(19) United States
(12) Patent Application Publication
(10) Pub. No.: US 2023/0348571 A1
(43) Pub. Date: Nov. 2, 2023

(54) CROSS-REACTIVE CORONAVIRUS ANTIBODIES AND USES THEREOF

(71) Applicants: VANDERBILT UNIVERSITY, Nashville, TN (US); BOARD OF REGENTS, THE UNIVERSITY OF TEXAS SYSTEM, Austin, TX (US); TRUSTEES OF DARTMOUTH COLLEGE, Hanover, NH (US)

(72) Inventors: Ivelin Stefanov Georgiev, Nashville, TN (US); Andrea R. Shiakolas, Nashville, TN (US); Kevin J. Kramer, Nashville, TN (US); James E. Crowe, Jr., Nashville, TN (US); Robert Carnahan, Nashville, TN (US); Nianshuang Wang, Austin, TX (US); Daniel Wrapp, Chandler, AZ (US); Jason McLellan, Austin, TX (US)

(21) Appl. No.: 17/917,174

(22) PCT Filed: Apr. 6, 2021
(86) PCT No.: PCT/US2021/025909

§ 371 Date: Oct. 5, 2022

Related U.S. Application Data
(60) Provisional application No. 63/005,788, filed on Apr. 6, 2020.
(60) Provisional application No. 63/018,637, filed on May 1, 2020.
(60) Provisional application No. 63/036,016, filed on Jun. 8, 2020.
(60) Provisional application No. 63/091,517, filed on Oct. 14, 2020.
(60) Provisional application No. 63/140,355, filed on Jan. 22, 2021.

(51) Int. Cl. C07K 16/10; A61P 31/14

(52) U.S. Cl. CPC C07K 16/1003; A61P 31/14; A61K 2039/505

(57) ABSTRACT

The present disclosure relates to antibodies and uses thereof for treating, preventing, and detecting coronavirus infection.

### CROSS REFERENCE TO RELATED APPLICATIONS

[0001] This application is a national stage application filed under 35 U.S.C. § 371 of PCT/US2021/025909, filed Apr. 6, 2021, which claims the benefit of U.S. Provisional Patent Application Ser. No. 63/005,788 filed Apr. 6, 2020, U.S. Provisional Patent Application Ser. No. 63/018,637 filed May 1, 2020, U.S. Provisional Patent Application Ser. No. 63/036,016 filed Jun. 8, 2020, U.S. Provisional Patent Application Ser. No. 63/091,517 filed Oct. 14, 2020, and U.S. Provisional Patent Application Ser. No. 63/140,355 filed Jan. 22, 2021, the disclosures of which are expressly incorporated herein by reference in their entireties.

### STATEMENT REGARDING FEDERALLY SPONSORED RESEARCH

[0002] This invention was made with government support under Grant No. RO1 AI131722ACV awarded by the National Institutes of Health. The government has certain rights in the invention.

### FIELD

[0003] The present disclosure relates to antibodies and uses thereof for treating, preventing, and detecting coronavirus infection.

### REFERENCE TO SEQUENCE LISTING

[0004] The Sequence Listing submitted Apr. 6, 2021 as a text file named “10644-115WO1_2021_04_06_Sequence_Listing.txt,” created on Apr. 6, 2021, and having a size of 9,784 bytes is hereby incorporated by reference pursuant to 37 C.F.R. § 1.52(e)(5).

### BACKGROUND

[0005] SARS-CoV-2, or the 2019 novel coronavirus (COVID-19), is a significant pandemic threat that has resulted in over 126,000,000 diagnosed cases including 2,760,000 deaths as of Mar. 26, 2021. Initially detected in Wuhan, China, human-human transmission has resulted in confirmed cases all over the world. On Jan. 30, 2020, the World Health Organization declared a Public Health of International Concern due to the COVID-19 outbreak and pronounced it a global pandemic on Mar. 12, 2020. The development of preventive and therapeutic measures that can counteract the ongoing, and any future, coronavirus pandemics is therefore of utmost significance for public health worldwide. What is needed are novel compositions and methods for treating and diagnosing SARS-CoV-2 infection.

### SUMMARY

[0006] Disclosed herein are recombinant antibodies and uses thereof for preventing, treating, and detecting coronavirus infection. Antibody sequences were obtained from an individual previously infected with a SARS-CoV-1 infection.

[0007] In some aspects, disclosed herein is a recombinant antibody, wherein the antibody comprises a light chain variable region (VL) that comprises a light chain complementarity determining region (CDRL)1, CDRL2, and CDRL3 and/or a heavy chain variable region (VH) that comprises a heavy chain complementarity determining region (CDRH)1, CDRH2, and CDRH3, wherein: CDRH3 comprises an amino acid sequence at least 60% identical to SEQ ID NOs: 109-126; and CDRL3 comprises an amino acid sequence at least 60% identical to SEQ ID NOs: 163-180.

[0008] In some embodiments, CDRH3 comprises at least one amino acid substitution when compared to SEQ ID NOs: 109-126. In some embodiments, CDRL3 comprises at least one amino acid substitution when compared to SEQ ID NOs: 163-180.

[0009] In some embodiments, CDRH1 comprises an amino acid sequence at least 60% identical to SEQ ID NOs: 73-90; and/or CDRL1 comprises an amino acid sequence at least 60% identical to SEQ ID NOs: 127-144.

[0010] In some embodiments, CDRH1 comprises at least one amino acid substitution when compared to SEQ ID NOs: 73-90. In some embodiments, CDRL1 comprises at least one amino acid substitution when compared to SEQ ID NOs: 127-144.

[0011] In some embodiments, CDRH2 comprises an amino acid sequence at least 60% identical to SEQ ID NOs: 91-108; and/or CDRL2 comprises an amino acid sequence at least 60% identical to SEQ ID NOs: 145-162.

[0012] In some embodiments, CDRH2 comprises at least one amino acid substitution when compared to SEQ ID NOs: 91-108. In some embodiments, CDRL2 comprises at least one amino acid substitution when compared to SEQ ID NOs: 145-162.

[0013] In some embodiments, VH comprises an amino acid sequence selected from the group consisting of SEQ ID NOs: 37-54. In some embodiments, VL comprises an amino acid sequence selected from the group consisting of SEQ ID NOs: 55-72.

[0014] In some embodiments, the recombinant antibody is selected from Table 1. In some embodiments, the recombinant antibody is selected from Table 2.

[0015] In one aspect, disclosed herein is a nucleic acid encoding a recombinant antibody as disclosed herein.

[0016] In one aspect, disclosed herein is a recombinant expression cassette or plasmid comprising a sequence to express a recombinant antibody as disclosed herein.

[0017] In one aspect, disclosed herein is a host cell comprising an expression cassette or a plasmid as disclosed herein.

[0018] In one aspect, disclosed herein is a method of producing an antibody, comprising cultivating or maintaining a host cell under conditions to produce the antibody.

[0019] In one aspect, disclosed herein is a method of treating a coronavirus infection in a subject, comprising administering to the subject a therapeutically effective amount of a recombinant antibody as disclosed herein. In some embodiments, the coronavirus is SARS-CoV-2.

[0020] In some aspects, disclosed herein is a method for detecting a coronavirus infection in a subject, comprising: providing a biological sample from the subject, and detecting a coronavirus antigen in the biological sample with an antibody that specifically binds to the coronavirus antigen, wherein the antibody is from any aspect as disclosed herein, and wherein the presence of the coronavirus antigen in the biological sample indicates the subject is infected with a coronavirus. In some embodiments, the coronavirus is SARS-CoV-2.

### DESCRIPTION OF DRAWINGS

[0021] The accompanying figures, which are incorporated in and constitute a part of this specification, illustrate aspects described below.

[0022] FIG. 1 shows schematic of the LIBRA-seq assay. Fluorescently-labelled, DNA-barcoded antigens are used to sort antigen-positive B cells before co-encapsulation of single B cells with bead-delivered oligos using droplet microfluidics. Bead-delivered oligos index both cellular BCR transcripts and antigen barcodes during reverse transcription, enabling direct mapping of BCR sequence to antigen specificity following sequencing. Note: schematic is not to scale, and the number and placement of oligonucleotides on each antigen can vary.

[0023] FIGS. 2A-2C show LIBRA-seq identification of cross-reactive HIV and influenza antibodies in HIV-infected samples from donors N90 (FIG. 2A) and NIAID 45 (FIG. 2B). ELISA binding (shown as area under the ELISA binding curve, AUC) and LIBRA-seq scores. Heatmap is tan(min)-white-blue(max). FIG. 2C shows neutralization of diverse HIV-1 strains by 3602-870 (N90) and published values for VRC38.01 for comparison (red-yellow-green-white heatmap).

[0024] FIG. 3 shows hepatitis C neutralization by mAbs 180 and 692, identified by LIBRA-seq. mAb 180 showed exceptional hepatitis C neutralization breadth against a panel of 19 HCV pseudoparticles, shown as % neutralized virus at 100 μg/ml ab; broadest known HEPC74 antibody from the Bailey group is used a control.

[0025] FIG. 4 shows LIBRA-seq identification of SARS-CoV-2 cross-reactive antibodies from a patient with a previous SARS-CoV-1 infection. Heatmap shows magnitude of LIBRA-seq scores for example SARS-CoV-2 cross-reactive IgG+ B cells (rows) against a set of CoV antigens (columns): blue (low)-white-red (high).

[0026] FIGS. 5A-5E show LIBRA-seq assay schematic. The assay consists of the following general steps: FIG. 5A. Antigens are recombinantly produced, biotinylated, and labeled with a DNA “barcode” oligonucleotide. The DNA-barcoded antigens are mixed with cells of interest and labeled with streptavidin fluorophores. FIG. 5B. Antigen positive B cells are bulk sorted and diluted to an appropriate concentration for single cell sequencing. FIG. 5C. Using the 10×Chromium controller, each cell (along with its bound antigens) is isolated in a single cell emulsion droplet along with a bead that has primers for downstream library preparation. FIG. 5D. Bead delivered oligos index both cellular BCR transcripts and antigen barcodes during reverse transcription. FIG. 5E. Library preparation results in amplification of transcripts for each cell that are indexed with the same cell barcode to enable direct mapping of BCR sequence to antigen specificity.

[0027] FIG. 6 shows LIBRA-seq applied to a SARS convalescent donor PBMC sample. An antigen screening library of oligonucleotide-labeled antigens was generated. This consisted of CoV antigens: SARS-CoV-2 spike, SARS-CoV-1 spike, MERS spike, MERS S1 trimer, OC43 spike, and HKU1 spike. There were also two HIV envelope trimer antigens included in the library, ZM197 and CZA97. The antigen screening library was mixed with the donor PBMCs, and the LIBRA-seq workflow was executed.

[0028] FIG. 7 shows antigen reactivity of LIBRA-seq identified antibodies. After next generation sequencing, 2526 B cells were recovered that had paired heavy/light chain sequencing information and antigen reactivity information. This heatmap shows the LIBRA-seq scores for each antigen for each cell recovered—each cell is one row in the matrix. The matrix is further divided by antibody isotype, shown to the right of the heatmap. LIBRA-seq scores are shown from −2 to 2, as dark blue to red respectively. Scores outside of this range were shown as the minimum and maximum values.

[0029] FIGS. 8A-8B show identification of SARS-CoV-2, SARS-CoV-1, and MERS mono-reactive and cross-reactive antibodies. FIG. 8A shows a Venn diagram depiction of the number of antibodies that had high LIBRA-seq scores (LIBRA-seq score >1) for SARS-CoV-2, SARS-CoV-1, and MERS. There were 10 antibodies that showed high scores to all three antigens: SARS-CoV-2, SARS-CoV-1, and MERS. FIG. 8B shows CDRH3 lengths and heavy chain variable (VH) region identity for different categories of antibodies with high LIBRA-seq scores (LIBRA-seq score >1) for CoV antigens shown, including both monoreactive and cross-reactive antibodies.

[0030] FIG. 9 shows identification of other CoV-specific antibodies. Genetic characteristics and antigen reactivity as determined by LIBRA-seq score of antibodies prioritized for expression and validation from the SARS-CoV-1 convalescent donor sample. Percent identity is calculated at the nucleotide level, and CDR length and sequences are noted at the amino acid level. LIBRA-seq scores are shown from −2 to 2, as dark blue to red respectively. Scores outside of this range were shown as the minimum and maximum values. FIG. 9 includes sequences

(SEQ ID NO: 120)
ARRPQYLLLSMTTGRRHHDFVMDV,
(SEQ ID NO: 16031)
ARDRVERTGNVGFGYYAMDV,
(SEQ ID NO: 16929)
VRGRTY,
(SEQ ID NO: 18090)
AREVNYYSAFDD,
(SEQ ID NO: 117)
ARDRSATYYGPFDY,
(SEQ ID NO: 123)
AKDLLSHSGTYSAGSTFDY,
(SEQ ID NO: 111)
ARLDYSKQT,
(SEQ ID NO: 114)
AAGPTGYDLLTGQYFPYFNY,
(SEQ ID NO: 122)
VKEDTPLVFDS,
(SEQ ID NO: 124)
VKMRTAVVGVTPL,
(SEQ ID NO: 17251)
ASLPTYGSGRWGIDS,
(SEQ ID NO: 113)
ARDFDLVVPSATYPPFYYHGMDV,
(SEQ ID NO: 16198)
ARVTIVSSFTNRFDP,
(SEQ ID NO: 110)
ALGRKDYGDYYR,
(SEQ ID NO: 118)
AGFLPVYNNGWSYFDS,
(SEQ ID NO: 174)
QQYYNTPRT,
(SEQ ID NO: 163)
QQTYSSPSYT,
(SEQ ID NO: 169)
QQYNRWLWT,
(SEQ ID NO: 175)
QQYNFWWT,
(SEQ ID NO: 25295)
NSRDNSGNHPVI,
(SEQ ID NO: 26363)
QESYSTNT,
(SEQ ID NO: 165)
MQALQTPLT,
(SEQ ID NO: 168)
QSYHGSDVV,
(SEQ ID NO: 176)
QQYDSYST,
(SEQ ID NO: 178)
LODYNYLFS,
(SEQ ID NO: 25135)
QQGNSFPLT,
(SEQ ID NO: 167)
NSRDSSGDQTFYV,
(SEQ ID NO: 166)
QHRVT,
(SEQ ID NO: 164)
QQYAPSPPWYI,
and
(SEQ ID NO: 172)
AVWDDSLNGPV

[0031] FIG. 10 shows antibody binding by ELISA. 15 prioritized antibodies were recombinantly expressed, purified, and tested for binding to antigens by ELISA. 46472-11 has a 15-nucleotide insertion in the heavy chain variable region and was expressed with (46472-1 lins) and without (46472-11) the insertion. 46472-1, 46472-2, 46472-3, 46472-4, 46472-6, and 46472-12 showed binding to SARSCoV-2 spike, SARS-CoV-1 spike, and MERS spike. 46472-6 and 46472-12 showed additional binding to OC43 and HKU1 by ELISA. None of the antibodies bound to irrelevant antigen H1 NC99, an influenza hemagglutinin protein. All antibodies tested are shown in the legend, including a negative IgG control. A positive control for H1 NC99, 3602-1707, is also shown, which was only tested in the H1 NC99 ELISA.

[0032] FIGS. 11A-11C show additional binding properties of antibodies. FIG. 11A shows that antibodies were tested at a single concentration (10 μg/ml) for binding to SARS-CoV-2 receptor binding domain, and 46472-12 showed binding to this subunit. FIG. 11B shows that antibodies were also tested for binding to SARS-CoV-2 spike in a cell surface display assay. Expi 293F cells were transfected with full length SARS-CoV-2 spike plasmid and then antibodies were tested for binding using flow cytometry. Binding was detected using an anti-human Fc antibody conjugated to FITC. 46472-1 data and gating is shown. A mock transfection control was also included. In FIG. 11C, antibody binding to cell surface displayed SARS-CoV-2 spike protein is shown as the percent of FITC+ cells at a single concentration (10 μg/ml). 46472-1, 46472-2, 46472-3, 46472-4, 46472-6, 46472-11ins and 46472-12 showed binding to cell surface displayed spike protein.

[0033] FIG. 12 shows recovery of virus specific antibodies suing LIBRA-seq.

[0034] FIG. 13 shows that antibodies were prioritized using sequence features and LIBRA-seq scores.

[0035] FIGS. 14A-14D show identification of coronavirus cross-reactive antibodies from SARS-CoV-1 convalescent PBMC sample using LIBRA-seq. FIG. 14A shows schematic of DNA-barcoded antigens used to probe a SARS-CoV-1 donor PBMC sample. The LIBRA-seq experiment setup consisted of nine oligo-labelled antigens in the screening library: SARS-CoV-2 S, SARS-CoV-1 S, MERS-CoV S, MERS-CoV S1, OC43 S, HKU1 S, and two HIV negative controls (ZM197, and CZA97). FIG. 14B shows LIBRA-seq scores for SARS-CoV-1 (x-axis) and SARS-CoV-2 (y-axis) for all IgG cells recovered from sequencing are shown as circles. The 15 selected antibodies are highlighted in purple. FIG. 14C shows that antibodies were tested for binding to SARS-CoV-2 S (S2P), SARS-CoV-1 S, MERS Spike OC43-CoV S, HKU1-CoV S, and SARS-CoV-2 S (HexaPro) by ELISA. HIV-specific antibody VRC01 is used as a negative control. Anti-SARS-CoV-1 mouse antibody 240CD was also used (BEI Resources). ELISAs were performed in technical duplicates with at least two biological duplicates. FIG. 14D shows that ELISA binding data against the antigens are displayed as a heatmap of the AUC analysis calculated from the data in FIG. 14C, with AUC of 0 displayed as white, and maximum AUC as purple. ELISAs were performed in technical duplicates with at least two biological duplicates.

[0036] FIGS. 15A-15F show epitope mapping of cross-reactive antibodies. FIG. 15A shows, for cross-reactive coronavirus antibodies, ELISA binding data against the antigens are displayed as a heatmap of the AUC analysis calculated from the data in FIG. 18A and FIG. 15B for SARS-CoV-2 S1 reactive antibodies, ELISA binding data against the RBD and NTD are displayed as a heatmap of the AUC analysis calculated from the data in FIG. 19B. AUC of 0 is displayed as white and maximum AUC as purple. ELISA data are representative of at least two independent experiments. ELISA AUC is displayed as a heat map. (Anti-HIV antibody VRCO1 and anti-VEGF antibody are shown as a negative control and anti-SARS-CoV-1 antibody 240CD is shown as positive control.) FIG. 15C shows surface plasmon resonance binding of 46472-12 Fab to SARS-CoV-2 RBD. Affinity measurements are shown to the right of the graph. FIG. 15D shows that cross-reactive antibodies were used in a competition ELISA to determine if binding of one antibody affected binding of another. Competitor antibodies were added at 10 μg/ml, and then detected antibodies were added at 0.1 μg/ml. The percent reduction in binding compared to binding without a competitor is shown. An anti-HIV antibody was also used as a negative control. ELISAs were performed in technical duplicates with at least two biological duplicates. FIG. 15E shows that antibodies were tested for autoreactivity against a variety of antigens in the Luminex AtheNA assay. Anti-HIV antibody 4E10 was used as a positive control and Ab82 was used as a negative control. FIG. 15F shows that cross-reactive coronavirus antibodies target a variety of epitopes on the SARS-CoV-2 S protein, including the RBD, NTD, and S2 domains, highlighted on the structure (pdb: 6VSB). Antibodies targeting each epitope are listed and color coded for each domain.

[0037] FIGS. 16A-16E show functional activity of cross-reactive coronavirus antibodies. FIG. 16A shows that cross-reactive coronavirus antibodies were tested for antibody-dependent cellular phagocytosis activity (ADCP) against SARS-CoV-2 S, compared to positive control antibody CR3022 and negative control Palivizumab, an anti-RSV antibody. Area under the curve of the phagocytosis score is shown, calculated from data in FIG. 20C. FIG. 16B shows that 46472-4 and 46472-12 were tested for antibody-dependent cellular phagocytosis activity against SARS-CoV-1 S, compared to CR3022 antibody and anti-RSV antibody Palivizumab. Area under the curve of the phagocytosis score is shown, calculated from data in FIG. 20D. FIG. 16C shows that cross-reactive coronavirus antibodies were tested for antibody-dependent trogocytosis (ADCT) activity against SARS-CoV-2 S coated on cells, compared to positive control CR3022 and anti-RSV antibody Palivizumab. Area under the curve of the trogocytosis score is shown, calculated from data in FIG. 20E. FIG. 16D shows that cross-reactive coronavirus antibodies were tested for antibody-dependent trogocytosis activity against SARS-CoV-2 S displayed on transfected cells, compared to positive control CR3022 and anti-RSV antibody Palivizumab. Area under the curve of the trogocytosis score is shown, calculated from data in FIG. 20F. FIG. 16E shows that cross-reactive coronavirus antibodies were tested for antibody-dependent complement deposition (ADCD) activity against SARS-CoV-2 S, compared to positive control CR3022 and anti-RSV antibody Palivizumab. Area under the curve of the C3b deposition score is shown, calculated from data in FIG. 20G.

[0038] FIGS. 17A-17D shows in vivo effects of cross-reactive antibodies. FIG. 17A shows timeline of the prophylactic antibody experiment in SARS-CoV-2 mouse adapted (MA) in vivo infection model. 200 μg antibody was given via intraperitoneal route to 12 month old female BALB/c mice 12 hours prior to virus inoculation (n=5 per group). 1×10³ or 1×10⁴ PFU infectious dose of SARS-CoV-2 MA was administered intranasally for the low dose and high dose experiments, respectively. Weights were measured daily, and on day 4 tissue was collected for histopathology and viral load quantification. FIG. 17B shows lung hemorrhage scores of gross pathology are shown for each low dose (1×10³ PFU of SARS-CoV-2 MA) treatment group. An ordinary one-way ANOVA test with multiple comparisons was performed. FIG. 17C shows, for the experiment utilizing 1×10⁴ PFU of SARS-CoV-2 MA, percent survival for each antibody group is shown. 2/5, 4/5, 3/5, and 2/5 mice survived to day 4 for antibodies 46472-4, 46472-12, CR3022 and isotype control DENV-2D22 respectively. FIG. 17D shows lung hemorrhage scores of gross pathology are shown for each high dose (1×10⁴ PFU of SARS-CoV-2 MA) treatment group. An ordinary one-way ANOVA test with multiple comparisons was performed.

[0039] FIG. 18A shows gating scheme for fluorescent-activated cell sorting of convalescent SARS-CoV-1 donor. Cells were initially stained with Ghost Red 780, CD14-APC-Cy7, CD3-FITC, CD19-BV711, and IgG-PE-Cy5 along with a DNA-barcoded antigen screening library. To detect antigen-positive B cells, cells were washed and treated with a streptavidin-PE secondary stain. Gates as drawn are based on gates used during the sort, and percentages from the sort are listed. FIG. 18B shows the categorization of processing of Cell ranger identified cells after sequencing. FIG. 18C shows genetic sequence characteristics and antigen specificity of the 15 highlighted antibodies of FIG. 14. Percent identity is calculated at the nucleotide level and CDRH3 and CDRL3 lengths and sequences are noted at the amino acid level. FIG. 18D shows ELISA binding data against coronavirus S antigens. HIV-specific antibody VRC01 was used as a negative control and anti-SARS-CoV-1 mouse antibody 240CD was used as a positive control (BEI Resources). ELISAs were performed in technical duplicates with at least two biological duplicates. FIG. 18E shows ELISA binding data to independent preparations of MERS-CoV S protein. An influenza HA-specific mAb 3502-1707 was used as a negative control along with positive control antibodies 1F8 (expressed and purified recombinantly) and MERS S1 mAb and MERS S2 mAbs (Sino Biological).

[0040] The sequences listed in FIG. 18C are AREVNYYSAFDD (SEQ ID NO: 121); AAGPTGYDLLTGQYFPYFNY (SEQ ID NO: 114); ARDRSATYYGPFDY (SEQ ID NO: 117); AKDLLSHSGTYSAGSTFDY (SEQ ID NO: 123); ARLDYSKQT (SEQ ID NO: 111); ARRPQYLLLSMTTGRRHHDFVMDV (SEQ ID NO: 120); VKEDTPLVFDS (SEQ ID NO: 122); ALGRKDYGDYYR (SEQ ID NO: 110); ASLPTYGSGRWGIDS (SEQ ID NO: 116); AGFLPVYNNGWSYFDS (SEQ ID NO: 118); VKMRTAVVGVTPL (SEQ ID NO: 119); ARDRVERTGNVGFGYYAMDV (SEQ ID NO: 109); ARVTIVSSFTNRFDP (SEQ ID NO: 112); VRGRTY (SEQ ID NO: 115); ARDFDLVVPSATYPPFYYHGMDV (SEQ ID NO: 113); QQYNFWWT (SEQ ID NO: 175); QSYHGSDVV (SEQ ID NO: 168); NSRDNSGNHPVI (SEQ ID NO: 171); QESYSTNT (SEQ ID NO: 177); MQALQTPLT (SEQ ID NO: 165); QQYYNTPRT (SEQ ID NO: 174); QQYDSYST (SEQ ID NO: 176); QQYAPSPPWYI (SEQ ID NO: 164); QQGNSFPLT (SEQ ID NO: 170); AVWDDSLNGPV (SEQ ID NO: 172); LQDYNYLFS (SEQ ID NO: 173); QQTYSSPSYT (SEQ ID NO: 163); QHRVT (SEQ ID NO: 166); QQYNRWLWT (SEQ ID NO: 169); and NSRDSSGDQTFYV (SEQ ID NO: 167).

[0041] FIG. 19A show that cross-reactive antibodies were tested for binding to SARS-CoV-2 S1 domain, SARS-CoV-2 S1 domain D614G, SARS-CoV-2 S2 domain, and SARS-CoV-2 S (HexaPro). Anti-HIV antibody VRC01 is shown as a negative control and anti-SARS-CoV-1 antibody 240CD is shown as positive control.) FIG. 19B shows that S1-directed antibodies 46472-6 and 46472-12 were tested for binding against SARS-CoV-2 RBD, SARS-CoV-1 RBD, SARS-CoV-2 NTD, and SARS-CoV-2 S (HexaPro). (Anti-HIV antibody VRC01 is shown as a negative control and anti-SARS-CoV-1 antibody 240CD is shown as positive control.) FIG. 19C shows that 46472-12 was tested for its ability to block ACE2 binding to SARS-CoV-2 S. Signal shown is anti-Flag tag detection of an ACE2-Flag tag protein construct. FIG. 19D shows that 46472-6 and 46472-12 were tested for binding to SARS-CoV-2 S (HexaPro) mutants, N165A and N709A by ELISA. FIG. 19E shows that mannose competition binding assays were performed to see if cross-reactive antibody binding to SARS-CoV-2 S can be modulated by mannose.

[0042] FIG. 20A shows that antibodies were tested for neutralization in a SARS-CoV-1 and SARS-CoV-2 nano-luciferase neutralization assay. FIG. 20B shows that antibodies were tested for neutralization in a SARS-CoV-2 RTCA assay. FIG. 20C shows that cross-reactive coronavirus antibodies were tested for ability to mediate antibody-dependent cellular phagocytosis against SARS-CoV-2 S. FIG. 20D shows that cross-reactive coronavirus antibodies were tested for ability to mediate antibody-dependent cellular trogocytosis against SARS-CoV-2 coated on cells. FIG. 20E shows that Cross-reactive coronavirus antibodies were tested for ability to mediate antibody-dependent cellular trogocytosis against transfected cells displaying SARS-CoV-2 S WT or SARS-CoV-2 S D614G. FIG. 20F shows that cross-reactive coronavirus antibodies were tested for ability to mediate antibody-dependent cellular phagocytosis against SARS-CoV-1 S. FIG. 20G shows that cross-reactive coronavirus antibodies were tested for ability to mediate antibody-dependent complement deposition against SARS-CoV-2 S.

[0043] FIG. 21A shows for each antibody treatment group for the experiment utilizing 1×10³ PFU of SARS-CoV-2 MA, a table showing the number of animals to survive per group, per day is shown. Body weights of each mouse in the four treatment groups were measured daily. FIG. 21B shows RT-qPCR quantification of lung viral burden. FIG. 21C shows for each antibody treatment group for the experiment utilizing 1×10⁴ PFU of SARS-CoV-2 MA, a table showing the number of animals to survive per group, per day is shown (survival curves shown in FIG. 17C). 2/5, 4/5, 3/5, and 2/5 mice survived to day 4 for antibodies 46472-4, 46472-12, CR3022 and isotype control DENV-2D22 respectively. Body weights of each mouse in the four treatment groups in both experiments were measured daily. FIG. 21D shows RT-qPCR quantification of lung viral burden.

### DETAILED DESCRIPTION

[0044] Therefore, in some aspects, disclosed herein are recombinant antibodies that specifically bind a viral protein of a coronavirus and uses thereof for treating, preventing, inhibiting, reducing, and detecting coronavirus infection, wherein the coronavirus is SARS-CoV-2.

[0045] Reference will now be made in detail to the embodiments of the invention, examples of which are illustrated in the drawings and the examples. This invention may, however, be embodied in many different forms and should not be construed as limited to the embodiments set forth herein.

[0046] Unless defined otherwise, all technical and scientific terms used herein have the same meaning as commonly understood to one of ordinary skill in the art to which this disclosure belongs. The term “comprising” and variations thereof as used herein is used synonymously with the term “including” and variations thereof and are open, non-limiting terms. Although the terms “comprising” and “including” have been used herein to describe various embodiments, the terms “consisting essentially of” and “consisting of” can be used in place of “comprising” and “including” to provide for more specific embodiments and are also disclosed. As used in this disclosure and in the appended claims, the singular forms “a”, “an”, “the”, include plural referents unless the context clearly dictates otherwise.

[0047] The following definitions are provided for the full understanding of terms used in this specification.

### Terminology

[0048] The term “about” as used herein when referring to a measurable value such as an amount, a percentage, and the like, is meant to encompass variations of ±20%, ±10%, ±5%, or ±1% from the measurable value.

[0049] “Administration” to a subject or “administering” includes any route of introducing or delivering to a subject an agent. Administration can be carried out by any suitable route, including oral, intravenous, intraperitoneal, intranasal, inhalation and the like. Administration includes self-administration and the administration by another.

[0050] As used herein, the terms “may,” “optionally,” and “may optionally” are used interchangeably and are meant to include cases in which the condition occurs as well as cases in which the condition does not occur. Thus, for example, the statement that a formulation “may include an excipient” is meant to include cases in which the formulation includes an excipient as well as cases in which the formulation does not include an excipient.

[0051] As used herein, the term “subject” or “host” can refer to living organisms such as mammals, including, but not limited to humans, livestock, dogs, cats, and other mammals. Administration of the therapeutic agents can be carried out at dosages and for periods of time effective for treatment of a subject. In some embodiments, the subject is a human.

[0052] As used herein, the term “antigen” refers to a molecule that is capable of binding to an antibody. In some embodiments, the antigen stimulates an immune response such as by production of antibodies specific for the antigen.

[0053] In the present invention, “specific for” and “specificity” means a condition where one of the molecules is involved in selective binding. Accordingly, an antibody that is specific for one antigen selectively binds that antigen and not other antigens.

[0054] The term “antibodies” is used herein in a broad sense and includes both polyclonal and monoclonal antibodies. In addition to intact immunoglobulin molecules, also included in the term “antibodies” are fragments or polymers of those immunoglobulin molecules, and human or humanized versions of immunoglobulin molecules or fragments thereof. The antibodies can be tested for their desired activity using the in vitro assays described herein, or by analogous methods, after which their in vivo therapeutic and/or prophylactic activities are tested according to known clinical testing methods. Native antibodies are usually heterotetrameric glycoproteins of about 150,000 daltons, composed of two identical light (L) chains and two identical heavy (H) chains. Each heavy chain has at one end a variable domain (VH) followed by a number of constant domains. Each light chain has a variable domain at one end (VL) and a constant domain at its other end. There are five major classes of human immunoglobulins: IgA, IgD, IgE, IgG and IgM, and several of these may be further divided into subclasses (isotypes), e.g., IgG-1, IgG-2, IgG-3, and IgG-4; IgA-1 and IgA-2. One skilled in the art would recognize the comparable classes for mouse. The heavy chain constant domains that correspond to the different classes of immunoglobulins are called alpha, delta, epsilon, gamma, and mu, respectively.

[0055] Each antibody molecule is made up of the protein products of two genes: heavy-chain gene and light-chain gene. The heavy-chain gene is constructed through somatic recombination of V, D, and J gene segments. In human, there are 51 VH, 27 DH, 6 RI, 9 CH gene segments on human chromosome 14. The light-chain gene is constructed through somatic recombination of V and J gene segments. There are 40 Vκ, 31 Vλ, 5 Jκ, 4 Jλ× gene segments on human chromosome 14 (80 VJ). The heavy-chain constant domains that correspond to the different classes of immunoglobulins are called α, δ, ε, γ, and μ, respectively. The “light chains” of antibodies from any vertebrate species can be assigned to one of two clearly distinct types, called kappa (κ) and lambda (λ), based on the amino acid sequences of their constant domains.

[0056] The term “monoclonal antibody” as used herein refers to an antibody obtained from a substantially homogeneous population of antibodies, i.e., the individual antibodies within the population are identical except for possible naturally occurring mutations that may be present in a small subset of the antibody molecules. The monoclonal antibodies herein specifically include “chimeric” antibodies in which a portion of the heavy and/or light chain is identical with or homologous to corresponding sequences in antibodies derived from a particular species or belonging to a particular antibody class or subclass, while the remainder of the chain(s) is identical with or homologous to corresponding sequences in antibodies derived from another species or belonging to another antibody class or subclass, as well as fragments of such antibodies, as long as they exhibit the desired antagonistic activity.

[0057] The disclosed monoclonal antibodies can be made using any procedure which produces monoclonal antibodies. For example, disclosed monoclonal antibodies can be prepared using hybridoma methods, such as those described by Kohler and Milstein, Nature, 256:495 (1975). In a hybridoma method, a mouse or other appropriate host animal is typically immunized with an immunizing agent to elicit lymphocytes that produce or are capable of producing antibodies that will specifically bind to the immunizing agent. Alternatively, the lymphocytes may be immunized in vitro.

[0058] The monoclonal antibodies may also be made by recombinant DNA methods. DNA encoding the disclosed monoclonal antibodies can be readily isolated and sequenced using conventional procedures (e.g., by using oligonucleotide probes that are capable of binding specifically to genes encoding the heavy and light chains of murine antibodies). Libraries of antibodies or active antibody fragments can also be generated and screened using phage display techniques, e.g., as described in U.S. Pat. No. 5,804,440 to Burton et al. and U.S. Pat. No. 6,096,441 to Barbas et al.

[0059] In vitro methods are also suitable for preparing monovalent antibodies. Digestion of antibodies to produce fragments thereof, particularly, Fab fragments, can be accomplished using routine techniques known in the art. For instance, digestion can be performed using papain. Examples of papain digestion are described in WO 94/29348 published Dec. 22, 1994 and U.S. Pat. No. 4,342,566. Papain digestion of antibodies typically produces two identical antigen binding fragments, called Fab fragments, each with a single antigen binding site, and a residual Fc fragment. Pepsin treatment yields a fragment that has two antigen combining sites and is still capable of cross-linking antigen.

[0060] As used herein, the term “antibody or antigen binding fragment thereof” or “antibody or fragments thereof” encompasses chimeric antibodies and hybrid antibodies, with dual or multiple antigen or epitope specificities, and fragments, such as F(ab′)2, Fab′, Fab, Fv, sFv, scFv, nanoantibody and the like, including hybrid fragments. Thus, fragments of the antibodies that retain the ability to bind their specific antigens are provided. Such antibodies and fragments can be made by techniques known in the art and can be screened for specificity and activity according to the methods set forth in the Examples and in general methods for producing antibodies and screening antibodies for specificity and activity (See Harlow and Lane. Antibodies, A Laboratory Manual. Cold Spring Harbor Publications, New York, (1988)).

[0061] The fragments, whether attached to other sequences or not, can also include insertions, deletions, substitutions, or other selected modifications of particular regions or specific amino acids residues, provided the activity of the antibody or antibody fragment is not significantly altered or impaired compared to the non-modified antibody or antibody fragment. These modifications can provide for some additional property, such as to remove/add amino acids capable of disulfide bonding, to increase its bio-longevity, to alter its secretory characteristics, etc. In any case, the antibody or antibody fragment must possess a bioactive property, such as specific binding to its cognate antigen. Functional or active regions of the antibody or antibody fragment may be identified by mutagenesis of a specific region of the protein, followed by expression and testing of the expressed polypeptide. Such methods are readily apparent to a skilled practitioner in the art and can include site-specific mutagenesis of the nucleic acid encoding the antibody or antibody fragment. (Zoller, M. J. Curr. Opin. Biotechnol. 3:348-354, 1992).

[0062] As used herein, the term “antibody” or “antibodies” can also refer to a human antibody and/or a humanized antibody. Many non-human antibodies (e.g., those derived from mice, rats, or rabbits) are naturally antigenic in humans, and thus can give rise to undesirable immune responses when administered to humans. Therefore, the use of human or humanized antibodies in the methods serves to lessen the chance that an antibody administered to a human will evoke an undesirable immune response.

[0063] The terms “antigen binding site”, “binding site” and “binding domain” refer to the specific elements, parts or amino acid residues of a polypeptide, such as an antibody, that bind the antigenic determinant or epitope.

[0064] An “antibody heavy chain,” as used herein, refers to the larger of the two types of polypeptide chains present in all antibody molecules in their naturally occurring conformations.

[0065] An “antibody light chain,” as used herein, refers to the smaller of the two types of polypeptide chains present in all antibody molecules in their naturally occurring conformations, κ and λ light chains refer to the two major antibody light chain isotypes.

[0066] The term “CDR” as used herein refers to the “complementarity determining regions” of the antibody which consist of the antigen binding loops. (Kabat E. A. et al., (1991) Sequences of proteins of immunological interest. NIH Publication 91-3242). Each of the two variable domains of an antibody Fv fragment contain, for example, three CDRs.

[0067] The term “hypervariable region” or “HVR”, as used herein, refers to each of the regions of an antibody variable domain which are hypervariable in sequence and/or form structurally defined loops (“hypervariable loops”). Generally, native four-chain antibodies comprise six HVRs; three in the VH (H1, H2, H3), and three in the VL (L1, L2, L3). HVRs generally comprise amino acid residues from the hypervariable loops and/or from the complementarity determining regions (CDRs), the latter being of highest sequence variability and/or involved in antigen recognition. With the exception of CDR1 in VH, CDRs generally comprise the amino acid residues that form the hypervariable loops. Hypervariable regions (HVRs) are also referred to as “complementarity determining regions” (CDRs), and these terms are used herein interchangeably in reference to portions of the variable region that form the antigen-binding regions. The amino acid sequence boundaries of a CDR can be determined by one of skill in the art using any of a number of known numbering schemes, including those described by Kabat et al., supra (“Kabat” numbering scheme): Al-Lazikani et al., 1997. J. Mol. Biol., 273:927-948 (“Chothia” numbering scheme); MacCallum et al., 1996, J. Mol. Biol, 262:732-745 (“Contact” numbering scheme); Lefranc et al., Dev. Comp. Immunol., 2003, 27:55-77 (“IMGT” numbering scheme); and Honegge and Plückthun, J. Mol. Biol., 2001, 309:657-70 (“AHo” numbering scheme); each of which is incorporated by reference in its entirety.

[0068] “Effective amount” encompasses, without limitation, an amount that can ameliorate, reverse, mitigate, prevent, or diagnose a symptom or sign of a medical condition or disorder. Unless dictated otherwise, explicitly or by context, an “effective amount” is not limited to a minimal amount sufficient to ameliorate a condition. The severity of a disease or disorder, as well as the ability of a treatment to prevent, treat, or mitigate, the disease or disorder can be measured, without implying any limitation, by a biomarker or by a clinical parameter. In some embodiments, the term “effective amount of a recombinant antibody” refers to an amount of a recombinant antibody sufficient to prevent, treat, or mitigate a coronavirus infection (e.g., SARS-CoV-2 infection).

[0069] The “fragments” or “functional fragments,” whether attached to other sequences or not, can include insertions, deletions, substitutions, or other selected modifications of particular regions or specific amino acids residues, provided the activity of the fragment is not significantly altered or impaired compared to the nonmodified peptide or protein. These modifications can provide for some additional property, such as to remove or add amino acids capable of disulfide bonding, to increase its bio-longevity, to alter its secretory characteristics, etc. In any case, the functional fragment must possess a bioactive property, such as binding to a coronavirus antigen (e.g., SARS-CoV-2 antigen), and/or ameliorating the viral infection.

[0070] The term “identity” or “homology” shall be construed to mean the percentage of nucleotide bases or amino acid residues in the candidate sequence that are identical with the bases or residues of a corresponding sequence to which it is compared, after aligning the sequences and introducing gaps, if necessary to achieve the maximum percent identity for the entire sequence, and not considering any conservative substitutions as part of the sequence identity. A polynucleotide or polynucleotide region (or a polypeptide or polypeptide region) that has a certain percentage (for example, 80%, 85%, 90%, or 95%) of “sequence identity” to another sequence means that, when aligned, that percentage of bases (or amino acids) are the same in comparing the two sequences. This alignment and the percent homology or sequence identity can be determined using software programs known in the art. Such alignment can be provided using, for instance, the method of Needleman et al. (1970) J. Mol. Biol. 48: 443-453, implemented conveniently by computer programs such as the Align program (DNAstar, Inc.).

[0071] The term “increased” or “increase” as used herein generally means an increase by a statically significant amount; for example, “increased” means an increase of at least 10% as compared to a reference level, for example an increase of at least about 20%, or at least about 30%, or at least about 40%, or at least about 50%, or at least about 60%, or at least about 70%, or at least about 80%, or at least about 90% or up to and including a 100% increase or any increase between 10-100% as compared to a reference level, or at least about a 2-fold, or at least about a 3-fold, or at least about a 4-fold, or at least about a 5-fold or at least about a 10-fold increase, or any increase between 2-fold and 10-fold or greater as compared to a reference level.

[0072] As used herein, the terms “nanobody”, “V_{H}H”, “V_{H}H antibody fragment” and “single domain antibody” are used indifferently and designate a variable domain of a single heavy chain of an antibody of the type found in Camelidae, which are without any light chains, such as those derived from Camelids as described in PCT Publication No. WO 94/04678, which is incorporated by reference in its entirety.

[0073] The term “reduced”, “reduce”, “reduction”, or “decrease” as used herein generally means a decrease by a statistically significant amount. However, for avoidance of doubt, “reduced” means a decrease by at least 10% as compared to a reference level, for example a decrease by at least about 20%, or at least about 30%, or at least about 40%, or at least about 50%, or at least about 60%, or at least about 70%, or at least about 80%, or at least about 90% or up to and including a 100% decrease (i.e. absent level as compared to a reference sample), or any decrease between 10-100% as compared to a reference level.

[0074] “Nucleotide,” “nucleoside,” “nucleotide residue,” and “nucleoside residue,” as used herein, can mean a deoxyribonucleotide, ribonucleotide residue, or another similar nucleoside analogue. A nucleotide is a molecule that contains a base moiety, a sugar moiety and a phosphate moiety. Nucleotides can be linked together through their phosphate moieties and sugar moieties creating an internucleoside linkage. The base moiety of a nucleotide can be adenin-9-yl (A), cytosin-1-yl (C), guanin-9-yl (G), uracil-1-yl (U), and thymin-1-yl (T). The sugar moiety of a nucleotide is a ribose or a deoxyribose. The phosphate moiety of a nucleotide is pentavalent phosphate. A non-limiting example of a nucleotide would be 3′-AMP (3′-adenosine monophosphate) or 5′-GMP (5′-guanosine monophosphate). There are many varieties of these types of molecules available in the art and available herein.

[0075] The method and the system disclosed here including the use of primers, which are capable of interacting with the disclosed nucleic acids, such as the antigen barcode as disclosed herein. In certain embodiments the primers are used to support DNA amplification reactions. Typically, the primers will be capable of being extended in a sequence specific manner. Extension of a primer in a sequence specific manner includes any methods wherein the sequence and/or composition of the nucleic acid molecule to which the primer is hybridized or otherwise associated directs or influences the composition or sequence of the product produced by the extension of the primer. Extension of the primer in a sequence specific manner therefore includes, but is not limited to, PCR, DNA sequencing, DNA extension, DNA polymerization, RNA transcription, or reverse transcription. Techniques and conditions that amplify the primer in a sequence specific manner are preferred. In certain embodiments the primers are used for the DNA amplification reactions, such as PCR or direct sequencing. It is understood that in certain embodiments the primers can also be extended using non-enzymatic techniques, where for example, the nucleotides or oligonucleotides used to extend the primer are modified such that they will chemically react to extend the primer in a sequence specific manner. Typically, the disclosed primers hybridize with the disclosed nucleic acids or region of the nucleic acids or they hybridize with the complement of the nucleic acids or complement of a region of the nucleic acids.

[0076] The term “amplification” refers to the production of one or more copies of a genetic fragment or target sequence, specifically the “amplicon”. As it refers to the product of an amplification reaction, amplicon is used interchangeably with common laboratory terms, such as “PCR product.”

[0077] The term “polypeptide” refers to a compound made up of a single chain of D- or L-amino acids or a mixture of D- and L-amino acids joined by peptide bonds.

[0078] “Encoding” refers to the inherent property of specific sequences of nucleotides in a polynucleotide, such as a gene, a cDNA, or an mRNA, to serve as templates for synthesis of other polymers and macromolecules in biological processes having either a defined sequence of nucleotides (i.e., rRNA, tRNA and mRNA) or a defined sequence of amino acids and the biological properties resulting therefrom. Thus, a gene encodes a protein if transcription and translation of mRNA.

[0079] An “expression cassette” refers to a DNA coding sequence or segment of DNA that code for an expression product that can be inserted into a vector at defined restriction sites. The cassette restriction sites are designed to ensure insertion of the cassette in the proper reading frame. Generally, foreign DNA is inserted at one or more restriction sites of the vector DNA, and then is carried by the vector into a host cell along with the transmissible vector DNA. A segment or sequence of DNA having inserted or added DNA, such as an expression vector, can also be called a “DNA construct”.

[0080] Expression vectors comprise the expression cassette and additionally usually comprise an origin for autonomous replication in the host cells or a genome integration site, one or more selectable markers (e.g. an amino acid synthesis gene or a gene conferring resistance to antibiotics such as zeocin, kanamycin, G418 or hygromycin), a number of restriction enzyme cleavage sites, a suitable promoter sequence and a transcription terminator, which components are operably linked together. The term “vector” as used herein includes autonomously replicating nucleotide sequences as well as genome integrating nucleotide sequences. A common type of vector is a “plasmid”, which generally is a self-contained molecule of double-stranded DNA that can readily accept additional (foreign) DNA and which can readily be introduced into a suitable host cell. A plasmid vector often contains coding DNA and promoter DNA and has one or more restriction sites suitable for inserting foreign DNA. Specifically, the term “vector” or “plasmid” refers to a vehicle by which a DNA or RNA sequence (e.g. a foreign gene) can be introduced into a host cell, so as to transform the host and promote expression (e.g. transcription and translation) of the introduced sequence.

[0081] The term “host cell” as used herein shall refer to primary subject cells trans-formed to produce a particular recombinant protein, such as an antibody as described herein, and any progeny thereof. It should be understood that not all progeny are exactly identical to the parental cell (due to deliberate or inadvertent mutations or differences in environment), however, such altered progeny are included in these terms, so long as the progeny retain the same functionality as that of the originally transformed cell. The term “host cell line” refers to a cell line of host cells as used for expressing a recombinant gene to produce recombinant polypeptides such as recombinant antibodies. The term “cell line” as used herein refers to an established clone of a particular cell type that has acquired the ability to proliferate over a prolonged period of time. Such host cell or host cell line may be maintained in cell culture and/or cultivated to produce a recombinant polypeptide.

[0082] The term “gene” or “gene sequence” refers to the coding sequence or control sequence, or fragments thereof. A gene may include any combination of coding sequence and control sequence, or fragments thereof. Thus, a “gene” as referred to herein may be all or part of a native gene. A polynucleotide sequence as referred to herein may be used interchangeably with the term “gene”, or may include any coding sequence, non-coding sequence or control sequence, fragments thereof, and combinations thereof. The term “gene” or “gene sequence” includes, for example, control sequences upstream of the coding sequence.

[0083] “Pharmaceutically acceptable carrier” (sometimes referred to as a “carrier”) means a carrier or excipient that is useful in preparing a pharmaceutical or therapeutic composition that is generally safe and non-toxic, and includes a carrier that is acceptable for veterinary and/or human pharmaceutical or therapeutic use. The terms “carrier” or “pharmaceutically acceptable carrier” can include, but are not limited to, phosphate buffered saline solution, water, emulsions (such as an oil/water or water/oil emulsion) and/or various types of wetting agents.

[0084] As used herein, the term “carrier” encompasses any excipient, diluent, filler, salt, buffer, stabilizer, solubilizer, lipid, stabilizer, or other material well known in the art for use in pharmaceutical formulations. The choice of a carrier for use in a composition will depend upon the intended route of administration for the composition. The preparation of pharmaceutically acceptable carriers and formulations containing these materials is described in, e.g., Remington's Pharmaceutical Sciences, 21st Edition, ed. University of the Sciences in Philadelphia, Lippincott, Williams & Wilkins, Philadelphia, PA, 2005. Examples of physiologically acceptable carriers include saline, glycerol, DMSO, buffers such as phosphate buffers, citrate buffer, and buffers with other organic acids; antioxidants including ascorbic acid; low molecular weight (less than about residues) polypeptides; proteins, such as serum albumin, gelatin, or immunoglobulins; hydrophilic polymers such as polyvinylpyrrolidone; amino acids such as glycine, glutamine, asparagine, arginine or lysine; monosaccharides, disaccharides, and other carbohydrates including glucose, mannose, or dextrins; chelating agents such as EDTA; sugar alcohols such as mannitol or sorbitol; salt-forming counterions such as sodium; and/or nonionic surfactants such as TWEEN™ (ICI, Inc.; Bridgewater, New Jersey), polyethylene glycol (PEG), and PLURONICS™ (BASF; Florham Park, NJ). To provide for the administration of such dosages for the desired therapeutic treatment, compositions disclosed herein can advantageously comprise between about 0.1% and 99% by weight of the total of one or more of the subject compounds based on the weight of the total composition including carrier or diluent.

[0085] The term “specificity” refers to the number of different types of antigens or antigenic determinants to which a particular antigen-binding molecule (such as the recombinant antibody of the invention) can bind. As used herein, the term “specifically binds,” as used herein with respect to a recombinant antibody refers to the recombinant antibody's preferential binding to one or more epitopes as compared with other epitopes. Specific binding can depend upon binding affinity and the stringency of the conditions under which the binding is conducted. In one example, an antibody specifically binds an epitope when there is high affinity binding under stringent conditions.

[0086] It should be understood that the specificity of an antigen-binding molecule (e.g., the recombinant antibodies of the present invention) can be determined based on affinity and/or avidity. The affinity, represented by the equilibrium constant for the dissociation of an antigen with an antigen-binding molecule (K_{D}), is a measure for the binding strength between an antigenic determinant and an antigen-binding site on the antigen-binding molecule: the lesser the value of the K_{D}, the stronger the binding strength between an antigenic determinant and the antigen-binding molecule (alternatively, the affinity can also be expressed as the affinity constant (KA), which is 1/K_{D}). As will be clear to the skilled person (for example on the basis of the further disclosure herein), affinity can be determined in a manner known per se, depending on the specific antigen of interest. Avidity is the measure of the strength of binding between an antigen-binding molecule (such as the recombinant antibodies of the present invention) and the pertinent antigen. Avidity is related to both the affinity between an antigenic determinant and its antigen binding site on the antigen-binding molecule and the number of pertinent binding sites present on the antigen-binding molecule. Typically, antigen-binding proteins (such as the recombinant antibodies of the invention) will bind to their antigen with a dissociation constant (K_{D}) of 10⁻⁵ to 10⁻¹² moles/liter or less, and preferably 10⁻⁷ to 10⁻¹² moles/liter or less, and more preferably 10⁻⁸ to 10⁻¹² moles/liter.

[0087] “Therapeutically effective amount” refers to the amount of a composition such as recombinant antibody that will elicit the biological or medical response of a tissue, system, animal, or human that is being sought by the researcher, veterinarian, medical doctor or other clinician over a generalized period of time. In some embodiments, a desired response is reduction of coronaviral titers in a subject. In some embodiments, the desired response is mitigation of coronavirus infection and/or related symptoms. In some instances, a desired biological or medical response is achieved following administration of multiple dosages of the composition to the subject over a period of days, weeks, or years. The therapeutically effective amount will vary depending on the composition, the disorder or conditions and its severity, the route of administration, time of administration, rate of excretion, drug combination, judgment of the treating physician, dosage form, and the age, weight, general health, sex and/or diet of the subject to be treated. The therapeutically effective amount of recombinant antibodies as described herein can be determined by one of ordinary skill in the art.

[0088] A therapeutically significant reduction in a symptom is, e.g. at least about 10%, at least about 20%, at least about 30%, at least about 40%, at least about 50%, at least about 60%, at least about 70%, at least about 80%, at least about 90%, at least about 100%, at least about 125%, at least about 150% or more in a measured parameter as compared to a control or non-treated subject. Measured or measurable parameters include clinically detectable markers of disease, for example, elevated or depressed levels of a biological marker, such as decreased viral titers, decreased viral RNA levels, increase in CD4 T lymphocyte counts, and/or prolonged survival of a subject. It will be understood, that the total daily usage of the compositions and formulations as disclosed herein will be decided by the attending physician within the scope of sound medical judgment. The exact amount required will vary depending on factors such as the type of disease being treated.

[0089] The terms “treat,” “treating,” “treatment,” and grammatical variations thereof as used herein, include partially or completely delaying, alleviating, mitigating or reducing the intensity of one or more attendant symptoms. Treatments according to the invention may be applied preventively, prophylactically, palliatively or remedially. Prophylactic treatments are administered to a subject prior to onset (e.g., before obvious signs of an infection), during early onset (e.g., upon initial signs and symptoms of an infection), after an established development of an infection, or during chronic infection. Prophylactic administration can occur for several minutes to months prior to the manifestation of an infection.

[0090] As used herein, the term “preventing” a disorder or unwanted physiological event in a subject refers specifically to the prevention of the occurrence of symptoms and/or their underlying cause, wherein the subject may or may not exhibit heightened susceptibility to the disorder or event.

### Antibodies and Compositions

[0091] In some aspects, disclosed herein is a recombinant antibody, said antibody comprising a light chain variable region (VL) that comprises a light chain complementarity determining region (CDRL)1, CDRL2, and CDRL3 and a heavy chain variable region (VH) that comprises a heavy chain complementarity determining region (CDRH)1, CDRH2, and CDRH3, wherein
[0092] CDRH3 comprises an amino acid sequence at least 60% (for example, at least 60%, at least 65%, at least 70%, at least 75%, at least 80%, at least 85%, at least 90%, at least 95%, at least 96%, at least 97%, at least 98%, at least 99%) identical to SEQ ID NOs: 109-126; and
[0093] CDRL3 comprises an amino acid sequence at least 60% (for example, at least 60%, at least 65%, at least 70%, at least 75%, at least 80%, at least 85%, at least 90%, at least 95%, at least 96%, at least 97%, at least 98%, at least 99%) identical to SEQ ID NOs: 163-180.

[0094] In some aspects, disclosed herein is a recombinant antibody, said antibody comprising a light chain variable region (VL) that comprises a light chain complementarity determining region (CDRL)1, CDRL2, and CDRL3 or a heavy chain variable region (VH) that comprises a heavy chain complementarity determining region (CDRH)1, CDRH2, and CDRH3, wherein
[0095] CDRH3 comprises an amino acid sequence at least 60% (for example, at least 60%, at least 65%, at least 70%, at least 75%, at least 80%, at least 85%, at least 90%, at least 95%, at least 96%, at least 97%, at least 98%, at least 99%) identical to SEQ ID NOs: 109-126; and
[0096] CDRL3 comprises an amino acid sequence at least 60% (for example, at least 60%, at least 65%, at least 70%, at least 75%, at least 80%, at least 85%, at least 90%, at least 95%, at least 96%, at least 97%, at least 98%, at least 99%) identical to SEQ ID NOs: 163-180.

[0097] In some embodiments, the CDRL3 comprises at least one amino acid substitution when compared to SEQ ID NOs: 163-180. In some embodiments, the CDRL3 comprises at least 1, 2, 3, 4, 5, or 6 substitutions when compared to SEQ ID NO: 163. In some embodiments, the CDRL3 comprises at least 1, 2, 3, 4, 5, or 6 substitutions when compared to SEQ ID NO: 164. In some embodiments, the CDRL3 comprises at least 1, 2, 3, 4, 5, or 6 substitutions when compared to SEQ ID NO: 165. In some embodiments, the CDRL3 comprises at least 1, 2, 3, 4, 5, or 6 substitutions when compared to SEQ ID NO: 166. In some embodiments, the CDRL3 comprises at least 1, 2, 3, 4, 5, or 6 substitutions when compared to SEQ ID NO: 167. In some embodiments, the CDRL3 comprises at least 1, 2, 3, 4, 5, or 6 substitutions when compared to SEQ ID NO: 168. In some embodiments, the CDRL3 comprises at least 1, 2, 3, 4, 5, or 6 substitutions when compared to SEQ ID NO: 169. In some embodiments, the CDRL3 comprises at least 1, 2, 3, 4, 5, or 6 substitutions when compared to SEQ ID NO: 170. In some embodiments, the CDRL3 comprises at least 1, 2, 3, 4, 5, or 6 substitutions when compared to SEQ ID NO: 171. In some embodiments, the CDRL3 comprises at least 1, 2, 3, 4, 5, or 6 substitutions when compared to SEQ ID NO: 172. In some embodiments, the CDRL3 comprises at least 1, 2, 3, 4, 5, or 6 substitutions when compared to SEQ ID NO: 173. In some embodiments, the CDRL3 comprises at least 1, 2, 3, 4, 5, or 6 substitutions when compared to SEQ ID NO: 174. In some embodiments, the CDRL3 comprises at least 1, 2, 3, 4, 5, or 6 substitutions when compared to SEQ ID NO: 175. In some embodiments, the CDRL3 comprises at least 1, 2, 3, 4, 5, or 6 substitutions when compared to SEQ ID NO: 176. In some embodiments, the CDRL3 comprises at least 1, 2, 3, 4, 5, or 6 substitutions when compared to SEQ ID NO: 177. In some embodiments, the CDRL3 comprises at least 1, 2, 3, 4, 5, or 6 substitutions when compared to SEQ ID NO: 178. In some embodiments, the CDRL3 comprises at least 1, 2, 3, 4, 5, or 6 substitutions when compared to SEQ ID NO: 179. In some embodiments, the CDRL3 comprises at least 1, 2, 3, 4, 5, or 6 substitutions when compared to SEQ ID NO: 180.

[0098] In some embodiments, the CDRH3 comprises at least one amino acid substitution when compared to SEQ ID NOs: 109-126. In some embodiments, the CDRH3 comprises at least 1, 2, 3, 4, 5, or 6 substitutions when compared to SEQ ID NO: 109. In some embodiments, the CDRH3 comprises at least 1, 2, 3, 4, 5, or 6 substitutions when compared to SEQ ID NO: 110. In some embodiments, the CDRH3 comprises at least 1, 2, 3, 4, 5, or 6 substitutions when compared to SEQ ID NO: 111. In some embodiments, the CDRH3 comprises at least 1, 2, 3, 4, 5, or 6 substitutions when compared to SEQ ID NO: 112. In some embodiments, the CDRH3 comprises at least 1, 2, 3, 4, 5, or 6 substitutions when compared to SEQ ID NO: 113. In some embodiments, the CDRH3 comprises at least 1, 2, 3, 4, 5, or 6 substitutions when compared to SEQ ID NO: 114. In some embodiments, the CDRH3 comprises at least 1, 2, 3, 4, 5, or 6 substitutions when compared to SEQ ID NO: 115. In some embodiments, the CDRH3 comprises at least 1, 2, 3, 4, 5, or 6 substitutions when compared to SEQ ID NO: 116. In some embodiments, the CDRH3 comprises at least 1, 2, 3, 4, 5, or 6 substitutions when compared to SEQ ID NO: 117. In some embodiments, the CDRH3 comprises at least 1, 2, 3, 4, 5, or 6 substitutions when compared to SEQ ID NO: 118. In some embodiments, the CDRH3 comprises at least 1, 2, 3, 4, 5, or 6 substitutions when compared to SEQ ID NO: 119. In some embodiments, the CDRH3 comprises at least 1, 2, 3, 4, 5, or 6 substitutions when compared to SEQ ID NO: 120. In some embodiments, the CDRH3 comprises at least 1, 2, 3, 4, 5, or 6 substitutions when compared to SEQ ID NO: 121. In some embodiments, the CDRH3 comprises at least 1, 2, 3, 4, 5, or 6 substitutions when compared to SEQ ID NO: 122. In some embodiments, the CDRH3 comprises at least 1, 2, 3, 4, 5, or 6 substitutions when compared to SEQ ID NO: 123. In some embodiments, the CDRH3 comprises at least 1, 2, 3, 4, 5, or 6 substitutions when compared to SEQ ID NO: 124. In some embodiments, the CDRH3 comprises at least 1, 2, 3, 4, 5, or 6 substitutions when compared to SEQ ID NO: 125. In some embodiments, the CDRH3 comprises at least 1, 2, 3, 4, 5, or 6 substitutions when compared to SEQ ID NO: 126.

[0099] In some embodiments, the CDRH1 comprises an amino acid sequence at least 60% (for example, at least 60%, at least 65%, at least 70%, at least 75%, at least 80%, at least 85%, at least 90%, at least 95%, at least 96%, at least 97%, at least 98%, at least 99%) identical to SEQ ID NOs: 73-90; and CDRL1 comprises an amino acid sequence at least 60% (for example, at least 60%, at least 65%, at least 70%, at least 75%, at least 80%, at least 85%, at least 90%, at least 95%, at least 96%, at least 97%, at least 98%, at least 99%) identical to SEQ ID NOs: 127-144.

[0100] In some embodiments, the CDRH1 comprises at least one amino acid substitution when compared to SEQ ID NOs: 73-90. In some embodiments, the CDRH1 comprises at least 1, 2, 3, 4, 5, or 6 substitutions when compared to SEQ ID NOs: 73-90.

[0101] In some embodiments, the CDRL1 comprises at least one amino acid substitution when compared to SEQ ID NOs: 127-144. In some embodiments, the CDRL1 comprises at least 1, 2, 3, 4, 5, or 6 substitutions when compared to SEQ ID NOs: 127-144.

[0102] In some embodiments, the CDRH2 comprises an amino acid sequence at least 60% (for example, at least 60%, at least 65%, at least 70%, at least 75%, at least 80%, at least 85%, at least 90%, at least 95%, at least 96%, at least 97%, at least 98%, at least 99%) identical to SEQ ID NOs: 91-108; and CDRL2 comprises an amino acid sequence at least 60% (for example, at least 60%, at least 65%, at least 70%, at least 75%, at least 80%, at least 85%, at least 90%, at least 95%, at least 96%, at least 97%, at least 98%, at least 99%) identical to SEQ ID NOs: 145-162.

[0103] In some embodiments, the CDRH2 comprises at least one amino acid substitution when compared to SEQ ID NOs: 91-108. In some embodiments, the CDRH2 comprises at least 1, 2, 3, 4, 5, or 6 substitutions when compared to SEQ ID NOs: 91-108.

[0104] In some embodiments, the CDRL2 comprises at least one amino acid substitution when compared to SEQ ID NOs: 145-162. In some embodiments, the CDRL2 comprises at least 1, 2, 3, 4, 5, or 6 substitutions when compared to SEQ ID NOs: 145-162.

[0105] In some embodiments, VH comprises an amino acid sequence at least 60% (for example, at least 60%, at least 65%, at least 70%, at least 75%, at least 80%, at least 85%, at least 90%, at least 95%, at least 96%, at least 97%, at least 98%, at least 99%) identical to SEQ ID NOs: 37-54. In some embodiments, VH comprises an amino acid sequence selected from the group consisting of SEQ ID NOs: 37-54.

[0106] In some embodiments, VL comprises an amino acid sequence at least 60% (for example, at least 60%, at least 65%, at least 70%, at least 75%, at least 80%, at least 85%, at least 90%, at least 95%, at least 96%, at least 97%, at least 98%, at least 99%) identical to SEQ ID NOs: 55-72. In some embodiments, VL comprises an amino acid sequence selected from the group consisting of SEQ ID NOs: 55-72.

[0107] In some embodiments, a CDR sequence (for example CDRL1, CDRL2, CDRL3, CDRH1, CDRH2, or CDRH3) comprises one amino acid mutation, two amino acid mutations, three amino acid mutations, four amino acid mutations, five amino acid mutations, etc. when compared to a CDR sequence as disclosed herein.

[0108] In some embodiments, the recombinant antibody is a monoclonal antibody. In some embodiments, the recombinant antibody is an isolated antibody. In some embodiments, the recombinant antibody is a non-naturally occurring antibody. In some embodiments, the recombinant antibody is an antibody or antigen binding fragment thereof. In some embodiments, combinations of antibodies or antigen binding fragments thereof disclosed herein are used for treating coronavirus infection.

[0109] In some embodiments, combinations of antibodies or antigen binding fragments thereof disclosed herein are used for treating SARS-CoV-2 infection.

[0110] In some embodiments, the antibody comprises a light chain variable region (VL) that comprises a light chain complementarity determining region (CDRL)1, CDRL2, and CDRL3 and a heavy chain variable region (VH) that comprises a heavy chain complementarity determining region (CDRH)1, CDRH2, and CDRH3, wherein:
[0111] CDRH1 is SEQ ID NO:73,
[0112] CDRH2 is SEQ ID NO:91,
[0113] CDRH3 is SEQ ID NO:109,
[0114] CDRL1 is SEQ ID NO:127,
[0115] CDRL2 is SEQ ID NO:145, and
[0116] CDRL3 is SEQ ID NO:163.

[0117] In some embodiments, the antibody comprises a light chain variable region (VL) that comprises a light chain complementarity determining region (CDRL)1, CDRL2, and CDRL3 and a heavy chain variable region (VH) that comprises a heavy chain complementarity determining region (CDRH)1, CDRH2, and CDRH3, wherein:
[0118] CDRH1 is SEQ ID NO:74,
[0119] CDRH2 is SEQ ID NO:92,
[0120] CDRH3 is SEQ ID NO:110,
[0121] CDRL1 is SEQ ID NO:128,
[0122] CDRL2 is SEQ ID NO:146, and
[0123] CDRL3 is SEQ ID NO:164.

[0124] In some embodiments, the antibody comprises a light chain variable region (VL) that comprises a light chain complementarity determining region (CDRL)1, CDRL2, and CDRL3 and a heavy chain variable region (VH) that comprises a heavy chain complementarity determining region (CDRH)1, CDRH2, and CDRH3, wherein:
[0125] CDRH1 is SEQ ID NO:75,
[0126] CDRH2 is SEQ ID NO:93,
[0127] CDRH3 is SEQ ID NO:111,
[0128] CDRL1 is SEQ ID NO:129,
[0129] CDRL2 is SEQ ID NO:147, and
[0130] CDRL3 is SEQ ID NO:165.

[0131] In some embodiments, the antibody comprises a light chain variable region (VL) that comprises a light chain complementarity determining region (CDRL)1, CDRL2, and CDRL3 and a heavy chain variable region (VH) that comprises a heavy chain complementarity determining region (CDRH)1, CDRH2, and CDRH3, wherein:
[0132] CDRH1 is SEQ ID NO:76,
[0133] CDRH2 is SEQ ID NO:94,
[0134] CDRH3 is SEQ ID NO:112,
[0135] CDRL1 is SEQ ID NO:130,
[0136] CDRL2 is SEQ ID NO:148, and
[0137] CDRL3 is SEQ ID NO:166.

[0138] In some embodiments, the antibody comprises a light chain variable region (VL) that comprises a light chain complementarity determining region (CDRL)1, CDRL2, and CDRL3 and a heavy chain variable region (VH) that comprises a heavy chain complementarity determining region (CDRH)1, CDRH2, and CDRH3, wherein:
[0139] CDRH1 is SEQ ID NO:77,
[0140] CDRH2 is SEQ ID NO:95,
[0141] CDRH3 is SEQ ID NO:113,
[0142] CDRL1 is SEQ ID NO:131,
[0143] CDRL2 is SEQ ID NO:149, and
[0144] CDRL3 is SEQ ID NO:167.

[0145] In some embodiments, the antibody comprises a light chain variable region (VL) that comprises a light chain complementarity determining region (CDRL)1, CDRL2, and CDRL3 and a heavy chain variable region (VH) that comprises a heavy chain complementarity determining region (CDRH)1, CDRH2, and CDRH3, wherein:
[0146] CDRH1 is SEQ ID NO:78,
[0147] CDRH2 is SEQ ID NO:96,
[0148] CDRH3 is SEQ ID NO:114,
[0149] CDRL1 is SEQ ID NO:132,
[0150] CDRL2 is SEQ ID NO:150, and
[0151] CDRL3 is SEQ ID NO:168.

[0152] In some embodiments, the antibody comprises a light chain variable region (VL) that comprises a light chain complementarity determining region (CDRL)1, CDRL2, and CDRL3 and a heavy chain variable region (VH) that comprises a heavy chain complementarity determining region (CDRH)1, CDRH2, and CDRH3, wherein:
[0153] CDRH1 is SEQ ID NO:79,
[0154] CDRH2 is SEQ ID NO:97,
[0155] CDRH3 is SEQ ID NO:115,
[0156] CDRL1 is SEQ ID NO:133,
[0157] CDRL2 is SEQ ID NO:151, and
[0158] CDRL3 is SEQ ID NO:169.

[0159] In some embodiments, the antibody comprises a light chain variable region (VL) that comprises a light chain complementarity determining region (CDRL)1, CDRL2, and CDRL3 and a heavy chain variable region (VH) that comprises a heavy chain complementarity determining region (CDRH)1, CDRH2, and CDRH3, wherein:
[0160] CDRH1 is SEQ ID NO:80,
[0161] CDRH2 is SEQ ID NO:98,
[0162] CDRH3 is SEQ ID NO:116,
[0163] CDRL1 is SEQ ID NO:134,
[0164] CDRL2 is SEQ ID NO:152, and
[0165] CDRL3 is SEQ ID NO:170.

[0166] In some embodiments, the antibody comprises a light chain variable region (VL) that comprises a light chain complementarity determining region (CDRL)1, CDRL2, and CDRL3 and a heavy chain variable region (VH) that comprises a heavy chain complementarity determining region (CDRH)1, CDRH2, and CDRH3, wherein:
[0167] CDRH1 is SEQ ID NO:81,
[0168] CDRH2 is SEQ ID NO:99,
[0169] CDRH3 is SEQ ID NO:117,
[0170] CDRL1 is SEQ ID NO:135,
[0171] CDRL2 is SEQ ID NO:153, and
[0172] CDRL3 is SEQ ID NO:171.

[0173] In some embodiments, the antibody comprises a light chain variable region (VL) that comprises a light chain complementarity determining region (CDRL)1, CDRL2, and CDRL3 and a heavy chain variable region (VH) that comprises a heavy chain complementarity determining region (CDRH)1, CDRH2, and CDRH3, wherein:
[0174] CDRH1 is SEQ ID NO:82,
[0175] CDRH2 is SEQ ID NO:100,
[0176] CDRH3 is SEQ ID NO:118,
[0177] CDRL1 is SEQ ID NO:136,
[0178] CDRL2 is SEQ ID NO:154, and
[0179] CDRL3 is SEQ ID NO:172.

[0180] In some embodiments, the antibody comprises a light chain variable region (VL) that comprises a light chain complementarity determining region (CDRL)1, CDRL2, and CDRL3 and a heavy chain variable region (VH) that comprises a heavy chain complementarity determining region (CDRH)1, CDRH2, and CDRH3, wherein:
[0181] CDRH1 is SEQ ID NO:83,
[0182] CDRH2 is SEQ ID NO:101,
[0183] CDRH3 is SEQ ID NO:119,
[0184] CDRL1 is SEQ ID NO:137,
[0185] CDRL2 is SEQ ID NO:155, and
[0186] CDRL3 is SEQ ID NO:173.

[0187] In some embodiments, the antibody comprises a light chain variable region (VL) that comprises a light chain complementarity determining region (CDRL)1, CDRL2, and CDRL3 and a heavy chain variable region (VH) that comprises a heavy chain complementarity determining region (CDRH)1, CDRH2, and CDRH3, wherein:
[0188] CDRH1 is SEQ ID NO:84,
[0189] CDRH2 is SEQ ID NO:102,
[0190] CDRH3 is SEQ ID NO:120,
[0191] CDRL1 is SEQ ID NO:138,
[0192] CDRL2 is SEQ ID NO:156, and
[0193] CDRL3 is SEQ ID NO:174.

[0194] In some embodiments, the antibody comprises a light chain variable region (VL) that comprises a light chain complementarity determining region (CDRL)1, CDRL2, and CDRL3 and a heavy chain variable region (VH) that comprises a heavy chain complementarity determining region (CDRH)1, CDRH2, and CDRH3, wherein:
[0195] CDRH1 is SEQ ID NO:85,
[0196] CDRH2 is SEQ ID NO:103,
[0197] CDRH3 is SEQ ID NO:121,
[0198] CDRL1 is SEQ ID NO:139,
[0199] CDRL2 is SEQ ID NO:157, and
[0200] CDRL3 is SEQ ID NO:175.

[0201] In some embodiments, the antibody comprises a light chain variable region (VL) that comprises a light chain complementarity determining region (CDRL)1, CDRL2, and CDRL3 and a heavy chain variable region (VH) that comprises a heavy chain complementarity determining region (CDRH)1, CDRH2, and CDRH3, wherein:
[0202] CDRH1 is SEQ ID NO:86,
[0203] CDRH2 is SEQ ID NO:104,
[0204] CDRH3 is SEQ ID NO:122,
[0205] CDRL1 is SEQ ID NO:140,
[0206] CDRL2 is SEQ ID NO:158, and
[0207] CDRL3 is SEQ ID NO:176.

[0208] In some embodiments, the antibody comprises a light chain variable region (VL) that comprises a light chain complementarity determining region (CDRL)1, CDRL2, and CDRL3 and a heavy chain variable region (VH) that comprises a heavy chain complementarity determining region (CDRH)1, CDRH2, and CDRH3, wherein:
[0209] CDRH1 is SEQ ID NO:87,
[0210] CDRH2 is SEQ ID NO:105,
[0211] CDRH3 is SEQ ID NO:123,
[0212] CDRL1 is SEQ ID NO:141,
[0213] CDRL2 is SEQ ID NO:159, and
[0214] CDRL3 is SEQ ID NO:177.

[0215] In some embodiments, the antibody comprises a light chain variable region (VL) that comprises a light chain complementarity determining region (CDRL)1, CDRL2, and CDRL3 and a heavy chain variable region (VH) that comprises a heavy chain complementarity determining region (CDRH)1, CDRH2, and CDRH3, wherein:
[0216] CDRH1 is SEQ ID NO:88,
[0217] CDRH2 is SEQ ID NO:106,
[0218] CDRH3 is SEQ ID NO:124,
[0219] CDRL1 is SEQ ID NO:142,
[0220] CDRL2 is SEQ ID NO:160, and
[0221] CDRL3 is SEQ ID NO:178.

[0222] In some embodiments, the antibody comprises a light chain variable region (VL) that comprises a light chain complementarity determining region (CDRL)1, CDRL2, and CDRL3 and a heavy chain variable region (VH) that comprises a heavy chain complementarity determining region (CDRH)1, CDRH2, and CDRH3, wherein:
[0223] CDRH1 is SEQ ID NO:89,
[0224] CDRH2 is SEQ ID NO:107,
[0225] CDRH3 is SEQ ID NO:125,
[0226] CDRL1 is SEQ ID NO:143,
[0227] CDRL2 is SEQ ID NO:161, and
[0228] CDRL3 is SEQ ID NO:179.

[0229] In some embodiments, the antibody comprises a light chain variable region (VL) that comprises a light chain complementarity determining region (CDRL)1, CDRL2, and CDRL3 and a heavy chain variable region (VH) that comprises a heavy chain complementarity determining region (CDRH)1, CDRH2, and CDRH3, wherein:
[0230] CDRH1 is SEQ ID NO:90,
[0231] CDRH2 is SEQ ID NO:108,
[0232] CDRH3 is SEQ ID NO:126,
[0233] CDRL1 is SEQ ID NO:144,
[0234] CDRL2 is SEQ ID NO:162, and
[0235] CDRL3 is SEQ ID NO:180.

[0236] In some embodiments, the antibody or antigen binding fragment thereof comprises a light chain variable region (VL) and/or a heavy chain variable region (VH), wherein:
[0237] VH is SEQ ID NO: 37, and
[0238] VL is SEQ ID NO: 55.

[0239] In some embodiments, the antibody or antigen binding fragment thereof comprises a light chain variable region (VL) and/or a heavy chain variable region (VH), wherein:
[0240] VH is SEQ ID NO: 38, and
[0241] VL is SEQ ID NO: 56.

[0242] In some embodiments, the antibody or antigen binding fragment thereof comprises a light chain variable region (VL) and/or a heavy chain variable region (VH), wherein:
[0243] VH is SEQ ID NO: 39, and
[0244] VL is SEQ ID NO: 57.

[0245] In some embodiments, the antibody or antigen binding fragment thereof comprises a light chain variable region (VL) and/or a heavy chain variable region (VH), wherein:
[0246] VH is SEQ ID NO: 40, and
[0247] VL is SEQ ID NO: 58.

[0248] In some embodiments, the antibody or antigen binding fragment thereof comprises a light chain variable region (VL) and/or a heavy chain variable region (VH), wherein:
[0249] VH is SEQ ID NO: 41, and
[0250] VL is SEQ ID NO: 59.

[0251] In some embodiments, the antibody or antigen binding fragment thereof comprises a light chain variable region (VL) and/or a heavy chain variable region (VH), wherein:
[0252] VH is SEQ ID NO: 42, and
[0253] VL is SEQ ID NO: 60.

[0254] In some embodiments, the antibody or antigen binding fragment thereof comprises a light chain variable region (VL) and/or a heavy chain variable region (VH), wherein:
[0255] VH is SEQ ID NO: 43, and
[0256] VL is SEQ ID NO: 61.

[0257] In some embodiments, the antibody or antigen binding fragment thereof comprises a light chain variable region (VL) and/or a heavy chain variable region (VH), wherein:
[0258] VH is SEQ ID NO: 44, and
[0259] VL is SEQ ID NO: 62.

[0260] In some embodiments, the antibody or antigen binding fragment thereof comprises a light chain variable region (VL) and/or a heavy chain variable region (VH), wherein:
[0261] VH is SEQ ID NO: 45, and
[0262] VL is SEQ ID NO: 63.

[0263] In some embodiments, the antibody or antigen binding fragment thereof comprises a light chain variable region (VL) and/or a heavy chain variable region (VH), wherein:
[0264] VH is SEQ ID NO: 46, and
[0265] VL is SEQ ID NO: 64.

[0266] In some embodiments, the antibody or antigen binding fragment thereof comprises a light chain variable region (VL) and/or a heavy chain variable region (VH), wherein:
[0267] VH is SEQ ID NO: 47, and
[0268] VL is SEQ ID NO: 65.

[0269] In some embodiments, the antibody or antigen binding fragment thereof comprises a light chain variable region (VL) and/or a heavy chain variable region (VH), wherein:
[0270] VH is SEQ ID NO: 48, and
[0271] VL is SEQ ID NO: 66.

[0272] In some embodiments, the antibody or antigen binding fragment thereof comprises a light chain variable region (VL) and/or a heavy chain variable region (VH), wherein:
[0273] VH is SEQ ID NO: 49, and
[0274] VL is SEQ ID NO: 67.

[0275] In some embodiments, the antibody or antigen binding fragment thereof comprises a light chain variable region (VL) and/or a heavy chain variable region (VH), wherein:
[0276] VH is SEQ ID NO: 50, and
[0277] VL is SEQ ID NO: 68.

[0278] In some embodiments, the antibody or antigen binding fragment thereof comprises a light chain variable region (VL) and/or a heavy chain variable region (VH), wherein:
[0279] VH is SEQ ID NO: 51, and
[0280] VL is SEQ ID NO: 69.

[0281] In some embodiments, the antibody or antigen binding fragment thereof comprises a light chain variable region (VL) and/or a heavy chain variable region (VH), wherein:
[0282] VH is SEQ ID NO: 52, and
[0283] VL is SEQ ID NO: 70.

[0284] In some embodiments, the antibody or antigen binding fragment thereof comprises a light chain variable region (VL) and/or a heavy chain variable region (VH), wherein:
[0285] VH is SEQ ID NO: 53, and
[0286] VL is SEQ ID NO: 71.

[0287] In some embodiments, the antibody or antigen binding fragment thereof comprises a light chain variable region (VL) and/or a heavy chain variable region (VH), wherein:
[0288] VH is SEQ ID NO: 54, and
[0289] VL is SEQ ID NO: 72.

[0290] In some embodiments, the recombinant antibody or antigen binding fragment thereof of any preceding aspect comprises a VH comprising an amino acid sequence selected from SEQ ID NOs: 5437-8064.

[0291] In some embodiments, the recombinant antibody or antigen binding fragment thereof of any preceding aspect comprises a VL comprising an amino acid sequence selected from SEQ ID NOs: 8065-10692.

[0292] In some embodiments, the recombinant antibody or antigen binding fragment thereof of any preceding aspect comprises a CDRH1 comprising an amino acid sequence selected from SEQ ID NOs: 10693-13311.

[0293] In some embodiments, the recombinant antibody or antigen binding fragment thereof of any preceding aspect comprises a CDRH2 comprising an amino acid sequence selected from SEQ ID NOs: 13312-15934.

[0294] In some embodiments, the recombinant antibody or antigen binding fragment thereof of any preceding aspect comprises a CDRH3 comprising an amino acid sequence selected from SEQ ID NOs: 15935-18562.

[0295] In some embodiments, the recombinant antibody or antigen binding fragment thereof of any preceding aspect comprises a CDRL1 comprising an amino acid sequence selected from SEQ ID NOs: 18563-21190.

[0296] In some embodiments, the recombinant antibody or antigen binding fragment thereof of any preceding aspect comprises a CDRL2 comprising an amino acid sequence selected from SEQ ID NOs: 21191-23818.

[0297] In some embodiments, the recombinant antibody or antigen binding fragment thereof of any preceding aspect comprises a CDRL3 comprising an amino acid sequence selected from SEQ ID NOs: 23819-26446.

### Methods

[0298] Disclosed herein are methods for preventing, treating, inhibiting, reducing, or detecting coronavirus infection.

[0299] In some aspects, disclosed herein is a method of producing a recombinant antibody comprising cultivating or maintaining the host cell of any preceding aspect under conditions to produce a recombinant antibody as described herein.

[0300] In some aspects, disclosed herein is a method of treating, preventing, reducing, and/or inhibiting coronavirus infection, comprising administering to a subject a therapeutically effective amount of a recombinant antibody, wherein the recombinant antibody comprises a light chain variable region (VL) that comprises a light chain complementarity determining region (CDRL)1, CDRL2, and CDRL3 and a heavy chain variable region (VH) that comprises a heavy chain complementarity determining region (CDRH)1, CDRH2, and CDRH3, wherein
[0301] CDRH3 comprises an amino acid sequence at least 60% (for example, at least 60%, at least 65%, at least 70%, at least 75%, at least 80%, at least 85%, at least 90%, at least 95%, at least 96%, at least 97%, at least 98%, at least 99%) identical to SEQ ID NOs: 109-126; and
[0302] CDRL3 comprises an amino acid sequence at least 60% (for example, at least 60%, at least 65%, at least 70%, at least 75%, at least 80%, at least 85%, at least 90%, at least 95%, at least 96%, at least 97%, at least 98%, at least 99%) identical to SEQ ID NOs: 163-180.

[0303] In some aspects, disclosed herein is a method of treating, preventing, reducing, and/or inhibiting coronavirus infection, comprising administering to a subject a therapeutically effective amount of a recombinant antibody, wherein the recombinant antibody comprises a light chain variable region (VL) that comprises a light chain complementarity determining region (CDRL)1, CDRL2, and CDRL3 or a heavy chain variable region (VH) that comprises a heavy chain complementarity determining region (CDRH)1, CDRH2, and CDRH3, wherein
[0304] CDRH3 comprises an amino acid sequence at least 60% (for example, at least 60%, at least 65%, at least 70%, at least 75%, at least 80%, at least 85%, at least 90%, at least 95%, at least 96%, at least 97%, at least 98%, at least 99%) identical to SEQ ID NOs: 109-126; and
[0305] CDRL3 comprises an amino acid sequence at least 60% (for example, at least 60%, at least 65%, at least 70%, at least 75%, at least 80%, at least 85%, at least 90%, at least 95%, at least 96%, at least 97%, at least 98%, at least 99%) identical to SEQ ID NOs: 163-180.

[0306] In some embodiments, the CDRL3 comprises at least one amino acid substitution when compared to SEQ ID NOs: 163-180. In some embodiments, the CDRL3 comprises at least 1, 2, 3, 4, 5, or 6 substitutions when compared to SEQ ID NO: 163. In some embodiments, the CDRL3 comprises at least 1, 2, 3, 4, 5, or 6 substitutions when compared to SEQ ID NO: 164. In some embodiments, the CDRL3 comprises at least 1, 2, 3, 4, 5, or 6 substitutions when compared to SEQ ID NO: 165. In some embodiments, the CDRL3 comprises at least 1, 2, 3, 4, 5, or 6 substitutions when compared to SEQ ID NO: 166. In some embodiments, the CDRL3 comprises at least 1, 2, 3, 4, 5, or 6 substitutions when compared to SEQ ID NO: 167. In some embodiments, the CDRL3 comprises at least 1, 2, 3, 4, 5, or 6 substitutions when compared to SEQ ID NO: 168. In some embodiments, the CDRL3 comprises at least 1, 2, 3, 4, 5, or 6 substitutions when compared to SEQ ID NO: 169. In some embodiments, the CDRL3 comprises at least 1, 2, 3, 4, 5, or 6 substitutions when compared to SEQ ID NO: 170. In some embodiments, the CDRL3 comprises at least 1, 2, 3, 4, 5, or 6 substitutions when compared to SEQ ID NO: 171. In some embodiments, the CDRL3 comprises at least 1, 2, 3, 4, 5, or 6 substitutions when compared to SEQ ID NO: 172. In some embodiments, the CDRL3 comprises at least 1, 2, 3, 4, 5, or 6 substitutions when compared to SEQ ID NO: 173. In some embodiments, the CDRL3 comprises at least 1, 2, 3, 4, 5, or 6 substitutions when compared to SEQ ID NO: 174. In some embodiments, the CDRL3 comprises at least 1, 2, 3, 4, 5, or 6 substitutions when compared to SEQ ID NO: 175. In some embodiments, the CDRL3 comprises at least 1, 2, 3, 4, 5, or 6 substitutions when compared to SEQ ID NO: 176. In some embodiments, the CDRL3 comprises at least 1, 2, 3, 4, 5, or 6 substitutions when compared to SEQ ID NO: 177. In some embodiments, the CDRL3 comprises at least 1, 2, 3, 4, 5, or 6 substitutions when compared to SEQ ID NO: 178. In some embodiments, the CDRL3 comprises at least 1, 2, 3, 4, 5, or 6 substitutions when compared to SEQ ID NO: 179. In some embodiments, the CDRL3 comprises at least 1, 2, 3, 4, 5, or 6 substitutions when compared to SEQ ID NO: 180.

[0307] In some embodiments, the CDRH3 comprises at least one amino acid substitution when compared to SEQ ID NOs: 109-126. In some embodiments, the CDRH3 comprises at least 1, 2, 3, 4, 5, or 6 substitutions when compared to SEQ ID NO: 109. In some embodiments, the CDRH3 comprises at least 1, 2, 3, 4, 5, or 6 substitutions when compared to SEQ ID NO: 110. In some embodiments, the CDRH3 comprises at least 1, 2, 3, 4, 5, or 6 substitutions when compared to SEQ ID NO: 111. In some embodiments, the CDRH3 comprises at least 1, 2, 3, 4, 5, or 6 substitutions when compared to SEQ ID NO: 112. In some embodiments, the CDRH3 comprises at least 1, 2, 3, 4, 5, or 6 substitutions when compared to SEQ ID NO: 113. In some embodiments, the CDRH3 comprises at least 1, 2, 3, 4, 5, or 6 substitutions when compared to SEQ ID NO: 114. In some embodiments, the CDRH3 comprises at least 1, 2, 3, 4, 5, or 6 substitutions when compared to SEQ ID NO: 115. In some embodiments, the CDRH3 comprises at least 1, 2, 3, 4, 5, or 6 substitutions when compared to SEQ ID NO: 116. In some embodiments, the CDRH3 comprises at least 1, 2, 3, 4, 5, or 6 substitutions when compared to SEQ ID NO: 117. In some embodiments, the CDRH3 comprises at least 1, 2, 3, 4, 5, or 6 substitutions when compared to SEQ ID NO: 118. In some embodiments, the CDRH3 comprises at least 1, 2, 3, 4, 5, or 6 substitutions when compared to SEQ ID NO: 119. In some embodiments, the CDRH3 comprises at least 1, 2, 3, 4, 5, or 6 substitutions when compared to SEQ ID NO: 120. In some embodiments, the CDRH3 comprises at least 1, 2, 3, 4, 5, or 6 substitutions when compared to SEQ ID NO: 121. In some embodiments, the CDRH3 comprises at least 1, 2, 3, 4, 5, or 6 substitutions when compared to SEQ ID NO: 122. In some embodiments, the CDRH3 comprises at least 1, 2, 3, 4, 5, or 6 substitutions when compared to SEQ ID NO: 123. In some embodiments, the CDRH3 comprises at least 1, 2, 3, 4, 5, or 6 substitutions when compared to SEQ ID NO: 124. In some embodiments, the CDRH3 comprises at least 1, 2, 3, 4, 5, or 6 substitutions when compared to SEQ ID NO: 125. In some embodiments, the CDRH3 comprises at least 1, 2, 3, 4, 5, or 6 substitutions when compared to SEQ ID NO: 126.

[0308] In some embodiments, the CDRH1 comprises an amino acid sequence at least 60% (for example, at least 60%, at least 65%, at least 70%, at least 75%, at least 80%, at least 85%, at least 90%, at least 95%, at least 96%, at least 97%, at least 98%, at least 99%) identical to SEQ ID NOs: 97-120; and CDRL1 comprises an amino acid sequence at least 60% (for example, at least 60%, at least 65%, at least 70%, at least 75%, at least 80%, at least 85%, at least 90%, at least 95%, at least 96%, at least 97%, at least 98%, at least 99%) identical to SEQ ID NOs: 121-144.

[0309] In some embodiments, the CDRH1 comprises at least one amino acid substitution when compared to SEQ ID NOs: 73-90. In some embodiments, the CDRH1 comprises at least 1, 2, 3, 4, 5, or 6 substitutions when compared to SEQ ID NOs: 73-90.

[0310] In some embodiments, the CDRL1 comprises at least one amino acid substitution when compared to SEQ ID NOs: 127-144. In some embodiments, the CDRL1 comprises at least 1, 2, 3, 4, 5, or 6 substitutions when compared to SEQ ID NOs: 127-144.

[0311] In some embodiments, the CDRH2 comprises an amino acid sequence at least 60% (for example, at least 60%, at least 65%, at least 70%, at least 75%, at least 80%, at least 85%, at least 90%, at least 95%, at least 96%, at least 97%, at least 98%, at least 99%) identical to SEQ ID NOs: 91-108; and CDRL2 comprises an amino acid sequence at least 60% (for example, at least 60%, at least 65%, at least 70%, at least 75%, at least 80%, at least 85%, at least 90%, at least 95%, at least 96%, at least 97%, at least 98%, at least 99%) identical to SEQ ID NOs: 145-162.

[0312] In some embodiments, the CDRH2 comprises at least one amino acid substitution when compared to SEQ ID NOs: 91-108. In some embodiments, the CDRH2 comprises at least 1, 2, 3, 4, 5, or 6 substitutions when compared to SEQ ID NOs: 91-108.

[0313] In some embodiments, the CDRL2 comprises at least one amino acid substitution when compared to SEQ ID NOs: 145-162. In some embodiments, the CDRL2 comprises at least 1, 2, 3, 4, 5, or 6 substitutions when compared to SEQ ID NOs: 145-162.

[0314] In some embodiments, VH comprises an amino acid sequence at least 60% (for example, at least 60%, at least 65%, at least 70%, at least 75%, at least 80%, at least 85%, at least 90%, at least 95%, at least 96%, at least 97%, at least 98%, at least 99%) identical to SEQ ID NOs: 37-54. In some embodiments, VH comprises an amino acid sequence selected from the group consisting of SEQ ID NOs: 37-54.

[0315] In some embodiments, VL comprises an amino acid sequence at least 60% (for example, at least 60%, at least 65%, at least 70%, at least 75%, at least 80%, at least 85%, at least 90%, at least 95%, at least 96%, at least 97%, at least 98%, at least 99%) identical to SEQ ID NOs: 55-72. In some embodiments, VL comprises an amino acid sequence selected from the group consisting of SEQ ID NOs: 55-72.

[0316] In some embodiments, a CDR sequence (for example CDRL1, CDRL2, CDRL3, CDRH1, CDRH2, or CDRH3) comprises one amino acid mutation, two amino acid mutations, three amino acid mutations, four amino acid mutations, five amino acid mutations, etc. when compared to a CDR sequence as disclosed herein.

[0317] In some embodiments, the recombinant antibody is a monoclonal antibody. In some embodiments, the recombinant antibody is an isolated antibody. In some embodiments, the recombinant antibody is an antibody or antigen binding fragment thereof. In some embodiments, combinations of antibodies or antigen binding fragments thereof disclosed herein are used for treating coronavirus infection.

[0318] In some embodiments, combinations of antibodies or antigen binding fragments thereof disclosed herein are used for treating SARS-CoV-2 infection.

[0319] In some embodiments, the antibody comprises a light chain variable region (VL) that comprises a light chain complementarity determining region (CDRL)1, CDRL2, and CDRL3 and a heavy chain variable region (VH) that comprises a heavy chain complementarity determining region (CDRH)1, CDRH2, and CDRH3, wherein:
[0320] CDRH1 is SEQ ID NO:73,
[0321] CDRH2 is SEQ ID NO:91,
[0322] CDRH3 is SEQ ID NO:109,
[0323] CDRL1 is SEQ ID NO:127,
[0324] CDRL2 is SEQ ID NO:145, and
[0325] CDRL3 is SEQ ID NO:163.

[0326] In some embodiments, the antibody comprises a light chain variable region (VL) that comprises a light chain complementarity determining region (CDRL)1, CDRL2, and CDRL3 and a heavy chain variable region (VH) that comprises a heavy chain complementarity determining region (CDRH)1, CDRH2, and CDRH3, wherein:
[0327] CDRH1 is SEQ ID NO:74,
[0328] CDRH2 is SEQ ID NO:92,
[0329] CDRH3 is SEQ ID NO:110,
[0330] CDRL1 is SEQ ID NO:128,
[0331] CDRL2 is SEQ ID NO:146, and
[0332] CDRL3 is SEQ ID NO:164.

[0333] In some embodiments, the antibody comprises a light chain variable region (VL) that comprises a light chain complementarity determining region (CDRL)1, CDRL2, and CDRL3 and a heavy chain variable region (VH) that comprises a heavy chain complementarity determining region (CDRH)1, CDRH2, and CDRH3, wherein:
[0334] CDRH1 is SEQ ID NO:75,
[0335] CDRH2 is SEQ ID NO:93,
[0336] CDRH3 is SEQ ID NO:111,
[0337] CDRL1 is SEQ ID NO:129,
[0338] CDRL2 is SEQ ID NO:147, and
[0339] CDRL3 is SEQ ID NO:165.

[0340] In some embodiments, the antibody comprises a light chain variable region (VL) that comprises a light chain complementarity determining region (CDRL)1, CDRL2, and CDRL3 and a heavy chain variable region (VH) that comprises a heavy chain complementarity determining region (CDRH)1, CDRH2, and CDRH3, wherein:
[0341] CDRH1 is SEQ ID NO:76,
[0342] CDRH2 is SEQ ID NO:94,
[0343] CDRH3 is SEQ ID NO:112,
[0344] CDRL1 is SEQ ID NO:130,
[0345] CDRL2 is SEQ ID NO:148, and
[0346] CDRL3 is SEQ ID NO:166.

[0347] In some embodiments, the antibody comprises a light chain variable region (VL) that comprises a light chain complementarity determining region (CDRL)1, CDRL2, and CDRL3 and a heavy chain variable region (VH) that comprises a heavy chain complementarity determining region (CDRH)1, CDRH2, and CDRH3, wherein:
[0348] CDRH1 is SEQ ID NO:77,
[0349] CDRH2 is SEQ ID NO:95,
[0350] CDRH3 is SEQ ID NO:113,
[0351] CDRL1 is SEQ ID NO:131,
[0352] CDRL2 is SEQ ID NO:149, and
[0353] CDRL3 is SEQ ID NO:167.

[0354] In some embodiments, the antibody comprises a light chain variable region (VL) that comprises a light chain complementarity determining region (CDRL)1, CDRL2, and CDRL3 and a heavy chain variable region (VH) that comprises a heavy chain complementarity determining region (CDRH)1, CDRH2, and CDRH3, wherein:
[0355] CDRH1 is SEQ ID NO:78,
[0356] CDRH2 is SEQ ID NO:96,
[0357] CDRH3 is SEQ ID NO:114,
[0358] CDRL1 is SEQ ID NO:132,
[0359] CDRL2 is SEQ ID NO:150, and
[0360] CDRL3 is SEQ ID NO:168.

[0361] In some embodiments, the antibody comprises a light chain variable region (VL) that comprises a light chain complementarity determining region (CDRL)1, CDRL2, and CDRL3 and a heavy chain variable region (VH) that comprises a heavy chain complementarity determining region (CDRH)1, CDRH2, and CDRH3, wherein:
[0362] CDRH1 is SEQ ID NO:79,
[0363] CDRH2 is SEQ ID NO:97,
[0364] CDRH3 is SEQ ID NO:115,
[0365] CDRL1 is SEQ ID NO:133,
[0366] CDRL2 is SEQ ID NO:151, and
[0367] CDRL3 is SEQ ID NO:169.

[0368] In some embodiments, the antibody comprises a light chain variable region (VL) that comprises a light chain complementarity determining region (CDRL)1, CDRL2, and CDRL3 and a heavy chain variable region (VH) that comprises a heavy chain complementarity determining region (CDRH)1, CDRH2, and CDRH3, wherein:
[0369] CDRH1 is SEQ ID NO:80,
[0370] CDRH2 is SEQ ID NO:98,
[0371] CDRH3 is SEQ ID NO:116,
[0372] CDRL1 is SEQ ID NO:134,
[0373] CDRL2 is SEQ ID NO:152, and
[0374] CDRL3 is SEQ ID NO:170.

[0375] In some embodiments, the antibody comprises a light chain variable region (VL) that comprises a light chain complementarity determining region (CDRL)1, CDRL2, and CDRL3 and a heavy chain variable region (VH) that comprises a heavy chain complementarity determining region (CDRH)1, CDRH2, and CDRH3, wherein:
[0376] CDRH1 is SEQ ID NO:81,
[0377] CDRH2 is SEQ ID NO:99,
[0378] CDRH3 is SEQ ID NO:117,
[0379] CDRL1 is SEQ ID NO:135,
[0380] CDRL2 is SEQ ID NO:153, and
[0381] CDRL3 is SEQ ID NO:171.

[0382] In some embodiments, the antibody comprises a light chain variable region (VL) that comprises a light chain complementarity determining region (CDRL)1, CDRL2, and CDRL3 and a heavy chain variable region (VH) that comprises a heavy chain complementarity determining region (CDRH)1, CDRH2, and CDRH3, wherein:
[0383] CDRH1 is SEQ ID NO:82,
[0384] CDRH2 is SEQ ID NO:100,
[0385] CDRH3 is SEQ ID NO:118,
[0386] CDRL1 is SEQ ID NO:136,
[0387] CDRL2 is SEQ ID NO:154, and
[0388] CDRL3 is SEQ ID NO:172.

[0389] In some embodiments, the antibody comprises a light chain variable region (VL) that comprises a light chain complementarity determining region (CDRL)1, CDRL2, and CDRL3 and a heavy chain variable region (VH) that comprises a heavy chain complementarity determining region (CDRH)1, CDRH2, and CDRH3, wherein:
[0390] CDRH1 is SEQ ID NO:83,
[0391] CDRH2 is SEQ ID NO:101,
[0392] CDRH3 is SEQ ID NO:119,
[0393] CDRL1 is SEQ ID NO:137,
[0394] CDRL2 is SEQ ID NO:155, and
[0395] CDRL3 is SEQ ID NO:173.

[0396] In some embodiments, the antibody comprises a light chain variable region (VL) that comprises a light chain complementarity determining region (CDRL)1, CDRL2, and CDRL3 and a heavy chain variable region (VH) that comprises a heavy chain complementarity determining region (CDRH)1, CDRH2, and CDRH3, wherein:
[0397] CDRH1 is SEQ ID NO:84,
[0398] CDRH2 is SEQ ID NO:102,
[0399] CDRH3 is SEQ ID NO:120,
[0400] CDRL1 is SEQ ID NO:138,
[0401] CDRL2 is SEQ ID NO:156, and
[0402] CDRL3 is SEQ ID NO:174.

[0403] In some embodiments, the antibody comprises a light chain variable region (VL) that comprises a light chain complementarity determining region (CDRL)1, CDRL2, and CDRL3 and a heavy chain variable region (VH) that comprises a heavy chain complementarity determining region (CDRH)1, CDRH2, and CDRH3, wherein:
[0404] CDRH1 is SEQ ID NO:85,
[0405] CDRH2 is SEQ ID NO:103,
[0406] CDRH3 is SEQ ID NO:121,
[0407] CDRL1 is SEQ ID NO:139,
[0408] CDRL2 is SEQ ID NO:157, and
[0409] CDRL3 is SEQ ID NO:175.

[0410] In some embodiments, the antibody comprises a light chain variable region (VL) that comprises a light chain complementarity determining region (CDRL)1, CDRL2, and CDRL3 and a heavy chain variable region (VH) that comprises a heavy chain complementarity determining region (CDRH)1, CDRH2, and CDRH3, wherein:
[0411] CDRH1 is SEQ ID NO:86,
[0412] CDRH2 is SEQ ID NO:104,
[0413] CDRH3 is SEQ ID NO:122,
[0414] CDRL1 is SEQ ID NO:140,
[0415] CDRL2 is SEQ ID NO:158, and
[0416] CDRL3 is SEQ ID NO:176.

[0417] In some embodiments, the antibody comprises a light chain variable region (VL) that comprises a light chain complementarity determining region (CDRL)1, CDRL2, and CDRL3 and a heavy chain variable region (VH) that comprises a heavy chain complementarity determining region (CDRH)1, CDRH2, and CDRH3, wherein:
[0418] CDRH1 is SEQ ID NO:87,
[0419] CDRH2 is SEQ ID NO:105,
[0420] CDRH3 is SEQ ID NO:123,
[0421] CDRL1 is SEQ ID NO:141,
[0422] CDRL2 is SEQ ID NO:159, and
[0423] CDRL3 is SEQ ID NO:177.

[0424] In some embodiments, the antibody comprises a light chain variable region (VL) that comprises a light chain complementarity determining region (CDRL)1, CDRL2, and CDRL3 and a heavy chain variable region (VH) that comprises a heavy chain complementarity determining region (CDRH)1, CDRH2, and CDRH3, wherein:
[0425] CDRH1 is SEQ ID NO:88,
[0426] CDRH2 is SEQ ID NO:106,
[0427] CDRH3 is SEQ ID NO:124,
[0428] CDRL1 is SEQ ID NO:142,
[0429] CDRL2 is SEQ ID NO:160, and
[0430] CDRL3 is SEQ ID NO:178.

[0431] In some embodiments, the antibody comprises a light chain variable region (VL) that comprises a light chain complementarity determining region (CDRL)1, CDRL2, and CDRL3 and a heavy chain variable region (VH) that comprises a heavy chain complementarity determining region (CDRH)1, CDRH2, and CDRH3, wherein:
[0432] CDRH1 is SEQ ID NO:89,
[0433] CDRH2 is SEQ ID NO:107,
[0434] CDRH3 is SEQ ID NO:125,
[0435] CDRL1 is SEQ ID NO:143,
[0436] CDRL2 is SEQ ID NO:161, and
[0437] CDRL3 is SEQ ID NO:179.

[0438] In some embodiments, the antibody comprises a light chain variable region (VL) that comprises a light chain complementarity determining region (CDRL)1, CDRL2, and CDRL3 and a heavy chain variable region (VH) that comprises a heavy chain complementarity determining region (CDRH)1, CDRH2, and CDRH3, wherein: CDRH1 is SEQ ID NO:90,
[0439] CDRH2 is SEQ ID NO:108,
[0440] CDRH3 is SEQ ID NO:126,
[0441] CDRL1 is SEQ ID NO:144,
[0442] CDRL2 is SEQ ID NO:162, and
[0443] CDRL3 is SEQ ID NO:180.

[0444] In some embodiments, the antibody or antigen binding fragment thereof comprises a light chain variable region (VL) and/or a heavy chain variable region (VH), wherein:
[0445] VH is SEQ ID NO: 37, and
[0446] VL is SEQ ID NO: 55.

[0447] In some embodiments, the antibody or antigen binding fragment thereof comprises a light chain variable region (VL) and/or a heavy chain variable region (VH), wherein:
[0448] VH is SEQ ID NO: 38, and
[0449] VL is SEQ ID NO: 56.

[0450] In some embodiments, the antibody or antigen binding fragment thereof comprises a light chain variable region (VL) and/or a heavy chain variable region (VH), wherein:
[0451] VH is SEQ ID NO: 39, and
[0452] VL is SEQ ID NO: 57.

[0453] In some embodiments, the antibody or antigen binding fragment thereof comprises a light chain variable region (VL) and/or a heavy chain variable region (VH), wherein:
[0454] VH is SEQ ID NO: 40, and
[0455] VL is SEQ ID NO: 58.

[0456] In some embodiments, the antibody or antigen binding fragment thereof comprises a light chain variable region (VL) and/or a heavy chain variable region (VH), wherein:
[0457] VH is SEQ ID NO: 41, and
[0458] VL is SEQ ID NO: 59.

[0459] In some embodiments, the antibody or antigen binding fragment thereof comprises a light chain variable region (VL) and/or a heavy chain variable region (VH), wherein:
[0460] VH is SEQ ID NO: 42, and
[0461] VL is SEQ ID NO: 60.

[0462] In some embodiments, the antibody or antigen binding fragment thereof comprises a light chain variable region (VL) and/or a heavy chain variable region (VH), wherein:
[0463] VH is SEQ ID NO: 43, and
[0464] VL is SEQ ID NO: 61.

[0465] In some embodiments, the antibody or antigen binding fragment thereof comprises a light chain variable region (VL) and/or a heavy chain variable region (VH), wherein:
[0466] VH is SEQ ID NO: 44, and
[0467] VL is SEQ ID NO: 62.

[0468] In some embodiments, the antibody or antigen binding fragment thereof comprises a light chain variable region (VL) and/or a heavy chain variable region (VH), wherein:
[0469] VH is SEQ ID NO: 45, and
[0470] VL is SEQ ID NO: 63.

[0471] In some embodiments, the antibody or antigen binding fragment thereof comprises a light chain variable region (VL) and/or a heavy chain variable region (VH), wherein:
[0472] VH is SEQ ID NO: 46, and
[0473] VL is SEQ ID NO: 64.

[0474] In some embodiments, the antibody or antigen binding fragment thereof comprises a light chain variable region (VL) and/or a heavy chain variable region (VH), wherein:
[0475] VH is SEQ ID NO: 47, and
[0476] VL is SEQ ID NO: 65.

[0477] In some embodiments, the antibody or antigen binding fragment thereof comprises a light chain variable region (VL) and/or a heavy chain variable region (VH), wherein:
[0478] VH is SEQ ID NO: 48, and
[0479] VL is SEQ ID NO: 66.

[0480] In some embodiments, the antibody or antigen binding fragment thereof comprises a light chain variable region (VL) and/or a heavy chain variable region (VH), wherein:
[0481] VH is SEQ ID NO: 49, and
[0482] VL is SEQ ID NO: 67.

[0483] In some embodiments, the antibody or antigen binding fragment thereof comprises a light chain variable region (VL) and/or a heavy chain variable region (VH), wherein:
[0484] VH is SEQ ID NO: 50, and
[0485] VL is SEQ ID NO: 68.

[0486] In some embodiments, the antibody or antigen binding fragment thereof comprises a light chain variable region (VL) and/or a heavy chain variable region (VH), wherein:
[0487] VH is SEQ ID NO: 51, and
[0488] VL is SEQ ID NO: 69.

[0489] In some embodiments, the antibody or antigen binding fragment thereof comprises a light chain variable region (VL) and/or a heavy chain variable region (VH), wherein:
[0490] VH is SEQ ID NO: 52, and
[0491] VL is SEQ ID NO: 70.

[0492] In some embodiments, the antibody or antigen binding fragment thereof comprises a light chain variable region (VL) and/or a heavy chain variable region (VH), wherein:
[0493] VH is SEQ ID NO: 53, and
[0494] VL is SEQ ID NO: 71.

[0495] In some embodiments, the antibody or antigen binding fragment thereof comprises a light chain variable region (VL) and/or a heavy chain variable region (VH), wherein:
[0496] VH is SEQ ID NO: 54, and
[0497] VL is SEQ ID NO: 72.

[0498] In some embodiments, the recombinant antibody or antigen binding fragment thereof of any preceding aspect comprises a VH comprising an amino acid sequence selected from SEQ ID NOs: 5437-8064.

[0499] In some embodiments, the recombinant antibody or antigen binding fragment thereof of any preceding aspect comprises a VL comprising an amino acid sequence selected from SEQ ID NOs: 8065-10692.

[0500] In some embodiments, the recombinant antibody or antigen binding fragment thereof of any preceding aspect comprises a CDRH1 comprising an amino acid sequence selected from SEQ ID NOs: 10693-13311.

[0501] In some embodiments, the recombinant antibody or antigen binding fragment thereof of any preceding aspect comprises a CDRH2 comprising an amino acid sequence selected from SEQ ID NOs: 13312-15934.

[0502] In some embodiments, the recombinant antibody or antigen binding fragment thereof of any preceding aspect comprises a CDRH3 comprising an amino acid sequence selected from SEQ ID NOs: 15935-18562.

[0503] In some embodiments, the recombinant antibody or antigen binding fragment thereof of any preceding aspect comprises a CDRL1 comprising an amino acid sequence selected from SEQ ID NOs: 18563-21190.

[0504] In some embodiments, the recombinant antibody or antigen binding fragment thereof of any preceding aspect comprises a CDRL2 comprising an amino acid sequence selected from SEQ ID NOs: 21191-23818.

[0505] In some embodiments, the recombinant antibody or antigen binding fragment thereof of any preceding aspect comprises a CDRL3 comprising an amino acid sequence selected from SEQ ID NOs: 23819-26446.

[0506] In some embodiments, the recombinant antibody binds to at least one coronavirus antigen. In some embodiments, the recombinant antibody binds to at least one SARS-CoV-2 antigen.

[0507] In some embodiments, the target protein comprises a viral protein. In some embodiments, the viral protein is a coronavirus protein. Coronaviruses constitute the subfamily Orthocoronavirinae, in the family Coronaviridae, order Nidovirales, and realm Riboviria. They are enveloped viruses with a positive-sense single-stranded RNA genome and a nucleocapsid of helical symmetry. The genome size of coronaviruses ranges from approximately 27 to 34 kilobases. The structure of coronavirus generally consists of the following: spike protein, hemagglutinin-esterease dimer (HE), a membrane glycoprotein (M), an envelope protein (E) a nucleoclapid protein (N) and RNA. The coronavirus family comprises genera including, for example, alphacoronavius (e.g., Human coronavirus 229E, Human coronavirus NL63, Miniopterus bat coronavirus 1, Miniopterus bat coronavirus HKU8, Porcine epidemic diarrhea virus, Rhinolophus bat coronavirus HKU2, Scotophilus bat coronavirus 512), betacoronavirus (e.g., SARS-CoV-2, Betacoronavirus 1, Human coronavirus HKU1, Murine coronavirus, Pipistrellus bat coronavirus HKU5, Rousettus bat coronavirus HKU9, Severe acute respiratory syndrome-related coronavirus, Tylonycteris bat coronavirus HKU4, Middle East respiratory syndrome-related coronavirus (MERS), Human coronavirus OC43, Hedgehog coronavirus 1 (EriCoV)), gammacoronavirus (e.g., Beluga whale coronavirus SW1, Infectious bronchitis virus), and deltacoronavirus (e.g., Bulbul coronavirus HKU11, Porcine coronavirus HKU15). In some embodiments, the viral protein is a protein of Severe acute respiratory syndrome-related coronavirus. In some embodiments, the viral protein is a protein of MERS coronavirus.

[0508] In some embodiments, the viral protein is a SARS-CoV-2 protein, including, for example, SARS-CoV-2 spike protein, SARS-CoV-2 envelope protein, SARS-CoV-2 membrane protein, or SARS-CoV-2 nucleocapsid protein, or a fragment thereof. In some embodiments, the viral protein is a receptor binding domain of a SARS-CoV-2 spike protein.

[0509] In some aspects, disclosed herein is a method of producing a recombinant antibody comprising cultivating or maintaining the host cell of any preceding aspect under conditions to produce said recombinant antibody.

[0510] In some aspects, disclosed herein is a method of treating, preventing, reducing, and/or inhibiting coronavirus infection comprising administering to a subject a therapeutically effective amount of the recombinant antibody of any preceding aspect.

[0511] The antibody repertoire characterization done herein is also readily generalizable to other pathogens, and as such, have a broad and lasting impact on the development of countermeasures for established and emerging infectious diseases.

[0512] Methods for determining antibody sequences and antigen-antibody specificities are known in the art. See, e.g., International Publication Number: WO 2020/033164, incorporated by reference.

[0513] In some aspects, disclosed herein is a method for detecting a coronavirus infection in a subject, comprising: providing a biological sample from the subject, and detecting a coronavirus antigen in the biological sample with an antibody that specifically binds to the coronavirus antigen, wherein the antibody is from any aspect as disclosed herein, and wherein the presence of the coronavirus antigen in the biological sample indicates the subject is infected with a coronavirus.

[0514] The biological sample can be from, for example, a throat swab, a nasal swab, a nasopharyngeal swab, an oropharyngeal swab, cells, blood, serum, plasma, saliva, urine, stool, sputum, or nasopharyngeal aspirates.

[0515] In some embodiments, the coronavirus infection is caused by SARS-CoV-2. In some embodiments, the method comprises contacting the biological sample with a SARS-CoV-2 antigen. In some embodiments, the SARS-CoV-2 antigen is directly immobilized on a substrate and is detected by an antibody disclosed herein directly or indirectly by a labeled heterologous anti-isotype antibody, wherein the bound antibody can be detected by a detection assay. The SARS-CoV-2 antigen can be selected from the spike (S), envelope (E), membrane (M), and nucleocapsid (N) proteins, or a fragment thereof.

[0516] The term “labeled”, with regard to the probe or antibody, is intended to encompass direct labeling of the probe or antibody by coupling (i.e., physically linking) a detectable substance to the probe or antibody, as well as indirect labeling of the probe or antibody by reactivity with another reagent that is directly labeled. Examples of indirect labeling include detection of a primary antibody using a secondary antibody that is labeled a fluorescent probe or with biotin for detection. In vitro techniques for detection of the antibodies of SARS-CoV-2 include enzyme linked immunosorbent assays (ELISAs), Western blots, immunoprecipitations and immunofluorescence, IgM antibody capture enzyme immunoassay (MAC-ELISA), indirect IgG ELISA, indirect fluorescent antibody assay (IFAT), hemagglutination inhibition (HIT), and serum dilution cross-species plaque reduction neutralization tests (PRNTs).

[0517] In some embodiments, in vitro techniques for detection of an antigen of SARS-CoV-2 include enzyme linked immunosorbent assays (ELISAs), Western blots, immunoprecipitations and immunofluorescence. Furthermore, in vivo techniques for detection of SARS-CoV-2 include introducing into a subject a labeled antibody directed against the polypeptide. For example, the antibody can be labeled with a radioactive marker whose presence and location can be detected by standard imaging techniques, including autoradiography.

[0518] In some embodiments, the levels of the antibodies are determined by immunoassay comprising Enzyme linked immunospot (ELISPOT), Enzyme-linked immunosorbent assay (ELISA), western blot, or a multiplex ELISA assay. In some embodiments, the multiplex ELISA assay is selected from the group consisting of Luminex, Veriplex, LEGENDplex, Bio-Plex, Milliplex MAP, and FirePlex.

[0519] The steps of various useful immunodetection methods have been described in the scientific literature, such as, e.g., Maggio et al., Enzyme-Immunoassay, (1987) and Nakamura, et al., Enzyme Immunoassays: Heterogeneous and Homogeneous Systems, Handbook of Experimental Immunology, Vol. 1: Immunochemistry, 27.1-27.20 (1986), each of which is incorporated herein by reference in its entirety and specifically for its teaching regarding immunodetection methods. Immunoassays, in their most simple and direct sense, are binding assays involving binding between antibodies and antigen. Many types and formats of immunoassays are known and all are suitable for detecting the disclosed biomarkers. Examples of immunoassays are enzyme linked immunosorbent assays (ELISAs), radioimmunoassays (RIA), radioimmune precipitation assays (RIPA), immunobead capture assays, Western blotting, dot blotting, gel-shift assays, Flow cytometry, protein arrays, multiplexed bead arrays, magnetic capture, in vivo imaging, fluorescence resonance energy transfer (FRET), and fluorescence recovery/localization after photobleaching (FRAP/FLAP).

[0520] The invention also encompasses kits for detecting the presence of SARS-CoV-2 or a polypeptide/antigen thereof in a biological sample. For antibody-based kits, the kit can comprise, for example: (1) a first antibody (e.g., attached to a solid support) which binds to a coronavirus antigen; and, optionally, (2) a second, different antibody which binds to either the coronavirus antigen or the first antibody and is conjugated to a detectable agent.

### EXAMPLES

[0521] The following examples are set forth below to illustrate the antibodies, methods, and results according to the disclosed subject matter. These examples are not intended to be inclusive of all aspects of the subject matter disclosed herein, but rather to illustrate representative methods and results. These examples are not intended to exclude equivalents and variations of the present invention which are apparent to one skilled in the art.

### Example 1. Antibodies for SARS-CoV-2

[0522] The Coronavirus (CoV) genus consists of positive sense RNA, zoonotic pathogens. The CoV genome is largely comprised of RNA-synthesis proteins, but approximately a third of the genetic payload encodes four structural proteins including the spike (S), envelope (E), membrane (M), and nucleocapsid (N). The S protein is the immunodominant region of the CoV recognized by the immune system and serves as the target for a number of neutralizing antibodies. Passive transfer of neutralizing antibodies can prevent coronavirus infection in animal models. Further, engineered prefusion-stabilized S protein immunogens have been shown to elicit high titers of coronavirus-neutralizing antibodies in animal models, in the context of MERS. More generally, a better understanding of the human antibody response to the S protein of SARS-CoV-2 as well as other related CoV members can help inform therapeutic antibody optimization and accelerate vaccine design efforts.

[0523] The LIBRA-seq technology (LInking B-cell Receptor to Antigen specificity through sequencing) is used for antibody discovery and characterization of antigen-specific antibody repertoires. Unlike other B cell approaches, LIBRA-seq is the first to enable the simultaneous determination of BCR sequence and antigen specificity for a large number of B cells against a theoretically unlimited number of diverse antigens, at the single-cell level. LIBRA-seq therefore provides a unique opportunity for characterizing the types and specificities of antibodies that can recognize the S protein from SARS-CoV-2, as well as other CoV viruses.

[0524] Here, the LIBRA-seq technology is used for identifying SARS-CoV-2-specific antibodies. Disclosed herein are cross-reactive antibodies that recognize multiple antigen variants associated with human coronavirus infection, including SARS-CoV-2, SARS-CoV-1, and MERS-CoV. The identification of cross-reactive coronavirus antibodies provides therapeutic and preventive measures against these highly pathogenic and lethal coronaviruses. Antibodies that cross-react with multiple known viruses target broadly conserved CoV S epitopes, and therefore become a first line of defense against new outbreaks with previously unencountered CoV viruses.

[0525] The types of antibody repertoire characterization done herein is also readily generalizable to other pathogens, and as such, have a broad and lasting impact on the development of countermeasures for established and emerging infectious diseases.

### Example 2. Broadly Neutralizing Antibodies for Coronavirus

[0526] Little is known about the ability of human antibodies to recognize multiple diverse CoV viruses, especially in the context of the newly identified SARS-CoV-2. The present disclosure identifies and characterizes such antibodies, providing novel insights into the frequencies, sequence characteristics, and epitope specificities of CoV cross-reactive antibodies. Further, given that such antibodies can be potent and broadly neutralizing, they are of exceptional value for the development of effective pan-CoV antibody-based therapeutics that can target novel CoV viruses that emerge in the future. Additionally, identifying antibodies that exhibit mono-specificity for SARS-CoV-2 are be of high significance for the development of immediate countermeasures.

[0527] The LIBRA-seq antigen screening library includes lead vaccine candidates for SARS-CoV-2 and other CoV. The protein version of the SARS-CoV-2 prefusion S vaccine that is now in clinical trials (ClinicalTrials.gov id: NCT04283461) is included herein.

### Example 3. Methods

[0528] The example shown here combines both experimental and computational efforts. In particular, a variety of techniques are utilized, bringing together microfluidics, next-generation sequencing, and protein science technologies, combined with computational analysis of the experimentally generated datasets.

[0529] Summary of experimental framework. The LIBRA-seq technology is based on the following framework (FIG. 1). Each of a set of target antigens is “barcoded” with a unique DNA sequence that is sufficiently different from any other barcode (thus allowing for robust barcode identification even with sequencing read errors). A given sample of B cells is then mixed with the set of antigens, such that if a B cell recognizes a specific antigen, that antigen is able to bind to the BCRs of that B cell. The cell-antigen mixture is FACS-sorted and run through a microfluidics system (such as the 10× Chromium system) for single-cell processing and high-throughput NGS (such as through an Illumina MiSeq or NovaSeq). The barcode for any antigen bound to a given single B cell is sequenced, thus simultaneously delineating the BCR sequences and the antigen specificity of the cell. Finally, the sequencing data is analyzed to identify B cell-antigen complexes by searching for B cells for which both BCR sequence and antigen barcode data are available.

[0530] Antigen production. Recombinant soluble antigens are expressed in 293F cells using polyethylenimine (PEI) transfection reagent. Protein antigens are purified over StrepTactin resin (IBA). Concentrated protein is run on a Superdex 200 Increase 10/300 GL or Superose 6 Increase 10/300 GL sizing column on an AKTA FPLC system. AviTagged antigens are biotinylated using BirA biotin ligase and conjugated to streptavidin-APC or streptavidin-PE for use in flow cytometry. Non-AviTagged proteins are biotinylated non-specifically which targets secondary amines on the protein's N terminus as well as solvent exposed lysine residues. For flow cytometry, cells were stained with the biotinylated, oligo labeled antigens. Then, after washing, cells were stained with streptavidin-PE, so antigen-reactive cells could be identified during FACS sorting. Unique oligonucleotide barcodes are directly conjugated to each antigen using the Solulink Protein-Oligonucleotide Conjugation Kit (TriLink cat no. S-9011) according to manufacturer's instructions. Antigen concentrations are estimated by BCA assay. Barcoded antigens are analyzed by SDS-PAGE, and antigenicity by ELISA is characterized with known mAbs specific for that antigen.

[0531] Antigen-specific B-cell sorting. PBMCs from the donors are stained with a panel of cell markers, and with fluorescent antigen to identify antigen-specific B cells, e.g., live CD3⁻ CD14⁻ CD19⁺ IgG⁺ and antigen⁺.

[0532] LIBRA-seq experiments. Cells are bulk sorted for loading onto the Chromium microfluidics device (10× Genomics) and processed using the B-cell VDJ solution according to manufacturer's suggestions for a target capture of 10,000 B cells per ⅛ 10× cassette. NGS is performed using NovaSeq 6000. Output fastq files are processed using Cell Ranger (10× Genomics) to assemble quantify, and annotate paired V(D)J transcript sequences and antigen barcode counts on a cell-by-cell basis using 10× Chromium cellular barcodes. The number of antigen barcodes for each cell is counted and then transformed and scaled. The final output is a matrix containing information on a cell-by-cell basis, including normalized UMI counts (referred to as LIBRA-seq scores), heavy and light chain sequences, and annotated sequence features including V gene, J gene, CDR3 sequence, identity to germline, isotype, and others.

### Example 4. Results

[0533] It has been established that LIBRA-seq can successfully identify broadly neutralizing antibodies (bNAbs) in the context of HIV-1. In particular, LIBRA-seq was used to analyze the antibody repertoires of two HIV-infected donors, N90 and NIAID 45, from whom HIV-1 bNAbs had been previously identified. In both cases, novel members were identified from the known bNAb lineages. Importantly, LIBRA-seq also successfully identified novel lineages of antigen-specific antibodies from both donors, with high concordance between LIBRA-seq scores and ELISA binding for tested antibodies (FIGS. 2A-2B). Further, the HIV-specific antibody 3602-870, a member of a new lineage in donor N90 utilizing different germline genes compared to VRC38, was able to neutralize more viruses and with greater potency compared to the broadest member of the VRC38 lineage (FIG. 2C).

[0534] Further disclosed herein are data showing the application of the technology in the setting of another virus, hepatitis C. In particular, LIBRA-seq is applied to characterize the antibody repertoire in a sample co-infected with HIV-1 and hepatitis C. A number of antibodies were identified that showed reactivity against hepatitis C antigens that were part of the LIBRA-seq screening library. The HCV neutralization ability of these antibodies were tested (FIG. 3). Notably, mAb 180 exhibited exceptional neutralization breadth that was superior to the best known HCV broadly neutralizing antibodies.

[0535] Taken together, these data indicate that LIBRA-seq is successfully applied to the characterization of antibody repertoires in the context of diverse pathogens (for example, SARS-CoV-2).

### Example 5. Cross-Reactive Antibodies that Recognize Multiple Antigen Variants Associated with Human Coronavirus Infection, Including SARS-CoV-2, SARS-CoV-1, and MERS-CoV

[0536] An antigen screening library that includes antigens from multiple diverse CoV viruses is used for screening for B cells that exhibit CoV cross-reactivity.

[0537] Study samples. A sample (20M PBMCs) from an individual who had prior SARS-CoV-1 infection. The subject had been infected during the SARS-CoV-1 outbreak in 2004, whereas the sample was collected ˜14 years post infection. Recent work has indicated that there are indeed antibodies that can cross-react between SARS-CoV-1 and 2. Therefore, this sample represents an appropriate target for LIBRA-seq screening for cross-reactive antibodies using diverse CoV antigens.

[0538] Antigen screening library. The library includes S protein antigens associated with common CoV (HKU1 and OC43), as well as SARS-CoV-2, SARS-CoV-1, and MERS. All of these antigens are in their prefusion-stabilized conformation that represent neutralization-sensitive epitopes better than other forms of this antigen. In addition, two HIV-1 antigens are used as a negative control.

[0539] Monoclonal antibody selection and validation. Select monoclonal antibodies corresponding to the BCRs from LIBRA-seq-identified antigen-specific B cells are synthesized, produced, and characterized for binding to the target antigens. Antibody selection criteria. Antibodies are selected for validation using several criteria, including: (a) high level of overall CoV cross-reactivity (i.e., antibodies that are reactive with multiple antigens from the screening library); (b) high LIBRA-seq scores for individual antigens (e.g., a high score for SARS-CoV-2 prefusion S); (c) BCR sequence characteristics (e.g., high level of somatic hypermutation, long CDRH3, etc.); (d) size of B cell clonotype (i.e., a large number of unique B cells that belong to the respective B cell lineage); (e) source donor (i.e., antibody selection to multiple donors is distributed). These criteria allow for selecting antibodies that have target antigen specificity profiles. Antibody production and characterization. Antibody heavy and light chains are synthesized by Twist Bioscience. A two-tier system is utilized for antibody production and validation. As a first step, the Crowe laboratory performs high-throughput antibody expression, purification, and ELISA binding against the same antigens as used in the LIBRA-seq screening library. For high-throughput production of recombinant antibodies, designated as “microscale”, antibody expression plasmids are transiently transfected into ˜1 mL Chinese hamster ovary (CHO) cell cultures per antibody in deep 96-well blocks. After 7-10 days, individual cultures are pelleted by centrifugation of the deep-well plate, and supernatants individually harvested using 96-channel automated pipetting. High-throughput micro-scale antibody purification of clarified supernatants is carried out using deep well plates containing protein G resin (GE Healthcare Life Sciences). A total of up to 100 antibodies are tested in the high-throughput step. Up to 20 antibodies that show an antigenicity profile from the high-throughput expression step are selected for large-scale expression. 293T cells are co-transfected with plasmids expressing Ig heavy and light chain genes. Recombinant mAbs are purified with protein-A agarose columns. The antibodies are tested in a number of assays: (i) Antigen binding is confirmed through ELISA, as well as surface plasmon resonance and biolayer interferometry by the McLellan group; (ii) Antibody epitopes are mapped using standard techniques, such as antigen epitope-knockouts and antibody binding competition; (iii) Antibody-virus neutralization is also tested; (iv) For antibodies, high-resolution cryo-EM structures are obtained by the McLellan group, who is a leader in the field of CoV structural biology and recently published the first ever cryo-EM structure of SARS-CoV-2 prefusion S.

[0540] Data. LIBRA-seq was applied to a sample from an individual who had prior SARS-CoV-1 infection using an antigen screening library that included antigens from diverse CoV, including prefusion-stabilized S from SARS-CoV-2, SARS-CoV-1, and MERS-CoV. LIBRA-seq discovered >2,500 B cells with antigen specificity for at least one CoV antigen from the screening library. FIG. 4 shows examples of a number of cross-reactive IgG⁺ B cells that had high LIBRA-seq scores for SARS-CoV-2 in addition to SARS-CoV-1, MERS, or both.

[0541] The present disclosure identifies cross-reactive and mono-reactive coronavirus antibodies. (i) Given that there are conserved regions on the CoV S protein, and reports of CoV antibody cross-reactivity between certain viruses, such cross-reactive antibodies are identified. The availability of the newly developed LIBRA-seq technology provides unique advantage compared to previous technologies, providing an unprecedented understanding of cross-reactive antibody characteristics, including sequence, functional, and epitope properties.

### Example 6. Ability of Current Lead CoV Vaccine Candidates to Engage with Antibody Repertoires from Healthy Individuals

[0542] SARS-CoV-2 vaccine candidate based on a stabilized prefusion S immunogen is already in clinical trials (ClinicalTrials.gov id: NCT04283461). Similar constructs for SARS-CoV-1 and MERS are also viable targets for clinical development. Ultimately, a vaccine that broadly protects against multiple highly pathogenic CoV can prove of significant value both against known and potential future CoV pathogens. The traditional model of vaccine development involves clinical trials to test the safety, immunogenicity, and efficacy of a candidate vaccine, frequently being subjected to the risk of failing to meet objectives and not receiving approval, even after investment of immense resources. In contrast, platforms like the one disclosed here, that enable ex vivo evaluation of vaccine candidates, can help efficiently prioritize the selection of candidates for clinical studies, thereby saving substantial effort and resources, and optimizing the likelihood of selecting a vaccine candidate with a greater potential for success.

[0543] There are a multitude of factors that can impact the performance of a vaccine candidate. The study herein focuses on the ability of vaccine candidates to engage with the antibody repertoires of healthy individuals. Specifically, by screening the antibody repertoires of healthy individuals, the capacity of current SARS-CoV-2, MERS, and SARS-CoV-1 lead vaccine candidates to engage with naïve antibody repertoires is evaluated. In essence, these experiments address the question of whether B cells that can recognize a given vaccine candidate readily exist in healthy individuals, and what the sequence and phenotypic characteristics of these B cells are. The application of the LIBRA-seq technology to address this question enables an unparalleled, high-throughput, characterization of the antigen specificity and BCR sequence characteristics of B cells that are capable of recognizing the CoV vaccine candidates studied here, from healthy individuals. These assessments can determine how well a given vaccine candidate can be able to engage with the repertoires of healthy individuals upon vaccination.

[0544] LIBRA-seq data and analysis. The healthy-donor LIBRA-seq data generated above are utilized here. However, unlike the characterization above, where the focus is to identify potently neutralizing CoV-specific antibodies, this study defines the overall reactivity of healthy antibody repertoires against the SARS-CoV-2, SARS-CoV-1, and MERS prefusion S vaccine candidates. For a given vaccine candidate and each healthy donor sample, a number of variables are analyzed, including: (i) frequency of reactive B cells; (ii) frequency of virus-specific vs. cross-reactive B cells; (iii) BCR sequence profiles of the reactive B cells (e.g., V-gene usage frequency, distribution of somatic hypermutation levels, CDRH3 length distribution, clonality, etc.). For each vaccine candidate, the results are analyzed across all donor samples. These experiments determine whether the given vaccine candidate can readily engage with healthy antibody repertoires, and if so, what the common characteristics of the reactive B cells are.

[0545] Monoclonal antibody selection and validation. Select monoclonal antibodies are produced and tested recombinantly to develop a general understanding of the fraction of B cell repertoire in healthy individuals that can engage with lead vaccine candidates. The mAb production and characterization focus on SARS-CoV-2 and characterizing B cells reactive with the SARS-CoV-1 and MERS vaccine candidates. The antibody selection criteria targets B cells with diverse properties, including: (a) a diverse spread of SARS-CoV-2 LIBRAseq scores; (b) diverse profiles of BCR sequence characteristics (e.g., diverse levels of somatic hypermutation, different CDRH3 lengths, diverse isotypes, etc.); (c) representatives from multiple source donors; and others.

[0546] If SARS-CoV-2-specific B cells are observed infrequently, then the antibody characterization analysis is expanded with B cells that are reactive with the SARS-CoV-1 and MERS vaccine candidates, or further expanded to explore B cells that are reactive with the antigens from the common CoV that are included in the LIBRA-seq screening library. Given the commonality of these infections, a large number of antigen-specific B cells reactive with these common CoV antigens are identified, resulting in novel insights into antibody repertoire reactivity against these viruses.

### Example 7. Identification and Characterization of Coronavirus Cross-Reactive Antibodies Using LIBRA-Seq

[0547] The spike protein on the CoV virion engages with host cell receptors to mediate viral entry and is the main antigenic target of neutralizing antibodies. Here, the study shows the antibodies that can cross-react with spike proteins from multiple CoVs. To identify these antibodies, an assay called LIBRA-seq (Linking B cell receptor to antigen specificity through sequencing) was performed, which enables the recovery of paired heavy/light chain antibody sequences along with antigen reactivity information for thousands of single B cells simultaneously. LIBRA-seq was used to screen B cells from a SARS-CoV-1 convalescent donor using an antigen screening library composed of stabilized prefusion spike proteins from pandemic strains (SARS-CoV-2, SARS-CoV-1, MERS-CoV) and endemic strains (HKU1, OC43), resulting in paired antibody sequence-antigen specificity information for 2526 B cells. A number of antibodies that were cross-reactive against SARS-CoV-2, SARS-CoV-1, and MERS-CoV, and in some cases additionally against HKU1 and OC43, were identified and validated in ELISA binding assays. Antibodies are evaluated in various functional assays.

[0548] The data (FIGS. 5-17) show that application of the LIBRA-seq method to a SARS convalescent donor PBMC sample using an eight-antigen screening library led to the rapid identification of multiple, genetically distinct antibodies that are cross-reactive to spike trimers from three pandemic strains (SARS-CoV-2, SARS-CoV-1, MERS) and reactive to spike proteins from endemic strains (OC43, HKU1) in some cases.

[0549] These antibodies target a variety of epitopes on the spike glycoprotein and can mediate Fc effector functions. Elucidation of cross-reactive CoV epitopes informs rational vaccine design strategies, both for the current and potential future CoV pandemics.

### Example 8. Cross-Reactive Coronavirus Antibodies with Diverse Epitope Specificities and Extra-Neutralization Functions

[0550] The emergence of a novel coronavirus (CoV) SARS-CoV-2, the causative agent of COVID-19, has resulted in a worldwide pandemic, threatening the lives of billions and imposing an immense burden on healthcare systems and the global economy. SARS-CoV-2, the seventh coronavirus known to infect humans, is a member of the Betacoronavirus genus which includes the highly pathogenic SARS-CoV-1 and MERS-CoV, as well as endemic variants OC43-CoV and HKU1-CoV. Recent coronavirus outbreaks and the threat of future emerging zoonotic strains highlight the need for broadly applicable coronavirus therapeutic interventions and vaccine design.

[0551] Coronaviruses utilize the homotrimeric Spike (S) protein to engage with cell-surface receptors and gain entry into host cells. S consists of two functional subunits: S1 and S2. S1 facilitates attachment to target cells and is composed of the N-terminal domain (NTD) and the receptor-binding domain (RBD), whereas S2, which encodes the fusion peptide and heptad repeats, promotes viral fusion. To facilitate cell entry, human coronaviruses employ different host factors; however, SARS-CoV-1 and SARS-CoV-2 both utilize the cell-surface receptor, angiotensin converting enzyme 2 (ACE2). Additionally, SARS-CoV-2 S shares 76% amino acid identity with SARS-CoV-1 S. Furthermore, S serves as a dominant antibody target and is a focus of countermeasures for the treatment and prevention of COVID-19 infection. S proteins from the Betacoronavirus genus share multiple regions of structural homology and thus can serve as targets for a cross-reactive antibody response. Identifying cross-reactive antibody epitopes can inform rational design strategies for vaccines and therapies that target multiple highly pathogenic coronaviruses, which can be of value both for the current and potential future outbreaks.

[0552] Numerous potent neutralizing antibodies against SARS-CoV-2 have been discovered, including multiple candidates currently in clinical trials for prophylactic and acute treatment of COVID-19. Investigation of SARS-CoV-2/SARS-CoV-1 cross-reactive antibodies has focused primarily on the RBD epitope. This has resulted in the identification of a number of SARS-CoV-2/SARS-CoV-1 cross-reactive antibody candidates. However, for cross-reactive antibodies, the diversity of epitopes and functions other than virus neutralization have not been extensively explored. Evidence of Fc effector function eliciting protection in vivo against SARS-CoV-1 and SARS-CoV-2 indicates the role of antibodies beyond neutralization (“extra-neutralization” functions) can be a crucial component of protection and an important consideration in vaccine design strategies for coronaviruses. Defining the genetic features, epitope targets, and Fc effector functions of cross-reactive antibodies can provide insights into current therapeutic strategies and can provide alternative approaches for the prevention and treatment of coronavirus infection.

[0553] In this study, antibody cross-reactivity across the Betacoronavirus genus at monoclonal resolution was investigated. To do this, LIBRA-seq (Linking B Cell receptor to antigen specificity through sequencing) was applied, a recently developed high-throughput antibody screening technology that allows for determination of B cell receptor sequence and antigen reactivity simultaneously for many single B cells. From a convalescent SARS-CoV-1 donor sample, SARS-CoV-2/SARS-CoV-1 cross-reactive human antibodies were identified and characterized that target multiple, distinct structural domains of S, mediate Fc effector functions, and reduce pathological burden in vivo. A better understanding of the epitope specificities and functional characteristics of cross-reactive coronavirus antibodies can translate into strategies for current vaccine design efforts and additional measures to counteract potential future pandemic variants.

[0554] LIBRA-seq applied to a SARS-CoV-1 convalescent donor. To identify cross-reactive antibodies to multiple coronavirus antigens, LIBRA-seq was applied to a PBMC sample from a donor previously infected with SARS-CoV-1 twelve years prior to sample collection. The antigen screening library consisted of eight oligo-tagged recombinant soluble antigens: six coronavirus trimer antigens (SARS-CoV-2 S, SARS-CoV-1 S, MERS-CoV S, MERS-CoV S1 (with foldon domain), OC43-CoV S, HKU1-CoV S) and two HIV trimer antigens from strains ZM197 and CZA97 as negative controls (FIG. 14A). After the antigen screening library was mixed with donor PBMCs, antigen positive B cells were enriched by fluorescence activated cell sorting and processed for single-cell sequencing (FIG. 18A). After bioinformatic processing, 2625 cells with paired heavy/light chain sequences and antigen reactivity information were recovered (FIG. 18B). Overall, LIBRA-seq enabled rapid screening of PBMCs from a patient sample, with recovery of paired heavy/light chain sequences and antigen reactivity for thousands of single B cells.

[0555] Identification of SARS-CoV-2 and SARS-CoV-1 cross-reactive antibodies. To identify antibodies that were cross-reactive to multiple coronavirus S proteins, antibodies were prioritized based on their sequence features and LIBRA-seq scores. 15 antibodies that exhibited diverse sequence features were selected and a number of different variable genes were utilized for expression and characterization (FIG. 14B, FIG. 18C). These antibodies displayed a broad range of somatic hypermutation levels (83-98%) and a variety of CDRH3 and CDRL3 lengths (6-24 and 5-12 amino acids, respectively) (FIG. 18C). Antibodies 46472-1, 46472-2, 46472-3, 46472-4, 46472-6, and 46472-12 showed binding to SARS-CoV-1 S and SARS-CoV-2 S by ELISA (FIGS. 14C-14D, FIG. 18D). Further, antibodies 46472-6 and 46472-12 bound to S proteins from endemic OC43-CoV and HKU1-CoV, albeit generally at lower levels (FIGS. 14C-14D, FIG. 18D). Although the six monoclonal antibodies showed reactivity by ELISA to the MERS antigen probe used in the LIBRA-seq screening library, antibody binding to other independent preparations of this protein was inconsistent, so MERS S reactivity cannot be definitively confirmed (FIG. 18E). Overall, the application of the LIBRA-seq technology enabled the identification of a panel of cross-reactive coronavirus antibodies that recognize the S antigen from multiple coronaviruses.

[0556] Cross-reactive coronavirus antibodies target diverse epitopes on S. To elucidate the epitopes targeted by the cross-reactive antibodies, binding assays to various structural domains of S as well as binding-competition experiments were performed. First, antibody binding to the S1 and S2 subdomains of SARS-CoV-2 was assessed. Antibodies 46472-1, 46472-2, 46472-3, and 46472-4 bound to the S2 domain, whereas 46472-6 and 46472-12 recognized the S1 domain but targeted different epitopes, the NTD and RBD, respectively (FIGS. 15A-15C, FIGS. 19A-19B). Although 46472-12 bound to the RBD, it did not compete with ACE2 for binding to SARS-CoV-2 S (FIG. 19C). To determine whether the antibodies targeted overlapping or distinct epitopes, competition ELISA experiments were performed and it was found that the S2-directed antibodies 46472-1, 46472-2, and 46472-4 competed for binding to S (FIG. 19D). This pattern was observed for both SARS-CoV-2 and SARS-CoV-1 S. Of note, this competition group did not include S2-directed antibody 46472-3, revealing the identification of multiple cross-reactive epitope targets on S2 (FIG. 15D). Further, binding assays with glycan knockout mutants and mannose competition experiments revealed no notable glycan dependence for antibody reactivity to S (FIG. 15D-15E). Lastly, antibody autoreactivity was measured, and it was found that with the exception of 46472-6 binding to Jo-1, none of the antibodies showed autoreactivity against the tested antigens (FIG. 15E). Together, these data show that these cross-reactive antibodies are coronavirus-specific and target multiple, diverse epitopes on the S protein (FIG. 15F).

[0557] Functional Characterization of Cross-reactive Coronavirus Antibodies. Next, the cross-reactive antibody panel for functional activity was characterized. Although none of the antibodies neutralized live SARS-CoV-1 or SARS-CoV-2 (FIGS. 20A-20B), all six antibodies demonstrated a range of Fc effector functions. Notably, all antibodies showed antibody-dependent cellular phagocytosis (ADCP) in vitro for SARS-CoV-2 S (FIG. 16A). In particular, antibody 46472-12 that targets RBD showed greater ADCP activity compared to the other cross-reactive antibodies and the RBD antibody control, CR3022 (FIG. 16A, FIG. 20C). Further, ADCP activity against SARS-CoV-1 for two antibodies, 46472-4 and 46472-12, was tested and confirmed, illustrating that these antibodies can mediate antiviral function against multiple coronaviruses (FIG. 16B, FIG. 20D). In a coated SARS-CoV-2 S assay (see Methods), the cross-reactive antibodies also mediated trogocytosis, an Fc-mediated immune function defined by the removal of cell membrane proteins from S-coated and opsonized cells to effector cells, which results in rapid cell death and antigen transfer (FIG. 16C, FIG. 20E). Only the S2-targeting antibodies in the panel (46472-1, 46472-2, 46472-3, and 46472-4) mediated trogocytosis for cell-surface expressed SARS-CoV-2 S (FIG. 16D, FIG. 20F). Lastly, none of the antibodies promoted complement deposition (ADCD) (FIG. 16E, FIG. 20G). Together, these results revealed that although this cross-reactive antibody panel is non-neutralizing, the six antibodies are capable of mediating a spectrum of Fc effector functions.

[0558] Since non-neutralizing SARS-CoV-2 antibodies with Fc effector function activity have not been extensively characterized in vivo, antibodies 46472-4 and 46472-12 for prophylaxis in a murine infection model were tested using a mouse-adapted virus strain (SARS-CoV-2 MA)(FIG. 17A). Although there were no differences in survival and viral load between experimental and control groups, the hemorrhage scores (see Methods) for 46472-4 and 46472-12 were similar to positive control CR3022, and all three groups were significantly lower than the scores for isotype control 2D22 (p<0.01, ordinary one-way ANOVA with multiple comparisons), suggesting a reduction in pathological burden (FIG. 17B, FIGS. 21A-21B). To evaluate the in vivo effect of these antibodies in a more stringent challenge model in mice, the viral dose was increased from 1×10³ to 1×10⁴. In this experiment, mice that received antibody 46472-12 exhibited the best survival rate (4/5 at day 4), compared to all other treatment groups (including CR3022 as a positive control and DENV-2D22 as a negative control), although statistical significance was not achieved (FIG. 17C, FIG. 21C). There were no significant differences in viral load between groups; however, the surviving animals from the 46472-4 and 46472-12 groups showed statistically significant lower hemorrhagic pathology scores in harvested mouse lungs compared to the negative control treatment group (p<0.001, ordinary one-way ANOVA with multiple comparisons) (FIG. 17D, FIG. 21D). Notably, animals treated with the positive control, CR3022, had significantly higher hemorrhage scores than animals treated with 46472-4 and 46472-12 (p<0.001, ordinary one-way ANOVA with multiple comparisons) (FIG. 17D). Together, the in vivo experiments show these cross-reactive antibodies can contribute to counteracting coronavirus infection in prophylaxis.

[0559] Here, a set of cross-reactive Betacoronavirus antibodies isolated from a convalescent SARS-CoV-1 donor were described. The antibodies targeted diverse epitopes on S, including the S2 subdomain as well as the RBD and NTD on S1, and were shown to be functional in vitro. Additionally, two of these antibodies were tested and demonstrated activity in vivo. While the precise in vivo effects of these antibodies have not been elucidated, the Fc effector function profiles in the absence of neutralization points to a role for extra-neutralization activity to reduce pathological burden, as illustrated for other SARS-CoV-2 antibodies. Evidence of protection associated with Fc effector function in SARS-CoV-1, and other infectious diseases including influenza, Ebola, and HIV, motivates further investigation into its contribution for the treatment of COVID-19.

[0560] Given the ongoing SARS-CoV-2 pandemic and for future zoonotic coronavirus pathogens to emerge, coronavirus vaccine and therapeutic development is of paramount importance. Antibodies that can cross-react with multiple coronavirus variants are primary targets as broadly reactive therapies. Such antibodies can further reveal cross-reactive epitopes that can serve as templates for the development of broadly protective vaccines. Understanding the spectrum of cross-reactive epitopes targeted by human antibodies, as well as the functional role that such antibodies have in preventing and treating coronavirus infection, are therefore critical for medical countermeasure development. In particular, the identification of functional cross-reactive antibodies that target diverse epitopes on S can present a viable avenue for pan-coronavirus vaccine design strategies.

[0561] Methods.

[0562] Donor Information. The donor had prior SARS-CoV-1 infection during the SARS-CoV-1 outbreak in 2004, and the PBMC sample was collected ˜12 years post infection (20 million PBMCs).

[0563] Antigen Purification. A variety of recombinant soluble protein antigens were used in the LIBRA-seq experiment and other experimental assays. Plasmids encoding residues 1-1208 of the SARS-CoV-2 spike with a mutated S1/S2 cleavage site, proline substitutions at positions 986 and 987, and a C-terminal T4-fibritin trimerization motif, an 8× HisTag, and a TwinStrepTag (SARS-CoV-2 S-2P); residues 1-1190 of the SARS-CoV-1 spike with proline substitutions at positions 968 and 969, and a C-terminal T4-fibritin trimerization motif, an 8× HisTag, and a TwinStrepTag (SARS-CoV-1 S-2P); residues 1-1291 of the MERS-CoV spike with a mutated S1/S2 cleavage site, proline substitutions at positions 1060 and 1061, and a C-terminal T4-fibritin trimerization motif, an AviTag, an 8× HisTag, and a TwinStrepTag (MERS-CoV S-2P Avi); residues 1-751 of the MERS-CoV spike with a C-terminal 8× HisTag, and a TwinStrepTag (MERS-CoV 51); residues 1-1277 of the HCoV-HKU1 spike with a mutated S1/S2 cleavage site, proline substitutions at positions 1067 and 1068, and a C-terminal T4-fibritin trimerization motif, an 8×HisTag, and a TwinStrepTag (HCoV-HKU1 S-2P); residues 1-1278 of the HCoV-OC43 spike with proline substitutions at positions 1070 and 1071, and a C-terminal T4-fibritin trimerization motif, an 8× HisTag, and a TwinStrepTag (HCoV-OC43 S-2P); or residues 319-591 of SARS-CoV-2 S with a C-terminal monomeric human IgG Fc-tag and an 8× HisTag (SARS-CoV-2 RBD-SD1) were transiently transfected into FreeStyle293F cells (Thermo Fisher) using polyethylenimine. The coronavirus trimer spike antigens were in a prefusion-stabilized (S-2P) conformation that better represents neutralization-sensitive epitopes in comparison to their wild-type forms. Two hours post-transfection, cells were treated with kifunensine to ensure uniform glycosylation. Transfected supernatants were harvested after 6 days of expression. SARS-CoV-2 RBD-SD1 was purified using Protein A resin (Pierce), SARS-CoV-2 S-2P, SARS-CoV-1 S-2P, MERS-CoV S-2P Avi, MERS-CoV S1, HCoV-HKU1 S-2P and HCoV-OC43 S-2P were purified using StrepTactin resin (IBA). Affinity-purified SARS-CoV-2 RBD-SD1 was further purified over a Superdex75 column (GE Life Sciences). MERS-CoV S1 was purified over a Superdex200 Increase column (GE Life Sciences). SARS-CoV-2 S-2P, SARS-CoV-1 S-2P, MERS-CoV S-2P Avi, HCoV-HKU1 S-2P and HCoV-OC43 S-2P were purified over a Superose6 Increase column (GE Life Sciences).

[0564] For the HIV-1 gp140 SOSIP variant from strain ZM197 (clade C) and CZA97 (clade C), recombinant, soluble antigens contained an AviTag and were expressed in Expi293F cells using polyethylenimine (PEI) transfection reagent and cultured. FreeStyle F17 expression medium supplemented with pluronic acid and glutamine was used. The cells were cultured at 37° C. with 8% CO₂ saturation and shaking. After 5-7 days, cultures were centrifuged and supernatant was filtered and run over an affinity column of agarose bound Galanthus nivalis lectin. The column was washed with PBS and antigens were eluted with 30 mL of 1M methyl-a-D-mannopyranoside. Protein elutions were buffer exchanged into PBS, concentrated, and run on a Superdex 200 Increase 10/300 GL Sizing column on the AKTA FPLC system. Fractions corresponding to correctly folded protein were collected, analyzed by SDS-PAGE and antigenicity was characterized by ELISA using known monoclonal antibodies specific to each antigen. Avitagged antigens were biotinylated using BirA biotin ligase (Avidity LLC).

[0565] For binding studies, SARS-CoV-2 HexaPro S, SARS-CoV-1 S, SARS-CoV-2 RBD, SARS-CoV-1 RBD, and MERS-CoV RBD constructs were expressed in the transient expression system previously mentioned. S proteins were purified using StrepTrap HP columns and RBD constructs were purified over protein A resin, respectively. Each resulting protein was further purified to homogeneity by size-exclusion chromatography on a Superose 6 10/300 GL column.

[0566] SARS-CoV-2 S1, S1 D614G, S2, NTD truncated proteins were purchased from commercial vendor Sino Biological.

[0567] DNA-barcoding of Antigens. Oligos that possess 15 bp antigen barcode were used, a sequence capable of annealing to the template switch oligo that is part of the 10× bead-delivered oligos, and contain truncated TruSeq small RNA read 1 sequences in the following structure: 5′-CCTTGGCACCCGAGAATTCCA CCCATATAAGA*A*A-3′ (SEQ ID NO: 26455), where Ns represent the antigen barcode, and * represents phosphiorate bond modification that can increase oligonucleotide stability. The following antigen barcodes were used: GCTCCTTTACACGTA (SEQ ID NO: 26447) (SARS-CoV-2 S), TGACCTTCCTCTCCT (SEQ ID NO: 26448) (SARS-CoV-1 S), ACAATTTGTCTGCGA (SEQ ID NO: 26449) (MERS-CoV S), TCCTTTCCTGATAGG (SEQ ID NO: 26450) (MERS-CoV 51), CAGGTCCCTTATTTC (SEQ ID NO: 26451) (HKU1-CoV S), TAACTCAGGGCCTAT (SEQ ID NO: 26452) (OC43-CoV S), CAGCCCACTGCAATA (SEQ ID NO: 26453) (CZA97), and ATCGTCGAGAGCTAG (SEQ ID NO: 26454) (ZM197). Oligos were ordered from Sigma-Aldrich and IDT with a 5′ amino modification and HPLC purified.

[0568] For each antigen, a unique DNA barcode was directly conjugated to the antigen itself. In particular, 5′amino-oligonucleotides were conjugated directly to each antigen using the Solulink Protein-Oligonucleotide Conjugation Kit (TriLink cat no. S-9011) according to manufacturer's instructions. Briefly, the oligo and protein were desalted, and then the amino-oligo was modified with the 4FB crosslinker, and the biotinylated antigen protein was modified with S-HyNic. Then, the 4FB-oligo and the HyNic-antigen were mixed together. This causes a stable bond to form between the protein and the oligonucleotide. The concentration of the antigen-oligo conjugates was determined by a BCA assay, and the HyNic molar substitution ratio of the antigen-oligo conjugates was analyzed using the NanoDrop according to the Solulink protocol guidelines. AKTA FPLC was used to remove excess oligonucleotide from the protein-oligo conjugates, which were also verified using SDS-PAGE with a silver stain. Antigen-oligo conjugates were also used in flow cytometry titration experiments.

[0569] Antigen specific B cell sorting. Cells were stained and mixed with DNA-barcoded antigens and other antibodies, and then sorted using fluorescence activated cell sorting (FACS). First, cells were counted and viability was assessed using Trypan Blue. Then, cells were washed 3× with DPBS supplemented with 0.1% Bovine serum albumin (BSA). Cells were resuspended in DPBS-BSA and stained with cell markers including viability dye (Ghost Red 780), CD14-APCCy7, CD3-FITC, CD19-BV711, and IgG-PECy5. Additionally, antigen-oligo conjugates were added to the stain. After staining in the dark for 30 minutes at room temperature, cells were washed 3 times with PBS-BSA at 300 g for 5 minutes. Cells were then incubated for 15 minutes at room temperature with Streptavidin-PE to label cells with bound antigen. Cells were washed with DPBS-BSA, resuspended in DPBS, and sorted by FACS. Antigen positive cells were bulk sorted and delivered to the Vanderbilt Technologies for Advanced Genomics (VANTAGE) sequencing core at an appropriate target concentration for 10× Genomics library preparation and subsequent sequencing. FACS data were analyzed using FlowJo.

[0570] Sample preparation, library preparation, and sequencing. Single-cell suspensions were loaded onto the Chromium Controller microfluidics device (10× Genomics) and processed using the B-cell Single Cell V(D)J solution according to manufacturer's suggestions for a target capture of 10,000 B cells per ⅛ 10× cassette, with minor modifications in order to intercept, amplify and purify the antigen barcode libraries as previously described.

[0571] Sequence processing and bioinformatic analysis. The previously described pipeline was utilized and modified to use paired-end FASTQ files of oligo libraries as input, processes and annotates reads for cell barcode, UMI, and antigen barcode, and generates a cell barcode-antigen barcode UMI count matrix. BCR contigs were processed using Cell Ranger (10× Genomics) using GRCh38 as reference. Antigen barcode libraries were also processed using Cell Ranger (10×Genomics). The overlapping cell barcodes between the two libraries were used as the basis of the subsequent analysis. Cell barcodes that had only non-functional heavy chain sequences as well as cells with multiple functional heavy chain sequences and/or multiple functional light chain sequences were removed, reasoning that these can be multiplets. Additionally, the BCR contigs (filtered_contigs.fasta file output by Cell Ranger, 10× Genomics) was aligned to IMGT reference genes using HighV-Quest. The output of HighV-Quest was parsed using ChangeO, and merged with an antigen barcode UMI count matrix. Finally, it was determined the LIBRA-seq score for each antigen in the library for every cell.

[0572] Antibody Expression and Purification. For each antibody, variable genes were inserted into custom plasmids encoding the constant region for the IgG1 heavy chain as well as respective lambda and kappa light chains (pTwist CMV BetaGlobin WPRE Neo vector, Twist Bioscience). mAbs were expressed in Expi293F mammalian cells (ThermoFisher) by co-transfecting heavy chain and light chain expressing plasmids using PEI transfection reagent and cultured for 5-7 days. Cells were maintained in FreeStyle F17 expression medium supplemented at final concentrations of 0.1% Pluronic Acid F-68 and 20% 4 mM L-Glutamine. These cells were cultured at 37° C. with 8% CO₂ saturation and shaking. After transfection and 5-7 days of culture, cell cultures were centrifuged and supernatant was 0.45 μm filtered with Nalgene Rapid Flow Disposable Filter Units with PES membrane. Filtered supernatant was run over a column containing Protein A agarose resin equilibrated with PBS. The column was washed with PBS, and then antibodies were eluted with 100 mM Glycine HCl at 2.7 pH directly into a 1:10 volume of 1M Tris-HCl pH 8.0. Eluted antibodies were buffer exchanged into PBS 3 times using Amicon Ultra centrifugal filter units and concentrated. Antibodies were analyzed by SDS-PAGE. Additionally, antibodies 46472-1, 46472-2, 46472-3, 46472-4, 46472-6 and 46472-12 were assessed by size exclusion chromatography on a Superdex 200 Increase 10/300 GL Sizing column with the AKTA FPLC system.

[0573] ELISA. To assess antibody binding, soluble protein was plated at 2 μg/ml overnight at 4° C. The next day, plates were washed three times with PBS supplemented with 0.05% Tween-20 (PBS-T) and coated with 5% milk powder in PBS-T. Plates were incubated for one hour at room temperature and then washed three times with PBS-T. Primary antibodies were diluted in 1% milk in PBS-T, starting at 10 μg/ml with a serial 1:5 dilution and then added to the plate. The plates were incubated at room temperature for one hour and then washed three times in PBS-T. The secondary antibody, goat anti-human IgG conjugated to peroxidase, was added at 1:10,000 dilution in 1% milk in PBS-T to the plates, which were incubated for one hour at room temperature. Goat anti-mouse secondary was used for SARS-CoV-1 specific control antibody 240CD (BEI Resources). Plates were washed three times with PBS-T and then developed by adding TMB substrate to each well. The plates were incubated at room temperature for ten minutes, and then IN sulfuric acid was added to stop the reaction. Plates were read at 450 nm.

[0574] Data are represented as mean±SEM for one ELISA experiment. ELISAs were repeated 2 or more times. The area under the curve (AUC) was calculated using GraphPad Prism 8.0.0. For antibody 240CD, the following reagent was obtained through BEI Resources, NIAID, NIH: Monoclonal Anti-SARS-CoV S Protein (Similar to 240C), NR-616.

[0575] Competition ELISA. Competition ELISAs were performed as described above, with some modifications. After coating with antigen and blocking, 25 μl of non-biotinylated competitor antibody was added to each well at 10 μg/ml and incubated at 37° C. for 10 minutes. Then, without washing, 75 μl biotinylated antibody (final concentration of 1 μg/ml) was added and incubated at 37° C. for 1 hour. After washing three times with PBS-T, streptavidin-HRP was added at 1:10,000 dilution in 1% milk in PBS-T and incubated for 1 hour at room temperature. Plates were washed and substrate and sulfuric acid were added as described above. ELISAs were repeated at least 2 times. Data is shown as the % decrease in binding.

[0576] Autoreactivity. Monoclonal antibody reactivity to nine autoantigens (SSA/Ro, SS-B/La, Sm, ribonucleoprotein (RNP), Scl 70, Jo-1, dsDNA, centromere B, and histone) was measured using the AtheNA Multi-Lyte® ANA-II Plus test kit (Zeus scientific, Inc, #A21101). Antibodies were incubated with AtheNA beads for 30 min at concentrations of 50, 25, 12.5 and 6.25 μg/mL. Beads were washed, incubated with secondary and read on the Luminex platform as specified in the kit protocol. Data were analyzed using AtheNA software. Positive (+) specimens received a score >120, and negative (−) specimens received a score <100. Samples between 100-120 were considered indeterminate.

[0577] Mannose competition. Mannose competition ELISAs were performed as described above with minor modifications. After antigen coating and washing, nonspecific binding was blocked by incubation with 5% FBS diluted in PBS for 1 hour at RT. Primary antibodies were diluted in 5% FBS-PBST+/−1M D-(+)-Mannose starting at 10 μg/ml with a serial 1:5 dilution and then added to the plate for 1 hour at RT. After washing, antibody binding was detected with goat anti-human IgG conjugated to peroxidase and added at 1:10,000 dilution in 5% FBS in PBS-T to the plates. After 1 hour incubation, plates were washed and substrate and sulfuric acid were added as described above. Data shown is representative of three replicates.

[0578] Epitope Mapping Visualization. SARS-CoV-2 Spike (PDB-6VSB) was visualized using PyMOL software. Antibody epitopes were visualized on the SARS-CoV-2 spike using a structure of the pre-fusion stabilized SARS-CoV-2 S-2P construct modeled in the molecular graphics software PyMOL (The PyMOL Molecular Graphics System, Version 2.3.5 Schrödinger, LLC.)

[0579] Neutralization Assay 1 RTCA. To assess for neutralizing activity against SARS-CoV-2 strain 2019 n-CoV/USA_WA1/2020 (obtained from the Centers for Disease Control and Prevention, a gift from N. Thornburg), the high-throughput RTCA assay and xCelligence RTCA HT Analyzer (ACEA Biosciences) were used. After obtaining a background reading of a 384-well E-plate, 6,000 Vero-furin cells were seeded per well. Sensograms were visualized using RTCA HT software version 1.0.1 (ACEA Biosciences). One day later, equal volumes of virus were added to antibody samples and incubated for 1 h at 37° C. in 5% CO₂. mAbs were tested in triplicate with a single (1:20) dilution. Virus—mAb mixtures were then added to Vero-furin cells in 384-well E-plates. Controls were included that had Vero-furin cells with virus only (no mAb) and media only (no virus or mAb). E-plates were read every 8-12 h for 72 h to monitor virus neutralization. At 32 h after virus-mAb mixtures were added to the E-plates, cell index values of antibody samples were compared to those of virus only and media only to determine presence of neutralization.

[0580] Neutralization Assay 2 nano-luciferase reporter system. A full-length SARS-CoV-2 virus based on the Seattle Washington isolate was designed to express luciferase and GFP and was recovered via reverse genetics and described previously. The virus was titered in Vero E6 USAMRID cells to obtain a relative light units (RLU) signal of at least 10× the cell only control background. Vero E6 USAMRID cells were plated at 20,000 cells per well the day prior in clear bottom black walled 96-well plates (Corning 3904). Neutralizing antibody serum samples were tested at a starting dilution of 1:40 and were serially diluted 4-fold up to eight dilution spots. Antibody-virus complexes were incubated at 37C with 5% CO₂ for 1 hour. Following incubation, growth media was removed and virus-antibody dilution complexes were added to the cells in duplicate. Virus-only controls and cell-only controls were included in each neutralization assay plate. Following infection, plates were incubated at 37C with 5% CO₂ for 48 hours. After the 48 hour incubation, cells were lysed and luciferase activity was measured via Nano-Glo Luciferase Assay System (Promega) according to the manufacturer specifications. SARS-CoV-2 neutralization titers were defined as the sample dilution at which a 50% reduction in RLU was observed relative to the average of the virus control wells.

[0581] SPR. His-tagged SARS-CoV RBD-SD1 was immobilized to a NiNTA sensorchip to a level of ˜150 RUs using a Biacore X100. Serial dilutions of purified Fab 12 were evaluated for binding, ranging in concentration from 1 to 0.25 μM. The resulting data were fit to a 1:1 binding model using Biacore Evaluation Software.

[0582] Fc Effector Function Assays

[0583] Antibody-dependent Cellular Phagocytosis (ADCP). Antibody-dependent cellular phagocytosis (ADCP) was performed using biotinylated SARS-CoV-2 or SARS-CoV-1 S ConC coated fluorescent neutravidin beads. Briefly, beads were incubated for two hours with antibodies at a starting concentration of 50 μg/ml and titrated five fold. CR3022 was used as a positive control while Palivizumab was used as a negative control. Antibodies and beads were incubated with THP-1 cells overnight, fixed and interrogated on the FACSAria II. Phagocytosis score was calculated as the percentage of THP-1 cells that engulfed fluorescent beads multiplied by the geometric mean fluorescence intensity of the population in the FITC channel less the no antibody control.

[0584] Antibody-dependent Cellular Trogocytosis (ADCT). ADCT was performed as described in and modified from a previously described study. HEK293T-ACE2 expressing cells were pulsed with SARS-CoV-2 S protein (10 μg/ml) for 75 minutes or HEK293T cells transfected with a SARS-CoV-2 spike pcDNA vector were surface biotinylated with EZ-Link Sulfo-NHS-LC-Biotin as recommended by the manufacturer. Fifty-thousand cells per well were incubated with antibody for 30 minutes starting at 25 μg/ml and titrated 5 fold. CR3022 was used as a positive control with Palivizumab as a negative. Following a RPMI media wash, these were then incubated with carboxyfluorescein succinimidyl ester (CFSE) stained THP-1 cells (5×10⁴ cells per well) for 1 hour and washed with 15 mM EDTA/PBS followed by PBS. Cells were then stained for biotin using Streptavidin-PE and read on a FACSAria II. Trogocytosis score was determined as the proportion of CFSE positive THP-1 cells also positive for streptavidin-PE less the no antibody control.

[0585] Antibody-dependent Complement Deposition (ADCD). Antibody-dependent complement deposition was performed. Briefly biotinylated SARS-Cov-2 S protein was coated 1:1 onto fluorescent neutravidin beads for 2 hours at 37 degrees. These beads were incubated with 100 ug/ml of antibody for 1 hour and incubated with guinea pig complement diluted 1 in 50 with gelatin/veronal buffer for 15 minutes at 37 degrees. Beads were washed at 2000 g twice in PBS and stained with guinea pig C3b-FITC, fixed and interrogated on a FACSAria II. Complement deposition score was calculated as the percentage of C3b-FITC positive beads multiplied by the geometric mean fluorescent intensity of FITC in this population less the no antibody or heat inactivated controls

[0586] Antibody Prophylaxis—Murine Model of Infection. 12 month old BALB/c mice were treated with 200 ug of mAb administered by intraperitoneal injection 12 hours prior to virus inoculation. The next day, mice were administered 1×10⁴ PFU SARS-CoV-2 MA10. Weights were taken each day, and after four days one lung lobe was taken for pathological analysis and the other lobe was processed for qPCR and viral load determination.

[0587] For viral titer and hermorrhage score comparisons, an ordinary one-way ANOVA test with multiple comparisons was performed using Prism software, GraphPad Prism version 8.0.

[0588] ACE2 Binding Inhibition Assay. Wells of 384-well microtiter plates were coated with purified recombinant SARS-CoV-2 S-2P ectoprotein at 4° C. overnight. Plates were blocked with 2% non-fat dry milk and 2% normal goat serum in DPBS-T for 1 hr. Purified mAbs from microscale expression were diluted two-fold in blocking buffer starting from 10 μg/mL in triplicate, added to the wells (20 μL/well), and incubated at ambient temperature. Recombinant human ACE2 with a C-terminal FLAG tag protein was added to wells at 2 μg/mL in a 5 μL/well volume (final 0.4 μg/mL concentration of ACE2) without washing of antibody and then incubated for 40 min at ambient temperature. Plates were washed, and bound ACE2 was detected using HRP-conjugated anti-FLAG antibody and TMB substrate. ACE2 binding without antibody served as a control. The signal obtained for binding of the ACE2 in the presence of each dilution of tested antibody was expressed as a percentage of the ACE2 binding without antibody after subtracting the background signal.

[0589] Computational Identification of Cross-reactive Epitopes. Cross-reactive epitopes were identified based on sequence and structural homology. Reference sequences for each Coronavirus S used in the LIBRA-seq run were obtained either from NCBI for SARS-CoV-2 (YP_009724390.1) and MERS-CoV (YP_009047204.1) or from Uniprot for SARS-CoV-1 (P59594), HKU1-CoV (Q5MQD0), and OC43-CoV (P36334). A multiple sequence alignment of all 5 spikes was then obtained using MUSCLE and the amino acid similarity to SARS-CoV-2 at each residue position was calculated using the BLOSUM-62 scoring matrix. These scores were then used to color each residue position on the SARS-CoV-2 S structure (PDB ID: 6VSB) in PyMOL (Schrodinger, version 2.3.5) in order to visualize surface patches and linear epitopes with structural homology. These conserved regions were then visualized on the other human coronavirus spike structures by retrieving them from the Protein Databank (SARS-CoV-1: 5X5B, MERS-CoV: 5W9I, OC43-CoV: 6OHW, HKU1-CoV: 5I08) and aligning them to the SARS-CoV-2 S structure. Finally, residues at prominent positions of conserved surface patches were chosen to be mutated and tested for altered binding with antibodies.

[0590] Quantification and Statistical Analysis. ELISA error bars (standard error of the mean) were calculated using GraphPad Prism version 8.0.0. ANOVA analysis was performed on viral load titers and hemorrhage scores from animal experiments using GraphPad Prism version 8.0.0.

[0591] In the examples above, large numbers of antibody sequences were determined (see sequences provided below). The following paired heavy chain and light chain sequences are used herein for methods of treating, preventing, or detecting coronavirus infections.

TABLE 1
Paired heavy and light chains and the CDRs thereof

| | Cell Barcode | | | | | Cell Barcode | | | | |
|---|---|---|---|---|---|---|---|---|---|---|
| Antibody | and Heavy | V-D-J | | | | and Light | V-J | | | |
| Name | Chain (HC) | (HC) | CDRH1 | CDRH2 | CDRH3 | Chain (LC) | (LC) | CDRL1 | CDRL2 | CDRL3 |
| 46472-12 | AATCCAGGTGT | SEQ ID | SEQ ID | SEQ ID | SEQ ID | AATCCAGGTGTT | SEQ ID | SEQ ID | SEQ ID | SEQ ID |
| | TTGGT (SEQ ID | NO: | NO: | NO: | NO: | TGGT(SEQ ID | NO: | NO: | NO: | NO: |
| | NO: 1).HC | 37 | 73 | 91 | 109 | NO: 2).LC | 55 | 127 | 145 | 163 |
| 46472-8 | ACAGCCGCAG | SEQ ID | SEQ ID | SEQ ID | SEQ ID | ACAGCCGCAGT | SEQ ID | SEQ ID | SEQ ID | SEQ ID |
| | TGACAG(SEQ | NO: | NO: | NO: | NO: | GACAG(SEQ ID | NO: | NO: | NO: | NO: |
| | ID NO: 3).HC | 38 | 74 | 92 | 110 | NO: 4).LC | 56 | 128 | 146 | 164 |
| 46472-5 | ACGCCAGCATC | SEQ ID | SEQ ID | SEQ ID | SEQ ID | ACGCCAGCATC | SEQ ID | SEQ ID | SEQ ID | SEQ ID |
| | ACGAT(SEQ ID | NO: | NO: | NO: | NO: | ACGAT(SEQ ID | NO: | NO: | NO: | NO: |
| | NO: 5).HC | 39 | 75 | 93 | 111 | NO: 6).LC | 57 | 129 | 147 | 165 |
| 46472-13 | ACTGAGTCAA | SEQ ID | SEQ ID | SEQ ID | SEQ ID | ACTGAGTCAAG | SEQ ID | SEQ ID | SEQ ID | SEQ ID |
| | GTTGTC(SEQ | NO: | NO: | NO: | NO: | TTGTC(SEQ ID | NO: | NO: | NO: | NO: |
| | ID NO: 7).HC | 40 | 76 | 94 | 112 | NO: 8).LC | 58 | 130 | 148 | 166 |
| 46472-15 | AGTGGGACAC | SEQ ID | SEQ ID | SEQ ID | SEQ ID | AGTGGGACACG | SEQ ID | SEQ ID | SEQ ID | SEQ ID |
| | GTAAGG(SEQ | NO: | NO: | NO: | NO: | TAAGG(SEQ ID | NO: | NO: | NO: | NO: |
| | ID NO: 9).HC | 41 | 77 | 95 | 113 | NO: 10).LC | 59 | 131 | 149 | 167 |
| 46472-2 | CATTCGCAGTC | SEQ ID | SEQ ID | SEQ ID | SEQ ID | CATTCGCAGTCT | SEQ ID | SEQ ID | SEQ ID | SEQ ID |
| | TCGGC(SEQ ID | NO: | NO: | NO: | NO: | CGGC(SEQ ID | NO: | NO: | NO: | NO: |
| | NO: 11).HC | 42 | 78 | 96 | 114 | NO: 12).LC | 60 | 132 | 150 | 168 |
| 46472-14 | CGAGCACGTCT | SEQ ID | SEQ ID | SEQ ID | SEQ ID | CGAGCACGTCTT | SEQ ID | SEQ ID | SEQ ID | SEQ ID |
| | TCTCG(SEQ ID | NO: | NO: | NO: | NO: | CTCG(SEQ ID | NO: | NO: | NO: | NO: |
| | NO: 13).HC | 43 | 79 | 97 | 115 | NO: 14).LC | 61 | 133 | 151 | 169 |
| 46472-9 | CTGATCCCATT | SEQ ID | SEQ ID | SEQ ID | SEQ ID | CTGATCCCATTC | SEQ ID | SEQ ID | SEQ ID | SEQ ID |
| | CTCAT(SEQ ID | NO: | NO: | NO: | NO: | TCAT(SEQ ID | NO: | NO: | NO: | NO: |
| | NO: 15).HC | 44 | 80 | 98 | 116 | NO: 16).LC | 62 | 134 | 152 | 170 |
| 46472-3 | GACTACAAGG | SEQ ID | SEQ ID | SEQ ID | SEQ ID | GACTACAAGGG | SEQ ID | SEQ ID | SEQ ID | SEQ ID |
| | GCATGT(SEQ | NO: | NO: | NO: | NO: | CATGT(SEQ ID | NO: | NO: | NO: | NO: |
| | ID NO: 17).HC | 45 | 81 | 99 | 117 | NO: 18).LC | 63 | 135 | 153 | 171 |
| 46472-10 | GTACTTTGTGA | SEQ ID | SEQ ID | SEQ ID | SEQ ID | GTACTTTGTGAT | SEQ ID | SEQ ID | SEQ ID | SEQ ID |
| | TAAAC(SEQ ID | NO: | NO: | NO: | NO: | AAAC(SEQ ID | NO: | NO: | NO: | NO: |
| | NO: 19).HC | 46 | 82 | 100 | 118 | NO: 20).LC | 64 | 136 | 154 | 172 |
| 46472-11 | TAGGCATGTA | SEQ ID | SEQ ID | SEQ ID | SEQ ID | TAGGCATGTAA | SEQ ID | SEQ ID | SEQ ID | SEQ ID |
| | AACCTC(SEQ | NO: | NO: | NO: | NO: | ACCTC(SEQ ID | NO: | NO: | NO: | NO: |
| | ID NO: 21).HC | 47 | 83 | 101 | 119 | NO: 22).LC | 65 | 137 | 155 | 173 |
| 46472-6 | TCAACGACAG | SEQ ID | SEQ ID | SEQ ID | SEQ ID | TCAACGACAGA | SEQ ID | SEQ ID | SEQ ID | SEQ ID |
| | ACGTAG(SEQ | NO: | NO: | NO: | NO: | CGTAG(SEQ ID | NO: | NO: | NO: | NO: |
| | ID NO: 23).HC | 48 | 84 | 102 | 120 | NO: 24).LC | 66 | 138 | 156 | 174 |
| 46472-1 | TCAGATGGTTA | SEQ ID | SEQ ID | SEQ ID | SEQ ID | TCAGATGGTTAT | SEQ ID | SEQ ID | SEQ ID | SEQ ID |
| | TCGGT(SEQ ID | NO: | NO: | NO: | NO: | CGGT(SEQ ID | NO: | NO: | NO: | NO: |
| | NO: 25).HC | 49 | 85 | 103 | 121 | NO: 26).LC | 67 | 139 | 157 | 175 |
| 46472-7 | TCAGCAATCAT | SEQ ID | SEQ ID | SEQ ID | SEQ ID | TCAGCAATCATC | SEQ ID | SEQ ID | SEQ ID | SEQ ID |
| | CTGTT(SEQ ID | NO: | NO: | NO: | NO: | TGTT(SEQ ID | NO: | NO: | NO: | NO: |
| | NO: 27).HC | 50 | 86 | 104 | 122 | NO: 28).LC | 68 | 140 | 158 | 176 |
| 46472-4 | TTCTCCTTCTAC | SEQ ID | SEQ ID | SEQ ID | SEQ ID | TTCTCCTTCTACT | SEQ ID | SEQ ID | SEQ ID | SEQ ID |
| | TATC(SEQ ID | NO: | NO: | NO: | NO: | ATC(SEQ ID NO: | NO: | NO: | NO: | NO: |
| | NO: 29).HC | 51 | 87 | 105 | 123 | 30).LC | 69 | 141 | 159 | 177 |
| 46472- | TAGGCATGTA | SEQ ID | SEQ ID | SEQ ID | SEQ ID | TAGGCATGTAA | SEQ ID | SEQ ID | SEQ ID | SEQ ID |
| 11lns | AACCTC(SEQ | NO: | NO: | NO: | NO: | ACCTC(SEQ ID | NO: | NO: | NO: | NO: |
| | ID NO: 31)2.HC | 52 | 88 | 106 | 124 | NO: 32)2.LC | 70 | 142 | 160 | 178 |
| 46472-16 | ACGATACCAAT | SEQ ID | SEQ ID | SEQ ID | SEQ ID | ACGATACCAAT | SEQ ID | SEQ ID | SEQ ID | SEQ ID |
| | GCCAT(SEQ ID | NO: | NO: | NO: | NO: | GCCAT(SEQ ID | NO: | NO: | NO: | NO: |
| | NO: 33).HC | 53 | 89 | 107 | 125 | NO: 34).LC | 71 | 143 | 161 | 179 |
| 46472-17 | TGCCAAAAGC | SEQ ID | SEQ ID | SEQ ID | SEQ ID | TGCCAAAAGCG | SEQ ID | SEQ ID | SEQ ID | SEQ ID |
| | GGATCA(SEQ | NO: | NO: | NO: | NO: | GATCA(SEQ ID | NO: | NO: | NO: | NO: |
| | ID NO: 35).HC | 54 | 90 | 108 | 126 | NO: 36).LC | 72 | 144 | 162 | 180 |

TABLE 2
Additional paired heavy and light chains and the CDRs thereof

| SEQ ID NO | | | | | SEQ ID NO | | | | |
|---|---|---|---|---|---|---|---|---|---|
| of Cell | | | | | of Cell | | | | |
| Barcode | | | | | Barcode | | | | |
| and Heavy | | | | | and Light | | | | |
| Chain (HC) | VH | CDRH1 | CDRH2 | CDRH3 | Chain (LC) | VL | CDRL1 | CDRL2 | CDRL3 |
| designation | SEQ ID NO | SEQ ID NO | SEQ ID NO | SEQ ID NO | designation | SEQ ID NO | SEQ ID NO | SEQ ID NO | SEQ ID NO |
| 181 | 5437 | 10693 | 13312 | 15935 | 182 | 8065 | 18563 | 21191 | 23819 |
| 183 | 5438 | 10694 | 13313 | 15936 | 184 | 8066 | 18564 | 21192 | 23820 |
| 185 | 5439 | 10695 | 13314 | 15937 | 186 | 8067 | 18565 | 21193 | 23821 |
| 187 | 5440 | 10696 | 13315 | 15938 | 188 | 8068 | 18566 | 21194 | 23822 |
| 189 | 5441 | 10697 | 13316 | 15939 | 190 | 8069 | 18567 | 21195 | 23823 |
| 191 | 5442 | 10698 | 13317 | 15940 | 192 | 8070 | 18568 | 21196 | 23824 |
| 193 | 5443 | 10699 | 13318 | 15941 | 194 | 8071 | 18569 | 21197 | 23825 |
| 195 | 5444 | 10700 | 13319 | 15942 | 196 | 8072 | 18570 | 21198 | 23826 |
| 197 | 5445 | 10701 | 13320 | 15943 | 198 | 8073 | 18571 | 21199 | 23827 |
| 199 | 5446 | 10702 | 13321 | 15944 | 200 | 8074 | 18572 | 21200 | 23828 |
| 201 | 5447 | 10703 | 13322 | 15945 | 202 | 8075 | 18573 | 21201 | 23829 |
| 203 | 5448 | 10704 | 13323 | 15946 | 204 | 8076 | 18574 | 21202 | 23830 |
| 205 | 5449 | 10705 | 13324 | 15947 | 206 | 8077 | 18575 | 21203 | 23831 |
| 207 | 5450 | 10706 | 13325 | 15948 | 208 | 8078 | 18576 | 21204 | 23832 |
| 209 | 5451 | 10707 | 13326 | 15949 | 210 | 8079 | 18577 | 21205 | 23833 |
| 211 | 5452 | 10708 | 13327 | 15950 | 212 | 8080 | 18578 | 21206 | 23834 |
| 213 | 5453 | 10709 | 13328 | 15951 | 214 | 8081 | 18579 | 21207 | 23835 |
| 215 | 5454 | 10710 | 13329 | 15952 | 216 | 8082 | 18580 | 21208 | 23836 |
| 217 | 5455 | 10711 | 13330 | 15953 | 218 | 8083 | 18581 | 21209 | 23837 |
| 219 | 5456 | 10712 | 13331 | 15954 | 220 | 8084 | 18582 | 21210 | 23838 |
| 221 | 5457 | 10713 | 13332 | 15955 | 222 | 8085 | 18583 | 21211 | 23839 |
| 223 | 5458 | 10714 | 13333 | 15956 | 224 | 8086 | 18584 | 21212 | 23840 |
| 225 | 5459 | 10715 | 13334 | 15957 | 226 | 8087 | 18585 | 21213 | 23841 |
| 227 | 5460 | 10716 | 13335 | 15958 | 228 | 8088 | 18586 | 21214 | 23842 |
| 229 | 5461 | 10717 | 13336 | 15959 | 230 | 8089 | 18587 | 21215 | 23843 |
| 231 | 5462 | 10718 | 13337 | 15960 | 232 | 8090 | 18588 | 21216 | 23844 |
| 233 | 5463 | 10719 | 13338 | 15961 | 234 | 8091 | 18589 | 21217 | 23845 |
| 235 | 5464 | 10720 | 13339 | 15962 | 236 | 8092 | 18590 | 21218 | 23846 |
| 237 | 5465 | 10721 | 13340 | 15963 | 238 | 8093 | 18591 | 21219 | 23847 |
| 239 | 5466 | 10722 | 13341 | 15964 | 240 | 8094 | 18592 | 21220 | 23848 |
| 241 | 5467 | 10723 | 13342 | 15965 | 242 | 8095 | 18593 | 21221 | 23849 |
| 243 | 5468 | 10724 | 13343 | 15966 | 244 | 8096 | 18594 | 21222 | 23850 |
| 245 | 5469 | 10725 | 13344 | 15967 | 246 | 8097 | 18595 | 21223 | 23851 |
| 247 | 5470 | 10726 | 13345 | 15968 | 248 | 8098 | 18596 | 21224 | 23852 |
| 249 | 5471 | 10727 | 13346 | 15969 | 250 | 8099 | 18597 | 21225 | 23853 |
| 251 | 5472 | 10728 | 13347 | 15970 | 252 | 8100 | 18598 | 21226 | 23854 |
| 253 | 5473 | 10729 | 13348 | 15971 | 254 | 8101 | 18599 | 21227 | 23855 |
| 255 | 5474 | 10730 | 13349 | 15972 | 256 | 8102 | 18600 | 21228 | 23856 |
| 257 | 5475 | 10731 | 13350 | 15973 | 258 | 8103 | 18601 | 21229 | 23857 |
| 259 | 5476 | 10732 | 13351 | 15974 | 260 | 8104 | 18602 | 21230 | 23858 |
| 261 | 5477 | 10733 | 13352 | 15975 | 262 | 8105 | 18603 | 21231 | 23859 |
| 263 | 5478 | 10734 | 13353 | 15976 | 264 | 8106 | 18604 | 21232 | 23860 |
| 265 | 5479 | 10735 | 13354 | 15977 | 266 | 8107 | 18605 | 21233 | 23861 |
| 267 | 5480 | 10736 | 13355 | 15978 | 268 | 8108 | 18606 | 21234 | 23862 |
| 269 | 5481 | 10737 | 13356 | 15979 | 270 | 8109 | 18607 | 21235 | 23863 |
| 271 | 5482 | 10738 | 13357 | 15980 | 272 | 8110 | 18608 | 21236 | 23864 |
| 273 | 5483 | 10739 | 13358 | 15981 | 274 | 8111 | 18609 | 21237 | 23865 |
| 275 | 5484 | 10740 | 13359 | 15982 | 276 | 8112 | 18610 | 21238 | 23866 |
| 277 | 5485 | 10741 | 13360 | 15983 | 278 | 8113 | 18611 | 21239 | 23867 |
| 279 | 5486 | 10742 | 13361 | 15984 | 280 | 8114 | 18612 | 21240 | 23868 |
| 281 | 5487 | 10743 | 13362 | 15985 | 282 | 8115 | 18613 | 21241 | 23869 |
| 283 | 5488 | 10744 | 13363 | 15986 | 284 | 8116 | 18614 | 21242 | 23870 |
| 285 | 5489 | 10745 | 13364 | 15987 | 286 | 8117 | 18615 | 21243 | 23871 |
| 287 | 5490 | 10746 | 13365 | 15988 | 288 | 8118 | 18616 | 21244 | 23872 |
| 289 | 5491 | 10747 | 13366 | 15989 | 290 | 8119 | 18617 | 21245 | 23873 |
| 291 | 5492 | 10748 | 13367 | 15990 | 292 | 8120 | 18618 | 21246 | 23874 |
| 293 | 5493 | 10749 | 13368 | 15991 | 294 | 8121 | 18619 | 21247 | 23875 |
| 295 | 5494 | 10750 | 13369 | 15992 | 296 | 8122 | 18620 | 21248 | 23876 |
| 297 | 5495 | 10751 | 13370 | 15993 | 298 | 8123 | 18621 | 21249 | 23877 |
| 299 | 5496 | 10752 | 13371 | 15994 | 300 | 8124 | 18622 | 21250 | 23878 |
| 301 | 5497 | 10753 | 13372 | 15995 | 302 | 8125 | 18623 | 21251 | 23879 |
| 303 | 5498 | 10754 | 13373 | 15996 | 304 | 8126 | 18624 | 21252 | 23880 |
| 305 | 5499 | 10755 | 13374 | 15997 | 306 | 8127 | 18625 | 21253 | 23881 |
| 307 | 5500 | 10756 | 13375 | 15998 | 308 | 8128 | 18626 | 21254 | 23882 |
| 309 | 5501 | 10757 | 13376 | 15999 | 310 | 8129 | 18627 | 21255 | 23883 |
| 311 | 5502 | 10758 | 13377 | 16000 | 312 | 8130 | 18628 | 21256 | 23884 |
| 313 | 5503 | 10759 | 13378 | 16001 | 314 | 8131 | 18629 | 21257 | 23885 |
| 315 | 5504 | 10760 | 13379 | 16002 | 316 | 8132 | 18630 | 21258 | 23886 |
| 317 | 5505 | 10761 | 13380 | 16003 | 318 | 8133 | 18631 | 21259 | 23887 |
| 319 | 5506 | 10762 | 13381 | 16004 | 320 | 8134 | 18632 | 21260 | 23888 |
| 321 | 5507 | 10763 | 13382 | 16005 | 322 | 8135 | 18633 | 21261 | 23889 |
| 323 | 5508 | 10764 | 13383 | 16006 | 324 | 8136 | 18634 | 21262 | 23890 |
| 325 | 5509 | 10765 | 13384 | 16007 | 326 | 8137 | 18635 | 21263 | 23891 |
| 327 | 5510 | 10766 | 13385 | 16008 | 328 | 8138 | 18636 | 21264 | 23892 |
| 329 | 5511 | 10767 | 13386 | 16009 | 330 | 8139 | 18637 | 21265 | 23893 |
| 331 | 5512 | 10768 | 13387 | 16010 | 332 | 8140 | 18638 | 21266 | 23894 |
| 333 | 5513 | 10769 | 13388 | 16011 | 334 | 8141 | 18639 | 21267 | 23895 |
| 335 | 5514 | 10770 | 13389 | 16012 | 336 | 8142 | 18640 | 21268 | 23896 |
| 337 | 5515 | 10771 | 13390 | 16013 | 338 | 8143 | 18641 | 21269 | 23897 |
| 339 | 5516 | 10772 | 13391 | 16014 | 340 | 8144 | 18642 | 21270 | 23898 |
| 341 | 5517 | 10773 | 13392 | 16015 | 342 | 8145 | 18643 | 21271 | 23899 |
| 343 | 5518 | 10774 | 13393 | 16016 | 344 | 8146 | 18644 | 21272 | 23900 |
| 345 | 5519 | 10775 | 13394 | 16017 | 346 | 8147 | 18645 | 21273 | 23901 |
| 347 | 5520 | 10776 | 13395 | 16018 | 348 | 8148 | 18646 | 21274 | 23902 |
| 349 | 5521 | 10777 | 13396 | 16019 | 350 | 8149 | 18647 | 21275 | 23903 |
| 351 | 5522 | 10778 | 13397 | 16020 | 352 | 8150 | 18648 | 21276 | 23904 |
| 353 | 5523 | 10779 | 13398 | 16021 | 354 | 8151 | 18649 | 21277 | 23905 |
| 355 | 5524 | 10780 | 13399 | 16022 | 356 | 8152 | 18650 | 21278 | 23906 |
| 357 | 5525 | 10781 | 13400 | 16023 | 358 | 8153 | 18651 | 21279 | 23907 |
| 359 | 5526 | 10782 | 13401 | 16024 | 360 | 8154 | 18652 | 21280 | 23908 |
| 361 | 5527 | 10783 | 13402 | 16025 | 362 | 8155 | 18653 | 21281 | 23909 |
| 363 | 5528 | 10784 | 13403 | 16026 | 364 | 8156 | 18654 | 21282 | 23910 |
| 365 | 5529 | 10785 | 13404 | 16027 | 366 | 8157 | 18655 | 21283 | 23911 |
| 367 | 5530 | 10786 | 13405 | 16028 | 368 | 8158 | 18656 | 21284 | 23912 |
| 369 | 5531 | 10787 | 13406 | 16029 | 370 | 8159 | 18657 | 21285 | 23913 |
| 371 | 5532 | 10788 | 13407 | 16030 | 372 | 8160 | 18658 | 21286 | 23914 |
| 373 | 5533 | 10789 | 13408 | 16031 | 374 | 8161 | 18659 | 21287 | 23915 |
| 375 | 5534 | 10790 | 13409 | 16032 | 376 | 8162 | 18660 | 21288 | 23916 |
| 377 | 5535 | 10791 | 13410 | 16033 | 378 | 8163 | 18661 | 21289 | 23917 |
| 379 | 5536 | 10792 | 13411 | 16034 | 380 | 8164 | 18662 | 21290 | 23918 |
| 381 | 5537 | 10793 | 13412 | 16035 | 382 | 8165 | 18663 | 21291 | 23919 |
| 383 | 5538 | 10794 | 13413 | 16036 | 384 | 8166 | 18664 | 21292 | 23920 |
| 385 | 5539 | 10795 | 13414 | 16037 | 386 | 8167 | 18665 | 21293 | 23921 |
| 387 | 5540 | 10796 | 13415 | 16038 | 388 | 8168 | 18666 | 21294 | 23922 |
| 389 | 5541 | 10797 | 13416 | 16039 | 390 | 8169 | 18667 | 21295 | 23923 |
| 391 | 5542 | 10798 | 13417 | 16040 | 392 | 8170 | 18668 | 21296 | 23924 |
| 393 | 5543 | 10799 | 13418 | 16041 | 394 | 8171 | 18669 | 21297 | 23925 |
| 395 | 5544 | 10800 | 13419 | 16042 | 396 | 8172 | 18670 | 21298 | 23926 |
| 397 | 5545 | 10801 | 13420 | 16043 | 398 | 8173 | 18671 | 21299 | 23927 |
| 399 | 5546 | 10802 | 13421 | 16044 | 400 | 8174 | 18672 | 21300 | 23928 |
| 401 | 5547 | 10803 | 13422 | 16045 | 402 | 8175 | 18673 | 21301 | 23929 |
| 403 | 5548 | 10804 | 13423 | 16046 | 404 | 8176 | 18674 | 21302 | 23930 |
| 405 | 5549 | 10805 | 13424 | 16047 | 406 | 8177 | 18675 | 21303 | 23931 |
| 407 | 5550 | 10806 | 13425 | 16048 | 408 | 8178 | 18676 | 21304 | 23932 |
| 409 | 5551 | 10807 | 13426 | 16049 | 410 | 8179 | 18677 | 21305 | 23933 |
| 411 | 5552 | 10808 | 13427 | 16050 | 412 | 8180 | 18678 | 21306 | 23934 |
| 413 | 5553 | 10809 | 13428 | 16051 | 414 | 8181 | 18679 | 21307 | 23935 |
| 415 | 5554 | 10810 | 13429 | 16052 | 416 | 8182 | 18680 | 21308 | 23936 |
| 417 | 5555 | 10811 | 13430 | 16053 | 418 | 8183 | 18681 | 21309 | 23937 |
| 419 | 5556 | 10812 | 13431 | 16054 | 420 | 8184 | 18682 | 21310 | 23938 |
| 421 | 5557 | 10813 | 13432 | 16055 | 422 | 8185 | 18683 | 21311 | 23939 |
| 423 | 5558 | 10814 | 13433 | 16056 | 424 | 8186 | 18684 | 21312 | 23940 |
| 425 | 5559 | 10815 | 13434 | 16057 | 426 | 8187 | 18685 | 21313 | 23941 |
| 427 | 5560 | 10816 | 13435 | 16058 | 428 | 8188 | 18686 | 21314 | 23942 |
| 429 | 5561 | 10817 | 13436 | 16059 | 430 | 8189 | 18687 | 21315 | 23943 |
| 431 | 5562 | 10818 | 13437 | 16060 | 432 | 8190 | 18688 | 21316 | 23944 |
| 433 | 5563 | 10819 | 13438 | 16061 | 434 | 8191 | 18689 | 21317 | 23945 |
| 435 | 5564 | 10820 | 13439 | 16062 | 436 | 8192 | 18690 | 21318 | 23946 |
| 437 | 5565 | 10821 | 13440 | 16063 | 438 | 8193 | 18691 | 21319 | 23947 |
| 439 | 5566 | 10822 | 13441 | 16064 | 440 | 8194 | 18692 | 21320 | 23948 |
| 441 | 5567 | 10823 | 13442 | 16065 | 442 | 8195 | 18693 | 21321 | 23949 |
| 443 | 5568 | 10824 | 13443 | 16066 | 444 | 8196 | 18694 | 21322 | 23950 |
| 445 | 5569 | 10825 | 13444 | 16067 | 446 | 8197 | 18695 | 21323 | 23951 |
| 447 | 5570 | 10826 | 13445 | 16068 | 448 | 8198 | 18696 | 21324 | 23952 |
| 449 | 5571 | 10827 | 13446 | 16069 | 450 | 8199 | 18697 | 21325 | 23953 |
| 451 | 5572 | 10828 | 13447 | 16070 | 452 | 8200 | 18698 | 21326 | 23954 |
| 453 | 5573 | 10829 | 13448 | 16071 | 454 | 8201 | 18699 | 21327 | 23955 |
| 455 | 5574 | 10830 | 13449 | 16072 | 456 | 8202 | 18700 | 21328 | 23956 |
| 457 | 5575 | 10831 | 13450 | 16073 | 458 | 8203 | 18701 | 21329 | 23957 |
| 459 | 5576 | 10832 | 13451 | 16074 | 460 | 8204 | 18702 | 21330 | 23958 |
| 461 | 5577 | 10833 | 13452 | 16075 | 462 | 8205 | 18703 | 21331 | 23959 |
| 463 | 5578 | 10834 | 13453 | 16076 | 464 | 8206 | 18704 | 21332 | 23960 |
| 465 | 5579 | 10835 | 13454 | 16077 | 466 | 8207 | 18705 | 21333 | 23961 |
| 467 | 5580 | 10836 | 13455 | 16078 | 468 | 8208 | 18706 | 21334 | 23962 |
| 469 | 5581 | 10837 | 13456 | 16079 | 470 | 8209 | 18707 | 21335 | 23963 |
| 471 | 5582 | 10838 | 13457 | 16080 | 472 | 8210 | 18708 | 21336 | 23964 |
| 473 | 5583 | 10839 | 13458 | 16081 | 474 | 8211 | 18709 | 21337 | 23965 |
| 475 | 5584 | 10840 | 13459 | 16082 | 476 | 8212 | 18710 | 21338 | 23966 |
| 477 | 5585 | 10841 | 13460 | 16083 | 478 | 8213 | 18711 | 21339 | 23967 |
| 479 | 5586 | 10842 | 13461 | 16084 | 480 | 8214 | 18712 | 21340 | 23968 |
| 481 | 5587 | 10843 | 13462 | 16085 | 482 | 8215 | 18713 | 21341 | 23969 |
| 483 | 5588 | 10844 | 13463 | 16086 | 484 | 8216 | 18714 | 21342 | 23970 |
| 485 | 5589 | 10845 | 13464 | 16087 | 486 | 8217 | 18715 | 21343 | 23971 |
| 487 | 5590 | 10846 | 13465 | 16088 | 488 | 8218 | 18716 | 21344 | 23972 |
| 489 | 5591 | 10847 | 13466 | 16089 | 490 | 8219 | 18717 | 21345 | 23973 |
| 491 | 5592 | 10848 | 13467 | 16090 | 492 | 8220 | 18718 | 21346 | 23974 |
| 493 | 5593 | 10849 | 13468 | 16091 | 494 | 8221 | 18719 | 21347 | 23975 |
| 495 | 5594 | 10850 | 13469 | 16092 | 496 | 8222 | 18720 | 21348 | 23976 |
| 497 | 5595 | 10851 | 13470 | 16093 | 498 | 8223 | 18721 | 21349 | 23977 |
| 499 | 5596 | 10852 | 13471 | 16094 | 500 | 8224 | 18722 | 21350 | 23978 |
| 501 | 5597 | 10853 | 13472 | 16095 | 502 | 8225 | 18723 | 21351 | 23979 |
| 503 | 5598 | 10854 | 13473 | 16096 | 504 | 8226 | 18724 | 21352 | 23980 |
| 505 | 5599 | 10855 | 13474 | 16097 | 506 | 8227 | 18725 | 21353 | 23981 |
| 507 | 5600 | 10856 | 13475 | 16098 | 508 | 8228 | 18726 | 21354 | 23982 |
| 509 | 5601 | 10857 | 13476 | 16099 | 510 | 8229 | 18727 | 21355 | 23983 |
| 511 | 5602 | 10858 | 13477 | 16100 | 512 | 8230 | 18728 | 21356 | 23984 |
| 513 | 5603 | 10859 | 13478 | 16101 | 514 | 8231 | 18729 | 21357 | 23985 |
| 515 | 5604 | 10860 | 13479 | 16102 | 516 | 8232 | 18730 | 21358 | 23986 |
| 517 | 5605 | 10861 | 13480 | 16103 | 518 | 8233 | 18731 | 21359 | 23987 |
| 519 | 5606 | 10862 | 13481 | 16104 | 520 | 8234 | 18732 | 21360 | 23988 |
| 521 | 5607 | 10863 | 13482 | 16105 | 522 | 8235 | 18733 | 21361 | 23989 |
| 523 | 5608 | 10864 | 13483 | 16106 | 524 | 8236 | 18734 | 21362 | 23990 |
| 525 | 5609 | 10865 | 13484 | 16107 | 526 | 8237 | 18735 | 21363 | 23991 |
| 527 | 5610 | 10866 | 13485 | 16108 | 528 | 8238 | 18736 | 21364 | 23992 |
| 529 | 5611 | 10867 | 13486 | 16109 | 530 | 8239 | 18737 | 21365 | 23993 |
| 531 | 5612 | | 13487 | 16110 | 532 | 8240 | 18738 | 21366 | 23994 |
| 533 | 5613 | 10868 | 13488 | 16111 | 534 | 8241 | 18739 | 21367 | 23995 |
| 535 | 5614 | 10869 | 13489 | 16112 | 536 | 8242 | 18740 | 21368 | 23996 |
| 537 | 5615 | 10870 | 13490 | 16113 | 538 | 8243 | 18741 | 21369 | 23997 |
| 539 | 5616 | 10871 | 13491 | 16114 | 540 | 8244 | 18742 | 21370 | 23998 |
| 541 | 5617 | 10872 | 13492 | 16115 | 542 | 8245 | 18743 | 21371 | 23999 |
| 543 | 5618 | 10873 | 13493 | 16116 | 544 | 8246 | 18744 | 21372 | 24000 |
| 545 | 5619 | 10874 | 13494 | 16117 | 546 | 8247 | 18745 | 21373 | 24001 |
| 547 | 5620 | 10875 | 13495 | 16118 | 548 | 8248 | 18746 | 21374 | 24002 |
| 549 | 5621 | 10876 | 13496 | 16119 | 550 | 8249 | 18747 | 21375 | 24003 |
| 551 | 5622 | 10877 | 13497 | 16120 | 552 | 8250 | 18748 | 21376 | 24004 |
| 553 | 5623 | 10878 | 13498 | 16121 | 554 | 8251 | 18749 | 21377 | 24005 |
| 555 | 5624 | 10879 | 13499 | 16122 | 556 | 8252 | 18750 | 21378 | 24006 |
| 557 | 5625 | 10880 | 13500 | 16123 | 558 | 8253 | 18751 | 21379 | 24007 |
| 559 | 5626 | 10881 | 13501 | 16124 | 560 | 8254 | 18752 | 21380 | 24008 |
| 561 | 5627 | 10882 | 13502 | 16125 | 562 | 8255 | 18753 | 21381 | 24009 |
| 563 | 5628 | 10883 | 13503 | 16126 | 564 | 8256 | 18754 | 21382 | 24010 |
| 565 | 5629 | 10884 | 13504 | 16127 | 566 | 8257 | 18755 | 21383 | 24011 |
| 567 | 5630 | 10885 | 13505 | 16128 | 568 | 8258 | 18756 | 21384 | 24012 |
| 569 | 5631 | 10886 | 13506 | 16129 | 570 | 8259 | 18757 | 21385 | 24013 |
| 571 | 5632 | 10887 | 13507 | 16130 | 572 | 8260 | 18758 | 21386 | 24014 |
| 573 | 5633 | 10888 | 13508 | 16131 | 574 | 8261 | 18759 | 21387 | 24015 |
| 575 | 5634 | 10889 | 13509 | 16132 | 576 | 8262 | 18760 | 21388 | 24016 |
| 577 | 5635 | 10890 | 13510 | 16133 | 578 | 8263 | 18761 | 21389 | 24017 |
| 579 | 5636 | 10891 | 13511 | 16134 | 580 | 8264 | 18762 | 21390 | 24018 |
| 581 | 5637 | 10892 | 13512 | 16135 | 582 | 8265 | 18763 | 21391 | 24019 |
| 583 | 5638 | 10893 | 13513 | 16136 | 584 | 8266 | 18764 | 21392 | 24020 |
| 585 | 5639 | 10894 | 13514 | 16137 | 586 | 8267 | 18765 | 21393 | 24021 |
| 587 | 5640 | 10895 | 13515 | 16138 | 588 | 8268 | 18766 | 21394 | 24022 |
| 589 | 5641 | 10896 | 13516 | 16139 | 590 | 8269 | 18767 | 21395 | 24023 |
| 591 | 5642 | 10897 | 13517 | 16140 | 592 | 8270 | 18768 | 21396 | 24024 |
| 593 | 5643 | 10898 | 13518 | 16141 | 594 | 8271 | 18769 | 21397 | 24025 |
| 595 | 5644 | 10899 | 13519 | 16142 | 596 | 8272 | 18770 | 21398 | 24026 |
| 597 | 5645 | 10900 | 13520 | 16143 | 598 | 8273 | 18771 | 21399 | 24027 |
| 599 | 5646 | 10901 | 13521 | 16144 | 600 | 8274 | 18772 | 21400 | 24028 |
| 601 | 5647 | 10902 | 13522 | 16145 | 602 | 8275 | 18773 | 21401 | 24029 |
| 603 | 5648 | 10903 | 13523 | 16146 | 604 | 8276 | 18774 | 21402 | 24030 |
| 605 | 5649 | 10904 | 13524 | 16147 | 606 | 8277 | 18775 | 21403 | 24031 |
| 607 | 5650 | 10905 | 13525 | 16148 | 608 | 8278 | 18776 | 21404 | 24032 |
| 609 | 5651 | 10906 | 13526 | 16149 | 610 | 8279 | 18777 | 21405 | 24033 |
| 611 | 5652 | 10907 | 13527 | 16150 | 612 | 8280 | 18778 | 21406 | 24034 |
| 613 | 5653 | 10908 | 13528 | 16151 | 614 | 8281 | 18779 | 21407 | 24035 |
| 615 | 5654 | 10909 | 13529 | 16152 | 616 | 8282 | 18780 | 21408 | 24036 |
| 617 | 5655 | 10910 | 13530 | 16153 | 618 | 8283 | 18781 | 21409 | 24037 |
| 619 | 5656 | 10911 | 13531 | 16154 | 620 | 8284 | 18782 | 21410 | 24038 |
| 621 | 5657 | 10912 | 13532 | 16155 | 622 | 8285 | 18783 | 21411 | 24039 |
| 623 | 5658 | 10913 | 13533 | 16156 | 624 | 8286 | 18784 | 21412 | 24040 |
| 625 | 5659 | 10914 | 13534 | 16157 | 626 | 8287 | 18785 | 21413 | 24041 |
| 627 | 5660 | 10915 | 13535 | 16158 | 628 | 8288 | 18786 | 21414 | 24042 |
| 629 | 5661 | | | 16159 | 630 | 8289 | 18787 | 21415 | 24043 |
| 631 | 5662 | 10916 | 13536 | 16160 | 632 | 8290 | 18788 | 21416 | 24044 |
| 633 | 5663 | 10917 | 13537 | 16161 | 634 | 8291 | 18789 | 21417 | 24045 |
| 635 | 5664 | 10918 | 13538 | 16162 | 636 | 8292 | 18790 | 21418 | 24046 |
| 637 | 5665 | 10919 | 13539 | 16163 | 638 | 8293 | 18791 | 21419 | 24047 |
| 639 | 5666 | 10920 | 13540 | 16164 | 640 | 8294 | 18792 | 21420 | 24048 |
| 641 | 5667 | 10921 | 13541 | 16165 | 642 | 8295 | 18793 | 21421 | 24049 |
| 643 | 5668 | 10922 | 13542 | 16166 | 644 | 8296 | 18794 | 21422 | 24050 |
| 645 | 5669 | 10923 | 13543 | 16167 | 646 | 8297 | 18795 | 21423 | 24051 |
| 647 | 5670 | 10924 | 13544 | 16168 | 648 | 8298 | 18796 | 21424 | 24052 |
| 649 | 5671 | 10925 | 13545 | 16169 | 650 | 8299 | 18797 | 21425 | 24053 |
| 651 | 5672 | 10926 | 13546 | 16170 | 652 | 8300 | 18798 | 21426 | 24054 |
| 653 | 5673 | 10927 | 13547 | 16171 | 654 | 8301 | 18799 | 21427 | 24055 |
| 655 | 5674 | 10928 | 13548 | 16172 | 656 | 8302 | 18800 | 21428 | 24056 |
| 657 | 5675 | 10929 | 13549 | 16173 | 658 | 8303 | 18801 | 21429 | 24057 |
| 659 | 5676 | 10930 | 13550 | 16174 | 660 | 8304 | 18802 | 21430 | 24058 |
| 661 | 5677 | 10931 | 13551 | 16175 | 662 | 8305 | 18803 | 21431 | 24059 |
| 663 | 5678 | 10932 | 13552 | 16176 | 664 | 8306 | 18804 | 21432 | 24060 |
| 665 | 5679 | 10933 | 13553 | 16177 | 666 | 8307 | 18805 | 21433 | 24061 |
| 667 | 5680 | 10934 | 13554 | 16178 | 668 | 8308 | 18806 | 21434 | 24062 |
| 669 | 5681 | 10935 | 13555 | 16179 | 670 | 8309 | 18807 | 21435 | 24063 |
| 671 | 5682 | 10936 | 13556 | 16180 | 672 | 8310 | 18808 | 21436 | 24064 |
| 673 | 5683 | 10937 | 13557 | 16181 | 674 | 8311 | 18809 | 21437 | 24065 |
| 675 | 5684 | 10938 | 13558 | 16182 | 676 | 8312 | 18810 | 21438 | 24066 |
| 677 | 5685 | 10939 | 13559 | 16183 | 678 | 8313 | 18811 | 21439 | 24067 |
| 679 | 5686 | 10940 | 13560 | 16184 | 680 | 8314 | 18812 | 21440 | 24068 |
| 681 | 5687 | 10941 | 13561 | 16185 | 682 | 8315 | 18813 | 21441 | 24069 |
| 683 | 5688 | 10942 | 13562 | 16186 | 684 | 8316 | 18814 | 21442 | 24070 |
| 685 | 5689 | 10943 | 13563 | 16187 | 686 | 8317 | 18815 | 21443 | 24071 |
| 687 | 5690 | 10944 | 13564 | 16188 | 688 | 8318 | 18816 | 21444 | 24072 |
| 689 | 5691 | 10945 | 13565 | 16189 | 690 | 8319 | 18817 | 21445 | 24073 |
| 691 | 5692 | 10946 | 13566 | 16190 | 692 | 8320 | 18818 | 21446 | 24074 |
| 693 | 5693 | 10947 | 13567 | 16191 | 694 | 8321 | 18819 | 21447 | 24075 |
| 695 | 5694 | 10948 | 13568 | 16192 | 696 | 8322 | 18820 | 21448 | 24076 |
| 697 | 5695 | 10949 | 13569 | 16193 | 698 | 8323 | 18821 | 21449 | 24077 |
| 699 | 5696 | 10950 | 13570 | 16194 | 700 | 8324 | 18822 | 21450 | 24078 |
| 701 | 5697 | 10951 | 13571 | 16195 | 702 | 8325 | 18823 | 21451 | 24079 |
| 703 | 5698 | 10952 | 13572 | 16196 | 704 | 8326 | 18824 | 21452 | 24080 |
| 705 | 5699 | 10953 | 13573 | 16197 | 706 | 8327 | 18825 | 21453 | 24081 |
| 707 | 5700 | 10954 | 13574 | 16198 | 708 | 8328 | 18826 | 21454 | 24082 |
| 709 | 5701 | 10955 | 13575 | 16199 | 710 | 8329 | 18827 | 21455 | 24083 |
| 711 | 5702 | 10956 | 13576 | 16200 | 712 | 8330 | 18828 | 21456 | 24084 |
| 713 | 5703 | 10957 | 13577 | 16201 | 714 | 8331 | 18829 | 21457 | 24085 |
| 715 | 5704 | 10958 | 13578 | 16202 | 716 | 8332 | 18830 | 21458 | 24086 |
| 717 | 5705 | 10959 | 13579 | 16203 | 718 | 8333 | 18831 | 21459 | 24087 |
| 719 | 5706 | 10960 | 13580 | 16204 | 720 | 8334 | 18832 | 21460 | 24088 |
| 721 | 5707 | 10961 | 13581 | 16205 | 722 | 8335 | 18833 | 21461 | 24089 |
| 723 | 5708 | 10962 | 13582 | 16206 | 724 | 8336 | 18834 | 21462 | 24090 |
| 725 | 5709 | 10963 | 13583 | 16207 | 726 | 8337 | 18835 | 21463 | 24091 |
| 727 | 5710 | 10964 | 13584 | 16208 | 728 | 8338 | 18836 | 21464 | 24092 |
| 729 | 5711 | 10965 | 13585 | 16209 | 730 | 8339 | 18837 | 21465 | 24093 |
| 731 | 5712 | 10966 | 13586 | 16210 | 732 | 8340 | 18838 | 21466 | 24094 |
| 733 | 5713 | 10967 | 13587 | 16211 | 734 | 8341 | 18839 | 21467 | 24095 |
| 735 | 5714 | 10968 | 13588 | 16212 | 736 | 8342 | 18840 | 21468 | 24096 |
| 737 | 5715 | 10969 | 13589 | 16213 | 738 | 8343 | 18841 | 21469 | 24097 |
| 739 | 5716 | 10970 | 13590 | 16214 | 740 | 8344 | 18842 | 21470 | 24098 |
| 741 | 5717 | 10971 | 13591 | 16215 | 742 | 8345 | 18843 | 21471 | 24099 |
| 743 | 5718 | 10972 | 13592 | 16216 | 744 | 8346 | 18844 | 21472 | 24100 |
| 745 | 5719 | 10973 | 13593 | 16217 | 746 | 8347 | 18845 | 21473 | 24101 |
| 747 | 5720 | 10974 | 13594 | 16218 | 748 | 8348 | 18846 | 21474 | 24102 |
| 749 | 5721 | 10975 | 13595 | 16219 | 750 | 8349 | 18847 | 21475 | 24103 |
| 751 | 5722 | 10976 | 13596 | 16220 | 752 | 8350 | 18848 | 21476 | 24104 |
| 753 | 5723 | 10977 | 13597 | 16221 | 754 | 8351 | 18849 | 21477 | 24105 |
| 755 | 5724 | 10978 | 13598 | 16222 | 756 | 8352 | 18850 | 21478 | 24106 |
| 757 | 5725 | 10979 | 13599 | 16223 | 758 | 8353 | 18851 | 21479 | 24107 |
| 759 | 5726 | 10980 | 13600 | 16224 | 760 | 8354 | 18852 | 21480 | 24108 |
| 761 | 5727 | 10981 | 13601 | 16225 | 762 | 8355 | 18853 | 21481 | 24109 |
| 763 | 5728 | 10982 | 13602 | 16226 | 764 | 8356 | 18854 | 21482 | 24110 |
| 765 | 5729 | 10983 | 13603 | 16227 | 766 | 8357 | 18855 | 21483 | 24111 |
| 767 | 5730 | 10984 | 13604 | 16228 | 768 | 8358 | 18856 | 21484 | 24112 |
| 769 | 5731 | 10985 | 13605 | 16229 | 770 | 8359 | 18857 | 21485 | 24113 |
| 771 | 5732 | 10986 | 13606 | 16230 | 772 | 8360 | 18858 | 21486 | 24114 |
| 773 | 5733 | 10987 | 13607 | 16231 | 774 | 8361 | 18859 | 21487 | 24115 |
| 775 | 5734 | 10988 | 13608 | 16232 | 776 | 8362 | 18860 | 21488 | 24116 |
| 777 | 5735 | 10989 | 13609 | 16233 | 778 | 8363 | 18861 | 21489 | 24117 |
| 779 | 5736 | 10990 | 13610 | 16234 | 780 | 8364 | 18862 | 21490 | 24118 |
| 781 | 5737 | 10991 | 13611 | 16235 | 782 | 8365 | 18863 | 21491 | 24119 |
| 783 | 5738 | 10992 | 13612 | 16236 | 784 | 8366 | 18864 | 21492 | 24120 |
| 785 | 5739 | 10993 | 13613 | 16237 | 786 | 8367 | 18865 | 21493 | 24121 |
| 787 | 5740 | 10994 | 13614 | 16238 | 788 | 8368 | 18866 | 21494 | 24122 |
| 789 | 5741 | 10995 | 13615 | 16239 | 790 | 8369 | 18867 | 21495 | 24123 |
| 791 | 5742 | 10996 | 13616 | 16240 | 792 | 8370 | 18868 | 21496 | 24124 |
| 793 | 5743 | 10997 | 13617 | 16241 | 794 | 8371 | 18869 | 21497 | 24125 |
| 795 | 5744 | 10998 | 13618 | 16242 | 796 | 8372 | 18870 | 21498 | 24126 |
| 797 | 5745 | 10999 | 13619 | 16243 | 798 | 8373 | 18871 | 21499 | 24127 |
| 799 | 5746 | 11000 | 13620 | 16244 | 800 | 8374 | 18872 | 21500 | 24128 |
| 801 | 5747 | 11001 | 13621 | 16245 | 802 | 8375 | 18873 | 21501 | 24129 |
| 803 | 5748 | 11002 | 13622 | 16246 | 804 | 8376 | 18874 | 21502 | 24130 |
| 805 | 5749 | 11003 | 13623 | 16247 | 806 | 8377 | 18875 | 21503 | 24131 |
| 807 | 5750 | 11004 | 13624 | 16248 | 808 | 8378 | 18876 | 21504 | 24132 |
| 809 | 5751 | 11005 | 13625 | 16249 | 810 | 8379 | 18877 | 21505 | 24133 |
| 811 | 5752 | 11006 | 13626 | 16250 | 812 | 8380 | 18878 | 21506 | 24134 |
| 813 | 5753 | 11007 | 13627 | 16251 | 814 | 8381 | 18879 | 21507 | 24135 |
| 815 | 5754 | 11008 | 13628 | 16252 | 816 | 8382 | 18880 | 21508 | 24136 |
| 817 | 5755 | 11009 | 13629 | 16253 | 818 | 8383 | 18881 | 21509 | 24137 |
| 819 | 5756 | 11010 | 13630 | 16254 | 820 | 8384 | 18882 | 21510 | 24138 |
| 821 | 5757 | 11011 | 13631 | 16255 | 822 | 8385 | 18883 | 21511 | 24139 |
| 823 | 5758 | 11012 | 13632 | 16256 | 824 | 8386 | 18884 | 21512 | 24140 |
| 825 | 5759 | 11013 | 13633 | 16257 | 826 | 8387 | 18885 | 21513 | 24141 |
| 827 | 5760 | 11014 | 13634 | 16258 | 828 | 8388 | 18886 | 21514 | 24142 |
| 829 | 5761 | 11015 | 13635 | 16259 | 830 | 8389 | 18887 | 21515 | 24143 |
| 831 | 5762 | 11016 | 13636 | 16260 | 832 | 8390 | 18888 | 21516 | 24144 |
| 833 | 5763 | 11017 | 13637 | 16261 | 834 | 8391 | 18889 | 21517 | 24145 |
| 835 | 5764 | 11018 | 13638 | 16262 | 836 | 8392 | 18890 | 21518 | 24146 |
| 837 | 5765 | 11019 | 13639 | 16263 | 838 | 8393 | 18891 | 21519 | 24147 |
| 839 | 5766 | 11020 | 13640 | 16264 | 840 | 8394 | 18892 | 21520 | 24148 |
| 841 | 5767 | 11021 | 13641 | 16265 | 842 | 8395 | 18893 | 21521 | 24149 |
| 843 | 5768 | 11022 | 13642 | 16266 | 844 | 8396 | 18894 | 21522 | 24150 |
| 845 | 5769 | 11023 | 13643 | 16267 | 846 | 8397 | 18895 | 21523 | 24151 |
| 847 | 5770 | 11024 | 13644 | 16268 | 848 | 8398 | 18896 | 21524 | 24152 |
| 849 | 5771 | 11025 | 13645 | 16269 | 850 | 8399 | 18897 | 21525 | 24153 |
| 851 | 5772 | 11026 | 13646 | 16270 | 852 | 8400 | 18898 | 21526 | 24154 |
| 853 | 5773 | 11027 | 13647 | 16271 | 854 | 8401 | 18899 | 21527 | 24155 |
| 855 | 5774 | 11028 | 13648 | 16272 | 856 | 8402 | 18900 | 21528 | 24156 |
| 857 | 5775 | 11029 | 13649 | 16273 | 858 | 8403 | 18901 | 21529 | 24157 |
| 859 | 5776 | 11030 | 13650 | 16274 | 860 | 8404 | 18902 | 21530 | 24158 |
| 861 | 5777 | 11031 | 13651 | 16275 | 862 | 8405 | 18903 | 21531 | 24159 |
| 863 | 5778 | 11032 | 13652 | 16276 | 864 | 8406 | 18904 | 21532 | 24160 |
| 865 | 5779 | 11033 | 13653 | 16277 | 866 | 8407 | 18905 | 21533 | 24161 |
| 867 | 5780 | 11034 | 13654 | 16278 | 868 | 8408 | 18906 | 21534 | 24162 |
| 869 | 5781 | 11035 | 13655 | 16279 | 870 | 8409 | 18907 | 21535 | 24163 |
| 871 | 5782 | 11036 | 13656 | 16280 | 872 | 8410 | 18908 | 21536 | 24164 |
| 873 | 5783 | 11037 | 13657 | 16281 | 874 | 8411 | 18909 | 21537 | 24165 |
| 875 | 5784 | 11038 | 13658 | 16282 | 876 | 8412 | 18910 | 21538 | 24166 |
| 877 | 5785 | 11039 | 13659 | 16283 | 878 | 8413 | 18911 | 21539 | 24167 |
| 879 | 5786 | 11040 | 13660 | 16284 | 880 | 8414 | 18912 | 21540 | 24168 |
| 881 | 5787 | 11041 | 13661 | 16285 | 882 | 8415 | 18913 | 21541 | 24169 |
| 883 | 5788 | 11042 | 13662 | 16286 | 884 | 8416 | 18914 | 21542 | 24170 |
| 885 | 5789 | 11043 | 13663 | 16287 | 886 | 8417 | 18915 | 21543 | 24171 |
| 887 | 5790 | 11044 | 13664 | 16288 | 888 | 8418 | 18916 | 21544 | 24172 |
| 889 | 5791 | 11045 | 13665 | 16289 | 890 | 8419 | 18917 | 21545 | 24173 |
| 891 | 5792 | 11046 | 13666 | 16290 | 892 | 8420 | 18918 | 21546 | 24174 |
| 893 | 5793 | 11047 | 13667 | 16291 | 894 | 8421 | 18919 | 21547 | 24175 |
| 895 | 5794 | 11048 | 13668 | 16292 | 896 | 8422 | 18920 | 21548 | 24176 |
| 897 | 5795 | 11049 | 13669 | 16293 | 898 | 8423 | 18921 | 21549 | 24177 |
| 899 | 5796 | 11050 | 13670 | 16294 | 900 | 8424 | 18922 | 21550 | 24178 |
| 901 | 5797 | 11051 | 13671 | 16295 | 902 | 8425 | 18923 | 21551 | 24179 |
| 903 | 5798 | 11052 | 13672 | 16296 | 904 | 8426 | 18924 | 21552 | 24180 |
| 905 | 5799 | 11053 | 13673 | 16297 | 906 | 8427 | 18925 | 21553 | 24181 |
| 907 | 5800 | 11054 | 13674 | 16298 | 908 | 8428 | 18926 | 21554 | 24182 |
| 909 | 5801 | 11055 | 13675 | 16299 | 910 | 8429 | 18927 | 21555 | 24183 |
| 911 | 5802 | | 13676 | 16300 | 912 | 8430 | 18928 | 21556 | 24184 |
| 913 | 5803 | 11056 | 13677 | 16301 | 914 | 8431 | 18929 | 21557 | 24185 |
| 915 | 5804 | 11057 | 13678 | 16302 | 916 | 8432 | 18930 | 21558 | 24186 |
| 917 | 5805 | 11058 | 13679 | 16303 | 918 | 8433 | 18931 | 21559 | 24187 |
| 919 | 5806 | 11059 | 13680 | 16304 | 920 | 8434 | 18932 | 21560 | 24188 |
| 921 | 5807 | 11060 | 13681 | 16305 | 922 | 8435 | 18933 | 21561 | 24189 |
| 923 | 5808 | 11061 | 13682 | 16306 | 924 | 8436 | 18934 | 21562 | 24190 |
| 925 | 5809 | 11062 | 13683 | 16307 | 926 | 8437 | 18935 | 21563 | 24191 |
| 927 | 5810 | 11063 | 13684 | 16308 | 928 | 8438 | 18936 | 21564 | 24192 |
| 929 | 5811 | 11064 | 13685 | 16309 | 930 | 8439 | 18937 | 21565 | 24193 |
| 931 | 5812 | 11065 | 13686 | 16310 | 932 | 8440 | 18938 | 21566 | 24194 |
| 933 | 5813 | 11066 | 13687 | 16311 | 934 | 8441 | 18939 | 21567 | 24195 |
| 935 | 5814 | 11067 | 13688 | 16312 | 936 | 8442 | 18940 | 21568 | 24196 |
| 937 | 5815 | 11068 | 13689 | 16313 | 938 | 8443 | 18941 | 21569 | 24197 |
| 939 | 5816 | 11069 | 13690 | 16314 | 940 | 8444 | 18942 | 21570 | 24198 |
| 941 | 5817 | 11070 | 13691 | 16315 | 942 | 8445 | 18943 | 21571 | 24199 |
| 943 | 5818 | 11071 | 13692 | 16316 | 944 | 8446 | 18944 | 21572 | 24200 |
| 945 | 5819 | 11072 | 13693 | 16317 | 946 | 8447 | 18945 | 21573 | 24201 |
| 947 | 5820 | 11073 | 13694 | 16318 | 948 | 8448 | 18946 | 21574 | 24202 |
| 949 | 5821 | 11074 | 13695 | 16319 | 950 | 8449 | 18947 | 21575 | 24203 |
| 951 | 5822 | 11075 | 13696 | 16320 | 952 | 8450 | 18948 | 21576 | 24204 |
| 953 | 5823 | 11076 | 13697 | 16321 | 954 | 8451 | 18949 | 21577 | 24205 |
| 955 | 5824 | 11077 | 13698 | 16322 | 956 | 8452 | 18950 | 21578 | 24206 |
| 957 | 5825 | 11078 | 13699 | 16323 | 958 | 8453 | 18951 | 21579 | 24207 |
| 959 | 5826 | 11079 | 13700 | 16324 | 960 | 8454 | 18952 | 21580 | 24208 |
| 961 | 5827 | 11080 | 13701 | 16325 | 962 | 8455 | 18953 | 21581 | 24209 |
| 963 | 5828 | 11081 | 13702 | 16326 | 964 | 8456 | 18954 | 21582 | 24210 |
| 965 | 5829 | 11082 | 13703 | 16327 | 966 | 8457 | 18955 | 21583 | 24211 |
| 967 | 5830 | 11083 | 13704 | 16328 | 968 | 8458 | 18956 | 21584 | 24212 |
| 969 | 5831 | 11084 | 13705 | 16329 | 970 | 8459 | 18957 | 21585 | 24213 |
| 971 | 5832 | 11085 | 13706 | 16330 | 972 | 8460 | 18958 | 21586 | 24214 |
| 973 | 5833 | 11086 | 13707 | 16331 | 974 | 8461 | 18959 | 21587 | 24215 |
| 975 | 5834 | 11087 | 13708 | 16332 | 976 | 8462 | 18960 | 21588 | 24216 |
| 977 | 5835 | 11088 | 13709 | 16333 | 978 | 8463 | 18961 | 21589 | 24217 |
| 979 | 5836 | 11089 | 13710 | 16334 | 980 | 8464 | 18962 | 21590 | 24218 |
| 981 | 5837 | 11090 | 13711 | 16335 | 982 | 8465 | 18963 | 21591 | 24219 |
| 983 | 5838 | 11091 | 13712 | 16336 | 984 | 8466 | 18964 | 21592 | 24220 |
| 985 | 5839 | 11092 | 13713 | 16337 | 986 | 8467 | 18965 | 21593 | 24221 |
| 987 | 5840 | 11093 | 13714 | 16338 | 988 | 8468 | 18966 | 21594 | 24222 |
| 989 | 5841 | 11094 | 13715 | 16339 | 990 | 8469 | 18967 | 21595 | 24223 |
| 991 | 5842 | 11095 | 13716 | 16340 | 992 | 8470 | 18968 | 21596 | 24224 |
| 993 | 5843 | 11096 | 13717 | 16341 | 994 | 8471 | 18969 | 21597 | 24225 |
| 995 | 5844 | 11097 | 13718 | 16342 | 996 | 8472 | 18970 | 21598 | 24226 |
| 997 | 5845 | 11098 | 13719 | 16343 | 998 | 8473 | 18971 | 21599 | 24227 |
| 999 | 5846 | | | 16344 | 1000 | 8474 | 18972 | 21600 | 24228 |
| 1001 | 5847 | 11099 | 13720 | 16345 | 1002 | 8475 | 18973 | 21601 | 24229 |
| 1003 | 5848 | 11100 | 13721 | 16346 | 1004 | 8476 | 18974 | 21602 | 24230 |
| 1005 | 5849 | 11101 | 13722 | 16347 | 1006 | 8477 | 18975 | 21603 | 24231 |
| 1007 | 5850 | 11102 | 13723 | 16348 | 1008 | 8478 | 18976 | 21604 | 24232 |
| 1009 | 5851 | 11103 | 13724 | 16349 | 1010 | 8479 | 18977 | 21605 | 24233 |
| 1011 | 5852 | | 13725 | 16350 | 1012 | 8480 | 18978 | 21606 | 24234 |
| 1013 | 5853 | 11104 | 13726 | 16351 | 1014 | 8481 | 18979 | 21607 | 24235 |
| 1015 | 5854 | 11105 | 13727 | 16352 | 1016 | 8482 | 18980 | 21608 | 24236 |
| 1017 | 5855 | 11106 | 13728 | 16353 | 1018 | 8483 | 18981 | 21609 | 24237 |
| 1019 | 5856 | 11107 | 13729 | 16354 | 1020 | 8484 | 18982 | 21610 | 24238 |
| 1021 | 5857 | 11108 | 13730 | 16355 | 1022 | 8485 | 18983 | 21611 | 24239 |
| 1023 | 5858 | 11109 | 13731 | 16356 | 1024 | 8486 | 18984 | 21612 | 24240 |
| 1025 | 5859 | 11110 | 13732 | 16357 | 1026 | 8487 | 18985 | 21613 | 24241 |
| 1027 | 5860 | 11111 | 13733 | 16358 | 1028 | 8488 | 18986 | 21614 | 24242 |
| 1029 | 5861 | 11112 | 13734 | 16359 | 1030 | 8489 | 18987 | 21615 | 24243 |
| 1031 | 5862 | 11113 | 13735 | 16360 | 1032 | 8490 | 18988 | 21616 | 24244 |
| 1033 | 5863 | 11114 | 13736 | 16361 | 1034 | 8491 | 18989 | 21617 | 24245 |
| 1035 | 5864 | 11115 | 13737 | 16362 | 1036 | 8492 | 18990 | 21618 | 24246 |
| 1037 | 5865 | 11116 | 13738 | 16363 | 1038 | 8493 | 18991 | 21619 | 24247 |
| 1039 | 5866 | 11117 | 13739 | 16364 | 1040 | 8494 | 18992 | 21620 | 24248 |
| 1041 | 5867 | 11118 | 13740 | 16365 | 1042 | 8495 | 18993 | 21621 | 24249 |
| 1043 | 5868 | 11119 | 13741 | 16366 | 1044 | 8496 | 18994 | 21622 | 24250 |
| 1045 | 5869 | 11120 | 13742 | 16367 | 1046 | 8497 | 18995 | 21623 | 24251 |
| 1047 | 5870 | 11121 | 13743 | 16368 | 1048 | 8498 | 18996 | 21624 | 24252 |
| 1049 | 5871 | 11122 | 13744 | 16369 | 1050 | 8499 | 18997 | 21625 | 24253 |
| 1051 | 5872 | 11123 | 13745 | 16370 | 1052 | 8500 | 18998 | 21626 | 24254 |
| 1053 | 5873 | 11124 | 13746 | 16371 | 1054 | 8501 | 18999 | 21627 | 24255 |
| 1055 | 5874 | 11125 | 13747 | 16372 | 1056 | 8502 | 19000 | 21628 | 24256 |
| 1057 | 5875 | 11126 | 13748 | 16373 | 1058 | 8503 | 19001 | 21629 | 24257 |
| 1059 | 5876 | 11127 | 13749 | 16374 | 1060 | 8504 | 19002 | 21630 | 24258 |
| 1061 | 5877 | 11128 | 13750 | 16375 | 1062 | 8505 | 19003 | 21631 | 24259 |
| 1063 | 5878 | 11129 | 13751 | 16376 | 1064 | 8506 | 19004 | 21632 | 24260 |
| 1065 | 5879 | 11130 | 13752 | 16377 | 1066 | 8507 | 19005 | 21633 | 24261 |
| 1067 | 5880 | 11131 | 13753 | 16378 | 1068 | 8508 | 19006 | 21634 | 24262 |
| 1069 | 5881 | 11132 | 13754 | 16379 | 1070 | 8509 | 19007 | 21635 | 24263 |
| 1071 | 5882 | 11133 | 13755 | 16380 | 1072 | 8510 | 19008 | 21636 | 24264 |
| 1073 | 5883 | 11134 | 13756 | 16381 | 1074 | 8511 | 19009 | 21637 | 24265 |
| 1075 | 5884 | 11135 | 13757 | 16382 | 1076 | 8512 | 19010 | 21638 | 24266 |
| 1077 | 5885 | 11136 | 13758 | 16383 | 1078 | 8513 | 19011 | 21639 | 24267 |
| 1079 | 5886 | 11137 | 13759 | 16384 | 1080 | 8514 | 19012 | 21640 | 24268 |
| 1081 | 5887 | 11138 | 13760 | 16385 | 1082 | 8515 | 19013 | 21641 | 24269 |
| 1083 | 5888 | 11139 | 13761 | 16386 | 1084 | 8516 | 19014 | 21642 | 24270 |
| 1085 | 5889 | 11140 | 13762 | 16387 | 1086 | 8517 | 19015 | 21643 | 24271 |
| 1087 | 5890 | 11141 | 13763 | 16388 | 1088 | 8518 | 19016 | 21644 | 24272 |
| 1089 | 5891 | 11142 | 13764 | 16389 | 1090 | 8519 | 19017 | 21645 | 24273 |
| 1091 | 5892 | 11143 | 13765 | 16390 | 1092 | 8520 | 19018 | 21646 | 24274 |
| 1093 | 5893 | 11144 | 13766 | 16391 | 1094 | 8521 | 19019 | 21647 | 24275 |
| 1095 | 5894 | 11145 | 13767 | 16392 | 1096 | 8522 | 19020 | 21648 | 24276 |
| 1097 | 5895 | 11146 | 13768 | 16393 | 1098 | 8523 | 19021 | 21649 | 24277 |
| 1099 | 5896 | 11147 | 13769 | 16394 | 1100 | 8524 | 19022 | 21650 | 24278 |
| 1101 | 5897 | 11148 | 13770 | 16395 | 1102 | 8525 | 19023 | 21651 | 24279 |
| 1103 | 5898 | 11149 | 13771 | 16396 | 1104 | 8526 | 19024 | 21652 | 24280 |
| 1105 | 5899 | 11150 | 13772 | 16397 | 1106 | 8527 | 19025 | 21653 | 24281 |
| 1107 | 5900 | 11151 | 13773 | 16398 | 1108 | 8528 | 19026 | 21654 | 24282 |
| 1109 | 5901 | 11152 | 13774 | 16399 | 1110 | 8529 | 19027 | 21655 | 24283 |
| 1111 | 5902 | 11153 | 13775 | 16400 | 1112 | 8530 | 19028 | 21656 | 24284 |
| 1113 | 5903 | 11154 | 13776 | 16401 | 1114 | 8531 | 19029 | 21657 | 24285 |
| 1115 | 5904 | 11155 | 13777 | 16402 | 1116 | 8532 | 19030 | 21658 | 24286 |
| 1117 | 5905 | 11156 | 13778 | 16403 | 1118 | 8533 | 19031 | 21659 | 24287 |
| 1119 | 5906 | 11157 | 13779 | 16404 | 1120 | 8534 | 19032 | 21660 | 24288 |
| 1121 | 5907 | 11158 | 13780 | 16405 | 1122 | 8535 | 19033 | 21661 | 24289 |
| 1123 | 5908 | 11159 | 13781 | 16406 | 1124 | 8536 | 19034 | 21662 | 24290 |
| 1125 | 5909 | 11160 | 13782 | 16407 | 1126 | 8537 | 19035 | 21663 | 24291 |
| 1127 | 5910 | 11161 | 13783 | 16408 | 1128 | 8538 | 19036 | 21664 | 24292 |
| 1129 | 5911 | 11162 | 13784 | 16409 | 1130 | 8539 | 19037 | 21665 | 24293 |
| 1131 | 5912 | 11163 | 13785 | 16410 | 1132 | 8540 | 19038 | 21666 | 24294 |
| 1133 | 5913 | 11164 | 13786 | 16411 | 1134 | 8541 | 19039 | 21667 | 24295 |
| 1135 | 5914 | 11165 | 13787 | 16412 | 1136 | 8542 | 19040 | 21668 | 24296 |
| 1137 | 5915 | 11166 | 13788 | 16413 | 1138 | 8543 | 19041 | 21669 | 24297 |
| 1139 | 5916 | 11167 | 13789 | 16414 | 1140 | 8544 | 19042 | 21670 | 24298 |
| 1141 | 5917 | 11168 | 13790 | 16415 | 1142 | 8545 | 19043 | 21671 | 24299 |
| 1143 | 5918 | 11169 | 13791 | 16416 | 1144 | 8546 | 19044 | 21672 | 24300 |
| 1145 | 5919 | 11170 | 13792 | 16417 | 1146 | 8547 | 19045 | 21673 | 24301 |
| 1147 | 5920 | 11171 | 13793 | 16418 | 1148 | 8548 | 19046 | 21674 | 24302 |
| 1149 | 5921 | 11172 | 13794 | 16419 | 1150 | 8549 | 19047 | 21675 | 24303 |
| 1151 | 5922 | 11173 | 13795 | 16420 | 1152 | 8550 | 19048 | 21676 | 24304 |
| 1153 | 5923 | 11174 | 13796 | 16421 | 1154 | 8551 | 19049 | 21677 | 24305 |
| 1155 | 5924 | 11175 | 13797 | 16422 | 1156 | 8552 | 19050 | 21678 | 24306 |
| 1157 | 5925 | 11176 | 13798 | 16423 | 1158 | 8553 | 19051 | 21679 | 24307 |
| 1159 | 5926 | 11177 | 13799 | 16424 | 1160 | 8554 | 19052 | 21680 | 24308 |
| 1161 | 5927 | 11178 | 13800 | 16425 | 1162 | 8555 | 19053 | 21681 | 24309 |
| 1163 | 5928 | 11179 | 13801 | 16426 | 1164 | 8556 | 19054 | 21682 | 24310 |
| 1165 | 5929 | 11180 | 13802 | 16427 | 1166 | 8557 | 19055 | 21683 | 24311 |
| 1167 | 5930 | 11181 | 13803 | 16428 | 1168 | 8558 | 19056 | 21684 | 24312 |
| 1169 | 5931 | 11182 | 13804 | 16429 | 1170 | 8559 | 19057 | 21685 | 24313 |
| 1171 | 5932 | 11183 | 13805 | 16430 | 1172 | 8560 | 19058 | 21686 | 24314 |
| 1173 | 5933 | 11184 | 13806 | 16431 | 1174 | 8561 | 19059 | 21687 | 24315 |
| 1175 | 5934 | 11185 | 13807 | 16432 | 1176 | 8562 | 19060 | 21688 | 24316 |
| 1177 | 5935 | 11186 | 13808 | 16433 | 1178 | 8563 | 19061 | 21689 | 24317 |
| 1179 | 5936 | 11187 | 13809 | 16434 | 1180 | 8564 | 19062 | 21690 | 24318 |
| 1181 | 5937 | 11188 | 13810 | 16435 | 1182 | 8565 | 19063 | 21691 | 24319 |
| 1183 | 5938 | 11189 | 13811 | 16436 | 1184 | 8566 | 19064 | 21692 | 24320 |
| 1185 | 5939 | 11190 | 13812 | 16437 | 1186 | 8567 | 19065 | 21693 | 24321 |
| 1187 | 5940 | 11191 | 13813 | 16438 | 1188 | 8568 | 19066 | 21694 | 24322 |
| 1189 | 5941 | 11192 | 13814 | 16439 | 1190 | 8569 | 19067 | 21695 | 24323 |
| 1191 | 5942 | 11193 | 13815 | 16440 | 1192 | 8570 | 19068 | 21696 | 24324 |
| 1193 | 5943 | 11194 | 13816 | 16441 | 1194 | 8571 | 19069 | 21697 | 24325 |
| 1195 | 5944 | 11195 | 13817 | 16442 | 1196 | 8572 | 19070 | 21698 | 24326 |
| 1197 | 5945 | 11196 | 13818 | 16443 | 1198 | 8573 | 19071 | 21699 | 24327 |
| 1199 | 5946 | 11197 | 13819 | 16444 | 1200 | 8574 | 19072 | 21700 | 24328 |
| 1201 | 5947 | 11198 | 13820 | 16445 | 1202 | 8575 | 19073 | 21701 | 24329 |
| 1203 | 5948 | 11199 | 13821 | 16446 | 1204 | 8576 | 19074 | 21702 | 24330 |
| 1205 | 5949 | 11200 | 13822 | 16447 | 1206 | 8577 | 19075 | 21703 | 24331 |
| 1207 | 5950 | 11201 | 13823 | 16448 | 1208 | 8578 | 19076 | 21704 | 24332 |
| 1209 | 5951 | 11202 | 13824 | 16449 | 1210 | 8579 | 19077 | 21705 | 24333 |
| 1211 | 5952 | 11203 | 13825 | 16450 | 1212 | 8580 | 19078 | 21706 | 24334 |
| 1213 | 5953 | 11204 | 13826 | 16451 | 1214 | 8581 | 19079 | 21707 | 24335 |
| 1215 | 5954 | 11205 | 13827 | 16452 | 1216 | 8582 | 19080 | 21708 | 24336 |
| 1217 | 5955 | 11206 | 13828 | 16453 | 1218 | 8583 | 19081 | 21709 | 24337 |
| 1219 | 5956 | 11207 | 13829 | 16454 | 1220 | 8584 | 19082 | 21710 | 24338 |
| 1221 | 5957 | 11208 | 13830 | 16455 | 1222 | 8585 | 19083 | 21711 | 24339 |
| 1223 | 5958 | 11209 | 13831 | 16456 | 1224 | 8586 | 19084 | 21712 | 24340 |
| 1225 | 5959 | 11210 | 13832 | 16457 | 1226 | 8587 | 19085 | 21713 | 24341 |
| 1227 | 5960 | 11211 | 13833 | 16458 | 1228 | 8588 | 19086 | 21714 | 24342 |
| 1229 | 5961 | 11212 | 13834 | 16459 | 1230 | 8589 | 19087 | 21715 | 24343 |
| 1231 | 5962 | 11213 | 13835 | 16460 | 1232 | 8590 | 19088 | 21716 | 24344 |
| 1233 | 5963 | 11214 | 13836 | 16461 | 1234 | 8591 | 19089 | 21717 | 24345 |
| 1235 | 5964 | 11215 | 13837 | 16462 | 1236 | 8592 | 19090 | 21718 | 24346 |
| 1237 | 5965 | 11216 | 13838 | 16463 | 1238 | 8593 | 19091 | 21719 | 24347 |
| 1239 | 5966 | 11217 | 13839 | 16464 | 1240 | 8594 | 19092 | 21720 | 24348 |
| 1241 | 5967 | 11218 | 13840 | 16465 | 1242 | 8595 | 19093 | 21721 | 24349 |
| 1243 | 5968 | 11219 | 13841 | 16466 | 1244 | 8596 | 19094 | 21722 | 24350 |
| 1245 | 5969 | 11220 | 13842 | 16467 | 1246 | 8597 | 19095 | 21723 | 24351 |
| 1247 | 5970 | 11221 | 13843 | 16468 | 1248 | 8598 | 19096 | 21724 | 24352 |
| 1249 | 5971 | 11222 | 13844 | 16469 | 1250 | 8599 | 19097 | 21725 | 24353 |
| 1251 | 5972 | 11223 | 13845 | 16470 | 1252 | 8600 | 19098 | 21726 | 24354 |
| 1253 | 5973 | 11224 | 13846 | 16471 | 1254 | 8601 | 19099 | 21727 | 24355 |
| 1255 | 5974 | 11225 | 13847 | 16472 | 1256 | 8602 | 19100 | 21728 | 24356 |
| 1257 | 5975 | 11226 | 13848 | 16473 | 1258 | 8603 | 19101 | 21729 | 24357 |
| 1259 | 5976 | 11227 | 13849 | 16474 | 1260 | 8604 | 19102 | 21730 | 24358 |
| 1261 | 5977 | 11228 | 13850 | 16475 | 1262 | 8605 | 19103 | 21731 | 24359 |
| 1263 | 5978 | 11229 | 13851 | 16476 | 1264 | 8606 | 19104 | 21732 | 24360 |
| 1265 | 5979 | 11230 | 13852 | 16477 | 1266 | 8607 | 19105 | 21733 | 24361 |
| 1267 | 5980 | 11231 | 13853 | 16478 | 1268 | 8608 | 19106 | 21734 | 24362 |
| 1269 | 5981 | 11232 | 13854 | 16479 | 1270 | 8609 | 19107 | 21735 | 24363 |
| 1271 | 5982 | 11233 | 13855 | 16480 | 1272 | 8610 | 19108 | 21736 | 24364 |
| 1273 | 5983 | 11234 | 13856 | 16481 | 1274 | 8611 | 19109 | 21737 | 24365 |
| 1275 | 5984 | 11235 | 13857 | 16482 | 1276 | 8612 | 19110 | 21738 | 24366 |
| 1277 | 5985 | 11236 | 13858 | 16483 | 1278 | 8613 | 19111 | 21739 | 24367 |
| 1279 | 5986 | 11237 | 13859 | 16484 | 1280 | 8614 | 19112 | 21740 | 24368 |
| 1281 | 5987 | 11238 | 13860 | 16485 | 1282 | 8615 | 19113 | 21741 | 24369 |
| 1283 | 5988 | 11239 | 13861 | 16486 | 1284 | 8616 | 19114 | 21742 | 24370 |
| 1285 | 5989 | 11240 | 13862 | 16487 | 1286 | 8617 | 19115 | 21743 | 24371 |
| 1287 | 5990 | 11241 | 13863 | 16488 | 1288 | 8618 | 19116 | 21744 | 24372 |
| 1289 | 5991 | 11242 | 13864 | 16489 | 1290 | 8619 | 19117 | 21745 | 24373 |
| 1291 | 5992 | 11243 | 13865 | 16490 | 1292 | 8620 | 19118 | 21746 | 24374 |
| 1293 | 5993 | 11244 | 13866 | 16491 | 1294 | 8621 | 19119 | 21747 | 24375 |
| 1295 | 5994 | 11245 | 13867 | 16492 | 1296 | 8622 | 19120 | 21748 | 24376 |
| 1297 | 5995 | 11246 | 13868 | 16493 | 1298 | 8623 | 19121 | 21749 | 24377 |
| 1299 | 5996 | 11247 | 13869 | 16494 | 1300 | 8624 | 19122 | 21750 | 24378 |
| 1301 | 5997 | 11248 | 13870 | 16495 | 1302 | 8625 | 19123 | 21751 | 24379 |
| 1303 | 5998 | 11249 | 13871 | 16496 | 1304 | 8626 | 19124 | 21752 | 24380 |
| 1305 | 5999 | 11250 | 13872 | 16497 | 1306 | 8627 | 19125 | 21753 | 24381 |
| 1307 | 6000 | 11251 | 13873 | 16498 | 1308 | 8628 | 19126 | 21754 | 24382 |
| 1309 | 6001 | 11252 | 13874 | 16499 | 1310 | 8629 | 19127 | 21755 | 24383 |
| 1311 | 6002 | 11253 | 13875 | 16500 | 1312 | 8630 | 19128 | 21756 | 24384 |
| 1313 | 6003 | 11254 | 13876 | 16501 | 1314 | 8631 | 19129 | 21757 | 24385 |
| 1315 | 6004 | 11255 | 13877 | 16502 | 1316 | 8632 | 19130 | 21758 | 24386 |
| 1317 | 6005 | 11256 | 13878 | 16503 | 1318 | 8633 | 19131 | 21759 | 24387 |
| 1319 | 6006 | 11257 | 13879 | 16504 | 1320 | 8634 | 19132 | 21760 | 24388 |
| 1321 | 6007 | 11258 | 13880 | 16505 | 1322 | 8635 | 19133 | 21761 | 24389 |
| 1323 | 6008 | 11259 | 13881 | 16506 | 1324 | 8636 | 19134 | 21762 | 24390 |
| 1325 | 6009 | 11260 | 13882 | 16507 | 1326 | 8637 | 19135 | 21763 | 24391 |
| 1327 | 6010 | 11261 | 13883 | 16508 | 1328 | 8638 | 19136 | 21764 | 24392 |
| 1329 | 6011 | 11262 | 13884 | 16509 | 1330 | 8639 | 19137 | 21765 | 24393 |
| 1331 | 6012 | 11263 | 13885 | 16510 | 1332 | 8640 | 19138 | 21766 | 24394 |
| 1333 | 6013 | 11264 | 13886 | 16511 | 1334 | 8641 | 19139 | 21767 | 24395 |
| 1335 | 6014 | 11265 | 13887 | 16512 | 1336 | 8642 | 19140 | 21768 | 24396 |
| 1337 | 6015 | 11266 | 13888 | 16513 | 1338 | 8643 | 19141 | 21769 | 24397 |
| 1339 | 6016 | 11267 | 13889 | 16514 | 1340 | 8644 | 19142 | 21770 | 24398 |
| 1341 | 6017 | 11268 | 13890 | 16515 | 1342 | 8645 | 19143 | 21771 | 24399 |
| 1343 | 6018 | 11269 | 13891 | 16516 | 1344 | 8646 | 19144 | 21772 | 24400 |
| 1345 | 6019 | 11270 | 13892 | 16517 | 1346 | 8647 | 19145 | 21773 | 24401 |
| 1347 | 6020 | 11271 | 13893 | 16518 | 1348 | 8648 | 19146 | 21774 | 24402 |
| 1349 | 6021 | 11272 | 13894 | 16519 | 1350 | 8649 | 19147 | 21775 | 24403 |
| 1351 | 6022 | 11273 | 13895 | 16520 | 1352 | 8650 | 19148 | 21776 | 24404 |
| 1353 | 6023 | 11274 | 13896 | 16521 | 1354 | 8651 | 19149 | 21777 | 24405 |
| 1355 | 6024 | 11275 | 13897 | 16522 | 1356 | 8652 | 19150 | 21778 | 24406 |
| 1357 | 6025 | 11276 | 13898 | 16523 | 1358 | 8653 | 19151 | 21779 | 24407 |
| 1359 | 6026 | 11277 | 13899 | 16524 | 1360 | 8654 | 19152 | 21780 | 24408 |
| 1361 | 6027 | 11278 | 13900 | 16525 | 1362 | 8655 | 19153 | 21781 | 24409 |
| 1363 | 6028 | 11279 | 13901 | 16526 | 1364 | 8656 | 19154 | 21782 | 24410 |
| 1365 | 6029 | 11280 | 13902 | 16527 | 1366 | 8657 | 19155 | 21783 | 24411 |
| 1367 | 6030 | 11281 | 13903 | 16528 | 1368 | 8658 | 19156 | 21784 | 24412 |
| 1369 | 6031 | 11282 | 13904 | 16529 | 1370 | 8659 | 19157 | 21785 | 24413 |
| 1371 | 6032 | 11283 | 13905 | 16530 | 1372 | 8660 | 19158 | 21786 | 24414 |
| 1373 | 6033 | 11284 | 13906 | 16531 | 1374 | 8661 | 19159 | 21787 | 24415 |
| 1375 | 6034 | 11285 | 13907 | 16532 | 1376 | 8662 | 19160 | 21788 | 24416 |
| 1377 | 6035 | 11286 | 13908 | 16533 | 1378 | 8663 | 19161 | 21789 | 24417 |
| 1379 | 6036 | 11287 | 13909 | 16534 | 1380 | 8664 | 19162 | 21790 | 24418 |
| 1381 | 6037 | 11288 | 13910 | 16535 | 1382 | 8665 | 19163 | 21791 | 24419 |
| 1383 | 6038 | 11289 | 13911 | 16536 | 1384 | 8666 | 19164 | 21792 | 24420 |
| 1385 | 6039 | 11290 | 13912 | 16537 | 1386 | 8667 | 19165 | 21793 | 24421 |
| 1387 | 6040 | 11291 | 13913 | 16538 | 1388 | 8668 | 19166 | 21794 | 24422 |
| 1389 | 6041 | 11292 | 13914 | 16539 | 1390 | 8669 | 19167 | 21795 | 24423 |
| 1391 | 6042 | 11293 | 13915 | 16540 | 1392 | 8670 | 19168 | 21796 | 24424 |
| 1393 | 6043 | 11294 | 13916 | 16541 | 1394 | 8671 | 19169 | 21797 | 24425 |
| 1395 | 6044 | 11295 | 13917 | 16542 | 1396 | 8672 | 19170 | 21798 | 24426 |
| 1397 | 6045 | 11296 | 13918 | 16543 | 1398 | 8673 | 19171 | 21799 | 24427 |
| 1399 | 6046 | 11297 | 13919 | 16544 | 1400 | 8674 | 19172 | 21800 | 24428 |
| 1401 | 6047 | 11298 | 13920 | 16545 | 1402 | 8675 | 19173 | 21801 | 24429 |
| 1403 | 6048 | 11299 | 13921 | 16546 | 1404 | 8676 | 19174 | 21802 | 24430 |
| 1405 | 6049 | 11300 | 13922 | 16547 | 1406 | 8677 | 19175 | 21803 | 24431 |
| 1407 | 6050 | 11301 | 13923 | 16548 | 1408 | 8678 | 19176 | 21804 | 24432 |
| 1409 | 6051 | 11302 | 13924 | 16549 | 1410 | 8679 | 19177 | 21805 | 24433 |
| 1411 | 6052 | 11303 | 13925 | 16550 | 1412 | 8680 | 19178 | 21806 | 24434 |
| 1413 | 6053 | 11304 | 13926 | 16551 | 1414 | 8681 | 19179 | 21807 | 24435 |
| 1415 | 6054 | 11305 | 13927 | 16552 | 1416 | 8682 | 19180 | 21808 | 24436 |
| 1417 | 6055 | 11306 | 13928 | 16553 | 1418 | 8683 | 19181 | 21809 | 24437 |
| 1419 | 6056 | 11307 | 13929 | 16554 | 1420 | 8684 | 19182 | 21810 | 24438 |
| 1421 | 6057 | 11308 | 13930 | 16555 | 1422 | 8685 | 19183 | 21811 | 24439 |
| 1423 | 6058 | 11309 | 13931 | 16556 | 1424 | 8686 | 19184 | 21812 | 24440 |
| 1425 | 6059 | 11310 | 13932 | 16557 | 1426 | 8687 | 19185 | 21813 | 24441 |
| 1427 | 6060 | 11311 | 13933 | 16558 | 1428 | 8688 | 19186 | 21814 | 24442 |
| 1429 | 6061 | 11312 | 13934 | 16559 | 1430 | 8689 | 19187 | 21815 | 24443 |
| 1431 | 6062 | 11313 | 13935 | 16560 | 1432 | 8690 | 19188 | 21816 | 24444 |
| 1433 | 6063 | 11314 | 13936 | 16561 | 1434 | 8691 | 19189 | 21817 | 24445 |
| 1435 | 6064 | 11315 | 13937 | 16562 | 1436 | 8692 | 19190 | 21818 | 24446 |
| 1437 | 6065 | 11316 | 13938 | 16563 | 1438 | 8693 | 19191 | 21819 | 24447 |
| 1439 | 6066 | 11317 | 13939 | 16564 | 1440 | 8694 | 19192 | 21820 | 24448 |
| 1441 | 6067 | 11318 | 13940 | 16565 | 1442 | 8695 | 19193 | 21821 | 24449 |
| 1443 | 6068 | 11319 | 13941 | 16566 | 1444 | 8696 | 19194 | 21822 | 24450 |
| 1445 | 6069 | 11320 | 13942 | 16567 | 1446 | 8697 | 19195 | 21823 | 24451 |
| 1447 | 6070 | 11321 | 13943 | 16568 | 1448 | 8698 | 19196 | 21824 | 24452 |
| 1449 | 6071 | 11322 | 13944 | 16569 | 1450 | 8699 | 19197 | 21825 | 24453 |
| 1451 | 6072 | 11323 | 13945 | 16570 | 1452 | 8700 | 19198 | 21826 | 24454 |
| 1453 | 6073 | 11324 | 13946 | 16571 | 1454 | 8701 | 19199 | 21827 | 24455 |
| 1455 | 6074 | 11325 | 13947 | 16572 | 1456 | 8702 | 19200 | 21828 | 24456 |
| 1457 | 6075 | 11326 | 13948 | 16573 | 1458 | 8703 | 19201 | 21829 | 24457 |
| 1459 | 6076 | 11327 | 13949 | 16574 | 1460 | 8704 | 19202 | 21830 | 24458 |
| 1461 | 6077 | 11328 | 13950 | 16575 | 1462 | 8705 | 19203 | 21831 | 24459 |
| 1463 | 6078 | 11329 | 13951 | 16576 | 1464 | 8706 | 19204 | 21832 | 24460 |
| 1465 | 6079 | 11330 | 13952 | 16577 | 1466 | 8707 | 19205 | 21833 | 24461 |
| 1467 | 6080 | 11331 | 13953 | 16578 | 1468 | 8708 | 19206 | 21834 | 24462 |
| 1469 | 6081 | 11332 | 13954 | 16579 | 1470 | 8709 | 19207 | 21835 | 24463 |
| 1471 | 6082 | 11333 | 13955 | 16580 | 1472 | 8710 | 19208 | 21836 | 24464 |
| 1473 | 6083 | 11334 | 13956 | 16581 | 1474 | 8711 | 19209 | 21837 | 24465 |
| 1475 | 6084 | 11335 | 13957 | 16582 | 1476 | 8712 | 19210 | 21838 | 24466 |
| 1477 | 6085 | 11336 | 13958 | 16583 | 1478 | 8713 | 19211 | 21839 | 24467 |
| 1479 | 6086 | 11337 | 13959 | 16584 | 1480 | 8714 | 19212 | 21840 | 24468 |
| 1481 | 6087 | 11338 | 13960 | 16585 | 1482 | 8715 | 19213 | 21841 | 24469 |
| 1483 | 6088 | 11339 | 13961 | 16586 | 1484 | 8716 | 19214 | 21842 | 24470 |
| 1485 | 6089 | 11340 | 13962 | 16587 | 1486 | 8717 | 19215 | 21843 | 24471 |
| 1487 | 6090 | 11341 | 13963 | 16588 | 1488 | 8718 | 19216 | 21844 | 24472 |
| 1489 | 6091 | 11342 | 13964 | 16589 | 1490 | 8719 | 19217 | 21845 | 24473 |
| 1491 | 6092 | 11343 | 13965 | 16590 | 1492 | 8720 | 19218 | 21846 | 24474 |
| 1493 | 6093 | 11344 | 13966 | 16591 | 1494 | 8721 | 19219 | 21847 | 24475 |
| 1495 | 6094 | 11345 | 13967 | 16592 | 1496 | 8722 | 19220 | 21848 | 24476 |
| 1497 | 6095 | 11346 | 13968 | 16593 | 1498 | 8723 | 19221 | 21849 | 24477 |
| 1499 | 6096 | 11347 | 13969 | 16594 | 1500 | 8724 | 19222 | 21850 | 24478 |
| 1501 | 6097 | 11348 | 13970 | 16595 | 1502 | 8725 | 19223 | 21851 | 24479 |
| 1503 | 6098 | 11349 | 13971 | 16596 | 1504 | 8726 | 19224 | 21852 | 24480 |
| 1505 | 6099 | 11350 | 13972 | 16597 | 1506 | 8727 | 19225 | 21853 | 24481 |
| 1507 | 6100 | 11351 | 13973 | 16598 | 1508 | 8728 | 19226 | 21854 | 24482 |
| 1509 | 6101 | 11352 | 13974 | 16599 | 1510 | 8729 | 19227 | 21855 | 24483 |
| 1511 | 6102 | 11353 | 13975 | 16600 | 1512 | 8730 | 19228 | 21856 | 24484 |
| 1513 | 6103 | 11354 | 13976 | 16601 | 1514 | 8731 | 19229 | 21857 | 24485 |
| 1515 | 6104 | 11355 | 13977 | 16602 | 1516 | 8732 | 19230 | 21858 | 24486 |
| 1517 | 6105 | 11356 | 13978 | 16603 | 1518 | 8733 | 19231 | 21859 | 24487 |
| 1519 | 6106 | 11357 | 13979 | 16604 | 1520 | 8734 | 19232 | 21860 | 24488 |
| 1521 | 6107 | 11358 | 13980 | 16605 | 1522 | 8735 | 19233 | 21861 | 24489 |
| 1523 | 6108 | 11359 | 13981 | 16606 | 1524 | 8736 | 19234 | 21862 | 24490 |
| 1525 | 6109 | 11360 | 13982 | 16607 | 1526 | 8737 | 19235 | 21863 | 24491 |
| 1527 | 6110 | 11361 | 13983 | 16608 | 1528 | 8738 | 19236 | 21864 | 24492 |
| 1529 | 6111 | 11362 | 13984 | 16609 | 1530 | 8739 | 19237 | 21865 | 24493 |
| 1531 | 6112 | 11363 | 13985 | 16610 | 1532 | 8740 | 19238 | 21866 | 24494 |
| 1533 | 6113 | 11364 | 13986 | 16611 | 1534 | 8741 | 19239 | 21867 | 24495 |
| 1535 | 6114 | 11365 | 13987 | 16612 | 1536 | 8742 | 19240 | 21868 | 24496 |
| 1537 | 6115 | 11366 | 13988 | 16613 | 1538 | 8743 | 19241 | 21869 | 24497 |
| 1539 | 6116 | 11367 | 13989 | 16614 | 1540 | 8744 | 19242 | 21870 | 24498 |
| 1541 | 6117 | 11368 | 13990 | 16615 | 1542 | 8745 | 19243 | 21871 | 24499 |
| 1543 | 6118 | 11369 | 13991 | 16616 | 1544 | 8746 | 19244 | 21872 | 24500 |
| 1545 | 6119 | 11370 | 13992 | 16617 | 1546 | 8747 | 19245 | 21873 | 24501 |
| 1547 | 6120 | 11371 | 13993 | 16618 | 1548 | 8748 | 19246 | 21874 | 24502 |
| 1549 | 6121 | 11372 | 13994 | 16619 | 1550 | 8749 | 19247 | 21875 | 24503 |
| 1551 | 6122 | 11373 | 13995 | 16620 | 1552 | 8750 | 19248 | 21876 | 24504 |
| 1553 | 6123 | 11374 | 13996 | 16621 | 1554 | 8751 | 19249 | 21877 | 24505 |
| 1555 | 6124 | 11375 | 13997 | 16622 | 1556 | 8752 | 19250 | 21878 | 24506 |
| 1557 | 6125 | 11376 | 13998 | 16623 | 1558 | 8753 | 19251 | 21879 | 24507 |
| 1559 | 6126 | 11377 | 13999 | 16624 | 1560 | 8754 | 19252 | 21880 | 24508 |
| 1561 | 6127 | 11378 | 14000 | 16625 | 1562 | 8755 | 19253 | 21881 | 24509 |
| 1563 | 6128 | 11379 | 14001 | 16626 | 1564 | 8756 | 19254 | 21882 | 24510 |
| 1565 | 6129 | 11380 | 14002 | 16627 | 1566 | 8757 | 19255 | 21883 | 24511 |
| 1567 | 6130 | 11381 | 14003 | 16628 | 1568 | 8758 | 19256 | 21884 | 24512 |
| 1569 | 6131 | 11382 | 14004 | 16629 | 1570 | 8759 | 19257 | 21885 | 24513 |
| 1571 | 6132 | 11383 | 14005 | 16630 | 1572 | 8760 | 19258 | 21886 | 24514 |
| 1573 | 6133 | 11384 | 14006 | 16631 | 1574 | 8761 | 19259 | 21887 | 24515 |
| 1575 | 6134 | 11385 | 14007 | 16632 | 1576 | 8762 | 19260 | 21888 | 24516 |
| 1577 | 6135 | 11386 | 14008 | 16633 | 1578 | 8763 | 19261 | 21889 | 24517 |
| 1579 | 6136 | 11387 | 14009 | 16634 | 1580 | 8764 | 19262 | 21890 | 24518 |
| 1581 | 6137 | 11388 | 14010 | 16635 | 1582 | 8765 | 19263 | 21891 | 24519 |
| 1583 | 6138 | 11389 | 14011 | 16636 | 1584 | 8766 | 19264 | 21892 | 24520 |
| 1585 | 6139 | 11390 | 14012 | 16637 | 1586 | 8767 | 19265 | 21893 | 24521 |
| 1587 | 6140 | 11391 | 14013 | 16638 | 1588 | 8768 | 19266 | 21894 | 24522 |
| 1589 | 6141 | 11392 | 14014 | 16639 | 1590 | 8769 | 19267 | 21895 | 24523 |
| 1591 | 6142 | 11393 | 14015 | 16640 | 1592 | 8770 | 19268 | 21896 | 24524 |
| 1593 | 6143 | 11394 | 14016 | 16641 | 1594 | 8771 | 19269 | 21897 | 24525 |
| 1595 | 6144 | 11395 | 14017 | 16642 | 1596 | 8772 | 19270 | 21898 | 24526 |
| 1597 | 6145 | 11396 | 14018 | 16643 | 1598 | 8773 | 19271 | 21899 | 24527 |
| 1599 | 6146 | 11397 | 14019 | 16644 | 1600 | 8774 | 19272 | 21900 | 24528 |
| 1601 | 6147 | 11398 | 14020 | 16645 | 1602 | 8775 | 19273 | 21901 | 24529 |
| 1603 | 6148 | 11399 | 14021 | 16646 | 1604 | 8776 | 19274 | 21902 | 24530 |
| 1605 | 6149 | 11400 | 14022 | 16647 | 1606 | 8777 | 19275 | 21903 | 24531 |
| 1607 | 6150 | 11401 | 14023 | 16648 | 1608 | 8778 | 19276 | 21904 | 24532 |
| 1609 | 6151 | 11402 | 14024 | 16649 | 1610 | 8779 | 19277 | 21905 | 24533 |
| 1611 | 6152 | 11403 | 14025 | 16650 | 1612 | 8780 | 19278 | 21906 | 24534 |
| 1613 | 6153 | 11404 | 14026 | 16651 | 1614 | 8781 | 19279 | 21907 | 24535 |
| 1615 | 6154 | 11405 | 14027 | 16652 | 1616 | 8782 | 19280 | 21908 | 24536 |
| 1617 | 6155 | 11406 | 14028 | 16653 | 1618 | 8783 | 19281 | 21909 | 24537 |
| 1619 | 6156 | 11407 | 14029 | 16654 | 1620 | 8784 | 19282 | 21910 | 24538 |
| 1621 | 6157 | 11408 | 14030 | 16655 | 1622 | 8785 | 19283 | 21911 | 24539 |
| 1623 | 6158 | 11409 | 14031 | 16656 | 1624 | 8786 | 19284 | 21912 | 24540 |
| 1625 | 6159 | 11410 | 14032 | 16657 | 1626 | 8787 | 19285 | 21913 | 24541 |
| 1627 | 6160 | 11411 | 14033 | 16658 | 1628 | 8788 | 19286 | 21914 | 24542 |
| 1629 | 6161 | 11412 | 14034 | 16659 | 1630 | 8789 | 19287 | 21915 | 24543 |
| 1631 | 6162 | 11413 | 14035 | 16660 | 1632 | 8790 | 19288 | 21916 | 24544 |
| 1633 | 6163 | 11414 | 14036 | 16661 | 1634 | 8791 | 19289 | 21917 | 24545 |
| 1635 | 6164 | 11415 | 14037 | 16662 | 1636 | 8792 | 19290 | 21918 | 24546 |
| 1637 | 6165 | 11416 | 14038 | 16663 | 1638 | 8793 | 19291 | 21919 | 24547 |
| 1639 | 6166 | 11417 | 14039 | 16664 | 1640 | 8794 | 19292 | 21920 | 24548 |
| 1641 | 6167 | 11418 | 14040 | 16665 | 1642 | 8795 | 19293 | 21921 | 24549 |
| 1643 | 6168 | 11419 | 14041 | 16666 | 1644 | 8796 | 19294 | 21922 | 24550 |
| 1645 | 6169 | 11420 | 14042 | 16667 | 1646 | 8797 | 19295 | 21923 | 24551 |
| 1647 | 6170 | 11421 | 14043 | 16668 | 1648 | 8798 | 19296 | 21924 | 24552 |
| 1649 | 6171 | 11422 | 14044 | 16669 | 1650 | 8799 | 19297 | 21925 | 24553 |
| 1651 | 6172 | 11423 | 14045 | 16670 | 1652 | 8800 | 19298 | 21926 | 24554 |
| 1653 | 6173 | 11424 | 14046 | 16671 | 1654 | 8801 | 19299 | 21927 | 24555 |
| 1655 | 6174 | 11425 | 14047 | 16672 | 1656 | 8802 | 19300 | 21928 | 24556 |
| 1657 | 6175 | 11426 | 14048 | 16673 | 1658 | 8803 | 19301 | 21929 | 24557 |
| 1659 | 6176 | 11427 | 14049 | 16674 | 1660 | 8804 | 19302 | 21930 | 24558 |
| 1661 | 6177 | 11428 | 14050 | 16675 | 1662 | 8805 | 19303 | 21931 | 24559 |
| 1663 | 6178 | 11429 | 14051 | 16676 | 1664 | 8806 | 19304 | 21932 | 24560 |
| 1665 | 6179 | 11430 | 14052 | 16677 | 1666 | 8807 | 19305 | 21933 | 24561 |
| 1667 | 6180 | 11431 | 14053 | 16678 | 1668 | 8808 | 19306 | 21934 | 24562 |
| 1669 | 6181 | 11432 | 14054 | 16679 | 1670 | 8809 | 19307 | 21935 | 24563 |
| 1671 | 6182 | 11433 | 14055 | 16680 | 1672 | 8810 | 19308 | 21936 | 24564 |
| 1673 | 6183 | 11434 | 14056 | 16681 | 1674 | 8811 | 19309 | 21937 | 24565 |
| 1675 | 6184 | 11435 | 14057 | 16682 | 1676 | 8812 | 19310 | 21938 | 24566 |
| 1677 | 6185 | 11436 | 14058 | 16683 | 1678 | 8813 | 19311 | 21939 | 24567 |
| 1679 | 6186 | 11437 | 14059 | 16684 | 1680 | 8814 | 19312 | 21940 | 24568 |
| 1681 | 6187 | 11438 | 14060 | 16685 | 1682 | 8815 | 19313 | 21941 | 24569 |
| 1683 | 6188 | 11439 | 14061 | 16686 | 1684 | 8816 | 19314 | 21942 | 24570 |
| 1685 | 6189 | 11440 | 14062 | 16687 | 1686 | 8817 | 19315 | 21943 | 24571 |
| 1687 | 6190 | 11441 | 14063 | 16688 | 1688 | 8818 | 19316 | 21944 | 24572 |
| 1689 | 6191 | 11442 | 14064 | 16689 | 1690 | 8819 | 19317 | 21945 | 24573 |
| 1691 | 6192 | 11443 | 14065 | 16690 | 1692 | 8820 | 19318 | 21946 | 24574 |
| 1693 | 6193 | 11444 | 14066 | 16691 | 1694 | 8821 | 19319 | 21947 | 24575 |
| 1695 | 6194 | 11445 | 14067 | 16692 | 1696 | 8822 | 19320 | 21948 | 24576 |
| 1697 | 6195 | 11446 | 14068 | 16693 | 1698 | 8823 | 19321 | 21949 | 24577 |
| 1699 | 6196 | 11447 | 14069 | 16694 | 1700 | 8824 | 19322 | 21950 | 24578 |
| 1701 | 6197 | 11448 | 14070 | 16695 | 1702 | 8825 | 19323 | 21951 | 24579 |
| 1703 | 6198 | 11449 | 14071 | 16696 | 1704 | 8826 | 19324 | 21952 | 24580 |
| 1705 | 6199 | 11450 | 14072 | 16697 | 1706 | 8827 | 19325 | 21953 | 24581 |
| 1707 | 6200 | 11451 | 14073 | 16698 | 1708 | 8828 | 19326 | 21954 | 24582 |
| 1709 | 6201 | 11452 | 14074 | 16699 | 1710 | 8829 | 19327 | 21955 | 24583 |
| 1711 | 6202 | 11453 | 14075 | 16700 | 1712 | 8830 | 19328 | 21956 | 24584 |
| 1713 | 6203 | 11454 | 14076 | 16701 | 1714 | 8831 | 19329 | 21957 | 24585 |
| 1715 | 6204 | 11455 | 14077 | 16702 | 1716 | 8832 | 19330 | 21958 | 24586 |
| 1717 | 6205 | 11456 | 14078 | 16703 | 1718 | 8833 | 19331 | 21959 | 24587 |
| 1719 | 6206 | 11457 | 14079 | 16704 | 1720 | 8834 | 19332 | 21960 | 24588 |
| 1721 | 6207 | 11458 | 14080 | 16705 | 1722 | 8835 | 19333 | 21961 | 24589 |
| 1723 | 6208 | 11459 | 14081 | 16706 | 1724 | 8836 | 19334 | 21962 | 24590 |
| 1725 | 6209 | 11460 | 14082 | 16707 | 1726 | 8837 | 19335 | 21963 | 24591 |
| 1727 | 6210 | 11461 | 14083 | 16708 | 1728 | 8838 | 19336 | 21964 | 24592 |
| 1729 | 6211 | 11462 | 14084 | 16709 | 1730 | 8839 | 19337 | 21965 | 24593 |
| 1731 | 6212 | 11463 | 14085 | 16710 | 1732 | 8840 | 19338 | 21966 | 24594 |
| 1733 | 6213 | 11464 | 14086 | 16711 | 1734 | 8841 | 19339 | 21967 | 24595 |
| 1735 | 6214 | 11465 | 14087 | 16712 | 1736 | 8842 | 19340 | 21968 | 24596 |
| 1737 | 6215 | 11466 | 14088 | 16713 | 1738 | 8843 | 19341 | 21969 | 24597 |
| 1739 | 6216 | 11467 | 14089 | 16714 | 1740 | 8844 | 19342 | 21970 | 24598 |
| 1741 | 6217 | 11468 | 14090 | 16715 | 1742 | 8845 | 19343 | 21971 | 24599 |
| 1743 | 6218 | 11469 | 14091 | 16716 | 1744 | 8846 | 19344 | 21972 | 24600 |
| 1745 | 6219 | 11470 | 14092 | 16717 | 1746 | 8847 | 19345 | 21973 | 24601 |
| 1747 | 6220 | 11471 | 14093 | 16718 | 1748 | 8848 | 19346 | 21974 | 24602 |
| 1749 | 6221 | 11472 | 14094 | 16719 | 1750 | 8849 | 19347 | 21975 | 24603 |
| 1751 | 6222 | 11473 | 14095 | 16720 | 1752 | 8850 | 19348 | 21976 | 24604 |
| 1753 | 6223 | 11474 | 14096 | 16721 | 1754 | 8851 | 19349 | 21977 | 24605 |
| 1755 | 6224 | 11475 | 14097 | 16722 | 1756 | 8852 | 19350 | 21978 | 24606 |
| 1757 | 6225 | 11476 | 14098 | 16723 | 1758 | 8853 | 19351 | 21979 | 24607 |
| 1759 | 6226 | 11477 | 14099 | 16724 | 1760 | 8854 | 19352 | 21980 | 24608 |
| 1761 | 6227 | 11478 | 14100 | 16725 | 1762 | 8855 | 19353 | 21981 | 24609 |
| 1763 | 6228 | 11479 | 14101 | 16726 | 1764 | 8856 | 19354 | 21982 | 24610 |
| 1765 | 6229 | 11480 | 14102 | 16727 | 1766 | 8857 | 19355 | 21983 | 24611 |
| 1767 | 6230 | 11481 | 14103 | 16728 | 1768 | 8858 | 19356 | 21984 | 24612 |
| 1769 | 6231 | 11482 | 14104 | 16729 | 1770 | 8859 | 19357 | 21985 | 24613 |
| 1771 | 6232 | 11483 | 14105 | 16730 | 1772 | 8860 | 19358 | 21986 | 24614 |
| 1773 | 6233 | 11484 | 14106 | 16731 | 1774 | 8861 | 19359 | 21987 | 24615 |
| 1775 | 6234 | 11485 | 14107 | 16732 | 1776 | 8862 | 19360 | 21988 | 24616 |
| 1777 | 6235 | 11486 | 14108 | 16733 | 1778 | 8863 | 19361 | 21989 | 24617 |
| 1779 | 6236 | 11487 | 14109 | 16734 | 1780 | 8864 | 19362 | 21990 | 24618 |
| 1781 | 6237 | 11488 | 14110 | 16735 | 1782 | 8865 | 19363 | 21991 | 24619 |
| 1783 | 6238 | 11489 | 14111 | 16736 | 1784 | 8866 | 19364 | 21992 | 24620 |
| 1785 | 6239 | 11490 | 14112 | 16737 | 1786 | 8867 | 19365 | 21993 | 24621 |
| 1787 | 6240 | 11491 | 14113 | 16738 | 1788 | 8868 | 19366 | 21994 | 24622 |
| 1789 | 6241 | 11492 | 14114 | 16739 | 1790 | 8869 | 19367 | 21995 | 24623 |
| 1791 | 6242 | 11493 | 14115 | 16740 | 1792 | 8870 | 19368 | 21996 | 24624 |
| 1793 | 6243 | 11494 | 14116 | 16741 | 1794 | 8871 | 19369 | 21997 | 24625 |
| 1795 | 6244 | 11495 | 14117 | 16742 | 1796 | 8872 | 19370 | 21998 | 24626 |
| 1797 | 6245 | 11496 | 14118 | 16743 | 1798 | 8873 | 19371 | 21999 | 24627 |
| 1799 | 6246 | 11497 | 14119 | 16744 | 1800 | 8874 | 19372 | 22000 | 24628 |
| 1801 | 6247 | 11498 | 14120 | 16745 | 1802 | 8875 | 19373 | 22001 | 24629 |
| 1803 | 6248 | 11499 | 14121 | 16746 | 1804 | 8876 | 19374 | 22002 | 24630 |
| 1805 | 6249 | 11500 | 14122 | 16747 | 1806 | 8877 | 19375 | 22003 | 24631 |
| 1807 | 6250 | 11501 | 14123 | 16748 | 1808 | 8878 | 19376 | 22004 | 24632 |
| 1809 | 6251 | 11502 | 14124 | 16749 | 1810 | 8879 | 19377 | 22005 | 24633 |
| 1811 | 6252 | 11503 | 14125 | 16750 | 1812 | 8880 | 19378 | 22006 | 24634 |
| 1813 | 6253 | 11504 | 14126 | 16751 | 1814 | 8881 | 19379 | 22007 | 24635 |
| 1815 | 6254 | 11505 | 14127 | 16752 | 1816 | 8882 | 19380 | 22008 | 24636 |
| 1817 | 6255 | 11506 | 14128 | 16753 | 1818 | 8883 | 19381 | 22009 | 24637 |
| 1819 | 6256 | 11507 | 14129 | 16754 | 1820 | 8884 | 19382 | 22010 | 24638 |
| 1821 | 6257 | 11508 | 14130 | 16755 | 1822 | 8885 | 19383 | 22011 | 24639 |
| 1823 | 6258 | 11509 | 14131 | 16756 | 1824 | 8886 | 19384 | 22012 | 24640 |
| 1825 | 6259 | 11510 | 14132 | 16757 | 1826 | 8887 | 19385 | 22013 | 24641 |
| 1827 | 6260 | 11511 | 14133 | 16758 | 1828 | 8888 | 19386 | 22014 | 24642 |
| 1829 | 6261 | 11512 | 14134 | 16759 | 1830 | 8889 | 19387 | 22015 | 24643 |
| 1831 | 6262 | 11513 | 14135 | 16760 | 1832 | 8890 | 19388 | 22016 | 24644 |
| 1833 | 6263 | 11514 | 14136 | 16761 | 1834 | 8891 | 19389 | 22017 | 24645 |
| 1835 | 6264 | 11515 | 14137 | 16762 | 1836 | 8892 | 19390 | 22018 | 24646 |
| 1837 | 6265 | 11516 | 14138 | 16763 | 1838 | 8893 | 19391 | 22019 | 24647 |
| 1839 | 6266 | 11517 | 14139 | 16764 | 1840 | 8894 | 19392 | 22020 | 24648 |
| 1841 | 6267 | 11518 | 14140 | 16765 | 1842 | 8895 | 19393 | 22021 | 24649 |
| 1843 | 6268 | 11519 | 14141 | 16766 | 1844 | 8896 | 19394 | 22022 | 24650 |
| 1845 | 6269 | 11520 | 14142 | 16767 | 1846 | 8897 | 19395 | 22023 | 24651 |
| 1847 | 6270 | 11521 | 14143 | 16768 | 1848 | 8898 | 19396 | 22024 | 24652 |
| 1849 | 6271 | 11522 | 14144 | 16769 | 1850 | 8899 | 19397 | 22025 | 24653 |
| 1851 | 6272 | 11523 | 14145 | 16770 | 1852 | 8900 | 19398 | 22026 | 24654 |
| 1853 | 6273 | 11524 | 14146 | 16771 | 1854 | 8901 | 19399 | 22027 | 24655 |
| 1855 | 6274 | 11525 | 14147 | 16772 | 1856 | 8902 | 19400 | 22028 | 24656 |
| 1857 | 6275 | 11526 | 14148 | 16773 | 1858 | 8903 | 19401 | 22029 | 24657 |
| 1859 | 6276 | 11527 | 14149 | 16774 | 1860 | 8904 | 19402 | 22030 | 24658 |
| 1861 | 6277 | 11528 | 14150 | 16775 | 1862 | 8905 | 19403 | 22031 | 24659 |
| 1863 | 6278 | 11529 | 14151 | 16776 | 1864 | 8906 | 19404 | 22032 | 24660 |
| 1865 | 6279 | 11530 | 14152 | 16777 | 1866 | 8907 | 19405 | 22033 | 24661 |
| 1867 | 6280 | 11531 | 14153 | 16778 | 1868 | 8908 | 19406 | 22034 | 24662 |
| 1869 | 6281 | 11532 | 14154 | 16779 | 1870 | 8909 | 19407 | 22035 | 24663 |
| 1871 | 6282 | 11533 | 14155 | 16780 | 1872 | 8910 | 19408 | 22036 | 24664 |
| 1873 | 6283 | 11534 | 14156 | 16781 | 1874 | 8911 | 19409 | 22037 | 24665 |
| 1875 | 6284 | 11535 | 14157 | 16782 | 1876 | 8912 | 19410 | 22038 | 24666 |
| 1877 | 6285 | 11536 | 14158 | 16783 | 1878 | 8913 | 19411 | 22039 | 24667 |
| 1879 | 6286 | 11537 | 14159 | 16784 | 1880 | 8914 | 19412 | 22040 | 24668 |
| 1881 | 6287 | 11538 | 14160 | 16785 | 1882 | 8915 | 19413 | 22041 | 24669 |
| 1883 | 6288 | 11539 | 14161 | 16786 | 1884 | 8916 | 19414 | 22042 | 24670 |
| 1885 | 6289 | 11540 | 14162 | 16787 | 1886 | 8917 | 19415 | 22043 | 24671 |
| 1887 | 6290 | 11541 | 14163 | 16788 | 1888 | 8918 | 19416 | 22044 | 24672 |
| 1889 | 6291 | 11542 | 14164 | 16789 | 1890 | 8919 | 19417 | 22045 | 24673 |
| 1891 | 6292 | 11543 | 14165 | 16790 | 1892 | 8920 | 19418 | 22046 | 24674 |
| 1893 | 6293 | 11544 | 14166 | 16791 | 1894 | 8921 | 19419 | 22047 | 24675 |
| 1895 | 6294 | 11545 | 14167 | 16792 | 1896 | 8922 | 19420 | 22048 | 24676 |
| 1897 | 6295 | 11546 | 14168 | 16793 | 1898 | 8923 | 19421 | 22049 | 24677 |
| 1899 | 6296 | 11547 | 14169 | 16794 | 1900 | 8924 | 19422 | 22050 | 24678 |
| 1901 | 6297 | 11548 | 14170 | 16795 | 1902 | 8925 | 19423 | 22051 | 24679 |
| 1903 | 6298 | 11549 | 14171 | 16796 | 1904 | 8926 | 19424 | 22052 | 24680 |
| 1905 | 6299 | 11550 | 14172 | 16797 | 1906 | 8927 | 19425 | 22053 | 24681 |
| 1907 | 6300 | 11551 | 14173 | 16798 | 1908 | 8928 | 19426 | 22054 | 24682 |
| 1909 | 6301 | 11552 | 14174 | 16799 | 1910 | 8929 | 19427 | 22055 | 24683 |
| 1911 | 6302 | 11553 | 14175 | 16800 | 1912 | 8930 | 19428 | 22056 | 24684 |
| 1913 | 6303 | 11554 | 14176 | 16801 | 1914 | 8931 | 19429 | 22057 | 24685 |
| 1915 | 6304 | 11555 | 14177 | 16802 | 1916 | 8932 | 19430 | 22058 | 24686 |
| 1917 | 6305 | 11556 | 14178 | 16803 | 1918 | 8933 | 19431 | 22059 | 24687 |
| 1919 | 6306 | 11557 | 14179 | 16804 | 1920 | 8934 | 19432 | 22060 | 24688 |
| 1921 | 6307 | 11558 | 14180 | 16805 | 1922 | 8935 | 19433 | 22061 | 24689 |
| 1923 | 6308 | 11559 | 14181 | 16806 | 1924 | 8936 | 19434 | 22062 | 24690 |
| 1925 | 6309 | 11560 | 14182 | 16807 | 1926 | 8937 | 19435 | 22063 | 24691 |
| 1927 | 6310 | 11561 | 14183 | 16808 | 1928 | 8938 | 19436 | 22064 | 24692 |
| 1929 | 6311 | 11562 | 14184 | 16809 | 1930 | 8939 | 19437 | 22065 | 24693 |
| 1931 | 6312 | 11563 | 14185 | 16810 | 1932 | 8940 | 19438 | 22066 | 24694 |
| 1933 | 6313 | 11564 | 14186 | 16811 | 1934 | 8941 | 19439 | 22067 | 24695 |
| 1935 | 6314 | 11565 | 14187 | 16812 | 1936 | 8942 | 19440 | 22068 | 24696 |
| 1937 | 6315 | 11566 | 14188 | 16813 | 1938 | 8943 | 19441 | 22069 | 24697 |
| 1939 | 6316 | 11567 | 14189 | 16814 | 1940 | 8944 | 19442 | 22070 | 24698 |
| 1941 | 6317 | 11568 | 14190 | 16815 | 1942 | 8945 | 19443 | 22071 | 24699 |
| 1943 | 6318 | 11569 | 14191 | 16816 | 1944 | 8946 | 19444 | 22072 | 24700 |
| 1945 | 6319 | 11570 | 14192 | 16817 | 1946 | 8947 | 19445 | 22073 | 24701 |
| 1947 | 6320 | 11571 | 14193 | 16818 | 1948 | 8948 | 19446 | 22074 | 24702 |
| 1949 | 6321 | 11572 | 14194 | 16819 | 1950 | 8949 | 19447 | 22075 | 24703 |
| 1951 | 6322 | 11573 | 14195 | 16820 | 1952 | 8950 | 19448 | 22076 | 24704 |
| 1953 | 6323 | 11574 | 14196 | 16821 | 1954 | 8951 | 19449 | 22077 | 24705 |
| 1955 | 6324 | 11575 | 14197 | 16822 | 1956 | 8952 | 19450 | 22078 | 24706 |
| 1957 | 6325 | 11576 | 14198 | 16823 | 1958 | 8953 | 19451 | 22079 | 24707 |
| 1959 | 6326 | 11577 | 14199 | 16824 | 1960 | 8954 | 19452 | 22080 | 24708 |
| 1961 | 6327 | 11578 | 14200 | 16825 | 1962 | 8955 | 19453 | 22081 | 24709 |
| 1963 | 6328 | 11579 | 14201 | 16826 | 1964 | 8956 | 19454 | 22082 | 24710 |
| 1965 | 6329 | 11580 | 14202 | 16827 | 1966 | 8957 | 19455 | 22083 | 24711 |
| 1967 | 6330 | 11581 | 14203 | 16828 | 1968 | 8958 | 19456 | 22084 | 24712 |
| 1969 | 6331 | 11582 | 14204 | 16829 | 1970 | 8959 | 19457 | 22085 | 24713 |
| 1971 | 6332 | 11583 | 14205 | 16830 | 1972 | 8960 | 19458 | 22086 | 24714 |
| 1973 | 6333 | 11584 | 14206 | 16831 | 1974 | 8961 | 19459 | 22087 | 24715 |
| 1975 | 6334 | 11585 | 14207 | 16832 | 1976 | 8962 | 19460 | 22088 | 24716 |
| 1977 | 6335 | 11586 | 14208 | 16833 | 1978 | 8963 | 19461 | 22089 | 24717 |
| 1979 | 6336 | 11587 | 14209 | 16834 | 1980 | 8964 | 19462 | 22090 | 24718 |
| 1981 | 6337 | 11588 | 14210 | 16835 | 1982 | 8965 | 19463 | 22091 | 24719 |
| 1983 | 6338 | 11589 | 14211 | 16836 | 1984 | 8966 | 19464 | 22092 | 24720 |
| 1985 | 6339 | 11590 | 14212 | 16837 | 1986 | 8967 | 19465 | 22093 | 24721 |
| 1987 | 6340 | 11591 | 14213 | 16838 | 1988 | 8968 | 19466 | 22094 | 24722 |
| 1989 | 6341 | 11592 | 14214 | 16839 | 1990 | 8969 | 19467 | 22095 | 24723 |
| 1991 | 6342 | 11593 | 14215 | 16840 | 1992 | 8970 | 19468 | 22096 | 24724 |
| 1993 | 6343 | 11594 | 14216 | 16841 | 1994 | 8971 | 19469 | 22097 | 24725 |
| 1995 | 6344 | 11595 | 14217 | 16842 | 1996 | 8972 | 19470 | 22098 | 24726 |
| 1997 | 6345 | 11596 | 14218 | 16843 | 1998 | 8973 | 19471 | 22099 | 24727 |
| 1999 | 6346 | 11597 | 14219 | 16844 | 2000 | 8974 | 19472 | 22100 | 24728 |
| 2001 | 6347 | 11598 | 14220 | 16845 | 2002 | 8975 | 19473 | 22101 | 24729 |
| 2003 | 6348 | 11599 | 14221 | 16846 | 2004 | 8976 | 19474 | 22102 | 24730 |
| 2005 | 6349 | 11600 | 14222 | 16847 | 2006 | 8977 | 19475 | 22103 | 24731 |
| 2007 | 6350 | 11601 | 14223 | 16848 | 2008 | 8978 | 19476 | 22104 | 24732 |
| 2009 | 6351 | 11602 | 14224 | 16849 | 2010 | 8979 | 19477 | 22105 | 24733 |
| 2011 | 6352 | 11603 | 14225 | 16850 | 2012 | 8980 | 19478 | 22106 | 24734 |
| 2013 | 6353 | 11604 | 14226 | 16851 | 2014 | 8981 | 19479 | 22107 | 24735 |
| 2015 | 6354 | 11605 | 14227 | 16852 | 2016 | 8982 | 19480 | 22108 | 24736 |
| 2017 | 6355 | 11606 | 14228 | 16853 | 2018 | 8983 | 19481 | 22109 | 24737 |
| 2019 | 6356 | 11607 | 14229 | 16854 | 2020 | 8984 | 19482 | 22110 | 24738 |
| 2021 | 6357 | 11608 | 14230 | 16855 | 2022 | 8985 | 19483 | 22111 | 24739 |
| 2023 | 6358 | 11609 | 14231 | 16856 | 2024 | 8986 | 19484 | 22112 | 24740 |
| 2025 | 6359 | 11610 | 14232 | 16857 | 2026 | 8987 | 19485 | 22113 | 24741 |
| 2027 | 6360 | 11611 | 14233 | 16858 | 2028 | 8988 | 19486 | 22114 | 24742 |
| 2029 | 6361 | 11612 | 14234 | 16859 | 2030 | 8989 | 19487 | 22115 | 24743 |
| 2031 | 6362 | 11613 | 14235 | 16860 | 2032 | 8990 | 19488 | 22116 | 24744 |
| 2033 | 6363 | 11614 | 14236 | 16861 | 2034 | 8991 | 19489 | 22117 | 24745 |
| 2035 | 6364 | 11615 | 14237 | 16862 | 2036 | 8992 | 19490 | 22118 | 24746 |
| 2037 | 6365 | 11616 | 14238 | 16863 | 2038 | 8993 | 19491 | 22119 | 24747 |
| 2039 | 6366 | 11617 | 14239 | 16864 | 2040 | 8994 | 19492 | 22120 | 24748 |
| 2041 | 6367 | 11618 | 14240 | 16865 | 2042 | 8995 | 19493 | 22121 | 24749 |
| 2043 | 6368 | 11619 | 14241 | 16866 | 2044 | 8996 | 19494 | 22122 | 24750 |
| 2045 | 6369 | 11620 | 14242 | 16867 | 2046 | 8997 | 19495 | 22123 | 24751 |
| 2047 | 6370 | 11621 | 14243 | 16868 | 2048 | 8998 | 19496 | 22124 | 24752 |
| 2049 | 6371 | 11622 | 14244 | 16869 | 2050 | 8999 | 19497 | 22125 | 24753 |
| 2051 | 6372 | 11623 | 14245 | 16870 | 2052 | 9000 | 19498 | 22126 | 24754 |
| 2053 | 6373 | 11624 | 14246 | 16871 | 2054 | 9001 | 19499 | 22127 | 24755 |
| 2055 | 6374 | 11625 | 14247 | 16872 | 2056 | 9002 | 19500 | 22128 | 24756 |
| 2057 | 6375 | 11626 | 14248 | 16873 | 2058 | 9003 | 19501 | 22129 | 24757 |
| 2059 | 6376 | 11627 | 14249 | 16874 | 2060 | 9004 | 19502 | 22130 | 24758 |
| 2061 | 6377 | 11628 | 14250 | 16875 | 2062 | 9005 | 19503 | 22131 | 24759 |
| 2063 | 6378 | 11629 | 14251 | 16876 | 2064 | 9006 | 19504 | 22132 | 24760 |
| 2065 | 6379 | 11630 | 14252 | 16877 | 2066 | 9007 | 19505 | 22133 | 24761 |
| 2067 | 6380 | 11631 | 14253 | 16878 | 2068 | 9008 | 19506 | 22134 | 24762 |
| 2069 | 6381 | 11632 | 14254 | 16879 | 2070 | 9009 | 19507 | 22135 | 24763 |
| 2071 | 6382 | 11633 | 14255 | 16880 | 2072 | 9010 | 19508 | 22136 | 24764 |
| 2073 | 6383 | 11634 | 14256 | 16881 | 2074 | 9011 | 19509 | 22137 | 24765 |
| 2075 | 6384 | 11635 | 14257 | 16882 | 2076 | 9012 | 19510 | 22138 | 24766 |
| 2077 | 6385 | 11636 | 14258 | 16883 | 2078 | 9013 | 19511 | 22139 | 24767 |
| 2079 | 6386 | 11637 | 14259 | 16884 | 2080 | 9014 | 19512 | 22140 | 24768 |
| 2081 | 6387 | 11638 | 14260 | 16885 | 2082 | 9015 | 19513 | 22141 | 24769 |
| 2083 | 6388 | 11639 | 14261 | 16886 | 2084 | 9016 | 19514 | 22142 | 24770 |
| 2085 | 6389 | 11640 | 14262 | 16887 | 2086 | 9017 | 19515 | 22143 | 24771 |
| 2087 | 6390 | 11641 | 14263 | 16888 | 2088 | 9018 | 19516 | 22144 | 24772 |
| 2089 | 6391 | 11642 | 14264 | 16889 | 2090 | 9019 | 19517 | 22145 | 24773 |
| 2091 | 6392 | 11643 | 14265 | 16890 | 2092 | 9020 | 19518 | 22146 | 24774 |
| 2093 | 6393 | 11644 | 14266 | 16891 | 2094 | 9021 | 19519 | 22147 | 24775 |
| 2095 | 6394 | 11645 | 14267 | 16892 | 2096 | 9022 | 19520 | 22148 | 24776 |
| 2097 | 6395 | 11646 | 14268 | 16893 | 2098 | 9023 | 19521 | 22149 | 24777 |
| 2099 | 6396 | 11647 | 14269 | 16894 | 2100 | 9024 | 19522 | 22150 | 24778 |
| 2101 | 6397 | 11648 | 14270 | 16895 | 2102 | 9025 | 19523 | 22151 | 24779 |
| 2103 | 6398 | 11649 | 14271 | 16896 | 2104 | 9026 | 19524 | 22152 | 24780 |
| 2105 | 6399 | 11650 | 14272 | 16897 | 2106 | 9027 | 19525 | 22153 | 24781 |
| 2107 | 6400 | 11651 | 14273 | 16898 | 2108 | 9028 | 19526 | 22154 | 24782 |
| 2109 | 6401 | 11652 | 14274 | 16899 | 2110 | 9029 | 19527 | 22155 | 24783 |
| 2111 | 6402 | 11653 | 14275 | 16900 | 2112 | 9030 | 19528 | 22156 | 24784 |
| 2113 | 6403 | 11654 | 14276 | 16901 | 2114 | 9031 | 19529 | 22157 | 24785 |
| 2115 | 6404 | 11655 | 14277 | 16902 | 2116 | 9032 | 19530 | 22158 | 24786 |
| 2117 | 6405 | 11656 | 14278 | 16903 | 2118 | 9033 | 19531 | 22159 | 24787 |
| 2119 | 6406 | 11657 | 14279 | 16904 | 2120 | 9034 | 19532 | 22160 | 24788 |
| 2121 | 6407 | 11658 | 14280 | 16905 | 2122 | 9035 | 19533 | 22161 | 24789 |
| 2123 | 6408 | 11659 | 14281 | 16906 | 2124 | 9036 | 19534 | 22162 | 24790 |
| 2125 | 6409 | 11660 | 14282 | 16907 | 2126 | 9037 | 19535 | 22163 | 24791 |
| 2127 | 6410 | 11661 | 14283 | 16908 | 2128 | 9038 | 19536 | 22164 | 24792 |
| 2129 | 6411 | 11662 | 14284 | 16909 | 2130 | 9039 | 19537 | 22165 | 24793 |
| 2131 | 6412 | 11663 | 14285 | 16910 | 2132 | 9040 | 19538 | 22166 | 24794 |
| 2133 | 6413 | 11664 | 14286 | 16911 | 2134 | 9041 | 19539 | 22167 | 24795 |
| 2135 | 6414 | 11665 | 14287 | 16912 | 2136 | 9042 | 19540 | 22168 | 24796 |
| 2137 | 6415 | 11666 | 14288 | 16913 | 2138 | 9043 | 19541 | 22169 | 24797 |
| 2139 | 6416 | 11667 | 14289 | 16914 | 2140 | 9044 | 19542 | 22170 | 24798 |
| 2141 | 6417 | 11668 | 14290 | 16915 | 2142 | 9045 | 19543 | 22171 | 24799 |
| 2143 | 6418 | 11669 | 14291 | 16916 | 2144 | 9046 | 19544 | 22172 | 24800 |
| 2145 | 6419 | 11670 | 14292 | 16917 | 2146 | 9047 | 19545 | 22173 | 24801 |
| 2147 | 6420 | 11671 | 14293 | 16918 | 2148 | 9048 | 19546 | 22174 | 24802 |
| 2149 | 6421 | 11672 | 14294 | 16919 | 2150 | 9049 | 19547 | 22175 | 24803 |
| 2151 | 6422 | 11673 | 14295 | 16920 | 2152 | 9050 | 19548 | 22176 | 24804 |
| 2153 | 6423 | 11674 | 14296 | 16921 | 2154 | 9051 | 19549 | 22177 | 24805 |
| 2155 | 6424 | 11675 | 14297 | 16922 | 2156 | 9052 | 19550 | 22178 | 24806 |
| 2157 | 6425 | 11676 | 14298 | 16923 | 2158 | 9053 | 19551 | 22179 | 24807 |
| 2159 | 6426 | 11677 | 14299 | 16924 | 2160 | 9054 | 19552 | 22180 | 24808 |
| 2161 | 6427 | 11678 | 14300 | 16925 | 2162 | 9055 | 19553 | 22181 | 24809 |
| 2163 | 6428 | 11679 | 14301 | 16926 | 2164 | 9056 | 19554 | 22182 | 24810 |
| 2165 | 6429 | 11680 | 14302 | 16927 | 2166 | 9057 | 19555 | 22183 | 24811 |
| 2167 | 6430 | 11681 | 14303 | 16928 | 2168 | 9058 | 19556 | 22184 | 24812 |
| 2169 | 6431 | 11682 | 14304 | 16929 | 2170 | 9059 | 19557 | 22185 | 24813 |
| 2171 | 6432 | 11683 | 14305 | 16930 | 2172 | 9060 | 19558 | 22186 | 24814 |
| 2173 | 6433 | 11684 | 14306 | 16931 | 2174 | 9061 | 19559 | 22187 | 24815 |
| 2175 | 6434 | 11685 | 14307 | 16932 | 2176 | 9062 | 19560 | 22188 | 24816 |
| 2177 | 6435 | 11686 | 14308 | 16933 | 2178 | 9063 | 19561 | 22189 | 24817 |
| 2179 | 6436 | 11687 | 14309 | 16934 | 2180 | 9064 | 19562 | 22190 | 24818 |
| 2181 | 6437 | 11688 | 14310 | 16935 | 2182 | 9065 | 19563 | 22191 | 24819 |
| 2183 | 6438 | 11689 | 14311 | 16936 | 2184 | 9066 | 19564 | 22192 | 24820 |
| 2185 | 6439 | 11690 | 14312 | 16937 | 2186 | 9067 | 19565 | 22193 | 24821 |
| 2187 | 6440 | 11691 | 14313 | 16938 | 2188 | 9068 | 19566 | 22194 | 24822 |
| 2189 | 6441 | 11692 | 14314 | 16939 | 2190 | 9069 | 19567 | 22195 | 24823 |
| 2191 | 6442 | 11693 | 14315 | 16940 | 2192 | 9070 | 19568 | 22196 | 24824 |
| 2193 | 6443 | 11694 | 14316 | 16941 | 2194 | 9071 | 19569 | 22197 | 24825 |
| 2195 | 6444 | 11695 | 14317 | 16942 | 2196 | 9072 | 19570 | 22198 | 24826 |
| 2197 | 6445 | 11696 | 14318 | 16943 | 2198 | 9073 | 19571 | 22199 | 24827 |
| 2199 | 6446 | 11697 | 14319 | 16944 | 2200 | 9074 | 19572 | 22200 | 24828 |
| 2201 | 6447 | 11698 | 14320 | 16945 | 2202 | 9075 | 19573 | 22201 | 24829 |
| 2203 | 6448 | 11699 | 14321 | 16946 | 2204 | 9076 | 19574 | 22202 | 24830 |
| 2205 | 6449 | 11700 | 14322 | 16947 | 2206 | 9077 | 19575 | 22203 | 24831 |
| 2207 | 6450 | 11701 | 14323 | 16948 | 2208 | 9078 | 19576 | 22204 | 24832 |
| 2209 | 6451 | 11702 | 14324 | 16949 | 2210 | 9079 | 19577 | 22205 | 24833 |
| 2211 | 6452 | 11703 | 14325 | 16950 | 2212 | 9080 | 19578 | 22206 | 24834 |
| 2213 | 6453 | 11704 | 14326 | 16951 | 2214 | 9081 | 19579 | 22207 | 24835 |
| 2215 | 6454 | 11705 | 14327 | 16952 | 2216 | 9082 | 19580 | 22208 | 24836 |
| 2217 | 6455 | 11706 | 14328 | 16953 | 2218 | 9083 | 19581 | 22209 | 24837 |
| 2219 | 6456 | 11707 | 14329 | 16954 | 2220 | 9084 | 19582 | 22210 | 24838 |
| 2221 | 6457 | 11708 | 14330 | 16955 | 2222 | 9085 | 19583 | 22211 | 24839 |
| 2223 | 6458 | 11709 | 14331 | 16956 | 2224 | 9086 | 19584 | 22212 | 24840 |
| 2225 | 6459 | 11710 | 14332 | 16957 | 2226 | 9087 | 19585 | 22213 | 24841 |
| 2227 | 6460 | 11711 | 14333 | 16958 | 2228 | 9088 | 19586 | 22214 | 24842 |
| 2229 | 6461 | 11712 | 14334 | 16959 | 2230 | 9089 | 19587 | 22215 | 24843 |
| 2231 | 6462 | 11713 | 14335 | 16960 | 2232 | 9090 | 19588 | 22216 | 24844 |
| 2233 | 6463 | 11714 | 14336 | 16961 | 2234 | 9091 | 19589 | 22217 | 24845 |
| 2235 | 6464 | 11715 | 14337 | 16962 | 2236 | 9092 | 19590 | 22218 | 24846 |
| 2237 | 6465 | 11716 | 14338 | 16963 | 2238 | 9093 | 19591 | 22219 | 24847 |
| 2239 | 6466 | 11717 | 14339 | 16964 | 2240 | 9094 | 19592 | 22220 | 24848 |
| 2241 | 6467 | 11718 | 14340 | 16965 | 2242 | 9095 | 19593 | 22221 | 24849 |
| 2243 | 6468 | 11719 | 14341 | 16966 | 2244 | 9096 | 19594 | 22222 | 24850 |
| 2245 | 6469 | 11720 | 14342 | 16967 | 2246 | 9097 | 19595 | 22223 | 24851 |
| 2247 | 6470 | 11721 | 14343 | 16968 | 2248 | 9098 | 19596 | 22224 | 24852 |
| 2249 | 6471 | 11722 | 14344 | 16969 | 2250 | 9099 | 19597 | 22225 | 24853 |
| 2251 | 6472 | 11723 | 14345 | 16970 | 2252 | 9100 | 19598 | 22226 | 24854 |
| 2253 | 6473 | 11724 | 14346 | 16971 | 2254 | 9101 | 19599 | 22227 | 24855 |
| 2255 | 6474 | 11725 | 14347 | 16972 | 2256 | 9102 | 19600 | 22228 | 24856 |
| 2257 | 6475 | 11726 | 14348 | 16973 | 2258 | 9103 | 19601 | 22229 | 24857 |
| 2259 | 6476 | 11727 | 14349 | 16974 | 2260 | 9104 | 19602 | 22230 | 24858 |
| 2261 | 6477 | 11728 | 14350 | 16975 | 2262 | 9105 | 19603 | 22231 | 24859 |
| 2263 | 6478 | 11729 | 14351 | 16976 | 2264 | 9106 | 19604 | 22232 | 24860 |
| 2265 | 6479 | 11730 | 14352 | 16977 | 2266 | 9107 | 19605 | 22233 | 24861 |
| 2267 | 6480 | 11731 | 14353 | 16978 | 2268 | 9108 | 19606 | 22234 | 24862 |
| 2269 | 6481 | 11732 | 14354 | 16979 | 2270 | 9109 | 19607 | 22235 | 24863 |
| 2271 | 6482 | 11733 | 14355 | 16980 | 2272 | 9110 | 19608 | 22236 | 24864 |
| 2273 | 6483 | 11734 | 14356 | 16981 | 2274 | 9111 | 19609 | 22237 | 24865 |
| 2275 | 6484 | 11735 | 14357 | 16982 | 2276 | 9112 | 19610 | 22238 | 24866 |
| 2277 | 6485 | 11736 | 14358 | 16983 | 2278 | 9113 | 19611 | 22239 | 24867 |
| 2279 | 6486 | 11737 | 14359 | 16984 | 2280 | 9114 | 19612 | 22240 | 24868 |
| 2281 | 6487 | 11738 | 14360 | 16985 | 2282 | 9115 | 19613 | 22241 | 24869 |
| 2283 | 6488 | 11739 | 14361 | 16986 | 2284 | 9116 | 19614 | 22242 | 24870 |
| 2285 | 6489 | 11740 | 14362 | 16987 | 2286 | 9117 | 19615 | 22243 | 24871 |
| 2287 | 6490 | 11741 | 14363 | 16988 | 2288 | 9118 | 19616 | 22244 | 24872 |
| 2289 | 6491 | 11742 | 14364 | 16989 | 2290 | 9119 | 19617 | 22245 | 24873 |
| 2291 | 6492 | 11743 | 14365 | 16990 | 2292 | 9120 | 19618 | 22246 | 24874 |
| 2293 | 6493 | 11744 | 14366 | 16991 | 2294 | 9121 | 19619 | 22247 | 24875 |
| 2295 | 6494 | 11745 | 14367 | 16992 | 2296 | 9122 | 19620 | 22248 | 24876 |
| 2297 | 6495 | 11746 | 14368 | 16993 | 2298 | 9123 | 19621 | 22249 | 24877 |
| 2299 | 6496 | 11747 | 14369 | 16994 | 2300 | 9124 | 19622 | 22250 | 24878 |
| 2301 | 6497 | 11748 | 14370 | 16995 | 2302 | 9125 | 19623 | 22251 | 24879 |
| 2303 | 6498 | 11749 | 14371 | 16996 | 2304 | 9126 | 19624 | 22252 | 24880 |
| 2305 | 6499 | 11750 | 14372 | 16997 | 2306 | 9127 | 19625 | 22253 | 24881 |
| 2307 | 6500 | 11751 | 14373 | 16998 | 2308 | 9128 | 19626 | 22254 | 24882 |
| 2309 | 6501 | 11752 | 14374 | 16999 | 2310 | 9129 | 19627 | 22255 | 24883 |
| 2311 | 6502 | 11753 | 14375 | 17000 | 2312 | 9130 | 19628 | 22256 | 24884 |
| 2313 | 6503 | 11754 | 14376 | 17001 | 2314 | 9131 | 19629 | 22257 | 24885 |
| 2315 | 6504 | 11755 | 14377 | 17002 | 2316 | 9132 | 19630 | 22258 | 24886 |
| 2317 | 6505 | 11756 | 14378 | 17003 | 2318 | 9133 | 19631 | 22259 | 24887 |
| 2319 | 6506 | 11757 | 14379 | 17004 | 2320 | 9134 | 19632 | 22260 | 24888 |
| 2321 | 6507 | 11758 | 14380 | 17005 | 2322 | 9135 | 19633 | 22261 | 24889 |
| 2323 | 6508 | 11759 | 14381 | 17006 | 2324 | 9136 | 19634 | 22262 | 24890 |
| 2325 | 6509 | 11760 | 14382 | 17007 | 2326 | 9137 | 19635 | 22263 | 24891 |
| 2327 | 6510 | 11761 | 14383 | 17008 | 2328 | 9138 | 19636 | 22264 | 24892 |
| 2329 | 6511 | 11762 | 14384 | 17009 | 2330 | 9139 | 19637 | 22265 | 24893 |
| 2331 | 6512 | 11763 | 14385 | 17010 | 2332 | 9140 | 19638 | 22266 | 24894 |
| 2333 | 6513 | 11764 | 14386 | 17011 | 2334 | 9141 | 19639 | 22267 | 24895 |
| 2335 | 6514 | 11765 | 14387 | 17012 | 2336 | 9142 | 19640 | 22268 | 24896 |
| 2337 | 6515 | 11766 | 14388 | 17013 | 2338 | 9143 | 19641 | 22269 | 24897 |
| 2339 | 6516 | 11767 | 14389 | 17014 | 2340 | 9144 | 19642 | 22270 | 24898 |
| 2341 | 6517 | 11768 | 14390 | 17015 | 2342 | 9145 | 19643 | 22271 | 24899 |
| 2343 | 6518 | 11769 | 14391 | 17016 | 2344 | 9146 | 19644 | 22272 | 24900 |
| 2345 | 6519 | 11770 | 14392 | 17017 | 2346 | 9147 | 19645 | 22273 | 24901 |
| 2347 | 6520 | 11771 | 14393 | 17018 | 2348 | 9148 | 19646 | 22274 | 24902 |
| 2349 | 6521 | 11772 | 14394 | 17019 | 2350 | 9149 | 19647 | 22275 | 24903 |
| 2351 | 6522 | 11773 | 14395 | 17020 | 2352 | 9150 | 19648 | 22276 | 24904 |
| 2353 | 6523 | 11774 | 14396 | 17021 | 2354 | 9151 | 19649 | 22277 | 24905 |
| 2355 | 6524 | 11775 | 14397 | 17022 | 2356 | 9152 | 19650 | 22278 | 24906 |
| 2357 | 6525 | 11776 | 14398 | 17023 | 2358 | 9153 | 19651 | 22279 | 24907 |
| 2359 | 6526 | 11777 | 14399 | 17024 | 2360 | 9154 | 19652 | 22280 | 24908 |
| 2361 | 6527 | 11778 | 14400 | 17025 | 2362 | 9155 | 19653 | 22281 | 24909 |
| 2363 | 6528 | 11779 | 14401 | 17026 | 2364 | 9156 | 19654 | 22282 | 24910 |
| 2365 | 6529 | 11780 | 14402 | 17027 | 2366 | 9157 | 19655 | 22283 | 24911 |
| 2367 | 6530 | 11781 | 14403 | 17028 | 2368 | 9158 | 19656 | 22284 | 24912 |
| 2369 | 6531 | 11782 | 14404 | 17029 | 2370 | 9159 | 19657 | 22285 | 24913 |
| 2371 | 6532 | 11783 | 14405 | 17030 | 2372 | 9160 | 19658 | 22286 | 24914 |
| 2373 | 6533 | 11784 | 14406 | 17031 | 2374 | 9161 | 19659 | 22287 | 24915 |
| 2375 | 6534 | 11785 | 14407 | 17032 | 2376 | 9162 | 19660 | 22288 | 24916 |
| 2377 | 6535 | 11786 | 14408 | 17033 | 2378 | 9163 | 19661 | 22289 | 24917 |
| 2379 | 6536 | 11787 | 14409 | 17034 | 2380 | 9164 | 19662 | 22290 | 24918 |
| 2381 | 6537 | 11788 | 14410 | 17035 | 2382 | 9165 | 19663 | 22291 | 24919 |
| 2383 | 6538 | 11789 | 14411 | 17036 | 2384 | 9166 | 19664 | 22292 | 24920 |
| 2385 | 6539 | 11790 | 14412 | 17037 | 2386 | 9167 | 19665 | 22293 | 24921 |
| 2387 | 6540 | 11791 | 14413 | 17038 | 2388 | 9168 | 19666 | 22294 | 24922 |
| 2389 | 6541 | 11792 | 14414 | 17039 | 2390 | 9169 | 19667 | 22295 | 24923 |
| 2391 | 6542 | 11793 | 14415 | 17040 | 2392 | 9170 | 19668 | 22296 | 24924 |
| 2393 | 6543 | 11794 | 14416 | 17041 | 2394 | 9171 | 19669 | 22297 | 24925 |
| 2395 | 6544 | 11795 | 14417 | 17042 | 2396 | 9172 | 19670 | 22298 | 24926 |
| 2397 | 6545 | 11796 | 14418 | 17043 | 2398 | 9173 | 19671 | 22299 | 24927 |
| 2399 | 6546 | 11797 | 14419 | 17044 | 2400 | 9174 | 19672 | 22300 | 24928 |
| 2401 | 6547 | 11798 | 14420 | 17045 | 2402 | 9175 | 19673 | 22301 | 24929 |
| 2403 | 6548 | 11799 | 14421 | 17046 | 2404 | 9176 | 19674 | 22302 | 24930 |
| 2405 | 6549 | 11800 | 14422 | 17047 | 2406 | 9177 | 19675 | 22303 | 24931 |
| 2407 | 6550 | 11801 | 14423 | 17048 | 2408 | 9178 | 19676 | 22304 | 24932 |
| 2409 | 6551 | 11802 | 14424 | 17049 | 2410 | 9179 | 19677 | 22305 | 24933 |
| 2411 | 6552 | 11803 | 14425 | 17050 | 2412 | 9180 | 19678 | 22306 | 24934 |
| 2413 | 6553 | 11804 | 14426 | 17051 | 2414 | 9181 | 19679 | 22307 | 24935 |
| 2415 | 6554 | 11805 | 14427 | 17052 | 2416 | 9182 | 19680 | 22308 | 24936 |
| 2417 | 6555 | 11806 | 14428 | 17053 | 2418 | 9183 | 19681 | 22309 | 24937 |
| 2419 | 6556 | 11807 | 14429 | 17054 | 2420 | 9184 | 19682 | 22310 | 24938 |
| 2421 | 6557 | 11808 | 14430 | 17055 | 2422 | 9185 | 19683 | 22311 | 24939 |
| 2423 | 6558 | 11809 | 14431 | 17056 | 2424 | 9186 | 19684 | 22312 | 24940 |
| 2425 | 6559 | 11810 | 14432 | 17057 | 2426 | 9187 | 19685 | 22313 | 24941 |
| 2427 | 6560 | 11811 | 14433 | 17058 | 2428 | 9188 | 19686 | 22314 | 24942 |
| 2429 | 6561 | 11812 | 14434 | 17059 | 2430 | 9189 | 19687 | 22315 | 24943 |
| 2431 | 6562 | 11813 | 14435 | 17060 | 2432 | 9190 | 19688 | 22316 | 24944 |
| 2433 | 6563 | 11814 | 14436 | 17061 | 2434 | 9191 | 19689 | 22317 | 24945 |
| 2435 | 6564 | 11815 | 14437 | 17062 | 2436 | 9192 | 19690 | 22318 | 24946 |
| 2437 | 6565 | 11816 | 14438 | 17063 | 2438 | 9193 | 19691 | 22319 | 24947 |
| 2439 | 6566 | 11817 | 14439 | 17064 | 2440 | 9194 | 19692 | 22320 | 24948 |
| 2441 | 6567 | 11818 | 14440 | 17065 | 2442 | 9195 | 19693 | 22321 | 24949 |
| 2443 | 6568 | 11819 | 14441 | 17066 | 2444 | 9196 | 19694 | 22322 | 24950 |
| 2445 | 6569 | 11820 | 14442 | 17067 | 2446 | 9197 | 19695 | 22323 | 24951 |
| 2447 | 6570 | 11821 | 14443 | 17068 | 2448 | 9198 | 19696 | 22324 | 24952 |
| 2449 | 6571 | 11822 | 14444 | 17069 | 2450 | 9199 | 19697 | 22325 | 24953 |
| 2451 | 6572 | 11823 | 14445 | 17070 | 2452 | 9200 | 19698 | 22326 | 24954 |
| 2453 | 6573 | 11824 | 14446 | 17071 | 2454 | 9201 | 19699 | 22327 | 24955 |
| 2455 | 6574 | 11825 | 14447 | 17072 | 2456 | 9202 | 19700 | 22328 | 24956 |
| 2457 | 6575 | 11826 | 14448 | 17073 | 2458 | 9203 | 19701 | 22329 | 24957 |
| 2459 | 6576 | 11827 | 14449 | 17074 | 2460 | 9204 | 19702 | 22330 | 24958 |
| 2461 | 6577 | 11828 | 14450 | 17075 | 2462 | 9205 | 19703 | 22331 | 24959 |
| 2463 | 6578 | 11829 | 14451 | 17076 | 2464 | 9206 | 19704 | 22332 | 24960 |
| 2465 | 6579 | 11830 | 14452 | 17077 | 2466 | 9207 | 19705 | 22333 | 24961 |
| 2467 | 6580 | 11831 | 14453 | 17078 | 2468 | 9208 | 19706 | 22334 | 24962 |
| 2469 | 6581 | 11832 | 14454 | 17079 | 2470 | 9209 | 19707 | 22335 | 24963 |
| 2471 | 6582 | 11833 | 14455 | 17080 | 2472 | 9210 | 19708 | 22336 | 24964 |
| 2473 | 6583 | 11834 | 14456 | 17081 | 2474 | 9211 | 19709 | 22337 | 24965 |
| 2475 | 6584 | 11835 | 14457 | 17082 | 2476 | 9212 | 19710 | 22338 | 24966 |
| 2477 | 6585 | 11836 | 14458 | 17083 | 2478 | 9213 | 19711 | 22339 | 24967 |
| 2479 | 6586 | 11837 | 14459 | 17084 | 2480 | 9214 | 19712 | 22340 | 24968 |
| 2481 | 6587 | 11838 | 14460 | 17085 | 2482 | 9215 | 19713 | 22341 | 24969 |
| 2483 | 6588 | 11839 | 14461 | 17086 | 2484 | 9216 | 19714 | 22342 | 24970 |
| 2485 | 6589 | 11840 | 14462 | 17087 | 2486 | 9217 | 19715 | 22343 | 24971 |
| 2487 | 6590 | 11841 | 14463 | 17088 | 2488 | 9218 | 19716 | 22344 | 24972 |
| 2489 | 6591 | 11842 | 14464 | 17089 | 2490 | 9219 | 19717 | 22345 | 24973 |
| 2491 | 6592 | 11843 | 14465 | 17090 | 2492 | 9220 | 19718 | 22346 | 24974 |
| 2493 | 6593 | 11844 | 14466 | 17091 | 2494 | 9221 | 19719 | 22347 | 24975 |
| 2495 | 6594 | 11845 | 14467 | 17092 | 2496 | 9222 | 19720 | 22348 | 24976 |
| 2497 | 6595 | 11846 | 14468 | 17093 | 2498 | 9223 | 19721 | 22349 | 24977 |
| 2499 | 6596 | 11847 | 14469 | 17094 | 2500 | 9224 | 19722 | 22350 | 24978 |
| 2501 | 6597 | 11848 | 14470 | 17095 | 2502 | 9225 | 19723 | 22351 | 24979 |
| 2503 | 6598 | 11849 | 14471 | 17096 | 2504 | 9226 | 19724 | 22352 | 24980 |
| 2505 | 6599 | 11850 | 14472 | 17097 | 2506 | 9227 | 19725 | 22353 | 24981 |
| 2507 | 6600 | 11851 | 14473 | 17098 | 2508 | 9228 | 19726 | 22354 | 24982 |
| 2509 | 6601 | 11852 | 14474 | 17099 | 2510 | 9229 | 19727 | 22355 | 24983 |
| 2511 | 6602 | 11853 | 14475 | 17100 | 2512 | 9230 | 19728 | 22356 | 24984 |
| 2513 | 6603 | 11854 | 14476 | 17101 | 2514 | 9231 | 19729 | 22357 | 24985 |
| 2515 | 6604 | | 14477 | 17102 | 2516 | 9232 | 19730 | 22358 | 24986 |
| 2517 | 6605 | 11855 | 14478 | 17103 | 2518 | 9233 | 19731 | 22359 | 24987 |
| 2519 | 6606 | 11856 | 14479 | 17104 | 2520 | 9234 | 19732 | 22360 | 24988 |
| 2521 | 6607 | | | 17105 | 2522 | 9235 | 19733 | 22361 | 24989 |
| 2523 | 6608 | 11857 | 14480 | 17106 | 2524 | 9236 | 19734 | 22362 | 24990 |
| 2525 | 6609 | 11858 | 14481 | 17107 | 2526 | 9237 | 19735 | 22363 | 24991 |
| 2527 | 6610 | 11859 | 14482 | 17108 | 2528 | 9238 | 19736 | 22364 | 24992 |
| 2529 | 6611 | 11860 | 14483 | 17109 | 2530 | 9239 | 19737 | 22365 | 24993 |
| 2531 | 6612 | 11861 | 14484 | 17110 | 2532 | 9240 | 19738 | 22366 | 24994 |
| 2533 | 6613 | 11862 | 14485 | 17111 | 2534 | 9241 | 19739 | 22367 | 24995 |
| 2535 | 6614 | 11863 | 14486 | 17112 | 2536 | 9242 | 19740 | 22368 | 24996 |
| 2537 | 6615 | 11864 | 14487 | 17113 | 2538 | 9243 | 19741 | 22369 | 24997 |
| 2539 | 6616 | 11865 | 14488 | 17114 | 2540 | 9244 | 19742 | 22370 | 24998 |
| 2541 | 6617 | 11866 | 14489 | 17115 | 2542 | 9245 | 19743 | 22371 | 24999 |
| 2543 | 6618 | 11867 | 14490 | 17116 | 2544 | 9246 | 19744 | 22372 | 25000 |
| 2545 | 6619 | 11868 | 14491 | 17117 | 2546 | 9247 | 19745 | 22373 | 25001 |
| 2547 | 6620 | 11869 | 14492 | 17118 | 2548 | 9248 | 19746 | 22374 | 25002 |
| 2549 | 6621 | 11870 | 14493 | 17119 | 2550 | 9249 | 19747 | 22375 | 25003 |
| 2551 | 6622 | 11871 | 14494 | 17120 | 2552 | 9250 | 19748 | 22376 | 25004 |
| 2553 | 6623 | 11872 | 14495 | 17121 | 2554 | 9251 | 19749 | 22377 | 25005 |
| 2555 | 6624 | 11873 | 14496 | 17122 | 2556 | 9252 | 19750 | 22378 | 25006 |
| 2557 | 6625 | 11874 | 14497 | 17123 | 2558 | 9253 | 19751 | 22379 | 25007 |
| 2559 | 6626 | 11875 | 14498 | 17124 | 2560 | 9254 | 19752 | 22380 | 25008 |
| 2561 | 6627 | 11876 | 14499 | 17125 | 2562 | 9255 | 19753 | 22381 | 25009 |
| 2563 | 6628 | 11877 | 14500 | 17126 | 2564 | 9256 | 19754 | 22382 | 25010 |
| 2565 | 6629 | 11878 | 14501 | 17127 | 2566 | 9257 | 19755 | 22383 | 25011 |
| 2567 | 6630 | 11879 | 14502 | 17128 | 2568 | 9258 | 19756 | 22384 | 25012 |
| 2569 | 6631 | 11880 | 14503 | 17129 | 2570 | 9259 | 19757 | 22385 | 25013 |
| 2571 | 6632 | 11881 | 14504 | 17130 | 2572 | 9260 | 19758 | 22386 | 25014 |
| 2573 | 6633 | 11882 | 14505 | 17131 | 2574 | 9261 | 19759 | 22387 | 25015 |
| 2575 | 6634 | 11883 | 14506 | 17132 | 2576 | 9262 | 19760 | 22388 | 25016 |
| 2577 | 6635 | 11884 | 14507 | 17133 | 2578 | 9263 | 19761 | 22389 | 25017 |
| 2579 | 6636 | 11885 | 14508 | 17134 | 2580 | 9264 | 19762 | 22390 | 25018 |
| 2581 | 6637 | 11886 | 14509 | 17135 | 2582 | 9265 | 19763 | 22391 | 25019 |
| 2583 | 6638 | 11887 | 14510 | 17136 | 2584 | 9266 | 19764 | 22392 | 25020 |
| 2585 | 6639 | 11888 | 14511 | 17137 | 2586 | 9267 | 19765 | 22393 | 25021 |
| 2587 | 6640 | 11889 | 14512 | 17138 | 2588 | 9268 | 19766 | 22394 | 25022 |
| 2589 | 6641 | 11890 | 14513 | 17139 | 2590 | 9269 | 19767 | 22395 | 25023 |
| 2591 | 6642 | 11891 | 14514 | 17140 | 2592 | 9270 | 19768 | 22396 | 25024 |
| 2593 | 6643 | 11892 | 14515 | 17141 | 2594 | 9271 | 19769 | 22397 | 25025 |
| 2595 | 6644 | 11893 | 14516 | 17142 | 2596 | 9272 | 19770 | 22398 | 25026 |
| 2597 | 6645 | 11894 | 14517 | 17143 | 2598 | 9273 | 19771 | 22399 | 25027 |
| 2599 | 6646 | 11895 | 14518 | 17144 | 2600 | 9274 | 19772 | 22400 | 25028 |
| 2601 | 6647 | 11896 | 14519 | 17145 | 2602 | 9275 | 19773 | 22401 | 25029 |
| 2603 | 6648 | 11897 | 14520 | 17146 | 2604 | 9276 | 19774 | 22402 | 25030 |
| 2605 | 6649 | 11898 | 14521 | 17147 | 2606 | 9277 | 19775 | 22403 | 25031 |
| 2607 | 6650 | 11899 | 14522 | 17148 | 2608 | 9278 | 19776 | 22404 | 25032 |
| 2609 | 6651 | 11900 | 14523 | 17149 | 2610 | 9279 | 19777 | 22405 | 25033 |
| 2611 | 6652 | 11901 | 14524 | 17150 | 2612 | 9280 | 19778 | 22406 | 25034 |
| 2613 | 6653 | 11902 | 14525 | 17151 | 2614 | 9281 | 19779 | 22407 | 25035 |
| 2615 | 6654 | 11903 | 14526 | 17152 | 2616 | 9282 | 19780 | 22408 | 25036 |
| 2617 | 6655 | 11904 | 14527 | 17153 | 2618 | 9283 | 19781 | 22409 | 25037 |
| 2619 | 6656 | 11905 | 14528 | 17154 | 2620 | 9284 | 19782 | 22410 | 25038 |
| 2621 | 6657 | 11906 | 14529 | 17155 | 2622 | 9285 | 19783 | 22411 | 25039 |
| 2623 | 6658 | 11907 | 14530 | 17156 | 2624 | 9286 | 19784 | 22412 | 25040 |
| 2625 | 6659 | 11908 | 14531 | 17157 | 2626 | 9287 | 19785 | 22413 | 25041 |
| 2627 | 6660 | 11909 | 14532 | 17158 | 2628 | 9288 | 19786 | 22414 | 25042 |
| 2629 | 6661 | 11910 | 14533 | 17159 | 2630 | 9289 | 19787 | 22415 | 25043 |
| 2631 | 6662 | 11911 | 14534 | 17160 | 2632 | 9290 | 19788 | 22416 | 25044 |
| 2633 | 6663 | 11912 | 14535 | 17161 | 2634 | 9291 | 19789 | 22417 | 25045 |
| 2635 | 6664 | 11913 | 14536 | 17162 | 2636 | 9292 | 19790 | 22418 | 25046 |
| 2637 | 6665 | 11914 | 14537 | 17163 | 2638 | 9293 | 19791 | 22419 | 25047 |
| 2639 | 6666 | 11915 | 14538 | 17164 | 2640 | 9294 | 19792 | 22420 | 25048 |
| 2641 | 6667 | 11916 | 14539 | 17165 | 2642 | 9295 | 19793 | 22421 | 25049 |
| 2643 | 6668 | 11917 | 14540 | 17166 | 2644 | 9296 | 19794 | 22422 | 25050 |
| 2645 | 6669 | 11918 | 14541 | 17167 | 2646 | 9297 | 19795 | 22423 | 25051 |
| 2647 | 6670 | 11919 | 14542 | 17168 | 2648 | 9298 | 19796 | 22424 | 25052 |
| 2649 | 6671 | 11920 | 14543 | 17169 | 2650 | 9299 | 19797 | 22425 | 25053 |
| 2651 | 6672 | 11921 | 14544 | 17170 | 2652 | 9300 | 19798 | 22426 | 25054 |
| 2653 | 6673 | 11922 | 14545 | 17171 | 2654 | 9301 | 19799 | 22427 | 25055 |
| 2655 | 6674 | 11923 | 14546 | 17172 | 2656 | 9302 | 19800 | 22428 | 25056 |
| 2657 | 6675 | 11924 | 14547 | 17173 | 2658 | 9303 | 19801 | 22429 | 25057 |
| 2659 | 6676 | 11925 | 14548 | 17174 | 2660 | 9304 | 19802 | 22430 | 25058 |
| 2661 | 6677 | 11926 | 14549 | 17175 | 2662 | 9305 | 19803 | 22431 | 25059 |
| 2663 | 6678 | 11927 | 14550 | 17176 | 2664 | 9306 | 19804 | 22432 | 25060 |
| 2665 | 6679 | 11928 | 14551 | 17177 | 2666 | 9307 | 19805 | 22433 | 25061 |
| 2667 | 6680 | 11929 | 14552 | 17178 | 2668 | 9308 | 19806 | 22434 | 25062 |
| 2669 | 6681 | 11930 | 14553 | 17179 | 2670 | 9309 | 19807 | 22435 | 25063 |
| 2671 | 6682 | 11931 | 14554 | 17180 | 2672 | 9310 | 19808 | 22436 | 25064 |
| 2673 | 6683 | 11932 | 14555 | 17181 | 2674 | 9311 | 19809 | 22437 | 25065 |
| 2675 | 6684 | 11933 | 14556 | 17182 | 2676 | 9312 | 19810 | 22438 | 25066 |
| 2677 | 6685 | 11934 | 14557 | 17183 | 2678 | 9313 | 19811 | 22439 | 25067 |
| 2679 | 6686 | 11935 | 14558 | 17184 | 2680 | 9314 | 19812 | 22440 | 25068 |
| 2681 | 6687 | 11936 | 14559 | 17185 | 2682 | 9315 | 19813 | 22441 | 25069 |
| 2683 | 6688 | 11937 | 14560 | 17186 | 2684 | 9316 | 19814 | 22442 | 25070 |
| 2685 | 6689 | 11938 | 14561 | 17187 | 2686 | 9317 | 19815 | 22443 | 25071 |
| 2687 | 6690 | 11939 | 14562 | 17188 | 2688 | 9318 | 19816 | 22444 | 25072 |
| 2689 | 6691 | 11940 | 14563 | 17189 | 2690 | 9319 | 19817 | 22445 | 25073 |
| 2691 | 6692 | 11941 | 14564 | 17190 | 2692 | 9320 | 19818 | 22446 | 25074 |
| 2693 | 6693 | 11942 | 14565 | 17191 | 2694 | 9321 | 19819 | 22447 | 25075 |
| 2695 | 6694 | 11943 | 14566 | 17192 | 2696 | 9322 | 19820 | 22448 | 25076 |
| 2697 | 6695 | 11944 | 14567 | 17193 | 2698 | 9323 | 19821 | 22449 | 25077 |
| 2699 | 6696 | 11945 | 14568 | 17194 | 2700 | 9324 | 19822 | 22450 | 25078 |
| 2701 | 6697 | 11946 | 14569 | 17195 | 2702 | 9325 | 19823 | 22451 | 25079 |
| 2703 | 6698 | 11947 | 14570 | 17196 | 2704 | 9326 | 19824 | 22452 | 25080 |
| 2705 | 6699 | 11948 | 14571 | 17197 | 2706 | 9327 | 19825 | 22453 | 25081 |
| 2707 | 6700 | 11949 | 14572 | 17198 | 2708 | 9328 | 19826 | 22454 | 25082 |
| 2709 | 6701 | 11950 | 14573 | 17199 | 2710 | 9329 | 19827 | 22455 | 25083 |
| 2711 | 6702 | 11951 | 14574 | 17200 | 2712 | 9330 | 19828 | 22456 | 25084 |
| 2713 | 6703 | 11952 | 14575 | 17201 | 2714 | 9331 | 19829 | 22457 | 25085 |
| 2715 | 6704 | 11953 | 14576 | 17202 | 2716 | 9332 | 19830 | 22458 | 25086 |
| 2717 | 6705 | 11954 | 14577 | 17203 | 2718 | 9333 | 19831 | 22459 | 25087 |
| 2719 | 6706 | 11955 | 14578 | 17204 | 2720 | 9334 | 19832 | 22460 | 25088 |
| 2721 | 6707 | 11956 | 14579 | 17205 | 2722 | 9335 | 19833 | 22461 | 25089 |
| 2723 | 6708 | 11957 | 14580 | 17206 | 2724 | 9336 | 19834 | 22462 | 25090 |
| 2725 | 6709 | 11958 | 14581 | 17207 | 2726 | 9337 | 19835 | 22463 | 25091 |
| 2727 | 6710 | 11959 | 14582 | 17208 | 2728 | 9338 | 19836 | 22464 | 25092 |
| 2729 | 6711 | 11960 | 14583 | 17209 | 2730 | 9339 | 19837 | 22465 | 25093 |
| 2731 | 6712 | 11961 | 14584 | 17210 | 2732 | 9340 | 19838 | 22466 | 25094 |
| 2733 | 6713 | 11962 | 14585 | 17211 | 2734 | 9341 | 19839 | 22467 | 25095 |
| 2735 | 6714 | 11963 | 14586 | 17212 | 2736 | 9342 | 19840 | 22468 | 25096 |
| 2737 | 6715 | 11964 | 14587 | 17213 | 2738 | 9343 | 19841 | 22469 | 25097 |
| 2739 | 6716 | 11965 | 14588 | 17214 | 2740 | 9344 | 19842 | 22470 | 25098 |
| 2741 | 6717 | 11966 | 14589 | 17215 | 2742 | 9345 | 19843 | 22471 | 25099 |
| 2743 | 6718 | 11967 | 14590 | 17216 | 2744 | 9346 | 19844 | 22472 | 25100 |
| 2745 | 6719 | 11968 | 14591 | 17217 | 2746 | 9347 | 19845 | 22473 | 25101 |
| 2747 | 6720 | 11969 | 14592 | 17218 | 2748 | 9348 | 19846 | 22474 | 25102 |
| 2749 | 6721 | 11970 | 14593 | 17219 | 2750 | 9349 | 19847 | 22475 | 25103 |
| 2751 | 6722 | 11971 | 14594 | 17220 | 2752 | 9350 | 19848 | 22476 | 25104 |
| 2753 | 6723 | 11972 | 14595 | 17221 | 2754 | 9351 | 19849 | 22477 | 25105 |
| 2755 | 6724 | 11973 | 14596 | 17222 | 2756 | 9352 | 19850 | 22478 | 25106 |
| 2757 | 6725 | 11974 | 14597 | 17223 | 2758 | 9353 | 19851 | 22479 | 25107 |
| 2759 | 6726 | 11975 | 14598 | 17224 | 2760 | 9354 | 19852 | 22480 | 25108 |
| 2761 | 6727 | 11976 | 14599 | 17225 | 2762 | 9355 | 19853 | 22481 | 25109 |
| 2763 | 6728 | 11977 | 14600 | 17226 | 2764 | 9356 | 19854 | 22482 | 25110 |
| 2765 | 6729 | 11978 | 14601 | 17227 | 2766 | 9357 | 19855 | 22483 | 25111 |
| 2767 | 6730 | 11979 | 14602 | 17228 | 2768 | 9358 | 19856 | 22484 | 25112 |
| 2769 | 6731 | 11980 | 14603 | 17229 | 2770 | 9359 | 19857 | 22485 | 25113 |
| 2771 | 6732 | 11981 | 14604 | 17230 | 2772 | 9360 | 19858 | 22486 | 25114 |
| 2773 | 6733 | 11982 | 14605 | 17231 | 2774 | 9361 | 19859 | 22487 | 25115 |
| 2775 | 6734 | 11983 | 14606 | 17232 | 2776 | 9362 | 19860 | 22488 | 25116 |
| 2777 | 6735 | 11984 | 14607 | 17233 | 2778 | 9363 | 19861 | 22489 | 25117 |
| 2779 | 6736 | 11985 | 14608 | 17234 | 2780 | 9364 | 19862 | 22490 | 25118 |
| 2781 | 6737 | 11986 | 14609 | 17235 | 2782 | 9365 | 19863 | 22491 | 25119 |
| 2783 | 6738 | 11987 | 14610 | 17236 | 2784 | 9366 | 19864 | 22492 | 25120 |
| 2785 | 6739 | 11988 | 14611 | 17237 | 2786 | 9367 | 19865 | 22493 | 25121 |
| 2787 | 6740 | 11989 | 14612 | 17238 | 2788 | 9368 | 19866 | 22494 | 25122 |
| 2789 | 6741 | 11990 | 14613 | 17239 | 2790 | 9369 | 19867 | 22495 | 25123 |
| 2791 | 6742 | 11991 | 14614 | 17240 | 2792 | 9370 | 19868 | 22496 | 25124 |
| 2793 | 6743 | 11992 | 14615 | 17241 | 2794 | 9371 | 19869 | 22497 | 25125 |
| 2795 | 6744 | 11993 | 14616 | 17242 | 2796 | 9372 | 19870 | 22498 | 25126 |
| 2797 | 6745 | 11994 | 14617 | 17243 | 2798 | 9373 | 19871 | 22499 | 25127 |
| 2799 | 6746 | 11995 | 14618 | 17244 | 2800 | 9374 | 19872 | 22500 | 25128 |
| 2801 | 6747 | 11996 | 14619 | 17245 | 2802 | 9375 | 19873 | 22501 | 25129 |
| 2803 | 6748 | 11997 | 14620 | 17246 | 2804 | 9376 | 19874 | 22502 | 25130 |
| 2805 | 6749 | 11998 | 14621 | 17247 | 2806 | 9377 | 19875 | 22503 | 25131 |
| 2807 | 6750 | 11999 | 14622 | 17248 | 2808 | 9378 | 19876 | 22504 | 25132 |
| 2809 | 6751 | 12000 | 14623 | 17249 | 2810 | 9379 | 19877 | 22505 | 25133 |
| 2811 | 6752 | 12001 | 14624 | 17250 | 2812 | 9380 | 19878 | 22506 | 25134 |
| 2813 | 6753 | 12002 | 14625 | 17251 | 2814 | 9381 | 19879 | 22507 | 25135 |
| 2815 | 6754 | 12003 | 14626 | 17252 | 2816 | 9382 | 19880 | 22508 | 25136 |
| 2817 | 6755 | 12004 | 14627 | 17253 | 2818 | 9383 | 19881 | 22509 | 25137 |
| 2819 | 6756 | 12005 | 14628 | 17254 | 2820 | 9384 | 19882 | 22510 | 25138 |
| 2821 | 6757 | 12006 | 14629 | 17255 | 2822 | 9385 | 19883 | 22511 | 25139 |
| 2823 | 6758 | 12007 | 14630 | 17256 | 2824 | 9386 | 19884 | 22512 | 25140 |
| 2825 | 6759 | 12008 | 14631 | 17257 | 2826 | 9387 | 19885 | 22513 | 25141 |
| 2827 | 6760 | 12009 | 14632 | 17258 | 2828 | 9388 | 19886 | 22514 | 25142 |
| 2829 | 6761 | 12010 | 14633 | 17259 | 2830 | 9389 | 19887 | 22515 | 25143 |
| 2831 | 6762 | 12011 | 14634 | 17260 | 2832 | 9390 | 19888 | 22516 | 25144 |
| 2833 | 6763 | 12012 | 14635 | 17261 | 2834 | 9391 | 19889 | 22517 | 25145 |
| 2835 | 6764 | 12013 | 14636 | 17262 | 2836 | 9392 | 19890 | 22518 | 25146 |
| 2837 | 6765 | 12014 | 14637 | 17263 | 2838 | 9393 | 19891 | 22519 | 25147 |
| 2839 | 6766 | 12015 | 14638 | 17264 | 2840 | 9394 | 19892 | 22520 | 25148 |
| 2841 | 6767 | 12016 | 14639 | 17265 | 2842 | 9395 | 19893 | 22521 | 25149 |
| 2843 | 6768 | 12017 | 14640 | 17266 | 2844 | 9396 | 19894 | 22522 | 25150 |
| 2845 | 6769 | 12018 | 14641 | 17267 | 2846 | 9397 | 19895 | 22523 | 25151 |
| 2847 | 6770 | 12019 | 14642 | 17268 | 2848 | 9398 | 19896 | 22524 | 25152 |
| 2849 | 6771 | 12020 | 14643 | 17269 | 2850 | 9399 | 19897 | 22525 | 25153 |
| 2851 | 6772 | 12021 | 14644 | 17270 | 2852 | 9400 | 19898 | 22526 | 25154 |
| 2853 | 6773 | 12022 | 14645 | 17271 | 2854 | 9401 | 19899 | 22527 | 25155 |
| 2855 | 6774 | 12023 | 14646 | 17272 | 2856 | 9402 | 19900 | 22528 | 25156 |
| 2857 | 6775 | 12024 | 14647 | 17273 | 2858 | 9403 | 19901 | 22529 | 25157 |
| 2859 | 6776 | 12025 | 14648 | 17274 | 2860 | 9404 | 19902 | 22530 | 25158 |
| 2861 | 6777 | 12026 | 14649 | 17275 | 2862 | 9405 | 19903 | 22531 | 25159 |
| 2863 | 6778 | 12027 | 14650 | 17276 | 2864 | 9406 | 19904 | 22532 | 25160 |
| 2865 | 6779 | 12028 | 14651 | 17277 | 2866 | 9407 | 19905 | 22533 | 25161 |
| 2867 | 6780 | 12029 | 14652 | 17278 | 2868 | 9408 | 19906 | 22534 | 25162 |
| 2869 | 6781 | 12030 | 14653 | 17279 | 2870 | 9409 | 19907 | 22535 | 25163 |
| 2871 | 6782 | 12031 | 14654 | 17280 | 2872 | 9410 | 19908 | 22536 | 25164 |
| 2873 | 6783 | 12032 | 14655 | 17281 | 2874 | 9411 | 19909 | 22537 | 25165 |
| 2875 | 6784 | 12033 | 14656 | 17282 | 2876 | 9412 | 19910 | 22538 | 25166 |
| 2877 | 6785 | 12034 | 14657 | 17283 | 2878 | 9413 | 19911 | 22539 | 25167 |
| 2879 | 6786 | 12035 | 14658 | 17284 | 2880 | 9414 | 19912 | 22540 | 25168 |
| 2881 | 6787 | 12036 | 14659 | 17285 | 2882 | 9415 | 19913 | 22541 | 25169 |
| 2883 | 6788 | 12037 | 14660 | 17286 | 2884 | 9416 | 19914 | 22542 | 25170 |
| 2885 | 6789 | 12038 | 14661 | 17287 | 2886 | 9417 | 19915 | 22543 | 25171 |
| 2887 | 6790 | 12039 | 14662 | 17288 | 2888 | 9418 | 19916 | 22544 | 25172 |
| 2889 | 6791 | 12040 | 14663 | 17289 | 2890 | 9419 | 19917 | 22545 | 25173 |
| 2891 | 6792 | 12041 | 14664 | 17290 | 2892 | 9420 | 19918 | 22546 | 25174 |
| 2893 | 6793 | 12042 | 14665 | 17291 | 2894 | 9421 | 19919 | 22547 | 25175 |
| 2895 | 6794 | 12043 | 14666 | 17292 | 2896 | 9422 | 19920 | 22548 | 25176 |
| 2897 | 6795 | 12044 | 14667 | 17293 | 2898 | 9423 | 19921 | 22549 | 25177 |
| 2899 | 6796 | 12045 | 14668 | 17294 | 2900 | 9424 | 19922 | 22550 | 25178 |
| 2901 | 6797 | 12046 | 14669 | 17295 | 2902 | 9425 | 19923 | 22551 | 25179 |
| 2903 | 6798 | 12047 | 14670 | 17296 | 2904 | 9426 | 19924 | 22552 | 25180 |
| 2905 | 6799 | 12048 | 14671 | 17297 | 2906 | 9427 | 19925 | 22553 | 25181 |
| 2907 | 6800 | 12049 | 14672 | 17298 | 2908 | 9428 | 19926 | 22554 | 25182 |
| 2909 | 6801 | 12050 | 14673 | 17299 | 2910 | 9429 | 19927 | 22555 | 25183 |
| 2911 | 6802 | 12051 | 14674 | 17300 | 2912 | 9430 | 19928 | 22556 | 25184 |
| 2913 | 6803 | 12052 | 14675 | 17301 | 2914 | 9431 | 19929 | 22557 | 25185 |
| 2915 | 6804 | 12053 | 14676 | 17302 | 2916 | 9432 | 19930 | 22558 | 25186 |
| 2917 | 6805 | 12054 | 14677 | 17303 | 2918 | 9433 | 19931 | 22559 | 25187 |
| 2919 | 6806 | 12055 | 14678 | 17304 | 2920 | 9434 | 19932 | 22560 | 25188 |
| 2921 | 6807 | 12056 | 14679 | 17305 | 2922 | 9435 | 19933 | 22561 | 25189 |
| 2923 | 6808 | 12057 | 14680 | 17306 | 2924 | 9436 | 19934 | 22562 | 25190 |
| 2925 | 6809 | 12058 | 14681 | 17307 | 2926 | 9437 | 19935 | 22563 | 25191 |
| 2927 | 6810 | 12059 | 14682 | 17308 | 2928 | 9438 | 19936 | 22564 | 25192 |
| 2929 | 6811 | 12060 | 14683 | 17309 | 2930 | 9439 | 19937 | 22565 | 25193 |
| 2931 | 6812 | 12061 | 14684 | 17310 | 2932 | 9440 | 19938 | 22566 | 25194 |
| 2933 | 6813 | 12062 | 14685 | 17311 | 2934 | 9441 | 19939 | 22567 | 25195 |
| 2935 | 6814 | 12063 | 14686 | 17312 | 2936 | 9442 | 19940 | 22568 | 25196 |
| 2937 | 6815 | 12064 | 14687 | 17313 | 2938 | 9443 | 19941 | 22569 | 25197 |
| 2939 | 6816 | 12065 | 14688 | 17314 | 2940 | 9444 | 19942 | 22570 | 25198 |
| 2941 | 6817 | 12066 | 14689 | 17315 | 2942 | 9445 | 19943 | 22571 | 25199 |
| 2943 | 6818 | 12067 | 14690 | 17316 | 2944 | 9446 | 19944 | 22572 | 25200 |
| 2945 | 6819 | 12068 | 14691 | 17317 | 2946 | 9447 | 19945 | 22573 | 25201 |
| 2947 | 6820 | 12069 | 14692 | 17318 | 2948 | 9448 | 19946 | 22574 | 25202 |
| 2949 | 6821 | 12070 | 14693 | 17319 | 2950 | 9449 | 19947 | 22575 | 25203 |
| 2951 | 6822 | 12071 | 14694 | 17320 | 2952 | 9450 | 19948 | 22576 | 25204 |
| 2953 | 6823 | 12072 | 14695 | 17321 | 2954 | 9451 | 19949 | 22577 | 25205 |
| 2955 | 6824 | 12073 | 14696 | 17322 | 2956 | 9452 | 19950 | 22578 | 25206 |
| 2957 | 6825 | 12074 | 14697 | 17323 | 2958 | 9453 | 19951 | 22579 | 25207 |
| 2959 | 6826 | 12075 | 14698 | 17324 | 2960 | 9454 | 19952 | 22580 | 25208 |
| 2961 | 6827 | 12076 | 14699 | 17325 | 2962 | 9455 | 19953 | 22581 | 25209 |
| 2963 | 6828 | 12077 | 14700 | 17326 | 2964 | 9456 | 19954 | 22582 | 25210 |
| 2965 | 6829 | 12078 | 14701 | 17327 | 2966 | 9457 | 19955 | 22583 | 25211 |
| 2967 | 6830 | 12079 | 14702 | 17328 | 2968 | 9458 | 19956 | 22584 | 25212 |
| 2969 | 6831 | 12080 | 14703 | 17329 | 2970 | 9459 | 19957 | 22585 | 25213 |
| 2971 | 6832 | 12081 | 14704 | 17330 | 2972 | 9460 | 19958 | 22586 | 25214 |
| 2973 | 6833 | 12082 | 14705 | 17331 | 2974 | 9461 | 19959 | 22587 | 25215 |
| 2975 | 6834 | 12083 | 14706 | 17332 | 2976 | 9462 | 19960 | 22588 | 25216 |
| 2977 | 6835 | 12084 | 14707 | 17333 | 2978 | 9463 | 19961 | 22589 | 25217 |
| 2979 | 6836 | 12085 | 14708 | 17334 | 2980 | 9464 | 19962 | 22590 | 25218 |
| 2981 | 6837 | 12086 | 14709 | 17335 | 2982 | 9465 | 19963 | 22591 | 25219 |
| 2983 | 6838 | 12087 | 14710 | 17336 | 2984 | 9466 | 19964 | 22592 | 25220 |
| 2985 | 6839 | 12088 | 14711 | 17337 | 2986 | 9467 | 19965 | 22593 | 25221 |
| 2987 | 6840 | 12089 | 14712 | 17338 | 2988 | 9468 | 19966 | 22594 | 25222 |
| 2989 | 6841 | 12090 | 14713 | 17339 | 2990 | 9469 | 19967 | 22595 | 25223 |
| 2991 | 6842 | 12091 | 14714 | 17340 | 2992 | 9470 | 19968 | 22596 | 25224 |
| 2993 | 6843 | 12092 | 14715 | 17341 | 2994 | 9471 | 19969 | 22597 | 25225 |
| 2995 | 6844 | 12093 | 14716 | 17342 | 2996 | 9472 | 19970 | 22598 | 25226 |
| 2997 | 6845 | 12094 | 14717 | 17343 | 2998 | 9473 | 19971 | 22599 | 25227 |
| 2999 | 6846 | 12095 | 14718 | 17344 | 3000 | 9474 | 19972 | 22600 | 25228 |
| 3001 | 6847 | 12096 | 14719 | 17345 | 3002 | 9475 | 19973 | 22601 | 25229 |
| 3003 | 6848 | 12097 | 14720 | 17346 | 3004 | 9476 | 19974 | 22602 | 25230 |
| 3005 | 6849 | 12098 | 14721 | 17347 | 3006 | 9477 | 19975 | 22603 | 25231 |
| 3007 | 6850 | 12099 | 14722 | 17348 | 3008 | 9478 | 19976 | 22604 | 25232 |
| 3009 | 6851 | 12100 | 14723 | 17349 | 3010 | 9479 | 19977 | 22605 | 25233 |
| 3011 | 6852 | 12101 | 14724 | 17350 | 3012 | 9480 | 19978 | 22606 | 25234 |
| 3013 | 6853 | 12102 | 14725 | 17351 | 3014 | 9481 | 19979 | 22607 | 25235 |
| 3015 | 6854 | 12103 | 14726 | 17352 | 3016 | 9482 | 19980 | 22608 | 25236 |
| 3017 | 6855 | 12104 | 14727 | 17353 | 3018 | 9483 | 19981 | 22609 | 25237 |
| 3019 | 6856 | 12105 | 14728 | 17354 | 3020 | 9484 | 19982 | 22610 | 25238 |
| 3021 | 6857 | 12106 | 14729 | 17355 | 3022 | 9485 | 19983 | 22611 | 25239 |
| 3023 | 6858 | 12107 | 14730 | 17356 | 3024 | 9486 | 19984 | 22612 | 25240 |
| 3025 | 6859 | 12108 | 14731 | 17357 | 3026 | 9487 | 19985 | 22613 | 25241 |
| 3027 | 6860 | 12109 | 14732 | 17358 | 3028 | 9488 | 19986 | 22614 | 25242 |
| 3029 | 6861 | 12110 | 14733 | 17359 | 3030 | 9489 | 19987 | 22615 | 25243 |
| 3031 | 6862 | 12111 | 14734 | 17360 | 3032 | 9490 | 19988 | 22616 | 25244 |
| 3033 | 6863 | 12112 | 14735 | 17361 | 3034 | 9491 | 19989 | 22617 | 25245 |
| 3035 | 6864 | 12113 | 14736 | 17362 | 3036 | 9492 | 19990 | 22618 | 25246 |
| 3037 | 6865 | 12114 | 14737 | 17363 | 3038 | 9493 | 19991 | 22619 | 25247 |
| 3039 | 6866 | 12115 | 14738 | 17364 | 3040 | 9494 | 19992 | 22620 | 25248 |
| 3041 | 6867 | 12116 | 14739 | 17365 | 3042 | 9495 | 19993 | 22621 | 25249 |
| 3043 | 6868 | 12117 | 14740 | 17366 | 3044 | 9496 | 19994 | 22622 | 25250 |
| 3045 | 6869 | 12118 | 14741 | 17367 | 3046 | 9497 | 19995 | 22623 | 25251 |
| 3047 | 6870 | 12119 | 14742 | 17368 | 3048 | 9498 | 19996 | 22624 | 25252 |
| 3049 | 6871 | 12120 | 14743 | 17369 | 3050 | 9499 | 19997 | 22625 | 25253 |
| 3051 | 6872 | 12121 | 14744 | 17370 | 3052 | 9500 | 19998 | 22626 | 25254 |
| 3053 | 6873 | 12122 | 14745 | 17371 | 3054 | 9501 | 19999 | 22627 | 25255 |
| 3055 | 6874 | 12123 | 14746 | 17372 | 3056 | 9502 | 20000 | 22628 | 25256 |
| 3057 | 6875 | 12124 | 14747 | 17373 | 3058 | 9503 | 20001 | 22629 | 25257 |
| 3059 | 6876 | 12125 | 14748 | 17374 | 3060 | 9504 | 20002 | 22630 | 25258 |
| 3061 | 6877 | 12126 | 14749 | 17375 | 3062 | 9505 | 20003 | 22631 | 25259 |
| 3063 | 6878 | 12127 | 14750 | 17376 | 3064 | 9506 | 20004 | 22632 | 25260 |
| 3065 | 6879 | 12128 | 14751 | 17377 | 3066 | 9507 | 20005 | 22633 | 25261 |
| 3067 | 6880 | 12129 | 14752 | 17378 | 3068 | 9508 | 20006 | 22634 | 25262 |
| 3069 | 6881 | 12130 | 14753 | 17379 | 3070 | 9509 | 20007 | 22635 | 25263 |
| 3071 | 6882 | 12131 | 14754 | 17380 | 3072 | 9510 | 20008 | 22636 | 25264 |
| 3073 | 6883 | 12132 | 14755 | 17381 | 3074 | 9511 | 20009 | 22637 | 25265 |
| 3075 | 6884 | 12133 | 14756 | 17382 | 3076 | 9512 | 20010 | 22638 | 25266 |
| 3077 | 6885 | 12134 | 14757 | 17383 | 3078 | 9513 | 20011 | 22639 | 25267 |
| 3079 | 6886 | 12135 | 14758 | 17384 | 3080 | 9514 | 20012 | 22640 | 25268 |
| 3081 | 6887 | 12136 | 14759 | 17385 | 3082 | 9515 | 20013 | 22641 | 25269 |
| 3083 | 6888 | 12137 | 14760 | 17386 | 3084 | 9516 | 20014 | 22642 | 25270 |
| 3085 | 6889 | 12138 | 14761 | 17387 | 3086 | 9517 | 20015 | 22643 | 25271 |
| 3087 | 6890 | 12139 | 14762 | 17388 | 3088 | 9518 | 20016 | 22644 | 25272 |
| 3089 | 6891 | 12140 | 14763 | 17389 | 3090 | 9519 | 20017 | 22645 | 25273 |
| 3091 | 6892 | 12141 | 14764 | 17390 | 3092 | 9520 | 20018 | 22646 | 25274 |
| 3093 | 6893 | 12142 | 14765 | 17391 | 3094 | 9521 | 20019 | 22647 | 25275 |
| 3095 | 6894 | 12143 | 14766 | 17392 | 3096 | 9522 | 20020 | 22648 | 25276 |
| 3097 | 6895 | 12144 | 14767 | 17393 | 3098 | 9523 | 20021 | 22649 | 25277 |
| 3099 | 6896 | 12145 | 14768 | 17394 | 3100 | 9524 | 20022 | 22650 | 25278 |
| 3101 | 6897 | 12146 | 14769 | 17395 | 3102 | 9525 | 20023 | 22651 | 25279 |
| 3103 | 6898 | 12147 | 14770 | 17396 | 3104 | 9526 | 20024 | 22652 | 25280 |
| 3105 | 6899 | 12148 | 14771 | 17397 | 3106 | 9527 | 20025 | 22653 | 25281 |
| 3107 | 6900 | 12149 | 14772 | 17398 | 3108 | 9528 | 20026 | 22654 | 25282 |
| 3109 | 6901 | 12150 | 14773 | 17399 | 3110 | 9529 | 20027 | 22655 | 25283 |
| 3111 | 6902 | 12151 | 14774 | 17400 | 3112 | 9530 | 20028 | 22656 | 25284 |
| 3113 | 6903 | 12152 | 14775 | 17401 | 3114 | 9531 | 20029 | 22657 | 25285 |
| 3115 | 6904 | 12153 | 14776 | 17402 | 3116 | 9532 | 20030 | 22658 | 25286 |
| 3117 | 6905 | 12154 | 14777 | 17403 | 3118 | 9533 | 20031 | 22659 | 25287 |
| 3119 | 6906 | 12155 | 14778 | 17404 | 3120 | 9534 | 20032 | 22660 | 25288 |
| 3121 | 6907 | 12156 | 14779 | 17405 | 3122 | 9535 | 20033 | 22661 | 25289 |
| 3123 | 6908 | 12157 | 14780 | 17406 | 3124 | 9536 | 20034 | 22662 | 25290 |
| 3125 | 6909 | 12158 | 14781 | 17407 | 3126 | 9537 | 20035 | 22663 | 25291 |
| 3127 | 6910 | 12159 | 14782 | 17408 | 3128 | 9538 | 20036 | 22664 | 25292 |
| 3129 | 6911 | 12160 | 14783 | 17409 | 3130 | 9539 | 20037 | 22665 | 25293 |
| 3131 | 6912 | 12161 | 14784 | 17410 | 3132 | 9540 | 20038 | 22666 | 25294 |
| 3133 | 6913 | 12162 | 14785 | 17411 | 3134 | 9541 | 20039 | 22667 | 25295 |
| 3135 | 6914 | 12163 | 14786 | 17412 | 3136 | 9542 | 20040 | 22668 | 25296 |
| 3137 | 6915 | 12164 | 14787 | 17413 | 3138 | 9543 | 20041 | 22669 | 25297 |
| 3139 | 6916 | 12165 | 14788 | 17414 | 3140 | 9544 | 20042 | 22670 | 25298 |
| 3141 | 6917 | 12166 | 14789 | 17415 | 3142 | 9545 | 20043 | 22671 | 25299 |
| 3143 | 6918 | 12167 | 14790 | 17416 | 3144 | 9546 | 20044 | 22672 | 25300 |
| 3145 | 6919 | 12168 | 14791 | 17417 | 3146 | 9547 | 20045 | 22673 | 25301 |
| 3147 | 6920 | 12169 | 14792 | 17418 | 3148 | 9548 | 20046 | 22674 | 25302 |
| 3149 | 6921 | 12170 | 14793 | 17419 | 3150 | 9549 | 20047 | 22675 | 25303 |
| 3151 | 6922 | 12171 | 14794 | 17420 | 3152 | 9550 | 20048 | 22676 | 25304 |
| 3153 | 6923 | 12172 | 14795 | 17421 | 3154 | 9551 | 20049 | 22677 | 25305 |
| 3155 | 6924 | 12173 | 14796 | 17422 | 3156 | 9552 | 20050 | 22678 | 25306 |
| 3157 | 6925 | 12174 | 14797 | 17423 | 3158 | 9553 | 20051 | 22679 | 25307 |
| 3159 | 6926 | 12175 | 14798 | 17424 | 3160 | 9554 | 20052 | 22680 | 25308 |
| 3161 | 6927 | 12176 | 14799 | 17425 | 3162 | 9555 | 20053 | 22681 | 25309 |
| 3163 | 6928 | 12177 | 14800 | 17426 | 3164 | 9556 | 20054 | 22682 | 25310 |
| 3165 | 6929 | 12178 | 14801 | 17427 | 3166 | 9557 | 20055 | 22683 | 25311 |
| 3167 | 6930 | 12179 | 14802 | 17428 | 3168 | 9558 | 20056 | 22684 | 25312 |
| 3169 | 6931 | 12180 | 14803 | 17429 | 3170 | 9559 | 20057 | 22685 | 25313 |
| 3171 | 6932 | 12181 | 14804 | 17430 | 3172 | 9560 | 20058 | 22686 | 25314 |
| 3173 | 6933 | 12182 | 14805 | 17431 | 3174 | 9561 | 20059 | 22687 | 25315 |
| 3175 | 6934 | 12183 | 14806 | 17432 | 3176 | 9562 | 20060 | 22688 | 25316 |
| 3177 | 6935 | 12184 | 14807 | 17433 | 3178 | 9563 | 20061 | 22689 | 25317 |
| 3179 | 6936 | 12185 | 14808 | 17434 | 3180 | 9564 | 20062 | 22690 | 25318 |
| 3181 | 6937 | 12186 | 14809 | 17435 | 3182 | 9565 | 20063 | 22691 | 25319 |
| 3183 | 6938 | 12187 | 14810 | 17436 | 3184 | 9566 | 20064 | 22692 | 25320 |
| 3185 | 6939 | 12188 | 14811 | 17437 | 3186 | 9567 | 20065 | 22693 | 25321 |
| 3187 | 6940 | 12189 | 14812 | 17438 | 3188 | 9568 | 20066 | 22694 | 25322 |
| 3189 | 6941 | 12190 | 14813 | 17439 | 3190 | 9569 | 20067 | 22695 | 25323 |
| 3191 | 6942 | 12191 | 14814 | 17440 | 3192 | 9570 | 20068 | 22696 | 25324 |
| 3193 | 6943 | 12192 | 14815 | 17441 | 3194 | 9571 | 20069 | 22697 | 25325 |
| 3195 | 6944 | 12193 | 14816 | 17442 | 3196 | 9572 | 20070 | 22698 | 25326 |
| 3197 | 6945 | 12194 | 14817 | 17443 | 3198 | 9573 | 20071 | 22699 | 25327 |
| 3199 | 6946 | 12195 | 14818 | 17444 | 3200 | 9574 | 20072 | 22700 | 25328 |
| 3201 | 6947 | 12196 | 14819 | 17445 | 3202 | 9575 | 20073 | 22701 | 25329 |
| 3203 | 6948 | 12197 | 14820 | 17446 | 3204 | 9576 | 20074 | 22702 | 25330 |
| 3205 | 6949 | 12198 | 14821 | 17447 | 3206 | 9577 | 20075 | 22703 | 25331 |
| 3207 | 6950 | 12199 | 14822 | 17448 | 3208 | 9578 | 20076 | 22704 | 25332 |
| 3209 | 6951 | 12200 | 14823 | 17449 | 3210 | 9579 | 20077 | 22705 | 25333 |
| 3211 | 6952 | 12201 | 14824 | 17450 | 3212 | 9580 | 20078 | 22706 | 25334 |
| 3213 | 6953 | 12202 | 14825 | 17451 | 3214 | 9581 | 20079 | 22707 | 25335 |
| 3215 | 6954 | 12203 | 14826 | 17452 | 3216 | 9582 | 20080 | 22708 | 25336 |
| 3217 | 6955 | 12204 | 14827 | 17453 | 3218 | 9583 | 20081 | 22709 | 25337 |
| 3219 | 6956 | 12205 | 14828 | 17454 | 3220 | 9584 | 20082 | 22710 | 25338 |
| 3221 | 6957 | 12206 | 14829 | 17455 | 3222 | 9585 | 20083 | 22711 | 25339 |
| 3223 | 6958 | 12207 | 14830 | 17456 | 3224 | 9586 | 20084 | 22712 | 25340 |
| 3225 | 6959 | 12208 | 14831 | 17457 | 3226 | 9587 | 20085 | 22713 | 25341 |
| 3227 | 6960 | 12209 | 14832 | 17458 | 3228 | 9588 | 20086 | 22714 | 25342 |
| 3229 | 6961 | 12210 | 14833 | 17459 | 3230 | 9589 | 20087 | 22715 | 25343 |
| 3231 | 6962 | 12211 | 14834 | 17460 | 3232 | 9590 | 20088 | 22716 | 25344 |
| 3233 | 6963 | 12212 | 14835 | 17461 | 3234 | 9591 | 20089 | 22717 | 25345 |
| 3235 | 6964 | 12213 | 14836 | 17462 | 3236 | 9592 | 20090 | 22718 | 25346 |
| 3237 | 6965 | 12214 | 14837 | 17463 | 3238 | 9593 | 20091 | 22719 | 25347 |
| 3239 | 6966 | 12215 | 14838 | 17464 | 3240 | 9594 | 20092 | 22720 | 25348 |
| 3241 | 6967 | 12216 | 14839 | 17465 | 3242 | 9595 | 20093 | 22721 | 25349 |
| 3243 | 6968 | 12217 | 14840 | 17466 | 3244 | 9596 | 20094 | 22722 | 25350 |
| 3245 | 6969 | 12218 | 14841 | 17467 | 3246 | 9597 | 20095 | 22723 | 25351 |
| 3247 | 6970 | 12219 | 14842 | 17468 | 3248 | 9598 | 20096 | 22724 | 25352 |
| 3249 | 6971 | 12220 | 14843 | 17469 | 3250 | 9599 | 20097 | 22725 | 25353 |
| 3251 | 6972 | 12221 | 14844 | 17470 | 3252 | 9600 | 20098 | 22726 | 25354 |
| 3253 | 6973 | 12222 | 14845 | 17471 | 3254 | 9601 | 20099 | 22727 | 25355 |
| 3255 | 6974 | 12223 | 14846 | 17472 | 3256 | 9602 | 20100 | 22728 | 25356 |
| 3257 | 6975 | 12224 | 14847 | 17473 | 3258 | 9603 | 20101 | 22729 | 25357 |
| 3259 | 6976 | 12225 | 14848 | 17474 | 3260 | 9604 | 20102 | 22730 | 25358 |
| 3261 | 6977 | 12226 | 14849 | 17475 | 3262 | 9605 | 20103 | 22731 | 25359 |
| 3263 | 6978 | 12227 | 14850 | 17476 | 3264 | 9606 | 20104 | 22732 | 25360 |
| 3265 | 6979 | 12228 | 14851 | 17477 | 3266 | 9607 | 20105 | 22733 | 25361 |
| 3267 | 6980 | 12229 | 14852 | 17478 | 3268 | 9608 | 20106 | 22734 | 25362 |
| 3269 | 6981 | 12230 | 14853 | 17479 | 3270 | 9609 | 20107 | 22735 | 25363 |
| 3271 | 6982 | 12231 | 14854 | 17480 | 3272 | 9610 | 20108 | 22736 | 25364 |
| 3273 | 6983 | 12232 | 14855 | 17481 | 3274 | 9611 | 20109 | 22737 | 25365 |
| 3275 | 6984 | 12233 | 14856 | 17482 | 3276 | 9612 | 20110 | 22738 | 25366 |
| 3277 | 6985 | 12234 | 14857 | 17483 | 3278 | 9613 | 20111 | 22739 | 25367 |
| 3279 | 6986 | 12235 | 14858 | 17484 | 3280 | 9614 | 20112 | 22740 | 25368 |
| 3281 | 6987 | 12236 | 14859 | 17485 | 3282 | 9615 | 20113 | 22741 | 25369 |
| 3283 | 6988 | 12237 | 14860 | 17486 | 3284 | 9616 | 20114 | 22742 | 25370 |
| 3285 | 6989 | 12238 | 14861 | 17487 | 3286 | 9617 | 20115 | 22743 | 25371 |
| 3287 | 6990 | 12239 | 14862 | 17488 | 3288 | 9618 | 20116 | 22744 | 25372 |
| 3289 | 6991 | 12240 | 14863 | 17489 | 3290 | 9619 | 20117 | 22745 | 25373 |
| 3291 | 6992 | 12241 | 14864 | 17490 | 3292 | 9620 | 20118 | 22746 | 25374 |
| 3293 | 6993 | 12242 | 14865 | 17491 | 3294 | 9621 | 20119 | 22747 | 25375 |
| 3295 | 6994 | 12243 | 14866 | 17492 | 3296 | 9622 | 20120 | 22748 | 25376 |
| 3297 | 6995 | 12244 | 14867 | 17493 | 3298 | 9623 | 20121 | 22749 | 25377 |
| 3299 | 6996 | 12245 | 14868 | 17494 | 3300 | 9624 | 20122 | 22750 | 25378 |
| 3301 | 6997 | 12246 | 14869 | 17495 | 3302 | 9625 | 20123 | 22751 | 25379 |
| 3303 | 6998 | 12247 | 14870 | 17496 | 3304 | 9626 | 20124 | 22752 | 25380 |
| 3305 | 6999 | 12248 | 14871 | 17497 | 3306 | 9627 | 20125 | 22753 | 25381 |
| 3307 | 7000 | 12249 | 14872 | 17498 | 3308 | 9628 | 20126 | 22754 | 25382 |
| 3309 | 7001 | 12250 | 14873 | 17499 | 3310 | 9629 | 20127 | 22755 | 25383 |
| 3311 | 7002 | 12251 | 14874 | 17500 | 3312 | 9630 | 20128 | 22756 | 25384 |
| 3313 | 7003 | 12252 | 14875 | 17501 | 3314 | 9631 | 20129 | 22757 | 25385 |
| 3315 | 7004 | 12253 | 14876 | 17502 | 3316 | 9632 | 20130 | 22758 | 25386 |
| 3317 | 7005 | 12254 | 14877 | 17503 | 3318 | 9633 | 20131 | 22759 | 25387 |
| 3319 | 7006 | 12255 | 14878 | 17504 | 3320 | 9634 | 20132 | 22760 | 25388 |
| 3321 | 7007 | 12256 | 14879 | 17505 | 3322 | 9635 | 20133 | 22761 | 25389 |
| 3323 | 7008 | 12257 | 14880 | 17506 | 3324 | 9636 | 20134 | 22762 | 25390 |
| 3325 | 7009 | 12258 | 14881 | 17507 | 3326 | 9637 | 20135 | 22763 | 25391 |
| 3327 | 7010 | 12259 | 14882 | 17508 | 3328 | 9638 | 20136 | 22764 | 25392 |
| 3329 | 7011 | 12260 | 14883 | 17509 | 3330 | 9639 | 20137 | 22765 | 25393 |
| 3331 | 7012 | 12261 | 14884 | 17510 | 3332 | 9640 | 20138 | 22766 | 25394 |
| 3333 | 7013 | 12262 | 14885 | 17511 | 3334 | 9641 | 20139 | 22767 | 25395 |
| 3335 | 7014 | 12263 | 14886 | 17512 | 3336 | 9642 | 20140 | 22768 | 25396 |
| 3337 | 7015 | 12264 | 14887 | 17513 | 3338 | 9643 | 20141 | 22769 | 25397 |
| 3339 | 7016 | 12265 | 14888 | 17514 | 3340 | 9644 | 20142 | 22770 | 25398 |
| 3341 | 7017 | 12266 | 14889 | 17515 | 3342 | 9645 | 20143 | 22771 | 25399 |
| 3343 | 7018 | 12267 | 14890 | 17516 | 3344 | 9646 | 20144 | 22772 | 25400 |
| 3345 | 7019 | 12268 | 14891 | 17517 | 3346 | 9647 | 20145 | 22773 | 25401 |
| 3347 | 7020 | 12269 | 14892 | 17518 | 3348 | 9648 | 20146 | 22774 | 25402 |
| 3349 | 7021 | 12270 | 14893 | 17519 | 3350 | 9649 | 20147 | 22775 | 25403 |
| 3351 | 7022 | 12271 | 14894 | 17520 | 3352 | 9650 | 20148 | 22776 | 25404 |
| 3353 | 7023 | 12272 | 14895 | 17521 | 3354 | 9651 | 20149 | 22777 | 25405 |
| 3355 | 7024 | 12273 | 14896 | 17522 | 3356 | 9652 | 20150 | 22778 | 25406 |
| 3357 | 7025 | 12274 | 14897 | 17523 | 3358 | 9653 | 20151 | 22779 | 25407 |
| 3359 | 7026 | 12275 | 14898 | 17524 | 3360 | 9654 | 20152 | 22780 | 25408 |
| 3361 | 7027 | 12276 | 14899 | 17525 | 3362 | 9655 | 20153 | 22781 | 25409 |
| 3363 | 7028 | 12277 | 14900 | 17526 | 3364 | 9656 | 20154 | 22782 | 25410 |
| 3365 | 7029 | 12278 | 14901 | 17527 | 3366 | 9657 | 20155 | 22783 | 25411 |
| 3367 | 7030 | 12279 | 14902 | 17528 | 3368 | 9658 | 20156 | 22784 | 25412 |
| 3369 | 7031 | 12280 | 14903 | 17529 | 3370 | 9659 | 20157 | 22785 | 25413 |
| 3371 | 7032 | 12281 | 14904 | 17530 | 3372 | 9660 | 20158 | 22786 | 25414 |
| 3373 | 7033 | 12282 | 14905 | 17531 | 3374 | 9661 | 20159 | 22787 | 25415 |
| 3375 | 7034 | 12283 | 14906 | 17532 | 3376 | 9662 | 20160 | 22788 | 25416 |
| 3377 | 7035 | 12284 | 14907 | 17533 | 3378 | 9663 | 20161 | 22789 | 25417 |
| 3379 | 7036 | 12285 | 14908 | 17534 | 3380 | 9664 | 20162 | 22790 | 25418 |
| 3381 | 7037 | 12286 | 14909 | 17535 | 3382 | 9665 | 20163 | 22791 | 25419 |
| 3383 | 7038 | 12287 | 14910 | 17536 | 3384 | 9666 | 20164 | 22792 | 25420 |
| 3385 | 7039 | 12288 | 14911 | 17537 | 3386 | 9667 | 20165 | 22793 | 25421 |
| 3387 | 7040 | 12289 | 14912 | 17538 | 3388 | 9668 | 20166 | 22794 | 25422 |
| 3389 | 7041 | 12290 | 14913 | 17539 | 3390 | 9669 | 20167 | 22795 | 25423 |
| 3391 | 7042 | 12291 | 14914 | 17540 | 3392 | 9670 | 20168 | 22796 | 25424 |
| 3393 | 7043 | 12292 | 14915 | 17541 | 3394 | 9671 | 20169 | 22797 | 25425 |
| 3395 | 7044 | 12293 | 14916 | 17542 | 3396 | 9672 | 20170 | 22798 | 25426 |
| 3397 | 7045 | 12294 | 14917 | 17543 | 3398 | 9673 | 20171 | 22799 | 25427 |
| 3399 | 7046 | 12295 | 14918 | 17544 | 3400 | 9674 | 20172 | 22800 | 25428 |
| 3401 | 7047 | 12296 | 14919 | 17545 | 3402 | 9675 | 20173 | 22801 | 25429 |
| 3403 | 7048 | 12297 | 14920 | 17546 | 3404 | 9676 | 20174 | 22802 | 25430 |
| 3405 | 7049 | 12298 | 14921 | 17547 | 3406 | 9677 | 20175 | 22803 | 25431 |
| 3407 | 7050 | 12299 | 14922 | 17548 | 3408 | 9678 | 20176 | 22804 | 25432 |
| 3409 | 7051 | 12300 | 14923 | 17549 | 3410 | 9679 | 20177 | 22805 | 25433 |
| 3411 | 7052 | | | 17550 | 3412 | 9680 | 20178 | 22806 | 25434 |
| 3413 | 7053 | 12301 | 14924 | 17551 | 3414 | 9681 | 20179 | 22807 | 25435 |
| 3415 | 7054 | 12302 | 14925 | 17552 | 3416 | 9682 | 20180 | 22808 | 25436 |
| 3417 | 7055 | 12303 | 14926 | 17553 | 3418 | 9683 | 20181 | 22809 | 25437 |
| 3419 | 7056 | 12304 | 14927 | 17554 | 3420 | 9684 | 20182 | 22810 | 25438 |
| 3421 | 7057 | 12305 | 14928 | 17555 | 3422 | 9685 | 20183 | 22811 | 25439 |
| 3423 | 7058 | 12306 | 14929 | 17556 | 3424 | 9686 | 20184 | 22812 | 25440 |
| 3425 | 7059 | 12307 | 14930 | 17557 | 3426 | 9687 | 20185 | 22813 | 25441 |
| 3427 | 7060 | 12308 | 14931 | 17558 | 3428 | 9688 | 20186 | 22814 | 25442 |
| 3429 | 7061 | 12309 | 14932 | 17559 | 3430 | 9689 | 20187 | 22815 | 25443 |
| 3431 | 7062 | 12310 | 14933 | 17560 | 3432 | 9690 | 20188 | 22816 | 25444 |
| 3433 | 7063 | 12311 | 14934 | 17561 | 3434 | 9691 | 20189 | 22817 | 25445 |
| 3435 | 7064 | 12312 | 14935 | 17562 | 3436 | 9692 | 20190 | 22818 | 25446 |
| 3437 | 7065 | 12313 | 14936 | 17563 | 3438 | 9693 | 20191 | 22819 | 25447 |
| 3439 | 7066 | 12314 | 14937 | 17564 | 3440 | 9694 | 20192 | 22820 | 25448 |
| 3441 | 7067 | 12315 | 14938 | 17565 | 3442 | 9695 | 20193 | 22821 | 25449 |
| 3443 | 7068 | 12316 | 14939 | 17566 | 3444 | 9696 | 20194 | 22822 | 25450 |
| 3445 | 7069 | 12317 | 14940 | 17567 | 3446 | 9697 | 20195 | 22823 | 25451 |
| 3447 | 7070 | 12318 | 14941 | 17568 | 3448 | 9698 | 20196 | 22824 | 25452 |
| 3449 | 7071 | 12319 | 14942 | 17569 | 3450 | 9699 | 20197 | 22825 | 25453 |
| 3451 | 7072 | 12320 | 14943 | 17570 | 3452 | 9700 | 20198 | 22826 | 25454 |
| 3453 | 7073 | 12321 | 14944 | 17571 | 3454 | 9701 | 20199 | 22827 | 25455 |
| 3455 | 7074 | 12322 | 14945 | 17572 | 3456 | 9702 | 20200 | 22828 | 25456 |
| 3457 | 7075 | 12323 | 14946 | 17573 | 3458 | 9703 | 20201 | 22829 | 25457 |
| 3459 | 7076 | 12324 | 14947 | 17574 | 3460 | 9704 | 20202 | 22830 | 25458 |
| 3461 | 7077 | 12325 | 14948 | 17575 | 3462 | 9705 | 20203 | 22831 | 25459 |
| 3463 | 7078 | 12326 | 14949 | 17576 | 3464 | 9706 | 20204 | 22832 | 25460 |
| 3465 | 7079 | 12327 | 14950 | 17577 | 3466 | 9707 | 20205 | 22833 | 25461 |
| 3467 | 7080 | 12328 | 14951 | 17578 | 3468 | 9708 | 20206 | 22834 | 25462 |
| 3469 | 7081 | 12329 | 14952 | 17579 | 3470 | 9709 | 20207 | 22835 | 25463 |
| 3471 | 7082 | 12330 | 14953 | 17580 | 3472 | 9710 | 20208 | 22836 | 25464 |
| 3473 | 7083 | 12331 | 14954 | 17581 | 3474 | 9711 | 20209 | 22837 | 25465 |
| 3475 | 7084 | 12332 | 14955 | 17582 | 3476 | 9712 | 20210 | 22838 | 25466 |
| 3477 | 7085 | 12333 | 14956 | 17583 | 3478 | 9713 | 20211 | 22839 | 25467 |
| 3479 | 7086 | 12334 | 14957 | 17584 | 3480 | 9714 | 20212 | 22840 | 25468 |
| 3481 | 7087 | 12335 | 14958 | 17585 | 3482 | 9715 | 20213 | 22841 | 25469 |
| 3483 | 7088 | 12336 | 14959 | 17586 | 3484 | 9716 | 20214 | 22842 | 25470 |
| 3485 | 7089 | 12337 | 14960 | 17587 | 3486 | 9717 | 20215 | 22843 | 25471 |
| 3487 | 7090 | 12338 | 14961 | 17588 | 3488 | 9718 | 20216 | 22844 | 25472 |
| 3489 | 7091 | 12339 | 14962 | 17589 | 3490 | 9719 | 20217 | 22845 | 25473 |
| 3491 | 7092 | 12340 | 14963 | 17590 | 3492 | 9720 | 20218 | 22846 | 25474 |
| 3493 | 7093 | 12341 | 14964 | 17591 | 3494 | 9721 | 20219 | 22847 | 25475 |
| 3495 | 7094 | 12342 | 14965 | 17592 | 3496 | 9722 | 20220 | 22848 | 25476 |
| 3497 | 7095 | 12343 | 14966 | 17593 | 3498 | 9723 | 20221 | 22849 | 25477 |
| 3499 | 7096 | 12344 | 14967 | 17594 | 3500 | 9724 | 20222 | 22850 | 25478 |
| 3501 | 7097 | 12345 | 14968 | 17595 | 3502 | 9725 | 20223 | 22851 | 25479 |
| 3503 | 7098 | 12346 | 14969 | 17596 | 3504 | 9726 | 20224 | 22852 | 25480 |
| 3505 | 7099 | 12347 | 14970 | 17597 | 3506 | 9727 | 20225 | 22853 | 25481 |
| 3507 | 7100 | 12348 | 14971 | 17598 | 3508 | 9728 | 20226 | 22854 | 25482 |
| 3509 | 7101 | 12349 | 14972 | 17599 | 3510 | 9729 | 20227 | 22855 | 25483 |
| 3511 | 7102 | 12350 | 14973 | 17600 | 3512 | 9730 | 20228 | 22856 | 25484 |
| 3513 | 7103 | 12351 | 14974 | 17601 | 3514 | 9731 | 20229 | 22857 | 25485 |
| 3515 | 7104 | 12352 | 14975 | 17602 | 3516 | 9732 | 20230 | 22858 | 25486 |
| 3517 | 7105 | 12353 | 14976 | 17603 | 3518 | 9733 | 20231 | 22859 | 25487 |
| 3519 | 7106 | 12354 | 14977 | 17604 | 3520 | 9734 | 20232 | 22860 | 25488 |
| 3521 | 7107 | 12355 | 14978 | 17605 | 3522 | 9735 | 20233 | 22861 | 25489 |
| 3523 | 7108 | 12356 | 14979 | 17606 | 3524 | 9736 | 20234 | 22862 | 25490 |
| 3525 | 7109 | 12357 | 14980 | 17607 | 3526 | 9737 | 20235 | 22863 | 25491 |
| 3527 | 7110 | 12358 | 14981 | 17608 | 3528 | 9738 | 20236 | 22864 | 25492 |
| 3529 | 7111 | 12359 | 14982 | 17609 | 3530 | 9739 | 20237 | 22865 | 25493 |
| 3531 | 7112 | 12360 | 14983 | 17610 | 3532 | 9740 | 20238 | 22866 | 25494 |
| 3533 | 7113 | 12361 | 14984 | 17611 | 3534 | 9741 | 20239 | 22867 | 25495 |
| 3535 | 7114 | 12362 | 14985 | 17612 | 3536 | 9742 | 20240 | 22868 | 25496 |
| 3537 | 7115 | 12363 | 14986 | 17613 | 3538 | 9743 | 20241 | 22869 | 25497 |
| 3539 | 7116 | 12364 | 14987 | 17614 | 3540 | 9744 | 20242 | 22870 | 25498 |
| 3541 | 7117 | 12365 | 14988 | 17615 | 3542 | 9745 | 20243 | 22871 | 25499 |
| 3543 | 7118 | 12366 | 14989 | 17616 | 3544 | 9746 | 20244 | 22872 | 25500 |
| 3545 | 7119 | 12367 | 14990 | 17617 | 3546 | 9747 | 20245 | 22873 | 25501 |
| 3547 | 7120 | 12368 | 14991 | 17618 | 3548 | 9748 | 20246 | 22874 | 25502 |
| 3549 | 7121 | 12369 | 14992 | 17619 | 3550 | 9749 | 20247 | 22875 | 25503 |
| 3551 | 7122 | 12370 | 14993 | 17620 | 3552 | 9750 | 20248 | 22876 | 25504 |
| 3553 | 7123 | 12371 | 14994 | 17621 | 3554 | 9751 | 20249 | 22877 | 25505 |
| 3555 | 7124 | 12372 | 14995 | 17622 | 3556 | 9752 | 20250 | 22878 | 25506 |
| 3557 | 7125 | 12373 | 14996 | 17623 | 3558 | 9753 | 20251 | 22879 | 25507 |
| 3559 | 7126 | 12374 | 14997 | 17624 | 3560 | 9754 | 20252 | 22880 | 25508 |
| 3561 | 7127 | 12375 | 14998 | 17625 | 3562 | 9755 | 20253 | 22881 | 25509 |
| 3563 | 7128 | 12376 | 14999 | 17626 | 3564 | 9756 | 20254 | 22882 | 25510 |
| 3565 | 7129 | 12377 | 15000 | 17627 | 3566 | 9757 | 20255 | 22883 | 25511 |
| 3567 | 7130 | 12378 | 15001 | 17628 | 3568 | 9758 | 20256 | 22884 | 25512 |
| 3569 | 7131 | 12379 | 15002 | 17629 | 3570 | 9759 | 20257 | 22885 | 25513 |
| 3571 | 7132 | 12380 | 15003 | 17630 | 3572 | 9760 | 20258 | 22886 | 25514 |
| 3573 | 7133 | 12381 | 15004 | 17631 | 3574 | 9761 | 20259 | 22887 | 25515 |
| 3575 | 7134 | 12382 | 15005 | 17632 | 3576 | 9762 | 20260 | 22888 | 25516 |
| 3577 | 7135 | 12383 | 15006 | 17633 | 3578 | 9763 | 20261 | 22889 | 25517 |
| 3579 | 7136 | 12384 | 15007 | 17634 | 3580 | 9764 | 20262 | 22890 | 25518 |
| 3581 | 7137 | 12385 | 15008 | 17635 | 3582 | 9765 | 20263 | 22891 | 25519 |
| 3583 | 7138 | 12386 | 15009 | 17636 | 3584 | 9766 | 20264 | 22892 | 25520 |
| 3585 | 7139 | 12387 | 15010 | 17637 | 3586 | 9767 | 20265 | 22893 | 25521 |
| 3587 | 7140 | 12388 | 15011 | 17638 | 3588 | 9768 | 20266 | 22894 | 25522 |
| 3589 | 7141 | 12389 | 15012 | 17639 | 3590 | 9769 | 20267 | 22895 | 25523 |
| 3591 | 7142 | 12390 | 15013 | 17640 | 3592 | 9770 | 20268 | 22896 | 25524 |
| 3593 | 7143 | 12391 | 15014 | 17641 | 3594 | 9771 | 20269 | 22897 | 25525 |
| 3595 | 7144 | 12392 | 15015 | 17642 | 3596 | 9772 | 20270 | 22898 | 25526 |
| 3597 | 7145 | 12393 | 15016 | 17643 | 3598 | 9773 | 20271 | 22899 | 25527 |
| 3599 | 7146 | 12394 | 15017 | 17644 | 3600 | 9774 | 20272 | 22900 | 25528 |
| 3601 | 7147 | 12395 | 15018 | 17645 | 3602 | 9775 | 20273 | 22901 | 25529 |
| 3603 | 7148 | 12396 | 15019 | 17646 | 3604 | 9776 | 20274 | 22902 | 25530 |
| 3605 | 7149 | 12397 | 15020 | 17647 | 3606 | 9777 | 20275 | 22903 | 25531 |
| 3607 | 7150 | 12398 | 15021 | 17648 | 3608 | 9778 | 20276 | 22904 | 25532 |
| 3609 | 7151 | 12399 | 15022 | 17649 | 3610 | 9779 | 20277 | 22905 | 25533 |
| 3611 | 7152 | 12400 | 15023 | 17650 | 3612 | 9780 | 20278 | 22906 | 25534 |
| 3613 | 7153 | 12401 | 15024 | 17651 | 3614 | 9781 | 20279 | 22907 | 25535 |
| 3615 | 7154 | 12402 | 15025 | 17652 | 3616 | 9782 | 20280 | 22908 | 25536 |
| 3617 | 7155 | 12403 | 15026 | 17653 | 3618 | 9783 | 20281 | 22909 | 25537 |
| 3619 | 7156 | 12404 | 15027 | 17654 | 3620 | 9784 | 20282 | 22910 | 25538 |
| 3621 | 7157 | 12405 | 15028 | 17655 | 3622 | 9785 | 20283 | 22911 | 25539 |
| 3623 | 7158 | 12406 | 15029 | 17656 | 3624 | 9786 | 20284 | 22912 | 25540 |
| 3625 | 7159 | 12407 | 15030 | 17657 | 3626 | 9787 | 20285 | 22913 | 25541 |
| 3627 | 7160 | 12408 | 15031 | 17658 | 3628 | 9788 | 20286 | 22914 | 25542 |
| 3629 | 7161 | 12409 | 15032 | 17659 | 3630 | 9789 | 20287 | 22915 | 25543 |
| 3631 | 7162 | 12410 | 15033 | 17660 | 3632 | 9790 | 20288 | 22916 | 25544 |
| 3633 | 7163 | 12411 | 15034 | 17661 | 3634 | 9791 | 20289 | 22917 | 25545 |
| 3635 | 7164 | 12412 | 15035 | 17662 | 3636 | 9792 | 20290 | 22918 | 25546 |
| 3637 | 7165 | 12413 | 15036 | 17663 | 3638 | 9793 | 20291 | 22919 | 25547 |
| 3639 | 7166 | 12414 | 15037 | 17664 | 3640 | 9794 | 20292 | 22920 | 25548 |
| 3641 | 7167 | 12415 | 15038 | 17665 | 3642 | 9795 | 20293 | 22921 | 25549 |
| 3643 | 7168 | 12416 | 15039 | 17666 | 3644 | 9796 | 20294 | 22922 | 25550 |
| 3645 | 7169 | 12417 | 15040 | 17667 | 3646 | 9797 | 20295 | 22923 | 25551 |
| 3647 | 7170 | 12418 | 15041 | 17668 | 3648 | 9798 | 20296 | 22924 | 25552 |
| 3649 | 7171 | 12419 | 15042 | 17669 | 3650 | 9799 | 20297 | 22925 | 25553 |
| 3651 | 7172 | 12420 | 15043 | 17670 | 3652 | 9800 | 20298 | 22926 | 25554 |
| 3653 | 7173 | 12421 | 15044 | 17671 | 3654 | 9801 | 20299 | 22927 | 25555 |
| 3655 | 7174 | 12422 | 15045 | 17672 | 3656 | 9802 | 20300 | 22928 | 25556 |
| 3657 | 7175 | 12423 | 15046 | 17673 | 3658 | 9803 | 20301 | 22929 | 25557 |
| 3659 | 7176 | 12424 | 15047 | 17674 | 3660 | 9804 | 20302 | 22930 | 25558 |
| 3661 | 7177 | 12425 | 15048 | 17675 | 3662 | 9805 | 20303 | 22931 | 25559 |
| 3663 | 7178 | 12426 | 15049 | 17676 | 3664 | 9806 | 20304 | 22932 | 25560 |
| 3665 | 7179 | 12427 | 15050 | 17677 | 3666 | 9807 | 20305 | 22933 | 25561 |
| 3667 | 7180 | 12428 | 15051 | 17678 | 3668 | 9808 | 20306 | 22934 | 25562 |
| 3669 | 7181 | 12429 | 15052 | 17679 | 3670 | 9809 | 20307 | 22935 | 25563 |
| 3671 | 7182 | 12430 | 15053 | 17680 | 3672 | 9810 | 20308 | 22936 | 25564 |
| 3673 | 7183 | 12431 | 15054 | 17681 | 3674 | 9811 | 20309 | 22937 | 25565 |
| 3675 | 7184 | 12432 | 15055 | 17682 | 3676 | 9812 | 20310 | 22938 | 25566 |
| 3677 | 7185 | 12433 | 15056 | 17683 | 3678 | 9813 | 20311 | 22939 | 25567 |
| 3679 | 7186 | 12434 | 15057 | 17684 | 3680 | 9814 | 20312 | 22940 | 25568 |
| 3681 | 7187 | 12435 | 15058 | 17685 | 3682 | 9815 | 20313 | 22941 | 25569 |
| 3683 | 7188 | 12436 | 15059 | 17686 | 3684 | 9816 | 20314 | 22942 | 25570 |
| 3685 | 7189 | 12437 | 15060 | 17687 | 3686 | 9817 | 20315 | 22943 | 25571 |
| 3687 | 7190 | 12438 | 15061 | 17688 | 3688 | 9818 | 20316 | 22944 | 25572 |
| 3689 | 7191 | 12439 | 15062 | 17689 | 3690 | 9819 | 20317 | 22945 | 25573 |
| 3691 | 7192 | 12440 | 15063 | 17690 | 3692 | 9820 | 20318 | 22946 | 25574 |
| 3693 | 7193 | 12441 | 15064 | 17691 | 3694 | 9821 | 20319 | 22947 | 25575 |
| 3695 | 7194 | 12442 | 15065 | 17692 | 3696 | 9822 | 20320 | 22948 | 25576 |
| 3697 | 7195 | 12443 | 15066 | 17693 | 3698 | 9823 | 20321 | 22949 | 25577 |
| 3699 | 7196 | 12444 | 15067 | 17694 | 3700 | 9824 | 20322 | 22950 | 25578 |
| 3701 | 7197 | 12445 | 15068 | 17695 | 3702 | 9825 | 20323 | 22951 | 25579 |
| 3703 | 7198 | 12446 | 15069 | 17696 | 3704 | 9826 | 20324 | 22952 | 25580 |
| 3705 | 7199 | 12447 | 15070 | 17697 | 3706 | 9827 | 20325 | 22953 | 25581 |
| 3707 | 7200 | 12448 | 15071 | 17698 | 3708 | 9828 | 20326 | 22954 | 25582 |
| 3709 | 7201 | 12449 | 15072 | 17699 | 3710 | 9829 | 20327 | 22955 | 25583 |
| 3711 | 7202 | 12450 | 15073 | 17700 | 3712 | 9830 | 20328 | 22956 | 25584 |
| 3713 | 7203 | 12451 | 15074 | 17701 | 3714 | 9831 | 20329 | 22957 | 25585 |
| 3715 | 7204 | 12452 | 15075 | 17702 | 3716 | 9832 | 20330 | 22958 | 25586 |
| 3717 | 7205 | 12453 | 15076 | 17703 | 3718 | 9833 | 20331 | 22959 | 25587 |
| 3719 | 7206 | 12454 | 15077 | 17704 | 3720 | 9834 | 20332 | 22960 | 25588 |
| 3721 | 7207 | 12455 | 15078 | 17705 | 3722 | 9835 | 20333 | 22961 | 25589 |
| 3723 | 7208 | 12456 | 15079 | 17706 | 3724 | 9836 | 20334 | 22962 | 25590 |
| 3725 | 7209 | 12457 | 15080 | 17707 | 3726 | 9837 | 20335 | 22963 | 25591 |
| 3727 | 7210 | 12458 | 15081 | 17708 | 3728 | 9838 | 20336 | 22964 | 25592 |
| 3729 | 7211 | 12459 | 15082 | 17709 | 3730 | 9839 | 20337 | 22965 | 25593 |
| 3731 | 7212 | 12460 | 15083 | 17710 | 3732 | 9840 | 20338 | 22966 | 25594 |
| 3733 | 7213 | 12461 | 15084 | 17711 | 3734 | 9841 | 20339 | 22967 | 25595 |
| 3735 | 7214 | 12462 | 15085 | 17712 | 3736 | 9842 | 20340 | 22968 | 25596 |
| 3737 | 7215 | 12463 | 15086 | 17713 | 3738 | 9843 | 20341 | 22969 | 25597 |
| 3739 | 7216 | 12464 | 15087 | 17714 | 3740 | 9844 | 20342 | 22970 | 25598 |
| 3741 | 7217 | 12465 | 15088 | 17715 | 3742 | 9845 | 20343 | 22971 | 25599 |
| 3743 | 7218 | 12466 | 15089 | 17716 | 3744 | 9846 | 20344 | 22972 | 25600 |
| 3745 | 7219 | 12467 | 15090 | 17717 | 3746 | 9847 | 20345 | 22973 | 25601 |
| 3747 | 7220 | 12468 | 15091 | 17718 | 3748 | 9848 | 20346 | 22974 | 25602 |
| 3749 | 7221 | 12469 | 15092 | 17719 | 3750 | 9849 | 20347 | 22975 | 25603 |
| 3751 | 7222 | 12470 | 15093 | 17720 | 3752 | 9850 | 20348 | 22976 | 25604 |
| 3753 | 7223 | 12471 | 15094 | 17721 | 3754 | 9851 | 20349 | 22977 | 25605 |
| 3755 | 7224 | 12472 | 15095 | 17722 | 3756 | 9852 | 20350 | 22978 | 25606 |
| 3757 | 7225 | 12473 | 15096 | 17723 | 3758 | 9853 | 20351 | 22979 | 25607 |
| 3759 | 7226 | 12474 | 15097 | 17724 | 3760 | 9854 | 20352 | 22980 | 25608 |
| 3761 | 7227 | 12475 | 15098 | 17725 | 3762 | 9855 | 20353 | 22981 | 25609 |
| 3763 | 7228 | 12476 | 15099 | 17726 | 3764 | 9856 | 20354 | 22982 | 25610 |
| 3765 | 7229 | 12477 | 15100 | 17727 | 3766 | 9857 | 20355 | 22983 | 25611 |
| 3767 | 7230 | 12478 | 15101 | 17728 | 3768 | 9858 | 20356 | 22984 | 25612 |
| 3769 | 7231 | 12479 | 15102 | 17729 | 3770 | 9859 | 20357 | 22985 | 25613 |
| 3771 | 7232 | 12480 | 15103 | 17730 | 3772 | 9860 | 20358 | 22986 | 25614 |
| 3773 | 7233 | 12481 | 15104 | 17731 | 3774 | 9861 | 20359 | 22987 | 25615 |
| 3775 | 7234 | 12482 | 15105 | 17732 | 3776 | 9862 | 20360 | 22988 | 25616 |
| 3777 | 7235 | 12483 | 15106 | 17733 | 3778 | 9863 | 20361 | 22989 | 25617 |
| 3779 | 7236 | 12484 | 15107 | 17734 | 3780 | 9864 | 20362 | 22990 | 25618 |
| 3781 | 7237 | 12485 | 15108 | 17735 | 3782 | 9865 | 20363 | 22991 | 25619 |
| 3783 | 7238 | 12486 | 15109 | 17736 | 3784 | 9866 | 20364 | 22992 | 25620 |
| 3785 | 7239 | 12487 | 15110 | 17737 | 3786 | 9867 | 20365 | 22993 | 25621 |
| 3787 | 7240 | 12488 | 15111 | 17738 | 3788 | 9868 | 20366 | 22994 | 25622 |
| 3789 | 7241 | 12489 | 15112 | 17739 | 3790 | 9869 | 20367 | 22995 | 25623 |
| 3791 | 7242 | 12490 | 15113 | 17740 | 3792 | 9870 | 20368 | 22996 | 25624 |
| 3793 | 7243 | 12491 | 15114 | 17741 | 3794 | 9871 | 20369 | 22997 | 25625 |
| 3795 | 7244 | 12492 | 15115 | 17742 | 3796 | 9872 | 20370 | 22998 | 25626 |
| 3797 | 7245 | 12493 | 15116 | 17743 | 3798 | 9873 | 20371 | 22999 | 25627 |
| 3799 | 7246 | 12494 | 15117 | 17744 | 3800 | 9874 | 20372 | 23000 | 25628 |
| 3801 | 7247 | 12495 | 15118 | 17745 | 3802 | 9875 | 20373 | 23001 | 25629 |
| 3803 | 7248 | 12496 | 15119 | 17746 | 3804 | 9876 | 20374 | 23002 | 25630 |
| 3805 | 7249 | 12497 | 15120 | 17747 | 3806 | 9877 | 20375 | 23003 | 25631 |
| 3807 | 7250 | 12498 | 15121 | 17748 | 3808 | 9878 | 20376 | 23004 | 25632 |
| 3809 | 7251 | 12499 | 15122 | 17749 | 3810 | 9879 | 20377 | 23005 | 25633 |
| 3811 | 7252 | 12500 | 15123 | 17750 | 3812 | 9880 | 20378 | 23006 | 25634 |
| 3813 | 7253 | 12501 | 15124 | 17751 | 3814 | 9881 | 20379 | 23007 | 25635 |
| 3815 | 7254 | 12502 | 15125 | 17752 | 3816 | 9882 | 20380 | 23008 | 25636 |
| 3817 | 7255 | 12503 | 15126 | 17753 | 3818 | 9883 | 20381 | 23009 | 25637 |
| 3819 | 7256 | 12504 | 15127 | 17754 | 3820 | 9884 | 20382 | 23010 | 25638 |
| 3821 | 7257 | 12505 | 15128 | 17755 | 3822 | 9885 | 20383 | 23011 | 25639 |
| 3823 | 7258 | 12506 | 15129 | 17756 | 3824 | 9886 | 20384 | 23012 | 25640 |
| 3825 | 7259 | 12507 | 15130 | 17757 | 3826 | 9887 | 20385 | 23013 | 25641 |
| 3827 | 7260 | 12508 | 15131 | 17758 | 3828 | 9888 | 20386 | 23014 | 25642 |
| 3829 | 7261 | 12509 | 15132 | 17759 | 3830 | 9889 | 20387 | 23015 | 25643 |
| 3831 | 7262 | 12510 | 15133 | 17760 | 3832 | 9890 | 20388 | 23016 | 25644 |
| 3833 | 7263 | 12511 | 15134 | 17761 | 3834 | 9891 | 20389 | 23017 | 25645 |
| 3835 | 7264 | 12512 | 15135 | 17762 | 3836 | 9892 | 20390 | 23018 | 25646 |
| 3837 | 7265 | 12513 | 15136 | 17763 | 3838 | 9893 | 20391 | 23019 | 25647 |
| 3839 | 7266 | 12514 | 15137 | 17764 | 3840 | 9894 | 20392 | 23020 | 25648 |
| 3841 | 7267 | 12515 | 15138 | 17765 | 3842 | 9895 | 20393 | 23021 | 25649 |
| 3843 | 7268 | 12516 | 15139 | 17766 | 3844 | 9896 | 20394 | 23022 | 25650 |
| 3845 | 7269 | 12517 | 15140 | 17767 | 3846 | 9897 | 20395 | 23023 | 25651 |
| 3847 | 7270 | 12518 | 15141 | 17768 | 3848 | 9898 | 20396 | 23024 | 25652 |
| 3849 | 7271 | 12519 | 15142 | 17769 | 3850 | 9899 | 20397 | 23025 | 25653 |
| 3851 | 7272 | 12520 | 15143 | 17770 | 3852 | 9900 | 20398 | 23026 | 25654 |
| 3853 | 7273 | 12521 | 15144 | 17771 | 3854 | 9901 | 20399 | 23027 | 25655 |
| 3855 | 7274 | 12522 | 15145 | 17772 | 3856 | 9902 | 20400 | 23028 | 25656 |
| 3857 | 7275 | 12523 | 15146 | 17773 | 3858 | 9903 | 20401 | 23029 | 25657 |
| 3859 | 7276 | 12524 | 15147 | 17774 | 3860 | 9904 | 20402 | 23030 | 25658 |
| 3861 | 7277 | 12525 | 15148 | 17775 | 3862 | 9905 | 20403 | 23031 | 25659 |
| 3863 | 7278 | 12526 | 15149 | 17776 | 3864 | 9906 | 20404 | 23032 | 25660 |
| 3865 | 7279 | 12527 | 15150 | 17777 | 3866 | 9907 | 20405 | 23033 | 25661 |
| 3867 | 7280 | 12528 | 15151 | 17778 | 3868 | 9908 | 20406 | 23034 | 25662 |
| 3869 | 7281 | 12529 | 15152 | 17779 | 3870 | 9909 | 20407 | 23035 | 25663 |
| 3871 | 7282 | 12530 | 15153 | 17780 | 3872 | 9910 | 20408 | 23036 | 25664 |
| 3873 | 7283 | 12531 | 15154 | 17781 | 3874 | 9911 | 20409 | 23037 | 25665 |
| 3875 | 7284 | 12532 | 15155 | 17782 | 3876 | 9912 | 20410 | 23038 | 25666 |
| 3877 | 7285 | 12533 | 15156 | 17783 | 3878 | 9913 | 20411 | 23039 | 25667 |
| 3879 | 7286 | 12534 | 15157 | 17784 | 3880 | 9914 | 20412 | 23040 | 25668 |
| 3881 | 7287 | 12535 | 15158 | 17785 | 3882 | 9915 | 20413 | 23041 | 25669 |
| 3883 | 7288 | 12536 | 15159 | 17786 | 3884 | 9916 | 20414 | 23042 | 25670 |
| 3885 | 7289 | 12537 | 15160 | 17787 | 3886 | 9917 | 20415 | 23043 | 25671 |
| 3887 | 7290 | 12538 | 15161 | 17788 | 3888 | 9918 | 20416 | 23044 | 25672 |
| 3889 | 7291 | 12539 | 15162 | 17789 | 3890 | 9919 | 20417 | 23045 | 25673 |
| 3891 | 7292 | 12540 | 15163 | 17790 | 3892 | 9920 | 20418 | 23046 | 25674 |
| 3893 | 7293 | 12541 | 15164 | 17791 | 3894 | 9921 | 20419 | 23047 | 25675 |
| 3895 | 7294 | 12542 | 15165 | 17792 | 3896 | 9922 | 20420 | 23048 | 25676 |
| 3897 | 7295 | 12543 | 15166 | 17793 | 3898 | 9923 | 20421 | 23049 | 25677 |
| 3899 | 7296 | 12544 | 15167 | 17794 | 3900 | 9924 | 20422 | 23050 | 25678 |
| 3901 | 7297 | 12545 | 15168 | 17795 | 3902 | 9925 | 20423 | 23051 | 25679 |
| 3903 | 7298 | 12546 | 15169 | 17796 | 3904 | 9926 | 20424 | 23052 | 25680 |
| 3905 | 7299 | 12547 | 15170 | 17797 | 3906 | 9927 | 20425 | 23053 | 25681 |
| 3907 | 7300 | 12548 | 15171 | 17798 | 3908 | 9928 | 20426 | 23054 | 25682 |
| 3909 | 7301 | 12549 | 15172 | 17799 | 3910 | 9929 | 20427 | 23055 | 25683 |
| 3911 | 7302 | 12550 | 15173 | 17800 | 3912 | 9930 | 20428 | 23056 | 25684 |
| 3913 | 7303 | 12551 | 15174 | 17801 | 3914 | 9931 | 20429 | 23057 | 25685 |
| 3915 | 7304 | 12552 | 15175 | 17802 | 3916 | 9932 | 20430 | 23058 | 25686 |
| 3917 | 7305 | 12553 | 15176 | 17803 | 3918 | 9933 | 20431 | 23059 | 25687 |
| 3919 | 7306 | 12554 | 15177 | 17804 | 3920 | 9934 | 20432 | 23060 | 25688 |
| 3921 | 7307 | 12555 | 15178 | 17805 | 3922 | 9935 | 20433 | 23061 | 25689 |
| 3923 | 7308 | 12556 | 15179 | 17806 | 3924 | 9936 | 20434 | 23062 | 25690 |
| 3925 | 7309 | 12557 | 15180 | 17807 | 3926 | 9937 | 20435 | 23063 | 25691 |
| 3927 | 7310 | 12558 | 15181 | 17808 | 3928 | 9938 | 20436 | 23064 | 25692 |
| 3929 | 7311 | 12559 | 15182 | 17809 | 3930 | 9939 | 20437 | 23065 | 25693 |
| 3931 | 7312 | 12560 | 15183 | 17810 | 3932 | 9940 | 20438 | 23066 | 25694 |
| 3933 | 7313 | 12561 | 15184 | 17811 | 3934 | 9941 | 20439 | 23067 | 25695 |
| 3935 | 7314 | 12562 | 15185 | 17812 | 3936 | 9942 | 20440 | 23068 | 25696 |
| 3937 | 7315 | 12563 | 15186 | 17813 | 3938 | 9943 | 20441 | 23069 | 25697 |
| 3939 | 7316 | 12564 | 15187 | 17814 | 3940 | 9944 | 20442 | 23070 | 25698 |
| 3941 | 7317 | 12565 | 15188 | 17815 | 3942 | 9945 | 20443 | 23071 | 25699 |
| 3943 | 7318 | 12566 | 15189 | 17816 | 3944 | 9946 | 20444 | 23072 | 25700 |
| 3945 | 7319 | 12567 | 15190 | 17817 | 3946 | 9947 | 20445 | 23073 | 25701 |
| 3947 | 7320 | 12568 | 15191 | 17818 | 3948 | 9948 | 20446 | 23074 | 25702 |
| 3949 | 7321 | 12569 | 15192 | 17819 | 3950 | 9949 | 20447 | 23075 | 25703 |
| 3951 | 7322 | 12570 | 15193 | 17820 | 3952 | 9950 | 20448 | 23076 | 25704 |
| 3953 | 7323 | 12571 | 15194 | 17821 | 3954 | 9951 | 20449 | 23077 | 25705 |
| 3955 | 7324 | 12572 | 15195 | 17822 | 3956 | 9952 | 20450 | 23078 | 25706 |
| 3957 | 7325 | 12573 | 15196 | 17823 | 3958 | 9953 | 20451 | 23079 | 25707 |
| 3959 | 7326 | 12574 | 15197 | 17824 | 3960 | 9954 | 20452 | 23080 | 25708 |
| 3961 | 7327 | 12575 | 15198 | 17825 | 3962 | 9955 | 20453 | 23081 | 25709 |
| 3963 | 7328 | 12576 | 15199 | 17826 | 3964 | 9956 | 20454 | 23082 | 25710 |
| 3965 | 7329 | 12577 | 15200 | 17827 | 3966 | 9957 | 20455 | 23083 | 25711 |
| 3967 | 7330 | 12578 | 15201 | 17828 | 3968 | 9958 | 20456 | 23084 | 25712 |
| 3969 | 7331 | 12579 | 15202 | 17829 | 3970 | 9959 | 20457 | 23085 | 25713 |
| 3971 | 7332 | 12580 | 15203 | 17830 | 3972 | 9960 | 20458 | 23086 | 25714 |
| 3973 | 7333 | 12581 | 15204 | 17831 | 3974 | 9961 | 20459 | 23087 | 25715 |
| 3975 | 7334 | 12582 | 15205 | 17832 | 3976 | 9962 | 20460 | 23088 | 25716 |
| 3977 | 7335 | 12583 | 15206 | 17833 | 3978 | 9963 | 20461 | 23089 | 25717 |
| 3979 | 7336 | 12584 | 15207 | 17834 | 3980 | 9964 | 20462 | 23090 | 25718 |
| 3981 | 7337 | 12585 | 15208 | 17835 | 3982 | 9965 | 20463 | 23091 | 25719 |
| 3983 | 7338 | 12586 | 15209 | 17836 | 3984 | 9966 | 20464 | 23092 | 25720 |
| 3985 | 7339 | 12587 | 15210 | 17837 | 3986 | 9967 | 20465 | 23093 | 25721 |
| 3987 | 7340 | 12588 | 15211 | 17838 | 3988 | 9968 | 20466 | 23094 | 25722 |
| 3989 | 7341 | 12589 | 15212 | 17839 | 3990 | 9969 | 20467 | 23095 | 25723 |
| 3991 | 7342 | 12590 | 15213 | 17840 | 3992 | 9970 | 20468 | 23096 | 25724 |
| 3993 | 7343 | 12591 | 15214 | 17841 | 3994 | 9971 | 20469 | 23097 | 25725 |
| 3995 | 7344 | 12592 | 15215 | 17842 | 3996 | 9972 | 20470 | 23098 | 25726 |
| 3997 | 7345 | 12593 | 15216 | 17843 | 3998 | 9973 | 20471 | 23099 | 25727 |
| 3999 | 7346 | 12594 | 15217 | 17844 | 4000 | 9974 | 20472 | 23100 | 25728 |
| 4001 | 7347 | 12595 | 15218 | 17845 | 4002 | 9975 | 20473 | 23101 | 25729 |
| 4003 | 7348 | 12596 | 15219 | 17846 | 4004 | 9976 | 20474 | 23102 | 25730 |
| 4005 | 7349 | 12597 | 15220 | 17847 | 4006 | 9977 | 20475 | 23103 | 25731 |
| 4007 | 7350 | 12598 | 15221 | 17848 | 4008 | 9978 | 20476 | 23104 | 25732 |
| 4009 | 7351 | 12599 | 15222 | 17849 | 4010 | 9979 | 20477 | 23105 | 25733 |
| 4011 | 7352 | 12600 | 15223 | 17850 | 4012 | 9980 | 20478 | 23106 | 25734 |
| 4013 | 7353 | 12601 | 15224 | 17851 | 4014 | 9981 | 20479 | 23107 | 25735 |
| 4015 | 7354 | 12602 | 15225 | 17852 | 4016 | 9982 | 20480 | 23108 | 25736 |
| 4017 | 7355 | 12603 | 15226 | 17853 | 4018 | 9983 | 20481 | 23109 | 25737 |
| 4019 | 7356 | 12604 | 15227 | 17854 | 4020 | 9984 | 20482 | 23110 | 25738 |
| 4021 | 7357 | 12605 | 15228 | 17855 | 4022 | 9985 | 20483 | 23111 | 25739 |
| 4023 | 7358 | 12606 | 15229 | 17856 | 4024 | 9986 | 20484 | 23112 | 25740 |
| 4025 | 7359 | 12607 | 15230 | 17857 | 4026 | 9987 | 20485 | 23113 | 25741 |
| 4027 | 7360 | 12608 | 15231 | 17858 | 4028 | 9988 | 20486 | 23114 | 25742 |
| 4029 | 7361 | 12609 | 15232 | 17859 | 4030 | 9989 | 20487 | 23115 | 25743 |
| 4031 | 7362 | 12610 | 15233 | 17860 | 4032 | 9990 | 20488 | 23116 | 25744 |
| 4033 | 7363 | 12611 | 15234 | 17861 | 4034 | 9991 | 20489 | 23117 | 25745 |
| 4035 | 7364 | 12612 | 15235 | 17862 | 4036 | 9992 | 20490 | 23118 | 25746 |
| 4037 | 7365 | 12613 | 15236 | 17863 | 4038 | 9993 | 20491 | 23119 | 25747 |
| 4039 | 7366 | 12614 | 15237 | 17864 | 4040 | 9994 | 20492 | 23120 | 25748 |
| 4041 | 7367 | 12615 | 15238 | 17865 | 4042 | 9995 | 20493 | 23121 | 25749 |
| 4043 | 7368 | 12616 | 15239 | 17866 | 4044 | 9996 | 20494 | 23122 | 25750 |
| 4045 | 7369 | 12617 | 15240 | 17867 | 4046 | 9997 | 20495 | 23123 | 25751 |
| 4047 | 7370 | 12618 | 15241 | 17868 | 4048 | 9998 | 20496 | 23124 | 25752 |
| 4049 | 7371 | 12619 | 15242 | 17869 | 4050 | 9999 | 20497 | 23125 | 25753 |
| 4051 | 7372 | 12620 | 15243 | 17870 | 4052 | 10000 | 20498 | 23126 | 25754 |
| 4053 | 7373 | 12621 | 15244 | 17871 | 4054 | 10001 | 20499 | 23127 | 25755 |
| 4055 | 7374 | 12622 | 15245 | 17872 | 4056 | 10002 | 20500 | 23128 | 25756 |
| 4057 | 7375 | 12623 | 15246 | 17873 | 4058 | 10003 | 20501 | 23129 | 25757 |
| 4059 | 7376 | 12624 | 15247 | 17874 | 4060 | 10004 | 20502 | 23130 | 25758 |
| 4061 | 7377 | 12625 | 15248 | 17875 | 4062 | 10005 | 20503 | 23131 | 25759 |
| 4063 | 7378 | 12626 | 15249 | 17876 | 4064 | 10006 | 20504 | 23132 | 25760 |
| 4065 | 7379 | 12627 | 15250 | 17877 | 4066 | 10007 | 20505 | 23133 | 25761 |
| 4067 | 7380 | 12628 | 15251 | 17878 | 4068 | 10008 | 20506 | 23134 | 25762 |
| 4069 | 7381 | 12629 | 15252 | 17879 | 4070 | 10009 | 20507 | 23135 | 25763 |
| 4071 | 7382 | 12630 | 15253 | 17880 | 4072 | 10010 | 20508 | 23136 | 25764 |
| 4073 | 7383 | 12631 | 15254 | 17881 | 4074 | 10011 | 20509 | 23137 | 25765 |
| 4075 | 7384 | 12632 | 15255 | 17882 | 4076 | 10012 | 20510 | 23138 | 25766 |
| 4077 | 7385 | 12633 | 15256 | 17883 | 4078 | 10013 | 20511 | 23139 | 25767 |
| 4079 | 7386 | 12634 | 15257 | 17884 | 4080 | 10014 | 20512 | 23140 | 25768 |
| 4081 | 7387 | 12635 | 15258 | 17885 | 4082 | 10015 | 20513 | 23141 | 25769 |
| 4083 | 7388 | 12636 | 15259 | 17886 | 4084 | 10016 | 20514 | 23142 | 25770 |
| 4085 | 7389 | 12637 | 15260 | 17887 | 4086 | 10017 | 20515 | 23143 | 25771 |
| 4087 | 7390 | 12638 | 15261 | 17888 | 4088 | 10018 | 20516 | 23144 | 25772 |
| 4089 | 7391 | 12639 | 15262 | 17889 | 4090 | 10019 | 20517 | 23145 | 25773 |
| 4091 | 7392 | 12640 | 15263 | 17890 | 4092 | 10020 | 20518 | 23146 | 25774 |
| 4093 | 7393 | 12641 | 15264 | 17891 | 4094 | 10021 | 20519 | 23147 | 25775 |
| 4095 | 7394 | 12642 | 15265 | 17892 | 4096 | 10022 | 20520 | 23148 | 25776 |
| 4097 | 7395 | 12643 | 15266 | 17893 | 4098 | 10023 | 20521 | 23149 | 25777 |
| 4099 | 7396 | 12644 | 15267 | 17894 | 4100 | 10024 | 20522 | 23150 | 25778 |
| 4101 | 7397 | 12645 | 15268 | 17895 | 4102 | 10025 | 20523 | 23151 | 25779 |
| 4103 | 7398 | 12646 | 15269 | 17896 | 4104 | 10026 | 20524 | 23152 | 25780 |
| 4105 | 7399 | 12647 | 15270 | 17897 | 4106 | 10027 | 20525 | 23153 | 25781 |
| 4107 | 7400 | 12648 | 15271 | 17898 | 4108 | 10028 | 20526 | 23154 | 25782 |
| 4109 | 7401 | 12649 | 15272 | 17899 | 4110 | 10029 | 20527 | 23155 | 25783 |
| 4111 | 7402 | 12650 | 15273 | 17900 | 4112 | 10030 | 20528 | 23156 | 25784 |
| 4113 | 7403 | 12651 | 15274 | 17901 | 4114 | 10031 | 20529 | 23157 | 25785 |
| 4115 | 7404 | 12652 | 15275 | 17902 | 4116 | 10032 | 20530 | 23158 | 25786 |
| 4117 | 7405 | 12653 | 15276 | 17903 | 4118 | 10033 | 20531 | 23159 | 25787 |
| 4119 | 7406 | 12654 | 15277 | 17904 | 4120 | 10034 | 20532 | 23160 | 25788 |
| 4121 | 7407 | 12655 | 15278 | 17905 | 4122 | 10035 | 20533 | 23161 | 25789 |
| 4123 | 7408 | 12656 | 15279 | 17906 | 4124 | 10036 | 20534 | 23162 | 25790 |
| 4125 | 7409 | 12657 | 15280 | 17907 | 4126 | 10037 | 20535 | 23163 | 25791 |
| 4127 | 7410 | 12658 | 15281 | 17908 | 4128 | 10038 | 20536 | 23164 | 25792 |
| 4129 | 7411 | 12659 | 15282 | 17909 | 4130 | 10039 | 20537 | 23165 | 25793 |
| 4131 | 7412 | 12660 | 15283 | 17910 | 4132 | 10040 | 20538 | 23166 | 25794 |
| 4133 | 7413 | 12661 | 15284 | 17911 | 4134 | 10041 | 20539 | 23167 | 25795 |
| 4135 | 7414 | 12662 | 15285 | 17912 | 4136 | 10042 | 20540 | 23168 | 25796 |
| 4137 | 7415 | 12663 | 15286 | 17913 | 4138 | 10043 | 20541 | 23169 | 25797 |
| 4139 | 7416 | 12664 | 15287 | 17914 | 4140 | 10044 | 20542 | 23170 | 25798 |
| 4141 | 7417 | 12665 | 15288 | 17915 | 4142 | 10045 | 20543 | 23171 | 25799 |
| 4143 | 7418 | 12666 | 15289 | 17916 | 4144 | 10046 | 20544 | 23172 | 25800 |
| 4145 | 7419 | 12667 | 15290 | 17917 | 4146 | 10047 | 20545 | 23173 | 25801 |
| 4147 | 7420 | 12668 | 15291 | 17918 | 4148 | 10048 | 20546 | 23174 | 25802 |
| 4149 | 7421 | 12669 | 15292 | 17919 | 4150 | 10049 | 20547 | 23175 | 25803 |
| 4151 | 7422 | 12670 | 15293 | 17920 | 4152 | 10050 | 20548 | 23176 | 25804 |
| 4153 | 7423 | 12671 | 15294 | 17921 | 4154 | 10051 | 20549 | 23177 | 25805 |
| 4155 | 7424 | 12672 | 15295 | 17922 | 4156 | 10052 | 20550 | 23178 | 25806 |
| 4157 | 7425 | 12673 | 15296 | 17923 | 4158 | 10053 | 20551 | 23179 | 25807 |
| 4159 | 7426 | 12674 | 15297 | 17924 | 4160 | 10054 | 20552 | 23180 | 25808 |
| 4161 | 7427 | 12675 | 15298 | 17925 | 4162 | 10055 | 20553 | 23181 | 25809 |
| 4163 | 7428 | 12676 | 15299 | 17926 | 4164 | 10056 | 20554 | 23182 | 25810 |
| 4165 | 7429 | 12677 | 15300 | 17927 | 4166 | 10057 | 20555 | 23183 | 25811 |
| 4167 | 7430 | 12678 | 15301 | 17928 | 4168 | 10058 | 20556 | 23184 | 25812 |
| 4169 | 7431 | 12679 | 15302 | 17929 | 4170 | 10059 | 20557 | 23185 | 25813 |
| 4171 | 7432 | 12680 | 15303 | 17930 | 4172 | 10060 | 20558 | 23186 | 25814 |
| 4173 | 7433 | 12681 | 15304 | 17931 | 4174 | 10061 | 20559 | 23187 | 25815 |
| 4175 | 7434 | 12682 | 15305 | 17932 | 4176 | 10062 | 20560 | 23188 | 25816 |
| 4177 | 7435 | 12683 | 15306 | 17933 | 4178 | 10063 | 20561 | 23189 | 25817 |
| 4179 | 7436 | 12684 | 15307 | 17934 | 4180 | 10064 | 20562 | 23190 | 25818 |
| 4181 | 7437 | 12685 | 15308 | 17935 | 4182 | 10065 | 20563 | 23191 | 25819 |
| 4183 | 7438 | 12686 | 15309 | 17936 | 4184 | 10066 | 20564 | 23192 | 25820 |
| 4185 | 7439 | 12687 | 15310 | 17937 | 4186 | 10067 | 20565 | 23193 | 25821 |
| 4187 | 7440 | 12688 | 15311 | 17938 | 4188 | 10068 | 20566 | 23194 | 25822 |
| 4189 | 7441 | 12689 | 15312 | 17939 | 4190 | 10069 | 20567 | 23195 | 25823 |
| 4191 | 7442 | 12690 | 15313 | 17940 | 4192 | 10070 | 20568 | 23196 | 25824 |
| 4193 | 7443 | 12691 | 15314 | 17941 | 4194 | 10071 | 20569 | 23197 | 25825 |
| 4195 | 7444 | 12692 | 15315 | 17942 | 4196 | 10072 | 20570 | 23198 | 25826 |
| 4197 | 7445 | 12693 | 15316 | 17943 | 4198 | 10073 | 20571 | 23199 | 25827 |
| 4199 | 7446 | 12694 | 15317 | 17944 | 4200 | 10074 | 20572 | 23200 | 25828 |
| 4201 | 7447 | 12695 | 15318 | 17945 | 4202 | 10075 | 20573 | 23201 | 25829 |
| 4203 | 7448 | 12696 | 15319 | 17946 | 4204 | 10076 | 20574 | 23202 | 25830 |
| 4205 | 7449 | 12697 | 15320 | 17947 | 4206 | 10077 | 20575 | 23203 | 25831 |
| 4207 | 7450 | 12698 | 15321 | 17948 | 4208 | 10078 | 20576 | 23204 | 25832 |
| 4209 | 7451 | 12699 | 15322 | 17949 | 4210 | 10079 | 20577 | 23205 | 25833 |
| 4211 | 7452 | 12700 | 15323 | 17950 | 4212 | 10080 | 20578 | 23206 | 25834 |
| 4213 | 7453 | 12701 | 15324 | 17951 | 4214 | 10081 | 20579 | 23207 | 25835 |
| 4215 | 7454 | 12702 | 15325 | 17952 | 4216 | 10082 | 20580 | 23208 | 25836 |
| 4217 | 7455 | 12703 | 15326 | 17953 | 4218 | 10083 | 20581 | 23209 | 25837 |
| 4219 | 7456 | 12704 | 15327 | 17954 | 4220 | 10084 | 20582 | 23210 | 25838 |
| 4221 | 7457 | 12705 | 15328 | 17955 | 4222 | 10085 | 20583 | 23211 | 25839 |
| 4223 | 7458 | 12706 | 15329 | 17956 | 4224 | 10086 | 20584 | 23212 | 25840 |
| 4225 | 7459 | 12707 | 15330 | 17957 | 4226 | 10087 | 20585 | 23213 | 25841 |
| 4227 | 7460 | 12708 | 15331 | 17958 | 4228 | 10088 | 20586 | 23214 | 25842 |
| 4229 | 7461 | 12709 | 15332 | 17959 | 4230 | 10089 | 20587 | 23215 | 25843 |
| 4231 | 7462 | 12710 | 15333 | 17960 | 4232 | 10090 | 20588 | 23216 | 25844 |
| 4233 | 7463 | 12711 | 15334 | 17961 | 4234 | 10091 | 20589 | 23217 | 25845 |
| 4235 | 7464 | 12712 | 15335 | 17962 | 4236 | 10092 | 20590 | 23218 | 25846 |
| 4237 | 7465 | 12713 | 15336 | 17963 | 4238 | 10093 | 20591 | 23219 | 25847 |
| 4239 | 7466 | 12714 | 15337 | 17964 | 4240 | 10094 | 20592 | 23220 | 25848 |
| 4241 | 7467 | 12715 | 15338 | 17965 | 4242 | 10095 | 20593 | 23221 | 25849 |
| 4243 | 7468 | 12716 | 15339 | 17966 | 4244 | 10096 | 20594 | 23222 | 25850 |
| 4245 | 7469 | 12717 | 15340 | 17967 | 4246 | 10097 | 20595 | 23223 | 25851 |
| 4247 | 7470 | 12718 | 15341 | 17968 | 4248 | 10098 | 20596 | 23224 | 25852 |
| 4249 | 7471 | 12719 | 15342 | 17969 | 4250 | 10099 | 20597 | 23225 | 25853 |
| 4251 | 7472 | 12720 | 15343 | 17970 | 4252 | 10100 | 20598 | 23226 | 25854 |
| 4253 | 7473 | 12721 | 15344 | 17971 | 4254 | 10101 | 20599 | 23227 | 25855 |
| 4255 | 7474 | 12722 | 15345 | 17972 | 4256 | 10102 | 20600 | 23228 | 25856 |
| 4257 | 7475 | 12723 | 15346 | 17973 | 4258 | 10103 | 20601 | 23229 | 25857 |
| 4259 | 7476 | 12724 | 15347 | 17974 | 4260 | 10104 | 20602 | 23230 | 25858 |
| 4261 | 7477 | 12725 | 15348 | 17975 | 4262 | 10105 | 20603 | 23231 | 25859 |
| 4263 | 7478 | 12726 | 15349 | 17976 | 4264 | 10106 | 20604 | 23232 | 25860 |
| 4265 | 7479 | 12727 | 15350 | 17977 | 4266 | 10107 | 20605 | 23233 | 25861 |
| 4267 | 7480 | 12728 | 15351 | 17978 | 4268 | 10108 | 20606 | 23234 | 25862 |
| 4269 | 7481 | 12729 | 15352 | 17979 | 4270 | 10109 | 20607 | 23235 | 25863 |
| 4271 | 7482 | 12730 | 15353 | 17980 | 4272 | 10110 | 20608 | 23236 | 25864 |
| 4273 | 7483 | 12731 | 15354 | 17981 | 4274 | 10111 | 20609 | 23237 | 25865 |
| 4275 | 7484 | 12732 | 15355 | 17982 | 4276 | 10112 | 20610 | 23238 | 25866 |
| 4277 | 7485 | 12733 | 15356 | 17983 | 4278 | 10113 | 20611 | 23239 | 25867 |
| 4279 | 7486 | 12734 | 15357 | 17984 | 4280 | 10114 | 20612 | 23240 | 25868 |
| 4281 | 7487 | 12735 | 15358 | 17985 | 4282 | 10115 | 20613 | 23241 | 25869 |
| 4283 | 7488 | 12736 | 15359 | 17986 | 4284 | 10116 | 20614 | 23242 | 25870 |
| 4285 | 7489 | 12737 | 15360 | 17987 | 4286 | 10117 | 20615 | 23243 | 25871 |
| 4287 | 7490 | 12738 | 15361 | 17988 | 4288 | 10118 | 20616 | 23244 | 25872 |
| 4289 | 7491 | 12739 | 15362 | 17989 | 4290 | 10119 | 20617 | 23245 | 25873 |
| 4291 | 7492 | 12740 | 15363 | 17990 | 4292 | 10120 | 20618 | 23246 | 25874 |
| 4293 | 7493 | 12741 | 15364 | 17991 | 4294 | 10121 | 20619 | 23247 | 25875 |
| 4295 | 7494 | 12742 | 15365 | 17992 | 4296 | 10122 | 20620 | 23248 | 25876 |
| 4297 | 7495 | 12743 | 15366 | 17993 | 4298 | 10123 | 20621 | 23249 | 25877 |
| 4299 | 7496 | 12744 | 15367 | 17994 | 4300 | 10124 | 20622 | 23250 | 25878 |
| 4301 | 7497 | 12745 | 15368 | 17995 | 4302 | 10125 | 20623 | 23251 | 25879 |
| 4303 | 7498 | 12746 | 15369 | 17996 | 4304 | 10126 | 20624 | 23252 | 25880 |
| 4305 | 7499 | 12747 | 15370 | 17997 | 4306 | 10127 | 20625 | 23253 | 25881 |
| 4307 | 7500 | 12748 | 15371 | 17998 | 4308 | 10128 | 20626 | 23254 | 25882 |
| 4309 | 7501 | 12749 | 15372 | 17999 | 4310 | 10129 | 20627 | 23255 | 25883 |
| 4311 | 7502 | 12750 | 15373 | 18000 | 4312 | 10130 | 20628 | 23256 | 25884 |
| 4313 | 7503 | 12751 | 15374 | 18001 | 4314 | 10131 | 20629 | 23257 | 25885 |
| 4315 | 7504 | 12752 | 15375 | 18002 | 4316 | 10132 | 20630 | 23258 | 25886 |
| 4317 | 7505 | 12753 | 15376 | 18003 | 4318 | 10133 | 20631 | 23259 | 25887 |
| 4319 | 7506 | 12754 | 15377 | 18004 | 4320 | 10134 | 20632 | 23260 | 25888 |
| 4321 | 7507 | 12755 | 15378 | 18005 | 4322 | 10135 | 20633 | 23261 | 25889 |
| 4323 | 7508 | 12756 | 15379 | 18006 | 4324 | 10136 | 20634 | 23262 | 25890 |
| 4325 | 7509 | 12757 | 15380 | 18007 | 4326 | 10137 | 20635 | 23263 | 25891 |
| 4327 | 7510 | 12758 | 15381 | 18008 | 4328 | 10138 | 20636 | 23264 | 25892 |
| 4329 | 7511 | 12759 | 15382 | 18009 | 4330 | 10139 | 20637 | 23265 | 25893 |
| 4331 | 7512 | 12760 | 15383 | 18010 | 4332 | 10140 | 20638 | 23266 | 25894 |
| 4333 | 7513 | 12761 | 15384 | 18011 | 4334 | 10141 | 20639 | 23267 | 25895 |
| 4335 | 7514 | 12762 | 15385 | 18012 | 4336 | 10142 | 20640 | 23268 | 25896 |
| 4337 | 7515 | 12763 | 15386 | 18013 | 4338 | 10143 | 20641 | 23269 | 25897 |
| 4339 | 7516 | 12764 | 15387 | 18014 | 4340 | 10144 | 20642 | 23270 | 25898 |
| 4341 | 7517 | 12765 | 15388 | 18015 | 4342 | 10145 | 20643 | 23271 | 25899 |
| 4343 | 7518 | 12766 | 15389 | 18016 | 4344 | 10146 | 20644 | 23272 | 25900 |
| 4345 | 7519 | 12767 | 15390 | 18017 | 4346 | 10147 | 20645 | 23273 | 25901 |
| 4347 | 7520 | 12768 | 15391 | 18018 | 4348 | 10148 | 20646 | 23274 | 25902 |
| 4349 | 7521 | 12769 | 15392 | 18019 | 4350 | 10149 | 20647 | 23275 | 25903 |
| 4351 | 7522 | 12770 | 15393 | 18020 | 4352 | 10150 | 20648 | 23276 | 25904 |
| 4353 | 7523 | 12771 | 15394 | 18021 | 4354 | 10151 | 20649 | 23277 | 25905 |
| 4355 | 7524 | 12772 | 15395 | 18022 | 4356 | 10152 | 20650 | 23278 | 25906 |
| 4357 | 7525 | 12773 | 15396 | 18023 | 4358 | 10153 | 20651 | 23279 | 25907 |
| 4359 | 7526 | 12774 | 15397 | 18024 | 4360 | 10154 | 20652 | 23280 | 25908 |
| 4361 | 7527 | 12775 | 15398 | 18025 | 4362 | 10155 | 20653 | 23281 | 25909 |
| 4363 | 7528 | 12776 | 15399 | 18026 | 4364 | 10156 | 20654 | 23282 | 25910 |
| 4365 | 7529 | 12777 | 15400 | 18027 | 4366 | 10157 | 20655 | 23283 | 25911 |
| 4367 | 7530 | 12778 | 15401 | 18028 | 4368 | 10158 | 20656 | 23284 | 25912 |
| 4369 | 7531 | 12779 | 15402 | 18029 | 4370 | 10159 | 20657 | 23285 | 25913 |
| 4371 | 7532 | 12780 | 15403 | 18030 | 4372 | 10160 | 20658 | 23286 | 25914 |
| 4373 | 7533 | 12781 | 15404 | 18031 | 4374 | 10161 | 20659 | 23287 | 25915 |
| 4375 | 7534 | 12782 | 15405 | 18032 | 4376 | 10162 | 20660 | 23288 | 25916 |
| 4377 | 7535 | 12783 | 15406 | 18033 | 4378 | 10163 | 20661 | 23289 | 25917 |
| 4379 | 7536 | 12784 | 15407 | 18034 | 4380 | 10164 | 20662 | 23290 | 25918 |
| 4381 | 7537 | 12785 | 15408 | 18035 | 4382 | 10165 | 20663 | 23291 | 25919 |
| 4383 | 7538 | 12786 | 15409 | 18036 | 4384 | 10166 | 20664 | 23292 | 25920 |
| 4385 | 7539 | 12787 | 15410 | 18037 | 4386 | 10167 | 20665 | 23293 | 25921 |
| 4387 | 7540 | 12788 | 15411 | 18038 | 4388 | 10168 | 20666 | 23294 | 25922 |
| 4389 | 7541 | 12789 | 15412 | 18039 | 4390 | 10169 | 20667 | 23295 | 25923 |
| 4391 | 7542 | 12790 | 15413 | 18040 | 4392 | 10170 | 20668 | 23296 | 25924 |
| 4393 | 7543 | 12791 | 15414 | 18041 | 4394 | 10171 | 20669 | 23297 | 25925 |
| 4395 | 7544 | 12792 | 15415 | 18042 | 4396 | 10172 | 20670 | 23298 | 25926 |
| 4397 | 7545 | 12793 | 15416 | 18043 | 4398 | 10173 | 20671 | 23299 | 25927 |
| 4399 | 7546 | 12794 | 15417 | 18044 | 4400 | 10174 | 20672 | 23300 | 25928 |
| 4401 | 7547 | 12795 | 15418 | 18045 | 4402 | 10175 | 20673 | 23301 | 25929 |
| 4403 | 7548 | 12796 | 15419 | 18046 | 4404 | 10176 | 20674 | 23302 | 25930 |
| 4405 | 7549 | 12797 | 15420 | 18047 | 4406 | 10177 | 20675 | 23303 | 25931 |
| 4407 | 7550 | 12798 | 15421 | 18048 | 4408 | 10178 | 20676 | 23304 | 25932 |
| 4409 | 7551 | 12799 | 15422 | 18049 | 4410 | 10179 | 20677 | 23305 | 25933 |
| 4411 | 7552 | 12800 | 15423 | 18050 | 4412 | 10180 | 20678 | 23306 | 25934 |
| 4413 | 7553 | 12801 | 15424 | 18051 | 4414 | 10181 | 20679 | 23307 | 25935 |
| 4415 | 7554 | 12802 | 15425 | 18052 | 4416 | 10182 | 20680 | 23308 | 25936 |
| 4417 | 7555 | 12803 | 15426 | 18053 | 4418 | 10183 | 20681 | 23309 | 25937 |
| 4419 | 7556 | 12804 | 15427 | 18054 | 4420 | 10184 | 20682 | 23310 | 25938 |
| 4421 | 7557 | 12805 | 15428 | 18055 | 4422 | 10185 | 20683 | 23311 | 25939 |
| 4423 | 7558 | 12806 | 15429 | 18056 | 4424 | 10186 | 20684 | 23312 | 25940 |
| 4425 | 7559 | | | 18057 | 4426 | 10187 | 20685 | 23313 | 25941 |
| 4427 | 7560 | 12807 | 15430 | 18058 | 4428 | 10188 | 20686 | 23314 | 25942 |
| 4429 | 7561 | 12808 | 15431 | 18059 | 4430 | 10189 | 20687 | 23315 | 25943 |
| 4431 | 7562 | 12809 | 15432 | 18060 | 4432 | 10190 | 20688 | 23316 | 25944 |
| 4433 | 7563 | 12810 | 15433 | 18061 | 4434 | 10191 | 20689 | 23317 | 25945 |
| 4435 | 7564 | 12811 | 15434 | 18062 | 4436 | 10192 | 20690 | 23318 | 25946 |
| 4437 | 7565 | 12812 | 15435 | 18063 | 4438 | 10193 | 20691 | 23319 | 25947 |
| 4439 | 7566 | 12813 | 15436 | 18064 | 4440 | 10194 | 20692 | 23320 | 25948 |
| 4441 | 7567 | 12814 | 15437 | 18065 | 4442 | 10195 | 20693 | 23321 | 25949 |
| 4443 | 7568 | 12815 | 15438 | 18066 | 4444 | 10196 | 20694 | 23322 | 25950 |
| 4445 | 7569 | 12816 | 15439 | 18067 | 4446 | 10197 | 20695 | 23323 | 25951 |
| 4447 | 7570 | 12817 | 15440 | 18068 | 4448 | 10198 | 20696 | 23324 | 25952 |
| 4449 | 7571 | 12818 | 15441 | 18069 | 4450 | 10199 | 20697 | 23325 | 25953 |
| 4451 | 7572 | 12819 | 15442 | 18070 | 4452 | 10200 | 20698 | 23326 | 25954 |
| 4453 | 7573 | 12820 | 15443 | 18071 | 4454 | 10201 | 20699 | 23327 | 25955 |
| 4455 | 7574 | 12821 | 15444 | 18072 | 4456 | 10202 | 20700 | 23328 | 25956 |
| 4457 | 7575 | 12822 | 15445 | 18073 | 4458 | 10203 | 20701 | 23329 | 25957 |
| 4459 | 7576 | 12823 | 15446 | 18074 | 4460 | 10204 | 20702 | 23330 | 25958 |
| 4461 | 7577 | 12824 | 15447 | 18075 | 4462 | 10205 | 20703 | 23331 | 25959 |
| 4463 | 7578 | 12825 | 15448 | 18076 | 4464 | 10206 | 20704 | 23332 | 25960 |
| 4465 | 7579 | 12826 | 15449 | 18077 | 4466 | 10207 | 20705 | 23333 | 25961 |
| 4467 | 7580 | 12827 | 15450 | 18078 | 4468 | 10208 | 20706 | 23334 | 25962 |
| 4469 | 7581 | 12828 | 15451 | 18079 | 4470 | 10209 | 20707 | 23335 | 25963 |
| 4471 | 7582 | 12829 | 15452 | 18080 | 4472 | 10210 | 20708 | 23336 | 25964 |
| 4473 | 7583 | 12830 | 15453 | 18081 | 4474 | 10211 | 20709 | 23337 | 25965 |
| 4475 | 7584 | 12831 | 15454 | 18082 | 4476 | 10212 | 20710 | 23338 | 25966 |
| 4477 | 7585 | 12832 | 15455 | 18083 | 4478 | 10213 | 20711 | 23339 | 25967 |
| 4479 | 7586 | 12833 | 15456 | 18084 | 4480 | 10214 | 20712 | 23340 | 25968 |
| 4481 | 7587 | 12834 | 15457 | 18085 | 4482 | 10215 | 20713 | 23341 | 25969 |
| 4483 | 7588 | 12835 | 15458 | 18086 | 4484 | 10216 | 20714 | 23342 | 25970 |
| 4485 | 7589 | 12836 | 15459 | 18087 | 4486 | 10217 | 20715 | 23343 | 25971 |
| 4487 | 7590 | 12837 | 15460 | 18088 | 4488 | 10218 | 20716 | 23344 | 25972 |
| 4489 | 7591 | 12838 | 15461 | 18089 | 4490 | 10219 | 20717 | 23345 | 25973 |
| 4491 | 7592 | 12839 | 15462 | 18090 | 4492 | 10220 | 20718 | 23346 | 25974 |
| 4493 | 7593 | 12840 | 15463 | 18091 | 4494 | 10221 | 20719 | 23347 | 25975 |
| 4495 | 7594 | 12841 | 15464 | 18092 | 4496 | 10222 | 20720 | 23348 | 25976 |
| 4497 | 7595 | 12842 | 15465 | 18093 | 4498 | 10223 | 20721 | 23349 | 25977 |
| 4499 | 7596 | 12843 | 15466 | 18094 | 4500 | 10224 | 20722 | 23350 | 25978 |
| 4501 | 7597 | 12844 | 15467 | 18095 | 4502 | 10225 | 20723 | 23351 | 25979 |
| 4503 | 7598 | 12845 | 15468 | 18096 | 4504 | 10226 | 20724 | 23352 | 25980 |
| 4505 | 7599 | 12846 | 15469 | 18097 | 4506 | 10227 | 20725 | 23353 | 25981 |
| 4507 | 7600 | 12847 | 15470 | 18098 | 4508 | 10228 | 20726 | 23354 | 25982 |
| 4509 | 7601 | 12848 | 15471 | 18099 | 4510 | 10229 | 20727 | 23355 | 25983 |
| 4511 | 7602 | 12849 | 15472 | 18100 | 4512 | 10230 | 20728 | 23356 | 25984 |
| 4513 | 7603 | 12850 | 15473 | 18101 | 4514 | 10231 | 20729 | 23357 | 25985 |
| 4515 | 7604 | 12851 | 15474 | 18102 | 4516 | 10232 | 20730 | 23358 | 25986 |
| 4517 | 7605 | 12852 | 15475 | 18103 | 4518 | 10233 | 20731 | 23359 | 25987 |
| 4519 | 7606 | 12853 | 15476 | 18104 | 4520 | 10234 | 20732 | 23360 | 25988 |
| 4521 | 7607 | 12854 | 15477 | 18105 | 4522 | 10235 | 20733 | 23361 | 25989 |
| 4523 | 7608 | 12855 | 15478 | 18106 | 4524 | 10236 | 20734 | 23362 | 25990 |
| 4525 | 7609 | 12856 | 15479 | 18107 | 4526 | 10237 | 20735 | 23363 | 25991 |
| 4527 | 7610 | 12857 | 15480 | 18108 | 4528 | 10238 | 20736 | 23364 | 25992 |
| 4529 | 7611 | 12858 | 15481 | 18109 | 4530 | 10239 | 20737 | 23365 | 25993 |
| 4531 | 7612 | 12859 | 15482 | 18110 | 4532 | 10240 | 20738 | 23366 | 25994 |
| 4533 | 7613 | 12860 | 15483 | 18111 | 4534 | 10241 | 20739 | 23367 | 25995 |
| 4535 | 7614 | 12861 | 15484 | 18112 | 4536 | 10242 | 20740 | 23368 | 25996 |
| 4537 | 7615 | 12862 | 15485 | 18113 | 4538 | 10243 | 20741 | 23369 | 25997 |
| 4539 | 7616 | 12863 | 15486 | 18114 | 4540 | 10244 | 20742 | 23370 | 25998 |
| 4541 | 7617 | 12864 | 15487 | 18115 | 4542 | 10245 | 20743 | 23371 | 25999 |
| 4543 | 7618 | 12865 | 15488 | 18116 | 4544 | 10246 | 20744 | 23372 | 26000 |
| 4545 | 7619 | 12866 | 15489 | 18117 | 4546 | 10247 | 20745 | 23373 | 26001 |
| 4547 | 7620 | 12867 | 15490 | 18118 | 4548 | 10248 | 20746 | 23374 | 26002 |
| 4549 | 7621 | 12868 | 15491 | 18119 | 4550 | 10249 | 20747 | 23375 | 26003 |
| 4551 | 7622 | 12869 | 15492 | 18120 | 4552 | 10250 | 20748 | 23376 | 26004 |
| 4553 | 7623 | 12870 | 15493 | 18121 | 4554 | 10251 | 20749 | 23377 | 26005 |
| 4555 | 7624 | 12871 | 15494 | 18122 | 4556 | 10252 | 20750 | 23378 | 26006 |
| 4557 | 7625 | 12872 | 15495 | 18123 | 4558 | 10253 | 20751 | 23379 | 26007 |
| 4559 | 7626 | 12873 | 15496 | 18124 | 4560 | 10254 | 20752 | 23380 | 26008 |
| 4561 | 7627 | 12874 | 15497 | 18125 | 4562 | 10255 | 20753 | 23381 | 26009 |
| 4563 | 7628 | 12875 | 15498 | 18126 | 4564 | 10256 | 20754 | 23382 | 26010 |
| 4565 | 7629 | 12876 | 15499 | 18127 | 4566 | 10257 | 20755 | 23383 | 26011 |
| 4567 | 7630 | 12877 | 15500 | 18128 | 4568 | 10258 | 20756 | 23384 | 26012 |
| 4569 | 7631 | 12878 | 15501 | 18129 | 4570 | 10259 | 20757 | 23385 | 26013 |
| 4571 | 7632 | 12879 | 15502 | 18130 | 4572 | 10260 | 20758 | 23386 | 26014 |
| 4573 | 7633 | 12880 | 15503 | 18131 | 4574 | 10261 | 20759 | 23387 | 26015 |
| 4575 | 7634 | 12881 | 15504 | 18132 | 4576 | 10262 | 20760 | 23388 | 26016 |
| 4577 | 7635 | 12882 | 15505 | 18133 | 4578 | 10263 | 20761 | 23389 | 26017 |
| 4579 | 7636 | 12883 | 15506 | 18134 | 4580 | 10264 | 20762 | 23390 | 26018 |
| 4581 | 7637 | 12884 | 15507 | 18135 | 4582 | 10265 | 20763 | 23391 | 26019 |
| 4583 | 7638 | 12885 | 15508 | 18136 | 4584 | 10266 | 20764 | 23392 | 26020 |
| 4585 | 7639 | 12886 | 15509 | 18137 | 4586 | 10267 | 20765 | 23393 | 26021 |
| 4587 | 7640 | 12887 | 15510 | 18138 | 4588 | 10268 | 20766 | 23394 | 26022 |
| 4589 | 7641 | 12888 | 15511 | 18139 | 4590 | 10269 | 20767 | 23395 | 26023 |
| 4591 | 7642 | 12889 | 15512 | 18140 | 4592 | 10270 | 20768 | 23396 | 26024 |
| 4593 | 7643 | 12890 | 15513 | 18141 | 4594 | 10271 | 20769 | 23397 | 26025 |
| 4595 | 7644 | 12891 | 15514 | 18142 | 4596 | 10272 | 20770 | 23398 | 26026 |
| 4597 | 7645 | 12892 | 15515 | 18143 | 4598 | 10273 | 20771 | 23399 | 26027 |
| 4599 | 7646 | 12893 | 15516 | 18144 | 4600 | 10274 | 20772 | 23400 | 26028 |
| 4601 | 7647 | 12894 | 15517 | 18145 | 4602 | 10275 | 20773 | 23401 | 26029 |
| 4603 | 7648 | 12895 | 15518 | 18146 | 4604 | 10276 | 20774 | 23402 | 26030 |
| 4605 | 7649 | 12896 | 15519 | 18147 | 4606 | 10277 | 20775 | 23403 | 26031 |
| 4607 | 7650 | 12897 | 15520 | 18148 | 4608 | 10278 | 20776 | 23404 | 26032 |
| 4609 | 7651 | 12898 | 15521 | 18149 | 4610 | 10279 | 20777 | 23405 | 26033 |
| 4611 | 7652 | 12899 | 15522 | 18150 | 4612 | 10280 | 20778 | 23406 | 26034 |
| 4613 | 7653 | 12900 | 15523 | 18151 | 4614 | 10281 | 20779 | 23407 | 26035 |
| 4615 | 7654 | 12901 | 15524 | 18152 | 4616 | 10282 | 20780 | 23408 | 26036 |
| 4617 | 7655 | 12902 | 15525 | 18153 | 4618 | 10283 | 20781 | 23409 | 26037 |
| 4619 | 7656 | 12903 | 15526 | 18154 | 4620 | 10284 | 20782 | 23410 | 26038 |
| 4621 | 7657 | 12904 | 15527 | 18155 | 4622 | 10285 | 20783 | 23411 | 26039 |
| 4623 | 7658 | 12905 | 15528 | 18156 | 4624 | 10286 | 20784 | 23412 | 26040 |
| 4625 | 7659 | 12906 | 15529 | 18157 | 4626 | 10287 | 20785 | 23413 | 26041 |
| 4627 | 7660 | 12907 | 15530 | 18158 | 4628 | 10288 | 20786 | 23414 | 26042 |
| 4629 | 7661 | 12908 | 15531 | 18159 | 4630 | 10289 | 20787 | 23415 | 26043 |
| 4631 | 7662 | 12909 | 15532 | 18160 | 4632 | 10290 | 20788 | 23416 | 26044 |
| 4633 | 7663 | 12910 | 15533 | 18161 | 4634 | 10291 | 20789 | 23417 | 26045 |
| 4635 | 7664 | 12911 | 15534 | 18162 | 4636 | 10292 | 20790 | 23418 | 26046 |
| 4637 | 7665 | 12912 | 15535 | 18163 | 4638 | 10293 | 20791 | 23419 | 26047 |
| 4639 | 7666 | 12913 | 15536 | 18164 | 4640 | 10294 | 20792 | 23420 | 26048 |
| 4641 | 7667 | 12914 | 15537 | 18165 | 4642 | 10295 | 20793 | 23421 | 26049 |
| 4643 | 7668 | 12915 | 15538 | 18166 | 4644 | 10296 | 20794 | 23422 | 26050 |
| 4645 | 7669 | 12916 | 15539 | 18167 | 4646 | 10297 | 20795 | 23423 | 26051 |
| 4647 | 7670 | 12917 | 15540 | 18168 | 4648 | 10298 | 20796 | 23424 | 26052 |
| 4649 | 7671 | 12918 | 15541 | 18169 | 4650 | 10299 | 20797 | 23425 | 26053 |
| 4651 | 7672 | 12919 | 15542 | 18170 | 4652 | 10300 | 20798 | 23426 | 26054 |
| 4653 | 7673 | 12920 | 15543 | 18171 | 4654 | 10301 | 20799 | 23427 | 26055 |
| 4655 | 7674 | 12921 | 15544 | 18172 | 4656 | 10302 | 20800 | 23428 | 26056 |
| 4657 | 7675 | 12922 | 15545 | 18173 | 4658 | 10303 | 20801 | 23429 | 26057 |
| 4659 | 7676 | 12923 | 15546 | 18174 | 4660 | 10304 | 20802 | 23430 | 26058 |
| 4661 | 7677 | 12924 | 15547 | 18175 | 4662 | 10305 | 20803 | 23431 | 26059 |
| 4663 | 7678 | 12925 | 15548 | 18176 | 4664 | 10306 | 20804 | 23432 | 26060 |
| 4665 | 7679 | 12926 | 15549 | 18177 | 4666 | 10307 | 20805 | 23433 | 26061 |
| 4667 | 7680 | 12927 | 15550 | 18178 | 4668 | 10308 | 20806 | 23434 | 26062 |
| 4669 | 7681 | 12928 | 15551 | 18179 | 4670 | 10309 | 20807 | 23435 | 26063 |
| 4671 | 7682 | 12929 | 15552 | 18180 | 4672 | 10310 | 20808 | 23436 | 26064 |
| 4673 | 7683 | 12930 | 15553 | 18181 | 4674 | 10311 | 20809 | 23437 | 26065 |
| 4675 | 7684 | 12931 | 15554 | 18182 | 4676 | 10312 | 20810 | 23438 | 26066 |
| 4677 | 7685 | 12932 | 15555 | 18183 | 4678 | 10313 | 20811 | 23439 | 26067 |
| 4679 | 7686 | 12933 | 15556 | 18184 | 4680 | 10314 | 20812 | 23440 | 26068 |
| 4681 | 7687 | 12934 | 15557 | 18185 | 4682 | 10315 | 20813 | 23441 | 26069 |
| 4683 | 7688 | 12935 | 15558 | 18186 | 4684 | 10316 | 20814 | 23442 | 26070 |
| 4685 | 7689 | 12936 | 15559 | 18187 | 4686 | 10317 | 20815 | 23443 | 26071 |
| 4687 | 7690 | 12937 | 15560 | 18188 | 4688 | 10318 | 20816 | 23444 | 26072 |
| 4689 | 7691 | 12938 | 15561 | 18189 | 4690 | 10319 | 20817 | 23445 | 26073 |
| 4691 | 7692 | 12939 | 15562 | 18190 | 4692 | 10320 | 20818 | 23446 | 26074 |
| 4693 | 7693 | 12940 | 15563 | 18191 | 4694 | 10321 | 20819 | 23447 | 26075 |
| 4695 | 7694 | 12941 | 15564 | 18192 | 4696 | 10322 | 20820 | 23448 | 26076 |
| 4697 | 7695 | 12942 | 15565 | 18193 | 4698 | 10323 | 20821 | 23449 | 26077 |
| 4699 | 7696 | 12943 | 15566 | 18194 | 4700 | 10324 | 20822 | 23450 | 26078 |
| 4701 | 7697 | 12944 | 15567 | 18195 | 4702 | 10325 | 20823 | 23451 | 26079 |
| 4703 | 7698 | 12945 | 15568 | 18196 | 4704 | 10326 | 20824 | 23452 | 26080 |
| 4705 | 7699 | 12946 | 15569 | 18197 | 4706 | 10327 | 20825 | 23453 | 26081 |
| 4707 | 7700 | 12947 | 15570 | 18198 | 4708 | 10328 | 20826 | 23454 | 26082 |
| 4709 | 7701 | 12948 | 15571 | 18199 | 4710 | 10329 | 20827 | 23455 | 26083 |
| 4711 | 7702 | 12949 | 15572 | 18200 | 4712 | 10330 | 20828 | 23456 | 26084 |
| 4713 | 7703 | 12950 | 15573 | 18201 | 4714 | 10331 | 20829 | 23457 | 26085 |
| 4715 | 7704 | 12951 | 15574 | 18202 | 4716 | 10332 | 20830 | 23458 | 26086 |
| 4717 | 7705 | 12952 | 15575 | 18203 | 4718 | 10333 | 20831 | 23459 | 26087 |
| 4719 | 7706 | 12953 | 15576 | 18204 | 4720 | 10334 | 20832 | 23460 | 26088 |
| 4721 | 7707 | 12954 | 15577 | 18205 | 4722 | 10335 | 20833 | 23461 | 26089 |
| 4723 | 7708 | 12955 | 15578 | 18206 | 4724 | 10336 | 20834 | 23462 | 26090 |
| 4725 | 7709 | 12956 | 15579 | 18207 | 4726 | 10337 | 20835 | 23463 | 26091 |
| 4727 | 7710 | 12957 | 15580 | 18208 | 4728 | 10338 | 20836 | 23464 | 26092 |
| 4729 | 7711 | 12958 | 15581 | 18209 | 4730 | 10339 | 20837 | 23465 | 26093 |
| 4731 | 7712 | 12959 | 15582 | 18210 | 4732 | 10340 | 20838 | 23466 | 26094 |
| 4733 | 7713 | 12960 | 15583 | 18211 | 4734 | 10341 | 20839 | 23467 | 26095 |
| 4735 | 7714 | 12961 | 15584 | 18212 | 4736 | 10342 | 20840 | 23468 | 26096 |
| 4737 | 7715 | 12962 | 15585 | 18213 | 4738 | 10343 | 20841 | 23469 | 26097 |
| 4739 | 7716 | 12963 | 15586 | 18214 | 4740 | 10344 | 20842 | 23470 | 26098 |
| 4741 | 7717 | 12964 | 15587 | 18215 | 4742 | 10345 | 20843 | 23471 | 26099 |
| 4743 | 7718 | 12965 | 15588 | 18216 | 4744 | 10346 | 20844 | 23472 | 26100 |
| 4745 | 7719 | 12966 | 15589 | 18217 | 4746 | 10347 | 20845 | 23473 | 26101 |
| 4747 | 7720 | 12967 | 15590 | 18218 | 4748 | 10348 | 20846 | 23474 | 26102 |
| 4749 | 7721 | 12968 | 15591 | 18219 | 4750 | 10349 | 20847 | 23475 | 26103 |
| 4751 | 7722 | 12969 | 15592 | 18220 | 4752 | 10350 | 20848 | 23476 | 26104 |
| 4753 | 7723 | 12970 | 15593 | 18221 | 4754 | 10351 | 20849 | 23477 | 26105 |
| 4755 | 7724 | 12971 | 15594 | 18222 | 4756 | 10352 | 20850 | 23478 | 26106 |
| 4757 | 7725 | 12972 | 15595 | 18223 | 4758 | 10353 | 20851 | 23479 | 26107 |
| 4759 | 7726 | 12973 | 15596 | 18224 | 4760 | 10354 | 20852 | 23480 | 26108 |
| 4761 | 7727 | 12974 | 15597 | 18225 | 4762 | 10355 | 20853 | 23481 | 26109 |
| 4763 | 7728 | 12975 | 15598 | 18226 | 4764 | 10356 | 20854 | 23482 | 26110 |
| 4765 | 7729 | 12976 | 15599 | 18227 | 4766 | 10357 | 20855 | 23483 | 26111 |
| 4767 | 7730 | 12977 | 15600 | 18228 | 4768 | 10358 | 20856 | 23484 | 26112 |
| 4769 | 7731 | 12978 | 15601 | 18229 | 4770 | 10359 | 20857 | 23485 | 26113 |
| 4771 | 7732 | 12979 | 15602 | 18230 | 4772 | 10360 | 20858 | 23486 | 26114 |
| 4773 | 7733 | 12980 | 15603 | 18231 | 4774 | 10361 | 20859 | 23487 | 26115 |
| 4775 | 7734 | 12981 | 15604 | 18232 | 4776 | 10362 | 20860 | 23488 | 26116 |
| 4777 | 7735 | 12982 | 15605 | 18233 | 4778 | 10363 | 20861 | 23489 | 26117 |
| 4779 | 7736 | 12983 | 15606 | 18234 | 4780 | 10364 | 20862 | 23490 | 26118 |
| 4781 | 7737 | 12984 | 15607 | 18235 | 4782 | 10365 | 20863 | 23491 | 26119 |
| 4783 | 7738 | 12985 | 15608 | 18236 | 4784 | 10366 | 20864 | 23492 | 26120 |
| 4785 | 7739 | 12986 | 15609 | 18237 | 4786 | 10367 | 20865 | 23493 | 26121 |
| 4787 | 7740 | 12987 | 15610 | 18238 | 4788 | 10368 | 20866 | 23494 | 26122 |
| 4789 | 7741 | 12988 | 15611 | 18239 | 4790 | 10369 | 20867 | 23495 | 26123 |
| 4791 | 7742 | 12989 | 15612 | 18240 | 4792 | 10370 | 20868 | 23496 | 26124 |
| 4793 | 7743 | 12990 | 15613 | 18241 | 4794 | 10371 | 20869 | 23497 | 26125 |
| 4795 | 7744 | 12991 | 15614 | 18242 | 4796 | 10372 | 20870 | 23498 | 26126 |
| 4797 | 7745 | 12992 | 15615 | 18243 | 4798 | 10373 | 20871 | 23499 | 26127 |
| 4799 | 7746 | 12993 | 15616 | 18244 | 4800 | 10374 | 20872 | 23500 | 26128 |
| 4801 | 7747 | 12994 | 15617 | 18245 | 4802 | 10375 | 20873 | 23501 | 26129 |
| 4803 | 7748 | 12995 | 15618 | 18246 | 4804 | 10376 | 20874 | 23502 | 26130 |
| 4805 | 7749 | 12996 | 15619 | 18247 | 4806 | 10377 | 20875 | 23503 | 26131 |
| 4807 | 7750 | 12997 | 15620 | 18248 | 4808 | 10378 | 20876 | 23504 | 26132 |
| 4809 | 7751 | 12998 | 15621 | 18249 | 4810 | 10379 | 20877 | 23505 | 26133 |
| 4811 | 7752 | 12999 | 15622 | 18250 | 4812 | 10380 | 20878 | 23506 | 26134 |
| 4813 | 7753 | 13000 | 15623 | 18251 | 4814 | 10381 | 20879 | 23507 | 26135 |
| 4815 | 7754 | 13001 | 15624 | 18252 | 4816 | 10382 | 20880 | 23508 | 26136 |
| 4817 | 7755 | 13002 | 15625 | 18253 | 4818 | 10383 | 20881 | 23509 | 26137 |
| 4819 | 7756 | 13003 | 15626 | 18254 | 4820 | 10384 | 20882 | 23510 | 26138 |
| 4821 | 7757 | 13004 | 15627 | 18255 | 4822 | 10385 | 20883 | 23511 | 26139 |
| 4823 | 7758 | 13005 | 15628 | 18256 | 4824 | 10386 | 20884 | 23512 | 26140 |
| 4825 | 7759 | 13006 | 15629 | 18257 | 4826 | 10387 | 20885 | 23513 | 26141 |
| 4827 | 7760 | 13007 | 15630 | 18258 | 4828 | 10388 | 20886 | 23514 | 26142 |
| 4829 | 7761 | 13008 | 15631 | 18259 | 4830 | 10389 | 20887 | 23515 | 26143 |
| 4831 | 7762 | 13009 | 15632 | 18260 | 4832 | 10390 | 20888 | 23516 | 26144 |
| 4833 | 7763 | 13010 | 15633 | 18261 | 4834 | 10391 | 20889 | 23517 | 26145 |
| 4835 | 7764 | 13011 | 15634 | 18262 | 4836 | 10392 | 20890 | 23518 | 26146 |
| 4837 | 7765 | 13012 | 15635 | 18263 | 4838 | 10393 | 20891 | 23519 | 26147 |
| 4839 | 7766 | 13013 | 15636 | 18264 | 4840 | 10394 | 20892 | 23520 | 26148 |
| 4841 | 7767 | 13014 | 15637 | 18265 | 4842 | 10395 | 20893 | 23521 | 26149 |
| 4843 | 7768 | 13015 | 15638 | 18266 | 4844 | 10396 | 20894 | 23522 | 26150 |
| 4845 | 7769 | 13016 | 15639 | 18267 | 4846 | 10397 | 20895 | 23523 | 26151 |
| 4847 | 7770 | 13017 | 15640 | 18268 | 4848 | 10398 | 20896 | 23524 | 26152 |
| 4849 | 7771 | 13018 | 15641 | 18269 | 4850 | 10399 | 20897 | 23525 | 26153 |
| 4851 | 7772 | 13019 | 15642 | 18270 | 4852 | 10400 | 20898 | 23526 | 26154 |
| 4853 | 7773 | 13020 | 15643 | 18271 | 4854 | 10401 | 20899 | 23527 | 26155 |
| 4855 | 7774 | 13021 | 15644 | 18272 | 4856 | 10402 | 20900 | 23528 | 26156 |
| 4857 | 7775 | 13022 | 15645 | 18273 | 4858 | 10403 | 20901 | 23529 | 26157 |
| 4859 | 7776 | 13023 | 15646 | 18274 | 4860 | 10404 | 20902 | 23530 | 26158 |
| 4861 | 7777 | 13024 | 15647 | 18275 | 4862 | 10405 | 20903 | 23531 | 26159 |
| 4863 | 7778 | 13025 | 15648 | 18276 | 4864 | 10406 | 20904 | 23532 | 26160 |
| 4865 | 7779 | 13026 | 15649 | 18277 | 4866 | 10407 | 20905 | 23533 | 26161 |
| 4867 | 7780 | 13027 | 15650 | 18278 | 4868 | 10408 | 20906 | 23534 | 26162 |
| 4869 | 7781 | 13028 | 15651 | 18279 | 4870 | 10409 | 20907 | 23535 | 26163 |
| 4871 | 7782 | 13029 | 15652 | 18280 | 4872 | 10410 | 20908 | 23536 | 26164 |
| 4873 | 7783 | 13030 | 15653 | 18281 | 4874 | 10411 | 20909 | 23537 | 26165 |
| 4875 | 7784 | 13031 | 15654 | 18282 | 4876 | 10412 | 20910 | 23538 | 26166 |
| 4877 | 7785 | 13032 | 15655 | 18283 | 4878 | 10413 | 20911 | 23539 | 26167 |
| 4879 | 7786 | 13033 | 15656 | 18284 | 4880 | 10414 | 20912 | 23540 | 26168 |
| 4881 | 7787 | 13034 | 15657 | 18285 | 4882 | 10415 | 20913 | 23541 | 26169 |
| 4883 | 7788 | 13035 | 15658 | 18286 | 4884 | 10416 | 20914 | 23542 | 26170 |
| 4885 | 7789 | 13036 | 15659 | 18287 | 4886 | 10417 | 20915 | 23543 | 26171 |
| 4887 | 7790 | 13037 | 15660 | 18288 | 4888 | 10418 | 20916 | 23544 | 26172 |
| 4889 | 7791 | 13038 | 15661 | 18289 | 4890 | 10419 | 20917 | 23545 | 26173 |
| 4891 | 7792 | 13039 | 15662 | 18290 | 4892 | 10420 | 20918 | 23546 | 26174 |
| 4893 | 7793 | 13040 | 15663 | 18291 | 4894 | 10421 | 20919 | 23547 | 26175 |
| 4895 | 7794 | 13041 | 15664 | 18292 | 4896 | 10422 | 20920 | 23548 | 26176 |
| 4897 | 7795 | 13042 | 15665 | 18293 | 4898 | 10423 | 20921 | 23549 | 26177 |
| 4899 | 7796 | 13043 | 15666 | 18294 | 4900 | 10424 | 20922 | 23550 | 26178 |
| 4901 | 7797 | 13044 | 15667 | 18295 | 4902 | 10425 | 20923 | 23551 | 26179 |
| 4903 | 7798 | 13045 | 15668 | 18296 | 4904 | 10426 | 20924 | 23552 | 26180 |
| 4905 | 7799 | 13046 | 15669 | 18297 | 4906 | 10427 | 20925 | 23553 | 26181 |
| 4907 | 7800 | 13047 | 15670 | 18298 | 4908 | 10428 | 20926 | 23554 | 26182 |
| 4909 | 7801 | 13048 | 15671 | 18299 | 4910 | 10429 | 20927 | 23555 | 26183 |
| 4911 | 7802 | 13049 | 15672 | 18300 | 4912 | 10430 | 20928 | 23556 | 26184 |
| 4913 | 7803 | 13050 | 15673 | 18301 | 4914 | 10431 | 20929 | 23557 | 26185 |
| 4915 | 7804 | 13051 | 15674 | 18302 | 4916 | 10432 | 20930 | 23558 | 26186 |
| 4917 | 7805 | 13052 | 15675 | 18303 | 4918 | 10433 | 20931 | 23559 | 26187 |
| 4919 | 7806 | 13053 | 15676 | 18304 | 4920 | 10434 | 20932 | 23560 | 26188 |
| 4921 | 7807 | 13054 | 15677 | 18305 | 4922 | 10435 | 20933 | 23561 | 26189 |
| 4923 | 7808 | 13055 | 15678 | 18306 | 4924 | 10436 | 20934 | 23562 | 26190 |
| 4925 | 7809 | 13056 | 15679 | 18307 | 4926 | 10437 | 20935 | 23563 | 26191 |
| 4927 | 7810 | 13057 | 15680 | 18308 | 4928 | 10438 | 20936 | 23564 | 26192 |
| 4929 | 7811 | 13058 | 15681 | 18309 | 4930 | 10439 | 20937 | 23565 | 26193 |
| 4931 | 7812 | 13059 | 15682 | 18310 | 4932 | 10440 | 20938 | 23566 | 26194 |
| 4933 | 7813 | 13060 | 15683 | 18311 | 4934 | 10441 | 20939 | 23567 | 26195 |
| 4935 | 7814 | 13061 | 15684 | 18312 | 4936 | 10442 | 20940 | 23568 | 26196 |
| 4937 | 7815 | 13062 | 15685 | 18313 | 4938 | 10443 | 20941 | 23569 | 26197 |
| 4939 | 7816 | 13063 | 15686 | 18314 | 4940 | 10444 | 20942 | 23570 | 26198 |
| 4941 | 7817 | 13064 | 15687 | 18315 | 4942 | 10445 | 20943 | 23571 | 26199 |
| 4943 | 7818 | 13065 | 15688 | 18316 | 4944 | 10446 | 20944 | 23572 | 26200 |
| 4945 | 7819 | 13066 | 15689 | 18317 | 4946 | 10447 | 20945 | 23573 | 26201 |
| 4947 | 7820 | 13067 | 15690 | 18318 | 4948 | 10448 | 20946 | 23574 | 26202 |
| 4949 | 7821 | 13068 | 15691 | 18319 | 4950 | 10449 | 20947 | 23575 | 26203 |
| 4951 | 7822 | 13069 | 15692 | 18320 | 4952 | 10450 | 20948 | 23576 | 26204 |
| 4953 | 7823 | 13070 | 15693 | 18321 | 4954 | 10451 | 20949 | 23577 | 26205 |
| 4955 | 7824 | 13071 | 15694 | 18322 | 4956 | 10452 | 20950 | 23578 | 26206 |
| 4957 | 7825 | 13072 | 15695 | 18323 | 4958 | 10453 | 20951 | 23579 | 26207 |
| 4959 | 7826 | 13073 | 15696 | 18324 | 4960 | 10454 | 20952 | 23580 | 26208 |
| 4961 | 7827 | 13074 | 15697 | 18325 | 4962 | 10455 | 20953 | 23581 | 26209 |
| 4963 | 7828 | 13075 | 15698 | 18326 | 4964 | 10456 | 20954 | 23582 | 26210 |
| 4965 | 7829 | 13076 | 15699 | 18327 | 4966 | 10457 | 20955 | 23583 | 26211 |
| 4967 | 7830 | 13077 | 15700 | 18328 | 4968 | 10458 | 20956 | 23584 | 26212 |
| 4969 | 7831 | 13078 | 15701 | 18329 | 4970 | 10459 | 20957 | 23585 | 26213 |
| 4971 | 7832 | 13079 | 15702 | 18330 | 4972 | 10460 | 20958 | 23586 | 26214 |
| 4973 | 7833 | 13080 | 15703 | 18331 | 4974 | 10461 | 20959 | 23587 | 26215 |
| 4975 | 7834 | 13081 | 15704 | 18332 | 4976 | 10462 | 20960 | 23588 | 26216 |
| 4977 | 7835 | 13082 | 15705 | 18333 | 4978 | 10463 | 20961 | 23589 | 26217 |
| 4979 | 7836 | 13083 | 15706 | 18334 | 4980 | 10464 | 20962 | 23590 | 26218 |
| 4981 | 7837 | 13084 | 15707 | 18335 | 4982 | 10465 | 20963 | 23591 | 26219 |
| 4983 | 7838 | 13085 | 15708 | 18336 | 4984 | 10466 | 20964 | 23592 | 26220 |
| 4985 | 7839 | 13086 | 15709 | 18337 | 4986 | 10467 | 20965 | 23593 | 26221 |
| 4987 | 7840 | 13087 | 15710 | 18338 | 4988 | 10468 | 20966 | 23594 | 26222 |
| 4989 | 7841 | 13088 | 15711 | 18339 | 4990 | 10469 | 20967 | 23595 | 26223 |
| 4991 | 7842 | 13089 | 15712 | 18340 | 4992 | 10470 | 20968 | 23596 | 26224 |
| 4993 | 7843 | 13090 | 15713 | 18341 | 4994 | 10471 | 20969 | 23597 | 26225 |
| 4995 | 7844 | 13091 | 15714 | 18342 | 4996 | 10472 | 20970 | 23598 | 26226 |
| 4997 | 7845 | 13092 | 15715 | 18343 | 4998 | 10473 | 20971 | 23599 | 26227 |
| 4999 | 7846 | 13093 | 15716 | 18344 | 5000 | 10474 | 20972 | 23600 | 26228 |
| 5001 | 7847 | 13094 | 15717 | 18345 | 5002 | 10475 | 20973 | 23601 | 26229 |
| 5003 | 7848 | 13095 | 15718 | 18346 | 5004 | 10476 | 20974 | 23602 | 26230 |
| 5005 | 7849 | 13096 | 15719 | 18347 | 5006 | 10477 | 20975 | 23603 | 26231 |
| 5007 | 7850 | 13097 | 15720 | 18348 | 5008 | 10478 | 20976 | 23604 | 26232 |
| 5009 | 7851 | 13098 | 15721 | 18349 | 5010 | 10479 | 20977 | 23605 | 26233 |
| 5011 | 7852 | 13099 | 15722 | 18350 | 5012 | 10480 | 20978 | 23606 | 26234 |
| 5013 | 7853 | 13100 | 15723 | 18351 | 5014 | 10481 | 20979 | 23607 | 26235 |
| 5015 | 7854 | 13101 | 15724 | 18352 | 5016 | 10482 | 20980 | 23608 | 26236 |
| 5017 | 7855 | 13102 | 15725 | 18353 | 5018 | 10483 | 20981 | 23609 | 26237 |
| 5019 | 7856 | 13103 | 15726 | 18354 | 5020 | 10484 | 20982 | 23610 | 26238 |
| 5021 | 7857 | 13104 | 15727 | 18355 | 5022 | 10485 | 20983 | 23611 | 26239 |
| 5023 | 7858 | 13105 | 15728 | 18356 | 5024 | 10486 | 20984 | 23612 | 26240 |
| 5025 | 7859 | 13106 | 15729 | 18357 | 5026 | 10487 | 20985 | 23613 | 26241 |
| 5027 | 7860 | 13107 | 15730 | 18358 | 5028 | 10488 | 20986 | 23614 | 26242 |
| 5029 | 7861 | 13108 | 15731 | 18359 | 5030 | 10489 | 20987 | 23615 | 26243 |
| 5031 | 7862 | 13109 | 15732 | 18360 | 5032 | 10490 | 20988 | 23616 | 26244 |
| 5033 | 7863 | 13110 | 15733 | 18361 | 5034 | 10491 | 20989 | 23617 | 26245 |
| 5035 | 7864 | 13111 | 15734 | 18362 | 5036 | 10492 | 20990 | 23618 | 26246 |
| 5037 | 7865 | 13112 | 15735 | 18363 | 5038 | 10493 | 20991 | 23619 | 26247 |
| 5039 | 7866 | 13113 | 15736 | 18364 | 5040 | 10494 | 20992 | 23620 | 26248 |
| 5041 | 7867 | 13114 | 15737 | 18365 | 5042 | 10495 | 20993 | 23621 | 26249 |
| 5043 | 7868 | 13115 | 15738 | 18366 | 5044 | 10496 | 20994 | 23622 | 26250 |
| 5045 | 7869 | 13116 | 15739 | 18367 | 5046 | 10497 | 20995 | 23623 | 26251 |
| 5047 | 7870 | 13117 | 15740 | 18368 | 5048 | 10498 | 20996 | 23624 | 26252 |
| 5049 | 7871 | 13118 | 15741 | 18369 | 5050 | 10499 | 20997 | 23625 | 26253 |
| 5051 | 7872 | 13119 | 15742 | 18370 | 5052 | 10500 | 20998 | 23626 | 26254 |
| 5053 | 7873 | 13120 | 15743 | 18371 | 5054 | 10501 | 20999 | 23627 | 26255 |
| 5055 | 7874 | 13121 | 15744 | 18372 | 5056 | 10502 | 21000 | 23628 | 26256 |
| 5057 | 7875 | 13122 | 15745 | 18373 | 5058 | 10503 | 21001 | 23629 | 26257 |
| 5059 | 7876 | 13123 | 15746 | 18374 | 5060 | 10504 | 21002 | 23630 | 26258 |
| 5061 | 7877 | 13124 | 15747 | 18375 | 5062 | 10505 | 21003 | 23631 | 26259 |
| 5063 | 7878 | 13125 | 15748 | 18376 | 5064 | 10506 | 21004 | 23632 | 26260 |
| 5065 | 7879 | 13126 | 15749 | 18377 | 5066 | 10507 | 21005 | 23633 | 26261 |
| 5067 | 7880 | 13127 | 15750 | 18378 | 5068 | 10508 | 21006 | 23634 | 26262 |
| 5069 | 7881 | 13128 | 15751 | 18379 | 5070 | 10509 | 21007 | 23635 | 26263 |
| 5071 | 7882 | 13129 | 15752 | 18380 | 5072 | 10510 | 21008 | 23636 | 26264 |
| 5073 | 7883 | 13130 | 15753 | 18381 | 5074 | 10511 | 21009 | 23637 | 26265 |
| 5075 | 7884 | 13131 | 15754 | 18382 | 5076 | 10512 | 21010 | 23638 | 26266 |
| 5077 | 7885 | 13132 | 15755 | 18383 | 5078 | 10513 | 21011 | 23639 | 26267 |
| 5079 | 7886 | 13133 | 15756 | 18384 | 5080 | 10514 | 21012 | 23640 | 26268 |
| 5081 | 7887 | 13134 | 15757 | 18385 | 5082 | 10515 | 21013 | 23641 | 26269 |
| 5083 | 7888 | 13135 | 15758 | 18386 | 5084 | 10516 | 21014 | 23642 | 26270 |
| 5085 | 7889 | 13136 | 15759 | 18387 | 5086 | 10517 | 21015 | 23643 | 26271 |
| 5087 | 7890 | 13137 | 15760 | 18388 | 5088 | 10518 | 21016 | 23644 | 26272 |
| 5089 | 7891 | 13138 | 15761 | 18389 | 5090 | 10519 | 21017 | 23645 | 26273 |
| 5091 | 7892 | 13139 | 15762 | 18390 | 5092 | 10520 | 21018 | 23646 | 26274 |
| 5093 | 7893 | 13140 | 15763 | 18391 | 5094 | 10521 | 21019 | 23647 | 26275 |
| 5095 | 7894 | 13141 | 15764 | 18392 | 5096 | 10522 | 21020 | 23648 | 26276 |
| 5097 | 7895 | 13142 | 15765 | 18393 | 5098 | 10523 | 21021 | 23649 | 26277 |
| 5099 | 7896 | 13143 | 15766 | 18394 | 5100 | 10524 | 21022 | 23650 | 26278 |
| 5101 | 7897 | 13144 | 15767 | 18395 | 5102 | 10525 | 21023 | 23651 | 26279 |
| 5103 | 7898 | 13145 | 15768 | 18396 | 5104 | 10526 | 21024 | 23652 | 26280 |
| 5105 | 7899 | 13146 | 15769 | 18397 | 5106 | 10527 | 21025 | 23653 | 26281 |
| 5107 | 7900 | 13147 | 15770 | 18398 | 5108 | 10528 | 21026 | 23654 | 26282 |
| 5109 | 7901 | 13148 | 15771 | 18399 | 5110 | 10529 | 21027 | 23655 | 26283 |
| 5111 | 7902 | 13149 | 15772 | 18400 | 5112 | 10530 | 21028 | 23656 | 26284 |
| 5113 | 7903 | 13150 | 15773 | 18401 | 5114 | 10531 | 21029 | 23657 | 26285 |
| 5115 | 7904 | 13151 | 15774 | 18402 | 5116 | 10532 | 21030 | 23658 | 26286 |
| 5117 | 7905 | 13152 | 15775 | 18403 | 5118 | 10533 | 21031 | 23659 | 26287 |
| 5119 | 7906 | 13153 | 15776 | 18404 | 5120 | 10534 | 21032 | 23660 | 26288 |
| 5121 | 7907 | 13154 | 15777 | 18405 | 5122 | 10535 | 21033 | 23661 | 26289 |
| 5123 | 7908 | 13155 | 15778 | 18406 | 5124 | 10536 | 21034 | 23662 | 26290 |
| 5125 | 7909 | 13156 | 15779 | 18407 | 5126 | 10537 | 21035 | 23663 | 26291 |
| 5127 | 7910 | 13157 | 15780 | 18408 | 5128 | 10538 | 21036 | 23664 | 26292 |
| 5129 | 7911 | 13158 | 15781 | 18409 | 5130 | 10539 | 21037 | 23665 | 26293 |
| 5131 | 7912 | 13159 | 15782 | 18410 | 5132 | 10540 | 21038 | 23666 | 26294 |
| 5133 | 7913 | 13160 | 15783 | 18411 | 5134 | 10541 | 21039 | 23667 | 26295 |
| 5135 | 7914 | 13161 | 15784 | 18412 | 5136 | 10542 | 21040 | 23668 | 26296 |
| 5137 | 7915 | 13162 | 15785 | 18413 | 5138 | 10543 | 21041 | 23669 | 26297 |
| 5139 | 7916 | 13163 | 15786 | 18414 | 5140 | 10544 | 21042 | 23670 | 26298 |
| 5141 | 7917 | 13164 | 15787 | 18415 | 5142 | 10545 | 21043 | 23671 | 26299 |
| 5143 | 7918 | 13165 | 15788 | 18416 | 5144 | 10546 | 21044 | 23672 | 26300 |
| 5145 | 7919 | 13166 | 15789 | 18417 | 5146 | 10547 | 21045 | 23673 | 26301 |
| 5147 | 7920 | 13167 | 15790 | 18418 | 5148 | 10548 | 21046 | 23674 | 26302 |
| 5149 | 7921 | 13168 | 15791 | 18419 | 5150 | 10549 | 21047 | 23675 | 26303 |
| 5151 | 7922 | 13169 | 15792 | 18420 | 5152 | 10550 | 21048 | 23676 | 26304 |
| 5153 | 7923 | 13170 | 15793 | 18421 | 5154 | 10551 | 21049 | 23677 | 26305 |
| 5155 | 7924 | 13171 | 15794 | 18422 | 5156 | 10552 | 21050 | 23678 | 26306 |
| 5157 | 7925 | 13172 | 15795 | 18423 | 5158 | 10553 | 21051 | 23679 | 26307 |
| 5159 | 7926 | 13173 | 15796 | 18424 | 5160 | 10554 | 21052 | 23680 | 26308 |
| 5161 | 7927 | 13174 | 15797 | 18425 | 5162 | 10555 | 21053 | 23681 | 26309 |
| 5163 | 7928 | 13175 | 15798 | 18426 | 5164 | 10556 | 21054 | 23682 | 26310 |
| 5165 | 7929 | 13176 | 15799 | 18427 | 5166 | 10557 | 21055 | 23683 | 26311 |
| 5167 | 7930 | 13177 | 15800 | 18428 | 5168 | 10558 | 21056 | 23684 | 26312 |
| 5169 | 7931 | 13178 | 15801 | 18429 | 5170 | 10559 | 21057 | 23685 | 26313 |
| 5171 | 7932 | 13179 | 15802 | 18430 | 5172 | 10560 | 21058 | 23686 | 26314 |
| 5173 | 7933 | 13180 | 15803 | 18431 | 5174 | 10561 | 21059 | 23687 | 26315 |
| 5175 | 7934 | 13181 | 15804 | 18432 | 5176 | 10562 | 21060 | 23688 | 26316 |
| 5177 | 7935 | 13182 | 15805 | 18433 | 5178 | 10563 | 21061 | 23689 | 26317 |
| 5179 | 7936 | 13183 | 15806 | 18434 | 5180 | 10564 | 21062 | 23690 | 26318 |
| 5181 | 7937 | 13184 | 15807 | 18435 | 5182 | 10565 | 21063 | 23691 | 26319 |
| 5183 | 7938 | 13185 | 15808 | 18436 | 5184 | 10566 | 21064 | 23692 | 26320 |
| 5185 | 7939 | 13186 | 15809 | 18437 | 5186 | 10567 | 21065 | 23693 | 26321 |
| 5187 | 7940 | 13187 | 15810 | 18438 | 5188 | 10568 | 21066 | 23694 | 26322 |
| 5189 | 7941 | 13188 | 15811 | 18439 | 5190 | 10569 | 21067 | 23695 | 26323 |
| 5191 | 7942 | 13189 | 15812 | 18440 | 5192 | 10570 | 21068 | 23696 | 26324 |
| 5193 | 7943 | 13190 | 15813 | 18441 | 5194 | 10571 | 21069 | 23697 | 26325 |
| 5195 | 7944 | 13191 | 15814 | 18442 | 5196 | 10572 | 21070 | 23698 | 26326 |
| 5197 | 7945 | 13192 | 15815 | 18443 | 5198 | 10573 | 21071 | 23699 | 26327 |
| 5199 | 7946 | 13193 | 15816 | 18444 | 5200 | 10574 | 21072 | 23700 | 26328 |
| 5201 | 7947 | 13194 | 15817 | 18445 | 5202 | 10575 | 21073 | 23701 | 26329 |
| 5203 | 7948 | 13195 | 15818 | 18446 | 5204 | 10576 | 21074 | 23702 | 26330 |
| 5205 | 7949 | 13196 | 15819 | 18447 | 5206 | 10577 | 21075 | 23703 | 26331 |
| 5207 | 7950 | 13197 | 15820 | 18448 | 5208 | 10578 | 21076 | 23704 | 26332 |
| 5209 | 7951 | 13198 | 15821 | 18449 | 5210 | 10579 | 21077 | 23705 | 26333 |
| 5211 | 7952 | 13199 | 15822 | 18450 | 5212 | 10580 | 21078 | 23706 | 26334 |
| 5213 | 7953 | 13200 | 15823 | 18451 | 5214 | 10581 | 21079 | 23707 | 26335 |
| 5215 | 7954 | 13201 | 15824 | 18452 | 5216 | 10582 | 21080 | 23708 | 26336 |
| 5217 | 7955 | 13202 | 15825 | 18453 | 5218 | 10583 | 21081 | 23709 | 26337 |
| 5219 | 7956 | 13203 | 15826 | 18454 | 5220 | 10584 | 21082 | 23710 | 26338 |
| 5221 | 7957 | 13204 | 15827 | 18455 | 5222 | 10585 | 21083 | 23711 | 26339 |
| 5223 | 7958 | 13205 | 15828 | 18456 | 5224 | 10586 | 21084 | 23712 | 26340 |
| 5225 | 7959 | 13206 | 15829 | 18457 | 5226 | 10587 | 21085 | 23713 | 26341 |
| 5227 | 7960 | 13207 | 15830 | 18458 | 5228 | 10588 | 21086 | 23714 | 26342 |
| 5229 | 7961 | 13208 | 15831 | 18459 | 5230 | 10589 | 21087 | 23715 | 26343 |
| 5231 | 7962 | 13209 | 15832 | 18460 | 5232 | 10590 | 21088 | 23716 | 26344 |
| 5233 | 7963 | 13210 | 15833 | 18461 | 5234 | 10591 | 21089 | 23717 | 26345 |
| 5235 | 7964 | 13211 | 15834 | 18462 | 5236 | 10592 | 21090 | 23718 | 26346 |
| 5237 | 7965 | 13212 | 15835 | 18463 | 5238 | 10593 | 21091 | 23719 | 26347 |
| 5239 | 7966 | 13213 | 15836 | 18464 | 5240 | 10594 | 21092 | 23720 | 26348 |
| 5241 | 7967 | 13214 | 15837 | 18465 | 5242 | 10595 | 21093 | 23721 | 26349 |
| 5243 | 7968 | 13215 | 15838 | 18466 | 5244 | 10596 | 21094 | 23722 | 26350 |
| 5245 | 7969 | 13216 | 15839 | 18467 | 5246 | 10597 | 21095 | 23723 | 26351 |
| 5247 | 7970 | 13217 | 15840 | 18468 | 5248 | 10598 | 21096 | 23724 | 26352 |
| 5249 | 7971 | 13218 | 15841 | 18469 | 5250 | 10599 | 21097 | 23725 | 26353 |
| 5251 | 7972 | 13219 | 15842 | 18470 | 5252 | 10600 | 21098 | 23726 | 26354 |
| 5253 | 7973 | 13220 | 15843 | 18471 | 5254 | 10601 | 21099 | 23727 | 26355 |
| 5255 | 7974 | 13221 | 15844 | 18472 | 5256 | 10602 | 21100 | 23728 | 26356 |
| 5257 | 7975 | 13222 | 15845 | 18473 | 5258 | 10603 | 21101 | 23729 | 26357 |
| 5259 | 7976 | 13223 | 15846 | 18474 | 5260 | 10604 | 21102 | 23730 | 26358 |
| 5261 | 7977 | 13224 | 15847 | 18475 | 5262 | 10605 | 21103 | 23731 | 26359 |
| 5263 | 7978 | 13225 | 15848 | 18476 | 5264 | 10606 | 21104 | 23732 | 26360 |
| 5265 | 7979 | 13226 | 15849 | 18477 | 5266 | 10607 | 21105 | 23733 | 26361 |
| 5267 | 7980 | 13227 | 15850 | 18478 | 5268 | 10608 | 21106 | 23734 | 26362 |
| 5269 | 7981 | 13228 | 15851 | 18479 | 5270 | 10609 | 21107 | 23735 | 26363 |
| 5271 | 7982 | 13229 | 15852 | 18480 | 5272 | 10610 | 21108 | 23736 | 26364 |
| 5273 | 7983 | 13230 | 15853 | 18481 | 5274 | 10611 | 21109 | 23737 | 26365 |
| 5275 | 7984 | 13231 | 15854 | 18482 | 5276 | 10612 | 21110 | 23738 | 26366 |
| 5277 | 7985 | 13232 | 15855 | 18483 | 5278 | 10613 | 21111 | 23739 | 26367 |
| 5279 | 7986 | 13233 | 15856 | 18484 | 5280 | 10614 | 21112 | 23740 | 26368 |
| 5281 | 7987 | 13234 | 15857 | 18485 | 5282 | 10615 | 21113 | 23741 | 26369 |
| 5283 | 7988 | 13235 | 15858 | 18486 | 5284 | 10616 | 21114 | 23742 | 26370 |
| 5285 | 7989 | 13236 | 15859 | 18487 | 5286 | 10617 | 21115 | 23743 | 26371 |
| 5287 | 7990 | 13237 | 15860 | 18488 | 5288 | 10618 | 21116 | 23744 | 26372 |
| 5289 | 7991 | 13238 | 15861 | 18489 | 5290 | 10619 | 21117 | 23745 | 26373 |
| 5291 | 7992 | 13239 | 15862 | 18490 | 5292 | 10620 | 21118 | 23746 | 26374 |
| 5293 | 7993 | 13240 | 15863 | 18491 | 5294 | 10621 | 21119 | 23747 | 26375 |
| 5295 | 7994 | 13241 | 15864 | 18492 | 5296 | 10622 | 21120 | 23748 | 26376 |
| 5297 | 7995 | 13242 | 15865 | 18493 | 5298 | 10623 | 21121 | 23749 | 26377 |
| 5299 | 7996 | 13243 | 15866 | 18494 | 5300 | 10624 | 21122 | 23750 | 26378 |
| 5301 | 7997 | 13244 | 15867 | 18495 | 5302 | 10625 | 21123 | 23751 | 26379 |
| 5303 | 7998 | 13245 | 15868 | 18496 | 5304 | 10626 | 21124 | 23752 | 26380 |
| 5305 | 7999 | 13246 | 15869 | 18497 | 5306 | 10627 | 21125 | 23753 | 26381 |
| 5307 | 8000 | 13247 | 15870 | 18498 | 5308 | 10628 | 21126 | 23754 | 26382 |
| 5309 | 8001 | 13248 | 15871 | 18499 | 5310 | 10629 | 21127 | 23755 | 26383 |
| 5311 | 8002 | 13249 | 15872 | 18500 | 5312 | 10630 | 21128 | 23756 | 26384 |
| 5313 | 8003 | 13250 | 15873 | 18501 | 5314 | 10631 | 21129 | 23757 | 26385 |
| 5315 | 8004 | 13251 | 15874 | 18502 | 5316 | 10632 | 21130 | 23758 | 26386 |
| 5317 | 8005 | 13252 | 15875 | 18503 | 5318 | 10633 | 21131 | 23759 | 26387 |
| 5319 | 8006 | 13253 | 15876 | 18504 | 5320 | 10634 | 21132 | 23760 | 26388 |
| 5321 | 8007 | 13254 | 15877 | 18505 | 5322 | 10635 | 21133 | 23761 | 26389 |
| 5323 | 8008 | 13255 | 15878 | 18506 | 5324 | 10636 | 21134 | 23762 | 26390 |
| 5325 | 8009 | 13256 | 15879 | 18507 | 5326 | 10637 | 21135 | 23763 | 26391 |
| 5327 | 8010 | 13257 | 15880 | 18508 | 5328 | 10638 | 21136 | 23764 | 26392 |
| 5329 | 8011 | 13258 | 15881 | 18509 | 5330 | 10639 | 21137 | 23765 | 26393 |
| 5331 | 8012 | 13259 | 15882 | 18510 | 5332 | 10640 | 21138 | 23766 | 26394 |
| 5333 | 8013 | 13260 | 15883 | 18511 | 5334 | 10641 | 21139 | 23767 | 26395 |
| 5335 | 8014 | 13261 | 15884 | 18512 | 5336 | 10642 | 21140 | 23768 | 26396 |
| 5337 | 8015 | 13262 | 15885 | 18513 | 5338 | 10643 | 21141 | 23769 | 26397 |
| 5339 | 8016 | 13263 | 15886 | 18514 | 5340 | 10644 | 21142 | 23770 | 26398 |
| 5341 | 8017 | 13264 | 15887 | 18515 | 5342 | 10645 | 21143 | 23771 | 26399 |
| 5343 | 8018 | 13265 | 15888 | 18516 | 5344 | 10646 | 21144 | 23772 | 26400 |
| 5345 | 8019 | 13266 | 15889 | 18517 | 5346 | 10647 | 21145 | 23773 | 26401 |
| 5347 | 8020 | 13267 | 15890 | 18518 | 5348 | 10648 | 21146 | 23774 | 26402 |
| 5349 | 8021 | 13268 | 15891 | 18519 | 5350 | 10649 | 21147 | 23775 | 26403 |
| 5351 | 8022 | 13269 | 15892 | 18520 | 5352 | 10650 | 21148 | 23776 | 26404 |
| 5353 | 8023 | 13270 | 15893 | 18521 | 5354 | 10651 | 21149 | 23777 | 26405 |
| 5355 | 8024 | 13271 | 15894 | 18522 | 5356 | 10652 | 21150 | 23778 | 26406 |
| 5357 | 8025 | 13272 | 15895 | 18523 | 5358 | 10653 | 21151 | 23779 | 26407 |
| 5359 | 8026 | 13273 | 15896 | 18524 | 5360 | 10654 | 21152 | 23780 | 26408 |
| 5361 | 8027 | 13274 | 15897 | 18525 | 5362 | 10655 | 21153 | 23781 | 26409 |
| 5363 | 8028 | 13275 | 15898 | 18526 | 5364 | 10656 | 21154 | 23782 | 26410 |
| 5365 | 8029 | 13276 | 15899 | 18527 | 5366 | 10657 | 21155 | 23783 | 26411 |
| 5367 | 8030 | 13277 | 15900 | 18528 | 5368 | 10658 | 21156 | 23784 | 26412 |
| 5369 | 8031 | 13278 | 15901 | 18529 | 5370 | 10659 | 21157 | 23785 | 26413 |
| 5371 | 8032 | 13279 | 15902 | 18530 | 5372 | 10660 | 21158 | 23786 | 26414 |
| 5373 | 8033 | 13280 | 15903 | 18531 | 5374 | 10661 | 21159 | 23787 | 26415 |
| 5375 | 8034 | 13281 | 15904 | 18532 | 5376 | 10662 | 21160 | 23788 | 26416 |
| 5377 | 8035 | 13282 | 15905 | 18533 | 5378 | 10663 | 21161 | 23789 | 26417 |
| 5379 | 8036 | 13283 | 15906 | 18534 | 5380 | 10664 | 21162 | 23790 | 26418 |
| 5381 | 8037 | 13284 | 15907 | 18535 | 5382 | 10665 | 21163 | 23791 | 26419 |
| 5383 | 8038 | 13285 | 15908 | 18536 | 5384 | 10666 | 21164 | 23792 | 26420 |
| 5385 | 8039 | 13286 | 15909 | 18537 | 5386 | 10667 | 21165 | 23793 | 26421 |
| 5387 | 8040 | 13287 | 15910 | 18538 | 5388 | 10668 | 21166 | 23794 | 26422 |
| 5389 | 8041 | 13288 | 15911 | 18539 | 5390 | 10669 | 21167 | 23795 | 26423 |
| 5391 | 8042 | 13289 | 15912 | 18540 | 5392 | 10670 | 21168 | 23796 | 26424 |
| 5393 | 8043 | 13290 | 15913 | 18541 | 5394 | 10671 | 21169 | 23797 | 26425 |
| 5395 | 8044 | 13291 | 15914 | 18542 | 5396 | 10672 | 21170 | 23798 | 26426 |
| 5397 | 8045 | 13292 | 15915 | 18543 | 5398 | 10673 | 21171 | 23799 | 26427 |
| 5399 | 8046 | 13293 | 15916 | 18544 | 5400 | 10674 | 21172 | 23800 | 26428 |
| 5401 | 8047 | 13294 | 15917 | 18545 | 5402 | 10675 | 21173 | 2380 | 26429 |
| 5403 | 8048 | 13295 | 15918 | 18546 | 5404 | 10676 | 21174 | 23802 | 26430 |
| 5405 | 8049 | 13296 | 15919 | 18547 | 5406 | 10677 | 21175 | 23803 | 26431 |
| 5407 | 8050 | 13297 | 15920 | 18548 | 5408 | 10678 | 21176 | 23804 | 26432 |
| 5409 | 8051 | 13298 | 15921 | 18549 | 5410 | 10679 | 21177 | 23805 | 26433 |
| 5411 | 8052 | 13299 | 15922 | 18550 | 5412 | 10680 | 21178 | 23806 | 26434 |
| 5413 | 8053 | 13300 | 15923 | 18551 | 5414 | 10681 | 21179 | 23807 | 26435 |
| 5415 | 8054 | 13301 | 15924 | 18552 | 5416 | 10682 | 21180 | 23808 | 26436 |
| 5417 | 8055 | 13302 | 15925 | 18553 | 5418 | 10683 | 21181 | 23809 | 26437 |
| 5419 | 8056 | 13303 | 15926 | 18554 | 5420 | 10684 | 21182 | 23810 | 26438 |
| 5421 | 8057 | 13304 | 15927 | 18555 | 5422 | 10685 | 21183 | 23811 | 26439 |
| 5423 | 8058 | 13305 | 15928 | 18556 | 5424 | 10686 | 21184 | 23812 | 26440 |
| 5425 | 8059 | 13306 | 15929 | 18557 | 5426 | 10687 | 21185 | 23813 | 26441 |
| 5427 | 8060 | 13307 | 15930 | 18558 | 5428 | 10688 | 21186 | 23814 | 26442 |
| 5429 | 8061 | 13308 | 15931 | 18559 | 5430 | 10689 | 21187 | 23815 | 26443 |
| 5431 | 8062 | 13309 | 15932 | 18560 | 5432 | 10690 | 21188 | 23816 | 26444 |
| 5433 | 8063 | 13310 | 15933 | 18561 | 5434 | 10691 | 21189 | 23817 | 26445 |
| 5435 | 8064 | 13311 | 15934 | 18562 | 5436 | 10692 | 21190 | 23818 | 26446 |

1. A recombinant antibody, wherein the antibody comprises a light chain variable region (VL) that comprises a light chain complementarity determining region (CDRL)1, CDRL2, and CDRL3 and/or a heavy chain variable region (VH) that comprises a heavy chain complementarity determining region (CDRH)1, CDRH2, and CDRH3, wherein:
CDRH3 comprises an amino acid sequence at least 60% identical to SEQ ID NOs: 109-126; and
CDRL3 comprises an amino acid sequence at least 60% identical to SEQ ID NOs: 163-180.

2. The recombinant antibody of claim 1, wherein CDRH3 comprises at least one amino acid substitution when compared to SEQ ID NOs: 109-126.

3. The recombinant antibody of claim 1, wherein CDRL3 comprises at least one amino acid substitution when compared to SEQ ID NOs: 163-180.

4. The recombinant antibody of claim 1, wherein:
CDRH1 comprises an amino acid sequence at least 60% identical to SEQ ID NOs: 73-90; and/or
CDRL1 comprises an amino acid sequence at least 60% identical to SEQ ID NOs: 127-144.

5. The recombinant antibody of claim 1, wherein CDRH1 comprises at least one amino acid substitution when compared to SEQ ID NOs: 73-90.

6. The recombinant antibody of claim 1, wherein CDRL1 comprises at least one amino acid substitution when compared to SEQ ID NOs: 127-144.

7. The recombinant antibody of claim 1, wherein:
CDRH2 comprises an amino acid sequence at least 60% identical to SEQ ID NOs: 91-108; and/or
CDRL2 comprises an amino acid sequence at least 60% identical to SEQ ID NOs: 145-162.

8. The recombinant antibody of claim 1, wherein CDRH2 comprises at least one amino acid substitution when compared to SEQ ID NOs: 91-108.

9. The recombinant antibody of claim 1, wherein CDRL2 comprises at least one amino acid substitution when compared to SEQ ID NOs: 145-162.

10. The recombinant antibody of claim 1, wherein VH comprises an amino acid sequence selected from the group consisting of SEQ ID NOs: 37-54.

11. The recombinant antibody of claim 1, wherein VL comprises an amino acid sequence selected from the group consisting of SEQ ID NOs: 55-72.

12. The recombinant antibody of claim 1, wherein the antibody comprises a light chain variable region (VL) that comprises a light chain complementarity determining region (CDRL)1, CDRL2, and CDRL3 and a heavy chain variable region (VH) that comprises a heavy chain complementarity determining region (CDRH)1, CDRH2, and CDRH3, wherein:
CDRH1 is SEQ ID NO:73,
CDRH2 is SEQ ID NO:91,
CDRH3 is SEQ ID NO:109,
CDRL1 is SEQ ID NO:127,
CDRL2 is SEQ ID NO:145, and
CDRL3 is SEQ ID NO:163;
CDRH1 is SEQ ID NO:74,
CDRH2 is SEQ ID NO:92,
CDRH3 is SEQ ID NO:110,
CDRL1 is SEQ ID NO:128,
CDRL2 is SEQ ID NO:146, and
CDRL3 is SEQ ID NO:164;
CDRH1 is SEQ ID NO:75,
CDRH2 is SEQ ID NO:93,
CDRH3 is SEQ ID NO:111,
CDRL1 is SEQ ID NO:129,
CDRL2 is SEQ ID NO:147, and
CDRL3 is SEQ ID NO:165;
CDRH1 is SEQ ID NO:76,
CDRH2 is SEQ ID NO:94,
CDRH3 is SEQ ID NO:112,
CDRL1 is SEQ ID NO:130,
CDRL2 is SEQ ID NO:148, and
CDRL3 is SEQ ID NO:166;
CDRH1 is SEQ ID NO:77,
CDRH2 is SEQ ID NO:95,
CDRH3 is SEQ ID NO:113,
CDRL1 is SEQ ID NO:131,
CDRL2 is SEQ ID NO:149, and
CDRL3 is SEQ ID NO:167;
CDRH1 is SEQ ID NO:78,
CDRH2 is SEQ ID NO:96,
CDRH3 is SEQ ID NO:114,
CDRL1 is SEQ ID NO:132,
CDRL2 is SEQ ID NO:150, and
CDRL3 is SEQ ID NO:168;
CDRH1 is SEQ ID NO:79,
CDRH2 is SEQ ID NO:97,
CDRH3 is SEQ ID NO:115,
CDRL1 is SEQ ID NO:133,
CDRL2 is SEQ ID NO:151, and
CDRL3 is SEQ ID NO:169;
CDRH1 is SEQ ID NO:80,
CDRH2 is SEQ ID NO:98,
CDRH3 is SEQ ID NO:116,
CDRL1 is SEQ ID NO:134,
CDRL2 is SEQ ID NO:152, and
CDRL3 is SEQ ID NO:170;
CDRH1 is SEQ ID NO:81,
CDRH2 is SEQ ID NO:99,
CDRH3 is SEQ ID NO:117,
CDRL1 is SEQ ID NO:135,
CDRL2 is SEQ ID NO:153, and
CDRL3 is SEQ ID NO:171;
CDRH1 is SEQ ID NO:82,
CDRH2 is SEQ ID NO:100,
CDRH3 is SEQ ID NO:118,
CDRL1 is SEQ ID NO:136,
CDRL2 is SEQ ID NO:154, and
CDRL3 is SEQ ID NO:172;
CDRH1 is SEQ ID NO:83,
CDRH2 is SEQ ID NO:101,
CDRH3 is SEQ ID NO:119,
CDRL1 is SEQ ID NO:137,
CDRL2 is SEQ ID NO:155, and
CDRL3 is SEQ ID NO:173;
CDRH1 is SEQ ID NO:84,
CDRH2 is SEQ ID NO:102,
CDRH3 is SEQ ID NO:120,
CDRL1 is SEQ ID NO:138,
CDRL2 is SEQ ID NO:156, and
CDRL3 is SEQ ID NO:174;
CDRH1 is SEQ ID NO:85,
CDRH2 is SEQ ID NO:103,
CDRH3 is SEQ ID NO:121,
CDRL1 is SEQ ID NO:139,
CDRL2 is SEQ ID NO:157, and
CDRL3 is SEQ ID NO:175;
CDRH1 is SEQ ID NO:86,
CDRH2 is SEQ ID NO:104,
CDRH3 is SEQ ID NO:122,
CDRL1 is SEQ ID NO:140,
CDRL2 is SEQ ID NO:158, and
CDRL3 is SEQ ID NO:176;
CDRH1 is SEQ ID NO:87,
CDRH2 is SEQ ID NO:105,
CDRH3 is SEQ ID NO:123,
CDRL1 is SEQ ID NO:141,
CDRL2 is SEQ ID NO:159, and
CDRL3 is SEQ ID NO:177;
CDRH1 is SEQ ID NO:88,
CDRH2 is SEQ ID NO:106,
CDRH3 is SEQ ID NO:124,
CDRL1 is SEQ ID NO:142,
CDRL2 is SEQ ID NO:160, and
CDRL3 is SEQ ID NO:178;
CDRH1 is SEQ ID NO:89,
CDRH2 is SEQ ID NO:107,
CDRH3 is SEQ ID NO:125,
CDRL1 is SEQ ID NO:143,
CDRL2 is SEQ ID NO:161, and
CDRL3 is SEQ ID NO:179;
or
CDRH1 is SEQ ID NO:90,
CDRH2 is SEQ ID NO:108,
CDRH3 is SEQ ID NO:126,
CDRL1 is SEQ ID NO:144,
CDRL2 is SEQ ID NO:162, and
CDRL3 is SEQ ID NO:180.

13.-29. (canceled)

30. A nucleic acid encoding the recombinant antibody of claim 1.

31. A recombinant expression cassette or plasmid comprising a sequence to express a recombinant antibody of claim 1.

32. A host cell comprising the expression cassette or the plasmid of claim 31.

33. A method of producing an antibody, comprising cultivating or maintaining the host cell of claim 32 under conditions to produce the antibody.

34. A method of treating a coronavirus infection in a subject, comprising administering to the subject a therapeutically effective amount of the recombinant antibody of claim 1.

35. The method of claim 34, where the coronavirus is SARS-CoV-2.

The application's sequence listing, which the Patent Office published only in electronic form, follows.

SEQUENCE LISTING (26455 sequences)

SEQ ID NO: 1 - DNA, 16 bp, Artificial Sequence
  Synthetic construct
aatccaggtgtttggt

SEQ ID NO: 2 - DNA, 16 bp, Artificial Sequence
  Synthetic construct
aatccaggtgtttggt

SEQ ID NO: 3 - DNA, 16 bp, Artificial Sequence
  Synthetic construct
acagccgcagtgacag

SEQ ID NO: 4 - DNA, 16 bp, Artificial Sequence
  Synthetic construct
acagccgcagtgacag

SEQ ID NO: 5 - DNA, 16 bp, Artificial Sequence
  Synthetic construct
acgccagcatcacgat

SEQ ID NO: 6 - DNA, 16 bp, Artificial Sequence
  Synthetic construct
acgccagcatcacgat

SEQ ID NO: 7 - DNA, 16 bp, Artificial Sequence
  Synthetic construct
actgagtcaagttgtc

SEQ ID NO: 8 - DNA, 16 bp, Artificial Sequence
  Synthetic construct
actgagtcaagttgtc

SEQ ID NO: 9 - DNA, 16 bp, Artificial Sequence
  Synthetic construct
agtgggacacgtaagg

SEQ ID NO: 10 - DNA, 16 bp, Artificial Sequence
  Synthetic construct
agtgggacacgtaagg

SEQ ID NO: 11 - DNA, 16 bp, Artificial Sequence
  Synthetic construct
cattcgcagtctcggc

SEQ ID NO: 12 - DNA, 16 bp, Artificial Sequence
  Synthetic construct
cattcgcagtctcggc

SEQ ID NO: 13 - DNA, 16 bp, Artificial Sequence
  Synthetic construct
cgagcacgtcttctcg

SEQ ID NO: 14 - DNA, 16 bp, Artificial Sequence
  Synthetic construct
cgagcacgtcttctcg

SEQ ID NO: 15 - DNA, 16 bp, Artificial Sequence
  Synthetic construct
ctgatcccattctcat

SEQ ID NO: 16 - DNA, 16 bp, Artificial Sequence
  Synthetic construct
ctgatcccattctcat

SEQ ID NO: 17 - DNA, 16 bp, Artificial Sequence
  Synthetic construct
gactacaagggcatgt

SEQ ID NO: 18 - DNA, 16 bp, Artificial Sequence
  Synthetic construct
gactacaagggcatgt

SEQ ID NO: 19 - DNA, 16 bp, Artificial Sequence
  Synthetic construct
gtactttgtgataaac

SEQ ID NO: 20 - DNA, 16 bp, Artificial Sequence
  Synthetic construct
gtactttgtgataaac

SEQ ID NO: 21 - DNA, 16 bp, Artificial Sequence
  Synthetic construct
taggcatgtaaacctc

SEQ ID NO: 22 - DNA, 16 bp, Artificial Sequence
  Synthetic construct
taggcatgtaaacctc

SEQ ID NO: 23 - DNA, 16 bp, Artificial Sequence
  Synthetic construct
tcaacgacagacgtag

SEQ ID NO: 24 - DNA, 16 bp, Artificial Sequence
  Synthetic construct
tcaacgacagacgtag

SEQ ID NO: 25 - DNA, 16 bp, Artificial Sequence
  Synthetic construct
tcagatggttatcggt

SEQ ID NO: 26 - DNA, 16 bp, Artificial Sequence
  Synthetic construct
tcagatggttatcggt

SEQ ID NO: 27 - DNA, 16 bp, Artificial Sequence
  Synthetic construct
tcagcaatcatctgtt

SEQ ID NO: 28 - DNA, 16 bp, Artificial Sequence
  Synthetic construct
tcagcaatcatctgtt

SEQ ID NO: 29 - DNA, 16 bp, Artificial Sequence
  Synthetic construct
ttctccttctactatc

SEQ ID NO: 30 - DNA, 16 bp, Artificial Sequence
  Synthetic construct
ttctccttctactatc

SEQ ID NO: 31 - DNA, 16 bp, Artificial Sequence
  Synthetic construct
taggcatgtaaacctc

SEQ ID NO: 32 - DNA, 16 bp, Artificial Sequence
  Synthetic construct
taggcatgtaaacctc

SEQ ID NO: 33 - DNA, 16 bp, Artificial Sequence
  Synthetic construct
acgataccaatgccat

SEQ ID NO: 34 - DNA, 16 bp, Artificial Sequence
  Synthetic construct
acgataccaatgccat

SEQ ID NO: 35 - DNA, 16 bp, Artificial Sequence
  Synthetic construct
tgccaaaagcggatca

SEQ ID NO: 36 - DNA, 16 bp, Artificial Sequence
  Synthetic construct
tgccaaaagcggatca

SEQ ID NO: 37 - protein, 127 aa, Artificial Sequence
  Synthetic construct
QVQLVQSGAEVQKPGASVKVSCKASGYRFDIFDINWVRQASGQGPEWMGWMNPNSGNTGYAHKFQGRVTMTRDSSTNTAYMELSSLTFEDTAVYYCARDRVERTGNVGFGYYAMDVWGQGTTVIVSS

SEQ ID NO: 38 - protein, 118 aa, Artificial Sequence
  Synthetic construct
EVQLVESGGGFIQPGGSVRLSCSASGFNVYDNYFSWVRQAPGRGPEWVSVIYRDGATRYAESVQGRFTMFRDNSRKTLYLQMNRLKAGDTAVYFCALGRKDYGDYYRWGQGTLVTVSS

SEQ ID NO: 39 - protein, 117 aa, Artificial Sequence
  Synthetic construct
QLRLQASGPGLVRPSVTLSLTCAVSGASVKSDKSYWGWFRQSPGKGLASIATIYYNGNVYYNPSLKSRVTLSLDTSTNQLSLKMRSVTAADTAIYYCARLDYSKQTWGQGILVTVSS

SEQ ID NO: 40 - protein, 122 aa, Artificial Sequence
  Synthetic construct
EVQLVESGGGLVPPGGSLGLSCAASGFTFSEFWMSWVRQTPGKGLEWVANIGQDGNSKYYVDSVKGRFTISRDNAKSSLNLQMNSLRAEDTGVYYCARVTIVSSFTNRFDPWGQGVLVTVSS

SEQ ID NO: 41 - protein, 130 aa, Artificial Sequence
  Synthetic construct
QVQLVQSGSELKKPGASVKVSCKASGYTFTSYALNWVRQAPGQGLEWMGWININTGKPTYAQGFTGRFVLSLDTSVSTAYLQISSLKAEDTAVYYCARDFDLVVPSATYPPFYYHGMDVWGQGTTVTVSS

SEQ ID NO: 42 - protein, 127 aa, Artificial Sequence
  Synthetic construct
EVQLVQSGAEVKKPGESLRISCKGSGYRFITYWISWVRQMPGRGLEWMGKIDPSDSSTNYSPSFQGHVAISVDKSFNTAYLQWSRLNTSDTAMYYCAAGPTGYDLLTGQYFPYFNYWAQGTLVTVSS

SEQ ID NO: 43 - protein, 112 aa, Artificial Sequence
  Synthetic construct
EVLLVESGGGVIQPGASLRLSCEPSGTTVSSNFWTWVRQAPGRRLEHVAIIYSGDATYYADSVKGRFTIFRDNSKNMLFLEMNNLKVADSAIYFCVRGRTYWGQGTLVSVSS

SEQ ID NO: 44 - protein, 123 aa, Artificial Sequence
  Synthetic construct
QVQLQESGPGLVKPSETLSLTCIISGGSVSSGSYYWSWIRQPPGKGLEYIGYIFYSGNTNYNPSLKSRVTISVDTSKNQFSLRLTSVTAADTAVYHCASLPTYGSGRWGIDSWGQGTLVTVSS

SEQ ID NO: 45 - protein, 121 aa, Artificial Sequence
  Synthetic construct
QVQLVESGGGVVQPGRSLRLSCAASGFTFSVYPMHWVRQAPGRGLEWVAVISYDGSNQYYADSVRGRFTISRDNSKNTLYLHMNSLRPEDTAVFYCARDRSATYYGPFDYWGQGTLVTVSS

SEQ ID NO: 46 - protein, 122 aa, Artificial Sequence
  Synthetic construct
EVHLVESGGGLIQPGGSLKLSCAASGFAVSGYYMIWVRQAPGKGLEWVSVIFTSGRTYYADSAKGRFTISRDSSKNTLYLQMDSLRAEDTAVYYCAGFLPVYNNGWSYFDSWGQGTLVTVSS

SEQ ID NO: 47 - protein, 120 aa, Artificial Sequence
  Synthetic construct
EGQLLESGGGLVQPGGSLRLSCEASGFTFSRYAMTWIRQAPGKGLEWVSSITAIPYDRFYADSVKGRFTISRDDSKNMVYLQANSLRVEDTAVYYCVKMRTAVVGVTPLWGQGTLVTVSS

SEQ ID NO: 48 - protein, 132 aa, Artificial Sequence
  Synthetic construct
QLQLQESGPGLVKPSETLFLFCSVSGGSISISTHYWEWIRQPPGKGLEWIGSFYSSGTTYYNPSLKGRVTISADTSKSQISLKMSSVTAADTAVYYCARRPQYLLLSMTTGRRHHDFVMDVWGQGTTVTVSS

SEQ ID NO: 49 - protein, 119 aa, Artificial Sequence
  Synthetic construct
QVQLVQSGAEVKKDGSSVKVSCEASGGTFSDYAISWVRQAPGQGLEWMGRIIPILGITNYAQQFQTRVTITADKSTSAVYMELSSLRSKDTAIYYCAREVNYYSAFDDWGQGTQVTVSS

SEQ ID NO: 50 - protein, 118 aa, Artificial Sequence
  Synthetic construct
GVQLVESGGGLVQPGGSLRLSCSASGFTFSSYAMHWVRQAPGKGLEYVSGINVNGYDTYYADSVKGRFTISRDNSKNTLFLQMISLTAEDTALYYCVKEDTPLVFDSWGQGTLVTVSS

SEQ ID NO: 51 - protein, 126 aa, Artificial Sequence
  Synthetic construct
EVPLLESGGGLVQPGGSLRLSCVASGFPFSSFALSWVRQAPGKGLEWVSTINTNGGTTYYLDSVKGRFTVSRDNSKNTLFLQMSSLRAEDTAIYYCAKDLLSHSGTYSAGSTFDYWGQGTLVIVSS

SEQ ID NO: 52 - protein, 125 aa, Artificial Sequence
  Synthetic construct
EGQLLESGGGLVQPGGSLRLSCEASGFTFSRYAMTWIRQAPGKGLEWVSSITAIPYDRFYADSLYADSVKGRFTISRDDSKNMVYLQANSLRVEDTAVYYCVKMRTAVVGVTPLWGQGTLVTVSS

SEQ ID NO: 53 - protein, 121 aa, Artificial Sequence
  Synthetic construct
QVQLQESGPGLVKPSQTLSLTCTVSGVSISSGRDYWSWIRQAAGKGLEWIGRIYTTGSANYNHSLKSRVSISLDTSKNQFSLKMTSMTAADTAVYYCARGNDYSNYPLDYWGQGTLVTVSS

SEQ ID NO: 54 - protein, 124 aa, Artificial Sequence
  Synthetic construct
QVQLGQSGAELKKPGASVKISCKASGYTFTNYDINWVRQATGQGLEWMGWMNPNSGNTGYAHKFQGRVSMTRDTSISTAFMELSSLRSDDTAVYYCARGLESKLGYGYGGSDYWGQGTLVTVSS

SEQ ID NO: 55 - protein, 108 aa, Artificial Sequence
  Synthetic construct
DIQMTQSPSSLSASVGDRVTITCRASQSITNYLNWYQQRPGKAPRLLIYAASSLQSGVPSRFSGSGSGTDFTLTISSLQPEDFGTFYCQQTYSSPSYTFGQGTKLEMK

SEQ ID NO: 56 - protein, 110 aa, Artificial Sequence
  Synthetic construct
EIVLTQSPGTLSLSPGETATLSCRAGQSVRSRFLAWYQQKPGQSPRVLIYGASNRASGVPDRFSGSGSGTDFTLTITRLEPEDVAVYYCQQYAPSPPWYIFGQGTKLEIK

SEQ ID NO: 57 - protein, 112 aa, Artificial Sequence
  Synthetic construct
DIVMTQSPRSLPVTPGEPASISCRSSQSLVHTNGYNYLDWYLQKPGQSPQLLIYLASNRASGVPGRFSGSGSGTDFTLKISRVEADDVGVYYCMQALQTPLTFGGGTRLEIK

SEQ ID NO: 58 - protein, 103 aa, Artificial Sequence
  Synthetic construct
AIQLTQSPSSLSASIGDRVTFTCRASQDISNFLAWYQQKPGEPPKLLIYSVSTLQSGVPSRFSGSGSGTDFTLTISSLQSEDLATYYCQHRVTFGPGTKVGIK

SEQ ID NO: 59 - protein, 110 aa, Artificial Sequence
  Synthetic construct
SSELTQDPAVSVALGQTVRITCQGDSLRTYYASWYQQKPGQAPILVIYGKNKRPSGIPDRFSGSSSGNTASLTITGAQAEDEADYYCNSRDSSGDQTFYVFGTGTQVTVL

SEQ ID NO: 60 - protein, 110 aa, Artificial Sequence
  Synthetic construct
NFMLTQPHSVSESPGKTVSISCTRSSGSIASKFMQWYQQRPGSAPTILIYEDNLRPSGVPDRFSGSIDTSSNSALLTISGLKTEDEADYYCQSYHGSDVVFGGGTKLTVL

SEQ ID NO: 61 - protein, 107 aa, Artificial Sequence
  Synthetic construct
EIVMTQSPATLSLSPGDTATLSCRASQSVASNLAWYQQKPGQAPRLLVSGASTRATGIPPRFSGSGSGTEFTLTISSLQSEDFAVYYCQQYNRWLWTFGQGTKVEIK

SEQ ID NO: 62 - protein, 107 aa, Artificial Sequence
  Synthetic construct
DIQMTQSPSSVSASVGDRVTITCRASQDISIWLTWYQQRPGKAPKLLIYAASALQRGVPSRFSGSGSGTDFTLTISSLQPEDFTTYFCQQGNSFPLTFGGGTKVEIK

SEQ ID NO: 63 - protein, 109 aa, Artificial Sequence
  Synthetic construct
SSELTQDPAVSVALGQTVRITCQGDSLRSYSASWYQQKPSQAPVLVIYANNNRPSGIPDRFSGSNSGNTASLTITGAQAEDEADYYCNSRDNSGNHPVIFGGGTTLTVL

SEQ ID NO: 64 - protein, 110 aa, Artificial Sequence
  Synthetic construct
QSVLTQPPSASGTPGQRVTISCSGSRPNIGNNKVNWYQQLPGTAPKVLIYGNNQRPSGVPDRFSGSKSATSASLAISGLQSEDEADYYCAVWDDSLNGPVFGGGTKLTVL

SEQ ID NO: 65 - protein, 107 aa, Artificial Sequence
  Synthetic construct
AIQVTQSPSSLSASVGDRITITCRTSQGIRDDLGWYQQKPGKAPTLLIYGATNLQSGVPSRFSGSESGTDFTLTISSLQPEDFATYYCLQDYNYLFSFGPGTKVDIK

SEQ ID NO: 66 - protein, 113 aa, Artificial Sequence
  Synthetic construct
DIVMTQSPDSLAVSLGERATITCKSSQSVLFGSNNENYLAWYQKKPGQPPKLLIYWASTRESGVPDRFSGSGSGTDFTLTISSLQAEDVAVYYCQQYYNTPRTFGQGTKVEVK

SEQ ID NO: 67 - protein, 106 aa, Artificial Sequence
  Synthetic construct
EIVMTQSPDTLSVSPGERATLSCRASQNVSSNLAWYQQKPGQAPRLLIYDASTRATGIPARFSGSGSGTEFTLAISSLQSEDFAVYYCQQYNFWWTFGQGTKVDIK

SEQ ID NO: 68 - protein, 106 aa, Artificial Sequence
  Synthetic construct
DIQMTQSPSTLSASVGDRVTITCRASQFINSWLAWYQQKPGKAPKLLIYAASSLQSGVPSRFSGSGSGTEFTLTINSLQPDDFATYYCQQYDSYSTFGQGTKVEIK

SEQ ID NO: 69 - protein, 106 aa, Artificial Sequence
  Synthetic construct
DIQMTQSPSSLSASVGDRVTITCRASQSIGVYLNWYQQKPGKAPKLLIHATSNLQSGVPSRFSCSGSGTEFTLTISSLQPEDFATYYCQESYSTNTFGQGTKLEIK

SEQ ID NO: 70 - protein, 107 aa, Artificial Sequence; identical to SEQ ID NO: 65
  Synthetic construct

SEQ ID NO: 71 - protein, 110 aa, Artificial Sequence
  Synthetic construct
QSVLTQPPSVSAAPGQKVTISCSGSYSNIGTNYVSWYQQLPGTAPKLLVYDNNKRPSGIPDRFSASRSGSSASLDITGLQTGDEADYYCGTWDGALSVGLFGTGTKVTVL

SEQ ID NO: 72 - protein, 107 aa, Artificial Sequence
  Synthetic construct
DIQMTQSPSSLSASVGDRVTITCRASQSISSYLNWYQQKSGEAPSLVIYAASRLQSGVPSRFSGSGSGTDFTLTISGLQPEDFATYYCQQTYSLLWTFGQGTRVEIK

SEQ ID NO: 73 - protein, 8 aa, Artificial Sequence
  Synthetic construct
GYRFDIFD

SEQ ID NO: 74 - protein, 8 aa, Artificial Sequence
  Synthetic construct
GFNVYDNY

SEQ ID NO: 75 - protein, 10 aa, Artificial Sequence
  Synthetic construct
GASVKSDKSY

SEQ ID NO: 76 - protein, 8 aa, Artificial Sequence
  Synthetic construct
GFTFSEFW

SEQ ID NO: 77 - protein, 8 aa, Artificial Sequence
  Synthetic construct
GYTFTSYA

SEQ ID NO: 78 - protein, 8 aa, Artificial Sequence
  Synthetic construct
GYRFITYW

SEQ ID NO: 79 - protein, 8 aa, Artificial Sequence
  Synthetic construct
GTTVSSNF

SEQ ID NO: 80 - protein, 10 aa, Artificial Sequence
  Synthetic construct
GGSVSSGSYY

SEQ ID NO: 81 - protein, 8 aa, Artificial Sequence
  Synthetic construct
GFTFSVYP

SEQ ID NO: 82 - protein, 8 aa, Artificial Sequence
  Synthetic construct
GFAVSGYY

SEQ ID NO: 83 - protein, 8 aa, Artificial Sequence
  Synthetic construct
GFTFSRYA

SEQ ID NO: 84 - protein, 10 aa, Artificial Sequence
  Synthetic construct
GGSISISTHY

SEQ ID NO: 85 - protein, 8 aa, Artificial Sequence
  Synthetic construct
GGTFSDYA

SEQ ID NO: 86 - protein, 8 aa, Artificial Sequence
  Synthetic construct
GFTFSSYA

SEQ ID NO: 87 - protein, 8 aa, Artificial Sequence
  Synthetic construct
GFPFSSFA

SEQ ID NO: 88 - protein, 8 aa, Artificial Sequence
  Synthetic construct
GFTFSRYA

SEQ ID NO: 89 - protein, 10 aa, Artificial Sequence
  Synthetic construct
GVSISSGRDY

SEQ ID NO: 90 - protein, 8 aa, Artificial Sequence
  Synthetic construct
GYTFTNYD

SEQ ID NO: 91 - protein, 8 aa, Artificial Sequence
  Synthetic construct
MNPNSGNT

SEQ ID NO: 92 - protein, 7 aa, Artificial Sequence
  Synthetic construct
IYRDGAT

SEQ ID NO: 93 - protein, 7 aa, Artificial Sequence
  Synthetic construct
IYYNGNV

SEQ ID NO: 94 - protein, 8 aa, Artificial Sequence
  Synthetic construct
IGQDGNSK

SEQ ID NO: 95 - protein, 8 aa, Artificial Sequence
  Synthetic construct
ININTGKP

SEQ ID NO: 96 - protein, 8 aa, Artificial Sequence
  Synthetic construct
IDPSDSST

SEQ ID NO: 97 - protein, 7 aa, Artificial Sequence
  Synthetic construct
IYSGDAT

SEQ ID NO: 98 - protein, 7 aa, Artificial Sequence
  Synthetic construct
IFYSGNT

SEQ ID NO: 99 - protein, 8 aa, Artificial Sequence
  Synthetic construct
ISYDGSNQ

SEQ ID NO: 100 - protein, 7 aa, Artificial Sequence
  Synthetic construct
IFTSGRT

SEQ ID NO: 101 - protein, 8 aa, Artificial Sequence
  Synthetic construct
ITAIPYDR

SEQ ID NO: 102 - protein, 7 aa, Artificial Sequence
  Synthetic construct
FYSSGTT

SEQ ID NO: 103 - protein, 8 aa, Artificial Sequence
  Synthetic construct
IIPILGIT

SEQ ID NO: 104 - protein, 8 aa, Artificial Sequence
  Synthetic construct
INVNGYDT

SEQ ID NO: 105 - protein, 8 aa, Artificial Sequence
  Synthetic construct
INTNGGTT

SEQ ID NO: 106 - protein, 10 aa, Artificial Sequence
  Synthetic construct
ITAIPYDRFY

SEQ ID NO: 107 - protein, 7 aa, Artificial Sequence
  Synthetic construct
IYTTGSA

SEQ ID NO: 108 - protein, 8 aa, Artificial Sequence
  Synthetic construct
MNPNSGNT

SEQ ID NO: 109 - protein, 20 aa, Artificial Sequence
  Synthetic construct
ARDRVERTGNVGFGYYAMDV

SEQ ID NO: 110 - protein, 12 aa, Artificial Sequence
  Synthetic construct
ALGRKDYGDYYR

SEQ ID NO: 111 - protein, 9 aa, Artificial Sequence
  Synthetic construct
ARLDYSKQT

SEQ ID NO: 112 - protein, 15 aa, Artificial Sequence
  Synthetic construct
ARVTIVSSFTNRFDP

SEQ ID NO: 113 - protein, 23 aa, Artificial Sequence
  Synthetic construct
ARDFDLVVPSATYPPFYYHGMDV

SEQ ID NO: 114 - protein, 20 aa, Artificial Sequence
  Synthetic construct
AAGPTGYDLLTGQYFPYFNY

SEQ ID NO: 115 - protein, 6 aa, Artificial Sequence
  Synthetic construct
VRGRTY

SEQ ID NO: 116 - protein, 15 aa, Artificial Sequence
  Synthetic construct
ASLPTYGSGRWGIDS

SEQ ID NO: 117 - protein, 14 aa, Artificial Sequence
  Synthetic construct
ARDRSATYYGPFDY

SEQ ID NO: 118 - protein, 16 aa, Artificial Sequence
  Synthetic construct
AGFLPVYNNGWSYFDS

SEQ ID NO: 119 - protein, 13 aa, Artificial Sequence
  Synthetic construct
VKMRTAVVGVTPL

SEQ ID NO: 120 - protein, 24 aa, Artificial Sequence
  Synthetic construct
ARRPQYLLLSMTTGRRHHDFVMDV

SEQ ID NO: 121 - protein, 12 aa, Artificial Sequence
  Synthetic construct
AREVNYYSAFDD

SEQ ID NO: 122 - protein, 11 aa, Artificial Sequence
  Synthetic construct
VKEDTPLVFDS

SEQ ID NO: 123 - protein, 19 aa, Artificial Sequence
  Synthetic construct
AKDLLSHSGTYSAGSTFDY

SEQ ID NO: 124 - protein, 13 aa, Artificial Sequence
  Synthetic construct
VKMRTAVVGVTPL

SEQ ID NO: 125 - protein, 13 aa, Artificial Sequence
  Synthetic construct
ARGNDYSNYPLDY

SEQ ID NO: 126 - protein, 17 aa, Artificial Sequence
  Synthetic construct
ARGLESKLGYGYGGSDY

SEQ ID NO: 127 - protein, 6 aa, Artificial Sequence
  Synthetic construct
QSITNY

SEQ ID NO: 128 - protein, 7 aa, Artificial Sequence
  Synthetic construct
QSVRSRF

SEQ ID NO: 129 - protein, 11 aa, Artificial Sequence
  Synthetic construct
QSLVHTNGYNY

SEQ ID NO: 130 - protein, 6 aa, Artificial Sequence
  Synthetic construct
QDISNF

SEQ ID NO: 131 - protein, 6 aa, Artificial Sequence
  Synthetic construct
SLRTYY

SEQ ID NO: 132 - protein, 8 aa, Artificial Sequence
  Synthetic construct
SGSIASKF

SEQ ID NO: 133 - protein, 6 aa, Artificial Sequence
  Synthetic construct
QSVASN

SEQ ID NO: 134 - protein, 6 aa, Artificial Sequence
  Synthetic construct
QDISIW

SEQ ID NO: 135 - protein, 6 aa, Artificial Sequence
  Synthetic construct
SLRSYS

SEQ ID NO: 136 - protein, 8 aa, Artificial Sequence
  Synthetic construct
RPNIGNNK

SEQ ID NO: 137 - protein, 6 aa, Artificial Sequence
  Synthetic construct
QGIRDD

SEQ ID NO: 138 - protein, 12 aa, Artificial Sequence
  Synthetic construct
QSVLFGSNNENY

SEQ ID NO: 139 - protein, 6 aa, Artificial Sequence
  Synthetic construct
QNVSSN

SEQ ID NO: 140 - protein, 6 aa, Artificial Sequence
  Synthetic construct
QFINSW

SEQ ID NO: 141 - protein, 6 aa, Artificial Sequence
  Synthetic construct
QSIGVY

SEQ ID NO: 142 - protein, 6 aa, Artificial Sequence
  Synthetic construct
QGIRDD

SEQ ID NO: 143 - protein, 8 aa, Artificial Sequence
  Synthetic construct
YSNIGTNY

SEQ ID NO: 144 - protein, 6 aa, Artificial Sequence
  Synthetic construct
QSISSY

SEQ ID NO: 145 - protein, 3 aa, Artificial Sequence
  Synthetic construct
AAS

SEQ ID NO: 146 - protein, 3 aa, Artificial Sequence
  Synthetic construct
GAS

SEQ ID NO: 147 - protein, 3 aa, Artificial Sequence
  Synthetic construct
LAS

SEQ ID NO: 148 - protein, 3 aa, Artificial Sequence
  Synthetic construct
SVS

SEQ ID NO: 149 - protein, 3 aa, Artificial Sequence
  Synthetic construct
GKN

SEQ ID NO: 150 - protein, 3 aa, Artificial Sequence
  Synthetic construct
EDN

SEQ ID NO: 151 - protein, 3 aa, Artificial Sequence
  Synthetic construct
GAS

SEQ ID NO: 152 - protein, 3 aa, Artificial Sequence
  Synthetic construct
AAS

SEQ ID NO: 153 - protein, 3 aa, Artificial Sequence
  Synthetic construct
ANN

SEQ ID NO: 154 - protein, 3 aa, Artificial Sequence
  Synthetic construct
GNN

SEQ ID NO: 155 - protein, 3 aa, Artificial Sequence
  Synthetic construct
GAT

SEQ ID NO: 156 - protein, 3 aa, Artificial Sequence
  Synthetic construct
WAS

SEQ ID NO: 157 - protein, 3 aa, Artificial Sequence
  Synthetic construct
DAS

SEQ ID NO: 158 - protein, 3 aa, Artificial Sequence
  Synthetic construct
AAS

SEQ ID NO: 159 - protein, 3 aa, Artificial Sequence
  Synthetic construct
ATS

SEQ ID NO: 160 - protein, 3 aa, Artificial Sequence
  Synthetic construct
GAT

SEQ ID NO: 161 - protein, 3 aa, Artificial Sequence
  Synthetic construct
DNN

SEQ ID NO: 162 - protein, 3 aa, Artificial Sequence
  Synthetic construct
AAS

SEQ ID NO: 163 - protein, 10 aa, Artificial Sequence
  Synthetic construct
QQTYSSPSYT

SEQ ID NO: 164 - protein, 11 aa, Artificial Sequence
  Synthetic construct
QQYAPSPPWYI

SEQ ID NO: 165 - protein, 9 aa, Artificial Sequence
  Synthetic construct
MQALQTPLT

SEQ ID NO: 166 - protein, 5 aa, Artificial Sequence
  Synthetic construct
QHRVT

SEQ ID NO: 167 - protein, 13 aa, Artificial Sequence
  Synthetic construct
NSRDSSGDQTFYV

SEQ ID NO: 168 - protein, 9 aa, Artificial Sequence
  Synthetic construct
QSYHGSDVV

SEQ ID NO: 169 - protein, 9 aa, Artificial Sequence
  Synthetic construct
QQYNRWLWT

SEQ ID NO: 170 - protein, 9 aa, Artificial Sequence
  Synthetic construct
QQGNSFPLT

SEQ ID NO: 171 - protein, 12 aa, Artificial Sequence
  Synthetic construct
NSRDNSGNHPVI

SEQ ID NO: 172 - protein, 11 aa, Artificial Sequence
  Synthetic construct
AVWDDSLNGPV

SEQ ID NO: 173 - protein, 9 aa, Artificial Sequence
  Synthetic construct
LQDYNYLFS

SEQ ID NO: 174 - protein, 9 aa, Artificial Sequence
  Synthetic construct
QQYYNTPRT

SEQ ID NO: 175 - protein, 8 aa, Artificial Sequence
  Synthetic construct
QQYNFWWT

SEQ ID NO: 176 - protein, 8 aa, Artificial Sequence
  Synthetic construct
QQYDSYST

SEQ ID NO: 177 - protein, 8 aa, Artificial Sequence
  Synthetic construct
QESYSTNT

SEQ ID NO: 178 - protein, 9 aa, Artificial Sequence
  Synthetic construct
LQDYNYLFS

SEQ ID NO: 179 - protein, 11 aa, Artificial Sequence
  Synthetic construct
GTWDGALSVGL

SEQ ID NO: 180 - protein, 9 aa, Artificial Sequence
  Synthetic construct
QQTYSLLWT

SEQ ID NO: 181 - DNA, 16 bp, Artificial Sequence
  Synthetic construct
aaacctgcacgccagt

SEQ ID NO: 182 - DNA, 16 bp, Artificial Sequence
  Synthetic construct
aaacctgcacgccagt

SEQ ID NO: 183 - DNA, 16 bp, Artificial Sequence
  Synthetic construct
aaacctgtcgtgacat

SEQ ID NO: 184 - DNA, 16 bp, Artificial Sequence
  Synthetic construct
aaacctgtcgtgacat

SEQ ID NO: 185 - DNA, 16 bp, Artificial Sequence
  Synthetic construct
aaacctgtcttgagac

SEQ ID NO: 186 - DNA, 16 bp, Artificial Sequence
  Synthetic construct
aaacctgtcttgagac

SEQ ID NO: 187 - DNA, 16 bp, Artificial Sequence
  Synthetic construct
aaacgggaggcgctct

SEQ ID NO: 188 - DNA, 16 bp, Artificial Sequence
  Synthetic construct
aaacgggaggcgctct

SEQ ID NO: 189 - DNA, 16 bp, Artificial Sequence
  Synthetic construct
aaacgggcaggacgta

SEQ ID NO: 190 - DNA, 16 bp, Artificial Sequence
  Synthetic construct
aaacgggcaggacgta

SEQ ID NO: 191 - DNA, 16 bp, Artificial Sequence
  Synthetic construct
aaacgggtcaacgcta

SEQ ID NO: 192 - DNA, 16 bp, Artificial Sequence
  Synthetic construct
aaacgggtcaacgcta

SEQ ID NO: 193 - DNA, 16 bp, Artificial Sequence
  Synthetic construct
aaagatgagacagaga

SEQ ID NO: 194 - DNA, 16 bp, Artificial Sequence
  Synthetic construct
aaagatgagacagaga

SEQ ID NO: 195 - DNA, 16 bp, Artificial Sequence
  Synthetic construct
aaagatggtccagtgc

SEQ ID NO: 196 - DNA, 16 bp, Artificial Sequence
  Synthetic construct
aaagatggtccagtgc

SEQ ID NO: 197 - DNA, 16 bp, Artificial Sequence
  Synthetic construct
aaagatgtcaccttat

SEQ ID NO: 198 - DNA, 16 bp, Artificial Sequence
  Synthetic construct
aaagatgtcaccttat

SEQ ID NO: 199 - DNA, 16 bp, Artificial Sequence
  Synthetic construct
aaagatgtctcggacg

SEQ ID NO: 200 - DNA, 16 bp, Artificial Sequence
  Synthetic construct
aaagatgtctcggacg

SEQ ID NO: 201 - DNA, 16 bp, Artificial Sequence
  Synthetic construct
aaagcaaagttaagtg

SEQ ID NO: 202 - DNA, 16 bp, Artificial Sequence
  Synthetic construct
aaagcaaagttaagtg

SEQ ID NO: 203 - DNA, 16 bp, Artificial Sequence
  Synthetic construct
aaagcaacaagctgtt

SEQ ID NO: 204 - DNA, 16 bp, Artificial Sequence
  Synthetic construct
aaagcaacaagctgtt

SEQ ID NO: 205 - DNA, 16 bp, Artificial Sequence
  Synthetic construct
aaagcaagtattaccg

SEQ ID NO: 206 - DNA, 16 bp, Artificial Sequence
  Synthetic construct
aaagcaagtattaccg

SEQ ID NO: 207 - DNA, 16 bp, Artificial Sequence
  Synthetic construct
aaagcaagtcgcttct

SEQ ID NO: 208 - DNA, 16 bp, Artificial Sequence
  Synthetic construct
aaagcaagtcgcttct

SEQ ID NO: 209 - DNA, 16 bp, Artificial Sequence
  Synthetic construct
aaagcaatccactggg

SEQ ID NO: 210 - DNA, 16 bp, Artificial Sequence
  Synthetic construct
aaagcaatccactggg

SEQ ID NO: 211 - DNA, 16 bp, Artificial Sequence
  Synthetic construct
aaagtagagctagccc

SEQ ID NO: 212 - DNA, 16 bp, Artificial Sequence
  Synthetic construct
aaagtagagctagccc

SEQ ID NO: 213 - DNA, 16 bp, Artificial Sequence
  Synthetic construct
aaagtagagtctcggc

SEQ ID NO: 214 - DNA, 16 bp, Artificial Sequence
  Synthetic construct
aaagtagagtctcggc

SEQ ID NO: 215 - DNA, 16 bp, Artificial Sequence
  Synthetic construct
aaagtaggtagtgaat

SEQ ID NO: 216 - DNA, 16 bp, Artificial Sequence
  Synthetic construct
aaagtaggtagtgaat

SEQ ID NO: 217 - DNA, 16 bp, Artificial Sequence
  Synthetic construct
aaagtaggttcaacca

SEQ ID NO: 218 - DNA, 16 bp, Artificial Sequence
  Synthetic construct
aaagtaggttcaacca

SEQ ID NO: 219 - DNA, 16 bp, Artificial Sequence
  Synthetic construct
aaatgccagaaaccgc

SEQ ID NO: 220 - DNA, 16 bp, Artificial Sequence
  Synthetic construct
aaatgccagaaaccgc

SEQ ID NO: 221 - DNA, 16 bp, Artificial Sequence
  Synthetic construct
aaatgccagtggtccc

SEQ ID NO: 222 - DNA, 16 bp, Artificial Sequence
  Synthetic construct
aaatgccagtggtccc

SEQ ID NO: 223 - DNA, 16 bp, Artificial Sequence
  Synthetic construct
aaatgcccaccgatat

SEQ ID NO: 224 - DNA, 16 bp, Artificial Sequence
  Synthetic construct
aaatgcccaccgatat

SEQ ID NO: 225 - DNA, 16 bp, Artificial Sequence
  Synthetic construct
aaatgcccagggagag

SEQ ID NO: 226 - DNA, 16 bp, Artificial Sequence
  Synthetic construct
aaatgcccagggagag

SEQ ID NO: 227 - DNA, 16 bp, Artificial Sequence
  Synthetic construct
aaatgccgtatcagtc

SEQ ID NO: 228 - DNA, 16 bp, Artificial Sequence
  Synthetic construct
aaatgccgtatcagtc

SEQ ID NO: 229 - DNA, 16 bp, Artificial Sequence
  Synthetic construct
aacacgtagcgtcaag

SEQ ID NO: 230 - DNA, 16 bp, Artificial Sequence
  Synthetic construct
aacacgtagcgtcaag

SEQ ID NO: 231 - DNA, 16 bp, Artificial Sequence
  Synthetic construct
aacacgttcaccgtaa

SEQ ID NO: 232 - DNA, 16 bp, Artificial Sequence
  Synthetic construct
aacacgttcaccgtaa

SEQ ID NO: 233 - DNA, 16 bp, Artificial Sequence
  Synthetic construct
aacacgttcacgaagg

SEQ ID NO: 234 - DNA, 16 bp, Artificial Sequence
  Synthetic construct
aacacgttcacgaagg

SEQ ID NO: 235 - DNA, 16 bp, Artificial Sequence
  Synthetic construct
aacacgttcctatgtt

SEQ ID NO: 236 - DNA, 16 bp, Artificial Sequence
  Synthetic construct
aacacgttcctatgtt

SEQ ID NO: 237 - DNA, 16 bp, Artificial Sequence
  Synthetic construct
aacacgttcttgggta

SEQ ID NO: 238 - DNA, 16 bp, Artificial Sequence
  Synthetic construct
aacacgttcttgggta

SEQ ID NO: 239 - DNA, 16 bp, Artificial Sequence
  Synthetic construct
aaccatgcattaaccg

SEQ ID NO: 240 - DNA, 16 bp, Artificial Sequence
  Synthetic construct
aaccatgcattaaccg

SEQ ID NO: 241 - DNA, 16 bp, Artificial Sequence
  Synthetic construct
aaccgcgagatccgag

SEQ ID NO: 242 - DNA, 16 bp, Artificial Sequence
  Synthetic construct
aaccgcgagatccgag

SEQ ID NO: 243 - DNA, 16 bp, Artificial Sequence
  Synthetic construct
aaccgcgagtcatgct

SEQ ID NO: 244 - DNA, 16 bp, Artificial Sequence
  Synthetic construct
aaccgcgagtcatgct

SEQ ID NO: 245 - DNA, 16 bp, Artificial Sequence
  Synthetic construct
aaccgcggtatgcttg

SEQ ID NO: 246 - DNA, 16 bp, Artificial Sequence
  Synthetic construct
aaccgcggtatgcttg

SEQ ID NO: 247 - DNA, 16 bp, Artificial Sequence
  Synthetic construct
aacgttgtctcacatt

SEQ ID NO: 248 - DNA, 16 bp, Artificial Sequence
  Synthetic construct
aacgttgtctcacatt

SEQ ID NO: 249 - DNA, 16 bp, Artificial Sequence
  Synthetic construct
aactcagaggatcgca

SEQ ID NO: 250 - DNA, 16 bp, Artificial Sequence
  Synthetic construct
aactcagaggatcgca

SEQ ID NO: 251 - DNA, 16 bp, Artificial Sequence
  Synthetic construct
aactcagaggtgatta

SEQ ID NO: 252 - DNA, 16 bp, Artificial Sequence
  Synthetic construct
aactcagaggtgatta

SEQ ID NO: 253 - DNA, 16 bp, Artificial Sequence
  Synthetic construct
aactcagcacgaaacg

SEQ ID NO: 254 - DNA, 16 bp, Artificial Sequence
  Synthetic construct
aactcagcacgaaacg

SEQ ID NO: 255 - DNA, 16 bp, Artificial Sequence
  Synthetic construct
aactcaggttcacggc

SEQ ID NO: 256 - DNA, 16 bp, Artificial Sequence
  Synthetic construct
aactcaggttcacggc

SEQ ID NO: 257 - DNA, 16 bp, Artificial Sequence
  Synthetic construct
aactcagtcaacgcta

SEQ ID NO: 258 - DNA, 16 bp, Artificial Sequence
  Synthetic construct
aactcagtcaacgcta

SEQ ID NO: 259 - DNA, 16 bp, Artificial Sequence
  Synthetic construct
aactcccagggtatcg

SEQ ID NO: 260 - DNA, 16 bp, Artificial Sequence
  Synthetic construct
aactcccagggtatcg

SEQ ID NO: 261 - DNA, 16 bp, Artificial Sequence
  Synthetic construct
aactcccagtgggttg

SEQ ID NO: 262 - DNA, 16 bp, Artificial Sequence
  Synthetic construct
aactcccagtgggttg

SEQ ID NO: 263 - DNA, 16 bp, Artificial Sequence
  Synthetic construct
aactccccaggctcac

SEQ ID NO: 264 - DNA, 16 bp, Artificial Sequence
  Synthetic construct
aactccccaggctcac

SEQ ID NO: 265 - DNA, 16 bp, Artificial Sequence
  Synthetic construct
aactccccattagcca

SEQ ID NO: 266 - DNA, 16 bp, Artificial Sequence
  Synthetic construct
aactccccattagcca

SEQ ID NO: 267 - DNA, 16 bp, Artificial Sequence
  Synthetic construct
aactcccgtaccgtta

SEQ ID NO: 268 - DNA, 16 bp, Artificial Sequence
  Synthetic construct
aactcccgtaccgtta

SEQ ID NO: 269 - DNA, 16 bp, Artificial Sequence
  Synthetic construct
aactcccgtctgcggt

SEQ ID NO: 270 - DNA, 16 bp, Artificial Sequence
  Synthetic construct
aactcccgtctgcggt

SEQ ID NO: 271 - DNA, 16 bp, Artificial Sequence
  Synthetic construct
aactccctcatgtagc

SEQ ID NO: 272 - DNA, 16 bp, Artificial Sequence
  Synthetic construct
aactccctcatgtagc

SEQ ID NO: 273 - DNA, 16 bp, Artificial Sequence
  Synthetic construct
aactccctccagtagt

SEQ ID NO: 274 - DNA, 16 bp, Artificial Sequence
  Synthetic construct
aactccctccagtagt

SEQ ID NO: 275 - DNA, 16 bp, Artificial Sequence
  Synthetic construct
aactccctctatcgcc

SEQ ID NO: 276 - DNA, 16 bp, Artificial Sequence
  Synthetic construct
aactccctctatcgcc

SEQ ID NO: 277 - DNA, 16 bp, Artificial Sequence
  Synthetic construct
aactcttcaatggata

SEQ ID NO: 278 - DNA, 16 bp, Artificial Sequence
  Synthetic construct
aactcttcaatggata

SEQ ID NO: 279 - DNA, 16 bp, Artificial Sequence
  Synthetic construct
aactcttcatcagtac

SEQ ID NO: 280 - DNA, 16 bp, Artificial Sequence
  Synthetic construct
aactcttcatcagtac

SEQ ID NO: 281 - DNA, 16 bp, Artificial Sequence
  Synthetic construct
aactcttgtaagcacg

SEQ ID NO: 282 - DNA, 16 bp, Artificial Sequence
  Synthetic construct
aactcttgtaagcacg

SEQ ID NO: 283 - DNA, 16 bp, Artificial Sequence
  Synthetic construct
aactcttgtagcctcg

SEQ ID NO: 284 - DNA, 16 bp, Artificial Sequence
  Synthetic construct
aactcttgtagcctcg

SEQ ID NO: 285 - DNA, 16 bp, Artificial Sequence
  Synthetic construct
aactcttgtgatgtct

SEQ ID NO: 286 - DNA, 16 bp, Artificial Sequence
  Synthetic construct
aactcttgtgatgtct

SEQ ID NO: 287 - DNA, 16 bp, Artificial Sequence
  Synthetic construct
aactctttcgcctgtt

SEQ ID NO: 288 - DNA, 16 bp, Artificial Sequence
  Synthetic construct
aactctttcgcctgtt

SEQ ID NO: 289 - DNA, 16 bp, Artificial Sequence
  Synthetic construct
aactctttcggcggtt

SEQ ID NO: 290 - DNA, 16 bp, Artificial Sequence
  Synthetic construct
aactctttcggcggtt

SEQ ID NO: 291 - DNA, 16 bp, Artificial Sequence
  Synthetic construct
aactggtaggaatcgc

SEQ ID NO: 292 - DNA, 16 bp, Artificial Sequence
  Synthetic construct
aactggtaggaatcgc

SEQ ID NO: 293 - DNA, 16 bp, Artificial Sequence
  Synthetic construct
aactggtgttgtcgcg

SEQ ID NO: 294 - DNA, 16 bp, Artificial Sequence
  Synthetic construct
aactggtgttgtcgcg

SEQ ID NO: 295 - DNA, 16 bp, Artificial Sequence
  Synthetic construct
aactggttccaaactg

SEQ ID NO: 296 - DNA, 16 bp, Artificial Sequence
  Synthetic construct
aactggttccaaactg

SEQ ID NO: 297 - DNA, 16 bp, Artificial Sequence
  Synthetic construct
aactttccacggcgtt

SEQ ID NO: 298 - DNA, 16 bp, Artificial Sequence
  Synthetic construct
aactttccacggcgtt

SEQ ID NO: 299 - DNA, 16 bp, Artificial Sequence
  Synthetic construct
aactttccagtatgct

SEQ ID NO: 300 - DNA, 16 bp, Artificial Sequence
  Synthetic construct
aactttccagtatgct

SEQ ID NO: 301 - DNA, 16 bp, Artificial Sequence
  Synthetic construct
aactttccagttccct

SEQ ID NO: 302 - DNA, 16 bp, Artificial Sequence
  Synthetic construct
aactttccagttccct

SEQ ID NO: 303 - DNA, 16 bp, Artificial Sequence
  Synthetic construct
aactttcgtattctct

SEQ ID NO: 304 - DNA, 16 bp, Artificial Sequence
  Synthetic construct
aactttcgtattctct

SEQ ID NO: 305 - DNA, 16 bp, Artificial Sequence
  Synthetic construct
aactttctcgcctgag

SEQ ID NO: 306 - DNA, 16 bp, Artificial Sequence
  Synthetic construct
aactttctcgcctgag

SEQ ID NO: 307 - DNA, 16 bp, Artificial Sequence
  Synthetic construct
aagacctcattcttac

SEQ ID NO: 308 - DNA, 16 bp, Artificial Sequence
  Synthetic construct
aagacctcattcttac

SEQ ID NO: 309 - DNA, 16 bp, Artificial Sequence
  Synthetic construct
aagacctcatttcagg

SEQ ID NO: 310 - DNA, 16 bp, Artificial Sequence
  Synthetic construct
aagacctcatttcagg

SEQ ID NO: 311 - DNA, 16 bp, Artificial Sequence
  Synthetic construct
aagacctgtaggcatg

SEQ ID NO: 312 - DNA, 16 bp, Artificial Sequence
  Synthetic construct
aagacctgtaggcatg

SEQ ID NO: 313 - DNA, 16 bp, Artificial Sequence
  Synthetic construct
aagacctgttatccga

SEQ ID NO: 314 - DNA, 16 bp, Artificial Sequence
  Synthetic construct
aagacctgttatccga

SEQ ID NO: 315 - DNA, 16 bp, Artificial Sequence
  Synthetic construct
aagccgccaaactgct

SEQ ID NO: 316 - DNA, 16 bp, Artificial Sequence
  Synthetic construct
aagccgccaaactgct

SEQ ID NO: 317 - DNA, 16 bp, Artificial Sequence
  Synthetic construct
aagccgcgtcttctcg

SEQ ID NO: 318 - DNA, 16 bp, Artificial Sequence
  Synthetic construct
aagccgcgtcttctcg

SEQ ID NO: 319 - DNA, 16 bp, Artificial Sequence
  Synthetic construct
aagccgcgtgaaatca

SEQ ID NO: 320 - DNA, 16 bp, Artificial Sequence
  Synthetic construct
aagccgcgtgaaatca

SEQ ID NO: 321 - DNA, 16 bp, Artificial Sequence
  Synthetic construct
aagccgcgtgctgtat

SEQ ID NO: 322 - DNA, 16 bp, Artificial Sequence
  Synthetic construct
aagccgcgtgctgtat

SEQ ID NO: 323 - DNA, 16 bp, Artificial Sequence
  Synthetic construct
aagccgctcttcgaga

SEQ ID NO: 324 - DNA, 16 bp, Artificial Sequence
  Synthetic construct
aagccgctcttcgaga

SEQ ID NO: 325 - DNA, 16 bp, Artificial Sequence
  Synthetic construct
aaggagccagtttacg

SEQ ID NO: 326 - DNA, 16 bp, Artificial Sequence
  Synthetic construct
aaggagccagtttacg

SEQ ID NO: 327 - DNA, 16 bp, Artificial Sequence
  Synthetic construct
aaggagccatcgatgt

SEQ ID NO: 328 - DNA, 16 bp, Artificial Sequence
  Synthetic construct
aaggagccatcgatgt

SEQ ID NO: 329 - DNA, 16 bp, Artificial Sequence
  Synthetic construct
aaggagcgttagtggg

SEQ ID NO: 330 - DNA, 16 bp, Artificial Sequence
  Synthetic construct
aaggagcgttagtggg

SEQ ID NO: 331 - DNA, 16 bp, Artificial Sequence
  Synthetic construct
aaggagctccacgcag

SEQ ID NO: 332 - DNA, 16 bp, Artificial Sequence
  Synthetic construct
aaggagctccacgcag

SEQ ID NO: 333 - DNA, 16 bp, Artificial Sequence
  Synthetic construct
aaggagctcgttgaca

SEQ ID NO: 334 - DNA, 16 bp, Artificial Sequence
  Synthetic construct
aaggagctcgttgaca

SEQ ID NO: 335 - DNA, 16 bp, Artificial Sequence
  Synthetic construct
aaggagctctatcgcc

SEQ ID NO: 336 - DNA, 16 bp, Artificial Sequence
  Synthetic construct
aaggagctctatcgcc

SEQ ID NO: 337 - DNA, 16 bp, Artificial Sequence
  Synthetic construct
aaggcagagctgtcta

SEQ ID NO: 338 - DNA, 16 bp, Artificial Sequence
  Synthetic construct
aaggcagagctgtcta

SEQ ID NO: 339 - DNA, 16 bp, Artificial Sequence
  Synthetic construct
aaggcagagtggagtc

SEQ ID NO: 340 - DNA, 16 bp, Artificial Sequence
  Synthetic construct
aaggcagagtggagtc

SEQ ID NO: 341 - DNA, 16 bp, Artificial Sequence
  Synthetic construct
aaggcagagttcgcat

SEQ ID NO: 342 - DNA, 16 bp, Artificial Sequence
  Synthetic construct
aaggcagagttcgcat

SEQ ID NO: 343 - DNA, 16 bp, Artificial Sequence
  Synthetic construct
aaggcaggttatcacg

SEQ ID NO: 344 - DNA, 16 bp, Artificial Sequence
  Synthetic construct
aaggcaggttatcacg

SEQ ID NO: 345 - DNA, 16 bp, Artificial Sequence
  Synthetic construct
aaggcaggtttaggaa

SEQ ID NO: 346 - DNA, 16 bp, Artificial Sequence
  Synthetic construct
aaggcaggtttaggaa

SEQ ID NO: 347 - DNA, 16 bp, Artificial Sequence
  Synthetic construct
aaggttcagtgtcccg

SEQ ID NO: 348 - DNA, 16 bp, Artificial Sequence
  Synthetic construct
aaggttcagtgtcccg

SEQ ID NO: 349 - DNA, 16 bp, Artificial Sequence
  Synthetic construct
aaggttccaacacgcc

SEQ ID NO: 350 - DNA, 16 bp, Artificial Sequence
  Synthetic construct
aaggttccaacacgcc

SEQ ID NO: 351 - DNA, 16 bp, Artificial Sequence
  Synthetic construct
aaggttcgtattcgtg

SEQ ID NO: 352 - DNA, 16 bp, Artificial Sequence
  Synthetic construct
aaggttcgtattcgtg

SEQ ID NO: 353 - DNA, 16 bp, Artificial Sequence
  Synthetic construct
aaggttcgttgtcttt

SEQ ID NO: 354 - DNA, 16 bp, Artificial Sequence
  Synthetic construct
aaggttcgttgtcttt

SEQ ID NO: 355 - DNA, 16 bp, Artificial Sequence
  Synthetic construct
aagtctgcagccaatt

SEQ ID NO: 356 - DNA, 16 bp, Artificial Sequence
  Synthetic construct
aagtctgcagccaatt

SEQ ID NO: 357 - DNA, 16 bp, Artificial Sequence
  Synthetic construct
aagtctggtggtacag

SEQ ID NO: 358 - DNA, 16 bp, Artificial Sequence
  Synthetic construct
aagtctggtggtacag

SEQ ID NO: 359 - DNA, 16 bp, Artificial Sequence
  Synthetic construct
aatccagagcagcctc

SEQ ID NO: 360 - DNA, 16 bp, Artificial Sequence
  Synthetic construct
aatccagagcagcctc

SEQ ID NO: 361 - DNA, 16 bp, Artificial Sequence
  Synthetic construct
aatccagagcccaacc

SEQ ID NO: 362 - DNA, 16 bp, Artificial Sequence
  Synthetic construct
aatccagagcccaacc

SEQ ID NO: 363 - DNA, 16 bp, Artificial Sequence
  Synthetic construct
aatccagagctagccc

SEQ ID NO: 364 - DNA, 16 bp, Artificial Sequence
  Synthetic construct
aatccagagctagccc

SEQ ID NO: 365 - DNA, 16 bp, Artificial Sequence
  Synthetic construct
aatccagagtgtggca

SEQ ID NO: 366 - DNA, 16 bp, Artificial Sequence
  Synthetic construct
aatccagagtgtggca

SEQ ID NO: 367 - DNA, 16 bp, Artificial Sequence
  Synthetic construct
aatccagcaggatcga

SEQ ID NO: 368 - DNA, 16 bp, Artificial Sequence
  Synthetic construct
aatccagcaggatcga

SEQ ID NO: 369 - DNA, 16 bp, Artificial Sequence
  Synthetic construct
aatccagcagggtatg

SEQ ID NO: 370 - DNA, 16 bp, Artificial Sequence
  Synthetic construct
aatccagcagggtatg

SEQ ID NO: 371 - DNA, 16 bp, Artificial Sequence
  Synthetic construct
aatccaggtgtaatga

SEQ ID NO: 372 - DNA, 16 bp, Artificial Sequence
  Synthetic construct
aatccaggtgtaatga

SEQ ID NO: 373 - DNA, 16 bp, Artificial Sequence
  Synthetic construct
aatccaggtgtttggt

SEQ ID NO: 374 - DNA, 16 bp, Artificial Sequence
  Synthetic construct
aatccaggtgtttggt

SEQ ID NO: 375 - DNA, 16 bp, Artificial Sequence
  Synthetic construct
aatccaggttatcacg

SEQ ID NO: 376 - DNA, 16 bp, Artificial Sequence
  Synthetic construct
aatccaggttatcacg

SEQ ID NO: 377 - DNA, 16 bp, Artificial Sequence
  Synthetic construct
aatccaggttcgcgac

SEQ ID NO: 378 - DNA, 16 bp, Artificial Sequence
  Synthetic construct
aatccaggttcgcgac

SEQ ID NO: 379 - DNA, 16 bp, Artificial Sequence
  Synthetic construct
aatccagtctgcttgc

SEQ ID NO: 380 - DNA, 16 bp, Artificial Sequence
  Synthetic construct
aatccagtctgcttgc

SEQ ID NO: 381 - DNA, 16 bp, Artificial Sequence
  Synthetic construct
aatccagtcttccttc

SEQ ID NO: 382 - DNA, 16 bp, Artificial Sequence
  Synthetic construct
aatccagtcttccttc

SEQ ID NO: 383 - DNA, 16 bp, Artificial Sequence
  Synthetic construct
aatcggtagccagaac

SEQ ID NO: 384 - DNA, 16 bp, Artificial Sequence
  Synthetic construct
aatcggtagccagaac

SEQ ID NO: 385 - DNA, 16 bp, Artificial Sequence
  Synthetic construct
aatcggtagctcccag

SEQ ID NO: 386 - DNA, 16 bp, Artificial Sequence
  Synthetic construct
aatcggtagctcccag

SEQ ID NO: 387 - DNA, 16 bp, Artificial Sequence
  Synthetic construct
aatcggtagtcgataa

SEQ ID NO: 388 - DNA, 16 bp, Artificial Sequence
  Synthetic construct
aatcggtagtcgataa

SEQ ID NO: 389 - DNA, 16 bp, Artificial Sequence
  Synthetic construct
aatcggtcaaacgcga

SEQ ID NO: 390 - DNA, 16 bp, Artificial Sequence
  Synthetic construct
aatcggtcaaacgcga

SEQ ID NO: 391 - DNA, 16 bp, Artificial Sequence
  Synthetic construct
aatcggtcacgaggta

SEQ ID NO: 392 - DNA, 16 bp, Artificial Sequence
  Synthetic construct
aatcggtcacgaggta

SEQ ID NO: 393 - DNA, 16 bp, Artificial Sequence
  Synthetic construct
aatcggtcagactcgc

SEQ ID NO: 394 - DNA, 16 bp, Artificial Sequence
  Synthetic construct
aatcggtcagactcgc

SEQ ID NO: 395 - DNA, 16 bp, Artificial Sequence
  Synthetic construct
aatcggtcagatcgga

SEQ ID NO: 396 - DNA, 16 bp, Artificial Sequence
  Synthetic construct
aatcggtcagatcgga

SEQ ID NO: 397 - DNA, 16 bp, Artificial Sequence
  Synthetic construct
aatcggtcatagactc

SEQ ID NO: 398 - DNA, 16 bp, Artificial Sequence
  Synthetic construct
aatcggtcatagactc

SEQ ID NO: 399 - DNA, 16 bp, Artificial Sequence
  Synthetic construct
aatcggtgtataaacg

SEQ ID NO: 400 - DNA, 16 bp, Artificial Sequence
  Synthetic construct
aatcggtgtataaacg

SEQ ID NO: 401 - DNA, 16 bp, Artificial Sequence
  Synthetic construct
aatcggtgttctcatt

SEQ ID NO: 402 - DNA, 16 bp, Artificial Sequence
  Synthetic construct
aatcggtgttctcatt

SEQ ID NO: 403 - DNA, 16 bp, Artificial Sequence
  Synthetic construct
acaccaatcagataag

SEQ ID NO: 404 - DNA, 16 bp, Artificial Sequence
  Synthetic construct
acaccaatcagataag

SEQ ID NO: 405 - DNA, 16 bp, Artificial Sequence
  Synthetic construct
acaccaatcccacttg

SEQ ID NO: 406 - DNA, 16 bp, Artificial Sequence
  Synthetic construct
acaccaatcccacttg

SEQ ID NO: 407 - DNA, 16 bp, Artificial Sequence
  Synthetic construct
acaccaatccgatatg

SEQ ID NO: 408 - DNA, 16 bp, Artificial Sequence
  Synthetic construct
acaccaatccgatatg

SEQ ID NO: 409 - DNA, 16 bp, Artificial Sequence
  Synthetic construct
acaccaatcggaaata

SEQ ID NO: 410 - DNA, 16 bp, Artificial Sequence
  Synthetic construct
acaccaatcggaaata

SEQ ID NO: 411 - DNA, 16 bp, Artificial Sequence
  Synthetic construct
acaccaatctatcgcc

SEQ ID NO: 412 - DNA, 16 bp, Artificial Sequence
  Synthetic construct
acaccaatctatcgcc

SEQ ID NO: 413 - DNA, 16 bp, Artificial Sequence
  Synthetic construct
acaccctagccgccta

SEQ ID NO: 414 - DNA, 16 bp, Artificial Sequence
  Synthetic construct
acaccctagccgccta

SEQ ID NO: 415 - DNA, 16 bp, Artificial Sequence
  Synthetic construct
acaccctagggcatgt

SEQ ID NO: 416 - DNA, 16 bp, Artificial Sequence
  Synthetic construct
acaccctagggcatgt

SEQ ID NO: 417 - DNA, 16 bp, Artificial Sequence
  Synthetic construct
acaccctgtataatgg

SEQ ID NO: 418 - DNA, 16 bp, Artificial Sequence
  Synthetic construct
acaccctgtataatgg

SEQ ID NO: 419 - DNA, 16 bp, Artificial Sequence
  Synthetic construct
acaccctgtatgaatg

SEQ ID NO: 420 - DNA, 16 bp, Artificial Sequence
  Synthetic construct
acaccctgtatgaatg

SEQ ID NO: 421 - DNA, 16 bp, Artificial Sequence
  Synthetic construct
acaccggagcgtgagt

SEQ ID NO: 422 - DNA, 16 bp, Artificial Sequence
  Synthetic construct
acaccggagcgtgagt

SEQ ID NO: 423 - DNA, 16 bp, Artificial Sequence
  Synthetic construct
acaccggagtaatccc

SEQ ID NO: 424 - DNA, 16 bp, Artificial Sequence
  Synthetic construct
acaccggagtaatccc

SEQ ID NO: 425 - DNA, 16 bp, Artificial Sequence
  Synthetic construct
acaccggcaaacccat

SEQ ID NO: 426 - DNA, 16 bp, Artificial Sequence
  Synthetic construct
acaccggcaaacccat

SEQ ID NO: 427 - DNA, 16 bp, Artificial Sequence
  Synthetic construct
acaccggcacaagtaa

SEQ ID NO: 428 - DNA, 16 bp, Artificial Sequence
  Synthetic construct
acaccggcacaagtaa

SEQ ID NO: 429 - DNA, 16 bp, Artificial Sequence
  Synthetic construct
acaccggcatgccttc

SEQ ID NO: 430 - DNA, 16 bp, Artificial Sequence
  Synthetic construct
acaccggcatgccttc

SEQ ID NO: 431 - DNA, 16 bp, Artificial Sequence
  Synthetic construct
acaccgggtcgaacag

SEQ ID NO: 432 - DNA, 16 bp, Artificial Sequence
  Synthetic construct
acaccgggtcgaacag

SEQ ID NO: 433 - DNA, 16 bp, Artificial Sequence
  Synthetic construct
acaccgggtgatgccc

SEQ ID NO: 434 - DNA, 16 bp, Artificial Sequence
  Synthetic construct
acaccgggtgatgccc

SEQ ID NO: 435 - DNA, 16 bp, Artificial Sequence
  Synthetic construct
acaccgggtgtgaccc

SEQ ID NO: 436 - DNA, 16 bp, Artificial Sequence
  Synthetic construct
acaccgggtgtgaccc

SEQ ID NO: 437 - DNA, 16 bp, Artificial Sequence
  Synthetic construct
acactgaagatgagag

SEQ ID NO: 438 - DNA, 16 bp, Artificial Sequence
  Synthetic construct
acactgaagatgagag

SEQ ID NO: 439 - DNA, 16 bp, Artificial Sequence
  Synthetic construct
acactgacaaacgcga

SEQ ID NO: 440 - DNA, 16 bp, Artificial Sequence
  Synthetic construct
acactgacaaacgcga

SEQ ID NO: 441 - DNA, 16 bp, Artificial Sequence
  Synthetic construct
acactgagtcgctttc

SEQ ID NO: 442 - DNA, 16 bp, Artificial Sequence
  Synthetic construct
acactgagtcgctttc

SEQ ID NO: 443 - DNA, 16 bp, Artificial Sequence
  Synthetic construct
acactgagtgaacctt

SEQ ID NO: 444 - DNA, 16 bp, Artificial Sequence
  Synthetic construct
acactgagtgaacctt

SEQ ID NO: 445 - DNA, 16 bp, Artificial Sequence
  Synthetic construct
acactgatctacttac

SEQ ID NO: 446 - DNA, 16 bp, Artificial Sequence
  Synthetic construct
acactgatctacttac

SEQ ID NO: 447 - DNA, 16 bp, Artificial Sequence
  Synthetic construct
acagccgcagtgacag

SEQ ID NO: 448 - DNA, 16 bp, Artificial Sequence
  Synthetic construct
acagccgcagtgacag

SEQ ID NO: 449 - DNA, 16 bp, Artificial Sequence
  Synthetic construct
acagccgtctgcggca

SEQ ID NO: 450 - DNA, 16 bp, Artificial Sequence
  Synthetic construct
acagccgtctgcggca

SEQ ID NO: 451 - DNA, 16 bp, Artificial Sequence
  Synthetic construct
acagccgtctttcctc

SEQ ID NO: 452 - DNA, 16 bp, Artificial Sequence
  Synthetic construct
acagccgtctttcctc

SEQ ID NO: 453 - DNA, 16 bp, Artificial Sequence
  Synthetic construct
acagctaagatcccat

SEQ ID NO: 454 - DNA, 16 bp, Artificial Sequence
  Synthetic construct
acagctaagatcccat

SEQ ID NO: 455 - DNA, 16 bp, Artificial Sequence
  Synthetic construct
acagctacacgaagca

SEQ ID NO: 456 - DNA, 16 bp, Artificial Sequence
  Synthetic construct
acagctacacgaagca

SEQ ID NO: 457 - DNA, 16 bp, Artificial Sequence
  Synthetic construct
acagctagtatgaaac

SEQ ID NO: 458 - DNA, 16 bp, Artificial Sequence
  Synthetic construct
acagctagtatgaaac

SEQ ID NO: 459 - DNA, 16 bp, Artificial Sequence
  Synthetic construct
acagctagtccgaaga

SEQ ID NO: 460 - DNA, 16 bp, Artificial Sequence
  Synthetic construct
acagctagtccgaaga

SEQ ID NO: 461 - DNA, 16 bp, Artificial Sequence
  Synthetic construct
acatacgagacctagg

SEQ ID NO: 462 - DNA, 16 bp, Artificial Sequence
  Synthetic construct
acatacgagacctagg

SEQ ID NO: 463 - DNA, 16 bp, Artificial Sequence
  Synthetic construct
acatacgagagtaagg

SEQ ID NO: 464 - DNA, 16 bp, Artificial Sequence
  Synthetic construct
acatacgagagtaagg

SEQ ID NO: 465 - DNA, 16 bp, Artificial Sequence
  Synthetic construct
acatacgaggtcggat

SEQ ID NO: 466 - DNA, 16 bp, Artificial Sequence
  Synthetic construct
acatacgaggtcggat

SEQ ID NO: 467 - DNA, 16 bp, Artificial Sequence
  Synthetic construct
acatacgcacagaggt

SEQ ID NO: 468 - DNA, 16 bp, Artificial Sequence
  Synthetic construct
acatacgcacagaggt

SEQ ID NO: 469 - DNA, 16 bp, Artificial Sequence
  Synthetic construct
acatacggtccatgat

SEQ ID NO: 470 - DNA, 16 bp, Artificial Sequence
  Synthetic construct
acatacggtccatgat

SEQ ID NO: 471 - DNA, 16 bp, Artificial Sequence
  Synthetic construct
acatacggtctagccg

SEQ ID NO: 472 - DNA, 16 bp, Artificial Sequence
  Synthetic construct
acatacggtctagccg

SEQ ID NO: 473 - DNA, 16 bp, Artificial Sequence
  Synthetic construct
acatacggttgtggag

SEQ ID NO: 474 - DNA, 16 bp, Artificial Sequence
  Synthetic construct
acatacggttgtggag

SEQ ID NO: 475 - DNA, 16 bp, Artificial Sequence
  Synthetic construct
acatacgtccgttgtc

SEQ ID NO: 476 - DNA, 16 bp, Artificial Sequence
  Synthetic construct
acatacgtccgttgtc

SEQ ID NO: 477 - DNA, 16 bp, Artificial Sequence
  Synthetic construct
acatcagagacctttg

SEQ ID NO: 478 - DNA, 16 bp, Artificial Sequence
  Synthetic construct
acatcagagacctttg

SEQ ID NO: 479 - DNA, 16 bp, Artificial Sequence
  Synthetic construct
acatcagagtgccaga

SEQ ID NO: 480 - DNA, 16 bp, Artificial Sequence
  Synthetic construct
acatcagagtgccaga

SEQ ID NO: 481 - DNA, 16 bp, Artificial Sequence
  Synthetic construct
acatcagcatgtcgat

SEQ ID NO: 482 - DNA, 16 bp, Artificial Sequence
  Synthetic construct
acatcagcatgtcgat

SEQ ID NO: 483 - DNA, 16 bp, Artificial Sequence
  Synthetic construct
acatcaggtagctccg

SEQ ID NO: 484 - DNA, 16 bp, Artificial Sequence
  Synthetic construct
acatcaggtagctccg

SEQ ID NO: 485 - DNA, 16 bp, Artificial Sequence
  Synthetic construct
acatggtaggccatag

SEQ ID NO: 486 - DNA, 16 bp, Artificial Sequence
  Synthetic construct
acatggtaggccatag

SEQ ID NO: 487 - DNA, 16 bp, Artificial Sequence
  Synthetic construct
acatggtaggccctca

SEQ ID NO: 488 - DNA, 16 bp, Artificial Sequence
  Synthetic construct
acatggtaggccctca

SEQ ID NO: 489 - DNA, 16 bp, Artificial Sequence
  Synthetic construct
acatggtgttagtggg

SEQ ID NO: 490 - DNA, 16 bp, Artificial Sequence
  Synthetic construct
acatggtgttagtggg

SEQ ID NO: 491 - DNA, 16 bp, Artificial Sequence
  Synthetic construct
acatggttctggagcc

SEQ ID NO: 492 - DNA, 16 bp, Artificial Sequence
  Synthetic construct
acatggttctggagcc

SEQ ID NO: 493 - DNA, 16 bp, Artificial Sequence
  Synthetic construct
accagtaagacctagg

SEQ ID NO: 494 - DNA, 16 bp, Artificial Sequence
  Synthetic construct
accagtaagacctagg

SEQ ID NO: 495 - DNA, 16 bp, Artificial Sequence
  Synthetic construct
accagtaagctgttca

SEQ ID NO: 496 - DNA, 16 bp, Artificial Sequence
  Synthetic construct
accagtaagctgttca

SEQ ID NO: 497 - DNA, 16 bp, Artificial Sequence
  Synthetic construct
accagtaaggctatct

SEQ ID NO: 498 - DNA, 16 bp, Artificial Sequence
  Synthetic construct
accagtaaggctatct

SEQ ID NO: 499 - DNA, 16 bp, Artificial Sequence
  Synthetic construct
accagtaagggagtaa

SEQ ID NO: 500 - DNA, 16 bp, Artificial Sequence
  Synthetic construct
accagtaagggagtaa

SEQ ID NO: 501 - DNA, 16 bp, Artificial Sequence
  Synthetic construct
accagtaagtcccacg

SEQ ID NO: 502 - DNA, 16 bp, Artificial Sequence
  Synthetic construct
accagtaagtcccacg

SEQ ID NO: 503 - DNA, 16 bp, Artificial Sequence
  Synthetic construct
accagtagtggtaacg

SEQ ID NO: 504 - DNA, 16 bp, Artificial Sequence
  Synthetic construct
accagtagtggtaacg

SEQ ID NO: 505 - DNA, 16 bp, Artificial Sequence
  Synthetic construct
accagtatccacgaat

SEQ ID NO: 506 - DNA, 16 bp, Artificial Sequence
  Synthetic construct
accagtatccacgaat

SEQ ID NO: 507 - DNA, 16 bp, Artificial Sequence
  Synthetic construct
acccactcatcggtta

SEQ ID NO: 508 - DNA, 16 bp, Artificial Sequence
  Synthetic construct
acccactcatcggtta

SEQ ID NO: 509 - DNA, 16 bp, Artificial Sequence
  Synthetic construct
accgtaaagtcgccgt

SEQ ID NO: 510 - DNA, 16 bp, Artificial Sequence
  Synthetic construct
accgtaaagtcgccgt

SEQ ID NO: 511 - DNA, 16 bp, Artificial Sequence
  Synthetic construct
accgtaaagttgtcgt

SEQ ID NO: 512 - DNA, 16 bp, Artificial Sequence
  Synthetic construct
accgtaaagttgtcgt

SEQ ID NO: 513 - DNA, 16 bp, Artificial Sequence
  Synthetic construct
accgtaacaaactgct

SEQ ID NO: 514 - DNA, 16 bp, Artificial Sequence
  Synthetic construct
accgtaacaaactgct

SEQ ID NO: 515 - DNA, 16 bp, Artificial Sequence
  Synthetic construct
accgtaagtaaacaca

SEQ ID NO: 516 - DNA, 16 bp, Artificial Sequence
  Synthetic construct
accgtaagtaaacaca

SEQ ID NO: 517 - DNA, 16 bp, Artificial Sequence
  Synthetic construct
accgtaatcacggtta

SEQ ID NO: 518 - DNA, 16 bp, Artificial Sequence
  Synthetic construct
accgtaatcacggtta

SEQ ID NO: 519 - DNA, 16 bp, Artificial Sequence
  Synthetic construct
accgtaatcggcatcg

SEQ ID NO: 520 - DNA, 16 bp, Artificial Sequence
  Synthetic construct
accgtaatcggcatcg

SEQ ID NO: 521 - DNA, 16 bp, Artificial Sequence
  Synthetic construct
acctttaagcgagaaa

SEQ ID NO: 522 - DNA, 16 bp, Artificial Sequence
  Synthetic construct
acctttaagcgagaaa

SEQ ID NO: 523 - DNA, 16 bp, Artificial Sequence
  Synthetic construct
acctttaaggctatct

SEQ ID NO: 524 - DNA, 16 bp, Artificial Sequence
  Synthetic construct
acctttaaggctatct

SEQ ID NO: 525 - DNA, 16 bp, Artificial Sequence
  Synthetic construct
acctttagtgactact

SEQ ID NO: 526 - DNA, 16 bp, Artificial Sequence
  Synthetic construct
acctttagtgactact

SEQ ID NO: 527 - DNA, 16 bp, Artificial Sequence
  Synthetic construct
acctttagttcgctaa

SEQ ID NO: 528 - DNA, 16 bp, Artificial Sequence
  Synthetic construct
acctttagttcgctaa

SEQ ID NO: 529 - DNA, 16 bp, Artificial Sequence
  Synthetic construct
acctttatccgcagtg

SEQ ID NO: 530 - DNA, 16 bp, Artificial Sequence
  Synthetic construct
acctttatccgcagtg

SEQ ID NO: 531 - DNA, 16 bp, Artificial Sequence
  Synthetic construct
acctttatcgtccagg

SEQ ID NO: 532 - DNA, 16 bp, Artificial Sequence
  Synthetic construct
acctttatcgtccagg

SEQ ID NO: 533 - DNA, 16 bp, Artificial Sequence
  Synthetic construct
acgagccagccagttt

SEQ ID NO: 534 - DNA, 16 bp, Artificial Sequence
  Synthetic construct
acgagccagccagttt

SEQ ID NO: 535 - DNA, 16 bp, Artificial Sequence
  Synthetic construct
acgagccagctcccag

SEQ ID NO: 536 - DNA, 16 bp, Artificial Sequence
  Synthetic construct
acgagccagctcccag

SEQ ID NO: 537 - DNA, 16 bp, Artificial Sequence
  Synthetic construct
acgagccaggacgaaa

SEQ ID NO: 538 - DNA, 16 bp, Artificial Sequence
  Synthetic construct
acgagccaggacgaaa

SEQ ID NO: 539 - DNA, 16 bp, Artificial Sequence
  Synthetic construct
acgagccagttaggta

SEQ ID NO: 540 - DNA, 16 bp, Artificial Sequence
  Synthetic construct
acgagccagttaggta

SEQ ID NO: 541 - DNA, 16 bp, Artificial Sequence
  Synthetic construct
acgagcccaaagcaat

SEQ ID NO: 542 - DNA, 16 bp, Artificial Sequence
  Synthetic construct
acgagcccaaagcaat

SEQ ID NO: 543 - DNA, 16 bp, Artificial Sequence
  Synthetic construct
acgagccgtataaacg

SEQ ID NO: 544 - DNA, 16 bp, Artificial Sequence
  Synthetic construct
acgagccgtataaacg

SEQ ID NO: 545 - DNA, 16 bp, Artificial Sequence
  Synthetic construct
acgagccgtcaatgtc

SEQ ID NO: 546 - DNA, 16 bp, Artificial Sequence
  Synthetic construct
acgagccgtcaatgtc

SEQ ID NO: 547 - DNA, 16 bp, Artificial Sequence
  Synthetic construct
acgagccgttagtggg

SEQ ID NO: 548 - DNA, 16 bp, Artificial Sequence
  Synthetic construct
acgagccgttagtggg

SEQ ID NO: 549 - DNA, 16 bp, Artificial Sequence
  Synthetic construct
acgagcctcgtctgct

SEQ ID NO: 550 - DNA, 16 bp, Artificial Sequence
  Synthetic construct
acgagcctcgtctgct

SEQ ID NO: 551 - DNA, 16 bp, Artificial Sequence
  Synthetic construct
acgagcctctagagtc

SEQ ID NO: 552 - DNA, 16 bp, Artificial Sequence
  Synthetic construct
acgagcctctagagtc

SEQ ID NO: 553 - DNA, 16 bp, Artificial Sequence
  Synthetic construct
acgaggaagaactgta

SEQ ID NO: 554 - DNA, 16 bp, Artificial Sequence
  Synthetic construct
acgaggaagaactgta

SEQ ID NO: 555 - DNA, 16 bp, Artificial Sequence
  Synthetic construct
acgaggaagctaagat

SEQ ID NO: 556 - DNA, 16 bp, Artificial Sequence
  Synthetic construct
acgaggaagctaagat

SEQ ID NO: 557 - DNA, 16 bp, Artificial Sequence
  Synthetic construct
acgaggaagctgaacg

SEQ ID NO: 558 - DNA, 16 bp, Artificial Sequence
  Synthetic construct
acgaggaagctgaacg

SEQ ID NO: 559 - DNA, 16 bp, Artificial Sequence
  Synthetic construct
acgaggaaggacagct

SEQ ID NO: 560 - DNA, 16 bp, Artificial Sequence
  Synthetic construct
acgaggaaggacagct

SEQ ID NO: 561 - DNA, 16 bp, Artificial Sequence
  Synthetic construct
acgaggaagtcacgcc

SEQ ID NO: 562 - DNA, 16 bp, Artificial Sequence
  Synthetic construct
acgaggaagtcacgcc

SEQ ID NO: 563 - DNA, 16 bp, Artificial Sequence
  Synthetic construct
acgaggagtgcctgca

SEQ ID NO: 564 - DNA, 16 bp, Artificial Sequence
  Synthetic construct
acgaggagtgcctgca

SEQ ID NO: 565 - DNA, 16 bp, Artificial Sequence
  Synthetic construct
acgaggagttcaggcc

SEQ ID NO: 566 - DNA, 16 bp, Artificial Sequence
  Synthetic construct
acgaggagttcaggcc

SEQ ID NO: 567 - DNA, 16 bp, Artificial Sequence
  Synthetic construct
acgaggagttgtcgcg

SEQ ID NO: 568 - DNA, 16 bp, Artificial Sequence
  Synthetic construct
acgaggagttgtcgcg

SEQ ID NO: 569 - DNA, 16 bp, Artificial Sequence
  Synthetic construct
acgatacaggctcatt

SEQ ID NO: 570 - DNA, 16 bp, Artificial Sequence
  Synthetic construct
acgatacaggctcatt

SEQ ID NO: 571 - DNA, 16 bp, Artificial Sequence
  Synthetic construct
acgataccagatccat

SEQ ID NO: 572 - DNA, 16 bp, Artificial Sequence
  Synthetic construct
acgataccagatccat

SEQ ID NO: 573 - DNA, 16 bp, Artificial Sequence
  Synthetic construct
acgataccatccgggt

SEQ ID NO: 574 - DNA, 16 bp, Artificial Sequence
  Synthetic construct
acgataccatccgggt

SEQ ID NO: 575 - DNA, 16 bp, Artificial Sequence
  Synthetic construct
acgatacgttgacgtt

SEQ ID NO: 576 - DNA, 16 bp, Artificial Sequence
  Synthetic construct
acgatacgttgacgtt

SEQ ID NO: 577 - DNA, 16 bp, Artificial Sequence
  Synthetic construct
acgatactctatgtgg

SEQ ID NO: 578 - DNA, 16 bp, Artificial Sequence
  Synthetic construct
acgatactctatgtgg

SEQ ID NO: 579 - DNA, 16 bp, Artificial Sequence
  Synthetic construct
acgatactctgtttgt

SEQ ID NO: 580 - DNA, 16 bp, Artificial Sequence
  Synthetic construct
acgatactctgtttgt

SEQ ID NO: 581 - DNA, 16 bp, Artificial Sequence
  Synthetic construct
acgatgtagtgtcccg

SEQ ID NO: 582 - DNA, 16 bp, Artificial Sequence
  Synthetic construct
acgatgtagtgtcccg

SEQ ID NO: 583 - DNA, 16 bp, Artificial Sequence
  Synthetic construct
acgatgttcttgggta

SEQ ID NO: 584 - DNA, 16 bp, Artificial Sequence
  Synthetic construct
acgatgttcttgggta

SEQ ID NO: 585 - DNA, 16 bp, Artificial Sequence
  Synthetic construct
acgcagcagctgataa

SEQ ID NO: 586 - DNA, 16 bp, Artificial Sequence
  Synthetic construct
acgcagcagctgataa

SEQ ID NO: 587 - DNA, 16 bp, Artificial Sequence
  Synthetic construct
acgcagccaagaagag

SEQ ID NO: 588 - DNA, 16 bp, Artificial Sequence
  Synthetic construct
acgcagccaagaagag

SEQ ID NO: 589 - DNA, 16 bp, Artificial Sequence
  Synthetic construct
acgcagcgtcatactg

SEQ ID NO: 590 - DNA, 16 bp, Artificial Sequence
  Synthetic construct
acgcagcgtcatactg

SEQ ID NO: 591 - DNA, 16 bp, Artificial Sequence
  Synthetic construct
acgcagctcaccacct

SEQ ID NO: 592 - DNA, 16 bp, Artificial Sequence
  Synthetic construct
acgcagctcaccacct

SEQ ID NO: 593 - DNA, 16 bp, Artificial Sequence
  Synthetic construct
acgcagctcatagcac

SEQ ID NO: 594 - DNA, 16 bp, Artificial Sequence
  Synthetic construct
acgcagctcatagcac

SEQ ID NO: 595 - DNA, 16 bp, Artificial Sequence
  Synthetic construct
acgccagagtgtggca

SEQ ID NO: 596 - DNA, 16 bp, Artificial Sequence
  Synthetic construct
acgccagagtgtggca

SEQ ID NO: 597 - DNA, 16 bp, Artificial Sequence
  Synthetic construct
acgccagagttgagat

SEQ ID NO: 598 - DNA, 16 bp, Artificial Sequence
  Synthetic construct
acgccagagttgagat

SEQ ID NO: 599 - DNA, 16 bp, Artificial Sequence
  Synthetic construct
acgccagcaaacctac

SEQ ID NO: 600 - DNA, 16 bp, Artificial Sequence
  Synthetic construct
acgccagcaaacctac

SEQ ID NO: 601 - DNA, 16 bp, Artificial Sequence
  Synthetic construct
acgccagcatcacgat

SEQ ID NO: 602 - DNA, 16 bp, Artificial Sequence
  Synthetic construct
acgccagcatcacgat

SEQ ID NO: 603 - DNA, 16 bp, Artificial Sequence
  Synthetic construct
acgccaggttaagggc

SEQ ID NO: 604 - DNA, 16 bp, Artificial Sequence
  Synthetic construct
acgccaggttaagggc

SEQ ID NO: 605 - DNA, 16 bp, Artificial Sequence
  Synthetic construct
acgccaggtttgacac

SEQ ID NO: 606 - DNA, 16 bp, Artificial Sequence
  Synthetic construct
acgccaggtttgacac

SEQ ID NO: 607 - DNA, 16 bp, Artificial Sequence
  Synthetic construct
acgccagtcgcttgtc

SEQ ID NO: 608 - DNA, 16 bp, Artificial Sequence
  Synthetic construct
acgccagtcgcttgtc

SEQ ID NO: 609 - DNA, 16 bp, Artificial Sequence
  Synthetic construct
acgccgaagcaggcta

SEQ ID NO: 610 - DNA, 16 bp, Artificial Sequence
  Synthetic construct
acgccgaagcaggcta

SEQ ID NO: 611 - DNA, 16 bp, Artificial Sequence
  Synthetic construct
acgccgacagattgct

SEQ ID NO: 612 - DNA, 16 bp, Artificial Sequence
  Synthetic construct
acgccgacagattgct

SEQ ID NO: 613 - DNA, 16 bp, Artificial Sequence
  Synthetic construct
acgccgatccaaacac

SEQ ID NO: 614 - DNA, 16 bp, Artificial Sequence
  Synthetic construct
acgccgatccaaacac

SEQ ID NO: 615 - DNA, 16 bp, Artificial Sequence
  Synthetic construct
acgccgatctgagtgt

SEQ ID NO: 616 - DNA, 16 bp, Artificial Sequence
  Synthetic construct
acgccgatctgagtgt

SEQ ID NO: 617 - DNA, 16 bp, Artificial Sequence
  Synthetic construct
acggagaagaagaagc

SEQ ID NO: 618 - DNA, 16 bp, Artificial Sequence
  Synthetic construct
acggagaagaagaagc

SEQ ID NO: 619 - DNA, 16 bp, Artificial Sequence
  Synthetic construct
acggagaagccagaac

SEQ ID NO: 620 - DNA, 16 bp, Artificial Sequence
  Synthetic construct
acggagaagccagaac

SEQ ID NO: 621 - DNA, 16 bp, Artificial Sequence
  Synthetic construct
acggagaaggtgttaa

SEQ ID NO: 622 - DNA, 16 bp, Artificial Sequence
  Synthetic construct
acggagaaggtgttaa

SEQ ID NO: 623 - DNA, 16 bp, Artificial Sequence
  Synthetic construct
acggagacatgcatgt

SEQ ID NO: 624 - DNA, 16 bp, Artificial Sequence
  Synthetic construct
acggagacatgcatgt

SEQ ID NO: 625 - DNA, 16 bp, Artificial Sequence
  Synthetic construct
acggagagtctgcggt

SEQ ID NO: 626 - DNA, 16 bp, Artificial Sequence
  Synthetic construct
acggagagtctgcggt

SEQ ID NO: 627 - DNA, 16 bp, Artificial Sequence
  Synthetic construct
acggagagtgaggcta

SEQ ID NO: 628 - DNA, 16 bp, Artificial Sequence
  Synthetic construct
acggagagtgaggcta

SEQ ID NO: 629 - DNA, 16 bp, Artificial Sequence
  Synthetic construct
acggagagtgcaccac

SEQ ID NO: 630 - DNA, 16 bp, Artificial Sequence
  Synthetic construct
acggagagtgcaccac

SEQ ID NO: 631 - DNA, 16 bp, Artificial Sequence
  Synthetic construct
acggagatcacccgag

SEQ ID NO: 632 - DNA, 16 bp, Artificial Sequence
  Synthetic construct
acggagatcacccgag

SEQ ID NO: 633 - DNA, 16 bp, Artificial Sequence
  Synthetic construct
acggccaagtttcctt

SEQ ID NO: 634 - DNA, 16 bp, Artificial Sequence
  Synthetic construct
acggccaagtttcctt

SEQ ID NO: 635 - DNA, 16 bp, Artificial Sequence
  Synthetic construct
acggccagtacttagc

SEQ ID NO: 636 - DNA, 16 bp, Artificial Sequence
  Synthetic construct
acggccagtacttagc

SEQ ID NO: 637 - DNA, 16 bp, Artificial Sequence
  Synthetic construct
acggccagtccagtta

SEQ ID NO: 638 - DNA, 16 bp, Artificial Sequence
  Synthetic construct
acggccagtccagtta

SEQ ID NO: 639 - DNA, 16 bp, Artificial Sequence
  Synthetic construct
acggccagtcggcact

SEQ ID NO: 640 - DNA, 16 bp, Artificial Sequence
  Synthetic construct
acggccagtcggcact

SEQ ID NO: 641 - DNA, 16 bp, Artificial Sequence
  Synthetic construct
acggccagttaccgat

SEQ ID NO: 642 - DNA, 16 bp, Artificial Sequence
  Synthetic construct
acggccagttaccgat

SEQ ID NO: 643 - DNA, 16 bp, Artificial Sequence
  Synthetic construct
acggccatccttcaat

SEQ ID NO: 644 - DNA, 16 bp, Artificial Sequence
  Synthetic construct
acggccatccttcaat

SEQ ID NO: 645 - DNA, 16 bp, Artificial Sequence
  Synthetic construct
acggccatctaccaga

SEQ ID NO: 646 - DNA, 16 bp, Artificial Sequence
  Synthetic construct
acggccatctaccaga

SEQ ID NO: 647 - DNA, 16 bp, Artificial Sequence
  Synthetic construct
acgggctagaccggat

SEQ ID NO: 648 - DNA, 16 bp, Artificial Sequence
  Synthetic construct
acgggctagaccggat

SEQ ID NO: 649 - DNA, 16 bp, Artificial Sequence
  Synthetic construct
acgggctagcgcctca

SEQ ID NO: 650 - DNA, 16 bp, Artificial Sequence
  Synthetic construct
acgggctagcgcctca

SEQ ID NO: 651 - DNA, 16 bp, Artificial Sequence
  Synthetic construct
acgggctcaccctatc

SEQ ID NO: 652 - DNA, 16 bp, Artificial Sequence
  Synthetic construct
acgggctcaccctatc

SEQ ID NO: 653 - DNA, 16 bp, Artificial Sequence
  Synthetic construct
acgggctcagatgagc

SEQ ID NO: 654 - DNA, 16 bp, Artificial Sequence
  Synthetic construct
acgggctcagatgagc

SEQ ID NO: 655 - DNA, 16 bp, Artificial Sequence
  Synthetic construct
acgggctcatgtcctc

SEQ ID NO: 656 - DNA, 16 bp, Artificial Sequence
  Synthetic construct
acgggctcatgtcctc

SEQ ID NO: 657 - DNA, 16 bp, Artificial Sequence
  Synthetic construct
acgggcttcataaagg

SEQ ID NO: 658 - DNA, 16 bp, Artificial Sequence
  Synthetic construct
acgggcttcataaagg

SEQ ID NO: 659 - DNA, 16 bp, Artificial Sequence
  Synthetic construct
acgggcttccaaccaa

SEQ ID NO: 660 - DNA, 16 bp, Artificial Sequence
  Synthetic construct
acgggcttccaaccaa

SEQ ID NO: 661 - DNA, 16 bp, Artificial Sequence
  Synthetic construct
acgggcttcgggagta

SEQ ID NO: 662 - DNA, 16 bp, Artificial Sequence
  Synthetic construct
acgggcttcgggagta

SEQ ID NO: 663 - DNA, 16 bp, Artificial Sequence
  Synthetic construct
acgggcttctttacgt

SEQ ID NO: 664 - DNA, 16 bp, Artificial Sequence
  Synthetic construct
acgggcttctttacgt

SEQ ID NO: 665 - DNA, 16 bp, Artificial Sequence
  Synthetic construct
acgggtcagccacctg

SEQ ID NO: 666 - DNA, 16 bp, Artificial Sequence
  Synthetic construct
acgggtcagccacctg

SEQ ID NO: 667 - DNA, 16 bp, Artificial Sequence
  Synthetic construct
acgggtcagggtgtgt

SEQ ID NO: 668 - DNA, 16 bp, Artificial Sequence
  Synthetic construct
acgggtcagggtgtgt

SEQ ID NO: 669 - DNA, 16 bp, Artificial Sequence
  Synthetic construct
acgggtccatcacgat

SEQ ID NO: 670 - DNA, 16 bp, Artificial Sequence
  Synthetic construct
acgggtccatcacgat

SEQ ID NO: 671 - DNA, 16 bp, Artificial Sequence
  Synthetic construct
acgggtcgtcaggaca

SEQ ID NO: 672 - DNA, 16 bp, Artificial Sequence
  Synthetic construct
acgggtcgtcaggaca

SEQ ID NO: 673 - DNA, 16 bp, Artificial Sequence
  Synthetic construct
acgggtctcacaacgt

SEQ ID NO: 674 - DNA, 16 bp, Artificial Sequence
  Synthetic construct
acgggtctcacaacgt

SEQ ID NO: 675 - DNA, 16 bp, Artificial Sequence
  Synthetic construct
acgggtctcacatagc

SEQ ID NO: 676 - DNA, 16 bp, Artificial Sequence
  Synthetic construct
acgggtctcacatagc

SEQ ID NO: 677 - DNA, 16 bp, Artificial Sequence
  Synthetic construct
acgggtctctcgtatt

SEQ ID NO: 678 - DNA, 16 bp, Artificial Sequence
  Synthetic construct
acgggtctctcgtatt

SEQ ID NO: 679 - DNA, 16 bp, Artificial Sequence
  Synthetic construct
acgtcaaagcagactg

SEQ ID NO: 680 - DNA, 16 bp, Artificial Sequence
  Synthetic construct
acgtcaaagcagactg

SEQ ID NO: 681 - DNA, 16 bp, Artificial Sequence
  Synthetic construct
acgtcaaagggtgttg

SEQ ID NO: 682 - DNA, 16 bp, Artificial Sequence
  Synthetic construct
acgtcaaagggtgttg

SEQ ID NO: 683 - DNA, 16 bp, Artificial Sequence
  Synthetic construct
acgtcaagtgcagtag

SEQ ID NO: 684 - DNA, 16 bp, Artificial Sequence
  Synthetic construct
acgtcaagtgcagtag

SEQ ID NO: 685 - DNA, 16 bp, Artificial Sequence
  Synthetic construct
actatctgtcggcact

SEQ ID NO: 686 - DNA, 16 bp, Artificial Sequence
  Synthetic construct
actatctgtcggcact

SEQ ID NO: 687 - DNA, 16 bp, Artificial Sequence
  Synthetic construct
actatcttcagctcgg

SEQ ID NO: 688 - DNA, 16 bp, Artificial Sequence
  Synthetic construct
actatcttcagctcgg

SEQ ID NO: 689 - DNA, 16 bp, Artificial Sequence
  Synthetic construct
actatcttcggcggtt

SEQ ID NO: 690 - DNA, 16 bp, Artificial Sequence
  Synthetic construct
actatcttcggcggtt

SEQ ID NO: 691 - DNA, 16 bp, Artificial Sequence
  Synthetic construct
actgaacagcaggtca

SEQ ID NO: 692 - DNA, 16 bp, Artificial Sequence
  Synthetic construct
actgaacagcaggtca

SEQ ID NO: 693 - DNA, 16 bp, Artificial Sequence
  Synthetic construct
actgaacagcgatata

SEQ ID NO: 694 - DNA, 16 bp, Artificial Sequence
  Synthetic construct
actgaacagcgatata

SEQ ID NO: 695 - DNA, 16 bp, Artificial Sequence
  Synthetic construct
actgaacagggctctc

SEQ ID NO: 696 - DNA, 16 bp, Artificial Sequence
  Synthetic construct
actgaacagggctctc

SEQ ID NO: 697 - DNA, 16 bp, Artificial Sequence
  Synthetic construct
actgaacagtcgccgt

SEQ ID NO: 698 - DNA, 16 bp, Artificial Sequence
  Synthetic construct
actgaacagtcgccgt

SEQ ID NO: 699 - DNA, 16 bp, Artificial Sequence
  Synthetic construct
actgaaccaatccaac

SEQ ID NO: 700 - DNA, 16 bp, Artificial Sequence
  Synthetic construct
actgaaccaatccaac

SEQ ID NO: 701 - DNA, 16 bp, Artificial Sequence
  Synthetic construct
actgaactcacgaagg

SEQ ID NO: 702 - DNA, 16 bp, Artificial Sequence
  Synthetic construct
actgaactcacgaagg

SEQ ID NO: 703 - DNA, 16 bp, Artificial Sequence
  Synthetic construct
actgaactcgtctgct

SEQ ID NO: 704 - DNA, 16 bp, Artificial Sequence
  Synthetic construct
actgaactcgtctgct

SEQ ID NO: 705 - DNA, 16 bp, Artificial Sequence
  Synthetic construct
actgagtagacctttg

SEQ ID NO: 706 - DNA, 16 bp, Artificial Sequence
  Synthetic construct
actgagtagacctttg

SEQ ID NO: 707 - DNA, 16 bp, Artificial Sequence
  Synthetic construct
actgagtcaagttgtc

SEQ ID NO: 708 - DNA, 16 bp, Artificial Sequence
  Synthetic construct
actgagtcaagttgtc

SEQ ID NO: 709 - DNA, 16 bp, Artificial Sequence
  Synthetic construct
actgagtgtcagctat

SEQ ID NO: 710 - DNA, 16 bp, Artificial Sequence
  Synthetic construct
actgagtgtcagctat

SEQ ID NO: 711 - DNA, 16 bp, Artificial Sequence
  Synthetic construct
actgagtgtctcccta

SEQ ID NO: 712 - DNA, 16 bp, Artificial Sequence
  Synthetic construct
actgagtgtctcccta

SEQ ID NO: 713 - DNA, 16 bp, Artificial Sequence
  Synthetic construct
actgagtgtgagcgat

SEQ ID NO: 714 - DNA, 16 bp, Artificial Sequence
  Synthetic construct
actgagtgtgagcgat

SEQ ID NO: 715 - DNA, 16 bp, Artificial Sequence
  Synthetic construct
actgagtgtggtaacg

SEQ ID NO: 716 - DNA, 16 bp, Artificial Sequence
  Synthetic construct
actgagtgtggtaacg

SEQ ID NO: 717 - DNA, 16 bp, Artificial Sequence
  Synthetic construct
actgagtgttatgtgc

SEQ ID NO: 718 - DNA, 16 bp, Artificial Sequence
  Synthetic construct
actgagtgttatgtgc

SEQ ID NO: 719 - DNA, 16 bp, Artificial Sequence
  Synthetic construct
actgagtgttgtggag

SEQ ID NO: 720 - DNA, 16 bp, Artificial Sequence
  Synthetic construct
actgagtgttgtggag

SEQ ID NO: 721 - DNA, 16 bp, Artificial Sequence
  Synthetic construct
actgagttcaaacggg

SEQ ID NO: 722 - DNA, 16 bp, Artificial Sequence
  Synthetic construct
actgagttcaaacggg

SEQ ID NO: 723 - DNA, 16 bp, Artificial Sequence
  Synthetic construct
actgagttcaggcaag

SEQ ID NO: 724 - DNA, 16 bp, Artificial Sequence
  Synthetic construct
actgagttcaggcaag

SEQ ID NO: 725 - DNA, 16 bp, Artificial Sequence
  Synthetic construct
actgagttcgtcacgg

SEQ ID NO: 726 - DNA, 16 bp, Artificial Sequence
  Synthetic construct
actgagttcgtcacgg

SEQ ID NO: 727 - DNA, 16 bp, Artificial Sequence
  Synthetic construct
actgatgagaagccca

SEQ ID NO: 728 - DNA, 16 bp, Artificial Sequence
  Synthetic construct
actgatgagaagccca

SEQ ID NO: 729 - DNA, 16 bp, Artificial Sequence
  Synthetic construct
actgatgagcggcttc

SEQ ID NO: 730 - DNA, 16 bp, Artificial Sequence
  Synthetic construct
actgatgagcggcttc

SEQ ID NO: 731 - DNA, 16 bp, Artificial Sequence
  Synthetic construct
actgatgagtcaatag

SEQ ID NO: 732 - DNA, 16 bp, Artificial Sequence
  Synthetic construct
actgatgagtcaatag

SEQ ID NO: 733 - DNA, 16 bp, Artificial Sequence
  Synthetic construct
actgatgagtgccatt

SEQ ID NO: 734 - DNA, 16 bp, Artificial Sequence
  Synthetic construct
actgatgagtgccatt

SEQ ID NO: 735 - DNA, 16 bp, Artificial Sequence
  Synthetic construct
actgatgcatcctaga

SEQ ID NO: 736 - DNA, 16 bp, Artificial Sequence
  Synthetic construct
actgatgcatcctaga

SEQ ID NO: 737 - DNA, 16 bp, Artificial Sequence
  Synthetic construct
actgctcagcgatagc

SEQ ID NO: 738 - DNA, 16 bp, Artificial Sequence
  Synthetic construct
actgctcagcgatagc

SEQ ID NO: 739 - DNA, 16 bp, Artificial Sequence
  Synthetic construct
actgctcagggctctc

SEQ ID NO: 740 - DNA, 16 bp, Artificial Sequence
  Synthetic construct
actgctcagggctctc

SEQ ID NO: 741 - DNA, 16 bp, Artificial Sequence
  Synthetic construct
actgctcgttaccgat

SEQ ID NO: 742 - DNA, 16 bp, Artificial Sequence
  Synthetic construct
actgctcgttaccgat

SEQ ID NO: 743 - DNA, 16 bp, Artificial Sequence
  Synthetic construct
actgctctctatcccg

SEQ ID NO: 744 - DNA, 16 bp, Artificial Sequence
  Synthetic construct
actgctctctatcccg

SEQ ID NO: 745 - DNA, 16 bp, Artificial Sequence
  Synthetic construct
actgtccgtaccgtta

SEQ ID NO: 746 - DNA, 16 bp, Artificial Sequence
  Synthetic construct
actgtccgtaccgtta

SEQ ID NO: 747 - DNA, 16 bp, Artificial Sequence
  Synthetic construct
actgtccgttctgaac

SEQ ID NO: 748 - DNA, 16 bp, Artificial Sequence
  Synthetic construct
actgtccgttctgaac

SEQ ID NO: 749 - DNA, 16 bp, Artificial Sequence
  Synthetic construct
actgtcctctaacggt

SEQ ID NO: 750 - DNA, 16 bp, Artificial Sequence
  Synthetic construct
actgtcctctaacggt

SEQ ID NO: 751 - DNA, 16 bp, Artificial Sequence
  Synthetic construct
acttactagcagactg

SEQ ID NO: 752 - DNA, 16 bp, Artificial Sequence
  Synthetic construct
acttactagcagactg

SEQ ID NO: 753 - DNA, 16 bp, Artificial Sequence
  Synthetic construct
acttactagcaggtca

SEQ ID NO: 754 - DNA, 16 bp, Artificial Sequence
  Synthetic construct
acttactagcaggtca

SEQ ID NO: 755 - DNA, 16 bp, Artificial Sequence
  Synthetic construct
acttactcatcggacc

SEQ ID NO: 756 - DNA, 16 bp, Artificial Sequence
  Synthetic construct
acttactcatcggacc

SEQ ID NO: 757 - DNA, 16 bp, Artificial Sequence
  Synthetic construct
acttactgtaagttcc

SEQ ID NO: 758 - DNA, 16 bp, Artificial Sequence
  Synthetic construct
acttactgtaagttcc

SEQ ID NO: 759 - DNA, 16 bp, Artificial Sequence
  Synthetic construct
acttactgtatcgcat

SEQ ID NO: 760 - DNA, 16 bp, Artificial Sequence
  Synthetic construct
acttactgtatcgcat

SEQ ID NO: 761 - DNA, 16 bp, Artificial Sequence
  Synthetic construct
acttactgtcacctaa

SEQ ID NO: 762 - DNA, 16 bp, Artificial Sequence
  Synthetic construct
acttactgtcacctaa

SEQ ID NO: 763 - DNA, 16 bp, Artificial Sequence
  Synthetic construct
acttactgttgattgc

SEQ ID NO: 764 - DNA, 16 bp, Artificial Sequence
  Synthetic construct
acttactgttgattgc

SEQ ID NO: 765 - DNA, 16 bp, Artificial Sequence
  Synthetic construct
acttacttccctaatt

SEQ ID NO: 766 - DNA, 16 bp, Artificial Sequence
  Synthetic construct
acttacttccctaatt

SEQ ID NO: 767 - DNA, 16 bp, Artificial Sequence
  Synthetic construct
acttacttcgcactct

SEQ ID NO: 768 - DNA, 16 bp, Artificial Sequence
  Synthetic construct
acttacttcgcactct

SEQ ID NO: 769 - DNA, 16 bp, Artificial Sequence
  Synthetic construct
acttgttagtcctcct

SEQ ID NO: 770 - DNA, 16 bp, Artificial Sequence
  Synthetic construct
acttgttagtcctcct

SEQ ID NO: 771 - DNA, 16 bp, Artificial Sequence
  Synthetic construct
acttgttagttaacga

SEQ ID NO: 772 - DNA, 16 bp, Artificial Sequence
  Synthetic construct
acttgttagttaacga

SEQ ID NO: 773 - DNA, 16 bp, Artificial Sequence
  Synthetic construct
acttgttagttagcgg

SEQ ID NO: 774 - DNA, 16 bp, Artificial Sequence
  Synthetic construct
acttgttagttagcgg

SEQ ID NO: 775 - DNA, 16 bp, Artificial Sequence
  Synthetic construct
acttgttgtctcacct

SEQ ID NO: 776 - DNA, 16 bp, Artificial Sequence
  Synthetic construct
acttgttgtctcacct

SEQ ID NO: 777 - DNA, 16 bp, Artificial Sequence
  Synthetic construct
acttgttgttgcctct

SEQ ID NO: 778 - DNA, 16 bp, Artificial Sequence
  Synthetic construct
acttgttgttgcctct

SEQ ID NO: 779 - DNA, 16 bp, Artificial Sequence
  Synthetic construct
actttcaagtggcaca

SEQ ID NO: 780 - DNA, 16 bp, Artificial Sequence
  Synthetic construct
actttcaagtggcaca

SEQ ID NO: 781 - DNA, 16 bp, Artificial Sequence
  Synthetic construct
actttcatcagtccct

SEQ ID NO: 782 - DNA, 16 bp, Artificial Sequence
  Synthetic construct
actttcatcagtccct

SEQ ID NO: 783 - DNA, 16 bp, Artificial Sequence
  Synthetic construct
actttcatcattcact

SEQ ID NO: 784 - DNA, 16 bp, Artificial Sequence
  Synthetic construct
actttcatcattcact

SEQ ID NO: 785 - DNA, 16 bp, Artificial Sequence
  Synthetic construct
agaatagaggacagct

SEQ ID NO: 786 - DNA, 16 bp, Artificial Sequence
  Synthetic construct
agaatagaggacagct

SEQ ID NO: 787 - DNA, 16 bp, Artificial Sequence
  Synthetic construct
agaatagaggagtctg

SEQ ID NO: 788 - DNA, 16 bp, Artificial Sequence
  Synthetic construct
agaatagaggagtctg

SEQ ID NO: 789 - DNA, 16 bp, Artificial Sequence
  Synthetic construct
agaatagcaatgttgc

SEQ ID NO: 790 - DNA, 16 bp, Artificial Sequence
  Synthetic construct
agaatagcaatgttgc

SEQ ID NO: 791 - DNA, 16 bp, Artificial Sequence
  Synthetic construct
agaataggtccgtgac

SEQ ID NO: 792 - DNA, 16 bp, Artificial Sequence
  Synthetic construct
agaataggtccgtgac

SEQ ID NO: 793 - DNA, 16 bp, Artificial Sequence
  Synthetic construct
agaataggtgttcgat

SEQ ID NO: 794 - DNA, 16 bp, Artificial Sequence
  Synthetic construct
agaataggtgttcgat

SEQ ID NO: 795 - DNA, 16 bp, Artificial Sequence
  Synthetic construct
agaatagtcatacggt

SEQ ID NO: 796 - DNA, 16 bp, Artificial Sequence
  Synthetic construct
agaatagtcatacggt

SEQ ID NO: 797 - DNA, 16 bp, Artificial Sequence
  Synthetic construct
agacgttcactgttag

SEQ ID NO: 798 - DNA, 16 bp, Artificial Sequence
  Synthetic construct
agacgttcactgttag

SEQ ID NO: 799 - DNA, 16 bp, Artificial Sequence
  Synthetic construct
agacgttgtagtagta

SEQ ID NO: 800 - DNA, 16 bp, Artificial Sequence
  Synthetic construct
agacgttgtagtagta

SEQ ID NO: 801 - DNA, 16 bp, Artificial Sequence
  Synthetic construct
agacgttgtatgaatg

SEQ ID NO: 802 - DNA, 16 bp, Artificial Sequence
  Synthetic construct
agacgttgtatgaatg

SEQ ID NO: 803 - DNA, 16 bp, Artificial Sequence
  Synthetic construct
agagcgaagaaaccta

SEQ ID NO: 804 - DNA, 16 bp, Artificial Sequence
  Synthetic construct
agagcgaagaaaccta

SEQ ID NO: 805 - DNA, 16 bp, Artificial Sequence
  Synthetic construct
agagcgacaggattgg

SEQ ID NO: 806 - DNA, 16 bp, Artificial Sequence
  Synthetic construct
agagcgacaggattgg

SEQ ID NO: 807 - DNA, 16 bp, Artificial Sequence
  Synthetic construct
agagcgacatcggaag

SEQ ID NO: 808 - DNA, 16 bp, Artificial Sequence
  Synthetic construct
agagcgacatcggaag

SEQ ID NO: 809 - DNA, 16 bp, Artificial Sequence
  Synthetic construct
agagcgagtgcaggta

SEQ ID NO: 810 - DNA, 16 bp, Artificial Sequence
  Synthetic construct
agagcgagtgcaggta

SEQ ID NO: 811 - DNA, 16 bp, Artificial Sequence
  Synthetic construct
agagcgagttgtttgg

SEQ ID NO: 812 - DNA, 16 bp, Artificial Sequence
  Synthetic construct
agagcgagttgtttgg

SEQ ID NO: 813 - DNA, 16 bp, Artificial Sequence
  Synthetic construct
agagcgagtttaagcc

SEQ ID NO: 814 - DNA, 16 bp, Artificial Sequence
  Synthetic construct
agagcgagtttaagcc

SEQ ID NO: 815 - DNA, 16 bp, Artificial Sequence
  Synthetic construct
agagcgatccaaccaa

SEQ ID NO: 816 - DNA, 16 bp, Artificial Sequence
  Synthetic construct
agagcgatccaaccaa

SEQ ID NO: 817 - DNA, 16 bp, Artificial Sequence
  Synthetic construct
agagcgatcgaggtag

SEQ ID NO: 818 - DNA, 16 bp, Artificial Sequence
  Synthetic construct
agagcgatcgaggtag

SEQ ID NO: 819 - DNA, 16 bp, Artificial Sequence
  Synthetic construct
agagcgatcttgggta

SEQ ID NO: 820 - DNA, 16 bp, Artificial Sequence
  Synthetic construct
agagcgatcttgggta

SEQ ID NO: 821 - DNA, 16 bp, Artificial Sequence
  Synthetic construct
agagcttagacgcttt

SEQ ID NO: 822 - DNA, 16 bp, Artificial Sequence
  Synthetic construct
agagcttagacgcttt

SEQ ID NO: 823 - DNA, 16 bp, Artificial Sequence
  Synthetic construct
agagcttagagcccaa

SEQ ID NO: 824 - DNA, 16 bp, Artificial Sequence
  Synthetic construct
agagcttagagcccaa

SEQ ID NO: 825 - DNA, 16 bp, Artificial Sequence
  Synthetic construct
agagcttaggacagaa

SEQ ID NO: 826 - DNA, 16 bp, Artificial Sequence
  Synthetic construct
agagcttaggacagaa

SEQ ID NO: 827 - DNA, 16 bp, Artificial Sequence
  Synthetic construct
agagcttagttccaca

SEQ ID NO: 828 - DNA, 16 bp, Artificial Sequence
  Synthetic construct
agagcttagttccaca

SEQ ID NO: 829 - DNA, 16 bp, Artificial Sequence
  Synthetic construct
agagcttgtcacccag

SEQ ID NO: 830 - DNA, 16 bp, Artificial Sequence
  Synthetic construct
agagcttgtcacccag

SEQ ID NO: 831 - DNA, 16 bp, Artificial Sequence
  Synthetic construct
agagcttgttaccgat

SEQ ID NO: 832 - DNA, 16 bp, Artificial Sequence
  Synthetic construct
agagcttgttaccgat

SEQ ID NO: 833 - DNA, 16 bp, Artificial Sequence
  Synthetic construct
agagcttgttcacggc

SEQ ID NO: 834 - DNA, 16 bp, Artificial Sequence
  Synthetic construct
agagcttgttcacggc

SEQ ID NO: 835 - DNA, 16 bp, Artificial Sequence
  Synthetic construct
agagctttcttctggc

SEQ ID NO: 836 - DNA, 16 bp, Artificial Sequence
  Synthetic construct
agagctttcttctggc

SEQ ID NO: 837 - DNA, 16 bp, Artificial Sequence
  Synthetic construct
agagtggagatacaca

SEQ ID NO: 838 - DNA, 16 bp, Artificial Sequence
  Synthetic construct
agagtggagatacaca

SEQ ID NO: 839 - DNA, 16 bp, Artificial Sequence
  Synthetic construct
agagtggcaccagatt

SEQ ID NO: 840 - DNA, 16 bp, Artificial Sequence
  Synthetic construct
agagtggcaccagatt

SEQ ID NO: 841 - DNA, 16 bp, Artificial Sequence
  Synthetic construct
agagtggcagctccga

SEQ ID NO: 842 - DNA, 16 bp, Artificial Sequence
  Synthetic construct
agagtggcagctccga

SEQ ID NO: 843 - DNA, 16 bp, Artificial Sequence
  Synthetic construct
agagtgggtgagtgac

SEQ ID NO: 844 - DNA, 16 bp, Artificial Sequence
  Synthetic construct
agagtgggtgagtgac

SEQ ID NO: 845 - DNA, 16 bp, Artificial Sequence
  Synthetic construct
agagtgggttcatggt

SEQ ID NO: 846 - DNA, 16 bp, Artificial Sequence
  Synthetic construct
agagtgggttcatggt

SEQ ID NO: 847 - DNA, 16 bp, Artificial Sequence
  Synthetic construct
agagtggtcagtacgt

SEQ ID NO: 848 - DNA, 16 bp, Artificial Sequence
  Synthetic construct
agagtggtcagtacgt

SEQ ID NO: 849 - DNA, 16 bp, Artificial Sequence
  Synthetic construct
agatctgcagctgcac

SEQ ID NO: 850 - DNA, 16 bp, Artificial Sequence
  Synthetic construct
agatctgcagctgcac

SEQ ID NO: 851 - DNA, 16 bp, Artificial Sequence
  Synthetic construct
agatctggtagcaaat

SEQ ID NO: 852 - DNA, 16 bp, Artificial Sequence
  Synthetic construct
agatctggtagcaaat

SEQ ID NO: 853 - DNA, 16 bp, Artificial Sequence
  Synthetic construct
agatctggttggtgga

SEQ ID NO: 854 - DNA, 16 bp, Artificial Sequence
  Synthetic construct
agatctggttggtgga

SEQ ID NO: 855 - DNA, 16 bp, Artificial Sequence
  Synthetic construct
agatctgtctgcgtaa

SEQ ID NO: 856 - DNA, 16 bp, Artificial Sequence
  Synthetic construct
agatctgtctgcgtaa

SEQ ID NO: 857 - DNA, 16 bp, Artificial Sequence
  Synthetic construct
agatctgtctgcttgc

SEQ ID NO: 858 - DNA, 16 bp, Artificial Sequence
  Synthetic construct
agatctgtctgcttgc

SEQ ID NO: 859 - DNA, 16 bp, Artificial Sequence
  Synthetic construct
agattgcagcacaggt

SEQ ID NO: 860 - DNA, 16 bp, Artificial Sequence
  Synthetic construct
agattgcagcacaggt

SEQ ID NO: 861 - DNA, 16 bp, Artificial Sequence
  Synthetic construct
agattgcagtcgccgt

SEQ ID NO: 862 - DNA, 16 bp, Artificial Sequence
  Synthetic construct
agattgcagtcgccgt

SEQ ID NO: 863 - DNA, 16 bp, Artificial Sequence
  Synthetic construct
agattgcagtgtacgg

SEQ ID NO: 864 - DNA, 16 bp, Artificial Sequence
  Synthetic construct
agattgcagtgtacgg

SEQ ID NO: 865 - DNA, 16 bp, Artificial Sequence
  Synthetic construct
agattgcagtgtcccg

SEQ ID NO: 866 - DNA, 16 bp, Artificial Sequence
  Synthetic construct
agattgcagtgtcccg

SEQ ID NO: 867 - DNA, 16 bp, Artificial Sequence
  Synthetic construct
agattgcgtatcacca

SEQ ID NO: 868 - DNA, 16 bp, Artificial Sequence
  Synthetic construct
agattgcgtatcacca

SEQ ID NO: 869 - DNA, 16 bp, Artificial Sequence
  Synthetic construct
agattgcgtcatgccg

SEQ ID NO: 870 - DNA, 16 bp, Artificial Sequence
  Synthetic construct
agattgcgtcatgccg

SEQ ID NO: 871 - DNA, 16 bp, Artificial Sequence
  Synthetic construct
agattgcgtcgcatat

SEQ ID NO: 872 - DNA, 16 bp, Artificial Sequence
  Synthetic construct
agattgcgtcgcatat

SEQ ID NO: 873 - DNA, 16 bp, Artificial Sequence
  Synthetic construct
agattgctccgcggta

SEQ ID NO: 874 - DNA, 16 bp, Artificial Sequence
  Synthetic construct
agattgctccgcggta

SEQ ID NO: 875 - DNA, 16 bp, Artificial Sequence
  Synthetic construct
agattgctcgccataa

SEQ ID NO: 876 - DNA, 16 bp, Artificial Sequence
  Synthetic construct
agattgctcgccataa

SEQ ID NO: 877 - DNA, 16 bp, Artificial Sequence
  Synthetic construct
agcagccagaattgtg

SEQ ID NO: 878 - DNA, 16 bp, Artificial Sequence
  Synthetic construct
agcagccagaattgtg

SEQ ID NO: 879 - DNA, 16 bp, Artificial Sequence
  Synthetic construct
agcagccagggagtaa

SEQ ID NO: 880 - DNA, 16 bp, Artificial Sequence
  Synthetic construct
agcagccagggagtaa

SEQ ID NO: 881 - DNA, 16 bp, Artificial Sequence
  Synthetic construct
agcagcccaagggtca

SEQ ID NO: 882 - DNA, 16 bp, Artificial Sequence
  Synthetic construct
agcagcccaagggtca

SEQ ID NO: 883 - DNA, 16 bp, Artificial Sequence
  Synthetic construct
agcagcccacacgctg

SEQ ID NO: 884 - DNA, 16 bp, Artificial Sequence
  Synthetic construct
agcagcccacacgctg

SEQ ID NO: 885 - DNA, 16 bp, Artificial Sequence
  Synthetic construct
agcagccgtaccagtt

SEQ ID NO: 886 - DNA, 16 bp, Artificial Sequence
  Synthetic construct
agcagccgtaccagtt

SEQ ID NO: 887 - DNA, 16 bp, Artificial Sequence
  Synthetic construct
agcagccgtacgctgc

SEQ ID NO: 888 - DNA, 16 bp, Artificial Sequence
  Synthetic construct
agcagccgtacgctgc

SEQ ID NO: 889 - DNA, 16 bp, Artificial Sequence
  Synthetic construct
agcagccgtgatgccc

SEQ ID NO: 890 - DNA, 16 bp, Artificial Sequence
  Synthetic construct
agcagccgtgatgccc

SEQ ID NO: 891 - DNA, 16 bp, Artificial Sequence
  Synthetic construct
agcagccgttgtacac

SEQ ID NO: 892 - DNA, 16 bp, Artificial Sequence
  Synthetic construct
agcagccgttgtacac

SEQ ID NO: 893 - DNA, 16 bp, Artificial Sequence
  Synthetic construct
agcagcctcacttact

SEQ ID NO: 894 - DNA, 16 bp, Artificial Sequence
  Synthetic construct
agcagcctcacttact

SEQ ID NO: 895 - DNA, 16 bp, Artificial Sequence
  Synthetic construct
agcataccacttctgc

SEQ ID NO: 896 - DNA, 16 bp, Artificial Sequence
  Synthetic construct
agcataccacttctgc

SEQ ID NO: 897 - DNA, 16 bp, Artificial Sequence
  Synthetic construct
agcctaagtacgaaat

SEQ ID NO: 898 - DNA, 16 bp, Artificial Sequence
  Synthetic construct
agcctaagtacgaaat

SEQ ID NO: 899 - DNA, 16 bp, Artificial Sequence
  Synthetic construct
agcctaagttcagtac

SEQ ID NO: 900 - DNA, 16 bp, Artificial Sequence
  Synthetic construct
agcctaagttcagtac

SEQ ID NO: 901 - DNA, 16 bp, Artificial Sequence
  Synthetic construct
agcctaatcaataagg

SEQ ID NO: 902 - DNA, 16 bp, Artificial Sequence
  Synthetic construct
agcctaatcaataagg

SEQ ID NO: 903 - DNA, 16 bp, Artificial Sequence
  Synthetic construct
agcctaatcaggtaaa

SEQ ID NO: 904 - DNA, 16 bp, Artificial Sequence
  Synthetic construct
agcctaatcaggtaaa

SEQ ID NO: 905 - DNA, 16 bp, Artificial Sequence
  Synthetic construct
agcctaatcgtgacat

SEQ ID NO: 906 - DNA, 16 bp, Artificial Sequence
  Synthetic construct
agcctaatcgtgacat

SEQ ID NO: 907 - DNA, 16 bp, Artificial Sequence
  Synthetic construct
agcggtcagacaaagg

SEQ ID NO: 908 - DNA, 16 bp, Artificial Sequence
  Synthetic construct
agcggtcagacaaagg

SEQ ID NO: 909 - DNA, 16 bp, Artificial Sequence
  Synthetic construct
agcggtcagagctggt

SEQ ID NO: 910 - DNA, 16 bp, Artificial Sequence
  Synthetic construct
agcggtcagagctggt

SEQ ID NO: 911 - DNA, 16 bp, Artificial Sequence
  Synthetic construct
agcggtcgtcttgatg

SEQ ID NO: 912 - DNA, 16 bp, Artificial Sequence
  Synthetic construct
agcggtcgtcttgatg

SEQ ID NO: 913 - DNA, 16 bp, Artificial Sequence
  Synthetic construct
agcgtatagcacgcct

SEQ ID NO: 914 - DNA, 16 bp, Artificial Sequence
  Synthetic construct
agcgtatagcacgcct

SEQ ID NO: 915 - DNA, 16 bp, Artificial Sequence
  Synthetic construct
agcgtatagctaactc

SEQ ID NO: 916 - DNA, 16 bp, Artificial Sequence
  Synthetic construct
agcgtatagctaactc

SEQ ID NO: 917 - DNA, 16 bp, Artificial Sequence
  Synthetic construct
agcgtataggcgatac

SEQ ID NO: 918 - DNA, 16 bp, Artificial Sequence
  Synthetic construct
agcgtataggcgatac

SEQ ID NO: 919 - DNA, 16 bp, Artificial Sequence
  Synthetic construct
agcgtatgtaagggaa

SEQ ID NO: 920 - DNA, 16 bp, Artificial Sequence
  Synthetic construct
agcgtatgtaagggaa

SEQ ID NO: 921 - DNA, 16 bp, Artificial Sequence
  Synthetic construct
agcgtcgcacaggcct

SEQ ID NO: 922 - DNA, 16 bp, Artificial Sequence
  Synthetic construct
agcgtcgcacaggcct

SEQ ID NO: 923 - DNA, 16 bp, Artificial Sequence
  Synthetic construct
agcgtcgcacctggtg

SEQ ID NO: 924 - DNA, 16 bp, Artificial Sequence
  Synthetic construct
agcgtcgcacctggtg

SEQ ID NO: 925 - DNA, 16 bp, Artificial Sequence
  Synthetic construct
agcgtcgcaggaacgt

SEQ ID NO: 926 - DNA, 16 bp, Artificial Sequence
  Synthetic construct
agcgtcgcaggaacgt

SEQ ID NO: 927 - DNA, 16 bp, Artificial Sequence
  Synthetic construct
agcgtcgcatgatcca

SEQ ID NO: 928 - DNA, 16 bp, Artificial Sequence
  Synthetic construct
agcgtcgcatgatcca

SEQ ID NO: 929 - DNA, 16 bp, Artificial Sequence
  Synthetic construct
agcgtcggtaaacctc

SEQ ID NO: 930 - DNA, 16 bp, Artificial Sequence
  Synthetic construct
agcgtcggtaaacctc

SEQ ID NO: 931 - DNA, 16 bp, Artificial Sequence
  Synthetic construct
agcgtcgtcacaaacc

SEQ ID NO: 932 - DNA, 16 bp, Artificial Sequence
  Synthetic construct
agcgtcgtcacaaacc

SEQ ID NO: 933 - DNA, 16 bp, Artificial Sequence
  Synthetic construct
agctcctagaccggat

SEQ ID NO: 934 - DNA, 16 bp, Artificial Sequence
  Synthetic construct
agctcctagaccggat

SEQ ID NO: 935 - DNA, 16 bp, Artificial Sequence
  Synthetic construct
agctcctagactaggc

SEQ ID NO: 936 - DNA, 16 bp, Artificial Sequence
  Synthetic construct
agctcctagactaggc

SEQ ID NO: 937 - DNA, 16 bp, Artificial Sequence
  Synthetic construct
agctcctcacatggga

SEQ ID NO: 938 - DNA, 16 bp, Artificial Sequence
  Synthetic construct
agctcctcacatggga

SEQ ID NO: 939 - DNA, 16 bp, Artificial Sequence
  Synthetic construct
agctctccaagtagta

SEQ ID NO: 940 - DNA, 16 bp, Artificial Sequence
  Synthetic construct
agctctccaagtagta

SEQ ID NO: 941 - DNA, 16 bp, Artificial Sequence
  Synthetic construct
agctctccacagaggt

SEQ ID NO: 942 - DNA, 16 bp, Artificial Sequence
  Synthetic construct
agctctccacagaggt

SEQ ID NO: 943 - DNA, 16 bp, Artificial Sequence
  Synthetic construct
agctctccacccagtg

SEQ ID NO: 944 - DNA, 16 bp, Artificial Sequence
  Synthetic construct
agctctccacccagtg

SEQ ID NO: 945 - DNA, 16 bp, Artificial Sequence
  Synthetic construct
agctctcgtaccgctg

SEQ ID NO: 946 - DNA, 16 bp, Artificial Sequence
  Synthetic construct
agctctcgtaccgctg

SEQ ID NO: 947 - DNA, 16 bp, Artificial Sequence
  Synthetic construct
agctctcgtgcagaca

SEQ ID NO: 948 - DNA, 16 bp, Artificial Sequence
  Synthetic construct
agctctcgtgcagaca

SEQ ID NO: 949 - DNA, 16 bp, Artificial Sequence
  Synthetic construct
agctctctcatgctcc

SEQ ID NO: 950 - DNA, 16 bp, Artificial Sequence
  Synthetic construct
agctctctcatgctcc

SEQ ID NO: 951 - DNA, 16 bp, Artificial Sequence
  Synthetic construct
agcttgaaggctagca

SEQ ID NO: 952 - DNA, 16 bp, Artificial Sequence
  Synthetic construct
agcttgaaggctagca

SEQ ID NO: 953 - DNA, 16 bp, Artificial Sequence
  Synthetic construct
agcttgacacatccgg

SEQ ID NO: 954 - DNA, 16 bp, Artificial Sequence
  Synthetic construct
agcttgacacatccgg

SEQ ID NO: 955 - DNA, 16 bp, Artificial Sequence
  Synthetic construct
agcttgacattaaccg

SEQ ID NO: 956 - DNA, 16 bp, Artificial Sequence
  Synthetic construct
agcttgacattaaccg

SEQ ID NO: 957 - DNA, 16 bp, Artificial Sequence
  Synthetic construct
agcttgatctacttac

SEQ ID NO: 958 - DNA, 16 bp, Artificial Sequence
  Synthetic construct
agcttgatctacttac

SEQ ID NO: 959 - DNA, 16 bp, Artificial Sequence
  Synthetic construct
aggccaccagccacca

SEQ ID NO: 960 - DNA, 16 bp, Artificial Sequence
  Synthetic construct
aggccaccagccacca

SEQ ID NO: 961 - DNA, 16 bp, Artificial Sequence
  Synthetic construct
aggccacgtcaaagat

SEQ ID NO: 962 - DNA, 16 bp, Artificial Sequence
  Synthetic construct
aggccacgtcaaagat

SEQ ID NO: 963 - DNA, 16 bp, Artificial Sequence
  Synthetic construct
aggccactctcggacg

SEQ ID NO: 964 - DNA, 16 bp, Artificial Sequence
  Synthetic construct
aggccactctcggacg

SEQ ID NO: 965 - DNA, 16 bp, Artificial Sequence
  Synthetic construct
aggccactctcttgat

SEQ ID NO: 966 - DNA, 16 bp, Artificial Sequence
  Synthetic construct
aggccactctcttgat

SEQ ID NO: 967 - DNA, 16 bp, Artificial Sequence
  Synthetic construct
aggccgtaggcaggtt

SEQ ID NO: 968 - DNA, 16 bp, Artificial Sequence
  Synthetic construct
aggccgtaggcaggtt

SEQ ID NO: 969 - DNA, 16 bp, Artificial Sequence
  Synthetic construct
aggccgtagtttcctt

SEQ ID NO: 970 - DNA, 16 bp, Artificial Sequence
  Synthetic construct
aggccgtagtttcctt

SEQ ID NO: 971 - DNA, 16 bp, Artificial Sequence
  Synthetic construct
aggccgtcaacgatct

SEQ ID NO: 972 - DNA, 16 bp, Artificial Sequence
  Synthetic construct
aggccgtcaacgatct

SEQ ID NO: 973 - DNA, 16 bp, Artificial Sequence
  Synthetic construct
aggccgtcatagtaag

SEQ ID NO: 974 - DNA, 16 bp, Artificial Sequence
  Synthetic construct
aggccgtcatagtaag

SEQ ID NO: 975 - DNA, 16 bp, Artificial Sequence
  Synthetic construct
aggccgtgtgttaaga

SEQ ID NO: 976 - DNA, 16 bp, Artificial Sequence
  Synthetic construct
aggccgtgtgttaaga

SEQ ID NO: 977 - DNA, 16 bp, Artificial Sequence
  Synthetic construct
agggagtcacagaggt

SEQ ID NO: 978 - DNA, 16 bp, Artificial Sequence
  Synthetic construct
agggagtcacagaggt

SEQ ID NO: 979 - DNA, 16 bp, Artificial Sequence
  Synthetic construct
agggagtgtagctccg

SEQ ID NO: 980 - DNA, 16 bp, Artificial Sequence
  Synthetic construct
agggagtgtagctccg

SEQ ID NO: 981 - DNA, 16 bp, Artificial Sequence
  Synthetic construct
agggagtgtctcgttc

SEQ ID NO: 982 - DNA, 16 bp, Artificial Sequence
  Synthetic construct
agggagtgtctcgttc

SEQ ID NO: 983 - DNA, 16 bp, Artificial Sequence
  Synthetic construct
agggagttctactcat

SEQ ID NO: 984 - DNA, 16 bp, Artificial Sequence
  Synthetic construct
agggagttctactcat

SEQ ID NO: 985 - DNA, 16 bp, Artificial Sequence
  Synthetic construct
agggatgagggtgttg

SEQ ID NO: 986 - DNA, 16 bp, Artificial Sequence
  Synthetic construct
agggatgagggtgttg

SEQ ID NO: 987 - DNA, 16 bp, Artificial Sequence
  Synthetic construct
agggatgcacaagccc

SEQ ID NO: 988 - DNA, 16 bp, Artificial Sequence
  Synthetic construct
agggatgcacaagccc

SEQ ID NO: 989 - DNA, 16 bp, Artificial Sequence
  Synthetic construct
agggatggtcacttcc

SEQ ID NO: 990 - DNA, 16 bp, Artificial Sequence
  Synthetic construct
agggatggtcacttcc

SEQ ID NO: 991 - DNA, 16 bp, Artificial Sequence
  Synthetic construct
agggatggtcgcttct

SEQ ID NO: 992 - DNA, 16 bp, Artificial Sequence
  Synthetic construct
agggatggtcgcttct

SEQ ID NO: 993 - DNA, 16 bp, Artificial Sequence
  Synthetic construct
agggatggtcggatcc

SEQ ID NO: 994 - DNA, 16 bp, Artificial Sequence
  Synthetic construct
agggatggtcggatcc

SEQ ID NO: 995 - DNA, 16 bp, Artificial Sequence
  Synthetic construct
agggatgtcatcattc

SEQ ID NO: 996 - DNA, 16 bp, Artificial Sequence
  Synthetic construct
agggatgtcatcattc

SEQ ID NO: 997 - DNA, 16 bp, Artificial Sequence
  Synthetic construct
agggatgtcctgcttg

SEQ ID NO: 998 - DNA, 16 bp, Artificial Sequence
  Synthetic construct
agggatgtcctgcttg

SEQ ID NO: 999 - DNA, 16 bp, Artificial Sequence
  Synthetic construct
agggtgagtcagaggt

SEQ ID NO: 1000 - DNA, 16 bp, Artificial Sequence
  Synthetic construct
agggtgagtcagaggt

SEQ ID NO: 1001 - DNA, 16 bp, Artificial Sequence
  Synthetic construct
agggtgagtcgtcttc

SEQ ID NO: 1002 - DNA, 16 bp, Artificial Sequence
  Synthetic construct
agggtgagtcgtcttc

SEQ ID NO: 1003 - DNA, 16 bp, Artificial Sequence
  Synthetic construct
agggtgagttaaagtg

SEQ ID NO: 1004 - DNA, 16 bp, Artificial Sequence
  Synthetic construct
agggtgagttaaagtg

SEQ ID NO: 1005 - DNA, 16 bp, Artificial Sequence
  Synthetic construct
agggtgatcccgactt

SEQ ID NO: 1006 - DNA, 16 bp, Artificial Sequence
  Synthetic construct
agggtgatcccgactt

SEQ ID NO: 1007 - DNA, 16 bp, Artificial Sequence
  Synthetic construct
aggtcatagcgttccg

SEQ ID NO: 1008 - DNA, 16 bp, Artificial Sequence
  Synthetic construct
aggtcatagcgttccg

SEQ ID NO: 1009 - DNA, 16 bp, Artificial Sequence
  Synthetic construct
aggtcatagtaagtac

SEQ ID NO: 1010 - DNA, 16 bp, Artificial Sequence
  Synthetic construct
aggtcatagtaagtac

SEQ ID NO: 1011 - DNA, 16 bp, Artificial Sequence
  Synthetic construct
aggtcatagtaggcca

SEQ ID NO: 1012 - DNA, 16 bp, Artificial Sequence
  Synthetic construct
aggtcatagtaggcca

SEQ ID NO: 1013 - DNA, 16 bp, Artificial Sequence
  Synthetic construct
aggtcatagtgaacat

SEQ ID NO: 1014 - DNA, 16 bp, Artificial Sequence
  Synthetic construct
aggtcatagtgaacat

SEQ ID NO: 1015 - DNA, 16 bp, Artificial Sequence
  Synthetic construct
aggtcatagttaagtg

SEQ ID NO: 1016 - DNA, 16 bp, Artificial Sequence
  Synthetic construct
aggtcatagttaagtg

SEQ ID NO: 1017 - DNA, 16 bp, Artificial Sequence
  Synthetic construct
aggtcatgtaagggaa

SEQ ID NO: 1018 - DNA, 16 bp, Artificial Sequence
  Synthetic construct
aggtcatgtaagggaa

SEQ ID NO: 1019 - DNA, 16 bp, Artificial Sequence
  Synthetic construct
aggtcattccttggtc

SEQ ID NO: 1020 - DNA, 16 bp, Artificial Sequence
  Synthetic construct
aggtcattccttggtc

SEQ ID NO: 1021 - DNA, 16 bp, Artificial Sequence
  Synthetic construct
aggtccgcatcgacgc

SEQ ID NO: 1022 - DNA, 16 bp, Artificial Sequence
  Synthetic construct
aggtccgcatcgacgc

SEQ ID NO: 1023 - DNA, 16 bp, Artificial Sequence
  Synthetic construct
aggtccgtcaaacaag

SEQ ID NO: 1024 - DNA, 16 bp, Artificial Sequence
  Synthetic construct
aggtccgtcaaacaag

SEQ ID NO: 1025 - DNA, 16 bp, Artificial Sequence
  Synthetic construct
agtagtcaggccgaat

SEQ ID NO: 1026 - DNA, 16 bp, Artificial Sequence
  Synthetic construct
agtagtcaggccgaat

SEQ ID NO: 1027 - DNA, 16 bp, Artificial Sequence
  Synthetic construct
agtagtccaaatacag

SEQ ID NO: 1028 - DNA, 16 bp, Artificial Sequence
  Synthetic construct
agtagtccaaatacag

SEQ ID NO: 1029 - DNA, 16 bp, Artificial Sequence
  Synthetic construct
agtagtccacagacag

SEQ ID NO: 1030 - DNA, 16 bp, Artificial Sequence
  Synthetic construct
agtagtccacagacag

SEQ ID NO: 1031 - DNA, 16 bp, Artificial Sequence
  Synthetic construct
agtagtccatactctt

SEQ ID NO: 1032 - DNA, 16 bp, Artificial Sequence
  Synthetic construct
agtagtccatactctt

SEQ ID NO: 1033 - DNA, 16 bp, Artificial Sequence
  Synthetic construct
agtagtccatctcgct

SEQ ID NO: 1034 - DNA, 16 bp, Artificial Sequence
  Synthetic construct
agtagtccatctcgct

SEQ ID NO: 1035 - DNA, 16 bp, Artificial Sequence
  Synthetic construct
agtagtccattcactt

SEQ ID NO: 1036 - DNA, 16 bp, Artificial Sequence
  Synthetic construct
agtagtccattcactt

SEQ ID NO: 1037 - DNA, 16 bp, Artificial Sequence
  Synthetic construct
agtagtcgtggcgaat

SEQ ID NO: 1038 - DNA, 16 bp, Artificial Sequence
  Synthetic construct
agtagtcgtggcgaat

SEQ ID NO: 1039 - DNA, 16 bp, Artificial Sequence
  Synthetic construct
agtagtcgttcgtctc

SEQ ID NO: 1040 - DNA, 16 bp, Artificial Sequence
  Synthetic construct
agtagtcgttcgtctc

SEQ ID NO: 1041 - DNA, 16 bp, Artificial Sequence
  Synthetic construct
agtctttagggctctc

SEQ ID NO: 1042 - DNA, 16 bp, Artificial Sequence
  Synthetic construct
agtctttagggctctc

SEQ ID NO: 1043 - DNA, 16 bp, Artificial Sequence
  Synthetic construct
agtctttagtgaagag

SEQ ID NO: 1044 - DNA, 16 bp, Artificial Sequence
  Synthetic construct
agtctttagtgaagag

SEQ ID NO: 1045 - DNA, 16 bp, Artificial Sequence
  Synthetic construct
agtctttcaatacgct

SEQ ID NO: 1046 - DNA, 16 bp, Artificial Sequence
  Synthetic construct
agtctttcaatacgct

SEQ ID NO: 1047 - DNA, 16 bp, Artificial Sequence
  Synthetic construct
agtctttcattacgac

SEQ ID NO: 1048 - DNA, 16 bp, Artificial Sequence
  Synthetic construct
agtctttcattacgac

SEQ ID NO: 1049 - DNA, 16 bp, Artificial Sequence
  Synthetic construct
agtctttgtaggcatg

SEQ ID NO: 1050 - DNA, 16 bp, Artificial Sequence
  Synthetic construct
agtctttgtaggcatg

SEQ ID NO: 1051 - DNA, 16 bp, Artificial Sequence
  Synthetic construct
agtctttgttcgttga

SEQ ID NO: 1052 - DNA, 16 bp, Artificial Sequence
  Synthetic construct
agtctttgttcgttga

SEQ ID NO: 1053 - DNA, 16 bp, Artificial Sequence
  Synthetic construct
agtcttttccctgact

SEQ ID NO: 1054 - DNA, 16 bp, Artificial Sequence
  Synthetic construct
agtcttttccctgact

SEQ ID NO: 1055 - DNA, 16 bp, Artificial Sequence
  Synthetic construct
agtcttttcggcatcg

SEQ ID NO: 1056 - DNA, 16 bp, Artificial Sequence
  Synthetic construct
agtcttttcggcatcg

SEQ ID NO: 1057 - DNA, 16 bp, Artificial Sequence
  Synthetic construct
agtcttttctctgaga

SEQ ID NO: 1058 - DNA, 16 bp, Artificial Sequence
  Synthetic construct
agtcttttctctgaga

SEQ ID NO: 1059 - DNA, 16 bp, Artificial Sequence
  Synthetic construct
agtgaggagagtaatc

SEQ ID NO: 1060 - DNA, 16 bp, Artificial Sequence
  Synthetic construct
agtgaggagagtaatc

SEQ ID NO: 1061 - DNA, 16 bp, Artificial Sequence
  Synthetic construct
agtgaggagatcctgt

SEQ ID NO: 1062 - DNA, 16 bp, Artificial Sequence
  Synthetic construct
agtgaggagatcctgt

SEQ ID NO: 1063 - DNA, 16 bp, Artificial Sequence
  Synthetic construct
agtgaggagatcgggt

SEQ ID NO: 1064 - DNA, 16 bp, Artificial Sequence
  Synthetic construct
agtgaggagatcgggt

SEQ ID NO: 1065 - DNA, 16 bp, Artificial Sequence
  Synthetic construct
agtgaggcatgttccc

SEQ ID NO: 1066 - DNA, 16 bp, Artificial Sequence
  Synthetic construct
agtgaggcatgttccc

SEQ ID NO: 1067 - DNA, 16 bp, Artificial Sequence
  Synthetic construct
agtgagggtagcacga

SEQ ID NO: 1068 - DNA, 16 bp, Artificial Sequence
  Synthetic construct
agtgagggtagcacga

SEQ ID NO: 1069 - DNA, 16 bp, Artificial Sequence
  Synthetic construct
agtgaggtcatggtca

SEQ ID NO: 1070 - DNA, 16 bp, Artificial Sequence
  Synthetic construct
agtgaggtcatggtca

SEQ ID NO: 1071 - DNA, 16 bp, Artificial Sequence
  Synthetic construct
agtgggaagtcaaggc

SEQ ID NO: 1072 - DNA, 16 bp, Artificial Sequence
  Synthetic construct
agtgggaagtcaaggc

SEQ ID NO: 1073 - DNA, 16 bp, Artificial Sequence
  Synthetic construct
agtgggacaagaagag

SEQ ID NO: 1074 - DNA, 16 bp, Artificial Sequence
  Synthetic construct
agtgggacaagaagag

SEQ ID NO: 1075 - DNA, 16 bp, Artificial Sequence
  Synthetic construct
agtgggacacgtaagg

SEQ ID NO: 1076 - DNA, 16 bp, Artificial Sequence
  Synthetic construct
agtgggacacgtaagg

SEQ ID NO: 1077 - DNA, 16 bp, Artificial Sequence
  Synthetic construct
agtgggagtatagtag

SEQ ID NO: 1078 - DNA, 16 bp, Artificial Sequence
  Synthetic construct
agtgggagtatagtag

SEQ ID NO: 1079 - DNA, 16 bp, Artificial Sequence
  Synthetic construct
agtgggagtctctcgt

SEQ ID NO: 1080 - DNA, 16 bp, Artificial Sequence
  Synthetic construct
agtgggagtctctcgt

SEQ ID NO: 1081 - DNA, 16 bp, Artificial Sequence
  Synthetic construct
agtgggagtgccttgg

SEQ ID NO: 1082 - DNA, 16 bp, Artificial Sequence
  Synthetic construct
agtgggagtgccttgg

SEQ ID NO: 1083 - DNA, 16 bp, Artificial Sequence
  Synthetic construct
agtgggatcaaggtaa

SEQ ID NO: 1084 - DNA, 16 bp, Artificial Sequence
  Synthetic construct
agtgggatcaaggtaa

SEQ ID NO: 1085 - DNA, 16 bp, Artificial Sequence
  Synthetic construct
agtgtcaagccagttt

SEQ ID NO: 1086 - DNA, 16 bp, Artificial Sequence
  Synthetic construct
agtgtcaagccagttt

SEQ ID NO: 1087 - DNA, 16 bp, Artificial Sequence
  Synthetic construct
agtgtcaagttacggg

SEQ ID NO: 1088 - DNA, 16 bp, Artificial Sequence
  Synthetic construct
agtgtcaagttacggg

SEQ ID NO: 1089 - DNA, 16 bp, Artificial Sequence
  Synthetic construct
agtgtcacagctccga

SEQ ID NO: 1090 - DNA, 16 bp, Artificial Sequence
  Synthetic construct
agtgtcacagctccga

SEQ ID NO: 1091 - DNA, 16 bp, Artificial Sequence
  Synthetic construct
agtgtcacagttccct

SEQ ID NO: 1092 - DNA, 16 bp, Artificial Sequence
  Synthetic construct
agtgtcacagttccct

SEQ ID NO: 1093 - DNA, 16 bp, Artificial Sequence
  Synthetic construct
agtgtcagtactcaac

SEQ ID NO: 1094 - DNA, 16 bp, Artificial Sequence
  Synthetic construct
agtgtcagtactcaac

SEQ ID NO: 1095 - DNA, 16 bp, Artificial Sequence
  Synthetic construct
agtgtcagtcggatcc

SEQ ID NO: 1096 - DNA, 16 bp, Artificial Sequence
  Synthetic construct
agtgtcagtcggatcc

SEQ ID NO: 1097 - DNA, 16 bp, Artificial Sequence
  Synthetic construct
agtgtcatcggaatct

SEQ ID NO: 1098 - DNA, 16 bp, Artificial Sequence
  Synthetic construct
agtgtcatcggaatct

SEQ ID NO: 1099 - DNA, 16 bp, Artificial Sequence
  Synthetic construct
agttggtagactacaa

SEQ ID NO: 1100 - DNA, 16 bp, Artificial Sequence
  Synthetic construct
agttggtagactacaa

SEQ ID NO: 1101 - DNA, 16 bp, Artificial Sequence
  Synthetic construct
agttggtcacgaagca

SEQ ID NO: 1102 - DNA, 16 bp, Artificial Sequence
  Synthetic construct
agttggtcacgaagca

SEQ ID NO: 1103 - DNA, 16 bp, Artificial Sequence
  Synthetic construct
agttggtgtatagtag

SEQ ID NO: 1104 - DNA, 16 bp, Artificial Sequence
  Synthetic construct
agttggtgtatagtag

SEQ ID NO: 1105 - DNA, 16 bp, Artificial Sequence
  Synthetic construct
ataacgcaggctagac

SEQ ID NO: 1106 - DNA, 16 bp, Artificial Sequence
  Synthetic construct
ataacgcaggctagac

SEQ ID NO: 1107 - DNA, 16 bp, Artificial Sequence
  Synthetic construct
ataacgcagggtcgat

SEQ ID NO: 1108 - DNA, 16 bp, Artificial Sequence
  Synthetic construct
ataacgcagggtcgat

SEQ ID NO: 1109 - DNA, 16 bp, Artificial Sequence
  Synthetic construct
ataacgcagtacgccc

SEQ ID NO: 1110 - DNA, 16 bp, Artificial Sequence
  Synthetic construct
ataacgcagtacgccc

SEQ ID NO: 1111 - DNA, 16 bp, Artificial Sequence
  Synthetic construct
ataacgccacagaggt

SEQ ID NO: 1112 - DNA, 16 bp, Artificial Sequence
  Synthetic construct
ataacgccacagaggt

SEQ ID NO: 1113 - DNA, 16 bp, Artificial Sequence
  Synthetic construct
ataacgcgtaggcatg

SEQ ID NO: 1114 - DNA, 16 bp, Artificial Sequence
  Synthetic construct
ataacgcgtaggcatg

SEQ ID NO: 1115 - DNA, 16 bp, Artificial Sequence
  Synthetic construct
ataacgcgtatagggc

SEQ ID NO: 1116 - DNA, 16 bp, Artificial Sequence
  Synthetic construct
ataacgcgtatagggc

SEQ ID NO: 1117 - DNA, 16 bp, Artificial Sequence
  Synthetic construct
ataacgcgtcagaata

SEQ ID NO: 1118 - DNA, 16 bp, Artificial Sequence
  Synthetic construct
ataacgcgtcagaata

SEQ ID NO: 1119 - DNA, 16 bp, Artificial Sequence
  Synthetic construct
ataacgctcgtggacc

SEQ ID NO: 1120 - DNA, 16 bp, Artificial Sequence
  Synthetic construct
ataacgctcgtggacc

SEQ ID NO: 1121 - DNA, 16 bp, Artificial Sequence
  Synthetic construct
ataagagagagttggc

SEQ ID NO: 1122 - DNA, 16 bp, Artificial Sequence
  Synthetic construct
ataagagagagttggc

SEQ ID NO: 1123 - DNA, 16 bp, Artificial Sequence
  Synthetic construct
ataagagcaagctgga

SEQ ID NO: 1124 - DNA, 16 bp, Artificial Sequence
  Synthetic construct
ataagagcaagctgga

SEQ ID NO: 1125 - DNA, 16 bp, Artificial Sequence
  Synthetic construct
ataagagcagttaacc

SEQ ID NO: 1126 - DNA, 16 bp, Artificial Sequence
  Synthetic construct
ataagagcagttaacc

SEQ ID NO: 1127 - DNA, 16 bp, Artificial Sequence
  Synthetic construct
ataagagcatggtcat

SEQ ID NO: 1128 - DNA, 16 bp, Artificial Sequence
  Synthetic construct
ataagagcatggtcat

SEQ ID NO: 1129 - DNA, 16 bp, Artificial Sequence
  Synthetic construct
ataagaggtaccatca

SEQ ID NO: 1130 - DNA, 16 bp, Artificial Sequence
  Synthetic construct
ataagaggtaccatca

SEQ ID NO: 1131 - DNA, 16 bp, Artificial Sequence
  Synthetic construct
ataagaggtcggatcc

SEQ ID NO: 1132 - DNA, 16 bp, Artificial Sequence
  Synthetic construct
ataagaggtcggatcc

SEQ ID NO: 1133 - DNA, 16 bp, Artificial Sequence
  Synthetic construct
ataagaggttattctc

SEQ ID NO: 1134 - DNA, 16 bp, Artificial Sequence
  Synthetic construct
ataagaggttattctc

SEQ ID NO: 1135 - DNA, 16 bp, Artificial Sequence
  Synthetic construct
ataagagtcagcgacc

SEQ ID NO: 1136 - DNA, 16 bp, Artificial Sequence
  Synthetic construct
ataagagtcagcgacc

SEQ ID NO: 1137 - DNA, 16 bp, Artificial Sequence
  Synthetic construct
atagaccagagacgaa

SEQ ID NO: 1138 - DNA, 16 bp, Artificial Sequence
  Synthetic construct
atagaccagagacgaa

SEQ ID NO: 1139 - DNA, 16 bp, Artificial Sequence
  Synthetic construct
atagacccagtgagtg

SEQ ID NO: 1140 - DNA, 16 bp, Artificial Sequence
  Synthetic construct
atagacccagtgagtg

SEQ ID NO: 1141 - DNA, 16 bp, Artificial Sequence
  Synthetic construct
atagaccgtcgtggct

SEQ ID NO: 1142 - DNA, 16 bp, Artificial Sequence
  Synthetic construct
atagaccgtcgtggct

SEQ ID NO: 1143 - DNA, 16 bp, Artificial Sequence
  Synthetic construct
atagaccgtgcagtag

SEQ ID NO: 1144 - DNA, 16 bp, Artificial Sequence
  Synthetic construct
atagaccgtgcagtag

SEQ ID NO: 1145 - DNA, 16 bp, Artificial Sequence
  Synthetic construct
atagacctctccaacc

SEQ ID NO: 1146 - DNA, 16 bp, Artificial Sequence
  Synthetic construct
atagacctctccaacc

SEQ ID NO: 1147 - DNA, 16 bp, Artificial Sequence
  Synthetic construct
atcacgaagcgcttat

SEQ ID NO: 1148 - DNA, 16 bp, Artificial Sequence
  Synthetic construct
atcacgaagcgcttat

SEQ ID NO: 1149 - DNA, 16 bp, Artificial Sequence
  Synthetic construct
atcacgacacgttggc

SEQ ID NO: 1150 - DNA, 16 bp, Artificial Sequence
  Synthetic construct
atcacgacacgttggc

SEQ ID NO: 1151 - DNA, 16 bp, Artificial Sequence
  Synthetic construct
atcacgagtcgcgtgt

SEQ ID NO: 1152 - DNA, 16 bp, Artificial Sequence
  Synthetic construct
atcacgagtcgcgtgt

SEQ ID NO: 1153 - DNA, 16 bp, Artificial Sequence
  Synthetic construct
atcacgatccaatggt

SEQ ID NO: 1154 - DNA, 16 bp, Artificial Sequence
  Synthetic construct
atcacgatccaatggt

SEQ ID NO: 1155 - DNA, 16 bp, Artificial Sequence
  Synthetic construct
atcatctagagcctag

SEQ ID NO: 1156 - DNA, 16 bp, Artificial Sequence
  Synthetic construct
atcatctagagcctag

SEQ ID NO: 1157 - DNA, 16 bp, Artificial Sequence
  Synthetic construct
atcatctagttacggg

SEQ ID NO: 1158 - DNA, 16 bp, Artificial Sequence
  Synthetic construct
atcatctagttacggg

SEQ ID NO: 1159 - DNA, 16 bp, Artificial Sequence
  Synthetic construct
atcatctcaccaggtc

SEQ ID NO: 1160 - DNA, 16 bp, Artificial Sequence
  Synthetic construct
atcatctcaccaggtc

SEQ ID NO: 1161 - DNA, 16 bp, Artificial Sequence
  Synthetic construct
atcatctcagtcagcc

SEQ ID NO: 1162 - DNA, 16 bp, Artificial Sequence
  Synthetic construct
atcatctcagtcagcc

SEQ ID NO: 1163 - DNA, 16 bp, Artificial Sequence
  Synthetic construct
atcatggagaagattc

SEQ ID NO: 1164 - DNA, 16 bp, Artificial Sequence
  Synthetic construct
atcatggagaagattc

SEQ ID NO: 1165 - DNA, 16 bp, Artificial Sequence
  Synthetic construct
atcatggagaggttgc

SEQ ID NO: 1166 - DNA, 16 bp, Artificial Sequence
  Synthetic construct
atcatggagaggttgc

SEQ ID NO: 1167 - DNA, 16 bp, Artificial Sequence
  Synthetic construct
atcatggcattgggcc

SEQ ID NO: 1168 - DNA, 16 bp, Artificial Sequence
  Synthetic construct
atcatggcattgggcc

SEQ ID NO: 1169 - DNA, 16 bp, Artificial Sequence
  Synthetic construct
atcatgggtgtggttt

SEQ ID NO: 1170 - DNA, 16 bp, Artificial Sequence
  Synthetic construct
atcatgggtgtggttt

SEQ ID NO: 1171 - DNA, 16 bp, Artificial Sequence
  Synthetic construct
atcatggtcagttcga

SEQ ID NO: 1172 - DNA, 16 bp, Artificial Sequence
  Synthetic construct
atcatggtcagttcga

SEQ ID NO: 1173 - DNA, 16 bp, Artificial Sequence
  Synthetic construct
atccaccagggtatcg

SEQ ID NO: 1174 - DNA, 16 bp, Artificial Sequence
  Synthetic construct
atccaccagggtatcg

SEQ ID NO: 1175 - DNA, 16 bp, Artificial Sequence
  Synthetic construct
atccaccgtctcgttc

SEQ ID NO: 1176 - DNA, 16 bp, Artificial Sequence
  Synthetic construct
atccaccgtctcgttc

SEQ ID NO: 1177 - DNA, 16 bp, Artificial Sequence
  Synthetic construct
atccacctcggaatct

SEQ ID NO: 1178 - DNA, 16 bp, Artificial Sequence
  Synthetic construct
atccacctcggaatct

SEQ ID NO: 1179 - DNA, 16 bp, Artificial Sequence
  Synthetic construct
atccgaaagtagcggt

SEQ ID NO: 1180 - DNA, 16 bp, Artificial Sequence
  Synthetic construct
atccgaaagtagcggt

SEQ ID NO: 1181 - DNA, 16 bp, Artificial Sequence
  Synthetic construct
atccgaacatataccg

SEQ ID NO: 1182 - DNA, 16 bp, Artificial Sequence
  Synthetic construct
atccgaacatataccg

SEQ ID NO: 1183 - DNA, 16 bp, Artificial Sequence
  Synthetic construct
atccgaacatgctggc

SEQ ID NO: 1184 - DNA, 16 bp, Artificial Sequence
  Synthetic construct
atccgaacatgctggc

SEQ ID NO: 1185 - DNA, 16 bp, Artificial Sequence
  Synthetic construct
atccgaagtaaggatt

SEQ ID NO: 1186 - DNA, 16 bp, Artificial Sequence
  Synthetic construct
atccgaagtaaggatt

SEQ ID NO: 1187 - DNA, 16 bp, Artificial Sequence
  Synthetic construct
atccgaagtccgagtc

SEQ ID NO: 1188 - DNA, 16 bp, Artificial Sequence
  Synthetic construct
atccgaagtccgagtc

SEQ ID NO: 1189 - DNA, 16 bp, Artificial Sequence
  Synthetic construct
atccgaatccaatggt

SEQ ID NO: 1190 - DNA, 16 bp, Artificial Sequence
  Synthetic construct
atccgaatccaatggt

SEQ ID NO: 1191 - DNA, 16 bp, Artificial Sequence
  Synthetic construct
atcgagtagtgtggca

SEQ ID NO: 1192 - DNA, 16 bp, Artificial Sequence
  Synthetic construct
atcgagtagtgtggca

SEQ ID NO: 1193 - DNA, 16 bp, Artificial Sequence
  Synthetic construct
atcgagtgtcatatcg

SEQ ID NO: 1194 - DNA, 16 bp, Artificial Sequence
  Synthetic construct
atcgagtgtcatatcg

SEQ ID NO: 1195 - DNA, 16 bp, Artificial Sequence
  Synthetic construct
atcgagttcctcaacc

SEQ ID NO: 1196 - DNA, 16 bp, Artificial Sequence
  Synthetic construct
atcgagttcctcaacc

SEQ ID NO: 1197 - DNA, 16 bp, Artificial Sequence
  Synthetic construct
atcgagttcgcttgtc

SEQ ID NO: 1198 - DNA, 16 bp, Artificial Sequence
  Synthetic construct
atcgagttcgcttgtc

SEQ ID NO: 1199 - DNA, 16 bp, Artificial Sequence
  Synthetic construct
atcgagttctgtgcaa

SEQ ID NO: 1200 - DNA, 16 bp, Artificial Sequence
  Synthetic construct
atcgagttctgtgcaa

SEQ ID NO: 1201 - DNA, 16 bp, Artificial Sequence
  Synthetic construct
atctactagaagattc

SEQ ID NO: 1202 - DNA, 16 bp, Artificial Sequence
  Synthetic construct
atctactagaagattc

SEQ ID NO: 1203 - DNA, 16 bp, Artificial Sequence
  Synthetic construct
atctactagggatacc

SEQ ID NO: 1204 - DNA, 16 bp, Artificial Sequence
  Synthetic construct
atctactagggatacc

SEQ ID NO: 1205 - DNA, 16 bp, Artificial Sequence
  Synthetic construct
atctactcaatcgaaa

SEQ ID NO: 1206 - DNA, 16 bp, Artificial Sequence
  Synthetic construct
atctactcaatcgaaa

SEQ ID NO: 1207 - DNA, 16 bp, Artificial Sequence
  Synthetic construct
atctactgttgtggcc

SEQ ID NO: 1208 - DNA, 16 bp, Artificial Sequence
  Synthetic construct
atctactgttgtggcc

SEQ ID NO: 1209 - DNA, 16 bp, Artificial Sequence
  Synthetic construct
atctacttcacttact

SEQ ID NO: 1210 - DNA, 16 bp, Artificial Sequence
  Synthetic construct
atctacttcacttact

SEQ ID NO: 1211 - DNA, 16 bp, Artificial Sequence
  Synthetic construct
atctgccagaaacgcc

SEQ ID NO: 1212 - DNA, 16 bp, Artificial Sequence
  Synthetic construct
atctgccagaaacgcc

SEQ ID NO: 1213 - DNA, 16 bp, Artificial Sequence
  Synthetic construct
atctgccaggatggtc

SEQ ID NO: 1214 - DNA, 16 bp, Artificial Sequence
  Synthetic construct
atctgccaggatggtc

SEQ ID NO: 1215 - DNA, 16 bp, Artificial Sequence
  Synthetic construct
atctgccagtttcctt

SEQ ID NO: 1216 - DNA, 16 bp, Artificial Sequence
  Synthetic construct
atctgccagtttcctt

SEQ ID NO: 1217 - DNA, 16 bp, Artificial Sequence
  Synthetic construct
atctgcccagtatctg

SEQ ID NO: 1218 - DNA, 16 bp, Artificial Sequence
  Synthetic construct
atctgcccagtatctg

SEQ ID NO: 1219 - DNA, 16 bp, Artificial Sequence
  Synthetic construct
atctgccgtccaacta

SEQ ID NO: 1220 - DNA, 16 bp, Artificial Sequence
  Synthetic construct
atctgccgtccaacta

SEQ ID NO: 1221 - DNA, 16 bp, Artificial Sequence
  Synthetic construct
atgagggagctgttca

SEQ ID NO: 1222 - DNA, 16 bp, Artificial Sequence
  Synthetic construct
atgagggagctgttca

SEQ ID NO: 1223 - DNA, 16 bp, Artificial Sequence
  Synthetic construct
atgagggcattgagct

SEQ ID NO: 1224 - DNA, 16 bp, Artificial Sequence
  Synthetic construct
atgagggcattgagct

SEQ ID NO: 1225 - DNA, 16 bp, Artificial Sequence
  Synthetic construct
atgaggggtacttctt

SEQ ID NO: 1226 - DNA, 16 bp, Artificial Sequence
  Synthetic construct
atgaggggtacttctt

SEQ ID NO: 1227 - DNA, 16 bp, Artificial Sequence
  Synthetic construct
atgagggtcgtctgaa

SEQ ID NO: 1228 - DNA, 16 bp, Artificial Sequence
  Synthetic construct
atgagggtcgtctgaa

SEQ ID NO: 1229 - DNA, 16 bp, Artificial Sequence
  Synthetic construct
atgcgatagatctgct

SEQ ID NO: 1230 - DNA, 16 bp, Artificial Sequence
  Synthetic construct
atgcgatagatctgct

SEQ ID NO: 1231 - DNA, 16 bp, Artificial Sequence
  Synthetic construct
atgcgatagcaggcta

SEQ ID NO: 1232 - DNA, 16 bp, Artificial Sequence
  Synthetic construct
atgcgatagcaggcta

SEQ ID NO: 1233 - DNA, 16 bp, Artificial Sequence
  Synthetic construct
atgcgatagcctatgt

SEQ ID NO: 1234 - DNA, 16 bp, Artificial Sequence
  Synthetic construct
atgcgatagcctatgt

SEQ ID NO: 1235 - DNA, 16 bp, Artificial Sequence
  Synthetic construct
atgcgatcacggtgtc

SEQ ID NO: 1236 - DNA, 16 bp, Artificial Sequence
  Synthetic construct
atgcgatcacggtgtc

SEQ ID NO: 1237 - DNA, 16 bp, Artificial Sequence
  Synthetic construct
atgcgatcagccagaa

SEQ ID NO: 1238 - DNA, 16 bp, Artificial Sequence
  Synthetic construct
atgcgatcagccagaa

SEQ ID NO: 1239 - DNA, 16 bp, Artificial Sequence
  Synthetic construct
atgcgatgtaaggatt

SEQ ID NO: 1240 - DNA, 16 bp, Artificial Sequence
  Synthetic construct
atgcgatgtaaggatt

SEQ ID NO: 1241 - DNA, 16 bp, Artificial Sequence
  Synthetic construct
atgcgatgtgcaccac

SEQ ID NO: 1242 - DNA, 16 bp, Artificial Sequence
  Synthetic construct
atgcgatgtgcaccac

SEQ ID NO: 1243 - DNA, 16 bp, Artificial Sequence
  Synthetic construct
atgcgattcatgtctt

SEQ ID NO: 1244 - DNA, 16 bp, Artificial Sequence
  Synthetic construct
atgcgattcatgtctt

SEQ ID NO: 1245 - DNA, 16 bp, Artificial Sequence
  Synthetic construct
atgggagagaagaagc

SEQ ID NO: 1246 - DNA, 16 bp, Artificial Sequence
  Synthetic construct
atgggagagaagaagc

SEQ ID NO: 1247 - DNA, 16 bp, Artificial Sequence
  Synthetic construct
atgggagagctaactc

SEQ ID NO: 1248 - DNA, 16 bp, Artificial Sequence
  Synthetic construct
atgggagagctaactc

SEQ ID NO: 1249 - DNA, 16 bp, Artificial Sequence
  Synthetic construct
atgggagaggcattgg

SEQ ID NO: 1250 - DNA, 16 bp, Artificial Sequence
  Synthetic construct
atgggagaggcattgg

SEQ ID NO: 1251 - DNA, 16 bp, Artificial Sequence
  Synthetic construct
atgggagaggtgacca

SEQ ID NO: 1252 - DNA, 16 bp, Artificial Sequence
  Synthetic construct
atgggagaggtgacca

SEQ ID NO: 1253 - DNA, 16 bp, Artificial Sequence
  Synthetic construct
atgggagcaaggacac

SEQ ID NO: 1254 - DNA, 16 bp, Artificial Sequence
  Synthetic construct
atgggagcaaggacac

SEQ ID NO: 1255 - DNA, 16 bp, Artificial Sequence
  Synthetic construct
atgggagcacaggcct

SEQ ID NO: 1256 - DNA, 16 bp, Artificial Sequence
  Synthetic construct
atgggagcacaggcct

SEQ ID NO: 1257 - DNA, 16 bp, Artificial Sequence
  Synthetic construct
atgggaggtccctact

SEQ ID NO: 1258 - DNA, 16 bp, Artificial Sequence
  Synthetic construct
atgggaggtccctact

SEQ ID NO: 1259 - DNA, 16 bp, Artificial Sequence
  Synthetic construct
atgggagtccggcaca

SEQ ID NO: 1260 - DNA, 16 bp, Artificial Sequence
  Synthetic construct
atgggagtccggcaca

SEQ ID NO: 1261 - DNA, 16 bp, Artificial Sequence
  Synthetic construct
atgtgtgcacgcatcg

SEQ ID NO: 1262 - DNA, 16 bp, Artificial Sequence
  Synthetic construct
atgtgtgcacgcatcg

SEQ ID NO: 1263 - DNA, 16 bp, Artificial Sequence
  Synthetic construct
atgtgtgcagattgct

SEQ ID NO: 1264 - DNA, 16 bp, Artificial Sequence
  Synthetic construct
atgtgtgcagattgct

SEQ ID NO: 1265 - DNA, 16 bp, Artificial Sequence
  Synthetic construct
atgtgtgcaggaatgc

SEQ ID NO: 1266 - DNA, 16 bp, Artificial Sequence
  Synthetic construct
atgtgtgcaggaatgc

SEQ ID NO: 1267 - DNA, 16 bp, Artificial Sequence
  Synthetic construct
atgtgtggtctagtgt

SEQ ID NO: 1268 - DNA, 16 bp, Artificial Sequence
  Synthetic construct
atgtgtggtctagtgt

SEQ ID NO: 1269 - DNA, 16 bp, Artificial Sequence
  Synthetic construct
atgtgtggttaagtag

SEQ ID NO: 1270 - DNA, 16 bp, Artificial Sequence
  Synthetic construct
atgtgtggttaagtag

SEQ ID NO: 1271 - DNA, 16 bp, Artificial Sequence
  Synthetic construct
atgtgtgtcatcaccc

SEQ ID NO: 1272 - DNA, 16 bp, Artificial Sequence
  Synthetic construct
atgtgtgtcatcaccc

SEQ ID NO: 1273 - DNA, 16 bp, Artificial Sequence
  Synthetic construct
attactcagagctata

SEQ ID NO: 1274 - DNA, 16 bp, Artificial Sequence
  Synthetic construct
attactcagagctata

SEQ ID NO: 1275 - DNA, 16 bp, Artificial Sequence
  Synthetic construct
attactcagtttgcgt

SEQ ID NO: 1276 - DNA, 16 bp, Artificial Sequence
  Synthetic construct
attactcagtttgcgt

SEQ ID NO: 1277 - DNA, 16 bp, Artificial Sequence
  Synthetic construct
attactctcacaacgt

SEQ ID NO: 1278 - DNA, 16 bp, Artificial Sequence
  Synthetic construct
attactctcacaacgt

SEQ ID NO: 1279 - DNA, 16 bp, Artificial Sequence
  Synthetic construct
attactctcgagagca

SEQ ID NO: 1280 - DNA, 16 bp, Artificial Sequence
  Synthetic construct
attactctcgagagca

SEQ ID NO: 1281 - DNA, 16 bp, Artificial Sequence
  Synthetic construct
attatccagcctatgt

SEQ ID NO: 1282 - DNA, 16 bp, Artificial Sequence
  Synthetic construct
attatccagcctatgt

SEQ ID NO: 1283 - DNA, 16 bp, Artificial Sequence
  Synthetic construct
attatcccaccaccag

SEQ ID NO: 1284 - DNA, 16 bp, Artificial Sequence
  Synthetic construct
attatcccaccaccag

SEQ ID NO: 1285 - DNA, 16 bp, Artificial Sequence
  Synthetic construct
attatcccaccagatt

SEQ ID NO: 1286 - DNA, 16 bp, Artificial Sequence
  Synthetic construct
attatcccaccagatt

SEQ ID NO: 1287 - DNA, 16 bp, Artificial Sequence
  Synthetic construct
attatcccagacgctc

SEQ ID NO: 1288 - DNA, 16 bp, Artificial Sequence
  Synthetic construct
attatcccagacgctc

SEQ ID NO: 1289 - DNA, 16 bp, Artificial Sequence
  Synthetic construct
attatccgtatctgca

SEQ ID NO: 1290 - DNA, 16 bp, Artificial Sequence
  Synthetic construct
attatccgtatctgca

SEQ ID NO: 1291 - DNA, 16 bp, Artificial Sequence
  Synthetic construct
attatccgtccagtgc

SEQ ID NO: 1292 - DNA, 16 bp, Artificial Sequence
  Synthetic construct
attatccgtccagtgc

SEQ ID NO: 1293 - DNA, 16 bp, Artificial Sequence
  Synthetic construct
attatcctctgctgtc

SEQ ID NO: 1294 - DNA, 16 bp, Artificial Sequence
  Synthetic construct
attatcctctgctgtc

SEQ ID NO: 1295 - DNA, 16 bp, Artificial Sequence
  Synthetic construct
attctacagagcctag

SEQ ID NO: 1296 - DNA, 16 bp, Artificial Sequence
  Synthetic construct
attctacagagcctag

SEQ ID NO: 1297 - DNA, 16 bp, Artificial Sequence
  Synthetic construct
attctaccaagtaatg

SEQ ID NO: 1298 - DNA, 16 bp, Artificial Sequence
  Synthetic construct
attctaccaagtaatg

SEQ ID NO: 1299 - DNA, 16 bp, Artificial Sequence
  Synthetic construct
attctaccatcacaac

SEQ ID NO: 1300 - DNA, 16 bp, Artificial Sequence
  Synthetic construct
attctaccatcacaac

SEQ ID NO: 1301 - DNA, 16 bp, Artificial Sequence
  Synthetic construct
attctacgttgcgcac

SEQ ID NO: 1302 - DNA, 16 bp, Artificial Sequence
  Synthetic construct
attctacgttgcgcac

SEQ ID NO: 1303 - DNA, 16 bp, Artificial Sequence
  Synthetic construct
attctactcaccttat

SEQ ID NO: 1304 - DNA, 16 bp, Artificial Sequence
  Synthetic construct
attctactcaccttat

SEQ ID NO: 1305 - DNA, 16 bp, Artificial Sequence
  Synthetic construct
attctactcagctctc

SEQ ID NO: 1306 - DNA, 16 bp, Artificial Sequence
  Synthetic construct
attctactcagctctc

SEQ ID NO: 1307 - DNA, 16 bp, Artificial Sequence
  Synthetic construct
attggaccagcgatcc

SEQ ID NO: 1308 - DNA, 16 bp, Artificial Sequence
  Synthetic construct
attggaccagcgatcc

SEQ ID NO: 1309 - DNA, 16 bp, Artificial Sequence
  Synthetic construct
attggtggtctaaacc

SEQ ID NO: 1310 - DNA, 16 bp, Artificial Sequence
  Synthetic construct
attggtggtctaaacc

SEQ ID NO: 1311 - DNA, 16 bp, Artificial Sequence
  Synthetic construct
attggtggtgcggtaa

SEQ ID NO: 1312 - DNA, 16 bp, Artificial Sequence
  Synthetic construct
attggtggtgcggtaa

SEQ ID NO: 1313 - DNA, 16 bp, Artificial Sequence
  Synthetic construct
attggtggttaagaca

SEQ ID NO: 1314 - DNA, 16 bp, Artificial Sequence
  Synthetic construct
attggtggttaagaca

SEQ ID NO: 1315 - DNA, 16 bp, Artificial Sequence
  Synthetic construct
attggtggttaccgat

SEQ ID NO: 1316 - DNA, 16 bp, Artificial Sequence
  Synthetic construct
attggtggttaccgat

SEQ ID NO: 1317 - DNA, 16 bp, Artificial Sequence
  Synthetic construct
attggtgtcaccaggc

SEQ ID NO: 1318 - DNA, 16 bp, Artificial Sequence
  Synthetic construct
attggtgtcaccaggc

SEQ ID NO: 1319 - DNA, 16 bp, Artificial Sequence
  Synthetic construct
attggtgtcccaggtg

SEQ ID NO: 1320 - DNA, 16 bp, Artificial Sequence
  Synthetic construct
attggtgtcccaggtg

SEQ ID NO: 1321 - DNA, 16 bp, Artificial Sequence
  Synthetic construct
attggtgtctacttac

SEQ ID NO: 1322 - DNA, 16 bp, Artificial Sequence
  Synthetic construct
attggtgtctacttac

SEQ ID NO: 1323 - DNA, 16 bp, Artificial Sequence
  Synthetic construct
attggtgtctcattca

SEQ ID NO: 1324 - DNA, 16 bp, Artificial Sequence
  Synthetic construct
attggtgtctcattca

SEQ ID NO: 1325 - DNA, 16 bp, Artificial Sequence
  Synthetic construct
atttctgagcccaatt

SEQ ID NO: 1326 - DNA, 16 bp, Artificial Sequence
  Synthetic construct
atttctgagcccaatt

SEQ ID NO: 1327 - DNA, 16 bp, Artificial Sequence
  Synthetic construct
atttctgaggctcatt

SEQ ID NO: 1328 - DNA, 16 bp, Artificial Sequence
  Synthetic construct
atttctgaggctcatt

SEQ ID NO: 1329 - DNA, 16 bp, Artificial Sequence
  Synthetic construct
atttctgcatcccatc

SEQ ID NO: 1330 - DNA, 16 bp, Artificial Sequence
  Synthetic construct
atttctgcatcccatc

SEQ ID NO: 1331 - DNA, 16 bp, Artificial Sequence
  Synthetic construct
atttctggtaacgcga

SEQ ID NO: 1332 - DNA, 16 bp, Artificial Sequence
  Synthetic construct
atttctggtaacgcga

SEQ ID NO: 1333 - DNA, 16 bp, Artificial Sequence
  Synthetic construct
atttctggtaagggct

SEQ ID NO: 1334 - DNA, 16 bp, Artificial Sequence
  Synthetic construct
atttctggtaagggct

SEQ ID NO: 1335 - DNA, 16 bp, Artificial Sequence
  Synthetic construct
atttctggtgtaacgg

SEQ ID NO: 1336 - DNA, 16 bp, Artificial Sequence
  Synthetic construct
atttctggtgtaacgg

SEQ ID NO: 1337 - DNA, 16 bp, Artificial Sequence
  Synthetic construct
atttctggttaagggc

SEQ ID NO: 1338 - DNA, 16 bp, Artificial Sequence
  Synthetic construct
atttctggttaagggc

SEQ ID NO: 1339 - DNA, 16 bp, Artificial Sequence
  Synthetic construct
atttctgtcgaacgga

SEQ ID NO: 1340 - DNA, 16 bp, Artificial Sequence
  Synthetic construct
atttctgtcgaacgga

SEQ ID NO: 1341 - DNA, 16 bp, Artificial Sequence
  Synthetic construct
caaccaatcccaacgg

SEQ ID NO: 1342 - DNA, 16 bp, Artificial Sequence
  Synthetic construct
caaccaatcccaacgg

SEQ ID NO: 1343 - DNA, 16 bp, Artificial Sequence
  Synthetic construct
caacctcagatcgata

SEQ ID NO: 1344 - DNA, 16 bp, Artificial Sequence
  Synthetic construct
caacctcagatcgata

SEQ ID NO: 1345 - DNA, 16 bp, Artificial Sequence
  Synthetic construct
caacctcgttcacctc

SEQ ID NO: 1346 - DNA, 16 bp, Artificial Sequence
  Synthetic construct
caacctcgttcacctc

SEQ ID NO: 1347 - DNA, 16 bp, Artificial Sequence
  Synthetic construct
caacctctcaaacaag

SEQ ID NO: 1348 - DNA, 16 bp, Artificial Sequence
  Synthetic construct
caacctctcaaacaag

SEQ ID NO: 1349 - DNA, 16 bp, Artificial Sequence
  Synthetic construct
caacctctccttggtc

SEQ ID NO: 1350 - DNA, 16 bp, Artificial Sequence
  Synthetic construct
caacctctccttggtc

SEQ ID NO: 1351 - DNA, 16 bp, Artificial Sequence
  Synthetic construct
caactagagtcacgcc

SEQ ID NO: 1352 - DNA, 16 bp, Artificial Sequence
  Synthetic construct
caactagagtcacgcc

SEQ ID NO: 1353 - DNA, 16 bp, Artificial Sequence
  Synthetic construct
caactagcataaaggt

SEQ ID NO: 1354 - DNA, 16 bp, Artificial Sequence
  Synthetic construct
caactagcataaaggt

SEQ ID NO: 1355 - DNA, 16 bp, Artificial Sequence
  Synthetic construct
caagaaaagcccgaaa

SEQ ID NO: 1356 - DNA, 16 bp, Artificial Sequence
  Synthetic construct
caagaaaagcccgaaa

SEQ ID NO: 1357 - DNA, 16 bp, Artificial Sequence
  Synthetic construct
caagaaacatcagtac

SEQ ID NO: 1358 - DNA, 16 bp, Artificial Sequence
  Synthetic construct
caagaaacatcagtac

SEQ ID NO: 1359 - DNA, 16 bp, Artificial Sequence
  Synthetic construct
caagaaagtaatcacc

SEQ ID NO: 1360 - DNA, 16 bp, Artificial Sequence
  Synthetic construct
caagaaagtaatcacc

SEQ ID NO: 1361 - DNA, 16 bp, Artificial Sequence
  Synthetic construct
caagaaatcgcctgag

SEQ ID NO: 1362 - DNA, 16 bp, Artificial Sequence
  Synthetic construct
caagaaatcgcctgag

SEQ ID NO: 1363 - DNA, 16 bp, Artificial Sequence
  Synthetic construct
caagatcagcacgcct

SEQ ID NO: 1364 - DNA, 16 bp, Artificial Sequence
  Synthetic construct
caagatcagcacgcct

SEQ ID NO: 1365 - DNA, 16 bp, Artificial Sequence
  Synthetic construct
caagatcagtagcggt

SEQ ID NO: 1366 - DNA, 16 bp, Artificial Sequence
  Synthetic construct
caagatcagtagcggt

SEQ ID NO: 1367 - DNA, 16 bp, Artificial Sequence
  Synthetic construct
caagatcagtgggatc

SEQ ID NO: 1368 - DNA, 16 bp, Artificial Sequence
  Synthetic construct
caagatcagtgggatc

SEQ ID NO: 1369 - DNA, 16 bp, Artificial Sequence
  Synthetic construct
caagatccaccgaatt

SEQ ID NO: 1370 - DNA, 16 bp, Artificial Sequence
  Synthetic construct
caagatccaccgaatt

SEQ ID NO: 1371 - DNA, 16 bp, Artificial Sequence
  Synthetic construct
caagatcgtaaggatt

SEQ ID NO: 1372 - DNA, 16 bp, Artificial Sequence
  Synthetic construct
caagatcgtaaggatt

SEQ ID NO: 1373 - DNA, 16 bp, Artificial Sequence
  Synthetic construct
caagatctcaccgtaa

SEQ ID NO: 1374 - DNA, 16 bp, Artificial Sequence
  Synthetic construct
caagatctcaccgtaa

SEQ ID NO: 1375 - DNA, 16 bp, Artificial Sequence
  Synthetic construct
caaggccagccagaac

SEQ ID NO: 1376 - DNA, 16 bp, Artificial Sequence
  Synthetic construct
caaggccagccagaac

SEQ ID NO: 1377 - DNA, 16 bp, Artificial Sequence
  Synthetic construct
caaggcccacaggttt

SEQ ID NO: 1378 - DNA, 16 bp, Artificial Sequence
  Synthetic construct
caaggcccacaggttt

SEQ ID NO: 1379 - DNA, 16 bp, Artificial Sequence
  Synthetic construct
caaggccgtagcgtag

SEQ ID NO: 1380 - DNA, 16 bp, Artificial Sequence
  Synthetic construct
caaggccgtagcgtag

SEQ ID NO: 1381 - DNA, 16 bp, Artificial Sequence
  Synthetic construct
caaggccgtgactcat

SEQ ID NO: 1382 - DNA, 16 bp, Artificial Sequence
  Synthetic construct
caaggccgtgactcat

SEQ ID NO: 1383 - DNA, 16 bp, Artificial Sequence
  Synthetic construct
caaggccgtgtttggt

SEQ ID NO: 1384 - DNA, 16 bp, Artificial Sequence
  Synthetic construct
caaggccgtgtttggt

SEQ ID NO: 1385 - DNA, 16 bp, Artificial Sequence
  Synthetic construct
caagttgagatcgata

SEQ ID NO: 1386 - DNA, 16 bp, Artificial Sequence
  Synthetic construct
caagttgagatcgata

SEQ ID NO: 1387 - DNA, 16 bp, Artificial Sequence
  Synthetic construct
caagttgcacgtgaga

SEQ ID NO: 1388 - DNA, 16 bp, Artificial Sequence
  Synthetic construct
caagttgcacgtgaga

SEQ ID NO: 1389 - DNA, 16 bp, Artificial Sequence
  Synthetic construct
caagttgcatggaata

SEQ ID NO: 1390 - DNA, 16 bp, Artificial Sequence
  Synthetic construct
caagttgcatggaata

SEQ ID NO: 1391 - DNA, 16 bp, Artificial Sequence
  Synthetic construct
caagttggtaccgtat

SEQ ID NO: 1392 - DNA, 16 bp, Artificial Sequence
  Synthetic construct
caagttggtaccgtat

SEQ ID NO: 1393 - DNA, 16 bp, Artificial Sequence
  Synthetic construct
caagttggtcttgtcc

SEQ ID NO: 1394 - DNA, 16 bp, Artificial Sequence
  Synthetic construct
caagttggtcttgtcc

SEQ ID NO: 1395 - DNA, 16 bp, Artificial Sequence
  Synthetic construct
caagttggttgtttgg

SEQ ID NO: 1396 - DNA, 16 bp, Artificial Sequence
  Synthetic construct
caagttggttgtttgg

SEQ ID NO: 1397 - DNA, 16 bp, Artificial Sequence
  Synthetic construct
caagttgtcctttctc

SEQ ID NO: 1398 - DNA, 16 bp, Artificial Sequence
  Synthetic construct
caagttgtcctttctc

SEQ ID NO: 1399 - DNA, 16 bp, Artificial Sequence
  Synthetic construct
caagttgtctttaggg

SEQ ID NO: 1400 - DNA, 16 bp, Artificial Sequence
  Synthetic construct
caagttgtctttaggg

SEQ ID NO: 1401 - DNA, 16 bp, Artificial Sequence
  Synthetic construct
cacaaacagtacatga

SEQ ID NO: 1402 - DNA, 16 bp, Artificial Sequence
  Synthetic construct
cacaaacagtacatga

SEQ ID NO: 1403 - DNA, 16 bp, Artificial Sequence
  Synthetic construct
cacaaaccaccaggtc

SEQ ID NO: 1404 - DNA, 16 bp, Artificial Sequence
  Synthetic construct
cacaaaccaccaggtc

SEQ ID NO: 1405 - DNA, 16 bp, Artificial Sequence
  Synthetic construct
cacaaacgtgcctgca

SEQ ID NO: 1406 - DNA, 16 bp, Artificial Sequence
  Synthetic construct
cacaaacgtgcctgca

SEQ ID NO: 1407 - DNA, 16 bp, Artificial Sequence
  Synthetic construct
cacaaactcagtgcat

SEQ ID NO: 1408 - DNA, 16 bp, Artificial Sequence
  Synthetic construct
cacaaactcagtgcat

SEQ ID NO: 1409 - DNA, 16 bp, Artificial Sequence
  Synthetic construct
cacaaactcgccaaat

SEQ ID NO: 1410 - DNA, 16 bp, Artificial Sequence
  Synthetic construct
cacaaactcgccaaat

SEQ ID NO: 1411 - DNA, 16 bp, Artificial Sequence
  Synthetic construct
cacaaactctcgcttg

SEQ ID NO: 1412 - DNA, 16 bp, Artificial Sequence
  Synthetic construct
cacaaactctcgcttg

SEQ ID NO: 1413 - DNA, 16 bp, Artificial Sequence
  Synthetic construct
cacacaaagggcacta

SEQ ID NO: 1414 - DNA, 16 bp, Artificial Sequence
  Synthetic construct
cacacaaagggcacta

SEQ ID NO: 1415 - DNA, 16 bp, Artificial Sequence
  Synthetic construct
cacacaacaccaggtc

SEQ ID NO: 1416 - DNA, 16 bp, Artificial Sequence
  Synthetic construct
cacacaacaccaggtc

SEQ ID NO: 1417 - DNA, 16 bp, Artificial Sequence
  Synthetic construct
cacacaacaggaatgc

SEQ ID NO: 1418 - DNA, 16 bp, Artificial Sequence
  Synthetic construct
cacacaacaggaatgc

SEQ ID NO: 1419 - DNA, 16 bp, Artificial Sequence
  Synthetic construct
cacacaagtaaaggag

SEQ ID NO: 1420 - DNA, 16 bp, Artificial Sequence
  Synthetic construct
cacacaagtaaaggag

SEQ ID NO: 1421 - DNA, 16 bp, Artificial Sequence
  Synthetic construct
cacacaagtgtcctct

SEQ ID NO: 1422 - DNA, 16 bp, Artificial Sequence
  Synthetic construct
cacacaagtgtcctct

SEQ ID NO: 1423 - DNA, 16 bp, Artificial Sequence
  Synthetic construct
cacacaatcctagggc

SEQ ID NO: 1424 - DNA, 16 bp, Artificial Sequence
  Synthetic construct
cacacaatcctagggc

SEQ ID NO: 1425 - DNA, 16 bp, Artificial Sequence
  Synthetic construct
cacacaatcggaaacg

SEQ ID NO: 1426 - DNA, 16 bp, Artificial Sequence
  Synthetic construct
cacacaatcggaaacg

SEQ ID NO: 1427 - DNA, 16 bp, Artificial Sequence
  Synthetic construct
cacacctagcacacag

SEQ ID NO: 1428 - DNA, 16 bp, Artificial Sequence
  Synthetic construct
cacacctagcacacag

SEQ ID NO: 1429 - DNA, 16 bp, Artificial Sequence
  Synthetic construct
cacacctaggctctta

SEQ ID NO: 1430 - DNA, 16 bp, Artificial Sequence
  Synthetic construct
cacacctaggctctta

SEQ ID NO: 1431 - DNA, 16 bp, Artificial Sequence
  Synthetic construct
cacacctagttagcgg

SEQ ID NO: 1432 - DNA, 16 bp, Artificial Sequence
  Synthetic construct
cacacctagttagcgg

SEQ ID NO: 1433 - DNA, 16 bp, Artificial Sequence
  Synthetic construct
cacacctgtgtgtgcc

SEQ ID NO: 1434 - DNA, 16 bp, Artificial Sequence
  Synthetic construct
cacacctgtgtgtgcc

SEQ ID NO: 1435 - DNA, 16 bp, Artificial Sequence
  Synthetic construct
cacaccttctctaagg

SEQ ID NO: 1436 - DNA, 16 bp, Artificial Sequence
  Synthetic construct
cacaccttctctaagg

SEQ ID NO: 1437 - DNA, 16 bp, Artificial Sequence
  Synthetic construct
cacactcgtagtagta

SEQ ID NO: 1438 - DNA, 16 bp, Artificial Sequence
  Synthetic construct
cacactcgtagtagta

SEQ ID NO: 1439 - DNA, 16 bp, Artificial Sequence
  Synthetic construct
cacactcgtcccgaca

SEQ ID NO: 1440 - DNA, 16 bp, Artificial Sequence
  Synthetic construct
cacactcgtcccgaca

SEQ ID NO: 1441 - DNA, 16 bp, Artificial Sequence
  Synthetic construct
cacaggcagatcgggt

SEQ ID NO: 1442 - DNA, 16 bp, Artificial Sequence
  Synthetic construct
cacaggcagatcgggt

SEQ ID NO: 1443 - DNA, 16 bp, Artificial Sequence
  Synthetic construct
cacaggccaaacccat

SEQ ID NO: 1444 - DNA, 16 bp, Artificial Sequence
  Synthetic construct
cacaggccaaacccat

SEQ ID NO: 1445 - DNA, 16 bp, Artificial Sequence
  Synthetic construct
cacaggccaatgtaag

SEQ ID NO: 1446 - DNA, 16 bp, Artificial Sequence
  Synthetic construct
cacaggccaatgtaag

SEQ ID NO: 1447 - DNA, 16 bp, Artificial Sequence
  Synthetic construct
cacaggcgtcttgatg

SEQ ID NO: 1448 - DNA, 16 bp, Artificial Sequence
  Synthetic construct
cacaggcgtcttgatg

SEQ ID NO: 1449 - DNA, 16 bp, Artificial Sequence
  Synthetic construct
cacaggctctggcgtg

SEQ ID NO: 1450 - DNA, 16 bp, Artificial Sequence
  Synthetic construct
cacaggctctggcgtg

SEQ ID NO: 1451 - DNA, 16 bp, Artificial Sequence
  Synthetic construct
cacagtaagagctata

SEQ ID NO: 1452 - DNA, 16 bp, Artificial Sequence
  Synthetic construct
cacagtaagagctata

SEQ ID NO: 1453 - DNA, 16 bp, Artificial Sequence
  Synthetic construct
cacagtaagccactat

SEQ ID NO: 1454 - DNA, 16 bp, Artificial Sequence
  Synthetic construct
cacagtaagccactat

SEQ ID NO: 1455 - DNA, 16 bp, Artificial Sequence
  Synthetic construct
cacagtacaatggacg

SEQ ID NO: 1456 - DNA, 16 bp, Artificial Sequence
  Synthetic construct
cacagtacaatggacg

SEQ ID NO: 1457 - DNA, 16 bp, Artificial Sequence
  Synthetic construct
cacagtacaggtggat

SEQ ID NO: 1458 - DNA, 16 bp, Artificial Sequence
  Synthetic construct
cacagtacaggtggat

SEQ ID NO: 1459 - DNA, 16 bp, Artificial Sequence
  Synthetic construct
cacagtatctgtttgt

SEQ ID NO: 1460 - DNA, 16 bp, Artificial Sequence
  Synthetic construct
cacagtatctgtttgt

SEQ ID NO: 1461 - DNA, 16 bp, Artificial Sequence
  Synthetic construct
cacatagcacaagacg

SEQ ID NO: 1462 - DNA, 16 bp, Artificial Sequence
  Synthetic construct
cacatagcacaagacg

SEQ ID NO: 1463 - DNA, 16 bp, Artificial Sequence
  Synthetic construct
cacatagcaccagtta

SEQ ID NO: 1464 - DNA, 16 bp, Artificial Sequence
  Synthetic construct
cacatagcaccagtta

SEQ ID NO: 1465 - DNA, 16 bp, Artificial Sequence
  Synthetic construct
cacatagtcaacacac

SEQ ID NO: 1466 - DNA, 16 bp, Artificial Sequence
  Synthetic construct
cacatagtcaacacac

SEQ ID NO: 1467 - DNA, 16 bp, Artificial Sequence
  Synthetic construct
cacatagtcgtgacat

SEQ ID NO: 1468 - DNA, 16 bp, Artificial Sequence
  Synthetic construct
cacatagtcgtgacat

SEQ ID NO: 1469 - DNA, 16 bp, Artificial Sequence
  Synthetic construct
cacatttagagacgaa

SEQ ID NO: 1470 - DNA, 16 bp, Artificial Sequence
  Synthetic construct
cacatttagagacgaa

SEQ ID NO: 1471 - DNA, 16 bp, Artificial Sequence
  Synthetic construct
cacatttagctagccc

SEQ ID NO: 1472 - DNA, 16 bp, Artificial Sequence
  Synthetic construct
cacatttagctagccc

SEQ ID NO: 1473 - DNA, 16 bp, Artificial Sequence
  Synthetic construct
cacatttagctagttc

SEQ ID NO: 1474 - DNA, 16 bp, Artificial Sequence
  Synthetic construct
cacatttagctagttc

SEQ ID NO: 1475 - DNA, 16 bp, Artificial Sequence
  Synthetic construct
cacatttagggcttga

SEQ ID NO: 1476 - DNA, 16 bp, Artificial Sequence
  Synthetic construct
cacatttagggcttga

SEQ ID NO: 1477 - DNA, 16 bp, Artificial Sequence
  Synthetic construct
caccactcacaggagt

SEQ ID NO: 1478 - DNA, 16 bp, Artificial Sequence
  Synthetic construct
caccactcacaggagt

SEQ ID NO: 1479 - DNA, 16 bp, Artificial Sequence
  Synthetic construct
caccactgtcacctaa

SEQ ID NO: 1480 - DNA, 16 bp, Artificial Sequence
  Synthetic construct
caccactgtcacctaa

SEQ ID NO: 1481 - DNA, 16 bp, Artificial Sequence
  Synthetic construct
caccactgtcacttcc

SEQ ID NO: 1482 - DNA, 16 bp, Artificial Sequence
  Synthetic construct
caccactgtcacttcc

SEQ ID NO: 1483 - DNA, 16 bp, Artificial Sequence
  Synthetic construct
caccactgtccctact

SEQ ID NO: 1484 - DNA, 16 bp, Artificial Sequence
  Synthetic construct
caccactgtccctact

SEQ ID NO: 1485 - DNA, 16 bp, Artificial Sequence
  Synthetic construct
caccactgtcgaatct

SEQ ID NO: 1486 - DNA, 16 bp, Artificial Sequence
  Synthetic construct
caccactgtcgaatct

SEQ ID NO: 1487 - DNA, 16 bp, Artificial Sequence
  Synthetic construct
caccacttctatcgcc

SEQ ID NO: 1488 - DNA, 16 bp, Artificial Sequence
  Synthetic construct
caccacttctatcgcc

SEQ ID NO: 1489 - DNA, 16 bp, Artificial Sequence
  Synthetic construct
caccaggagagtcggt

SEQ ID NO: 1490 - DNA, 16 bp, Artificial Sequence
  Synthetic construct
caccaggagagtcggt

SEQ ID NO: 1491 - DNA, 16 bp, Artificial Sequence
  Synthetic construct
caccagggtcaactgt

SEQ ID NO: 1492 - DNA, 16 bp, Artificial Sequence
  Synthetic construct
caccagggtcaactgt

SEQ ID NO: 1493 - DNA, 16 bp, Artificial Sequence
  Synthetic construct
caccagggttatcacg

SEQ ID NO: 1494 - DNA, 16 bp, Artificial Sequence
  Synthetic construct
caccagggttatcacg

SEQ ID NO: 1495 - DNA, 16 bp, Artificial Sequence
  Synthetic construct
caccaggtccatgagt

SEQ ID NO: 1496 - DNA, 16 bp, Artificial Sequence
  Synthetic construct
caccaggtccatgagt

SEQ ID NO: 1497 - DNA, 16 bp, Artificial Sequence
  Synthetic construct
caccttgagctgaacg

SEQ ID NO: 1498 - DNA, 16 bp, Artificial Sequence
  Synthetic construct
caccttgagctgaacg

SEQ ID NO: 1499 - DNA, 16 bp, Artificial Sequence
  Synthetic construct
caccttgcaagtctac

SEQ ID NO: 1500 - DNA, 16 bp, Artificial Sequence
  Synthetic construct
caccttgcaagtctac

SEQ ID NO: 1501 - DNA, 16 bp, Artificial Sequence
  Synthetic construct
caccttgcaatgacct

SEQ ID NO: 1502 - DNA, 16 bp, Artificial Sequence
  Synthetic construct
caccttgcaatgacct

SEQ ID NO: 1503 - DNA, 16 bp, Artificial Sequence
  Synthetic construct
caccttgcaatggtct

SEQ ID NO: 1504 - DNA, 16 bp, Artificial Sequence
  Synthetic construct
caccttgcaatggtct

SEQ ID NO: 1505 - DNA, 16 bp, Artificial Sequence
  Synthetic construct
caccttgcatttgctt

SEQ ID NO: 1506 - DNA, 16 bp, Artificial Sequence
  Synthetic construct
caccttgcatttgctt

SEQ ID NO: 1507 - DNA, 16 bp, Artificial Sequence
  Synthetic construct
caccttggtcaatgtc

SEQ ID NO: 1508 - DNA, 16 bp, Artificial Sequence
  Synthetic construct
caccttggtcaatgtc

SEQ ID NO: 1509 - DNA, 16 bp, Artificial Sequence
  Synthetic construct
caccttggtcggatcc

SEQ ID NO: 1510 - DNA, 16 bp, Artificial Sequence
  Synthetic construct
caccttggtcggatcc

SEQ ID NO: 1511 - DNA, 16 bp, Artificial Sequence
  Synthetic construct
cactccaagacacgac

SEQ ID NO: 1512 - DNA, 16 bp, Artificial Sequence
  Synthetic construct
cactccaagacacgac

SEQ ID NO: 1513 - DNA, 16 bp, Artificial Sequence
  Synthetic construct
cactccaaggccctca

SEQ ID NO: 1514 - DNA, 16 bp, Artificial Sequence
  Synthetic construct
cactccaaggccctca

SEQ ID NO: 1515 - DNA, 16 bp, Artificial Sequence
  Synthetic construct
cactccagtgctcttc

SEQ ID NO: 1516 - DNA, 16 bp, Artificial Sequence
  Synthetic construct
cactccagtgctcttc

SEQ ID NO: 1517 - DNA, 16 bp, Artificial Sequence
  Synthetic construct
cagaatcagtccatac

SEQ ID NO: 1518 - DNA, 16 bp, Artificial Sequence
  Synthetic construct
cagaatcagtccatac

SEQ ID NO: 1519 - DNA, 16 bp, Artificial Sequence
  Synthetic construct
cagaatcagtgccaga

SEQ ID NO: 1520 - DNA, 16 bp, Artificial Sequence
  Synthetic construct
cagaatcagtgccaga

SEQ ID NO: 1521 - DNA, 16 bp, Artificial Sequence
  Synthetic construct
cagaatccaaatccgt

SEQ ID NO: 1522 - DNA, 16 bp, Artificial Sequence
  Synthetic construct
cagaatccaaatccgt

SEQ ID NO: 1523 - DNA, 16 bp, Artificial Sequence
  Synthetic construct
cagaatcgttaccagt

SEQ ID NO: 1524 - DNA, 16 bp, Artificial Sequence
  Synthetic construct
cagaatcgttaccagt

SEQ ID NO: 1525 - DNA, 16 bp, Artificial Sequence
  Synthetic construct
cagagagcagaagcac

SEQ ID NO: 1526 - DNA, 16 bp, Artificial Sequence
  Synthetic construct
cagagagcagaagcac

SEQ ID NO: 1527 - DNA, 16 bp, Artificial Sequence
  Synthetic construct
cagagagcatataccg

SEQ ID NO: 1528 - DNA, 16 bp, Artificial Sequence
  Synthetic construct
cagagagcatataccg

SEQ ID NO: 1529 - DNA, 16 bp, Artificial Sequence
  Synthetic construct
cagagagcatcggacc

SEQ ID NO: 1530 - DNA, 16 bp, Artificial Sequence
  Synthetic construct
cagagagcatcggacc

SEQ ID NO: 1531 - DNA, 16 bp, Artificial Sequence
  Synthetic construct
cagagaggtagcgctc

SEQ ID NO: 1532 - DNA, 16 bp, Artificial Sequence
  Synthetic construct
cagagaggtagcgctc

SEQ ID NO: 1533 - DNA, 16 bp, Artificial Sequence
  Synthetic construct
cagagaggttgcctct

SEQ ID NO: 1534 - DNA, 16 bp, Artificial Sequence
  Synthetic construct
cagagaggttgcctct

SEQ ID NO: 1535 - DNA, 16 bp, Artificial Sequence
  Synthetic construct
cagagaggtttgttgg

SEQ ID NO: 1536 - DNA, 16 bp, Artificial Sequence
  Synthetic construct
cagagaggtttgttgg

SEQ ID NO: 1537 - DNA, 16 bp, Artificial Sequence
  Synthetic construct
cagagagtcatcgctc

SEQ ID NO: 1538 - DNA, 16 bp, Artificial Sequence
  Synthetic construct
cagagagtcatcgctc

SEQ ID NO: 1539 - DNA, 16 bp, Artificial Sequence
  Synthetic construct
cagagagtcccttgca

SEQ ID NO: 1540 - DNA, 16 bp, Artificial Sequence
  Synthetic construct
cagagagtcccttgca

SEQ ID NO: 1541 - DNA, 16 bp, Artificial Sequence
  Synthetic construct
cagatcaagaaggtga

SEQ ID NO: 1542 - DNA, 16 bp, Artificial Sequence
  Synthetic construct
cagatcaagaaggtga

SEQ ID NO: 1543 - DNA, 16 bp, Artificial Sequence
  Synthetic construct
cagatcaagtgaagag

SEQ ID NO: 1544 - DNA, 16 bp, Artificial Sequence
  Synthetic construct
cagatcaagtgaagag

SEQ ID NO: 1545 - DNA, 16 bp, Artificial Sequence
  Synthetic construct
cagatcacatgttgac

SEQ ID NO: 1546 - DNA, 16 bp, Artificial Sequence
  Synthetic construct
cagatcacatgttgac

SEQ ID NO: 1547 - DNA, 16 bp, Artificial Sequence
  Synthetic construct
cagatcagtataatgg

SEQ ID NO: 1548 - DNA, 16 bp, Artificial Sequence
  Synthetic construct
cagatcagtataatgg

SEQ ID NO: 1549 - DNA, 16 bp, Artificial Sequence
  Synthetic construct
cagatcagtcgctttc

SEQ ID NO: 1550 - DNA, 16 bp, Artificial Sequence
  Synthetic construct
cagatcagtcgctttc

SEQ ID NO: 1551 - DNA, 16 bp, Artificial Sequence
  Synthetic construct
cagatcagttagatga

SEQ ID NO: 1552 - DNA, 16 bp, Artificial Sequence
  Synthetic construct
cagatcagttagatga

SEQ ID NO: 1553 - DNA, 16 bp, Artificial Sequence
  Synthetic construct
cagatcagttcaggcc

SEQ ID NO: 1554 - DNA, 16 bp, Artificial Sequence
  Synthetic construct
cagatcagttcaggcc

SEQ ID NO: 1555 - DNA, 16 bp, Artificial Sequence
  Synthetic construct
cagcagcagatgagag

SEQ ID NO: 1556 - DNA, 16 bp, Artificial Sequence
  Synthetic construct
cagcagcagatgagag

SEQ ID NO: 1557 - DNA, 16 bp, Artificial Sequence
  Synthetic construct
cagcagcagtccgtat

SEQ ID NO: 1558 - DNA, 16 bp, Artificial Sequence
  Synthetic construct
cagcagcagtccgtat

SEQ ID NO: 1559 - DNA, 16 bp, Artificial Sequence
  Synthetic construct
cagcagccacataacc

SEQ ID NO: 1560 - DNA, 16 bp, Artificial Sequence
  Synthetic construct
cagcagccacataacc

SEQ ID NO: 1561 - DNA, 16 bp, Artificial Sequence
  Synthetic construct
cagcagccatggtagg

SEQ ID NO: 1562 - DNA, 16 bp, Artificial Sequence
  Synthetic construct
cagcagccatggtagg

SEQ ID NO: 1563 - DNA, 16 bp, Artificial Sequence
  Synthetic construct
cagcagccatttgctt

SEQ ID NO: 1564 - DNA, 16 bp, Artificial Sequence
  Synthetic construct
cagcagccatttgctt

SEQ ID NO: 1565 - DNA, 16 bp, Artificial Sequence
  Synthetic construct
cagcagcgtcatatgc

SEQ ID NO: 1566 - DNA, 16 bp, Artificial Sequence
  Synthetic construct
cagcagcgtcatatgc

SEQ ID NO: 1567 - DNA, 16 bp, Artificial Sequence
  Synthetic construct
cagcagcgtcttcaag

SEQ ID NO: 1568 - DNA, 16 bp, Artificial Sequence
  Synthetic construct
cagcagcgtcttcaag

SEQ ID NO: 1569 - DNA, 16 bp, Artificial Sequence
  Synthetic construct
cagcatacaacaacct

SEQ ID NO: 1570 - DNA, 16 bp, Artificial Sequence
  Synthetic construct
cagcatacaacaacct

SEQ ID NO: 1571 - DNA, 16 bp, Artificial Sequence
  Synthetic construct
cagcatacaaggctcc

SEQ ID NO: 1572 - DNA, 16 bp, Artificial Sequence
  Synthetic construct
cagcatacaaggctcc

SEQ ID NO: 1573 - DNA, 16 bp, Artificial Sequence
  Synthetic construct
cagcatacaggaccct

SEQ ID NO: 1574 - DNA, 16 bp, Artificial Sequence
  Synthetic construct
cagcatacaggaccct

SEQ ID NO: 1575 - DNA, 16 bp, Artificial Sequence
  Synthetic construct
cagcatacatataccg

SEQ ID NO: 1576 - DNA, 16 bp, Artificial Sequence
  Synthetic construct
cagcatacatataccg

SEQ ID NO: 1577 - DNA, 16 bp, Artificial Sequence
  Synthetic construct
cagccgaagggtgttg

SEQ ID NO: 1578 - DNA, 16 bp, Artificial Sequence
  Synthetic construct
cagccgaagggtgttg

SEQ ID NO: 1579 - DNA, 16 bp, Artificial Sequence
  Synthetic construct
cagccgacagacgctc

SEQ ID NO: 1580 - DNA, 16 bp, Artificial Sequence
  Synthetic construct
cagccgacagacgctc

SEQ ID NO: 1581 - DNA, 16 bp, Artificial Sequence
  Synthetic construct
cagccgagtctcacct

SEQ ID NO: 1582 - DNA, 16 bp, Artificial Sequence
  Synthetic construct
cagccgagtctcacct

SEQ ID NO: 1583 - DNA, 16 bp, Artificial Sequence
  Synthetic construct
cagccgatcactcctg

SEQ ID NO: 1584 - DNA, 16 bp, Artificial Sequence
  Synthetic construct
cagccgatcactcctg

SEQ ID NO: 1585 - DNA, 16 bp, Artificial Sequence
  Synthetic construct
cagcgacagcaatctc

SEQ ID NO: 1586 - DNA, 16 bp, Artificial Sequence
  Synthetic construct
cagcgacagcaatctc

SEQ ID NO: 1587 - DNA, 16 bp, Artificial Sequence
  Synthetic construct
cagcgacagcgtttac

SEQ ID NO: 1588 - DNA, 16 bp, Artificial Sequence
  Synthetic construct
cagcgacagcgtttac

SEQ ID NO: 1589 - DNA, 16 bp, Artificial Sequence
  Synthetic construct
cagcgacagctgcaag

SEQ ID NO: 1590 - DNA, 16 bp, Artificial Sequence
  Synthetic construct
cagcgacagctgcaag

SEQ ID NO: 1591 - DNA, 16 bp, Artificial Sequence
  Synthetic construct
cagcgactcaacggcc

SEQ ID NO: 1592 - DNA, 16 bp, Artificial Sequence
  Synthetic construct
cagcgactcaacggcc

SEQ ID NO: 1593 - DNA, 16 bp, Artificial Sequence
  Synthetic construct
cagcgactcagtccct

SEQ ID NO: 1594 - DNA, 16 bp, Artificial Sequence
  Synthetic construct
cagcgactcagtccct

SEQ ID NO: 1595 - DNA, 16 bp, Artificial Sequence
  Synthetic construct
cagctaaagagggata

SEQ ID NO: 1596 - DNA, 16 bp, Artificial Sequence
  Synthetic construct
cagctaaagagggata

SEQ ID NO: 1597 - DNA, 16 bp, Artificial Sequence
  Synthetic construct
cagctaacaagtaatg

SEQ ID NO: 1598 - DNA, 16 bp, Artificial Sequence
  Synthetic construct
cagctaacaagtaatg

SEQ ID NO: 1599 - DNA, 16 bp, Artificial Sequence
  Synthetic construct
cagctaagtactcgcg

SEQ ID NO: 1600 - DNA, 16 bp, Artificial Sequence
  Synthetic construct
cagctaagtactcgcg

SEQ ID NO: 1601 - DNA, 16 bp, Artificial Sequence
  Synthetic construct
cagctaatctaagcca

SEQ ID NO: 1602 - DNA, 16 bp, Artificial Sequence
  Synthetic construct
cagctaatctaagcca

SEQ ID NO: 1603 - DNA, 16 bp, Artificial Sequence
  Synthetic construct
cagctggagagatgag

SEQ ID NO: 1604 - DNA, 16 bp, Artificial Sequence
  Synthetic construct
cagctggagagatgag

SEQ ID NO: 1605 - DNA, 16 bp, Artificial Sequence
  Synthetic construct
cagctggagtatgaca

SEQ ID NO: 1606 - DNA, 16 bp, Artificial Sequence
  Synthetic construct
cagctggagtatgaca

SEQ ID NO: 1607 - DNA, 16 bp, Artificial Sequence
  Synthetic construct
cagctggcaagtcatc

SEQ ID NO: 1608 - DNA, 16 bp, Artificial Sequence
  Synthetic construct
cagctggcaagtcatc

SEQ ID NO: 1609 - DNA, 16 bp, Artificial Sequence
  Synthetic construct
cagctggcaggtccac

SEQ ID NO: 1610 - DNA, 16 bp, Artificial Sequence
  Synthetic construct
cagctggcaggtccac

SEQ ID NO: 1611 - DNA, 16 bp, Artificial Sequence
  Synthetic construct
cagctgggtgttcttt

SEQ ID NO: 1612 - DNA, 16 bp, Artificial Sequence
  Synthetic construct
cagctgggtgttcttt

SEQ ID NO: 1613 - DNA, 16 bp, Artificial Sequence
  Synthetic construct
cagctggtccgcatct

SEQ ID NO: 1614 - DNA, 16 bp, Artificial Sequence
  Synthetic construct
cagctggtccgcatct

SEQ ID NO: 1615 - DNA, 16 bp, Artificial Sequence
  Synthetic construct
caggtgcagcaggcta

SEQ ID NO: 1616 - DNA, 16 bp, Artificial Sequence
  Synthetic construct
caggtgcagcaggcta

SEQ ID NO: 1617 - DNA, 16 bp, Artificial Sequence
  Synthetic construct
caggtgcagcccgaaa

SEQ ID NO: 1618 - DNA, 16 bp, Artificial Sequence
  Synthetic construct
caggtgcagcccgaaa

SEQ ID NO: 1619 - DNA, 16 bp, Artificial Sequence
  Synthetic construct
caggtgccaccttgtc

SEQ ID NO: 1620 - DNA, 16 bp, Artificial Sequence
  Synthetic construct
caggtgccaccttgtc

SEQ ID NO: 1621 - DNA, 16 bp, Artificial Sequence
  Synthetic construct
caggtgcgtacagacg

SEQ ID NO: 1622 - DNA, 16 bp, Artificial Sequence
  Synthetic construct
caggtgcgtacagacg

SEQ ID NO: 1623 - DNA, 16 bp, Artificial Sequence
  Synthetic construct
caggtgcgtacttagc

SEQ ID NO: 1624 - DNA, 16 bp, Artificial Sequence
  Synthetic construct
caggtgcgtacttagc

SEQ ID NO: 1625 - DNA, 16 bp, Artificial Sequence
  Synthetic construct
cagtaacagtcaagcg

SEQ ID NO: 1626 - DNA, 16 bp, Artificial Sequence
  Synthetic construct
cagtaacagtcaagcg

SEQ ID NO: 1627 - DNA, 16 bp, Artificial Sequence
  Synthetic construct
cagtaacgtcaagcga

SEQ ID NO: 1628 - DNA, 16 bp, Artificial Sequence
  Synthetic construct
cagtaacgtcaagcga

SEQ ID NO: 1629 - DNA, 16 bp, Artificial Sequence
  Synthetic construct
cagtaacgtctagtgt

SEQ ID NO: 1630 - DNA, 16 bp, Artificial Sequence
  Synthetic construct
cagtaacgtctagtgt

SEQ ID NO: 1631 - DNA, 16 bp, Artificial Sequence
  Synthetic construct
cagtaacgtggaaaga

SEQ ID NO: 1632 - DNA, 16 bp, Artificial Sequence
  Synthetic construct
cagtaacgtggaaaga

SEQ ID NO: 1633 - DNA, 16 bp, Artificial Sequence
  Synthetic construct
cagtaacgtgtttggt

SEQ ID NO: 1634 - DNA, 16 bp, Artificial Sequence
  Synthetic construct
cagtaacgtgtttggt

SEQ ID NO: 1635 - DNA, 16 bp, Artificial Sequence
  Synthetic construct
cagtaacgttcggcac

SEQ ID NO: 1636 - DNA, 16 bp, Artificial Sequence
  Synthetic construct
cagtaacgttcggcac

SEQ ID NO: 1637 - DNA, 16 bp, Artificial Sequence
  Synthetic construct
cagtaactccaaagtc

SEQ ID NO: 1638 - DNA, 16 bp, Artificial Sequence
  Synthetic construct
cagtaactccaaagtc

SEQ ID NO: 1639 - DNA, 16 bp, Artificial Sequence
  Synthetic construct
cagtaactccctgact

SEQ ID NO: 1640 - DNA, 16 bp, Artificial Sequence
  Synthetic construct
cagtaactccctgact

SEQ ID NO: 1641 - DNA, 16 bp, Artificial Sequence
  Synthetic construct
cagtcctagcatggca

SEQ ID NO: 1642 - DNA, 16 bp, Artificial Sequence
  Synthetic construct
cagtcctagcatggca

SEQ ID NO: 1643 - DNA, 16 bp, Artificial Sequence
  Synthetic construct
cagtcctagcgtcaag

SEQ ID NO: 1644 - DNA, 16 bp, Artificial Sequence
  Synthetic construct
cagtcctagcgtcaag

SEQ ID NO: 1645 - DNA, 16 bp, Artificial Sequence
  Synthetic construct
cagtcctagctagtgg

SEQ ID NO: 1646 - DNA, 16 bp, Artificial Sequence
  Synthetic construct
cagtcctagctagtgg

SEQ ID NO: 1647 - DNA, 16 bp, Artificial Sequence
  Synthetic construct
cagtcctagttaacga

SEQ ID NO: 1648 - DNA, 16 bp, Artificial Sequence
  Synthetic construct
cagtcctagttaacga

SEQ ID NO: 1649 - DNA, 16 bp, Artificial Sequence
  Synthetic construct
cagtcctagtttcctt

SEQ ID NO: 1650 - DNA, 16 bp, Artificial Sequence
  Synthetic construct
cagtcctagtttcctt

SEQ ID NO: 1651 - DNA, 16 bp, Artificial Sequence
  Synthetic construct
cagtcctgtcttctcg

SEQ ID NO: 1652 - DNA, 16 bp, Artificial Sequence
  Synthetic construct
cagtcctgtcttctcg

SEQ ID NO: 1653 - DNA, 16 bp, Artificial Sequence
  Synthetic construct
cagtccttcgtaggtt

SEQ ID NO: 1654 - DNA, 16 bp, Artificial Sequence
  Synthetic construct
cagtccttcgtaggtt

SEQ ID NO: 1655 - DNA, 16 bp, Artificial Sequence
  Synthetic construct
catatggcatcacaac

SEQ ID NO: 1656 - DNA, 16 bp, Artificial Sequence
  Synthetic construct
catatggcatcacaac

SEQ ID NO: 1657 - DNA, 16 bp, Artificial Sequence
  Synthetic construct
catatgggtctcgttc

SEQ ID NO: 1658 - DNA, 16 bp, Artificial Sequence
  Synthetic construct
catatgggtctcgttc

SEQ ID NO: 1659 - DNA, 16 bp, Artificial Sequence
  Synthetic construct
catatgggttcctcca

SEQ ID NO: 1660 - DNA, 16 bp, Artificial Sequence
  Synthetic construct
catatgggttcctcca

SEQ ID NO: 1661 - DNA, 16 bp, Artificial Sequence
  Synthetic construct
catattcagctgcgaa

SEQ ID NO: 1662 - DNA, 16 bp, Artificial Sequence
  Synthetic construct
catattcagctgcgaa

SEQ ID NO: 1663 - DNA, 16 bp, Artificial Sequence
  Synthetic construct
catattcagtcttgca

SEQ ID NO: 1664 - DNA, 16 bp, Artificial Sequence
  Synthetic construct
catattcagtcttgca

SEQ ID NO: 1665 - DNA, 16 bp, Artificial Sequence
  Synthetic construct
catattccacgttggc

SEQ ID NO: 1666 - DNA, 16 bp, Artificial Sequence
  Synthetic construct
catattccacgttggc

SEQ ID NO: 1667 - DNA, 16 bp, Artificial Sequence
  Synthetic construct
catattcgtaattgga

SEQ ID NO: 1668 - DNA, 16 bp, Artificial Sequence
  Synthetic construct
catattcgtaattgga

SEQ ID NO: 1669 - DNA, 16 bp, Artificial Sequence
  Synthetic construct
catattcgtagaagga

SEQ ID NO: 1670 - DNA, 16 bp, Artificial Sequence
  Synthetic construct
catattcgtagaagga

SEQ ID NO: 1671 - DNA, 16 bp, Artificial Sequence
  Synthetic construct
catattcgtgttgagg

SEQ ID NO: 1672 - DNA, 16 bp, Artificial Sequence
  Synthetic construct
catattcgtgttgagg

SEQ ID NO: 1673 - DNA, 16 bp, Artificial Sequence
  Synthetic construct
catattctcaaaccac

SEQ ID NO: 1674 - DNA, 16 bp, Artificial Sequence
  Synthetic construct
catattctcaaaccac

SEQ ID NO: 1675 - DNA, 16 bp, Artificial Sequence
  Synthetic construct
catattctcacgcggt

SEQ ID NO: 1676 - DNA, 16 bp, Artificial Sequence
  Synthetic construct
catattctcacgcggt

SEQ ID NO: 1677 - DNA, 16 bp, Artificial Sequence
  Synthetic construct
catcaagagctctcgg

SEQ ID NO: 1678 - DNA, 16 bp, Artificial Sequence
  Synthetic construct
catcaagagctctcgg

SEQ ID NO: 1679 - DNA, 16 bp, Artificial Sequence
  Synthetic construct
catcaagcaactggcc

SEQ ID NO: 1680 - DNA, 16 bp, Artificial Sequence
  Synthetic construct
catcaagcaactggcc

SEQ ID NO: 1681 - DNA, 16 bp, Artificial Sequence
  Synthetic construct
catcaaggttcagact

SEQ ID NO: 1682 - DNA, 16 bp, Artificial Sequence
  Synthetic construct
catcaaggttcagact

SEQ ID NO: 1683 - DNA, 16 bp, Artificial Sequence
  Synthetic construct
catcaagtcagagctt

SEQ ID NO: 1684 - DNA, 16 bp, Artificial Sequence
  Synthetic construct
catcaagtcagagctt

SEQ ID NO: 1685 - DNA, 16 bp, Artificial Sequence
  Synthetic construct
catcagaagctaccgc

SEQ ID NO: 1686 - DNA, 16 bp, Artificial Sequence
  Synthetic construct
catcagaagctaccgc

SEQ ID NO: 1687 - DNA, 16 bp, Artificial Sequence
  Synthetic construct
catcagagtgatgata

SEQ ID NO: 1688 - DNA, 16 bp, Artificial Sequence
  Synthetic construct
catcagagtgatgata

SEQ ID NO: 1689 - DNA, 16 bp, Artificial Sequence
  Synthetic construct
catcagagttcgctaa

SEQ ID NO: 1690 - DNA, 16 bp, Artificial Sequence
  Synthetic construct
catcagagttcgctaa

SEQ ID NO: 1691 - DNA, 16 bp, Artificial Sequence
  Synthetic construct
catcagatcgtccagg

SEQ ID NO: 1692 - DNA, 16 bp, Artificial Sequence
  Synthetic construct
catcagatcgtccagg

SEQ ID NO: 1693 - DNA, 16 bp, Artificial Sequence
  Synthetic construct
catccacaggttccta

SEQ ID NO: 1694 - DNA, 16 bp, Artificial Sequence
  Synthetic construct
catccacaggttccta

SEQ ID NO: 1695 - DNA, 16 bp, Artificial Sequence
  Synthetic construct
catccacgtctagagg

SEQ ID NO: 1696 - DNA, 16 bp, Artificial Sequence
  Synthetic construct
catccacgtctagagg

SEQ ID NO: 1697 - DNA, 16 bp, Artificial Sequence
  Synthetic construct
catccacgtgggtcaa

SEQ ID NO: 1698 - DNA, 16 bp, Artificial Sequence
  Synthetic construct
catccacgtgggtcaa

SEQ ID NO: 1699 - DNA, 16 bp, Artificial Sequence
  Synthetic construct
catcgaaagctgaaat

SEQ ID NO: 1700 - DNA, 16 bp, Artificial Sequence
  Synthetic construct
catcgaaagctgaaat

SEQ ID NO: 1701 - DNA, 16 bp, Artificial Sequence
  Synthetic construct
catcgaaaggttccta

SEQ ID NO: 1702 - DNA, 16 bp, Artificial Sequence
  Synthetic construct
catcgaaaggttccta

SEQ ID NO: 1703 - DNA, 16 bp, Artificial Sequence
  Synthetic construct
catcgaacactgtcgg

SEQ ID NO: 1704 - DNA, 16 bp, Artificial Sequence
  Synthetic construct
catcgaacactgtcgg

SEQ ID NO: 1705 - DNA, 16 bp, Artificial Sequence
  Synthetic construct
catcgaatcacttcat

SEQ ID NO: 1706 - DNA, 16 bp, Artificial Sequence
  Synthetic construct
catcgaatcacttcat

SEQ ID NO: 1707 - DNA, 16 bp, Artificial Sequence
  Synthetic construct
catcgaatccgcagtg

SEQ ID NO: 1708 - DNA, 16 bp, Artificial Sequence
  Synthetic construct
catcgaatccgcagtg

SEQ ID NO: 1709 - DNA, 16 bp, Artificial Sequence
  Synthetic construct
catcgggagaagattc

SEQ ID NO: 1710 - DNA, 16 bp, Artificial Sequence
  Synthetic construct
catcgggagaagattc

SEQ ID NO: 1711 - DNA, 16 bp, Artificial Sequence
  Synthetic construct
catcgggaggaactgc

SEQ ID NO: 1712 - DNA, 16 bp, Artificial Sequence
  Synthetic construct
catcgggaggaactgc

SEQ ID NO: 1713 - DNA, 16 bp, Artificial Sequence
  Synthetic construct
catcggggtaccatca

SEQ ID NO: 1714 - DNA, 16 bp, Artificial Sequence
  Synthetic construct
catcggggtaccatca

SEQ ID NO: 1715 - DNA, 16 bp, Artificial Sequence
  Synthetic construct
catcggggtctgatca

SEQ ID NO: 1716 - DNA, 16 bp, Artificial Sequence
  Synthetic construct
catcggggtctgatca

SEQ ID NO: 1717 - DNA, 16 bp, Artificial Sequence
  Synthetic construct
catcgggtcagtacgt

SEQ ID NO: 1718 - DNA, 16 bp, Artificial Sequence
  Synthetic construct
catcgggtcagtacgt

SEQ ID NO: 1719 - DNA, 16 bp, Artificial Sequence
  Synthetic construct
catcgggtcttaccgc

SEQ ID NO: 1720 - DNA, 16 bp, Artificial Sequence
  Synthetic construct
catcgggtcttaccgc

SEQ ID NO: 1721 - DNA, 16 bp, Artificial Sequence
  Synthetic construct
catgacacatcgggtc

SEQ ID NO: 1722 - DNA, 16 bp, Artificial Sequence
  Synthetic construct
catgacacatcgggtc

SEQ ID NO: 1723 - DNA, 16 bp, Artificial Sequence
  Synthetic construct
catgacatcccacttg

SEQ ID NO: 1724 - DNA, 16 bp, Artificial Sequence
  Synthetic construct
catgacatcccacttg

SEQ ID NO: 1725 - DNA, 16 bp, Artificial Sequence
  Synthetic construct
catgacatctttagtc

SEQ ID NO: 1726 - DNA, 16 bp, Artificial Sequence
  Synthetic construct
catgacatctttagtc

SEQ ID NO: 1727 - DNA, 16 bp, Artificial Sequence
  Synthetic construct
catgcctagcccaacc

SEQ ID NO: 1728 - DNA, 16 bp, Artificial Sequence
  Synthetic construct
catgcctagcccaacc

SEQ ID NO: 1729 - DNA, 16 bp, Artificial Sequence
  Synthetic construct
catgcctcacacatgt

SEQ ID NO: 1730 - DNA, 16 bp, Artificial Sequence
  Synthetic construct
catgcctcacacatgt

SEQ ID NO: 1731 - DNA, 16 bp, Artificial Sequence
  Synthetic construct
catgcctcaccatgta

SEQ ID NO: 1732 - DNA, 16 bp, Artificial Sequence
  Synthetic construct
catgcctcaccatgta

SEQ ID NO: 1733 - DNA, 16 bp, Artificial Sequence
  Synthetic construct
catgccttcaccatag

SEQ ID NO: 1734 - DNA, 16 bp, Artificial Sequence
  Synthetic construct
catgccttcaccatag

SEQ ID NO: 1735 - DNA, 16 bp, Artificial Sequence
  Synthetic construct
catggcgagccagttt

SEQ ID NO: 1736 - DNA, 16 bp, Artificial Sequence
  Synthetic construct
catggcgagccagttt

SEQ ID NO: 1737 - DNA, 16 bp, Artificial Sequence
  Synthetic construct
catggcggtagtgaat

SEQ ID NO: 1738 - DNA, 16 bp, Artificial Sequence
  Synthetic construct
catggcggtagtgaat

SEQ ID NO: 1739 - DNA, 16 bp, Artificial Sequence
  Synthetic construct
cattatccagatctgt

SEQ ID NO: 1740 - DNA, 16 bp, Artificial Sequence
  Synthetic construct
cattatccagatctgt

SEQ ID NO: 1741 - DNA, 16 bp, Artificial Sequence
  Synthetic construct
cattatcgtaagtagt

SEQ ID NO: 1742 - DNA, 16 bp, Artificial Sequence
  Synthetic construct
cattatcgtaagtagt

SEQ ID NO: 1743 - DNA, 16 bp, Artificial Sequence
  Synthetic construct
cattatcgtcgaaagc

SEQ ID NO: 1744 - DNA, 16 bp, Artificial Sequence
  Synthetic construct
cattatcgtcgaaagc

SEQ ID NO: 1745 - DNA, 16 bp, Artificial Sequence
  Synthetic construct
cattatcgtggcgaat

SEQ ID NO: 1746 - DNA, 16 bp, Artificial Sequence
  Synthetic construct
cattatcgtggcgaat

SEQ ID NO: 1747 - DNA, 16 bp, Artificial Sequence
  Synthetic construct
cattatctccagggct

SEQ ID NO: 1748 - DNA, 16 bp, Artificial Sequence
  Synthetic construct
cattatctccagggct

SEQ ID NO: 1749 - DNA, 16 bp, Artificial Sequence
  Synthetic construct
cattatctcgcctgag

SEQ ID NO: 1750 - DNA, 16 bp, Artificial Sequence
  Synthetic construct
cattatctcgcctgag

SEQ ID NO: 1751 - DNA, 16 bp, Artificial Sequence
  Synthetic construct
cattcgcagtctcggc

SEQ ID NO: 1752 - DNA, 16 bp, Artificial Sequence
  Synthetic construct
cattcgcagtctcggc

SEQ ID NO: 1753 - DNA, 16 bp, Artificial Sequence
  Synthetic construct
cattcgcagttccaca

SEQ ID NO: 1754 - DNA, 16 bp, Artificial Sequence
  Synthetic construct
cattcgcagttccaca

SEQ ID NO: 1755 - DNA, 16 bp, Artificial Sequence
  Synthetic construct
cattcgcagttcgatc

SEQ ID NO: 1756 - DNA, 16 bp, Artificial Sequence
  Synthetic construct
cattcgcagttcgatc

SEQ ID NO: 1757 - DNA, 16 bp, Artificial Sequence
  Synthetic construct
cattcgcgtacagacg

SEQ ID NO: 1758 - DNA, 16 bp, Artificial Sequence
  Synthetic construct
cattcgcgtacagacg

SEQ ID NO: 1759 - DNA, 16 bp, Artificial Sequence
  Synthetic construct
cattcgcgttcgggct

SEQ ID NO: 1760 - DNA, 16 bp, Artificial Sequence
  Synthetic construct
cattcgcgttcgggct

SEQ ID NO: 1761 - DNA, 16 bp, Artificial Sequence
  Synthetic construct
ccaatcccaataacga

SEQ ID NO: 1762 - DNA, 16 bp, Artificial Sequence
  Synthetic construct
ccaatcccaataacga

SEQ ID NO: 1763 - DNA, 16 bp, Artificial Sequence
  Synthetic construct
ccaatccgtcagctat

SEQ ID NO: 1764 - DNA, 16 bp, Artificial Sequence
  Synthetic construct
ccaatccgtcagctat

SEQ ID NO: 1765 - DNA, 16 bp, Artificial Sequence
  Synthetic construct
ccaatccgtctacctc

SEQ ID NO: 1766 - DNA, 16 bp, Artificial Sequence
  Synthetic construct
ccaatccgtctacctc

SEQ ID NO: 1767 - DNA, 16 bp, Artificial Sequence
  Synthetic construct
ccaatcctcagcaact

SEQ ID NO: 1768 - DNA, 16 bp, Artificial Sequence
  Synthetic construct
ccaatcctcagcaact

SEQ ID NO: 1769 - DNA, 16 bp, Artificial Sequence
  Synthetic construct
ccacctaagaatgttg

SEQ ID NO: 1770 - DNA, 16 bp, Artificial Sequence
  Synthetic construct
ccacctaagaatgttg

SEQ ID NO: 1771 - DNA, 16 bp, Artificial Sequence
  Synthetic construct
ccacctaaggctacga

SEQ ID NO: 1772 - DNA, 16 bp, Artificial Sequence
  Synthetic construct
ccacctaaggctacga

SEQ ID NO: 1773 - DNA, 16 bp, Artificial Sequence
  Synthetic construct
ccacctacaatctacg

SEQ ID NO: 1774 - DNA, 16 bp, Artificial Sequence
  Synthetic construct
ccacctacaatctacg

SEQ ID NO: 1775 - DNA, 16 bp, Artificial Sequence
  Synthetic construct
ccacctacacttggat

SEQ ID NO: 1776 - DNA, 16 bp, Artificial Sequence
  Synthetic construct
ccacctacacttggat

SEQ ID NO: 1777 - DNA, 16 bp, Artificial Sequence
  Synthetic construct
ccacctacatggtagg

SEQ ID NO: 1778 - DNA, 16 bp, Artificial Sequence
  Synthetic construct
ccacctacatggtagg

SEQ ID NO: 1779 - DNA, 16 bp, Artificial Sequence
  Synthetic construct
ccacctacatttgctt

SEQ ID NO: 1780 - DNA, 16 bp, Artificial Sequence
  Synthetic construct
ccacctacatttgctt

SEQ ID NO: 1781 - DNA, 16 bp, Artificial Sequence
  Synthetic construct
ccacctagttatgtgc

SEQ ID NO: 1782 - DNA, 16 bp, Artificial Sequence
  Synthetic construct
ccacctagttatgtgc

SEQ ID NO: 1783 - DNA, 16 bp, Artificial Sequence
  Synthetic construct
ccacctatccgtagta

SEQ ID NO: 1784 - DNA, 16 bp, Artificial Sequence
  Synthetic construct
ccacctatccgtagta

SEQ ID NO: 1785 - DNA, 16 bp, Artificial Sequence
  Synthetic construct
ccacggaagcaacggt

SEQ ID NO: 1786 - DNA, 16 bp, Artificial Sequence
  Synthetic construct
ccacggaagcaacggt

SEQ ID NO: 1787 - DNA, 16 bp, Artificial Sequence
  Synthetic construct
ccacggacacatcttt

SEQ ID NO: 1788 - DNA, 16 bp, Artificial Sequence
  Synthetic construct
ccacggacacatcttt

SEQ ID NO: 1789 - DNA, 16 bp, Artificial Sequence
  Synthetic construct
ccacggagtactcgcg

SEQ ID NO: 1790 - DNA, 16 bp, Artificial Sequence
  Synthetic construct
ccacggagtactcgcg

SEQ ID NO: 1791 - DNA, 16 bp, Artificial Sequence
  Synthetic construct
ccacggagtcacaagg

SEQ ID NO: 1792 - DNA, 16 bp, Artificial Sequence
  Synthetic construct
ccacggagtcacaagg

SEQ ID NO: 1793 - DNA, 16 bp, Artificial Sequence
  Synthetic construct
ccacggagtcggatcc

SEQ ID NO: 1794 - DNA, 16 bp, Artificial Sequence
  Synthetic construct
ccacggagtcggatcc

SEQ ID NO: 1795 - DNA, 16 bp, Artificial Sequence
  Synthetic construct
ccacggagttccacaa

SEQ ID NO: 1796 - DNA, 16 bp, Artificial Sequence
  Synthetic construct
ccacggagttccacaa

SEQ ID NO: 1797 - DNA, 16 bp, Artificial Sequence
  Synthetic construct
ccacggagttggaccc

SEQ ID NO: 1798 - DNA, 16 bp, Artificial Sequence
  Synthetic construct
ccacggagttggaccc

SEQ ID NO: 1799 - DNA, 16 bp, Artificial Sequence
  Synthetic construct
ccacggagtttggcgc

SEQ ID NO: 1800 - DNA, 16 bp, Artificial Sequence
  Synthetic construct
ccacggagtttggcgc

SEQ ID NO: 1801 - DNA, 16 bp, Artificial Sequence
  Synthetic construct
ccacggatcatcaccc

SEQ ID NO: 1802 - DNA, 16 bp, Artificial Sequence
  Synthetic construct
ccacggatcatcaccc

SEQ ID NO: 1803 - DNA, 16 bp, Artificial Sequence
  Synthetic construct
ccacggatccctcttt

SEQ ID NO: 1804 - DNA, 16 bp, Artificial Sequence
  Synthetic construct
ccacggatccctcttt

SEQ ID NO: 1805 - DNA, 16 bp, Artificial Sequence
  Synthetic construct
ccactacagactagat

SEQ ID NO: 1806 - DNA, 16 bp, Artificial Sequence
  Synthetic construct
ccactacagactagat

SEQ ID NO: 1807 - DNA, 16 bp, Artificial Sequence
  Synthetic construct
ccactacagcacgcct

SEQ ID NO: 1808 - DNA, 16 bp, Artificial Sequence
  Synthetic construct
ccactacagcacgcct

SEQ ID NO: 1809 - DNA, 16 bp, Artificial Sequence
  Synthetic construct
ccactacagcgatagc

SEQ ID NO: 1810 - DNA, 16 bp, Artificial Sequence
  Synthetic construct
ccactacagcgatagc

SEQ ID NO: 1811 - DNA, 16 bp, Artificial Sequence
  Synthetic construct
ccactacagtgggttg

SEQ ID NO: 1812 - DNA, 16 bp, Artificial Sequence
  Synthetic construct
ccactacagtgggttg

SEQ ID NO: 1813 - DNA, 16 bp, Artificial Sequence
  Synthetic construct
ccactaccaccctatc

SEQ ID NO: 1814 - DNA, 16 bp, Artificial Sequence
  Synthetic construct
ccactaccaccctatc

SEQ ID NO: 1815 - DNA, 16 bp, Artificial Sequence
  Synthetic construct
ccactaccacgtcagc

SEQ ID NO: 1816 - DNA, 16 bp, Artificial Sequence
  Synthetic construct
ccactaccacgtcagc

SEQ ID NO: 1817 - DNA, 16 bp, Artificial Sequence
  Synthetic construct
ccactacgtaggctga

SEQ ID NO: 1818 - DNA, 16 bp, Artificial Sequence
  Synthetic construct
ccactacgtaggctga

SEQ ID NO: 1819 - DNA, 16 bp, Artificial Sequence
  Synthetic construct
ccactacgtcacttcc

SEQ ID NO: 1820 - DNA, 16 bp, Artificial Sequence
  Synthetic construct
ccactacgtcacttcc

SEQ ID NO: 1821 - DNA, 16 bp, Artificial Sequence
  Synthetic construct
ccactacgtctaaaga

SEQ ID NO: 1822 - DNA, 16 bp, Artificial Sequence
  Synthetic construct
ccactacgtctaaaga

SEQ ID NO: 1823 - DNA, 16 bp, Artificial Sequence
  Synthetic construct
ccactacgtgcgaaac

SEQ ID NO: 1824 - DNA, 16 bp, Artificial Sequence
  Synthetic construct
ccactacgtgcgaaac

SEQ ID NO: 1825 - DNA, 16 bp, Artificial Sequence
  Synthetic construct
ccactactctactcat

SEQ ID NO: 1826 - DNA, 16 bp, Artificial Sequence
  Synthetic construct
ccactactctactcat

SEQ ID NO: 1827 - DNA, 16 bp, Artificial Sequence
  Synthetic construct
ccagcgacaagcctat

SEQ ID NO: 1828 - DNA, 16 bp, Artificial Sequence
  Synthetic construct
ccagcgacaagcctat

SEQ ID NO: 1829 - DNA, 16 bp, Artificial Sequence
  Synthetic construct
ccagcgatctttacac

SEQ ID NO: 1830 - DNA, 16 bp, Artificial Sequence
  Synthetic construct
ccagcgatctttacac

SEQ ID NO: 1831 - DNA, 16 bp, Artificial Sequence
  Synthetic construct
ccatgtcaggtaaact

SEQ ID NO: 1832 - DNA, 16 bp, Artificial Sequence
  Synthetic construct
ccatgtcaggtaaact

SEQ ID NO: 1833 - DNA, 16 bp, Artificial Sequence
  Synthetic construct
ccatgtccaaggtgtg

SEQ ID NO: 1834 - DNA, 16 bp, Artificial Sequence
  Synthetic construct
ccatgtccaaggtgtg

SEQ ID NO: 1835 - DNA, 16 bp, Artificial Sequence
  Synthetic construct
ccatgtcgtaacgcga

SEQ ID NO: 1836 - DNA, 16 bp, Artificial Sequence
  Synthetic construct
ccatgtcgtaacgcga

SEQ ID NO: 1837 - DNA, 16 bp, Artificial Sequence
  Synthetic construct
ccatgtcgtagaaagg

SEQ ID NO: 1838 - DNA, 16 bp, Artificial Sequence
  Synthetic construct
ccatgtcgtagaaagg

SEQ ID NO: 1839 - DNA, 16 bp, Artificial Sequence
  Synthetic construct
ccattcgcaccgatat

SEQ ID NO: 1840 - DNA, 16 bp, Artificial Sequence
  Synthetic construct
ccattcgcaccgatat

SEQ ID NO: 1841 - DNA, 16 bp, Artificial Sequence
  Synthetic construct
ccattcgtcccaagta

SEQ ID NO: 1842 - DNA, 16 bp, Artificial Sequence
  Synthetic construct
ccattcgtcccaagta

SEQ ID NO: 1843 - DNA, 16 bp, Artificial Sequence
  Synthetic construct
cccaatcaggcgacat

SEQ ID NO: 1844 - DNA, 16 bp, Artificial Sequence
  Synthetic construct
cccaatcaggcgacat

SEQ ID NO: 1845 - DNA, 16 bp, Artificial Sequence
  Synthetic construct
cccaatccatctatgg

SEQ ID NO: 1846 - DNA, 16 bp, Artificial Sequence
  Synthetic construct
cccaatccatctatgg

SEQ ID NO: 1847 - DNA, 16 bp, Artificial Sequence
  Synthetic construct
cccaatcgtcgaatct

SEQ ID NO: 1848 - DNA, 16 bp, Artificial Sequence
  Synthetic construct
cccaatcgtcgaatct

SEQ ID NO: 1849 - DNA, 16 bp, Artificial Sequence
  Synthetic construct
cccagttagcaccgtc

SEQ ID NO: 1850 - DNA, 16 bp, Artificial Sequence
  Synthetic construct
cccagttagcaccgtc

SEQ ID NO: 1851 - DNA, 16 bp, Artificial Sequence
  Synthetic construct
cccagttagccaggat

SEQ ID NO: 1852 - DNA, 16 bp, Artificial Sequence
  Synthetic construct
cccagttagccaggat

SEQ ID NO: 1853 - DNA, 16 bp, Artificial Sequence
  Synthetic construct
cccagttagtccgtat

SEQ ID NO: 1854 - DNA, 16 bp, Artificial Sequence
  Synthetic construct
cccagttagtccgtat

SEQ ID NO: 1855 - DNA, 16 bp, Artificial Sequence
  Synthetic construct
cccagttcaatgttgc

SEQ ID NO: 1856 - DNA, 16 bp, Artificial Sequence
  Synthetic construct
cccagttcaatgttgc

SEQ ID NO: 1857 - DNA, 16 bp, Artificial Sequence
  Synthetic construct
cccagttcacctggtg

SEQ ID NO: 1858 - DNA, 16 bp, Artificial Sequence
  Synthetic construct
cccagttcacctggtg

SEQ ID NO: 1859 - DNA, 16 bp, Artificial Sequence
  Synthetic construct
cccagttcacggacaa

SEQ ID NO: 1860 - DNA, 16 bp, Artificial Sequence
  Synthetic construct
cccagttcacggacaa

SEQ ID NO: 1861 - DNA, 16 bp, Artificial Sequence
  Synthetic construct
cccagttgtagcgcaa

SEQ ID NO: 1862 - DNA, 16 bp, Artificial Sequence
  Synthetic construct
cccagttgtagcgcaa

SEQ ID NO: 1863 - DNA, 16 bp, Artificial Sequence
  Synthetic construct
cccagttgtagtagta

SEQ ID NO: 1864 - DNA, 16 bp, Artificial Sequence
  Synthetic construct
cccagttgtagtagta

SEQ ID NO: 1865 - DNA, 16 bp, Artificial Sequence
  Synthetic construct
cccagttgttcgaatc

SEQ ID NO: 1866 - DNA, 16 bp, Artificial Sequence
  Synthetic construct
cccagttgttcgaatc

SEQ ID NO: 1867 - DNA, 16 bp, Artificial Sequence
  Synthetic construct
cccagtttccacgtgg

SEQ ID NO: 1868 - DNA, 16 bp, Artificial Sequence
  Synthetic construct
cccagtttccacgtgg

SEQ ID NO: 1869 - DNA, 16 bp, Artificial Sequence
  Synthetic construct
cccataccaccagatt

SEQ ID NO: 1870 - DNA, 16 bp, Artificial Sequence
  Synthetic construct
cccataccaccagatt

SEQ ID NO: 1871 - DNA, 16 bp, Artificial Sequence
  Synthetic construct
cccataccactgttag

SEQ ID NO: 1872 - DNA, 16 bp, Artificial Sequence
  Synthetic construct
cccataccactgttag

SEQ ID NO: 1873 - DNA, 16 bp, Artificial Sequence
  Synthetic construct
cccataccagcctgtg

SEQ ID NO: 1874 - DNA, 16 bp, Artificial Sequence
  Synthetic construct
cccataccagcctgtg

SEQ ID NO: 1875 - DNA, 16 bp, Artificial Sequence
  Synthetic construct
cccatacgtactcgcg

SEQ ID NO: 1876 - DNA, 16 bp, Artificial Sequence
  Synthetic construct
cccatacgtactcgcg

SEQ ID NO: 1877 - DNA, 16 bp, Artificial Sequence
  Synthetic construct
cccatacgtatatgag

SEQ ID NO: 1878 - DNA, 16 bp, Artificial Sequence
  Synthetic construct
cccatacgtatatgag

SEQ ID NO: 1879 - DNA, 16 bp, Artificial Sequence
  Synthetic construct
cccatacgtctggtcg

SEQ ID NO: 1880 - DNA, 16 bp, Artificial Sequence
  Synthetic construct
cccatacgtctggtcg

SEQ ID NO: 1881 - DNA, 16 bp, Artificial Sequence
  Synthetic construct
cccatactcgaacgga

SEQ ID NO: 1882 - DNA, 16 bp, Artificial Sequence
  Synthetic construct
cccatactcgaacgga

SEQ ID NO: 1883 - DNA, 16 bp, Artificial Sequence
  Synthetic construct
ccctcctagctcaact

SEQ ID NO: 1884 - DNA, 16 bp, Artificial Sequence
  Synthetic construct
ccctcctagctcaact

SEQ ID NO: 1885 - DNA, 16 bp, Artificial Sequence
  Synthetic construct
ccctcctaggtgacca

SEQ ID NO: 1886 - DNA, 16 bp, Artificial Sequence
  Synthetic construct
ccctcctaggtgacca

SEQ ID NO: 1887 - DNA, 16 bp, Artificial Sequence
  Synthetic construct
ccctcctagtcgtttg

SEQ ID NO: 1888 - DNA, 16 bp, Artificial Sequence
  Synthetic construct
ccctcctagtcgtttg

SEQ ID NO: 1889 - DNA, 16 bp, Artificial Sequence
  Synthetic construct
ccctcctcattcgaca

SEQ ID NO: 1890 - DNA, 16 bp, Artificial Sequence
  Synthetic construct
ccctcctcattcgaca

SEQ ID NO: 1891 - DNA, 16 bp, Artificial Sequence
  Synthetic construct
ccctcctgtacatcca

SEQ ID NO: 1892 - DNA, 16 bp, Artificial Sequence
  Synthetic construct
ccctcctgtacatcca

SEQ ID NO: 1893 - DNA, 16 bp, Artificial Sequence
  Synthetic construct
ccctcctgtataatgg

SEQ ID NO: 1894 - DNA, 16 bp, Artificial Sequence
  Synthetic construct
ccctcctgtataatgg

SEQ ID NO: 1895 - DNA, 16 bp, Artificial Sequence
  Synthetic construct
ccctcctgtgagcgat

SEQ ID NO: 1896 - DNA, 16 bp, Artificial Sequence
  Synthetic construct
ccctcctgtgagcgat

SEQ ID NO: 1897 - DNA, 16 bp, Artificial Sequence
  Synthetic construct
ccctccttcattgccc

SEQ ID NO: 1898 - DNA, 16 bp, Artificial Sequence
  Synthetic construct
ccctccttcattgccc

SEQ ID NO: 1899 - DNA, 16 bp, Artificial Sequence
  Synthetic construct
ccctccttctcgagta

SEQ ID NO: 1900 - DNA, 16 bp, Artificial Sequence
  Synthetic construct
ccctccttctcgagta

SEQ ID NO: 1901 - DNA, 16 bp, Artificial Sequence
  Synthetic construct
ccgggatgtatatgga

SEQ ID NO: 1902 - DNA, 16 bp, Artificial Sequence
  Synthetic construct
ccgggatgtatatgga

SEQ ID NO: 1903 - DNA, 16 bp, Artificial Sequence
  Synthetic construct
ccgggatgttcacctc

SEQ ID NO: 1904 - DNA, 16 bp, Artificial Sequence
  Synthetic construct
ccgggatgttcacctc

SEQ ID NO: 1905 - DNA, 16 bp, Artificial Sequence
  Synthetic construct
ccggtagagcagactg

SEQ ID NO: 1906 - DNA, 16 bp, Artificial Sequence
  Synthetic construct
ccggtagagcagactg

SEQ ID NO: 1907 - DNA, 16 bp, Artificial Sequence
  Synthetic construct
ccggtagagccacgct

SEQ ID NO: 1908 - DNA, 16 bp, Artificial Sequence
  Synthetic construct
ccggtagagccacgct

SEQ ID NO: 1909 - DNA, 16 bp, Artificial Sequence
  Synthetic construct
ccggtagagcttatcg

SEQ ID NO: 1910 - DNA, 16 bp, Artificial Sequence
  Synthetic construct
ccggtagagcttatcg

SEQ ID NO: 1911 - DNA, 16 bp, Artificial Sequence
  Synthetic construct
ccggtagagtgtccat

SEQ ID NO: 1912 - DNA, 16 bp, Artificial Sequence
  Synthetic construct
ccggtagagtgtccat

SEQ ID NO: 1913 - DNA, 16 bp, Artificial Sequence
  Synthetic construct
ccggtagcatccaaca

SEQ ID NO: 1914 - DNA, 16 bp, Artificial Sequence
  Synthetic construct
ccggtagcatccaaca

SEQ ID NO: 1915 - DNA, 16 bp, Artificial Sequence
  Synthetic construct
ccggtaggtagtagta

SEQ ID NO: 1916 - DNA, 16 bp, Artificial Sequence
  Synthetic construct
ccggtaggtagtagta

SEQ ID NO: 1917 - DNA, 16 bp, Artificial Sequence
  Synthetic construct
ccggtaggtcccttgt

SEQ ID NO: 1918 - DNA, 16 bp, Artificial Sequence
  Synthetic construct
ccggtaggtcccttgt

SEQ ID NO: 1919 - DNA, 16 bp, Artificial Sequence
  Synthetic construct
ccggtaggtcgtcttc

SEQ ID NO: 1920 - DNA, 16 bp, Artificial Sequence
  Synthetic construct
ccggtaggtcgtcttc

SEQ ID NO: 1921 - DNA, 16 bp, Artificial Sequence
  Synthetic construct
ccggtaggtctaacgt

SEQ ID NO: 1922 - DNA, 16 bp, Artificial Sequence
  Synthetic construct
ccggtaggtctaacgt

SEQ ID NO: 1923 - DNA, 16 bp, Artificial Sequence
  Synthetic construct
ccggtaggtctcttta

SEQ ID NO: 1924 - DNA, 16 bp, Artificial Sequence
  Synthetic construct
ccggtaggtctcttta

SEQ ID NO: 1925 - DNA, 16 bp, Artificial Sequence
  Synthetic construct
ccggtaggtgacaaat

SEQ ID NO: 1926 - DNA, 16 bp, Artificial Sequence
  Synthetic construct
ccggtaggtgacaaat

SEQ ID NO: 1927 - DNA, 16 bp, Artificial Sequence
  Synthetic construct
ccgtactagaataggg

SEQ ID NO: 1928 - DNA, 16 bp, Artificial Sequence
  Synthetic construct
ccgtactagaataggg

SEQ ID NO: 1929 - DNA, 16 bp, Artificial Sequence
  Synthetic construct
ccgtactaggccgaat

SEQ ID NO: 1930 - DNA, 16 bp, Artificial Sequence
  Synthetic construct
ccgtactaggccgaat

SEQ ID NO: 1931 - DNA, 16 bp, Artificial Sequence
  Synthetic construct
ccgtacttcacctcgt

SEQ ID NO: 1932 - DNA, 16 bp, Artificial Sequence
  Synthetic construct
ccgtacttcacctcgt

SEQ ID NO: 1933 - DNA, 16 bp, Artificial Sequence
  Synthetic construct
ccgtggaagcatcatc

SEQ ID NO: 1934 - DNA, 16 bp, Artificial Sequence
  Synthetic construct
ccgtggaagcatcatc

SEQ ID NO: 1935 - DNA, 16 bp, Artificial Sequence
  Synthetic construct
ccgtggaagggcacta

SEQ ID NO: 1936 - DNA, 16 bp, Artificial Sequence
  Synthetic construct
ccgtggaagggcacta

SEQ ID NO: 1937 - DNA, 16 bp, Artificial Sequence
  Synthetic construct
ccgtggacacaagtaa

SEQ ID NO: 1938 - DNA, 16 bp, Artificial Sequence
  Synthetic construct
ccgtggacacaagtaa

SEQ ID NO: 1939 - DNA, 16 bp, Artificial Sequence
  Synthetic construct
ccgtggacagcctata

SEQ ID NO: 1940 - DNA, 16 bp, Artificial Sequence
  Synthetic construct
ccgtggacagcctata

SEQ ID NO: 1941 - DNA, 16 bp, Artificial Sequence
  Synthetic construct
ccgtggagtattcgtg

SEQ ID NO: 1942 - DNA, 16 bp, Artificial Sequence
  Synthetic construct
ccgtggagtattcgtg

SEQ ID NO: 1943 - DNA, 16 bp, Artificial Sequence
  Synthetic construct
ccgtggatccgaagag

SEQ ID NO: 1944 - DNA, 16 bp, Artificial Sequence
  Synthetic construct
ccgtggatccgaagag

SEQ ID NO: 1945 - DNA, 16 bp, Artificial Sequence
  Synthetic construct
ccgttcaagcaatatg

SEQ ID NO: 1946 - DNA, 16 bp, Artificial Sequence
  Synthetic construct
ccgttcaagcaatatg

SEQ ID NO: 1947 - DNA, 16 bp, Artificial Sequence
  Synthetic construct
ccgttcaaggatgcgt

SEQ ID NO: 1948 - DNA, 16 bp, Artificial Sequence
  Synthetic construct
ccgttcaaggatgcgt

SEQ ID NO: 1949 - DNA, 16 bp, Artificial Sequence
  Synthetic construct
ccgttcacaatggacg

SEQ ID NO: 1950 - DNA, 16 bp, Artificial Sequence
  Synthetic construct
ccgttcacaatggacg

SEQ ID NO: 1951 - DNA, 16 bp, Artificial Sequence
  Synthetic construct
ccgttcagtagaaagg

SEQ ID NO: 1952 - DNA, 16 bp, Artificial Sequence
  Synthetic construct
ccgttcagtagaaagg

SEQ ID NO: 1953 - DNA, 16 bp, Artificial Sequence
  Synthetic construct
ccgttcagtatagggc

SEQ ID NO: 1954 - DNA, 16 bp, Artificial Sequence
  Synthetic construct
ccgttcagtatagggc

SEQ ID NO: 1955 - DNA, 16 bp, Artificial Sequence
  Synthetic construct
ccgttcagtcattagc

SEQ ID NO: 1956 - DNA, 16 bp, Artificial Sequence
  Synthetic construct
ccgttcagtcattagc

SEQ ID NO: 1957 - DNA, 16 bp, Artificial Sequence
  Synthetic construct
ccgttcagttgtcgcg

SEQ ID NO: 1958 - DNA, 16 bp, Artificial Sequence
  Synthetic construct
ccgttcagttgtcgcg

SEQ ID NO: 1959 - DNA, 16 bp, Artificial Sequence
  Synthetic construct
ccgttcagtttcgctc

SEQ ID NO: 1960 - DNA, 16 bp, Artificial Sequence
  Synthetic construct
ccgttcagtttcgctc

SEQ ID NO: 1961 - DNA, 16 bp, Artificial Sequence
  Synthetic construct
ccgttcatcgtttgcc

SEQ ID NO: 1962 - DNA, 16 bp, Artificial Sequence
  Synthetic construct
ccgttcatcgtttgcc

SEQ ID NO: 1963 - DNA, 16 bp, Artificial Sequence
  Synthetic construct
ccgttcatctgagtgt

SEQ ID NO: 1964 - DNA, 16 bp, Artificial Sequence
  Synthetic construct
ccgttcatctgagtgt

SEQ ID NO: 1965 - DNA, 16 bp, Artificial Sequence
  Synthetic construct
ccgttcatcttgacga

SEQ ID NO: 1966 - DNA, 16 bp, Artificial Sequence
  Synthetic construct
ccgttcatcttgacga

SEQ ID NO: 1967 - DNA, 16 bp, Artificial Sequence
  Synthetic construct
cctaaagagccacgtc

SEQ ID NO: 1968 - DNA, 16 bp, Artificial Sequence
  Synthetic construct
cctaaagagccacgtc

SEQ ID NO: 1969 - DNA, 16 bp, Artificial Sequence
  Synthetic construct
cctaaagagccaggat

SEQ ID NO: 1970 - DNA, 16 bp, Artificial Sequence
  Synthetic construct
cctaaagagccaggat

SEQ ID NO: 1971 - DNA, 16 bp, Artificial Sequence
  Synthetic construct
cctaaagaggcattgg

SEQ ID NO: 1972 - DNA, 16 bp, Artificial Sequence
  Synthetic construct
cctaaagaggcattgg

SEQ ID NO: 1973 - DNA, 16 bp, Artificial Sequence
  Synthetic construct
cctaaagcatacgcta

SEQ ID NO: 1974 - DNA, 16 bp, Artificial Sequence
  Synthetic construct
cctaaagcatacgcta

SEQ ID NO: 1975 - DNA, 16 bp, Artificial Sequence
  Synthetic construct
cctaaaggtctaggtt

SEQ ID NO: 1976 - DNA, 16 bp, Artificial Sequence
  Synthetic construct
cctaaaggtctaggtt

SEQ ID NO: 1977 - DNA, 16 bp, Artificial Sequence
  Synthetic construct
cctacacaggatatac

SEQ ID NO: 1978 - DNA, 16 bp, Artificial Sequence
  Synthetic construct
cctacacaggatatac

SEQ ID NO: 1979 - DNA, 16 bp, Artificial Sequence
  Synthetic construct
cctacaccaggaatcg

SEQ ID NO: 1980 - DNA, 16 bp, Artificial Sequence
  Synthetic construct
cctacaccaggaatcg

SEQ ID NO: 1981 - DNA, 16 bp, Artificial Sequence
  Synthetic construct
cctacacgtctaacgt

SEQ ID NO: 1982 - DNA, 16 bp, Artificial Sequence
  Synthetic construct
cctacacgtctaacgt

SEQ ID NO: 1983 - DNA, 16 bp, Artificial Sequence
  Synthetic construct
cctacactcccttgtg

SEQ ID NO: 1984 - DNA, 16 bp, Artificial Sequence
  Synthetic construct
cctacactcccttgtg

SEQ ID NO: 1985 - DNA, 16 bp, Artificial Sequence
  Synthetic construct
cctaccaagcgatagc

SEQ ID NO: 1986 - DNA, 16 bp, Artificial Sequence
  Synthetic construct
cctaccaagcgatagc

SEQ ID NO: 1987 - DNA, 16 bp, Artificial Sequence
  Synthetic construct
cctaccaaggccgaat

SEQ ID NO: 1988 - DNA, 16 bp, Artificial Sequence
  Synthetic construct
cctaccaaggccgaat

SEQ ID NO: 1989 - DNA, 16 bp, Artificial Sequence
  Synthetic construct
cctaccagtacgaaat

SEQ ID NO: 1990 - DNA, 16 bp, Artificial Sequence
  Synthetic construct
cctaccagtacgaaat

SEQ ID NO: 1991 - DNA, 16 bp, Artificial Sequence
  Synthetic construct
cctaccagtatatgag

SEQ ID NO: 1992 - DNA, 16 bp, Artificial Sequence
  Synthetic construct
cctaccagtatatgag

SEQ ID NO: 1993 - DNA, 16 bp, Artificial Sequence
  Synthetic construct
cctaccagtgagtata

SEQ ID NO: 1994 - DNA, 16 bp, Artificial Sequence
  Synthetic construct
cctaccagtgagtata

SEQ ID NO: 1995 - DNA, 16 bp, Artificial Sequence
  Synthetic construct
cctaccatccgaatgt

SEQ ID NO: 1996 - DNA, 16 bp, Artificial Sequence
  Synthetic construct
cctaccatccgaatgt

SEQ ID NO: 1997 - DNA, 16 bp, Artificial Sequence
  Synthetic construct
cctagctagacgcaca

SEQ ID NO: 1998 - DNA, 16 bp, Artificial Sequence
  Synthetic construct
cctagctagacgcaca

SEQ ID NO: 1999 - DNA, 16 bp, Artificial Sequence
  Synthetic construct
cctagctagcagcgta

SEQ ID NO: 2000 - DNA, 16 bp, Artificial Sequence
  Synthetic construct
cctagctagcagcgta

SEQ ID NO: 2001 - DNA, 16 bp, Artificial Sequence
  Synthetic construct
cctagctagccatcgc

SEQ ID NO: 2002 - DNA, 16 bp, Artificial Sequence
  Synthetic construct
cctagctagccatcgc

SEQ ID NO: 2003 - DNA, 16 bp, Artificial Sequence
  Synthetic construct
cctagctaggtagctg

SEQ ID NO: 2004 - DNA, 16 bp, Artificial Sequence
  Synthetic construct
cctagctaggtagctg

SEQ ID NO: 2005 - DNA, 16 bp, Artificial Sequence
  Synthetic construct
cctagctcacggtaag

SEQ ID NO: 2006 - DNA, 16 bp, Artificial Sequence
  Synthetic construct
cctagctcacggtaag

SEQ ID NO: 2007 - DNA, 16 bp, Artificial Sequence
  Synthetic construct
cctagctgtaaacctc

SEQ ID NO: 2008 - DNA, 16 bp, Artificial Sequence
  Synthetic construct
cctagctgtaaacctc

SEQ ID NO: 2009 - DNA, 16 bp, Artificial Sequence
  Synthetic construct
cctagctgtagagtgc

SEQ ID NO: 2010 - DNA, 16 bp, Artificial Sequence
  Synthetic construct
cctagctgtagagtgc

SEQ ID NO: 2011 - DNA, 16 bp, Artificial Sequence
  Synthetic construct
cctagctgtgaggcta

SEQ ID NO: 2012 - DNA, 16 bp, Artificial Sequence
  Synthetic construct
cctagctgtgaggcta

SEQ ID NO: 2013 - DNA, 16 bp, Artificial Sequence
  Synthetic construct
cctagctgttcatggt

SEQ ID NO: 2014 - DNA, 16 bp, Artificial Sequence
  Synthetic construct
cctagctgttcatggt

SEQ ID NO: 2015 - DNA, 16 bp, Artificial Sequence
  Synthetic construct
cctagcttcagtgttg

SEQ ID NO: 2016 - DNA, 16 bp, Artificial Sequence
  Synthetic construct
cctagcttcagtgttg

SEQ ID NO: 2017 - DNA, 16 bp, Artificial Sequence
  Synthetic construct
cctattaagctaacaa

SEQ ID NO: 2018 - DNA, 16 bp, Artificial Sequence
  Synthetic construct
cctattaagctaacaa

SEQ ID NO: 2019 - DNA, 16 bp, Artificial Sequence
  Synthetic construct
cctattaaggctacga

SEQ ID NO: 2020 - DNA, 16 bp, Artificial Sequence
  Synthetic construct
cctattaaggctacga

SEQ ID NO: 2021 - DNA, 16 bp, Artificial Sequence
  Synthetic construct
cctattacaccgatat

SEQ ID NO: 2022 - DNA, 16 bp, Artificial Sequence
  Synthetic construct
cctattacaccgatat

SEQ ID NO: 2023 - DNA, 16 bp, Artificial Sequence
  Synthetic construct
cctattagtctggaga

SEQ ID NO: 2024 - DNA, 16 bp, Artificial Sequence
  Synthetic construct
cctattagtctggaga

SEQ ID NO: 2025 - DNA, 16 bp, Artificial Sequence
  Synthetic construct
cctattagtgacaaat

SEQ ID NO: 2026 - DNA, 16 bp, Artificial Sequence
  Synthetic construct
cctattagtgacaaat

SEQ ID NO: 2027 - DNA, 16 bp, Artificial Sequence
  Synthetic construct
cctcagtagagctata

SEQ ID NO: 2028 - DNA, 16 bp, Artificial Sequence
  Synthetic construct
cctcagtagagctata

SEQ ID NO: 2029 - DNA, 16 bp, Artificial Sequence
  Synthetic construct
cctcagtagccagttt

SEQ ID NO: 2030 - DNA, 16 bp, Artificial Sequence
  Synthetic construct
cctcagtagccagttt

SEQ ID NO: 2031 - DNA, 16 bp, Artificial Sequence
  Synthetic construct
cctcagtagctaaaca

SEQ ID NO: 2032 - DNA, 16 bp, Artificial Sequence
  Synthetic construct
cctcagtagctaaaca

SEQ ID NO: 2033 - DNA, 16 bp, Artificial Sequence
  Synthetic construct
cctcagtaggctctta

SEQ ID NO: 2034 - DNA, 16 bp, Artificial Sequence
  Synthetic construct
cctcagtaggctctta

SEQ ID NO: 2035 - DNA, 16 bp, Artificial Sequence
  Synthetic construct
cctcagtagtgttgaa

SEQ ID NO: 2036 - DNA, 16 bp, Artificial Sequence
  Synthetic construct
cctcagtagtgttgaa

SEQ ID NO: 2037 - DNA, 16 bp, Artificial Sequence
  Synthetic construct
cctcagtcactgaagg

SEQ ID NO: 2038 - DNA, 16 bp, Artificial Sequence
  Synthetic construct
cctcagtcactgaagg

SEQ ID NO: 2039 - DNA, 16 bp, Artificial Sequence
  Synthetic construct
cctcagtcacttaacg

SEQ ID NO: 2040 - DNA, 16 bp, Artificial Sequence
  Synthetic construct
cctcagtcacttaacg

SEQ ID NO: 2041 - DNA, 16 bp, Artificial Sequence
  Synthetic construct
cctcagtcaggcagta

SEQ ID NO: 2042 - DNA, 16 bp, Artificial Sequence
  Synthetic construct
cctcagtcaggcagta

SEQ ID NO: 2043 - DNA, 16 bp, Artificial Sequence
  Synthetic construct
cctcagtcatcgggtc

SEQ ID NO: 2044 - DNA, 16 bp, Artificial Sequence
  Synthetic construct
cctcagtcatcgggtc

SEQ ID NO: 2045 - DNA, 16 bp, Artificial Sequence
  Synthetic construct
cctcagtcattggtac

SEQ ID NO: 2046 - DNA, 16 bp, Artificial Sequence
  Synthetic construct
cctcagtcattggtac

SEQ ID NO: 2047 - DNA, 16 bp, Artificial Sequence
  Synthetic construct
cctcagtgtgttggga

SEQ ID NO: 2048 - DNA, 16 bp, Artificial Sequence
  Synthetic construct
cctcagtgtgttggga

SEQ ID NO: 2049 - DNA, 16 bp, Artificial Sequence
  Synthetic construct
cctcagttcgccagca

SEQ ID NO: 2050 - DNA, 16 bp, Artificial Sequence
  Synthetic construct
cctcagttcgccagca

SEQ ID NO: 2051 - DNA, 16 bp, Artificial Sequence
  Synthetic construct
cctcagttctgggcca

SEQ ID NO: 2052 - DNA, 16 bp, Artificial Sequence
  Synthetic construct
cctcagttctgggcca

SEQ ID NO: 2053 - DNA, 16 bp, Artificial Sequence
  Synthetic construct
cctctgagtcaaagat

SEQ ID NO: 2054 - DNA, 16 bp, Artificial Sequence
  Synthetic construct
cctctgagtcaaagat

SEQ ID NO: 2055 - DNA, 16 bp, Artificial Sequence
  Synthetic construct
cctctgagtcggcact

SEQ ID NO: 2056 - DNA, 16 bp, Artificial Sequence
  Synthetic construct
cctctgagtcggcact

SEQ ID NO: 2057 - DNA, 16 bp, Artificial Sequence
  Synthetic construct
ccttacgagacctttg

SEQ ID NO: 2058 - DNA, 16 bp, Artificial Sequence
  Synthetic construct
ccttacgagacctttg

SEQ ID NO: 2059 - DNA, 16 bp, Artificial Sequence
  Synthetic construct
ccttacgagcaaatca

SEQ ID NO: 2060 - DNA, 16 bp, Artificial Sequence
  Synthetic construct
ccttacgagcaaatca

SEQ ID NO: 2061 - DNA, 16 bp, Artificial Sequence
  Synthetic construct
ccttacgaggacatta

SEQ ID NO: 2062 - DNA, 16 bp, Artificial Sequence
  Synthetic construct
ccttacgaggacatta

SEQ ID NO: 2063 - DNA, 16 bp, Artificial Sequence
  Synthetic construct
ccttacgaggacgaaa

SEQ ID NO: 2064 - DNA, 16 bp, Artificial Sequence
  Synthetic construct
ccttacgaggacgaaa

SEQ ID NO: 2065 - DNA, 16 bp, Artificial Sequence
  Synthetic construct
ccttacgaggtgcttt

SEQ ID NO: 2066 - DNA, 16 bp, Artificial Sequence
  Synthetic construct
ccttacgaggtgcttt

SEQ ID NO: 2067 - DNA, 16 bp, Artificial Sequence
  Synthetic construct
ccttacgagtttcctt

SEQ ID NO: 2068 - DNA, 16 bp, Artificial Sequence
  Synthetic construct
ccttacgagtttcctt

SEQ ID NO: 2069 - DNA, 16 bp, Artificial Sequence
  Synthetic construct
ccttacgcaaatacag

SEQ ID NO: 2070 - DNA, 16 bp, Artificial Sequence
  Synthetic construct
ccttacgcaaatacag

SEQ ID NO: 2071 - DNA, 16 bp, Artificial Sequence
  Synthetic construct
ccttacgcaatgaatg

SEQ ID NO: 2072 - DNA, 16 bp, Artificial Sequence
  Synthetic construct
ccttacgcaatgaatg

SEQ ID NO: 2073 - DNA, 16 bp, Artificial Sequence
  Synthetic construct
ccttacgcacagcgtc

SEQ ID NO: 2074 - DNA, 16 bp, Artificial Sequence
  Synthetic construct
ccttacgcacagcgtc

SEQ ID NO: 2075 - DNA, 16 bp, Artificial Sequence
  Synthetic construct
ccttacgtcgaatcca

SEQ ID NO: 2076 - DNA, 16 bp, Artificial Sequence
  Synthetic construct
ccttacgtcgaatcca

SEQ ID NO: 2077 - DNA, 16 bp, Artificial Sequence
  Synthetic construct
ccttcccaggattcgg

SEQ ID NO: 2078 - DNA, 16 bp, Artificial Sequence
  Synthetic construct
ccttcccaggattcgg

SEQ ID NO: 2079 - DNA, 16 bp, Artificial Sequence
  Synthetic construct
ccttccccacctatcc

SEQ ID NO: 2080 - DNA, 16 bp, Artificial Sequence
  Synthetic construct
ccttccccacctatcc

SEQ ID NO: 2081 - DNA, 16 bp, Artificial Sequence
  Synthetic construct
ccttccctctcgagta

SEQ ID NO: 2082 - DNA, 16 bp, Artificial Sequence
  Synthetic construct
ccttccctctcgagta

SEQ ID NO: 2083 - DNA, 16 bp, Artificial Sequence
  Synthetic construct
ccttcgaagcacacag

SEQ ID NO: 2084 - DNA, 16 bp, Artificial Sequence
  Synthetic construct
ccttcgaagcacacag

SEQ ID NO: 2085 - DNA, 16 bp, Artificial Sequence
  Synthetic construct
ccttcgacaccgaatt

SEQ ID NO: 2086 - DNA, 16 bp, Artificial Sequence
  Synthetic construct
ccttcgacaccgaatt

SEQ ID NO: 2087 - DNA, 16 bp, Artificial Sequence
  Synthetic construct
ccttcgagtagagctg

SEQ ID NO: 2088 - DNA, 16 bp, Artificial Sequence
  Synthetic construct
ccttcgagtagagctg

SEQ ID NO: 2089 - DNA, 16 bp, Artificial Sequence
  Synthetic construct
ccttcgatcagaggtg

SEQ ID NO: 2090 - DNA, 16 bp, Artificial Sequence
  Synthetic construct
ccttcgatcagaggtg

SEQ ID NO: 2091 - DNA, 16 bp, Artificial Sequence
  Synthetic construct
ccttcgatctctgaga

SEQ ID NO: 2092 - DNA, 16 bp, Artificial Sequence
  Synthetic construct
ccttcgatctctgaga

SEQ ID NO: 2093 - DNA, 16 bp, Artificial Sequence
  Synthetic construct
cctttctagatgttag

SEQ ID NO: 2094 - DNA, 16 bp, Artificial Sequence
  Synthetic construct
cctttctagatgttag

SEQ ID NO: 2095 - DNA, 16 bp, Artificial Sequence
  Synthetic construct
cctttctagtgatcgg

SEQ ID NO: 2096 - DNA, 16 bp, Artificial Sequence
  Synthetic construct
cctttctagtgatcgg

SEQ ID NO: 2097 - DNA, 16 bp, Artificial Sequence
  Synthetic construct
cctttctcagcttaac

SEQ ID NO: 2098 - DNA, 16 bp, Artificial Sequence
  Synthetic construct
cctttctcagcttaac

SEQ ID NO: 2099 - DNA, 16 bp, Artificial Sequence
  Synthetic construct
cctttcttcctcgcat

SEQ ID NO: 2100 - DNA, 16 bp, Artificial Sequence
  Synthetic construct
cctttcttcctcgcat

SEQ ID NO: 2101 - DNA, 16 bp, Artificial Sequence
  Synthetic construct
cctttcttcctgcttg

SEQ ID NO: 2102 - DNA, 16 bp, Artificial Sequence
  Synthetic construct
cctttcttcctgcttg

SEQ ID NO: 2103 - DNA, 16 bp, Artificial Sequence
  Synthetic construct
cctttcttctaacggt

SEQ ID NO: 2104 - DNA, 16 bp, Artificial Sequence
  Synthetic construct
cctttcttctaacggt

SEQ ID NO: 2105 - DNA, 16 bp, Artificial Sequence
  Synthetic construct
cgaacatcaacgatgg

SEQ ID NO: 2106 - DNA, 16 bp, Artificial Sequence
  Synthetic construct
cgaacatcaacgatgg

SEQ ID NO: 2107 - DNA, 16 bp, Artificial Sequence
  Synthetic construct
cgaacatcaatgaatg

SEQ ID NO: 2108 - DNA, 16 bp, Artificial Sequence
  Synthetic construct
cgaacatcaatgaatg

SEQ ID NO: 2109 - DNA, 16 bp, Artificial Sequence
  Synthetic construct
cgaacatgtctaacgt

SEQ ID NO: 2110 - DNA, 16 bp, Artificial Sequence
  Synthetic construct
cgaacatgtctaacgt

SEQ ID NO: 2111 - DNA, 16 bp, Artificial Sequence
  Synthetic construct
cgaacatgtgcgaaac

SEQ ID NO: 2112 - DNA, 16 bp, Artificial Sequence
  Synthetic construct
cgaacatgtgcgaaac

SEQ ID NO: 2113 - DNA, 16 bp, Artificial Sequence
  Synthetic construct
cgaacatgttgtggag

SEQ ID NO: 2114 - DNA, 16 bp, Artificial Sequence
  Synthetic construct
cgaacatgttgtggag

SEQ ID NO: 2115 - DNA, 16 bp, Artificial Sequence
  Synthetic construct
cgaacattcaacgcta

SEQ ID NO: 2116 - DNA, 16 bp, Artificial Sequence
  Synthetic construct
cgaacattcaacgcta

SEQ ID NO: 2117 - DNA, 16 bp, Artificial Sequence
  Synthetic construct
cgaacattctgtcaag

SEQ ID NO: 2118 - DNA, 16 bp, Artificial Sequence
  Synthetic construct
cgaacattctgtcaag

SEQ ID NO: 2119 - DNA, 16 bp, Artificial Sequence
  Synthetic construct
cgaatgtcagtacact

SEQ ID NO: 2120 - DNA, 16 bp, Artificial Sequence
  Synthetic construct
cgaatgtcagtacact

SEQ ID NO: 2121 - DNA, 16 bp, Artificial Sequence
  Synthetic construct
cgaatgtcatggtcat

SEQ ID NO: 2122 - DNA, 16 bp, Artificial Sequence
  Synthetic construct
cgaatgtcatggtcat

SEQ ID NO: 2123 - DNA, 16 bp, Artificial Sequence
  Synthetic construct
cgaatgtgtcgctttc

SEQ ID NO: 2124 - DNA, 16 bp, Artificial Sequence
  Synthetic construct
cgaatgtgtcgctttc

SEQ ID NO: 2125 - DNA, 16 bp, Artificial Sequence
  Synthetic construct
cgaatgtgtttgcatg

SEQ ID NO: 2126 - DNA, 16 bp, Artificial Sequence
  Synthetic construct
cgaatgtgtttgcatg

SEQ ID NO: 2127 - DNA, 16 bp, Artificial Sequence
  Synthetic construct
cgaatgttccatgagt

SEQ ID NO: 2128 - DNA, 16 bp, Artificial Sequence
  Synthetic construct
cgaatgttccatgagt

SEQ ID NO: 2129 - DNA, 16 bp, Artificial Sequence
  Synthetic construct
cgaccttagtacgccc

SEQ ID NO: 2130 - DNA, 16 bp, Artificial Sequence
  Synthetic construct
cgaccttagtacgccc

SEQ ID NO: 2131 - DNA, 16 bp, Artificial Sequence
  Synthetic construct
cgaccttcaaactgct

SEQ ID NO: 2132 - DNA, 16 bp, Artificial Sequence
  Synthetic construct
cgaccttcaaactgct

SEQ ID NO: 2133 - DNA, 16 bp, Artificial Sequence
  Synthetic construct
cgaccttcagacgtag

SEQ ID NO: 2134 - DNA, 16 bp, Artificial Sequence
  Synthetic construct
cgaccttcagacgtag

SEQ ID NO: 2135 - DNA, 16 bp, Artificial Sequence
  Synthetic construct
cgaccttcatgaacct

SEQ ID NO: 2136 - DNA, 16 bp, Artificial Sequence
  Synthetic construct
cgaccttcatgaacct

SEQ ID NO: 2137 - DNA, 16 bp, Artificial Sequence
  Synthetic construct
cgacctttcaaagaca

SEQ ID NO: 2138 - DNA, 16 bp, Artificial Sequence
  Synthetic construct
cgacctttcaaagaca

SEQ ID NO: 2139 - DNA, 16 bp, Artificial Sequence
  Synthetic construct
cgacctttccctcttt

SEQ ID NO: 2140 - DNA, 16 bp, Artificial Sequence
  Synthetic construct
cgacctttccctcttt

SEQ ID NO: 2141 - DNA, 16 bp, Artificial Sequence
  Synthetic construct
cgacctttctgaaaga

SEQ ID NO: 2142 - DNA, 16 bp, Artificial Sequence
  Synthetic construct
cgacctttctgaaaga

SEQ ID NO: 2143 - DNA, 16 bp, Artificial Sequence
  Synthetic construct
cgacttcaggattcgg

SEQ ID NO: 2144 - DNA, 16 bp, Artificial Sequence
  Synthetic construct
cgacttcaggattcgg

SEQ ID NO: 2145 - DNA, 16 bp, Artificial Sequence
  Synthetic construct
cgacttcaggcgacat

SEQ ID NO: 2146 - DNA, 16 bp, Artificial Sequence
  Synthetic construct
cgacttcaggcgacat

SEQ ID NO: 2147 - DNA, 16 bp, Artificial Sequence
  Synthetic construct
cgacttcagtgtggca

SEQ ID NO: 2148 - DNA, 16 bp, Artificial Sequence
  Synthetic construct
cgacttcagtgtggca

SEQ ID NO: 2149 - DNA, 16 bp, Artificial Sequence
  Synthetic construct
cgacttccaattcctt

SEQ ID NO: 2150 - DNA, 16 bp, Artificial Sequence
  Synthetic construct
cgacttccaattcctt

SEQ ID NO: 2151 - DNA, 16 bp, Artificial Sequence
  Synthetic construct
cgacttccacatccgg

SEQ ID NO: 2152 - DNA, 16 bp, Artificial Sequence
  Synthetic construct
cgacttccacatccgg

SEQ ID NO: 2153 - DNA, 16 bp, Artificial Sequence
  Synthetic construct
cgacttcgtgggtcaa

SEQ ID NO: 2154 - DNA, 16 bp, Artificial Sequence
  Synthetic construct
cgacttcgtgggtcaa

SEQ ID NO: 2155 - DNA, 16 bp, Artificial Sequence
  Synthetic construct
cgagaagagtgccatt

SEQ ID NO: 2156 - DNA, 16 bp, Artificial Sequence
  Synthetic construct
cgagaagagtgccatt

SEQ ID NO: 2157 - DNA, 16 bp, Artificial Sequence
  Synthetic construct
cgagaagcaccgctag

SEQ ID NO: 2158 - DNA, 16 bp, Artificial Sequence
  Synthetic construct
cgagaagcaccgctag

SEQ ID NO: 2159 - DNA, 16 bp, Artificial Sequence
  Synthetic construct
cgagaagcagttccct

SEQ ID NO: 2160 - DNA, 16 bp, Artificial Sequence
  Synthetic construct
cgagaagcagttccct

SEQ ID NO: 2161 - DNA, 16 bp, Artificial Sequence
  Synthetic construct
cgagaagtcttgtatc

SEQ ID NO: 2162 - DNA, 16 bp, Artificial Sequence
  Synthetic construct
cgagaagtcttgtatc

SEQ ID NO: 2163 - DNA, 16 bp, Artificial Sequence
  Synthetic construct
cgagcacagttagcgg

SEQ ID NO: 2164 - DNA, 16 bp, Artificial Sequence
  Synthetic construct
cgagcacagttagcgg

SEQ ID NO: 2165 - DNA, 16 bp, Artificial Sequence
  Synthetic construct
cgagcacgtaggcatg

SEQ ID NO: 2166 - DNA, 16 bp, Artificial Sequence
  Synthetic construct
cgagcacgtaggcatg

SEQ ID NO: 2167 - DNA, 16 bp, Artificial Sequence
  Synthetic construct
cgagcacgtctagtca

SEQ ID NO: 2168 - DNA, 16 bp, Artificial Sequence
  Synthetic construct
cgagcacgtctagtca

SEQ ID NO: 2169 - DNA, 16 bp, Artificial Sequence
  Synthetic construct
cgagcacgtcttctcg

SEQ ID NO: 2170 - DNA, 16 bp, Artificial Sequence
  Synthetic construct
cgagcacgtcttctcg

SEQ ID NO: 2171 - DNA, 16 bp, Artificial Sequence
  Synthetic construct
cgagcactcttgtcat

SEQ ID NO: 2172 - DNA, 16 bp, Artificial Sequence
  Synthetic construct
cgagcactcttgtcat

SEQ ID NO: 2173 - DNA, 16 bp, Artificial Sequence
  Synthetic construct
cgagccaagccacctg

SEQ ID NO: 2174 - DNA, 16 bp, Artificial Sequence
  Synthetic construct
cgagccaagccacctg

SEQ ID NO: 2175 - DNA, 16 bp, Artificial Sequence
  Synthetic construct
cgagccacatataccg

SEQ ID NO: 2176 - DNA, 16 bp, Artificial Sequence
  Synthetic construct
cgagccacatataccg

SEQ ID NO: 2177 - DNA, 16 bp, Artificial Sequence
  Synthetic construct
cgagccagtcagaata

SEQ ID NO: 2178 - DNA, 16 bp, Artificial Sequence
  Synthetic construct
cgagccagtcagaata

SEQ ID NO: 2179 - DNA, 16 bp, Artificial Sequence
  Synthetic construct
cgagccagtgactact

SEQ ID NO: 2180 - DNA, 16 bp, Artificial Sequence
  Synthetic construct
cgagccagtgactact

SEQ ID NO: 2181 - DNA, 16 bp, Artificial Sequence
  Synthetic construct
cgagccatcttaccta

SEQ ID NO: 2182 - DNA, 16 bp, Artificial Sequence
  Synthetic construct
cgagccatcttaccta

SEQ ID NO: 2183 - DNA, 16 bp, Artificial Sequence
  Synthetic construct
cgatcggaggacgaaa

SEQ ID NO: 2184 - DNA, 16 bp, Artificial Sequence
  Synthetic construct
cgatcggaggacgaaa

SEQ ID NO: 2185 - DNA, 16 bp, Artificial Sequence
  Synthetic construct
cgatcggcacgaagca

SEQ ID NO: 2186 - DNA, 16 bp, Artificial Sequence
  Synthetic construct
cgatcggcacgaagca

SEQ ID NO: 2187 - DNA, 16 bp, Artificial Sequence
  Synthetic construct
cgatcgggttcacctc

SEQ ID NO: 2188 - DNA, 16 bp, Artificial Sequence
  Synthetic construct
cgatcgggttcacctc

SEQ ID NO: 2189 - DNA, 16 bp, Artificial Sequence
  Synthetic construct
cgatggcagacacgac

SEQ ID NO: 2190 - DNA, 16 bp, Artificial Sequence
  Synthetic construct
cgatggcagacacgac

SEQ ID NO: 2191 - DNA, 16 bp, Artificial Sequence
  Synthetic construct
cgatggcagcagatcg

SEQ ID NO: 2192 - DNA, 16 bp, Artificial Sequence
  Synthetic construct
cgatggcagcagatcg

SEQ ID NO: 2193 - DNA, 16 bp, Artificial Sequence
  Synthetic construct
cgatggcaggctagac

SEQ ID NO: 2194 - DNA, 16 bp, Artificial Sequence
  Synthetic construct
cgatggcaggctagac

SEQ ID NO: 2195 - DNA, 16 bp, Artificial Sequence
  Synthetic construct
cgatggccacgcgaaa

SEQ ID NO: 2196 - DNA, 16 bp, Artificial Sequence
  Synthetic construct
cgatggccacgcgaaa

SEQ ID NO: 2197 - DNA, 16 bp, Artificial Sequence
  Synthetic construct
cgatggcgtacagacg

SEQ ID NO: 2198 - DNA, 16 bp, Artificial Sequence
  Synthetic construct
cgatggcgtacagacg

SEQ ID NO: 2199 - DNA, 16 bp, Artificial Sequence
  Synthetic construct
cgatggcgtgaaatca

SEQ ID NO: 2200 - DNA, 16 bp, Artificial Sequence
  Synthetic construct
cgatggcgtgaaatca

SEQ ID NO: 2201 - DNA, 16 bp, Artificial Sequence
  Synthetic construct
cgatggcgtgactact

SEQ ID NO: 2202 - DNA, 16 bp, Artificial Sequence
  Synthetic construct
cgatggcgtgactact

SEQ ID NO: 2203 - DNA, 16 bp, Artificial Sequence
  Synthetic construct
cgatggcgtgatgccc

SEQ ID NO: 2204 - DNA, 16 bp, Artificial Sequence
  Synthetic construct
cgatggcgtgatgccc

SEQ ID NO: 2205 - DNA, 16 bp, Artificial Sequence
  Synthetic construct
cgatggctcggcatcg

SEQ ID NO: 2206 - DNA, 16 bp, Artificial Sequence
  Synthetic construct
cgatggctcggcatcg

SEQ ID NO: 2207 - DNA, 16 bp, Artificial Sequence
  Synthetic construct
cgatggctcgtccagg

SEQ ID NO: 2208 - DNA, 16 bp, Artificial Sequence
  Synthetic construct
cgatggctcgtccagg

SEQ ID NO: 2209 - DNA, 16 bp, Artificial Sequence
  Synthetic construct
cgatgtaagacctttg

SEQ ID NO: 2210 - DNA, 16 bp, Artificial Sequence
  Synthetic construct
cgatgtaagacctttg

SEQ ID NO: 2211 - DNA, 16 bp, Artificial Sequence
  Synthetic construct
cgatgtaagagtgacc

SEQ ID NO: 2212 - DNA, 16 bp, Artificial Sequence
  Synthetic construct
cgatgtaagagtgacc

SEQ ID NO: 2213 - DNA, 16 bp, Artificial Sequence
  Synthetic construct
cgatgtaagtcccacg

SEQ ID NO: 2214 - DNA, 16 bp, Artificial Sequence
  Synthetic construct
cgatgtaagtcccacg

SEQ ID NO: 2215 - DNA, 16 bp, Artificial Sequence
  Synthetic construct
cgatgtacaatggacg

SEQ ID NO: 2216 - DNA, 16 bp, Artificial Sequence
  Synthetic construct
cgatgtacaatggacg

SEQ ID NO: 2217 - DNA, 16 bp, Artificial Sequence
  Synthetic construct
cgatgtagtgatgtgg

SEQ ID NO: 2218 - DNA, 16 bp, Artificial Sequence
  Synthetic construct
cgatgtagtgatgtgg

SEQ ID NO: 2219 - DNA, 16 bp, Artificial Sequence
  Synthetic construct
cgatgtagtggctcca

SEQ ID NO: 2220 - DNA, 16 bp, Artificial Sequence
  Synthetic construct
cgatgtagtggctcca

SEQ ID NO: 2221 - DNA, 16 bp, Artificial Sequence
  Synthetic construct
cgatgtagttccggca

SEQ ID NO: 2222 - DNA, 16 bp, Artificial Sequence
  Synthetic construct
cgatgtagttccggca

SEQ ID NO: 2223 - DNA, 16 bp, Artificial Sequence
  Synthetic construct
cgatgtatcccacttg

SEQ ID NO: 2224 - DNA, 16 bp, Artificial Sequence
  Synthetic construct
cgatgtatcccacttg

SEQ ID NO: 2225 - DNA, 16 bp, Artificial Sequence
  Synthetic construct
cgattgaagactcgga

SEQ ID NO: 2226 - DNA, 16 bp, Artificial Sequence
  Synthetic construct
cgattgaagactcgga

SEQ ID NO: 2227 - DNA, 16 bp, Artificial Sequence
  Synthetic construct
cgattgatcatctgtt

SEQ ID NO: 2228 - DNA, 16 bp, Artificial Sequence
  Synthetic construct
cgattgatcatctgtt

SEQ ID NO: 2229 - DNA, 16 bp, Artificial Sequence
  Synthetic construct
cgattgatcctcaacc

SEQ ID NO: 2230 - DNA, 16 bp, Artificial Sequence
  Synthetic construct
cgattgatcctcaacc

SEQ ID NO: 2231 - DNA, 16 bp, Artificial Sequence
  Synthetic construct
cgccaagagccctaat

SEQ ID NO: 2232 - DNA, 16 bp, Artificial Sequence
  Synthetic construct
cgccaagagccctaat

SEQ ID NO: 2233 - DNA, 16 bp, Artificial Sequence
  Synthetic construct
cgccaagaggctaggt

SEQ ID NO: 2234 - DNA, 16 bp, Artificial Sequence
  Synthetic construct
cgccaagaggctaggt

SEQ ID NO: 2235 - DNA, 16 bp, Artificial Sequence
  Synthetic construct
cgccaagaggtgggtt

SEQ ID NO: 2236 - DNA, 16 bp, Artificial Sequence
  Synthetic construct
cgccaagaggtgggtt

SEQ ID NO: 2237 - DNA, 16 bp, Artificial Sequence
  Synthetic construct
cgccaagagtacatga

SEQ ID NO: 2238 - DNA, 16 bp, Artificial Sequence
  Synthetic construct
cgccaagagtacatga

SEQ ID NO: 2239 - DNA, 16 bp, Artificial Sequence
  Synthetic construct
cgccaagagttaacga

SEQ ID NO: 2240 - DNA, 16 bp, Artificial Sequence
  Synthetic construct
cgccaagagttaacga

SEQ ID NO: 2241 - DNA, 16 bp, Artificial Sequence
  Synthetic construct
cgccaagcacgaagca

SEQ ID NO: 2242 - DNA, 16 bp, Artificial Sequence
  Synthetic construct
cgccaagcacgaagca

SEQ ID NO: 2243 - DNA, 16 bp, Artificial Sequence
  Synthetic construct
cgccaagcacggccat

SEQ ID NO: 2244 - DNA, 16 bp, Artificial Sequence
  Synthetic construct
cgccaagcacggccat

SEQ ID NO: 2245 - DNA, 16 bp, Artificial Sequence
  Synthetic construct
cgccaagcagtgagtg

SEQ ID NO: 2246 - DNA, 16 bp, Artificial Sequence
  Synthetic construct
cgccaagcagtgagtg

SEQ ID NO: 2247 - DNA, 16 bp, Artificial Sequence
  Synthetic construct
cgccaaggtgacaaat

SEQ ID NO: 2248 - DNA, 16 bp, Artificial Sequence
  Synthetic construct
cgccaaggtgacaaat

SEQ ID NO: 2249 - DNA, 16 bp, Artificial Sequence
  Synthetic construct
cgccaaggtgaggcta

SEQ ID NO: 2250 - DNA, 16 bp, Artificial Sequence
  Synthetic construct
cgccaaggtgaggcta

SEQ ID NO: 2251 - DNA, 16 bp, Artificial Sequence
  Synthetic construct
cgccaagtccactggg

SEQ ID NO: 2252 - DNA, 16 bp, Artificial Sequence
  Synthetic construct
cgccaagtccactggg

SEQ ID NO: 2253 - DNA, 16 bp, Artificial Sequence
  Synthetic construct
cgcggtagtcagaata

SEQ ID NO: 2254 - DNA, 16 bp, Artificial Sequence
  Synthetic construct
cgcggtagtcagaata

SEQ ID NO: 2255 - DNA, 16 bp, Artificial Sequence
  Synthetic construct
cgcggtatcaggttca

SEQ ID NO: 2256 - DNA, 16 bp, Artificial Sequence
  Synthetic construct
cgcggtatcaggttca

SEQ ID NO: 2257 - DNA, 16 bp, Artificial Sequence
  Synthetic construct
cgcggtatcgacggaa

SEQ ID NO: 2258 - DNA, 16 bp, Artificial Sequence
  Synthetic construct
cgcggtatcgacggaa

SEQ ID NO: 2259 - DNA, 16 bp, Artificial Sequence
  Synthetic construct
cgcgtttagacgcaca

SEQ ID NO: 2260 - DNA, 16 bp, Artificial Sequence
  Synthetic construct
cgcgtttagacgcaca

SEQ ID NO: 2261 - DNA, 16 bp, Artificial Sequence
  Synthetic construct
cgcgtttagctggaac

SEQ ID NO: 2262 - DNA, 16 bp, Artificial Sequence
  Synthetic construct
cgcgtttagctggaac

SEQ ID NO: 2263 - DNA, 16 bp, Artificial Sequence
  Synthetic construct
cgcgtttaggaactgc

SEQ ID NO: 2264 - DNA, 16 bp, Artificial Sequence
  Synthetic construct
cgcgtttaggaactgc

SEQ ID NO: 2265 - DNA, 16 bp, Artificial Sequence
  Synthetic construct
cgcgtttcaatcggtt

SEQ ID NO: 2266 - DNA, 16 bp, Artificial Sequence
  Synthetic construct
cgcgtttcaatcggtt

SEQ ID NO: 2267 - DNA, 16 bp, Artificial Sequence
  Synthetic construct
cgcgtttcagggttag

SEQ ID NO: 2268 - DNA, 16 bp, Artificial Sequence
  Synthetic construct
cgcgtttcagggttag

SEQ ID NO: 2269 - DNA, 16 bp, Artificial Sequence
  Synthetic construct
cgcgttttcgacggaa

SEQ ID NO: 2270 - DNA, 16 bp, Artificial Sequence
  Synthetic construct
cgcgttttcgacggaa

SEQ ID NO: 2271 - DNA, 16 bp, Artificial Sequence
  Synthetic construct
cgctatcagtgcgatg

SEQ ID NO: 2272 - DNA, 16 bp, Artificial Sequence
  Synthetic construct
cgctatcagtgcgatg

SEQ ID NO: 2273 - DNA, 16 bp, Artificial Sequence
  Synthetic construct
cgctatccacatggga

SEQ ID NO: 2274 - DNA, 16 bp, Artificial Sequence
  Synthetic construct
cgctatccacatggga

SEQ ID NO: 2275 - DNA, 16 bp, Artificial Sequence
  Synthetic construct
cgctatccactacagt

SEQ ID NO: 2276 - DNA, 16 bp, Artificial Sequence
  Synthetic construct
cgctatccactacagt

SEQ ID NO: 2277 - DNA, 16 bp, Artificial Sequence
  Synthetic construct
cgctatccatgacgga

SEQ ID NO: 2278 - DNA, 16 bp, Artificial Sequence
  Synthetic construct
cgctatccatgacgga

SEQ ID NO: 2279 - DNA, 16 bp, Artificial Sequence
  Synthetic construct
cgctatctcaacactg

SEQ ID NO: 2280 - DNA, 16 bp, Artificial Sequence
  Synthetic construct
cgctatctcaacactg

SEQ ID NO: 2281 - DNA, 16 bp, Artificial Sequence
  Synthetic construct
cgctatctctgcttgc

SEQ ID NO: 2282 - DNA, 16 bp, Artificial Sequence
  Synthetic construct
cgctatctctgcttgc

SEQ ID NO: 2283 - DNA, 16 bp, Artificial Sequence
  Synthetic construct
cgctggacacggatag

SEQ ID NO: 2284 - DNA, 16 bp, Artificial Sequence
  Synthetic construct
cgctggacacggatag

SEQ ID NO: 2285 - DNA, 16 bp, Artificial Sequence
  Synthetic construct
cgctggagtacctaca

SEQ ID NO: 2286 - DNA, 16 bp, Artificial Sequence
  Synthetic construct
cgctggagtacctaca

SEQ ID NO: 2287 - DNA, 16 bp, Artificial Sequence
  Synthetic construct
cgctggagtctaaaga

SEQ ID NO: 2288 - DNA, 16 bp, Artificial Sequence
  Synthetic construct
cgctggagtctaaaga

SEQ ID NO: 2289 - DNA, 16 bp, Artificial Sequence
  Synthetic construct
cgctggatcggtctaa

SEQ ID NO: 2290 - DNA, 16 bp, Artificial Sequence
  Synthetic construct
cgctggatcggtctaa

SEQ ID NO: 2291 - DNA, 16 bp, Artificial Sequence
  Synthetic construct
cgcttcaagatgtaac

SEQ ID NO: 2292 - DNA, 16 bp, Artificial Sequence
  Synthetic construct
cgcttcaagatgtaac

SEQ ID NO: 2293 - DNA, 16 bp, Artificial Sequence
  Synthetic construct
cgcttcaagcgtgtcc

SEQ ID NO: 2294 - DNA, 16 bp, Artificial Sequence
  Synthetic construct
cgcttcaagcgtgtcc

SEQ ID NO: 2295 - DNA, 16 bp, Artificial Sequence
  Synthetic construct
cgcttcacaagaaagg

SEQ ID NO: 2296 - DNA, 16 bp, Artificial Sequence
  Synthetic construct
cgcttcacaagaaagg

SEQ ID NO: 2297 - DNA, 16 bp, Artificial Sequence
  Synthetic construct
cgcttcacacaagccc

SEQ ID NO: 2298 - DNA, 16 bp, Artificial Sequence
  Synthetic construct
cgcttcacacaagccc

SEQ ID NO: 2299 - DNA, 16 bp, Artificial Sequence
  Synthetic construct
cgcttcacagccaatt

SEQ ID NO: 2300 - DNA, 16 bp, Artificial Sequence
  Synthetic construct
cgcttcacagccaatt

SEQ ID NO: 2301 - DNA, 16 bp, Artificial Sequence
  Synthetic construct
cgcttcatcctcaacc

SEQ ID NO: 2302 - DNA, 16 bp, Artificial Sequence
  Synthetic construct
cgcttcatcctcaacc

SEQ ID NO: 2303 - DNA, 16 bp, Artificial Sequence
  Synthetic construct
cgcttcatcgcctgag

SEQ ID NO: 2304 - DNA, 16 bp, Artificial Sequence
  Synthetic construct
cgcttcatcgcctgag

SEQ ID NO: 2305 - DNA, 16 bp, Artificial Sequence
  Synthetic construct
cggacacagatgagag

SEQ ID NO: 2306 - DNA, 16 bp, Artificial Sequence
  Synthetic construct
cggacacagatgagag

SEQ ID NO: 2307 - DNA, 16 bp, Artificial Sequence
  Synthetic construct
cggacacagcatggca

SEQ ID NO: 2308 - DNA, 16 bp, Artificial Sequence
  Synthetic construct
cggacacagcatggca

SEQ ID NO: 2309 - DNA, 16 bp, Artificial Sequence
  Synthetic construct
cggacacagcgtgaac

SEQ ID NO: 2310 - DNA, 16 bp, Artificial Sequence
  Synthetic construct
cggacacagcgtgaac

SEQ ID NO: 2311 - DNA, 16 bp, Artificial Sequence
  Synthetic construct
cggacaccacgctttc

SEQ ID NO: 2312 - DNA, 16 bp, Artificial Sequence
  Synthetic construct
cggacaccacgctttc

SEQ ID NO: 2313 - DNA, 16 bp, Artificial Sequence
  Synthetic construct
cggacaccatgatcca

SEQ ID NO: 2314 - DNA, 16 bp, Artificial Sequence
  Synthetic construct
cggacaccatgatcca

SEQ ID NO: 2315 - DNA, 16 bp, Artificial Sequence
  Synthetic construct
cggacacgttgtcttt

SEQ ID NO: 2316 - DNA, 16 bp, Artificial Sequence
  Synthetic construct
cggacacgttgtcttt

SEQ ID NO: 2317 - DNA, 16 bp, Artificial Sequence
  Synthetic construct
cggacgtagtccggtc

SEQ ID NO: 2318 - DNA, 16 bp, Artificial Sequence
  Synthetic construct
cggacgtagtccggtc

SEQ ID NO: 2319 - DNA, 16 bp, Artificial Sequence
  Synthetic construct
cggacgtagtgggttg

SEQ ID NO: 2320 - DNA, 16 bp, Artificial Sequence
  Synthetic construct
cggacgtagtgggttg

SEQ ID NO: 2321 - DNA, 16 bp, Artificial Sequence
  Synthetic construct
cggacgtcatttcagg

SEQ ID NO: 2322 - DNA, 16 bp, Artificial Sequence
  Synthetic construct
cggacgtcatttcagg

SEQ ID NO: 2323 - DNA, 16 bp, Artificial Sequence
  Synthetic construct
cggacgtgtctagtca

SEQ ID NO: 2324 - DNA, 16 bp, Artificial Sequence
  Synthetic construct
cggacgtgtctagtca

SEQ ID NO: 2325 - DNA, 16 bp, Artificial Sequence
  Synthetic construct
cggacgtgttcagtac

SEQ ID NO: 2326 - DNA, 16 bp, Artificial Sequence
  Synthetic construct
cggacgtgttcagtac

SEQ ID NO: 2327 - DNA, 16 bp, Artificial Sequence
  Synthetic construct
cggacgtgttgtggag

SEQ ID NO: 2328 - DNA, 16 bp, Artificial Sequence
  Synthetic construct
cggacgtgttgtggag

SEQ ID NO: 2329 - DNA, 16 bp, Artificial Sequence
  Synthetic construct
cggactgagacctagg

SEQ ID NO: 2330 - DNA, 16 bp, Artificial Sequence
  Synthetic construct
cggactgagacctagg

SEQ ID NO: 2331 - DNA, 16 bp, Artificial Sequence
  Synthetic construct
cggactgcacgtcagc

SEQ ID NO: 2332 - DNA, 16 bp, Artificial Sequence
  Synthetic construct
cggactgcacgtcagc

SEQ ID NO: 2333 - DNA, 16 bp, Artificial Sequence
  Synthetic construct
cggactggtagagctg

SEQ ID NO: 2334 - DNA, 16 bp, Artificial Sequence
  Synthetic construct
cggactggtagagctg

SEQ ID NO: 2335 - DNA, 16 bp, Artificial Sequence
  Synthetic construct
cggactggtccaacta

SEQ ID NO: 2336 - DNA, 16 bp, Artificial Sequence
  Synthetic construct
cggactggtccaacta

SEQ ID NO: 2337 - DNA, 16 bp, Artificial Sequence
  Synthetic construct
cggactgtctgtccgt

SEQ ID NO: 2338 - DNA, 16 bp, Artificial Sequence
  Synthetic construct
cggactgtctgtccgt

SEQ ID NO: 2339 - DNA, 16 bp, Artificial Sequence
  Synthetic construct
cggagctcagcagttt

SEQ ID NO: 2340 - DNA, 16 bp, Artificial Sequence
  Synthetic construct
cggagctcagcagttt

SEQ ID NO: 2341 - DNA, 16 bp, Artificial Sequence
  Synthetic construct
cggagctcatgccacg

SEQ ID NO: 2342 - DNA, 16 bp, Artificial Sequence
  Synthetic construct
cggagctcatgccacg

SEQ ID NO: 2343 - DNA, 16 bp, Artificial Sequence
  Synthetic construct
cggagctgtcaaagat

SEQ ID NO: 2344 - DNA, 16 bp, Artificial Sequence
  Synthetic construct
cggagctgtcaaagat

SEQ ID NO: 2345 - DNA, 16 bp, Artificial Sequence
  Synthetic construct
cggagctgtctcacct

SEQ ID NO: 2346 - DNA, 16 bp, Artificial Sequence
  Synthetic construct
cggagctgtctcacct

SEQ ID NO: 2347 - DNA, 16 bp, Artificial Sequence
  Synthetic construct
cggagctgtctgcggt

SEQ ID NO: 2348 - DNA, 16 bp, Artificial Sequence
  Synthetic construct
cggagctgtctgcggt

SEQ ID NO: 2349 - DNA, 16 bp, Artificial Sequence
  Synthetic construct
cggagctgtgctcttc

SEQ ID NO: 2350 - DNA, 16 bp, Artificial Sequence
  Synthetic construct
cggagctgtgctcttc

SEQ ID NO: 2351 - DNA, 16 bp, Artificial Sequence
  Synthetic construct
cggagctgttcgctaa

SEQ ID NO: 2352 - DNA, 16 bp, Artificial Sequence
  Synthetic construct
cggagctgttcgctaa

SEQ ID NO: 2353 - DNA, 16 bp, Artificial Sequence
  Synthetic construct
cggagtccatccgtgg

SEQ ID NO: 2354 - DNA, 16 bp, Artificial Sequence
  Synthetic construct
cggagtccatccgtgg

SEQ ID NO: 2355 - DNA, 16 bp, Artificial Sequence
  Synthetic construct
cggagtcgtggacgat

SEQ ID NO: 2356 - DNA, 16 bp, Artificial Sequence
  Synthetic construct
cggagtcgtggacgat

SEQ ID NO: 2357 - DNA, 16 bp, Artificial Sequence
  Synthetic construct
cggagtcgttacggag

SEQ ID NO: 2358 - DNA, 16 bp, Artificial Sequence
  Synthetic construct
cggagtcgttacggag

SEQ ID NO: 2359 - DNA, 16 bp, Artificial Sequence
  Synthetic construct
cggagtctcagcctaa

SEQ ID NO: 2360 - DNA, 16 bp, Artificial Sequence
  Synthetic construct
cggagtctcagcctaa

SEQ ID NO: 2361 - DNA, 16 bp, Artificial Sequence
  Synthetic construct
cggagtctcgtaggtt

SEQ ID NO: 2362 - DNA, 16 bp, Artificial Sequence
  Synthetic construct
cggagtctcgtaggtt

SEQ ID NO: 2363 - DNA, 16 bp, Artificial Sequence
  Synthetic construct
cggctagaggagtctg

SEQ ID NO: 2364 - DNA, 16 bp, Artificial Sequence
  Synthetic construct
cggctagaggagtctg

SEQ ID NO: 2365 - DNA, 16 bp, Artificial Sequence
  Synthetic construct
cggctagagtattgga

SEQ ID NO: 2366 - DNA, 16 bp, Artificial Sequence
  Synthetic construct
cggctagagtattgga

SEQ ID NO: 2367 - DNA, 16 bp, Artificial Sequence
  Synthetic construct
cggctaggtggcgaat

SEQ ID NO: 2368 - DNA, 16 bp, Artificial Sequence
  Synthetic construct
cggctaggtggcgaat

SEQ ID NO: 2369 - DNA, 16 bp, Artificial Sequence
  Synthetic construct
cggctagtcaggttca

SEQ ID NO: 2370 - DNA, 16 bp, Artificial Sequence
  Synthetic construct
cggctagtcaggttca

SEQ ID NO: 2371 - DNA, 16 bp, Artificial Sequence
  Synthetic construct
cgggtcaagaaggcct

SEQ ID NO: 2372 - DNA, 16 bp, Artificial Sequence
  Synthetic construct
cgggtcaagaaggcct

SEQ ID NO: 2373 - DNA, 16 bp, Artificial Sequence
  Synthetic construct
cgggtcaagtaccgga

SEQ ID NO: 2374 - DNA, 16 bp, Artificial Sequence
  Synthetic construct
cgggtcaagtaccgga

SEQ ID NO: 2375 - DNA, 16 bp, Artificial Sequence
  Synthetic construct
cgggtcaagtcgtttg

SEQ ID NO: 2376 - DNA, 16 bp, Artificial Sequence
  Synthetic construct
cgggtcaagtcgtttg

SEQ ID NO: 2377 - DNA, 16 bp, Artificial Sequence
  Synthetic construct
cgggtcacaaatacag

SEQ ID NO: 2378 - DNA, 16 bp, Artificial Sequence
  Synthetic construct
cgggtcacaaatacag

SEQ ID NO: 2379 - DNA, 16 bp, Artificial Sequence
  Synthetic construct
cgggtcacaaggctcc

SEQ ID NO: 2380 - DNA, 16 bp, Artificial Sequence
  Synthetic construct
cgggtcacaaggctcc

SEQ ID NO: 2381 - DNA, 16 bp, Artificial Sequence
  Synthetic construct
cgggtcacagtcagag

SEQ ID NO: 2382 - DNA, 16 bp, Artificial Sequence
  Synthetic construct
cgggtcacagtcagag

SEQ ID NO: 2383 - DNA, 16 bp, Artificial Sequence
  Synthetic construct
cgggtcacattacctt

SEQ ID NO: 2384 - DNA, 16 bp, Artificial Sequence
  Synthetic construct
cgggtcacattacctt

SEQ ID NO: 2385 - DNA, 16 bp, Artificial Sequence
  Synthetic construct
cggttaacaagggtca

SEQ ID NO: 2386 - DNA, 16 bp, Artificial Sequence
  Synthetic construct
cggttaacaagggtca

SEQ ID NO: 2387 - DNA, 16 bp, Artificial Sequence
  Synthetic construct
cggttaagtctttcat

SEQ ID NO: 2388 - DNA, 16 bp, Artificial Sequence
  Synthetic construct
cggttaagtctttcat

SEQ ID NO: 2389 - DNA, 16 bp, Artificial Sequence
  Synthetic construct
cggttaatccaaatgc

SEQ ID NO: 2390 - DNA, 16 bp, Artificial Sequence
  Synthetic construct
cggttaatccaaatgc

SEQ ID NO: 2391 - DNA, 16 bp, Artificial Sequence
  Synthetic construct
cgtagcgagacaaagg

SEQ ID NO: 2392 - DNA, 16 bp, Artificial Sequence
  Synthetic construct
cgtagcgagacaaagg

SEQ ID NO: 2393 - DNA, 16 bp, Artificial Sequence
  Synthetic construct
cgtagcgagcacgcct

SEQ ID NO: 2394 - DNA, 16 bp, Artificial Sequence
  Synthetic construct
cgtagcgagcacgcct

SEQ ID NO: 2395 - DNA, 16 bp, Artificial Sequence
  Synthetic construct
cgtagcgagttaccca

SEQ ID NO: 2396 - DNA, 16 bp, Artificial Sequence
  Synthetic construct
cgtagcgagttaccca

SEQ ID NO: 2397 - DNA, 16 bp, Artificial Sequence
  Synthetic construct
cgtagcgcagccaatt

SEQ ID NO: 2398 - DNA, 16 bp, Artificial Sequence
  Synthetic construct
cgtagcgcagccaatt

SEQ ID NO: 2399 - DNA, 16 bp, Artificial Sequence
  Synthetic construct
cgtagcggtacccaat

SEQ ID NO: 2400 - DNA, 16 bp, Artificial Sequence
  Synthetic construct
cgtagcggtacccaat

SEQ ID NO: 2401 - DNA, 16 bp, Artificial Sequence
  Synthetic construct
cgtagcggtggtctcg

SEQ ID NO: 2402 - DNA, 16 bp, Artificial Sequence
  Synthetic construct
cgtagcggtggtctcg

SEQ ID NO: 2403 - DNA, 16 bp, Artificial Sequence
  Synthetic construct
cgtagcgtctgtacga

SEQ ID NO: 2404 - DNA, 16 bp, Artificial Sequence
  Synthetic construct
cgtagcgtctgtacga

SEQ ID NO: 2405 - DNA, 16 bp, Artificial Sequence
  Synthetic construct
cgtaggccagctccga

SEQ ID NO: 2406 - DNA, 16 bp, Artificial Sequence
  Synthetic construct
cgtaggccagctccga

SEQ ID NO: 2407 - DNA, 16 bp, Artificial Sequence
  Synthetic construct
cgtaggctcaggccca

SEQ ID NO: 2408 - DNA, 16 bp, Artificial Sequence
  Synthetic construct
cgtaggctcaggccca

SEQ ID NO: 2409 - DNA, 16 bp, Artificial Sequence
  Synthetic construct
cgtaggctctttagtc

SEQ ID NO: 2410 - DNA, 16 bp, Artificial Sequence
  Synthetic construct
cgtaggctctttagtc

SEQ ID NO: 2411 - DNA, 16 bp, Artificial Sequence
  Synthetic construct
cgtcactagactaggc

SEQ ID NO: 2412 - DNA, 16 bp, Artificial Sequence
  Synthetic construct
cgtcactagactaggc

SEQ ID NO: 2413 - DNA, 16 bp, Artificial Sequence
  Synthetic construct
cgtcactagttcgatc

SEQ ID NO: 2414 - DNA, 16 bp, Artificial Sequence
  Synthetic construct
cgtcactagttcgatc

SEQ ID NO: 2415 - DNA, 16 bp, Artificial Sequence
  Synthetic construct
cgtcactcatgacgga

SEQ ID NO: 2416 - DNA, 16 bp, Artificial Sequence
  Synthetic construct
cgtcactcatgacgga

SEQ ID NO: 2417 - DNA, 16 bp, Artificial Sequence
  Synthetic construct
cgtcaggagaaggcct

SEQ ID NO: 2418 - DNA, 16 bp, Artificial Sequence
  Synthetic construct
cgtcaggagaaggcct

SEQ ID NO: 2419 - DNA, 16 bp, Artificial Sequence
  Synthetic construct
cgtcaggagccaacag

SEQ ID NO: 2420 - DNA, 16 bp, Artificial Sequence
  Synthetic construct
cgtcaggagccaacag

SEQ ID NO: 2421 - DNA, 16 bp, Artificial Sequence
  Synthetic construct
cgtcaggagggtttct

SEQ ID NO: 2422 - DNA, 16 bp, Artificial Sequence
  Synthetic construct
cgtcaggagggtttct

SEQ ID NO: 2423 - DNA, 16 bp, Artificial Sequence
  Synthetic construct
cgtcaggcatgtcctc

SEQ ID NO: 2424 - DNA, 16 bp, Artificial Sequence
  Synthetic construct
cgtcaggcatgtcctc

SEQ ID NO: 2425 - DNA, 16 bp, Artificial Sequence
  Synthetic construct
cgtcagggtgtgaccc

SEQ ID NO: 2426 - DNA, 16 bp, Artificial Sequence
  Synthetic construct
cgtcagggtgtgaccc

SEQ ID NO: 2427 - DNA, 16 bp, Artificial Sequence
  Synthetic construct
cgtcaggtccagagga

SEQ ID NO: 2428 - DNA, 16 bp, Artificial Sequence
  Synthetic construct
cgtcaggtccagagga

SEQ ID NO: 2429 - DNA, 16 bp, Artificial Sequence
  Synthetic construct
cgtcaggtctgaggga

SEQ ID NO: 2430 - DNA, 16 bp, Artificial Sequence
  Synthetic construct
cgtcaggtctgaggga

SEQ ID NO: 2431 - DNA, 16 bp, Artificial Sequence
  Synthetic construct
cgtccatcaagctgtt

SEQ ID NO: 2432 - DNA, 16 bp, Artificial Sequence
  Synthetic construct
cgtccatcaagctgtt

SEQ ID NO: 2433 - DNA, 16 bp, Artificial Sequence
  Synthetic construct
cgtccatgtacccaat

SEQ ID NO: 2434 - DNA, 16 bp, Artificial Sequence
  Synthetic construct
cgtccatgtacccaat

SEQ ID NO: 2435 - DNA, 16 bp, Artificial Sequence
  Synthetic construct
cgtccatgtgaaatca

SEQ ID NO: 2436 - DNA, 16 bp, Artificial Sequence
  Synthetic construct
cgtccatgtgaaatca

SEQ ID NO: 2437 - DNA, 16 bp, Artificial Sequence
  Synthetic construct
cgtccattcactctta

SEQ ID NO: 2438 - DNA, 16 bp, Artificial Sequence
  Synthetic construct
cgtccattcactctta

SEQ ID NO: 2439 - DNA, 16 bp, Artificial Sequence
  Synthetic construct
cgtccattccgatatg

SEQ ID NO: 2440 - DNA, 16 bp, Artificial Sequence
  Synthetic construct
cgtccattccgatatg

SEQ ID NO: 2441 - DNA, 16 bp, Artificial Sequence
  Synthetic construct
cgtccattcttgtact

SEQ ID NO: 2442 - DNA, 16 bp, Artificial Sequence
  Synthetic construct
cgtccattcttgtact

SEQ ID NO: 2443 - DNA, 16 bp, Artificial Sequence
  Synthetic construct
cgtctacgtaccgtta

SEQ ID NO: 2444 - DNA, 16 bp, Artificial Sequence
  Synthetic construct
cgtctacgtaccgtta

SEQ ID NO: 2445 - DNA, 16 bp, Artificial Sequence
  Synthetic construct
cgtctacgttgaactc

SEQ ID NO: 2446 - DNA, 16 bp, Artificial Sequence
  Synthetic construct
cgtctacgttgaactc

SEQ ID NO: 2447 - DNA, 16 bp, Artificial Sequence
  Synthetic construct
cgtctacgttggtttg

SEQ ID NO: 2448 - DNA, 16 bp, Artificial Sequence
  Synthetic construct
cgtctacgttggtttg

SEQ ID NO: 2449 - DNA, 16 bp, Artificial Sequence
  Synthetic construct
cgtctacgttgtacac

SEQ ID NO: 2450 - DNA, 16 bp, Artificial Sequence
  Synthetic construct
cgtctacgttgtacac

SEQ ID NO: 2451 - DNA, 16 bp, Artificial Sequence
  Synthetic construct
cgtgagcagatgccag

SEQ ID NO: 2452 - DNA, 16 bp, Artificial Sequence
  Synthetic construct
cgtgagcagatgccag

SEQ ID NO: 2453 - DNA, 16 bp, Artificial Sequence
  Synthetic construct
cgtgagccaacgatct

SEQ ID NO: 2454 - DNA, 16 bp, Artificial Sequence
  Synthetic construct
cgtgagccaacgatct

SEQ ID NO: 2455 - DNA, 16 bp, Artificial Sequence
  Synthetic construct
cgtgagccatgccacg

SEQ ID NO: 2456 - DNA, 16 bp, Artificial Sequence
  Synthetic construct
cgtgagccatgccacg

SEQ ID NO: 2457 - DNA, 16 bp, Artificial Sequence
  Synthetic construct
cgtgtaaagcgatgac

SEQ ID NO: 2458 - DNA, 16 bp, Artificial Sequence
  Synthetic construct
cgtgtaaagcgatgac

SEQ ID NO: 2459 - DNA, 16 bp, Artificial Sequence
  Synthetic construct
cgtgtaaagctagtct

SEQ ID NO: 2460 - DNA, 16 bp, Artificial Sequence
  Synthetic construct
cgtgtaaagctagtct

SEQ ID NO: 2461 - DNA, 16 bp, Artificial Sequence
  Synthetic construct
cgtgtaaagtcatgct

SEQ ID NO: 2462 - DNA, 16 bp, Artificial Sequence
  Synthetic construct
cgtgtaaagtcatgct

SEQ ID NO: 2463 - DNA, 16 bp, Artificial Sequence
  Synthetic construct
cgtgtaatctgctgtc

SEQ ID NO: 2464 - DNA, 16 bp, Artificial Sequence
  Synthetic construct
cgtgtaatctgctgtc

SEQ ID NO: 2465 - DNA, 16 bp, Artificial Sequence
  Synthetic construct
cgtgtctagaaggttt

SEQ ID NO: 2466 - DNA, 16 bp, Artificial Sequence
  Synthetic construct
cgtgtctagaaggttt

SEQ ID NO: 2467 - DNA, 16 bp, Artificial Sequence
  Synthetic construct
cgtgtctagccactat

SEQ ID NO: 2468 - DNA, 16 bp, Artificial Sequence
  Synthetic construct
cgtgtctagccactat

SEQ ID NO: 2469 - DNA, 16 bp, Artificial Sequence
  Synthetic construct
cgtgtctagtccgtat

SEQ ID NO: 2470 - DNA, 16 bp, Artificial Sequence
  Synthetic construct
cgtgtctagtccgtat

SEQ ID NO: 2471 - DNA, 16 bp, Artificial Sequence
  Synthetic construct
cgtgtctcaccctatc

SEQ ID NO: 2472 - DNA, 16 bp, Artificial Sequence
  Synthetic construct
cgtgtctcaccctatc

SEQ ID NO: 2473 - DNA, 16 bp, Artificial Sequence
  Synthetic construct
cgtgtctcatccgggt

SEQ ID NO: 2474 - DNA, 16 bp, Artificial Sequence
  Synthetic construct
cgtgtctcatccgggt

SEQ ID NO: 2475 - DNA, 16 bp, Artificial Sequence
  Synthetic construct
cgtgtctgtaaggatt

SEQ ID NO: 2476 - DNA, 16 bp, Artificial Sequence
  Synthetic construct
cgtgtctgtaaggatt

SEQ ID NO: 2477 - DNA, 16 bp, Artificial Sequence
  Synthetic construct
cgtgtctgtaagggaa

SEQ ID NO: 2478 - DNA, 16 bp, Artificial Sequence
  Synthetic construct
cgtgtctgtaagggaa

SEQ ID NO: 2479 - DNA, 16 bp, Artificial Sequence
  Synthetic construct
cgtgtctgtagcctat

SEQ ID NO: 2480 - DNA, 16 bp, Artificial Sequence
  Synthetic construct
cgtgtctgtagcctat

SEQ ID NO: 2481 - DNA, 16 bp, Artificial Sequence
  Synthetic construct
cgtgtcttcaccatag

SEQ ID NO: 2482 - DNA, 16 bp, Artificial Sequence
  Synthetic construct
cgtgtcttcaccatag

SEQ ID NO: 2483 - DNA, 16 bp, Artificial Sequence
  Synthetic construct
cgtgtcttcagcgatt

SEQ ID NO: 2484 - DNA, 16 bp, Artificial Sequence
  Synthetic construct
cgtgtcttcagcgatt

SEQ ID NO: 2485 - DNA, 16 bp, Artificial Sequence
  Synthetic construct
cgttagaagcatcatc

SEQ ID NO: 2486 - DNA, 16 bp, Artificial Sequence
  Synthetic construct
cgttagaagcatcatc

SEQ ID NO: 2487 - DNA, 16 bp, Artificial Sequence
  Synthetic construct
cgttagacagcgttcg

SEQ ID NO: 2488 - DNA, 16 bp, Artificial Sequence
  Synthetic construct
cgttagacagcgttcg

SEQ ID NO: 2489 - DNA, 16 bp, Artificial Sequence
  Synthetic construct
cgttagagtcgactgc

SEQ ID NO: 2490 - DNA, 16 bp, Artificial Sequence
  Synthetic construct
cgttagagtcgactgc

SEQ ID NO: 2491 - DNA, 16 bp, Artificial Sequence
  Synthetic construct
cgttagatcggatgtt

SEQ ID NO: 2492 - DNA, 16 bp, Artificial Sequence
  Synthetic construct
cgttagatcggatgtt

SEQ ID NO: 2493 - DNA, 16 bp, Artificial Sequence
  Synthetic construct
cgttctgagctaacaa

SEQ ID NO: 2494 - DNA, 16 bp, Artificial Sequence
  Synthetic construct
cgttctgagctaacaa

SEQ ID NO: 2495 - DNA, 16 bp, Artificial Sequence
  Synthetic construct
cgttctgcaagcccac

SEQ ID NO: 2496 - DNA, 16 bp, Artificial Sequence
  Synthetic construct
cgttctgcaagcccac

SEQ ID NO: 2497 - DNA, 16 bp, Artificial Sequence
  Synthetic construct
cgttctgcatccgggt

SEQ ID NO: 2498 - DNA, 16 bp, Artificial Sequence
  Synthetic construct
cgttctgcatccgggt

SEQ ID NO: 2499 - DNA, 16 bp, Artificial Sequence
  Synthetic construct
cgttctgcatggtagg

SEQ ID NO: 2500 - DNA, 16 bp, Artificial Sequence
  Synthetic construct
cgttctgcatggtagg

SEQ ID NO: 2501 - DNA, 16 bp, Artificial Sequence
  Synthetic construct
cgttctgtctctagga

SEQ ID NO: 2502 - DNA, 16 bp, Artificial Sequence
  Synthetic construct
cgttctgtctctagga

SEQ ID NO: 2503 - DNA, 16 bp, Artificial Sequence
  Synthetic construct
cgttgggagagtaagg

SEQ ID NO: 2504 - DNA, 16 bp, Artificial Sequence
  Synthetic construct
cgttgggagagtaagg

SEQ ID NO: 2505 - DNA, 16 bp, Artificial Sequence
  Synthetic construct
cgttgggaggatcgca

SEQ ID NO: 2506 - DNA, 16 bp, Artificial Sequence
  Synthetic construct
cgttgggaggatcgca

SEQ ID NO: 2507 - DNA, 16 bp, Artificial Sequence
  Synthetic construct
cgttgggcaggtttca

SEQ ID NO: 2508 - DNA, 16 bp, Artificial Sequence
  Synthetic construct
cgttgggcaggtttca

SEQ ID NO: 2509 - DNA, 16 bp, Artificial Sequence
  Synthetic construct
cgttggggtttgcatg

SEQ ID NO: 2510 - DNA, 16 bp, Artificial Sequence
  Synthetic construct
cgttggggtttgcatg

SEQ ID NO: 2511 - DNA, 16 bp, Artificial Sequence
  Synthetic construct
ctaacttagtctcggc

SEQ ID NO: 2512 - DNA, 16 bp, Artificial Sequence
  Synthetic construct
ctaacttagtctcggc

SEQ ID NO: 2513 - DNA, 16 bp, Artificial Sequence
  Synthetic construct
ctaacttcagtaagcg

SEQ ID NO: 2514 - DNA, 16 bp, Artificial Sequence
  Synthetic construct
ctaacttcagtaagcg

SEQ ID NO: 2515 - DNA, 16 bp, Artificial Sequence
  Synthetic construct
ctaacttcattctcat

SEQ ID NO: 2516 - DNA, 16 bp, Artificial Sequence
  Synthetic construct
ctaacttcattctcat

SEQ ID NO: 2517 - DNA, 16 bp, Artificial Sequence
  Synthetic construct
ctaacttgtgcatcta

SEQ ID NO: 2518 - DNA, 16 bp, Artificial Sequence
  Synthetic construct
ctaacttgtgcatcta

SEQ ID NO: 2519 - DNA, 16 bp, Artificial Sequence
  Synthetic construct
ctaactttcctgccat

SEQ ID NO: 2520 - DNA, 16 bp, Artificial Sequence
  Synthetic construct
ctaactttcctgccat

SEQ ID NO: 2521 - DNA, 16 bp, Artificial Sequence
  Synthetic construct
ctaagacagcgtctat

SEQ ID NO: 2522 - DNA, 16 bp, Artificial Sequence
  Synthetic construct
ctaagacagcgtctat

SEQ ID NO: 2523 - DNA, 16 bp, Artificial Sequence
  Synthetic construct
ctaagacagtgggttg

SEQ ID NO: 2524 - DNA, 16 bp, Artificial Sequence
  Synthetic construct
ctaagacagtgggttg

SEQ ID NO: 2525 - DNA, 16 bp, Artificial Sequence
  Synthetic construct
ctaagacagtgtacgg

SEQ ID NO: 2526 - DNA, 16 bp, Artificial Sequence
  Synthetic construct
ctaagacagtgtacgg

SEQ ID NO: 2527 - DNA, 16 bp, Artificial Sequence
  Synthetic construct
ctaagaccacggtaag

SEQ ID NO: 2528 - DNA, 16 bp, Artificial Sequence
  Synthetic construct
ctaagaccacggtaag

SEQ ID NO: 2529 - DNA, 16 bp, Artificial Sequence
  Synthetic construct
ctaagacgtcccttgt

SEQ ID NO: 2530 - DNA, 16 bp, Artificial Sequence
  Synthetic construct
ctaagacgtcccttgt

SEQ ID NO: 2531 - DNA, 16 bp, Artificial Sequence
  Synthetic construct
ctaatggagctcccag

SEQ ID NO: 2532 - DNA, 16 bp, Artificial Sequence
  Synthetic construct
ctaatggagctcccag

SEQ ID NO: 2533 - DNA, 16 bp, Artificial Sequence
  Synthetic construct
ctaatggagctgttca

SEQ ID NO: 2534 - DNA, 16 bp, Artificial Sequence
  Synthetic construct
ctaatggagctgttca

SEQ ID NO: 2535 - DNA, 16 bp, Artificial Sequence
  Synthetic construct
ctaatggcatgggaca

SEQ ID NO: 2536 - DNA, 16 bp, Artificial Sequence
  Synthetic construct
ctaatggcatgggaca

SEQ ID NO: 2537 - DNA, 16 bp, Artificial Sequence
  Synthetic construct
ctaatgggtgactcat

SEQ ID NO: 2538 - DNA, 16 bp, Artificial Sequence
  Synthetic construct
ctaatgggtgactcat

SEQ ID NO: 2539 - DNA, 16 bp, Artificial Sequence
  Synthetic construct
ctaatgggtgttgagg

SEQ ID NO: 2540 - DNA, 16 bp, Artificial Sequence
  Synthetic construct
ctaatgggtgttgagg

SEQ ID NO: 2541 - DNA, 16 bp, Artificial Sequence
  Synthetic construct
ctaatgggttccatga

SEQ ID NO: 2542 - DNA, 16 bp, Artificial Sequence
  Synthetic construct
ctaatgggttccatga

SEQ ID NO: 2543 - DNA, 16 bp, Artificial Sequence
  Synthetic construct
ctaatgggttgcctct

SEQ ID NO: 2544 - DNA, 16 bp, Artificial Sequence
  Synthetic construct
ctaatgggttgcctct

SEQ ID NO: 2545 - DNA, 16 bp, Artificial Sequence
  Synthetic construct
ctaatggtcgaactgt

SEQ ID NO: 2546 - DNA, 16 bp, Artificial Sequence
  Synthetic construct
ctaatggtcgaactgt

SEQ ID NO: 2547 - DNA, 16 bp, Artificial Sequence
  Synthetic construct
ctaatggtctttaggg

SEQ ID NO: 2548 - DNA, 16 bp, Artificial Sequence
  Synthetic construct
ctaatggtctttaggg

SEQ ID NO: 2549 - DNA, 16 bp, Artificial Sequence
  Synthetic construct
ctacaccagagtacat

SEQ ID NO: 2550 - DNA, 16 bp, Artificial Sequence
  Synthetic construct
ctacaccagagtacat

SEQ ID NO: 2551 - DNA, 16 bp, Artificial Sequence
  Synthetic construct
ctacacccaatagcaa

SEQ ID NO: 2552 - DNA, 16 bp, Artificial Sequence
  Synthetic construct
ctacacccaatagcaa

SEQ ID NO: 2553 - DNA, 16 bp, Artificial Sequence
  Synthetic construct
ctacacccacaacgtt

SEQ ID NO: 2554 - DNA, 16 bp, Artificial Sequence
  Synthetic construct
ctacacccacaacgtt

SEQ ID NO: 2555 - DNA, 16 bp, Artificial Sequence
  Synthetic construct
ctacacccagctgtgc

SEQ ID NO: 2556 - DNA, 16 bp, Artificial Sequence
  Synthetic construct
ctacacccagctgtgc

SEQ ID NO: 2557 - DNA, 16 bp, Artificial Sequence
  Synthetic construct
ctacaccgtacagcag

SEQ ID NO: 2558 - DNA, 16 bp, Artificial Sequence
  Synthetic construct
ctacaccgtacagcag

SEQ ID NO: 2559 - DNA, 16 bp, Artificial Sequence
  Synthetic construct
ctacattcacagattc

SEQ ID NO: 2560 - DNA, 16 bp, Artificial Sequence
  Synthetic construct
ctacattcacagattc

SEQ ID NO: 2561 - DNA, 16 bp, Artificial Sequence
  Synthetic construct
ctacattcacggtgtc

SEQ ID NO: 2562 - DNA, 16 bp, Artificial Sequence
  Synthetic construct
ctacattcacggtgtc

SEQ ID NO: 2563 - DNA, 16 bp, Artificial Sequence
  Synthetic construct
ctacattcagattgct

SEQ ID NO: 2564 - DNA, 16 bp, Artificial Sequence
  Synthetic construct
ctacattcagattgct

SEQ ID NO: 2565 - DNA, 16 bp, Artificial Sequence
  Synthetic construct
ctacattgttaccagt

SEQ ID NO: 2566 - DNA, 16 bp, Artificial Sequence
  Synthetic construct
ctacattgttaccagt

SEQ ID NO: 2567 - DNA, 16 bp, Artificial Sequence
  Synthetic construct
ctacatttcggatgga

SEQ ID NO: 2568 - DNA, 16 bp, Artificial Sequence
  Synthetic construct
ctacatttcggatgga

SEQ ID NO: 2569 - DNA, 16 bp, Artificial Sequence
  Synthetic construct
ctacatttcgggagta

SEQ ID NO: 2570 - DNA, 16 bp, Artificial Sequence
  Synthetic construct
ctacatttcgggagta

SEQ ID NO: 2571 - DNA, 16 bp, Artificial Sequence
  Synthetic construct
ctacatttctctgtcg

SEQ ID NO: 2572 - DNA, 16 bp, Artificial Sequence
  Synthetic construct
ctacatttctctgtcg

SEQ ID NO: 2573 - DNA, 16 bp, Artificial Sequence
  Synthetic construct
ctacatttctttcctc

SEQ ID NO: 2574 - DNA, 16 bp, Artificial Sequence
  Synthetic construct
ctacatttctttcctc

SEQ ID NO: 2575 - DNA, 16 bp, Artificial Sequence
  Synthetic construct
ctacccacaactgcgc

SEQ ID NO: 2576 - DNA, 16 bp, Artificial Sequence
  Synthetic construct
ctacccacaactgcgc

SEQ ID NO: 2577 - DNA, 16 bp, Artificial Sequence
  Synthetic construct
ctacccagtgtcgctg

SEQ ID NO: 2578 - DNA, 16 bp, Artificial Sequence
  Synthetic construct
ctacccagtgtcgctg

SEQ ID NO: 2579 - DNA, 16 bp, Artificial Sequence
  Synthetic construct
ctacccagttgaactc

SEQ ID NO: 2580 - DNA, 16 bp, Artificial Sequence
  Synthetic construct
ctacccagttgaactc

SEQ ID NO: 2581 - DNA, 16 bp, Artificial Sequence
  Synthetic construct
ctacccatcatgcaac

SEQ ID NO: 2582 - DNA, 16 bp, Artificial Sequence
  Synthetic construct
ctacccatcatgcaac

SEQ ID NO: 2583 - DNA, 16 bp, Artificial Sequence
  Synthetic construct
ctacccatccaagccg

SEQ ID NO: 2584 - DNA, 16 bp, Artificial Sequence
  Synthetic construct
ctacccatccaagccg

SEQ ID NO: 2585 - DNA, 16 bp, Artificial Sequence
  Synthetic construct
ctacgtcagcgtctat

SEQ ID NO: 2586 - DNA, 16 bp, Artificial Sequence
  Synthetic construct
ctacgtcagcgtctat

SEQ ID NO: 2587 - DNA, 16 bp, Artificial Sequence
  Synthetic construct
ctacgtcgtccatcct

SEQ ID NO: 2588 - DNA, 16 bp, Artificial Sequence
  Synthetic construct
ctacgtcgtccatcct

SEQ ID NO: 2589 - DNA, 16 bp, Artificial Sequence
  Synthetic construct
ctacgtctcggcggtt

SEQ ID NO: 2590 - DNA, 16 bp, Artificial Sequence
  Synthetic construct
ctacgtctcggcggtt

SEQ ID NO: 2591 - DNA, 16 bp, Artificial Sequence
  Synthetic construct
ctagagtgtactcaac

SEQ ID NO: 2592 - DNA, 16 bp, Artificial Sequence
  Synthetic construct
ctagagtgtactcaac

SEQ ID NO: 2593 - DNA, 16 bp, Artificial Sequence
  Synthetic construct
ctagagtgtcgaatct

SEQ ID NO: 2594 - DNA, 16 bp, Artificial Sequence
  Synthetic construct
ctagagtgtcgaatct

SEQ ID NO: 2595 - DNA, 16 bp, Artificial Sequence
  Synthetic construct
ctagagtgtgatgtgg

SEQ ID NO: 2596 - DNA, 16 bp, Artificial Sequence
  Synthetic construct
ctagagtgtgatgtgg

SEQ ID NO: 2597 - DNA, 16 bp, Artificial Sequence
  Synthetic construct
ctagagttctcgttta

SEQ ID NO: 2598 - DNA, 16 bp, Artificial Sequence
  Synthetic construct
ctagagttctcgttta

SEQ ID NO: 2599 - DNA, 16 bp, Artificial Sequence
  Synthetic construct
ctagcctagaaaccat

SEQ ID NO: 2600 - DNA, 16 bp, Artificial Sequence
  Synthetic construct
ctagcctagaaaccat

SEQ ID NO: 2601 - DNA, 16 bp, Artificial Sequence
  Synthetic construct
ctagcctagacgcaca

SEQ ID NO: 2602 - DNA, 16 bp, Artificial Sequence
  Synthetic construct
ctagcctagacgcaca

SEQ ID NO: 2603 - DNA, 16 bp, Artificial Sequence
  Synthetic construct
ctagcctgttacggag

SEQ ID NO: 2604 - DNA, 16 bp, Artificial Sequence
  Synthetic construct
ctagcctgttacggag

SEQ ID NO: 2605 - DNA, 16 bp, Artificial Sequence
  Synthetic construct
ctagcctgttggaggt

SEQ ID NO: 2606 - DNA, 16 bp, Artificial Sequence
  Synthetic construct
ctagcctgttggaggt

SEQ ID NO: 2607 - DNA, 16 bp, Artificial Sequence
  Synthetic construct
ctagccttcgcttaga

SEQ ID NO: 2608 - DNA, 16 bp, Artificial Sequence
  Synthetic construct
ctagccttcgcttaga

SEQ ID NO: 2609 - DNA, 16 bp, Artificial Sequence
  Synthetic construct
ctagtgaagacctagg

SEQ ID NO: 2610 - DNA, 16 bp, Artificial Sequence
  Synthetic construct
ctagtgaagacctagg

SEQ ID NO: 2611 - DNA, 16 bp, Artificial Sequence
  Synthetic construct
ctagtgaagggtcgat

SEQ ID NO: 2612 - DNA, 16 bp, Artificial Sequence
  Synthetic construct
ctagtgaagggtcgat

SEQ ID NO: 2613 - DNA, 16 bp, Artificial Sequence
  Synthetic construct
ctagtgacaagagtcg

SEQ ID NO: 2614 - DNA, 16 bp, Artificial Sequence
  Synthetic construct
ctagtgacaagagtcg

SEQ ID NO: 2615 - DNA, 16 bp, Artificial Sequence
  Synthetic construct
ctagtgacaataagca

SEQ ID NO: 2616 - DNA, 16 bp, Artificial Sequence
  Synthetic construct
ctagtgacaataagca

SEQ ID NO: 2617 - DNA, 16 bp, Artificial Sequence
  Synthetic construct
ctagtgacacagcgtc

SEQ ID NO: 2618 - DNA, 16 bp, Artificial Sequence
  Synthetic construct
ctagtgacacagcgtc

SEQ ID NO: 2619 - DNA, 16 bp, Artificial Sequence
  Synthetic construct
ctagtgatcacatgca

SEQ ID NO: 2620 - DNA, 16 bp, Artificial Sequence
  Synthetic construct
ctagtgatcacatgca

SEQ ID NO: 2621 - DNA, 16 bp, Artificial Sequence
  Synthetic construct
ctagtgatccgcgttt

SEQ ID NO: 2622 - DNA, 16 bp, Artificial Sequence
  Synthetic construct
ctagtgatccgcgttt

SEQ ID NO: 2623 - DNA, 16 bp, Artificial Sequence
  Synthetic construct
ctagtgatcgcttaga

SEQ ID NO: 2624 - DNA, 16 bp, Artificial Sequence
  Synthetic construct
ctagtgatcgcttaga

SEQ ID NO: 2625 - DNA, 16 bp, Artificial Sequence
  Synthetic construct
ctcacacagtaatccc

SEQ ID NO: 2626 - DNA, 16 bp, Artificial Sequence
  Synthetic construct
ctcacacagtaatccc

SEQ ID NO: 2627 - DNA, 16 bp, Artificial Sequence
  Synthetic construct
ctcacaccagctggct

SEQ ID NO: 2628 - DNA, 16 bp, Artificial Sequence
  Synthetic construct
ctcacaccagctggct

SEQ ID NO: 2629 - DNA, 16 bp, Artificial Sequence
  Synthetic construct
ctcacactcaccttat

SEQ ID NO: 2630 - DNA, 16 bp, Artificial Sequence
  Synthetic construct
ctcacactcaccttat

SEQ ID NO: 2631 - DNA, 16 bp, Artificial Sequence
  Synthetic construct
ctcacactcatcggat

SEQ ID NO: 2632 - DNA, 16 bp, Artificial Sequence
  Synthetic construct
ctcacactcatcggat

SEQ ID NO: 2633 - DNA, 16 bp, Artificial Sequence
  Synthetic construct
ctcacactcgccctta

SEQ ID NO: 2634 - DNA, 16 bp, Artificial Sequence
  Synthetic construct
ctcacactcgccctta

SEQ ID NO: 2635 - DNA, 16 bp, Artificial Sequence
  Synthetic construct
ctcagaaagggctctc

SEQ ID NO: 2636 - DNA, 16 bp, Artificial Sequence
  Synthetic construct
ctcagaaagggctctc

SEQ ID NO: 2637 - DNA, 16 bp, Artificial Sequence
  Synthetic construct
ctcagaaagtgaagtt

SEQ ID NO: 2638 - DNA, 16 bp, Artificial Sequence
  Synthetic construct
ctcagaaagtgaagtt

SEQ ID NO: 2639 - DNA, 16 bp, Artificial Sequence
  Synthetic construct
ctcagaacagctgtgc

SEQ ID NO: 2640 - DNA, 16 bp, Artificial Sequence
  Synthetic construct
ctcagaacagctgtgc

SEQ ID NO: 2641 - DNA, 16 bp, Artificial Sequence
  Synthetic construct
ctcagaagtgagggtt

SEQ ID NO: 2642 - DNA, 16 bp, Artificial Sequence
  Synthetic construct
ctcagaagtgagggtt

SEQ ID NO: 2643 - DNA, 16 bp, Artificial Sequence
  Synthetic construct
ctcagaatcatgcaac

SEQ ID NO: 2644 - DNA, 16 bp, Artificial Sequence
  Synthetic construct
ctcagaatcatgcaac

SEQ ID NO: 2645 - DNA, 16 bp, Artificial Sequence
  Synthetic construct
ctcagaatcggttcgg

SEQ ID NO: 2646 - DNA, 16 bp, Artificial Sequence
  Synthetic construct
ctcagaatcggttcgg

SEQ ID NO: 2647 - DNA, 16 bp, Artificial Sequence
  Synthetic construct
ctcattaagaagggta

SEQ ID NO: 2648 - DNA, 16 bp, Artificial Sequence
  Synthetic construct
ctcattaagaagggta

SEQ ID NO: 2649 - DNA, 16 bp, Artificial Sequence
  Synthetic construct
ctcattaagacccacc

SEQ ID NO: 2650 - DNA, 16 bp, Artificial Sequence
  Synthetic construct
ctcattaagacccacc

SEQ ID NO: 2651 - DNA, 16 bp, Artificial Sequence
  Synthetic construct
ctcattacacaactgt

SEQ ID NO: 2652 - DNA, 16 bp, Artificial Sequence
  Synthetic construct
ctcattacacaactgt

SEQ ID NO: 2653 - DNA, 16 bp, Artificial Sequence
  Synthetic construct
ctcattagtagctaaa

SEQ ID NO: 2654 - DNA, 16 bp, Artificial Sequence
  Synthetic construct
ctcattagtagctaaa

SEQ ID NO: 2655 - DNA, 16 bp, Artificial Sequence
  Synthetic construct
ctcattagtatatgag

SEQ ID NO: 2656 - DNA, 16 bp, Artificial Sequence
  Synthetic construct
ctcattagtatatgag

SEQ ID NO: 2657 - DNA, 16 bp, Artificial Sequence
  Synthetic construct
ctcattagtccaacta

SEQ ID NO: 2658 - DNA, 16 bp, Artificial Sequence
  Synthetic construct
ctcattagtccaacta

SEQ ID NO: 2659 - DNA, 16 bp, Artificial Sequence
  Synthetic construct
ctcctagagatgtggc

SEQ ID NO: 2660 - DNA, 16 bp, Artificial Sequence
  Synthetic construct
ctcctagagatgtggc

SEQ ID NO: 2661 - DNA, 16 bp, Artificial Sequence
  Synthetic construct
ctcctagcacggttta

SEQ ID NO: 2662 - DNA, 16 bp, Artificial Sequence
  Synthetic construct
ctcctagcacggttta

SEQ ID NO: 2663 - DNA, 16 bp, Artificial Sequence
  Synthetic construct
ctcctaggtgctcttc

SEQ ID NO: 2664 - DNA, 16 bp, Artificial Sequence
  Synthetic construct
ctcctaggtgctcttc

SEQ ID NO: 2665 - DNA, 16 bp, Artificial Sequence
  Synthetic construct
ctcctaggttccacgg

SEQ ID NO: 2666 - DNA, 16 bp, Artificial Sequence
  Synthetic construct
ctcctaggttccacgg

SEQ ID NO: 2667 - DNA, 16 bp, Artificial Sequence
  Synthetic construct
ctcctaggtttgggcc

SEQ ID NO: 2668 - DNA, 16 bp, Artificial Sequence
  Synthetic construct
ctcctaggtttgggcc

SEQ ID NO: 2669 - DNA, 16 bp, Artificial Sequence
  Synthetic construct
ctcctagtcagcttag

SEQ ID NO: 2670 - DNA, 16 bp, Artificial Sequence
  Synthetic construct
ctcctagtcagcttag

SEQ ID NO: 2671 - DNA, 16 bp, Artificial Sequence
  Synthetic construct
ctcctagtcggccgat

SEQ ID NO: 2672 - DNA, 16 bp, Artificial Sequence
  Synthetic construct
ctcctagtcggccgat

SEQ ID NO: 2673 - DNA, 16 bp, Artificial Sequence
  Synthetic construct
ctcgaaaaggagcgtt

SEQ ID NO: 2674 - DNA, 16 bp, Artificial Sequence
  Synthetic construct
ctcgaaaaggagcgtt

SEQ ID NO: 2675 - DNA, 16 bp, Artificial Sequence
  Synthetic construct
ctcgaaaagtgaacgc

SEQ ID NO: 2676 - DNA, 16 bp, Artificial Sequence
  Synthetic construct
ctcgaaaagtgaacgc

SEQ ID NO: 2677 - DNA, 16 bp, Artificial Sequence
  Synthetic construct
ctcgaaacagggttag

SEQ ID NO: 2678 - DNA, 16 bp, Artificial Sequence
  Synthetic construct
ctcgaaacagggttag

SEQ ID NO: 2679 - DNA, 16 bp, Artificial Sequence
  Synthetic construct
ctcgaaagtggtctcg

SEQ ID NO: 2680 - DNA, 16 bp, Artificial Sequence
  Synthetic construct
ctcgaaagtggtctcg

SEQ ID NO: 2681 - DNA, 16 bp, Artificial Sequence
  Synthetic construct
ctcgaaagttacagaa

SEQ ID NO: 2682 - DNA, 16 bp, Artificial Sequence
  Synthetic construct
ctcgaaagttacagaa

SEQ ID NO: 2683 - DNA, 16 bp, Artificial Sequence
  Synthetic construct
ctcgaggagagtgaga

SEQ ID NO: 2684 - DNA, 16 bp, Artificial Sequence
  Synthetic construct
ctcgaggagagtgaga

SEQ ID NO: 2685 - DNA, 16 bp, Artificial Sequence
  Synthetic construct
ctcgaggaggacgaaa

SEQ ID NO: 2686 - DNA, 16 bp, Artificial Sequence
  Synthetic construct
ctcgaggaggacgaaa

SEQ ID NO: 2687 - DNA, 16 bp, Artificial Sequence
  Synthetic construct
ctcgaggcacgaaacg

SEQ ID NO: 2688 - DNA, 16 bp, Artificial Sequence
  Synthetic construct
ctcgaggcacgaaacg

SEQ ID NO: 2689 - DNA, 16 bp, Artificial Sequence
  Synthetic construct
ctcgaggcatcacaac

SEQ ID NO: 2690 - DNA, 16 bp, Artificial Sequence
  Synthetic construct
ctcgaggcatcacaac

SEQ ID NO: 2691 - DNA, 16 bp, Artificial Sequence
  Synthetic construct
ctcgagggtatagggc

SEQ ID NO: 2692 - DNA, 16 bp, Artificial Sequence
  Synthetic construct
ctcgagggtatagggc

SEQ ID NO: 2693 - DNA, 16 bp, Artificial Sequence
  Synthetic construct
ctcgagggtccgtcag

SEQ ID NO: 2694 - DNA, 16 bp, Artificial Sequence
  Synthetic construct
ctcgagggtccgtcag

SEQ ID NO: 2695 - DNA, 16 bp, Artificial Sequence
  Synthetic construct
ctcgaggtccattcta

SEQ ID NO: 2696 - DNA, 16 bp, Artificial Sequence
  Synthetic construct
ctcgaggtccattcta

SEQ ID NO: 2697 - DNA, 16 bp, Artificial Sequence
  Synthetic construct
ctcggagagaaaccgc

SEQ ID NO: 2698 - DNA, 16 bp, Artificial Sequence
  Synthetic construct
ctcggagagaaaccgc

SEQ ID NO: 2699 - DNA, 16 bp, Artificial Sequence
  Synthetic construct
ctcggagagacagacc

SEQ ID NO: 2700 - DNA, 16 bp, Artificial Sequence
  Synthetic construct
ctcggagagacagacc

SEQ ID NO: 2701 - DNA, 16 bp, Artificial Sequence
  Synthetic construct
ctcggagagagctggt

SEQ ID NO: 2702 - DNA, 16 bp, Artificial Sequence
  Synthetic construct
ctcggagagagctggt

SEQ ID NO: 2703 - DNA, 16 bp, Artificial Sequence
  Synthetic construct
ctcggagagtagccga

SEQ ID NO: 2704 - DNA, 16 bp, Artificial Sequence
  Synthetic construct
ctcggagagtagccga

SEQ ID NO: 2705 - DNA, 16 bp, Artificial Sequence
  Synthetic construct
ctcggaggtgtgaaat

SEQ ID NO: 2706 - DNA, 16 bp, Artificial Sequence
  Synthetic construct
ctcggaggtgtgaaat

SEQ ID NO: 2707 - DNA, 16 bp, Artificial Sequence
  Synthetic construct
ctcggagtcaacggga

SEQ ID NO: 2708 - DNA, 16 bp, Artificial Sequence
  Synthetic construct
ctcggagtcaacggga

SEQ ID NO: 2709 - DNA, 16 bp, Artificial Sequence
  Synthetic construct
ctcgggaagacgacgt

SEQ ID NO: 2710 - DNA, 16 bp, Artificial Sequence
  Synthetic construct
ctcgggaagacgacgt

SEQ ID NO: 2711 - DNA, 16 bp, Artificial Sequence
  Synthetic construct
ctcgggaaggatggtc

SEQ ID NO: 2712 - DNA, 16 bp, Artificial Sequence
  Synthetic construct
ctcgggaaggatggtc

SEQ ID NO: 2713 - DNA, 16 bp, Artificial Sequence
  Synthetic construct
ctcgggaagtcccacg

SEQ ID NO: 2714 - DNA, 16 bp, Artificial Sequence
  Synthetic construct
ctcgggaagtcccacg

SEQ ID NO: 2715 - DNA, 16 bp, Artificial Sequence
  Synthetic construct
ctcgggacattatctc

SEQ ID NO: 2716 - DNA, 16 bp, Artificial Sequence
  Synthetic construct
ctcgggacattatctc

SEQ ID NO: 2717 - DNA, 16 bp, Artificial Sequence
  Synthetic construct
ctcgggagtagaaagg

SEQ ID NO: 2718 - DNA, 16 bp, Artificial Sequence
  Synthetic construct
ctcgggagtagaaagg

SEQ ID NO: 2719 - DNA, 16 bp, Artificial Sequence
  Synthetic construct
ctcgggagtgtgcctg

SEQ ID NO: 2720 - DNA, 16 bp, Artificial Sequence
  Synthetic construct
ctcgggagtgtgcctg

SEQ ID NO: 2721 - DNA, 16 bp, Artificial Sequence
  Synthetic construct
ctcgggatcgtggtcg

SEQ ID NO: 2722 - DNA, 16 bp, Artificial Sequence
  Synthetic construct
ctcgggatcgtggtcg

SEQ ID NO: 2723 - DNA, 16 bp, Artificial Sequence
  Synthetic construct
ctcgtacagtaaccct

SEQ ID NO: 2724 - DNA, 16 bp, Artificial Sequence
  Synthetic construct
ctcgtacagtaaccct

SEQ ID NO: 2725 - DNA, 16 bp, Artificial Sequence
  Synthetic construct
ctcgtaccagtccttc

SEQ ID NO: 2726 - DNA, 16 bp, Artificial Sequence
  Synthetic construct
ctcgtaccagtccttc

SEQ ID NO: 2727 - DNA, 16 bp, Artificial Sequence
  Synthetic construct
ctcgtactcgtccagg

SEQ ID NO: 2728 - DNA, 16 bp, Artificial Sequence
  Synthetic construct
ctcgtactcgtccagg

SEQ ID NO: 2729 - DNA, 16 bp, Artificial Sequence
  Synthetic construct
ctcgtactcgtttgcc

SEQ ID NO: 2730 - DNA, 16 bp, Artificial Sequence
  Synthetic construct
ctcgtactcgtttgcc

SEQ ID NO: 2731 - DNA, 16 bp, Artificial Sequence
  Synthetic construct
ctcgtcacattatctc

SEQ ID NO: 2732 - DNA, 16 bp, Artificial Sequence
  Synthetic construct
ctcgtcacattatctc

SEQ ID NO: 2733 - DNA, 16 bp, Artificial Sequence
  Synthetic construct
ctcgtcagtctgcaat

SEQ ID NO: 2734 - DNA, 16 bp, Artificial Sequence
  Synthetic construct
ctcgtcagtctgcaat

SEQ ID NO: 2735 - DNA, 16 bp, Artificial Sequence
  Synthetic construct
ctcgtcagtgcctgtg

SEQ ID NO: 2736 - DNA, 16 bp, Artificial Sequence
  Synthetic construct
ctcgtcagtgcctgtg

SEQ ID NO: 2737 - DNA, 16 bp, Artificial Sequence
  Synthetic construct
ctctaatagtgttgaa

SEQ ID NO: 2738 - DNA, 16 bp, Artificial Sequence
  Synthetic construct
ctctaatagtgttgaa

SEQ ID NO: 2739 - DNA, 16 bp, Artificial Sequence
  Synthetic construct
ctctaatagtttagga

SEQ ID NO: 2740 - DNA, 16 bp, Artificial Sequence
  Synthetic construct
ctctaatagtttagga

SEQ ID NO: 2741 - DNA, 16 bp, Artificial Sequence
  Synthetic construct
ctctaatcaccaaccg

SEQ ID NO: 2742 - DNA, 16 bp, Artificial Sequence
  Synthetic construct
ctctaatcaccaaccg

SEQ ID NO: 2743 - DNA, 16 bp, Artificial Sequence
  Synthetic construct
ctctaatcatcggtta

SEQ ID NO: 2744 - DNA, 16 bp, Artificial Sequence
  Synthetic construct
ctctaatcatcggtta

SEQ ID NO: 2745 - DNA, 16 bp, Artificial Sequence
  Synthetic construct
ctctaatgtcagctat

SEQ ID NO: 2746 - DNA, 16 bp, Artificial Sequence
  Synthetic construct
ctctaatgtcagctat

SEQ ID NO: 2747 - DNA, 16 bp, Artificial Sequence
  Synthetic construct
ctctacgagaaacgag

SEQ ID NO: 2748 - DNA, 16 bp, Artificial Sequence
  Synthetic construct
ctctacgagaaacgag

SEQ ID NO: 2749 - DNA, 16 bp, Artificial Sequence
  Synthetic construct
ctctacgaggcgtaca

SEQ ID NO: 2750 - DNA, 16 bp, Artificial Sequence
  Synthetic construct
ctctacgaggcgtaca

SEQ ID NO: 2751 - DNA, 16 bp, Artificial Sequence
  Synthetic construct
ctctacgcagagccaa

SEQ ID NO: 2752 - DNA, 16 bp, Artificial Sequence
  Synthetic construct
ctctacgcagagccaa

SEQ ID NO: 2753 - DNA, 16 bp, Artificial Sequence
  Synthetic construct
ctctacgcaggctgaa

SEQ ID NO: 2754 - DNA, 16 bp, Artificial Sequence
  Synthetic construct
ctctacgcaggctgaa

SEQ ID NO: 2755 - DNA, 16 bp, Artificial Sequence
  Synthetic construct
ctctacgcatgacgga

SEQ ID NO: 2756 - DNA, 16 bp, Artificial Sequence
  Synthetic construct
ctctacgcatgacgga

SEQ ID NO: 2757 - DNA, 16 bp, Artificial Sequence
  Synthetic construct
ctctacgcattatctc

SEQ ID NO: 2758 - DNA, 16 bp, Artificial Sequence
  Synthetic construct
ctctacgcattatctc

SEQ ID NO: 2759 - DNA, 16 bp, Artificial Sequence
  Synthetic construct
ctctacggtctgatca

SEQ ID NO: 2760 - DNA, 16 bp, Artificial Sequence
  Synthetic construct
ctctacggtctgatca

SEQ ID NO: 2761 - DNA, 16 bp, Artificial Sequence
  Synthetic construct
ctctacgtcacgatgt

SEQ ID NO: 2762 - DNA, 16 bp, Artificial Sequence
  Synthetic construct
ctctacgtcacgatgt

SEQ ID NO: 2763 - DNA, 16 bp, Artificial Sequence
  Synthetic construct
ctctacgtcgccataa

SEQ ID NO: 2764 - DNA, 16 bp, Artificial Sequence
  Synthetic construct
ctctacgtcgccataa

SEQ ID NO: 2765 - DNA, 16 bp, Artificial Sequence
  Synthetic construct
ctctacgtcggtgtcg

SEQ ID NO: 2766 - DNA, 16 bp, Artificial Sequence
  Synthetic construct
ctctacgtcggtgtcg

SEQ ID NO: 2767 - DNA, 16 bp, Artificial Sequence
  Synthetic construct
ctctggtagactacaa

SEQ ID NO: 2768 - DNA, 16 bp, Artificial Sequence
  Synthetic construct
ctctggtagactacaa

SEQ ID NO: 2769 - DNA, 16 bp, Artificial Sequence
  Synthetic construct
ctctggtagagaacag

SEQ ID NO: 2770 - DNA, 16 bp, Artificial Sequence
  Synthetic construct
ctctggtagagaacag

SEQ ID NO: 2771 - DNA, 16 bp, Artificial Sequence
  Synthetic construct
ctctggtagagttggc

SEQ ID NO: 2772 - DNA, 16 bp, Artificial Sequence
  Synthetic construct
ctctggtagagttggc

SEQ ID NO: 2773 - DNA, 16 bp, Artificial Sequence
  Synthetic construct
ctctggtcaccttgtc

SEQ ID NO: 2774 - DNA, 16 bp, Artificial Sequence
  Synthetic construct
ctctggtcaccttgtc

SEQ ID NO: 2775 - DNA, 16 bp, Artificial Sequence
  Synthetic construct
ctctggtgttgcgcac

SEQ ID NO: 2776 - DNA, 16 bp, Artificial Sequence
  Synthetic construct
ctctggtgttgcgcac

SEQ ID NO: 2777 - DNA, 16 bp, Artificial Sequence
  Synthetic construct
ctctggttcctgcttg

SEQ ID NO: 2778 - DNA, 16 bp, Artificial Sequence
  Synthetic construct
ctctggttcctgcttg

SEQ ID NO: 2779 - DNA, 16 bp, Artificial Sequence
  Synthetic construct
ctgaaaccatcgtcgg

SEQ ID NO: 2780 - DNA, 16 bp, Artificial Sequence
  Synthetic construct
ctgaaaccatcgtcgg

SEQ ID NO: 2781 - DNA, 16 bp, Artificial Sequence
  Synthetic construct
ctgaaacgtatctgca

SEQ ID NO: 2782 - DNA, 16 bp, Artificial Sequence
  Synthetic construct
ctgaaacgtatctgca

SEQ ID NO: 2783 - DNA, 16 bp, Artificial Sequence
  Synthetic construct
ctgaaactcaagaagt

SEQ ID NO: 2784 - DNA, 16 bp, Artificial Sequence
  Synthetic construct
ctgaaactcaagaagt

SEQ ID NO: 2785 - DNA, 16 bp, Artificial Sequence
  Synthetic construct
ctgaaactcatatcgg

SEQ ID NO: 2786 - DNA, 16 bp, Artificial Sequence
  Synthetic construct
ctgaaactcatatcgg

SEQ ID NO: 2787 - DNA, 16 bp, Artificial Sequence
  Synthetic construct
ctgaagtagcaaatca

SEQ ID NO: 2788 - DNA, 16 bp, Artificial Sequence
  Synthetic construct
ctgaagtagcaaatca

SEQ ID NO: 2789 - DNA, 16 bp, Artificial Sequence
  Synthetic construct
ctgaagtcatactctt

SEQ ID NO: 2790 - DNA, 16 bp, Artificial Sequence
  Synthetic construct
ctgaagtcatactctt

SEQ ID NO: 2791 - DNA, 16 bp, Artificial Sequence
  Synthetic construct
ctgaagtgtgcagaca

SEQ ID NO: 2792 - DNA, 16 bp, Artificial Sequence
  Synthetic construct
ctgaagtgtgcagaca

SEQ ID NO: 2793 - DNA, 16 bp, Artificial Sequence
  Synthetic construct
ctgaagtgtgcgaaac

SEQ ID NO: 2794 - DNA, 16 bp, Artificial Sequence
  Synthetic construct
ctgaagtgtgcgaaac

SEQ ID NO: 2795 - DNA, 16 bp, Artificial Sequence
  Synthetic construct
ctgaagtgtggcaaac

SEQ ID NO: 2796 - DNA, 16 bp, Artificial Sequence
  Synthetic construct
ctgaagtgtggcaaac

SEQ ID NO: 2797 - DNA, 16 bp, Artificial Sequence
  Synthetic construct
ctgaagttcgatagaa

SEQ ID NO: 2798 - DNA, 16 bp, Artificial Sequence
  Synthetic construct
ctgaagttcgatagaa

SEQ ID NO: 2799 - DNA, 16 bp, Artificial Sequence
  Synthetic construct
ctgaagttcggatgga

SEQ ID NO: 2800 - DNA, 16 bp, Artificial Sequence
  Synthetic construct
ctgaagttcggatgga

SEQ ID NO: 2801 - DNA, 16 bp, Artificial Sequence
  Synthetic construct
ctgatagaggcatggt

SEQ ID NO: 2802 - DNA, 16 bp, Artificial Sequence
  Synthetic construct
ctgatagaggcatggt

SEQ ID NO: 2803 - DNA, 16 bp, Artificial Sequence
  Synthetic construct
ctgataggtcgcatat

SEQ ID NO: 2804 - DNA, 16 bp, Artificial Sequence
  Synthetic construct
ctgataggtcgcatat

SEQ ID NO: 2805 - DNA, 16 bp, Artificial Sequence
  Synthetic construct
ctgataggtctttcat

SEQ ID NO: 2806 - DNA, 16 bp, Artificial Sequence
  Synthetic construct
ctgataggtctttcat

SEQ ID NO: 2807 - DNA, 16 bp, Artificial Sequence
  Synthetic construct
ctgatccagacgcaac

SEQ ID NO: 2808 - DNA, 16 bp, Artificial Sequence
  Synthetic construct
ctgatccagacgcaac

SEQ ID NO: 2809 - DNA, 16 bp, Artificial Sequence
  Synthetic construct
ctgatccagtaaccct

SEQ ID NO: 2810 - DNA, 16 bp, Artificial Sequence
  Synthetic construct
ctgatccagtaaccct

SEQ ID NO: 2811 - DNA, 16 bp, Artificial Sequence
  Synthetic construct
ctgatccagtaggtgc

SEQ ID NO: 2812 - DNA, 16 bp, Artificial Sequence
  Synthetic construct
ctgatccagtaggtgc

SEQ ID NO: 2813 - DNA, 16 bp, Artificial Sequence
  Synthetic construct
ctgatcccattctcat

SEQ ID NO: 2814 - DNA, 16 bp, Artificial Sequence
  Synthetic construct
ctgatcccattctcat

SEQ ID NO: 2815 - DNA, 16 bp, Artificial Sequence
  Synthetic construct
ctgatccgtacccaat

SEQ ID NO: 2816 - DNA, 16 bp, Artificial Sequence
  Synthetic construct
ctgatccgtacccaat

SEQ ID NO: 2817 - DNA, 16 bp, Artificial Sequence
  Synthetic construct
ctgatcctcacaatgc

SEQ ID NO: 2818 - DNA, 16 bp, Artificial Sequence
  Synthetic construct
ctgatcctcacaatgc

SEQ ID NO: 2819 - DNA, 16 bp, Artificial Sequence
  Synthetic construct
ctgcctacatttgctt

SEQ ID NO: 2820 - DNA, 16 bp, Artificial Sequence
  Synthetic construct
ctgcctacatttgctt

SEQ ID NO: 2821 - DNA, 16 bp, Artificial Sequence
  Synthetic construct
ctgcctagtaagttcc

SEQ ID NO: 2822 - DNA, 16 bp, Artificial Sequence
  Synthetic construct
ctgcctagtaagttcc

SEQ ID NO: 2823 - DNA, 16 bp, Artificial Sequence
  Synthetic construct
ctgcctagtctggtcg

SEQ ID NO: 2824 - DNA, 16 bp, Artificial Sequence
  Synthetic construct
ctgcctagtctggtcg

SEQ ID NO: 2825 - DNA, 16 bp, Artificial Sequence
  Synthetic construct
ctgcctagtgcaccac

SEQ ID NO: 2826 - DNA, 16 bp, Artificial Sequence
  Synthetic construct
ctgcctagtgcaccac

SEQ ID NO: 2827 - DNA, 16 bp, Artificial Sequence
  Synthetic construct
ctgcctatcaggatct

SEQ ID NO: 2828 - DNA, 16 bp, Artificial Sequence
  Synthetic construct
ctgcctatcaggatct

SEQ ID NO: 2829 - DNA, 16 bp, Artificial Sequence
  Synthetic construct
ctgcctatcggaggta

SEQ ID NO: 2830 - DNA, 16 bp, Artificial Sequence
  Synthetic construct
ctgcctatcggaggta

SEQ ID NO: 2831 - DNA, 16 bp, Artificial Sequence
  Synthetic construct
ctgcctatcgtacggc

SEQ ID NO: 2832 - DNA, 16 bp, Artificial Sequence
  Synthetic construct
ctgcctatcgtacggc

SEQ ID NO: 2833 - DNA, 16 bp, Artificial Sequence
  Synthetic construct
ctgcggaagcgctcca

SEQ ID NO: 2834 - DNA, 16 bp, Artificial Sequence
  Synthetic construct
ctgcggaagcgctcca

SEQ ID NO: 2835 - DNA, 16 bp, Artificial Sequence
  Synthetic construct
ctgctgtgtagattag

SEQ ID NO: 2836 - DNA, 16 bp, Artificial Sequence
  Synthetic construct
ctgctgtgtagattag

SEQ ID NO: 2837 - DNA, 16 bp, Artificial Sequence
  Synthetic construct
ctggtctagcaggcta

SEQ ID NO: 2838 - DNA, 16 bp, Artificial Sequence
  Synthetic construct
ctggtctagcaggcta

SEQ ID NO: 2839 - DNA, 16 bp, Artificial Sequence
  Synthetic construct
ctggtctcaatacgct

SEQ ID NO: 2840 - DNA, 16 bp, Artificial Sequence
  Synthetic construct
ctggtctcaatacgct

SEQ ID NO: 2841 - DNA, 16 bp, Artificial Sequence
  Synthetic construct
ctggtctgtacagacg

SEQ ID NO: 2842 - DNA, 16 bp, Artificial Sequence
  Synthetic construct
ctggtctgtacagacg

SEQ ID NO: 2843 - DNA, 16 bp, Artificial Sequence
  Synthetic construct
ctggtctgtactcgcg

SEQ ID NO: 2844 - DNA, 16 bp, Artificial Sequence
  Synthetic construct
ctggtctgtactcgcg

SEQ ID NO: 2845 - DNA, 16 bp, Artificial Sequence
  Synthetic construct
ctggtcttcgcaggct

SEQ ID NO: 2846 - DNA, 16 bp, Artificial Sequence
  Synthetic construct
ctggtcttcgcaggct

SEQ ID NO: 2847 - DNA, 16 bp, Artificial Sequence
  Synthetic construct
ctgtgctagaagaagc

SEQ ID NO: 2848 - DNA, 16 bp, Artificial Sequence
  Synthetic construct
ctgtgctagaagaagc

SEQ ID NO: 2849 - DNA, 16 bp, Artificial Sequence
  Synthetic construct
ctgtgctagaccggat

SEQ ID NO: 2850 - DNA, 16 bp, Artificial Sequence
  Synthetic construct
ctgtgctagaccggat

SEQ ID NO: 2851 - DNA, 16 bp, Artificial Sequence
  Synthetic construct
ctgtgctagccctaat

SEQ ID NO: 2852 - DNA, 16 bp, Artificial Sequence
  Synthetic construct
ctgtgctagccctaat

SEQ ID NO: 2853 - DNA, 16 bp, Artificial Sequence
  Synthetic construct
ctgtgctcaaggctcc

SEQ ID NO: 2854 - DNA, 16 bp, Artificial Sequence
  Synthetic construct
ctgtgctcaaggctcc

SEQ ID NO: 2855 - DNA, 16 bp, Artificial Sequence
  Synthetic construct
ctgtgctcatatgctg

SEQ ID NO: 2856 - DNA, 16 bp, Artificial Sequence
  Synthetic construct
ctgtgctcatatgctg

SEQ ID NO: 2857 - DNA, 16 bp, Artificial Sequence
  Synthetic construct
ctgtgctgtagcctcg

SEQ ID NO: 2858 - DNA, 16 bp, Artificial Sequence
  Synthetic construct
ctgtgctgtagcctcg

SEQ ID NO: 2859 - DNA, 16 bp, Artificial Sequence
  Synthetic construct
ctgtgctgtcgaatct

SEQ ID NO: 2860 - DNA, 16 bp, Artificial Sequence
  Synthetic construct
ctgtgctgtcgaatct

SEQ ID NO: 2861 - DNA, 16 bp, Artificial Sequence
  Synthetic construct
ctgtgctgtgttcgat

SEQ ID NO: 2862 - DNA, 16 bp, Artificial Sequence
  Synthetic construct
ctgtgctgtgttcgat

SEQ ID NO: 2863 - DNA, 16 bp, Artificial Sequence
  Synthetic construct
ctgtgcttcgtaggag

SEQ ID NO: 2864 - DNA, 16 bp, Artificial Sequence
  Synthetic construct
ctgtgcttcgtaggag

SEQ ID NO: 2865 - DNA, 16 bp, Artificial Sequence
  Synthetic construct
ctgtttaagtaggcca

SEQ ID NO: 2866 - DNA, 16 bp, Artificial Sequence
  Synthetic construct
ctgtttaagtaggcca

SEQ ID NO: 2867 - DNA, 16 bp, Artificial Sequence
  Synthetic construct
ctgtttacatggtcat

SEQ ID NO: 2868 - DNA, 16 bp, Artificial Sequence
  Synthetic construct
ctgtttacatggtcat

SEQ ID NO: 2869 - DNA, 16 bp, Artificial Sequence
  Synthetic construct
ctgtttatctacgagt

SEQ ID NO: 2870 - DNA, 16 bp, Artificial Sequence
  Synthetic construct
ctgtttatctacgagt

SEQ ID NO: 2871 - DNA, 16 bp, Artificial Sequence
  Synthetic construct
cttaactagcgtcaag

SEQ ID NO: 2872 - DNA, 16 bp, Artificial Sequence
  Synthetic construct
cttaactagcgtcaag

SEQ ID NO: 2873 - DNA, 16 bp, Artificial Sequence
  Synthetic construct
cttaactagtatgaca

SEQ ID NO: 2874 - DNA, 16 bp, Artificial Sequence
  Synthetic construct
cttaactagtatgaca

SEQ ID NO: 2875 - DNA, 16 bp, Artificial Sequence
  Synthetic construct
cttaactcagtgagtg

SEQ ID NO: 2876 - DNA, 16 bp, Artificial Sequence
  Synthetic construct
cttaactcagtgagtg

SEQ ID NO: 2877 - DNA, 16 bp, Artificial Sequence
  Synthetic construct
cttaactgtacagcag

SEQ ID NO: 2878 - DNA, 16 bp, Artificial Sequence
  Synthetic construct
cttaactgtacagcag

SEQ ID NO: 2879 - DNA, 16 bp, Artificial Sequence
  Synthetic construct
cttaacttcggatgtt

SEQ ID NO: 2880 - DNA, 16 bp, Artificial Sequence
  Synthetic construct
cttaacttcggatgtt

SEQ ID NO: 2881 - DNA, 16 bp, Artificial Sequence
  Synthetic construct
cttaccgagtcccacg

SEQ ID NO: 2882 - DNA, 16 bp, Artificial Sequence
  Synthetic construct
cttaccgagtcccacg

SEQ ID NO: 2883 - DNA, 16 bp, Artificial Sequence
  Synthetic construct
cttaccgcaccggaaa

SEQ ID NO: 2884 - DNA, 16 bp, Artificial Sequence
  Synthetic construct
cttaccgcaccggaaa

SEQ ID NO: 2885 - DNA, 16 bp, Artificial Sequence
  Synthetic construct
cttaccgcatcgtcgg

SEQ ID NO: 2886 - DNA, 16 bp, Artificial Sequence
  Synthetic construct
cttaccgcatcgtcgg

SEQ ID NO: 2887 - DNA, 16 bp, Artificial Sequence
  Synthetic construct
cttaccggtatatgga

SEQ ID NO: 2888 - DNA, 16 bp, Artificial Sequence
  Synthetic construct
cttaccggtatatgga

SEQ ID NO: 2889 - DNA, 16 bp, Artificial Sequence
  Synthetic construct
cttaccgtcggcttgg

SEQ ID NO: 2890 - DNA, 16 bp, Artificial Sequence
  Synthetic construct
cttaccgtcggcttgg

SEQ ID NO: 2891 - DNA, 16 bp, Artificial Sequence
  Synthetic construct
cttaggaaggaccaca

SEQ ID NO: 2892 - DNA, 16 bp, Artificial Sequence
  Synthetic construct
cttaggaaggaccaca

SEQ ID NO: 2893 - DNA, 16 bp, Artificial Sequence
  Synthetic construct
cttaggaaggcgctct

SEQ ID NO: 2894 - DNA, 16 bp, Artificial Sequence
  Synthetic construct
cttaggaaggcgctct

SEQ ID NO: 2895 - DNA, 16 bp, Artificial Sequence
  Synthetic construct
cttaggagtcttgcgg

SEQ ID NO: 2896 - DNA, 16 bp, Artificial Sequence
  Synthetic construct
cttaggagtcttgcgg

SEQ ID NO: 2897 - DNA, 16 bp, Artificial Sequence
  Synthetic construct
cttaggagtggtccgt

SEQ ID NO: 2898 - DNA, 16 bp, Artificial Sequence
  Synthetic construct
cttaggagtggtccgt

SEQ ID NO: 2899 - DNA, 16 bp, Artificial Sequence
  Synthetic construct
cttaggatcagagacg

SEQ ID NO: 2900 - DNA, 16 bp, Artificial Sequence
  Synthetic construct
cttaggatcagagacg

SEQ ID NO: 2901 - DNA, 16 bp, Artificial Sequence
  Synthetic construct
cttaggatcgccataa

SEQ ID NO: 2902 - DNA, 16 bp, Artificial Sequence
  Synthetic construct
cttaggatcgccataa

SEQ ID NO: 2903 - DNA, 16 bp, Artificial Sequence
  Synthetic construct
cttctctaggaccaca

SEQ ID NO: 2904 - DNA, 16 bp, Artificial Sequence
  Synthetic construct
cttctctaggaccaca

SEQ ID NO: 2905 - DNA, 16 bp, Artificial Sequence
  Synthetic construct
cttctctaggccgaat

SEQ ID NO: 2906 - DNA, 16 bp, Artificial Sequence
  Synthetic construct
cttctctaggccgaat

SEQ ID NO: 2907 - DNA, 16 bp, Artificial Sequence
  Synthetic construct
cttctctgtagggtac

SEQ ID NO: 2908 - DNA, 16 bp, Artificial Sequence
  Synthetic construct
cttctctgtagggtac

SEQ ID NO: 2909 - DNA, 16 bp, Artificial Sequence
  Synthetic construct
cttctctgtctcaaca

SEQ ID NO: 2910 - DNA, 16 bp, Artificial Sequence
  Synthetic construct
cttctctgtctcaaca

SEQ ID NO: 2911 - DNA, 16 bp, Artificial Sequence
  Synthetic construct
cttctctgtctctctg

SEQ ID NO: 2912 - DNA, 16 bp, Artificial Sequence
  Synthetic construct
cttctctgtctctctg

SEQ ID NO: 2913 - DNA, 16 bp, Artificial Sequence
  Synthetic construct
cttctctgttgtggcc

SEQ ID NO: 2914 - DNA, 16 bp, Artificial Sequence
  Synthetic construct
cttctctgttgtggcc

SEQ ID NO: 2915 - DNA, 16 bp, Artificial Sequence
  Synthetic construct
cttggctagagtaccg

SEQ ID NO: 2916 - DNA, 16 bp, Artificial Sequence
  Synthetic construct
cttggctagagtaccg

SEQ ID NO: 2917 - DNA, 16 bp, Artificial Sequence
  Synthetic construct
cttggctagcaggtca

SEQ ID NO: 2918 - DNA, 16 bp, Artificial Sequence
  Synthetic construct
cttggctagcaggtca

SEQ ID NO: 2919 - DNA, 16 bp, Artificial Sequence
  Synthetic construct
cttggctagcgtctat

SEQ ID NO: 2920 - DNA, 16 bp, Artificial Sequence
  Synthetic construct
cttggctagcgtctat

SEQ ID NO: 2921 - DNA, 16 bp, Artificial Sequence
  Synthetic construct
cttggctaggatggaa

SEQ ID NO: 2922 - DNA, 16 bp, Artificial Sequence
  Synthetic construct
cttggctaggatggaa

SEQ ID NO: 2923 - DNA, 16 bp, Artificial Sequence
  Synthetic construct
cttggctaggctatct

SEQ ID NO: 2924 - DNA, 16 bp, Artificial Sequence
  Synthetic construct
cttggctaggctatct

SEQ ID NO: 2925 - DNA, 16 bp, Artificial Sequence
  Synthetic construct
cttggctagtggcaca

SEQ ID NO: 2926 - DNA, 16 bp, Artificial Sequence
  Synthetic construct
cttggctagtggcaca

SEQ ID NO: 2927 - DNA, 16 bp, Artificial Sequence
  Synthetic construct
cttggctcacggttta

SEQ ID NO: 2928 - DNA, 16 bp, Artificial Sequence
  Synthetic construct
cttggctcacggttta

SEQ ID NO: 2929 - DNA, 16 bp, Artificial Sequence
  Synthetic construct
cttggctcagggtatg

SEQ ID NO: 2930 - DNA, 16 bp, Artificial Sequence
  Synthetic construct
cttggctcagggtatg

SEQ ID NO: 2931 - DNA, 16 bp, Artificial Sequence
  Synthetic construct
cttggctgtgcagtag

SEQ ID NO: 2932 - DNA, 16 bp, Artificial Sequence
  Synthetic construct
cttggctgtgcagtag

SEQ ID NO: 2933 - DNA, 16 bp, Artificial Sequence
  Synthetic construct
cttggcttcagttgac

SEQ ID NO: 2934 - DNA, 16 bp, Artificial Sequence
  Synthetic construct
cttggcttcagttgac

SEQ ID NO: 2935 - DNA, 16 bp, Artificial Sequence
  Synthetic construct
cttggcttccttaatc

SEQ ID NO: 2936 - DNA, 16 bp, Artificial Sequence
  Synthetic construct
cttggcttccttaatc

SEQ ID NO: 2937 - DNA, 16 bp, Artificial Sequence
  Synthetic construct
cttggcttcgttacga

SEQ ID NO: 2938 - DNA, 16 bp, Artificial Sequence
  Synthetic construct
cttggcttcgttacga

SEQ ID NO: 2939 - DNA, 16 bp, Artificial Sequence
  Synthetic construct
ctttgcgagatcgata

SEQ ID NO: 2940 - DNA, 16 bp, Artificial Sequence
  Synthetic construct
ctttgcgagatcgata

SEQ ID NO: 2941 - DNA, 16 bp, Artificial Sequence
  Synthetic construct
ctttgcgagccacctg

SEQ ID NO: 2942 - DNA, 16 bp, Artificial Sequence
  Synthetic construct
ctttgcgagccacctg

SEQ ID NO: 2943 - DNA, 16 bp, Artificial Sequence
  Synthetic construct
ctttgcgagccatcgc

SEQ ID NO: 2944 - DNA, 16 bp, Artificial Sequence
  Synthetic construct
ctttgcgagccatcgc

SEQ ID NO: 2945 - DNA, 16 bp, Artificial Sequence
  Synthetic construct
ctttgcgtcccaagat

SEQ ID NO: 2946 - DNA, 16 bp, Artificial Sequence
  Synthetic construct
ctttgcgtcccaagat

SEQ ID NO: 2947 - DNA, 16 bp, Artificial Sequence
  Synthetic construct
ctttgcgtcgtcacgg

SEQ ID NO: 2948 - DNA, 16 bp, Artificial Sequence
  Synthetic construct
ctttgcgtcgtcacgg

SEQ ID NO: 2949 - DNA, 16 bp, Artificial Sequence
  Synthetic construct
ctttgcgtctcgtatt

SEQ ID NO: 2950 - DNA, 16 bp, Artificial Sequence
  Synthetic construct
ctttgcgtctcgtatt

SEQ ID NO: 2951 - DNA, 16 bp, Artificial Sequence
  Synthetic construct
gaaactcagtattgga

SEQ ID NO: 2952 - DNA, 16 bp, Artificial Sequence
  Synthetic construct
gaaactcagtattgga

SEQ ID NO: 2953 - DNA, 16 bp, Artificial Sequence
  Synthetic construct
gaaactcagtcaagcg

SEQ ID NO: 2954 - DNA, 16 bp, Artificial Sequence
  Synthetic construct
gaaactcagtcaagcg

SEQ ID NO: 2955 - DNA, 16 bp, Artificial Sequence
  Synthetic construct
gaaactccacagaggt

SEQ ID NO: 2956 - DNA, 16 bp, Artificial Sequence
  Synthetic construct
gaaactccacagaggt

SEQ ID NO: 2957 - DNA, 16 bp, Artificial Sequence
  Synthetic construct
gaaactccatcgatgt

SEQ ID NO: 2958 - DNA, 16 bp, Artificial Sequence
  Synthetic construct
gaaactccatcgatgt

SEQ ID NO: 2959 - DNA, 16 bp, Artificial Sequence
  Synthetic construct
gaaactcgtgtgcctg

SEQ ID NO: 2960 - DNA, 16 bp, Artificial Sequence
  Synthetic construct
gaaactcgtgtgcctg

SEQ ID NO: 2961 - DNA, 16 bp, Artificial Sequence
  Synthetic construct
gaaactctcacaaacc

SEQ ID NO: 2962 - DNA, 16 bp, Artificial Sequence
  Synthetic construct
gaaactctcacaaacc

SEQ ID NO: 2963 - DNA, 16 bp, Artificial Sequence
  Synthetic construct
gaaatgaagagtaccg

SEQ ID NO: 2964 - DNA, 16 bp, Artificial Sequence
  Synthetic construct
gaaatgaagagtaccg

SEQ ID NO: 2965 - DNA, 16 bp, Artificial Sequence
  Synthetic construct
gaaatgaagccacgct

SEQ ID NO: 2966 - DNA, 16 bp, Artificial Sequence
  Synthetic construct
gaaatgaagccacgct

SEQ ID NO: 2967 - DNA, 16 bp, Artificial Sequence
  Synthetic construct
gaaatgaagggtctcc

SEQ ID NO: 2968 - DNA, 16 bp, Artificial Sequence
  Synthetic construct
gaaatgaagggtctcc

SEQ ID NO: 2969 - DNA, 16 bp, Artificial Sequence
  Synthetic construct
gaaatgaagtggcaca

SEQ ID NO: 2970 - DNA, 16 bp, Artificial Sequence
  Synthetic construct
gaaatgaagtggcaca

SEQ ID NO: 2971 - DNA, 16 bp, Artificial Sequence
  Synthetic construct
gaaatgacattggtac

SEQ ID NO: 2972 - DNA, 16 bp, Artificial Sequence
  Synthetic construct
gaaatgacattggtac

SEQ ID NO: 2973 - DNA, 16 bp, Artificial Sequence
  Synthetic construct
gaaatgagtaagttcc

SEQ ID NO: 2974 - DNA, 16 bp, Artificial Sequence
  Synthetic construct
gaaatgagtaagttcc

SEQ ID NO: 2975 - DNA, 16 bp, Artificial Sequence
  Synthetic construct
gaaatgagttcacctc

SEQ ID NO: 2976 - DNA, 16 bp, Artificial Sequence
  Synthetic construct
gaaatgagttcacctc

SEQ ID NO: 2977 - DNA, 16 bp, Artificial Sequence
  Synthetic construct
gaaatgatcggaaata

SEQ ID NO: 2978 - DNA, 16 bp, Artificial Sequence
  Synthetic construct
gaaatgatcggaaata

SEQ ID NO: 2979 - DNA, 16 bp, Artificial Sequence
  Synthetic construct
gaacatcagaatgtgt

SEQ ID NO: 2980 - DNA, 16 bp, Artificial Sequence
  Synthetic construct
gaacatcagaatgtgt

SEQ ID NO: 2981 - DNA, 16 bp, Artificial Sequence
  Synthetic construct
gaacatcaggagtacc

SEQ ID NO: 2982 - DNA, 16 bp, Artificial Sequence
  Synthetic construct
gaacatcaggagtacc

SEQ ID NO: 2983 - DNA, 16 bp, Artificial Sequence
  Synthetic construct
gaacctaagcgcctca

SEQ ID NO: 2984 - DNA, 16 bp, Artificial Sequence
  Synthetic construct
gaacctaagcgcctca

SEQ ID NO: 2985 - DNA, 16 bp, Artificial Sequence
  Synthetic construct
gaacctaaggatcgca

SEQ ID NO: 2986 - DNA, 16 bp, Artificial Sequence
  Synthetic construct
gaacctaaggatcgca

SEQ ID NO: 2987 - DNA, 16 bp, Artificial Sequence
  Synthetic construct
gaacctaagtgaagtt

SEQ ID NO: 2988 - DNA, 16 bp, Artificial Sequence
  Synthetic construct
gaacctaagtgaagtt

SEQ ID NO: 2989 - DNA, 16 bp, Artificial Sequence
  Synthetic construct
gaacctacagatgagc

SEQ ID NO: 2990 - DNA, 16 bp, Artificial Sequence
  Synthetic construct
gaacctacagatgagc

SEQ ID NO: 2991 - DNA, 16 bp, Artificial Sequence
  Synthetic construct
gaacctacagtttacg

SEQ ID NO: 2992 - DNA, 16 bp, Artificial Sequence
  Synthetic construct
gaacctacagtttacg

SEQ ID NO: 2993 - DNA, 16 bp, Artificial Sequence
  Synthetic construct
gaacctagtgatgccc

SEQ ID NO: 2994 - DNA, 16 bp, Artificial Sequence
  Synthetic construct
gaacctagtgatgccc

SEQ ID NO: 2995 - DNA, 16 bp, Artificial Sequence
  Synthetic construct
gaacctagtgcaccac

SEQ ID NO: 2996 - DNA, 16 bp, Artificial Sequence
  Synthetic construct
gaacctagtgcaccac

SEQ ID NO: 2997 - DNA, 16 bp, Artificial Sequence
  Synthetic construct
gaacctatcatacggt

SEQ ID NO: 2998 - DNA, 16 bp, Artificial Sequence
  Synthetic construct
gaacctatcatacggt

SEQ ID NO: 2999 - DNA, 16 bp, Artificial Sequence
  Synthetic construct
gaacctatctggtgta

SEQ ID NO: 3000 - DNA, 16 bp, Artificial Sequence
  Synthetic construct
gaacctatctggtgta

SEQ ID NO: 3001 - DNA, 16 bp, Artificial Sequence
  Synthetic construct
gaacggaaggacgaaa

SEQ ID NO: 3002 - DNA, 16 bp, Artificial Sequence
  Synthetic construct
gaacggaaggacgaaa

SEQ ID NO: 3003 - DNA, 16 bp, Artificial Sequence
  Synthetic construct
gaacggacaaggtgtg

SEQ ID NO: 3004 - DNA, 16 bp, Artificial Sequence
  Synthetic construct
gaacggacaaggtgtg

SEQ ID NO: 3005 - DNA, 16 bp, Artificial Sequence
  Synthetic construct
gaacggacataggata

SEQ ID NO: 3006 - DNA, 16 bp, Artificial Sequence
  Synthetic construct
gaacggacataggata

SEQ ID NO: 3007 - DNA, 16 bp, Artificial Sequence
  Synthetic construct
gaacggagtaaatgtg

SEQ ID NO: 3008 - DNA, 16 bp, Artificial Sequence
  Synthetic construct
gaacggagtaaatgtg

SEQ ID NO: 3009 - DNA, 16 bp, Artificial Sequence
  Synthetic construct
gaacggagtttgacac

SEQ ID NO: 3010 - DNA, 16 bp, Artificial Sequence
  Synthetic construct
gaacggagtttgacac

SEQ ID NO: 3011 - DNA, 16 bp, Artificial Sequence
  Synthetic construct
gaacggatcatctgtt

SEQ ID NO: 3012 - DNA, 16 bp, Artificial Sequence
  Synthetic construct
gaacggatcatctgtt

SEQ ID NO: 3013 - DNA, 16 bp, Artificial Sequence
  Synthetic construct
gaagcagaggcgacat

SEQ ID NO: 3014 - DNA, 16 bp, Artificial Sequence
  Synthetic construct
gaagcagaggcgacat

SEQ ID NO: 3015 - DNA, 16 bp, Artificial Sequence
  Synthetic construct
gaagcagaggttccta

SEQ ID NO: 3016 - DNA, 16 bp, Artificial Sequence
  Synthetic construct
gaagcagaggttccta

SEQ ID NO: 3017 - DNA, 16 bp, Artificial Sequence
  Synthetic construct
gaagcagcagggagag

SEQ ID NO: 3018 - DNA, 16 bp, Artificial Sequence
  Synthetic construct
gaagcagcagggagag

SEQ ID NO: 3019 - DNA, 16 bp, Artificial Sequence
  Synthetic construct
gaagcagcagtcttcc

SEQ ID NO: 3020 - DNA, 16 bp, Artificial Sequence
  Synthetic construct
gaagcagcagtcttcc

SEQ ID NO: 3021 - DNA, 16 bp, Artificial Sequence
  Synthetic construct
gaataagagaacaatc

SEQ ID NO: 3022 - DNA, 16 bp, Artificial Sequence
  Synthetic construct
gaataagagaacaatc

SEQ ID NO: 3023 - DNA, 16 bp, Artificial Sequence
  Synthetic construct
gaataagagacaatac

SEQ ID NO: 3024 - DNA, 16 bp, Artificial Sequence
  Synthetic construct
gaataagagacaatac

SEQ ID NO: 3025 - DNA, 16 bp, Artificial Sequence
  Synthetic construct
gaataagagtgcaagc

SEQ ID NO: 3026 - DNA, 16 bp, Artificial Sequence
  Synthetic construct
gaataagagtgcaagc

SEQ ID NO: 3027 - DNA, 16 bp, Artificial Sequence
  Synthetic construct
gaataagcatagactc

SEQ ID NO: 3028 - DNA, 16 bp, Artificial Sequence
  Synthetic construct
gaataagcatagactc

SEQ ID NO: 3029 - DNA, 16 bp, Artificial Sequence
  Synthetic construct
gacacgcaggcaaaga

SEQ ID NO: 3030 - DNA, 16 bp, Artificial Sequence
  Synthetic construct
gacacgcaggcaaaga

SEQ ID NO: 3031 - DNA, 16 bp, Artificial Sequence
  Synthetic construct
gacacgcagtgaacgc

SEQ ID NO: 3032 - DNA, 16 bp, Artificial Sequence
  Synthetic construct
gacacgcagtgaacgc

SEQ ID NO: 3033 - DNA, 16 bp, Artificial Sequence
  Synthetic construct
gacacgcgttaaagac

SEQ ID NO: 3034 - DNA, 16 bp, Artificial Sequence
  Synthetic construct
gacacgcgttaaagac

SEQ ID NO: 3035 - DNA, 16 bp, Artificial Sequence
  Synthetic construct
gacacgcgttcagtac

SEQ ID NO: 3036 - DNA, 16 bp, Artificial Sequence
  Synthetic construct
gacacgcgttcagtac

SEQ ID NO: 3037 - DNA, 16 bp, Artificial Sequence
  Synthetic construct
gacagagagcgagaaa

SEQ ID NO: 3038 - DNA, 16 bp, Artificial Sequence
  Synthetic construct
gacagagagcgagaaa

SEQ ID NO: 3039 - DNA, 16 bp, Artificial Sequence
  Synthetic construct
gacagagcacaggcct

SEQ ID NO: 3040 - DNA, 16 bp, Artificial Sequence
  Synthetic construct
gacagagcacaggcct

SEQ ID NO: 3041 - DNA, 16 bp, Artificial Sequence
  Synthetic construct
gacagagtcaaggctt

SEQ ID NO: 3042 - DNA, 16 bp, Artificial Sequence
  Synthetic construct
gacagagtcaaggctt

SEQ ID NO: 3043 - DNA, 16 bp, Artificial Sequence
  Synthetic construct
gacagagtccttaatc

SEQ ID NO: 3044 - DNA, 16 bp, Artificial Sequence
  Synthetic construct
gacagagtccttaatc

SEQ ID NO: 3045 - DNA, 16 bp, Artificial Sequence
  Synthetic construct
gacagagtccttgacc

SEQ ID NO: 3046 - DNA, 16 bp, Artificial Sequence
  Synthetic construct
gacagagtccttgacc

SEQ ID NO: 3047 - DNA, 16 bp, Artificial Sequence
  Synthetic construct
gacagagtcggacaag

SEQ ID NO: 3048 - DNA, 16 bp, Artificial Sequence
  Synthetic construct
gacagagtcggacaag

SEQ ID NO: 3049 - DNA, 16 bp, Artificial Sequence
  Synthetic construct
gaccaatagaataggg

SEQ ID NO: 3050 - DNA, 16 bp, Artificial Sequence
  Synthetic construct
gaccaatagaataggg

SEQ ID NO: 3051 - DNA, 16 bp, Artificial Sequence
  Synthetic construct
gaccaatagacctttg

SEQ ID NO: 3052 - DNA, 16 bp, Artificial Sequence
  Synthetic construct
gaccaatagacctttg

SEQ ID NO: 3053 - DNA, 16 bp, Artificial Sequence
  Synthetic construct
gaccaatagggtttct

SEQ ID NO: 3054 - DNA, 16 bp, Artificial Sequence
  Synthetic construct
gaccaatagggtttct

SEQ ID NO: 3055 - DNA, 16 bp, Artificial Sequence
  Synthetic construct
gaccaatcaatggaat

SEQ ID NO: 3056 - DNA, 16 bp, Artificial Sequence
  Synthetic construct
gaccaatcaatggaat

SEQ ID NO: 3057 - DNA, 16 bp, Artificial Sequence
  Synthetic construct
gaccaatcacaggagt

SEQ ID NO: 3058 - DNA, 16 bp, Artificial Sequence
  Synthetic construct
gaccaatcacaggagt

SEQ ID NO: 3059 - DNA, 16 bp, Artificial Sequence
  Synthetic construct
gaccaatcagtacact

SEQ ID NO: 3060 - DNA, 16 bp, Artificial Sequence
  Synthetic construct
gaccaatcagtacact

SEQ ID NO: 3061 - DNA, 16 bp, Artificial Sequence
  Synthetic construct
gacctggagccgccta

SEQ ID NO: 3062 - DNA, 16 bp, Artificial Sequence
  Synthetic construct
gacctggagccgccta

SEQ ID NO: 3063 - DNA, 16 bp, Artificial Sequence
  Synthetic construct
gacctggcagccagaa

SEQ ID NO: 3064 - DNA, 16 bp, Artificial Sequence
  Synthetic construct
gacctggcagccagaa

SEQ ID NO: 3065 - DNA, 16 bp, Artificial Sequence
  Synthetic construct
gacctggcagctggct

SEQ ID NO: 3066 - DNA, 16 bp, Artificial Sequence
  Synthetic construct
gacctggcagctggct

SEQ ID NO: 3067 - DNA, 16 bp, Artificial Sequence
  Synthetic construct
gacctgggtacagtgg

SEQ ID NO: 3068 - DNA, 16 bp, Artificial Sequence
  Synthetic construct
gacctgggtacagtgg

SEQ ID NO: 3069 - DNA, 16 bp, Artificial Sequence
  Synthetic construct
gacctgggtcggcact

SEQ ID NO: 3070 - DNA, 16 bp, Artificial Sequence
  Synthetic construct
gacctgggtcggcact

SEQ ID NO: 3071 - DNA, 16 bp, Artificial Sequence
  Synthetic construct
gacctgggtgcagtag

SEQ ID NO: 3072 - DNA, 16 bp, Artificial Sequence
  Synthetic construct
gacctgggtgcagtag

SEQ ID NO: 3073 - DNA, 16 bp, Artificial Sequence
  Synthetic construct
gacctgggttccggca

SEQ ID NO: 3074 - DNA, 16 bp, Artificial Sequence
  Synthetic construct
gacctgggttccggca

SEQ ID NO: 3075 - DNA, 16 bp, Artificial Sequence
  Synthetic construct
gacctggtcactgggc

SEQ ID NO: 3076 - DNA, 16 bp, Artificial Sequence
  Synthetic construct
gacctggtcactgggc

SEQ ID NO: 3077 - DNA, 16 bp, Artificial Sequence
  Synthetic construct
gacctggtcctcgcat

SEQ ID NO: 3078 - DNA, 16 bp, Artificial Sequence
  Synthetic construct
gacctggtcctcgcat

SEQ ID NO: 3079 - DNA, 16 bp, Artificial Sequence
  Synthetic construct
gacctggtcgcctgag

SEQ ID NO: 3080 - DNA, 16 bp, Artificial Sequence
  Synthetic construct
gacctggtcgcctgag

SEQ ID NO: 3081 - DNA, 16 bp, Artificial Sequence
  Synthetic construct
gacgcgtagatgcctt

SEQ ID NO: 3082 - DNA, 16 bp, Artificial Sequence
  Synthetic construct
gacgcgtagatgcctt

SEQ ID NO: 3083 - DNA, 16 bp, Artificial Sequence
  Synthetic construct
gacgcgtcatacagct

SEQ ID NO: 3084 - DNA, 16 bp, Artificial Sequence
  Synthetic construct
gacgcgtcatacagct

SEQ ID NO: 3085 - DNA, 16 bp, Artificial Sequence
  Synthetic construct
gacgcgtgtagcgtcc

SEQ ID NO: 3086 - DNA, 16 bp, Artificial Sequence
  Synthetic construct
gacgcgtgtagcgtcc

SEQ ID NO: 3087 - DNA, 16 bp, Artificial Sequence
  Synthetic construct
gacggctagagtgacc

SEQ ID NO: 3088 - DNA, 16 bp, Artificial Sequence
  Synthetic construct
gacggctagagtgacc

SEQ ID NO: 3089 - DNA, 16 bp, Artificial Sequence
  Synthetic construct
gacggctcagatgggt

SEQ ID NO: 3090 - DNA, 16 bp, Artificial Sequence
  Synthetic construct
gacggctcagatgggt

SEQ ID NO: 3091 - DNA, 16 bp, Artificial Sequence
  Synthetic construct
gacggctgtgtctgat

SEQ ID NO: 3092 - DNA, 16 bp, Artificial Sequence
  Synthetic construct
gacggctgtgtctgat

SEQ ID NO: 3093 - DNA, 16 bp, Artificial Sequence
  Synthetic construct
gacggctgttaagggc

SEQ ID NO: 3094 - DNA, 16 bp, Artificial Sequence
  Synthetic construct
gacggctgttaagggc

SEQ ID NO: 3095 - DNA, 16 bp, Artificial Sequence
  Synthetic construct
gacgtgcagaggtaga

SEQ ID NO: 3096 - DNA, 16 bp, Artificial Sequence
  Synthetic construct
gacgtgcagaggtaga

SEQ ID NO: 3097 - DNA, 16 bp, Artificial Sequence
  Synthetic construct
gacgtgccattcttac

SEQ ID NO: 3098 - DNA, 16 bp, Artificial Sequence
  Synthetic construct
gacgtgccattcttac

SEQ ID NO: 3099 - DNA, 16 bp, Artificial Sequence
  Synthetic construct
gacgtgcgtggcgaat

SEQ ID NO: 3100 - DNA, 16 bp, Artificial Sequence
  Synthetic construct
gacgtgcgtggcgaat

SEQ ID NO: 3101 - DNA, 16 bp, Artificial Sequence
  Synthetic construct
gacgttaagagggctt

SEQ ID NO: 3102 - DNA, 16 bp, Artificial Sequence
  Synthetic construct
gacgttaagagggctt

SEQ ID NO: 3103 - DNA, 16 bp, Artificial Sequence
  Synthetic construct
gacgttacagctgtgc

SEQ ID NO: 3104 - DNA, 16 bp, Artificial Sequence
  Synthetic construct
gacgttacagctgtgc

SEQ ID NO: 3105 - DNA, 16 bp, Artificial Sequence
  Synthetic construct
gacgttagtgtgtgcc

SEQ ID NO: 3106 - DNA, 16 bp, Artificial Sequence
  Synthetic construct
gacgttagtgtgtgcc

SEQ ID NO: 3107 - DNA, 16 bp, Artificial Sequence
  Synthetic construct
gacgttatcagtacgt

SEQ ID NO: 3108 - DNA, 16 bp, Artificial Sequence
  Synthetic construct
gacgttatcagtacgt

SEQ ID NO: 3109 - DNA, 16 bp, Artificial Sequence
  Synthetic construct
gacgttatcgcaggct

SEQ ID NO: 3110 - DNA, 16 bp, Artificial Sequence
  Synthetic construct
gacgttatcgcaggct

SEQ ID NO: 3111 - DNA, 16 bp, Artificial Sequence
  Synthetic construct
gacgttatcgctagcg

SEQ ID NO: 3112 - DNA, 16 bp, Artificial Sequence
  Synthetic construct
gacgttatcgctagcg

SEQ ID NO: 3113 - DNA, 16 bp, Artificial Sequence
  Synthetic construct
gactaacaggtgcttt

SEQ ID NO: 3114 - DNA, 16 bp, Artificial Sequence
  Synthetic construct
gactaacaggtgcttt

SEQ ID NO: 3115 - DNA, 16 bp, Artificial Sequence
  Synthetic construct
gactaaccaaactgct

SEQ ID NO: 3116 - DNA, 16 bp, Artificial Sequence
  Synthetic construct
gactaaccaaactgct

SEQ ID NO: 3117 - DNA, 16 bp, Artificial Sequence
  Synthetic construct
gactaaccaatccgat

SEQ ID NO: 3118 - DNA, 16 bp, Artificial Sequence
  Synthetic construct
gactaaccaatccgat

SEQ ID NO: 3119 - DNA, 16 bp, Artificial Sequence
  Synthetic construct
gactaaccagtgggat

SEQ ID NO: 3120 - DNA, 16 bp, Artificial Sequence
  Synthetic construct
gactaaccagtgggat

SEQ ID NO: 3121 - DNA, 16 bp, Artificial Sequence
  Synthetic construct
gactaactcccattat

SEQ ID NO: 3122 - DNA, 16 bp, Artificial Sequence
  Synthetic construct
gactaactcccattat

SEQ ID NO: 3123 - DNA, 16 bp, Artificial Sequence
  Synthetic construct
gactaactccgatatg

SEQ ID NO: 3124 - DNA, 16 bp, Artificial Sequence
  Synthetic construct
gactaactccgatatg

SEQ ID NO: 3125 - DNA, 16 bp, Artificial Sequence
  Synthetic construct
gactaactcgtatcag

SEQ ID NO: 3126 - DNA, 16 bp, Artificial Sequence
  Synthetic construct
gactaactcgtatcag

SEQ ID NO: 3127 - DNA, 16 bp, Artificial Sequence
  Synthetic construct
gactaactcgtccagg

SEQ ID NO: 3128 - DNA, 16 bp, Artificial Sequence
  Synthetic construct
gactaactcgtccagg

SEQ ID NO: 3129 - DNA, 16 bp, Artificial Sequence
  Synthetic construct
gactacaagatggcgt

SEQ ID NO: 3130 - DNA, 16 bp, Artificial Sequence
  Synthetic construct
gactacaagatggcgt

SEQ ID NO: 3131 - DNA, 16 bp, Artificial Sequence
  Synthetic construct
gactacaagcccagct

SEQ ID NO: 3132 - DNA, 16 bp, Artificial Sequence
  Synthetic construct
gactacaagcccagct

SEQ ID NO: 3133 - DNA, 16 bp, Artificial Sequence
  Synthetic construct
gactacaagggcatgt

SEQ ID NO: 3134 - DNA, 16 bp, Artificial Sequence
  Synthetic construct
gactacaagggcatgt

SEQ ID NO: 3135 - DNA, 16 bp, Artificial Sequence
  Synthetic construct
gactacacaagttaag

SEQ ID NO: 3136 - DNA, 16 bp, Artificial Sequence
  Synthetic construct
gactacacaagttaag

SEQ ID NO: 3137 - DNA, 16 bp, Artificial Sequence
  Synthetic construct
gactacacatatggtc

SEQ ID NO: 3138 - DNA, 16 bp, Artificial Sequence
  Synthetic construct
gactacacatatggtc

SEQ ID NO: 3139 - DNA, 16 bp, Artificial Sequence
  Synthetic construct
gactacagtgtgaccc

SEQ ID NO: 3140 - DNA, 16 bp, Artificial Sequence
  Synthetic construct
gactacagtgtgaccc

SEQ ID NO: 3141 - DNA, 16 bp, Artificial Sequence
  Synthetic construct
gactacatctagagtc

SEQ ID NO: 3142 - DNA, 16 bp, Artificial Sequence
  Synthetic construct
gactacatctagagtc

SEQ ID NO: 3143 - DNA, 16 bp, Artificial Sequence
  Synthetic construct
gactgcgagggtgttg

SEQ ID NO: 3144 - DNA, 16 bp, Artificial Sequence
  Synthetic construct
gactgcgagggtgttg

SEQ ID NO: 3145 - DNA, 16 bp, Artificial Sequence
  Synthetic construct
gactgcgcacacgctg

SEQ ID NO: 3146 - DNA, 16 bp, Artificial Sequence
  Synthetic construct
gactgcgcacacgctg

SEQ ID NO: 3147 - DNA, 16 bp, Artificial Sequence
  Synthetic construct
gactgcgcagccagaa

SEQ ID NO: 3148 - DNA, 16 bp, Artificial Sequence
  Synthetic construct
gactgcgcagccagaa

SEQ ID NO: 3149 - DNA, 16 bp, Artificial Sequence
  Synthetic construct
gactgcggttcgtgat

SEQ ID NO: 3150 - DNA, 16 bp, Artificial Sequence
  Synthetic construct
gactgcggttcgtgat

SEQ ID NO: 3151 - DNA, 16 bp, Artificial Sequence
  Synthetic construct
gactgcggtttggcgc

SEQ ID NO: 3152 - DNA, 16 bp, Artificial Sequence
  Synthetic construct
gactgcggtttggcgc

SEQ ID NO: 3153 - DNA, 16 bp, Artificial Sequence
  Synthetic construct
gactgcgtcctcaatt

SEQ ID NO: 3154 - DNA, 16 bp, Artificial Sequence
  Synthetic construct
gactgcgtcctcaatt

SEQ ID NO: 3155 - DNA, 16 bp, Artificial Sequence
  Synthetic construct
gagcagaagccggtaa

SEQ ID NO: 3156 - DNA, 16 bp, Artificial Sequence
  Synthetic construct
gagcagaagccggtaa

SEQ ID NO: 3157 - DNA, 16 bp, Artificial Sequence
  Synthetic construct
gagcagaagtacgacg

SEQ ID NO: 3158 - DNA, 16 bp, Artificial Sequence
  Synthetic construct
gagcagaagtacgacg

SEQ ID NO: 3159 - DNA, 16 bp, Artificial Sequence
  Synthetic construct
gagcagacatttcagg

SEQ ID NO: 3160 - DNA, 16 bp, Artificial Sequence
  Synthetic construct
gagcagacatttcagg

SEQ ID NO: 3161 - DNA, 16 bp, Artificial Sequence
  Synthetic construct
gagcagagtgcaggta

SEQ ID NO: 3162 - DNA, 16 bp, Artificial Sequence
  Synthetic construct
gagcagagtgcaggta

SEQ ID NO: 3163 - DNA, 16 bp, Artificial Sequence
  Synthetic construct
gagcagagttgtcgcg

SEQ ID NO: 3164 - DNA, 16 bp, Artificial Sequence
  Synthetic construct
gagcagagttgtcgcg

SEQ ID NO: 3165 - DNA, 16 bp, Artificial Sequence
  Synthetic construct
gagcagatcgcgtagc

SEQ ID NO: 3166 - DNA, 16 bp, Artificial Sequence
  Synthetic construct
gagcagatcgcgtagc

SEQ ID NO: 3167 - DNA, 16 bp, Artificial Sequence
  Synthetic construct
gagcagatctggcgtg

SEQ ID NO: 3168 - DNA, 16 bp, Artificial Sequence
  Synthetic construct
gagcagatctggcgtg

SEQ ID NO: 3169 - DNA, 16 bp, Artificial Sequence
  Synthetic construct
gaggtgacagtaacgg

SEQ ID NO: 3170 - DNA, 16 bp, Artificial Sequence
  Synthetic construct
gaggtgacagtaacgg

SEQ ID NO: 3171 - DNA, 16 bp, Artificial Sequence
  Synthetic construct
gaggtgagtcttgcgg

SEQ ID NO: 3172 - DNA, 16 bp, Artificial Sequence
  Synthetic construct
gaggtgagtcttgcgg

SEQ ID NO: 3173 - DNA, 16 bp, Artificial Sequence
  Synthetic construct
gaggtgagttaaagtg

SEQ ID NO: 3174 - DNA, 16 bp, Artificial Sequence
  Synthetic construct
gaggtgagttaaagtg

SEQ ID NO: 3175 - DNA, 16 bp, Artificial Sequence
  Synthetic construct
gagtccgagcaatctc

SEQ ID NO: 3176 - DNA, 16 bp, Artificial Sequence
  Synthetic construct
gagtccgagcaatctc

SEQ ID NO: 3177 - DNA, 16 bp, Artificial Sequence
  Synthetic construct
gagtccggttcgttga

SEQ ID NO: 3178 - DNA, 16 bp, Artificial Sequence
  Synthetic construct
gagtccggttcgttga

SEQ ID NO: 3179 - DNA, 16 bp, Artificial Sequence
  Synthetic construct
gagtccgtctgtgcaa

SEQ ID NO: 3180 - DNA, 16 bp, Artificial Sequence
  Synthetic construct
gagtccgtctgtgcaa

SEQ ID NO: 3181 - DNA, 16 bp, Artificial Sequence
  Synthetic construct
gatcagtaggtgcttt

SEQ ID NO: 3182 - DNA, 16 bp, Artificial Sequence
  Synthetic construct
gatcagtaggtgcttt

SEQ ID NO: 3183 - DNA, 16 bp, Artificial Sequence
  Synthetic construct
gatcagtgtagaaagg

SEQ ID NO: 3184 - DNA, 16 bp, Artificial Sequence
  Synthetic construct
gatcagtgtagaaagg

SEQ ID NO: 3185 - DNA, 16 bp, Artificial Sequence
  Synthetic construct
gatcagtgttccaaca

SEQ ID NO: 3186 - DNA, 16 bp, Artificial Sequence
  Synthetic construct
gatcagtgttccaaca

SEQ ID NO: 3187 - DNA, 16 bp, Artificial Sequence
  Synthetic construct
gatcagttcagctctc

SEQ ID NO: 3188 - DNA, 16 bp, Artificial Sequence
  Synthetic construct
gatcagttcagctctc

SEQ ID NO: 3189 - DNA, 16 bp, Artificial Sequence
  Synthetic construct
gatcgatagagactta

SEQ ID NO: 3190 - DNA, 16 bp, Artificial Sequence
  Synthetic construct
gatcgatagagactta

SEQ ID NO: 3191 - DNA, 16 bp, Artificial Sequence
  Synthetic construct
gatcgatgtcgtcttc

SEQ ID NO: 3192 - DNA, 16 bp, Artificial Sequence
  Synthetic construct
gatcgatgtcgtcttc

SEQ ID NO: 3193 - DNA, 16 bp, Artificial Sequence
  Synthetic construct
gatcgatgtgataaac

SEQ ID NO: 3194 - DNA, 16 bp, Artificial Sequence
  Synthetic construct
gatcgatgtgataaac

SEQ ID NO: 3195 - DNA, 16 bp, Artificial Sequence
  Synthetic construct
gatcgattcaccgggt

SEQ ID NO: 3196 - DNA, 16 bp, Artificial Sequence
  Synthetic construct
gatcgattcaccgggt

SEQ ID NO: 3197 - DNA, 16 bp, Artificial Sequence
  Synthetic construct
gatcgattcagtcagt

SEQ ID NO: 3198 - DNA, 16 bp, Artificial Sequence
  Synthetic construct
gatcgattcagtcagt

SEQ ID NO: 3199 - DNA, 16 bp, Artificial Sequence
  Synthetic construct
gatcgattcataaccg

SEQ ID NO: 3200 - DNA, 16 bp, Artificial Sequence
  Synthetic construct
gatcgattcataaccg

SEQ ID NO: 3201 - DNA, 16 bp, Artificial Sequence
  Synthetic construct
gatcgcgagacaggct

SEQ ID NO: 3202 - DNA, 16 bp, Artificial Sequence
  Synthetic construct
gatcgcgagacaggct

SEQ ID NO: 3203 - DNA, 16 bp, Artificial Sequence
  Synthetic construct
gatcgcgagtggcaca

SEQ ID NO: 3204 - DNA, 16 bp, Artificial Sequence
  Synthetic construct
gatcgcgagtggcaca

SEQ ID NO: 3205 - DNA, 16 bp, Artificial Sequence
  Synthetic construct
gatcgcgcagctgtat

SEQ ID NO: 3206 - DNA, 16 bp, Artificial Sequence
  Synthetic construct
gatcgcgcagctgtat

SEQ ID NO: 3207 - DNA, 16 bp, Artificial Sequence
  Synthetic construct
gatcgcggtcgagttt

SEQ ID NO: 3208 - DNA, 16 bp, Artificial Sequence
  Synthetic construct
gatcgcggtcgagttt

SEQ ID NO: 3209 - DNA, 16 bp, Artificial Sequence
  Synthetic construct
gatcgcgtctcctata

SEQ ID NO: 3210 - DNA, 16 bp, Artificial Sequence
  Synthetic construct
gatcgcgtctcctata

SEQ ID NO: 3211 - DNA, 16 bp, Artificial Sequence
  Synthetic construct
gatcgtacatgcaact

SEQ ID NO: 3212 - DNA, 16 bp, Artificial Sequence
  Synthetic construct
gatcgtacatgcaact

SEQ ID NO: 3213 - DNA, 16 bp, Artificial Sequence
  Synthetic construct
gatcgtagttaagatg

SEQ ID NO: 3214 - DNA, 16 bp, Artificial Sequence
  Synthetic construct
gatcgtagttaagatg

SEQ ID NO: 3215 - DNA, 16 bp, Artificial Sequence
  Synthetic construct
gatcgtatcacatagc

SEQ ID NO: 3216 - DNA, 16 bp, Artificial Sequence
  Synthetic construct
gatcgtatcacatagc

SEQ ID NO: 3217 - DNA, 16 bp, Artificial Sequence
  Synthetic construct
gatcgtatctagcaca

SEQ ID NO: 3218 - DNA, 16 bp, Artificial Sequence
  Synthetic construct
gatcgtatctagcaca

SEQ ID NO: 3219 - DNA, 16 bp, Artificial Sequence
  Synthetic construct
gatctagaggcgtaca

SEQ ID NO: 3220 - DNA, 16 bp, Artificial Sequence
  Synthetic construct
gatctagaggcgtaca

SEQ ID NO: 3221 - DNA, 16 bp, Artificial Sequence
  Synthetic construct
gatctaggtatcacca

SEQ ID NO: 3222 - DNA, 16 bp, Artificial Sequence
  Synthetic construct
gatctaggtatcacca

SEQ ID NO: 3223 - DNA, 16 bp, Artificial Sequence
  Synthetic construct
gatctaggtcatgcat

SEQ ID NO: 3224 - DNA, 16 bp, Artificial Sequence
  Synthetic construct
gatctaggtcatgcat

SEQ ID NO: 3225 - DNA, 16 bp, Artificial Sequence
  Synthetic construct
gatctaggtttaagcc

SEQ ID NO: 3226 - DNA, 16 bp, Artificial Sequence
  Synthetic construct
gatctaggtttaagcc

SEQ ID NO: 3227 - DNA, 16 bp, Artificial Sequence
  Synthetic construct
gatctagtctagagtc

SEQ ID NO: 3228 - DNA, 16 bp, Artificial Sequence
  Synthetic construct
gatctagtctagagtc

SEQ ID NO: 3229 - DNA, 16 bp, Artificial Sequence
  Synthetic construct
gatgaaaagatgtaac

SEQ ID NO: 3230 - DNA, 16 bp, Artificial Sequence
  Synthetic construct
gatgaaaagatgtaac

SEQ ID NO: 3231 - DNA, 16 bp, Artificial Sequence
  Synthetic construct
gatgaaaagatgttag

SEQ ID NO: 3232 - DNA, 16 bp, Artificial Sequence
  Synthetic construct
gatgaaaagatgttag

SEQ ID NO: 3233 - DNA, 16 bp, Artificial Sequence
  Synthetic construct
gatgaggagctaactc

SEQ ID NO: 3234 - DNA, 16 bp, Artificial Sequence
  Synthetic construct
gatgaggagctaactc

SEQ ID NO: 3235 - DNA, 16 bp, Artificial Sequence
  Synthetic construct
gatgaggagtggagaa

SEQ ID NO: 3236 - DNA, 16 bp, Artificial Sequence
  Synthetic construct
gatgaggagtggagaa

SEQ ID NO: 3237 - DNA, 16 bp, Artificial Sequence
  Synthetic construct
gatgaggcatcgattg

SEQ ID NO: 3238 - DNA, 16 bp, Artificial Sequence
  Synthetic construct
gatgaggcatcgattg

SEQ ID NO: 3239 - DNA, 16 bp, Artificial Sequence
  Synthetic construct
gatgagggtcttcgtc

SEQ ID NO: 3240 - DNA, 16 bp, Artificial Sequence
  Synthetic construct
gatgagggtcttcgtc

SEQ ID NO: 3241 - DNA, 16 bp, Artificial Sequence
  Synthetic construct
gatgaggtcagctcgg

SEQ ID NO: 3242 - DNA, 16 bp, Artificial Sequence
  Synthetic construct
gatgaggtcagctcgg

SEQ ID NO: 3243 - DNA, 16 bp, Artificial Sequence
  Synthetic construct
gatgctaagactgggt

SEQ ID NO: 3244 - DNA, 16 bp, Artificial Sequence
  Synthetic construct
gatgctaagactgggt

SEQ ID NO: 3245 - DNA, 16 bp, Artificial Sequence
  Synthetic construct
gatgctaagcaaatca

SEQ ID NO: 3246 - DNA, 16 bp, Artificial Sequence
  Synthetic construct
gatgctaagcaaatca

SEQ ID NO: 3247 - DNA, 16 bp, Artificial Sequence
  Synthetic construct
gatgctacactgaagg

SEQ ID NO: 3248 - DNA, 16 bp, Artificial Sequence
  Synthetic construct
gatgctacactgaagg

SEQ ID NO: 3249 - DNA, 16 bp, Artificial Sequence
  Synthetic construct
gatgctatcacgacta

SEQ ID NO: 3250 - DNA, 16 bp, Artificial Sequence
  Synthetic construct
gatgctatcacgacta

SEQ ID NO: 3251 - DNA, 16 bp, Artificial Sequence
  Synthetic construct
gatgctatccgagcca

SEQ ID NO: 3252 - DNA, 16 bp, Artificial Sequence
  Synthetic construct
gatgctatccgagcca

SEQ ID NO: 3253 - DNA, 16 bp, Artificial Sequence
  Synthetic construct
gatgctatcgaatcca

SEQ ID NO: 3254 - DNA, 16 bp, Artificial Sequence
  Synthetic construct
gatgctatcgaatcca

SEQ ID NO: 3255 - DNA, 16 bp, Artificial Sequence
  Synthetic construct
gatgctatcgcgatcg

SEQ ID NO: 3256 - DNA, 16 bp, Artificial Sequence
  Synthetic construct
gatgctatcgcgatcg

SEQ ID NO: 3257 - DNA, 16 bp, Artificial Sequence
  Synthetic construct
gattcagagcatggca

SEQ ID NO: 3258 - DNA, 16 bp, Artificial Sequence
  Synthetic construct
gattcagagcatggca

SEQ ID NO: 3259 - DNA, 16 bp, Artificial Sequence
  Synthetic construct
gattcagaggatgtat

SEQ ID NO: 3260 - DNA, 16 bp, Artificial Sequence
  Synthetic construct
gattcagaggatgtat

SEQ ID NO: 3261 - DNA, 16 bp, Artificial Sequence
  Synthetic construct
gattcagcaaactgct

SEQ ID NO: 3262 - DNA, 16 bp, Artificial Sequence
  Synthetic construct
gattcagcaaactgct

SEQ ID NO: 3263 - DNA, 16 bp, Artificial Sequence
  Synthetic construct
gattcaggtagggact

SEQ ID NO: 3264 - DNA, 16 bp, Artificial Sequence
  Synthetic construct
gattcaggtagggact

SEQ ID NO: 3265 - DNA, 16 bp, Artificial Sequence
  Synthetic construct
gattcagtcccacttg

SEQ ID NO: 3266 - DNA, 16 bp, Artificial Sequence
  Synthetic construct
gattcagtcccacttg

SEQ ID NO: 3267 - DNA, 16 bp, Artificial Sequence
  Synthetic construct
gcaaactagggatacc

SEQ ID NO: 3268 - DNA, 16 bp, Artificial Sequence
  Synthetic construct
gcaaactagggatacc

SEQ ID NO: 3269 - DNA, 16 bp, Artificial Sequence
  Synthetic construct
gcaaactcaaagcaat

SEQ ID NO: 3270 - DNA, 16 bp, Artificial Sequence
  Synthetic construct
gcaaactcaaagcaat

SEQ ID NO: 3271 - DNA, 16 bp, Artificial Sequence
  Synthetic construct
gcaaactcacaagccc

SEQ ID NO: 3272 - DNA, 16 bp, Artificial Sequence
  Synthetic construct
gcaaactcacaagccc

SEQ ID NO: 3273 - DNA, 16 bp, Artificial Sequence
  Synthetic construct
gcaaactgtgtgcgtc

SEQ ID NO: 3274 - DNA, 16 bp, Artificial Sequence
  Synthetic construct
gcaaactgtgtgcgtc

SEQ ID NO: 3275 - DNA, 16 bp, Artificial Sequence
  Synthetic construct
gcaaacttcaggccca

SEQ ID NO: 3276 - DNA, 16 bp, Artificial Sequence
  Synthetic construct
gcaaacttcaggccca

SEQ ID NO: 3277 - DNA, 16 bp, Artificial Sequence
  Synthetic construct
gcaatcaagaaggcct

SEQ ID NO: 3278 - DNA, 16 bp, Artificial Sequence
  Synthetic construct
gcaatcaagaaggcct

SEQ ID NO: 3279 - DNA, 16 bp, Artificial Sequence
  Synthetic construct
gcaatcagttatgcgt

SEQ ID NO: 3280 - DNA, 16 bp, Artificial Sequence
  Synthetic construct
gcaatcagttatgcgt

SEQ ID NO: 3281 - DNA, 16 bp, Artificial Sequence
  Synthetic construct
gcacatagtattaccg

SEQ ID NO: 3282 - DNA, 16 bp, Artificial Sequence
  Synthetic construct
gcacatagtattaccg

SEQ ID NO: 3283 - DNA, 16 bp, Artificial Sequence
  Synthetic construct
gcacatagtcgagttt

SEQ ID NO: 3284 - DNA, 16 bp, Artificial Sequence
  Synthetic construct
gcacatagtcgagttt

SEQ ID NO: 3285 - DNA, 16 bp, Artificial Sequence
  Synthetic construct
gcacatagttagatga

SEQ ID NO: 3286 - DNA, 16 bp, Artificial Sequence
  Synthetic construct
gcacatagttagatga

SEQ ID NO: 3287 - DNA, 16 bp, Artificial Sequence
  Synthetic construct
gcacatatcactattc

SEQ ID NO: 3288 - DNA, 16 bp, Artificial Sequence
  Synthetic construct
gcacatatcactattc

SEQ ID NO: 3289 - DNA, 16 bp, Artificial Sequence
  Synthetic construct
gcacatatcccttgtg

SEQ ID NO: 3290 - DNA, 16 bp, Artificial Sequence
  Synthetic construct
gcacatatcccttgtg

SEQ ID NO: 3291 - DNA, 16 bp, Artificial Sequence
  Synthetic construct
gcacatatcctcctag

SEQ ID NO: 3292 - DNA, 16 bp, Artificial Sequence
  Synthetic construct
gcacatatcctcctag

SEQ ID NO: 3293 - DNA, 16 bp, Artificial Sequence
  Synthetic construct
gcacatatcggaggta

SEQ ID NO: 3294 - DNA, 16 bp, Artificial Sequence
  Synthetic construct
gcacatatcggaggta

SEQ ID NO: 3295 - DNA, 16 bp, Artificial Sequence
  Synthetic construct
gcactctagttaccca

SEQ ID NO: 3296 - DNA, 16 bp, Artificial Sequence
  Synthetic construct
gcactctagttaccca

SEQ ID NO: 3297 - DNA, 16 bp, Artificial Sequence
  Synthetic construct
gcactctcacaagtaa

SEQ ID NO: 3298 - DNA, 16 bp, Artificial Sequence
  Synthetic construct
gcactctcacaagtaa

SEQ ID NO: 3299 - DNA, 16 bp, Artificial Sequence
  Synthetic construct
gcactctgtatctgca

SEQ ID NO: 3300 - DNA, 16 bp, Artificial Sequence
  Synthetic construct
gcactctgtatctgca

SEQ ID NO: 3301 - DNA, 16 bp, Artificial Sequence
  Synthetic construct
gcactctgtccgctga

SEQ ID NO: 3302 - DNA, 16 bp, Artificial Sequence
  Synthetic construct
gcactctgtccgctga

SEQ ID NO: 3303 - DNA, 16 bp, Artificial Sequence
  Synthetic construct
gcagccaagaaacgcc

SEQ ID NO: 3304 - DNA, 16 bp, Artificial Sequence
  Synthetic construct
gcagccaagaaacgcc

SEQ ID NO: 3305 - DNA, 16 bp, Artificial Sequence
  Synthetic construct
gcagccacacatcttt

SEQ ID NO: 3306 - DNA, 16 bp, Artificial Sequence
  Synthetic construct
gcagccacacatcttt

SEQ ID NO: 3307 - DNA, 16 bp, Artificial Sequence
  Synthetic construct
gcagccagtgcagtag

SEQ ID NO: 3308 - DNA, 16 bp, Artificial Sequence
  Synthetic construct
gcagccagtgcagtag

SEQ ID NO: 3309 - DNA, 16 bp, Artificial Sequence
  Synthetic construct
gcagccatcagagacg

SEQ ID NO: 3310 - DNA, 16 bp, Artificial Sequence
  Synthetic construct
gcagccatcagagacg

SEQ ID NO: 3311 - DNA, 16 bp, Artificial Sequence
  Synthetic construct
gcagccatcagttcga

SEQ ID NO: 3312 - DNA, 16 bp, Artificial Sequence
  Synthetic construct
gcagccatcagttcga

SEQ ID NO: 3313 - DNA, 16 bp, Artificial Sequence
  Synthetic construct
gcagccatctgcgacg

SEQ ID NO: 3314 - DNA, 16 bp, Artificial Sequence
  Synthetic construct
gcagccatctgcgacg

SEQ ID NO: 3315 - DNA, 16 bp, Artificial Sequence
  Synthetic construct
gcagttaagccttgat

SEQ ID NO: 3316 - DNA, 16 bp, Artificial Sequence
  Synthetic construct
gcagttaagccttgat

SEQ ID NO: 3317 - DNA, 16 bp, Artificial Sequence
  Synthetic construct
gcagttaagggcatgt

SEQ ID NO: 3318 - DNA, 16 bp, Artificial Sequence
  Synthetic construct
gcagttaagggcatgt

SEQ ID NO: 3319 - DNA, 16 bp, Artificial Sequence
  Synthetic construct
gcagttagtagcttgt

SEQ ID NO: 3320 - DNA, 16 bp, Artificial Sequence
  Synthetic construct
gcagttagtagcttgt

SEQ ID NO: 3321 - DNA, 16 bp, Artificial Sequence
  Synthetic construct
gcagttagtatgaaac

SEQ ID NO: 3322 - DNA, 16 bp, Artificial Sequence
  Synthetic construct
gcagttagtatgaaac

SEQ ID NO: 3323 - DNA, 16 bp, Artificial Sequence
  Synthetic construct
gcatacaagcaggcta

SEQ ID NO: 3324 - DNA, 16 bp, Artificial Sequence
  Synthetic construct
gcatacaagcaggcta

SEQ ID NO: 3325 - DNA, 16 bp, Artificial Sequence
  Synthetic construct
gcatacaaggtgcaac

SEQ ID NO: 3326 - DNA, 16 bp, Artificial Sequence
  Synthetic construct
gcatacaaggtgcaac

SEQ ID NO: 3327 - DNA, 16 bp, Artificial Sequence
  Synthetic construct
gcatacaaggtgcaca

SEQ ID NO: 3328 - DNA, 16 bp, Artificial Sequence
  Synthetic construct
gcatacaaggtgcaca

SEQ ID NO: 3329 - DNA, 16 bp, Artificial Sequence
  Synthetic construct
gcatacaagttaccca

SEQ ID NO: 3330 - DNA, 16 bp, Artificial Sequence
  Synthetic construct
gcatacaagttaccca

SEQ ID NO: 3331 - DNA, 16 bp, Artificial Sequence
  Synthetic construct
gcatacaagtttagga

SEQ ID NO: 3332 - DNA, 16 bp, Artificial Sequence
  Synthetic construct
gcatacaagtttagga

SEQ ID NO: 3333 - DNA, 16 bp, Artificial Sequence
  Synthetic construct
gcatacacaaggttct

SEQ ID NO: 3334 - DNA, 16 bp, Artificial Sequence
  Synthetic construct
gcatacacaaggttct

SEQ ID NO: 3335 - DNA, 16 bp, Artificial Sequence
  Synthetic construct
gcatgatagccagaac

SEQ ID NO: 3336 - DNA, 16 bp, Artificial Sequence
  Synthetic construct
gcatgatagccagaac

SEQ ID NO: 3337 - DNA, 16 bp, Artificial Sequence
  Synthetic construct
gcatgatcaagacacg

SEQ ID NO: 3338 - DNA, 16 bp, Artificial Sequence
  Synthetic construct
gcatgatcaagacacg

SEQ ID NO: 3339 - DNA, 16 bp, Artificial Sequence
  Synthetic construct
gcatgatcacagcgtc

SEQ ID NO: 3340 - DNA, 16 bp, Artificial Sequence
  Synthetic construct
gcatgatcacagcgtc

SEQ ID NO: 3341 - DNA, 16 bp, Artificial Sequence
  Synthetic construct
gcatgattcagttgac

SEQ ID NO: 3342 - DNA, 16 bp, Artificial Sequence
  Synthetic construct
gcatgattcagttgac

SEQ ID NO: 3343 - DNA, 16 bp, Artificial Sequence
  Synthetic construct
gcatgattccagaagg

SEQ ID NO: 3344 - DNA, 16 bp, Artificial Sequence
  Synthetic construct
gcatgattccagaagg

SEQ ID NO: 3345 - DNA, 16 bp, Artificial Sequence
  Synthetic construct
gcatgcgagcgtgaac

SEQ ID NO: 3346 - DNA, 16 bp, Artificial Sequence
  Synthetic construct
gcatgcgagcgtgaac

SEQ ID NO: 3347 - DNA, 16 bp, Artificial Sequence
  Synthetic construct
gcatgcgagctgcaag

SEQ ID NO: 3348 - DNA, 16 bp, Artificial Sequence
  Synthetic construct
gcatgcgagctgcaag

SEQ ID NO: 3349 - DNA, 16 bp, Artificial Sequence
  Synthetic construct
gcatgcgagggctctc

SEQ ID NO: 3350 - DNA, 16 bp, Artificial Sequence
  Synthetic construct
gcatgcgagggctctc

SEQ ID NO: 3351 - DNA, 16 bp, Artificial Sequence
  Synthetic construct
gcatgcggtacttgac

SEQ ID NO: 3352 - DNA, 16 bp, Artificial Sequence
  Synthetic construct
gcatgcggtacttgac

SEQ ID NO: 3353 - DNA, 16 bp, Artificial Sequence
  Synthetic construct
gcatgcgtcgaactgt

SEQ ID NO: 3354 - DNA, 16 bp, Artificial Sequence
  Synthetic construct
gcatgcgtcgaactgt

SEQ ID NO: 3355 - DNA, 16 bp, Artificial Sequence
  Synthetic construct
gcatgcgtcgttacag

SEQ ID NO: 3356 - DNA, 16 bp, Artificial Sequence
  Synthetic construct
gcatgcgtcgttacag

SEQ ID NO: 3357 - DNA, 16 bp, Artificial Sequence
  Synthetic construct
gcatgtaagacctagg

SEQ ID NO: 3358 - DNA, 16 bp, Artificial Sequence
  Synthetic construct
gcatgtaagacctagg

SEQ ID NO: 3359 - DNA, 16 bp, Artificial Sequence
  Synthetic construct
gcatgtaaggacacca

SEQ ID NO: 3360 - DNA, 16 bp, Artificial Sequence
  Synthetic construct
gcatgtaaggacacca

SEQ ID NO: 3361 - DNA, 16 bp, Artificial Sequence
  Synthetic construct
gcatgtacatccaaca

SEQ ID NO: 3362 - DNA, 16 bp, Artificial Sequence
  Synthetic construct
gcatgtacatccaaca

SEQ ID NO: 3363 - DNA, 16 bp, Artificial Sequence
  Synthetic construct
gcatgtagttaagtag

SEQ ID NO: 3364 - DNA, 16 bp, Artificial Sequence
  Synthetic construct
gcatgtagttaagtag

SEQ ID NO: 3365 - DNA, 16 bp, Artificial Sequence
  Synthetic construct
gcatgtatccgcagtg

SEQ ID NO: 3366 - DNA, 16 bp, Artificial Sequence
  Synthetic construct
gcatgtatccgcagtg

SEQ ID NO: 3367 - DNA, 16 bp, Artificial Sequence
  Synthetic construct
gcatgtatcgtacggc

SEQ ID NO: 3368 - DNA, 16 bp, Artificial Sequence
  Synthetic construct
gcatgtatcgtacggc

SEQ ID NO: 3369 - DNA, 16 bp, Artificial Sequence
  Synthetic construct
gccaaatagggtttct

SEQ ID NO: 3370 - DNA, 16 bp, Artificial Sequence
  Synthetic construct
gccaaatagggtttct

SEQ ID NO: 3371 - DNA, 16 bp, Artificial Sequence
  Synthetic construct
gccaaataggtgcaca

SEQ ID NO: 3372 - DNA, 16 bp, Artificial Sequence
  Synthetic construct
gccaaataggtgcaca

SEQ ID NO: 3373 - DNA, 16 bp, Artificial Sequence
  Synthetic construct
gccaaatgtacgaccc

SEQ ID NO: 3374 - DNA, 16 bp, Artificial Sequence
  Synthetic construct
gccaaatgtacgaccc

SEQ ID NO: 3375 - DNA, 16 bp, Artificial Sequence
  Synthetic construct
gccaaatgttgaactc

SEQ ID NO: 3376 - DNA, 16 bp, Artificial Sequence
  Synthetic construct
gccaaatgttgaactc

SEQ ID NO: 3377 - DNA, 16 bp, Artificial Sequence
  Synthetic construct
gccaaatgttggtaaa

SEQ ID NO: 3378 - DNA, 16 bp, Artificial Sequence
  Synthetic construct
gccaaatgttggtaaa

SEQ ID NO: 3379 - DNA, 16 bp, Artificial Sequence
  Synthetic construct
gccaaattccgtagta

SEQ ID NO: 3380 - DNA, 16 bp, Artificial Sequence
  Synthetic construct
gccaaattccgtagta

SEQ ID NO: 3381 - DNA, 16 bp, Artificial Sequence
  Synthetic construct
gcctctaagagcctag

SEQ ID NO: 3382 - DNA, 16 bp, Artificial Sequence
  Synthetic construct
gcctctaagagcctag

SEQ ID NO: 3383 - DNA, 16 bp, Artificial Sequence
  Synthetic construct
gcctctaagaggttat

SEQ ID NO: 3384 - DNA, 16 bp, Artificial Sequence
  Synthetic construct
gcctctaagaggttat

SEQ ID NO: 3385 - DNA, 16 bp, Artificial Sequence
  Synthetic construct
gcctctacagatgagc

SEQ ID NO: 3386 - DNA, 16 bp, Artificial Sequence
  Synthetic construct
gcctctacagatgagc

SEQ ID NO: 3387 - DNA, 16 bp, Artificial Sequence
  Synthetic construct
gcctctagtctaaaga

SEQ ID NO: 3388 - DNA, 16 bp, Artificial Sequence
  Synthetic construct
gcctctagtctaaaga

SEQ ID NO: 3389 - DNA, 16 bp, Artificial Sequence
  Synthetic construct
gcctctatctggcgac

SEQ ID NO: 3390 - DNA, 16 bp, Artificial Sequence
  Synthetic construct
gcctctatctggcgac

SEQ ID NO: 3391 - DNA, 16 bp, Artificial Sequence
  Synthetic construct
gcgaccaagccctaat

SEQ ID NO: 3392 - DNA, 16 bp, Artificial Sequence
  Synthetic construct
gcgaccaagccctaat

SEQ ID NO: 3393 - DNA, 16 bp, Artificial Sequence
  Synthetic construct
gcgaccaagctgttca

SEQ ID NO: 3394 - DNA, 16 bp, Artificial Sequence
  Synthetic construct
gcgaccaagctgttca

SEQ ID NO: 3395 - DNA, 16 bp, Artificial Sequence
  Synthetic construct
gcgaccagttcgcgac

SEQ ID NO: 3396 - DNA, 16 bp, Artificial Sequence
  Synthetic construct
gcgaccagttcgcgac

SEQ ID NO: 3397 - DNA, 16 bp, Artificial Sequence
  Synthetic construct
gcgaccatcattcact

SEQ ID NO: 3398 - DNA, 16 bp, Artificial Sequence
  Synthetic construct
gcgaccatcattcact

SEQ ID NO: 3399 - DNA, 16 bp, Artificial Sequence
  Synthetic construct
gcgaccatcccaggtg

SEQ ID NO: 3400 - DNA, 16 bp, Artificial Sequence
  Synthetic construct
gcgaccatcccaggtg

SEQ ID NO: 3401 - DNA, 16 bp, Artificial Sequence
  Synthetic construct
gcgagaaagtaggtgc

SEQ ID NO: 3402 - DNA, 16 bp, Artificial Sequence
  Synthetic construct
gcgagaaagtaggtgc

SEQ ID NO: 3403 - DNA, 16 bp, Artificial Sequence
  Synthetic construct
gcgagaagtccctact

SEQ ID NO: 3404 - DNA, 16 bp, Artificial Sequence
  Synthetic construct
gcgagaagtccctact

SEQ ID NO: 3405 - DNA, 16 bp, Artificial Sequence
  Synthetic construct
gcgagaatcgtttgcc

SEQ ID NO: 3406 - DNA, 16 bp, Artificial Sequence
  Synthetic construct
gcgagaatcgtttgcc

SEQ ID NO: 3407 - DNA, 16 bp, Artificial Sequence
  Synthetic construct
gcgagaatcttctggc

SEQ ID NO: 3408 - DNA, 16 bp, Artificial Sequence
  Synthetic construct
gcgagaatcttctggc

SEQ ID NO: 3409 - DNA, 16 bp, Artificial Sequence
  Synthetic construct
gcgcaacagaagattc

SEQ ID NO: 3410 - DNA, 16 bp, Artificial Sequence
  Synthetic construct
gcgcaacagaagattc

SEQ ID NO: 3411 - DNA, 16 bp, Artificial Sequence
  Synthetic construct
gcgcaaccacataacc

SEQ ID NO: 3412 - DNA, 16 bp, Artificial Sequence
  Synthetic construct
gcgcaaccacataacc

SEQ ID NO: 3413 - DNA, 16 bp, Artificial Sequence
  Synthetic construct
gcgcaacgtcagataa

SEQ ID NO: 3414 - DNA, 16 bp, Artificial Sequence
  Synthetic construct
gcgcaacgtcagataa

SEQ ID NO: 3415 - DNA, 16 bp, Artificial Sequence
  Synthetic construct
gcgcaacgtcccgaca

SEQ ID NO: 3416 - DNA, 16 bp, Artificial Sequence
  Synthetic construct
gcgcaacgtcccgaca

SEQ ID NO: 3417 - DNA, 16 bp, Artificial Sequence
  Synthetic construct
gcgcaacgtcggatcc

SEQ ID NO: 3418 - DNA, 16 bp, Artificial Sequence
  Synthetic construct
gcgcaacgtcggatcc

SEQ ID NO: 3419 - DNA, 16 bp, Artificial Sequence
  Synthetic construct
gcgcagtagaggtacc

SEQ ID NO: 3420 - DNA, 16 bp, Artificial Sequence
  Synthetic construct
gcgcagtagaggtacc

SEQ ID NO: 3421 - DNA, 16 bp, Artificial Sequence
  Synthetic construct
gcgcagtcacaggttt

SEQ ID NO: 3422 - DNA, 16 bp, Artificial Sequence
  Synthetic construct
gcgcagtcacaggttt

SEQ ID NO: 3423 - DNA, 16 bp, Artificial Sequence
  Synthetic construct
gcgcagtcagatggca

SEQ ID NO: 3424 - DNA, 16 bp, Artificial Sequence
  Synthetic construct
gcgcagtcagatggca

SEQ ID NO: 3425 - DNA, 16 bp, Artificial Sequence
  Synthetic construct
gcgcagttcaaacaag

SEQ ID NO: 3426 - DNA, 16 bp, Artificial Sequence
  Synthetic construct
gcgcagttcaaacaag

SEQ ID NO: 3427 - DNA, 16 bp, Artificial Sequence
  Synthetic construct
gcgccaaagactagat

SEQ ID NO: 3428 - DNA, 16 bp, Artificial Sequence
  Synthetic construct
gcgccaaagactagat

SEQ ID NO: 3429 - DNA, 16 bp, Artificial Sequence
  Synthetic construct
gcgccaaagtgtctca

SEQ ID NO: 3430 - DNA, 16 bp, Artificial Sequence
  Synthetic construct
gcgccaaagtgtctca

SEQ ID NO: 3431 - DNA, 16 bp, Artificial Sequence
  Synthetic construct
gcgccaagtaaatgac

SEQ ID NO: 3432 - DNA, 16 bp, Artificial Sequence
  Synthetic construct
gcgccaagtaaatgac

SEQ ID NO: 3433 - DNA, 16 bp, Artificial Sequence
  Synthetic construct
gcgccaagtcatccct

SEQ ID NO: 3434 - DNA, 16 bp, Artificial Sequence
  Synthetic construct
gcgccaagtcatccct

SEQ ID NO: 3435 - DNA, 16 bp, Artificial Sequence
  Synthetic construct
gcgccaatcagctcgg

SEQ ID NO: 3436 - DNA, 16 bp, Artificial Sequence
  Synthetic construct
gcgccaatcagctcgg

SEQ ID NO: 3437 - DNA, 16 bp, Artificial Sequence
  Synthetic construct
gcgccaatcggtctaa

SEQ ID NO: 3438 - DNA, 16 bp, Artificial Sequence
  Synthetic construct
gcgccaatcggtctaa

SEQ ID NO: 3439 - DNA, 16 bp, Artificial Sequence
  Synthetic construct
gcgcgatagcccgaaa

SEQ ID NO: 3440 - DNA, 16 bp, Artificial Sequence
  Synthetic construct
gcgcgatagcccgaaa

SEQ ID NO: 3441 - DNA, 16 bp, Artificial Sequence
  Synthetic construct
gcgcgatagggcttga

SEQ ID NO: 3442 - DNA, 16 bp, Artificial Sequence
  Synthetic construct
gcgcgatagggcttga

SEQ ID NO: 3443 - DNA, 16 bp, Artificial Sequence
  Synthetic construct
gcgcgatcaaaggtgc

SEQ ID NO: 3444 - DNA, 16 bp, Artificial Sequence
  Synthetic construct
gcgcgatcaaaggtgc

SEQ ID NO: 3445 - DNA, 16 bp, Artificial Sequence
  Synthetic construct
gcgcgatgtcgactgc

SEQ ID NO: 3446 - DNA, 16 bp, Artificial Sequence
  Synthetic construct
gcgcgatgtcgactgc

SEQ ID NO: 3447 - DNA, 16 bp, Artificial Sequence
  Synthetic construct
gcgcgattccctaatt

SEQ ID NO: 3448 - DNA, 16 bp, Artificial Sequence
  Synthetic construct
gcgcgattccctaatt

SEQ ID NO: 3449 - DNA, 16 bp, Artificial Sequence
  Synthetic construct
gcgcgattcctctagc

SEQ ID NO: 3450 - DNA, 16 bp, Artificial Sequence
  Synthetic construct
gcgcgattcctctagc

SEQ ID NO: 3451 - DNA, 16 bp, Artificial Sequence
  Synthetic construct
gcgggttagagtaagg

SEQ ID NO: 3452 - DNA, 16 bp, Artificial Sequence
  Synthetic construct
gcgggttagagtaagg

SEQ ID NO: 3453 - DNA, 16 bp, Artificial Sequence
  Synthetic construct
gcgggttgtagagctg

SEQ ID NO: 3454 - DNA, 16 bp, Artificial Sequence
  Synthetic construct
gcgggttgtagagctg

SEQ ID NO: 3455 - DNA, 16 bp, Artificial Sequence
  Synthetic construct
gcgggtttctccctga

SEQ ID NO: 3456 - DNA, 16 bp, Artificial Sequence
  Synthetic construct
gcgggtttctccctga

SEQ ID NO: 3457 - DNA, 16 bp, Artificial Sequence
  Synthetic construct
gcgggtttctcgcttg

SEQ ID NO: 3458 - DNA, 16 bp, Artificial Sequence
  Synthetic construct
gcgggtttctcgcttg

SEQ ID NO: 3459 - DNA, 16 bp, Artificial Sequence
  Synthetic construct
gcgggtttctgctgct

SEQ ID NO: 3460 - DNA, 16 bp, Artificial Sequence
  Synthetic construct
gcgggtttctgctgct

SEQ ID NO: 3461 - DNA, 16 bp, Artificial Sequence
  Synthetic construct
gctcctaagaccggat

SEQ ID NO: 3462 - DNA, 16 bp, Artificial Sequence
  Synthetic construct
gctcctaagaccggat

SEQ ID NO: 3463 - DNA, 16 bp, Artificial Sequence
  Synthetic construct
gctcctaagtggagaa

SEQ ID NO: 3464 - DNA, 16 bp, Artificial Sequence
  Synthetic construct
gctcctaagtggagaa

SEQ ID NO: 3465 - DNA, 16 bp, Artificial Sequence
  Synthetic construct
gctcctagtgcgaaac

SEQ ID NO: 3466 - DNA, 16 bp, Artificial Sequence
  Synthetic construct
gctcctagtgcgaaac

SEQ ID NO: 3467 - DNA, 16 bp, Artificial Sequence
  Synthetic construct
gctcctagtggcaaac

SEQ ID NO: 3468 - DNA, 16 bp, Artificial Sequence
  Synthetic construct
gctcctagtggcaaac

SEQ ID NO: 3469 - DNA, 16 bp, Artificial Sequence
  Synthetic construct
gctcctagtggtccgt

SEQ ID NO: 3470 - DNA, 16 bp, Artificial Sequence
  Synthetic construct
gctcctagtggtccgt

SEQ ID NO: 3471 - DNA, 16 bp, Artificial Sequence
  Synthetic construct
gctcctagttacgact

SEQ ID NO: 3472 - DNA, 16 bp, Artificial Sequence
  Synthetic construct
gctcctagttacgact

SEQ ID NO: 3473 - DNA, 16 bp, Artificial Sequence
  Synthetic construct
gctctgtcattggcgc

SEQ ID NO: 3474 - DNA, 16 bp, Artificial Sequence
  Synthetic construct
gctctgtcattggcgc

SEQ ID NO: 3475 - DNA, 16 bp, Artificial Sequence
  Synthetic construct
gctctgtgtggctcca

SEQ ID NO: 3476 - DNA, 16 bp, Artificial Sequence
  Synthetic construct
gctctgtgtggctcca

SEQ ID NO: 3477 - DNA, 16 bp, Artificial Sequence
  Synthetic construct
gctctgtgttccgtct

SEQ ID NO: 3478 - DNA, 16 bp, Artificial Sequence
  Synthetic construct
gctctgtgttccgtct

SEQ ID NO: 3479 - DNA, 16 bp, Artificial Sequence
  Synthetic construct
gctgcagagcaaatca

SEQ ID NO: 3480 - DNA, 16 bp, Artificial Sequence
  Synthetic construct
gctgcagagcaaatca

SEQ ID NO: 3481 - DNA, 16 bp, Artificial Sequence
  Synthetic construct
gctgcagagttgagat

SEQ ID NO: 3482 - DNA, 16 bp, Artificial Sequence
  Synthetic construct
gctgcagagttgagat

SEQ ID NO: 3483 - DNA, 16 bp, Artificial Sequence
  Synthetic construct
gctgcagcacggtaag

SEQ ID NO: 3484 - DNA, 16 bp, Artificial Sequence
  Synthetic construct
gctgcagcacggtaag

SEQ ID NO: 3485 - DNA, 16 bp, Artificial Sequence
  Synthetic construct
gctgcaggtaaggatt

SEQ ID NO: 3486 - DNA, 16 bp, Artificial Sequence
  Synthetic construct
gctgcaggtaaggatt

SEQ ID NO: 3487 - DNA, 16 bp, Artificial Sequence
  Synthetic construct
gctgcaggtccatcct

SEQ ID NO: 3488 - DNA, 16 bp, Artificial Sequence
  Synthetic construct
gctgcaggtccatcct

SEQ ID NO: 3489 - DNA, 16 bp, Artificial Sequence
  Synthetic construct
gctgcaggttctcatt

SEQ ID NO: 3490 - DNA, 16 bp, Artificial Sequence
  Synthetic construct
gctgcaggttctcatt

SEQ ID NO: 3491 - DNA, 16 bp, Artificial Sequence
  Synthetic construct
gctgcagtcaaggctt

SEQ ID NO: 3492 - DNA, 16 bp, Artificial Sequence
  Synthetic construct
gctgcagtcaaggctt

SEQ ID NO: 3493 - DNA, 16 bp, Artificial Sequence
  Synthetic construct
gctgcagtcttaccgc

SEQ ID NO: 3494 - DNA, 16 bp, Artificial Sequence
  Synthetic construct
gctgcagtcttaccgc

SEQ ID NO: 3495 - DNA, 16 bp, Artificial Sequence
  Synthetic construct
gctgcgaagaactcgg

SEQ ID NO: 3496 - DNA, 16 bp, Artificial Sequence
  Synthetic construct
gctgcgaagaactcgg

SEQ ID NO: 3497 - DNA, 16 bp, Artificial Sequence
  Synthetic construct
gctgcgaaggtgcaca

SEQ ID NO: 3498 - DNA, 16 bp, Artificial Sequence
  Synthetic construct
gctgcgaaggtgcaca

SEQ ID NO: 3499 - DNA, 16 bp, Artificial Sequence
  Synthetic construct
gctgcgacatactctt

SEQ ID NO: 3500 - DNA, 16 bp, Artificial Sequence
  Synthetic construct
gctgcgacatactctt

SEQ ID NO: 3501 - DNA, 16 bp, Artificial Sequence
  Synthetic construct
gctgcgagtgcactta

SEQ ID NO: 3502 - DNA, 16 bp, Artificial Sequence
  Synthetic construct
gctgcgagtgcactta

SEQ ID NO: 3503 - DNA, 16 bp, Artificial Sequence
  Synthetic construct
gctgcgagttgcctct

SEQ ID NO: 3504 - DNA, 16 bp, Artificial Sequence
  Synthetic construct
gctgcgagttgcctct

SEQ ID NO: 3505 - DNA, 16 bp, Artificial Sequence
  Synthetic construct
gctgcgatctcacatt

SEQ ID NO: 3506 - DNA, 16 bp, Artificial Sequence
  Synthetic construct
gctgcgatctcacatt

SEQ ID NO: 3507 - DNA, 16 bp, Artificial Sequence
  Synthetic construct
gctgcttagagggata

SEQ ID NO: 3508 - DNA, 16 bp, Artificial Sequence
  Synthetic construct
gctgcttagagggata

SEQ ID NO: 3509 - DNA, 16 bp, Artificial Sequence
  Synthetic construct
gctgcttagcgaaggg

SEQ ID NO: 3510 - DNA, 16 bp, Artificial Sequence
  Synthetic construct
gctgcttagcgaaggg

SEQ ID NO: 3511 - DNA, 16 bp, Artificial Sequence
  Synthetic construct
gctgcttcaaggactg

SEQ ID NO: 3512 - DNA, 16 bp, Artificial Sequence
  Synthetic construct
gctgcttcaaggactg

SEQ ID NO: 3513 - DNA, 16 bp, Artificial Sequence
  Synthetic construct
gctgcttgtagcgatg

SEQ ID NO: 3514 - DNA, 16 bp, Artificial Sequence
  Synthetic construct
gctgcttgtagcgatg

SEQ ID NO: 3515 - DNA, 16 bp, Artificial Sequence
  Synthetic construct
gctgcttgtatatccg

SEQ ID NO: 3516 - DNA, 16 bp, Artificial Sequence
  Synthetic construct
gctgcttgtatatccg

SEQ ID NO: 3517 - DNA, 16 bp, Artificial Sequence
  Synthetic construct
gctgcttgtcaagcga

SEQ ID NO: 3518 - DNA, 16 bp, Artificial Sequence
  Synthetic construct
gctgcttgtcaagcga

SEQ ID NO: 3519 - DNA, 16 bp, Artificial Sequence
  Synthetic construct
gctgcttgttatgtgc

SEQ ID NO: 3520 - DNA, 16 bp, Artificial Sequence
  Synthetic construct
gctgcttgttatgtgc

SEQ ID NO: 3521 - DNA, 16 bp, Artificial Sequence
  Synthetic construct
gctgctttcaacacgt

SEQ ID NO: 3522 - DNA, 16 bp, Artificial Sequence
  Synthetic construct
gctgctttcaacacgt

SEQ ID NO: 3523 - DNA, 16 bp, Artificial Sequence
  Synthetic construct
gctgctttcttgagac

SEQ ID NO: 3524 - DNA, 16 bp, Artificial Sequence
  Synthetic construct
gctgctttcttgagac

SEQ ID NO: 3525 - DNA, 16 bp, Artificial Sequence
  Synthetic construct
gctgggtagttatcgc

SEQ ID NO: 3526 - DNA, 16 bp, Artificial Sequence
  Synthetic construct
gctgggtagttatcgc

SEQ ID NO: 3527 - DNA, 16 bp, Artificial Sequence
  Synthetic construct
gctgggtgtccaagtt

SEQ ID NO: 3528 - DNA, 16 bp, Artificial Sequence
  Synthetic construct
gctgggtgtccaagtt

SEQ ID NO: 3529 - DNA, 16 bp, Artificial Sequence
  Synthetic construct
gctgggtgttaccgat

SEQ ID NO: 3530 - DNA, 16 bp, Artificial Sequence
  Synthetic construct
gctgggtgttaccgat

SEQ ID NO: 3531 - DNA, 16 bp, Artificial Sequence
  Synthetic construct
gctgggttcatcattc

SEQ ID NO: 3532 - DNA, 16 bp, Artificial Sequence
  Synthetic construct
gctgggttcatcattc

SEQ ID NO: 3533 - DNA, 16 bp, Artificial Sequence
  Synthetic construct
gctgggttcctcaatt

SEQ ID NO: 3534 - DNA, 16 bp, Artificial Sequence
  Synthetic construct
gctgggttcctcaatt

SEQ ID NO: 3535 - DNA, 16 bp, Artificial Sequence
  Synthetic construct
gcttccaaggactggt

SEQ ID NO: 3536 - DNA, 16 bp, Artificial Sequence
  Synthetic construct
gcttccaaggactggt

SEQ ID NO: 3537 - DNA, 16 bp, Artificial Sequence
  Synthetic construct
gcttccaagtgcaagc

SEQ ID NO: 3538 - DNA, 16 bp, Artificial Sequence
  Synthetic construct
gcttccaagtgcaagc

SEQ ID NO: 3539 - DNA, 16 bp, Artificial Sequence
  Synthetic construct
gcttccacagctattg

SEQ ID NO: 3540 - DNA, 16 bp, Artificial Sequence
  Synthetic construct
gcttccacagctattg

SEQ ID NO: 3541 - DNA, 16 bp, Artificial Sequence
  Synthetic construct
gcttccagttgtggcc

SEQ ID NO: 3542 - DNA, 16 bp, Artificial Sequence
  Synthetic construct
gcttccagttgtggcc

SEQ ID NO: 3543 - DNA, 16 bp, Artificial Sequence
  Synthetic construct
gcttccatcctgccat

SEQ ID NO: 3544 - DNA, 16 bp, Artificial Sequence
  Synthetic construct
gcttccatcctgccat

SEQ ID NO: 3545 - DNA, 16 bp, Artificial Sequence
  Synthetic construct
gcttgaaagactgggt

SEQ ID NO: 3546 - DNA, 16 bp, Artificial Sequence
  Synthetic construct
gcttgaaagactgggt

SEQ ID NO: 3547 - DNA, 16 bp, Artificial Sequence
  Synthetic construct
gcttgaaagccttgat

SEQ ID NO: 3548 - DNA, 16 bp, Artificial Sequence
  Synthetic construct
gcttgaaagccttgat

SEQ ID NO: 3549 - DNA, 16 bp, Artificial Sequence
  Synthetic construct
gcttgaaagcgttgcc

SEQ ID NO: 3550 - DNA, 16 bp, Artificial Sequence
  Synthetic construct
gcttgaaagcgttgcc

SEQ ID NO: 3551 - DNA, 16 bp, Artificial Sequence
  Synthetic construct
gcttgaagtttggcgc

SEQ ID NO: 3552 - DNA, 16 bp, Artificial Sequence
  Synthetic construct
gcttgaagtttggcgc

SEQ ID NO: 3553 - DNA, 16 bp, Artificial Sequence
  Synthetic construct
gcttgaatcaaacaag

SEQ ID NO: 3554 - DNA, 16 bp, Artificial Sequence
  Synthetic construct
gcttgaatcaaacaag

SEQ ID NO: 3555 - DNA, 16 bp, Artificial Sequence
  Synthetic construct
gcttgaatcccacttg

SEQ ID NO: 3556 - DNA, 16 bp, Artificial Sequence
  Synthetic construct
gcttgaatcccacttg

SEQ ID NO: 3557 - DNA, 16 bp, Artificial Sequence
  Synthetic construct
ggaaagcagtaggtgc

SEQ ID NO: 3558 - DNA, 16 bp, Artificial Sequence
  Synthetic construct
ggaaagcagtaggtgc

SEQ ID NO: 3559 - DNA, 16 bp, Artificial Sequence
  Synthetic construct
ggaaagccacatgact

SEQ ID NO: 3560 - DNA, 16 bp, Artificial Sequence
  Synthetic construct
ggaaagccacatgact

SEQ ID NO: 3561 - DNA, 16 bp, Artificial Sequence
  Synthetic construct
ggaaagcgttagatga

SEQ ID NO: 3562 - DNA, 16 bp, Artificial Sequence
  Synthetic construct
ggaaagcgttagatga

SEQ ID NO: 3563 - DNA, 16 bp, Artificial Sequence
  Synthetic construct
ggaacttagtgttaga

SEQ ID NO: 3564 - DNA, 16 bp, Artificial Sequence
  Synthetic construct
ggaacttagtgttaga

SEQ ID NO: 3565 - DNA, 16 bp, Artificial Sequence
  Synthetic construct
ggaacttcattcctcg

SEQ ID NO: 3566 - DNA, 16 bp, Artificial Sequence
  Synthetic construct
ggaacttcattcctcg

SEQ ID NO: 3567 - DNA, 16 bp, Artificial Sequence
  Synthetic construct
ggaactttcacgatgt

SEQ ID NO: 3568 - DNA, 16 bp, Artificial Sequence
  Synthetic construct
ggaactttcacgatgt

SEQ ID NO: 3569 - DNA, 16 bp, Artificial Sequence
  Synthetic construct
ggaactttcgttacag

SEQ ID NO: 3570 - DNA, 16 bp, Artificial Sequence
  Synthetic construct
ggaactttcgttacag

SEQ ID NO: 3571 - DNA, 16 bp, Artificial Sequence
  Synthetic construct
ggaataaagcccgaaa

SEQ ID NO: 3572 - DNA, 16 bp, Artificial Sequence
  Synthetic construct
ggaataaagcccgaaa

SEQ ID NO: 3573 - DNA, 16 bp, Artificial Sequence
  Synthetic construct
ggaataagtaccgaga

SEQ ID NO: 3574 - DNA, 16 bp, Artificial Sequence
  Synthetic construct
ggaataagtaccgaga

SEQ ID NO: 3575 - DNA, 16 bp, Artificial Sequence
  Synthetic construct
ggaataagtcccgaca

SEQ ID NO: 3576 - DNA, 16 bp, Artificial Sequence
  Synthetic construct
ggaataagtcccgaca

SEQ ID NO: 3577 - DNA, 16 bp, Artificial Sequence
  Synthetic construct
ggacaagagaggtaga

SEQ ID NO: 3578 - DNA, 16 bp, Artificial Sequence
  Synthetic construct
ggacaagagaggtaga

SEQ ID NO: 3579 - DNA, 16 bp, Artificial Sequence
  Synthetic construct
ggacaagagcagcgta

SEQ ID NO: 3580 - DNA, 16 bp, Artificial Sequence
  Synthetic construct
ggacaagagcagcgta

SEQ ID NO: 3581 - DNA, 16 bp, Artificial Sequence
  Synthetic construct
ggacaagagctaccta

SEQ ID NO: 3582 - DNA, 16 bp, Artificial Sequence
  Synthetic construct
ggacaagagctaccta

SEQ ID NO: 3583 - DNA, 16 bp, Artificial Sequence
  Synthetic construct
ggacaagtcgtagatc

SEQ ID NO: 3584 - DNA, 16 bp, Artificial Sequence
  Synthetic construct
ggacaagtcgtagatc

SEQ ID NO: 3585 - DNA, 16 bp, Artificial Sequence
  Synthetic construct
ggacagaagtaagtac

SEQ ID NO: 3586 - DNA, 16 bp, Artificial Sequence
  Synthetic construct
ggacagaagtaagtac

SEQ ID NO: 3587 - DNA, 16 bp, Artificial Sequence
  Synthetic construct
ggacagatcgcaggct

SEQ ID NO: 3588 - DNA, 16 bp, Artificial Sequence
  Synthetic construct
ggacagatcgcaggct

SEQ ID NO: 3589 - DNA, 16 bp, Artificial Sequence
  Synthetic construct
ggacattagacaagcc

SEQ ID NO: 3590 - DNA, 16 bp, Artificial Sequence
  Synthetic construct
ggacattagacaagcc

SEQ ID NO: 3591 - DNA, 16 bp, Artificial Sequence
  Synthetic construct
ggacattagtgggttg

SEQ ID NO: 3592 - DNA, 16 bp, Artificial Sequence
  Synthetic construct
ggacattagtgggttg

SEQ ID NO: 3593 - DNA, 16 bp, Artificial Sequence
  Synthetic construct
ggacatttcacatacg

SEQ ID NO: 3594 - DNA, 16 bp, Artificial Sequence
  Synthetic construct
ggacatttcacatacg

SEQ ID NO: 3595 - DNA, 16 bp, Artificial Sequence
  Synthetic construct
ggacatttcgcggatc

SEQ ID NO: 3596 - DNA, 16 bp, Artificial Sequence
  Synthetic construct
ggacatttcgcggatc

SEQ ID NO: 3597 - DNA, 16 bp, Artificial Sequence
  Synthetic construct
ggacgtcgttgacgtt

SEQ ID NO: 3598 - DNA, 16 bp, Artificial Sequence
  Synthetic construct
ggacgtcgttgacgtt

SEQ ID NO: 3599 - DNA, 16 bp, Artificial Sequence
  Synthetic construct
ggacgtctcacaatgc

SEQ ID NO: 3600 - DNA, 16 bp, Artificial Sequence
  Synthetic construct
ggacgtctcacaatgc

SEQ ID NO: 3601 - DNA, 16 bp, Artificial Sequence
  Synthetic construct
ggacgtctcagcgacc

SEQ ID NO: 3602 - DNA, 16 bp, Artificial Sequence
  Synthetic construct
ggacgtctcagcgacc

SEQ ID NO: 3603 - DNA, 16 bp, Artificial Sequence
  Synthetic construct
ggagcaaagcgatccc

SEQ ID NO: 3604 - DNA, 16 bp, Artificial Sequence
  Synthetic construct
ggagcaaagcgatccc

SEQ ID NO: 3605 - DNA, 16 bp, Artificial Sequence
  Synthetic construct
ggagcaacagatggca

SEQ ID NO: 3606 - DNA, 16 bp, Artificial Sequence
  Synthetic construct
ggagcaacagatggca

SEQ ID NO: 3607 - DNA, 16 bp, Artificial Sequence
  Synthetic construct
ggagcaacattatctc

SEQ ID NO: 3608 - DNA, 16 bp, Artificial Sequence
  Synthetic construct
ggagcaacattatctc

SEQ ID NO: 3609 - DNA, 16 bp, Artificial Sequence
  Synthetic construct
ggagcaagtctcaaca

SEQ ID NO: 3610 - DNA, 16 bp, Artificial Sequence
  Synthetic construct
ggagcaagtctcaaca

SEQ ID NO: 3611 - DNA, 16 bp, Artificial Sequence
  Synthetic construct
ggagcaagtctgcggt

SEQ ID NO: 3612 - DNA, 16 bp, Artificial Sequence
  Synthetic construct
ggagcaagtctgcggt

SEQ ID NO: 3613 - DNA, 16 bp, Artificial Sequence
  Synthetic construct
ggagcaagtgacaaat

SEQ ID NO: 3614 - DNA, 16 bp, Artificial Sequence
  Synthetic construct
ggagcaagtgacaaat

SEQ ID NO: 3615 - DNA, 16 bp, Artificial Sequence
  Synthetic construct
ggagcaagtgggtcaa

SEQ ID NO: 3616 - DNA, 16 bp, Artificial Sequence
  Synthetic construct
ggagcaagtgggtcaa

SEQ ID NO: 3617 - DNA, 16 bp, Artificial Sequence
  Synthetic construct
ggagcaatcacttact

SEQ ID NO: 3618 - DNA, 16 bp, Artificial Sequence
  Synthetic construct
ggagcaatcacttact

SEQ ID NO: 3619 - DNA, 16 bp, Artificial Sequence
  Synthetic construct
ggatgttaggtgctag

SEQ ID NO: 3620 - DNA, 16 bp, Artificial Sequence
  Synthetic construct
ggatgttaggtgctag

SEQ ID NO: 3621 - DNA, 16 bp, Artificial Sequence
  Synthetic construct
ggatgttgtgaaatca

SEQ ID NO: 3622 - DNA, 16 bp, Artificial Sequence
  Synthetic construct
ggatgttgtgaaatca

SEQ ID NO: 3623 - DNA, 16 bp, Artificial Sequence
  Synthetic construct
ggatgttgttctgaac

SEQ ID NO: 3624 - DNA, 16 bp, Artificial Sequence
  Synthetic construct
ggatgttgttctgaac

SEQ ID NO: 3625 - DNA, 16 bp, Artificial Sequence
  Synthetic construct
ggatgtttccatgagt

SEQ ID NO: 3626 - DNA, 16 bp, Artificial Sequence
  Synthetic construct
ggatgtttccatgagt

SEQ ID NO: 3627 - DNA, 16 bp, Artificial Sequence
  Synthetic construct
ggatgtttcgcttaga

SEQ ID NO: 3628 - DNA, 16 bp, Artificial Sequence
  Synthetic construct
ggatgtttcgcttaga

SEQ ID NO: 3629 - DNA, 16 bp, Artificial Sequence
  Synthetic construct
ggattacagagaacag

SEQ ID NO: 3630 - DNA, 16 bp, Artificial Sequence
  Synthetic construct
ggattacagagaacag

SEQ ID NO: 3631 - DNA, 16 bp, Artificial Sequence
  Synthetic construct
ggattacagagtctgg

SEQ ID NO: 3632 - DNA, 16 bp, Artificial Sequence
  Synthetic construct
ggattacagagtctgg

SEQ ID NO: 3633 - DNA, 16 bp, Artificial Sequence
  Synthetic construct
ggattacagtacttgc

SEQ ID NO: 3634 - DNA, 16 bp, Artificial Sequence
  Synthetic construct
ggattacagtacttgc

SEQ ID NO: 3635 - DNA, 16 bp, Artificial Sequence
  Synthetic construct
ggattacgtgatgccc

SEQ ID NO: 3636 - DNA, 16 bp, Artificial Sequence
  Synthetic construct
ggattacgtgatgccc

SEQ ID NO: 3637 - DNA, 16 bp, Artificial Sequence
  Synthetic construct
ggcaattcaatgacct

SEQ ID NO: 3638 - DNA, 16 bp, Artificial Sequence
  Synthetic construct
ggcaattcaatgacct

SEQ ID NO: 3639 - DNA, 16 bp, Artificial Sequence
  Synthetic construct
ggcaattcagctcgca

SEQ ID NO: 3640 - DNA, 16 bp, Artificial Sequence
  Synthetic construct
ggcaattcagctcgca

SEQ ID NO: 3641 - DNA, 16 bp, Artificial Sequence
  Synthetic construct
ggcaattgtaagtgta

SEQ ID NO: 3642 - DNA, 16 bp, Artificial Sequence
  Synthetic construct
ggcaattgtaagtgta

SEQ ID NO: 3643 - DNA, 16 bp, Artificial Sequence
  Synthetic construct
ggcaatttcttgacga

SEQ ID NO: 3644 - DNA, 16 bp, Artificial Sequence
  Synthetic construct
ggcaatttcttgacga

SEQ ID NO: 3645 - DNA, 16 bp, Artificial Sequence
  Synthetic construct
ggccgatcaaagcggt

SEQ ID NO: 3646 - DNA, 16 bp, Artificial Sequence
  Synthetic construct
ggccgatcaaagcggt

SEQ ID NO: 3647 - DNA, 16 bp, Artificial Sequence
  Synthetic construct
ggccgatcataggata

SEQ ID NO: 3648 - DNA, 16 bp, Artificial Sequence
  Synthetic construct
ggccgatcataggata

SEQ ID NO: 3649 - DNA, 16 bp, Artificial Sequence
  Synthetic construct
ggccgattcattgccc

SEQ ID NO: 3650 - DNA, 16 bp, Artificial Sequence
  Synthetic construct
ggccgattcattgccc

SEQ ID NO: 3651 - DNA, 16 bp, Artificial Sequence
  Synthetic construct
ggccgattctcgagta

SEQ ID NO: 3652 - DNA, 16 bp, Artificial Sequence
  Synthetic construct
ggccgattctcgagta

SEQ ID NO: 3653 - DNA, 16 bp, Artificial Sequence
  Synthetic construct
ggcgactagtagatgt

SEQ ID NO: 3654 - DNA, 16 bp, Artificial Sequence
  Synthetic construct
ggcgactagtagatgt

SEQ ID NO: 3655 - DNA, 16 bp, Artificial Sequence
  Synthetic construct
ggcgactcacttaagc

SEQ ID NO: 3656 - DNA, 16 bp, Artificial Sequence
  Synthetic construct
ggcgactcacttaagc

SEQ ID NO: 3657 - DNA, 16 bp, Artificial Sequence
  Synthetic construct
ggcgactgtcgagttt

SEQ ID NO: 3658 - DNA, 16 bp, Artificial Sequence
  Synthetic construct
ggcgactgtcgagttt

SEQ ID NO: 3659 - DNA, 16 bp, Artificial Sequence
  Synthetic construct
ggcgactgtctgattg

SEQ ID NO: 3660 - DNA, 16 bp, Artificial Sequence
  Synthetic construct
ggcgactgtctgattg

SEQ ID NO: 3661 - DNA, 16 bp, Artificial Sequence
  Synthetic construct
ggcgactgtgtaatga

SEQ ID NO: 3662 - DNA, 16 bp, Artificial Sequence
  Synthetic construct
ggcgactgtgtaatga

SEQ ID NO: 3663 - DNA, 16 bp, Artificial Sequence
  Synthetic construct
ggcgacttcgtggacc

SEQ ID NO: 3664 - DNA, 16 bp, Artificial Sequence
  Synthetic construct
ggcgacttcgtggacc

SEQ ID NO: 3665 - DNA, 16 bp, Artificial Sequence
  Synthetic construct
ggcgtgtcaaggactg

SEQ ID NO: 3666 - DNA, 16 bp, Artificial Sequence
  Synthetic construct
ggcgtgtcaaggactg

SEQ ID NO: 3667 - DNA, 16 bp, Artificial Sequence
  Synthetic construct
ggcgtgtgtagcacga

SEQ ID NO: 3668 - DNA, 16 bp, Artificial Sequence
  Synthetic construct
ggcgtgtgtagcacga

SEQ ID NO: 3669 - DNA, 16 bp, Artificial Sequence
  Synthetic construct
ggcgtgttcgtccgtt

SEQ ID NO: 3670 - DNA, 16 bp, Artificial Sequence
  Synthetic construct
ggcgtgttcgtccgtt

SEQ ID NO: 3671 - DNA, 16 bp, Artificial Sequence
  Synthetic construct
ggctcgagtaaatgac

SEQ ID NO: 3672 - DNA, 16 bp, Artificial Sequence
  Synthetic construct
ggctcgagtaaatgac

SEQ ID NO: 3673 - DNA, 16 bp, Artificial Sequence
  Synthetic construct
ggctcgagttagaaca

SEQ ID NO: 3674 - DNA, 16 bp, Artificial Sequence
  Synthetic construct
ggctcgagttagaaca

SEQ ID NO: 3675 - DNA, 16 bp, Artificial Sequence
  Synthetic construct
ggctcgagttgtttgg

SEQ ID NO: 3676 - DNA, 16 bp, Artificial Sequence
  Synthetic construct
ggctcgagttgtttgg

SEQ ID NO: 3677 - DNA, 16 bp, Artificial Sequence
  Synthetic construct
ggctcgatcaataccg

SEQ ID NO: 3678 - DNA, 16 bp, Artificial Sequence
  Synthetic construct
ggctcgatcaataccg

SEQ ID NO: 3679 - DNA, 16 bp, Artificial Sequence
  Synthetic construct
ggctcgatcggatgtt

SEQ ID NO: 3680 - DNA, 16 bp, Artificial Sequence
  Synthetic construct
ggctcgatcggatgtt

SEQ ID NO: 3681 - DNA, 16 bp, Artificial Sequence
  Synthetic construct
ggctcgatcggtgtta

SEQ ID NO: 3682 - DNA, 16 bp, Artificial Sequence
  Synthetic construct
ggctcgatcggtgtta

SEQ ID NO: 3683 - DNA, 16 bp, Artificial Sequence
  Synthetic construct
ggctcgatctggcgac

SEQ ID NO: 3684 - DNA, 16 bp, Artificial Sequence
  Synthetic construct
ggctcgatctggcgac

SEQ ID NO: 3685 - DNA, 16 bp, Artificial Sequence
  Synthetic construct
ggctggtagagtgaga

SEQ ID NO: 3686 - DNA, 16 bp, Artificial Sequence
  Synthetic construct
ggctggtagagtgaga

SEQ ID NO: 3687 - DNA, 16 bp, Artificial Sequence
  Synthetic construct
ggctggtagtaggtgc

SEQ ID NO: 3688 - DNA, 16 bp, Artificial Sequence
  Synthetic construct
ggctggtagtaggtgc

SEQ ID NO: 3689 - DNA, 16 bp, Artificial Sequence
  Synthetic construct
ggctggtcaggtggat

SEQ ID NO: 3690 - DNA, 16 bp, Artificial Sequence
  Synthetic construct
ggctggtcaggtggat

SEQ ID NO: 3691 - DNA, 16 bp, Artificial Sequence
  Synthetic construct
ggctggttcttaacct

SEQ ID NO: 3692 - DNA, 16 bp, Artificial Sequence
  Synthetic construct
ggctggttcttaacct

SEQ ID NO: 3693 - DNA, 16 bp, Artificial Sequence
  Synthetic construct
gggaatgagatcctgt

SEQ ID NO: 3694 - DNA, 16 bp, Artificial Sequence
  Synthetic construct
gggaatgagatcctgt

SEQ ID NO: 3695 - DNA, 16 bp, Artificial Sequence
  Synthetic construct
gggaatgcaaccgcca

SEQ ID NO: 3696 - DNA, 16 bp, Artificial Sequence
  Synthetic construct
gggaatgcaaccgcca

SEQ ID NO: 3697 - DNA, 16 bp, Artificial Sequence
  Synthetic construct
gggaatgcaaggttct

SEQ ID NO: 3698 - DNA, 16 bp, Artificial Sequence
  Synthetic construct
gggaatgcaaggttct

SEQ ID NO: 3699 - DNA, 16 bp, Artificial Sequence
  Synthetic construct
gggaatgcatgcccga

SEQ ID NO: 3700 - DNA, 16 bp, Artificial Sequence
  Synthetic construct
gggaatgcatgcccga

SEQ ID NO: 3701 - DNA, 16 bp, Artificial Sequence
  Synthetic construct
gggaatggtaaaggag

SEQ ID NO: 3702 - DNA, 16 bp, Artificial Sequence
  Synthetic construct
gggaatggtaaaggag

SEQ ID NO: 3703 - DNA, 16 bp, Artificial Sequence
  Synthetic construct
gggaatggtcaaagcg

SEQ ID NO: 3704 - DNA, 16 bp, Artificial Sequence
  Synthetic construct
gggaatggtcaaagcg

SEQ ID NO: 3705 - DNA, 16 bp, Artificial Sequence
  Synthetic construct
gggaatggtcgcatat

SEQ ID NO: 3706 - DNA, 16 bp, Artificial Sequence
  Synthetic construct
gggaatggtcgcatat

SEQ ID NO: 3707 - DNA, 16 bp, Artificial Sequence
  Synthetic construct
gggacctagagggata

SEQ ID NO: 3708 - DNA, 16 bp, Artificial Sequence
  Synthetic construct
gggacctagagggata

SEQ ID NO: 3709 - DNA, 16 bp, Artificial Sequence
  Synthetic construct
gggacctaggcaatta

SEQ ID NO: 3710 - DNA, 16 bp, Artificial Sequence
  Synthetic construct
gggacctaggcaatta

SEQ ID NO: 3711 - DNA, 16 bp, Artificial Sequence
  Synthetic construct
gggacctagtcgtttg

SEQ ID NO: 3712 - DNA, 16 bp, Artificial Sequence
  Synthetic construct
gggacctagtcgtttg

SEQ ID NO: 3713 - DNA, 16 bp, Artificial Sequence
  Synthetic construct
gggacctagttaccca

SEQ ID NO: 3714 - DNA, 16 bp, Artificial Sequence
  Synthetic construct
gggacctagttaccca

SEQ ID NO: 3715 - DNA, 16 bp, Artificial Sequence
  Synthetic construct
gggacctgttaagaac

SEQ ID NO: 3716 - DNA, 16 bp, Artificial Sequence
  Synthetic construct
gggacctgttaagaac

SEQ ID NO: 3717 - DNA, 16 bp, Artificial Sequence
  Synthetic construct
gggagatagtctcggc

SEQ ID NO: 3718 - DNA, 16 bp, Artificial Sequence
  Synthetic construct
gggagatagtctcggc

SEQ ID NO: 3719 - DNA, 16 bp, Artificial Sequence
  Synthetic construct
gggagatcacgaagca

SEQ ID NO: 3720 - DNA, 16 bp, Artificial Sequence
  Synthetic construct
gggagatcacgaagca

SEQ ID NO: 3721 - DNA, 16 bp, Artificial Sequence
  Synthetic construct
gggagatcacgtctct

SEQ ID NO: 3722 - DNA, 16 bp, Artificial Sequence
  Synthetic construct
gggagatcacgtctct

SEQ ID NO: 3723 - DNA, 16 bp, Artificial Sequence
  Synthetic construct
gggagatcatcaccct

SEQ ID NO: 3724 - DNA, 16 bp, Artificial Sequence
  Synthetic construct
gggagatcatcaccct

SEQ ID NO: 3725 - DNA, 16 bp, Artificial Sequence
  Synthetic construct
gggatgaagaaagtgg

SEQ ID NO: 3726 - DNA, 16 bp, Artificial Sequence
  Synthetic construct
gggatgaagaaagtgg

SEQ ID NO: 3727 - DNA, 16 bp, Artificial Sequence
  Synthetic construct
gggatgaagatgcctt

SEQ ID NO: 3728 - DNA, 16 bp, Artificial Sequence
  Synthetic construct
gggatgaagatgcctt

SEQ ID NO: 3729 - DNA, 16 bp, Artificial Sequence
  Synthetic construct
gggatgaagcagcctc

SEQ ID NO: 3730 - DNA, 16 bp, Artificial Sequence
  Synthetic construct
gggatgaagcagcctc

SEQ ID NO: 3731 - DNA, 16 bp, Artificial Sequence
  Synthetic construct
gggatgacattgggcc

SEQ ID NO: 3732 - DNA, 16 bp, Artificial Sequence
  Synthetic construct
gggatgacattgggcc

SEQ ID NO: 3733 - DNA, 16 bp, Artificial Sequence
  Synthetic construct
gggatgagtctagcgc

SEQ ID NO: 3734 - DNA, 16 bp, Artificial Sequence
  Synthetic construct
gggatgagtctagcgc

SEQ ID NO: 3735 - DNA, 16 bp, Artificial Sequence
  Synthetic construct
gggatgatcgtatcag

SEQ ID NO: 3736 - DNA, 16 bp, Artificial Sequence
  Synthetic construct
gggatgatcgtatcag

SEQ ID NO: 3737 - DNA, 16 bp, Artificial Sequence
  Synthetic construct
gggatgatcgttacga

SEQ ID NO: 3738 - DNA, 16 bp, Artificial Sequence
  Synthetic construct
gggatgatcgttacga

SEQ ID NO: 3739 - DNA, 16 bp, Artificial Sequence
  Synthetic construct
gggcactcatctatgg

SEQ ID NO: 3740 - DNA, 16 bp, Artificial Sequence
  Synthetic construct
gggcactcatctatgg

SEQ ID NO: 3741 - DNA, 16 bp, Artificial Sequence
  Synthetic construct
gggcacttcggacaag

SEQ ID NO: 3742 - DNA, 16 bp, Artificial Sequence
  Synthetic construct
gggcacttcggacaag

SEQ ID NO: 3743 - DNA, 16 bp, Artificial Sequence
  Synthetic construct
gggcatcagatcctgt

SEQ ID NO: 3744 - DNA, 16 bp, Artificial Sequence
  Synthetic construct
gggcatcagatcctgt

SEQ ID NO: 3745 - DNA, 16 bp, Artificial Sequence
  Synthetic construct
gggcatccaagcgtag

SEQ ID NO: 3746 - DNA, 16 bp, Artificial Sequence
  Synthetic construct
gggcatccaagcgtag

SEQ ID NO: 3747 - DNA, 16 bp, Artificial Sequence
  Synthetic construct
gggcatccaatagcgg

SEQ ID NO: 3748 - DNA, 16 bp, Artificial Sequence
  Synthetic construct
gggcatccaatagcgg

SEQ ID NO: 3749 - DNA, 16 bp, Artificial Sequence
  Synthetic construct
gggcatccagttccct

SEQ ID NO: 3750 - DNA, 16 bp, Artificial Sequence
  Synthetic construct
gggcatccagttccct

SEQ ID NO: 3751 - DNA, 16 bp, Artificial Sequence
  Synthetic construct
gggcatcgtaccgtat

SEQ ID NO: 3752 - DNA, 16 bp, Artificial Sequence
  Synthetic construct
gggcatcgtaccgtat

SEQ ID NO: 3753 - DNA, 16 bp, Artificial Sequence
  Synthetic construct
gggcatcgtctccact

SEQ ID NO: 3754 - DNA, 16 bp, Artificial Sequence
  Synthetic construct
gggcatcgtctccact

SEQ ID NO: 3755 - DNA, 16 bp, Artificial Sequence
  Synthetic construct
gggtctgagggtatcg

SEQ ID NO: 3756 - DNA, 16 bp, Artificial Sequence
  Synthetic construct
gggtctgagggtatcg

SEQ ID NO: 3757 - DNA, 16 bp, Artificial Sequence
  Synthetic construct
gggtctgagtttgcgt

SEQ ID NO: 3758 - DNA, 16 bp, Artificial Sequence
  Synthetic construct
gggtctgagtttgcgt

SEQ ID NO: 3759 - DNA, 16 bp, Artificial Sequence
  Synthetic construct
gggtctgcaatagcaa

SEQ ID NO: 3760 - DNA, 16 bp, Artificial Sequence
  Synthetic construct
gggtctgcaatagcaa

SEQ ID NO: 3761 - DNA, 16 bp, Artificial Sequence
  Synthetic construct
gggtctgcaatgttgc

SEQ ID NO: 3762 - DNA, 16 bp, Artificial Sequence
  Synthetic construct
gggtctgcaatgttgc

SEQ ID NO: 3763 - DNA, 16 bp, Artificial Sequence
  Synthetic construct
gggtctgcatgaacct

SEQ ID NO: 3764 - DNA, 16 bp, Artificial Sequence
  Synthetic construct
gggtctgcatgaacct

SEQ ID NO: 3765 - DNA, 16 bp, Artificial Sequence
  Synthetic construct
gggtctggtagggact

SEQ ID NO: 3766 - DNA, 16 bp, Artificial Sequence
  Synthetic construct
gggtctggtagggact

SEQ ID NO: 3767 - DNA, 16 bp, Artificial Sequence
  Synthetic construct
gggtctggtattctct

SEQ ID NO: 3768 - DNA, 16 bp, Artificial Sequence
  Synthetic construct
gggtctggtattctct

SEQ ID NO: 3769 - DNA, 16 bp, Artificial Sequence
  Synthetic construct
gggtctggtggcccta

SEQ ID NO: 3770 - DNA, 16 bp, Artificial Sequence
  Synthetic construct
gggtctggtggcccta

SEQ ID NO: 3771 - DNA, 16 bp, Artificial Sequence
  Synthetic construct
gggtctggttcgtctc

SEQ ID NO: 3772 - DNA, 16 bp, Artificial Sequence
  Synthetic construct
gggtctggttcgtctc

SEQ ID NO: 3773 - DNA, 16 bp, Artificial Sequence
  Synthetic construct
gggttgcgtatcacca

SEQ ID NO: 3774 - DNA, 16 bp, Artificial Sequence
  Synthetic construct
gggttgcgtatcacca

SEQ ID NO: 3775 - DNA, 16 bp, Artificial Sequence
  Synthetic construct
gggttgcgtcatcggc

SEQ ID NO: 3776 - DNA, 16 bp, Artificial Sequence
  Synthetic construct
gggttgcgtcatcggc

SEQ ID NO: 3777 - DNA, 16 bp, Artificial Sequence
  Synthetic construct
gggttgcgtcccgaca

SEQ ID NO: 3778 - DNA, 16 bp, Artificial Sequence
  Synthetic construct
gggttgcgtcccgaca

SEQ ID NO: 3779 - DNA, 16 bp, Artificial Sequence
  Synthetic construct
gggttgcgtttcgctc

SEQ ID NO: 3780 - DNA, 16 bp, Artificial Sequence
  Synthetic construct
gggttgcgtttcgctc

SEQ ID NO: 3781 - DNA, 16 bp, Artificial Sequence
  Synthetic construct
ggtattgagaaacgag

SEQ ID NO: 3782 - DNA, 16 bp, Artificial Sequence
  Synthetic construct
ggtattgagaaacgag

SEQ ID NO: 3783 - DNA, 16 bp, Artificial Sequence
  Synthetic construct
ggtattgagacgcaac

SEQ ID NO: 3784 - DNA, 16 bp, Artificial Sequence
  Synthetic construct
ggtattgagacgcaac

SEQ ID NO: 3785 - DNA, 16 bp, Artificial Sequence
  Synthetic construct
ggtattgcaggaatgc

SEQ ID NO: 3786 - DNA, 16 bp, Artificial Sequence
  Synthetic construct
ggtattgcaggaatgc

SEQ ID NO: 3787 - DNA, 16 bp, Artificial Sequence
  Synthetic construct
ggtattggtccgtgac

SEQ ID NO: 3788 - DNA, 16 bp, Artificial Sequence
  Synthetic construct
ggtattggtccgtgac

SEQ ID NO: 3789 - DNA, 16 bp, Artificial Sequence
  Synthetic construct
ggtattggttaaagtg

SEQ ID NO: 3790 - DNA, 16 bp, Artificial Sequence
  Synthetic construct
ggtattggttaaagtg

SEQ ID NO: 3791 - DNA, 16 bp, Artificial Sequence
  Synthetic construct
ggtgaagagaggacgg

SEQ ID NO: 3792 - DNA, 16 bp, Artificial Sequence
  Synthetic construct
ggtgaagagaggacgg

SEQ ID NO: 3793 - DNA, 16 bp, Artificial Sequence
  Synthetic construct
ggtgaagaggtgatat

SEQ ID NO: 3794 - DNA, 16 bp, Artificial Sequence
  Synthetic construct
ggtgaagaggtgatat

SEQ ID NO: 3795 - DNA, 16 bp, Artificial Sequence
  Synthetic construct
ggtgaagcatcctaga

SEQ ID NO: 3796 - DNA, 16 bp, Artificial Sequence
  Synthetic construct
ggtgaagcatcctaga

SEQ ID NO: 3797 - DNA, 16 bp, Artificial Sequence
  Synthetic construct
ggtgaagcattagcca

SEQ ID NO: 3798 - DNA, 16 bp, Artificial Sequence
  Synthetic construct
ggtgaagcattagcca

SEQ ID NO: 3799 - DNA, 16 bp, Artificial Sequence
  Synthetic construct
ggtgaaggtccagtgc

SEQ ID NO: 3800 - DNA, 16 bp, Artificial Sequence
  Synthetic construct
ggtgaaggtccagtgc

SEQ ID NO: 3801 - DNA, 16 bp, Artificial Sequence
  Synthetic construct
ggtgaagtcgcatggc

SEQ ID NO: 3802 - DNA, 16 bp, Artificial Sequence
  Synthetic construct
ggtgaagtcgcatggc

SEQ ID NO: 3803 - DNA, 16 bp, Artificial Sequence
  Synthetic construct
ggtgaagtctgtttgt

SEQ ID NO: 3804 - DNA, 16 bp, Artificial Sequence
  Synthetic construct
ggtgaagtctgtttgt

SEQ ID NO: 3805 - DNA, 16 bp, Artificial Sequence
  Synthetic construct
ggtgcgtagaatgtgt

SEQ ID NO: 3806 - DNA, 16 bp, Artificial Sequence
  Synthetic construct
ggtgcgtagaatgtgt

SEQ ID NO: 3807 - DNA, 16 bp, Artificial Sequence
  Synthetic construct
ggtgcgtagggtgtgt

SEQ ID NO: 3808 - DNA, 16 bp, Artificial Sequence
  Synthetic construct
ggtgcgtagggtgtgt

SEQ ID NO: 3809 - DNA, 16 bp, Artificial Sequence
  Synthetic construct
ggtgcgtagtgaacat

SEQ ID NO: 3810 - DNA, 16 bp, Artificial Sequence
  Synthetic construct
ggtgcgtagtgaacat

SEQ ID NO: 3811 - DNA, 16 bp, Artificial Sequence
  Synthetic construct
ggtgcgtcagttcatg

SEQ ID NO: 3812 - DNA, 16 bp, Artificial Sequence
  Synthetic construct
ggtgcgtcagttcatg

SEQ ID NO: 3813 - DNA, 16 bp, Artificial Sequence
  Synthetic construct
ggtgcgtgtaagtggc

SEQ ID NO: 3814 - DNA, 16 bp, Artificial Sequence
  Synthetic construct
ggtgcgtgtaagtggc

SEQ ID NO: 3815 - DNA, 16 bp, Artificial Sequence
  Synthetic construct
ggtgcgtgtctagagg

SEQ ID NO: 3816 - DNA, 16 bp, Artificial Sequence
  Synthetic construct
ggtgcgtgtctagagg

SEQ ID NO: 3817 - DNA, 16 bp, Artificial Sequence
  Synthetic construct
ggtgcgtgtgcctggt

SEQ ID NO: 3818 - DNA, 16 bp, Artificial Sequence
  Synthetic construct
ggtgcgtgtgcctggt

SEQ ID NO: 3819 - DNA, 16 bp, Artificial Sequence
  Synthetic construct
ggtgcgttcacctcgt

SEQ ID NO: 3820 - DNA, 16 bp, Artificial Sequence
  Synthetic construct
ggtgcgttcacctcgt

SEQ ID NO: 3821 - DNA, 16 bp, Artificial Sequence
  Synthetic construct
ggtgttaagacctagg

SEQ ID NO: 3822 - DNA, 16 bp, Artificial Sequence
  Synthetic construct
ggtgttaagacctagg

SEQ ID NO: 3823 - DNA, 16 bp, Artificial Sequence
  Synthetic construct
ggtgttaagggtgttg

SEQ ID NO: 3824 - DNA, 16 bp, Artificial Sequence
  Synthetic construct
ggtgttaagggtgttg

SEQ ID NO: 3825 - DNA, 16 bp, Artificial Sequence
  Synthetic construct
ggtgttaagtcgagtg

SEQ ID NO: 3826 - DNA, 16 bp, Artificial Sequence
  Synthetic construct
ggtgttaagtcgagtg

SEQ ID NO: 3827 - DNA, 16 bp, Artificial Sequence
  Synthetic construct
ggtgttacacgttggc

SEQ ID NO: 3828 - DNA, 16 bp, Artificial Sequence
  Synthetic construct
ggtgttacacgttggc

SEQ ID NO: 3829 - DNA, 16 bp, Artificial Sequence
  Synthetic construct
ggtgttacactatctt

SEQ ID NO: 3830 - DNA, 16 bp, Artificial Sequence
  Synthetic construct
ggtgttacactatctt

SEQ ID NO: 3831 - DNA, 16 bp, Artificial Sequence
  Synthetic construct
ggtgttacatttgctt

SEQ ID NO: 3832 - DNA, 16 bp, Artificial Sequence
  Synthetic construct
ggtgttacatttgctt

SEQ ID NO: 3833 - DNA, 16 bp, Artificial Sequence
  Synthetic construct
ggtgttagtaagtggc

SEQ ID NO: 3834 - DNA, 16 bp, Artificial Sequence
  Synthetic construct
ggtgttagtaagtggc

SEQ ID NO: 3835 - DNA, 16 bp, Artificial Sequence
  Synthetic construct
ggtgttatcagagacg

SEQ ID NO: 3836 - DNA, 16 bp, Artificial Sequence
  Synthetic construct
ggtgttatcagagacg

SEQ ID NO: 3837 - DNA, 16 bp, Artificial Sequence
  Synthetic construct
gtaacgtagaggttgc

SEQ ID NO: 3838 - DNA, 16 bp, Artificial Sequence
  Synthetic construct
gtaacgtagaggttgc

SEQ ID NO: 3839 - DNA, 16 bp, Artificial Sequence
  Synthetic construct
gtaacgtcaagagtcg

SEQ ID NO: 3840 - DNA, 16 bp, Artificial Sequence
  Synthetic construct
gtaacgtcaagagtcg

SEQ ID NO: 3841 - DNA, 16 bp, Artificial Sequence
  Synthetic construct
gtaacgtgtcaatacc

SEQ ID NO: 3842 - DNA, 16 bp, Artificial Sequence
  Synthetic construct
gtaacgtgtcaatacc

SEQ ID NO: 3843 - DNA, 16 bp, Artificial Sequence
  Synthetic construct
gtaacgttcctaagtg

SEQ ID NO: 3844 - DNA, 16 bp, Artificial Sequence
  Synthetic construct
gtaacgttcctaagtg

SEQ ID NO: 3845 - DNA, 16 bp, Artificial Sequence
  Synthetic construct
gtaacgttctcaagtg

SEQ ID NO: 3846 - DNA, 16 bp, Artificial Sequence
  Synthetic construct
gtaacgttctcaagtg

SEQ ID NO: 3847 - DNA, 16 bp, Artificial Sequence
  Synthetic construct
gtaactgagaggtacc

SEQ ID NO: 3848 - DNA, 16 bp, Artificial Sequence
  Synthetic construct
gtaactgagaggtacc

SEQ ID NO: 3849 - DNA, 16 bp, Artificial Sequence
  Synthetic construct
gtaactgagccgtcgt

SEQ ID NO: 3850 - DNA, 16 bp, Artificial Sequence
  Synthetic construct
gtaactgagccgtcgt

SEQ ID NO: 3851 - DNA, 16 bp, Artificial Sequence
  Synthetic construct
gtaactgagcgatata

SEQ ID NO: 3852 - DNA, 16 bp, Artificial Sequence
  Synthetic construct
gtaactgagcgatata

SEQ ID NO: 3853 - DNA, 16 bp, Artificial Sequence
  Synthetic construct
gtaactgagttgtaga

SEQ ID NO: 3854 - DNA, 16 bp, Artificial Sequence
  Synthetic construct
gtaactgagttgtaga

SEQ ID NO: 3855 - DNA, 16 bp, Artificial Sequence
  Synthetic construct
gtaactgcatcccact

SEQ ID NO: 3856 - DNA, 16 bp, Artificial Sequence
  Synthetic construct
gtaactgcatcccact

SEQ ID NO: 3857 - DNA, 16 bp, Artificial Sequence
  Synthetic construct
gtaactggtattagcc

SEQ ID NO: 3858 - DNA, 16 bp, Artificial Sequence
  Synthetic construct
gtaactggtattagcc

SEQ ID NO: 3859 - DNA, 16 bp, Artificial Sequence
  Synthetic construct
gtaactggtgtatggg

SEQ ID NO: 3860 - DNA, 16 bp, Artificial Sequence
  Synthetic construct
gtaactggtgtatggg

SEQ ID NO: 3861 - DNA, 16 bp, Artificial Sequence
  Synthetic construct
gtaactggtgtcaatc

SEQ ID NO: 3862 - DNA, 16 bp, Artificial Sequence
  Synthetic construct
gtaactggtgtcaatc

SEQ ID NO: 3863 - DNA, 16 bp, Artificial Sequence
  Synthetic construct
gtaactgtcatgtctt

SEQ ID NO: 3864 - DNA, 16 bp, Artificial Sequence
  Synthetic construct
gtaactgtcatgtctt

SEQ ID NO: 3865 - DNA, 16 bp, Artificial Sequence
  Synthetic construct
gtaactgtctcgttta

SEQ ID NO: 3866 - DNA, 16 bp, Artificial Sequence
  Synthetic construct
gtaactgtctcgttta

SEQ ID NO: 3867 - DNA, 16 bp, Artificial Sequence
  Synthetic construct
gtacgtaaggctacga

SEQ ID NO: 3868 - DNA, 16 bp, Artificial Sequence
  Synthetic construct
gtacgtaaggctacga

SEQ ID NO: 3869 - DNA, 16 bp, Artificial Sequence
  Synthetic construct
gtacgtacaataagca

SEQ ID NO: 3870 - DNA, 16 bp, Artificial Sequence
  Synthetic construct
gtacgtacaataagca

SEQ ID NO: 3871 - DNA, 16 bp, Artificial Sequence
  Synthetic construct
gtacgtatcaggcgaa

SEQ ID NO: 3872 - DNA, 16 bp, Artificial Sequence
  Synthetic construct
gtacgtatcaggcgaa

SEQ ID NO: 3873 - DNA, 16 bp, Artificial Sequence
  Synthetic construct
gtacgtatcgatccct

SEQ ID NO: 3874 - DNA, 16 bp, Artificial Sequence
  Synthetic construct
gtacgtatcgatccct

SEQ ID NO: 3875 - DNA, 16 bp, Artificial Sequence
  Synthetic construct
gtactccaggaactgc

SEQ ID NO: 3876 - DNA, 16 bp, Artificial Sequence
  Synthetic construct
gtactccaggaactgc

SEQ ID NO: 3877 - DNA, 16 bp, Artificial Sequence
  Synthetic construct
gtactccagttcgcat

SEQ ID NO: 3878 - DNA, 16 bp, Artificial Sequence
  Synthetic construct
gtactccagttcgcat

SEQ ID NO: 3879 - DNA, 16 bp, Artificial Sequence
  Synthetic construct
gtactccgtaaatgtg

SEQ ID NO: 3880 - DNA, 16 bp, Artificial Sequence
  Synthetic construct
gtactccgtaaatgtg

SEQ ID NO: 3881 - DNA, 16 bp, Artificial Sequence
  Synthetic construct
gtactccgtgatgtgg

SEQ ID NO: 3882 - DNA, 16 bp, Artificial Sequence
  Synthetic construct
gtactccgtgatgtgg

SEQ ID NO: 3883 - DNA, 16 bp, Artificial Sequence
  Synthetic construct
gtactcctctgaaaga

SEQ ID NO: 3884 - DNA, 16 bp, Artificial Sequence
  Synthetic construct
gtactcctctgaaaga

SEQ ID NO: 3885 - DNA, 16 bp, Artificial Sequence
  Synthetic construct
gtactttagagcctag

SEQ ID NO: 3886 - DNA, 16 bp, Artificial Sequence
  Synthetic construct
gtactttagagcctag

SEQ ID NO: 3887 - DNA, 16 bp, Artificial Sequence
  Synthetic construct
gtactttagagctata

SEQ ID NO: 3888 - DNA, 16 bp, Artificial Sequence
  Synthetic construct
gtactttagagctata

SEQ ID NO: 3889 - DNA, 16 bp, Artificial Sequence
  Synthetic construct
gtactttagtcacgcc

SEQ ID NO: 3890 - DNA, 16 bp, Artificial Sequence
  Synthetic construct
gtactttagtcacgcc

SEQ ID NO: 3891 - DNA, 16 bp, Artificial Sequence
  Synthetic construct
gtactttgtgataaac

SEQ ID NO: 3892 - DNA, 16 bp, Artificial Sequence
  Synthetic construct
gtactttgtgataaac

SEQ ID NO: 3893 - DNA, 16 bp, Artificial Sequence
  Synthetic construct
gtactttgtgggtcaa

SEQ ID NO: 3894 - DNA, 16 bp, Artificial Sequence
  Synthetic construct
gtactttgtgggtcaa

SEQ ID NO: 3895 - DNA, 16 bp, Artificial Sequence
  Synthetic construct
gtactttgttcgggct

SEQ ID NO: 3896 - DNA, 16 bp, Artificial Sequence
  Synthetic construct
gtactttgttcgggct

SEQ ID NO: 3897 - DNA, 16 bp, Artificial Sequence
  Synthetic construct
gtacttttcgtcacgg

SEQ ID NO: 3898 - DNA, 16 bp, Artificial Sequence
  Synthetic construct
gtacttttcgtcacgg

SEQ ID NO: 3899 - DNA, 16 bp, Artificial Sequence
  Synthetic construct
gtaggccagcacacag

SEQ ID NO: 3900 - DNA, 16 bp, Artificial Sequence
  Synthetic construct
gtaggccagcacacag

SEQ ID NO: 3901 - DNA, 16 bp, Artificial Sequence
  Synthetic construct
gtaggccagcgtttac

SEQ ID NO: 3902 - DNA, 16 bp, Artificial Sequence
  Synthetic construct
gtaggccagcgtttac

SEQ ID NO: 3903 - DNA, 16 bp, Artificial Sequence
  Synthetic construct
gtaggcccaccaccag

SEQ ID NO: 3904 - DNA, 16 bp, Artificial Sequence
  Synthetic construct
gtaggcccaccaccag

SEQ ID NO: 3905 - DNA, 16 bp, Artificial Sequence
  Synthetic construct
gtaggccgtctagccg

SEQ ID NO: 3906 - DNA, 16 bp, Artificial Sequence
  Synthetic construct
gtaggccgtctagccg

SEQ ID NO: 3907 - DNA, 16 bp, Artificial Sequence
  Synthetic construct
gtaggccgtctcccta

SEQ ID NO: 3908 - DNA, 16 bp, Artificial Sequence
  Synthetic construct
gtaggccgtctcccta

SEQ ID NO: 3909 - DNA, 16 bp, Artificial Sequence
  Synthetic construct
gtagtcaagcgaaggg

SEQ ID NO: 3910 - DNA, 16 bp, Artificial Sequence
  Synthetic construct
gtagtcaagcgaaggg

SEQ ID NO: 3911 - DNA, 16 bp, Artificial Sequence
  Synthetic construct
gtagtcaaggcccttg

SEQ ID NO: 3912 - DNA, 16 bp, Artificial Sequence
  Synthetic construct
gtagtcaaggcccttg

SEQ ID NO: 3913 - DNA, 16 bp, Artificial Sequence
  Synthetic construct
gtagtcaaggtcatct

SEQ ID NO: 3914 - DNA, 16 bp, Artificial Sequence
  Synthetic construct
gtagtcaaggtcatct

SEQ ID NO: 3915 - DNA, 16 bp, Artificial Sequence
  Synthetic construct
gtagtcacaacttgac

SEQ ID NO: 3916 - DNA, 16 bp, Artificial Sequence
  Synthetic construct
gtagtcacaacttgac

SEQ ID NO: 3917 - DNA, 16 bp, Artificial Sequence
  Synthetic construct
gtagtcagtgtgtgcc

SEQ ID NO: 3918 - DNA, 16 bp, Artificial Sequence
  Synthetic construct
gtagtcagtgtgtgcc

SEQ ID NO: 3919 - DNA, 16 bp, Artificial Sequence
  Synthetic construct
gtagtcagttcctcca

SEQ ID NO: 3920 - DNA, 16 bp, Artificial Sequence
  Synthetic construct
gtagtcagttcctcca

SEQ ID NO: 3921 - DNA, 16 bp, Artificial Sequence
  Synthetic construct
gtagtcatcaacgcta

SEQ ID NO: 3922 - DNA, 16 bp, Artificial Sequence
  Synthetic construct
gtagtcatcaacgcta

SEQ ID NO: 3923 - DNA, 16 bp, Artificial Sequence
  Synthetic construct
gtagtcatcgatagaa

SEQ ID NO: 3924 - DNA, 16 bp, Artificial Sequence
  Synthetic construct
gtagtcatcgatagaa

SEQ ID NO: 3925 - DNA, 16 bp, Artificial Sequence
  Synthetic construct
gtatcttagacaaagg

SEQ ID NO: 3926 - DNA, 16 bp, Artificial Sequence
  Synthetic construct
gtatcttagacaaagg

SEQ ID NO: 3927 - DNA, 16 bp, Artificial Sequence
  Synthetic construct
gtatcttagagtaccg

SEQ ID NO: 3928 - DNA, 16 bp, Artificial Sequence
  Synthetic construct
gtatcttagagtaccg

SEQ ID NO: 3929 - DNA, 16 bp, Artificial Sequence
  Synthetic construct
gtatcttcatgacgga

SEQ ID NO: 3930 - DNA, 16 bp, Artificial Sequence
  Synthetic construct
gtatcttcatgacgga

SEQ ID NO: 3931 - DNA, 16 bp, Artificial Sequence
  Synthetic construct
gtattctcatccttgc

SEQ ID NO: 3932 - DNA, 16 bp, Artificial Sequence
  Synthetic construct
gtattctcatccttgc

SEQ ID NO: 3933 - DNA, 16 bp, Artificial Sequence
  Synthetic construct
gtattctgtagcgctc

SEQ ID NO: 3934 - DNA, 16 bp, Artificial Sequence
  Synthetic construct
gtattctgtagcgctc

SEQ ID NO: 3935 - DNA, 16 bp, Artificial Sequence
  Synthetic construct
gtattctgtccgacgt

SEQ ID NO: 3936 - DNA, 16 bp, Artificial Sequence
  Synthetic construct
gtattctgtccgacgt

SEQ ID NO: 3937 - DNA, 16 bp, Artificial Sequence
  Synthetic construct
gtattcttcgcgatcg

SEQ ID NO: 3938 - DNA, 16 bp, Artificial Sequence
  Synthetic construct
gtattcttcgcgatcg

SEQ ID NO: 3939 - DNA, 16 bp, Artificial Sequence
  Synthetic construct
gtcaagtcagggtaca

SEQ ID NO: 3940 - DNA, 16 bp, Artificial Sequence
  Synthetic construct
gtcaagtcagggtaca

SEQ ID NO: 3941 - DNA, 16 bp, Artificial Sequence
  Synthetic construct
gtcaagttctcgtatt

SEQ ID NO: 3942 - DNA, 16 bp, Artificial Sequence
  Synthetic construct
gtcaagttctcgtatt

SEQ ID NO: 3943 - DNA, 16 bp, Artificial Sequence
  Synthetic construct
gtcacaaagatatgca

SEQ ID NO: 3944 - DNA, 16 bp, Artificial Sequence
  Synthetic construct
gtcacaaagatatgca

SEQ ID NO: 3945 - DNA, 16 bp, Artificial Sequence
  Synthetic construct
gtcacaaagctttggt

SEQ ID NO: 3946 - DNA, 16 bp, Artificial Sequence
  Synthetic construct
gtcacaaagctttggt

SEQ ID NO: 3947 - DNA, 16 bp, Artificial Sequence
  Synthetic construct
gtcacaagtcgactgc

SEQ ID NO: 3948 - DNA, 16 bp, Artificial Sequence
  Synthetic construct
gtcacaagtcgactgc

SEQ ID NO: 3949 - DNA, 16 bp, Artificial Sequence
  Synthetic construct
gtcacaagtgttggga

SEQ ID NO: 3950 - DNA, 16 bp, Artificial Sequence
  Synthetic construct
gtcacaagtgttggga

SEQ ID NO: 3951 - DNA, 16 bp, Artificial Sequence
  Synthetic construct
gtcacaatcctacaga

SEQ ID NO: 3952 - DNA, 16 bp, Artificial Sequence
  Synthetic construct
gtcacaatcctacaga

SEQ ID NO: 3953 - DNA, 16 bp, Artificial Sequence
  Synthetic construct
gtcacggagaatctcc

SEQ ID NO: 3954 - DNA, 16 bp, Artificial Sequence
  Synthetic construct
gtcacggagaatctcc

SEQ ID NO: 3955 - DNA, 16 bp, Artificial Sequence
  Synthetic construct
gtcacggagaccggat

SEQ ID NO: 3956 - DNA, 16 bp, Artificial Sequence
  Synthetic construct
gtcacggagaccggat

SEQ ID NO: 3957 - DNA, 16 bp, Artificial Sequence
  Synthetic construct
gtcacggagtgtactc

SEQ ID NO: 3958 - DNA, 16 bp, Artificial Sequence
  Synthetic construct
gtcacggagtgtactc

SEQ ID NO: 3959 - DNA, 16 bp, Artificial Sequence
  Synthetic construct
gtcacgggtgcggtaa

SEQ ID NO: 3960 - DNA, 16 bp, Artificial Sequence
  Synthetic construct
gtcacgggtgcggtaa

SEQ ID NO: 3961 - DNA, 16 bp, Artificial Sequence
  Synthetic construct
gtcatttcagctccga

SEQ ID NO: 3962 - DNA, 16 bp, Artificial Sequence
  Synthetic construct
gtcatttcagctccga

SEQ ID NO: 3963 - DNA, 16 bp, Artificial Sequence
  Synthetic construct
gtcatttgtacgctgc

SEQ ID NO: 3964 - DNA, 16 bp, Artificial Sequence
  Synthetic construct
gtcatttgtacgctgc

SEQ ID NO: 3965 - DNA, 16 bp, Artificial Sequence
  Synthetic construct
gtcatttgttccacgg

SEQ ID NO: 3966 - DNA, 16 bp, Artificial Sequence
  Synthetic construct
gtcatttgttccacgg

SEQ ID NO: 3967 - DNA, 16 bp, Artificial Sequence
  Synthetic construct
gtcattttcgccctta

SEQ ID NO: 3968 - DNA, 16 bp, Artificial Sequence
  Synthetic construct
gtcattttcgccctta

SEQ ID NO: 3969 - DNA, 16 bp, Artificial Sequence
  Synthetic construct
gtcattttcggtgtta

SEQ ID NO: 3970 - DNA, 16 bp, Artificial Sequence
  Synthetic construct
gtcattttcggtgtta

SEQ ID NO: 3971 - DNA, 16 bp, Artificial Sequence
  Synthetic construct
gtcattttcgttacga

SEQ ID NO: 3972 - DNA, 16 bp, Artificial Sequence
  Synthetic construct
gtcattttcgttacga

SEQ ID NO: 3973 - DNA, 16 bp, Artificial Sequence
  Synthetic construct
gtcctcacaatgacct

SEQ ID NO: 3974 - DNA, 16 bp, Artificial Sequence
  Synthetic construct
gtcctcacaatgacct

SEQ ID NO: 3975 - DNA, 16 bp, Artificial Sequence
  Synthetic construct
gtcctcacagctgtat

SEQ ID NO: 3976 - DNA, 16 bp, Artificial Sequence
  Synthetic construct
gtcctcacagctgtat

SEQ ID NO: 3977 - DNA, 16 bp, Artificial Sequence
  Synthetic construct
gtcctcagtcgcatat

SEQ ID NO: 3978 - DNA, 16 bp, Artificial Sequence
  Synthetic construct
gtcctcagtcgcatat

SEQ ID NO: 3979 - DNA, 16 bp, Artificial Sequence
  Synthetic construct
gtcctcagttccaaca

SEQ ID NO: 3980 - DNA, 16 bp, Artificial Sequence
  Synthetic construct
gtcctcagttccaaca

SEQ ID NO: 3981 - DNA, 16 bp, Artificial Sequence
  Synthetic construct
gtcctcatccggcaca

SEQ ID NO: 3982 - DNA, 16 bp, Artificial Sequence
  Synthetic construct
gtcctcatccggcaca

SEQ ID NO: 3983 - DNA, 16 bp, Artificial Sequence
  Synthetic construct
gtcctcatctaacggt

SEQ ID NO: 3984 - DNA, 16 bp, Artificial Sequence
  Synthetic construct
gtcctcatctaacggt

SEQ ID NO: 3985 - DNA, 16 bp, Artificial Sequence
  Synthetic construct
gtcgggtcaacaacct

SEQ ID NO: 3986 - DNA, 16 bp, Artificial Sequence
  Synthetic construct
gtcgggtcaacaacct

SEQ ID NO: 3987 - DNA, 16 bp, Artificial Sequence
  Synthetic construct
gtcgggttcagcacat

SEQ ID NO: 3988 - DNA, 16 bp, Artificial Sequence
  Synthetic construct
gtcgggttcagcacat

SEQ ID NO: 3989 - DNA, 16 bp, Artificial Sequence
  Synthetic construct
gtcgggttcagctctc

SEQ ID NO: 3990 - DNA, 16 bp, Artificial Sequence
  Synthetic construct
gtcgggttcagctctc

SEQ ID NO: 3991 - DNA, 16 bp, Artificial Sequence
  Synthetic construct
gtcgggttctgcccta

SEQ ID NO: 3992 - DNA, 16 bp, Artificial Sequence
  Synthetic construct
gtcgggttctgcccta

SEQ ID NO: 3993 - DNA, 16 bp, Artificial Sequence
  Synthetic construct
gtcgtaaagatggcgt

SEQ ID NO: 3994 - DNA, 16 bp, Artificial Sequence
  Synthetic construct
gtcgtaaagatggcgt

SEQ ID NO: 3995 - DNA, 16 bp, Artificial Sequence
  Synthetic construct
gtcgtaaaggactggt

SEQ ID NO: 3996 - DNA, 16 bp, Artificial Sequence
  Synthetic construct
gtcgtaaaggactggt

SEQ ID NO: 3997 - DNA, 16 bp, Artificial Sequence
  Synthetic construct
gtctcgtagtgcgtga

SEQ ID NO: 3998 - DNA, 16 bp, Artificial Sequence
  Synthetic construct
gtctcgtagtgcgtga

SEQ ID NO: 3999 - DNA, 16 bp, Artificial Sequence
  Synthetic construct
gtctcgtgtgtaacgg

SEQ ID NO: 4000 - DNA, 16 bp, Artificial Sequence
  Synthetic construct
gtctcgtgtgtaacgg

SEQ ID NO: 4001 - DNA, 16 bp, Artificial Sequence
  Synthetic construct
gtctcgttcgccctta

SEQ ID NO: 4002 - DNA, 16 bp, Artificial Sequence
  Synthetic construct
gtctcgttcgccctta

SEQ ID NO: 4003 - DNA, 16 bp, Artificial Sequence
  Synthetic construct
gtctcgttctagagtc

SEQ ID NO: 4004 - DNA, 16 bp, Artificial Sequence
  Synthetic construct
gtctcgttctagagtc

SEQ ID NO: 4005 - DNA, 16 bp, Artificial Sequence
  Synthetic construct
gtcttcgcaccgaaag

SEQ ID NO: 4006 - DNA, 16 bp, Artificial Sequence
  Synthetic construct
gtcttcgcaccgaaag

SEQ ID NO: 4007 - DNA, 16 bp, Artificial Sequence
  Synthetic construct
gtcttcgcagacactt

SEQ ID NO: 4008 - DNA, 16 bp, Artificial Sequence
  Synthetic construct
gtcttcgcagacactt

SEQ ID NO: 4009 - DNA, 16 bp, Artificial Sequence
  Synthetic construct
gtcttcggtcttgcgg

SEQ ID NO: 4010 - DNA, 16 bp, Artificial Sequence
  Synthetic construct
gtcttcggtcttgcgg

SEQ ID NO: 4011 - DNA, 16 bp, Artificial Sequence
  Synthetic construct
gtcttcgtcttgagac

SEQ ID NO: 4012 - DNA, 16 bp, Artificial Sequence
  Synthetic construct
gtcttcgtcttgagac

SEQ ID NO: 4013 - DNA, 16 bp, Artificial Sequence
  Synthetic construct
gtgaaggagccggtaa

SEQ ID NO: 4014 - DNA, 16 bp, Artificial Sequence
  Synthetic construct
gtgaaggagccggtaa

SEQ ID NO: 4015 - DNA, 16 bp, Artificial Sequence
  Synthetic construct
gtgaaggagcgattct

SEQ ID NO: 4016 - DNA, 16 bp, Artificial Sequence
  Synthetic construct
gtgaaggagcgattct

SEQ ID NO: 4017 - DNA, 16 bp, Artificial Sequence
  Synthetic construct
gtgaaggaggaatgga

SEQ ID NO: 4018 - DNA, 16 bp, Artificial Sequence
  Synthetic construct
gtgaaggaggaatgga

SEQ ID NO: 4019 - DNA, 16 bp, Artificial Sequence
  Synthetic construct
gtgaagggtaaggatt

SEQ ID NO: 4020 - DNA, 16 bp, Artificial Sequence
  Synthetic construct
gtgaagggtaaggatt

SEQ ID NO: 4021 - DNA, 16 bp, Artificial Sequence
  Synthetic construct
gtgaagggtatctgca

SEQ ID NO: 4022 - DNA, 16 bp, Artificial Sequence
  Synthetic construct
gtgaagggtatctgca

SEQ ID NO: 4023 - DNA, 16 bp, Artificial Sequence
  Synthetic construct
gtgaaggtcacaaacc

SEQ ID NO: 4024 - DNA, 16 bp, Artificial Sequence
  Synthetic construct
gtgaaggtcacaaacc

SEQ ID NO: 4025 - DNA, 16 bp, Artificial Sequence
  Synthetic construct
gtgaaggtcatcgctc

SEQ ID NO: 4026 - DNA, 16 bp, Artificial Sequence
  Synthetic construct
gtgaaggtcatcgctc

SEQ ID NO: 4027 - DNA, 16 bp, Artificial Sequence
  Synthetic construct
gtgaaggtcctcatta

SEQ ID NO: 4028 - DNA, 16 bp, Artificial Sequence
  Synthetic construct
gtgaaggtcctcatta

SEQ ID NO: 4029 - DNA, 16 bp, Artificial Sequence
  Synthetic construct
gtgcagcgtgtgacga

SEQ ID NO: 4030 - DNA, 16 bp, Artificial Sequence
  Synthetic construct
gtgcagcgtgtgacga

SEQ ID NO: 4031 - DNA, 16 bp, Artificial Sequence
  Synthetic construct
gtgcagcgttcagtac

SEQ ID NO: 4032 - DNA, 16 bp, Artificial Sequence
  Synthetic construct
gtgcagcgttcagtac

SEQ ID NO: 4033 - DNA, 16 bp, Artificial Sequence
  Synthetic construct
gtgcagcgttcggcac

SEQ ID NO: 4034 - DNA, 16 bp, Artificial Sequence
  Synthetic construct
gtgcagcgttcggcac

SEQ ID NO: 4035 - DNA, 16 bp, Artificial Sequence
  Synthetic construct
gtgcataagaactgta

SEQ ID NO: 4036 - DNA, 16 bp, Artificial Sequence
  Synthetic construct
gtgcataagaactgta

SEQ ID NO: 4037 - DNA, 16 bp, Artificial Sequence
  Synthetic construct
gtgcataagttagcgg

SEQ ID NO: 4038 - DNA, 16 bp, Artificial Sequence
  Synthetic construct
gtgcataagttagcgg

SEQ ID NO: 4039 - DNA, 16 bp, Artificial Sequence
  Synthetic construct
gtgcatacacggtaag

SEQ ID NO: 4040 - DNA, 16 bp, Artificial Sequence
  Synthetic construct
gtgcatacacggtaag

SEQ ID NO: 4041 - DNA, 16 bp, Artificial Sequence
  Synthetic construct
gtgcatagtcagaata

SEQ ID NO: 4042 - DNA, 16 bp, Artificial Sequence
  Synthetic construct
gtgcatagtcagaata

SEQ ID NO: 4043 - DNA, 16 bp, Artificial Sequence
  Synthetic construct
gtgcatagtgaacctt

SEQ ID NO: 4044 - DNA, 16 bp, Artificial Sequence
  Synthetic construct
gtgcatagtgaacctt

SEQ ID NO: 4045 - DNA, 16 bp, Artificial Sequence
  Synthetic construct
gtgcatatccctgact

SEQ ID NO: 4046 - DNA, 16 bp, Artificial Sequence
  Synthetic construct
gtgcatatccctgact

SEQ ID NO: 4047 - DNA, 16 bp, Artificial Sequence
  Synthetic construct
gtgcggtagacagacc

SEQ ID NO: 4048 - DNA, 16 bp, Artificial Sequence
  Synthetic construct
gtgcggtagacagacc

SEQ ID NO: 4049 - DNA, 16 bp, Artificial Sequence
  Synthetic construct
gtgcggtagagctgca

SEQ ID NO: 4050 - DNA, 16 bp, Artificial Sequence
  Synthetic construct
gtgcggtagagctgca

SEQ ID NO: 4051 - DNA, 16 bp, Artificial Sequence
  Synthetic construct
gtgcggtcaatcagaa

SEQ ID NO: 4052 - DNA, 16 bp, Artificial Sequence
  Synthetic construct
gtgcggtcaatcagaa

SEQ ID NO: 4053 - DNA, 16 bp, Artificial Sequence
  Synthetic construct
gtgcggtcatctccca

SEQ ID NO: 4054 - DNA, 16 bp, Artificial Sequence
  Synthetic construct
gtgcggtcatctccca

SEQ ID NO: 4055 - DNA, 16 bp, Artificial Sequence
  Synthetic construct
gtgcggtgtgcaactt

SEQ ID NO: 4056 - DNA, 16 bp, Artificial Sequence
  Synthetic construct
gtgcggtgtgcaactt

SEQ ID NO: 4057 - DNA, 16 bp, Artificial Sequence
  Synthetic construct
gtgcggttcggaatct

SEQ ID NO: 4058 - DNA, 16 bp, Artificial Sequence
  Synthetic construct
gtgcggttcggaatct

SEQ ID NO: 4059 - DNA, 16 bp, Artificial Sequence
  Synthetic construct
gtgcttcaggcatgtg

SEQ ID NO: 4060 - DNA, 16 bp, Artificial Sequence
  Synthetic construct
gtgcttcaggcatgtg

SEQ ID NO: 4061 - DNA, 16 bp, Artificial Sequence
  Synthetic construct
gtgcttccagctgtat

SEQ ID NO: 4062 - DNA, 16 bp, Artificial Sequence
  Synthetic construct
gtgcttccagctgtat

SEQ ID NO: 4063 - DNA, 16 bp, Artificial Sequence
  Synthetic construct
gtgcttcgtcattagc

SEQ ID NO: 4064 - DNA, 16 bp, Artificial Sequence
  Synthetic construct
gtgcttcgtcattagc

SEQ ID NO: 4065 - DNA, 16 bp, Artificial Sequence
  Synthetic construct
gtgcttcgtgcaggta

SEQ ID NO: 4066 - DNA, 16 bp, Artificial Sequence
  Synthetic construct
gtgcttcgtgcaggta

SEQ ID NO: 4067 - DNA, 16 bp, Artificial Sequence
  Synthetic construct
gtgcttctcgggagta

SEQ ID NO: 4068 - DNA, 16 bp, Artificial Sequence
  Synthetic construct
gtgcttctcgggagta

SEQ ID NO: 4069 - DNA, 16 bp, Artificial Sequence
  Synthetic construct
gtgggtcagatcccgc

SEQ ID NO: 4070 - DNA, 16 bp, Artificial Sequence
  Synthetic construct
gtgggtcagatcccgc

SEQ ID NO: 4071 - DNA, 16 bp, Artificial Sequence
  Synthetic construct
gtgggtcagtgatcgg

SEQ ID NO: 4072 - DNA, 16 bp, Artificial Sequence
  Synthetic construct
gtgggtcagtgatcgg

SEQ ID NO: 4073 - DNA, 16 bp, Artificial Sequence
  Synthetic construct
gtgggtccagatgggt

SEQ ID NO: 4074 - DNA, 16 bp, Artificial Sequence
  Synthetic construct
gtgggtccagatgggt

SEQ ID NO: 4075 - DNA, 16 bp, Artificial Sequence
  Synthetic construct
gtgggtcgtcgagttt

SEQ ID NO: 4076 - DNA, 16 bp, Artificial Sequence
  Synthetic construct
gtgggtcgtcgagttt

SEQ ID NO: 4077 - DNA, 16 bp, Artificial Sequence
  Synthetic construct
gtgggtcgtgtgaata

SEQ ID NO: 4078 - DNA, 16 bp, Artificial Sequence
  Synthetic construct
gtgggtcgtgtgaata

SEQ ID NO: 4079 - DNA, 16 bp, Artificial Sequence
  Synthetic construct
gtgggtctcacggtta

SEQ ID NO: 4080 - DNA, 16 bp, Artificial Sequence
  Synthetic construct
gtgggtctcacggtta

SEQ ID NO: 4081 - DNA, 16 bp, Artificial Sequence
  Synthetic construct
gtgggtctctggtgta

SEQ ID NO: 4082 - DNA, 16 bp, Artificial Sequence
  Synthetic construct
gtgggtctctggtgta

SEQ ID NO: 4083 - DNA, 16 bp, Artificial Sequence
  Synthetic construct
gtgtgcgcaattgctg

SEQ ID NO: 4084 - DNA, 16 bp, Artificial Sequence
  Synthetic construct
gtgtgcgcaattgctg

SEQ ID NO: 4085 - DNA, 16 bp, Artificial Sequence
  Synthetic construct
gtgtgcgcaccatgta

SEQ ID NO: 4086 - DNA, 16 bp, Artificial Sequence
  Synthetic construct
gtgtgcgcaccatgta

SEQ ID NO: 4087 - DNA, 16 bp, Artificial Sequence
  Synthetic construct
gtgtgcgcagctgtgc

SEQ ID NO: 4088 - DNA, 16 bp, Artificial Sequence
  Synthetic construct
gtgtgcgcagctgtgc

SEQ ID NO: 4089 - DNA, 16 bp, Artificial Sequence
  Synthetic construct
gtgtgcgcatcgtcgg

SEQ ID NO: 4090 - DNA, 16 bp, Artificial Sequence
  Synthetic construct
gtgtgcgcatcgtcgg

SEQ ID NO: 4091 - DNA, 16 bp, Artificial Sequence
  Synthetic construct
gtgtgcggtcggcatc

SEQ ID NO: 4092 - DNA, 16 bp, Artificial Sequence
  Synthetic construct
gtgtgcggtcggcatc

SEQ ID NO: 4093 - DNA, 16 bp, Artificial Sequence
  Synthetic construct
gtgtgcggtgagcgat

SEQ ID NO: 4094 - DNA, 16 bp, Artificial Sequence
  Synthetic construct
gtgtgcggtgagcgat

SEQ ID NO: 4095 - DNA, 16 bp, Artificial Sequence
  Synthetic construct
gtgtgcgtctgtctcg

SEQ ID NO: 4096 - DNA, 16 bp, Artificial Sequence
  Synthetic construct
gtgtgcgtctgtctcg

SEQ ID NO: 4097 - DNA, 16 bp, Artificial Sequence
  Synthetic construct
gtgttagagacagaga

SEQ ID NO: 4098 - DNA, 16 bp, Artificial Sequence
  Synthetic construct
gtgttagagacagaga

SEQ ID NO: 4099 - DNA, 16 bp, Artificial Sequence
  Synthetic construct
gtgttagagggatctg

SEQ ID NO: 4100 - DNA, 16 bp, Artificial Sequence
  Synthetic construct
gtgttagagggatctg

SEQ ID NO: 4101 - DNA, 16 bp, Artificial Sequence
  Synthetic construct
gtgttagcacttcgaa

SEQ ID NO: 4102 - DNA, 16 bp, Artificial Sequence
  Synthetic construct
gtgttagcacttcgaa

SEQ ID NO: 4103 - DNA, 16 bp, Artificial Sequence
  Synthetic construct
gtgttagcaggaacgt

SEQ ID NO: 4104 - DNA, 16 bp, Artificial Sequence
  Synthetic construct
gtgttagcaggaacgt

SEQ ID NO: 4105 - DNA, 16 bp, Artificial Sequence
  Synthetic construct
gtgttaggtcgcatcg

SEQ ID NO: 4106 - DNA, 16 bp, Artificial Sequence
  Synthetic construct
gtgttaggtcgcatcg

SEQ ID NO: 4107 - DNA, 16 bp, Artificial Sequence
  Synthetic construct
gtgttagtccgttgct

SEQ ID NO: 4108 - DNA, 16 bp, Artificial Sequence
  Synthetic construct
gtgttagtccgttgct

SEQ ID NO: 4109 - DNA, 16 bp, Artificial Sequence
  Synthetic construct
gtgttagtcttaccta

SEQ ID NO: 4110 - DNA, 16 bp, Artificial Sequence
  Synthetic construct
gtgttagtcttaccta

SEQ ID NO: 4111 - DNA, 16 bp, Artificial Sequence
  Synthetic construct
gttaagccagcgttcg

SEQ ID NO: 4112 - DNA, 16 bp, Artificial Sequence
  Synthetic construct
gttaagccagcgttcg

SEQ ID NO: 4113 - DNA, 16 bp, Artificial Sequence
  Synthetic construct
gttaagcgtaaagtca

SEQ ID NO: 4114 - DNA, 16 bp, Artificial Sequence
  Synthetic construct
gttaagcgtaaagtca

SEQ ID NO: 4115 - DNA, 16 bp, Artificial Sequence
  Synthetic construct
gttaagcgtacaagta

SEQ ID NO: 4116 - DNA, 16 bp, Artificial Sequence
  Synthetic construct
gttaagcgtacaagta

SEQ ID NO: 4117 - DNA, 16 bp, Artificial Sequence
  Synthetic construct
gttaagcgtcgcatat

SEQ ID NO: 4118 - DNA, 16 bp, Artificial Sequence
  Synthetic construct
gttaagcgtcgcatat

SEQ ID NO: 4119 - DNA, 16 bp, Artificial Sequence
  Synthetic construct
gttaagcgttcagact

SEQ ID NO: 4120 - DNA, 16 bp, Artificial Sequence
  Synthetic construct
gttaagcgttcagact

SEQ ID NO: 4121 - DNA, 16 bp, Artificial Sequence
  Synthetic construct
gttaagcgtttgactg

SEQ ID NO: 4122 - DNA, 16 bp, Artificial Sequence
  Synthetic construct
gttaagcgtttgactg

SEQ ID NO: 4123 - DNA, 16 bp, Artificial Sequence
  Synthetic construct
gttacagagaatgtgt

SEQ ID NO: 4124 - DNA, 16 bp, Artificial Sequence
  Synthetic construct
gttacagagaatgtgt

SEQ ID NO: 4125 - DNA, 16 bp, Artificial Sequence
  Synthetic construct
gttacagcagtaacgg

SEQ ID NO: 4126 - DNA, 16 bp, Artificial Sequence
  Synthetic construct
gttacagcagtaacgg

SEQ ID NO: 4127 - DNA, 16 bp, Artificial Sequence
  Synthetic construct
gttacagcatgggaca

SEQ ID NO: 4128 - DNA, 16 bp, Artificial Sequence
  Synthetic construct
gttacagcatgggaca

SEQ ID NO: 4129 - DNA, 16 bp, Artificial Sequence
  Synthetic construct
gttacaggttcagcgc

SEQ ID NO: 4130 - DNA, 16 bp, Artificial Sequence
  Synthetic construct
gttacaggttcagcgc

SEQ ID NO: 4131 - DNA, 16 bp, Artificial Sequence
  Synthetic construct
gttcattagagcaatt

SEQ ID NO: 4132 - DNA, 16 bp, Artificial Sequence
  Synthetic construct
gttcattagagcaatt

SEQ ID NO: 4133 - DNA, 16 bp, Artificial Sequence
  Synthetic construct
gttcattaggcagtca

SEQ ID NO: 4134 - DNA, 16 bp, Artificial Sequence
  Synthetic construct
gttcattaggcagtca

SEQ ID NO: 4135 - DNA, 16 bp, Artificial Sequence
  Synthetic construct
gttcattagggcacta

SEQ ID NO: 4136 - DNA, 16 bp, Artificial Sequence
  Synthetic construct
gttcattagggcacta

SEQ ID NO: 4137 - DNA, 16 bp, Artificial Sequence
  Synthetic construct
gttcattgtgttcgat

SEQ ID NO: 4138 - DNA, 16 bp, Artificial Sequence
  Synthetic construct
gttcattgtgttcgat

SEQ ID NO: 4139 - DNA, 16 bp, Artificial Sequence
  Synthetic construct
gttcatttcatgtctt

SEQ ID NO: 4140 - DNA, 16 bp, Artificial Sequence
  Synthetic construct
gttcatttcatgtctt

SEQ ID NO: 4141 - DNA, 16 bp, Artificial Sequence
  Synthetic construct
gttcatttctctaagg

SEQ ID NO: 4142 - DNA, 16 bp, Artificial Sequence
  Synthetic construct
gttcatttctctaagg

SEQ ID NO: 4143 - DNA, 16 bp, Artificial Sequence
  Synthetic construct
gttcgggagcaatctc

SEQ ID NO: 4144 - DNA, 16 bp, Artificial Sequence
  Synthetic construct
gttcgggagcaatctc

SEQ ID NO: 4145 - DNA, 16 bp, Artificial Sequence
  Synthetic construct
gttcgggaggtcggat

SEQ ID NO: 4146 - DNA, 16 bp, Artificial Sequence
  Synthetic construct
gttcgggaggtcggat

SEQ ID NO: 4147 - DNA, 16 bp, Artificial Sequence
  Synthetic construct
gttcgggcaccagcac

SEQ ID NO: 4148 - DNA, 16 bp, Artificial Sequence
  Synthetic construct
gttcgggcaccagcac

SEQ ID NO: 4149 - DNA, 16 bp, Artificial Sequence
  Synthetic construct
gttcggggtgatgata

SEQ ID NO: 4150 - DNA, 16 bp, Artificial Sequence
  Synthetic construct
gttcggggtgatgata

SEQ ID NO: 4151 - DNA, 16 bp, Artificial Sequence
  Synthetic construct
gttcgggtccctcttt

SEQ ID NO: 4152 - DNA, 16 bp, Artificial Sequence
  Synthetic construct
gttcgggtccctcttt

SEQ ID NO: 4153 - DNA, 16 bp, Artificial Sequence
  Synthetic construct
gttcgggtcgtccagg

SEQ ID NO: 4154 - DNA, 16 bp, Artificial Sequence
  Synthetic construct
gttcgggtcgtccagg

SEQ ID NO: 4155 - DNA, 16 bp, Artificial Sequence
  Synthetic construct
gttcgggtctagagtc

SEQ ID NO: 4156 - DNA, 16 bp, Artificial Sequence
  Synthetic construct
gttcgggtctagagtc

SEQ ID NO: 4157 - DNA, 16 bp, Artificial Sequence
  Synthetic construct
gttctcgagagctggt

SEQ ID NO: 4158 - DNA, 16 bp, Artificial Sequence
  Synthetic construct
gttctcgagagctggt

SEQ ID NO: 4159 - DNA, 16 bp, Artificial Sequence
  Synthetic construct
gttctcgagatgtcgg

SEQ ID NO: 4160 - DNA, 16 bp, Artificial Sequence
  Synthetic construct
gttctcgagatgtcgg

SEQ ID NO: 4161 - DNA, 16 bp, Artificial Sequence
  Synthetic construct
gttctcgagccgtcgt

SEQ ID NO: 4162 - DNA, 16 bp, Artificial Sequence
  Synthetic construct
gttctcgagccgtcgt

SEQ ID NO: 4163 - DNA, 16 bp, Artificial Sequence
  Synthetic construct
gttctcgagcgttgcc

SEQ ID NO: 4164 - DNA, 16 bp, Artificial Sequence
  Synthetic construct
gttctcgagcgttgcc

SEQ ID NO: 4165 - DNA, 16 bp, Artificial Sequence
  Synthetic construct
gttctcgagctagccc

SEQ ID NO: 4166 - DNA, 16 bp, Artificial Sequence
  Synthetic construct
gttctcgagctagccc

SEQ ID NO: 4167 - DNA, 16 bp, Artificial Sequence
  Synthetic construct
gttctcgagggaacgg

SEQ ID NO: 4168 - DNA, 16 bp, Artificial Sequence
  Synthetic construct
gttctcgagggaacgg

SEQ ID NO: 4169 - DNA, 16 bp, Artificial Sequence
  Synthetic construct
gttctcgagtgggatc

SEQ ID NO: 4170 - DNA, 16 bp, Artificial Sequence
  Synthetic construct
gttctcgagtgggatc

SEQ ID NO: 4171 - DNA, 16 bp, Artificial Sequence
  Synthetic construct
gttctcgcaaacccat

SEQ ID NO: 4172 - DNA, 16 bp, Artificial Sequence
  Synthetic construct
gttctcgcaaacccat

SEQ ID NO: 4173 - DNA, 16 bp, Artificial Sequence
  Synthetic construct
gttctcgcaaggactg

SEQ ID NO: 4174 - DNA, 16 bp, Artificial Sequence
  Synthetic construct
gttctcgcaaggactg

SEQ ID NO: 4175 - DNA, 16 bp, Artificial Sequence
  Synthetic construct
gttctcgtcgtaccgg

SEQ ID NO: 4176 - DNA, 16 bp, Artificial Sequence
  Synthetic construct
gttctcgtcgtaccgg

SEQ ID NO: 4177 - DNA, 16 bp, Artificial Sequence
  Synthetic construct
gtttctacatcggaag

SEQ ID NO: 4178 - DNA, 16 bp, Artificial Sequence
  Synthetic construct
gtttctacatcggaag

SEQ ID NO: 4179 - DNA, 16 bp, Artificial Sequence
  Synthetic construct
gtttctatcctctagc

SEQ ID NO: 4180 - DNA, 16 bp, Artificial Sequence
  Synthetic construct
gtttctatcctctagc

SEQ ID NO: 4181 - DNA, 16 bp, Artificial Sequence
  Synthetic construct
gtttctatctacttac

SEQ ID NO: 4182 - DNA, 16 bp, Artificial Sequence
  Synthetic construct
gtttctatctacttac

SEQ ID NO: 4183 - DNA, 16 bp, Artificial Sequence
  Synthetic construct
taaaccgagtgatcgg

SEQ ID NO: 4184 - DNA, 16 bp, Artificial Sequence
  Synthetic construct
taaaccgagtgatcgg

SEQ ID NO: 4185 - DNA, 16 bp, Artificial Sequence
  Synthetic construct
taaaccgcaacacccg

SEQ ID NO: 4186 - DNA, 16 bp, Artificial Sequence
  Synthetic construct
taaaccgcaacacccg

SEQ ID NO: 4187 - DNA, 16 bp, Artificial Sequence
  Synthetic construct
taaaccgcagctccga

SEQ ID NO: 4188 - DNA, 16 bp, Artificial Sequence
  Synthetic construct
taaaccgcagctccga

SEQ ID NO: 4189 - DNA, 16 bp, Artificial Sequence
  Synthetic construct
taaaccggttccacgg

SEQ ID NO: 4190 - DNA, 16 bp, Artificial Sequence
  Synthetic construct
taaaccggttccacgg

SEQ ID NO: 4191 - DNA, 16 bp, Artificial Sequence
  Synthetic construct
taaaccgtctgctgct

SEQ ID NO: 4192 - DNA, 16 bp, Artificial Sequence
  Synthetic construct
taaaccgtctgctgct

SEQ ID NO: 4193 - DNA, 16 bp, Artificial Sequence
  Synthetic construct
taagagaagcaccgct

SEQ ID NO: 4194 - DNA, 16 bp, Artificial Sequence
  Synthetic construct
taagagaagcaccgct

SEQ ID NO: 4195 - DNA, 16 bp, Artificial Sequence
  Synthetic construct
taagagaagcgcctca

SEQ ID NO: 4196 - DNA, 16 bp, Artificial Sequence
  Synthetic construct
taagagaagcgcctca

SEQ ID NO: 4197 - DNA, 16 bp, Artificial Sequence
  Synthetic construct
taagagacacagattc

SEQ ID NO: 4198 - DNA, 16 bp, Artificial Sequence
  Synthetic construct
taagagacacagattc

SEQ ID NO: 4199 - DNA, 16 bp, Artificial Sequence
  Synthetic construct
taagagagttctgaac

SEQ ID NO: 4200 - DNA, 16 bp, Artificial Sequence
  Synthetic construct
taagagagttctgaac

SEQ ID NO: 4201 - DNA, 16 bp, Artificial Sequence
  Synthetic construct
taagagatcacgaagg

SEQ ID NO: 4202 - DNA, 16 bp, Artificial Sequence
  Synthetic construct
taagagatcacgaagg

SEQ ID NO: 4203 - DNA, 16 bp, Artificial Sequence
  Synthetic construct
taagagatcccattat

SEQ ID NO: 4204 - DNA, 16 bp, Artificial Sequence
  Synthetic construct
taagagatcccattat

SEQ ID NO: 4205 - DNA, 16 bp, Artificial Sequence
  Synthetic construct
taagagatcggctacg

SEQ ID NO: 4206 - DNA, 16 bp, Artificial Sequence
  Synthetic construct
taagagatcggctacg

SEQ ID NO: 4207 - DNA, 16 bp, Artificial Sequence
  Synthetic construct
taagagatcttagccc

SEQ ID NO: 4208 - DNA, 16 bp, Artificial Sequence
  Synthetic construct
taagagatcttagccc

SEQ ID NO: 4209 - DNA, 16 bp, Artificial Sequence
  Synthetic construct
taagcgtagaagccca

SEQ ID NO: 4210 - DNA, 16 bp, Artificial Sequence
  Synthetic construct
taagcgtagaagccca

SEQ ID NO: 4211 - DNA, 16 bp, Artificial Sequence
  Synthetic construct
taagcgtagagtcggt

SEQ ID NO: 4212 - DNA, 16 bp, Artificial Sequence
  Synthetic construct
taagcgtagagtcggt

SEQ ID NO: 4213 - DNA, 16 bp, Artificial Sequence
  Synthetic construct
taagcgtaggcagtca

SEQ ID NO: 4214 - DNA, 16 bp, Artificial Sequence
  Synthetic construct
taagcgtaggcagtca

SEQ ID NO: 4215 - DNA, 16 bp, Artificial Sequence
  Synthetic construct
taagcgtagggaacgg

SEQ ID NO: 4216 - DNA, 16 bp, Artificial Sequence
  Synthetic construct
taagcgtagggaacgg

SEQ ID NO: 4217 - DNA, 16 bp, Artificial Sequence
  Synthetic construct
taagcgtagtcacgcc

SEQ ID NO: 4218 - DNA, 16 bp, Artificial Sequence
  Synthetic construct
taagcgtagtcacgcc

SEQ ID NO: 4219 - DNA, 16 bp, Artificial Sequence
  Synthetic construct
taagcgtagtccagga

SEQ ID NO: 4220 - DNA, 16 bp, Artificial Sequence
  Synthetic construct
taagcgtagtccagga

SEQ ID NO: 4221 - DNA, 16 bp, Artificial Sequence
  Synthetic construct
taagcgtagtttcctt

SEQ ID NO: 4222 - DNA, 16 bp, Artificial Sequence
  Synthetic construct
taagcgtagtttcctt

SEQ ID NO: 4223 - DNA, 16 bp, Artificial Sequence
  Synthetic construct
taagcgttccgcgttt

SEQ ID NO: 4224 - DNA, 16 bp, Artificial Sequence
  Synthetic construct
taagcgttccgcgttt

SEQ ID NO: 4225 - DNA, 16 bp, Artificial Sequence
  Synthetic construct
taagcgttctgctgtc

SEQ ID NO: 4226 - DNA, 16 bp, Artificial Sequence
  Synthetic construct
taagcgttctgctgtc

SEQ ID NO: 4227 - DNA, 16 bp, Artificial Sequence
  Synthetic construct
taagtgcagtagtgcg

SEQ ID NO: 4228 - DNA, 16 bp, Artificial Sequence
  Synthetic construct
taagtgcagtagtgcg

SEQ ID NO: 4229 - DNA, 16 bp, Artificial Sequence
  Synthetic construct
taagtgccacggtaag

SEQ ID NO: 4230 - DNA, 16 bp, Artificial Sequence
  Synthetic construct
taagtgccacggtaag

SEQ ID NO: 4231 - DNA, 16 bp, Artificial Sequence
  Synthetic construct
taagtgcgtcctgctt

SEQ ID NO: 4232 - DNA, 16 bp, Artificial Sequence
  Synthetic construct
taagtgcgtcctgctt

SEQ ID NO: 4233 - DNA, 16 bp, Artificial Sequence
  Synthetic construct
taagtgcgtgataaac

SEQ ID NO: 4234 - DNA, 16 bp, Artificial Sequence
  Synthetic construct
taagtgcgtgataaac

SEQ ID NO: 4235 - DNA, 16 bp, Artificial Sequence
  Synthetic construct
taagtgcgttgacgtt

SEQ ID NO: 4236 - DNA, 16 bp, Artificial Sequence
  Synthetic construct
taagtgcgttgacgtt

SEQ ID NO: 4237 - DNA, 16 bp, Artificial Sequence
  Synthetic construct
tacacgaagatcgggt

SEQ ID NO: 4238 - DNA, 16 bp, Artificial Sequence
  Synthetic construct
tacacgaagatcgggt

SEQ ID NO: 4239 - DNA, 16 bp, Artificial Sequence
  Synthetic construct
tacacgaagtacatga

SEQ ID NO: 4240 - DNA, 16 bp, Artificial Sequence
  Synthetic construct
tacacgaagtacatga

SEQ ID NO: 4241 - DNA, 16 bp, Artificial Sequence
  Synthetic construct
tacacgacagtcagag

SEQ ID NO: 4242 - DNA, 16 bp, Artificial Sequence
  Synthetic construct
tacacgacagtcagag

SEQ ID NO: 4243 - DNA, 16 bp, Artificial Sequence
  Synthetic construct
tacacgagtaccggct

SEQ ID NO: 4244 - DNA, 16 bp, Artificial Sequence
  Synthetic construct
tacacgagtaccggct

SEQ ID NO: 4245 - DNA, 16 bp, Artificial Sequence
  Synthetic construct
tacacgatccggcaca

SEQ ID NO: 4246 - DNA, 16 bp, Artificial Sequence
  Synthetic construct
tacacgatccggcaca

SEQ ID NO: 4247 - DNA, 16 bp, Artificial Sequence
  Synthetic construct
tacacgatcggcgcta

SEQ ID NO: 4248 - DNA, 16 bp, Artificial Sequence
  Synthetic construct
tacacgatcggcgcta

SEQ ID NO: 4249 - DNA, 16 bp, Artificial Sequence
  Synthetic construct
tacacgatctgtctcg

SEQ ID NO: 4250 - DNA, 16 bp, Artificial Sequence
  Synthetic construct
tacacgatctgtctcg

SEQ ID NO: 4251 - DNA, 16 bp, Artificial Sequence
  Synthetic construct
tacagtgagaaggcct

SEQ ID NO: 4252 - DNA, 16 bp, Artificial Sequence
  Synthetic construct
tacagtgagaaggcct

SEQ ID NO: 4253 - DNA, 16 bp, Artificial Sequence
  Synthetic construct
tacagtgcacctggtg

SEQ ID NO: 4254 - DNA, 16 bp, Artificial Sequence
  Synthetic construct
tacagtgcacctggtg

SEQ ID NO: 4255 - DNA, 16 bp, Artificial Sequence
  Synthetic construct
tacagtggtttgcatg

SEQ ID NO: 4256 - DNA, 16 bp, Artificial Sequence
  Synthetic construct
tacagtggtttgcatg

SEQ ID NO: 4257 - DNA, 16 bp, Artificial Sequence
  Synthetic construct
tacagtgtcatgcatg

SEQ ID NO: 4258 - DNA, 16 bp, Artificial Sequence
  Synthetic construct
tacagtgtcatgcatg

SEQ ID NO: 4259 - DNA, 16 bp, Artificial Sequence
  Synthetic construct
tacagtgtcggcgcta

SEQ ID NO: 4260 - DNA, 16 bp, Artificial Sequence
  Synthetic construct
tacagtgtcggcgcta

SEQ ID NO: 4261 - DNA, 16 bp, Artificial Sequence
  Synthetic construct
tacctatcattgggcc

SEQ ID NO: 4262 - DNA, 16 bp, Artificial Sequence
  Synthetic construct
tacctatcattgggcc

SEQ ID NO: 4263 - DNA, 16 bp, Artificial Sequence
  Synthetic construct
tacctatgtagaagga

SEQ ID NO: 4264 - DNA, 16 bp, Artificial Sequence
  Synthetic construct
tacctatgtagaagga

SEQ ID NO: 4265 - DNA, 16 bp, Artificial Sequence
  Synthetic construct
tacctattcaataccg

SEQ ID NO: 4266 - DNA, 16 bp, Artificial Sequence
  Synthetic construct
tacctattcaataccg

SEQ ID NO: 4267 - DNA, 16 bp, Artificial Sequence
  Synthetic construct
taccttaaggtagctg

SEQ ID NO: 4268 - DNA, 16 bp, Artificial Sequence
  Synthetic construct
taccttaaggtagctg

SEQ ID NO: 4269 - DNA, 16 bp, Artificial Sequence
  Synthetic construct
taccttacatgggaca

SEQ ID NO: 4270 - DNA, 16 bp, Artificial Sequence
  Synthetic construct
taccttacatgggaca

SEQ ID NO: 4271 - DNA, 16 bp, Artificial Sequence
  Synthetic construct
taccttacattatctc

SEQ ID NO: 4272 - DNA, 16 bp, Artificial Sequence
  Synthetic construct
taccttacattatctc

SEQ ID NO: 4273 - DNA, 16 bp, Artificial Sequence
  Synthetic construct
taccttatcctagaac

SEQ ID NO: 4274 - DNA, 16 bp, Artificial Sequence
  Synthetic construct
taccttatcctagaac

SEQ ID NO: 4275 - DNA, 16 bp, Artificial Sequence
  Synthetic construct
tacggatagcgcttat

SEQ ID NO: 4276 - DNA, 16 bp, Artificial Sequence
  Synthetic construct
tacggatagcgcttat

SEQ ID NO: 4277 - DNA, 16 bp, Artificial Sequence
  Synthetic construct
tacggataggtactct

SEQ ID NO: 4278 - DNA, 16 bp, Artificial Sequence
  Synthetic construct
tacggataggtactct

SEQ ID NO: 4279 - DNA, 16 bp, Artificial Sequence
  Synthetic construct
tacggatagtgcgatg

SEQ ID NO: 4280 - DNA, 16 bp, Artificial Sequence
  Synthetic construct
tacggatagtgcgatg

SEQ ID NO: 4281 - DNA, 16 bp, Artificial Sequence
  Synthetic construct
tacggatagtgtccat

SEQ ID NO: 4282 - DNA, 16 bp, Artificial Sequence
  Synthetic construct
tacggatagtgtccat

SEQ ID NO: 4283 - DNA, 16 bp, Artificial Sequence
  Synthetic construct
tacggatgttccatga

SEQ ID NO: 4284 - DNA, 16 bp, Artificial Sequence
  Synthetic construct
tacggatgttccatga

SEQ ID NO: 4285 - DNA, 16 bp, Artificial Sequence
  Synthetic construct
tacggatgtttaggaa

SEQ ID NO: 4286 - DNA, 16 bp, Artificial Sequence
  Synthetic construct
tacggatgtttaggaa

SEQ ID NO: 4287 - DNA, 16 bp, Artificial Sequence
  Synthetic construct
tacggattcaccatag

SEQ ID NO: 4288 - DNA, 16 bp, Artificial Sequence
  Synthetic construct
tacggattcaccatag

SEQ ID NO: 4289 - DNA, 16 bp, Artificial Sequence
  Synthetic construct
tacgggccatggtcat

SEQ ID NO: 4290 - DNA, 16 bp, Artificial Sequence
  Synthetic construct
tacgggccatggtcat

SEQ ID NO: 4291 - DNA, 16 bp, Artificial Sequence
  Synthetic construct
tacgggcgttagatga

SEQ ID NO: 4292 - DNA, 16 bp, Artificial Sequence
  Synthetic construct
tacgggcgttagatga

SEQ ID NO: 4293 - DNA, 16 bp, Artificial Sequence
  Synthetic construct
tacgggcgttccacgg

SEQ ID NO: 4294 - DNA, 16 bp, Artificial Sequence
  Synthetic construct
tacgggcgttccacgg

SEQ ID NO: 4295 - DNA, 16 bp, Artificial Sequence
  Synthetic construct
tacggtacatgaacct

SEQ ID NO: 4296 - DNA, 16 bp, Artificial Sequence
  Synthetic construct
tacggtacatgaacct

SEQ ID NO: 4297 - DNA, 16 bp, Artificial Sequence
  Synthetic construct
tacggtatcagcgacc

SEQ ID NO: 4298 - DNA, 16 bp, Artificial Sequence
  Synthetic construct
tacggtatcagcgacc

SEQ ID NO: 4299 - DNA, 16 bp, Artificial Sequence
  Synthetic construct
tacggtatctcgcttg

SEQ ID NO: 4300 - DNA, 16 bp, Artificial Sequence
  Synthetic construct
tacggtatctcgcttg

SEQ ID NO: 4301 - DNA, 16 bp, Artificial Sequence
  Synthetic construct
tactcatagagtcggt

SEQ ID NO: 4302 - DNA, 16 bp, Artificial Sequence
  Synthetic construct
tactcatagagtcggt

SEQ ID NO: 4303 - DNA, 16 bp, Artificial Sequence
  Synthetic construct
tactcatagtacgtaa

SEQ ID NO: 4304 - DNA, 16 bp, Artificial Sequence
  Synthetic construct
tactcatagtacgtaa

SEQ ID NO: 4305 - DNA, 16 bp, Artificial Sequence
  Synthetic construct
tactcatcatgcaact

SEQ ID NO: 4306 - DNA, 16 bp, Artificial Sequence
  Synthetic construct
tactcatcatgcaact

SEQ ID NO: 4307 - DNA, 16 bp, Artificial Sequence
  Synthetic construct
tactcatgtacagcag

SEQ ID NO: 4308 - DNA, 16 bp, Artificial Sequence
  Synthetic construct
tactcatgtacagcag

SEQ ID NO: 4309 - DNA, 16 bp, Artificial Sequence
  Synthetic construct
tactcatgttacgact

SEQ ID NO: 4310 - DNA, 16 bp, Artificial Sequence
  Synthetic construct
tactcatgttacgact

SEQ ID NO: 4311 - DNA, 16 bp, Artificial Sequence
  Synthetic construct
tactcatgttccgtct

SEQ ID NO: 4312 - DNA, 16 bp, Artificial Sequence
  Synthetic construct
tactcatgttccgtct

SEQ ID NO: 4313 - DNA, 16 bp, Artificial Sequence
  Synthetic construct
tactcattcctgtacc

SEQ ID NO: 4314 - DNA, 16 bp, Artificial Sequence
  Synthetic construct
tactcattcctgtacc

SEQ ID NO: 4315 - DNA, 16 bp, Artificial Sequence
  Synthetic construct
tactcgccatacgccg

SEQ ID NO: 4316 - DNA, 16 bp, Artificial Sequence
  Synthetic construct
tactcgccatacgccg

SEQ ID NO: 4317 - DNA, 16 bp, Artificial Sequence
  Synthetic construct
tactcgccatttgctt

SEQ ID NO: 4318 - DNA, 16 bp, Artificial Sequence
  Synthetic construct
tactcgccatttgctt

SEQ ID NO: 4319 - DNA, 16 bp, Artificial Sequence
  Synthetic construct
tactcgcgtacgaaat

SEQ ID NO: 4320 - DNA, 16 bp, Artificial Sequence
  Synthetic construct
tactcgcgtacgaaat

SEQ ID NO: 4321 - DNA, 16 bp, Artificial Sequence
  Synthetic construct
tactcgctccgtacaa

SEQ ID NO: 4322 - DNA, 16 bp, Artificial Sequence
  Synthetic construct
tactcgctccgtacaa

SEQ ID NO: 4323 - DNA, 16 bp, Artificial Sequence
  Synthetic construct
tacttacaggagtacc

SEQ ID NO: 4324 - DNA, 16 bp, Artificial Sequence
  Synthetic construct
tacttacaggagtacc

SEQ ID NO: 4325 - DNA, 16 bp, Artificial Sequence
  Synthetic construct
tacttacagtgaattg

SEQ ID NO: 4326 - DNA, 16 bp, Artificial Sequence
  Synthetic construct
tacttacagtgaattg

SEQ ID NO: 4327 - DNA, 16 bp, Artificial Sequence
  Synthetic construct
tacttacgtatgaatg

SEQ ID NO: 4328 - DNA, 16 bp, Artificial Sequence
  Synthetic construct
tacttacgtatgaatg

SEQ ID NO: 4329 - DNA, 16 bp, Artificial Sequence
  Synthetic construct
tacttacgtccgaaga

SEQ ID NO: 4330 - DNA, 16 bp, Artificial Sequence
  Synthetic construct
tacttacgtccgaaga

SEQ ID NO: 4331 - DNA, 16 bp, Artificial Sequence
  Synthetic construct
tacttactccaaactg

SEQ ID NO: 4332 - DNA, 16 bp, Artificial Sequence
  Synthetic construct
tacttactccaaactg

SEQ ID NO: 4333 - DNA, 16 bp, Artificial Sequence
  Synthetic construct
tacttgtagcagactg

SEQ ID NO: 4334 - DNA, 16 bp, Artificial Sequence
  Synthetic construct
tacttgtagcagactg

SEQ ID NO: 4335 - DNA, 16 bp, Artificial Sequence
  Synthetic construct
tacttgtcactagtac

SEQ ID NO: 4336 - DNA, 16 bp, Artificial Sequence
  Synthetic construct
tacttgtcactagtac

SEQ ID NO: 4337 - DNA, 16 bp, Artificial Sequence
  Synthetic construct
tacttgtcagcctgtg

SEQ ID NO: 4338 - DNA, 16 bp, Artificial Sequence
  Synthetic construct
tacttgtcagcctgtg

SEQ ID NO: 4339 - DNA, 16 bp, Artificial Sequence
  Synthetic construct
tacttgtgtagcacga

SEQ ID NO: 4340 - DNA, 16 bp, Artificial Sequence
  Synthetic construct
tacttgtgtagcacga

SEQ ID NO: 4341 - DNA, 16 bp, Artificial Sequence
  Synthetic construct
tacttgtgtcgagatg

SEQ ID NO: 4342 - DNA, 16 bp, Artificial Sequence
  Synthetic construct
tacttgtgtcgagatg

SEQ ID NO: 4343 - DNA, 16 bp, Artificial Sequence
  Synthetic construct
tacttgtgttcacggc

SEQ ID NO: 4344 - DNA, 16 bp, Artificial Sequence
  Synthetic construct
tacttgtgttcacggc

SEQ ID NO: 4345 - DNA, 16 bp, Artificial Sequence
  Synthetic construct
tacttgttcttccttc

SEQ ID NO: 4346 - DNA, 16 bp, Artificial Sequence
  Synthetic construct
tacttgttcttccttc

SEQ ID NO: 4347 - DNA, 16 bp, Artificial Sequence
  Synthetic construct
tagaccaagcgctcca

SEQ ID NO: 4348 - DNA, 16 bp, Artificial Sequence
  Synthetic construct
tagaccaagcgctcca

SEQ ID NO: 4349 - DNA, 16 bp, Artificial Sequence
  Synthetic construct
tagaccagtattcgtg

SEQ ID NO: 4350 - DNA, 16 bp, Artificial Sequence
  Synthetic construct
tagaccagtattcgtg

SEQ ID NO: 4351 - DNA, 16 bp, Artificial Sequence
  Synthetic construct
tagaccagtcaaactc

SEQ ID NO: 4352 - DNA, 16 bp, Artificial Sequence
  Synthetic construct
tagaccagtcaaactc

SEQ ID NO: 4353 - DNA, 16 bp, Artificial Sequence
  Synthetic construct
tagaccagtcagaggt

SEQ ID NO: 4354 - DNA, 16 bp, Artificial Sequence
  Synthetic construct
tagaccagtcagaggt

SEQ ID NO: 4355 - DNA, 16 bp, Artificial Sequence
  Synthetic construct
tagaccatcacttatc

SEQ ID NO: 4356 - DNA, 16 bp, Artificial Sequence
  Synthetic construct
tagaccatcacttatc

SEQ ID NO: 4357 - DNA, 16 bp, Artificial Sequence
  Synthetic construct
tagaccatccaaccaa

SEQ ID NO: 4358 - DNA, 16 bp, Artificial Sequence
  Synthetic construct
tagaccatccaaccaa

SEQ ID NO: 4359 - DNA, 16 bp, Artificial Sequence
  Synthetic construct
tagaccatcctctagc

SEQ ID NO: 4360 - DNA, 16 bp, Artificial Sequence
  Synthetic construct
tagaccatcctctagc

SEQ ID NO: 4361 - DNA, 16 bp, Artificial Sequence
  Synthetic construct
tagagctaggagttta

SEQ ID NO: 4362 - DNA, 16 bp, Artificial Sequence
  Synthetic construct
tagagctaggagttta

SEQ ID NO: 4363 - DNA, 16 bp, Artificial Sequence
  Synthetic construct
tagagctcagtcgtgc

SEQ ID NO: 4364 - DNA, 16 bp, Artificial Sequence
  Synthetic construct
tagagctcagtcgtgc

SEQ ID NO: 4365 - DNA, 16 bp, Artificial Sequence
  Synthetic construct
tagccggagatctgct

SEQ ID NO: 4366 - DNA, 16 bp, Artificial Sequence
  Synthetic construct
tagccggagatctgct

SEQ ID NO: 4367 - DNA, 16 bp, Artificial Sequence
  Synthetic construct
tagccggagctatgct

SEQ ID NO: 4368 - DNA, 16 bp, Artificial Sequence
  Synthetic construct
tagccggagctatgct

SEQ ID NO: 4369 - DNA, 16 bp, Artificial Sequence
  Synthetic construct
tagccgggttagaaca

SEQ ID NO: 4370 - DNA, 16 bp, Artificial Sequence
  Synthetic construct
tagccgggttagaaca

SEQ ID NO: 4371 - DNA, 16 bp, Artificial Sequence
  Synthetic construct
taggcatagtacgcga

SEQ ID NO: 4372 - DNA, 16 bp, Artificial Sequence
  Synthetic construct
taggcatagtacgcga

SEQ ID NO: 4373 - DNA, 16 bp, Artificial Sequence
  Synthetic construct
taggcatcaagcccac

SEQ ID NO: 4374 - DNA, 16 bp, Artificial Sequence
  Synthetic construct
taggcatcaagcccac

SEQ ID NO: 4375 - DNA, 16 bp, Artificial Sequence
  Synthetic construct
taggcatcaatgccat

SEQ ID NO: 4376 - DNA, 16 bp, Artificial Sequence
  Synthetic construct
taggcatcaatgccat

SEQ ID NO: 4377 - DNA, 16 bp, Artificial Sequence
  Synthetic construct
taggcatgtaaacctc

SEQ ID NO: 4378 - DNA, 16 bp, Artificial Sequence
  Synthetic construct
taggcatgtaaacctc

SEQ ID NO: 4379 - DNA, 16 bp, Artificial Sequence
  Synthetic construct
taggcatgtcagaata

SEQ ID NO: 4380 - DNA, 16 bp, Artificial Sequence
  Synthetic construct
taggcatgtcagaata

SEQ ID NO: 4381 - DNA, 16 bp, Artificial Sequence
  Synthetic construct
taggcattcctgcttg

SEQ ID NO: 4382 - DNA, 16 bp, Artificial Sequence
  Synthetic construct
taggcattcctgcttg

SEQ ID NO: 4383 - DNA, 16 bp, Artificial Sequence
  Synthetic construct
tagtggtagaattgtg

SEQ ID NO: 4384 - DNA, 16 bp, Artificial Sequence
  Synthetic construct
tagtggtagaattgtg

SEQ ID NO: 4385 - DNA, 16 bp, Artificial Sequence
  Synthetic construct
tagtggtagacagacc

SEQ ID NO: 4386 - DNA, 16 bp, Artificial Sequence
  Synthetic construct
tagtggtagacagacc

SEQ ID NO: 4387 - DNA, 16 bp, Artificial Sequence
  Synthetic construct
tagtggtgtagagtgc

SEQ ID NO: 4388 - DNA, 16 bp, Artificial Sequence
  Synthetic construct
tagtggtgtagagtgc

SEQ ID NO: 4389 - DNA, 16 bp, Artificial Sequence
  Synthetic construct
tagtggttcatatcgg

SEQ ID NO: 4390 - DNA, 16 bp, Artificial Sequence
  Synthetic construct
tagtggttcatatcgg

SEQ ID NO: 4391 - DNA, 16 bp, Artificial Sequence
  Synthetic construct
tagttggagctgcgaa

SEQ ID NO: 4392 - DNA, 16 bp, Artificial Sequence
  Synthetic construct
tagttggagctgcgaa

SEQ ID NO: 4393 - DNA, 16 bp, Artificial Sequence
  Synthetic construct
tagttggagttcgcgc

SEQ ID NO: 4394 - DNA, 16 bp, Artificial Sequence
  Synthetic construct
tagttggagttcgcgc

SEQ ID NO: 4395 - DNA, 16 bp, Artificial Sequence
  Synthetic construct
tagttggcagtcgtgc

SEQ ID NO: 4396 - DNA, 16 bp, Artificial Sequence
  Synthetic construct
tagttggcagtcgtgc

SEQ ID NO: 4397 - DNA, 16 bp, Artificial Sequence
  Synthetic construct
tagttggcataccatg

SEQ ID NO: 4398 - DNA, 16 bp, Artificial Sequence
  Synthetic construct
tagttggcataccatg

SEQ ID NO: 4399 - DNA, 16 bp, Artificial Sequence
  Synthetic construct
tagttggtccagggct

SEQ ID NO: 4400 - DNA, 16 bp, Artificial Sequence
  Synthetic construct
tagttggtccagggct

SEQ ID NO: 4401 - DNA, 16 bp, Artificial Sequence
  Synthetic construct
tagttggtcccaagat

SEQ ID NO: 4402 - DNA, 16 bp, Artificial Sequence
  Synthetic construct
tagttggtcccaagat

SEQ ID NO: 4403 - DNA, 16 bp, Artificial Sequence
  Synthetic construct
tagttggtccgatatg

SEQ ID NO: 4404 - DNA, 16 bp, Artificial Sequence
  Synthetic construct
tagttggtccgatatg

SEQ ID NO: 4405 - DNA, 16 bp, Artificial Sequence
  Synthetic construct
tatcaggagcaggcta

SEQ ID NO: 4406 - DNA, 16 bp, Artificial Sequence
  Synthetic construct
tatcaggagcaggcta

SEQ ID NO: 4407 - DNA, 16 bp, Artificial Sequence
  Synthetic construct
tatcaggaggccgaat

SEQ ID NO: 4408 - DNA, 16 bp, Artificial Sequence
  Synthetic construct
tatcaggaggccgaat

SEQ ID NO: 4409 - DNA, 16 bp, Artificial Sequence
  Synthetic construct
tatcaggcaagtaatg

SEQ ID NO: 4410 - DNA, 16 bp, Artificial Sequence
  Synthetic construct
tatcaggcaagtaatg

SEQ ID NO: 4411 - DNA, 16 bp, Artificial Sequence
  Synthetic construct
tatcagggtgtgaaat

SEQ ID NO: 4412 - DNA, 16 bp, Artificial Sequence
  Synthetic construct
tatcagggtgtgaaat

SEQ ID NO: 4413 - DNA, 16 bp, Artificial Sequence
  Synthetic construct
tatcaggtcataaagg

SEQ ID NO: 4414 - DNA, 16 bp, Artificial Sequence
  Synthetic construct
tatcaggtcataaagg

SEQ ID NO: 4415 - DNA, 16 bp, Artificial Sequence
  Synthetic construct
tatctcaagtagatgt

SEQ ID NO: 4416 - DNA, 16 bp, Artificial Sequence
  Synthetic construct
tatctcaagtagatgt

SEQ ID NO: 4417 - DNA, 16 bp, Artificial Sequence
  Synthetic construct
tatctcaagtgggttg

SEQ ID NO: 4418 - DNA, 16 bp, Artificial Sequence
  Synthetic construct
tatctcaagtgggttg

SEQ ID NO: 4419 - DNA, 16 bp, Artificial Sequence
  Synthetic construct
tatctcacacagaggt

SEQ ID NO: 4420 - DNA, 16 bp, Artificial Sequence
  Synthetic construct
tatctcacacagaggt

SEQ ID NO: 4421 - DNA, 16 bp, Artificial Sequence
  Synthetic construct
tatctcacaccaggct

SEQ ID NO: 4422 - DNA, 16 bp, Artificial Sequence
  Synthetic construct
tatctcacaccaggct

SEQ ID NO: 4423 - DNA, 16 bp, Artificial Sequence
  Synthetic construct
tatctcacactacagt

SEQ ID NO: 4424 - DNA, 16 bp, Artificial Sequence
  Synthetic construct
tatctcacactacagt

SEQ ID NO: 4425 - DNA, 16 bp, Artificial Sequence
  Synthetic construct
tatctcagtctctcgt

SEQ ID NO: 4426 - DNA, 16 bp, Artificial Sequence
  Synthetic construct
tatctcagtctctcgt

SEQ ID NO: 4427 - DNA, 16 bp, Artificial Sequence
  Synthetic construct
tatgcccagacaagcc

SEQ ID NO: 4428 - DNA, 16 bp, Artificial Sequence
  Synthetic construct
tatgcccagacaagcc

SEQ ID NO: 4429 - DNA, 16 bp, Artificial Sequence
  Synthetic construct
tatgcccagctgcaag

SEQ ID NO: 4430 - DNA, 16 bp, Artificial Sequence
  Synthetic construct
tatgcccagctgcaag

SEQ ID NO: 4431 - DNA, 16 bp, Artificial Sequence
  Synthetic construct
tatgcccgtctcccta

SEQ ID NO: 4432 - DNA, 16 bp, Artificial Sequence
  Synthetic construct
tatgcccgtctcccta

SEQ ID NO: 4433 - DNA, 16 bp, Artificial Sequence
  Synthetic construct
tatgcccgttacgact

SEQ ID NO: 4434 - DNA, 16 bp, Artificial Sequence
  Synthetic construct
tatgcccgttacgact

SEQ ID NO: 4435 - DNA, 16 bp, Artificial Sequence
  Synthetic construct
tatgccctctgtctcg

SEQ ID NO: 4436 - DNA, 16 bp, Artificial Sequence
  Synthetic construct
tatgccctctgtctcg

SEQ ID NO: 4437 - DNA, 16 bp, Artificial Sequence
  Synthetic construct
tattaccagaaaccat

SEQ ID NO: 4438 - DNA, 16 bp, Artificial Sequence
  Synthetic construct
tattaccagaaaccat

SEQ ID NO: 4439 - DNA, 16 bp, Artificial Sequence
  Synthetic construct
tattacccacactgcg

SEQ ID NO: 4440 - DNA, 16 bp, Artificial Sequence
  Synthetic construct
tattacccacactgcg

SEQ ID NO: 4441 - DNA, 16 bp, Artificial Sequence
  Synthetic construct
tattacccatggtcat

SEQ ID NO: 4442 - DNA, 16 bp, Artificial Sequence
  Synthetic construct
tattacccatggtcat

SEQ ID NO: 4443 - DNA, 16 bp, Artificial Sequence
  Synthetic construct
tattaccgtactcgcg

SEQ ID NO: 4444 - DNA, 16 bp, Artificial Sequence
  Synthetic construct
tattaccgtactcgcg

SEQ ID NO: 4445 - DNA, 16 bp, Artificial Sequence
  Synthetic construct
tcaacgacagacgtag

SEQ ID NO: 4446 - DNA, 16 bp, Artificial Sequence
  Synthetic construct
tcaacgacagacgtag

SEQ ID NO: 4447 - DNA, 16 bp, Artificial Sequence
  Synthetic construct
tcaacgacatctccca

SEQ ID NO: 4448 - DNA, 16 bp, Artificial Sequence
  Synthetic construct
tcaacgacatctccca

SEQ ID NO: 4449 - DNA, 16 bp, Artificial Sequence
  Synthetic construct
tcaatctgttctcatt

SEQ ID NO: 4450 - DNA, 16 bp, Artificial Sequence
  Synthetic construct
tcaatctgttctcatt

SEQ ID NO: 4451 - DNA, 16 bp, Artificial Sequence
  Synthetic construct
tcacaagagcccgaaa

SEQ ID NO: 4452 - DNA, 16 bp, Artificial Sequence
  Synthetic construct
tcacaagagcccgaaa

SEQ ID NO: 4453 - DNA, 16 bp, Artificial Sequence
  Synthetic construct
tcacaaggttgcctct

SEQ ID NO: 4454 - DNA, 16 bp, Artificial Sequence
  Synthetic construct
tcacaaggttgcctct

SEQ ID NO: 4455 - DNA, 16 bp, Artificial Sequence
  Synthetic construct
tcacaaggttggaggt

SEQ ID NO: 4456 - DNA, 16 bp, Artificial Sequence
  Synthetic construct
tcacaaggttggaggt

SEQ ID NO: 4457 - DNA, 16 bp, Artificial Sequence
  Synthetic construct
tcacaagtcataaagg

SEQ ID NO: 4458 - DNA, 16 bp, Artificial Sequence
  Synthetic construct
tcacaagtcataaagg

SEQ ID NO: 4459 - DNA, 16 bp, Artificial Sequence
  Synthetic construct
tcacaagtccaaacac

SEQ ID NO: 4460 - DNA, 16 bp, Artificial Sequence
  Synthetic construct
tcacaagtccaaacac

SEQ ID NO: 4461 - DNA, 16 bp, Artificial Sequence
  Synthetic construct
tcacaagtcggcatcg

SEQ ID NO: 4462 - DNA, 16 bp, Artificial Sequence
  Synthetic construct
tcacaagtcggcatcg

SEQ ID NO: 4463 - DNA, 16 bp, Artificial Sequence
  Synthetic construct
tcacgaaagctcctct

SEQ ID NO: 4464 - DNA, 16 bp, Artificial Sequence
  Synthetic construct
tcacgaaagctcctct

SEQ ID NO: 4465 - DNA, 16 bp, Artificial Sequence
  Synthetic construct
tcacgaagtcaaactc

SEQ ID NO: 4466 - DNA, 16 bp, Artificial Sequence
  Synthetic construct
tcacgaagtcaaactc

SEQ ID NO: 4467 - DNA, 16 bp, Artificial Sequence
  Synthetic construct
tcacgaagtcgaaagc

SEQ ID NO: 4468 - DNA, 16 bp, Artificial Sequence
  Synthetic construct
tcacgaagtcgaaagc

SEQ ID NO: 4469 - DNA, 16 bp, Artificial Sequence
  Synthetic construct
tcacgaatcatctgcc

SEQ ID NO: 4470 - DNA, 16 bp, Artificial Sequence
  Synthetic construct
tcacgaatcatctgcc

SEQ ID NO: 4471 - DNA, 16 bp, Artificial Sequence
  Synthetic construct
tcacgaatcccacttg

SEQ ID NO: 4472 - DNA, 16 bp, Artificial Sequence
  Synthetic construct
tcacgaatcccacttg

SEQ ID NO: 4473 - DNA, 16 bp, Artificial Sequence
  Synthetic construct
tcacgaatcgtggtcg

SEQ ID NO: 4474 - DNA, 16 bp, Artificial Sequence
  Synthetic construct
tcacgaatcgtggtcg

SEQ ID NO: 4475 - DNA, 16 bp, Artificial Sequence
  Synthetic construct
tcacgaatctactatc

SEQ ID NO: 4476 - DNA, 16 bp, Artificial Sequence
  Synthetic construct
tcacgaatctactatc

SEQ ID NO: 4477 - DNA, 16 bp, Artificial Sequence
  Synthetic construct
tcagatgaggtaaact

SEQ ID NO: 4478 - DNA, 16 bp, Artificial Sequence
  Synthetic construct
tcagatgaggtaaact

SEQ ID NO: 4479 - DNA, 16 bp, Artificial Sequence
  Synthetic construct
tcagatgagttacggg

SEQ ID NO: 4480 - DNA, 16 bp, Artificial Sequence
  Synthetic construct
tcagatgagttacggg

SEQ ID NO: 4481 - DNA, 16 bp, Artificial Sequence
  Synthetic construct
tcagatgcacggtaga

SEQ ID NO: 4482 - DNA, 16 bp, Artificial Sequence
  Synthetic construct
tcagatgcacggtaga

SEQ ID NO: 4483 - DNA, 16 bp, Artificial Sequence
  Synthetic construct
tcagatgcatgggaac

SEQ ID NO: 4484 - DNA, 16 bp, Artificial Sequence
  Synthetic construct
tcagatgcatgggaac

SEQ ID NO: 4485 - DNA, 16 bp, Artificial Sequence
  Synthetic construct
tcagatgcattcctgc

SEQ ID NO: 4486 - DNA, 16 bp, Artificial Sequence
  Synthetic construct
tcagatgcattcctgc

SEQ ID NO: 4487 - DNA, 16 bp, Artificial Sequence
  Synthetic construct
tcagatggtctcaaca

SEQ ID NO: 4488 - DNA, 16 bp, Artificial Sequence
  Synthetic construct
tcagatggtctcaaca

SEQ ID NO: 4489 - DNA, 16 bp, Artificial Sequence
  Synthetic construct
tcagatggtgtcaatc

SEQ ID NO: 4490 - DNA, 16 bp, Artificial Sequence
  Synthetic construct
tcagatggtgtcaatc

SEQ ID NO: 4491 - DNA, 16 bp, Artificial Sequence
  Synthetic construct
tcagatggttatcggt

SEQ ID NO: 4492 - DNA, 16 bp, Artificial Sequence
  Synthetic construct
tcagatggttatcggt

SEQ ID NO: 4493 - DNA, 16 bp, Artificial Sequence
  Synthetic construct
tcagatgtcaacacac

SEQ ID NO: 4494 - DNA, 16 bp, Artificial Sequence
  Synthetic construct
tcagatgtcaacacac

SEQ ID NO: 4495 - DNA, 16 bp, Artificial Sequence
  Synthetic construct
tcagatgtcaacgcta

SEQ ID NO: 4496 - DNA, 16 bp, Artificial Sequence
  Synthetic construct
tcagatgtcaacgcta

SEQ ID NO: 4497 - DNA, 16 bp, Artificial Sequence
  Synthetic construct
tcagatgtcaggtaaa

SEQ ID NO: 4498 - DNA, 16 bp, Artificial Sequence
  Synthetic construct
tcagatgtcaggtaaa

SEQ ID NO: 4499 - DNA, 16 bp, Artificial Sequence
  Synthetic construct
tcagatgtcagtttgg

SEQ ID NO: 4500 - DNA, 16 bp, Artificial Sequence
  Synthetic construct
tcagatgtcagtttgg

SEQ ID NO: 4501 - DNA, 16 bp, Artificial Sequence
  Synthetic construct
tcagatgtcatcaccc

SEQ ID NO: 4502 - DNA, 16 bp, Artificial Sequence
  Synthetic construct
tcagatgtcatcaccc

SEQ ID NO: 4503 - DNA, 16 bp, Artificial Sequence
  Synthetic construct
tcagatgtctcacatt

SEQ ID NO: 4504 - DNA, 16 bp, Artificial Sequence
  Synthetic construct
tcagatgtctcacatt

SEQ ID NO: 4505 - DNA, 16 bp, Artificial Sequence
  Synthetic construct
tcagcaaagaaacgag

SEQ ID NO: 4506 - DNA, 16 bp, Artificial Sequence
  Synthetic construct
tcagcaaagaaacgag

SEQ ID NO: 4507 - DNA, 16 bp, Artificial Sequence
  Synthetic construct
tcagcaaaggcccgtt

SEQ ID NO: 4508 - DNA, 16 bp, Artificial Sequence
  Synthetic construct
tcagcaaaggcccgtt

SEQ ID NO: 4509 - DNA, 16 bp, Artificial Sequence
  Synthetic construct
tcagcaaagggcttga

SEQ ID NO: 4510 - DNA, 16 bp, Artificial Sequence
  Synthetic construct
tcagcaaagggcttga

SEQ ID NO: 4511 - DNA, 16 bp, Artificial Sequence
  Synthetic construct
tcagcaacaccgatat

SEQ ID NO: 4512 - DNA, 16 bp, Artificial Sequence
  Synthetic construct
tcagcaacaccgatat

SEQ ID NO: 4513 - DNA, 16 bp, Artificial Sequence
  Synthetic construct
tcagcaatcacgacta

SEQ ID NO: 4514 - DNA, 16 bp, Artificial Sequence
  Synthetic construct
tcagcaatcacgacta

SEQ ID NO: 4515 - DNA, 16 bp, Artificial Sequence
  Synthetic construct
tcagcaatcatctgtt

SEQ ID NO: 4516 - DNA, 16 bp, Artificial Sequence
  Synthetic construct
tcagcaatcatctgtt

SEQ ID NO: 4517 - DNA, 16 bp, Artificial Sequence
  Synthetic construct
tcagctcaggtagctg

SEQ ID NO: 4518 - DNA, 16 bp, Artificial Sequence
  Synthetic construct
tcagctcaggtagctg

SEQ ID NO: 4519 - DNA, 16 bp, Artificial Sequence
  Synthetic construct
tcagctcagtaggcca

SEQ ID NO: 4520 - DNA, 16 bp, Artificial Sequence
  Synthetic construct
tcagctcagtaggcca

SEQ ID NO: 4521 - DNA, 16 bp, Artificial Sequence
  Synthetic construct
tcagctcagtgcgatg

SEQ ID NO: 4522 - DNA, 16 bp, Artificial Sequence
  Synthetic construct
tcagctcagtgcgatg

SEQ ID NO: 4523 - DNA, 16 bp, Artificial Sequence
  Synthetic construct
tcagctccaccaggct

SEQ ID NO: 4524 - DNA, 16 bp, Artificial Sequence
  Synthetic construct
tcagctccaccaggct

SEQ ID NO: 4525 - DNA, 16 bp, Artificial Sequence
  Synthetic construct
tcagctccagccacca

SEQ ID NO: 4526 - DNA, 16 bp, Artificial Sequence
  Synthetic construct
tcagctccagccacca

SEQ ID NO: 4527 - DNA, 16 bp, Artificial Sequence
  Synthetic construct
tcagctccatgcaact

SEQ ID NO: 4528 - DNA, 16 bp, Artificial Sequence
  Synthetic construct
tcagctccatgcaact

SEQ ID NO: 4529 - DNA, 16 bp, Artificial Sequence
  Synthetic construct
tcagctcgtaaagtca

SEQ ID NO: 4530 - DNA, 16 bp, Artificial Sequence
  Synthetic construct
tcagctcgtaaagtca

SEQ ID NO: 4531 - DNA, 16 bp, Artificial Sequence
  Synthetic construct
tcaggatagcacacag

SEQ ID NO: 4532 - DNA, 16 bp, Artificial Sequence
  Synthetic construct
tcaggatagcacacag

SEQ ID NO: 4533 - DNA, 16 bp, Artificial Sequence
  Synthetic construct
tcaggatagcgtgagt

SEQ ID NO: 4534 - DNA, 16 bp, Artificial Sequence
  Synthetic construct
tcaggatagcgtgagt

SEQ ID NO: 4535 - DNA, 16 bp, Artificial Sequence
  Synthetic construct
tcaggatagctcaact

SEQ ID NO: 4536 - DNA, 16 bp, Artificial Sequence
  Synthetic construct
tcaggatagctcaact

SEQ ID NO: 4537 - DNA, 16 bp, Artificial Sequence
  Synthetic construct
tcaggatcacatccgg

SEQ ID NO: 4538 - DNA, 16 bp, Artificial Sequence
  Synthetic construct
tcaggatcacatccgg

SEQ ID NO: 4539 - DNA, 16 bp, Artificial Sequence
  Synthetic construct
tcaggatgttctggta

SEQ ID NO: 4540 - DNA, 16 bp, Artificial Sequence
  Synthetic construct
tcaggatgttctggta

SEQ ID NO: 4541 - DNA, 16 bp, Artificial Sequence
  Synthetic construct
tcaggattcaccttat

SEQ ID NO: 4542 - DNA, 16 bp, Artificial Sequence
  Synthetic construct
tcaggattcaccttat

SEQ ID NO: 4543 - DNA, 16 bp, Artificial Sequence
  Synthetic construct
tcaggattcctttcgg

SEQ ID NO: 4544 - DNA, 16 bp, Artificial Sequence
  Synthetic construct
tcaggattcctttcgg

SEQ ID NO: 4545 - DNA, 16 bp, Artificial Sequence
  Synthetic construct
tcaggattcgccagca

SEQ ID NO: 4546 - DNA, 16 bp, Artificial Sequence
  Synthetic construct
tcaggattcgccagca

SEQ ID NO: 4547 - DNA, 16 bp, Artificial Sequence
  Synthetic construct
tcaggattctctgtcg

SEQ ID NO: 4548 - DNA, 16 bp, Artificial Sequence
  Synthetic construct
tcaggattctctgtcg

SEQ ID NO: 4549 - DNA, 16 bp, Artificial Sequence
  Synthetic construct
tcaggattcttgggta

SEQ ID NO: 4550 - DNA, 16 bp, Artificial Sequence
  Synthetic construct
tcaggattcttgggta

SEQ ID NO: 4551 - DNA, 16 bp, Artificial Sequence
  Synthetic construct
tcaggtacacttaagc

SEQ ID NO: 4552 - DNA, 16 bp, Artificial Sequence
  Synthetic construct
tcaggtacacttaagc

SEQ ID NO: 4553 - DNA, 16 bp, Artificial Sequence
  Synthetic construct
tcaggtagtcttctcg

SEQ ID NO: 4554 - DNA, 16 bp, Artificial Sequence
  Synthetic construct
tcaggtagtcttctcg

SEQ ID NO: 4555 - DNA, 16 bp, Artificial Sequence
  Synthetic construct
tcaggtagtgttaaga

SEQ ID NO: 4556 - DNA, 16 bp, Artificial Sequence
  Synthetic construct
tcaggtagtgttaaga

SEQ ID NO: 4557 - DNA, 16 bp, Artificial Sequence
  Synthetic construct
tcaggtatcagcatgt

SEQ ID NO: 4558 - DNA, 16 bp, Artificial Sequence
  Synthetic construct
tcaggtatcagcatgt

SEQ ID NO: 4559 - DNA, 16 bp, Artificial Sequence
  Synthetic construct
tcaggtatcgtgggaa

SEQ ID NO: 4560 - DNA, 16 bp, Artificial Sequence
  Synthetic construct
tcaggtatcgtgggaa

SEQ ID NO: 4561 - DNA, 16 bp, Artificial Sequence
  Synthetic construct
tcaggtatctcttatg

SEQ ID NO: 4562 - DNA, 16 bp, Artificial Sequence
  Synthetic construct
tcaggtatctcttatg

SEQ ID NO: 4563 - DNA, 16 bp, Artificial Sequence
  Synthetic construct
tcattacaggatgcgt

SEQ ID NO: 4564 - DNA, 16 bp, Artificial Sequence
  Synthetic construct
tcattacaggatgcgt

SEQ ID NO: 4565 - DNA, 16 bp, Artificial Sequence
  Synthetic construct
tcattacaggccgaat

SEQ ID NO: 4566 - DNA, 16 bp, Artificial Sequence
  Synthetic construct
tcattacaggccgaat

SEQ ID NO: 4567 - DNA, 16 bp, Artificial Sequence
  Synthetic construct
tcattacagtatcgaa

SEQ ID NO: 4568 - DNA, 16 bp, Artificial Sequence
  Synthetic construct
tcattacagtatcgaa

SEQ ID NO: 4569 - DNA, 16 bp, Artificial Sequence
  Synthetic construct
tcattaccaggaatcg

SEQ ID NO: 4570 - DNA, 16 bp, Artificial Sequence
  Synthetic construct
tcattaccaggaatcg

SEQ ID NO: 4571 - DNA, 16 bp, Artificial Sequence
  Synthetic construct
tcattactcgtaggag

SEQ ID NO: 4572 - DNA, 16 bp, Artificial Sequence
  Synthetic construct
tcattactcgtaggag

SEQ ID NO: 4573 - DNA, 16 bp, Artificial Sequence
  Synthetic construct
tcatttgagctaggca

SEQ ID NO: 4574 - DNA, 16 bp, Artificial Sequence
  Synthetic construct
tcatttgagctaggca

SEQ ID NO: 4575 - DNA, 16 bp, Artificial Sequence
  Synthetic construct
tcatttgagctccttc

SEQ ID NO: 4576 - DNA, 16 bp, Artificial Sequence
  Synthetic construct
tcatttgagctccttc

SEQ ID NO: 4577 - DNA, 16 bp, Artificial Sequence
  Synthetic construct
tcatttgcaatgaatg

SEQ ID NO: 4578 - DNA, 16 bp, Artificial Sequence
  Synthetic construct
tcatttgcaatgaatg

SEQ ID NO: 4579 - DNA, 16 bp, Artificial Sequence
  Synthetic construct
tcatttgcagtcagag

SEQ ID NO: 4580 - DNA, 16 bp, Artificial Sequence
  Synthetic construct
tcatttgcagtcagag

SEQ ID NO: 4581 - DNA, 16 bp, Artificial Sequence
  Synthetic construct
tcatttggtgaaatca

SEQ ID NO: 4582 - DNA, 16 bp, Artificial Sequence
  Synthetic construct
tcatttggtgaaatca

SEQ ID NO: 4583 - DNA, 16 bp, Artificial Sequence
  Synthetic construct
tcatttggtgataaac

SEQ ID NO: 4584 - DNA, 16 bp, Artificial Sequence
  Synthetic construct
tcatttggtgataaac

SEQ ID NO: 4585 - DNA, 16 bp, Artificial Sequence
  Synthetic construct
tcatttggtggacgat

SEQ ID NO: 4586 - DNA, 16 bp, Artificial Sequence
  Synthetic construct
tcatttggtggacgat

SEQ ID NO: 4587 - DNA, 16 bp, Artificial Sequence
  Synthetic construct
tcatttggttaagaac

SEQ ID NO: 4588 - DNA, 16 bp, Artificial Sequence
  Synthetic construct
tcatttggttaagaac

SEQ ID NO: 4589 - DNA, 16 bp, Artificial Sequence
  Synthetic construct
tccacacagcgatccc

SEQ ID NO: 4590 - DNA, 16 bp, Artificial Sequence
  Synthetic construct
tccacacagcgatccc

SEQ ID NO: 4591 - DNA, 16 bp, Artificial Sequence
  Synthetic construct
tccacacgtaatcgtc

SEQ ID NO: 4592 - DNA, 16 bp, Artificial Sequence
  Synthetic construct
tccacacgtaatcgtc

SEQ ID NO: 4593 - DNA, 16 bp, Artificial Sequence
  Synthetic construct
tccacactctgccagg

SEQ ID NO: 4594 - DNA, 16 bp, Artificial Sequence
  Synthetic construct
tccacactctgccagg

SEQ ID NO: 4595 - DNA, 16 bp, Artificial Sequence
  Synthetic construct
tcccgatagagcctag

SEQ ID NO: 4596 - DNA, 16 bp, Artificial Sequence
  Synthetic construct
tcccgatagagcctag

SEQ ID NO: 4597 - DNA, 16 bp, Artificial Sequence
  Synthetic construct
tcccgataggtgcaac

SEQ ID NO: 4598 - DNA, 16 bp, Artificial Sequence
  Synthetic construct
tcccgataggtgcaac

SEQ ID NO: 4599 - DNA, 16 bp, Artificial Sequence
  Synthetic construct
tcccgatcaagttaag

SEQ ID NO: 4600 - DNA, 16 bp, Artificial Sequence
  Synthetic construct
tcccgatcaagttaag

SEQ ID NO: 4601 - DNA, 16 bp, Artificial Sequence
  Synthetic construct
tcccgatcaccctatc

SEQ ID NO: 4602 - DNA, 16 bp, Artificial Sequence
  Synthetic construct
tcccgatcaccctatc

SEQ ID NO: 4603 - DNA, 16 bp, Artificial Sequence
  Synthetic construct
tcccgatcacttaagc

SEQ ID NO: 4604 - DNA, 16 bp, Artificial Sequence
  Synthetic construct
tcccgatcacttaagc

SEQ ID NO: 4605 - DNA, 16 bp, Artificial Sequence
  Synthetic construct
tcccgatgtgtaagta

SEQ ID NO: 4606 - DNA, 16 bp, Artificial Sequence
  Synthetic construct
tcccgatgtgtaagta

SEQ ID NO: 4607 - DNA, 16 bp, Artificial Sequence
  Synthetic construct
tcccgattccattcta

SEQ ID NO: 4608 - DNA, 16 bp, Artificial Sequence
  Synthetic construct
tcccgattccattcta

SEQ ID NO: 4609 - DNA, 16 bp, Artificial Sequence
  Synthetic construct
tcccgattcctgtaga

SEQ ID NO: 4610 - DNA, 16 bp, Artificial Sequence
  Synthetic construct
tcccgattcctgtaga

SEQ ID NO: 4611 - DNA, 16 bp, Artificial Sequence
  Synthetic construct
tcccgattctttacgt

SEQ ID NO: 4612 - DNA, 16 bp, Artificial Sequence
  Synthetic construct
tcccgattctttacgt

SEQ ID NO: 4613 - DNA, 16 bp, Artificial Sequence
  Synthetic construct
tcgaggcagcgcttat

SEQ ID NO: 4614 - DNA, 16 bp, Artificial Sequence
  Synthetic construct
tcgaggcagcgcttat

SEQ ID NO: 4615 - DNA, 16 bp, Artificial Sequence
  Synthetic construct
tcgaggcagtcccacg

SEQ ID NO: 4616 - DNA, 16 bp, Artificial Sequence
  Synthetic construct
tcgaggcagtcccacg

SEQ ID NO: 4617 - DNA, 16 bp, Artificial Sequence
  Synthetic construct
tcgaggcagtgtctca

SEQ ID NO: 4618 - DNA, 16 bp, Artificial Sequence
  Synthetic construct
tcgaggcagtgtctca

SEQ ID NO: 4619 - DNA, 16 bp, Artificial Sequence
  Synthetic construct
tcgaggccacgtgaga

SEQ ID NO: 4620 - DNA, 16 bp, Artificial Sequence
  Synthetic construct
tcgaggccacgtgaga

SEQ ID NO: 4621 - DNA, 16 bp, Artificial Sequence
  Synthetic construct
tcgaggcgtcaactgt

SEQ ID NO: 4622 - DNA, 16 bp, Artificial Sequence
  Synthetic construct
tcgaggcgtcaactgt

SEQ ID NO: 4623 - DNA, 16 bp, Artificial Sequence
  Synthetic construct
tcgaggcgtcgctttc

SEQ ID NO: 4624 - DNA, 16 bp, Artificial Sequence
  Synthetic construct
tcgaggcgtcgctttc

SEQ ID NO: 4625 - DNA, 16 bp, Artificial Sequence
  Synthetic construct
tcgaggcgtgcagtag

SEQ ID NO: 4626 - DNA, 16 bp, Artificial Sequence
  Synthetic construct
tcgaggcgtgcagtag

SEQ ID NO: 4627 - DNA, 16 bp, Artificial Sequence
  Synthetic construct
tcgcgagagagtacat

SEQ ID NO: 4628 - DNA, 16 bp, Artificial Sequence
  Synthetic construct
tcgcgagagagtacat

SEQ ID NO: 4629 - DNA, 16 bp, Artificial Sequence
  Synthetic construct
tcgcgagagctgcaag

SEQ ID NO: 4630 - DNA, 16 bp, Artificial Sequence
  Synthetic construct
tcgcgagagctgcaag

SEQ ID NO: 4631 - DNA, 16 bp, Artificial Sequence
  Synthetic construct
tcgcgagaggtcggat

SEQ ID NO: 4632 - DNA, 16 bp, Artificial Sequence
  Synthetic construct
tcgcgagaggtcggat

SEQ ID NO: 4633 - DNA, 16 bp, Artificial Sequence
  Synthetic construct
tcgcgagaggtgcaca

SEQ ID NO: 4634 - DNA, 16 bp, Artificial Sequence
  Synthetic construct
tcgcgagaggtgcaca

SEQ ID NO: 4635 - DNA, 16 bp, Artificial Sequence
  Synthetic construct
tcgcgaggttgtttgg

SEQ ID NO: 4636 - DNA, 16 bp, Artificial Sequence
  Synthetic construct
tcgcgaggttgtttgg

SEQ ID NO: 4637 - DNA, 16 bp, Artificial Sequence
  Synthetic construct
tcgcgttcagggagag

SEQ ID NO: 4638 - DNA, 16 bp, Artificial Sequence
  Synthetic construct
tcgcgttcagggagag

SEQ ID NO: 4639 - DNA, 16 bp, Artificial Sequence
  Synthetic construct
tcgcgttcatcggaag

SEQ ID NO: 4640 - DNA, 16 bp, Artificial Sequence
  Synthetic construct
tcgcgttcatcggaag

SEQ ID NO: 4641 - DNA, 16 bp, Artificial Sequence
  Synthetic construct
tcgcgtttcaccgggt

SEQ ID NO: 4642 - DNA, 16 bp, Artificial Sequence
  Synthetic construct
tcgcgtttcaccgggt

SEQ ID NO: 4643 - DNA, 16 bp, Artificial Sequence
  Synthetic construct
tcgcgtttcgtttgcc

SEQ ID NO: 4644 - DNA, 16 bp, Artificial Sequence
  Synthetic construct
tcgcgtttcgtttgcc

SEQ ID NO: 4645 - DNA, 16 bp, Artificial Sequence
  Synthetic construct
tcgcgtttcttctggc

SEQ ID NO: 4646 - DNA, 16 bp, Artificial Sequence
  Synthetic construct
tcgcgtttcttctggc

SEQ ID NO: 4647 - DNA, 16 bp, Artificial Sequence
  Synthetic construct
tcgggacagtcgccgt

SEQ ID NO: 4648 - DNA, 16 bp, Artificial Sequence
  Synthetic construct
tcgggacagtcgccgt

SEQ ID NO: 4649 - DNA, 16 bp, Artificial Sequence
  Synthetic construct
tcgggacgtctccact

SEQ ID NO: 4650 - DNA, 16 bp, Artificial Sequence
  Synthetic construct
tcgggacgtctccact

SEQ ID NO: 4651 - DNA, 16 bp, Artificial Sequence
  Synthetic construct
tcgggacgtttcgctc

SEQ ID NO: 4652 - DNA, 16 bp, Artificial Sequence
  Synthetic construct
tcgggacgtttcgctc

SEQ ID NO: 4653 - DNA, 16 bp, Artificial Sequence
  Synthetic construct
tcgggactccgttgtc

SEQ ID NO: 4654 - DNA, 16 bp, Artificial Sequence
  Synthetic construct
tcgggactccgttgtc

SEQ ID NO: 4655 - DNA, 16 bp, Artificial Sequence
  Synthetic construct
tcgggactctggtgta

SEQ ID NO: 4656 - DNA, 16 bp, Artificial Sequence
  Synthetic construct
tcgggactctggtgta

SEQ ID NO: 4657 - DNA, 16 bp, Artificial Sequence
  Synthetic construct
tcggtaaaggcatgtg

SEQ ID NO: 4658 - DNA, 16 bp, Artificial Sequence
  Synthetic construct
tcggtaaaggcatgtg

SEQ ID NO: 4659 - DNA, 16 bp, Artificial Sequence
  Synthetic construct
tcggtaaagtacgacg

SEQ ID NO: 4660 - DNA, 16 bp, Artificial Sequence
  Synthetic construct
tcggtaaagtacgacg

SEQ ID NO: 4661 - DNA, 16 bp, Artificial Sequence
  Synthetic construct
tcggtaaagtcttgca

SEQ ID NO: 4662 - DNA, 16 bp, Artificial Sequence
  Synthetic construct
tcggtaaagtcttgca

SEQ ID NO: 4663 - DNA, 16 bp, Artificial Sequence
  Synthetic construct
tcggtaagtcttgcgg

SEQ ID NO: 4664 - DNA, 16 bp, Artificial Sequence
  Synthetic construct
tcggtaagtcttgcgg

SEQ ID NO: 4665 - DNA, 16 bp, Artificial Sequence
  Synthetic construct
tcggtaatcccttgtg

SEQ ID NO: 4666 - DNA, 16 bp, Artificial Sequence
  Synthetic construct
tcggtaatcccttgtg

SEQ ID NO: 4667 - DNA, 16 bp, Artificial Sequence
  Synthetic construct
tcggtaatccgcatct

SEQ ID NO: 4668 - DNA, 16 bp, Artificial Sequence
  Synthetic construct
tcggtaatccgcatct

SEQ ID NO: 4669 - DNA, 16 bp, Artificial Sequence
  Synthetic construct
tcggtaatctgcagta

SEQ ID NO: 4670 - DNA, 16 bp, Artificial Sequence
  Synthetic construct
tcggtaatctgcagta

SEQ ID NO: 4671 - DNA, 16 bp, Artificial Sequence
  Synthetic construct
tcgtaccgtcagaggt

SEQ ID NO: 4672 - DNA, 16 bp, Artificial Sequence
  Synthetic construct
tcgtaccgtcagaggt

SEQ ID NO: 4673 - DNA, 16 bp, Artificial Sequence
  Synthetic construct
tcgtacctctactatc

SEQ ID NO: 4674 - DNA, 16 bp, Artificial Sequence
  Synthetic construct
tcgtacctctactatc

SEQ ID NO: 4675 - DNA, 16 bp, Artificial Sequence
  Synthetic construct
tcgtagaagggcatgt

SEQ ID NO: 4676 - DNA, 16 bp, Artificial Sequence
  Synthetic construct
tcgtagaagggcatgt

SEQ ID NO: 4677 - DNA, 16 bp, Artificial Sequence
  Synthetic construct
tcgtagaagttacggg

SEQ ID NO: 4678 - DNA, 16 bp, Artificial Sequence
  Synthetic construct
tcgtagaagttacggg

SEQ ID NO: 4679 - DNA, 16 bp, Artificial Sequence
  Synthetic construct
tcgtagacatcaccct

SEQ ID NO: 4680 - DNA, 16 bp, Artificial Sequence
  Synthetic construct
tcgtagacatcaccct

SEQ ID NO: 4681 - DNA, 16 bp, Artificial Sequence
  Synthetic construct
tcgtagagtacgaaat

SEQ ID NO: 4682 - DNA, 16 bp, Artificial Sequence
  Synthetic construct
tcgtagagtacgaaat

SEQ ID NO: 4683 - DNA, 16 bp, Artificial Sequence
  Synthetic construct
tcgtagagtcagctat

SEQ ID NO: 4684 - DNA, 16 bp, Artificial Sequence
  Synthetic construct
tcgtagagtcagctat

SEQ ID NO: 4685 - DNA, 16 bp, Artificial Sequence
  Synthetic construct
tcgtagatcggaaacg

SEQ ID NO: 4686 - DNA, 16 bp, Artificial Sequence
  Synthetic construct
tcgtagatcggaaacg

SEQ ID NO: 4687 - DNA, 16 bp, Artificial Sequence
  Synthetic construct
tcgtagatctgctgct

SEQ ID NO: 4688 - DNA, 16 bp, Artificial Sequence
  Synthetic construct
tcgtagatctgctgct

SEQ ID NO: 4689 - DNA, 16 bp, Artificial Sequence
  Synthetic construct
tctattgagtacacct

SEQ ID NO: 4690 - DNA, 16 bp, Artificial Sequence
  Synthetic construct
tctattgagtacacct

SEQ ID NO: 4691 - DNA, 16 bp, Artificial Sequence
  Synthetic construct
tctattgcacagactt

SEQ ID NO: 4692 - DNA, 16 bp, Artificial Sequence
  Synthetic construct
tctattgcacagactt

SEQ ID NO: 4693 - DNA, 16 bp, Artificial Sequence
  Synthetic construct
tctattgcagccacca

SEQ ID NO: 4694 - DNA, 16 bp, Artificial Sequence
  Synthetic construct
tctattgcagccacca

SEQ ID NO: 4695 - DNA, 16 bp, Artificial Sequence
  Synthetic construct
tctattgcatgacgga

SEQ ID NO: 4696 - DNA, 16 bp, Artificial Sequence
  Synthetic construct
tctattgcatgacgga

SEQ ID NO: 4697 - DNA, 16 bp, Artificial Sequence
  Synthetic construct
tctattggtaccatca

SEQ ID NO: 4698 - DNA, 16 bp, Artificial Sequence
  Synthetic construct
tctattggtaccatca

SEQ ID NO: 4699 - DNA, 16 bp, Artificial Sequence
  Synthetic construct
tctattgtctcgttta

SEQ ID NO: 4700 - DNA, 16 bp, Artificial Sequence
  Synthetic construct
tctattgtctcgttta

SEQ ID NO: 4701 - DNA, 16 bp, Artificial Sequence
  Synthetic construct
tctcataagagtgaga

SEQ ID NO: 4702 - DNA, 16 bp, Artificial Sequence
  Synthetic construct
tctcataagagtgaga

SEQ ID NO: 4703 - DNA, 16 bp, Artificial Sequence
  Synthetic construct
tctcataagcgacgta

SEQ ID NO: 4704 - DNA, 16 bp, Artificial Sequence
  Synthetic construct
tctcataagcgacgta

SEQ ID NO: 4705 - DNA, 16 bp, Artificial Sequence
  Synthetic construct
tctcatacacttggat

SEQ ID NO: 4706 - DNA, 16 bp, Artificial Sequence
  Synthetic construct
tctcatacacttggat

SEQ ID NO: 4707 - DNA, 16 bp, Artificial Sequence
  Synthetic construct
tctcatagtacagacg

SEQ ID NO: 4708 - DNA, 16 bp, Artificial Sequence
  Synthetic construct
tctcatagtacagacg

SEQ ID NO: 4709 - DNA, 16 bp, Artificial Sequence
  Synthetic construct
tctcatatcctcgcat

SEQ ID NO: 4710 - DNA, 16 bp, Artificial Sequence
  Synthetic construct
tctcatatcctcgcat

SEQ ID NO: 4711 - DNA, 16 bp, Artificial Sequence
  Synthetic construct
tctctaaagggtgttg

SEQ ID NO: 4712 - DNA, 16 bp, Artificial Sequence
  Synthetic construct
tctctaaagggtgttg

SEQ ID NO: 4713 - DNA, 16 bp, Artificial Sequence
  Synthetic construct
tctctaacaatacgct

SEQ ID NO: 4714 - DNA, 16 bp, Artificial Sequence
  Synthetic construct
tctctaacaatacgct

SEQ ID NO: 4715 - DNA, 16 bp, Artificial Sequence
  Synthetic construct
tctctaacacattcga

SEQ ID NO: 4716 - DNA, 16 bp, Artificial Sequence
  Synthetic construct
tctctaacacattcga

SEQ ID NO: 4717 - DNA, 16 bp, Artificial Sequence
  Synthetic construct
tctctaacactcgacg

SEQ ID NO: 4718 - DNA, 16 bp, Artificial Sequence
  Synthetic construct
tctctaacactcgacg

SEQ ID NO: 4719 - DNA, 16 bp, Artificial Sequence
  Synthetic construct
tctctaacaggtccac

SEQ ID NO: 4720 - DNA, 16 bp, Artificial Sequence
  Synthetic construct
tctctaacaggtccac

SEQ ID NO: 4721 - DNA, 16 bp, Artificial Sequence
  Synthetic construct
tctctaatcagcgacc

SEQ ID NO: 4722 - DNA, 16 bp, Artificial Sequence
  Synthetic construct
tctctaatcagcgacc

SEQ ID NO: 4723 - DNA, 16 bp, Artificial Sequence
  Synthetic construct
tctctaatcagtccct

SEQ ID NO: 4724 - DNA, 16 bp, Artificial Sequence
  Synthetic construct
tctctaatcagtccct

SEQ ID NO: 4725 - DNA, 16 bp, Artificial Sequence
  Synthetic construct
tctgagaagactttcg

SEQ ID NO: 4726 - DNA, 16 bp, Artificial Sequence
  Synthetic construct
tctgagaagactttcg

SEQ ID NO: 4727 - DNA, 16 bp, Artificial Sequence
  Synthetic construct
tctgagaagttgagat

SEQ ID NO: 4728 - DNA, 16 bp, Artificial Sequence
  Synthetic construct
tctgagaagttgagat

SEQ ID NO: 4729 - DNA, 16 bp, Artificial Sequence
  Synthetic construct
tctgagagtaccgaga

SEQ ID NO: 4730 - DNA, 16 bp, Artificial Sequence
  Synthetic construct
tctgagagtaccgaga

SEQ ID NO: 4731 - DNA, 16 bp, Artificial Sequence
  Synthetic construct
tctgagagttaagaca

SEQ ID NO: 4732 - DNA, 16 bp, Artificial Sequence
  Synthetic construct
tctgagagttaagaca

SEQ ID NO: 4733 - DNA, 16 bp, Artificial Sequence
  Synthetic construct
tctggaaagaggtacc

SEQ ID NO: 4734 - DNA, 16 bp, Artificial Sequence
  Synthetic construct
tctggaaagaggtacc

SEQ ID NO: 4735 - DNA, 16 bp, Artificial Sequence
  Synthetic construct
tctggaagtaagagga

SEQ ID NO: 4736 - DNA, 16 bp, Artificial Sequence
  Synthetic construct
tctggaagtaagagga

SEQ ID NO: 4737 - DNA, 16 bp, Artificial Sequence
  Synthetic construct
tctggaagttaccagt

SEQ ID NO: 4738 - DNA, 16 bp, Artificial Sequence
  Synthetic construct
tctggaagttaccagt

SEQ ID NO: 4739 - DNA, 16 bp, Artificial Sequence
  Synthetic construct
tctggaagttcacggc

SEQ ID NO: 4740 - DNA, 16 bp, Artificial Sequence
  Synthetic construct
tctggaagttcacggc

SEQ ID NO: 4741 - DNA, 16 bp, Artificial Sequence
  Synthetic construct
tctggaatcaggtaaa

SEQ ID NO: 4742 - DNA, 16 bp, Artificial Sequence
  Synthetic construct
tctggaatcaggtaaa

SEQ ID NO: 4743 - DNA, 16 bp, Artificial Sequence
  Synthetic construct
tctggaatccttgacc

SEQ ID NO: 4744 - DNA, 16 bp, Artificial Sequence
  Synthetic construct
tctggaatccttgacc

SEQ ID NO: 4745 - DNA, 16 bp, Artificial Sequence
  Synthetic construct
tcttcggcatgccacg

SEQ ID NO: 4746 - DNA, 16 bp, Artificial Sequence
  Synthetic construct
tcttcggcatgccacg

SEQ ID NO: 4747 - DNA, 16 bp, Artificial Sequence
  Synthetic construct
tcttcgggtccgaaga

SEQ ID NO: 4748 - DNA, 16 bp, Artificial Sequence
  Synthetic construct
tcttcgggtccgaaga

SEQ ID NO: 4749 - DNA, 16 bp, Artificial Sequence
  Synthetic construct
tcttcggtcaggcgaa

SEQ ID NO: 4750 - DNA, 16 bp, Artificial Sequence
  Synthetic construct
tcttcggtcaggcgaa

SEQ ID NO: 4751 - DNA, 16 bp, Artificial Sequence
  Synthetic construct
tcttcggtctgtctcg

SEQ ID NO: 4752 - DNA, 16 bp, Artificial Sequence
  Synthetic construct
tcttcggtctgtctcg

SEQ ID NO: 4753 - DNA, 16 bp, Artificial Sequence
  Synthetic construct
tctttccagaatgtgt

SEQ ID NO: 4754 - DNA, 16 bp, Artificial Sequence
  Synthetic construct
tctttccagaatgtgt

SEQ ID NO: 4755 - DNA, 16 bp, Artificial Sequence
  Synthetic construct
tctttccagggtgtgt

SEQ ID NO: 4756 - DNA, 16 bp, Artificial Sequence
  Synthetic construct
tctttccagggtgtgt

SEQ ID NO: 4757 - DNA, 16 bp, Artificial Sequence
  Synthetic construct
tctttcccacggtaag

SEQ ID NO: 4758 - DNA, 16 bp, Artificial Sequence
  Synthetic construct
tctttcccacggtaag

SEQ ID NO: 4759 - DNA, 16 bp, Artificial Sequence
  Synthetic construct
tctttcccagtttacg

SEQ ID NO: 4760 - DNA, 16 bp, Artificial Sequence
  Synthetic construct
tctttcccagtttacg

SEQ ID NO: 4761 - DNA, 16 bp, Artificial Sequence
  Synthetic construct
tctttccgtcgtcttc

SEQ ID NO: 4762 - DNA, 16 bp, Artificial Sequence
  Synthetic construct
tctttccgtcgtcttc

SEQ ID NO: 4763 - DNA, 16 bp, Artificial Sequence
  Synthetic construct
tctttccgtgacgcct

SEQ ID NO: 4764 - DNA, 16 bp, Artificial Sequence
  Synthetic construct
tctttccgtgacgcct

SEQ ID NO: 4765 - DNA, 16 bp, Artificial Sequence
  Synthetic construct
tctttccgttgaactc

SEQ ID NO: 4766 - DNA, 16 bp, Artificial Sequence
  Synthetic construct
tctttccgttgaactc

SEQ ID NO: 4767 - DNA, 16 bp, Artificial Sequence
  Synthetic construct
tctttccgttgattgc

SEQ ID NO: 4768 - DNA, 16 bp, Artificial Sequence
  Synthetic construct
tctttccgttgattgc

SEQ ID NO: 4769 - DNA, 16 bp, Artificial Sequence
  Synthetic construct
tctttcctcacttatc

SEQ ID NO: 4770 - DNA, 16 bp, Artificial Sequence
  Synthetic construct
tctttcctcacttatc

SEQ ID NO: 4771 - DNA, 16 bp, Artificial Sequence
  Synthetic construct
tctttcctcagagctt

SEQ ID NO: 4772 - DNA, 16 bp, Artificial Sequence
  Synthetic construct
tctttcctcagagctt

SEQ ID NO: 4773 - DNA, 16 bp, Artificial Sequence
  Synthetic construct
tgaaagaagggaacgg

SEQ ID NO: 4774 - DNA, 16 bp, Artificial Sequence
  Synthetic construct
tgaaagaagggaacgg

SEQ ID NO: 4775 - DNA, 16 bp, Artificial Sequence
  Synthetic construct
tgaaagacagcatact

SEQ ID NO: 4776 - DNA, 16 bp, Artificial Sequence
  Synthetic construct
tgaaagacagcatact

SEQ ID NO: 4777 - DNA, 16 bp, Artificial Sequence
  Synthetic construct
tgaaagatcggtccga

SEQ ID NO: 4778 - DNA, 16 bp, Artificial Sequence
  Synthetic construct
tgaaagatcggtccga

SEQ ID NO: 4779 - DNA, 16 bp, Artificial Sequence
  Synthetic construct
tgaaagatctcttatg

SEQ ID NO: 4780 - DNA, 16 bp, Artificial Sequence
  Synthetic construct
tgaaagatctcttatg

SEQ ID NO: 4781 - DNA, 16 bp, Artificial Sequence
  Synthetic construct
tgacaacagacaaagg

SEQ ID NO: 4782 - DNA, 16 bp, Artificial Sequence
  Synthetic construct
tgacaacagacaaagg

SEQ ID NO: 4783 - DNA, 16 bp, Artificial Sequence
  Synthetic construct
tgacaacaggagtacc

SEQ ID NO: 4784 - DNA, 16 bp, Artificial Sequence
  Synthetic construct
tgacaacaggagtacc

SEQ ID NO: 4785 - DNA, 16 bp, Artificial Sequence
  Synthetic construct
tgacaacagtcgccgt

SEQ ID NO: 4786 - DNA, 16 bp, Artificial Sequence
  Synthetic construct
tgacaacagtcgccgt

SEQ ID NO: 4787 - DNA, 16 bp, Artificial Sequence
  Synthetic construct
tgacaaccatgtagtc

SEQ ID NO: 4788 - DNA, 16 bp, Artificial Sequence
  Synthetic construct
tgacaaccatgtagtc

SEQ ID NO: 4789 - DNA, 16 bp, Artificial Sequence
  Synthetic construct
tgacaaccattcctcg

SEQ ID NO: 4790 - DNA, 16 bp, Artificial Sequence
  Synthetic construct
tgacaaccattcctcg

SEQ ID NO: 4791 - DNA, 16 bp, Artificial Sequence
  Synthetic construct
tgacaacgtcatgcat

SEQ ID NO: 4792 - DNA, 16 bp, Artificial Sequence
  Synthetic construct
tgacaacgtcatgcat

SEQ ID NO: 4793 - DNA, 16 bp, Artificial Sequence
  Synthetic construct
tgacaactcaaccaac

SEQ ID NO: 4794 - DNA, 16 bp, Artificial Sequence
  Synthetic construct
tgacaactcaaccaac

SEQ ID NO: 4795 - DNA, 16 bp, Artificial Sequence
  Synthetic construct
tgacaactctgccagg

SEQ ID NO: 4796 - DNA, 16 bp, Artificial Sequence
  Synthetic construct
tgacaactctgccagg

SEQ ID NO: 4797 - DNA, 16 bp, Artificial Sequence
  Synthetic construct
tgacggcagacaggct

SEQ ID NO: 4798 - DNA, 16 bp, Artificial Sequence
  Synthetic construct
tgacggcagacaggct

SEQ ID NO: 4799 - DNA, 16 bp, Artificial Sequence
  Synthetic construct
tgacggcagctagtct

SEQ ID NO: 4800 - DNA, 16 bp, Artificial Sequence
  Synthetic construct
tgacggcagctagtct

SEQ ID NO: 4801 - DNA, 16 bp, Artificial Sequence
  Synthetic construct
tgacggccacctatcc

SEQ ID NO: 4802 - DNA, 16 bp, Artificial Sequence
  Synthetic construct
tgacggccacctatcc

SEQ ID NO: 4803 - DNA, 16 bp, Artificial Sequence
  Synthetic construct
tgacggctcgccataa

SEQ ID NO: 4804 - DNA, 16 bp, Artificial Sequence
  Synthetic construct
tgacggctcgccataa

SEQ ID NO: 4805 - DNA, 16 bp, Artificial Sequence
  Synthetic construct
tgactagagatgttag

SEQ ID NO: 4806 - DNA, 16 bp, Artificial Sequence
  Synthetic construct
tgactagagatgttag

SEQ ID NO: 4807 - DNA, 16 bp, Artificial Sequence
  Synthetic construct
tgactagcaggcagta

SEQ ID NO: 4808 - DNA, 16 bp, Artificial Sequence
  Synthetic construct
tgactagcaggcagta

SEQ ID NO: 4809 - DNA, 16 bp, Artificial Sequence
  Synthetic construct
tgactaggtaaaggag

SEQ ID NO: 4810 - DNA, 16 bp, Artificial Sequence
  Synthetic construct
tgactaggtaaaggag

SEQ ID NO: 4811 - DNA, 16 bp, Artificial Sequence
  Synthetic construct
tgactaggtccgagtc

SEQ ID NO: 4812 - DNA, 16 bp, Artificial Sequence
  Synthetic construct
tgactaggtccgagtc

SEQ ID NO: 4813 - DNA, 16 bp, Artificial Sequence
  Synthetic construct
tgactaggttattctc

SEQ ID NO: 4814 - DNA, 16 bp, Artificial Sequence
  Synthetic construct
tgactaggttattctc

SEQ ID NO: 4815 - DNA, 16 bp, Artificial Sequence
  Synthetic construct
tgactagtcaatctct

SEQ ID NO: 4816 - DNA, 16 bp, Artificial Sequence
  Synthetic construct
tgactagtcaatctct

SEQ ID NO: 4817 - DNA, 16 bp, Artificial Sequence
  Synthetic construct
tgactagtcccttgca

SEQ ID NO: 4818 - DNA, 16 bp, Artificial Sequence
  Synthetic construct
tgactagtcccttgca

SEQ ID NO: 4819 - DNA, 16 bp, Artificial Sequence
  Synthetic construct
tgactttagaaagtgg

SEQ ID NO: 4820 - DNA, 16 bp, Artificial Sequence
  Synthetic construct
tgactttagaaagtgg

SEQ ID NO: 4821 - DNA, 16 bp, Artificial Sequence
  Synthetic construct
tgactttaggccatag

SEQ ID NO: 4822 - DNA, 16 bp, Artificial Sequence
  Synthetic construct
tgactttaggccatag

SEQ ID NO: 4823 - DNA, 16 bp, Artificial Sequence
  Synthetic construct
tgactttagtaggtgc

SEQ ID NO: 4824 - DNA, 16 bp, Artificial Sequence
  Synthetic construct
tgactttagtaggtgc

SEQ ID NO: 4825 - DNA, 16 bp, Artificial Sequence
  Synthetic construct
tgactttagtcgagtg

SEQ ID NO: 4826 - DNA, 16 bp, Artificial Sequence
  Synthetic construct
tgactttagtcgagtg

SEQ ID NO: 4827 - DNA, 16 bp, Artificial Sequence
  Synthetic construct
tgacttttctgaggga

SEQ ID NO: 4828 - DNA, 16 bp, Artificial Sequence
  Synthetic construct
tgacttttctgaggga

SEQ ID NO: 4829 - DNA, 16 bp, Artificial Sequence
  Synthetic construct
tgacttttcttgtcat

SEQ ID NO: 4830 - DNA, 16 bp, Artificial Sequence
  Synthetic construct
tgacttttcttgtcat

SEQ ID NO: 4831 - DNA, 16 bp, Artificial Sequence
  Synthetic construct
tgagaggaggactggt

SEQ ID NO: 4832 - DNA, 16 bp, Artificial Sequence
  Synthetic construct
tgagaggaggactggt

SEQ ID NO: 4833 - DNA, 16 bp, Artificial Sequence
  Synthetic construct
tgagaggcaccatgta

SEQ ID NO: 4834 - DNA, 16 bp, Artificial Sequence
  Synthetic construct
tgagaggcaccatgta

SEQ ID NO: 4835 - DNA, 16 bp, Artificial Sequence
  Synthetic construct
tgagaggcaggctgaa

SEQ ID NO: 4836 - DNA, 16 bp, Artificial Sequence
  Synthetic construct
tgagaggcaggctgaa

SEQ ID NO: 4837 - DNA, 16 bp, Artificial Sequence
  Synthetic construct
tgagagggtgagggag

SEQ ID NO: 4838 - DNA, 16 bp, Artificial Sequence
  Synthetic construct
tgagagggtgagggag

SEQ ID NO: 4839 - DNA, 16 bp, Artificial Sequence
  Synthetic construct
tgagaggtcatctgcc

SEQ ID NO: 4840 - DNA, 16 bp, Artificial Sequence
  Synthetic construct
tgagaggtcatctgcc

SEQ ID NO: 4841 - DNA, 16 bp, Artificial Sequence
  Synthetic construct
tgagcatagaaaccgc

SEQ ID NO: 4842 - DNA, 16 bp, Artificial Sequence
  Synthetic construct
tgagcatagaaaccgc

SEQ ID NO: 4843 - DNA, 16 bp, Artificial Sequence
  Synthetic construct
tgagcataggaatgga

SEQ ID NO: 4844 - DNA, 16 bp, Artificial Sequence
  Synthetic construct
tgagcataggaatgga

SEQ ID NO: 4845 - DNA, 16 bp, Artificial Sequence
  Synthetic construct
tgagcatagtgctgcc

SEQ ID NO: 4846 - DNA, 16 bp, Artificial Sequence
  Synthetic construct
tgagcatagtgctgcc

SEQ ID NO: 4847 - DNA, 16 bp, Artificial Sequence
  Synthetic construct
tgagcatagttgtcgt

SEQ ID NO: 4848 - DNA, 16 bp, Artificial Sequence
  Synthetic construct
tgagcatagttgtcgt

SEQ ID NO: 4849 - DNA, 16 bp, Artificial Sequence
  Synthetic construct
tgagcatcaatagcgg

SEQ ID NO: 4850 - DNA, 16 bp, Artificial Sequence
  Synthetic construct
tgagcatcaatagcgg

SEQ ID NO: 4851 - DNA, 16 bp, Artificial Sequence
  Synthetic construct
tgagcatcatgttgac

SEQ ID NO: 4852 - DNA, 16 bp, Artificial Sequence
  Synthetic construct
tgagcatcatgttgac

SEQ ID NO: 4853 - DNA, 16 bp, Artificial Sequence
  Synthetic construct
tgagcatgtaacgttc

SEQ ID NO: 4854 - DNA, 16 bp, Artificial Sequence
  Synthetic construct
tgagcatgtaacgttc

SEQ ID NO: 4855 - DNA, 16 bp, Artificial Sequence
  Synthetic construct
tgagcatgtcctccat

SEQ ID NO: 4856 - DNA, 16 bp, Artificial Sequence
  Synthetic construct
tgagcatgtcctccat

SEQ ID NO: 4857 - DNA, 16 bp, Artificial Sequence
  Synthetic construct
tgagcatgttgcgtta

SEQ ID NO: 4858 - DNA, 16 bp, Artificial Sequence
  Synthetic construct
tgagcatgttgcgtta

SEQ ID NO: 4859 - DNA, 16 bp, Artificial Sequence
  Synthetic construct
tgagcattccagtagt

SEQ ID NO: 4860 - DNA, 16 bp, Artificial Sequence
  Synthetic construct
tgagcattccagtagt

SEQ ID NO: 4861 - DNA, 16 bp, Artificial Sequence
  Synthetic construct
tgagccggtacagacg

SEQ ID NO: 4862 - DNA, 16 bp, Artificial Sequence
  Synthetic construct
tgagccggtacagacg

SEQ ID NO: 4863 - DNA, 16 bp, Artificial Sequence
  Synthetic construct
tgagggacaaggctcc

SEQ ID NO: 4864 - DNA, 16 bp, Artificial Sequence
  Synthetic construct
tgagggacaaggctcc

SEQ ID NO: 4865 - DNA, 16 bp, Artificial Sequence
  Synthetic construct
tgagggacaattcctt

SEQ ID NO: 4866 - DNA, 16 bp, Artificial Sequence
  Synthetic construct
tgagggacaattcctt

SEQ ID NO: 4867 - DNA, 16 bp, Artificial Sequence
  Synthetic construct
tgagggacacatgtgt

SEQ ID NO: 4868 - DNA, 16 bp, Artificial Sequence
  Synthetic construct
tgagggacacatgtgt

SEQ ID NO: 4869 - DNA, 16 bp, Artificial Sequence
  Synthetic construct
tgagggagtgagtgac

SEQ ID NO: 4870 - DNA, 16 bp, Artificial Sequence
  Synthetic construct
tgagggagtgagtgac

SEQ ID NO: 4871 - DNA, 16 bp, Artificial Sequence
  Synthetic construct
tgagggagttaagtag

SEQ ID NO: 4872 - DNA, 16 bp, Artificial Sequence
  Synthetic construct
tgagggagttaagtag

SEQ ID NO: 4873 - DNA, 16 bp, Artificial Sequence
  Synthetic construct
tgatttcaggcccgtt

SEQ ID NO: 4874 - DNA, 16 bp, Artificial Sequence
  Synthetic construct
tgatttcaggcccgtt

SEQ ID NO: 4875 - DNA, 16 bp, Artificial Sequence
  Synthetic construct
tgatttcgtataggta

SEQ ID NO: 4876 - DNA, 16 bp, Artificial Sequence
  Synthetic construct
tgatttcgtataggta

SEQ ID NO: 4877 - DNA, 16 bp, Artificial Sequence
  Synthetic construct
tgatttcgtgcggtaa

SEQ ID NO: 4878 - DNA, 16 bp, Artificial Sequence
  Synthetic construct
tgatttcgtgcggtaa

SEQ ID NO: 4879 - DNA, 16 bp, Artificial Sequence
  Synthetic construct
tgatttcgtgggtcaa

SEQ ID NO: 4880 - DNA, 16 bp, Artificial Sequence
  Synthetic construct
tgatttcgtgggtcaa

SEQ ID NO: 4881 - DNA, 16 bp, Artificial Sequence
  Synthetic construct
tgatttcgttcgttga

SEQ ID NO: 4882 - DNA, 16 bp, Artificial Sequence
  Synthetic construct
tgatttcgttcgttga

SEQ ID NO: 4883 - DNA, 16 bp, Artificial Sequence
  Synthetic construct
tgatttcgttgtcttt

SEQ ID NO: 4884 - DNA, 16 bp, Artificial Sequence
  Synthetic construct
tgatttcgttgtcttt

SEQ ID NO: 4885 - DNA, 16 bp, Artificial Sequence
  Synthetic construct
tgatttctcccttgca

SEQ ID NO: 4886 - DNA, 16 bp, Artificial Sequence
  Synthetic construct
tgatttctcccttgca

SEQ ID NO: 4887 - DNA, 16 bp, Artificial Sequence
  Synthetic construct
tgatttctccgcagtg

SEQ ID NO: 4888 - DNA, 16 bp, Artificial Sequence
  Synthetic construct
tgatttctccgcagtg

SEQ ID NO: 4889 - DNA, 16 bp, Artificial Sequence
  Synthetic construct
tgatttctcttgagac

SEQ ID NO: 4890 - DNA, 16 bp, Artificial Sequence
  Synthetic construct
tgatttctcttgagac

SEQ ID NO: 4891 - DNA, 16 bp, Artificial Sequence
  Synthetic construct
tgcacctaggccgaat

SEQ ID NO: 4892 - DNA, 16 bp, Artificial Sequence
  Synthetic construct
tgcacctaggccgaat

SEQ ID NO: 4893 - DNA, 16 bp, Artificial Sequence
  Synthetic construct
tgcacctcaaacctac

SEQ ID NO: 4894 - DNA, 16 bp, Artificial Sequence
  Synthetic construct
tgcacctcaaacctac

SEQ ID NO: 4895 - DNA, 16 bp, Artificial Sequence
  Synthetic construct
tgcacctcacttaacg

SEQ ID NO: 4896 - DNA, 16 bp, Artificial Sequence
  Synthetic construct
tgcacctcacttaacg

SEQ ID NO: 4897 - DNA, 16 bp, Artificial Sequence
  Synthetic construct
tgcacctcaggtttca

SEQ ID NO: 4898 - DNA, 16 bp, Artificial Sequence
  Synthetic construct
tgcacctcaggtttca

SEQ ID NO: 4899 - DNA, 16 bp, Artificial Sequence
  Synthetic construct
tgcacctgtataatgg

SEQ ID NO: 4900 - DNA, 16 bp, Artificial Sequence
  Synthetic construct
tgcacctgtataatgg

SEQ ID NO: 4901 - DNA, 16 bp, Artificial Sequence
  Synthetic construct
tgcacctgtcagataa

SEQ ID NO: 4902 - DNA, 16 bp, Artificial Sequence
  Synthetic construct
tgcacctgtcagataa

SEQ ID NO: 4903 - DNA, 16 bp, Artificial Sequence
  Synthetic construct
tgcacctgttcagact

SEQ ID NO: 4904 - DNA, 16 bp, Artificial Sequence
  Synthetic construct
tgcacctgttcagact

SEQ ID NO: 4905 - DNA, 16 bp, Artificial Sequence
  Synthetic construct
tgccaaacattacgac

SEQ ID NO: 4906 - DNA, 16 bp, Artificial Sequence
  Synthetic construct
tgccaaacattacgac

SEQ ID NO: 4907 - DNA, 16 bp, Artificial Sequence
  Synthetic construct
tgccaaagtaagtggc

SEQ ID NO: 4908 - DNA, 16 bp, Artificial Sequence
  Synthetic construct
tgccaaagtaagtggc

SEQ ID NO: 4909 - DNA, 16 bp, Artificial Sequence
  Synthetic construct
tgccaaagtcacttcc

SEQ ID NO: 4910 - DNA, 16 bp, Artificial Sequence
  Synthetic construct
tgccaaagtcacttcc

SEQ ID NO: 4911 - DNA, 16 bp, Artificial Sequence
  Synthetic construct
tgccaaagtgcaggta

SEQ ID NO: 4912 - DNA, 16 bp, Artificial Sequence
  Synthetic construct
tgccaaagtgcaggta

SEQ ID NO: 4913 - DNA, 16 bp, Artificial Sequence
  Synthetic construct
tgccaaagttggaccc

SEQ ID NO: 4914 - DNA, 16 bp, Artificial Sequence
  Synthetic construct
tgccaaagttggaccc

SEQ ID NO: 4915 - DNA, 16 bp, Artificial Sequence
  Synthetic construct
tgccaaatcagtacgt

SEQ ID NO: 4916 - DNA, 16 bp, Artificial Sequence
  Synthetic construct
tgccaaatcagtacgt

SEQ ID NO: 4917 - DNA, 16 bp, Artificial Sequence
  Synthetic construct
tgccaaatcggcggtt

SEQ ID NO: 4918 - DNA, 16 bp, Artificial Sequence
  Synthetic construct
tgccaaatcggcggtt

SEQ ID NO: 4919 - DNA, 16 bp, Artificial Sequence
  Synthetic construct
tgcccatagaactgta

SEQ ID NO: 4920 - DNA, 16 bp, Artificial Sequence
  Synthetic construct
tgcccatagaactgta

SEQ ID NO: 4921 - DNA, 16 bp, Artificial Sequence
  Synthetic construct
tgcccataggctcaga

SEQ ID NO: 4922 - DNA, 16 bp, Artificial Sequence
  Synthetic construct
tgcccataggctcaga

SEQ ID NO: 4923 - DNA, 16 bp, Artificial Sequence
  Synthetic construct
tgcccatcaactgcgc

SEQ ID NO: 4924 - DNA, 16 bp, Artificial Sequence
  Synthetic construct
tgcccatcaactgcgc

SEQ ID NO: 4925 - DNA, 16 bp, Artificial Sequence
  Synthetic construct
tgcccatgtggcaaac

SEQ ID NO: 4926 - DNA, 16 bp, Artificial Sequence
  Synthetic construct
tgcccatgtggcaaac

SEQ ID NO: 4927 - DNA, 16 bp, Artificial Sequence
  Synthetic construct
tgccctaagagcaatt

SEQ ID NO: 4928 - DNA, 16 bp, Artificial Sequence
  Synthetic construct
tgccctaagagcaatt

SEQ ID NO: 4929 - DNA, 16 bp, Artificial Sequence
  Synthetic construct
tgccctaaggctaggt

SEQ ID NO: 4930 - DNA, 16 bp, Artificial Sequence
  Synthetic construct
tgccctaaggctaggt

SEQ ID NO: 4931 - DNA, 16 bp, Artificial Sequence
  Synthetic construct
tgccctaagtgtacgg

SEQ ID NO: 4932 - DNA, 16 bp, Artificial Sequence
  Synthetic construct
tgccctaagtgtacgg

SEQ ID NO: 4933 - DNA, 16 bp, Artificial Sequence
  Synthetic construct
tgccctacaaccgcca

SEQ ID NO: 4934 - DNA, 16 bp, Artificial Sequence
  Synthetic construct
tgccctacaaccgcca

SEQ ID NO: 4935 - DNA, 16 bp, Artificial Sequence
  Synthetic construct
tgccctacattcctcg

SEQ ID NO: 4936 - DNA, 16 bp, Artificial Sequence
  Synthetic construct
tgccctacattcctcg

SEQ ID NO: 4937 - DNA, 16 bp, Artificial Sequence
  Synthetic construct
tgccctagtcgcatat

SEQ ID NO: 4938 - DNA, 16 bp, Artificial Sequence
  Synthetic construct
tgccctagtcgcatat

SEQ ID NO: 4939 - DNA, 16 bp, Artificial Sequence
  Synthetic construct
tgccctagtcggcact

SEQ ID NO: 4940 - DNA, 16 bp, Artificial Sequence
  Synthetic construct
tgccctagtcggcact

SEQ ID NO: 4941 - DNA, 16 bp, Artificial Sequence
  Synthetic construct
tgccctagtgagtata

SEQ ID NO: 4942 - DNA, 16 bp, Artificial Sequence
  Synthetic construct
tgccctagtgagtata

SEQ ID NO: 4943 - DNA, 16 bp, Artificial Sequence
  Synthetic construct
tgccctagtgcgaaac

SEQ ID NO: 4944 - DNA, 16 bp, Artificial Sequence
  Synthetic construct
tgccctagtgcgaaac

SEQ ID NO: 4945 - DNA, 16 bp, Artificial Sequence
  Synthetic construct
tgccctagtttccacc

SEQ ID NO: 4946 - DNA, 16 bp, Artificial Sequence
  Synthetic construct
tgccctagtttccacc

SEQ ID NO: 4947 - DNA, 16 bp, Artificial Sequence
  Synthetic construct
tgcgcagcacaagtaa

SEQ ID NO: 4948 - DNA, 16 bp, Artificial Sequence
  Synthetic construct
tgcgcagcacaagtaa

SEQ ID NO: 4949 - DNA, 16 bp, Artificial Sequence
  Synthetic construct
tgcgcagtctttaggg

SEQ ID NO: 4950 - DNA, 16 bp, Artificial Sequence
  Synthetic construct
tgcgcagtctttaggg

SEQ ID NO: 4951 - DNA, 16 bp, Artificial Sequence
  Synthetic construct
tgcgggtcaaaggcgt

SEQ ID NO: 4952 - DNA, 16 bp, Artificial Sequence
  Synthetic construct
tgcgggtcaaaggcgt

SEQ ID NO: 4953 - DNA, 16 bp, Artificial Sequence
  Synthetic construct
tgcgggtcatcgacgc

SEQ ID NO: 4954 - DNA, 16 bp, Artificial Sequence
  Synthetic construct
tgcgggtcatcgacgc

SEQ ID NO: 4955 - DNA, 16 bp, Artificial Sequence
  Synthetic construct
tgcgggtcatggtcat

SEQ ID NO: 4956 - DNA, 16 bp, Artificial Sequence
  Synthetic construct
tgcgggtcatggtcat

SEQ ID NO: 4957 - DNA, 16 bp, Artificial Sequence
  Synthetic construct
tgcgggtgtattcgtg

SEQ ID NO: 4958 - DNA, 16 bp, Artificial Sequence
  Synthetic construct
tgcgggtgtattcgtg

SEQ ID NO: 4959 - DNA, 16 bp, Artificial Sequence
  Synthetic construct
tgcgggtgtctcgttc

SEQ ID NO: 4960 - DNA, 16 bp, Artificial Sequence
  Synthetic construct
tgcgggtgtctcgttc

SEQ ID NO: 4961 - DNA, 16 bp, Artificial Sequence
  Synthetic construct
tgcgggtgttgattgc

SEQ ID NO: 4962 - DNA, 16 bp, Artificial Sequence
  Synthetic construct
tgcgggtgttgattgc

SEQ ID NO: 4963 - DNA, 16 bp, Artificial Sequence
  Synthetic construct
tgcgggttcgaactgt

SEQ ID NO: 4964 - DNA, 16 bp, Artificial Sequence
  Synthetic construct
tgcgggttcgaactgt

SEQ ID NO: 4965 - DNA, 16 bp, Artificial Sequence
  Synthetic construct
tgcgggttcggaggta

SEQ ID NO: 4966 - DNA, 16 bp, Artificial Sequence
  Synthetic construct
tgcgggttcggaggta

SEQ ID NO: 4967 - DNA, 16 bp, Artificial Sequence
  Synthetic construct
tgcgggttcggcgcta

SEQ ID NO: 4968 - DNA, 16 bp, Artificial Sequence
  Synthetic construct
tgcgggttcggcgcta

SEQ ID NO: 4969 - DNA, 16 bp, Artificial Sequence
  Synthetic construct
tgcgggttctttagtc

SEQ ID NO: 4970 - DNA, 16 bp, Artificial Sequence
  Synthetic construct
tgcgggttctttagtc

SEQ ID NO: 4971 - DNA, 16 bp, Artificial Sequence
  Synthetic construct
tgcgtggagatcgggt

SEQ ID NO: 4972 - DNA, 16 bp, Artificial Sequence
  Synthetic construct
tgcgtggagatcgggt

SEQ ID NO: 4973 - DNA, 16 bp, Artificial Sequence
  Synthetic construct
tgcgtggagccagtag

SEQ ID NO: 4974 - DNA, 16 bp, Artificial Sequence
  Synthetic construct
tgcgtggagccagtag

SEQ ID NO: 4975 - DNA, 16 bp, Artificial Sequence
  Synthetic construct
tgcgtggcagctattg

SEQ ID NO: 4976 - DNA, 16 bp, Artificial Sequence
  Synthetic construct
tgcgtggcagctattg

SEQ ID NO: 4977 - DNA, 16 bp, Artificial Sequence
  Synthetic construct
tgcgtggcagctgtgc

SEQ ID NO: 4978 - DNA, 16 bp, Artificial Sequence
  Synthetic construct
tgcgtggcagctgtgc

SEQ ID NO: 4979 - DNA, 16 bp, Artificial Sequence
  Synthetic construct
tgcgtgggttatcggt

SEQ ID NO: 4980 - DNA, 16 bp, Artificial Sequence
  Synthetic construct
tgcgtgggttatcggt

SEQ ID NO: 4981 - DNA, 16 bp, Artificial Sequence
  Synthetic construct
tgcgtggtcatcgatg

SEQ ID NO: 4982 - DNA, 16 bp, Artificial Sequence
  Synthetic construct
tgcgtggtcatcgatg

SEQ ID NO: 4983 - DNA, 16 bp, Artificial Sequence
  Synthetic construct
tgcgtggtcgtaggtt

SEQ ID NO: 4984 - DNA, 16 bp, Artificial Sequence
  Synthetic construct
tgcgtggtcgtaggtt

SEQ ID NO: 4985 - DNA, 16 bp, Artificial Sequence
  Synthetic construct
tgctaccagaaagtgg

SEQ ID NO: 4986 - DNA, 16 bp, Artificial Sequence
  Synthetic construct
tgctaccagaaagtgg

SEQ ID NO: 4987 - DNA, 16 bp, Artificial Sequence
  Synthetic construct
tgctaccaggtgttaa

SEQ ID NO: 4988 - DNA, 16 bp, Artificial Sequence
  Synthetic construct
tgctaccaggtgttaa

SEQ ID NO: 4989 - DNA, 16 bp, Artificial Sequence
  Synthetic construct
tgctaccagtctcggc

SEQ ID NO: 4990 - DNA, 16 bp, Artificial Sequence
  Synthetic construct
tgctaccagtctcggc

SEQ ID NO: 4991 - DNA, 16 bp, Artificial Sequence
  Synthetic construct
tgctaccgttgattgc

SEQ ID NO: 4992 - DNA, 16 bp, Artificial Sequence
  Synthetic construct
tgctaccgttgattgc

SEQ ID NO: 4993 - DNA, 16 bp, Artificial Sequence
  Synthetic construct
tgctacctcgagagca

SEQ ID NO: 4994 - DNA, 16 bp, Artificial Sequence
  Synthetic construct
tgctacctcgagagca

SEQ ID NO: 4995 - DNA, 16 bp, Artificial Sequence
  Synthetic construct
tgctgctagcaccgct

SEQ ID NO: 4996 - DNA, 16 bp, Artificial Sequence
  Synthetic construct
tgctgctagcaccgct

SEQ ID NO: 4997 - DNA, 16 bp, Artificial Sequence
  Synthetic construct
tgctgctagcagactg

SEQ ID NO: 4998 - DNA, 16 bp, Artificial Sequence
  Synthetic construct
tgctgctagcagactg

SEQ ID NO: 4999 - DNA, 16 bp, Artificial Sequence
  Synthetic construct
tgctgctagctgcgaa

SEQ ID NO: 5000 - DNA, 16 bp, Artificial Sequence
  Synthetic construct
tgctgctagctgcgaa

SEQ ID NO: 5001 - DNA, 16 bp, Artificial Sequence
  Synthetic construct
tgctgctagtacgttc

SEQ ID NO: 5002 - DNA, 16 bp, Artificial Sequence
  Synthetic construct
tgctgctagtacgttc

SEQ ID NO: 5003 - DNA, 16 bp, Artificial Sequence
  Synthetic construct
tgctgctcaaagtgcg

SEQ ID NO: 5004 - DNA, 16 bp, Artificial Sequence
  Synthetic construct
tgctgctcaaagtgcg

SEQ ID NO: 5005 - DNA, 16 bp, Artificial Sequence
  Synthetic construct
tgctgctcagatcgga

SEQ ID NO: 5006 - DNA, 16 bp, Artificial Sequence
  Synthetic construct
tgctgctcagatcgga

SEQ ID NO: 5007 - DNA, 16 bp, Artificial Sequence
  Synthetic construct
tgctgctgtacatcca

SEQ ID NO: 5008 - DNA, 16 bp, Artificial Sequence
  Synthetic construct
tgctgctgtacatcca

SEQ ID NO: 5009 - DNA, 16 bp, Artificial Sequence
  Synthetic construct
tgctgctgtctctcgt

SEQ ID NO: 5010 - DNA, 16 bp, Artificial Sequence
  Synthetic construct
tgctgctgtctctcgt

SEQ ID NO: 5011 - DNA, 16 bp, Artificial Sequence
  Synthetic construct
tgctgcttcaccaggc

SEQ ID NO: 5012 - DNA, 16 bp, Artificial Sequence
  Synthetic construct
tgctgcttcaccaggc

SEQ ID NO: 5013 - DNA, 16 bp, Artificial Sequence
  Synthetic construct
tgctgcttccgagcca

SEQ ID NO: 5014 - DNA, 16 bp, Artificial Sequence
  Synthetic construct
tgctgcttccgagcca

SEQ ID NO: 5015 - DNA, 16 bp, Artificial Sequence
  Synthetic construct
tggacgcgtatggttc

SEQ ID NO: 5016 - DNA, 16 bp, Artificial Sequence
  Synthetic construct
tggacgcgtatggttc

SEQ ID NO: 5017 - DNA, 16 bp, Artificial Sequence
  Synthetic construct
tggacgcgtgttgagg

SEQ ID NO: 5018 - DNA, 16 bp, Artificial Sequence
  Synthetic construct
tggacgcgtgttgagg

SEQ ID NO: 5019 - DNA, 16 bp, Artificial Sequence
  Synthetic construct
tggacgctccacgttc

SEQ ID NO: 5020 - DNA, 16 bp, Artificial Sequence
  Synthetic construct
tggacgctccacgttc

SEQ ID NO: 5021 - DNA, 16 bp, Artificial Sequence
  Synthetic construct
tggacgctcctagtga

SEQ ID NO: 5022 - DNA, 16 bp, Artificial Sequence
  Synthetic construct
tggacgctcctagtga

SEQ ID NO: 5023 - DNA, 16 bp, Artificial Sequence
  Synthetic construct
tggacgctcctcatta

SEQ ID NO: 5024 - DNA, 16 bp, Artificial Sequence
  Synthetic construct
tggacgctcctcatta

SEQ ID NO: 5025 - DNA, 16 bp, Artificial Sequence
  Synthetic construct
tggccagagtgttgaa

SEQ ID NO: 5026 - DNA, 16 bp, Artificial Sequence
  Synthetic construct
tggccagagtgttgaa

SEQ ID NO: 5027 - DNA, 16 bp, Artificial Sequence
  Synthetic construct
tggccagcaaacccat

SEQ ID NO: 5028 - DNA, 16 bp, Artificial Sequence
  Synthetic construct
tggccagcaaacccat

SEQ ID NO: 5029 - DNA, 16 bp, Artificial Sequence
  Synthetic construct
tggccaggtgggtatg

SEQ ID NO: 5030 - DNA, 16 bp, Artificial Sequence
  Synthetic construct
tggccaggtgggtatg

SEQ ID NO: 5031 - DNA, 16 bp, Artificial Sequence
  Synthetic construct
tggcgcaagagcttct

SEQ ID NO: 5032 - DNA, 16 bp, Artificial Sequence
  Synthetic construct
tggcgcaagagcttct

SEQ ID NO: 5033 - DNA, 16 bp, Artificial Sequence
  Synthetic construct
tggcgcaaggaatcgc

SEQ ID NO: 5034 - DNA, 16 bp, Artificial Sequence
  Synthetic construct
tggcgcaaggaatcgc

SEQ ID NO: 5035 - DNA, 16 bp, Artificial Sequence
  Synthetic construct
tggcgcaagttgagat

SEQ ID NO: 5036 - DNA, 16 bp, Artificial Sequence
  Synthetic construct
tggcgcaagttgagat

SEQ ID NO: 5037 - DNA, 16 bp, Artificial Sequence
  Synthetic construct
tggcgcacactatctt

SEQ ID NO: 5038 - DNA, 16 bp, Artificial Sequence
  Synthetic construct
tggcgcacactatctt

SEQ ID NO: 5039 - DNA, 16 bp, Artificial Sequence
  Synthetic construct
tggcgcacatcctaga

SEQ ID NO: 5040 - DNA, 16 bp, Artificial Sequence
  Synthetic construct
tggcgcacatcctaga

SEQ ID NO: 5041 - DNA, 16 bp, Artificial Sequence
  Synthetic construct
tggcgcacattcttac

SEQ ID NO: 5042 - DNA, 16 bp, Artificial Sequence
  Synthetic construct
tggcgcacattcttac

SEQ ID NO: 5043 - DNA, 16 bp, Artificial Sequence
  Synthetic construct
tggcgcagtaccgaga

SEQ ID NO: 5044 - DNA, 16 bp, Artificial Sequence
  Synthetic construct
tggcgcagtaccgaga

SEQ ID NO: 5045 - DNA, 16 bp, Artificial Sequence
  Synthetic construct
tggcgcatcttcatgt

SEQ ID NO: 5046 - DNA, 16 bp, Artificial Sequence
  Synthetic construct
tggcgcatcttcatgt

SEQ ID NO: 5047 - DNA, 16 bp, Artificial Sequence
  Synthetic construct
tggctggcactcaggc

SEQ ID NO: 5048 - DNA, 16 bp, Artificial Sequence
  Synthetic construct
tggctggcactcaggc

SEQ ID NO: 5049 - DNA, 16 bp, Artificial Sequence
  Synthetic construct
tggctggcagacgctc

SEQ ID NO: 5050 - DNA, 16 bp, Artificial Sequence
  Synthetic construct
tggctggcagacgctc

SEQ ID NO: 5051 - DNA, 16 bp, Artificial Sequence
  Synthetic construct
tggctgggtatgaatg

SEQ ID NO: 5052 - DNA, 16 bp, Artificial Sequence
  Synthetic construct
tggctgggtatgaatg

SEQ ID NO: 5053 - DNA, 16 bp, Artificial Sequence
  Synthetic construct
tggctgggtattcgtg

SEQ ID NO: 5054 - DNA, 16 bp, Artificial Sequence
  Synthetic construct
tggctgggtattcgtg

SEQ ID NO: 5055 - DNA, 16 bp, Artificial Sequence
  Synthetic construct
tggctggtcaaggtaa

SEQ ID NO: 5056 - DNA, 16 bp, Artificial Sequence
  Synthetic construct
tggctggtcaaggtaa

SEQ ID NO: 5057 - DNA, 16 bp, Artificial Sequence
  Synthetic construct
tgggaagaggaatcgc

SEQ ID NO: 5058 - DNA, 16 bp, Artificial Sequence
  Synthetic construct
tgggaagaggaatcgc

SEQ ID NO: 5059 - DNA, 16 bp, Artificial Sequence
  Synthetic construct
tgggaagtctacgagt

SEQ ID NO: 5060 - DNA, 16 bp, Artificial Sequence
  Synthetic construct
tgggaagtctacgagt

SEQ ID NO: 5061 - DNA, 16 bp, Artificial Sequence
  Synthetic construct
tgggcgtcaatgttgc

SEQ ID NO: 5062 - DNA, 16 bp, Artificial Sequence
  Synthetic construct
tgggcgtcaatgttgc

SEQ ID NO: 5063 - DNA, 16 bp, Artificial Sequence
  Synthetic construct
tgggcgtcataacctg

SEQ ID NO: 5064 - DNA, 16 bp, Artificial Sequence
  Synthetic construct
tgggcgtcataacctg

SEQ ID NO: 5065 - DNA, 16 bp, Artificial Sequence
  Synthetic construct
tgggcgtgtttgacac

SEQ ID NO: 5066 - DNA, 16 bp, Artificial Sequence
  Synthetic construct
tgggcgtgtttgacac

SEQ ID NO: 5067 - DNA, 16 bp, Artificial Sequence
  Synthetic construct
tgggcgttcacatgca

SEQ ID NO: 5068 - DNA, 16 bp, Artificial Sequence
  Synthetic construct
tgggcgttcacatgca

SEQ ID NO: 5069 - DNA, 16 bp, Artificial Sequence
  Synthetic construct
tggttagagcgctcca

SEQ ID NO: 5070 - DNA, 16 bp, Artificial Sequence
  Synthetic construct
tggttagagcgctcca

SEQ ID NO: 5071 - DNA, 16 bp, Artificial Sequence
  Synthetic construct
tggttagcacattagc

SEQ ID NO: 5072 - DNA, 16 bp, Artificial Sequence
  Synthetic construct
tggttagcacattagc

SEQ ID NO: 5073 - DNA, 16 bp, Artificial Sequence
  Synthetic construct
tggttagcaggatcga

SEQ ID NO: 5074 - DNA, 16 bp, Artificial Sequence
  Synthetic construct
tggttagcaggatcga

SEQ ID NO: 5075 - DNA, 16 bp, Artificial Sequence
  Synthetic construct
tggttaggtgtgaata

SEQ ID NO: 5076 - DNA, 16 bp, Artificial Sequence
  Synthetic construct
tggttaggtgtgaata

SEQ ID NO: 5077 - DNA, 16 bp, Artificial Sequence
  Synthetic construct
tggttagtcgcttgtc

SEQ ID NO: 5078 - DNA, 16 bp, Artificial Sequence
  Synthetic construct
tggttagtcgcttgtc

SEQ ID NO: 5079 - DNA, 16 bp, Artificial Sequence
  Synthetic construct
tggttccaggctaggt

SEQ ID NO: 5080 - DNA, 16 bp, Artificial Sequence
  Synthetic construct
tggttccaggctaggt

SEQ ID NO: 5081 - DNA, 16 bp, Artificial Sequence
  Synthetic construct
tggttcccattaaccg

SEQ ID NO: 5082 - DNA, 16 bp, Artificial Sequence
  Synthetic construct
tggttcccattaaccg

SEQ ID NO: 5083 - DNA, 16 bp, Artificial Sequence
  Synthetic construct
tggttccgtatctgca

SEQ ID NO: 5084 - DNA, 16 bp, Artificial Sequence
  Synthetic construct
tggttccgtatctgca

SEQ ID NO: 5085 - DNA, 16 bp, Artificial Sequence
  Synthetic construct
tggttccgtcagaagc

SEQ ID NO: 5086 - DNA, 16 bp, Artificial Sequence
  Synthetic construct
tggttccgtcagaagc

SEQ ID NO: 5087 - DNA, 16 bp, Artificial Sequence
  Synthetic construct
tgtattcagtacgttc

SEQ ID NO: 5088 - DNA, 16 bp, Artificial Sequence
  Synthetic construct
tgtattcagtacgttc

SEQ ID NO: 5089 - DNA, 16 bp, Artificial Sequence
  Synthetic construct
tgtattccaaactgtc

SEQ ID NO: 5090 - DNA, 16 bp, Artificial Sequence
  Synthetic construct
tgtattccaaactgtc

SEQ ID NO: 5091 - DNA, 16 bp, Artificial Sequence
  Synthetic construct
tgtattccaccacgtg

SEQ ID NO: 5092 - DNA, 16 bp, Artificial Sequence
  Synthetic construct
tgtattccaccacgtg

SEQ ID NO: 5093 - DNA, 16 bp, Artificial Sequence
  Synthetic construct
tgtattccattcctgc

SEQ ID NO: 5094 - DNA, 16 bp, Artificial Sequence
  Synthetic construct
tgtattccattcctgc

SEQ ID NO: 5095 - DNA, 16 bp, Artificial Sequence
  Synthetic construct
tgtattcgtctagtgt

SEQ ID NO: 5096 - DNA, 16 bp, Artificial Sequence
  Synthetic construct
tgtattcgtctagtgt

SEQ ID NO: 5097 - DNA, 16 bp, Artificial Sequence
  Synthetic construct
tgtattcgtgcctgtg

SEQ ID NO: 5098 - DNA, 16 bp, Artificial Sequence
  Synthetic construct
tgtattcgtgcctgtg

SEQ ID NO: 5099 - DNA, 16 bp, Artificial Sequence
  Synthetic construct
tgtattctcgtagatc

SEQ ID NO: 5100 - DNA, 16 bp, Artificial Sequence
  Synthetic construct
tgtattctcgtagatc

SEQ ID NO: 5101 - DNA, 16 bp, Artificial Sequence
  Synthetic construct
tgtattctcttatctg

SEQ ID NO: 5102 - DNA, 16 bp, Artificial Sequence
  Synthetic construct
tgtattctcttatctg

SEQ ID NO: 5103 - DNA, 16 bp, Artificial Sequence
  Synthetic construct
tgtcccaagggctctc

SEQ ID NO: 5104 - DNA, 16 bp, Artificial Sequence
  Synthetic construct
tgtcccaagggctctc

SEQ ID NO: 5105 - DNA, 16 bp, Artificial Sequence
  Synthetic construct
tgtcccagtaagcacg

SEQ ID NO: 5106 - DNA, 16 bp, Artificial Sequence
  Synthetic construct
tgtcccagtaagcacg

SEQ ID NO: 5107 - DNA, 16 bp, Artificial Sequence
  Synthetic construct
tgtcccagtagcctcg

SEQ ID NO: 5108 - DNA, 16 bp, Artificial Sequence
  Synthetic construct
tgtcccagtagcctcg

SEQ ID NO: 5109 - DNA, 16 bp, Artificial Sequence
  Synthetic construct
tgtcccagtcttcaag

SEQ ID NO: 5110 - DNA, 16 bp, Artificial Sequence
  Synthetic construct
tgtcccagtcttcaag

SEQ ID NO: 5111 - DNA, 16 bp, Artificial Sequence
  Synthetic construct
tgtcccagtgtgcgtc

SEQ ID NO: 5112 - DNA, 16 bp, Artificial Sequence
  Synthetic construct
tgtcccagtgtgcgtc

SEQ ID NO: 5113 - DNA, 16 bp, Artificial Sequence
  Synthetic construct
tgtcccatcatttggg

SEQ ID NO: 5114 - DNA, 16 bp, Artificial Sequence
  Synthetic construct
tgtcccatcatttggg

SEQ ID NO: 5115 - DNA, 16 bp, Artificial Sequence
  Synthetic construct
tgtggtaagcgtgtcc

SEQ ID NO: 5116 - DNA, 16 bp, Artificial Sequence
  Synthetic construct
tgtggtaagcgtgtcc

SEQ ID NO: 5117 - DNA, 16 bp, Artificial Sequence
  Synthetic construct
tgtggtacaacgcacc

SEQ ID NO: 5118 - DNA, 16 bp, Artificial Sequence
  Synthetic construct
tgtggtacaacgcacc

SEQ ID NO: 5119 - DNA, 16 bp, Artificial Sequence
  Synthetic construct
tgtggtacactgtcgg

SEQ ID NO: 5120 - DNA, 16 bp, Artificial Sequence
  Synthetic construct
tgtggtacactgtcgg

SEQ ID NO: 5121 - DNA, 16 bp, Artificial Sequence
  Synthetic construct
tgtggtatcggttaac

SEQ ID NO: 5122 - DNA, 16 bp, Artificial Sequence
  Synthetic construct
tgtggtatcggttaac

SEQ ID NO: 5123 - DNA, 16 bp, Artificial Sequence
  Synthetic construct
tgtggtatctgcgtaa

SEQ ID NO: 5124 - DNA, 16 bp, Artificial Sequence
  Synthetic construct
tgtggtatctgcgtaa

SEQ ID NO: 5125 - DNA, 16 bp, Artificial Sequence
  Synthetic construct
tgtgtttagtgggcta

SEQ ID NO: 5126 - DNA, 16 bp, Artificial Sequence
  Synthetic construct
tgtgtttagtgggcta

SEQ ID NO: 5127 - DNA, 16 bp, Artificial Sequence
  Synthetic construct
tgtgtttgtctagccg

SEQ ID NO: 5128 - DNA, 16 bp, Artificial Sequence
  Synthetic construct
tgtgtttgtctagccg

SEQ ID NO: 5129 - DNA, 16 bp, Artificial Sequence
  Synthetic construct
tgtgtttgttatgtgc

SEQ ID NO: 5130 - DNA, 16 bp, Artificial Sequence
  Synthetic construct
tgtgtttgttatgtgc

SEQ ID NO: 5131 - DNA, 16 bp, Artificial Sequence
  Synthetic construct
tgtgttttcacgacta

SEQ ID NO: 5132 - DNA, 16 bp, Artificial Sequence
  Synthetic construct
tgtgttttcacgacta

SEQ ID NO: 5133 - DNA, 16 bp, Artificial Sequence
  Synthetic construct
tgttccgagaagaagc

SEQ ID NO: 5134 - DNA, 16 bp, Artificial Sequence
  Synthetic construct
tgttccgagaagaagc

SEQ ID NO: 5135 - DNA, 16 bp, Artificial Sequence
  Synthetic construct
tgttccgagcgttccg

SEQ ID NO: 5136 - DNA, 16 bp, Artificial Sequence
  Synthetic construct
tgttccgagcgttccg

SEQ ID NO: 5137 - DNA, 16 bp, Artificial Sequence
  Synthetic construct
tgttccggtggtttca

SEQ ID NO: 5138 - DNA, 16 bp, Artificial Sequence
  Synthetic construct
tgttccggtggtttca

SEQ ID NO: 5139 - DNA, 16 bp, Artificial Sequence
  Synthetic construct
tgttccggttaagggc

SEQ ID NO: 5140 - DNA, 16 bp, Artificial Sequence
  Synthetic construct
tgttccggttaagggc

SEQ ID NO: 5141 - DNA, 16 bp, Artificial Sequence
  Synthetic construct
tgttccgtcaagccta

SEQ ID NO: 5142 - DNA, 16 bp, Artificial Sequence
  Synthetic construct
tgttccgtcaagccta

SEQ ID NO: 5143 - DNA, 16 bp, Artificial Sequence
  Synthetic construct
tgttccgtcggaaata

SEQ ID NO: 5144 - DNA, 16 bp, Artificial Sequence
  Synthetic construct
tgttccgtcggaaata

SEQ ID NO: 5145 - DNA, 16 bp, Artificial Sequence
  Synthetic construct
tgttccgtcttatctg

SEQ ID NO: 5146 - DNA, 16 bp, Artificial Sequence
  Synthetic construct
tgttccgtcttatctg

SEQ ID NO: 5147 - DNA, 16 bp, Artificial Sequence
  Synthetic construct
ttaactcgtccatcct

SEQ ID NO: 5148 - DNA, 16 bp, Artificial Sequence
  Synthetic construct
ttaactcgtccatcct

SEQ ID NO: 5149 - DNA, 16 bp, Artificial Sequence
  Synthetic construct
ttaactctccgcgttt

SEQ ID NO: 5150 - DNA, 16 bp, Artificial Sequence
  Synthetic construct
ttaactctccgcgttt

SEQ ID NO: 5151 - DNA, 16 bp, Artificial Sequence
  Synthetic construct
ttaactctcgagaacg

SEQ ID NO: 5152 - DNA, 16 bp, Artificial Sequence
  Synthetic construct
ttaactctcgagaacg

SEQ ID NO: 5153 - DNA, 16 bp, Artificial Sequence
  Synthetic construct
ttaactctctacgagt

SEQ ID NO: 5154 - DNA, 16 bp, Artificial Sequence
  Synthetic construct
ttaactctctacgagt

SEQ ID NO: 5155 - DNA, 16 bp, Artificial Sequence
  Synthetic construct
ttaactctctcaactt

SEQ ID NO: 5156 - DNA, 16 bp, Artificial Sequence
  Synthetic construct
ttaactctctcaactt

SEQ ID NO: 5157 - DNA, 16 bp, Artificial Sequence
  Synthetic construct
ttaggaccaagcgctc

SEQ ID NO: 5158 - DNA, 16 bp, Artificial Sequence
  Synthetic construct
ttaggaccaagcgctc

SEQ ID NO: 5159 - DNA, 16 bp, Artificial Sequence
  Synthetic construct
ttaggactccgtacaa

SEQ ID NO: 5160 - DNA, 16 bp, Artificial Sequence
  Synthetic construct
ttaggactccgtacaa

SEQ ID NO: 5161 - DNA, 16 bp, Artificial Sequence
  Synthetic construct
ttaggactcgtacggc

SEQ ID NO: 5162 - DNA, 16 bp, Artificial Sequence
  Synthetic construct
ttaggactcgtacggc

SEQ ID NO: 5163 - DNA, 16 bp, Artificial Sequence
  Synthetic construct
ttaggcaagagggctt

SEQ ID NO: 5164 - DNA, 16 bp, Artificial Sequence
  Synthetic construct
ttaggcaagagggctt

SEQ ID NO: 5165 - DNA, 16 bp, Artificial Sequence
  Synthetic construct
ttaggcacatcagtac

SEQ ID NO: 5166 - DNA, 16 bp, Artificial Sequence
  Synthetic construct
ttaggcacatcagtac

SEQ ID NO: 5167 - DNA, 16 bp, Artificial Sequence
  Synthetic construct
ttaggcagtaccgtta

SEQ ID NO: 5168 - DNA, 16 bp, Artificial Sequence
  Synthetic construct
ttaggcagtaccgtta

SEQ ID NO: 5169 - DNA, 16 bp, Artificial Sequence
  Synthetic construct
ttaggcagtccgaacc

SEQ ID NO: 5170 - DNA, 16 bp, Artificial Sequence
  Synthetic construct
ttaggcagtccgaacc

SEQ ID NO: 5171 - DNA, 16 bp, Artificial Sequence
  Synthetic construct
ttaggcagtggctcca

SEQ ID NO: 5172 - DNA, 16 bp, Artificial Sequence
  Synthetic construct
ttaggcagtggctcca

SEQ ID NO: 5173 - DNA, 16 bp, Artificial Sequence
  Synthetic construct
ttaggcatctgagtgt

SEQ ID NO: 5174 - DNA, 16 bp, Artificial Sequence
  Synthetic construct
ttaggcatctgagtgt

SEQ ID NO: 5175 - DNA, 16 bp, Artificial Sequence
  Synthetic construct
ttagttcagagcaatt

SEQ ID NO: 5176 - DNA, 16 bp, Artificial Sequence
  Synthetic construct
ttagttcagagcaatt

SEQ ID NO: 5177 - DNA, 16 bp, Artificial Sequence
  Synthetic construct
ttagttcgtcggatcc

SEQ ID NO: 5178 - DNA, 16 bp, Artificial Sequence
  Synthetic construct
ttagttcgtcggatcc

SEQ ID NO: 5179 - DNA, 16 bp, Artificial Sequence
  Synthetic construct
ttagttctcaagccta

SEQ ID NO: 5180 - DNA, 16 bp, Artificial Sequence
  Synthetic construct
ttagttctcaagccta

SEQ ID NO: 5181 - DNA, 16 bp, Artificial Sequence
  Synthetic construct
ttatgctgtaagggaa

SEQ ID NO: 5182 - DNA, 16 bp, Artificial Sequence
  Synthetic construct
ttatgctgtaagggaa

SEQ ID NO: 5183 - DNA, 16 bp, Artificial Sequence
  Synthetic construct
ttatgctgtcacccag

SEQ ID NO: 5184 - DNA, 16 bp, Artificial Sequence
  Synthetic construct
ttatgctgtcacccag

SEQ ID NO: 5185 - DNA, 16 bp, Artificial Sequence
  Synthetic construct
ttatgctgtctagagg

SEQ ID NO: 5186 - DNA, 16 bp, Artificial Sequence
  Synthetic construct
ttatgctgtctagagg

SEQ ID NO: 5187 - DNA, 16 bp, Artificial Sequence
  Synthetic construct
ttatgctgttctgttt

SEQ ID NO: 5188 - DNA, 16 bp, Artificial Sequence
  Synthetic construct
ttatgctgttctgttt

SEQ ID NO: 5189 - DNA, 16 bp, Artificial Sequence
  Synthetic construct
ttatgctgttgaactc

SEQ ID NO: 5190 - DNA, 16 bp, Artificial Sequence
  Synthetic construct
ttatgctgttgaactc

SEQ ID NO: 5191 - DNA, 16 bp, Artificial Sequence
  Synthetic construct
ttatgctgttgattgc

SEQ ID NO: 5192 - DNA, 16 bp, Artificial Sequence
  Synthetic construct
ttatgctgttgattgc

SEQ ID NO: 5193 - DNA, 16 bp, Artificial Sequence
  Synthetic construct
ttcccagagtttagga

SEQ ID NO: 5194 - DNA, 16 bp, Artificial Sequence
  Synthetic construct
ttcccagagtttagga

SEQ ID NO: 5195 - DNA, 16 bp, Artificial Sequence
  Synthetic construct
ttcccaggtaccggct

SEQ ID NO: 5196 - DNA, 16 bp, Artificial Sequence
  Synthetic construct
ttcccaggtaccggct

SEQ ID NO: 5197 - DNA, 16 bp, Artificial Sequence
  Synthetic construct
ttcccagtcccattta

SEQ ID NO: 5198 - DNA, 16 bp, Artificial Sequence
  Synthetic construct
ttcccagtcccattta

SEQ ID NO: 5199 - DNA, 16 bp, Artificial Sequence
  Synthetic construct
ttcccagtctaccaga

SEQ ID NO: 5200 - DNA, 16 bp, Artificial Sequence
  Synthetic construct
ttcccagtctaccaga

SEQ ID NO: 5201 - DNA, 16 bp, Artificial Sequence
  Synthetic construct
ttcgaagagccttgat

SEQ ID NO: 5202 - DNA, 16 bp, Artificial Sequence
  Synthetic construct
ttcgaagagccttgat

SEQ ID NO: 5203 - DNA, 16 bp, Artificial Sequence
  Synthetic construct
ttcgaaggtatatgag

SEQ ID NO: 5204 - DNA, 16 bp, Artificial Sequence
  Synthetic construct
ttcgaaggtatatgag

SEQ ID NO: 5205 - DNA, 16 bp, Artificial Sequence
  Synthetic construct
ttcgaagtcaacacac

SEQ ID NO: 5206 - DNA, 16 bp, Artificial Sequence
  Synthetic construct
ttcgaagtcaacacac

SEQ ID NO: 5207 - DNA, 16 bp, Artificial Sequence
  Synthetic construct
ttcgaagtcctctagc

SEQ ID NO: 5208 - DNA, 16 bp, Artificial Sequence
  Synthetic construct
ttcgaagtcctctagc

SEQ ID NO: 5209 - DNA, 16 bp, Artificial Sequence
  Synthetic construct
ttcgaagtcgtaccgg

SEQ ID NO: 5210 - DNA, 16 bp, Artificial Sequence
  Synthetic construct
ttcgaagtcgtaccgg

SEQ ID NO: 5211 - DNA, 16 bp, Artificial Sequence
  Synthetic construct
ttcgaagtctggtatg

SEQ ID NO: 5212 - DNA, 16 bp, Artificial Sequence
  Synthetic construct
ttcgaagtctggtatg

SEQ ID NO: 5213 - DNA, 16 bp, Artificial Sequence
  Synthetic construct
ttcggtcagccagttt

SEQ ID NO: 5214 - DNA, 16 bp, Artificial Sequence
  Synthetic construct
ttcggtcagccagttt

SEQ ID NO: 5215 - DNA, 16 bp, Artificial Sequence
  Synthetic construct
ttcggtcgttgtacac

SEQ ID NO: 5216 - DNA, 16 bp, Artificial Sequence
  Synthetic construct
ttcggtcgttgtacac

SEQ ID NO: 5217 - DNA, 16 bp, Artificial Sequence
  Synthetic construct
ttcggtctctacctgc

SEQ ID NO: 5218 - DNA, 16 bp, Artificial Sequence
  Synthetic construct
ttcggtctctacctgc

SEQ ID NO: 5219 - DNA, 16 bp, Artificial Sequence
  Synthetic construct
ttcggtctcttagagc

SEQ ID NO: 5220 - DNA, 16 bp, Artificial Sequence
  Synthetic construct
ttcggtctcttagagc

SEQ ID NO: 5221 - DNA, 16 bp, Artificial Sequence
  Synthetic construct
ttctacaagacaaagg

SEQ ID NO: 5222 - DNA, 16 bp, Artificial Sequence
  Synthetic construct
ttctacaagacaaagg

SEQ ID NO: 5223 - DNA, 16 bp, Artificial Sequence
  Synthetic construct
ttctacaagcccgaaa

SEQ ID NO: 5224 - DNA, 16 bp, Artificial Sequence
  Synthetic construct
ttctacaagcccgaaa

SEQ ID NO: 5225 - DNA, 16 bp, Artificial Sequence
  Synthetic construct
ttctacacattgcggc

SEQ ID NO: 5226 - DNA, 16 bp, Artificial Sequence
  Synthetic construct
ttctacacattgcggc

SEQ ID NO: 5227 - DNA, 16 bp, Artificial Sequence
  Synthetic construct
ttctacagtcctcttg

SEQ ID NO: 5228 - DNA, 16 bp, Artificial Sequence
  Synthetic construct
ttctacagtcctcttg

SEQ ID NO: 5229 - DNA, 16 bp, Artificial Sequence
  Synthetic construct
ttctacagtgaaagag

SEQ ID NO: 5230 - DNA, 16 bp, Artificial Sequence
  Synthetic construct
ttctacagtgaaagag

SEQ ID NO: 5231 - DNA, 16 bp, Artificial Sequence
  Synthetic construct
ttctcaacagtcagag

SEQ ID NO: 5232 - DNA, 16 bp, Artificial Sequence
  Synthetic construct
ttctcaacagtcagag

SEQ ID NO: 5233 - DNA, 16 bp, Artificial Sequence
  Synthetic construct
ttctcaagtaacgttc

SEQ ID NO: 5234 - DNA, 16 bp, Artificial Sequence
  Synthetic construct
ttctcaagtaacgttc

SEQ ID NO: 5235 - DNA, 16 bp, Artificial Sequence
  Synthetic construct
ttctcaagtaagtagt

SEQ ID NO: 5236 - DNA, 16 bp, Artificial Sequence
  Synthetic construct
ttctcaagtaagtagt

SEQ ID NO: 5237 - DNA, 16 bp, Artificial Sequence
  Synthetic construct
ttctcaagtaccggct

SEQ ID NO: 5238 - DNA, 16 bp, Artificial Sequence
  Synthetic construct
ttctcaagtaccggct

SEQ ID NO: 5239 - DNA, 16 bp, Artificial Sequence
  Synthetic construct
ttctcaagttatcacg

SEQ ID NO: 5240 - DNA, 16 bp, Artificial Sequence
  Synthetic construct
ttctcaagttatcacg

SEQ ID NO: 5241 - DNA, 16 bp, Artificial Sequence
  Synthetic construct
ttctcaagttgattgc

SEQ ID NO: 5242 - DNA, 16 bp, Artificial Sequence
  Synthetic construct
ttctcaagttgattgc

SEQ ID NO: 5243 - DNA, 16 bp, Artificial Sequence
  Synthetic construct
ttctcaatcagcctaa

SEQ ID NO: 5244 - DNA, 16 bp, Artificial Sequence
  Synthetic construct
ttctcaatcagcctaa

SEQ ID NO: 5245 - DNA, 16 bp, Artificial Sequence
  Synthetic construct
ttctcaatcgccataa

SEQ ID NO: 5246 - DNA, 16 bp, Artificial Sequence
  Synthetic construct
ttctcaatcgccataa

SEQ ID NO: 5247 - DNA, 16 bp, Artificial Sequence
  Synthetic construct
ttctcctagtcgtttg

SEQ ID NO: 5248 - DNA, 16 bp, Artificial Sequence
  Synthetic construct
ttctcctagtcgtttg

SEQ ID NO: 5249 - DNA, 16 bp, Artificial Sequence
  Synthetic construct
ttctcctcaagggtca

SEQ ID NO: 5250 - DNA, 16 bp, Artificial Sequence
  Synthetic construct
ttctcctcaagggtca

SEQ ID NO: 5251 - DNA, 16 bp, Artificial Sequence
  Synthetic construct
ttctcctcaccagcac

SEQ ID NO: 5252 - DNA, 16 bp, Artificial Sequence
  Synthetic construct
ttctcctcaccagcac

SEQ ID NO: 5253 - DNA, 16 bp, Artificial Sequence
  Synthetic construct
ttctcctcaccatcct

SEQ ID NO: 5254 - DNA, 16 bp, Artificial Sequence
  Synthetic construct
ttctcctcaccatcct

SEQ ID NO: 5255 - DNA, 16 bp, Artificial Sequence
  Synthetic construct
ttctcctcacgtctct

SEQ ID NO: 5256 - DNA, 16 bp, Artificial Sequence
  Synthetic construct
ttctcctcacgtctct

SEQ ID NO: 5257 - DNA, 16 bp, Artificial Sequence
  Synthetic construct
ttctcctcatttgctt

SEQ ID NO: 5258 - DNA, 16 bp, Artificial Sequence
  Synthetic construct
ttctcctcatttgctt

SEQ ID NO: 5259 - DNA, 16 bp, Artificial Sequence
  Synthetic construct
ttctcctgtaatcacc

SEQ ID NO: 5260 - DNA, 16 bp, Artificial Sequence
  Synthetic construct
ttctcctgtaatcacc

SEQ ID NO: 5261 - DNA, 16 bp, Artificial Sequence
  Synthetic construct
ttctcctgtagggact

SEQ ID NO: 5262 - DNA, 16 bp, Artificial Sequence
  Synthetic construct
ttctcctgtagggact

SEQ ID NO: 5263 - DNA, 16 bp, Artificial Sequence
  Synthetic construct
ttctccttcacatagc

SEQ ID NO: 5264 - DNA, 16 bp, Artificial Sequence
  Synthetic construct
ttctccttcacatagc

SEQ ID NO: 5265 - DNA, 16 bp, Artificial Sequence
  Synthetic construct
ttctccttcagtacgt

SEQ ID NO: 5266 - DNA, 16 bp, Artificial Sequence
  Synthetic construct
ttctccttcagtacgt

SEQ ID NO: 5267 - DNA, 16 bp, Artificial Sequence
  Synthetic construct
ttctccttcggtgtcg

SEQ ID NO: 5268 - DNA, 16 bp, Artificial Sequence
  Synthetic construct
ttctccttcggtgtcg

SEQ ID NO: 5269 - DNA, 16 bp, Artificial Sequence
  Synthetic construct
ttctccttctactatc

SEQ ID NO: 5270 - DNA, 16 bp, Artificial Sequence
  Synthetic construct
ttctccttctactatc

SEQ ID NO: 5271 - DNA, 16 bp, Artificial Sequence
  Synthetic construct
ttctccttctgaggga

SEQ ID NO: 5272 - DNA, 16 bp, Artificial Sequence
  Synthetic construct
ttctccttctgaggga

SEQ ID NO: 5273 - DNA, 16 bp, Artificial Sequence
  Synthetic construct
ttcttagagcaatatg

SEQ ID NO: 5274 - DNA, 16 bp, Artificial Sequence
  Synthetic construct
ttcttagagcaatatg

SEQ ID NO: 5275 - DNA, 16 bp, Artificial Sequence
  Synthetic construct
ttcttagagccacgtc

SEQ ID NO: 5276 - DNA, 16 bp, Artificial Sequence
  Synthetic construct
ttcttagagccacgtc

SEQ ID NO: 5277 - DNA, 16 bp, Artificial Sequence
  Synthetic construct
ttcttagagtgggcta

SEQ ID NO: 5278 - DNA, 16 bp, Artificial Sequence
  Synthetic construct
ttcttagagtgggcta

SEQ ID NO: 5279 - DNA, 16 bp, Artificial Sequence
  Synthetic construct
ttcttagcaatgacct

SEQ ID NO: 5280 - DNA, 16 bp, Artificial Sequence
  Synthetic construct
ttcttagcaatgacct

SEQ ID NO: 5281 - DNA, 16 bp, Artificial Sequence
  Synthetic construct
ttcttagcagacgcaa

SEQ ID NO: 5282 - DNA, 16 bp, Artificial Sequence
  Synthetic construct
ttcttagcagacgcaa

SEQ ID NO: 5283 - DNA, 16 bp, Artificial Sequence
  Synthetic construct
ttcttagcatcgacgc

SEQ ID NO: 5284 - DNA, 16 bp, Artificial Sequence
  Synthetic construct
ttcttagcatcgacgc

SEQ ID NO: 5285 - DNA, 16 bp, Artificial Sequence
  Synthetic construct
ttcttaggtacatgtc

SEQ ID NO: 5286 - DNA, 16 bp, Artificial Sequence
  Synthetic construct
ttcttaggtacatgtc

SEQ ID NO: 5287 - DNA, 16 bp, Artificial Sequence
  Synthetic construct
ttcttaggtagaaagg

SEQ ID NO: 5288 - DNA, 16 bp, Artificial Sequence
  Synthetic construct
ttcttaggtagaaagg

SEQ ID NO: 5289 - DNA, 16 bp, Artificial Sequence
  Synthetic construct
ttcttaggtggctcca

SEQ ID NO: 5290 - DNA, 16 bp, Artificial Sequence
  Synthetic construct
ttcttaggtggctcca

SEQ ID NO: 5291 - DNA, 16 bp, Artificial Sequence
  Synthetic construct
ttcttaggttaagtag

SEQ ID NO: 5292 - DNA, 16 bp, Artificial Sequence
  Synthetic construct
ttcttaggttaagtag

SEQ ID NO: 5293 - DNA, 16 bp, Artificial Sequence
  Synthetic construct
ttcttagtcattatcc

SEQ ID NO: 5294 - DNA, 16 bp, Artificial Sequence
  Synthetic construct
ttcttagtcattatcc

SEQ ID NO: 5295 - DNA, 16 bp, Artificial Sequence
  Synthetic construct
ttcttagtctctaagg

SEQ ID NO: 5296 - DNA, 16 bp, Artificial Sequence
  Synthetic construct
ttcttagtctctaagg

SEQ ID NO: 5297 - DNA, 16 bp, Artificial Sequence
  Synthetic construct
ttgaacgagcgagaaa

SEQ ID NO: 5298 - DNA, 16 bp, Artificial Sequence
  Synthetic construct
ttgaacgagcgagaaa

SEQ ID NO: 5299 - DNA, 16 bp, Artificial Sequence
  Synthetic construct
ttgaacgagcgccttg

SEQ ID NO: 5300 - DNA, 16 bp, Artificial Sequence
  Synthetic construct
ttgaacgagcgccttg

SEQ ID NO: 5301 - DNA, 16 bp, Artificial Sequence
  Synthetic construct
ttgaacggtctgcaat

SEQ ID NO: 5302 - DNA, 16 bp, Artificial Sequence
  Synthetic construct
ttgaacggtctgcaat

SEQ ID NO: 5303 - DNA, 16 bp, Artificial Sequence
  Synthetic construct
ttgaacggtggtttca

SEQ ID NO: 5304 - DNA, 16 bp, Artificial Sequence
  Synthetic construct
ttgaacggtggtttca

SEQ ID NO: 5305 - DNA, 16 bp, Artificial Sequence
  Synthetic construct
ttgaacggtgtgcctg

SEQ ID NO: 5306 - DNA, 16 bp, Artificial Sequence
  Synthetic construct
ttgaacggtgtgcctg

SEQ ID NO: 5307 - DNA, 16 bp, Artificial Sequence
  Synthetic construct
ttgacttagaataggg

SEQ ID NO: 5308 - DNA, 16 bp, Artificial Sequence
  Synthetic construct
ttgacttagaataggg

SEQ ID NO: 5309 - DNA, 16 bp, Artificial Sequence
  Synthetic construct
ttgacttcacattcga

SEQ ID NO: 5310 - DNA, 16 bp, Artificial Sequence
  Synthetic construct
ttgacttcacattcga

SEQ ID NO: 5311 - DNA, 16 bp, Artificial Sequence
  Synthetic construct
ttgacttcagatggca

SEQ ID NO: 5312 - DNA, 16 bp, Artificial Sequence
  Synthetic construct
ttgacttcagatggca

SEQ ID NO: 5313 - DNA, 16 bp, Artificial Sequence
  Synthetic construct
ttgacttgtggtctcg

SEQ ID NO: 5314 - DNA, 16 bp, Artificial Sequence
  Synthetic construct
ttgacttgtggtctcg

SEQ ID NO: 5315 - DNA, 16 bp, Artificial Sequence
  Synthetic construct
ttgacttgttgcgcac

SEQ ID NO: 5316 - DNA, 16 bp, Artificial Sequence
  Synthetic construct
ttgacttgttgcgcac

SEQ ID NO: 5317 - DNA, 16 bp, Artificial Sequence
  Synthetic construct
ttgactttcaacggga

SEQ ID NO: 5318 - DNA, 16 bp, Artificial Sequence
  Synthetic construct
ttgactttcaacggga

SEQ ID NO: 5319 - DNA, 16 bp, Artificial Sequence
  Synthetic construct
ttgactttccgtcatc

SEQ ID NO: 5320 - DNA, 16 bp, Artificial Sequence
  Synthetic construct
ttgactttccgtcatc

SEQ ID NO: 5321 - DNA, 16 bp, Artificial Sequence
  Synthetic construct
ttgactttctaacggt

SEQ ID NO: 5322 - DNA, 16 bp, Artificial Sequence
  Synthetic construct
ttgactttctaacggt

SEQ ID NO: 5323 - DNA, 16 bp, Artificial Sequence
  Synthetic construct
ttgccgtagtacgata

SEQ ID NO: 5324 - DNA, 16 bp, Artificial Sequence
  Synthetic construct
ttgccgtagtacgata

SEQ ID NO: 5325 - DNA, 16 bp, Artificial Sequence
  Synthetic construct
ttgccgtcaaaggaag

SEQ ID NO: 5326 - DNA, 16 bp, Artificial Sequence
  Synthetic construct
ttgccgtcaaaggaag

SEQ ID NO: 5327 - DNA, 16 bp, Artificial Sequence
  Synthetic construct
ttgccgtcacatccaa

SEQ ID NO: 5328 - DNA, 16 bp, Artificial Sequence
  Synthetic construct
ttgccgtcacatccaa

SEQ ID NO: 5329 - DNA, 16 bp, Artificial Sequence
  Synthetic construct
ttgccgtcactctgtc

SEQ ID NO: 5330 - DNA, 16 bp, Artificial Sequence
  Synthetic construct
ttgccgtcactctgtc

SEQ ID NO: 5331 - DNA, 16 bp, Artificial Sequence
  Synthetic construct
ttgccgtgtaaaggag

SEQ ID NO: 5332 - DNA, 16 bp, Artificial Sequence
  Synthetic construct
ttgccgtgtaaaggag

SEQ ID NO: 5333 - DNA, 16 bp, Artificial Sequence
  Synthetic construct
ttgccgtgtcgttgta

SEQ ID NO: 5334 - DNA, 16 bp, Artificial Sequence
  Synthetic construct
ttgccgtgtcgttgta

SEQ ID NO: 5335 - DNA, 16 bp, Artificial Sequence
  Synthetic construct
ttgccgttccgtcatc

SEQ ID NO: 5336 - DNA, 16 bp, Artificial Sequence
  Synthetic construct
ttgccgttccgtcatc

SEQ ID NO: 5337 - DNA, 16 bp, Artificial Sequence
  Synthetic construct
ttgcgtcagagcctag

SEQ ID NO: 5338 - DNA, 16 bp, Artificial Sequence
  Synthetic construct
ttgcgtcagagcctag

SEQ ID NO: 5339 - DNA, 16 bp, Artificial Sequence
  Synthetic construct
ttgcgtcgtcaggaca

SEQ ID NO: 5340 - DNA, 16 bp, Artificial Sequence
  Synthetic construct
ttgcgtcgtcaggaca

SEQ ID NO: 5341 - DNA, 16 bp, Artificial Sequence
  Synthetic construct
ttgcgtctcagcctaa

SEQ ID NO: 5342 - DNA, 16 bp, Artificial Sequence
  Synthetic construct
ttgcgtctcagcctaa

SEQ ID NO: 5343 - DNA, 16 bp, Artificial Sequence
  Synthetic construct
ttgcgtctcgaatggg

SEQ ID NO: 5344 - DNA, 16 bp, Artificial Sequence
  Synthetic construct
ttgcgtctcgaatggg

SEQ ID NO: 5345 - DNA, 16 bp, Artificial Sequence
  Synthetic construct
ttgcgtctcgctgata

SEQ ID NO: 5346 - DNA, 16 bp, Artificial Sequence
  Synthetic construct
ttgcgtctcgctgata

SEQ ID NO: 5347 - DNA, 16 bp, Artificial Sequence
  Synthetic construct
ttggaaccaagtctac

SEQ ID NO: 5348 - DNA, 16 bp, Artificial Sequence
  Synthetic construct
ttggaaccaagtctac

SEQ ID NO: 5349 - DNA, 16 bp, Artificial Sequence
  Synthetic construct
ttggaacgttcctcca

SEQ ID NO: 5350 - DNA, 16 bp, Artificial Sequence
  Synthetic construct
ttggaacgttcctcca

SEQ ID NO: 5351 - DNA, 16 bp, Artificial Sequence
  Synthetic construct
ttggaactcacatacg

SEQ ID NO: 5352 - DNA, 16 bp, Artificial Sequence
  Synthetic construct
ttggaactcacatacg

SEQ ID NO: 5353 - DNA, 16 bp, Artificial Sequence
  Synthetic construct
ttggaactcgtttagg

SEQ ID NO: 5354 - DNA, 16 bp, Artificial Sequence
  Synthetic construct
ttggaactcgtttagg

SEQ ID NO: 5355 - DNA, 16 bp, Artificial Sequence
  Synthetic construct
ttggcaaaggagttgc

SEQ ID NO: 5356 - DNA, 16 bp, Artificial Sequence
  Synthetic construct
ttggcaaaggagttgc

SEQ ID NO: 5357 - DNA, 16 bp, Artificial Sequence
  Synthetic construct
ttggcaacaacaacct

SEQ ID NO: 5358 - DNA, 16 bp, Artificial Sequence
  Synthetic construct
ttggcaacaacaacct

SEQ ID NO: 5359 - DNA, 16 bp, Artificial Sequence
  Synthetic construct
ttggcaacatatgctg

SEQ ID NO: 5360 - DNA, 16 bp, Artificial Sequence
  Synthetic construct
ttggcaacatatgctg

SEQ ID NO: 5361 - DNA, 16 bp, Artificial Sequence
  Synthetic construct
ttggcaagttgcgtta

SEQ ID NO: 5362 - DNA, 16 bp, Artificial Sequence
  Synthetic construct
ttggcaagttgcgtta

SEQ ID NO: 5363 - DNA, 16 bp, Artificial Sequence
  Synthetic construct
ttgtaggcacccattc

SEQ ID NO: 5364 - DNA, 16 bp, Artificial Sequence
  Synthetic construct
ttgtaggcacccattc

SEQ ID NO: 5365 - DNA, 16 bp, Artificial Sequence
  Synthetic construct
ttgtagggtctggtcg

SEQ ID NO: 5366 - DNA, 16 bp, Artificial Sequence
  Synthetic construct
ttgtagggtctggtcg

SEQ ID NO: 5367 - DNA, 16 bp, Artificial Sequence
  Synthetic construct
ttgtagggttaagatg

SEQ ID NO: 5368 - DNA, 16 bp, Artificial Sequence
  Synthetic construct
ttgtagggttaagatg

SEQ ID NO: 5369 - DNA, 16 bp, Artificial Sequence
  Synthetic construct
tttactgagtgatcgg

SEQ ID NO: 5370 - DNA, 16 bp, Artificial Sequence
  Synthetic construct
tttactgagtgatcgg

SEQ ID NO: 5371 - DNA, 16 bp, Artificial Sequence
  Synthetic construct
tttactgcaggacgta

SEQ ID NO: 5372 - DNA, 16 bp, Artificial Sequence
  Synthetic construct
tttactgcaggacgta

SEQ ID NO: 5373 - DNA, 16 bp, Artificial Sequence
  Synthetic construct
tttactggtagcctcg

SEQ ID NO: 5374 - DNA, 16 bp, Artificial Sequence
  Synthetic construct
tttactggtagcctcg

SEQ ID NO: 5375 - DNA, 16 bp, Artificial Sequence
  Synthetic construct
tttactggtagctaaa

SEQ ID NO: 5376 - DNA, 16 bp, Artificial Sequence
  Synthetic construct
tttactggtagctaaa

SEQ ID NO: 5377 - DNA, 16 bp, Artificial Sequence
  Synthetic construct
tttactggtcgctttc

SEQ ID NO: 5378 - DNA, 16 bp, Artificial Sequence
  Synthetic construct
tttactggtcgctttc

SEQ ID NO: 5379 - DNA, 16 bp, Artificial Sequence
  Synthetic construct
tttactgtcgcctgtt

SEQ ID NO: 5380 - DNA, 16 bp, Artificial Sequence
  Synthetic construct
tttactgtcgcctgtt

SEQ ID NO: 5381 - DNA, 16 bp, Artificial Sequence
  Synthetic construct
tttatgcagtctcctc

SEQ ID NO: 5382 - DNA, 16 bp, Artificial Sequence
  Synthetic construct
tttatgcagtctcctc

SEQ ID NO: 5383 - DNA, 16 bp, Artificial Sequence
  Synthetic construct
tttatgccagtcgtgc

SEQ ID NO: 5384 - DNA, 16 bp, Artificial Sequence
  Synthetic construct
tttatgccagtcgtgc

SEQ ID NO: 5385 - DNA, 16 bp, Artificial Sequence
  Synthetic construct
tttatgcgtaccggct

SEQ ID NO: 5386 - DNA, 16 bp, Artificial Sequence
  Synthetic construct
tttatgcgtaccggct

SEQ ID NO: 5387 - DNA, 16 bp, Artificial Sequence
  Synthetic construct
tttatgcgttggtgga

SEQ ID NO: 5388 - DNA, 16 bp, Artificial Sequence
  Synthetic construct
tttatgcgttggtgga

SEQ ID NO: 5389 - DNA, 16 bp, Artificial Sequence
  Synthetic construct
tttatgctcaaccatg

SEQ ID NO: 5390 - DNA, 16 bp, Artificial Sequence
  Synthetic construct
tttatgctcaaccatg

SEQ ID NO: 5391 - DNA, 16 bp, Artificial Sequence
  Synthetic construct
tttcctcagacgcaac

SEQ ID NO: 5392 - DNA, 16 bp, Artificial Sequence
  Synthetic construct
tttcctcagacgcaac

SEQ ID NO: 5393 - DNA, 16 bp, Artificial Sequence
  Synthetic construct
tttcctccacagattc

SEQ ID NO: 5394 - DNA, 16 bp, Artificial Sequence
  Synthetic construct
tttcctccacagattc

SEQ ID NO: 5395 - DNA, 16 bp, Artificial Sequence
  Synthetic construct
tttcctccacaggttt

SEQ ID NO: 5396 - DNA, 16 bp, Artificial Sequence
  Synthetic construct
tttcctccacaggttt

SEQ ID NO: 5397 - DNA, 16 bp, Artificial Sequence
  Synthetic construct
tttcctcgttgggaca

SEQ ID NO: 5398 - DNA, 16 bp, Artificial Sequence
  Synthetic construct
tttcctcgttgggaca

SEQ ID NO: 5399 - DNA, 16 bp, Artificial Sequence
  Synthetic construct
tttcctctcgagccca

SEQ ID NO: 5400 - DNA, 16 bp, Artificial Sequence
  Synthetic construct
tttcctctcgagccca

SEQ ID NO: 5401 - DNA, 16 bp, Artificial Sequence
  Synthetic construct
tttgcgcagacagaga

SEQ ID NO: 5402 - DNA, 16 bp, Artificial Sequence
  Synthetic construct
tttgcgcagacagaga

SEQ ID NO: 5403 - DNA, 16 bp, Artificial Sequence
  Synthetic construct
tttgcgctcacttatc

SEQ ID NO: 5404 - DNA, 16 bp, Artificial Sequence
  Synthetic construct
tttgcgctcacttatc

SEQ ID NO: 5405 - DNA, 16 bp, Artificial Sequence
  Synthetic construct
tttgcgctccactggg

SEQ ID NO: 5406 - DNA, 16 bp, Artificial Sequence
  Synthetic construct
tttgcgctccactggg

SEQ ID NO: 5407 - DNA, 16 bp, Artificial Sequence
  Synthetic construct
tttgcgctccctaatt

SEQ ID NO: 5408 - DNA, 16 bp, Artificial Sequence
  Synthetic construct
tttgcgctccctaatt

SEQ ID NO: 5409 - DNA, 16 bp, Artificial Sequence
  Synthetic construct
tttggttagagcccaa

SEQ ID NO: 5410 - DNA, 16 bp, Artificial Sequence
  Synthetic construct
tttggttagagcccaa

SEQ ID NO: 5411 - DNA, 16 bp, Artificial Sequence
  Synthetic construct
tttggttagagtacat

SEQ ID NO: 5412 - DNA, 16 bp, Artificial Sequence
  Synthetic construct
tttggttagagtacat

SEQ ID NO: 5413 - DNA, 16 bp, Artificial Sequence
  Synthetic construct
tttggttgttcgaatc

SEQ ID NO: 5414 - DNA, 16 bp, Artificial Sequence
  Synthetic construct
tttggttgttcgaatc

SEQ ID NO: 5415 - DNA, 16 bp, Artificial Sequence
  Synthetic construct
tttgtcaagctaccta

SEQ ID NO: 5416 - DNA, 16 bp, Artificial Sequence
  Synthetic construct
tttgtcaagctaccta

SEQ ID NO: 5417 - DNA, 16 bp, Artificial Sequence
  Synthetic construct
tttgtcacatgcctaa

SEQ ID NO: 5418 - DNA, 16 bp, Artificial Sequence
  Synthetic construct
tttgtcacatgcctaa

SEQ ID NO: 5419 - DNA, 16 bp, Artificial Sequence
  Synthetic construct
tttgtcagtataaacg

SEQ ID NO: 5420 - DNA, 16 bp, Artificial Sequence
  Synthetic construct
tttgtcagtataaacg

SEQ ID NO: 5421 - DNA, 16 bp, Artificial Sequence
  Synthetic construct
tttgtcagtgacgcct

SEQ ID NO: 5422 - DNA, 16 bp, Artificial Sequence
  Synthetic construct
tttgtcagtgacgcct

SEQ ID NO: 5423 - DNA, 16 bp, Artificial Sequence
  Synthetic construct
tttgtcagtgctgtat

SEQ ID NO: 5424 - DNA, 16 bp, Artificial Sequence
  Synthetic construct
tttgtcagtgctgtat

SEQ ID NO: 5425 - DNA, 16 bp, Artificial Sequence
  Synthetic construct
tttgtcatccgaagag

SEQ ID NO: 5426 - DNA, 16 bp, Artificial Sequence
  Synthetic construct
tttgtcatccgaagag

SEQ ID NO: 5427 - DNA, 16 bp, Artificial Sequence
  Synthetic construct
tttgtcatcctacaga

SEQ ID NO: 5428 - DNA, 16 bp, Artificial Sequence
  Synthetic construct
tttgtcatcctacaga

SEQ ID NO: 5429 - DNA, 16 bp, Artificial Sequence
  Synthetic construct
tttgtcatctgcggca

SEQ ID NO: 5430 - DNA, 16 bp, Artificial Sequence
  Synthetic construct
tttgtcatctgcggca

SEQ ID NO: 5431 - DNA, 16 bp, Artificial Sequence
  Synthetic construct
taggcatgtaaacctc

SEQ ID NO: 5432 - DNA, 16 bp, Artificial Sequence
  Synthetic construct
taggcatgtaaacctc

SEQ ID NO: 5433 - DNA, 16 bp, Artificial Sequence
  Synthetic construct
acgataccaatgccat

SEQ ID NO: 5434 - DNA, 16 bp, Artificial Sequence
  Synthetic construct
acgataccaatgccat

SEQ ID NO: 5435 - DNA, 16 bp, Artificial Sequence
  Synthetic construct
tgccaaaagcggatca

SEQ ID NO: 5436 - DNA, 16 bp, Artificial Sequence
  Synthetic construct
tgccaaaagcggatca

SEQ ID NO: 5437 - protein, 123 aa, Artificial Sequence
  Synthetic construct
EVQLVQSGAEAKKPGESLTISCKASGYSFATYWISWVRQMPGKGLEWMGRIDPTDSYTNYSPSFQGHVTISVDKSIGTAYLQWSSLKASDTAMYYCARHLRRDNADYYGLDVWGQGTTVTVSS

SEQ ID NO: 5438 - protein, 121 aa, Artificial Sequence
  Synthetic construct
QVQLVQSGSELKKPGASVKVSCKASGYTFTSYAMNWVRQAPGQGLEWMGWINTNTGNPTYAQGFTGRFVFSLDTSVSTAYLQISSLKAEDTAVYYCARHRRYSGYVSFDYWGQGTLVTVSS

SEQ ID NO: 5439 - protein, 124 aa, Artificial Sequence
  Synthetic construct
QAQLVQSGPEVKKPGASVKVSCKTSGYPFTRDGISWVRQAPGEGLEWMGWISTYNGKADYLQKFQGRVTMTTDTSTSTIYMELRSLRSDDTAVYYCARSPHDHESSGYYAFDIWGQGTMVTVSS

SEQ ID NO: 5440 - protein, 120 aa, Artificial Sequence
  Synthetic construct
QMQLVQSGPEVKKPMTSVTVSCRASGLSFRDSGLQWVRQARGQRPEWLGWVGDGRGNTHYAQKFQGRVTITRDMSTSTAYLQLASLTFEDTAIYYCIVITTSGLGTVGFWGPGTPVAVSS

SEQ ID NO: 5441 - protein, 125 aa, Artificial Sequence
  Synthetic construct
QVQLVQSGAEVKKPGASVKVSCKASGYTFTSYGISWVRQAPGQGLEWMGWISAYNGNTNYAQKLQGRVTMTTDTSTSTAYMELRSLRSDDTAVYYCARKMALRYSSGWYVWFDPWGQGTLVTVSS

SEQ ID NO: 5442 - protein, 132 aa, Artificial Sequence
  Synthetic construct
EVMLVESGGGLVQPGEALRLSCVASGFNFSNYAMTWVRQAPGKGLEWLSVISGSGQGAHYADSVKGRLSTSRDNSKNTMYLHMSSLGVDDTGVYFCAKDLAAWGAIPDIDTGDFASYSFDVWGQGIVVTVSS

SEQ ID NO: 5443 - protein, 121 aa, Artificial Sequence
  Synthetic construct
EVQVVEFGGGLIQPGGSLRLSCVASGFSVSSNYMNWVRQAPGKGLEWVSAIYAGGNTHFADSVKGRFTIFRDNSKNTLYLQMNSLRAEDTAIYYCASSSNWGFYYHGLDVWGQGTTVTVSS

SEQ ID NO: 5444 - protein, 128 aa, Artificial Sequence
  Synthetic construct
QLQLQESGPGLVKPSETLSLTCTFSGGSMNNNIYYWSWIRQPPGKGLEWIGSIYYDGRTHYSSALKSRVTLSVDTPKNQFSLKLSSVTAADTAVYYCARPGVYCGGTTCYYYLGMDVWGQGTTVTVSS

SEQ ID NO: 5445 - protein, 119 aa, Artificial Sequence
  Synthetic construct
QVQLQESGPGLVKFSQTLSLTCTVSGGSISSGDYYWSWIRQPPGRGLEWIGYIYYIGSTNYNPSLKSRVTISVDTSKNQFSLKLSSVSAADTAVYYCARVTSSGSAGYWGQGTLVTVSS

SEQ ID NO: 5446 - protein, 125 aa, Artificial Sequence
  Synthetic construct
QVQLVQSGAEVKKPGASVKVSCKASGYTFTGYYMHWVRQAPGQGLEWMGWINPNSGGTNYAQKFQGRVTMTRDTSISTAYMELSRLRSDDTAVYYCARSRAMVRGAPNAHWFDPWGQGTLVTVSS

SEQ ID NO: 5447 - protein, 125 aa, Artificial Sequence
  Synthetic construct
QVQLVQSGAEVKKPGASVKVSCKASGYTFTGYYMHWVRQAPGQGLEWMGWINPNSGGTNYAQKFQGWVTMTRDTSISTAYMELSRLRSDDTAVYYCARGGGYCSGGSCYFWFDPWGQGTLVTVSS

SEQ ID NO: 5448 - protein, 126 aa, Artificial Sequence
  Synthetic construct
QVQLLQSGAEVRTTGASVRVSCKASGSPLTGYYIHWVRQAPGQGLEWMGWVTPNSGDTNYAQKFRGRVTMTADTSMRTVYMELRSLRSDDSAVYYCARVGSRWIAGTTSELFFHYWGQGTQVTVSS

SEQ ID NO: 5449 - protein, 130 aa, Artificial Sequence
  Synthetic construct
EVELMESGGGLVRPGGSLRLACSTSTFTLSDYTVNWIRQPPGKGLQWVSSITNIGGDSYYSDSVRGRFTISRDSAKNSVFLQLTSLTVEDTAVYYCARDKQGQGYSNTWHGGYYYGFDVWGQGTTVTVSS

SEQ ID NO: 5450 - protein, 117 aa, Artificial Sequence
  Synthetic construct
QVQLVQSGAEVKKPGASVKVSCKASGYTFTSYGISWVRQAPGQGLEWMGWISAYNGNTNYAQKLQGRVTMTTDTSTSTAYMELRSLRSDDTAVYYCARGAALRMDVWGQGTTVTVSS

SEQ ID NO: 5451 - protein, 131 aa, Artificial Sequence
  Synthetic construct
EVQLVESGGGLVQPGGSLRLSCAASGFTFSSYDMHWVRQATGKGLEWVSAIGTAGDPYYPGSVKGRFTISRENAKNSLYLQMNSLRAGDTAVYYCARGGRYCSSTSCYEPPENNYWYFDLWGRGTLVTVSS

SEQ ID NO: 5452 - protein, 132 aa, Artificial Sequence
  Synthetic construct
QVRLVQSGAEVRKPGASVKVSCTASGYTFTKYYIHWVRQAPGQGLEWMGIINPENGRVIYEETFQDRVTMTRDTSTSTVYLELSGLRSDDTALYYCARDFMPPPSGAFFGVVPLPGYFFDFWGQGARVTVSS

SEQ ID NO: 5453 - protein, 125 aa, Artificial Sequence
  Synthetic construct
EVQLVESGGGLVQPGGSLRLSCAASGFTFSSYSMNWVRQAPGKGLEWVSYISSGASTIYYADSVKGRFTISRDNAEHSLYLQMNSLRDEDTAVYYCASTYSGSYGPYYYYAMGVWGQGTTVTVSS

SEQ ID NO: 5454 - protein, 121 aa, Artificial Sequence
  Synthetic construct
EVQLLESGGGLVQPGGSLRLSCAASGFTFSSYAMSWVRQAPGKGLEWVSAISGSGGSTYYADSVKGRFTISRDNSKNTLYLQMNSLRAEDTAVYYCAKVRLLWGSRYFDYWGQGTLVTVSS

SEQ ID NO: 5455 - protein, 121 aa, Artificial Sequence
  Synthetic construct
QLQLQESGSGLVKPSQTLSLTCAVSGDFINSAGYTWSWVRQPLGKGLEWIGYIYYSGNTYYNPNLKSRVTISLDRSKSQVSLNLTSMTAADTAVYYCAREVGSPRPHFDLWGQGTLVTVSS

SEQ ID NO: 5456 - protein, 114 aa, Artificial Sequence
  Synthetic construct
QMQLVESGGGVVQPGTSLRLSCATSDFTFGSYVMHWVRQAPGKGLEWVALISYDGNNKYYADSVKDRFTISRDNSKNTVSLQMNSLRTEDTAVYYCASLSVGDWGQGTPVTVSS

SEQ ID NO: 5457 - protein, 120 aa, Artificial Sequence
  Synthetic construct
QVQLQESGPGLVKPSQTLSLTCTVSGGSISSGNYYWSWIRQPAGKGLEWIGRFYDSGSTSYNPSLKSRVTISVDTSKNQFSLELTSLTAADTAVYYCARAGFGEFEFDSWGRGTLVTVSS

SEQ ID NO: 5458 - protein, 128 aa, Artificial Sequence
  Synthetic construct
QLQLQESGSGLVKPSQTLSLTCAVSGGSISSGGYSWSWIRQPPGKGLEWIGYIYHSGSTYYNPSLKSRVTISVDRSKNQFSLKLSSVTAADTAVYYCARDRVTMVRGVKHRAGGMDVWGQGTTVTVSS

SEQ ID NO: 5459 - protein, 126 aa, Artificial Sequence
  Synthetic construct
QVQLVQSESELKKPGASVKVSCEASGYRITNYAMNWVRQAPGQGLEWMGWINTNTGNPTYAQGFTGRFVFSLDTSVSTTYLQIINLEADDTAVYYCARDQRVGVRPKTSSWYFDLWGRGTLVTVSS

SEQ ID NO: 5460 - protein, 128 aa, Artificial Sequence
  Synthetic construct
QVQLQESGPGPVKPSQTLTLTCTVSGGSTSSGGYYWSWIRQHPGKGLEWIGYIYDSGSTYYTPSLRSRATISADTSKNQFSLKLTSVTAADTAVYYCARGGDQNNCSAGSCYPLFDYWGQGALVTVSS

SEQ ID NO: 5461 - protein, 119 aa, Artificial Sequence
  Synthetic construct
QVQLVESGGGVVQPGKSLRLSCAASGFIFDSYGMHWVRQAPGKGLEWAALISTDGNNKFYADSVKGRFTISRDNSKNTLYLQINSLRFEDTAVYFCARFAAEQGNFDYWGQGTLVTVSS

SEQ ID NO: 5462 - protein, 121 aa, Artificial Sequence
  Synthetic construct
QVQLVQSRTEVKKPGASVKVSCKTSGYTFNTYGISWARQAPGQGLEWMGWISAFNGNTDYAQKFQGRVTMTTDTSASTAYMELRSLRSDDTAVYYCARGPGVQRLVYFDYWGQGTLVTVSS

SEQ ID NO: 5463 - protein, 123 aa, Artificial Sequence
  Synthetic construct
EVQVVESGGGLVKPGGSLRLSCAASGFTFNDAWMNWVRQAPGKGLEWVGRIRSSNDGGPTHYAAPVSGRFTISRDDSKKTVYLQMNSLKTEDTAVYYCTTEDWNLYNYAMGVWGQGTTVTVSS

SEQ ID NO: 5464 - protein, 125 aa, Artificial Sequence
  Synthetic construct
EVQLLESGGGLVQPGGSLRLSCAASGFTFSSYAMSWVRQAPGKGLEWVSAISGSGGSTYYADSVKGRFTISRDNSKNTLYLQMNSLRAEDTAVYYCAKGATDTAMGGFFGYFDLWGRGTLVTVSS

SEQ ID NO: 5465 - protein, 126 aa, Artificial Sequence
  Synthetic construct
QVQLVESGGGVVQPGRSLRLSCAASGFTFSSYGMHWVRQAPGKGLEWVAVIWYDGSNKYYADSVKGRFTISRDNSKNTLYLQMNSLRAEDTAVYYCARLTTGGSADYYYYYGMDVWGQGTTVTVSS

SEQ ID NO: 5466 - protein, 121 aa, Artificial Sequence
  Synthetic construct
EVQLLESGGGLGQPGGSLTLSCAASGFTFSHFAMSWVRQVPGQRLEWVAGVTDTGGGTFYADSVKGRFTISRDNSKNTLYLQMSGLRVDDTAIYYCAKEMQGIATPYFDSWGQGVPVAVSS

SEQ ID NO: 5467 - protein, 119 aa, Artificial Sequence
  Synthetic construct
QVQLVESGGGVVQPGRSLRLSCAASGFTFSSYGMHWVRQAPGKGLEWVAVIWYDGSNKYYADSVKGRFTISRDNSKNTLYLQMNSLRAEDTAVYYCARAVVGGDAFDIWGQGTMVTVSS

SEQ ID NO: 5468 - protein, 124 aa, Artificial Sequence
  Synthetic construct
EVQLVESGGGLVQPGGSLRLSCAASGFTFSAHWMHWVRQVPGKGLLWVSRINSDGRSTSYADSVKGRFTISRDNTKNTLYLQMNSLGAEDTAVYYCTRDPNTRPSPRLNWFDPWGQGTLVTVSS

SEQ ID NO: 5469 - protein, 125 aa, Artificial Sequence
  Synthetic construct
RIQLVQSGAEVKKPGASVKVSCKASGYTFDNYGIAWVRQAPGQGLEWMGWIGAYNNDTKYAQIFEGRVTMTTDTSTSTAYMELRSLTPDDTAVYYCARVMTLIVVVARAAWIDPWGPGTLVTVSS

SEQ ID NO: 5470 - protein, 124 aa, Artificial Sequence
  Synthetic construct
EVQLLESGGGLVQPGGSLRLSCAASGFNFNNYAMSWVRQAPGKGLEWVSTISVSGGTTYYADSVKGRFTISRDSSKKTVSLQLNSLRGEDTAIYYCAKGLYYYDSSGYRIFDFWGQGTLVTVSS

SEQ ID NO: 5471 - protein, 125 aa, Artificial Sequence
  Synthetic construct
EVQLLESGGGLVQPGGSLRLSCAASGFTFSSYAMSWVRQAPGKGLEWVSAISGSGGSTYYADSVKGRFTISRDNSKNTLYLQMNSLRAEDTAVYYCAKYVRRGNYYGSGSYYDYWGQGTLVTVSS

SEQ ID NO: 5472 - protein, 127 aa, Artificial Sequence
  Synthetic construct
EVQLVASGGGLVEPGGSLRLSCAASGFIFSNAWMSWVRQAPGKGLEWVGRIKSKTDGGTTDYAAPVQGRFTVSRDDSKTTLYVQMNSLKTEDTAVYYCTTEIHPSLRQDYRGYFQYWGQGTLVTVSS

SEQ ID NO: 5473 - protein, 122 aa, Artificial Sequence
  Synthetic construct
QVQLVQSGAEVKKPGASVKVSCKASGYSFTNYYIQWVRQAPGQGLEWMGIINASGGTTTYAQKFQGRVTVTSDTSTSTVYMELSSLRSEDTAVYYCARGILTGYYVPYFDYWGQGTLVTVSS

SEQ ID NO: 5474 - protein, 115 aa, Artificial Sequence
  Synthetic construct
QVQLVESGGGVVQPGGSLRLSCAASAFDFSAYGMHWVRQAPGKGLEWVALSANGGDKQFYGESVKGRFTVSRDKSKRTMYLQMNSLRAEDTAVYYCASRGSFDMWGQGTMVTVSS

SEQ ID NO: 5475 - protein, 118 aa, Artificial Sequence
  Synthetic construct
EVQLVESGGGLVQPGGSLRISCAASGSTFTGYYMSWVRQAPGKGLEWLANIAGDGSTKNYVDSVKGRFTISRDNGENSVFLQMNSLRAEDTAVYYCARDKRRGASDYWGQGTLVTVSS

SEQ ID NO: 5476 - protein, 123 aa, Artificial Sequence
  Synthetic construct
QVRLQESGPGLVKPSQTLSLTCTVSGGSISGGNYYWTWIRQPPGKGLEWIGYIYYSGGTYYNPSLKSRVTMSIDTSKNQFSLKLSSVTAADTAVYYCARIPISGGSYGYFDPWGQGTLVTVSS

SEQ ID NO: 5477 - protein, 120 aa, Artificial Sequence
  Synthetic construct
QLQLQESGPGLVKPSETLSLTCTVSGGSISSSSYYWGWIRQPPGKGLEWIGSIYYSGSTYYNPSLKSRVTISVDTSKNQFSLKLSSVTAADTAVYYCARLLNRGYYFDYWGQGTLVTVSS

SEQ ID NO: 5478 - protein, 116 aa, Artificial Sequence
  Synthetic construct
QVQLVQSGAEVKKPGASVKVSCKASGYTFTSYDINWVRQATGQGLEWMGWMNPNSGNTGYAQKFQGRVTMTRNTSISTAYMELSSLRSEDTAVYYCARGRWSAAYWGQGTLVTVSS

SEQ ID NO: 5479 - protein, 120 aa, Artificial Sequence
  Synthetic construct
QVQLVESGGGVVQPGRSLRLSCAASGFTFSNHGMHWVRQAPGKGLEWVAVISYDGRNKYYADSVKGRFTISRDNSKNTLYLQMNSLRAEDTAVYYCAKGPWFGETPLDYWGQGTLVTVSS

SEQ ID NO: 5480 - protein, 121 aa, Artificial Sequence
  Synthetic construct
QVQLVQSGAEVKKPGASVMVSCKASGYSFTDYHIHWVRQAPGQGLEWMGYINPNSGGTNYAQKYQGRVSMTRDTSINTAYMELHRLTSDDTAVFYCAREAAWVGEFQPECWGQGALVTVSS

SEQ ID NO: 5481 - protein, 132 aa, Artificial Sequence
  Synthetic construct
EVQLVQSGAEVKKPGESLRISCKGSGYSFTSYWISWVRQMPGKGLEWMGRIDPSDSYTNYSPSFQGHVTISADKSISTAYLQWSSLKASDTAMYYCARHRRPYYDYVWGSYRYNDYYGMDVWGQGTTVTVSS

SEQ ID NO: 5482 - protein, 121 aa, Artificial Sequence
  Synthetic construct
QVQLVESGGGVVQPGRSLRLSCAASGFTFSSYGMHWVRQAPGKGLEWVAVISYDGSNKYYADSVKGRFTISRDNSKNTLYLQMNSLRAEDTAVYYCAKDKWHSSSWYFDYWGQGTLVTVSS

SEQ ID NO: 5483 - protein, 117 aa, Artificial Sequence
  Synthetic construct
EVQLVESGGGLVKPGGSLRLSCAASGFTFRSFTMNWVRQAPGKGLEWVSSVSGSSTYIYYADSAKGRFTISRDNAKNSLDLQMNSLGVEDTAVYYCVTSGRDVGSFWGQGTTVTVSS

SEQ ID NO: 5484 - protein, 123 aa, Artificial Sequence; identical to SEQ ID NO: 5463
  Synthetic construct

SEQ ID NO: 5485 - protein, 125 aa, Artificial Sequence
  Synthetic construct
QVQLVESGGGVVQPGRSLRLSCAAAGFTFSGYGMHWVRQAPGKGLEWVALISYDGSNKHYEDSVKGRFTISRDNSKNTLYLQMDSLRAEDTALYYCAKDPLRGDSGYGNYYFDYWGQGTLVTVSS

SEQ ID NO: 5486 - protein, 126 aa, Artificial Sequence
  Synthetic construct
EVQLVESGGGLVKPGGSLRLSCAASGFSFSTYAMNWVRQAPGKGLEWVSSISRSSSYIYYADSLKGRFTISRDNAKSSLYLQMDSLRAEDTAVYYCARVGGGAEWYSSGWLSFDYWGQGTLVTVSS

SEQ ID NO: 5487 - protein, 121 aa, Artificial Sequence
  Synthetic construct
QITLKESGPTLVKPTQTLTLTCTFSGFSLSTSGVGVGWIRQPPGKALEWLALIYWDDDKRYSPSLKSRLTITKDTSKNQVVLTMTNMDPVDTATYYCAHRLGGGYAAFDYWGQGTLVTVSS

SEQ ID NO: 5488 - protein, 127 aa, Artificial Sequence
  Synthetic construct
QVQLVQSGAEVKKPGASVKVSCKASGYTFTSYGISWVRQAPGQGLEWMGWISAYNGNTNYAQKLQGRVTMTTDTSTSTAYMELRSLRSDDTAVYYCARDRSIAARRAFYYYYGMDVWGQGTTVTVSS

SEQ ID NO: 5489 - protein, 125 aa, Artificial Sequence
  Synthetic construct
EVQLLESGGGLVQPGGSLRLSCAASGFSLSSYAMSWVRQAPGRGLEWVSAISGGGGGTYYADSVKGRFTISRDNSKNTLYLQMNSLRAEDTAVYYCAKAPKHRCSGGSCYSGDHWGQGTLVTVSS

SEQ ID NO: 5490 - protein, 123 aa, Artificial Sequence
  Synthetic construct
QVQLVESGGGVVQPGRSLRLSCAASGFTFSSYGMHWVRQAPGKGLEWVAVIWYDGSNKYYADSVKGRFTISRDNSKNTLYLQMNSLRAEDTAVYYCARDRETMVRGVGLSGIWGQGTMVTVSS

SEQ ID NO: 5491 - protein, 120 aa, Artificial Sequence
  Synthetic construct
EVQLVESGGGLVQPGGSLRLSCAASGFTFSSYWMSWVRQAPGKGLEWVANIKQDGSEKYYVDSVKGRFTISRDNAKNSLYLQMNSLRAEDTAVYYCATYSSSWYGSVGSWGQGTLVTVSS

SEQ ID NO: 5492 - protein, 120 aa, Artificial Sequence
  Synthetic construct
QVQLVESGGGVVQPGKSRRLSCAGSGFSFSSYAMHWVRQAPGKGLEWVAVTSYDGGSKNYAEPVRGRFTISRDNSKNTLYLQMNSLRTEDTAVYYCAMFSGVDIMATDSWGQGTLVIVSS

SEQ ID NO: 5493 - protein, 123 aa, Artificial Sequence
  Synthetic construct
EVQLVESGGGLIQPGGSLRLSCAASGFTVTRNYMTWVRQAPGRGLEWVSLTYDDDTPYYADSVKGRFTISRDASKNTLYLQMNSLRAEDTAVYYCARGVPGSSWYAVWGFDYWGQGILVTVSS

SEQ ID NO: 5494 - protein, 120 aa, Artificial Sequence
  Synthetic construct
EVQLVQSGAEVKKPGESLKISCQGSGFTFTRYWIGWVRQMPVKGLEYMGSIYPGDSDTRYSPSFQGQVSISADKSISTAYLQWSSLKASDTAMYYCARAPQGRDDAFDIWGQGTMVTVSS

SEQ ID NO: 5495 - protein, 120 aa, Artificial Sequence
  Synthetic construct
QVQLVESGGGVVQPGRSLRLSCAASGFTFSSYAMHWVRQAPGKGLEWVAVISYDGSNKYYADSVKGRFTISRDNSKNTLYLQMNSLRAEDTAVYYCARGAVVAESSFDYWGQGTLVTVSS

SEQ ID NO: 5496 - protein, 118 aa, Artificial Sequence
  Synthetic construct
EVQLVESGGGLIQPGGSLRLSCVASGFTINSNYMSWVRQAPGKGLEWVSVIYSDGNTYYADSVKGRFTISRDNSKNTVNLQMNSLRPDDTAVYYCARDVDGLYFFEYWGQGTLVTVSS

SEQ ID NO: 5497 - protein, 118 aa, Artificial Sequence
  Synthetic construct
QVQLQESGPGLVKPSETLSLTCSVSGGSIYSYYWSWIRQPPGKGLEWIGYIYYSGSTGYNPSLKSRVTISMDTSKNQFSLKLRSVTAADTAFYYCARGTGSYYDFDYWGQGTLVSVSS

SEQ ID NO: 5498 - protein, 124 aa, Artificial Sequence
  Synthetic construct
QVQLVQSGAEVKKPGASVKVSCKASGYTFTSYAMHWVRQAPGQRLEWMGWINAGNGNTKYSQKFQGRVTITRDTSASTAYMELSSLRSEDTAVYYCASSGYSYGSYYYYGMDVWGQGTTVTVSS

SEQ ID NO: 5499 - protein, 127 aa, Artificial Sequence
  Synthetic construct
EVQLVQSGAEVKKPGESLRISCKGSGYSFTSYWISWVRQMPGKGLEWMGRIDPSDSYTNYSPSFQGHVTISADKSISTAYLQWSSLKASDTAMYYCARRGAVYYGSGNLYYYGMDVWGQGTTVTVSS

SEQ ID NO: 5500 - protein, 127 aa, Artificial Sequence
  Synthetic construct
EMQLVESGGVVVEPGGSLRLSCAASGFTFDDYTMHWVRQAPGKGLEWVSLISWDGGSTYYGDSVKGRFTISRDNGKNSLYLQMNSLRTEDTALYYCAKDTSFGRPFSSWYVGYFHHWGQGTLVTVSS

SEQ ID NO: 5501 - protein, 120 aa, Artificial Sequence
  Synthetic construct
QVQLVESGGGVVQPGRSLRLSCAASGFTFSSYAMHWVRQAPGKGLEWVAVISYDGSNKYYADSVKGRFTISRDNSKNTLYLQMNSLRAEDTAVYYCARSSGVWFGELGYWGQGTLVTVSS

SEQ ID NO: 5502 - protein, 121 aa, Artificial Sequence
  Synthetic construct
QVQLVESGGGVVQPGRSLRLSCAASGFTFSSYGMHWVRQAPGKGLEWVAVISYDGSNKYYADSVKGRFTISRDNSKNTLYLQMNSLRAEDTAVYYCAKDPMRLTWNYFDHWGQGTLVTVSS

SEQ ID NO: 5503 - protein, 122 aa, Artificial Sequence
  Synthetic construct
QVQLVESGGGVVQPGRSLRLSCAASGFTFSSYGMHWVRQAPGKGLEWVAVISYDGSNKYYADSVKGRFTISRDNSKNTLYLQMNSLRAEDTAVYYCAAGLNYDILTGSLDYWGQGTLVTVSS

SEQ ID NO: 5504 - protein, 121 aa, Artificial Sequence
  Synthetic construct
QITLKESGPTLVKPTQTLTLTCTFSGFSLSTNGVGVGWIRQPPGKALEWLALVYWDDDKRYNSSLKGRLTITKDTSKNQVVLTMANMDPVDTGTYYCARLWSGYPPYFQDWGQGTLLTVSS

SEQ ID NO: 5505 - protein, 126 aa, Artificial Sequence
  Synthetic construct
QVQLVESGGGVVQPGRSLRLSCAASGFTFSSYGMHWVRQAPGKGLEWVAVISYDGSNKYYADSVKGRFTISRDNSKNTLYLQMNSLRAEDTAVYYCAKEKGYHYDSRNRRTYFDYWGQGTLVTVSS

SEQ ID NO: 5506 - protein, 128 aa, Artificial Sequence
  Synthetic construct
QVQLAQSGAEVKKPGSSVKVSCKASGGTFNIHAINWVRQAPGQGLEWMGGIIPLFGTSKYAQKFQDRVTITADESTSTAYMELSSLRSEDTAMYYCARGDRCSSTDCFRWRSHLFDSWGQGTLVTVSS

SEQ ID NO: 5507 - protein, 116 aa, Artificial Sequence
  Synthetic construct
QVQLQASGPGLVKPSQTLSLTCTVSGGSIRSGSYSWNWIRQPAGKALEWVGRVYATGTTTYNPSLKSRVTVSIDTSKNQFSLKLTSVTAADTAVYYCVRGYGLDVWGQGTTVTVSS

SEQ ID NO: 5508 - protein, 119 aa, Artificial Sequence
  Synthetic construct
QVQLVQSGSDLKSPGASVRISCKCSGYTFADYPVNWVRQAPGQGLQWMGWISARDGDPTYAQGFTGRFVFSLDSSVTTTYLDIYSLEAEDTAIYYCAKGTAYYYGMDVWGQGTTVTVSS

SEQ ID NO: 5509 - protein, 117 aa, Artificial Sequence
  Synthetic construct
EVQLLESGGGLVQPGGSLRLSCAASGFTFSSYAMSWVRQAPGKGLEWVSAISGSGGSTYYADSVKGRFTISRDNSKNTLYLQMNSLRAEDTAVYYCAYDFWRGGDYWGQGTLVTVSS

SEQ ID NO: 5510 - protein, 127 aa, Artificial Sequence
  Synthetic construct
QVQLVQSGAEVKKPGASVKVSCKASGYTFTSYGISWVRQAPGQGLEWMGWISAYNGNTNYAQKLQGRVTMTTDTSTSTAYMELRSLRSDDTAVYYCARGRRGYCSSTSCYTGWFDPWGQGTLVTVSS

SEQ ID NO: 5511 - protein, 121 aa, Artificial Sequence
  Synthetic construct
QVQLVQSGTEVKKPGSSVKVSCKASGGIFSGHAISWVRQAPGQGLEWMGRIIPIVGVVKYAQNFQGRVTITADKSTSSVYMDLSSLRFEDTAVYYCATDQSIAAAGNPDHWGQGTLVTVSS

SEQ ID NO: 5512 - protein, 124 aa, Artificial Sequence
  Synthetic construct
QITLKESGPTLVKPTQTLTLTCTFSGFSLTTSGVAVGWIRQPPGKALEWLTLIYWDDDKLYSPFLESRVTITKDTSKNQVVLRMTNMDPEDTGTYFCTHKQADQYDILTGYWSWGQGILVTVSS

SEQ ID NO: 5513 - protein, 128 aa, Artificial Sequence
  Synthetic construct
QVQLVESGGGVVQPGRSLRLSCAASGFTFSSYGMHWVRQAPGKGLEWVAVISYDGSNKYYADSVKGRFTISRDNSKNTLYLQMNSLRAEDTAVYYCAKDLVGATKGLRNLQRSPPDYWGQGTLVTVSS

SEQ ID NO: 5514 - protein, 115 aa, Artificial Sequence
  Synthetic construct
EVQLLESGGGLVQPGGSLRLSCAASGFTFSSYAMSWVRQAPGKGPEWVSAIGSGGSTYYADSVKGRFSISRDNSKNTLYLQMNSLRAEDTAVYYCASGRVSPDNWGQGTLVTVSS

SEQ ID NO: 5515 - protein, 130 aa, Artificial Sequence
  Synthetic construct
QVQLVESGGGVVQPGRSLRLSCAASGFTFSSYAMHWVRQAPGKGLEWVAVISYDGSNKYYADSVKGRFTISRDNSKNTLYLQMNSLRAEDTAVYYCARDHLKRRDGYNYIRKWGGGFDPWGQGTLVTVSS

SEQ ID NO: 5516 - protein, 119 aa, Artificial Sequence
  Synthetic construct
DVQLVESGGGLVQPGGSLRLSCEGYGFTFSEYSMSWVRQAPGRGLEWVAYLSRDSVSEGFGDSVKGRFRISRDNAKNSLFLHMTRLRDEDTAVYFCARRASEEYFFDFWGQGSLVTVSS

SEQ ID NO: 5517 - protein, 120 aa, Artificial Sequence
  Synthetic construct
QVQLQEWGAGLLKPSETLSLTCAVSGGSLSGHFGDWIRQPPGKGLEWIGEVDSNGATNYSPSLKSRATISLDTSKNQFFLKLTSVTAADTAVYYCARHNAAISQRGSYDWGQGTLVTVSS

SEQ ID NO: 5518 - protein, 133 aa, Artificial Sequence
  Synthetic construct
EVRLVESGGGLVKPGGSLRLSCAASGFTFSTYRMNWVRQAPGKGLEWVSSISSSSSYIYYADSVKGRLTISRDNAKNSLFLEMKSLRAEDTAVYYCARDADLGRGYSYGYWLEFDYYNGMDVWGQGTTVTVSS

SEQ ID NO: 5519 - protein, 121 aa, Artificial Sequence
  Synthetic construct
EVQLVESGGSLVQPGGSLRLSCAASGFSFSNYWMSWVRQAPGKGLEWVGSIKKDGSEKYYGDSVKGRFTISRDNAKNSMYLQSNSLRVEDTAVYYCARVPYGDYIVYFDYWGQGTLVTVSS

SEQ ID NO: 5520 - protein, 133 aa, Artificial Sequence
  Synthetic construct
QVQLQQWGAGLLKPSETLSLTCAVYGGSFSGYYWSWIRQPPGKGLEWIGEINHSGSTNYNPSLKSRVTISVDTSKNQFSLKLSSVTAADTAVYYCARGRGSRSIALRDYYGSGSYRLYYFDYWGQGTLVTVSS

SEQ ID NO: 5521 - protein, 125 aa, Artificial Sequence
  Synthetic construct
QVTLKESGPVLVKPTETLTLTCTVSGFSLSNARMGVSWIRQPPGKALEWLAHIFSNDEKSYSTSLKSRLTISKDTSKSQVVLTMTNMDPVDTATYYCARMQPMRLHEYYYGMDVWGQGTTVTVSS

SEQ ID NO: 5522 - protein, 129 aa, Artificial Sequence
  Synthetic construct
QVQLQESGPGLVKPSQTLSLTCTVSGGSISSGSYYWSWIRQPAGKGLEWIGRIYTSGSTNYNPSLKSRVTISVDTSKNQFSLKLSSVTAADTAVYYCARADRYCSSTSCYKWGLAFDIWGQGTMVTVSS

SEQ ID NO: 5523 - protein, 129 aa, Artificial Sequence
  Synthetic construct
EVQLVQSGAEVKKPGESLKISCKASGYTFSSYWIGWVRQMPGEGLEWMAIIYPGDSDTRYSPSFQGQVTLSADKSITTAYLQWSSLKASDTAMYYCARLGNPLDYYRMGSPHYYAMDVWGQGTTVTVSS

SEQ ID NO: 5524 - protein, 127 aa, Artificial Sequence
  Synthetic construct
EVQLVESGGGLVQPGGSLRLSCAASGFTFSSYWMSWVRQAPGKGLEWVANIKQDGSEKYYVDSVKGRFTISRDNAKNSLYLQMNSLRAEDTAVYYCARDVGYCSSTSCYVRAGMDVWGQGTTVTVSS

SEQ ID NO: 5525 - protein, 123 aa, Artificial Sequence
  Synthetic construct
AVQLVESGGGLVRPGGSLRLSCAVSGFSITNNCMSWVRQAPGKGLEWVSVIYSGATTYYADSVKGRFTISRDNSKNTLYLQINNLRVDDTAVYYCARDWDTEIPDYYYGLDIWGQGTTVIVSP

SEQ ID NO: 5526 - protein, 126 aa, Artificial Sequence
  Synthetic construct
QVQLVESGGGVVQPGRSLRLSCAASGFTFSSYGMHWVRQAPGKGLEWVAVIWYDGSNKYYADSVKGRFTISRDNSKNTLYLQMNSLRAEDTAVYYCARDGGDIVVVTAIGDAFDIWGQGTMVTVSS

SEQ ID NO: 5527 - protein, 120 aa, Artificial Sequence
  Synthetic construct
QVTLRESGPALVQPTQSLTLTCTLSGVSLTSNVKCVTWIRQPPGKALEWLALIGSDDDEYYSPSLQTRLSISKDTSQNQVVLTMKNMTPVDTATYYCAVMATATDAFDIWGPGTMVTVSP

SEQ ID NO: 5528 - protein, 128 aa, Artificial Sequence
  Synthetic construct
QVQLVQSGAEVKKPGASVKVSCKASGYTFSGYYIHWVRQAPGQGLEWMGWINPKNGGTNYAQKFQGRVTMTRDTSISTAYMELSRLRSDDTAVYYCARSRLLPAATPRAVPNYCFDYWGLGTLVTVSS

SEQ ID NO: 5529 - protein, 126 aa, Artificial Sequence
  Synthetic construct
QVQLQQSGPGLVKPSQTLSLTCVISGDSVSTHTAAWNWIRQSPSRGLEWLGRTYYRSKWYNDYAVSVKSRITISPDTSKNQFSLQLNSVTPEDTAVYYCARNYDSSGYFYEGLDYWGQGTLVTVSS

SEQ ID NO: 5530 - protein, 121 aa, Artificial Sequence; identical to SEQ ID NO: 5443
  Synthetic construct

SEQ ID NO: 5531 - protein, 134 aa, Artificial Sequence
  Synthetic construct
QVQLQESGPGLVKPSQTLSLTCTVSGGSISSGDYYWSWVRQPPGQGLEWIGYIFYSGNTYFNPSLESRVSISIDRSKNKFSLKLNSVTAADTAVYYCARDSHNYYNSGSALSLGYYSYYGMDVWGQGTTVTVSS

SEQ ID NO: 5532 - protein, 119 aa, Artificial Sequence
  Synthetic construct
QVQLVESGGGVVQPGRSLRLSCAASGFTFNNYAMHWVRQAPGKGLEWVAVVSYDGYNEYYADSVKGRVTVSRDNSKNMLYLQMNSLRTEDTAVYYCARSRSTPYFFESWGQGTLVTVSS

SEQ ID NO: 5533 - protein, 127 aa, Artificial Sequence; identical to SEQ ID NO: 37
  Synthetic construct

SEQ ID NO: 5534 - protein, 126 aa, Artificial Sequence
  Synthetic construct
QGQLVQSGAEVQKPGASLKVSCKASGHTYSNYWMHWVRQAPGQGLEWVGVINPDGTGALYAQKFQGRVTVTRDTSTGTVDMKLSSLRSDDTAMYYCARDHSADQDDGRRSWWLDPWGQGTLVIVSS

SEQ ID NO: 5535 - protein, 120 aa, Artificial Sequence
  Synthetic construct
QVQLQESGPGLVKPSQTLSLTCSVSGASISSGTYYWSWIRQHPGKGLEWIGYIYDGGSTFYNPSLKSRVIISLDTSKIQFSLNVGSVTAADTAIYYCVLEGGVSNSFDHWGQGTLVTVSS

SEQ ID NO: 5536 - protein, 129 aa, Artificial Sequence
  Synthetic construct
QVQLVESGGGVVQPGRSLRLSCAASGFTFSSYGMHWVRQAPGKGLEWVAVISYDGSNKYYADSVKGRFTISRDNSKNTLYLQMNSLRAEDTAVYYCAKDGFIWKFRIAAAGRRDYFDYWGQGTLVTVSS

SEQ ID NO: 5537 - protein, 129 aa, Artificial Sequence
  Synthetic construct
QVQLVQSGAEVKKPGSSVKVSCKASGGTFSSYAISWVRQAPGQGLEWMGGIIPIFGTANYAQKFQGRVTITADESTSTAYMELSSLRSEDTAVYYCAREIVAVLPSNYYDSSAGAFDIWGQGTMVTVSS

SEQ ID NO: 5538 - protein, 121 aa, Artificial Sequence
  Synthetic construct
QVQLQESGPGLLKPSETLSLTCSVSGGSISYYYWNWIRQPPGRGLEWIGSIYNGGSTNFNPSLKSRVTISLDTSKNQFSLKLNSVTAADTAVYYCARGGVYGSRLGWFDPWGQGTLVTVSS

SEQ ID NO: 5539 - protein, 119 aa, Artificial Sequence
  Synthetic construct
QMQLVESGGGLVKPGGSLRLSCAASGFTFTDNYMSWIRQAPGKGLEWVSYISSSGSTINYTDSVKGRFTISRDNAKNSLSLQMNSLRAEDTAVYYCARGEVWFGELCFWGQGTLVTVSS

SEQ ID NO: 5540 - protein, 133 aa, Artificial Sequence
  Synthetic construct
EVQLVESGGGLVKPGGSLRLSCAASGFTFSTYRMNWVRQAPGKGLEWVSSISGSSSYIYYADSMKGRFTISRDNAKNSLYLQMNSLRAEDTAVYYCARDADSGRGYSYGYWGEFDYYNGMDVWGQGTTVTVSS

SEQ ID NO: 5541 - protein, 118 aa, Artificial Sequence
  Synthetic construct
EVHLMESGGGLVPPGGSLRLSCAASGFTFTKYWINWVRQAPGKGLEWVANINQDGSENYYVDSVKGRFTISRDNAKNSLYLQMNILRAEDTAVYYCAASETSTGIDFWGQGTLVTVSS

SEQ ID NO: 5542 - protein, 120 aa, Artificial Sequence
  Synthetic construct
QVQLVESGGGVVQPGRSLRLSCAASGFSFSSDAMHWVRQAPGKGLEWVAIISYDGKYKYYADSVKGRFTISRDNSKNTLYLQVNSLRSEDTAVYYCARAPGNGKWEITYWGQGTLVTVSS

SEQ ID NO: 5543 - protein, 126 aa, Artificial Sequence
  Synthetic construct
EVQLLESGGGLVQPGGSLRLSCAASGFTFRNHAMSWVRQAPGKGPEWVSTISGSGTPTYYADSVRGRATISRDNSKNALYLQMSDLRAADTAIYYCAKGFWACTPYTCSTGPFDSWGQGIPVTVSS

SEQ ID NO: 5544 - protein, 121 aa, Artificial Sequence
  Synthetic construct
EVQLVESGGGLVQPGGSLKLSCAASGFTFSDSAMHWVRQASGKGLEWVGRIRSKANSYATSYDASVKGRFTISRDDSKNTAYLQMNSLKTEDTAVYYCTRRGTTADNGDYWGQGTLVIVSS

SEQ ID NO: 5545 - protein, 120 aa, Artificial Sequence
  Synthetic construct
QVQLVESGGGVVQPGRSLRLSCAASGPTLGAYAMHWVRQPPGKGLEWVAVTSYAGTDKNYADSVKGRFTISRDNSRNTVYLQMNSLRPEDTAVYYCAIFPGVDTVVADYWGQGTLVIVSS

SEQ ID NO: 5546 - protein, 128 aa, Artificial Sequence
  Synthetic construct
QVQLVESGGGVVQPGRSLRLSCAASGFTFSSYAVHWVRQAPGKGLEWVAVISFDGSNTYYADSVKGRFTISRDNSKNTLYLQMNSLRAEDTAVYYSARAIWARYSGSSHYYYYGMDVWGQGTTVTVSS

SEQ ID NO: 5547 - protein, 120 aa, Artificial Sequence
  Synthetic construct
EVQLVGSGGGLVQPGESLRLSCAASGFTFDSYAMNWVRQAPGKGLEWVSYISGSGSPLYYADSVKGRFTISRDNAKNSLYLQMNSLRDEDTALYYCARIRVNALYLSDYWGQGILVTVSS

SEQ ID NO: 5548 - protein, 134 aa, Artificial Sequence
  Synthetic construct
EVQLVESGGGLVQPGGSLRLSCAASGFTFSSYWMSWVRQAPGKGLEWVANIKQDGSEKYYVDSVKGRFTISRDNAKNSLYLQMNSLRAEDTAVYYCARDKIWRRGTTGPHPQAQRYYYYGMDVWGQGTTVTVSS

SEQ ID NO: 5549 - protein, 126 aa, Artificial Sequence
  Synthetic construct
QVQLVESGGGVVQPGRSLRLSCAASGFTFSSYGMHWVRQAPGKGLEWVAVISYDGSNKYYADSVKGRFTISRDNSKNTLYLQMNSLRAEDTAVYYCAKDLSGVTTRYYYYYGMDVWGQGTTVTVSS

SEQ ID NO: 5550 - protein, 121 aa, Artificial Sequence
  Synthetic construct
EVKLVESGGGLVQPGGSLRLSCAVSGFTFSTYAMHWVRQAPGKGLEYVSGISGNGGSTYYANSVKGRFTISRDNSKNTLYLQMGSLRAEDMAVYYCARVRYYGSGSYHDYWGQGTLVIVSS

SEQ ID NO: 5551 - protein, 120 aa, Artificial Sequence
  Synthetic construct
QVQLVESGGGVVQPGRALRLSCEASGFMFSSYGMHWVRQGPGKGLEWVAVISYDGNRKYYSDSVKGRFAISRDNSKNTLYLQMNSLRTEDTAVYYCAKDYGGSGTYWSYWGQGTLVTVSS

SEQ ID NO: 5552 - protein, 122 aa, Artificial Sequence
  Synthetic construct
QITLKESGPTLVKPTQTLTLTCTFSGFSLSTSGVGVGWIRQPPGKALEWLALIYWDDDKRYRPSLKTRLTITKDTSKNQVVLTMTNMDPVDTATYYCAHSGRGSTPFTIDSWGQGTLVTVSS

SEQ ID NO: 5553 - protein, 121 aa, Artificial Sequence
  Synthetic construct
QVRLQESGPGLVKPSETLSLTCTVSGGSITSDSWSWIRQPPGKGLEWIGYIYHSAITNYNPSLKSRVTISIDTSKSQFSLNLSSVTAADTAIYFCARIPSTYTSSSWFDPWGQGTLVIVSS

SEQ ID NO: 5554 - protein, 117 aa, Artificial Sequence
  Synthetic construct
EVRLEESGGGLVRPGGSLRLSCVTSGFIFTDAWLSWVRQAPGKGLEWVGRIKSESYGGTAEYAAPVKGRFIISRDDSKNTMYLQMNNVKIEDTGVYYCDGDYGDYGGGQGARVIVSS

SEQ ID NO: 5555 - protein, 121 aa, Artificial Sequence
  Synthetic construct
EVQLVESGGGLVQPGGSLRLSCGASGFTFSSYWMTWVRQAPGKGLEWVANIKQDGNEKYYVDSVEGRFTISRDNAKNSLFLQMNSLRAEDTAVYYCARASWLPYPDYLDYWGQGTLVTVSS

SEQ ID NO: 5556 - protein, 116 aa, Artificial Sequence
  Synthetic construct
EVQLVESGGGLVQPGGSLRLSCVVSGFTFSNYWMTWVRQAPGKGLEWVANIKEDGSETNYVDSVKGRFTISRDNAKNSLYLQMNSLRADDTALYYCAKLRTRFSYWGQGTLVTVSS

SEQ ID NO: 5557 - protein, 124 aa, Artificial Sequence
  Synthetic construct
EVQLVESGGGLVQPGRSLRLSCAASGFTFDDYAMHWVRQAPGKGLEWVSGISWNSGSIGYADSVKGRFTISRDNAKNSLYLQMNSLRAEDTALYYCAKDNYYDIRAVEGYFDYWGQGTLVTVSS

SEQ ID NO: 5558 - protein, 126 aa, Artificial Sequence
  Synthetic construct
EVQLVESGGGLVQPGGSQRLSCAASGFSFNIYTMNWVRQAPGKGLEWVSYISSSSRDIYYAGSVRGRFIISRDNGKKSLYLQMNSLRDEDTAVYYCARGHYYDSSPYYSEGGFDYWGQGAVVTVSS

SEQ ID NO: 5559 - protein, 124 aa, Artificial Sequence
  Synthetic construct
QVQLVQSGAEVNKPGASVKVSCKASGYTFTDYYIHWVRQAPGQGLEWMGWINPNTGATNYPQKFQGRVTMTRDTSIGTAYMELSRLRSNDTALYYCAREADVIEATTNDGFDIWGQGTMVTVSS

SEQ ID NO: 5560 - protein, 129 aa, Artificial Sequence
  Synthetic construct
QVHLQQWGAGLVKPSETLSLTCGVYNGSFSNYYWNWIRQSPGKGLEWIGEINHSGITNYNPSLKSRVTISVDTSKNQFSLELSSVTAADTAVYYCARGATRERSRSGNYFRSKGYFDYWGQGTVVTVSS

SEQ ID NO: 5561 - protein, 119 aa, Artificial Sequence
  Synthetic construct
EVQLVESGGGLVQPGGSLRLSCAASGFTFSPYWMHWVRQAPGRGLVWVSYISGDGSTTTYADSVKGRFTISRDNAKNTLYLQMNSLRAEDTAVYYCVRASIIGTMPGYWGQGTLVTVSS

SEQ ID NO: 5562 - protein, 128 aa, Artificial Sequence
  Synthetic construct
QVQLQESGPGLVKPSGTLSLTCTVSGGSITSSNWWNWVRQPPGKGLEWIGEIYHSGSTNYNPSLKSRVIMSVDKSQNQFSLKLTSVTAADTAVYYCARDSPSQYYYENSDNSDAFDTWGQGTMVIVSS

SEQ ID NO: 5563 - protein, 122 aa, Artificial Sequence
  Synthetic construct
QVQLVESGGGVVQPGRSLRLSCAASGFTFSSYGMHWVRQAPGKGLEWVAVISYDGSNKYYADSVKGRFTISRDNSKNTLYLQMNSLRAEDTAVYYCAKDISLYRRYGALDYWGQGTLVTVSS

SEQ ID NO: 5564 - protein, 120 aa, Artificial Sequence
  Synthetic construct
EVQLSESGGNLVQPGGSLRLSCAASGFTFSNYAMSWVRKAPGKGLEWVSSIIASGDTTYYTDSVRGRFTISRDNSKSTLYLQMNGLRAEDSATYYCAKEGAKNYGYIDYWGQGTLVTVSS

SEQ ID NO: 5565 - protein, 119 aa, Artificial Sequence
  Synthetic construct
QVQLVQSGAEVRKPGASVKVSCKVSGYPFTSYYMHWVRQAPGQGLEWMGIINPGGGSATYAQKFQGRVTMTRDTSTTTIYMELSSLRSEDTAVYYCARAVIDTPDIDYWGQGTLVSVSS

SEQ ID NO: 5566 - protein, 125 aa, Artificial Sequence
  Synthetic construct
QMSLVESGGGLVKPGGSLRLSCVASGISLTDYYMTWIRQAPGKGLECLAYISPTSDDTHYADSVKGRFTISRDNAKNSLSLQMNSLRVEDTAVYFCAREPDPTRVMVSAVYFDHWGQGALVTVSS

SEQ ID NO: 5567 - protein, 117 aa, Artificial Sequence
  Synthetic construct
QVQLQQWGAGLLKPSETLSLTCAVYGGSFSGYYWSWIRQPPGKGLEWIGEINHSGSTNYNPSLKSRVTISVDTSKNQFSLKLSSVTAADTAVYYCARVTAVAGRVYWGQGTLVTVSS

SEQ ID NO: 5568 - protein, 118 aa, Artificial Sequence
  Synthetic construct
QVQLQESGPGLVMPSETLSLACTVAGASMSDSYWSWIRQPPGKGLEWIGYIYHTGSTNYSPSLWGRITISLDTPKKQFSLKLSSVTAADTALYYCARAESSWYSIDYWGQGTQVTVSS

SEQ ID NO: 5569 - protein, 112 aa, Artificial Sequence
  Synthetic construct
AVQLVESGGGLIQPGGSLSLSCAASGFNVSDNYMTWVRQAPGKGLEWVSIMYTTGRTFYPDSLKGRVSASRDTSKNTLSLQMSGLRVEDTATYYCVRGTGYWGRGTRVTVSS

SEQ ID NO: 5570 - protein, 118 aa, Artificial Sequence; identical to SEQ ID NO: 38
  Synthetic construct

SEQ ID NO: 5571 - protein, 124 aa, Artificial Sequence
  Synthetic construct
QLQLQESGPGLVKPSETLSLTCTVSGGSFSNNYYFWAWVRQPPGKGLEWIGSVSYAESTYYNPSFKSRITMSVDTSKKQISLTLSSVTAADTAVYFCARHLRGSYYGPDYFDYWGQGTLVTVSS

SEQ ID NO: 5572 - protein, 123 aa, Artificial Sequence
  Synthetic construct
QVQLVESGGGVVQPGRSLRLSCAASGFTFSSYGMHWVRQAPGKGLEWVAVISYDGSNKYYADSVKGRFTISRDNSKNTLYLQMNSLRAEDTAVYYCAKLAQQWLVSKSPFDYWGQGTLVTVSS

SEQ ID NO: 5573 - protein, 125 aa, Artificial Sequence
  Synthetic construct
QVQLQESGPGLVKPSGTLSLTCGVSDGSMSAGHWWSWVRQAPGKGLEWIGEIYHTGSTNYNPSLRGRLTMSVEKSKNRFSLKLTSVTAADTAVYYCASSSCSTTSCLVGEYFDNWGQGTLVTVSS

SEQ ID NO: 5574 - protein, 128 aa, Artificial Sequence
  Synthetic construct
EVQLLESGGGLVQPGGSLRLSCAASGFTFSSYAMSWVRQAPGKGLEWVSAISGSGGSTYYADSVKGRFTISRDNSKNTLYLQMNSLRAEDTAVYYCAKAPTRGRYCSSTSCSYYFDYWGQGTLVTVSS

SEQ ID NO: 5575 - protein, 120 aa, Artificial Sequence
  Synthetic construct
QVQLVQSGAEVKKPGASVKVSCKASGYSFTDYYIHWVRQAPGQRLEWMGWIDPKNGGTKYAQKFQGRVAMTRDTPITTAYMELSSLRSDDSAVYFCVRDPRDDIVGIDYWGQGTLVTVSS

SEQ ID NO: 5576 - protein, 124 aa, Artificial Sequence
  Synthetic construct
LVQLEESGGGVVQTGRSLRLSCVTSGFIFSSYAMHWVRQVPGKGLEWLAVFWHDGSTKYYADSVQGRFFISRDDSKNTVYLEMNDLRHGDTAVYYCARDNPLPRTPLTNHFDFWGRGTRVTVSS

SEQ ID NO: 5577 - protein, 122 aa, Artificial Sequence
  Synthetic construct
QVQLVQSGAEVKKPGASVKVSCKASGYTFTGYYMHWVRQAPGQGLEWMGWINPNSGGTNYAQKFQGRVTMTRDTSISTAYMELSRLRSDDTAVYYCARFSLYSYGYRKFDYWGQGTLVTVSS

SEQ ID NO: 5578 - protein, 126 aa, Artificial Sequence
  Synthetic construct
QVTLKESGPVLVKPTETLTLTCTVSGFSLSNARMGVSWIRQPPGKALEWLAHIFSNDEKSYSTSLKSRLTISKDTSKSQVVLTMTNMDPVDTATYYCARILSARIAAAGKGAFDPWGQGTLVTVSS

SEQ ID NO: 5579 - protein, 124 aa, Artificial Sequence
  Synthetic construct
EAQLVESGGGLVQPGRSLRLSCAVSGFTFADYAMHWVRQAPGLGLEWVSGINWNSGSIDYVDSVKGRFTISRDNAKNSLYLQMNSLTAEDTALYHCVKDREWQLRRGQMAFDFWGQGTLVTVSS

SEQ ID NO: 5580 - protein, 129 aa, Artificial Sequence
  Synthetic construct
QVQLVQSGPEVKKPGSSVKVSCRSSGDTLTSHTISWVRQAPGQGPEWMGRIIPSLGITNYAQKMQGRVTISADEPTSTVYMELSSLRSDDTAMYYCARVGTRHYDFLSGYYKRDAFDIWGQGTMVLVTS

SEQ ID NO: 5581 - protein, 122 aa, Artificial Sequence
  Synthetic construct
EVQLVQSGAEVKRPGESLKISCKGSGYEFFYYWIGWVRQKPGKGLEWMGIVYPADSDARYSPPFQGQVTFSADSSISTAYLQLSSLKASDTAMYFCARQRGSSGNNDAFDFWGQGTMVTVSS

SEQ ID NO: 5582 - protein, 122 aa, Artificial Sequence
  Synthetic construct
EVQLVESGGGLVQPGGSLRLSCAASGFTFSSYSINWVRQAPGKGLEWVSYVSISSSTIYYADSVKGRFTISRDTAKNSLYLQMNSLRDEDTAVYYCARGRIYGSGNPLYDYWGQGTLVTVSS

SEQ ID NO: 5583 - protein, 119 aa, Artificial Sequence
  Synthetic construct
EVQLLESGGGLEQPGGSLRLSCAGSGLTFRSYAMHWVRQTPGKGLEWVSGISVNADSTYYADSVKGRFTISRDNSKNTLYLQMNSLRAEDTAVYWCASDYADVGFLDYWGQGTLVTVSS

SEQ ID NO: 5584 - protein, 123 aa, Artificial Sequence
  Synthetic construct
QVQLVESGGGVVQPGRSLRLSCAASGFTFSSYGMHWVRQAPGKGLEWVAVIWYDGSNKYYADSVKGRFTISRDNSKNTLYLQMNSLRAEDTAVYYCARDKGSSSWYGRGFDYWGQGTLVTVSS

SEQ ID NO: 5585 - protein, 118 aa, Artificial Sequence
  Synthetic construct
QVQLKESGPGLVKPSETLSLTCSVSGVSISSSSFFWNWIRQAPGLGPEWIGTIYQNGQTFYNPSLESRVTISADWSKNQFSLRLASVTATDTAMYFCARHPYGGYHGWGQGTPVIVSS

SEQ ID NO: 5586 - protein, 124 aa, Artificial Sequence
  Synthetic construct
QVQLQESGPGLVKPSETLSLTCTVSGGSISSYYWSWIRQPPGKGLEWIGYIYYSGSANYNPSLKSRVAISVDTSKNQFSLRLSSVTAADTAVYYCANSLRSCSGGSCQYYFDYWGQGTLVTVSS

SEQ ID NO: 5587 - protein, 125 aa, Artificial Sequence
  Synthetic construct
QVQLVQSGAEVKKPGASVKVSCKASGYTFTSYYMHWVRQAPGQGLEWMGIINPSGGSTSYAQKFQGRVTMTRDTSTSTVYMELSSLRSEDTAVYYCARDYYDYVWGSYRYSYDYWGQGTLVTVSS

SEQ ID NO: 5588 - protein, 122 aa, Artificial Sequence
  Synthetic construct
QVQLVESGGGVVQPGRSLRLSCVASGFTFSIYGMHWVRQAPGKGLEWVSVISYDGHDKYYADSVKGRFTISRDNSKDTLYVQMNRLTPEDTAVYFCAKPPDRRNTVTPFEYWGQGTLVTVSS

SEQ ID NO: 5589 - protein, 124 aa, Artificial Sequence
  Synthetic construct
EVQLVESGGGLVKPGGSLRLSCAASGFAFAAYTMSWVRQAPGKGLEWVSSIRSSDTYIYYADSLEGRFTISRDNAKNSLYLQMNSLRVEDTAVYYCAKEEGGWGNYRIGWFDPWGQGTLVTVSS

SEQ ID NO: 5590 - protein, 118 aa, Artificial Sequence
  Synthetic construct
EVQLLESGGGLVQPGGSLRLSCAASGFTFSSYAMSWVRQAPGKGLEWVSAISGSGGSTYYADSVKGRFTISRDNSKNTLYLQMNSLRAEDTAVYYCAKGARGYCSTNWGQGTLVTVSS

SEQ ID NO: 5591 - protein, 121 aa, Artificial Sequence
  Synthetic construct
EVQLVESGGGLVKPGGSLRLSCAASGFTFSDYSMNWVRQAPGKGLEWVSSISIVGSNTYYADSVKGRFTISRDNAENSLHLHLNSLRAEDTAVYYCARPILGHFYYGMDVWGQGTTVTVSS

SEQ ID NO: 5592 - protein, 124 aa, Artificial Sequence
  Synthetic construct
EVQLVQSGAEVKKPGESLRISCQGSGYSFSNYWISWVRRMPGKGLEWVGRVNPDDSYSDYSPSFQGHATISVDRSISTAYLQWSSLRASDTAMYYCVTMRGHYQLFYDDSFDVWGQGTMVTVSS

SEQ ID NO: 5593 - protein, 124 aa, Artificial Sequence
  Synthetic construct
EERLVESGGGLVQPGKSLRLSCAASGFSFSSYWMTWVRQAPGKGLEWVANINQDGTEKYFVDSVKGRFTISRDNAKNSLFLQMSSLRAEDTAVYYCARDDPGHYYDYYFAMDVWGPGTTVTFSS

SEQ ID NO: 5594 - protein, 127 aa, Artificial Sequence
  Synthetic construct
QLQLQESGPGLVKPSETLSLACSVYGVSIGSTNYHWGWIRQPPGKGLEWIGSISYSGNTYQNPSLKSRVTISVDRPNNQISLRLRSVTAADTALYYCARHHGVPSSSHYYYYGMDVWGQGTTVTVSS

SEQ ID NO: 5595 - protein, 124 aa, Artificial Sequence
  Synthetic construct
QVQLVQSGAEVKKPGASVKVSCKTSGYTFISYNMHWVRQAPGQGLEWMGKINPSGGSSTYAQKFQGRVTVTRDTSTSTVYMELSSLGSEDTAVYYCARGGSLVVVPATKGLDIWGQGTMVTVSS

SEQ ID NO: 5596 - protein, 122 aa, Artificial Sequence
  Synthetic construct
QVQLQESGPGLVKPSQTLSLTCTVSGGSISSGSYYWSWIRQPAGKGLEWIGRIYTSGSTNYNPSLKSRVTISVDTSKNQFSLKLSSVTAADTAVYYCARGPVTIFGVVTRDWGQGTLVTVSS

SEQ ID NO: 5597 - protein, 123 aa, Artificial Sequence
  Synthetic construct
EVQLVESGGGLVQPGGSLRLSCAASGFSFSTYPMHWVRQAPGKGLEYVSAISSTDDTTYYADSVKGRFTISRDTSKNILYLQMSSLRPDDTAIYYCVRDLAWRSIAADGGDCWGQGTLVTVSS

SEQ ID NO: 5598 - protein, 123 aa, Artificial Sequence
  Synthetic construct
EVQLVESGGGLVQPGGSLRLSCAASGFTFSSYWMHWVRQAPGKGLMWVSGINTDGSRTTYADSVKGRFTISRDNAKSTLYVQVNSLRVEDTAVYYCTRGGYSDYDWVPGIDYWGQGTLVTVSS

SEQ ID NO: 5599 - protein, 126 aa, Artificial Sequence
  Synthetic construct
QLQLQESGPGLVTPSETLSLTCTVSRGSITNTVYYWGWIRQPPGKGLEWIGNIYHSGTTYYNPSLKSRVTMSVDTAKNQFSLKLSSVTAADTAVYFCARQGRRDGYNWRLAHFDSWGQGTLVTVSS

SEQ ID NO: 5600 - protein, 128 aa, Artificial Sequence
  Synthetic construct
QVTLKESGPVLVKPTETLTLTCTVSGFSLSNARMGVSWIRQPPGKALEWLAHIFSNDEKSYSTSLKSRLTISKDTSKSQVVLTMTNMDPVDTATYYCARIRGYSSSWYDSADDYDSYWGQGTLVTVSS

SEQ ID NO: 5601 - protein, 119 aa, Artificial Sequence
  Synthetic construct
QVQLVQDGAEVKKPGASVKVSCKAFGYSFTSYYIHWVRQAPGQGPQWMGIINPSGGSTVYAQAFQGRVTMTRDTSTSTVHMELSSLKSDDTAIYYCARGGSNGHMEAIWGQGTMVTVSS

SEQ ID NO: 5602 - protein, 120 aa, Artificial Sequence
  Synthetic construct
QVQLVESGGGLVKPGGSLRLSCAASGFTFSDYYMSWIRQAPGKGLEWVSYISSSSSYTNYADSVKGRFTISRDNAKNSLYLQMNSLRAEDTAVYYCARVWELVGANFDYWGQGTLVTVSS

SEQ ID NO: 5603 - protein, 121 aa, Artificial Sequence
  Synthetic construct
EVQLLESGGGLVQPGGSLRLSCAASGFTFSSYAMSWVRQAPGKGLEWVSAISGSGGSTYYADSVKGRFTISRDNSKNTLYLQMNSLRAEDTAVYYCAKDPPGGYGASGDYWGQGTLVTVSS

SEQ ID NO: 5604 - protein, 122 aa, Artificial Sequence
  Synthetic construct
EVQLVESGGGLVQPGRSLRLSCAASGFTFDDYAMHWVRQAPGKGLEWVSGISWNSGSIGYADSVKGRFTISRDNAKNSLYLQMNSLRAEDTALYYCAKDRGNYYDIGAFDIWGQGTMVTVSS

SEQ ID NO: 5605 - protein, 120 aa, Artificial Sequence
  Synthetic construct
QVQLQESGPGLVKPSQTLSLTCSVSGASISSGTYYWSWIRQHPGKGLEWIGYVYDGGSTYYNPSLKSRVSISLDTSQIRFSLKLSSVTAADTALYYCVLEGGAANSFDHWGQGTLVTVSS

SEQ ID NO: 5606 - protein, 118 aa, Artificial Sequence
  Synthetic construct
EVQLLESGGGLVQPGGSLRLSCAASGFTFSSYAMSWVRQAPGKGLEWVSAISGSGGSTYYADSVKGRFTISRDNSKNTLYLQMNSLRAEDTAVYYCAKALRSGTPGWWGQGTLVTVSS

SEQ ID NO: 5607 - protein, 120 aa, Artificial Sequence
  Synthetic construct
QVQLQQWGAGLLKPSETLSLTCAVYGGSFSGYYWSWIRQPPGKGLEWIGEINHSGSTNYNPSLKSRVTISVDTSKNQFSLKLSSVTAADTAVYYCARRKNRLAAAWFDPWGQGTLVTVSS

SEQ ID NO: 5608 - protein, 128 aa, Artificial Sequence
  Synthetic construct
QVQLQESGPGLVKPSQTLSLTCTVSGGSISSGSYYWSWIRQPAGKGLEWIGRIYTSGSTNYNPSLKSRVTISVDTSKNQFSLKLSSVTAADTAVYYCARDTGAYCSSTSCYPRAFDIWGQGTMVTVSS

SEQ ID NO: 5609 - protein, 123 aa, Artificial Sequence
  Synthetic construct
EVQLLETGGGLVQPGGSLRLSCASSGFTFSNFAMSWVRQAPGKGLEWASTISGSSGSTFYADSVEGRFTISRDNSKNTVYLHMSSLRAEDTAVYYCAKGVGSDIAVAGTFEYWGQGTLVTVSS

SEQ ID NO: 5610 - protein, 123 aa, Artificial Sequence
  Synthetic construct
EVQLVQSGAEVKKPGESLKISCKGSGYTFTSYWIGWVRQMPGKGLEWMGIIYPGDSDTRYSPSFQGQVTISADKSINTAYLQWSSLKASDTAMYYCVRTEYCSSTTCYHFDCWGQGTLVTVSS

SEQ ID NO: 5611 - protein, 123 aa, Artificial Sequence; identical to SEQ ID NO: 5437
  Synthetic construct

SEQ ID NO: 5612 - protein, 62 aa, Artificial Sequence
  Synthetic construct
KEYADSVKGRFTISRDNSKDMLYLQMNSLRAEDTAVYYCVRSVEILYYFDYWGQGALVTVSP

SEQ ID NO: 5613 - protein, 120 aa, Artificial Sequence
  Synthetic construct
QVQLVESGGGLVKPGGSLRLSCAASGLTLSDFYMSWIRQAPGKGLEWVSHMSSSGNLIYYADSVKGRFTISRDNAKNSLYLQMNSLRAEDTAVYYCARGYYYSSGSYKFWGQGTLVTVSS

SEQ ID NO: 5614 - protein, 120 aa, Artificial Sequence
  Synthetic construct
EVQLLESGGGLVQPGGSLRLSCAASGFSFSNFAMSWVRQAPGKGLEWVSTLTGSDAHYADSVKGRFTISRDNSKNTVYLQVNSLRAEDTAVYYCAKDQVSGDGYLEFDYWGQGTLVTVSS

SEQ ID NO: 5615 - protein, 114 aa, Artificial Sequence
  Synthetic construct
EVQLVESGGGLVKPGGSLRLSCAASGFTFSSYSMNWVRQAPGKGLEWVSSISSSSSYIYYADSVKGRFTISRDNAKNSLYLQMNSLRAEDTAVYYCARDFEAAWGQGTLVTVSS

SEQ ID NO: 5616 - protein, 124 aa, Artificial Sequence
  Synthetic construct
QVQLVQSGAEVKKPGASVKVSCQTSGYSFTDYFMHWVRQAPGQGLEWMGWINPNSGATHYAQNFKGRVTLTRDTSVSTVYMELSRLGADDTAVFYCTRAELPPDYGDDVYFNHWGQGTVVTVSS

SEQ ID NO: 5617 - protein, 124 aa, Artificial Sequence; identical to SEQ ID NO: 5439
  Synthetic construct

SEQ ID NO: 5618 - protein, 127 aa, Artificial Sequence
  Synthetic construct
QVQVEQSGPEVREPGASVKVSCKTSDTRSANFAISWVRQAPGQGLEWMGWVSVYNGDTKYSEKFQGRVIMTRVRSINRADMELRSLRSDDTAIYYCARFSVYGADTSPKYFYGVDVWGQGTAITVSA

SEQ ID NO: 5619 - protein, 124 aa, Artificial Sequence
  Synthetic construct
EVQLVESGGGLVQPGGSLRLSCAASGFTFSSYWMHWVRQPPGKGLVWVSRINNDGTTTGYADSVKGRFTISRDNAKNMVYLHMNSLRAEDAAVYYCARDPGYSGDDWRNQFWLWGQGTQVTVSS

SEQ ID NO: 5620 - protein, 128 aa, Artificial Sequence
  Synthetic construct
QVQLVQSGAEVKKPGASVKVSCKASGYTFDNYDLHWVRQAPGQRLEWMGWINVGNNNTQYSQNLQGRVTITGDTSATTAYMELSSLRSEDTAVYFCARDSRARSSPKFYSFFYGMDVWGQGTTVTVSS

SEQ ID NO: 5621 - protein, 129 aa, Artificial Sequence
  Synthetic construct
QVQLVQSGAEVKKPGASVKVSCKASGYTFTSYDINWVRQATGQGLEWMGWMNPNSGNTGYAQKFQGRVTMTRNTSISTAYMELSSLRSEDTAVYYCARGPRYYDFWSGYYPGYYGMDVWGQGTTVTVSS

SEQ ID NO: 5622 - protein, 120 aa, Artificial Sequence
  Synthetic construct
EVQLVESGGGLIQPGGSLRLSCAASGFTVSSNYMSWVRQAPGKGLEWVSVIYSGGSTYYADSVKGRFTISRDNSKNTLYLQMNSLRAEDTAVYYCARVSSGRYRGWFDPWGQGTLVTVSS

SEQ ID NO: 5623 - protein, 123 aa, Artificial Sequence; identical to SEQ ID NO: 5437
  Synthetic construct

SEQ ID NO: 5624 - protein, 119 aa, Artificial Sequence
  Synthetic construct
EVQLVESGGGLVQPGGSLRLSCATSGFSFSDFWMSWVRQAPGKGLEWLAQINQDGSDHSYLDSVKGRFTISRDNTKKSLYLQMNSLRVHDTALYYCVREGGATNIFDLWGQGTLVTVSS

SEQ ID NO: 5625 - protein, 119 aa, Artificial Sequence
  Synthetic construct
QVTLRESGPAMVTPTETLTLTCTFSGFSLNADRMSVSWVRQPPGKALEWLALIDSDGETLYRTPLKTRLTISRDTSKNLVIFTMANMDPVDTATYYCARMTSQGYFDFWGQGTLVSVSS

SEQ ID NO: 5626 - protein, 129 aa, Artificial Sequence
  Synthetic construct
QLQLQESGPGLVKPSETLSLTCTVSGGSISSSSYYWGWIRQPPGKGLEWIGSIYYSGSTYYNPSLKSRVTISVDTSKNQFSLKLSSVTAADTAVYYCARHSLSSSEVRQHRGRGWFDPWGQGTLVTVSS

SEQ ID NO: 5627 - protein, 133 aa, Artificial Sequence
  Synthetic construct
QLQLQESGPGLVKPSETLSLTCTVSGGSISSSSYYWGWIRQPPGKGLEWIGSIYYSGSTYYNPSLKSRVTISVDTSKNQFSLKLSSVTAADTAVYYCARHAAGAHYYGSGSYYRARSNWFDPWGQGTLVTVSS

SEQ ID NO: 5628 - protein, 124 aa, Artificial Sequence
  Synthetic construct
QVQLVESGGGVVQPGRSLRLSCAASGFTFSSYGMHWVRQAPGKGLEWVAVIWYDGSNKYYADSVKGRFTISRDNSKNTLYLQMNSLRAEDTAVYYCARDFKSKMVRGGTNMDVWGQGTTVTVSS

SEQ ID NO: 5629 - protein, 121 aa, Artificial Sequence
  Synthetic construct
QVQLVQSGAEVKKPGASVKVSCKASGYTFTGYYMHWVRQAPGQGLEWMGWINPNSGGTNYAQKFQGRVTMTRDTSISTAYMELSRLRSDDTAVYYCARVLRYFDWYYFQHWGQGTLVTVSS

SEQ ID NO: 5630 - protein, 114 aa, Artificial Sequence
  Synthetic construct
QVQLVQSGAEVKKPGASVKVSCKASGYTFTSYAMHWVRQAPGQRLEWMGWINAGNGNTKYSQKFQGRVTITRDTSASTAYMELSSLRSEDTAVYYCARGYGGYWGQGTLVTVSS

SEQ ID NO: 5631 - protein, 124 aa, Artificial Sequence
  Synthetic construct
QLQLQESGPGLVKPSETLSLTCTVSGGSISRESYHWGWIRQPPGRGLEWIGSISYSGTTYYNASLKSRITVSADTSKNQFSLKLRSVTAADTAMYHCASQPDYYDRPRGLFEIWGQGTMVSVSS

SEQ ID NO: 5632 - protein, 119 aa, Artificial Sequence
  Synthetic construct
QVQVVESGGDVVQPGRSLRLACVGSGFTLSNHGIHWVRQTPGKGLEWVAVTWHEEDYKHYAESVRGRFTISRDNAKNTVFLQMRNLRVEDSAVYYCARDRGIAVVLDVWGRGTTVTVSS

SEQ ID NO: 5633 - protein, 124 aa, Artificial Sequence
  Synthetic construct
QVQLVESGGALVKPGGSLRLSCVASGFTFSHYYMSWIRQAPGKGLEWISYITSSDSTIYYADSVRGRFTISRDNARNSLYLQMNSLRAEDTAVYYCARYCSSPSCETSDVFDVWGQGTMVTVSS

SEQ ID NO: 5634 - protein, 123 aa, Artificial Sequence
  Synthetic construct
QVQLVQSGAEVKKPGASVKISCEASGYSFTTYFVDWVRQAPGQDLEWMGIINCNGGTTRYAERFQDRVTMTRDMSTDTVYLELSSLTFEDTAVYYCARVVPPDNSNWYLADYWGQGTLVTVSS

SEQ ID NO: 5635 - protein, 119 aa, Artificial Sequence
  Synthetic construct
EVQLVESGGGLVQPGGSLKLSCAASGFTFSGSAIHWVRQASGKGLEWVGRVGSKGNTYATAYGASVKGRFTTSRDDSKNTAYLQMNSLKTEDTAVYYCIRRSDDSSPSWGQGTLVTVSS

SEQ ID NO: 5636 - protein, 123 aa, Artificial Sequence
  Synthetic construct
EVQLAESGGGLVQPGRSLRLSCAASGFTFDDYAMHWVRQAPGKGLEWVSGISWNSGDIGYADSLKGRFIISRDNAKNSLYVQMNSLRPEDTALYYCAKSRFRSLLSDDAFDIWGQGTMVTVSS

SEQ ID NO: 5637 - protein, 134 aa, Artificial Sequence
  Synthetic construct
QLQLQESGPGLVKPSETLSLTCTVSGGSISSSSYYWGWIRQPPGKGLEWIGSIYYSGSTYYNPSLKSRVTISVDTSKNQFSLKLSSVTAADTAVYYCRGASMVVAAKGMRAWKSEHYYYGMDVWGQGTTVTVSS

SEQ ID NO: 5638 - protein, 124 aa, Artificial Sequence
  Synthetic construct
QLQLQESGPGLVKPSETLSLTCTVSGGSISSSSHYWGWTRQPPGKGLEWIGSIYYSGSADSNTSLKSRVTIFIDTSKNQFSLKVSSVTAADTAVYYCARLVRTGDQGRGYFDYWGQGTLVTVSS

SEQ ID NO: 5639 - protein, 126 aa, Artificial Sequence
  Synthetic construct
EVQLVESGGGLVKPGGALRLSCAASGFTFSSYSMSWVRQAPGKGLEWVSSISSSSSYIYSADSVKGRFTISRDNAKNSVYLQMNSLRAEDTAVYYCARDFDDGSYYDILTGYPDYWGQGTLVTVSS

SEQ ID NO: 5640 - protein, 118 aa, Artificial Sequence
  Synthetic construct
EVVLEQSGGGLVQPGGSLRLSCVVSGFTFRNYWMSWVRHIPGKGLEWVANINQDGSVTDYMDSVKGRFTISRDSAKNSLFLQMSSLRAEDTAMYFCAREALTGHFDYWGQGTRVAVSS

SEQ ID NO: 5641 - protein, 124 aa, Artificial Sequence
  Synthetic construct
QVQLVQSGAEVKKPGSSVKVSCKASGGTFSSYAISWVRQAPGQGLEWMGRIIPILGIANYAQKFQGRVTITADKSTSTAYMELSSLRSEDTAVYYCASSRRYCSSTSCYGMDVWGQGTTVTVSS

SEQ ID NO: 5642 - protein, 123 aa, Artificial Sequence
  Synthetic construct
QVQLVESGGGVVQPGRSLRLSCAASGFTFSSYGMHWVRQAPGKGLEWVAVIWYDGSNKYYADSVKGRFTISRDNSKNTLYLQMNSLRAEDTAVYYCARGGYSGYGKKYYFDYWGQGTLVTVSS

SEQ ID NO: 5643 - protein, 122 aa, Artificial Sequence
  Synthetic construct
QVQLVQSGAEVKKPGASVKVSCKASGYTFTGYYMHWVRQAPGQGLEWMGWINPNSGGTNYAQKFQGRVTMTRDTSISTAYMELSRLRSDDTAVYYCARLRWELRYYYGMDVWGQGTTVTVSS

SEQ ID NO: 5644 - protein, 122 aa, Artificial Sequence
  Synthetic construct
EVQLLESGGGLVQPGGSLTLSCAASGFTFTSSAMNWVRQAPGKGLEWLSFISGSGTTVHYANSVKGRFAISRDNSKNTLYLQMNNLRAEDTAIYYCAKVSWRQLVIEFLDHWGQGTLVTVSS

SEQ ID NO: 5645 - protein, 124 aa, Artificial Sequence
  Synthetic construct
QVTLRESGPVAVKPTETLTLTCTVSGFSLSNPRMGVSWIRQPPGKALEWLGNIFSTDEKSYNSFLKSRLTITKDASRSLVVLTLTDVDPVDTATYYCARIDSWYQWALVAFDPWGQGTLVTVSS

SEQ ID NO: 5646 - protein, 125 aa, Artificial Sequence
  Synthetic construct
QVHLVESGGGVVQPGKSQRLSCVASGFTFTTCVMHWVRQAPGKGLEWVAALSHDGSNHHYADSVKGRFTISRDNSKNTLYLHMNSLRAEDTAVYYCAKEGHGNTSGFYYSMMDYWGLGTLVTVSS

SEQ ID NO: 5647 - protein, 117 aa, Artificial Sequence; identical to SEQ ID NO: 39
  Synthetic construct

SEQ ID NO: 5648 - protein, 122 aa, Artificial Sequence
  Synthetic construct
QVQLVESGGGVVQPGRSLRLSCAASGFTFSSYGMHWVRQAPGKGLEWVAVIWYDGSNKYYADSVKGRFTISRDNSKNTLYLQMNSLRAEDTAVYYCARGSYDFWREGAFDIWGQGTMVTVSS

SEQ ID NO: 5649 - protein, 120 aa, Artificial Sequence
  Synthetic construct
QVQLVQSGAEVKKPGASVKVSCKASGYTFTSYAMHWVRQAPGQRLEWMGWINAGNGNTKYSQKFQGRVTITRDTSASTAYMELSSLRSEDTAVYYCARSYSSGRGGMDVWGQGTTVTVSS

SEQ ID NO: 5650 - protein, 124 aa, Artificial Sequence; identical to SEQ ID NO: 5592
  Synthetic construct

SEQ ID NO: 5651 - protein, 122 aa, Artificial Sequence
  Synthetic construct
EVHLLESGGALAQPGGSLTLSCAASGFTFSSHAMSWVRQAPGKGLEWVSSIRGSGTISYYADSVRGRFTISRDSSKQIVYLQIHSLRAEDTAVYYCVKDRYSTGDRGYFDSWGQGTLVTVSS

SEQ ID NO: 5652 - protein, 120 aa, Artificial Sequence
  Synthetic construct
QVQLVQSGAEVKKPGASVKVSCKASGYTFTSYGISWVRQAPGQGLEWMGWISAYNGNTNYAQKLQGRVTMTTDTSTSTAYMELRSLRSDDTAVYYCARRKTTMGAAFDIWGQGTMVTVSS

SEQ ID NO: 5653 - protein, 119 aa, Artificial Sequence
  Synthetic construct
EVQLLESGGGLLQPGGSLRLSCAASGFTFSSYAMSWVRQAPGKGLEWVSAISGSGGSTYYADSVKGRFTISRDNSKNTVYLQVNSLRAEDTAVYYCAKGLNYLDAFDIWGQGTMVTVSS

SEQ ID NO: 5654 - protein, 125 aa, Artificial Sequence
  Synthetic construct
QLQLQESGPGLVKPSETLSLTCTVSGGSISSSSYYWGWIRQPPGKGLEWIGSIYYSGSTYYNPSLKSRVTISVDTSKNQFSLKLSSVTAADTAVYYCARRDPRRRGVYYYGMDVWGQGTTVTVSS

SEQ ID NO: 5655 - protein, 121 aa, Artificial Sequence
  Synthetic construct
QVKLVESGGGVVRPGTSLRLSCVGSGFTFSKYGMHWVRQAPGKGLEWVAVITFEGTKEFYRDSVKGRFSISRDNAKNTLGLQMNSLKPEDTALYYCARAGPTTVGDAFDFWGQGTMVTVST

SEQ ID NO: 5656 - protein, 124 aa, Artificial Sequence; identical to SEQ ID NO: 5592
  Synthetic construct

SEQ ID NO: 5657 - protein, 124 aa, Artificial Sequence
  Synthetic construct
QLQLQESGPRLVKPSETLSLTCTVSGGSIRSNNDYWGWIRQPPGKGLEWIGSIYYRGSTYYQSSLKSRVNISVDTSKNQFFLEVNSVTAADTAIYYCARQTIYTDYQSYYYDFWGQGTLVTVSS

SEQ ID NO: 5658 - protein, 125 aa, Artificial Sequence
  Synthetic construct
QVQLVQSGAEVKKPGSSVKVSCKASGGTFSSYAISWVRQAPGQGLEWMGGIIPIFGTANYAQKFQGRVTITADESTSTAYMELSSLRSEDTAVYYCARTRHPYYYDSSGYCYDYWGQGTLVTVSS

SEQ ID NO: 5659 - protein, 118 aa, Artificial Sequence
  Synthetic construct
EVQLVESGGGLVKPGRSLRLSCTASGFTFGDYAMSWFRQAPGKGLEWVGFIRSKAYGGTTEYAASVKGRFTISRDDSKSIAYLQMNSLKTEDTAVYYCTRVGTVYRGWGQGTLVTVSS

SEQ ID NO: 5660 - protein, 120 aa, Artificial Sequence
  Synthetic construct
EVQLLESGGDLVQPGGSLRLSCAASGFTFSSSPMSWVRQDPGKGLEWVSSISSNGGYTYYADSVKGRFTISRDNSENTLYLQMSSLRVEDTAIYYCTRIGISGQWFFDLWGRGTLAIVSS

SEQ ID NO: 5661 - protein, 62 aa, Artificial Sequence
  Synthetic construct
NSVKGRFTISRDNSKNTLYLQMNSLRAEDTALYYCAKGGKWDSTLVTRLAYWGQGTLVTVSS

SEQ ID NO: 5662 - protein, 120 aa, Artificial Sequence
  Synthetic construct
EVQLVQSGAEVKKPGESLKISCKGSGYSFTSYWIGWVRQMPGKGLEWMGIIYPGDSDTRYSPSCQGQVTISADKSISTAYLQWSSLKASDTAMYYCARGGGGTHNWFDPWGQGTLVTVSS

SEQ ID NO: 5663 - protein, 118 aa, Artificial Sequence
  Synthetic construct
EVQLVESGGDLVQPGGSLRLSCTASGFTFKSYDMHWVRQSTGKGLEWVSGIGPAGDTYSTASVKGRFSISREDAKNSLFLQMNRLTVGDTAVYYCVRGGRQWLQIDSWGQGTLVTVSS

SEQ ID NO: 5664 - protein, 115 aa, Artificial Sequence
  Synthetic construct
QVQLVESGGGLVKPGGSLRLSCAASGFTFSDYYMSWIRQAPGKGLEWVSYISSSGSTIYYADSVKGRFTISRDNAKNSLYLQMNSLRAEDTAVYYCARDAVFDYWGQGTLVTVSS

SEQ ID NO: 5665 - protein, 133 aa, Artificial Sequence
  Synthetic construct
EVQLVESGGGLVQPGGSLRLSCAASGFTVSSNYMSWVRQAPGKGLEWVSVIYSGGSTYYADSVKGRFTISRDNSKNTLYLQMNSLRAEDTAVYYCARGPKRYCSGGSCYSSSPRYYYYGMDVWGQGTTVTVSS

SEQ ID NO: 5666 - protein, 126 aa, Artificial Sequence
  Synthetic construct
QVQLQQWGAGLLKPSETLSLTCAVYGGSFSGYYWSWIRQPPGKGLEWIGEINHSGSTNYNPSLKSRVTISVDTSKNQFSLKLSSVTAADTAVYYCARGGGIAARRRNYYYYGMDVWGQGTTVTVSS

SEQ ID NO: 5667 - protein, 128 aa, Artificial Sequence
  Synthetic construct
EVQLVESGGGLVKPGGSLRLSCTASGFPFSTYSMNWVRQAPGKGLEWVSYITSGSNFFDYAASVKGRFTISRDNTKNSLYLQMNSLRAEDTAVYYCARDLFTHSRGYYYHPVGAFEIWGQGTMVIVSS

SEQ ID NO: 5668 - protein, 124 aa, Artificial Sequence
  Synthetic construct
QVQLVQSGAEVKKPGSSVKVSCKASGGTLSTYGISWVRQAPGQGLEWMGRFIPLFETPNYAQKFQGRVTIAADKSTSTAYMVLSSLRSDDTAVYYCAREYRETNWNSHDAFDIWGQGTVVTVSS

SEQ ID NO: 5669 - protein, 120 aa, Artificial Sequence
  Synthetic construct
EVLLLQSGGGLAQPGGSLRLSCAASGFSFDKYAMAWVRQAPGKGLEWVSTISGTASTTLYADSVRGRSTISRDNSNNTLFLQLHTLRAEDTAIYYCAKVGDYISRYFDSWSRGTLVSVTS

SEQ ID NO: 5670 - protein, 123 aa, Artificial Sequence
  Synthetic construct
EVQLVESGGGLVKPGGSLRLSCAASGFTFSTYSMHWVRQAPGKGLEWVSLISSGSTNIYYAESLEGRFTISRDNAKSSLYLQMDSLRAEDTAVYYCARGGYYDSSGFYYFDYWGQGTMVTVSS

SEQ ID NO: 5671 - protein, 128 aa, Artificial Sequence
  Synthetic construct
QPQLQESGPRLVKPSETLSLTCSVSGGPISSSIYYWGWIRQTPGKGLEWIGSIYFDGSTYYNPSLRSRVTISVDTSKNQFSLKLTSVTAADTAVYYCARPGIAAGGSYYYYYLGMDVWGQGTTVTVSS

SEQ ID NO: 5672 - protein, 123 aa, Artificial Sequence
  Synthetic construct
QITLKESGPTLVKPTQTLTLTCTFSGFSLTTSGVGVGWIRQPPGKVLEWLALIYWDDDKRYSPSLKNRLTITKDTSKNQVVLTMTNMDPVDTATYYCAHAITIFGVVSGFYYWGQGTLVTVSS

SEQ ID NO: 5673 - protein, 123 aa, Artificial Sequence
  Synthetic construct
QVQLVQSGAEVKKPGASVKVSCKASGYTFTRYYIHWVRLAPGQGLEWMGIINPGGGTSTYAQKFLGRVTMTSDTSTSSVFVELSSLKSEDTAVYFCAKERATVVVPVGIMDVWGQGTTVTVSS

SEQ ID NO: 5674 - protein, 125 aa, Artificial Sequence
  Synthetic construct
QVQLVQSGAEVKKPGASVKVSCKVSGYTLTELSMHWVRQAPGKGLEWMGGFDPEDGETIYAQKFQGRVTMTEDTSTDTAYMELSSLRSEDTAVYYCATISGLRLGELSPYYFDYWGQGTLVTVSS

SEQ ID NO: 5675 - protein, 116 aa, Artificial Sequence
  Synthetic construct
EVQLLESGGGLIKPGGSLRLSCAASGLIFYDAWLSWFRQAPGKGLEWVGRIKSNMHGGTADYAAPVKGRFTISRDDSKDTLYLQMNSLETEDTAMYFCAADFGDFWGRGTLVTVSS

SEQ ID NO: 5676 - protein, 119 aa, Artificial Sequence
  Synthetic construct
QVQLVQSGAEVKKPGASVKVSCKASGYTFTGYYMHWVRQAPGQGLEWMGWINPNSGGTNYAQKFQGRVTMTRDTSISTAYMELSRLRSDDTAVYYCARRVWAMGAFDIWGQGTMVTVSS

SEQ ID NO: 5677 - protein, 126 aa, Artificial Sequence
  Synthetic construct
QVQLVESGGGVVQPGRSLRLSCAASGFTFSSYGMHWVRQAPGKGLEWVAVIWYDGSNKYYADSVKGRFTISRDNSKNTLYLQMNSLRAEDTAVYYCARGGRRGIVGPLYYYGMDVWGQGTTVTVSS

SEQ ID NO: 5678 - protein, 127 aa, Artificial Sequence
  Synthetic construct
EVQLVESGGGLVEPGGSLRLSCAASGFAFGNYAMNWVRQAPGKGLEWVSGLSGSGRGTYYADSLKGRLIISRDNSKSTVSLQMNSLRDEDTAIYYCVKDFHAGGASYDFWSGLFDRWGQGTLVTVSP

SEQ ID NO: 5679 - protein, 125 aa, Artificial Sequence
  Synthetic construct
EVQLVESGGGLVQPGGSLKLSCTVSGFSFSDSAIHWVRQAPGKGLEWVGRIRSITNNYATVYAASVKGRFTISRDDSKNTAYLQMNSLKTEDTAVYYCTRRDRDCAGNCAIFDYWGQGTLVTVSS

SEQ ID NO: 5680 - protein, 121 aa, Artificial Sequence
  Synthetic construct
EVQLLESGGGLLQPGESLRLSCAASGFTFSNYAMSWVRQAPGKGLEWVSSISNIGVTTYYADSVKGRFTISRDNSKNTLSLQMNSLRAEDTAIYYCAKSLQWFGEPELDYWGQGTLVTVSS

SEQ ID NO: 5681 - protein, 128 aa, Artificial Sequence
  Synthetic construct
QVQLVQSGAEVKKPGASVKVSCKASGYTFTSYGISWVRQAPGQGLEWMGWISAYNGNTNYAQKLQGRVTMTTDTSTSTAYMELRSLRSDDTAVYYCARGRRIVGVKGGQYYYYGMDVWGQGTTVTVSS

SEQ ID NO: 5682 - protein, 125 aa, Artificial Sequence
  Synthetic construct
EVQLVESGGGLVQQGGSLRLSCVVFGFTFENYWMSWVRQAPGKGPEWVANIKPDGSEKYLVDSVKGRFTISRDNARRSVYLQMDSLRAEDTAVYYCARIQAATEYYNWNDVDDFWGQGTLVTVSS

SEQ ID NO: 5683 - protein, 118 aa, Artificial Sequence; identical to SEQ ID NO: 5663
  Synthetic construct

SEQ ID NO: 5684 - protein, 130 aa, Artificial Sequence
  Synthetic construct
QVQLVQSGAEVKKPGASVKVSCKASGYTFTSYGISWVRQAPGQGLEWMGWISAYNGNTNYAQKLQGRVTMTTDTSTSTAYMELRSLRSDDTAVYYCARDHFRVTGTTISRHYYYYGMDVWGQGTTVTVSS

SEQ ID NO: 5685 - protein, 120 aa, Artificial Sequence
  Synthetic construct
QVQLVQSGAEVKKPGASVKVSCKASGYTFTSYGISWVRQAPGQGLEWMGWISAYNGNTNYAQKLQGRVTMTTDTSTSTAYMELRSLRSDDTAVYYCARSGDRKGGRNDYWGQGTLVTVSS

SEQ ID NO: 5686 - protein, 122 aa, Artificial Sequence
  Synthetic construct
QVQLVQSGVEVKKPGASVKVSCKASGYTFTSYGISWVRQAPGQGLEWMGWISANNGNTNYAQKLQGRVTMTTDTSTSTAYMELRSLRSDDTAVYYCARDRGRPTWEPFVDYWGQGTLVTVSS

SEQ ID NO: 5687 - protein, 134 aa, Artificial Sequence
  Synthetic construct
QVQLVESGGGVVQPGRSLRLSCAASGFTFSSYAMHWVRQAPGKGLEWVAVISYDGSNKYYADSVKGRFTISRDNSKNTLYLQMNSLRAEDTAVYYCARDRLRIGGYCSSTSCYRWGYYYGMDVWGQGTTVTVSS

SEQ ID NO: 5688 - protein, 125 aa, Artificial Sequence
  Synthetic construct
QVQLVQSGAEVKKPGASVKVSCKASGYTFTSYYMHWVRQAPGQGLEWMGIINPSGGSTSYAQKFQGRVTMTRDTSTSTVYMELSSLRSEDTAVYYCARDQLLGYSSSWYLRFDYWGQGTLVTVSS

SEQ ID NO: 5689 - protein, 120 aa, Artificial Sequence
  Synthetic construct
QVRLEESGGGLVKPGRSLRLSCAASGFTFSDYHMSWIRQAPGKGLEWISYITSSGVDTNYADSVKGRFTISRDNAKNSLSLQMNGLRDDDTAVYYCARQAWGTDGWLDPWGQGTLVTVSS

SEQ ID NO: 5690 - protein, 121 aa, Artificial Sequence
  Synthetic construct
QLQLQESGSGLVKPSQTLSLTCVVSGGSISSGVFSWSWIRQPPGKGLEWIGDIYNSGSIYYNPALRSRVTISADRSKNQFSLKLTSVTAADTAIYYCARDRGAGAGWFDPWGQGTLVTVSS

SEQ ID NO: 5691 - protein, 122 aa, Artificial Sequence
  Synthetic construct
EVQLVQSGAEAKKPGESLTISCKASGYSFATYWISWVRQMPGKGLEWMGRIDPTDSYTNYSPSFQGHVTISVDKSIGTAYLQWSSLKASDTAMYYCARHLRRDNADYYGLDVWGQGTTVTVS

SEQ ID NO: 5692 - protein, 123 aa, Artificial Sequence
  Synthetic construct
QVQLQESGPGLVKPLQTLSLTCIVSGGSIRSGDYYWTWIRQPAGKGLEWIGRIYTGGRTNYNPSLKSGVTISLDTSQNQFSLKLASVTAADTAVYYCARSVLPLSNYWYLDVWGRGTLVTVSS

SEQ ID NO: 5693 - protein, 123 aa, Artificial Sequence
  Synthetic construct
EVQLMESGGTLVQPGGSLRLSCAASGFTFSHYWMTWVRQAPGKGLEWVANINHNGSEKNYVDSLKGRFTISRDNAVNSLFLQMNSLRAEDSAVYYCARLDEDLEWLPLALDYWGQGTLVTVSS

SEQ ID NO: 5694 - protein, 121 aa, Artificial Sequence
  Synthetic construct
QVQLQQSGPGLVKPSQTLSLTCAISGDSVSSNSAAWNWIRQSPSRGLEWLGRTYYRSKWYNDYAVSVKSRITINPDTSKNQFSLQLNSVTPEDTAVYYCARGRGWARFDPWGQGTLVTVSS

SEQ ID NO: 5695 - protein, 120 aa, Artificial Sequence
  Synthetic construct
EVQLLESGGGLVQPGGSLRLSCAASGFPFSIYGMMWVRQSPGKGLEWVSAISNSGGLRYYADSVKGRFAISRDNSDYTLYLQMNSLRAEDTAVYHCAKIPVAGQWYFDLWGRGTLVTVSS

SEQ ID NO: 5696 - protein, 123 aa, Artificial Sequence
  Synthetic construct
EVQLVQSGAEVKKPGESLKISCRGSGYSFTNFWIGWVRQMPGKGLEWMGIIYPGDSDTRYSPSFQGQVTISADKSISTAYLQWTSLKASDTAMYYCARTKGVYGSMSTSFVYWGQGTLVTVSS

SEQ ID NO: 5697 - protein, 125 aa, Artificial Sequence
  Synthetic construct
QVQLQQWGAGLLKPSETLSLTCAVYGGSFSGYYWTWIRQPPGKGLQWIGEIDDSGSTNYNPSLKSRVTISVDTSKYQFSLKLSSVTAADTAVYFCARARTTVTTFRFFYYGLDVWGQGTTVTVSS

SEQ ID NO: 5698 - protein, 121 aa, Artificial Sequence
  Synthetic construct
QVQLVQSGAEVKKPGASVRVSCKASGYTFTGHYMHWVRQAPGQGLEWMGWINPNSGDTRYAQKFQGRVTLTRDTSINTAYMELTRLRSDDTAVYYCATPSDCGVDCYGLFWGRGTLITVSS

SEQ ID NO: 5699 - protein, 126 aa, Artificial Sequence
  Synthetic construct
QVQLVQSGAEVKKPGASVKVSCKASGYTFTSYAMHWVRQAPGQRLEWMGWINAGNGNTKYSQKFQGRVTITRDTSASTAYMELSSLRSEDTAVYYCARATYYYDSSGYRGGRFDYWGQGTLVTVSS

SEQ ID NO: 5700 - protein, 122 aa, Artificial Sequence; identical to SEQ ID NO: 40
  Synthetic construct

SEQ ID NO: 5701 - protein, 127 aa, Artificial Sequence
  Synthetic construct
QLQLQESGPGLMKPSETLSLTCNVSGGSISSRSYYWGWIRQPPGRRLEWIGSLSYGGSTFYSPSLKSRITLSVDASKNQFSLKLTSVTAADTAVYFCARTLRVDFAHIVTTIRFDYWGQGALVTVSS

SEQ ID NO: 5702 - protein, 121 aa, Artificial Sequence
  Synthetic construct
EEQLLESGGGLAQPGGSLRLSCAASGFKLITYAVTWVRQAPGKGLEWVAGISSSGVNTYYADSVKGRFTISRDNSKNTLSLQMNSLRGEDTAVYFCAKGATSGWPIRIDNWGLGTRVSVLS

SEQ ID NO: 5703 - protein, 120 aa, Artificial Sequence
  Synthetic construct
EVQLLESGGGLVQPGGSLRLSCAASGFTFSSHAMTWVRQAPGKGLAWVSTISGSGAITYYADSVKGRFTISRDNSKNTLYLQMNSLRAEDTAIYYCARVGAIRTGDLDYWSQGTLVTVSS

SEQ ID NO: 5704 - protein, 127 aa, Artificial Sequence; identical to SEQ ID NO: 5678
  Synthetic construct

SEQ ID NO: 5705 - protein, 123 aa, Artificial Sequence
  Synthetic construct
QVQLQESGPGLVKPSETLSLTCTVSGGSISSFYWSWIRQPAGKRLEWIGRIYSSGITYYNPSLKSRVTMSVDTSKSQISLKLTSVTAADTAVYYCAREGPSNYYETNGVIDHWGQGTLVTVSS

SEQ ID NO: 5706 - protein, 125 aa, Artificial Sequence
  Synthetic construct
QVQLVESGGGVVQPGRSLRLSCAASGFTFSSYGMHWVRQAPGKGLEWVAVISYDGSNKYYADSVKGRFTISRDNSKNTLYLQMNSLRAEDTAVYYCAKSGRYFDWLSTHYGMDVWGQGTTVTVSS

SEQ ID NO: 5707 - protein, 118 aa, Artificial Sequence; identical to SEQ ID NO: 5663
  Synthetic construct

SEQ ID NO: 5708 - protein, 125 aa, Artificial Sequence
  Synthetic construct
EVQLVESGGDLVQPGGSLRLSCAASGFTFSDYYMDWVRQAPGKGLEWVGRMRHKASRYTTEYAASVKGRFTISRDDSKNSLYLHMSSLKTEDTAVYYCARSSISCHRDYCYFDFWGQGTQVTVSS

SEQ ID NO: 5709 - protein, 129 aa, Artificial Sequence
  Synthetic construct
QVQLVQSGAEVKKPGASVKVSCKASGYTFTSYGISWVRQAPGQGLEWMGWISAYNGNTNYAQKLQGRVTMTTDTSTSTAYMELRSLRSDDTAVYYCARDRRRQQLVRSPPGYRFGMDVWGQGTTVTVSS

SEQ ID NO: 5710 - protein, 123 aa, Artificial Sequence; identical to SEQ ID NO: 5463
  Synthetic construct

SEQ ID NO: 5711 - protein, 125 aa, Artificial Sequence
  Synthetic construct
QITLKESGPTRVRPTQPLTLTCTFSGFSLATSGVGVAWIRQPPGEAPEWLAVIYWDDDKRFRPSLKSRLTIAKDTSKNQVVLTMTNMDPADTATYYCAHRRAEGGNWDGGCLDVWGPGTLVTVSS

SEQ ID NO: 5712 - protein, 121 aa, Artificial Sequence
  Synthetic construct
EVQLVQSGAEVKKPGESLRISCKGSGYSFTSYWISWVRQMPGKGLEWMGRIDPSDSYTNYSPSFQGHVTISADKSISTAYLQWSSLKASDTAMYYCARHSRGYSYGYNNYWGQGTLVTVSS

SEQ ID NO: 5713 - protein, 121 aa, Artificial Sequence
  Synthetic construct
EVQLVESGGGLIQPGGSLRLSCAASGFTVSNNFMSWVRQAPGKGLEWVSLIYSGGATYYADSVKGRFTISRDHPKNTMYLQMNSLTVEDTAVYYCARGPTVPLPGPPLGYWGQGTLVTVSS

SEQ ID NO: 5714 - protein, 125 aa, Artificial Sequence; identical to SEQ ID NO: 5711
  Synthetic construct

SEQ ID NO: 5715 - protein, 129 aa, Artificial Sequence
  Synthetic construct
QITLKESGPTLVKPTQTLTLTCTFSGFSLSTSGVGVGWIRQPPGKALEWLALIYWDDDKRYSPSLKSRLTITKDTSKNQVVLTMTNMDPVDTATYYCAHSESWYSAMVRGVIRTHFDYWGQGTLVTVSS

SEQ ID NO: 5716 - protein, 122 aa, Artificial Sequence
  Synthetic construct
QVQLVQSGAEVKKPGASVKVSCKASGYTFTTYYMHWVRQAPGQGLEWMGIINPSGGSTNYAQQFQGRVTMTRDTSTSTVYMELSSLRSEDTAVYYCARDKGTVVRASGFDPWGQGTLVTVSS

SEQ ID NO: 5717 - protein, 121 aa, Artificial Sequence
  Synthetic construct
QVQLQESGPGLVKPSGTLSLTCTVSGGSLSTFYWSWLRQPPGKGLEWIGYSFHNGITKYNPSLKSRVTISVDTSKNQFSLKLSSMTAADTAVYYCARGGDYDSSAYAFDYWGQGTLVTVSS

SEQ ID NO: 5718 - protein, 123 aa, Artificial Sequence; identical to SEQ ID NO: 5437
  Synthetic construct

SEQ ID NO: 5719 - protein, 123 aa, Artificial Sequence; identical to SEQ ID NO: 5437
  Synthetic construct

SEQ ID NO: 5720 - protein, 122 aa, Artificial Sequence
  Synthetic construct
QVTLRESGPALVKPTQTLTLTCTFSGFALSTSGMCVSWIRQSPGKALEWLARIDWDDSKFYSTSLRTRLAISRDTSENQVVLTMTNMGLVDTATYYCARSDHFNRSPVLDYWGQGTLVTVSS

SEQ ID NO: 5721 - protein, 129 aa, Artificial Sequence
  Synthetic construct
QVQLVQSGAEVKRPGASVKVSCKASGYTFTDHHMHWMRQAPGQGPEWMGHMNSNSGGTSYAQKFQGRVTLTRDTSISTAYMELTSLRSDDTAMYYCVRGGPINYVSDSHYNEHPPFAYWGQGTLVTVSS

SEQ ID NO: 5722 - protein, 124 aa, Artificial Sequence
  Synthetic construct
QVQLVQSGAEVKKPGSSVKVSCKASRGTFISYGFSWVRQAPGQGLEWMGRIIPVLEIANYAQKFQGRVTIIADKSTSTAYMEVSSLTSEDTAVYYCARDLWDGSSLSTNYFDYWGQGTLVTVSS

SEQ ID NO: 5723 - protein, 129 aa, Artificial Sequence
  Synthetic construct
QVQLVQSGAEVKRPGASVKVSCKASGYTFTDHHIHWMRQAPGQGPEWMGHMYSNSGATSYAQKFQGRVTLTRDTSISTAYMELTSLRSDDTAMYYCVRGGPIKYVSDSHYNERPPFAYWGQGTLVTVSS

SEQ ID NO: 5724 - protein, 124 aa, Artificial Sequence; identical to SEQ ID NO: 5439
  Synthetic construct

SEQ ID NO: 5725 - protein, 121 aa, Artificial Sequence
  Synthetic construct
QVQLQESGPGLVKPSETLSVTCTVSGGSLSTYYWSWLRQPPGKGLEWIGYIFHSGNANKNPSLKSRLTLSVDTSKKQFSLRLSSVTAADTAVYYCARGGDYDTSGYALDYWGQGTLVTVSA

SEQ ID NO: 5726 - protein, 124 aa, Artificial Sequence; identical to SEQ ID NO: 5439
  Synthetic construct

SEQ ID NO: 5727 - protein, 124 aa, Artificial Sequence
  Synthetic construct
QVQLQQWGAGLLKPSETLSLTCAVYGGSFSGYYWSWIRQPPGKGLEWIGEINHSGSTNYNPSLKSRVTISVDTSKNQFSLKLSSVTAADTAVYYCARRRITMVRGVSPNWFDPWGQGTLVTVSS

SEQ ID NO: 5728 - protein, 124 aa, Artificial Sequence
  Synthetic construct
EVQLVESGGGLVQPGGSLRLSCAASGFTFSNYWMSWVRQAPGKGLEWVANIKQDGSEKYYVDSVKGRFTISRDNAKKSVYLQMDSLRAEDTAVYYCARDVLFGWFGESDAFDIWGQGTMVSVSS

SEQ ID NO: 5729 - protein, 122 aa, Artificial Sequence
  Synthetic construct
QVQLQESGPGLVKPSQTLSLTCTVSGGSISSGSYYWSWIRQPAGKGLEWIGRIYTSGSTNYNPSLKSRVTISVDTSKNQFSLKLSSVTAADTAVYYCARGRGLRFSPAFDIWGQGTMVTVSS

SEQ ID NO: 5730 - protein, 125 aa, Artificial Sequence
  Synthetic construct
QVQLQESGPGLVKPSETLSLTCSVSGASVSSRTFAWGWIRQPPGKGLEWIGGVFYDGTSYYKSSLQSRATIFRDTSKNHISLRLTSVTATDTAVYFCVRGLKVMSYPPTNWFDSWSQGTLVTVSS

SEQ ID NO: 5731 - protein, 132 aa, Artificial Sequence
  Synthetic construct
QVQLQESGPGLVKPSGTLSLTCAVSGGSISSSNWWSWVRQPPGKGLEWIGEIYHSGSTNYNPSLKSRVTISVDKSKNQFSLKLSSVTAADTAVYYCARHPKKGYCSSTSCYRNYYYYGMDVWGQGTTVTVSS

SEQ ID NO: 5732 - protein, 119 aa, Artificial Sequence
  Synthetic construct
QVQLQESGPGLVKPSQTLSLTCTVSGGSISSGSYYWSWIRQPAGKGLEWIGRIYTSGSTNYNPSLKSRVTISVDTSKNQFSLKLSSVTAADTAVYYCARDLRGGSYSRWGQGTLVTVSS

SEQ ID NO: 5733 - protein, 121 aa, Artificial Sequence
  Synthetic construct
QVQLMQSGPEVAKPGASVTVSCQTSGYTFTNYFIQWVRQLPGGGLEWMGIVDPKDDRTTYAPKFQDRVTMSGDTSTNRVYMALSGLTSEDSGTYFCARGPRSLGELLTDYWGQGTLVTVSS

SEQ ID NO: 5734 - protein, 121 aa, Artificial Sequence
  Synthetic construct
EVQLVESGGGLVKPGGSLRLSCAASGFTFSSYSMNWVRQAPGKGLEWVSSISSSSSYIYYADSVKGRFTISRDNAKNSLYLQMNSLRAEDTAVYYCARAYGYSSSWYVGYWGQGTLVTVSS

SEQ ID NO: 5735 - protein, 122 aa, Artificial Sequence
  Synthetic construct
GIQLVESGGGLVQPGGSLRLSCSASGFAFSNYVMHWVRQAPGRGLGYVSAISSNGGRTYYADSVKGRFTISRDNSKNTLYLQMSSLRAEDTAVYYCVKDAGGYGSGRVSDYWGQGTLVTVSS

SEQ ID NO: 5736 - protein, 121 aa, Artificial Sequence
  Synthetic construct
QVQLVQSGAEVKKPGASVKVSCKASGYTFTSYGISWVRQAPGQGLEWMGWISAYNGNTNYAQKLQGRVTMTTDTSTSTAYMELRSLRSDDTAVYYCARGGGYHRYNWFDPWGQGTLVTVSS

SEQ ID NO: 5737 - protein, 123 aa, Artificial Sequence; identical to SEQ ID NO: 5437
  Synthetic construct

SEQ ID NO: 5738 - protein, 115 aa, Artificial Sequence
  Synthetic construct
QVQVVESGGTLVKPGGSLRLSCVVSGFTFGDYFMSWIRQAPGKGLEWISFISGSGDNIYYADSVKGRFTISRDNSKNSLYLQMNSLGVEDTAIYYCASSRVFDYWGQGTLVTVSS

SEQ ID NO: 5739 - protein, 135 aa, Artificial Sequence
  Synthetic construct
QVQLVQSGAEVKKPGASVKVSCKASGYTFTSYGISWVRQAPGQGLEWMGWISAYNGNTNYAQKLQGRVTMTTDTSTSTAYMELRSLRSDDTAVYYCARDRRSIAVAGTPPRRTTYTYYYYGMDVWGQGTTVTVSS

SEQ ID NO: 5740 - protein, 124 aa, Artificial Sequence
  Synthetic construct
EVQLVESGGGLVKPGGSLRLSCAASGFTFSSYSMNWVRQAPGKGLEWVSSISSSSSYIYYADSVKGRFTISRDNAKNSLYLQMNSLRAEDTAVYYCARGVGDVVVPGKDGMDVWGQGTTVTVSS

SEQ ID NO: 5741 - protein, 121 aa, Artificial Sequence
  Synthetic construct
QVQLQESGPGLVKPSGTLSLTCAVSGGSISSSNWWSWVRQPPGKGLEWIGEIYHSGSTNYNPSLKSRVTISVDKSKNQFSLKLSSVTAADTAVYYCARGTAVAPGKAFDIWGQGTMVTVSS

SEQ ID NO: 5742 - protein, 123 aa, Artificial Sequence
  Synthetic construct
QVQLVESGGGVVQPGRSLRLSCAASGFTFSSYAMHWVRQAPGKGLEWVAVISYDGSNKYYADSVKGRFTISRDNSKNTLYLQMNSLRAEDTAVYYCARVGAERWLQFNALRYWGQGTLVTVSS

SEQ ID NO: 5743 - protein, 121 aa, Artificial Sequence
  Synthetic construct
EVQLLESGGGLVQPGGSLRLSCAASGFTFSSYAMSWVRQAPGKGLEWVSAISGSGGSTYYADSVKGRFTISRDNSKNTLYLQMNSLRAEDTAVYYCAKDARRTYYFGSFHWGQGTLVTVSS

SEQ ID NO: 5744 - protein, 121 aa, Artificial Sequence
  Synthetic construct
QVQLVESGGGVVQPGRSLRLSCAASGFTFSSYGMHWVRQAPGKGLEWVAVIWYDGSNKYYADSVKGRFTISRDNSKNTLYLQMNSLRAEDTAVYYCARDLTVTHYYGMDVWGQGTTVTVSS

SEQ ID NO: 5745 - protein, 125 aa, Artificial Sequence
  Synthetic construct
QVQLVQSGAEVKKPGASVKVSCKASGYTFTSYYMHWVRQAPGQGLEWMGIINPSGGSTSYAQKFQGRVTMTRDTSTSTVYMELSSLRSEDTAVYYCARDSEGRYYDSSGGYFDYWGQGTLVTVSS

SEQ ID NO: 5746 - protein, 124 aa, Artificial Sequence; identical to SEQ ID NO: 5592
  Synthetic construct

SEQ ID NO: 5747 - protein, 119 aa, Artificial Sequence
  Synthetic construct
QVQLVQSGAEVRKPGASVKVSCTASGDGFTSYYMHWVRQAPGQGLEWMGIMNPSDGAATSAQNFQDRVTMTRDTSSSTVYMELSSLRSDDTAVYYCAGSDWYPYYFDYWGQGTLVTVSS

SEQ ID NO: 5748 - protein, 125 aa, Artificial Sequence
  Synthetic construct
EVQLVESGGGLVKPGGSLRLSCAASGFTFSSYSMNWVRQAPGKGLEWVSSISSSSSYIYYADSVKGRFTISRDNAKNSLYLQMNSLRAEDTAVYYCAREGRAVRGVMGGYYFDYWGQGTLVTVSS

SEQ ID NO: 5749 - protein, 124 aa, Artificial Sequence
  Synthetic construct
QVQLVQSGAEVKKPGASVKVSCKASGYTFTSYGISWVRQAPGQGLEWMGWISAYNGNTNYAQKLQGRVTMTTDTSTSTAYMELRSLRSDDTAVYYCARDLRLSPYRPSHNIDYWGQGTLVTVSS

SEQ ID NO: 5750 - protein, 136 aa, Artificial Sequence
  Synthetic construct
QVTLRESGPALVKPTQTLTLTCTFSGFSLSTSGMCVSWIRQPPGKALEWLALIDWDDDKYYSTSLKTRLTISKDTSKNQVVLTMTNMDPVDTATYYCARMKSPPRYFRYYGSGSYYEYYYYGMDVWGQGTTVTVSS

SEQ ID NO: 5751 - protein, 123 aa, Artificial Sequence
  Synthetic construct
QLQLQESGPGLVKPSESLSLTCIVSGDSIISSSSYWDWIRQPPGKGLEWIGSIYYSGSTYYNPSLKSRVTMSVDTSKNHFSLRLSFVTAADTAVYSCARRTADGRGHHYVDTWGQGTLVTVSS

SEQ ID NO: 5752 - protein, 121 aa, Artificial Sequence
  Synthetic construct
QLQLQESGPGLVKPSETLSLTCTVSGGSISSGSDYWGWIRQSPGKGLEWIGNIFYGGTTSYNPSLKSRVTISVDRSKNQFSLRATSLTAADTAVYYCARQTGHYYYTMDVWGQGTTVTVSS

SEQ ID NO: 5753 - protein, 123 aa, Artificial Sequence; identical to SEQ ID NO: 5437
  Synthetic construct

SEQ ID NO: 5754 - protein, 123 aa, Artificial Sequence
  Synthetic construct
EVHLVESGGGLVQPGESLRLSCVASGFTFSNYWMHWVRQVPGKGLVWLSHIKDDGSTTNYADSVKGRFTISRDNAKNTLYLQMSSLRAEDTAVYYCVRGGGKMLGAIPKVDYWGQGTLVTVSS

SEQ ID NO: 5755 - protein, 120 aa, Artificial Sequence; identical to SEQ ID NO: 5494
  Synthetic construct

SEQ ID NO: 5756 - protein, 120 aa, Artificial Sequence
  Synthetic construct
QVQLQESGPGLVKPSETLSLTCSVSGGSITESYWNWIRQAAGKGLQWIGRFYISGSTTYNPALKSRVTISADTSQNQFSLRLTSVTAADTAVYYCARGPYGDPDDHFDHWGQGTLVTVSS

SEQ ID NO: 5757 - protein, 119 aa, Artificial Sequence
  Synthetic construct
QVQLVESGGGVVQPGKSLRLSCAASGFTFSSSALHWVRQAPVKGLEWVGIVSYDGSNQFYADSVKGRFTISRDNSKNTLYLQMNSLRTDDTAVYYCARGGDGGNSLDYWGQGALVTVDS

SEQ ID NO: 5758 - protein, 114 aa, Artificial Sequence
  Synthetic construct
AIQLLESGGDLVQPGGSLRLSCLTSGFTFSNYPMHWVRQIPGKGLEWVSTVDQTGSESQFLDSVRGRFSISRDNAKNTLYLQMDSLGPEDTARYYCTTEGLDYWGRGALVTVSS

SEQ ID NO: 5759 - protein, 127 aa, Artificial Sequence
  Synthetic construct
QVQLVQSGAEVKKPGSSVKVSCKASGGTFSSYAISWVRQAPGQGLEWMGRIIPILGIANYAQKFQGRVTITADKSTSTAYMELSSLRSEDTAVYYCAREESTRSSSWYYYYYGMDVWGQGTTVTVSS

SEQ ID NO: 5760 - protein, 118 aa, Artificial Sequence
  Synthetic construct
EVQLVESGGDLVQPGGSLRLSCGVSGLTFSGYWMSWVRQAPGKGLEWVANIKPDGTVKYYVDAVKGRFTVYRDNAQTSLYLQMNSLRAEDTAVYYCARERDSAWFDPWGQGTLVAVSS

SEQ ID NO: 5761 - protein, 123 aa, Artificial Sequence
  Synthetic construct
EVQLVESGGGLVKPGGSLRLSCAASGFTFSSYSMNWVRQAPGKGLEWVSSISSSSSYIYYADSVKGRFTISRDNAKNSLYLQMNSLRAEDTAVYYCARIGVRDPYYYYGMDVWGQGTTVTVSS

SEQ ID NO: 5762 - protein, 127 aa, Artificial Sequence; identical to SEQ ID NO: 5678
  Synthetic construct

SEQ ID NO: 5763 - protein, 131 aa, Artificial Sequence
  Synthetic construct
QVQLQESGPGLVKPSQTLSLTCTVSGGSISSGGYYWSWIRQHPGKGLEWIGYIYYSGSTYYNPSLKSRVTISVDTSKNQFSLKLSSVTAADTAVYYCARGHRENYYGSGSYYKRGYYFDYWGQGTLVTVSS

SEQ ID NO: 5764 - protein, 124 aa, Artificial Sequence
  Synthetic construct
QVQVQQWGAGLLKPSETLSLTCAVYGGSFSGYSWSWIRQPPGKGLEWIGEINHSGSTSYNPSLKSRVTISLDTSKNQFSLKLSSVTAADTGVYYCARGKGSVVAPVPIKAFAPWGQGTLVTVSS

SEQ ID NO: 5765 - protein, 128 aa, Artificial Sequence
  Synthetic construct
QLQLQESGPGLVKPSETLSLTCTVSGGSISSSSYYWGWIRQPPGKGLEWIGSIYYSGSTYYNPSLKSRVTISVDTSKNQFSLKLSSVTAADTAVYYCARHVGEYSSSWYFYYYGMDVWGQGTTVTVSS

SEQ ID NO: 5766 - protein, 120 aa, Artificial Sequence
  Synthetic construct
EVHLVESGGGLVQPGGSLRLSCEASEFTFSDYWMTWVRQAPGKGLEWVATIQRDGSEKYYVDSVKGRFTISRDNAKNSLFLQMNSLRVEDTAIYYCSRAIDSGTVAGDYWGQGTLVTVSS

SEQ ID NO: 5767 - protein, 123 aa, Artificial Sequence
  Synthetic construct
QVQLQESGPGLVKPSQTLSLTCTVSGGSINSGYYWSWIRQSAGKGLEWIGRMYPTGGTKYNPSLKSRVTMSADTSKSQFSLTMTSVTAADTAVYYCARSVVRGAIMSDYFDLWGQGNLVTVSS

SEQ ID NO: 5768 - protein, 125 aa, Artificial Sequence
  Synthetic construct
QVQLQESGPGLVKPSQTLSLTCTVSGGSISSGSYYWSWIRQPAGKGLEWIGRIYTSGSTNYNPSLKSRVTISVDTSKNQFSLKLSSVTAADTAVYYCARDPNGSGSYYMSWFDPWGQGTLVTVSS

SEQ ID NO: 5769 - protein, 122 aa, Artificial Sequence
  Synthetic construct
EVQLVQSGAEVKKPGESLRISCKGSGYSFTSYWISWVRQMPGKGLEWMGRIDPSDSYTNYSPSFQGHVTISADKSISTAYLQWSSLKASDTAMYYCARRRGGDYGGNLFDYWGQGTLVTVSS

SEQ ID NO: 5770 - protein, 121 aa, Artificial Sequence
  Synthetic construct
EVQLLESGGGLVQPGGSLRLSCAASGVIFSSYAMSWVRQAPGKGLEWVSTISGSGGSTYYADSVKGRFTISRDNSKNTLYLQMNSLRAEDTAVYYCATDLQPYASGGSPPWGQGTLVTVSS

SEQ ID NO: 5771 - protein, 129 aa, Artificial Sequence
  Synthetic construct
QVQLQESGPGLVKPSQTLSLTCTVSGGSISSGSYYWSWIRQPAGKGLEWIGRIYFSGSTNYNPSLKSRATISVDTSNNQFSLKLSSVTAADTAVYYCARDLYEQLVAGEYYHYYGMDVWGQGTTVSVSS

SEQ ID NO: 5772 - protein, 127 aa, Artificial Sequence
  Synthetic construct
QVQLVESGGGVVHPGRSLRLSCAASGFSFSIYTMHWVRQAPGKGLEWVAVISYDGGTKYYTDPVKGRFTISRDNSTDTLFLQMDSLRVEDTAVYYCARDPTRRWFTRSTRQYYLDSWGQGTLVTVSS

SEQ ID NO: 5773 - protein, 120 aa, Artificial Sequence
  Synthetic construct
EVQLVESGGGLVKPGRSLRLSCTASGFTFGDYAMSWFRQAPGKGLEWVGFIRSKAYGGTTEYAASVKGRFTISRDDSKSIAYLQMNSLKTEDTAVYYCTRRSRSGIDDYWGQGTLVTVSS

SEQ ID NO: 5774 - protein, 126 aa, Artificial Sequence
  Synthetic construct
QVQLQESGPGLVKPSQTLSLTCTVSGGSISSGSYYWSWIRQPAGKGLEWIGRIYTSGSTNYNPSLKSRVTISVDTSKNQFSLKLSSVTAADTAVYYCARVSLPAAAPRGPGIAVYWGQGTLVTVSS

SEQ ID NO: 5775 - protein, 121 aa, Artificial Sequence
  Synthetic construct
QPQLVQSGPELKKPGAPVKVSCKVSGYTFNTYGISWVRQAPGQGLEWVGWVSGFNGNTNYAQKFQGRVTMTIDTSTNTAFMELRSLTSDDTAVYFCARDYRVPGNYGMDVWGQGTTVTVSS

SEQ ID NO: 5776 - protein, 123 aa, Artificial Sequence
  Synthetic construct
EVQLLESGGGLVQPGGSLRLSCAASGFSFSSYAMSWVRQAPGKGLEWVSAISDSGGSTYYAGSMKGRFTVSRDNSKNTLYLQMNSLRVDDTAVYNCAKVLSWAVVPLNAFDSWGQGTMVTVSS

SEQ ID NO: 5777 - protein, 123 aa, Artificial Sequence; identical to SEQ ID NO: 5463
  Synthetic construct

SEQ ID NO: 5778 - protein, 122 aa, Artificial Sequence
  Synthetic construct
QVQLVQSGAEVKKPGASVKVSCKASGYTFTGYYMHWVRQAPGQGLEWMGWINPNSGGTNYAQKFQGRVTMTRDTSISTAYMELSRLRSDDTAVYYCARGRRGSFKTYYFDYWGQGTLVTVSS

SEQ ID NO: 5779 - protein, 120 aa, Artificial Sequence
  Synthetic construct
EGQVVQSGGGSIQPGGSLRLSCAASGFSVNTLYMTWVRQAPGNGLQWVSVIYSGGSTYYADSVKGRFIISRDNSKNTVYLQMNNLRVEDTAVYYCARGGRGRATAGMDVWGPGTTVTVSS

SEQ ID NO: 5780 - protein, 128 aa, Artificial Sequence
  Synthetic construct
QLQLQESGPGLVKPSETLSLTCTVSGGSISSSSYYWGWIRQPPGKGLEWIGSIYYSGSTYYNPSLKSRVTISVDTSKNQFSLKLSSVTAADTAVYYCARQYKGRSGGNAARGSLIDYWGQGTLVTVSS

SEQ ID NO: 5781 - protein, 124 aa, Artificial Sequence
  Synthetic construct
EVQLVESGGGLVKPGGSLRLSCAASGFTFSSYSMNWVRQAPGKGLEWVSSISSSSSYIYYADSVKGRFTISRDNAKNSLYLQMNSLRAEDTAVYYCARAARRYYDKNKVAFDIWGQGTMVTVSS

SEQ ID NO: 5782 - protein, 120 aa, Artificial Sequence
  Synthetic construct
EVQLVESGGGLVQTGGSLTLSCAGSGFTFSVYAMNWVRQAPGKGLEWISYISGSSNMKFYADSVKGRFTVSRDNAKNSLYLQMDSLRDEDTAVYYCARDALGMLGDEDSWGQGTQVTVSS

SEQ ID NO: 5783 - protein, 124 aa, Artificial Sequence; identical to SEQ ID NO: 5592
  Synthetic construct

SEQ ID NO: 5784 - protein, 124 aa, Artificial Sequence; identical to SEQ ID NO: 5439
  Synthetic construct

SEQ ID NO: 5785 - protein, 124 aa, Artificial Sequence
  Synthetic construct
QVQLVQSGAEVKKPGASVKVSCKASGYTFTSYGISWVRQAPGQGLEWMGWISAYNGNTNYAQKLQGRVTMTTDTSTSTAYMELRSLRSDDTAVYYCARGVRDSSGYYYNDFQHWGQGTLVTVSS

SEQ ID NO: 5786 - protein, 123 aa, Artificial Sequence; identical to SEQ ID NO: 5437
  Synthetic construct

SEQ ID NO: 5787 - protein, 129 aa, Artificial Sequence
  Synthetic construct
QVQLVESGGGVVQPGRSLRLSCAASGFTFSSYGMHWVRQAPGKGLEWVAVIWYDGSNKYYADSVKGRFTISRDNSKNTLYLQMNSLRAEDTAVYYCARDFRPTSYCSSTSCYLLPQDYWGQGTLVTVSS

SEQ ID NO: 5788 - protein, 118 aa, Artificial Sequence
  Synthetic construct
QVQLVESGGGVVQPGKSLRLSCAASGFTFRNYGMYWVRQAPGKGLECVAFISFDGSNKYYADSVKGRFTISRDNSKNTLYLHIKSLRPEDTAVYYCPLIAAAQPWDFWGQGTLVTFSS

SEQ ID NO: 5789 - protein, 123 aa, Artificial Sequence
  Synthetic construct
EVQLSESGGGLVQPGESLRLSCAASGFSFSSSVMSWVRQAPGKGLEWVSIISDNAGSIYYADSVKGRFTISRDNSRNTLSLQMNSLRAEDTAVYYCAKGVGSTPPTSRYLDYWGQGALVTVSS

SEQ ID NO: 5790 - protein, 120 aa, Artificial Sequence
  Synthetic construct
QEQLQESGPGLVKPSETLSLTCTVSGGSTSFYYWNWIRQPPGKGLEWIGYIYYSGSTNYNPSLKSRVIMSVDTSKNQFSLKLSSVTAADTAVYYCARTGYYDSSGYLDIWGQGTMVTVSS

SEQ ID NO: 5791 - protein, 124 aa, Artificial Sequence; identical to SEQ ID NO: 5439
  Synthetic construct

SEQ ID NO: 5792 - protein, 120 aa, Artificial Sequence
  Synthetic construct
QVQLVQSGAEVKKPGSSVKVSCKASGNTFSSYTINWVRLAPGQGLEWMGRIIPIVGIANYAQKFQGRVTITADKSTSTAYMELNSLRSEDTAVYYCARVGGKSPWYFDLWGRGTLVTVSS

SEQ ID NO: 5793 - protein, 131 aa, Artificial Sequence
  Synthetic construct
EVQLVQSGAEVKKPGEYLKISCKASGYRFFGHWIGWVRQMPGKGLEWMGIIYPDDSDTRYSPSFQGQVTMSADKSISTTYLQWSSLQASDTATYYCARLGGTYYDTLTGDPYYFFYGMDVWGQGTTVTVSS

SEQ ID NO: 5794 - protein, 123 aa, Artificial Sequence
  Synthetic construct
QLQLQESGPGLVKPSETLSLTCTVSGGSISSSSYYWGWIRQPPGKGLEWIGSIYYSGSTYYNPSLKSRVTISVDTSKNQFSLKLSSVTAADTAVYYCARHVLLGVVPAAIDYWGQGTLVTVSS

SEQ ID NO: 5795 - protein, 123 aa, Artificial Sequence; identical to SEQ ID NO: 5437
  Synthetic construct

SEQ ID NO: 5796 - protein, 120 aa, Artificial Sequence; identical to SEQ ID NO: 5575
  Synthetic construct

SEQ ID NO: 5797 - protein, 125 aa, Artificial Sequence
  Synthetic construct
QVQLQESGPGLVKPSETLSLTCTVSGDSITSYYWSWIRQPPGKGLEWIGWIFYSGRTNYNSSLKSRATISVDTSKNQLSLKLSSVTAADTAVYYCARDRGVGSWHNYHYYGMDVWGQGTTVIVSS

SEQ ID NO: 5798 - protein, 124 aa, Artificial Sequence
  Synthetic construct
EVQLVESGGGLIQPGGSLRLSCAASGFTVSSNYMSWVRQAPGKGLEWVSVIYSGGSTYYADSVKGRFTISRDNSKNTLYLQMNSLRAEDTAVYYCARAICSTDSGIRSCAFDIWGQGTMVTVSS

SEQ ID NO: 5799 - protein, 124 aa, Artificial Sequence
  Synthetic construct
EVQLLESGGGLVQPGGSLRLSCAASGFTFSTYAMTWVRQAPGKGLEWVATISGSGGSTHYPDSVKGRFTISRDYSKNTLYLQMNSLRAEDTAVYYCAKDALYSGSYYEGVFDYWGQGALVTVSS

SEQ ID NO: 5800 - protein, 122 aa, Artificial Sequence
  Synthetic construct
QAQLVESGGGVVQPGRSLRLSCAASGFIFSSYAMHWVRLAPGKGLEWVAVTSYDGSNGYYADSVKGRFIISRDNSKNTLYLQMNSLRPEDTAVYYCARDPKYSGDYGLRFYWGQGTLVTVSS

SEQ ID NO: 5801 - protein, 120 aa, Artificial Sequence
  Synthetic construct
QITLKESGPTLVKPTQTLTLTCTFSGFSLSTSGVGVGWIRQPPGKALEWLALIYWDGDKRYSPSLKSRLTITKDTSKNQVVLTVTNMDPVDTATYYCAHSNSLPPNFDYWGQGTLVTVSS

SEQ ID NO: 5802 - protein, 79 aa, Artificial Sequence
  Synthetic construct
KGLDWLSYITNTGRTIYYADSVKGRFTISRDNAENSLYLHMSSLKDDDAAVYFCARVGDGGYGPNFDHWGQGTVVSVSS

SEQ ID NO: 5803 - protein, 128 aa, Artificial Sequence
  Synthetic construct
EVQLVESGGGLVQPGGSLRLSCAASGFTFSSYSMNWVRQAPGKGLEWVSYISSSSSTIYYADSVKGRFTISRDNAKNSLYLQMNSLRDEDTAVYYCARDRAQYSSGWGRVYYYGMDVWGQGTTVTVSS

SEQ ID NO: 5804 - protein, 127 aa, Artificial Sequence
  Synthetic construct
QVQLVESGGGVVQPGRSLRLSCAASGFTFRSYGMHWVRQAPGKGLEWVAIIWFDGSKEYYADSVKGRFTISRDNSNNTLYLQMNNLRAEDTGVYYCARGKNLVVIPAADYGSWFDPWGQGTLVTVSS

SEQ ID NO: 5805 - protein, 122 aa, Artificial Sequence
  Synthetic construct
EVQLVQSGAEMKKPGATVKISCKVSGYTFTDYYMHWVQQAPDKGLEWMGLVDPEDGETKYAEKFQGRVTITADTSTDTAYMELSSLTSGDTAVYYCAADGRNWKSLEVLDVWGQGTTVTVSS

SEQ ID NO: 5806 - protein, 122 aa, Artificial Sequence
  Synthetic construct
EVQLVESGGGLVKPGGSLRLSCAASGFTFSDAWMRWVRQAPGKGPEWVGRIKSETDGGTTDYAAPVKGRFTISRDDSRNMLYLQMNSLTTEDTAVYYCTTRYKWNVDHSDYWGQGTLVTVSS

SEQ ID NO: 5807 - protein, 125 aa, Artificial Sequence
  Synthetic construct
EVQLLESGGGLVQPGGSLRLSCAASGFTFSSYAMSWVRQAPGKGLEWVSAISGSGGSTYYADSVKGRFTISRDNSKNTLYLQMNSLRAEDTAVYYCAKDRRYCSSTSCYFPFDYWGQGTLVTVSS

SEQ ID NO: 5808 - protein, 127 aa, Artificial Sequence
  Synthetic construct
QVQLQESGPGLVKPSETLSLTCTVSSDSFEGYFWTWVRQPPGMGLEWIGYSYHSGSTNYNPSLGSRVTISVDTSKKQFSLKLTSVTAADTAVYFCARDAPVIRVETGMVTNRIFDSWGQGTLVTVSS

SEQ ID NO: 5809 - protein, 124 aa, Artificial Sequence
  Synthetic construct
QVQLVQSGAEVKKPGASVKVSCEASGYPFTDYFLHWVRQAPGQGLEWMGWINPNSGATHYARKFQGTVSLTRDTSVSKAYMELSSLTSVDTAVYFCARAEVPPDYSDHVYFQHWGQGSLITVSS

SEQ ID NO: 5810 - protein, 119 aa, Artificial Sequence
  Synthetic construct
QVQLQESGPGLVKPSETLSLTCTVSGGSISSYYWSWIRQPAGKGLEWIGRIYTSGSTNYNPSLKSRVTMSVDTSKNQFSLKLSSVTAADTAVYYCARGGRYSSSWLSSWGQGTLVTVSS

SEQ ID NO: 5811 - protein, 120 aa, Artificial Sequence
  Synthetic construct
EVHLVESGGGLAQPGGSLRLSCAASGFTFSSYNMNWVRQAPGKGLEWISYISSSSDTIYYADSVKGRFTISRDNAKNSLLLQMSSLRDEDTAVYYCTRDSGRGGSWFDYWGQGALVTVSS

SEQ ID NO: 5812 - protein, 123 aa, Artificial Sequence
  Synthetic construct
EVQLVESGGGLVKPGGSLRLSCAASGFTFSSYSMNWVRQAPGKGLEWVSSISSSSSYIYYADSVKGRFTISRDNAKNSLYLQMNSLRAEDTAVYYCARDLRSLTRGYSLYDYWGQGTLVTVSS

SEQ ID NO: 5813 - protein, 130 aa, Artificial Sequence
  Synthetic construct
QVQLVQSGAEVKKPGASVKVSCKASGYTFTSYYMHWVRQAPGQGLEWMGIINPSGGSTSYAQKFQGRVTMTRDTSTSTVYMELSSLRSEDTAVYYCARDARYCSSTSCYRPDYYYGMDVWGQGTTVTVSS

SEQ ID NO: 5814 - protein, 120 aa, Artificial Sequence
  Synthetic construct
EVQLVESGGGLVQPGGSLRLSCAASGFTVSSNYMSWVRQAPGKGLEWVSVIYSGGSTYYADSVKGRFTISRDNSKNTLYLQMNSLRAEDTAVYYCASARFRAARPIFDYWGQGTLVTVSS

SEQ ID NO: 5815 - protein, 118 aa, Artificial Sequence
  Synthetic construct
QVQLVEAGGGVVQPGESLKLACVVSGFNLGSYGMHWVRQAPGKGLEWVSTVWYSGETKYYAGSVKGRFSISRDNPKKTVHLQMNNLGLGDTAVYYCVRGEGLGHIDLWGQGTLVTVSS

SEQ ID NO: 5816 - protein, 123 aa, Artificial Sequence
  Synthetic construct
QVQLQESGPGLVKPSETLSLTCTVSGGSISSYYWSWIRQPPGKGLEWIGYIYYSGSTNYNPSLKSRVTISVDTSKNQFSLKLSSVTAADTAVYYCARGLRWFPFERYNWFDPWGQGTLVTVSS

SEQ ID NO: 5817 - protein, 117 aa, Artificial Sequence
  Synthetic construct
QVQLVESGGGVVQPGRSLRLSCTASGFTFRFSAMHWVRQAPGKGLEWVAVISDDGGNKDFADSVKGRFTISRDNSKNTLYLQMNSLGGDDTAVYYCATPVVERRDYWGQGTLVTVSS

SEQ ID NO: 5818 - protein, 118 aa, Artificial Sequence
  Synthetic construct
EVQLVESGGGLVKPGGSLRLSCTASEFAFSDYTMNWVRQAPGKGLEWVSSISGRSTYIYYADSVKGRFTVSRDNAKNSLYLQMNSLRAEDTAVYYCVSKNNFHWFDRWGQGTLVTVSS

SEQ ID NO: 5819 - protein, 127 aa, Artificial Sequence
  Synthetic construct
EVQLLDSGGGLVQPGGSLRLSCAASGFTFSSYAMSWLRQAPGKGLEWVSSISGSGGTTYYADSVKGRFTISRDHSKNTLYLQMNSLRADDTAVYYCAKDRAPPNIYDSSGRYYFDSWGQGTLVTVSS

SEQ ID NO: 5820 - protein, 119 aa, Artificial Sequence
  Synthetic construct
QVQLVESGGGVVQPGRSLRLSCAASGFTFSSYAMHWVRQAPGKGLEWVAVISYDGSNKYYADSVKGRFTISRDNSKNTLYLQMNSLRAEDTAVYYCARDVARGDGMDVWGQGTTVTVSS

SEQ ID NO: 5821 - protein, 118 aa, Artificial Sequence
  Synthetic construct
QLQLVESGGGLVQPGGSLRLSCAASGFTFNKFWMTWVRQAPGKGLEFVANIKDGGDVKHYGGSVKGRFTISRDNTKNSLHLQMTGLRADDTGIYYCALLLNKNGVDVWGQGTTVSVSS

SEQ ID NO: 5822 - protein, 126 aa, Artificial Sequence
  Synthetic construct
EVQLVQSGAEVKKPGESLRISCKGSGYSFTSYWISWVRQMPGKGLEWMGRIDPSDSYTNYSPSFQGHVTISADKSISTAYLQWSSLKASDTAMYYCARLMGYYGSGSYYSNWFDPWGQGTLVTVSS

SEQ ID NO: 5823 - protein, 128 aa, Artificial Sequence
  Synthetic construct
QVHLVESGGGVVQPGGSLRLSCAPSGFTFRTYTMHWVRQAPGKGLEWVAVVSNDGYIKYYADSVKGRFAISRDNSENILYLQMNSLRVEDTAVYYCARGVAKRGGEYCSSTSCRLDPWGQGTLVTVSS

SEQ ID NO: 5824 - protein, 123 aa, Artificial Sequence
  Synthetic construct
EVQLVEIGGGLVQPGGSLGLSCSASGFTFSRWAMHWVRQAPGKGLEYVAAISNNGDNTDYADSVKGRFRISRDNSENTLYLQMSSLRVEDTAVYYCVKDLGWRSIAADGGDYWGQGTLVTVSS

SEQ ID NO: 5825 - protein, 121 aa, Artificial Sequence
  Synthetic construct
EVQLVESGGGLVKPGGSLRLSCAASGFIFDNAWMSWVRQAPGKGLEWVGRIKTTTDGGTTDYAAPVQGRFTISRDDSKNTLYLQMNSLRTEDTAVYYCTTFAGWRSYFDYWGQGTLVTVSS

SEQ ID NO: 5826 - protein, 122 aa, Artificial Sequence
  Synthetic construct
EVQLLESGGGLVQPGGSLRLSCAASGFTFSSYAMSWVRQAPGKGLEWVSAISGSGGSTYYADSVKGRFTISRDNSKNTLYLQMNSLRAEDTAVYYCAKVAAKYSSSSHIDYWGQGTLVTVSS

SEQ ID NO: 5827 - protein, 118 aa, Artificial Sequence
  Synthetic construct
QVQLQQWGAGLLKPSETLSLTCAVYVGSFTGYYWTWIRQPPGKGLEWIGEINHTGSTNYNPSLRSRVTISLDRSNNQYSLKVSSVTAADTAVYYCARAWERKQWLDSWGQGTQVTVSS

SEQ ID NO: 5828 - protein, 125 aa, Artificial Sequence; identical to SEQ ID NO: 5711
  Synthetic construct

SEQ ID NO: 5829 - protein, 129 aa, Artificial Sequence
  Synthetic construct
QVQLVESGGGVVQPGRSLRLSCAASGFTFSSYAMHWVRQAPGKGLEWVAVISYDGSNKYYADSVKGRFTISRDNSKNTLYLQMNSLRAEDTAVYYCARRPYTASGSSSLVYYYYGMDVWGQGTTVTVSS

SEQ ID NO: 5830 - protein, 126 aa, Artificial Sequence
  Synthetic construct
EVQLVESGGGLVKPGGSLRLSCAASGVSFSTYNMNWVRQAPGKGLEWVSYISSTSSYIYYADSVKGRFTISRDNARKSVYLQMDSLGAEDTAVYYCARVGGGSEWYNSGWFSFDSWGQGTLVTVSS

SEQ ID NO: 5831 - protein, 116 aa, Artificial Sequence
  Synthetic construct
EVLLVESGGGLVQPGGSLRLSCVASGFMFSGYTMNWVRQAPGRGLEWVSYISGSSNTKYYADFAKGRFTISRDNAKNSVHLQMNSLRDDDTAVYYCTRDGGTYPYWGQGTRVTVSA

SEQ ID NO: 5832 - protein, 121 aa, Artificial Sequence
  Synthetic construct
QVQLVQSGSELKKPGASVKVSCWASGYTFTTYALNWVRQAPGQGLEWLGWINTNTGNPTYARGFTERFVFSLDTSITTAYLEISSLTPDDTATYHCARSGHDREMAAIDYWGQGTLVTVSS

SEQ ID NO: 5833 - protein, 118 aa, Artificial Sequence
  Synthetic construct
EVQVLESGGGLVQPGGSLRLSCAASGFTFSSYAMAWIRQAPGKGLEWVSTISGTTYYADSVKGRFTISRDNSKNTVYLQMDSLRADDTAVYYCAKDRSVRGVITPDYWGQGTLVTVSS

SEQ ID NO: 5834 - protein, 127 aa, Artificial Sequence
  Synthetic construct
EVQLVESGGGLVEPGGSLRLSCAASGFAFGNYAMNWVRQAPGKGLEWVSGLSGSGRGTYYADSLKGRLIISRDNSKSTVSLHMNSLRDEDTAIYYCVKDFHAGGASYDFWSGLFDRWGQGTLVTVSP

SEQ ID NO: 5835 - protein, 125 aa, Artificial Sequence
  Synthetic construct
QEQLVESGGGVVQPGRSLRLSCAASGFTFNTYTMHWVRQAPGRGLEWVAVISDDGYNKDYADSVKGRFTISRDNSQKKLYLEMRSLRAEDTAVFYCARDSRSNEYFYFYYGMDVWGQGTTVTVSS

SEQ ID NO: 5836 - protein, 124 aa, Artificial Sequence
  Synthetic construct
QVQLQESGPGLVNPSQTLSLTCTVSGGSISSDSYYWSWIRQPPGEGLQWIGCIYYSGSTYYNPSLRSRVTISVDTSKNQFSLELNSVTAADTAVYYCATDHHFDWLDYNWFDPWGQGTLVTVSS

SEQ ID NO: 5837 - protein, 125 aa, Artificial Sequence
  Synthetic construct
QVQLVESGGNLVKPGGSLRLSCAASGFTFNDFYLSWIRQAPGKGLEWISYIGSSSRYIHNSDSVKGRFSISRDNAKNSVYLQMSTLRTEDTAVYYCARGVKWFGDPAAVWSLDIWGRGTTVTVSS

SEQ ID NO: 5838 - protein, 127 aa, Artificial Sequence
  Synthetic construct
EVQLVQSGAEVKMPGESLKISCKGSGYSFTSYWIGWVYQLPGKDLEWMGIIHPGDSDTRYSPSFQGQVTISADKSISTAYVQWSNLKASDTAMYYCARLRAQGQYDFWSADFYFDYWGQGTLVTVSS

SEQ ID NO: 5839 - protein, 121 aa, Artificial Sequence
  Synthetic construct
QAQLVQSGGGVVQPGRSLRLSCVTSGFGFINFGLHWVRQAPGKGLEWVAVISDDGTNEYYADSVKGRFSISRDSSRTTLSLQMNSLRGEDTAVYYCVKDIGTTTSPPLDSWGQGTLVTVSS

SEQ ID NO: 5840 - protein, 121 aa, Artificial Sequence
  Synthetic construct
QAQLVQSGAEVKKPGASVKVSCKASGYSFTNHYIHWVRQAPGQGLEWMGIMKTNGDIASYEQRFQGRLVISSDTSTRTIFLELSSLRSGDTAVYYCARGYGSDWRDAFDLWGKGTLVTVSS

SEQ ID NO: 5841 - protein, 124 aa, Artificial Sequence
  Synthetic construct
EMILAQSGGIAVQPGGSHRLSCEASGFMFGDYSMHWVRQVPGKGLEWVSLISWDTGKIFYSDSVRGRFTVSRDNNKNSLFLQMTNLKPEDSALYFCAKDLEAAAPIYHSALDLWGQGTVVTVSS

SEQ ID NO: 5842 - protein, 126 aa, Artificial Sequence
  Synthetic construct
EVQLLESGGGLVQPGGSLRLSCAASGFTFSSYAMSWVRQAPGKGLEWVSAISGSGGSTYYADSVKGRFTISRDNSKNTLYLQMNSLRAEDTAVYYCAKEGYQLLTGYSSGRLFDYWGQGTLVTVSS

SEQ ID NO: 5843 - protein, 126 aa, Artificial Sequence
  Synthetic construct
QVQLQESGPGLVKPSGTLSLTCAVSGGSISSSNWWSWVRQPPGKGLEWIGEIYHSGSTNYNPSLKSRVTISVDKSKNQFSLKLSSVTAADTAVYYCAREPGSGSYLIYYYYGMDVWGQGTTVTVSS

SEQ ID NO: 5844 - protein, 123 aa, Artificial Sequence
  Synthetic construct
QVQLQESGPGLVKPSQTLSLTCAVSGGSISSGGHYWGWIRQRPGKGLECIGYIYYSGRTYSNPSLRGRVTISVDTSKNQFSLKLSSVTAADTAVYYCARGDYSSSWYRPFNYWGQGTLVTVSS

SEQ ID NO: 5845 - protein, 119 aa, Artificial Sequence
  Synthetic construct
QVQLQQWGAGLLKPSETLSLTCAVYGGSFSGYYWSWIRQPPGKGLEWIGEINHSGSTNYNPSLKSRVTISVDTSKNQFSLKLSSVTAADTAVYYCARRYYYGSAAFGYWGQGTLVTVSS

SEQ ID NO: 5846 - protein, 61 aa, Artificial Sequence
  Synthetic construct
YNPALKSRATISLDTSKNQFSLQLSAVTVADTAVYYCAKDHNWNDWYFDLWGRGTLVTVSS

SEQ ID NO: 5847 - protein, 122 aa, Artificial Sequence
  Synthetic construct
QVTLRESGPALVKPTQTLTLTCTFSGFSLSTSGMCVSWIRQPPGKALEWLALIDWDDDKYYSTSLKTRLTISKDTSKNQVVLTMTNMDPVDTATYYCARMAGVRYYYGMDVWGQGTTVTVSS

SEQ ID NO: 5848 - protein, 124 aa, Artificial Sequence
  Synthetic construct
EVQLVESGGGLVQPGGSLRLSCAASGFTFSSYDMHWVRQATGKGLEWVSAIGTAGDPYYPGSVKGRFTISRENAKNSLYLQMNSLRAGDTAVYYCARGGDSSGYDYYYYGMDVWGQGTTVTVSS

SEQ ID NO: 5849 - protein, 119 aa, Artificial Sequence
  Synthetic construct
EMQLVQSGPEVKKPGESLRISCSASGYRFTTSWINWVRQVPGKGLEWLGRIDPSDSYTTYSPTFEGHVIISADSSISTVFLQWNDLKASDTAIYYCAGGITFGGVHTFWGRGTLVTVSS

SEQ ID NO: 5850 - protein, 118 aa, Artificial Sequence
  Synthetic construct
EVQLVESGGGLVKPGGSLRLSCAASGFTFSDAWMSWVRQAPGKGLEWVGRIKSKTDGGTTDYAAPVKSRFTISRDDSKNTLYLQMNSLKTEDTAVYYCFWGARGFDYWGQGTLVTVSS

SEQ ID NO: 5851 - protein, 117 aa, Artificial Sequence
  Synthetic construct
QVQLLQSGSEVKKPGSSVRVSCKTSGDIFDNNAVAWVRQAPGHRLEWMGRIVPLHGATQYAQNFQDRITISADHSTRTVFLELNNLRFEDTGVYYCATAERLWFDPRGQGTLVTVSS

SEQ ID NO: 5852 - protein, 87 aa, Artificial Sequence
  Synthetic construct
VIVGQAPGQRLEWMGWINADNGNTKYSQKFHDRVTFTRDTAASIIYMELRTLTSEDTGVYYCARLQVGAMGNGLDAWGQGTTVTVSS

SEQ ID NO: 5853 - protein, 125 aa, Artificial Sequence; identical to SEQ ID NO: 5711
  Synthetic construct

SEQ ID NO: 5854 - protein, 124 aa, Artificial Sequence
  Synthetic construct
EVQLLESGGGLVQPGGSLRLSCAASGFTFSSYAMSWVRQAPGKGLEWVSAISGSGGSTYYADSVKGRFTISRDNSKNTLYLQMNSLRAEDTAVYYCAKLKRWFGPYAKYYFDYWGQGTLVTVSS

SEQ ID NO: 5855 - protein, 119 aa, Artificial Sequence
  Synthetic construct
QVQLVQSGAEVKKPGSSVKVSCKASGGTFSSYTISWVRQAPGQGLEWMGRIIPILGIANYAQKFQGRVTITADKSTSTAYMELSSLRSEDTAVYYCARDLGKYYDSRNWGQGTLVTVSS

SEQ ID NO: 5856 - protein, 124 aa, Artificial Sequence
  Synthetic construct
QVQLVQSGAEVKKPGSSVKVSCKASGGTFSKSATSWVRQAPGQGLEWMGRIIPVLGVTNYAQKMQDRITITADKSTTTVYMELFSLTSEDTAMYYCARELCSGGVCYQDAFDAWGQGAMVTVSS

SEQ ID NO: 5857 - protein, 118 aa, Artificial Sequence
  Synthetic construct
EVQLLESGGGLVQPGGSLRLSCVASGFTFSNYAMTWVRQAPGKGLEWVSGITGNGDNTFYADSVKGRCTISRDNSNNTLYLQISSLGVEDTAVYYCAKEGRGNGFDPWGQGTLVAVSS

SEQ ID NO: 5858 - protein, 121 aa, Artificial Sequence
  Synthetic construct
QVQLVQSGAEVKRPGASVKVSCKASGNTFTNYAMHWVRQAPGQRLEWMGWINDGNDNTKYSQKFQGRVTISRDTSASTAYMELSYLRSEDTAVYYCARGPRGGRTNWFDPWGQGTLVTVSS

SEQ ID NO: 5859 - protein, 118 aa, Artificial Sequence
  Synthetic construct
QVQLQQWGAGLLKPSETLSLTCAVYGGSFSGYYWSWIRQPPGKGLEWIGEINHSGSTNYNPSLKSRVTISVDTSKNQFSLKLSSVTAADTAVYYCARGRYSYGPFDYWGQGTLVTVSS

SEQ ID NO: 5860 - protein, 121 aa, Artificial Sequence
  Synthetic construct
QVRLQESGPGLVKPSETLSLTCTVSGGSTSSYYWNWIRQSSVKGLEWIAYINDSGATNYNPSLKSRIAISIDRSKKQISLKLTSVTAADTAVYYCARDYGEWEQYGTFPIWGQGTTVTVSS

SEQ ID NO: 5861 - protein, 125 aa, Artificial Sequence
  Synthetic construct
QVHLRESGPALVKPLQTLSLTCSVSGGSITTGRYFWGWIRQSPAKGLEWIGYIYHSGSSYLNPSLKSRVSMSVDASSNQFSLKLNSATAADTALYFCARARYGGSDLIYDVFDLWGRGTMVTVSS

SEQ ID NO: 5862 - protein, 125 aa, Artificial Sequence; identical to SEQ ID NO: 5711
  Synthetic construct

SEQ ID NO: 5863 - protein, 126 aa, Artificial Sequence
  Synthetic construct
QVQLQESGPGLVKPSQTLSLTCTVSGGSISSGGYYWSWIRQHPGKGLEWIGYIYYSGSTYYNPSLKSRVTISVDTSKNQFSLKLSSVTAADTAVYYCARNLITMVRGVIQHPFDYWGQGTLVTVSS

SEQ ID NO: 5864 - protein, 121 aa, Artificial Sequence
  Synthetic construct
EVQLVESGGGLVQPGGSLRLSCAASGFTFSSYWMSWVRQAPGKGLEWVANIKQDGSEKYYVDSVKGRFTISRDNAKNSLYLQMNSLRAEDTAVYYCARGGRWGQSYGLDYWGQGTLVTVSS

SEQ ID NO: 5865 - protein, 121 aa, Artificial Sequence
  Synthetic construct
EVQLVESGGGLVQPGGSLRLSCAASGFTFSSYAMHWVRQAPGKGLEYVSAISSNGGSTYYANSVKGRFTISRDNSKNTLYLQMGSLRAEDMAVYYCARARSSKGYYDSSHWGQGTLVTVSS

SEQ ID NO: 5866 - protein, 118 aa, Artificial Sequence
  Synthetic construct
QVQLVQSGAEVKKPGASVKVSCKASGYTFTSYYMHWVRQAPGQGLEWMGIINPSGGSTSYAQKFQGRVTMTRDTSTSTVYMELSSLRSEDTAVYYCARAPNRVGMDVWGQGTTVTVSS

SEQ ID NO: 5867 - protein, 121 aa, Artificial Sequence
  Synthetic construct
QLQLQESGPGLVKPSETLSLTCTVSGGSISSVGDYWGWIRQPPDGGLEWIGNVYFTGSTYYNPSLKSRATISVDTSKNQFSLMLISVTAADTAVYYCARRVAGATIWFHPWGQGTLVTVSS

SEQ ID NO: 5868 - protein, 123 aa, Artificial Sequence
  Synthetic construct
QVQLVESGGGVVQPGRSLRLSCAASGFTFRTYAIHWVRQAPGRVLDWLAVISDDGSNNYYADSVKGRFTISRDNSKNTMYLQMNSLRPDDTAVYYCARSPMIRGVPAALFDHWGQGTLVTVSS

SEQ ID NO: 5869 - protein, 120 aa, Artificial Sequence
  Synthetic construct
QVQLVESGGGVVQPGRSLRLSCAASGFTFSSYGMHWVRQAPGKGLEWVAVISYDGSNKYYADSVKGRFTISRDNSKNTLYLQMNSLRAEDTAVYYCAKDRKQQRPFIDYWGQGTLVTVSS

SEQ ID NO: 5870 - protein, 123 aa, Artificial Sequence
  Synthetic construct
QVQLVESGGGVVQPGRSLRLSCAASGFTFSSYGMHWVRQAPGKGLEWVAVISYDGSNKYYADSVKGRFTISRDNSKNTLYLQMNSLRAEDTAVYYCAKAHRRGGYYYYGMDVWGQGTTVTVSS

SEQ ID NO: 5871 - protein, 120 aa, Artificial Sequence
  Synthetic construct
QVQLQESGPGLVKPSETLTLTCTVSGASIGTSPYNWSWIRQLPGQHLEWIGYFISSASPSYNPLFKGRLIISADTSNNQFSLSLTSVTAADSAVYFCARGGDGFDLFDYWGPGLLVTVSS

SEQ ID NO: 5872 - protein, 121 aa, Artificial Sequence
  Synthetic construct
EVQLVESGGGLVQPGGSLRLSCAASGFTFSSYAMYWVRQAPGKGLEYVSAISSNGITTYYAKSVKGRFTISRDNSKNTLYLQMGSLRAEDMAVYYCARAHVLIWFGAADYWGQGTLVTVSS

SEQ ID NO: 5873 - protein, 118 aa, Artificial Sequence
  Synthetic construct
QVQLVQSGAEVKKPGASVKVSCKASGYTFTSYYMHWVRQAPGQGLEWMGIINPSGGSTSYAQKFQGRVTMTRDTSTSTVYMELSSLRSEDTAVYYCVIVVVPAAIVYWGQGTLVTVSS

SEQ ID NO: 5874 - protein, 126 aa, Artificial Sequence
  Synthetic construct
EVQLLESGGALVQPGGSLRLSCSAFGFTFNHYAMNWVRQAPGKGLEWVATITHNGGDRYYSDSVKGRLTIFRDNSKNTLFLQMESLRAGDTATYYCAVTTFYDFFTGGPGGGFDYWGQGTLVSVSS

SEQ ID NO: 5875 - protein, 133 aa, Artificial Sequence
  Synthetic construct
QVQLVESGGGVVQPGRSLRLSCAASGFTFSSYGMHWVRQAPGKGLEWVAVIWYDGSNKYYADSVKGRFTISRDNSKNTLYLQMNSLRAEDTAVYYCARDRLGYCSGGSCSRLPAYYYYGMDVWGQGTTVTVSS

SEQ ID NO: 5876 - protein, 127 aa, Artificial Sequence
  Synthetic construct
QVQLVESGGGVVQPGRSLRLSCAASGFTFSSYGMHWVRQAPGKGLEWVAVIWYDGSNKYYADSVKGRFTISRDNSKNTLYLQMNSLRAEDTAVYYCAREGGKGGSGSRSSKYGMDVWGQGTTVTVSS

SEQ ID NO: 5877 - protein, 126 aa, Artificial Sequence
  Synthetic construct
QVQLVESGGGVVQPGRSLRLSCAASGFTFSSYGMHWVRQAPGKGLEWVAVISYDGSNKYYADSVKGRFTISRDNSKNTLYLQMNSLRAEDTAVYYCAKDWGYCSSTSCYRSGMDVWGQGTTVTVSS

SEQ ID NO: 5878 - protein, 119 aa, Artificial Sequence
  Synthetic construct
QVQLQQWGAGLLKPSETLSLTCAVSGGSLNGYYWNWIRQTPGKGLEWIGEISHGGDTNYNPSLKSRLTISVDTSKNQFSLRLNAVTAADTAMFYCVRGQRRTRWALDIWGQGTMVIVSS

SEQ ID NO: 5879 - protein, 118 aa, Artificial Sequence
  Synthetic construct
QVQLQESGPGLVKPSETLSLTCTVSGGSISSYYWSWIRQPPGKGLEWIGYIYYSGSTNYNPSLKSRVTISVDTSKNQFSLKLSSVTAADTAVYYCARGRRTGTYFDYWGQGTLVTVSS

SEQ ID NO: 5880 - protein, 126 aa, Artificial Sequence
  Synthetic construct
QLQLQESGPGLVKPSETLSLTCTVSGGSISSSSYYWGWIRQPPGKGLEWIGSIYYSGSTYYNPSLKSRVTISVDTSKNQFSLKLSSVTAADTAVYYCARHSHGRIAAAGRKWFDPWGQGTLVTVSS

SEQ ID NO: 5881 - protein, 131 aa, Artificial Sequence
  Synthetic construct
QVQLVQSGAEVKKPGASVKVSCKASGYTFTSYYMHWVRQAPGQGLEWMGIINPSGGSTSYAQKFQGRVTMTRDTSTSTVYMELSSLRSEDTAVYYCARDLVYRDYYGSGSYYLMTGYFDYWGQGTLVTVSS

SEQ ID NO: 5882 - protein, 123 aa, Artificial Sequence
  Synthetic construct
QVQLVESGGGVVQPGRSLRLSCAASGFSLSGYGMHWVRQAPGKGLEWVAVIWYDGTNKYYGDSVKGRFTISRDDSKNTLYLQMNSLRAEDTAVYFCARDPFRGSSAYYLRDYWGQGILVTVSS

SEQ ID NO: 5883 - protein, 119 aa, Artificial Sequence
  Synthetic construct
QLQLQESGPGLVKPSETLSLTCTVSGGSISSSSYYWGWIRQPPGKGLEWIGSIYYSGSTYYNPSLKSRVTISVDTSKNQFSLKLSSVTAADTAVYYCARLRSRGWFDPWGQGTLVTVSS

SEQ ID NO: 5884 - protein, 130 aa, Artificial Sequence; identical to SEQ ID NO: 41
  Synthetic construct

SEQ ID NO: 5885 - protein, 123 aa, Artificial Sequence
  Synthetic construct
QVQLQQWGAGLLKPSETLSLTCAVYGGSFSGNSWTWIRQPPGKGLEWIGEINHSGDTNYNPSLKSRVTISLDTSKKQFSLRLTSVAAADTALYYCARTYTPFYYGSGKHLDYWGQGALVTVSS

SEQ ID NO: 5886 - protein, 123 aa, Artificial Sequence
  Synthetic construct
QVQLVQSGAEVKKPGASVKVSCKASGYTFTSYGISWVRQAPGQGLEWMGWISAYNGNTNYAQKLQGRVTMTTDTSTSTAYMELRSLRSDDTAVYYCARDLEITYDSSGYIDYWGQGTLVTVSS

SEQ ID NO: 5887 - protein, 118 aa, Artificial Sequence
  Synthetic construct
EVQLVQSGAEVKKPGATVKISCKVSGYTFNDYYIHWVQQAPGKGLEWMGLVDPEDDETIYAEKFQGRVTITADTSTDTAYMELSSLRSDDTAVYYCTTLPKNTDFDLWGRGTLVTVSS

SEQ ID NO: 5888 - protein, 119 aa, Artificial Sequence
  Synthetic construct
EVQLVESGGGLVQPGGSLRLSCAASGFTFSDYWMRWVRQPPGKGLVWVSHVNSDGSSTSYAGSVKGRFTISRDNAKNTLSLQMHSLRVEDTGVYFCVRYSIGWPHLGYWGQGTLVTVSS

SEQ ID NO: 5889 - protein, 122 aa, Artificial Sequence
  Synthetic construct
QLQLQESGPGLVKPSETLSLTCTVSGDSISSSNYYWAWIRQPPGKGLEWIGSLYYSGNTYYDPSLKSRVTISVDTSKNQLSLKLTSATGADTAVYYCARVDYDFWKGNFDYWGQGTLVTVSS

SEQ ID NO: 5890 - protein, 129 aa, Artificial Sequence
  Synthetic construct
EVQLVESGGGLVQPGGSLRLSCVASEFTFTRDWMTWVRQAPGRGLEWVANIKRDGSEKNYVDSVKGRFTISRDNAKNSLYLQMNSLRAEDTAVYYCARDLTQTHYYEGRAYYYDAFDVWGQGTMVTVSS

SEQ ID NO: 5891 - protein, 119 aa, Artificial Sequence
  Synthetic construct
QVQLVESGGGVVQPGSSLRLSCEASGFIFNNYGMHWVRQAPGKGLEWVAVIWYDGSKKIYADSVKGRFTISRDNYKNTLYLEVDSLRVEDTALYFCASATTVIGAFDIWGQGTVVIVSS

SEQ ID NO: 5892 - protein, 117 aa, Artificial Sequence
  Synthetic construct
EVQLLQSGGGLVQPGGSLRLSCAASGFTFKTYAMTWARQAPGKGLEWVSAIGGQGDSTDYADSVKGRFTISRDNSQNTVYLEMKSLRSDDTAVYYCARRTGGSPDYWGQGTLVTVSS

SEQ ID NO: 5893 - protein, 120 aa, Artificial Sequence
  Synthetic construct
EVQLVESGGGLVQPGGSLRLSCAASGFTFSSYWMHWVRQAPGKGLVWVSRINSDGSSTSYADSVKGRFTISRDNAKNTLYLQMNSLRAEDTAVYYCASSSWRYYYGMDVWGQGTTVTVSS

SEQ ID NO: 5894 - protein, 124 aa, Artificial Sequence
  Synthetic construct
QVHLVESGGGLVKPGGSLRLSCAASGFIFTDYYMSWFRQAPGKGLEWVSYISTSRSYTSYADSVQGRFTMSRDNTQRSVSLQMNSLRDEDTAIYYCARGAGDSAYDAWGVLDFWGQGALVTVSA

SEQ ID NO: 5895 - protein, 127 aa, Artificial Sequence
  Synthetic construct
QVQLQESGPGLVKPSGTLSLTCAVSGDSISSSHWWSWVRQPPGKGLEWIGEIYQSGNTNYNPSLKSRVTISVDKSKNQFSLKLTSVTAADTAVYFCASLAYCSTIGCPHYYYGMDVWGQGTTVTVSS

SEQ ID NO: 5896 - protein, 123 aa, Artificial Sequence; identical to SEQ ID NO: 5437
  Synthetic construct

SEQ ID NO: 5897 - protein, 125 aa, Artificial Sequence
  Synthetic construct
QAQLVESGGGLVQPGKSLRLSCAVSGFTFSSYAMHWVRQAPGKGLEWVSLISSDGYNTFYADSVEGRFTISRDDSRNTLFLQMDSLTPDDTAVYFCARDRDFGSGNPYTNSFDPWGQGTLVTVST

SEQ ID NO: 5898 - protein, 121 aa, Artificial Sequence
  Synthetic construct
EVHLLESGGGLVQPGGSLRLSCVASGFTFRNYAMNWVRQAPGKGLEWVSSISGSGANTYYADSVKGRFSISRDNSKNTLSLQMSSLRAEDTAIYYCAKAWGSNYGPPDVDWGQGTLVTVSS

SEQ ID NO: 5899 - protein, 123 aa, Artificial Sequence; identical to SEQ ID NO: 5598
  Synthetic construct

SEQ ID NO: 5900 - protein, 133 aa, Artificial Sequence
  Synthetic construct
QVQLVESGGGVVQPGRSLRLSCAASGFTFSSYAMHWVRQAPGKGLEWVAVISYDGSNKYYADSVKGRFTISRDNSKNTLYLQMNSLRAEDTAVYYCAREGPRRWEVDCGGDCYSGHSRAFDIWGQGTMVTVSS

SEQ ID NO: 5901 - protein, 124 aa, Artificial Sequence; identical to SEQ ID NO: 5439
  Synthetic construct

SEQ ID NO: 5902 - protein, 128 aa, Artificial Sequence
  Synthetic construct
QVQLQESGPGLVKPSQTLSLTCSVSGGSINNEGFYWSWIRQHPGKNLEWIAYIYFTGTTFYNPSLKSRISISIDTSKNQFSLKLSSVTAADTAVYYCARRQTFYYTDYSPPTDAFDIWGQGTTVTVSS

SEQ ID NO: 5903 - protein, 123 aa, Artificial Sequence
  Synthetic construct
QVRLVESGGGVVQPGTSLRLSCVGSGFIFSSYGMHWVRQTPGKGLEWVAVIWYDGSNTYYLDSVKGRFTISRDNSKNTVFLQMNSLRGEDTAVYYCARDPFRGSSAYYLRDYWGQGTLVTVSS

SEQ ID NO: 5904 - protein, 118 aa, Artificial Sequence
  Synthetic construct
EVQLVESGGDVVQPGGSLRLSCSASGFIFSDHHMDWVRQAPGKRLEWVARCRKRANRFTTEYAASVGGRFTISRDDSKNSLYLQMNSLKTEDTAVYYCVRGFHSFDLWGQGTMVTISS

SEQ ID NO: 5905 - protein, 125 aa, Artificial Sequence; identical to SEQ ID NO: 5711
  Synthetic construct

SEQ ID NO: 5906 - protein, 121 aa, Artificial Sequence
  Synthetic construct
QVQLQESGPGLVQPSETLSLTCTVSGTSIGSGTYFWAWIRQPAGKRPEWIGRIFAHGSTNFNPSLKSRLTMSVDTSKNQFSLTLSSVTAADTATYYCARAFHLVNNWHDPWGPGIQVTVSS

SEQ ID NO: 5907 - protein, 120 aa, Artificial Sequence
  Synthetic construct
EVQLVESGGGLIQPGGSLRLSCAASGFTVSSNYMSWVRQAPGKGLEWVSVIYSGGSTYYADSVKGRFTISRDNSKNTLYLQMNSLRAEDTAVYYCARVSGSYRRNAFDIWGQGTMVTVSS

SEQ ID NO: 5908 - protein, 122 aa, Artificial Sequence
  Synthetic construct
QVQLQESGPGLVKPSQTLSLTCTVSGGSISSGSYYWSWIRQPAGKGLEWIGRIYTSGSTNYNPSLKSRVTISVDTSKNQFSLKLSSVTAADTAVYYCARGGAAAATRYFDYWGQGTLVTVSS

SEQ ID NO: 5909 - protein, 114 aa, Artificial Sequence
  Synthetic construct
QVQLQESGPGLVKPSQTLSLTCTVSGGSISSGSYYWSWIRQPAGKGLEWIGRIYTSGSTNYNPSLKSRVTISVDTSKNQFSLKLSSVTAADTAVYYCARTTDVWGQGTTVTVSS

SEQ ID NO: 5910 - protein, 122 aa, Artificial Sequence
  Synthetic construct
EVQLLESGGGLAQPGGSLRLSCAASGFTFSTYAMSWVRQAPGKGLEWVSVISGSGITTYYADSVKGRFTISRDKSKNTLFLQMNSLRAEDTAVYYCAKGNSYSGSYLSFDPWGQGTLVSVSS

SEQ ID NO: 5911 - protein, 126 aa, Artificial Sequence
  Synthetic construct
EVQLVESGGGLVQPGGSLRLSCSASGFTFSSYAMHWVRQAPGKGLEYVSAISSNGGSTYYADSVKGRFTISRDNSKNTLYLQMSSLRAEDTAVYYCVKDGVASGSYRIARNSFDYWGQGTLVTVSS

SEQ ID NO: 5912 - protein, 122 aa, Artificial Sequence
  Synthetic construct
EVQLLESGGGLVQSGGSLRLSCAASGFTFRDYAMNWVRQAPGKGLEWVSSISGSGVYTYYADSVKGRFTVSRDNSKNTVYLQMNSLRVEDTAVYYCAKGVEQAVDLNWFDPWGQGTLVTVSS

SEQ ID NO: 5913 - protein, 118 aa, Artificial Sequence
  Synthetic construct
EVQLVESGGGLVKPGGSLRLSCAASGFTFSNAWMSWVRQAPGKGLEWVGRIKSKTDGGTTDYAAPVKGRFTISRDDSKNTLYLQMNSLKTEDTAVYYCTTQNGWFDPWGQGTLVTVSS

SEQ ID NO: 5914 - protein, 120 aa, Artificial Sequence
  Synthetic construct
EVQLVESGGGLVQGGGSLRLSCAASGFTFRSHWMSWVRRAPGKGLEWVANINQDGSQIHYVDSVKGRFTISRDNTKNSLFLHMSSLIIEDTAVYFCARDWAGRFLGHLSWGQGTLVTVSS

SEQ ID NO: 5915 - protein, 117 aa, Artificial Sequence
  Synthetic construct
EVQLVESGGGLIQPGGSLRLSCAASGFTVSSNYMSWVRQAPGKGLEWVSVIYSGGSTYYADSVKGRFTISRDNSKNTLYLQMNSLRAEDTAVYYCARGDGGLPFDYWGQGTLVTVSS

SEQ ID NO: 5916 - protein, 119 aa, Artificial Sequence
  Synthetic construct
QVQLLQSGAEVRKPGASVKVSCKASGYTFATYGFNWVRQAPGQGPEWLGWISFYNGEIRNAQKFQGRVSMTTDTSTSTGYMELTSLKSDDTAIYYCASGYSTIRGFDHWGQGTLVSVSS

SEQ ID NO: 5917 - protein, 120 aa, Artificial Sequence
  Synthetic construct
EVQLVESGGGLIQPGGSLRLSCAASGFTVSSNYMSWVRQAPGKGLEWVSVIYSGGSTYYADSVKGRFTISRDNSKNTLYLQMNSLRAEDTAVYYCARESSIAAPGGVAVWGQGTTVTVSS

SEQ ID NO: 5918 - protein, 124 aa, Artificial Sequence
  Synthetic construct
QVQLVESGGGVVQPGRSLRLSCAASGFTFSSYGMHWVRQAPGKGLEWVAVISYDGSNKYYADSVKGRFTISRDNSKNTLYLQMNSLRAEDTAVYYCAKEVKWSTPRGYNWFDPWGQGTLVTVSS

SEQ ID NO: 5919 - protein, 127 aa, Artificial Sequence; identical to SEQ ID NO: 5678
  Synthetic construct

SEQ ID NO: 5920 - protein, 121 aa, Artificial Sequence
  Synthetic construct
EVQLVQSGAEVKKPGESLKISCKDSGYSFTTYWIGWVRQMPGKGLELMGIIYPGDSDTRYSPSFQGQVTISADKSISTAYLQWSSLKASDTAMYYCARRKMATIWDAFDLWGQGTMVTVSS

SEQ ID NO: 5921 - protein, 116 aa, Artificial Sequence
  Synthetic construct
EVQLVESGGALVQPGGSLRLSCAASGFTFNNYWMSWVRQAPGKGLEWVANIKHDGSEKYYVDSVKGRFTISRDNAKNSLDLQMNSLRAEDTAVYYCARESRWLTYWGQGTLVTVSS

SEQ ID NO: 5922 - protein, 120 aa, Artificial Sequence
  Synthetic construct
EVQLVESGGGLVKPGGSLRLSCAASGLTFRSSGMNWVRQAPGKGLEWVGFIRSKAYGGTTEYAASVKGRFTISRDDSQSIAYLQMNSLKTEDTAVYYCTRFGSYYWFDPWGQGTLVTVSS

SEQ ID NO: 5923 - protein, 122 aa, Artificial Sequence
  Synthetic construct
QLQLQESGSGLVKPSQTLSLTCAVSGGSISSGGYSWSWIRQPPGKGLEWIGYIYHSGSTYYNPSLKSRVTISVDRSKNQFSLKLSSVTAADTAVYYCAREGRAYSHYYFDYWGQGTLVTVSS

SEQ ID NO: 5924 - protein, 121 aa, Artificial Sequence
  Synthetic construct
EVQLVESGGGLVKPGGSLRLSCAASGFTFSSYSMNWVRQAPGKGLEWVSSISSSSSYIYYADSVKGRFTISRDNAKNSLYLQMNSLRAEDTAVYYCAREYSSSWYRRVDYWGQGTLVTVSS

SEQ ID NO: 5925 - protein, 123 aa, Artificial Sequence; identical to SEQ ID NO: 5437
  Synthetic construct

SEQ ID NO: 5926 - protein, 119 aa, Artificial Sequence
  Synthetic construct
EVQLVESGGGLVQPGGSLRLSCAASGFTFSSYWMSWVRQAPGKGLEWVANIKQDGSEKYYVDSVKGRFTISRDNAKNSLYLQMNSLRAEDTAVYYCARRKYSSIYFDYWGQGTLVTVSS

SEQ ID NO: 5927 - protein, 119 aa, Artificial Sequence
  Synthetic construct
QVQLVQSGAEVKKPGASVKVSCKASGYTFTSYYMHWVRQAPGQGLEWMGIINPTGGRTNYAQKFQGRVTMTRDTSTSTVYMELSSLRSEDTAVYYCARSLGDSSGLDYWGQGTLVTVSS

SEQ ID NO: 5928 - protein, 124 aa, Artificial Sequence
  Synthetic construct
QVQLQESGPGLVKPSQTLSLICTVSGGSIGSSSYHWTWIRQPAGKGLEWIGRIDSGGSTNYNPSLKSRVTISVDRSRNQLSLKLSSVTAADTAVYYCARDKDRTIFINYGMDVWGQGTTVTVSS

SEQ ID NO: 5929 - protein, 123 aa, Artificial Sequence
  Synthetic construct
QVTLRESGPALVNRTQTLTLTCTVSGFSLGTTGMCVSWFRQPPGKALEWLAFVDWNGDKYYSSSLMTRLTLSQDTSKNQVVFTMTNMDPVDTATYYCARSPNYYDTRAYFDSWGQGNLVTVSS

SEQ ID NO: 5930 - protein, 128 aa, Artificial Sequence
  Synthetic construct
QVQLQQWGAGLLKPSETLSLTCAVYGGSFSGYYWSWIRQPPGKGLEWIGEINHSGSTNYNPSLKSRVTISVDTSKNQFSLKLSSVTAADTAVYYCARTGGGAARAARTRYYYYGMDVWGQGTTVTVSS

SEQ ID NO: 5931 - protein, 124 aa, Artificial Sequence
  Synthetic construct
EVQLVESGGGLIQPGGSLRLSCAASGFTVSSNQMSWVRQAPGKGLEWVSVIYSGGSTDYADSVKGRFTISRDNSKNTLYLQTNSLRAEDTAVYYCARAICSTDSGIRSCAFDIWGQGTMVTVSS

SEQ ID NO: 5932 - protein, 128 aa, Artificial Sequence
  Synthetic construct
QLQLQESGPGLVKPSETLSLTCTVSGASISNNIYYWAWIRQPPGKGLEWIGSIYYSGSTYYNASLKSRVTVYVDTSKNQFSLKLSSVTAADTAVYYCARPGVYCGGPTCYFYSGMDVWGQGTTVTVSS

SEQ ID NO: 5933 - protein, 125 aa, Artificial Sequence
  Synthetic construct
EVQLVESGGGLVQPGGSLRLSCAASGFTFSSYWMSWVRQAPGKGLEWVANIKQDGSEKYYVDSVKGRFTISRDNAKNSLYLQMNSLRAEDTAVYYCARDDKYYYGSGSQHAFDIWGQGTMVTVSS

SEQ ID NO: 5934 - protein, 116 aa, Artificial Sequence
  Synthetic construct
QVQLQESGPGLVKPSETLSLTCTVSGGSISSYYWSWIRQPAGKGLEWIGRIYTSGSTNYNPSLKSRVTMSVDTSKNQFSLKLSSVTAADTAVYYCATVTAWGSDYWGQGTLVTVSS

SEQ ID NO: 5935 - protein, 124 aa, Artificial Sequence; identical to SEQ ID NO: 5439
  Synthetic construct

SEQ ID NO: 5936 - protein, 123 aa, Artificial Sequence
  Synthetic construct
QVQLVESGGGVVQPGRSLRLSCAASGFTFSSYAMHWVRQAPGKGLEWVAVISYDGSNKYYADSVKGRFTISRDNSKNTLYLQMNSLRAEDTAVYYCARVPRLHIAAAGGGGGWGQGTLVTVSS

SEQ ID NO: 5937 - protein, 118 aa, Artificial Sequence
  Synthetic construct
QVQLVESGGGLVKPGGSLRLSCTASGFTFSDSYMSWIRQTPGKGLDWVSFISNSGSATFYAGSVKGRFTISRDNAKNSLFLQMNSLRPEDTAVYYCARWKSGTHFDYWGQGTLVTVSS

SEQ ID NO: 5938 - protein, 125 aa, Artificial Sequence
  Synthetic construct
EVYLVESGGGLVKPGGSLRLSCAVSGFTFSKTYMSWVRQAPGKGLEWVGRIKSKTDGGTTDYAAPVKGRFTISRDDSKNTLYLQMHSLKTEDTAVYYCTTDSVPYSSGWYWYDYWGQGTLVTVSS

SEQ ID NO: 5939 - protein, 123 aa, Artificial Sequence
  Synthetic construct
EEQLVESGGGLVKPGGSLRLSCAASGFTFSNYNMNWVRQAPGKGLEWVSSISHSSIYIYYADSVKGRFTISRDNAKSSLSLQMNSLRAEDTAVYYCARNPRSLEGYYDAFDPWGQGTLVIVSS

SEQ ID NO: 5940 - protein, 122 aa, Artificial Sequence
  Synthetic construct
QVHLVESGGGLVKPGGSLRLSCAASGFIFSGDYMSWVRQAPGKGLEWISYISESGSLIYYADSVRGRFTISRDNAQNSLYLQMNSLRAEDTAVYYCVRDKPDDGGTTTYDFWGQGTLVTVSS

SEQ ID NO: 5941 - protein, 122 aa, Artificial Sequence
  Synthetic construct
QIQLQQWGAGLLKPSETLSLTCAVHGGSFSGYSWSWIRQSPGKGLEWIGEVFHSGNTNYNPSLKSRVTISMDTSKNQYSLNLTSVTAADTAVYYCARGRYVYYESTADFDNWGQGTLVTVSS

SEQ ID NO: 5942 - protein, 121 aa, Artificial Sequence
  Synthetic construct
EVQLVESGGGLVRPGGSLRLSCAASGFSFSDYNMNWVRQSPGRGLEWVSSISNGRNYVYYADPVRGRFTISRDNAKNSLSLQMNSLRAEDTAVYYCARDGGSGSSVFFDYWGQGTLVTVSS

SEQ ID NO: 5943 - protein, 123 aa, Artificial Sequence
  Synthetic construct
QVQLQESGPGLVKPSQTLSLICTVSGASITSSDYYWSWVRQPAGKGLEWIGRLYISENTNYNPSLRSRVTISGDPSKNQFSLNLSSVTAADTAVYFCASSNYDNLSFRSFDIWGQGTLVTVSS

SEQ ID NO: 5944 - protein, 126 aa, Artificial Sequence
  Synthetic construct
QVQLVESGGGVVQPGRSLRLSCAASGFTFSSYAMHWVRQAPGKGLEWVAVISYDGSNKYYADSVKGRFTISRDNSKNTLYLQMNSLRAEDTAVYYCARDPRIAAAGRVRNNWFDPWGQGTLVTVSS

SEQ ID NO: 5945 - protein, 128 aa, Artificial Sequence
  Synthetic construct
QVQLQESGPGLVKPSQTLSLTCTVSGGSINSGSHYWSWIRQPAGKGLEWIGRIYPSGPTQYNPSLKSPVTISMDTSKNQFSLRLNSVTAADTAVYYCAGEFVIPAGKSQYYYYGMDVWGRGTTVTVSS

SEQ ID NO: 5946 - protein, 124 aa, Artificial Sequence
  Synthetic construct
EVQLVESGGGLVQPGGSLTLSCAASGFTFDSYSMIWVRQAPGKGLEWISYISSSSATIHYADSVKGRFTISRDNAKNSLYLQMNSLRDEDTAVYYCARDPVYYYDRNNGYFDHWGQGTLVTVSA

SEQ ID NO: 5947 - protein, 120 aa, Artificial Sequence
  Synthetic construct
QVQLVQSGAEVKKPGASVKVSCKASGYTFTSYAMHWVRQAPGQRLEWMGWINAGNGNTKYSQKFQGRVTITRDTSASTAYMELSSLRSEDTAVYYCARRTSNYGVFFDYWGQGTLVTVSS

SEQ ID NO: 5948 - protein, 128 aa, Artificial Sequence
  Synthetic construct
QVQLVQSGAEVKKPGSSVKVSCKASGGTFSSYAISWVRQAPGQGLEWMGGIIPIFGTANYAQKFQGRVTITADESTSTAYMELSSLRSEDTAVYYCARDSGHYYGSGSHPARDAFDIWGQGTMVTVSS

SEQ ID NO: 5949 - protein, 120 aa, Artificial Sequence
  Synthetic construct
QVQLVESGGGVVQPGGSLRLACTVSGFTFSNYGMHWVRQAPGKGLEWMAFIWYDGSSVSYADSVKGRFTISRDNSKNTLFLQMNSLRAEDTAVYYCARISAGIVGPSEYWGQGTLVTVSS

SEQ ID NO: 5950 - protein, 121 aa, Artificial Sequence
  Synthetic construct
EVQLVESGGGLVQPGGSLRLSCAASGFTFSSYWMSWVRQAPGKGLEWVANIKQDGSEKYYVDSVKGRFTISRDNAKNSLYLQMNSLRAEDTAVYYCARDGERGSSSPLDYWGQGTLVTVSS

SEQ ID NO: 5951 - protein, 115 aa, Artificial Sequence
  Synthetic construct
EVHLVESGGNLVQPGGSLRLSCAASGFTFSSYFMSWVRQAPGKGLEWVANINQDGSEKYYVDSVKGRFTISRDNARNSVSLQMNSLRAEDTAVYYCARSWNCDFWGRGTLVTVSS

SEQ ID NO: 5952 - protein, 124 aa, Artificial Sequence
  Synthetic construct
EVQLLESGGGPGQPGGSLRLSCLGSGFIFSSFDMIWVRQAPGQGLEWVSSISGSGGVTYYADSVKGRFVISRDNSKKTLYLQMDGLRDEDTGMYYCAKGGGFSGYNYDPTADFWGQGTLVTVSS

SEQ ID NO: 5953 - protein, 119 aa, Artificial Sequence
  Synthetic construct
QVQLQQWGAGLLKPSETLSLTCAVYGGYFSGYYWTWIRQSPGKGLEWIGEMKQSGNTYYNPSLKSRVTISVDSSKNQVSLKLTSVTAADTAVYYCARGYGSGNSRFDPWGQGTLVTVSS

SEQ ID NO: 5954 - protein, 126 aa, Artificial Sequence
  Synthetic construct
QVQLVESGGGVVQPGRSLRLSCAASGFTFSSYGMHWVRQAPGKGLEWVAVIWYDGSNKYYADSVKGRFTISRDNSKNTLYLQMNSLRAEDTAVYYCARDWGLGHRGGIAAAGEDYWGQGTLVTVSS

SEQ ID NO: 5955 - protein, 121 aa, Artificial Sequence
  Synthetic construct
EVQLVESGGGLVQPGGSLRLSCAASGFTFSRYALTWVRQAPGKGLEWVSAISGRGSDTYYADSVKGRFTISRDNSKNTLYLQMSSLRAEDTAIYYCAKPVVEEVDLQFDYWGQGTLVTVSS

SEQ ID NO: 5956 - protein, 131 aa, Artificial Sequence
  Synthetic construct
EVQLLESGGGLVQPGGSLRLSCAASGFTFSNYAMSWVRQAPGKGLEWVSVISGSGGSTYYADSVKGRFTISRDNSKNTLYLHMNSLRAEDTAVYYCAKDAGYGSGKRTGKVYYYYYGMDVWGQGTTVTVSS

SEQ ID NO: 5957 - protein, 123 aa, Artificial Sequence
  Synthetic construct
EVQLVESGGGLVQPGGSLKLSCAASGFTFSGSAMHWVRQASGKGLEWVGRIRSKANSYATAYAASVKGRFTISRDDSKNTAYLQMNSLKTEDTAVYYCTRQRYSGSYSVFDYWGQGTLVTVSS

SEQ ID NO: 5958 - protein, 117 aa, Artificial Sequence
  Synthetic construct
QVQLVQSGAEVKKPGASVKVSCKTSGYTFTGYYMHWVRQAPGQGLEWMGWINTSGDTNYALNLQGRVTMTRDTSINTAYMELSRLRSDDTAVYYCATRGGPLPFNYWGQGTLVTVSS

SEQ ID NO: 5959 - protein, 118 aa, Artificial Sequence
  Synthetic construct
QVQLQQWGAGLLKPSETLSLTCAVYGVSFRNYWWSWVRQPPGRGLEWIGKINHSGNTNYNPSLESRVSISVDTSRNQFSLRLTSVTAADTSVYYCARGEPTSDAFDIWGQGSMVTVSS

SEQ ID NO: 5960 - protein, 124 aa, Artificial Sequence; identical to SEQ ID NO: 5439
  Synthetic construct

SEQ ID NO: 5961 - protein, 130 aa, Artificial Sequence
  Synthetic construct
EVQLVESGGGLVQPGGSLRLSCAASGFTVSSNYMSWVRQAPGKGLEWVSVIYSGGSTYYADSVKGRFTISRDNSKNTLYLQMNSLRAEDTAVYYCARDRTYYDSSGYYLRQYYYYGMDVWGQGTTVTVSS

SEQ ID NO: 5962 - protein, 122 aa, Artificial Sequence
  Synthetic construct
QVQLVQSGAEVKKPGSSVKVSCKASGGTFSNYSLSWVRQAPGQGLEWMGGIIAFLGIPEYAQKFQGRVTISADKVTTTAYMELNNLRSEDTAVYYCARDPTDVVVDPDFDYWGPGTLVTVSS

SEQ ID NO: 5963 - protein, 124 aa, Artificial Sequence
  Synthetic construct
EVQLVESGGGLVQPGGSLRVSCTASGFTFSSHWMSWVRQAPGKGLEWVAIIKQDGSEKHYVDSVKGRFTISRDNAKNSLYLQMNSLRAEDTAVYYCARDFGVDVLLWFGAFDYWGQGTLVTVSS

SEQ ID NO: 5964 - protein, 123 aa, Artificial Sequence
  Synthetic construct
EVQLVQSRAEVKQPGESLRISCKGSGYSFPTYWIGWVRQMPGKGLEWIGVIYFDDSDTRYSPSFQGQVTISVDKSTTTAYLQWSSVKASDTAMYYCVRLALGSYTYYRQVDYWGQGTLVTVSP

SEQ ID NO: 5965 - protein, 126 aa, Artificial Sequence
  Synthetic construct
QVQLVQSGAEVKKPGASVKVSCKASGYTFTSYGISWVRQAPGQGLEWMGWISAYNGNTNYAQKLQGRVTMTTDTSTSTAYMELRSLRSDDTAVYYCARHRVDYYGSGSYSNWFDPWGQGTLVTVSS

SEQ ID NO: 5966 - protein, 123 aa, Artificial Sequence; identical to SEQ ID NO: 5437
  Synthetic construct

SEQ ID NO: 5967 - protein, 124 aa, Artificial Sequence
  Synthetic construct
QLQLQESGPGLVKPSETLSLTCTVSGGSISSSSYYWGWIRQPPGKGLEWIGSIYYSGSTYYNPSLKSRVTISVDTSKNQFSLKLSSVTAADTAVYYCARHRSGSYRGSAWFDPWGQGTLVTVSS

SEQ ID NO: 5968 - protein, 120 aa, Artificial Sequence
  Synthetic construct
EVQLVESGGGLVKPGGSLRLSCAASGFTFSSYSMNWVRQAPGKGLEWVSSISSSSSYIYYADSVKGRFTISRDNAKNSLYLQMNSLRAEDTAVYYCARAVAGITRPLDYWGQGTLVTVSS

SEQ ID NO: 5969 - protein, 123 aa, Artificial Sequence
  Synthetic construct
QVQLVQSGAEVKEPGASVTVSCKASGYTVSSNYMHWVRQAPGQGLEWMGIINPTDGTTTYAENFQGRVTMTRDTSTNTVYMELRSLRSEDRAIYYCARDSRASGTTPLYYDYWGQGTLVTVSS

SEQ ID NO: 5970 - protein, 123 aa, Artificial Sequence; identical to SEQ ID NO: 5437
  Synthetic construct

SEQ ID NO: 5971 - protein, 118 aa, Artificial Sequence
  Synthetic construct
EVQLEESGGGVVQPGGSLRLSCAAAGFTFSISSLNWVRQAPGKGLEWVSSINRDSTYIFYADSVEGRFTISRDNARNSLYLEMRSLRVEDSAVYYCTEGIQFWDMDVWGPGTTVTVSS

SEQ ID NO: 5972 - protein, 126 aa, Artificial Sequence
  Synthetic construct
QITLKESGPTLVKPTQTVTLTCTFSGVSFTTPGVNVGWVRQPPGEALEWLALIYWDGDARYSPSLKNRVTISADTSKNQVALTMTNMQALDTATYYCLYREEQLRRGVHHYGVDVWGPGTTVIVSS

SEQ ID NO: 5973 - protein, 120 aa, Artificial Sequence
  Synthetic construct
EVQLVESGGGLVQPGGSLRLSCAASGFTFSSYSMNWVRQAPGKGLEWVSYISSSSSTIYYADSVKGRFTISRDNAKNSLYLQMNSLRDEDTAVYYCARRAYSSGWYVDYWGQGTLVTVSS

SEQ ID NO: 5974 - protein, 100 aa, Artificial Sequence
  Synthetic construct
PPLRLSCAASGFPFSTDAMNWVRQAPGEGLEWVSTISDTGRDTYYAASVKGRFTISRDNSKNTVYLQMNSLRAEDTAVYYCANTNFLDYWGQGTLVTVSS

SEQ ID NO: 5975 - protein, 121 aa, Artificial Sequence
  Synthetic construct
EVQLVESGGGLIQPGGSLRLSCAASGFTVSSNYMSWVRQAPGKGLEWVSVIYSGGNTYYADSVKGRFTISRDTSKNTLYLQMNSLRAGDTGIYYCARSTVPAGIGGGLDYWGQGTLVTVSS

SEQ ID NO: 5976 - protein, 129 aa, Artificial Sequence
  Synthetic construct
QVQLQESGPGLVEPSQTLFLTCTVSGGSISSGNYCWNWIRQPAGKGLEFVGRIHLSGNTNYNPSLKSRVTVSVDTSKNQFSLQMSSMTAADTAVYYCAREYFDWQLYATSPSYYGMDVWGQGTTVTVSS

SEQ ID NO: 5977 - protein, 123 aa, Artificial Sequence
  Synthetic construct
EVQLVESGGGLVKPGGSLRLSCAASGFTFSSYSMNWVRQAPGKGLEWVSSISSSSSYIYYADSVKGRFTISRDNAKNSLYLQMNSLRAEDTAVYYCATLPNWGRHYYYGMDVWGQGTTVTVSS

SEQ ID NO: 5978 - protein, 123 aa, Artificial Sequence
  Synthetic construct
EVQLVESGGGLVQPGGSLRLSCAASGFTFSRYWMHWVRQAPGKGLMWVSGINIDGSRTTYADSVKGRFTISRDNAKSTLYVQVNSLRVEDTAVYYCTRGGYSDYDWVPGIDYWGQGTLVTVSS

SEQ ID NO: 5979 - protein, 123 aa, Artificial Sequence; identical to SEQ ID NO: 5437
  Synthetic construct

SEQ ID NO: 5980 - protein, 116 aa, Artificial Sequence
  Synthetic construct
EVQLLESGGGLVQPGGSLRLSCAASGFTFSSYAMSWVRQAPGKGLEWVSAISGSGGSTYYADSVKGRFTISRDNSKNTLYLQMNSLRAEDTAVYYCAKGGSCYYYWGQGTLVTVSS

SEQ ID NO: 5981 - protein, 123 aa, Artificial Sequence; identical to SEQ ID NO: 5437
  Synthetic construct

SEQ ID NO: 5982 - protein, 126 aa, Artificial Sequence
  Synthetic construct
EVQLVESGGGLVQPGGSLRLSCAASGFTVSSNYMSWVRQAPGKGLEWVSVIYSGGSTYYADSVKGRFTISRDNSKNTLYLQMNSLRAEDTAVYYCAREGLGAYYYGSGSYKNIDYWGQGTLVTVSS

SEQ ID NO: 5983 - protein, 122 aa, Artificial Sequence
  Synthetic construct
EVQLLESGGGLVQSGGSLRLSCAASGFSFRDYAMNWVRQAPGKGLEWVSSISGSGVYTYYADSVKGRFTVSRDNSKNTVYLQMNSLGVEDTAVYFCAKGVEQAVDLNWFDPWGQGTLVTVSS

SEQ ID NO: 5984 - protein, 125 aa, Artificial Sequence
  Synthetic construct
QVQLVQSGSELKKPGASVKVSCKASGYTFTTYAINWVRQAPGQGLEWMGWINTNSGNPTYAQGFTGRFVFSLDTSVSTAYLQISSLEAEDTAVYYCARVGAFSFSQAVKFYFDYWGQGALVTVSS

SEQ ID NO: 5985 - protein, 117 aa, Artificial Sequence
  Synthetic construct
QVQLVQSGVAVRKPGASVKVSCKASGYNFTSYGISWVRQAPGQGLEWLGWIGALHGNTNYAEKFQDRITMTTDTSTTTAYMELRRLRSDDMAVYYCARDRHAYYDQWGQGTLVTVSS

SEQ ID NO: 5986 - protein, 123 aa, Artificial Sequence
  Synthetic construct
QVQLVESGGGVVQPGRSLRLSCAASGFTFSSYAMHWVRQAPGKGLEWVAVISYDGSNKYYADSVKGRFTISRDNSKNTLYLQMNSLRAEDTAVYYCARDAYRYSSGWRGFDYWGQGTLVTVSS

SEQ ID NO: 5987 - protein, 123 aa, Artificial Sequence; identical to SEQ ID NO: 5437
  Synthetic construct

SEQ ID NO: 5988 - protein, 121 aa, Artificial Sequence
  Synthetic construct
QLQLQESGPGLVKPSETLSLTCTVSGGSVTTGHYWGWVRQPPEKGLEWIGSIFYSGTTYYNPSLKSRLTISVDTSNNQFSLKLSSVTAADTALYYCARHERAGAHNPFDYWGQGTLVTVSS

SEQ ID NO: 5989 - protein, 125 aa, Artificial Sequence
  Synthetic construct
EVQLVESGGGLVQPGGSLKLSCAASGFTFSGSAMHWVRQASGKGLEWVGRIRSKANSYATAYAASVKGRFTISRDDSKNTAYLQMNSLKTEDTAVYYCTRLANIAAAGRPVVDYWGQGTLVTVSS

SEQ ID NO: 5990 - protein, 127 aa, Artificial Sequence; identical to SEQ ID NO: 5678
  Synthetic construct

SEQ ID NO: 5991 - protein, 123 aa, Artificial Sequence
  Synthetic construct
EVQLVQSGAAVKKPGESLKISCKGSGNTFTSYWVGWVRQMPGKGLEWMGIIYPPDSDTRYSPSFQGQVTISADKSISTAYLQWRSLKASDSGIYYCVRTEYCSSTTCYHFDLWGQGTLVTVSS

SEQ ID NO: 5992 - protein, 120 aa, Artificial Sequence
  Synthetic construct
QVQLQESGPGLVKPSETLSLTCTVSGDSISSYYWSWIRQPPGKGLEWIGWIYYSGSTRYNPSLTSRVTISIDTSKNQFSLKLRSVTAADTAVYYCARYCSSINCYSFDYWGQGTLVTVSS

SEQ ID NO: 5993 - protein, 124 aa, Artificial Sequence
  Synthetic construct
EVQLVQSGAEVKKPGESLRISCQGSGYSFSSYWISWVRRMPGKGLEWVGRINPDDSYSDNSPSFQGHATISVDRSISTAYLQWSSLRASDTAMYYCVTMRGHYQLFYDDSFDVWGQGTMVTVSS

SEQ ID NO: 5994 - protein, 125 aa, Artificial Sequence
  Synthetic construct
QVQLVQSGAEVKKPGSSMKVSCKASGVNFRSYSFSWVRQAPGQGLEWMGGVIPYFPTANYADKFRDRVTITADESTGTVYLEMSSLRSGDTAVYYCASEYFDGRSYHSFCGLDVWGQGTPVTVSS

SEQ ID NO: 5995 - protein, 120 aa, Artificial Sequence
  Synthetic construct
QLQLHESGPGLVRPSETLSLACFVSGASIDSSQDYWAWIRQPPGKGLEWLGSVYYSGSTYYEPSLKSRLSIGVDRTRNQFSLNLTSVTAADSALYFCARHEQWASGFDVWGRGATVTISS

SEQ ID NO: 5996 - protein, 126 aa, Artificial Sequence
  Synthetic construct
LVQLVQSGAELKRPGSSVKVSCKASGGTFNSYGINWVRQAPGQGLEWMGRIIPILDISTYAQKFQGRVTISADRPTTTVYMELTSLRSEDTAVYYCARDEWDGHSLGHYHYTMDVWGQGSTVTVSS

SEQ ID NO: 5997 - protein, 124 aa, Artificial Sequence
  Synthetic construct
QVQLQESGPGLVKPSGTLSLTCAVSGGSISSSNWWSWVRQPPGKGLEWIGEIYHSGSTNYNPSLKSRVTISVDKSKNQFSLKLSSVTAADTAVYYCARGFGGSRYYYYYGMDVWGQGTTVTVSS

SEQ ID NO: 5998 - protein, 124 aa, Artificial Sequence; identical to SEQ ID NO: 5439
  Synthetic construct

SEQ ID NO: 5999 - protein, 121 aa, Artificial Sequence
  Synthetic construct
QVQLQESGPGLVKPSQTLSLSCSVSGGSVSSGTYYWSWIRQPAGKGLEYIGRIYTTGSTNYNPSLKSRVAISVDTSKNQFFLNLTSVTAADTAIYYCAGDCSGGSCWFDPWGQGILVTVSS

SEQ ID NO: 6000 - protein, 126 aa, Artificial Sequence
  Synthetic construct
QVQLVQSGAEVKKPGASVKVSCKASGYTFTGYYMHWVRQAPGQGLEWMGWINPNSGGTNYAQKFQGRVTMTRDTSISTAYMELSRLRSDDTAVYYCALGLYVWGSYHPQGGWFDPWGQGTLVTVSS

SEQ ID NO: 6001 - protein, 119 aa, Artificial Sequence
  Synthetic construct
QVQLVQSGAEVKKPGASVKISCKASGYTFTSFYIHWVRQAPGQGLEWMGIINPLGGRTEYAQKFQARVTMTRDTSTSTVNMELTSLRSDDTAVYYCGRSLGDSSGLDYWGQGALVTVSS

SEQ ID NO: 6002 - protein, 127 aa, Artificial Sequence
  Synthetic construct
EVQLVQSGAEVKKPGESLRISCKGSGYSFTSYWISWVRQMPGKGLEWMGRIDPSDSYTNYSPSFQGHVTISADKSISTAYLQWSSLKASDTAMYYCARHEPPTYDSSGYYYDAFDIWGQGTMVTVSS

SEQ ID NO: 6003 - protein, 123 aa, Artificial Sequence
  Synthetic construct
EVQLVQSGAEVKKPGESLKISCKGSGYSFTNYWIGWVRQMPGKGLEWMGIIYPGDSDTRYSPSFQGQVTISADKSMSTASLQWSSLKASDTAIYYCARARGRGSGYYSDFDSWGQGTLVTVSS

SEQ ID NO: 6004 - protein, 122 aa, Artificial Sequence
  Synthetic construct
EVQLVQSGAEMKNPGESLRISCKGSGYNFISSWINWVRQMPGKGLEWMGRIDPQDSYTNYSPSFQGHVTISVDKSISTAYLQWSSLKTSDTAIYYCAMGSVAWAGRKGADFWGQGTLVTVSS

SEQ ID NO: 6005 - protein, 121 aa, Artificial Sequence
  Synthetic construct
QGQLVESGGDVVQPGTSLRLSCVGSGVTYAADALHWVRQAPGKGLEWVALISFDGSKKNYADSVKGRFTISRDRSKNTLFLQMNSLTTEDTAVYFCAREAFGWEQKHLDHWGQGTLVTVSS

SEQ ID NO: 6006 - protein, 122 aa, Artificial Sequence
  Synthetic construct
EGQLVESGGGLVQPGRSLRLSCAAAGFVFEDHAMYWVRQAPGKGLEWVSGISWNSGSIVYADSVKGRFTISRDNAENSLYLQMNSLRAEDTALYYCTKDRDLLGLGEAFDTWGQGTMVTVSS

SEQ ID NO: 6007 - protein, 121 aa, Artificial Sequence
  Synthetic construct
EVQLLESGGGLVQPGGSLRLSCAASGFTFSSYAMSWVRQAPGKGLEWVSAISGSGGSTYYADSVKGRFTISRDNSKNTLYLQMNSLRAEDTAVYYCAKDFYYDILTEPWYWGQGTLVTVSS

SEQ ID NO: 6008 - protein, 127 aa, Artificial Sequence
  Synthetic construct
QVQLVQSGSELKRPGASVRISCTASGYLFTAHSVSWVRQAPGQAPEWMGWINTDTGHPTYGQALRGRIVLSADTSVNTAYLEISSLENEDTAVYYCARIFHDGHNYDYEPLAWFDNWGQGTLVSVSS

SEQ ID NO: 6009 - protein, 127 aa, Artificial Sequence; identical to SEQ ID NO: 5678
  Synthetic construct

SEQ ID NO: 6010 - protein, 122 aa, Artificial Sequence
  Synthetic construct
EVKLLESGGGLAQPGGSLRLSCATSGFTFSTYAMSWVRQAPGKGLEWVSAIRGSGDKTYYADSVKGRFTISRDNFKNTVSLQMNSLRAEDTAIYYCAKDSSSWYAGGYFDSWGQGTHVTVSS

SEQ ID NO: 6011 - protein, 124 aa, Artificial Sequence
  Synthetic construct
QVQLQESGPGLVKPSETLSLTCTVSGDSFSNYYWTWIRQPPGKGLEWIGYIYNSAVTHYNPSLKSRVTMSGDTSKNQFSLRLSSVTAADTAVYYCARDHHHSSDFYFNGVFDIWGQGTMVTVSS

SEQ ID NO: 6012 - protein, 119 aa, Artificial Sequence
  Synthetic construct
QLQLQESGPGLVKPSEALSLTCTVSGGSISTNYYWGWIRQAPGKGPEWIGSIYYSDPPYYNTALKSRVTLSLDTSKNQFSLRMTSVTTADTAVYYCARHEQWLIGFRHWGQGTLVTVSS

SEQ ID NO: 6013 - protein, 117 aa, Artificial Sequence
  Synthetic construct
QVHLVQSGAEVKNPGASVKVSCRSSGDTFTSNGITWVRQAPGQGLEWMGWISTNNGNTNYAQKFQGRVTMTTDTSTTTAYMDLRSLRSDDTAVYYCATDGFSPSDHWGQGTLVTVSS

SEQ ID NO: 6014 - protein, 119 aa, Artificial Sequence
  Synthetic construct
QVHLVESGGGVVQPGRSLRLSCAASGFSFSNYGMHWVRQAPGKGLEWLALVSVDGNNQFYSDSVKGRFTISRDNSMNTLYLQMNSLRPEDTAVYFCARFGAEQGNFDYWGPGTLVTVSS

SEQ ID NO: 6015 - protein, 122 aa, Artificial Sequence
  Synthetic construct
QVQLVQSGAEVKKPGASVKVSCKASGYTFTGYYMHWVRQAPGQGLEWMGWINPNSGGTNYAQKFQGRVTMTRDTSISTAYMELSRLRSDDTAVYYCARVYFDWPKTYYFDYWGQGTLVTVSS

SEQ ID NO: 6016 - protein, 132 aa, Artificial Sequence
  Synthetic construct
EVQLVESGGGLVQPGGSLRLSCAASGFTVSSNYMSWVRQAPGKGLEWVSVIYSGGSTYYADSVKGRFTISRDNSKNTLYLQMNSLRAEDTAVYYCARDWGYYYGSGSYYKRVRDYYYGMDVWGQGTTVTVSS

SEQ ID NO: 6017 - protein, 126 aa, Artificial Sequence
  Synthetic construct
QVQLVQSGAEVKKPGSSVKVSCKASGGTFSSYAISWVRQAPGQGLEWMGGIIPIFGTANYAQKFQGRVTITADESTSTAYMELSSLRSEDTAVYYCASLGEYSSGWKTKKNWFDPWGQGTLVTVSS

SEQ ID NO: 6018 - protein, 115 aa, Artificial Sequence
  Synthetic construct
EVQLLESGGGLVQPGGSLRLSCAASGFTFSSYAMSWVRQAPGKGLEWVSAISGSGGSTYYADSVKGRFTISRDNSKNTLYLQMNSLRAEDTAVYYCAKGAGFDYWGQGTLVTVSS

SEQ ID NO: 6019 - protein, 122 aa, Artificial Sequence
  Synthetic construct
QVQLVESGGGVVQPGRSLRLSCAASGFTFRSYGMHWVRQAPGKGLEWVAVISYDGSNKYYADSVKGRFTISRDNSKTTLYLQMTSVRAEDTAVYYCVRSRVVAPRPSYFDYWGQGTLVTVSS

SEQ ID NO: 6020 - protein, 123 aa, Artificial Sequence
  Synthetic construct
QVQLVQSGAEVKKPGASVKVSCKASGYTFTGYYMHWVRQAPGQGLEWMGWINPNSGGTNYAQKFQGRVTMTRDTSISTAYMELSRLRSDDTAVYYCARVRYYGSGSYYIFDYWGQGTLVTVSS

SEQ ID NO: 6021 - protein, 123 aa, Artificial Sequence
  Synthetic construct
EVQLVESGGGLVQPGGSLRLSCAASGFTFSDHYMDWVRQAPGKGLEWVGRTRNKANSFATEYAASVKGRFTISRDNSKRSLYLQMNSLKTEDTAVYYCARDQSYGSGSGLDYWGQGALVTVSS

SEQ ID NO: 6022 - protein, 130 aa, Artificial Sequence
  Synthetic construct
QVQLVQSGAEVKKPGASVKVSCKASGYTFTGYYMHWVRQAPGQGLEWMGWINPNSGGTNYAQKFQGWVTMTRDTSISTAYMELSRLRSDDTAVYYCARGHYYGSGSYPHPAYYYYGMDVWGQGTTVTVSS

SEQ ID NO: 6023 - protein, 120 aa, Artificial Sequence
  Synthetic construct
EVQLVESGGGLVQPGGSLRLSCAASGFTFSSYWMHWVRQAPGKGLVWVSRINSDGSSTSYADSVKGRFTISRDNAKNTLYLQMNSLRAEDTAVYYCARLNYYYYYGMDVWGQGTTVTVSS

SEQ ID NO: 6024 - protein, 120 aa, Artificial Sequence
  Synthetic construct
QVQLVQSGAEVKKPGSSVKVSCKASGVTFTSYAISWVRQAPGQGLEWMGKIIPVLGVANYAQKFQGTVTITADKSTSTTYMELSSLRSEDTAVYYCATITTMVDYAMDVWGQGTTVTVSS

SEQ ID NO: 6025 - protein, 123 aa, Artificial Sequence
  Synthetic construct
QVQLQESGPGLVKPSETLSLTCTVSGGSISSYYWSWIRQPPGKGLEWIGYIYYSGSTNYNPSLKSRVTISVDTSKNQFSLKLSSVTAADTAVYYCARYRGYSYGSPRYYFDYWGQGTLVTVSS

SEQ ID NO: 6026 - protein, 122 aa, Artificial Sequence
  Synthetic construct
QVQLVQSGAEVKKPGASVKVSCKASGYTFTSYGISWVRQAPGQGLEWMGWISAYNGNTNYAQKLQGRVTMTTDTSTSTAYMELRSLRSDDTAVYYCARDLGSSSSLLWFDYWGQGTLVTVSS

SEQ ID NO: 6027 - protein, 117 aa, Artificial Sequence
  Synthetic construct
QVQLVQSGSELKKPGASVKVSCKASGYTFTNYGMNWVRQAPGQGLEWMGWINTRTGNPTYGQGFTGRFVFSLDTSVTTAYLQISSLKAEDTAVYYCATASGWPLDFWGQGTLVTVSS

SEQ ID NO: 6028 - protein, 125 aa, Artificial Sequence; identical to SEQ ID NO: 5711
  Synthetic construct

SEQ ID NO: 6029 - protein, 115 aa, Artificial Sequence
  Synthetic construct
QVQLVESGGGVVQPGRSLRLSCAGSGFTFSSYDMHWVRQAPGKGLEWVAVKSYDGNNKDYGDSVKGRFTISRDNSKNTLYLQMNSLRVEDTAVYYCARGRSMDVWGQGTTVTVSS

SEQ ID NO: 6030 - protein, 121 aa, Artificial Sequence
  Synthetic construct
QVQLQESGPGLVKPSQTLSLTCTVSGGSISSGSYYWSWIRQPAGKGLEWIGRIYTSGSTNYNPSLKSRVTISVDTSKNQFSLKLSSVTAADTAVYYCAREYGSGSSIFDYWGQGTLVTVSS

SEQ ID NO: 6031 - protein, 116 aa, Artificial Sequence
  Synthetic construct
EVQLVESGGGLVKPGGSLRLSCAASGFTFSNTWMSWVRQAPGKGLEWVGRIKSKTDGGTTDYAAPVKGRFTISRDDSKNTLYLQMNSLKTEDTAVYYCFQYQVTPWGQGTLVTVSS

SEQ ID NO: 6032 - protein, 123 aa, Artificial Sequence
  Synthetic construct
VVQLVESGGGLIQPGGSLRLSCAASGSNVRNNDMTWVRQAPGKGLEWVSVILSTGTTYNADSVRGRVTISRDDSKNTVFLQMSSLRAEDTAVYYCARDSGYGYGLHEEAFDVWGQGTMVTVSS

SEQ ID NO: 6033 - protein, 124 aa, Artificial Sequence
  Synthetic construct
QVQLQESGPGLVKPSQTLSLTCTVSGGSITTGGYYWSWIRQHPGKGLEWIGYIYHSGTTYYNPSLKSRVFISVDTSKNQFSLKLTSVTVADTAVYYCAREGGGPYDRSHYYDIWGRGTLVTVSS

SEQ ID NO: 6034 - protein, 120 aa, Artificial Sequence
  Synthetic construct
QVQLVQSGAEVKKPGASVKVSCKASGYTFTSYAMHWVRQAPGQRLEWMGWINAGNGNTKYSQKFQGRVTITRDTSASTAYMELSSLRSEDTAVYYCARARGRYSAEFDYWGQGTLVTVSS

SEQ ID NO: 6035 - protein, 122 aa, Artificial Sequence
  Synthetic construct
EVQLVESGGGLVQPGGSLRLSCSASGFTFSSYAMHWVRQAPGKGLEYVSAISSNGGSTYYADSVKGRFTISRDNSKNTLYLQMSSLRAEDTAVYYCVKPASSWTPQIVRDYWGQGTLVTVSS

SEQ ID NO: 6036 - protein, 119 aa, Artificial Sequence
  Synthetic construct
EVQLVESGGGLVQPGGSLRLACGASGFIMSSYWMSWVRQAPGKGLEWVANINQDGSEEYYVDSVKGRFTISRDNAKNSLYLQMNSLRTEDTAVYHCARVCCRLGRSDFWGQGTLVTVSS

SEQ ID NO: 6037 - protein, 120 aa, Artificial Sequence
  Synthetic construct
QVQLVESGGGVVQPGGSLRLSCVASGFTFSDYGIHWVRQAPGKGLEWVGIIWYDGTNTHFPESVRGRFTISRDNSKNTVFLQMNSLRVDDTAVYYCARDRSRSTGSFDSWGQGTPVSVST

SEQ ID NO: 6038 - protein, 121 aa, Artificial Sequence
  Synthetic construct
QVQLQQSGPGLVKPSQTLSLTCAISGDSVSSTSAAWNWIRQSPSRGLEWLGRTYYRSKWSNDYAISVKSRITINPDTSKNQFSLQLNSVTPEDTAVYYCASGVRSSGFDIWGQGTVVTVSA

SEQ ID NO: 6039 - protein, 132 aa, Artificial Sequence
  Synthetic construct
EVQLVESGGGLVKPGGSLRLSCAASGFTFSSYSMNWVRQAPGKGLEWVSSISSSSSYIYYADSVKGRFTISRDNAKNSLYLQMNSLRAEDTAVYYCARGAGYCSSTSCSQKQRYYYYGMDVWGQGTTVTVSS

SEQ ID NO: 6040 - protein, 120 aa, Artificial Sequence
  Synthetic construct
QVQLQESGPGLVKPSQTLSLTCTVSGDSIGYGGYYWSWIRQHPGKGLEWLGYIYDSGSTSYSPSLKSRVIISLDTSKNQFSLRLTSVTAADTAIYYCARAYSDSWGFDYWGQGTLVTVSS

SEQ ID NO: 6041 - protein, 126 aa, Artificial Sequence
  Synthetic construct
EVQLVQSGAEVKKPGESLRISCKGSGYSFTSYWISWVRQMPGKGLEWMGRIDPSDSYTNYSPSFQGHVTISADKSISTAYLQWSSLKASDTAMYYCARHYNGGYCSGGSCYSFDYWGQGTLVTVSS

SEQ ID NO: 6042 - protein, 121 aa, Artificial Sequence
  Synthetic construct
EAQLLESGGRLGPPGGSLRLSCAASGFTFRSSAMSWVRQAPGKGLEWVSGVSGSGDSPYYADSVRGRFTISRDNSKNTLYLQLNSLRVEDTAMYYCAKHVRGWFIYGLDVWGHGTTVTVSS

SEQ ID NO: 6043 - protein, 124 aa, Artificial Sequence
  Synthetic construct
QLQLQESGPGLVKPSETLSLTCTVSGGSIRNSNYYWGWIRQSPEKGLEWIGNIYYNGNAYYNPSLKSRVTISLDTSKNQFSLKLSSVTAADTAIYYCARRRGTDISTGRFFDSWGQGTLVTVSS

SEQ ID NO: 6044 - protein, 120 aa, Artificial Sequence
  Synthetic construct
QLQLQESGPGLVKPSETLSLTCTVSGGSISSSSYYWGWIRQPPGKGLEWIGSIYYSGSTYYNPSLKSRVTISVDTSKNQFSLKLSSVTAADTAVYYCARFGVKENWFDPWGQGTLVTVSS

SEQ ID NO: 6045 - protein, 121 aa, Artificial Sequence
  Synthetic construct
QVQLVESGGGVVQPGRSLRLSCAASGFTFRSCAMHWVRQAPGKGLEWVAVIAYDGSNEFHADSVKGRFTISRDNSDNTLYLQMNSLRNEDTAVYYCARDPDPATYSPYGMDVWGQGTTVIV

SEQ ID NO: 6046 - protein, 130 aa, Artificial Sequence
  Synthetic construct
QVQLQESGPGLVKPSQTLSLTCTVSGGSISSGSYYWSWIRQPAGKGLEWIGRIYTSGSTNYNPSLKSRVTISVDTSKNQFSLKLSSVTAADTAVYYCAREGRGYFFLSGGYYYYYGMDVWGQGTTVTVSS

SEQ ID NO: 6047 - protein, 126 aa, Artificial Sequence
  Synthetic construct
QVQLVQSGAEVKKPGASVKVSCKASGYTFTGYYMHWVRQAPGQGLEWMGWINPNSGGTNYAQKFQGRVTMTRDTSISTAYMELSRLRSDDTAVYYCARDGRLRNSGSYYGNWFDPWGQGTLVTVSS

SEQ ID NO: 6048 - protein, 123 aa, Artificial Sequence
  Synthetic construct
EVQLVESGGGLVKPGGSLRLSCAASGFTFSSYSMTWVRQAPGKGLEWVSSISANSAYIYYVDSVKGRFTISRDNAKNSLFLQMNSLRAEDTAVYYCARCGGGACNRAGGMDVWGQGTTVTVSS

SEQ ID NO: 6049 - protein, 125 aa, Artificial Sequence
  Synthetic construct
QLQLQESGPGLVKPSETLSLTCTVSGGSVYSSNYCWGWIRQSPGQGLEWIGSGYYSGSTYYNPALKSRVSIFVDTSENQVSLKLRSVTAADTAVYYCARHFRYYDFWSGYALDFWGQGTLVTVSS

SEQ ID NO: 6050 - protein, 125 aa, Artificial Sequence
  Synthetic construct
QVQLVESGGDLVKPGGSLRLSCAASGFTFSDYYMTWIRQAPGKGLEWVSYISGGGRVIYYRDSVKGRFTISRDNAEKSLSLQMNTLRAEDTAIYYCAGQKEGVSIFGTDYGMDVWGQGTTVIVSS

SEQ ID NO: 6051 - protein, 125 aa, Artificial Sequence
  Synthetic construct
EVQLVESGGGLVQPGGSLRLSCAASGFTFDSYWMHWVRQVPGKGLVWVSRIKFDGSDTRYADSVKGRFTVSRDNTKSTLYLQMNSLRVEDTAVYYCARDLGGNYYLLPHDWFDTWGQGILVTVSS

SEQ ID NO: 6052 - protein, 119 aa, Artificial Sequence
  Synthetic construct
EERLVESGGGLAQPGGSLRLSCVASRFTFSDFWMSWVRQAPGKGLEWVANINQDGGDKYYVDSVKGRFTVSRDNAKNSVYLQMNNLSAQDTALYYCTREGGATNIFDLWGQGALVTVSS

SEQ ID NO: 6053 - protein, 125 aa, Artificial Sequence
  Synthetic construct
EVQLLESGGGLVQPGGSLRLSCVASGFTFSSYAMNWVRQVPGKGLEWVSVISASDGRTYYVDSVKGRFTISRDNSKNTLYVQMNSLRVEDTAVYYCARGPPAGYYGSIVGAFDIWGQGTLVTVSS

SEQ ID NO: 6054 - protein, 122 aa, Artificial Sequence
  Synthetic construct
EVQLVESGGGLVKPGGSLRLSCAASGFTFSSYSMNWVRQAPGKGLEWVSSISSSSSYIYYADSVKGRFTISRDNAKNSLYLQMNSLRAEDTAVYYCARGGIVGATRGFFDYWGQGTLVTVSS

SEQ ID NO: 6055 - protein, 123 aa, Artificial Sequence; identical to SEQ ID NO: 5437
  Synthetic construct

SEQ ID NO: 6056 - protein, 127 aa, Artificial Sequence
  Synthetic construct
EVQLVESGGGLVKPGGSLRLSCAASESTFRIHNMNWVRQAPGKGLEWLCSISSTSSHIFYADSVKGRFTISRDNAEKSLYLQMNRLRAEDTAVYYCAGEGTYVVRGVVHFYYAMNVWGQGTTVTVSS

SEQ ID NO: 6057 - protein, 127 aa, Artificial Sequence
  Synthetic construct
QVQLVQSGAEVKKPGASVKVSCKASGYTFTSYYMHWVRQAPGQGLEWMGIINPSGGSTSYAQKFQGRVTMTRDTSTSTVYMELSSLRSEDTAVYYCARDRITMVRGAPISYYGMDVWGQGTTVTVSS

SEQ ID NO: 6058 - protein, 123 aa, Artificial Sequence
  Synthetic construct
EVQLVESGGGLGLPGGSLRLSCAASGFTFSSHWMSWVRQAPGKGLEWVANINQDGRQKYYVDSVKGRFTISRDNAKNSLYLQMSSLRGEDTAMYFCARDQIYSSKWYQHSDSWGQGTLVTVSS

SEQ ID NO: 6059 - protein, 119 aa, Artificial Sequence
  Synthetic construct
EVQLVESGGGLIQPGGSLRLSCAASGFTVSSNYMSWVRQAPGKGLEWVSVIYSGGSTYYADSVKGRFTISRDNSKNTLYLQMNSLRAEDTAVYYCARVKGSGIRAFDIWGQGTMVTVSS

SEQ ID NO: 6060 - protein, 115 aa, Artificial Sequence
  Synthetic construct
EVQLLESGGGLVQPGGSLRLSCAASGFTFSNYAMSWVRQAPGKGLEWVSAISGSGGSTYYADSVKGRFTISRDNSKKTLYLQMNSLTVEDTAVYYCAKGSGIDYWGQGTLVTVSS

SEQ ID NO: 6061 - protein, 118 aa, Artificial Sequence
  Synthetic construct
QVQLRESGPGLVKPSETLSLTCTVSGGLLSSYWWTWIRQPPGGGLEWLGYIYFSRNTKYNPALQSRIAMSTDTSKNQFSLTLWSVTAADTAVYYCARANSGADSVDYWGQGTLVTVAP

SEQ ID NO: 6062 - protein, 122 aa, Artificial Sequence
  Synthetic construct
QVQLVESGGGVVQPGRSLRLSCAASGFTFSSYGMHWVRQAPGKGLEWVAVISYDGSNKYYADSVKGRFTISRDNSKNTLYLQMNSLRAEDTAVYYCAKDRSRYYGSGIEDYWGQGTLVTVSS

SEQ ID NO: 6063 - protein, 117 aa, Artificial Sequence
  Synthetic construct
EVQLVQSGAEVRKPGAAVRLSCKVSGYTFTDYYIHWVRQAPGKGLEWMGLIDPEYGETIYAEKFQGRLTITADTSTDTAYMELSSLRSEDTAVYFCSTDRAAGFDHWGQGSLVAVSS

SEQ ID NO: 6064 - protein, 127 aa, Artificial Sequence
  Synthetic construct
EVQLVESGGGLVKPGRSLRLSCTASGFTFGDYAMSWFRQAPGKGLEWVGFIRSKAYGGTTEYAASVKGRFTISRDDSKSIAYLQMNSLKTEDTAVYYCTRVLAYCGGDCYRGPFDYWGQGTLVTVSS

SEQ ID NO: 6065 - protein, 114 aa, Artificial Sequence
  Synthetic construct
EVQLVESGGGLVKPGGSLRLSCAASGFTFSSYSMNWVRQAPGKGLEWVSSISSSSSYIYYADSVKGRFTISRDNAKNSLYLQMNSLRAEDTAVYYCASSSPDYWGQGTLVTVSS

SEQ ID NO: 6066 - protein, 117 aa, Artificial Sequence
  Synthetic construct
KVQLVQSGAEVKKPGATVKISCKVSGYTFTDYYIHWVQQAPGKGLEWMGLIDPENGETIYAEKFQGRVTIAADTSTDTAYMELSSLRSDDTAVYYCATNRQGNFDYWGQGALVTVSS

SEQ ID NO: 6067 - protein, 121 aa, Artificial Sequence
  Synthetic construct
QVQLVESGGGVVQPGRSLRLSCAASGFTFSSYGMHWVRQAPGKGLEWVAVIWYDGSNKYYADSVKGRFTISRDNSKNTLYLQMNSLRAEDTAVYYCAREHLSESRYLLDYWGQGTLVTVSS

SEQ ID NO: 6068 - protein, 125 aa, Artificial Sequence
  Synthetic construct
EVQLVQSGAEVKKPGESLKISCKGSGYSFTSYWIGWVRQMPGKGLEWMGIIYPGDSDTRYSPSFQGQVTISADKSISTAYLQWSSLKASDTAMYYCARQKRGYSYGYSADAFDIWGQGTMVTVSS

SEQ ID NO: 6069 - protein, 125 aa, Artificial Sequence
  Synthetic construct
QVQLQESGPGLVKPSQTLSLTCTVSGGSISSGSYYWSWIRQPAGKGLEWIGRIYTSGSTNYNPSLKSRVTISVDTSKNQFSLKLSSVTAADTAVYYCAREYYDILTGYYVGFDYWGQGTLVTVSS

SEQ ID NO: 6070 - protein, 126 aa, Artificial Sequence
  Synthetic construct
QVQLVESGGGVVQPGRSQRLSCAASGFTFSDYGMHWVRQTPGKGLEWVAAIWFDGSNKDYADSVKGRFTISRDNSKNTLYLEMNSLRVEDTAVYYCARDHVYGLGLGERNDALDIWGQGTMVTVST

SEQ ID NO: 6071 - protein, 119 aa, Artificial Sequence
  Synthetic construct
QVQLVESGGRVVQPGMSLRLSCEASGFTFSIYTMHWVRQAPGKGLQWVSLISNDGSDKYYADSVKGRFTVSRDNSKNTLYLQVNSLRPEDTAVYYCSRAPRFGYPLDYWGLGTPVTVSS

SEQ ID NO: 6072 - protein, 128 aa, Artificial Sequence
  Synthetic construct
QLQLQESGPGLVKPSETLSLTCTVSGGSISSSSYYWGWIRQPPGKGLEWIGSIYYSGSTYYNPSLKSRVTISVDTSKNQFSLKLSSVTAADTAVYYCARQSRYITMVRGAPYWYFDLWGRGTLVTVSS

SEQ ID NO: 6073 - protein, 122 aa, Artificial Sequence
  Synthetic construct
EVQLLESGGGLVQPGTSLRLSCAASGFTFTSYAMNWVRQAPGKGLEWVSGISFSDGSTYYADSVKGRFTIYRDNSKNTLYLQMNSLRPEDTAVYYCAKESPLVIGADGSASLVNMNVWGQGT

SEQ ID NO: 6074 - protein, 123 aa, Artificial Sequence
  Synthetic construct
QLQLQESGSGLVKPSQTLSLTCAVSGGSISSGGYSWSWIRQPPGKGLEWIGYIYHSGSTYYNPSLKSRVTISVDRSKNQFSLKLSSVTAADTAVYYCARQTWFGELLSWFDPWGQGTLVTVSS

SEQ ID NO: 6075 - protein, 123 aa, Artificial Sequence; identical to SEQ ID NO: 5437
  Synthetic construct

SEQ ID NO: 6076 - protein, 125 aa, Artificial Sequence
  Synthetic construct
QVQLVQSGAEVKKPGSSMKVSCKASGVNFRSYSFSWVRQAPGQGLEWMGGVIPYFPTANYAEKFRDRVTVTADESTGTVYLEMSSLRSGDTAVYYCASEYFDGRSFHSFCGLDVWGQGTPVTVSS

SEQ ID NO: 6077 - protein, 123 aa, Artificial Sequence; identical to SEQ ID NO: 5437
  Synthetic construct

SEQ ID NO: 6078 - protein, 131 aa, Artificial Sequence
  Synthetic construct
EVQLVESGGGLVQPGGSLRLSCAASGFTFSSYAMHWVRQAPGKGLEYVSAISSNGGSTYYANSVKGRFTISRDNSKNTLYLQMGSLRAEDMAVYYCARAWSDCSSTSCFARSPYYYGMDVWGQGTTVTVSS

SEQ ID NO: 6079 - protein, 118 aa, Artificial Sequence
  Synthetic construct
EVQLVESGGGLVQPGRSLRLSCTASGFTFGDYSMSWFRQAPGKGLEWVGFIRSKAFGGTTEYAASVKGRFTISRDDSKNIASLQMNSLKNEDTAVYYCLGYYYGMDVWGQGTTVTVSS

SEQ ID NO: 6080 - protein, 131 aa, Artificial Sequence
  Synthetic construct
EVQLVQSGAEVKKPGESLRISCQGSGYSFSRNWISWVRQTPGKGLEWMGRIDPTESYTNYSPSFQGHVTISADKSISTAYLQWSSLKASDTGIYYCATAGDILTGYHYSIIDSSRYLTRFWGQGTTVIVSS

SEQ ID NO: 6081 - protein, 147 aa, Artificial Sequence
  Synthetic construct
QVQLQESGPGLVKPSQTLSLTCIVSGASISSDYFYWSWVRQPPGQGLEWIGSIFYTGTTYSSPSLKSRLTISVDTSKNQISLSLISVTAADTAVYYCARDYPAGWEEESRSSKDVGVRSGNYYSKPEESYYYGLDVWGQGTTVTVSS

SEQ ID NO: 6082 - protein, 116 aa, Artificial Sequence
  Synthetic construct
EVQLQESGPGLVQPSETLSLTCTVSGASMFSHYWNWIRQFPGGELDWIGRVYYSGSIDYNPSLKSRVALSMDPSKNHFSLKVNSVTAADTAVYFCVRDRRGFFDEWGQGALVTVSS

SEQ ID NO: 6083 - protein, 125 aa, Artificial Sequence
  Synthetic construct
EVQLVESGGGLVKPGGSLRLSCTASGFTFSTYAMNWVRQAPGKGLEWVSFISSSSDYVYYADSVKGRFTISRDNAKNSLYLQLNSLRAEDTAVYYCATTHTSYYYDSSAGYMDVWGQGTAVTVSS

SEQ ID NO: 6084 - protein, 124 aa, Artificial Sequence
  Synthetic construct
QVQLQESGPGLVKPSQTLSLTCAVSGGSISRGGYYWNWIRQHPGKGLEWIGSFYDNGSTYYTPSLKSRVTISVDTSKNQFSLELSSVTAADTAMYYCARTRSLFYDNSGGFDYWGQGTLVTVSS

SEQ ID NO: 6085 - protein, 126 aa, Artificial Sequence
  Synthetic construct
QVRLVQSGATLKRPGTSVKISCKASGFTFVDFFIHWVRQAPGQGPEWVAWINPSGASQLAQKFQGRITMTRSTSSSTAYLELSSLTSDDTAVYYCARSYHYGTGGYRYYYYGMDAWGQGTTVTVSS

SEQ ID NO: 6086 - protein, 117 aa, Artificial Sequence
  Synthetic construct
QVQLQQWGAGLLKPSETLSLTCAVYGGSFSGYYWSWIRQPPGKGLEWIGEIHHRGTTKYNPSLKSRVTISADTSKNQFSLQLTSVTAADTAVYYCARARGSDYFGYWGQGTLVTVAS

SEQ ID NO: 6087 - protein, 120 aa, Artificial Sequence
  Synthetic construct
QVQLVQSGAEVKKPGSSVKVSCKTSGATFSSYAISWVRQAPGQGLEWVGRIIPILDLANYAQKFQGRVTINADKSTSTAYMELNILTSEDTAVYYCARDAHTWVGVLGFWGQGTLVTVSS

SEQ ID NO: 6088 - protein, 131 aa, Artificial Sequence
  Synthetic construct
QVQLQQWGAGLLKPSETLSLTCAVYGGSFSGYYWSWIRQPPGKGLEWIGEINHSGSTNYNPSLKSRVTISVDTSKNQFSLKLSSVTAADTAVYYCARGRIFRYYDSSGYATFQSVRYFDYWGQGTLVTVSS

SEQ ID NO: 6089 - protein, 120 aa, Artificial Sequence
  Synthetic construct
EVQLLESGGGLVQPGGSLRLSCAASGFTFSRYGMSWVRQAPGKGLEWVSVISGSGGSTYYADSVKGRFTISRDNSKNTLYLQMNSLRAEDTAVYYCAKGLAVAGSSYDPWGQGTLVTVSS

SEQ ID NO: 6090 - protein, 124 aa, Artificial Sequence
  Synthetic construct
EVQLVESGGGLVQPGRSLRLSCTGSGFLFSDYIISWFRQAPGKGLEWVGLIRSKTYGATTEYAASVKGRFTVSRDDSKTIAYLQMNSLKIEDTAVYFCTRDLYCTGDSCDDNYWGQGTLVTVSS

SEQ ID NO: 6091 - protein, 129 aa, Artificial Sequence
  Synthetic construct
EVQLVQSGAEVKKPGESLSISCQTSGYRFTFYYIGWVRQVPGRGLEWMAIMFPSDSDTRYNPSFEGHVTISADQSVNTAYLHWSSLKASDSAIYYCVRLSAAGGMAFCGGVCPNGFDVWGQGTMVTVSS

SEQ ID NO: 6092 - protein, 123 aa, Artificial Sequence; identical to SEQ ID NO: 5670
  Synthetic construct

SEQ ID NO: 6093 - protein, 125 aa, Artificial Sequence
  Synthetic construct
QITLKESGPTLVKPTQTLTLTCTFSGFSLSTSGVGVGWIRQPPGKALEWLALIYWDDDKRYSPSLKSRLTITKDTSKNQVVLTMTNMDPVDTATYYCARGVVPAAPPWSPQFDYWGQGTLVTVSS

SEQ ID NO: 6094 - protein, 125 aa, Artificial Sequence
  Synthetic construct
QLQLQESDSGLVKPSQTLSLTCAVSGVSITGAGYSWSWVRQPPGRGLEWIGYIYHSGSTTYNPSLKSRVTMSLDRSKNQVSLKLNSVTAADTAVYFCARGPRAIGFGDYGWFDPWGQGTLVTVSS

SEQ ID NO: 6095 - protein, 123 aa, Artificial Sequence
  Synthetic construct
QVQLVQSGAEVKKPGASVKVSCKASGYTFTGYYLHWLRQAPGQGLEWVGWINPNTGATDFAQKFQGRVVMTSDSSIPAAYLELSRLRSDDTAVYFCARDQYASSWYSGLIDYWGRGTLITVSS

SEQ ID NO: 6096 - protein, 126 aa, Artificial Sequence; identical to SEQ ID NO: 5543
  Synthetic construct

SEQ ID NO: 6097 - protein, 122 aa, Artificial Sequence
  Synthetic construct
QVQLVESGGGVVQPGRSLRLSCAASGFTFSSYGMHWVRQAPGKGLEWVAVISYDGSNKYYADSVKGRFTISRDNSKNTLYLQMNSLRAEDTAVYYCAKERYRSGGSCPLHVWGQGTTVTVSS

SEQ ID NO: 6098 - protein, 117 aa, Artificial Sequence
  Synthetic construct
QVQLVESGGGVVQPGTSLRLSCAGSGITLTDIGVHWVRQPPGKGLEWVAVISYDGSNKDYADSVKGRFNISRDNSKKMLFLQMNSLRPEDTAVYFCATPVVERRDYWGQGTLVTVSS

SEQ ID NO: 6099 - protein, 126 aa, Artificial Sequence
  Synthetic construct
EVQLVESGGGLVQPGGSLRLSCSASGFTFSSYAMHWVRQAPGKGLEYVSAISSNGGSTYYADSVKGRFTISRDNSKNTLYLQMSSLRAEDTAVYYCVKGRPKYGSGSYYLKNFDYWGQGTLVTVSS

SEQ ID NO: 6100 - protein, 124 aa, Artificial Sequence
  Synthetic construct
EVQLVESGGGLVKPGGSLRLSCAASGFTFSSYSMNWVRQAPGKGLEWVSSISSSSSYIYYADSVKGRFTISRDNAKNSLYLQMNSLRAEDTAVYYCARDQLRRSSWYHFCFDYWGQGTLVTVSS

SEQ ID NO: 6101 - protein, 123 aa, Artificial Sequence
  Synthetic construct
QVQLQESGPGLVKPSQTLSLTCTVSGGSIRSGSYYWSWIRQRPGKGLEWIGYVYYSGSTYYNPSLKSRVIISIDTSKNQFSLKLSSVTAADTAVYYCARDSDSSGYWGWFDPWGQGTLVTVSS

SEQ ID NO: 6102 - protein, 124 aa, Artificial Sequence
  Synthetic construct
QVQLVQSGAEVKKPGASVKVSCQASGYSFITYGISWVRQAPGQGLEWMGWISAYDGNTNYAQKVQDRVTMTTDTSTSTAYMELRSLGSDDTAVYYCARDARSIEDRYYYAMDVWGQGTTVTVSS

SEQ ID NO: 6103 - protein, 123 aa, Artificial Sequence; identical to SEQ ID NO: 5437
  Synthetic construct

SEQ ID NO: 6104 - protein, 121 aa, Artificial Sequence
  Synthetic construct
QVQLVQSGAEVKKPGASVKVSCKASGYTFTSYAMHWVRQAPGQRLEWMGWINAGNGNTKYSQKFQGRVTITRDTSASTAYMELSSLRSEDTAVYYCARGIAARHRKPGDYWGQGTLVTVSS

SEQ ID NO: 6105 - protein, 123 aa, Artificial Sequence
  Synthetic construct
EVQLLESGGGLVQPGGSLRLSCAASGFTFSSYAMSWVRQAPGKGLEWVSAISGSGGSTYYADSVKGRFTISRDNSKNTLYLQMNSLRAEDTAVYYCAKGRRNSGSYFPFFDYWGQGTLVTVSS

SEQ ID NO: 6106 - protein, 125 aa, Artificial Sequence
  Synthetic construct
EVQLVESGGGLVQPGGSLRLSCAASGFTFSSYWMHWVRQAPGKGLVWVSRINSDGSSTSYADSVKGRFTISRDNAKNTLYLQMNSLRAEDTAVYYCARGQYYYGSGSYATPFDYWGQGTLVTVSS

SEQ ID NO: 6107 - protein, 122 aa, Artificial Sequence
  Synthetic construct
EVQLVESGGVVVQPGGSLRLSCAASGFTFDDYTMHWVRQAPGKGLEWVSLISWDGGSTYYADSVKGRFTISRDNSKNSLYLQMNSLRTEDTALYYCAKGRHWRLWFGELLLWGQGTLVTVSS

SEQ ID NO: 6108 - protein, 123 aa, Artificial Sequence; identical to SEQ ID NO: 5437
  Synthetic construct

SEQ ID NO: 6109 - protein, 126 aa, Artificial Sequence
  Synthetic construct
QVQLVQSGTEVKSPGSSVRVSCRASGGAFINSAISWLRQAPGQSLEWVGRFIPSLNIPTYAQEFQKRVTFTVDKSSNTASLDLGSLRTDDTAVYYCARDSRVLSGTDPRGYALDVWGQGTTVIVSS

SEQ ID NO: 6110 - protein, 123 aa, Artificial Sequence; identical to SEQ ID NO: 5437
  Synthetic construct

SEQ ID NO: 6111 - protein, 123 aa, Artificial Sequence
  Synthetic construct
EVDLVESGGALVQRGGSLRLSCAGSGFTFNKYWMSWVRQAPGKGLEWVANIEQDGSEKYYVDSVKGRFTVSRDNAKNSLYLQMNSLRAEDTAIYYCAREDGRSSGWSSVLDQWGQGTLVTVSS

SEQ ID NO: 6112 - protein, 125 aa, Artificial Sequence; identical to SEQ ID NO: 5711
  Synthetic construct

SEQ ID NO: 6113 - protein, 124 aa, Artificial Sequence
  Synthetic construct
EVQLVESGGGLVQPGGSLRLSCAASGFTFSDSWMNWVRQAPGKGLEWVANIKRDGSEKYYVDSVRGRFTISRDNAKNSLYLLMNSLRADDTAVYYCARDSGTDYGGNSGAFDIWGQGTMVAVSP

SEQ ID NO: 6114 - protein, 121 aa, Artificial Sequence
  Synthetic construct
EVQLLESGGGLVQPGGSLRLSCAASGFTFSSYAMSWVRQAPGKGLEWVSAISGSGGSTYYADSVKGRFTISRDNSKNTLYLQMNSLRAEDTAVYYCAKLASYSRYNWFDPWGQGTLVTVSS

SEQ ID NO: 6115 - protein, 121 aa, Artificial Sequence
  Synthetic construct
QVQLVESGGGVVQPGRSLRVSCAASGFTFSRYGMHWVRQAPGKGLEWVAVISYDGSNKYYADSVKGRFTISRDNSKNTLYLQMNSLRAEDTAVFYCAKTTYSSGWWVFDYWGQGTLVTVSS

SEQ ID NO: 6116 - protein, 119 aa, Artificial Sequence
  Synthetic construct
QVQLQESGPGLVKPSQTLSLTCTVFGGSISGGSYYWSWIRQPAGKGLEWIGRTYTSGSTNYNPSLKSRVTISVDTSKNQFSLKLSSVTAADTAVYYCARDFWSGYSDYWGQGTLVTVSS

SEQ ID NO: 6117 - protein, 126 aa, Artificial Sequence
  Synthetic construct
EVQLVESGGGLVQPGGSLRLSCAASGFTFSSYWMHWVRQAPGKGLVWVSRINSDGSSTSYADSVKGRFTISRDNAKNTLYLQMNSLRAEDTAVYYCARDFITMVRGVIIGRGFDPWGQGTLVTVSS

SEQ ID NO: 6118 - protein, 127 aa, Artificial Sequence
  Synthetic construct
EVQLVESGGGLVQPGGSLRLSCAASGFTFSSYSMNWVRQAPGKGLEWVSYISSSSSTIYYADSVKGRFTISRDNAKNSLYLQMNSLRDEDTAVYYCARRRVREYQLLRAVGYGMDVWGQGTTVTVSS

SEQ ID NO: 6119 - protein, 114 aa, Artificial Sequence
  Synthetic construct
EVQLVESGGGLVKPGGSLRLSCAASGFTFSSYSMNWVRQAPGKGLEWVSSISSSSSYIYYADSVKGRFTISRDNAKNSLYLQMNSLRAEDTAVYYCARGPCITWGQGTLVTVSS

SEQ ID NO: 6120 - protein, 122 aa, Artificial Sequence
  Synthetic construct
QVQLVESGGGVVQPEKSLRLSCAASGFTFSSYGIHWVRQAPGKGLEWVAAISYDGTNKYYADSVKGRFTTSRDNSKNTLYLQMNSLRAEDTAMYYCAKDRSHHYTSGEFDHWGQGTLVTVSS

SEQ ID NO: 6121 - protein, 123 aa, Artificial Sequence
  Synthetic construct
EVQLVESGGGLVQPGGSLRLSCSASGFTFTTYPMHWVRQAPGKGLEYVSAISSTGDNTYYADSVKGRFTISRDTSKNTLYLQMNNLKAEDTAVYHCVKDLGWRSIAADGGDYWGQGTLVTVSS

SEQ ID NO: 6122 - protein, 128 aa, Artificial Sequence
  Synthetic construct
QVQLVESGGGFVKPGGSLRLSCAASEFTLSYYYMSWFRQAPGKGPEWISYISSSSNYTDYAASVKGRFTISRDNAKNSLYLQMNGLTPDDTAVYYCARASAFCGGDCRPPRAEYIQHFGRGTLVIVSS

SEQ ID NO: 6123 - protein, 128 aa, Artificial Sequence
  Synthetic construct
EVQLLESGGGLVQPGGSLRLSCAASGFTFSSYAMSWVRQAPGKGLEWVSAISGSGGSTYYADSVKGRFTISRDNSKNTLYLQMNSLRAEDTAVYYCAKAPTTRPGSGSYYRGGWFDPWGQGTLVTVSS

SEQ ID NO: 6124 - protein, 119 aa, Artificial Sequence
  Synthetic construct
QLLLQESGPGLVKPSEALSLICSVSGNSIRDDHYYWGWIRQSPGKGLEWLGSINYSGATYYKPSLRSRVTISADSSKNQISLRLTSVTAADTAMYFCARGSVDWSFDHWGRGILVSVSS

SEQ ID NO: 6125 - protein, 119 aa, Artificial Sequence
  Synthetic construct
QVQLVQSGAEVKKPGASVKVSCKASGYTFTGYYMHWVRQAPGQGLEWMGWINPNSGGTNYAQKFQGRVTMTRDTSISTAYMELSRLRSDDTAVYYCASSTVAGTSFDYWGQGTLVTVSS

SEQ ID NO: 6126 - protein, 125 aa, Artificial Sequence
  Synthetic construct
EVQLVESGGGLVQPGGSLRLSCVVYGFTFENYWMSWVRQAPGKGPEWVANIKPDGSEKNYVDSVKGRFTISRDNARRSVYLQMTGLRGEDTAVYHCARIQAATEYYNWNDVDDFWGQGTLVSVSS

SEQ ID NO: 6127 - protein, 128 aa, Artificial Sequence
  Synthetic construct
RVQLQESGPSQVKPSETLSLTCTVTGASISGTYHYWSWIRQPAGGGLEWIGRIFVSGNTNYNPSLKSRVTMSVDLDRNHFSLRLESVTAADAGVYYCARDRPSDHNFWSDRPYGLDVWGQGTTVTVSS

SEQ ID NO: 6128 - protein, 127 aa, Artificial Sequence; identical to SEQ ID NO: 5678
  Synthetic construct

SEQ ID NO: 6129 - protein, 123 aa, Artificial Sequence
  Synthetic construct
EVQLVESGGDLVQPGGSLRLSCAASGFTFSRHWIHWVRQAPGKGLVWVSRVSPDGTITTYADSVRGRFTISRDNAKNTVYLQMNSLRAEDTAVYFCVRDDDTLYHTGPHFDFWGQGALVTVTV

SEQ ID NO: 6130 - protein, 122 aa, Artificial Sequence
  Synthetic construct
EVQLVESGGGLVQPGGSLRLSCAASGFPFNTYSMNWVRQAPGKGLEWVSTISSLSSYIYYADSVKGRFTISRDNAKNSLYLQLDGLRAEDTAVYYCARGSSFYGSGSEFDPWGQGTLVTVSS

SEQ ID NO: 6131 - protein, 127 aa, Artificial Sequence
  Synthetic construct
EVQLLESGGGLVQPGGSLRLSCAASGFTFSSYAMSWVRQAPGKGLEWVSAISGSGGSTYYADSVKGRFTISRDNSKNTLYLQMNSLRAEDTAVYYCAKRGYSSGWRHSYYYYGMDVWGQGTTVTVSS

SEQ ID NO: 6132 - protein, 123 aa, Artificial Sequence; identical to SEQ ID NO: 5437
  Synthetic construct

SEQ ID NO: 6133 - protein, 137 aa, Artificial Sequence
  Synthetic construct
EVQLLESGGGLVQPGGSLRLSCAASGFTFSSYAMSWVRQAPGKGLEWVSAISGSGGSTYYADSVKGRFTISRDNSKNTLYLQMNSLRAEDTAVYYCAKGTKGGQKRRYCSSTSCYTGTYYYYGMDVWGQGTTVTVSS

SEQ ID NO: 6134 - protein, 124 aa, Artificial Sequence
  Synthetic construct
QAQLVESGGGVVQPGKSLRLSCTTSGFDFRTYGMHWVRQAPGRGLEWVAVISYEGSIKNYADSVKGRFTISRDNSQDTVYLQMNRLRPEDTAVYFCAKDLLVWFGEQLNAFHLWGQGTMVTVSS

SEQ ID NO: 6135 - protein, 122 aa, Artificial Sequence
  Synthetic construct
EVQLVESGGGLVKPGGSLRLSCTASGLSLSSYSMSWVRQAPGKGLEWVSSISSSSTYIFYADSVQGRFTISRDNAKNSLYLHMNSLRAEDTAVYYCVVCDITGCIRGYFDYWGQGTLVPVSS

SEQ ID NO: 6136 - protein, 121 aa, Artificial Sequence
  Synthetic construct
QVQLVQSGAEVKKPGASLKISCKTFGYTFSDYGFNWVRQAPGQGLEWMGWISVYNGNTNYAQKFQGRVTLTTDTSTTTAYMEVRSLRSDDTAVYYCARERSRGSIVGIDIWGQGTMVTVSS

SEQ ID NO: 6137 - protein, 125 aa, Artificial Sequence
  Synthetic construct
EVHLLESGGGFAQPGGSLRLSCAASGFTFDNYAMNWVRQAPGEGLEWVAAISASGATAYYPNSEKGRFIISRDNSKNTLYLQLNSLGVEDTATYYCVRGFFSNVRGRIVKGIDHWGQGTPVTVSS

SEQ ID NO: 6138 - protein, 119 aa, Artificial Sequence
  Synthetic construct
QVQLVESGGGVVQPGRSLRLSCAASGFTFSSYGMHWVRQAPGKGLEWVAVIWYDGSNKYYADSVKGRFTISRDNSKNTLYLQMNSLRAEDTAVYYCASDLSYDIEGGYWGQGTLVTVSS

SEQ ID NO: 6139 - protein, 122 aa, Artificial Sequence
  Synthetic construct
QLQLQESGPGLVKPSETLSLTCTVSGGSISSSSYYWGWIRQPPGKGLEWIGSIYYSGSTYYNPSLKSRVTISVDTSKNQFSLKLSSVTAADTAVYYCARQTTTTRGGWFDPWGQGTLVTVSS

SEQ ID NO: 6140 - protein, 126 aa, Artificial Sequence
  Synthetic construct
QVQLVESGGGLVKPGGSLRVSCAASGFSFSDHYMTWIRQAPGKGLEWVSYISKDGRHTKNADSVKGRFTISRDNAKNSLSLEMNNLRSDDTAVYYCARVFGTYYYGSGTYPNLDCWGQGTLITVSS

SEQ ID NO: 6141 - protein, 127 aa, Artificial Sequence
  Synthetic construct
EVQLVESGGGLVQPGRSLRLSCTASGFTFGDYAMSWFRQAPGKGLEWVGFIRSKAYGGTTEYAASVKGRFTISRDDSKSIAYLQMNSLKTEDTAVYYCTRALLEPQINYYYYGMDVWGQGTTVTVSS

SEQ ID NO: 6142 - protein, 119 aa, Artificial Sequence
  Synthetic construct
QVQLQESGPGLVKPSQTLSLTCTVSGGSISSGSYYWSWIRQPAGKGLEWIGRIYTSGSTNYNPSLKSRVTISVDTSKNQFSLKLSSVTAADTAVYYCARSRGAGTPGYWGQGTLVTVSS

SEQ ID NO: 6143 - protein, 125 aa, Artificial Sequence
  Synthetic construct
EVQLVESGGGLVQPGGSLRLSCSASGFTFSSYAMHWVRQAPGKGLEYVSAISSNGGSTYYADSVKGRFTISRDNSKNTLYLQMSSLRAEDTAVYYCVKDHLVATSRRYYYGMDVWGQGTTVTVSS

SEQ ID NO: 6144 - protein, 120 aa, Artificial Sequence
  Synthetic construct
EVQLLESGGGLVQPGGSLRLSCAASGFTFSSYAMSWVRQAPGKGLEWVSAISGSGGSTYYADSVKGRFTISRDNSKNTLYLQMNSLRAEDTAVYYCAKKDYSGSYSFDYWGQGTLVTVSS

SEQ ID NO: 6145 - protein, 118 aa, Artificial Sequence
  Synthetic construct
QVQLVQSGGEVKIPGASVKVSCKASGFEFSRYGISWVRQAPGQGPEWVGWISARSGTTRDGHKVQGRVTMTTDTSTSTAYLELNSLKYDDTAVYYCVRGSFGELPLYWGQGTLVTVAS

SEQ ID NO: 6146 - protein, 130 aa, Artificial Sequence
  Synthetic construct
EVQLVESGGGLVQPGGSLRLSCAASGFTFSSYKMNWVRQAPGKGLEWVSHISSSSSIYYADSVKGRFTVSRDNAKNSMYLQMSSLRDEDTAVYYCARDAVVRSVAGVLGRTNNYYGMDVWGQGTTVTVSS

SEQ ID NO: 6147 - protein, 126 aa, Artificial Sequence
  Synthetic construct
QVQLQESGPGLVKPSQTLSLTCTVSGGSISSGSYYWSWIRQPAGKGLEWIGRIYTSGSTNYNPSLKSRVTISVDTSKNQFSLKLSSVTAADTAVYYCARAWTRQGTTRGGYYFDYWGQGTLVTVSS

SEQ ID NO: 6148 - protein, 114 aa, Artificial Sequence
  Synthetic construct
EVQLVESGGGLVQPGGSLRLSCAASGFTVSSNYMSWVRQAPGKGLEWVSVIYSGGSTYYADSVKGRFTISRDNSKNTLYLQMNSLRAEDTAVYYCAREGFLGAWGQGTLVTVSS

SEQ ID NO: 6149 - protein, 124 aa, Artificial Sequence
  Synthetic construct
QVQLQESGPGLVKPSETLSLTCTVSGGSISSYYWSWIRQPPGKGLEWIGYIYYSGSTNYNPSLKSRVTISVDTSKNQFSLKLSSVTAADTAVYYCAREREYYYGSGSTYYFDYWGQGTLVTVSS

SEQ ID NO: 6150 - protein, 121 aa, Artificial Sequence
  Synthetic construct
EVQLLESGGGLVQPGGSLRLSCAASLFTFSNYDMSWVRQTPGKGLEWVSAIHGSGGITWYKDSVKGRFTISRDNSKNTLYLQMNSLRAEDTAVYYCATYGGYRSSSPSHYWGQGTLVTVSS

SEQ ID NO: 6151 - protein, 119 aa, Artificial Sequence
  Synthetic construct
QVQLVESGGGVVQPGKSLRLSCAASGFTFNNYGMHWVRQAPGKGLEWVAVIWYDGSKKFYADSVKGRFIISRDSVKNILYLQINSLRAEDTAVYYCAAGISETTHLDHWGQGSLVTVSS

SEQ ID NO: 6152 - protein, 122 aa, Artificial Sequence
  Synthetic construct
QVQLRESGPGLVKPSQTLSLTCTVSGGSFDDGDHFWSWFRQPPGGGLEWIGYIYHSGSTHYNPSLKSRVSMSLDASKNQFFLNLNSVTAADTAIYYCARDASYSESYASDCWGRGTLVNVSS

SEQ ID NO: 6153 - protein, 121 aa, Artificial Sequence
  Synthetic construct
QVQLVQSGAEVKKPGASVKVSCKASGYTFTSYGISWVRQAPGQGLEWMGWISAYNGNTNYAQKLQGRVTMTTDTSTSTAYMELRSLRSDDTAVYYCARVGVVYGSGSYGYWGQGTLVTVSS

SEQ ID NO: 6154 - protein, 127 aa, Artificial Sequence
  Synthetic construct
EVQLVESGGGLVQPGGSLRLSCAASGFTFSSYSMNWVRQAPGKGLEWVSYISSSSSTIYYADSVKGRFTISRDNAKNSLYLQMNSLRDEDTAVYYCARDLGPCSSTSCPTREYFQHWGQGTLVTVSS

SEQ ID NO: 6155 - protein, 119 aa, Artificial Sequence
  Synthetic construct
EVQLLESGGGLVQPGGSLRLSCAASGFTFRTYAMNWVRQGPGKGLEWVSHISDSGDRTYYADSVKGRFTISRDISKNTLYLQMNSLSAEDTAVYYCASDYGDVGFLDYWGQGTLVTVSS

SEQ ID NO: 6156 - protein, 125 aa, Artificial Sequence
  Synthetic construct
QVQLVESGGGVVQPGRSLRLSCAASGFTFSSYAMHWVRQAPGKGLEWVAVISYDGSNKYYADSVKGRFTISRDNSKNTLYLQMNSLRAEDTAVYYCAREFSSSWYRYYYYGMDVWGQGTTVTVSS

SEQ ID NO: 6157 - protein, 123 aa, Artificial Sequence
  Synthetic construct
QVQLQESGPGLVKPSQTLSLTCTVSGGSISSGSYYWSWIRQPAGKGLEWIGRIYTSGSTNYNPSLKSRVTISVDTSKNQFSLKLSSVTAADTAVYYCARDVAARPQYNWFDPWGQGTLVTVSS

SEQ ID NO: 6158 - protein, 122 aa, Artificial Sequence
  Synthetic construct
QLHLQESGPGLVEPSETLSLTCTVSGGSMNNDDYYWGWVRQPPGGGLEWIVSINYSGTTSYNPSLESRVTISMDKSKNQFSLRLQSVNAADTAVYYCARRGYHANSAALDIWGQGTMVTVSS

SEQ ID NO: 6159 - protein, 125 aa, Artificial Sequence
  Synthetic construct
QVQLVESGGGVVQPGRSLRLSCAASGFTFSSYAMHWVRQAPGKGLEWVAVISYDGSNKYYADSVKGRFTISRDNSKNTLYLQMNSLRAEDTAVYYCARECFSSSWYVGYYGMDVWGQGTTVTVSS

SEQ ID NO: 6160 - protein, 124 aa, Artificial Sequence
  Synthetic construct
EVQLVQSGAEVKKPGESLKISCKASGYNFNNYWIGWVRQTPGKGLEWMGIIYPRDSDTRYSPSFQGQVTISADKSINTAYLQWASLKASDTAMYFCTRRYVATFPIEDHGMDVWGQGTTVTVSS

SEQ ID NO: 6161 - protein, 121 aa, Artificial Sequence
  Synthetic construct
QVQLVESGGGVVQPGGSLRLSCAASGFTFSAYAINWVRQAPGMGLEWVAVIWEDGDKIDYADSVKGRFTISRDDSKDTAYLQMNSLRAEDTAVYYCALPKSNHHHFGMDVWGLGTTVFVSS

SEQ ID NO: 6162 - protein, 123 aa, Artificial Sequence
  Synthetic construct
QLQLQESGSGLVKPSQTLSLTCAVSGGSISSGGYSWSWIRQPPGKGLEWIGYIYHSGSTYYNPSLKSRVTISVDRSKNQFSLKLSSVTAADTAVYYCARGGPQWLRRYYFDYWGQGTLVTVSS

SEQ ID NO: 6163 - protein, 122 aa, Artificial Sequence
  Synthetic construct
QVQLQESGPGLVKPSQTLSLTCTVSGGSISSTTDYWNWIRQPAGKGLEWIGRIYSSGSTNYNPSLRSRVTMSVDTSKNQFFLRVKSMTAADTAVYYCARGAGYVLHYAMDVWGQGTTVTVSS

SEQ ID NO: 6164 - protein, 127 aa, Artificial Sequence
  Synthetic construct
QLQLQESGPGLVKPSETLSLTCTVSGGSISSSSYYWGWIRQPPGKGLEWIGSIYYSGSTYYNPSLKSRVTISVDTSKNQFSLKLSSVTAADTAVYYCAIYRDGGSYYGGYYYGMDVWGQGTTVTVSS

SEQ ID NO: 6165 - protein, 122 aa, Artificial Sequence
  Synthetic construct
EVQLLESGGGLAKPGGSLRLSCAASGFTFSAYAMNWVRLVSGKGLEWVSSISAGGVDTYYGDSVKGRFTISRDNSKNILFLQMDNLRVEDTAMYYCAKVKDFGVLILNPDYWGQGALVTVSS

SEQ ID NO: 6166 - protein, 120 aa, Artificial Sequence
  Synthetic construct
QVHLVESGGGVVQPGASLRLSCAASDFILSTYGIHWVRQAPGKGLEWVAVIWHDGSRKYYADSVNGRFTISRDNSKNTLHLQLDSLRVEDTAVYYCVRDIGNTGFHLDYWGQGTLITVSS

SEQ ID NO: 6167 - protein, 131 aa, Artificial Sequence
  Synthetic construct
QVQLQESGPGLVKPSETLSLTCTVSGGSISSYYWSWIRQPAGKGLEWIGRIYTSGSTNYNPSLKSRVTMSVDTSKNQFSLKLSSVTAADTAVYYCARASGYCSSTSCYKGHYYYYYGMDVWGQGTTVTVSS

SEQ ID NO: 6168 - protein, 123 aa, Artificial Sequence
  Synthetic construct
EVQLVESGGGLVQPGGSLRLSCAASRFTFSSYWMYWVRQGPGKGLVWVSRINSDGSSTTYADSVKGRFTISRDNAKRMLYLQLNSLRVEDTAVYSCARWAAVAGTGIEAFDIWGQGTMVTVSS

SEQ ID NO: 6169 - protein, 118 aa, Artificial Sequence
  Synthetic construct
EVQLVESGGGLVKPGRSLRLSCTASGFTFGDYAMSWFRQAPGKGLEWVGFIRSKAYGGTTEYAASVKGRFTISRDDSKSIAYLQMNSLKTEDTAVYYCTRGARYSSFWGQGTTVTVSS

SEQ ID NO: 6170 - protein, 117 aa, Artificial Sequence
  Synthetic construct
QQQLRESGPGLVKPSETLSLTCSVSGGSINNGNYYWGWIRQAPGKGLEWIGTISYSGSLYYSPSLRSRITISVDTSKNQFSLEVKSVTAADTALYFCFSATRDLDFWGQGTLVTVSS

SEQ ID NO: 6171 - protein, 121 aa, Artificial Sequence
  Synthetic construct
QVQLQESGPGLVKPSQTLSLTCTVSGDSISSGGYYWSWLRQHPGKGLEWIGYIYYTGATSYNPSLRSRVTISVDTSQNQFSLELNSVTATDSAVYYCARELGSYSVAFDYWGQGSLVTVSS

SEQ ID NO: 6172 - protein, 129 aa, Artificial Sequence
  Synthetic construct
QVQLVQSGAEVKKPGASVKVSCKASGYTFTSYGISWVRQAPGQGLEWMGWISAYNGNTNYAQKLQGRVTMTTDTSTSTAYMELRSLRSDDTAVYYCARRVKGSSIRGSSSSGSGWFDPWGQGTLVTVSS

SEQ ID NO: 6173 - protein, 130 aa, Artificial Sequence
  Synthetic construct
QVQLQQWGAGLLKPSETLSLTCAVYGGSFSGYYWSWIRQPPGKGLEWIGEINHSGSTNYNPSLKSRVTISVDTSKNQFSLKLSSVTAADTAVYYCARGNPRHAYYYGSGSYSHNNWFDPWGQGTLVTVSS

SEQ ID NO: 6174 - protein, 130 aa, Artificial Sequence
  Synthetic construct
QVQLVQSGAEVKKPGASVKVSCKASGYTFTGYYMHWVRQAPGQGLEWMGWINPNSGGTNYAQKFQGRVTMTRDTSISTAYMELSRLRSDDTAVYYCAKGTNCSGGSCTNYYYYYYGMDVWGQGTTVTVSS

SEQ ID NO: 6175 - protein, 131 aa, Artificial Sequence
  Synthetic construct
QLQLQESGPGLVKPSETLSLTCTVSGGSISSSSYYWGWIRQPPGKGLEWIGSIYYSGSTYYNPSLKSRVTISVDTSKNQFSLKLSSVTAADTAVYYCARLPYCSGGSCYWKKAKGGSFDYWGQGTLVTVSS

SEQ ID NO: 6176 - protein, 125 aa, Artificial Sequence
  Synthetic construct
EVQLVESGGGLVKPGGSLRLSCAASGFTFSSYSMNWVRQAPGKGLEWVSSISSSSSYIYYADSVKGRFTISRDNAKNSLYLQMNSLRAEDTAVYYCARVSSSWPRGGARNGMDVWGQGTTVTVSS

SEQ ID NO: 6177 - protein, 122 aa, Artificial Sequence
  Synthetic construct
EVKIVESGGGLIQPGGSLRISCAASEFIDSFTYMAWVRQAPGKGLECVSVTHSGGRTYYPDSVKGRFTLSRDNSKNTLDLQMSRLKVEDTAVYYCARDFGRYDSRSYAFDVWGHGTMVIVSS

SEQ ID NO: 6178 - protein, 121 aa, Artificial Sequence
  Synthetic construct
QVQLVQSGAEVKKPGASVKVSCKASGYTFTSYAMHWVRQAPGQRLEWMGWINAGNGNTKYSQKFQGRVTITRDTSASTAYMELSSLRSEDTAVYYCARDRGRVATAIFDYWGQGTLVTVSS

SEQ ID NO: 6179 - protein, 124 aa, Artificial Sequence; identical to SEQ ID NO: 5439
  Synthetic construct

SEQ ID NO: 6180 - protein, 120 aa, Artificial Sequence
  Synthetic construct
QVQLVQSGAEVKKPGASVKVSCKASGYTFTDYYMHWVRQAPGQGLEWMGWFNPKSGITSYAQKFQGRVIMTRDTSISTAYMELSRLRSDDTALYYCAREREANSDAFDRWGQGTMVTVSS

SEQ ID NO: 6181 - protein, 127 aa, Artificial Sequence
  Synthetic construct
EVQLVQSGAEVKKPGESLRISCKGSGYSFTSYWISWVRQMPGKGLEWMGRIDPSDSYTNYSPSFQGHVTISADKSISTAYLQWSSLKASDTAMYYCARQRLGYSSGWTVYYYGMDVWGQGTTVTVSS

SEQ ID NO: 6182 - protein, 122 aa, Artificial Sequence
  Synthetic construct
QVQLVESGGGVVQPGRSLRLSCEASGFTFSTHAMHWVRQAPGKGLEWVSLIWYDGSDEYYSDSVTGRFTISRDNSKNTLYLQMNSMRAEDTAVYYCARGGSRYSSGYYFDFWGQGTLVSVSS

SEQ ID NO: 6183 - protein, 124 aa, Artificial Sequence
  Synthetic construct
EVQLVESGGGLIQPGGSLRLSCAASGFTVSSNYMSWVRQAPGKGLEWVSVIYSGGSTYYADSVKGRFTISRDNSKNTLYLQMNSLRAEDTAVYYCARPKSIAARPAYYYGMDVWGQGTTVTVSS

SEQ ID NO: 6184 - protein, 122 aa, Artificial Sequence
  Synthetic construct
QVQLQESGPGLVKPSETLSLTCTVSGGSISSYYWSWIRQPPGKGLEWIGYIYYSGSTNYNPSLKSRVTISVDTSKNQFSLKLSSVTAADTAVYYCARDWPHCGGDCHIMDVWGQGTTVTVSS

SEQ ID NO: 6185 - protein, 127 aa, Artificial Sequence
  Synthetic construct
QVLLVESGGAVVQPGRSLRLSCAASGFTFNSYAMHWVRQAPGKGLEWMAVISDDGSTKFYADSVKGRFTISRDNSKNTLFLQMNSLRAEDTALYYCAKGSLSTLVRGVIMRDWLDPWGQGTLVTVSS

SEQ ID NO: 6186 - protein, 120 aa, Artificial Sequence
  Synthetic construct
EVQLLESGGGLVQPGGSLRLSCAASGFTFSSYAMSWVRQAPGKGLEWVSAISGSGGSTYYADSVKGRFTISRDNSKNTLYLQMNSLRAEDTAVYYCAKSPTGYYSWCDYWGQGTLVTVSS

SEQ ID NO: 6187 - protein, 121 aa, Artificial Sequence
  Synthetic construct
EVQLVESGGGLVQPGGSLRLSCSASGFTFSSYAMHWVRQAPGKGLEYVSAISSNGGSTYYADSVKGRFTISRDNSKNTLYLQMSSLRAEDTAVYYCVKGHSSSWYQYFQHWGQGTLVTVSS

SEQ ID NO: 6188 - protein, 128 aa, Artificial Sequence
  Synthetic construct
EVQLVESGGGLVQPGRSLRVSCTASGFTFADYAISWFRQAPGKGLEWVGFIRSKTFGGTTEYAASVKGRFTISRDDSKSIAYLQMNSLKTEDTAVYFCSRVEVRGSTNYGRFEWIDPWGQGTLVTVSS

SEQ ID NO: 6189 - protein, 123 aa, Artificial Sequence; identical to SEQ ID NO: 5437
  Synthetic construct

SEQ ID NO: 6190 - protein, 122 aa, Artificial Sequence
  Synthetic construct
EVQLVESGGGLVQPGGSLRLSCAASGFTFSSYAMHWVRQAPGKGLEYVSAISSNGGSTYYANSVKGRFTISRDNSKNTLYLQMGSLRAEDMAVYYCARIRVRFGVVTPPDYWGQGTLVTVSS

SEQ ID NO: 6191 - protein, 119 aa, Artificial Sequence
  Synthetic construct
QMQLQESGPGLVKPSETLSLTCTVSGGSISGNFWSWVRQSPGKGLEWIGYVSHTGSTNYSPSLKSRVTISLDTSKNQFSLTLKSVTAADSAVYFCVRDKSGTYFSFENWGQGTLVTVSS

SEQ ID NO: 6192 - protein, 125 aa, Artificial Sequence
  Synthetic construct
QVQLVESGGGVVQPGRSLRLSCAASGFTFSSYAMHWVRQAPGKGLEWVAVISYDGSNKYYADSVKGRFTISRDNSKNTLYLQMNSLRAEDTAVYYCARDREYSGSYYYYYGMDVWGQGTTVTVSS

SEQ ID NO: 6193 - protein, 132 aa, Artificial Sequence
  Synthetic construct
QVQLVQSGAEVKKPGASVKVSCKASGYTFTSYYMHWVRQAPGQGLEWMGIINPSGGSTSYAQKFQGRVTMTRDTSTSTVYMELSSLRSEDTAVYYCARVGTLGGYYYGSGRSAYREYGMDVWGQGTTVTVSS

SEQ ID NO: 6194 - protein, 117 aa, Artificial Sequence
  Synthetic construct
EVQLVESGGGLVKPGRSLRLSCTASGFTFGDYAMSWFRQAPGKGLEWVGFIRSKAYGGTTEYAASVKGRFTISRDDSKSIAYLQMNSLKTEDTAVYYCTTIKGFDPWGQGTLVTVSS

SEQ ID NO: 6195 - protein, 120 aa, Artificial Sequence
  Synthetic construct
QITLKESGPTLVKPTQTLTLTCTFSGFSLSTSGVGVGWIRQPPGKALEWLALIYWDDDKRYSPSLKSRLTITKDTSKNQVVLTMTNMDPVDTATYYCAHPSGSYFQFDYWGQGTLVTVSS

SEQ ID NO: 6196 - protein, 118 aa, Artificial Sequence
  Synthetic construct
QAQLVQSGSELKKPGASVKVSCKASGYTFTNYAINWVRQAPGQGLEWLGWINTNTKNPTYAQDFTGRFVFSLDTSVNTAFLEISSLKAEDTAMYYCARVSPNYGDYTWGQGTLVTVSS

SEQ ID NO: 6197 - protein, 124 aa, Artificial Sequence; identical to SEQ ID NO: 6033
  Synthetic construct

SEQ ID NO: 6198 - protein, 130 aa, Artificial Sequence
  Synthetic construct
EVQLVESGGGLVKPGGSLRLSCAASGFTFSNAWMSWVRQAPGKGLEWVGRIKSKTDGGTTDYAAPVKGRFTISRDDSKNTLYLQMNSLKTEDTAVYYCTTDPRITMVRGVIIFTGLGPHGGQGTLVTVSS

SEQ ID NO: 6199 - protein, 123 aa, Artificial Sequence
  Synthetic construct
EVQLVQSRAEVKKPGESLKISCSGSGFGFTSYWIGWVRQRPGRGPEWMGILYPADSDTRYSPSFQGQVTISADKSINTAYLHWSSLRVSDTAMYYCARTPYCSTTSCNPLDLWGQGTLVIVSS

SEQ ID NO: 6200 - protein, 127 aa, Artificial Sequence
  Synthetic construct
QVQLVESGGGVVQPGRSLRLSCAASGFTFSSYGMHWVRQAPGKGLEWVAVIWYDGSNKYYADSVKGRFTISRDNSKNTLYLQMNSLRAEDTAVYYCARDHDSSGYYYRGYYYGMDVWGQGTTVTVSS

SEQ ID NO: 6201 - protein, 118 aa, Artificial Sequence; identical to SEQ ID NO: 5585
  Synthetic construct

SEQ ID NO: 6202 - protein, 124 aa, Artificial Sequence
  Synthetic construct
QVQLQESGPGLVQPSETLSLTCTVSGVSITNYNWNWIRQSPKMGLEWIGFIYYGDTTKYNPSLTSRVTISMDTSKNQFSLKLTSVTAADTAVYYCALRRSLGMSPAQDNWFDPWGQGTLVTVSS

SEQ ID NO: 6203 - protein, 119 aa, Artificial Sequence
  Synthetic construct
EVQLVESGGGLVQPGGSLRLSCAASGFTFTNYWMNWVRQAPGKGLEWVSFINIDGSGTNYADSVKGRFTISRDNAKNTVYLQLNSLRAEDTATYYCARDRWQLGEFDYWGQGTQVTVSS

SEQ ID NO: 6204 - protein, 124 aa, Artificial Sequence
  Synthetic construct
QVQLQESGPGLVKPSQTLSLTCTVSGGSISSGSYYWSWIRQPAGKGLEWIGRIYTSGSTNYNPSLKSRVTISVDTSKNQFSLKLSSVTAADTAVYYCARDSSGWYRRVFGFDPWGQGTLVTVSS

SEQ ID NO: 6205 - protein, 121 aa, Artificial Sequence
  Synthetic construct
EVQLLESGGGLVRPGGSLRLSCAASGFSFGTYAMSWVRQAPGKGLEWVSVISGRDENTYHADSVKGRFSISRDISNDTLYLEISGLRAEDTANYYCAKGLTGWFLAPFDYWGQGTLVTVSS

SEQ ID NO: 6206 - protein, 114 aa, Artificial Sequence
  Synthetic construct
EVQLVESGGGLVQPGGSLKLSCATSGFTFSGSALHWVRQASGEGLEWVGLIRSRTNNYATAYIASVKGRFTISRDDSKKTVFLQMNRLRAEDTAVYYCSTTNYWGRGTLVTVSS

SEQ ID NO: 6207 - protein, 123 aa, Artificial Sequence
  Synthetic construct
EVQLVQSGAEMKKPGESLKISCKGSGYNFESFWIGWVRQMPGKGLEWMGIIYAGDSDTRYSPSFQGQVTISVDKSTTTAYLQWRSLKASDTAMYYCVRTPYCSLSTCYPFDKWGQGTMVTVSS

SEQ ID NO: 6208 - protein, 126 aa, Artificial Sequence
  Synthetic construct
EVQLVDSGGGVVQRGGSLRLSCAASGFTFSNYWLSWFRQAPGKGLEWVANIKPDGSEKNYVDSVRGRFTISRDNAKNSLYLQMTSLRGEDTAVYHCARGQHCSSTSCSYDYGMDVWGQGTTVSVSS

SEQ ID NO: 6209 - protein, 124 aa, Artificial Sequence
  Synthetic construct
QVQLQESGPGLVRPSETLSLTCTVSGDSINSYYWGWIRQPPGKGLEWVGHIYHSGGANYNPSLKSRVTLSLDMSKNQVSLKLTSVTVADTAVYYCASLYASGSRSYYYYGVDVWGPGTTVTVSS

SEQ ID NO: 6210 - protein, 118 aa, Artificial Sequence
  Synthetic construct
QVQLVQSGAEVKKPGASVKVSCKASGYTFTSYGISWVRQAPGQGLEWMGWISAYNGNTNYAQKLQGRVTMTTDTSTSTAYMELRSLRSDDTAVYYCAREFRGGRFDPWGQGTLVTVSS

SEQ ID NO: 6211 - protein, 124 aa, Artificial Sequence
  Synthetic construct
QVQLQESGPGLVKPSQTLSLTCTVSGGSITTGGYYWSWIRQHPGKGLEWIGYIYHSGTTYYNPSLKSRVFISVDTSKNQFSLKLSSVTVADTAVYYCAREGGGPYDRSHYYDIWGRGTLVTVSS

SEQ ID NO: 6212 - protein, 123 aa, Artificial Sequence
  Synthetic construct
EVQLVESGGGLVKPGGSLRLSCAASGFTFSNAWMSWVRQAPGKGLEWVGRIKSKTDGGTTDYAAPVKGRFTISRDDSKNTLYLQMNSLKTEDTAVYYCTTGVRYSGYDFHDYWGQGTLVTVSS

SEQ ID NO: 6213 - protein, 125 aa, Artificial Sequence
  Synthetic construct
QVQLVESGGGVVQPGRSLRLSCAASGFTFSSYAMHWVRQAPGKGLEWVAVISYDGSNKYYADSVKGRFTISRDNSKNTLYLQMNSLRAEDTAVYYCARGGKWELRFYYYYGMDVWGQGTTVTVSS

SEQ ID NO: 6214 - protein, 120 aa, Artificial Sequence
  Synthetic construct
EEQLVQSGAEVKKPGESLKISCEGSGYSFTSYWIGWVRQMPGKGPEWMGIIYPGDSDTRYSPPFQGQVTFSVDKSIKTAYLQWNNLKASDTAMYYCARPRHFGHDAFDIWGQGTMVTVSS

SEQ ID NO: 6215 - protein, 116 aa, Artificial Sequence
  Synthetic construct
EVQLVESGGGLVQPGGSLRLSCAASGFTFSSYSMNWVRQAPGKGLEWVSYISSSSSTIYYADSVKGRFTISRDNAKNSLYLQMNSLRDEDTAVYYCASGGSYFGHWGQGTLVTVSS

SEQ ID NO: 6216 - protein, 119 aa, Artificial Sequence
  Synthetic construct
EVHLVESGGGLIKPGGSLRLSCAASGFTFSSCSMNWVRQAPGKGLEWVSSIDTTSSYIYYADSVKGRFIISRDNAKNSLYLQLNSLRADDTAVYYCARDGDGFNVFDFWGQGSLVTVSS

SEQ ID NO: 6217 - protein, 125 aa, Artificial Sequence
  Synthetic construct
QLQLQESGPGLVKPSETLSLTCCVSGGSISSSSNYWGWIRQPPGKGLEWVGTIYYSGTTYYNPSLKSRVTISVVTSKNQFSLKLTSVTAADTAVYYCARGYYGSGSYYPFEFEPWGQGTLVTVSS

SEQ ID NO: 6218 - protein, 130 aa, Artificial Sequence
  Synthetic construct
EVQLVESGGVVVQPGGTLRLSCAASGFTFDDYTMHWVRQAPGKGLQWVSLISWDGSSTLYADSVKGRFTISRDNSESSLSLEMNSLTLEDTALYYCARGETGRYYDVWTGKAGYYGMDFWGQGTTVTVSS

SEQ ID NO: 6219 - protein, 124 aa, Artificial Sequence
  Synthetic construct
EVQLLESGGGLVQPGGSLRLSCAASGFTFSSYAMSWVRQAPGKGLEWVSAISGSGGSTYYADSVKGRFTISRDNSKNTLYLQMNSLRAEDTAVYYCAKDHAGGWELLDGYFDYWGQGTLVTVSS

SEQ ID NO: 6220 - protein, 121 aa, Artificial Sequence
  Synthetic construct
QVQLVESGGGVVQPGRSLRLSCAASGFTSSNYGMHWVRQAPGKGLEWVAVIWSDGRNKYYADSVKGRFTISRDTSLHLQMNSLRAEDTAVYYCARDRGDIDIIATGTIDYWGLGTLVTVSS

SEQ ID NO: 6221 - protein, 125 aa, Artificial Sequence
  Synthetic construct
EVQLLESGGGLVQPGGSLRLSCAASGFTFSSYAMNWVRQAPGKRLEWVSSIIGGGGSTYYADSVKGRFTIFRDNSKNTLYLQMDSLRDEDTAIYYCAKGSLGHCSGVTCYQFDYWGQGTLVTVSS

SEQ ID NO: 6222 - protein, 127 aa, Artificial Sequence; identical to SEQ ID NO: 42
  Synthetic construct

SEQ ID NO: 6223 - protein, 118 aa, Artificial Sequence; identical to SEQ ID NO: 5663
  Synthetic construct

SEQ ID NO: 6224 - protein, 118 aa, Artificial Sequence
  Synthetic construct
QVQLVQSGAEVKKPGASVKVSCKASGYTFTSYGISWVRQAPGQGLEWMGWISAYNGNTNYAQKLQGRVTMTTDTSTSTAYMELRSLRSDDTAVYYCARRGLVGATDPWGQGTLVTVSS

SEQ ID NO: 6225 - protein, 120 aa, Artificial Sequence
  Synthetic construct
EVQLVESGGGLVQPGGSLRLSCSASGFTFSSYAMHWVRQAPGKGLEYVSAISSNGGSTYYADSVKGRFTISRDNSKNTLYLQMSSLRAEDTAVYYCVKTSWGSYRNFDYWGQGTLVTVSS

SEQ ID NO: 6226 - protein, 117 aa, Artificial Sequence
  Synthetic construct
EVQLVQSGAEVKKPGESLKISCKGSGYSFTSYYVGWVRQIPGKGLEWMGLIYPGDSQTSYSPSFQGQVTISVDKSIKTVYLQWSSLKPSDTAMYYCARGGYSEFDPWGQGTLVTVSS

SEQ ID NO: 6227 - protein, 123 aa, Artificial Sequence
  Synthetic construct
QGQLVQSGAEVKKPGSSVKVSCKASGGTFSSYAINWVRQAPGQGLEWMGRIIPILDVADHAQKFQGRVTVTADKSTSTAYMELSSLRVDDTAVYYCARATLPGKVGGTTLHHWGQGTLVTVSS

SEQ ID NO: 6228 - protein, 126 aa, Artificial Sequence
  Synthetic construct
QVQLVQSGAEVKKPGASVKVSCKTSGYTFTRFAVHWVRQAPGQRLEWMGWINGGNGNTEYSQKFQGRVTITRDTSATTAYMELSSLRSGDTAVYYCARVCSSTSCYTDFYYGMDVWGQGTTVTVSS

SEQ ID NO: 6229 - protein, 121 aa, Artificial Sequence
  Synthetic construct
QVQLVQSGAEVKKPGASVKVSCKASGYTFTGYYMHWVRQAPGQGLEWMGWINPNSGGTNYAQKFQGRVTMTRDTSISTAYMELSRLRSDDTAVYYCARDIKESGSYYSDYWGQGTLVTVSS

SEQ ID NO: 6230 - protein, 124 aa, Artificial Sequence
  Synthetic construct
QVQLQESGPGLVKPSQTLSLTCTVSGGSISSGSYYWSWIRQPAGKGLEWIGRIYTSGSTNYNPSLKSRVTISVDTSKNQFSLKLSSVTAADTAVYYCARESPKWYQLRNAFDIWGQGTMVTVSS

SEQ ID NO: 6231 - protein, 120 aa, Artificial Sequence
  Synthetic construct
EVQLVESGGGLIQPGGSLRLSCAASGFTVSSNYMSWVRQAPGKGLEWVSVIYSGGSTYYADSVKGRFTISRDNSKNTLYLQMNSLRAEDTAVYYCARETGTRRLYGMDVWGQGTTVTVSS

SEQ ID NO: 6232 - protein, 125 aa, Artificial Sequence; identical to SEQ ID NO: 5711
  Synthetic construct

SEQ ID NO: 6233 - protein, 125 aa, Artificial Sequence
  Synthetic construct
QLQLQESGPGLVKPSETLSLTCTVSGGSISSSSYYWGWIRQPPGKGLEWIGSIYYSGSTYYNPSLKSRVTISVDTSKNQFSLKLSSVTAADTAVYYCATKRMVVAAIPARWFDPWGQGTLVTVSS

SEQ ID NO: 6234 - protein, 125 aa, Artificial Sequence
  Synthetic construct
EVHLLESGGGLVQPGGSLRLSCAASGFNFNNYGMSWVRQAPGKGLEWVSVMSGSGGTTHYADSVKGRFTVSRDSSTNTLFLQMHSLRIEDTAVYYCAKDLAAGGWELPETSFDSWGQGTLVTVSS

SEQ ID NO: 6235 - protein, 121 aa, Artificial Sequence
  Synthetic construct
EVQLSQSGAEVKRPGASVRVSCRSSGYTFISYAIHWVRQAPGQRPEWMGWINTGHGKAKYSERFQDRVTITRDTSTTTVYMDLTSLTSEDTAVYYCARVTRTWSEPEFDYWGQGTLVTVSS

SEQ ID NO: 6236 - protein, 127 aa, Artificial Sequence
  Synthetic construct
EVQLVESGGGLVKPGGSLRLSCAASGFTFSSYSMNWVRQAPGKGLEWVSSISSSSSYIYYADSVKGRFTISRDNAKNSLYLQMNSLRAEDTAVYYCARAGRRGYYDSSGYHNWFDPWGQGTLVTVSS

SEQ ID NO: 6237 - protein, 128 aa, Artificial Sequence
  Synthetic construct
EVQLVESGGGLVQPGRSLRLSCAASGFTFDDYAMHWVRQAPGKGLEWVSGISWNSGSIGYADSVKGRFTISRDNAKNSLYLQMNSLRAEDTALYYCAKVPTYYDFWSGHYYYYGMDVWGQGTTVTVSS

SEQ ID NO: 6238 - protein, 124 aa, Artificial Sequence
  Synthetic construct
QITLKESGPTLLKPTQTLTLTCTFSGFSLSTTSVAVGWIRQSPGKALEWLAMVSWDDDKRYSPSLKTRLTITKDTSSNQVVLTMTHMDPVDTGTYYCARVGIPEWLFGLSFDYWGQGTLVTVSS

SEQ ID NO: 6239 - protein, 120 aa, Artificial Sequence
  Synthetic construct
EVQLVESGGDLVKPGGSLRLSCAVSGLPFNNAWMSWVRQAPGKGLEWVGRIKSKSDGETIDYAAPVKGRFSISRDDSKKTLYLQMNSLKIEDTAVYYCTLEYSSSWLITWGQGTLVTVSS

SEQ ID NO: 6240 - protein, 127 aa, Artificial Sequence; identical to SEQ ID NO: 6008
  Synthetic construct

SEQ ID NO: 6241 - protein, 123 aa, Artificial Sequence
  Synthetic construct
QVQLVQSGSELKKPGASVKVSCKTSGHTSMSYGVSWVRQAPGQGLEWLGWINTYNGDTKYAQKLQGRITMTTDTSATTVFMDLGGLTSDDTAIYYCATSFGSQTYYKSHFDSWGQGTLVTVSS

SEQ ID NO: 6242 - protein, 126 aa, Artificial Sequence
  Synthetic construct
EVQLLESGGGLVQPGGSLRLSCAASGFTFSSYAMSWVRQAPGKGLEWVSAISGSGGSTYYADSVKGRFTISRDNSKNTLYLQMNSLRAEDTAVYYCAKDRGYCSSTSCRYWYFDLWGRGTLVTVSS

SEQ ID NO: 6243 - protein, 126 aa, Artificial Sequence
  Synthetic construct
QVQLVESGGGVVQPGRSLRLSCAASGFTFSSYGMHWVRQAPGKGLEWVAVISYDGSNKYYADSVKGRFTISRDNSKNTLYLQMNSLRAEDTAVYYCAKDYRVGATYYYYYYGMDVWGQGTTVTVSS

SEQ ID NO: 6244 - protein, 120 aa, Artificial Sequence
  Synthetic construct
QVQLVQSGAEVKKPGASVKVSCKASGYTFTSYYMHWVRQAPGQGLEWMGIINPSGGSTSYAQKFQGRVTMTRDTSTSTVYMELSSLRSEDTAVYYCASVKGSWGYAFDIWGQGTMVTVSS

SEQ ID NO: 6245 - protein, 124 aa, Artificial Sequence
  Synthetic construct
QVQLQQWGAGLLKPSETLSLTCAVYGGSFSGYYWSWIRQPPGKGLEWIGEINHSGSTNYNPSLKSRVTISVDTSKNQFSLKLSSVTAADTAVYYCARVQGKYYYGPYYYGMDVWGQGTTVTVSS

SEQ ID NO: 6246 - protein, 121 aa, Artificial Sequence
  Synthetic construct
EVQLVESGGGLVKPGGSLRLSCAASGFTFSSYSMNWVRQAPGKGLEWVSSISSSSSYIYYADSVKGRFTISRDNAKNSLYLQMNSLRAEDTAVYYCARDLRGSQIGAFDPWGQGTLVTVSS

SEQ ID NO: 6247 - protein, 125 aa, Artificial Sequence
  Synthetic construct
QLQLQESGPGLVKPSETLSLTCTVSGGSISSSSYYWGWIRQPPGKGLEWIGSIYYSGSTYYNPSLKSRVTISVDTSKNQFSLKLSSVTAADTAVYYCARRRIVVVPAANDAFDIWGQGTMVTVSS

SEQ ID NO: 6248 - protein, 121 aa, Artificial Sequence
  Synthetic construct
QVQLVESGGGVVQPGRSLRLSCAASGFTFSDYGMHWVRQAPGKGLEWVAVIWYDGSNKYYVDSVKGRFTISRDNSKNTLYLQMNSLRAEDTAVYFCAVTTTVTTSAYFDYWGQGTLVTVSS

SEQ ID NO: 6249 - protein, 124 aa, Artificial Sequence
  Synthetic construct
QITLDVSGPTRLRPTQPLTLTCTFSGFSLTSNGVGVGWIRQPPGKALECLALIYWDDDKRYNPSLKTRLTVTKDTSRNQVVLTMTNVDPVDTARYYCAHRLPGGDWNSGYFDFWGPGTLVTVSS

SEQ ID NO: 6250 - protein, 126 aa, Artificial Sequence
  Synthetic construct
EDQLVESGGGVVQPGGSLTLFCGASGFTFVNYGIHWVRQAPGKGLEWLAVIWFKGNNQFYADSVRGRFRISRDTARPTLSLEMNSLGGDDTARYYCARSGDPLLPGPAGYFGLDVWGPGTMVTVSS

SEQ ID NO: 6251 - protein, 118 aa, Artificial Sequence
  Synthetic construct
QVQLVQSGAEVKKPGASVKVSCKASGYTFTSYGISWVRQAPGQGLEWMGWISAYNGNTNYAQKLQGRVTMTTDTSTSTAYMELRSLRSDDTAVYYCARDYDFCRFDPWGQGTLVTVSS

SEQ ID NO: 6252 - protein, 125 aa, Artificial Sequence
  Synthetic construct
EVRLLESGGGLVQPGGSLRLSCAASGFNFKRNAMSWVRQVPGKGLEWVSAISGNGANTYYADSVEGRVAISRDNSYNTLYLQMSNLRVEDTAIYYCAKDGNTFRPLDNYYGMDVWGQGTAVTVSA

SEQ ID NO: 6253 - protein, 125 aa, Artificial Sequence; identical to SEQ ID NO: 5711
  Synthetic construct

SEQ ID NO: 6254 - protein, 121 aa, Artificial Sequence
  Synthetic construct
EVQLVESGGGLVQPGGSLRLSCVASGFTFSSYSMNWVRQAPGKGLEWVSFISSSSSTIYYADSVKGRFTISRDNAKTSLFLQMNSLRVEDTAVYYCAGAPPYNSGYYFDYWGQGTLVTVSS

SEQ ID NO: 6255 - protein, 126 aa, Artificial Sequence
  Synthetic construct
QVQMQESGPGLVKPSGTLSLTCAVSGDSVSSNAWWSWVRQPPGKGLEWIGEVFHRGNTNFSPSLKSRVTMSVDKSKNEISLRLASVTAADTAVYYCARRLRGVEAINAYYFGMDAWGPGATVFVSS

SEQ ID NO: 6256 - protein, 125 aa, Artificial Sequence
  Synthetic construct
EVQLVESGGGLVKPGGSLRLSCAASGFTFSNAWMSWVRQAPGKGLEWVGRIKSKTDGGTTDYAAPVKGRFTISRDDSKNTLYLQMNSLKTEDTAVYYCTTDLRWRYGERYYFDYWGQGTLVTVSS

SEQ ID NO: 6257 - protein, 128 aa, Artificial Sequence
  Synthetic construct
QVQLMESGGGLVRPGGALRLSCRVSGFIFSDAYMNWVRQAPGKGLEWVGRISTNSAGGTVDYADPAKGRFIISRDDSESTLYLQMNSLKTADSAIYYCTTHFVGRLVNTSTSDYFDYWGQGTLVTVSS

SEQ ID NO: 6258 - protein, 128 aa, Artificial Sequence
  Synthetic construct
QVQLQESGPGLVKPSQTLSLTCTVSGGSISSGSYYWSWIRQPAGKGLEWIGRIYTSGSTNYNPSLKSRVTISVDTSKNQFSLKLSSVTAADTAVYYCARAGRSSSSGRRYYYYGMDVWGQGTTVTVSS

SEQ ID NO: 6259 - protein, 121 aa, Artificial Sequence
  Synthetic construct
EVQLVQSGGGLVQPGGSLRLSCAASGFNFNTYSMNWVRQSPGKRLEWLSFISSSSGTIYYADSAEGRFTVSRDNAKNSLFLQMNSLRGEDTAVYYCAGAPPYNSGYYFDYWGQGTLVTVSS

SEQ ID NO: 6260 - protein, 121 aa, Artificial Sequence
  Synthetic construct
QLQLQESGSGLVKPSQTLSLTCAVSGGSISSGGYSWSWIRQPPGKGLEWIGYIYHSGSTYYNPSLKSRVTISVDRSKNQFSLKLSSVTAADTAVYYCARGTGSSWYIFDYWGQGTLVTVSS

SEQ ID NO: 6261 - protein, 121 aa, Artificial Sequence
  Synthetic construct
QAQLVQSGTEVKRPGSSVNVSCQTSGGSFDNFLINWVRQAPGQGLVWMGRILPILGVPNYAQKFQGRVTITADKTTNTAYMELSSLTSDDTAFYYCAGSYSSVHPSGFHIWGRGTLVTVSS

SEQ ID NO: 6262 - protein, 130 aa, Artificial Sequence
  Synthetic construct
QVQLVQSGAEVKKPGASVKVSCKASGYTFTSYGISWVRQAPGQGLEWMGWISAYNGNTNYAQKLQGRVTMTTDTSTSTAYMELRSLRSDDTAVYYCAVGSEGRCFGSGSYRRCYYGMDVWGQGTTVTVSS

SEQ ID NO: 6263 - protein, 125 aa, Artificial Sequence; identical to SEQ ID NO: 5711
  Synthetic construct

SEQ ID NO: 6264 - protein, 128 aa, Artificial Sequence
  Synthetic construct
QVQLQESGPGLVKPSQTLSLTCTVSGGSVSSGEFHWSWIRQPPGKGLEWIGYIYYNGRTDYKPSLKSRVDISLDASKNQVSLKLNSVIAADTAVYYCARSYYYRSDYHGSDHYGMGVWGQGTTVTVSS

SEQ ID NO: 6265 - protein, 135 aa, Artificial Sequence
  Synthetic construct
QVQLQQWGAGLLKPSETLSLTCAVYGGSFSGYYWSWIRQPPGKGLEWIGEINHSGSTNYNPSLKSRVTISVDTSKNQFSLKLSSVTAADTAVYYCARASMNIVVVPAARGTHSEPQYYYYGMDVWGQGTTVTVSS

SEQ ID NO: 6266 - protein, 125 aa, Artificial Sequence
  Synthetic construct
EVQLLESGGGLVQPGGSLRLSCAASGFTFSSYAMSWVRQAPGKGLEWVSAISGSGGSTYYADSVKGRFTISRDNSKNTLYLQMNSLRAEDTAVYYCAKGGLWYYDSSGYYSCDYWGQGTLVTVSS

SEQ ID NO: 6267 - protein, 118 aa, Artificial Sequence
  Synthetic construct
QVHLQESGPGLVKPSETLSLTCTVSGGSVNSYYWSWIRQPPGKGLEWIGYIYYSGSTNSNPSLKSRVTISLDTSKNQFSLKLRSMTAADTALYYCARARANYFLFDYWGQGTLVTVSS

SEQ ID NO: 6268 - protein, 123 aa, Artificial Sequence
  Synthetic construct
QVHLVQSGAEVKKPGASVRVSCKASANTFNGYSIHWVRQAPGQRLEWMGWITGARGNRKYSQRFQARITITRDTSARIAYMELRGLRYEDTATYYCAWGVDYYGSGGGPVDDWGQGTLVTVSS

SEQ ID NO: 6269 - protein, 122 aa, Artificial Sequence
  Synthetic construct
QVQLVQSGAEVKKPGSSVKVSCKASGGTLSSYGISWVRQAPGQGLEWMGGIIPVFGTASYAQKFQGRVTITADESTSTAYMELSSLRSEDTAVYYCARDGQQLVHKSNFDMWGQGTMVTVSS

SEQ ID NO: 6270 - protein, 125 aa, Artificial Sequence
  Synthetic construct
QVHLVQSGGEVKTPGASVKVSCKASGYPLIEHYLHWVRQAPGQGFEWMGCVRPHSGDTESSQNFQKRVILSTDTSIDTAYMELTRLTSDDTAVYFCAREISVSRGVILPGAFDIWGQGTLVNISS

SEQ ID NO: 6271 - protein, 125 aa, Artificial Sequence
  Synthetic construct
QVQLVQSGAEVKKPGASVKVSCKASGYAFISYYVHWVRQAPGQGLEWMGIINPSGCTPDYAQKFQGRLTMTCDMSTGTVYMELSSLTSDDTAIYYCARSGWELLQAFGGGWFDPWGQGTLVTVSP

SEQ ID NO: 6272 - protein, 121 aa, Artificial Sequence
  Synthetic construct
EVQLSESGGGLVQPGGSLRLSCEASGFTFDSYAMNWVRQAPGKGLEWVSVISYNGVTTSYADSVKGRFTISRDNSKNTLFLQMNSLRAEDTAVYYCAKSRVLVWFGDYDNWGQGTLVTVSS

SEQ ID NO: 6273 - protein, 120 aa, Artificial Sequence
  Synthetic construct
EVQLVESGGGLVQPGGSLRLSCAASGFTVSSNYMIWVRQAPGKGLQWVSVIYGDGSTFYADSVKGRFTISRDNSKNTLYIQMNSLRPEDTAMYYCARYEGGNPPGAMDVWGQGTTVTVSS

SEQ ID NO: 6274 - protein, 123 aa, Artificial Sequence
  Synthetic construct
EVQLVESGGGLVQPGGSLRLSCAASGFTFSSYSMNWVRQAPGKGLEWVSYISSSSSTIYYADSVKGRFTISRDNAKNSLYLQMNSLRDEDTAVYYCARSWTRSGSYSREFDYWGQGTLVTVSS

SEQ ID NO: 6275 - protein, 124 aa, Artificial Sequence
  Synthetic construct
QVQLQESGPGVVKPSGTLSLTCAVSGVSISRGNWWSWVRQPPGKGLEWIGEIYHSGNTNYRPSLKSRVTISVDISKNEFSLRLSSVTAADTALYYCARDTALMTTVTTGALDVWGLGTMVTVSS

SEQ ID NO: 6276 - protein, 115 aa, Artificial Sequence
  Synthetic construct
EVQLVESGGGLVKPGGSLRLSCAASGFTFSSYSMNWVRQAPGKGLEWVSSISSSSSYIYYADSVKGRFTISRDNAKNSLYLQMNSLRAEDTAVYYCASYHRRDYWGQGTLVTVSS

SEQ ID NO: 6277 - protein, 128 aa, Artificial Sequence
  Synthetic construct
QVQLVQSGAEVKKPGASVKVSCKASGYTFTSYAMHWVRQAPGQRLEWMGWINAGNGNTKYSQKFQGRVTITRDTSASTAYMELSSLRSEDTAVYYCARVSQRYYYDSSGTPRGSFDYWGQGTLVTVSS

SEQ ID NO: 6278 - protein, 122 aa, Artificial Sequence
  Synthetic construct
QVHLQQWGAGLLKPSETLSLTCAVYGVSFRGYYWTWIRQPPGKGLEWIGEVTYSGNTNYNPSLKSRVTMSVDTSKNQFSLRLSSVTAADTAVYYCATILPDWDRPHYYFEYWGQGTLVTVSP

SEQ ID NO: 6279 - protein, 122 aa, Artificial Sequence
  Synthetic construct
QVQLQQSGPGLVKPSQTLSLTCAISGDSVSSNNAAWNWIRQSPSRGLEWLGRTYYRSKWYNDYAVSVKSRVTINPDTSKNQFSLQLNSVTPEDTAVFFCARSWGRGWYFDLWGRGTLVTVSS

SEQ ID NO: 6280 - protein, 122 aa, Artificial Sequence
  Synthetic construct
QVQLQESGPGLVKPSETLSLTCTVSGGSISSYYWSWIRQPPGKGLEWIGYIYYSGSTNYNPSLKSRVTISVDTSKNQFSLKLSSVTAADTAVYYCARQSSSGWKRYDAFDIWGQGTMVTVSS

SEQ ID NO: 6281 - protein, 125 aa, Artificial Sequence
  Synthetic construct
EVQLVESGGGLVKPGGSLRLSCAASGFTFSSYSMNWVRQAPGKGLEWVSSISSSSSYIYYADSVKGRFTISRDNAKNSLYLQMNSLRAEDTAVYYCARGPKQRGYSYGYYGMDVWGQGTTVTVSS

SEQ ID NO: 6282 - protein, 125 aa, Artificial Sequence; identical to SEQ ID NO: 5711
  Synthetic construct

SEQ ID NO: 6283 - protein, 124 aa, Artificial Sequence; identical to SEQ ID NO: 5470
  Synthetic construct

SEQ ID NO: 6284 - protein, 132 aa, Artificial Sequence
  Synthetic construct
QVQLVESGGGVVQPGRSLRLSCAASGFTFSSYAMHWVRQAPGKGLEWVAVISYDGSNKYYADSVKGRFTISRDNSKNTLYLQMNSLRAEDTAVYYCARRGIAVAGSKSGRNFPGGGGAFDIWGQGTMVTVSS

SEQ ID NO: 6285 - protein, 123 aa, Artificial Sequence
  Synthetic construct
EVQLVESGGGSVQPGGSLRLSCVASGFTFNSYWMHWVRQVPGKGLLWVSRINQISTIITYADSVRGRFTISRDNAKNTVYLQMNNLRVEDTGIYYCARDLIMVKTPGDDFDYWGQGTLVTVSS

SEQ ID NO: 6286 - protein, 122 aa, Artificial Sequence
  Synthetic construct
QVQLVESGGGVVQPGRSLRLSCEASGFTFSTHAMHWVRQAPGKGLEWVSLIWYDGSDEYYSDSVTGRFTISRDNSKNTLYLQMNSLRAEDTAVYYCARGGSRYSSGYYFDYWGQGTLVSVSS

SEQ ID NO: 6287 - protein, 130 aa, Artificial Sequence
  Synthetic construct
EVQLVQSGAEVKKPGESLRISCKGSGYSFTSYWISWVRQMPGKGLEWMGRIDPSDSYTNYSPSFQGHVTISADKSISTAYLQWSSLKASDTAMYYCARHRKGRGYYYGSGSYYNNNFDYWGQGTLVTVSS

SEQ ID NO: 6288 - protein, 117 aa, Artificial Sequence
  Synthetic construct
QVQLVQSGAEVKKPGASVKVSCKASGYTFTGYYMHWVRQAPGQGLEWMGWINPNSGGTNYAQKFQGRVTMTRDTSISTAYMELSRLRSDDTAVYYCARVPSSGWPYWGQGTLVTVSS

SEQ ID NO: 6289 - protein, 121 aa, Artificial Sequence
  Synthetic construct
QVQLQESGPGLVKPSQTLSLTCAVSGGSISSSDYYWNWIRLPPGKGLEWIGFIYYSGSTNYNPSLKSRVTISVDTSKNHFSLKLNSVTAADTAVYYCARDGGGTSKGFGYWGQGILVTVSS

SEQ ID NO: 6290 - protein, 127 aa, Artificial Sequence
  Synthetic construct
QVQMVQSGAEVKEPGASVKVSCKATGKTTTNYAISWLRQAPGQGLEWIAWSSVYNGETKYSQKFRGRVTVTTVKATNSGDLELRSLRPDDTAVYFCARFTTYGADTSPKYFFGMDVWGQGTTIIVST

SEQ ID NO: 6291 - protein, 115 aa, Artificial Sequence
  Synthetic construct
EVQLVESGGGSVQPGGSLRLSCAVSRLTFSNHWMSWVRQAPGKGLEWVANIKKDGSEKYYVDSVKGRFTISRDNAKNSLYLQMNSLRAEDTAVYYCATYRNLGYWGQGTLVTVSS

SEQ ID NO: 6292 - protein, 126 aa, Artificial Sequence
  Synthetic construct
EVQLLESGGGLVQPGGSLRLSCAASGFTFSSYAMSWVRQAPGKGLEWVSAISGSGGSTYYADSVKGRFTISRDNSKNTLYLQMNSLRAEDTAVYYCAKDLRSRRYSGSYYGAFDIWGQGTMVTVSS

SEQ ID NO: 6293 - protein, 120 aa, Artificial Sequence
  Synthetic construct
QVQLVESGGGLVKPGGSLRLSCVASGLTFSDFYMSWIRQAPGKGLEWVSHISGSGNIIYYADSVKGRFTISRDNAESSLYLQMNSLRVEDTAVYYCARGYSYSSGSYKFWGQGTLVTVSS

SEQ ID NO: 6294 - protein, 122 aa, Artificial Sequence
  Synthetic construct
QLQLQESGPGLVKPSETLSLTCTVSGGSISSSSYYWGWIRQPPGKGLEWIGSIYYSGSTYYNPSLKSRVTISVDTSKNQFSLKLSSVTAADTAVYYCASRNAYSSGWFVEYWGQGTLVTVSS

SEQ ID NO: 6295 - protein, 117 aa, Artificial Sequence
  Synthetic construct
QVHLQESGPGLVKPSETLSLSCSVSGASIRSSYWSWIRQSPGKGLEWIGYIYHSGSTNYNPSLKSRVTMTVDTSKNQFSLNLRSVTAADTAVYYCASLFSGSYPKSWGQGTLVAVSS

SEQ ID NO: 6296 - protein, 126 aa, Artificial Sequence
  Synthetic construct
QVQLVESGGGVVQPGRSLRLSCAASGFTFSSYAMHWVRQAPGKGLEWVAVISYDGSNKYYADSVKGRFTISRDNSKNTLYLQMNSLRAEDTAVYYCARKSLLWFGELLWSLTFDLWGRGTLVTVSS

SEQ ID NO: 6297 - protein, 119 aa, Artificial Sequence
  Synthetic construct
QMQLQQWGAGLLKPSETLSLTCAVYGGFFSGYYWTWIRQPPGKGLEWIGEMKVSGSPRYRPSLRGRVTISADTSKNQISLKLSSVTAADTAVYFCARGYGSGSARFDPWGQGTLVTVSS

SEQ ID NO: 6298 - protein, 116 aa, Artificial Sequence
  Synthetic construct
EVQLVESGGGLVQPGGSLRLSCAASGFTFSSYNMDWVRQAPGKGPEWVAYITSSSSTIYYAASVRGRFTISRDNAKNSLFLQMNSLRDEDTAVYYCARDPLWRGYWGQGTLVTVSS

SEQ ID NO: 6299 - protein, 130 aa, Artificial Sequence
  Synthetic construct
EVQLVESGGGLVKPGGSLRLSCAASGFTFSSYSMNWVRQAPGKGLEWVSSISSSSSYIYYADSVKGRFTISRDNAKNSLYLQMNSLRAEDTAVYYCAREPTYSPIAVAGKGRLGKTLDYWGQGTLVTVSS

SEQ ID NO: 6300 - protein, 120 aa, Artificial Sequence
  Synthetic construct
EVQLVESGGGLIQPGGSLRLSCAASGFTVSSNYMSWVRQAPGKGLEWVSVIYSGGSTYYADSVKGRFTISRDNSKNTLYLQMNSLRAEDTAVYYCARVGSSGYLYYFDYWGQGTLVTVSS

SEQ ID NO: 6301 - protein, 123 aa, Artificial Sequence; identical to SEQ ID NO: 5437
  Synthetic construct

SEQ ID NO: 6302 - protein, 120 aa, Artificial Sequence
  Synthetic construct
QVQLVQSGAEVKKPGASVKVSCKASGYTFSSYDINWVRQATGQGLEWMGWMTPNSGDTGYAQKFHGRVTMTRNTSKSTAYMELSSLRSDDTAVYYCARFHEDWPYGMDVWGQGTTVTVSS

SEQ ID NO: 6303 - protein, 120 aa, Artificial Sequence
  Synthetic construct
EVQLVESGGGLIQPGGSLRLSCAASGFTVSSNYMSWVRQAPGKGLEWVSVLYSGGSTYYADSVKGRFTISRDNSKNTLYLQMNSLRAEDTAVYYCARGSDYYRTGGFDPWGQGTLVTVSS

SEQ ID NO: 6304 - protein, 124 aa, Artificial Sequence
  Synthetic construct
QVQLVQSGAEVKKPGASVKVSCKASGYTFTSYGISWVRQAPGQGLEWMGWISAYNGNTNYAQKLQGRVTMTTDTSTSTAYMELRSLRSDDTAVYYCARDARQQQRETRTPPGYWGQGTLVTVSS

SEQ ID NO: 6305 - protein, 130 aa, Artificial Sequence
  Synthetic construct
QVQLVESGGGVVQPGRSLRLSCAASGFTFSSYGMHWVRQAPGKGLEWVAVIWYDGSNKYYADSVKGRFTISRDNSKNTLYLQMNSLRAEDTAVYYCAREGQKRYYDFWSGYYRFHGMDVWGQGTTVTVSS

SEQ ID NO: 6306 - protein, 128 aa, Artificial Sequence
  Synthetic construct
EVQLVESGGGLVQPGRSLRLSCAASGFTFDDYAMHWVRQAPGKGLEWVSGISWNSGSIGYADSVKGRFTISRDNAKNSLYLQMNSLRAEDTALYYCAKDMYPGYCSGGSCYLDVFQHWGQGTLVTVSS

SEQ ID NO: 6307 - protein, 124 aa, Artificial Sequence
  Synthetic construct
EVQLVESGGGLVKPGGSLRLSCAASGFTFSSYSMNWVRQAPGKGLEWVSSISSSSSYIYYADSVKGRFTISRDNAKNSLYLQMNSLRAEDTAVYYCARGGGRNYYGSGSYYSSWGQGTLVTVSS

SEQ ID NO: 6308 - protein, 118 aa, Artificial Sequence
  Synthetic construct
EVQLVESGGGLVQPGGSLRLSCAASGFTFSSYWMHWVRQAPGKGLVWVSRINSDGSSTSYADSVKGRFTISRDNAKNTMYLQMNSLRAEDTAVYYCTSLSFLSPGDYWGQGTLVTVSS

SEQ ID NO: 6309 - protein, 120 aa, Artificial Sequence
  Synthetic construct
QVQLQESGPGLVKPSGTLSLTCAVSGGSISSSNWWSWVRQPPGKGLEWIGEIYHSGSTNYNPSLKSRVTISVDKSKNQFSLKLSSVTAADTAVYYCARASYYGSGSYYNWGQGTLVTVSS

SEQ ID NO: 6310 - protein, 126 aa, Artificial Sequence
  Synthetic construct
QVQLVESGGGVVQPGRSLRLSCAASGFTFSSYGMHWVRQAPGKGLEWVAVIWYDGSNKYYADSVKGRFTISRDNSKNTLYLQMNSLRAEDTAVYYCARQKHSMVRGVISHWYFDLWGRGTLVTVSS

SEQ ID NO: 6311 - protein, 121 aa, Artificial Sequence
  Synthetic construct
QLQVAESGGGIVQPGTSLRLACAVSGFSLTSFPIHWVRQPPGKGLQWVGVISHDGRNQYFGDSVKGRFIISRDTSKNTVSLQMNTLTSEDTAVYYCAKGASTALVRGPDVWGQGTTVTVSA

SEQ ID NO: 6312 - protein, 131 aa, Artificial Sequence
  Synthetic construct
QVQLQQWGAGLLKPSETLSLTCAVYGGSFSGYYWSWIRQPPGKGLEWIGEINHSGSTNYNPSLKSRVTISVDTSKNQFSLKLSSVTAADTAVYYCARGGRPGCSGGSCYPPRYYYYGMDVWGQGTTVTVSS

SEQ ID NO: 6313 - protein, 121 aa, Artificial Sequence
  Synthetic construct
EVQLVESGGGLVKPGGSLRLSCAASGFTFSSYSMNWVRQAPGKGLEWVSSISSSSSYIYYADSVKGRFTISRDNAKNSLYLQMNSLRAEDTAVYYCASPGTYYYGSGRDYWGQGTLVTVSS

SEQ ID NO: 6314 - protein, 130 aa, Artificial Sequence
  Synthetic construct
QVQLQESGPGLVKPSETLSLTCTVSGGSVSSGSYYWSWIRQPPGKGLEWIGYIYYSGSTNYNPSLKSRVTISVDTSKNQFSLKLSSVTAADTAVYYCARESRSTRYCSSTSCYRSGMDVWGQGTTVTVSS

SEQ ID NO: 6315 - protein, 115 aa, Artificial Sequence
  Synthetic construct
EVQLVESGGGLVQPGGSLRLSCAASGFTFSSYWMSWVRQAPGKGLEWVANIKQDGSEKYYVDSVKGRFTISRDNAKNSLYLQMNSLRAEDTAVYYCARSARKDYWGQGTLVTVSS

SEQ ID NO: 6316 - protein, 125 aa, Artificial Sequence
  Synthetic construct
EVLLLEAGGGLVQPGGSLRLSCGTSGFTFSAYTMTWVRQRPGKGLEWVSAISGNSAATYYAGSVRGRFTISRDNTKSTLFLQLSSLRAEDTAIYFCARDKGGEKGVFRDYVLGFWGQGTAVTVSS

SEQ ID NO: 6317 - protein, 128 aa, Artificial Sequence
  Synthetic construct
QLQLQESGPQLVKPSETLSLTCTVSGGFIGSSGYYWAWIRQPPRKGLEWIGSMYSTGSTYYNPSLESRITISIDTSKNQYSLKLRSVTAADTAVYHCARRGGTYCSGVGCYENWFDPWGQGTLVTVSS

SEQ ID NO: 6318 - protein, 124 aa, Artificial Sequence; identical to SEQ ID NO: 5963
  Synthetic construct

SEQ ID NO: 6319 - protein, 126 aa, Artificial Sequence
  Synthetic construct
EVQLVESGGGLVKPGGSLRLSCAVSGFSLSTSGMNWVRQAPGKGLEWVSYISRSSSYIYYADSVKGRFTISRDNARNSLFLQMNSLRDEDTAVYYCARVGGGDEWYSSGWFSFDNWGQGTLVTVSS

SEQ ID NO: 6320 - protein, 119 aa, Artificial Sequence
  Synthetic construct
EVQLVQSGAEVKKPGATVKISCKVSGYTFTDYYIYWVQQAPGKGLEWMGLIDPEDGRTIYAEKFQGRVTITADTTTDTAHMEMSSLRSEDTAVYYCSKNVAGSDALDFWGQGTVVTVSS

SEQ ID NO: 6321 - protein, 125 aa, Artificial Sequence
  Synthetic construct
QLQLQESGPGLVKPSETLSLTCSVSGGSISSSPYWWIWFRQSPGKGLEYIGHVLHSGTTALNPSLKSRLTLSVDTSKNQLSLRLSSVTAADTAVYYCAYTLGYCTSDSCPGFDPWGQGAPVTVSS

SEQ ID NO: 6322 - protein, 122 aa, Artificial Sequence
  Synthetic construct
QVQLVESGGGVVQPGRSLRLSCAASGFTFSSYGMHWVRQAPGKGLEWVAVISYDGSNKYYADSVKGRFTISRDNSKNTLYLQMNSLRAEDTAVYYCAKGRKWELLQAQIDYWGQGTLVTVSS

SEQ ID NO: 6323 - protein, 126 aa, Artificial Sequence
  Synthetic construct
QVQLQESGPGLLKPSQTLTLICTVSGGSVSSGDYYWNWIRQPPGKGLEWIGSIYYSGTTYYNPSLKSRVSMSLDTSKNQFSLKLTSVTAADTAVYYCARAYDILTDYYPNIYFDYWGQGSLVTVSS

SEQ ID NO: 6324 - protein, 127 aa, Artificial Sequence
  Synthetic construct
QVPLVESGGGVVQPGRSLRLSCVASGFTFNTSTIHWVRQAPGKGLEWVAVISYDGDNKYYADSVKGRFTISRDNSKNTLYLQMNSLRAEDTAMYYCARDFWQRYYYDSSGSDAFDIWGQGTMVTVSS

SEQ ID NO: 6325 - protein, 122 aa, Artificial Sequence
  Synthetic construct
EVQLVQSGAVVKKPGTTVRISCKVSGNRFSDYYIHWVRQAPGKGLEWLGLVGPDDGEAVYAEKFQGRVSITADTSTDSAYIDISSLRSEDTALYYCTTDFRGDGSNDAFHIWGQGTMVTVSS

SEQ ID NO: 6326 - protein, 125 aa, Artificial Sequence
  Synthetic construct
EVQLLESGGGLVQPGGSLSLSCAASGFTFSSYAMSWVRQAPGKGLQWVSAISAGGGNVNYADSVKGRFTISRDNSKNTLYLDMKSLGAEDTAVYYCAKDSNSFIVVPAPNGLDVWGQGTTVTVSS

SEQ ID NO: 6327 - protein, 125 aa, Artificial Sequence
  Synthetic construct
QVQVVESGGGVVQPGRSLRLSCVASGFTFSSYGMHWVRQAPGKGLEWVAAIWYDGSNKYYVDSVKGRFTISRDNSKNTLYLQMNSLRAEDTAVYYCARGGIWFGELTAVDAFDIWGQGTMVTVSS

SEQ ID NO: 6328 - protein, 118 aa, Artificial Sequence
  Synthetic construct
EVQLVESGGGLVQPGGSLRLSCTASGFTFRNFWMSWVRQDEGKRLEFVANINPDGSEISLADSVKGRFIISRDNAKNSVFLQMNSLRVEDTSVYYCARDPAYSAFDIWGQGTVVTVSS

SEQ ID NO: 6329 - protein, 125 aa, Artificial Sequence
  Synthetic construct
EVQLVESGGGLVKPGRSLRLSCTASGFTFGDYAMSWFRQAPGKGLEWVGFIRSKAYGGTTEYAASVKGRFTISRDDSKSIAYLQMNSLKTEDTAVYYCTRENARRWLQYLQFDYWGQGTLVTVSS

SEQ ID NO: 6330 - protein, 118 aa, Artificial Sequence
  Synthetic construct
QVQLQESGPGVVKPSETLFLTCTVSGGSIGRSYWYWIRQLPGEGLEWLGYVYYSGSANYNSPVKNRVAISVDTSKNQFTLELRSMTAADTGVYYCARSNMAYWFFDLWGRGALVTVSS

SEQ ID NO: 6331 - protein, 123 aa, Artificial Sequence
  Synthetic construct
EVQLLESGGGLVQPGGSLRLACVASGFTFSDYAMSWVRQPPGKGLEWVSVVSESGIITYYTDSVKGRFTISRDNSKNTLYLQMNSLRAEDAAVYYCAKDRERELKWGRKFDSWGQGTLVTVSS

SEQ ID NO: 6332 - protein, 126 aa, Artificial Sequence
  Synthetic construct
QVQLQESGPGLVKPSQTLSLTCTVSGGSISSGGYYWSWIRQHPGKGLEWIGYIYYSGSTYYNPSLKSRVTISVDTSKNQFSLKLSSVTAADTAVYYCARERVRRSGSYWSGYFDYWGQGTLVTVSS

SEQ ID NO: 6333 - protein, 123 aa, Artificial Sequence
  Synthetic construct
QVQLVQSGAEVKKPGASVKVSCKASGYTFTGYYMHWVRQAPGQGLEWMGWINPNSGGTNYAQKFQGRVTMTRDTSISTAYMELSRLRSDDTAVYYCARTRQGSGSYYNLLRYWGQGTLVTVSS

SEQ ID NO: 6334 - protein, 135 aa, Artificial Sequence
  Synthetic construct
QLQLQESGPGLVKPSETLSLTCTVSGGSISSSSYYWGWIRQPPGKGLEWIGSIYYSGSTYYNPSLKSRVTISVDTSKNQFSLKLSSVTAADTAVYYCARHPLYYDFWSGYYEMGLGDYYYGMDVWGQGTTVTVSS

SEQ ID NO: 6335 - protein, 124 aa, Artificial Sequence
  Synthetic construct
EVQLVESGGNLVQPGGSLRLSCAASGFTFSGYAMTWVRQAPGKGLECVSGITGNGGTTYYADSVKGRFIISRDNSKNTLHLQMNSLRDDDTAVYYCAKRDYYDESGYFPLLDEWGQGTLVTVSS

SEQ ID NO: 6336 - protein, 120 aa, Artificial Sequence
  Synthetic construct
QVQLQESGPGLVKPSETLSLTCSVSGGSISSYYWSWIRQPPGKGLEWIGYIYYSGSTNYNPSLKSRVTISVDTSKNQFSLKLSSVTAADTAVYYCARGFKGSSFNWFDPWGQGTLVTVSS

SEQ ID NO: 6337 - protein, 123 aa, Artificial Sequence
  Synthetic construct
EAQLVESGGGLVQPGGSLRLSCAASGFTFSTSAINWVRQAPGKGLEWIAYVSGSSANIKYADSVKGRFTVSRDNAKNSAYLQMVSLRDEDTAVYYCARDRSLGATHIHWFDPWGQGTQVTVSS

SEQ ID NO: 6338 - protein, 117 aa, Artificial Sequence
  Synthetic construct
EVQLVESGGGLVQPGGSLKLSCAASGFTFSGSAMHWVRQASGKGLEWVGRIRSKANSYATAYAASVKGRFTISRDDSKNTAYLQMNSLKTEDTAVYYCTRHYFPGDWGQGTLVTVSS

SEQ ID NO: 6339 - protein, 120 aa, Artificial Sequence
  Synthetic construct
QITLRESGLTLVKPTQTLTLTCSFSGFSLSTSGVGLLWIRQPPGKALEWLALIYWDDDKRYNSSLKNRLSVTKDTSKNEVVLTMTNVDPEDTATYYCAQSSSFYYGIDFWGQGALVTVSS

SEQ ID NO: 6340 - protein, 135 aa, Artificial Sequence
  Synthetic construct
QVQLQESGPGLVKPSQTLSLTCTVSGGSISSGSYYWSWIRQPAGKGLEWIGRIYTSGSTNYNPSLKSRVTISVDTSKNQFSLKLSSVTAADTAVYYCARGYSYRRAAYCGGDCYSFGKTNWFDPWGQGTLVTVSS

SEQ ID NO: 6341 - protein, 128 aa, Artificial Sequence
  Synthetic construct
QVQLVQSGAEVKKPGSSVKVSCKASGGTFSTYAMNWVRQAPGQGLEWMGRIIPVLGLANYAQRFQDRVTITADKSTNTVYMELSSLRSEDTAVFYCSRAINIAPADTGSYSYYGLDVWGQGTTVTVSS

SEQ ID NO: 6342 - protein, 133 aa, Artificial Sequence
  Synthetic construct
QLQLQESGPGLVKPSETLSLTCTVSGGSISSSSYYWGWIRQPPGKGLEWIGSIYYSGSTYYNPSLKSRVTISVDTSKNQFSLKLSSVTAADTAVYYCARVSKGYYYGSGSYNRDYYYYGMDVWGQGTTVTVSS

SEQ ID NO: 6343 - protein, 125 aa, Artificial Sequence
  Synthetic construct
EVQLVESGGGLVQPGGSLRLSCAASGFTFSSYSMNWVRQAPGKGLEWVSYITTSSSTIYYTDSVKGRFTISRDNAKNSLYLQMNSLRDEDTAVYYCASDPYCSGGSCYTGPNYYWGRGTLVTVSS

SEQ ID NO: 6344 - protein, 123 aa, Artificial Sequence
  Synthetic construct
QVQLVQSGAEVKKPGASVKVSCKASGYTFTSYAMHWVRQAPGQRLEWMGWINAGNGNTKYSQKFQGRVTITRDTSASTAYMELSSLRSEDTAVYYCARARGNYYDSSGLGAYWGQGTLVTVSS

SEQ ID NO: 6345 - protein, 122 aa, Artificial Sequence
  Synthetic construct
QVQLQESGPGLVKPSETLFLTCSVSGDSVSSGTHYWNWIRQPAGKGLQWIGRVYGSGTVTYSPSLESRGTISVDMSTNQFSLRLTSVTAADTAVYYCARGPYGDPDDRFDYWGQGTLVTVSS

SEQ ID NO: 6346 - protein, 119 aa, Artificial Sequence
  Synthetic construct
EVQLVESGGGLVQPGGSLRLSCAASGFTFSSYWMSWVRQAPGKGLEWVANIKQDGSEKYYVDSVKGRFTISRDNAKNSLYLQMNSLRAEDTAVYYCARGSYYRHAFDIWGQGTMVTVSS

SEQ ID NO: 6347 - protein, 122 aa, Artificial Sequence
  Synthetic construct
QVQLQESGPGLVKPSETLSLSCTVSGVSITSGSYYWGWIRRSPGTGLEWIGSIYYSGTTYYNPSLKSRVTMSVDTSKNQFSLRLRSVSAPDTALYYCARYAGTRSGWFFDFWGQGALVTVSS

SEQ ID NO: 6348 - protein, 122 aa, Artificial Sequence
  Synthetic construct
EVQLVESGGGLVQPGGSLRLSCAASGFTFSSYWMHWVRQGSGKGLVWISSINTDGSSTSYADSVKGRFTISRDNAKNTLDLQMNSLRAEETAVFYCVRGGGDTPARPPEFYWGQGTLVTVSS

SEQ ID NO: 6349 - protein, 118 aa, Artificial Sequence
  Synthetic construct
EVQLVESGGGLIQPGGSLRLSCAASGFTVSSNYMSWVRQAPGKGLEWVSVINSGGSTNYADSVKGRFTISRDNSKNTLYLQMNSLRAEDTAVYYCAYTIVRGGFRDYWGQGTLVTVSS

SEQ ID NO: 6350 - protein, 124 aa, Artificial Sequence; identical to SEQ ID NO: 5439
  Synthetic construct

SEQ ID NO: 6351 - protein, 121 aa, Artificial Sequence
  Synthetic construct
VVQLVESGGGVVRPGEALKLSCTASGFKFDDYGMGWVRQVPGKGLEWVATTNWNGGGKSLAASVRGRFTISRDNAKNSLFLQVNSLRVDDTAVYYCATYYYDSGFHYFEFWGQGTQVTVSS

SEQ ID NO: 6352 - protein, 123 aa, Artificial Sequence; identical to SEQ ID NO: 5598
  Synthetic construct

SEQ ID NO: 6353 - protein, 126 aa, Artificial Sequence; identical to SEQ ID NO: 5486
  Synthetic construct

SEQ ID NO: 6354 - protein, 127 aa, Artificial Sequence
  Synthetic construct
QVQLVESGGGVVQPGRSLRLSCAASGFTFSSYAMHWVRQAPGKGLEWVAVISYDGSNKYYADSVKGRFTISRDNSKNTLYLQMNSLRAEDTAVYYCARGPSPGRGAQPSAQTPFDYWGQGTLVTVSS

SEQ ID NO: 6355 - protein, 115 aa, Artificial Sequence
  Synthetic construct
EVQLVESGGGLVQPGGSLKLSCAASGFTFSDYTIHWVRQASGKGLEWVGRIRVRANRYATSYSPSVEGRFSISRDDSKNTAFLQMHSLRTEDTALYYCTFRLAPQWGRGTLVTVS

SEQ ID NO: 6356 - protein, 125 aa, Artificial Sequence
  Synthetic construct
QVRLVQSGAEVRKPGSSVKVSCTASGDSLNNYAFTWVRQAPGHGLDWMGRIIPVLDRPNYAETLQGRVTFSADTSTKTVYMELNGLTSDDTAMYYCARGNMGFGTPQYHYGLDAWGQGTWVTVSS

SEQ ID NO: 6357 - protein, 126 aa, Artificial Sequence
  Synthetic construct
EVQLVESGGGLVKPGGSLRLSCAASGFTFSSYSMNWVRQAPGKGLEWVASISSSSRYIYYAESVRGRFTISRDNAKISLSLQMNSLGAEDTAVYYCARDPLWYYGSETYSYYFDYWGQGTLVTVSS

SEQ ID NO: 6358 - protein, 121 aa, Artificial Sequence
  Synthetic construct
QVQLVQSGTEVKKPGSSVRVSCKASGGTFSKYAFNWVRQAPGQGLEWMGGIIPMFGTTTYAQEFRGRVTITADESSGTAHMELSTLRSEDTAMYYCARGRGVDFVDALDIWGQGTMVTVSL

SEQ ID NO: 6359 - protein, 123 aa, Artificial Sequence
  Synthetic construct
EVQLVESGGGLVQPGGSLRLSCAASGFTFSSYWMHWVRQAPGKGLMWVSGINIDGSRTTYADSVKGRFTISRDNAKSTLYVQVNSLRAEDTAVYYCTRGGYSGYDWVPGIDYWGQGTLVTVSS

SEQ ID NO: 6360 - protein, 130 aa, Artificial Sequence
  Synthetic construct
QVQLVQSGAEVKKPGSSVKVSCKASGGTFSSYAISWVRQAPGQGLEWMGGIIPIFGTANYAQKFQGRVTITADESTSTAYMELSSLRSEDTAVYYCARAAEDIVVVPAAKDYYYYGMDVWGQGTTVTVSS

SEQ ID NO: 6361 - protein, 125 aa, Artificial Sequence
  Synthetic construct
QVQLQESGPGLVKPSQTLSLTCTVSGGSISSGGYYWSWIRQHPGKGLEWIGYIYYSGSTYYNPSLKSRVTISVDTSKNQFSLKLSSVTAADTAVYYCARDLGLQGGRVPGIFDYWGQGTLVTVSS

SEQ ID NO: 6362 - protein, 126 aa, Artificial Sequence
  Synthetic construct
QLQLQESGPGLVKPSETLSLTCTVSGGSISSSSYYWGWIRQPPGKGLEWIGSIYYSGSTYYNPSLKSRVTISVDTSKNQFSLKLSSVTAADTAVYYCASLQIESGYYTSPHGFDYWGQGTLVTVSS

SEQ ID NO: 6363 - protein, 116 aa, Artificial Sequence
  Synthetic construct
QITLKESGPTLVKPTQTLTLTCTFSGFSLSTSGVGVGWIRQPPGKALEWLALIYWDDDKRYSPSLKSRLTITKDTSKNQVVLTMTNMDPVDTATYYCAHSGIAAPWGQGTLVTVSS

SEQ ID NO: 6364 - protein, 120 aa, Artificial Sequence
  Synthetic construct
EVQLVQSGAEVKKPGESLRISCKGSGYSFTSYWISWVRQMPGKGLEWMGRIDPSDSYTNYSPSFQGHVTISVDKSISTAYLQWSSLKASDTAMYYCARQAHGSGSYLVYWGQGTLVTVSS

SEQ ID NO: 6365 - protein, 122 aa, Artificial Sequence
  Synthetic construct
EVKLVESGGALVQPGGSLRLLCAASGFTFDSYSMVWVRQAPGKGLDWVSYISSRSSTIYYGDSVKGRFTISRDNAKNSLYLQMDSLKDEDTAVYYCARVGRFGSGGYPFDYWGQGTLVPVSS

SEQ ID NO: 6366 - protein, 123 aa, Artificial Sequence
  Synthetic construct
QVQLVQSGSELKKPGASLKVSCKTSGYTFSSYSLNWVRQAPGQGLEWMGWITTDTGNPTYGQGFTGRFVFSLDTSVSTAYLQISSLKAEDTAVYYCARGGDCFSTSCYHFDYWGQGTLVTVSS

SEQ ID NO: 6367 - protein, 123 aa, Artificial Sequence
  Synthetic construct
QVQLVQSGAEVKKPGASVKVSCKASGYTFTSYGISWVRQAPGQGLEWMGWISAYNGNTNYAQKLQGRVTMTTDTSTSTAYMELRSLRSDDTAVYYCARRGGRYSNNDNWFDPWGQGTLVTVSS

SEQ ID NO: 6368 - protein, 123 aa, Artificial Sequence; identical to SEQ ID NO: 5437
  Synthetic construct

SEQ ID NO: 6369 - protein, 121 aa, Artificial Sequence
  Synthetic construct
EVQLVESGGGLVQPGGSLKLSCAASGFTFSGSAMHWVRQASGKGLEWVGRIRSKANSYATAYAASVKGRFTISRDDSKNTAYLQMNSLKTEDTAVYYCTRQTQWLRSLDYWGQGTLVTVSS

SEQ ID NO: 6370 - protein, 127 aa, Artificial Sequence
  Synthetic construct
EVQLVESGGGLVQPGGSLRLSCAASGFTFSSYSMNWVRQAPGKGLEWVSYISSSSSTIYYADSVKGRFTISRDNAKNSLYLQMNSLRDEDTAVYYCARGRGTRGYSYGYPFSWFDPWGQGTLVTVSS

SEQ ID NO: 6371 - protein, 127 aa, Artificial Sequence
  Synthetic construct
QVQLLQSGTAMKKPGASVKLSCQPSGYTFTYYSIHWVRQAPGQRLEWMGWINGGNGNTKYSEKFQGRLTMTRDISASTAYMELSRLTSDDTAIYYCVRAGGAAAGKPGYYKYGLDVWGQGTTVTVSS

SEQ ID NO: 6372 - protein, 127 aa, Artificial Sequence; identical to SEQ ID NO: 5678
  Synthetic construct

SEQ ID NO: 6373 - protein, 123 aa, Artificial Sequence; identical to SEQ ID NO: 5437
  Synthetic construct

SEQ ID NO: 6374 - protein, 129 aa, Artificial Sequence
  Synthetic construct
QVQLQQWGAGLLKPSETLSLTCAVYGGSFSGYYWSWIRQPPGKGLEWIGEINHSGSTNYNPSLKSRVTISVDTSKNQFSLKLSSVTAADTAVYYCARLPHPRSSGWSNRGYYYYGMDVWGQGTTVTVSS

SEQ ID NO: 6375 - protein, 122 aa, Artificial Sequence
  Synthetic construct
EVQLLESGGGLVQPGGSQRLSCAASGFTFSSYAMNWVRQGPGKGLEWVSSISGSGVTTYYADSVKGRFTISRDNSKNTLYLQMNSLRAEDTALYYCAKDLHGTTADGPGDYWGQGTLVTVSS

SEQ ID NO: 6376 - protein, 116 aa, Artificial Sequence
  Synthetic construct
EVQLVESGGGLVKPGGSLRLSCAASGFTFSNAWMSWVRQAPGKGLEWVGRIKSKTDGGTTDYAAPVKGRFTISRDDSKNTLYLQMNSLKTEDTAVYYCTTAGIDYWGQGTLVTVSS

SEQ ID NO: 6377 - protein, 122 aa, Artificial Sequence
  Synthetic construct
QVQLVESGGGVVQPGRSLRLSCAASGFIFSDYAMHWVRQAPGKGLEWVAVISYDGNHKYHADSIKGRFTISRDNSKNTLYLEMNGLRAEDTAVYYCSNSRKSTAVTSNFDSWGQGILVTVSS

SEQ ID NO: 6378 - protein, 123 aa, Artificial Sequence
  Synthetic construct
EVHLVESGGGLVKPGGSLRLSCAASGFTFSSYSMNWVRQAPGKGLEWVSSISSSSTYIFHADSVRGRFTTSRDNAKNSLYLQMNSLRAEDTAVYYCARAGDIVGATRGWFDPWGQGTLVTVSS

SEQ ID NO: 6379 - protein, 117 aa, Artificial Sequence
  Synthetic construct
QVQLQESGPGLVKPSETLSLTCTVSGGSISSYYWSWIRQPPGKGLEWIGYIYYSGSTNYNPSLKSRVTISVDTSKNQFSLKLSSVTAADTAVYYCARSPKWLRFDYWGQGTLVTVSS

SEQ ID NO: 6380 - protein, 115 aa, Artificial Sequence
  Synthetic construct
EVQLVESGGGLVQPGGSLRLSCTASGFTFSSYWMHWVRQAPGKGLVWVSYIKTDGSSTSYADSVKGRFTISRDNAKNTLYLQMNSLRAEDTAVYYCARTGDFDSWGQGTLVTVSS

SEQ ID NO: 6381 - protein, 119 aa, Artificial Sequence
  Synthetic construct
EVQLLESGGDLVQPGGSLRLSCAASGFTFNSNAMTWVRQAPGKGLEWVATISGSAVSTYYADFVKGRFIISRDNSKNILFLQMNSLRAEDTAIYYCAKDIAARTYFHSWGQGTLVTVSS

SEQ ID NO: 6382 - protein, 123 aa, Artificial Sequence
  Synthetic construct
QVQLQESGPGLVKPSQTLSLTCTVSGGSISSGGYYWSWIRQHPGKGLEWIGYIYYSGSTYYNPSLKSRVTISVDTSKNQFSLKLSSVTAADTAVYYCARSIQGWGQRGAFDIWGQGTMVTVSS

SEQ ID NO: 6383 - protein, 119 aa, Artificial Sequence
  Synthetic construct
EVQLVESGGGLMKPGESLRLSCAASGFTFSAYSMNWVRQAPGKGLQWVSSITADSTYKYYRDSVTGRFTISRDNAKNSLYLHLDSLTVEDTAVYYCARDREDSHGFDYWGQGTLVTVSS

SEQ ID NO: 6384 - protein, 118 aa, Artificial Sequence; identical to SEQ ID NO: 5663
  Synthetic construct

SEQ ID NO: 6385 - protein, 119 aa, Artificial Sequence
  Synthetic construct
EVQLVESGGGLVKPGGSLRLSCAASGFTFSSYSMNWVRQAPGKGLEWVSSISSSSSYIYYADSVKGRFTISRDNAKNSLYLQMNSLRAEDTAVYYCARDKTRGYAFDIWGQGTMVTVSS

SEQ ID NO: 6386 - protein, 124 aa, Artificial Sequence
  Synthetic construct
QLQLQESGPGLVKPSETLSLTCTVSGGSIRGSDYYWGWIRQPPGKGLEWIGSIYYSGSTYYNPSLKSRVTVSVDTSKNQFSLKLRSVTAADTAVYYCAKHPLCRSSICYSLDVWGQGTTVGVPS

SEQ ID NO: 6387 - protein, 121 aa, Artificial Sequence
  Synthetic construct
QVQLQESGPGLVKPSQTLSLTCTVSGGSISSGSYYWSWIRQPAGKGLEWIGRIYTSGSTNYNPSLKSRVTISVDTSKNQFSLKLSSVTAADTAVYYCAREGRFPRGWFDPWGQGTLVTVSS

SEQ ID NO: 6388 - protein, 130 aa, Artificial Sequence
  Synthetic construct
QVQLVQSGSELKKPGASVKVSCQTSGYIFTKYSINWVRQAPGQGLEWMGWINTNTGNPTYAQGFTGRFVFSLDTSVNTAYLQISGLMPEDTAVYYCARESVSVYDFWSDSYKDYWYFDLWGRGTLVTVSS

SEQ ID NO: 6389 - protein, 122 aa, Artificial Sequence
  Synthetic construct
GVQLVESGGGLVQPGGSLGLSCAVSGLNFKNYWMHWVRHIPGKGLLWVARITADGRTTAYAASVTGRFTISRDNVKQTLYLHMNRLRVEDTAVYYCVSPSSDKDYFEVFDFWGQGTLVTVSS

SEQ ID NO: 6390 - protein, 116 aa, Artificial Sequence
  Synthetic construct
GPGLQESGPGLVKPSETLSLNCTVSGDSFSNYYWSWIRQPAGKGLEWIGRIYPSGATNYSPSLKSRVTMSVDTSKKQFSLKLNSVTAADTAVYYCARGGIWGFDSWGQGARVTVFS

SEQ ID NO: 6391 - protein, 124 aa, Artificial Sequence
  Synthetic construct
EVQMVESGGGLVKPGGSLRLSCAASGFTFSAYGMHWVRQAPGKGLEWVSYISSTGNYISYADSLRGRFTISRDDARNSLYLQMNSLRAEDTAVYYCARDPLHYDTLTTYYEGYWGQGTLVTVSS

SEQ ID NO: 6392 - protein, 128 aa, Artificial Sequence
  Synthetic construct
QVQLVQSGSELKKPGASVKVSCKASGYTVTEYVINWVRQAPGQGLEWMGWINTNTAKPMYAQGFTGRFVFSLDTSVNTAYLQISGLQAEDTYTYYCARGAPVFGPVIVPSFYKPFDVWGQGTAVIVSS

SEQ ID NO: 6393 - protein, 123 aa, Artificial Sequence
  Synthetic construct
EVQLVESGGGLVQPGGSLRLSCAASGFTFSSYWMSWVRQAPGKGLEWVANIKQDGSEKYYVDSVKGRFTISRDNAKNSLYLQMNSLRAEDTAVYYCARVLRYFDRLRAAFDIWGQGTMVTVSS

SEQ ID NO: 6394 - protein, 121 aa, Artificial Sequence
  Synthetic construct
QVQLVQSGAEVKKPGASVKVSCKASGNIVSTNYMHWVRQAPGQGLEWMGLINPDGGSTTYAQKFQGRVTMTRDTSTSTVYMELSSLRSDDTAVYYCVRTFAESHYSGMDVWGQGTTVTVSS

SEQ ID NO: 6395 - protein, 127 aa, Artificial Sequence
  Synthetic construct
EVQLVESGGHVVQPGGSLRLSCVASGFTFKNYWMTWVRQAPGKGLEWVANIREDGSEKYYVDSLKGRFIISRDNAKNLMHLEMNRLRVEDTGVYYCARVGGSLESKVTVYYFEMDVWGQGTTVTVSS

SEQ ID NO: 6396 - protein, 124 aa, Artificial Sequence; identical to SEQ ID NO: 5439
  Synthetic construct

SEQ ID NO: 6397 - protein, 128 aa, Artificial Sequence
  Synthetic construct
QVQLQESGPGLVKPSQTLSLTCTVSGGSISSGSYYWSWIRQPAGKGLEWIGRIYTSGSTNYNPSLKSRVTISVDTSKNQFSLKLSSVTAADTAVYYCARDHRGGYGPKRYYYYGMDVWGQGTTVTVSS

SEQ ID NO: 6398 - protein, 127 aa, Artificial Sequence
  Synthetic construct
EVQLVESGGGLEQPGRSLRLSCVASGFTFDDYAMHWVRQAPGKGLEWVSGITWSSDVIDYADSVRGRFTISRDNAKSSLYLQMNSLRAEDTAFYYCIKGSRVTIFGVLTDGDAFDIWGQGTMVTVSS

SEQ ID NO: 6399 - protein, 120 aa, Artificial Sequence
  Synthetic construct
QVQLQQWGAGLLKPSETLSLTCAVYGGSFSGYYWTWIRQPPGKGLECIGQINYSGSTNYNPSLKSRVTISVDTSKTQFSLNLSSVTAADTAVYYCARGSSYYKPWYFDVWGRGTLVTVSS

SEQ ID NO: 6400 - protein, 116 aa, Artificial Sequence
  Synthetic construct
QPQLHESGPGLLKPSETLSLTCSVSGGSVRTSAHFWGWIRQPPGKGLEWIGSTYFTGATYYNPSLKSRITISVDTSKNQFSLRLSSVTAADTAVYYCARHPTLDYWGQGILVTVSS

SEQ ID NO: 6401 - protein, 125 aa, Artificial Sequence
  Synthetic construct
QLQLQESGPGLVKPSETLSLTCTVSGGSISSSSYYWGWIRQPPGKGLEWIGSIYYSGSTYYNPSLKSRVTISVDTSKNQFSLKLSSVTAADTAVYYCARHRGRDGYNRRGGFDYWGQGTLVTVSS

SEQ ID NO: 6402 - protein, 122 aa, Artificial Sequence
  Synthetic construct
QVQLVQSGAEVKKPGASVKVSCKASGYTFTSYGISWVRQAPGQGLEWMGWISAYNGNTNYAQKLQGRVTMTTDTSTSTAYMELRSLRSDDTAVYYCARDLRRYSSGWYYDYWGQGTLVTVSS

SEQ ID NO: 6403 - protein, 121 aa, Artificial Sequence
  Synthetic construct
EVQLVQSGAEVKKPGESLKISCKGSGYSFAKYWIGWVRQMPGKGLEWMGIIYPGDSDTKYSPSFQGRVAISADKSISTAYLQWSSLRASDTAIYYCARARAQLWPDAFDYWGQGTLVTASP

SEQ ID NO: 6404 - protein, 126 aa, Artificial Sequence
  Synthetic construct
QVQLQESGPGLVKPSETLSLTCTVSGGSISSGPSHWSWIRQPAGKGLEWIGRIYSSGSTNYNPSLKSRVTMAVDTSKNQISLKMSSVTAADTAVYYCARVHYDFRSGTIRDAFDIWGQGTMVTVSS

SEQ ID NO: 6405 - protein, 119 aa, Artificial Sequence
  Synthetic construct
QLQLQESGPGLVKPAETLSLTCSVSGASISSFSYYWGWIRQPPGKGLEWIGSLYYSGSTYYNPSLKSRGTISVDTTKNQFFLKLSSVTAADTAVYYCALLSASSEFDFWGQGILVTVSS

SEQ ID NO: 6406 - protein, 116 aa, Artificial Sequence
  Synthetic construct
EVQLVESGGGLVQPGGSLRLSCVASGFRFDIFWMTWVRQAPGKGLEWVANIKEDGSEEYYVDSVRGRFTISRDNSKNSVYLQLNSLTVADSAVYYCGRDRGFGEGGGQGTLVIVSS

SEQ ID NO: 6407 - protein, 123 aa, Artificial Sequence
  Synthetic construct
QVQLVESGGGVVQPGRSLRLSCAASGFTFSSYGMHWVRQAPGKGLEWVAVISYDGSNKYYADSVKGRFTISRDNSKNTLYLQMNSLRAEDTAVYYCAKVPTWIQLWTTYFDYWGQGTLVTVSS

SEQ ID NO: 6408 - protein, 121 aa, Artificial Sequence
  Synthetic construct
QVQLQESGPGLVKPSETLSLTCTVSGGSISGYHWSWIRQPPGKGLEWIGYIYFTGSTNYNPSLKSRVTISLDTSKNQFSLELTSVAAADTAVYYCARDGRAYNYGYGMDVWGQGTTVTVSS

SEQ ID NO: 6409 - protein, 124 aa, Artificial Sequence
  Synthetic construct
QVQLVQSGAEVKKPGSSVKVSCKASGGTFSSYAISWVRQAPGQGLEWMGGIIPIFGTANYAQKFQGRVTITADESTSTAYMELSSLRSEDTAVYYCAARSGYDYGWFVMPMDVWGQGTTVTVSS

SEQ ID NO: 6410 - protein, 121 aa, Artificial Sequence
  Synthetic construct
QVQLQESGPGLMKPSQTLSLTCTVSGGSISSGGNFWSWIRQPAGKGLEWIGRISSSGSSNYNPSLKSRVIISIDTSKSQFSLELSSVTAADTALYYCAREGGPAKNYFDNWGQGMLVTVSS

SEQ ID NO: 6411 - protein, 119 aa, Artificial Sequence
  Synthetic construct
QVQLVQSGAEVRKPGASVKVSCNPSGYTFNTYGISWVRQIPGQGLEWMGWISVSSDITKYAERFQGRVTLTTDTSTSTAYMELRSLRSDDTAVYFCARNSGTYFPFDYWGQGTLVTVSS

SEQ ID NO: 6412 - protein, 115 aa, Artificial Sequence
  Synthetic construct
EVQLLESGGALVQPGGSLRLSCAASGFTFSNYAMSWVRQAPGKGLEWVSAISGSGGSTYYADSVKGRFTISRDNSKKTLYLQMNSLTAEDTAVYYCAKGSGIDYWGQGTLVTVSS

SEQ ID NO: 6413 - protein, 124 aa, Artificial Sequence
  Synthetic construct
QVELQESGPGLVKPSQTLSLTCKVSRGSISGGFYFWTWMRQPAGKGLEWIGRVDSSGSLDPNPSFKSRLTIEIDKSKTEFSLRLNSVTAADTGVYFCARERRPHTTTWTWFDSWGQGTLVTVSS

SEQ ID NO: 6414 - protein, 120 aa, Artificial Sequence; identical to SEQ ID NO: 5545
  Synthetic construct

SEQ ID NO: 6415 - protein, 127 aa, Artificial Sequence
  Synthetic construct
QVQLVESGGGVVQTGRSLRLSCAASGFTFSDHAMHWVRQAPGKGLEWVAIISYDGNKKYYTDSVKGRFTVSRDNSKNTLYLQMKSLRLEDTGVFYCARELGKYTYGRHYYYYAMDVWGRGTTVTVSP

SEQ ID NO: 6416 - protein, 120 aa, Artificial Sequence
  Synthetic construct
QVQLVESGGALVKPGGSLRLSCVASGLTFSDFYMSWIRQAPGKGLEWVSHISGSGNIIYYADSVKGRFTISRDNAKSSLYLQMNSLRAEDTAVYYCARGYSYSSGSYKFWGQGTLVTVSS

SEQ ID NO: 6417 - protein, 119 aa, Artificial Sequence
  Synthetic construct
QITLKESGPTLVKPTQTLTLTCTFSGFSLSTSGVGVGWIRQPPGKALEWLALIYWDDDKRYSPSLKSRLTITKDTSKNQVVLTMTNMDPVDTATYYCAPRGYGSGFDPWGQGTLVTVSS

SEQ ID NO: 6418 - protein, 120 aa, Artificial Sequence; identical to SEQ ID NO: 5494
  Synthetic construct

SEQ ID NO: 6419 - protein, 127 aa, Artificial Sequence
  Synthetic construct
QITLKESGPTLVKPTQTLTLTCTFSGFSLSTSGVGVGWIRQPPGKALEWLAVIYWDDDKRYRPSLKSRLTITKDTSKNQVVLTMTNMDPVDTATYYCVHSQNCESTTCYKLNWFDVWGQGTLVTVSS

SEQ ID NO: 6420 - protein, 129 aa, Artificial Sequence
  Synthetic construct
QVQLVESGGGVVQPGRSLRLSCAASGFTFSSYGMHWVRQAPGKGLEWVAVISYDGSNKYYADSVKGRFTISRDNSKNTLYLQMNSLRAEDTAVYYCAKDPTPLKYMVRGVPLGRWFDPWGQGTLVTVSS

SEQ ID NO: 6421 - protein, 123 aa, Artificial Sequence
  Synthetic construct
QMQLQESGPGLVKPSETLSLTCTVSGGSISSNYWSWIRQPPGKGLEWIGYIYYSGTTNYNPSLKSRVTISVDTSKNQFSLKLTSVTAADTAVYYCARGIAVTGKPLPEWLQHWGQGTLVTVSS

SEQ ID NO: 6422 - protein, 118 aa, Artificial Sequence; identical to SEQ ID NO: 5663
  Synthetic construct

SEQ ID NO: 6423 - protein, 123 aa, Artificial Sequence
  Synthetic construct
QVQLQQWGAGLLKPSETLSLTCAVHGGSLSGYYWTWIRQSPGKGLEWMGETDHSGDTNYSPSLESRFTISLDTSKNQFSLRLSSLTAADTAVYYCARGFVPGGRYLDRQFDLWGRGTLVTVSS

SEQ ID NO: 6424 - protein, 120 aa, Artificial Sequence
  Synthetic construct
QVQLQESGPGLVKPSGTLSLTCAVSGDSIINNNWWSWVRQPPGKGLEWIGETHHSGGSNYSPSLRSRVTISVDESKNQFSLDLTSVTAADTAVYYCTRRPKGGGGSDQYWGQGTLVTVSS

SEQ ID NO: 6425 - protein, 124 aa, Artificial Sequence
  Synthetic construct
QVQLVQSGPEMKKPGSSVRVSCKASGGSFRSYAVSWVRQAPGQRLEWMGGVLPMYGTANYVQKFQGRVTITADESTSTAYMELSSLRSEDTAVYYCVLDTTMAHPHNWYGLDVWGQGTTVTVSS

SEQ ID NO: 6426 - protein, 130 aa, Artificial Sequence
  Synthetic construct
EVQLLESGGGLVQPGGSLRLSCAASGFTFSSYAMSWVRQAPGKGLEWVSAISGSGGSTYYADSVKGRFTISRDNSKNTLYLQMNSLRAEDTAVYYCAKDLVVAAVRSGSYVSYYYGMDVWGQGTTVTVSS

SEQ ID NO: 6427 - protein, 125 aa, Artificial Sequence
  Synthetic construct
EVRLVQSGAEVKKPGEPLKISCTASGYTFNEYWIGWVRQMPGQGLEWMGIIFPRDSDVRYSPSFQGQVTISVDRSITTAYLQWSSLEASDTAMYYCARAGWGSGSLFNPYNFDYWGQGSLVTVSS

SEQ ID NO: 6428 - protein, 123 aa, Artificial Sequence
  Synthetic construct
EVQLVESGGGLVQPGESLILSCTASGFTFSSYNINWVRQAPGKGLEWVSYISSSSSTIWYADSVKGRVSISRDNAQNSLYLQINSLRDDDTAVYYCARDRPSCGSRYCPFDYWGQGTLVTVFS

SEQ ID NO: 6429 - protein, 124 aa, Artificial Sequence; identical to SEQ ID NO: 5439
  Synthetic construct

SEQ ID NO: 6430 - protein, 125 aa, Artificial Sequence
  Synthetic construct
QVQLQESGPGLVKPSETLSLTCTVSGGSISSYYWSWIRQPAGKGLEWIGRIYTSGSTNYNPSLKSRVTMSVDTSKNQFSLKLSSVTAADTAVYYCARDRTHYYGSGKTENWFDPWGQGTLVTVSS

SEQ ID NO: 6431 - protein, 112 aa, Artificial Sequence; identical to SEQ ID NO: 43
  Synthetic construct

SEQ ID NO: 6432 - protein, 118 aa, Artificial Sequence; identical to SEQ ID NO: 5815
  Synthetic construct

SEQ ID NO: 6433 - protein, 123 aa, Artificial Sequence; identical to SEQ ID NO: 5964
  Synthetic construct

SEQ ID NO: 6434 - protein, 120 aa, Artificial Sequence
  Synthetic construct
QLHLQESGPGLVKPSETLSLTCTVSDDSISKSAFYWGWVRQPPGKGLEWIGSFYYSGSTLYNPSLKSRVIISVDTSKSHVSLELNSVTAADTAVYYCARLPFPGAEGFDQWGQGTLVTVS

SEQ ID NO: 6435 - protein, 132 aa, Artificial Sequence
  Synthetic construct
EVQLVESGGGLVQPGGSLRLSCAASGFTLSSYDMNWVRQAPGKGLEWVSYITVSSSSTYYADSVKGRFTISRDNAKNSLYLQMNSLRDDDTAVYYCARDSAVEYWPVYGPRSTSHHYAMDVWGQGTTVTVSS

SEQ ID NO: 6436 - protein, 118 aa, Artificial Sequence; identical to SEQ ID NO: 5663
  Synthetic construct

SEQ ID NO: 6437 - protein, 117 aa, Artificial Sequence
  Synthetic construct
QVQLVQSGAEVKKPGASVKVSCKASGYTFTSYGISWVRQAPGQGLEWMGWISAYNGNTNYAQKLQGRVTMTTDTSTSTAYMELRSLRSDDTAVYYCARDIDGGMDVWGQGTTVTVSS

SEQ ID NO: 6438 - protein, 121 aa, Artificial Sequence
  Synthetic construct
QVQLQESGPGLVKPSQTLSLTCTVSGGSISSGSYYWSWIRQPAGKGLEWIGRIYTSGSTNYNPSLKSRVTISVDTSKNQFSLKLSSVTAADTAVYYCARILRFVGYGMDVWGQGTTVTVSS

SEQ ID NO: 6439 - protein, 117 aa, Artificial Sequence
  Synthetic construct
EVQLVESGGGLVQPGGSLRLSCAASGFTVSSNYMSWVRQAPGKGLEWVSVIYSGGSTYYADSVKGRFTISRDNSKNTLYLQMNSLRAEDTAVYYCARDHYYYGMDVWGQGTTVTVSS

SEQ ID NO: 6440 - protein, 123 aa, Artificial Sequence
  Synthetic construct
QVQLQESGPGLVKPSQTLSLACSVSGGSIDRSDYYWTWIRQPPGKGLEWIGYIYYSGSTNYNPSLKSRITMSRDTSKNQFSLNLNSVTAADTAVYYCAIAPGSGSQFSCLHIWGPGVMVTVSS

SEQ ID NO: 6441 - protein, 123 aa, Artificial Sequence
  Synthetic construct
EVQLVESGGGLVQPGGSLRLSCAASGFTFSSYSMNWVRQAPGKGLEWVSYISSSSSTIYYADSVKGRFTISRDNAKNSLYLQMNSLRDEDTAVYYCARDARSSNLYYYGMDVWGQGTTVTVSS

SEQ ID NO: 6442 - protein, 122 aa, Artificial Sequence
  Synthetic construct
QVQLQESGPGLVKPSGTLSLTCVVSGGSITSSNWWSWVRQPPGKGLDWIGEISLGGSTNYSPSLKSRVTMSVDKSKNQFSLKLTSVTAADTAVYYCASVGAVAEGEGYFDYWGQGTLVTVSS

SEQ ID NO: 6443 - protein, 118 aa, Artificial Sequence
  Synthetic construct
QVQLVQSGAEVKKPGASVKVSCKASGYTFTGYYMHWVRQAPGQGLEWMGWINPNSGGTNYAQKFQGRVTMTRDTSISTAYMELSRLRSDDTAVYYCARVRRSGGGDYWGQGTLVTVSS

SEQ ID NO: 6444 - protein, 128 aa, Artificial Sequence
  Synthetic construct
QVQLVESGGGVVQPGRSLRLSCAASGFTFSSYAMHWVRQAPGKGLEWVAVISYDGSNKYYADSVKGRFTISRDNSKNTLYLQMNSLRAEDTAVYYCARARYDTIRPLGSGRMNAFDIWGQGTMVTVSS

SEQ ID NO: 6445 - protein, 124 aa, Artificial Sequence; identical to SEQ ID NO: 5809
  Synthetic construct

SEQ ID NO: 6446 - protein, 120 aa, Artificial Sequence
  Synthetic construct
QLQLQESGPGLVKPSETLSLTCTVSGGSISSSSYYWGWIRQPPGKGLEWIGSIYYSGSTYYNPSLKSRVTISVDTSKNQFSLKLSSVTAADTAVYYCARHGMGATTIDYWGQGTLVTVSS

SEQ ID NO: 6447 - protein, 124 aa, Artificial Sequence
  Synthetic construct
QVQLVQSGAEVKKPGASVKVSCKASGYTFTSYAMHWVRQAPGQRLEWMGWINGANDNIKYSQKFQGRVTIIRDTSATTAYMELSSLISEDTAVYYCARGNGQWLGRNYYGMDVWGQGTTVTVSS

SEQ ID NO: 6448 - protein, 123 aa, Artificial Sequence; identical to SEQ ID NO: 5978
  Synthetic construct

SEQ ID NO: 6449 - protein, 118 aa, Artificial Sequence
  Synthetic construct
EVQLVESGGGLAQPGGSLRLSCAASGFSFSSYVMHWVRQAPGRGLMWVSRISHDATITSYADSVKGRFTISRDNAKNTLYLQMNSLRADDTATYYCARDVSWLLFDYWGQGTLVTVSS

SEQ ID NO: 6450 - protein, 122 aa, Artificial Sequence
  Synthetic construct
QVQLVESGGGVVQPGRSLRLSCAASGFTFSSYAMHWVRQAPGKGLEWVAVISYDGSNKYYADSVKGRFTISRDNSKNTLYLQMNSLRAEDTAVYYCARDPYYDISPGYFDYWGQGTLVTVSS

SEQ ID NO: 6451 - protein, 127 aa, Artificial Sequence
  Synthetic construct
QVQLVESGGGVVQPGRSLRLSCAASGFTFSSYAMHWVRQAPGKGLEWVAVISYDGSNKYYADSVKGRFTISRDNSKNTLYLQMNSLRAEDTAVYYCARQSYDSSGYYFRVAGAFDIWGQGTMVTVSS

SEQ ID NO: 6452 - protein, 125 aa, Artificial Sequence
  Synthetic construct
QVQLVESGGGVVQPGRSLRLSCAASGFTFSSYAMHWVRQAPGKGLEWVAVISYDGSNKYYADSVKGRFTISRDNSKNTLYLQMNSLRAEDTAVYYCARTPYYYDSSGYYNAFDIWGQGTMVTVSS

SEQ ID NO: 6453 - protein, 129 aa, Artificial Sequence
  Synthetic construct
QVQLVQSGSELKKPGASVKVSCKASGYDFITYAINWVRQAPGRGLEWMGRINTHTGDSTNAQDFRGRFVFSLDSSVSTAYLHISGLRPADTAIYYCMRENQKRTSRLGVVTIARYFDLWGRGTQVTVSS

SEQ ID NO: 6454 - protein, 118 aa, Artificial Sequence
  Synthetic construct
EVQLEQSGGGLVQPGGSLRLSCAASGFRFSDYVMHWVRQVPGKGLEWVSRISHDGAVITYADPVRGRFTISRDNAMNTLYLQMNSLRVEDTAFYYCGRDMNLILFDYWGQGALVTVSP

SEQ ID NO: 6455 - protein, 122 aa, Artificial Sequence; identical to SEQ ID NO: 6279
  Synthetic construct

SEQ ID NO: 6456 - protein, 118 aa, Artificial Sequence
  Synthetic construct
QVQLVESGGGVVQPGRSLRLSCAASGFTFSSYGMHWVRQAPGKGLEWVAVIWYDGRNKYYTDSVKGRFIMSRDNSKNTLYLQMNSLRAEDTAVYYCARDMFGQAFDLWGRGTLVTVSS

SEQ ID NO: 6457 - protein, 125 aa, Artificial Sequence
  Synthetic construct
EVQLVESGGGLVQPGGSLKLSCAASGFTFSGSAMHWVRQASGKGLEWVGRIRSKANSYATAYAASVKGRFTISRDDSKNTAYLQMNSLKTEDTAVYYCTSHGSGVYYYYYGMDVWGQGTTVTVSS

SEQ ID NO: 6458 - protein, 123 aa, Artificial Sequence
  Synthetic construct
QVQLVESGGGVVQPGRSLRLSCAASGFTFSSYGMHWVRQAPGKGLEWVAVIWYDGSNKYYADSVKGRFTISRDNSKNTLYLQMNSLRAEDTAVYYCARGGRGLYGGNSREDYWGQGTLVTVSS

SEQ ID NO: 6459 - protein, 127 aa, Artificial Sequence
  Synthetic construct
EVQLVESGGDLVQPGGSLRLSCVVTGFTVRNNYMNWVRQAPGKGLEWVSVIYSGDNTKYADSVKGRFTISRDTSKNTLYLQMNSLRTEDTAVYYCARDDRYSGYDRRYYYYHGMDVWGQGTTVTVSS

SEQ ID NO: 6460 - protein, 122 aa, Artificial Sequence
  Synthetic construct
QVQLVESGGGVVQPGRSLRLSCAASGFTFSSYGMHWVRQAPGKGLEWVAVISYDGSNKYYADSVKGRFTISRDNSKNTLYLQMNSLRAEDTAVYYCAKRGAAVVYYYGMDVWGQGTTVTVSS

SEQ ID NO: 6461 - protein, 125 aa, Artificial Sequence
  Synthetic construct
EVQLVESGGGLVQPGGSLRLSCAASGFTFSSYWMSWVRQAPGKGLEWVANIKQDGSEKYYVDSVKGRFTISRDNAKNSLYLQMNSLRAEDTAVYYCARAGRSSSWSVSEGKFDPWGQGTLVTVSS

SEQ ID NO: 6462 - protein, 124 aa, Artificial Sequence
  Synthetic construct
EVQLVQSGAEVKKPGAAVKFSCKGSGYKFFDYYIHWVRQAPGKGLEWMGLHDPSDGEIWFAEKFRDRVSVDADRLTDTAFMDLTALTSDDTATYYCATVAGIDCRDASCQLRYWGQGSLVIVSS

SEQ ID NO: 6463 - protein, 120 aa, Artificial Sequence
  Synthetic construct
QVQLQESGPGLVKPSETLSLTCTVSGGSISSYYWSWIRQPPGKGLEWIGYIYYSGSTNYNPSLKSRVTISVDTSKNQFSLKLSSVTAADTAVYYCARVGTTVVTYYFDYWGQGTLVTVSS

SEQ ID NO: 6464 - protein, 117 aa, Artificial Sequence
  Synthetic construct
QVQLQESGPGLVKPSGTLSLTCAVSGASFSGSNWWSWVRQPPGEGLEWIGEIHHSGSTNYNPSLKSRVTMSMDKSKIQFSLKLSSVTAADTAVYYCARSLGWYSDYWGHGTLVTVSS

SEQ ID NO: 6465 - protein, 127 aa, Artificial Sequence
  Synthetic construct
GVQLVQSGVEVKKPGESLKISCKGSGYSFTSYWIAWVYQVPGKGLEWMGIIHPGDSDIRYSPSFQGQVTISADKSFSTAYLHWSNLKASDSAMYYCARLRAQGQYDFWSADFYLDYWGQGTLVTVSS

SEQ ID NO: 6466 - protein, 125 aa, Artificial Sequence; identical to SEQ ID NO: 5711
  Synthetic construct

SEQ ID NO: 6467 - protein, 122 aa, Artificial Sequence
  Synthetic construct
EVQLLESGGGLVQPGGSLRLSCAASGFTFSSYAMSWVRQAPGKGLEWVSAISGSGGSTYYADSVKGRFTISRDNSKNTLYLQMNSLRAEDTAVYYCAKSGTLYFVVGGMDVWGQGTTVTVSS

SEQ ID NO: 6468 - protein, 120 aa, Artificial Sequence
  Synthetic construct
QVQLQESGPGLVKPSQTLSLTCTVSGGSISSGSYYWSWIRQPAGKGLEWIGRIYTSGSTNYNPSLKSRVTISVDTSKNQFSLKLSSVTAADTAVYYCARAPYDFWEFDPWGQGTLVTVSS

SEQ ID NO: 6469 - protein, 123 aa, Artificial Sequence
  Synthetic construct
QVRLVESGGGLVKPGGSLRLSCAASGFTFSDYYMTWIRQAPGKGLEWVSYITSSGSTMYYADSVKGRFTISRDNARNSLYLQMNSLRAEDTAVYYCARSGTTSYYYFYGMDVWGQGTTVTVSS

SEQ ID NO: 6470 - protein, 122 aa, Artificial Sequence
  Synthetic construct
EVQLVQSGAEVKKPGESLKISCQASGYSFTNYWIAWVRQMPGRGLEWMGIIYPRDSDTRYSPSFQGQVTISADKSISTAYLQLSSLKASDTAMYYCARPAAQAARMYYFDSWGQGTLVTVSS

SEQ ID NO: 6471 - protein, 127 aa, Artificial Sequence; identical to SEQ ID NO: 5678
  Synthetic construct

SEQ ID NO: 6472 - protein, 133 aa, Artificial Sequence
  Synthetic construct
QVQLQQWGAGLLKPSETLSLTCAVYGGSFSGYYWSWIRQPPGKGLEWIGEINHSGSTNYNPSLKSRVTISVDTSKNQFSLKLSSVTAADTAVYYCARGRSSPGSGSPRRERVAGYYYYGMDVWGQGTTVTVSS

SEQ ID NO: 6473 - protein, 130 aa, Artificial Sequence
  Synthetic construct
QVQLVQSGAEVKKPGASVKVSCKASGYTFTSYGISWVRQAPGQGLEWMGWISAYNGNTNYAQKLQGRVTMTTDTSTSTAYMELRSLRSDDTAVYYCARLGCSSTSCYWGLDYYYYGMDVWGQGTTVTVSS

SEQ ID NO: 6474 - protein, 127 aa, Artificial Sequence; identical to SEQ ID NO: 5772
  Synthetic construct

SEQ ID NO: 6475 - protein, 121 aa, Artificial Sequence
  Synthetic construct
QVQLQESGPGLVKPSQTLSLTCTVSGGSISSGDYYWSWIRQPPGKGLEWIGYIYYSGSTYYNPSLKSRVTISVDTSKNQFSLKLSSVTAADTAVYYCARDKGELLDGFDYWGQGTLVTVSS

SEQ ID NO: 6476 - protein, 122 aa, Artificial Sequence
  Synthetic construct
QVQLQESGPGLVKPSGTLSLTCAVSGGSISSSNWWSWVRQPPGKGLEWIGEIYHSGSTNYNPSLKSRVTISVDKSKNQFSLKLSSVTAADTAVYYCARSPPGIAVAGTGYYWGQGTLVTVSS

SEQ ID NO: 6477 - protein, 126 aa, Artificial Sequence
  Synthetic construct
EVQLVESGGGLVKPGGSLRLSCAASGFTFSSYSMNWVRQAPGKGLEWVSSISSSSSYIYYADSVKGRFTISRDNAKNSLYLQMNSLRAEDTAVYYCARMKGYCSSTSCYTRAFDIWGQGTMVTVSS

SEQ ID NO: 6478 - protein, 122 aa, Artificial Sequence
  Synthetic construct
EVELVQSGAEVKKPGESLRISCKGSGYIFRNHWISWVRQKPGKGLEWMGKIDPGDSHTKYSPSFQGHVTISADKSITTAYLQWSSLKASDTAMYFCARFDPATDQGDAFDVWGQGTMVTVSS

SEQ ID NO: 6479 - protein, 130 aa, Artificial Sequence
  Synthetic construct
QVQLVQSGAEVKKPGASVKVSCKASGYTFTSYGISWVRQAPGQGLEWMGWISAYNGNTNYAQKLQGRVTMTTDTSTSTAYMELRSLRSDDTAVYYCARDLRYSYGFQNPKSYYYYGMDVWGQGTTVTVSS

SEQ ID NO: 6480 - protein, 121 aa, Artificial Sequence
  Synthetic construct
EVQLVESGGGLVKPGGSLRLSCAASGFTFSDYSMTWVRQAPGKGLEWLSSISIVGSNKYYADSVKGRFTISRDNAENSLQLQMNTLRAEDTAVYYCARPIMGHFYYGMDVWGQGTTVTVSS

SEQ ID NO: 6481 - protein, 123 aa, Artificial Sequence; identical to SEQ ID NO: 5437
  Synthetic construct

SEQ ID NO: 6482 - protein, 121 aa, Artificial Sequence
  Synthetic construct
EVQLVQSGAEVKKPGESLKISCKGSGYSFTTYWIGWVRQMPGKGLEWMGVIYPGDSDTKYSPSFRGQVTISADKSVSTAYLQWSSLKASDTAIYYCARARAQLWPTAFDFWGQGTLVTVSS

SEQ ID NO: 6483 - protein, 124 aa, Artificial Sequence
  Synthetic construct
QVQLKQWGAGLLKPSETLSLTCTVSGEPFTKFYYNWIRQSPETGLEWIGEISHDGNIRYSPSVESRVAISVDTSKSQISLKLQSVSGADTGVYYCARGAGTGRSNYFFYGLDVWGQGTAVTVSS

SEQ ID NO: 6484 - protein, 114 aa, Artificial Sequence
  Synthetic construct
QVQLVQSGAEVKKPGASVKVSCKASGYTFTSYGISWVRQAPGQGLEWMGWISAYNGNTNYAQKLQGRVTMTTDTSTSTAYMELRSLRSDDTAVYYCARDRGGYWGQGTLVTVSS

SEQ ID NO: 6485 - protein, 119 aa, Artificial Sequence; identical to SEQ ID NO: 6383
  Synthetic construct

SEQ ID NO: 6486 - protein, 121 aa, Artificial Sequence
  Synthetic construct
QVQLVESGGGVVQPGRSLRLSCAASGFTFSSYGMHWVRQAPGKGLEWVAVIWYDGSNKYYADSVKGRFTISRDNSKNTLYLQMNSLRAEDTAVYYCARYGGRIAAREFDYWGQGTLVTVSS

SEQ ID NO: 6487 - protein, 123 aa, Artificial Sequence
  Synthetic construct
QVQLVESGGGVVQPGRSLRLSCAASGFTFSSYAMHWVRQAPGKGLEWVAVISYDGSNKYYADSVKGRFTISRDNSKNTLYLQMNSLRAEDTAVYYCARASGPAYRQSGPYRHWGQGTLVTVSS

SEQ ID NO: 6488 - protein, 121 aa, Artificial Sequence
  Synthetic construct
QVQLVQSGAEVKKPGASVKVSCKASGYTFTSYGISWVRQAPGQGLEWMGWISAYNGNTNYAQKLQGRVTMTTDTSTSTAYMELRSLRSDDTAVYYCARAWGLKSRTTFDYWGQGTLVTVSS

SEQ ID NO: 6489 - protein, 126 aa, Artificial Sequence
  Synthetic construct
EVQLVESGGGLVQPGGSLRLSCAASGFTFSSYSMNWVRQAPGKGLEWVSYISSSSSTIYYADSVKGRFTISRDNAKNSLYLQMNSLRDEDTAVYYCARERWVRYCSSTSCSPNDYWGQGTLVTVSS

SEQ ID NO: 6490 - protein, 125 aa, Artificial Sequence
  Synthetic construct
QVQLVESGGGVVQPGRSLRLSCAASGFTFSSYGMHWVRQAPGKGLEWVAVISYDGSNKYYADSVKGRFTISRDNSKNTLYLQMNSLRAEDTAVYYCAKALYYYGSGSSRSLIDYWGQGTLVTVSS

SEQ ID NO: 6491 - protein, 125 aa, Artificial Sequence
  Synthetic construct
QVQLQQWGAGLLKPSETLSLTCAVYGGSFSGYYWSWIRQPPGKGLEWIGEINHSGSTNYNPSLKSRVTISVDTSKNQFSLKLSSVTAADTAVYYCARDRGYSYGRPYYYYGMDVWGQGTTVTVSS

SEQ ID NO: 6492 - protein, 122 aa, Artificial Sequence
  Synthetic construct
QVQLQQWGAGLLKPSETLSLTCAVYGGSFSGYYWSWIRQPPGKGLEWIGEINHSGSTNYNPSLKSRVTISVDTSKNQFSLKLSSVTAADTAVYYCARDLDAIADLSLGFDPWGQGTLVTVSS

SEQ ID NO: 6493 - protein, 126 aa, Artificial Sequence
  Synthetic construct
EVQLLESGGGLEQPGGSLRISCAASGFTFSTYGMSWVRQAPGEGLEWVSSISGRGGSTYYAEPVQGRFTISRDNSNNTLYLQMDSLRAEDTAMYFCARINGGFSGQDYDKECFDPWGQGTLVTVSS

SEQ ID NO: 6494 - protein, 124 aa, Artificial Sequence
  Synthetic construct
EANLVESGGAWVQPGGSLRLSCEASGFDFNSYSMSWVRRAPGKGLEWLAYINSRSSTIKYASSVQGRFIVSRDNEKKSVFLQMKSLRDEDTAVYYCARELDSETYYNYNSLDVWGQGTTVTVSS

SEQ ID NO: 6495 - protein, 125 aa, Artificial Sequence
  Synthetic construct
QVQLQESGPGLVKPSGTLSLTCAVSGGSISSSNWWSWVRQPPGKGLEWIGEIYHSGSTNYNPSLKSRVTISVDKSKNQFSLKLSSVTAADTAVYYCARSQRIGSWPNRYNWFDPWGQGTLVTVSS

SEQ ID NO: 6496 - protein, 121 aa, Artificial Sequence
  Synthetic construct
QVQLQESGPGLVKPSETLSLTCTISGGSFSPNYWTWLRQPPGKGLEWLGYIFHSGNPNYNPSLKGRLTLSVDTSKNQFSLRLSSVTAADTAVYYCARGGDYDTSGYAFDHWGQGTLVTVSS

SEQ ID NO: 6497 - protein, 124 aa, Artificial Sequence
  Synthetic construct
QVQLVESGGGVVQPGRSLRLSCAASGFTFSSYGMHWVRQAPGKGLEWVAVIWYDGSNKYYADSVKGRFTISRDNSKNTLYLQMNSLRAEDTAVYYCARRTRRAAPRYYYGMDVWGQGTTVTVSS

SEQ ID NO: 6498 - protein, 123 aa, Artificial Sequence
  Synthetic construct
EVQLVESGGGLVQPGGSLRLSCSGSGFTFSTYPMHWVRQAPGKGLEYVSAVGSDGGSTYYADSVKGRFTISRDNSKNTLYLQMSSLRAEDTAVYYCVKDLGWRSIAADGGDYWGQGTLVSVSS

SEQ ID NO: 6499 - protein, 124 aa, Artificial Sequence
  Synthetic construct
EVQLLESGGGFVQPGGSLRLSCSASGFTFAAYVMSWVRQAPGKGLEWVSSISNSGGSIYYADSVKGRFTISRDNSKSTLHLQLNGLGAEDTAVYYCAKDHAVGVTDTGEYFQHWGQGTLVTVSS

SEQ ID NO: 6500 - protein, 121 aa, Artificial Sequence
  Synthetic construct
EVQLVESGGGLIKPGGSLRLSCAASGFTFSDSWMHWVRQAPGKGLEWVARIKSIVHGGTTDYAAPVKGRFTISRDDSKSTLYLQLNNLKTEDTAVYYCTDSFHYASRSRGGGQGTLVIVSS

SEQ ID NO: 6501 - protein, 120 aa, Artificial Sequence
  Synthetic construct
QVQLEESGGGLVKPGGSLRLSCAASGFTFSDYYMSWIRQAPGQGLEWISYISSRSTFTNYADSVKGRFTISRDNAGNSLFLQMTSLKAEDTAVYYCAREGLSAGQPFDTWGQGTLVTVSS

SEQ ID NO: 6502 - protein, 119 aa, Artificial Sequence
  Synthetic construct
EVQLVESGGGLIKPGGSLRLSCAASGFSFSYTWMTWVRQVPGKGLEWVGRIKSKTDGGTADYAAPVKGRFTISRDDSENTLYLQMNSLKTEDTAVYYCNGRQWGTFDYWGQGTLVTVSS

SEQ ID NO: 6503 - protein, 125 aa, Artificial Sequence
  Synthetic construct
EVQLVESGGGLVKPGGSLRLSCAASGFTFSSYSMNWVRQAPGKGLEWVSSISSSSSYIYYADSVKGRFTISRDNAKNSLYLQMNSLRAEDTAVYYCARDLSLRARSGSYDLRDYWGQGTLVTVSS

SEQ ID NO: 6504 - protein, 114 aa, Artificial Sequence
  Synthetic construct
EVQLVQSGAEVKKPGESLRISCKGSGYSFTSYWISWVRQMPGKGLEWMGRIDPSDSYTNYSPSFQGHVTISADKSISTAYLQWSSLKASDTAMYYCARESTNPWGQGTLVTVSS

SEQ ID NO: 6505 - protein, 124 aa, Artificial Sequence
  Synthetic construct
EVQLVESGGGLVQPGGSLRLSCAASGFTVSSNYMSWVRQAPGKGLEWVSVIYSGGSTYYADSVKGRFTISRDNSKNTLYLQMNSLRAEDTAVYYCARDRAGAISPRVGYYFDYWGQGTLVTVSS

SEQ ID NO: 6506 - protein, 124 aa, Artificial Sequence
  Synthetic construct
QVQLQESGPGLVKPSQTLSLTCTVSGGSISSGDYYWSWIRQPPGKGLEWIGYIYYSGSTYYNPSLKSRVTISVDTSKNQFSLKLSSVTAADTAVYYCARHGRKRGYSGYYFDYWGQGTLVTVSS

SEQ ID NO: 6507 - protein, 125 aa, Artificial Sequence
  Synthetic construct
QVQLVESGGGVVQPGRSLRLSCAASGFTFSSYGMHWVRQAPGKGLEWLVVISYVGSNKYYADSVKGRFTISRDNSKNTLYLQMNSLRAEDTAVYYCAKDCRWEPSIGYYYGMDVWGQGTTVTVSS

SEQ ID NO: 6508 - protein, 130 aa, Artificial Sequence
  Synthetic construct
EVQLLESGGGLVQPGGSLRLSCAASGFTFSSYAMSWVRQAPGKGLEWVSAISGSGGSTYYADSVKGRFTISRDNSKNTLYLQMNSLRAEDTAVYYCAKDLGRLYSSSWYVRYYYYGMDVWGQGTTVTVSS

SEQ ID NO: 6509 - protein, 118 aa, Artificial Sequence
  Synthetic construct
QVQLVESGGGVVQPGRSLRLSCAASGFTFSSYGMHWVRQAPGKGLEWVAVIWYDGSNKYYADSVKGRFTISRDNSKNTLYLQMNSLRAEDTAVYYCARARIRSPFDYWGQGTLVTVSS

SEQ ID NO: 6510 - protein, 127 aa, Artificial Sequence
  Synthetic construct
EVKLVESGGGLVQPGGSLRLSCSVSGFSFTSYAIHWVRQAPGKGLEYVSAISSNGGVTFYADSVKGRFTISRDDSKNTVHLQMNSLRADDTAVYTCVKDWRGGIVEVFAVNSAFDIWGQGTKVTVSS

SEQ ID NO: 6511 - protein, 126 aa, Artificial Sequence
  Synthetic construct
EVQLVQSGAEVKKPGESLKISCKGSGYSFTSYWIGWVRQMPGKGLEWMGIIYPGDSDTRYSPSFQGQVTISADKSISTAYLQWSSLKASDTAMYYCARHPFRYYYGSGPVYGMDVWGQGTTVTVSS

SEQ ID NO: 6512 - protein, 121 aa, Artificial Sequence
  Synthetic construct
QVQLQESGPGLVKPSQTLSLTCSVSGGSISSDNYYWSWIRQPAGKGLEWIGRIYSSGTTGYNPALKSRVTISLDTSKNQFSLQLSAVTVADTAVYYCAKDHNWNDWYFDLWGRGTLVTVAS

SEQ ID NO: 6513 - protein, 122 aa, Artificial Sequence
  Synthetic construct
QVQLVQSGAEVKKPGASVKVSCKASGYTFTSYGISWVRQAPGQGLEWMGWISAYNGNTNYAQKLQGRVTMTTDTSTSTAYMELRSLRSDDTAVYYCASSRVVATIPRRFDYWGQGTLVTVSS

SEQ ID NO: 6514 - protein, 122 aa, Artificial Sequence
  Synthetic construct
EVQLLESGGGLVQPGGSLRLSCAASGFTFSNYAMSWVRQAPGKGLEWVSAISGSSGNTYYADSVKGRFTISRDNSKNTLYLQMNSLRAEDTAVYYCAKPTWTFDWNLLYDYWGQGTLVTVSS

SEQ ID NO: 6515 - protein, 125 aa, Artificial Sequence
  Synthetic construct
QLQLQESGPGLVKPSETLSLTCTVSGGSISSSSYYWGWIRQPPGKGLEWIGSIYYSGSTYYNPSLKSRVTISVDTSKNQFSLKLSSVTAADTAVYYCARHVSSSRPRYYYGMDVWGQGTTVTVSS

SEQ ID NO: 6516 - protein, 125 aa, Artificial Sequence
  Synthetic construct
EVQLVESGGTFVQPGGSLRLSCAASGFTFRSSWMYWVRQVPGKGLAWVSRINGPGTSAYYADPVNGRFTVSRDNANNTLYLRMDSLRSEDTAIYYCVKQFHSGSGSYYNVAFDLWGQGTTVIVSS

SEQ ID NO: 6517 - protein, 128 aa, Artificial Sequence
  Synthetic construct
EVQLLESGGGLVQPGGSLRLSCAASGFTFSSYAMSWVRQAPGKGLEWVSAISGSGGSTYYADSVKGRFTISRDNSKNTLYLQMNSLRAEDTAVYYCAKGSARGYSSSWHGPKYYFDYWGQGTLVTVSS

SEQ ID NO: 6518 - protein, 127 aa, Artificial Sequence
  Synthetic construct
DVQLVESGGGLVQPGGSLRLSCVASGLKFSSYWMSWVRQAPGRGLEWVANIKQDGGAKYYVDSVKGRFTISRDNTKNSLFLQMNSLRAEDTALYFCARDMYCTDNSCYHTSPFFVWWGQGTQVTVAS

SEQ ID NO: 6519 - protein, 118 aa, Artificial Sequence
  Synthetic construct
EVQLVESGGGLVQPGGSLRLSCAASGFTFRNSWMSWVRQAPGKGLEWVANIRHDESEIYYADSVKGRFTISRDNAKNSLYLQMNSLRADDTAAYYCARDPGRIGFDYWGQGALVTVSS

SEQ ID NO: 6520 - protein, 122 aa, Artificial Sequence
  Synthetic construct
EVLLVESGGGLVQPGRSLRLSCSGSGFTFGDYPISWFRQTPARGLEWVGFIRSRRNGGTTEYGTSLRGRFTIFRDDSRSAAYLQIQSLAKEDTGIYYCTRYDYGGGSYLAYWGQGTLLRVSS

SEQ ID NO: 6521 - protein, 132 aa, Artificial Sequence
  Synthetic construct
EVQLVQSGAEVKKPGESLRISCKGSGYSFTNYWISWVRQMPGKGLEWMGRIDPSDSYTNYSPSFQGHVTISTDKSISTAYLQWSSLKASDTAMYYCARRMYYYDSSGYYQRTHYYYNAMDVWGQGTTVTVSS

SEQ ID NO: 6522 - protein, 123 aa, Artificial Sequence; identical to SEQ ID NO: 5437
  Synthetic construct

SEQ ID NO: 6523 - protein, 124 aa, Artificial Sequence
  Synthetic construct
QLQLQESGSGLVKPSQTLSLTCAVSGGSISSGGYSWSWIRQPPGKGLEWIGYIYHSGSTYYNPSLKSRVTISVDRSKNQFSLKLSSVTAADTAVYYCARGKAGTTVTTGAFDIWGQGTMVTVSS

SEQ ID NO: 6524 - protein, 125 aa, Artificial Sequence
  Synthetic construct
EVQLVESGGGLVQPGGSLKLSCAASGFTFSGSAMHWVRQASGKGLEWVGRIRSKANSYATAYAASVKGRFTISRDDSKNTAYLQMNSLKTEDTAVYYCTRQGVEKINPRWAFDIWGQGTMVTVSS

SEQ ID NO: 6525 - protein, 127 aa, Artificial Sequence
  Synthetic construct
QVQLVESGGGVVQPGRSLRLSCAASGFTFSSYGMHWVRQAPGKGLEWVAVISYDGSNKYYADSVKGRFTISRDNSKNTLYLQMNSLRAEDTAVYYCAKGAGYGSGSYYKSLFGMDVWGQGTTVTVSS

SEQ ID NO: 6526 - protein, 124 aa, Artificial Sequence
  Synthetic construct
EVQLVESGGGLVQPGGSLKLSCAASGFTFSGSAMHWVRQASGKGLEWVGRIRSKANSYATAYAASVKGRFTISRDDSKNTAYLQMNSLKTEDTAVYYCTRPKVGATSYYGMDVWGQGTTVTVSS

SEQ ID NO: 6527 - protein, 125 aa, Artificial Sequence
  Synthetic construct
QVRLLESGPGLVKPSETLSLTCDVSGGSLSGNSWWGWVRQAPGKGLEWVGQISHLGTTYSNPALERRVTISVDKSKDQFSLTLASVIAADTATYFCVKVRPYSGGSYWENYFDYWGQGTLVTVSS

SEQ ID NO: 6528 - protein, 125 aa, Artificial Sequence
  Synthetic construct
EVQLVQSGAEVKKPGESLRISCKGSGYTFTSYRITWVRQMPGKGLEWMGTIDPSDSYTNYSPSFEGHVTISTDKTISTAYLYWSSLKPSDTAIFYCARLFEYYYDSSGYYFPDYWGQGTLVTVSS

SEQ ID NO: 6529 - protein, 123 aa, Artificial Sequence
  Synthetic construct
EVQLVESGGGLVQPGGSLRLSCAASGFTFSSYWMSWVRQAPGKGLEWVANIKQDGSEKYYVDSVKGRFTISRDNAKNSLYLQMNSLRAEDTAVYYCARDLRGTMVRGVIFYYWGQGTLVTVSS

SEQ ID NO: 6530 - protein, 121 aa, Artificial Sequence
  Synthetic construct
EVQLVEFGGGLVQPGRSLRLSCGASGFTFEDNAMHWVRQAPGKGLEWVSGISWNSGGTGYMDSVKGRFTISRDNAKNSLYLQMNSLRPEDTALYYCVKDRTSSSSGGFDSWGQGTLVIVSS

SEQ ID NO: 6531 - protein, 128 aa, Artificial Sequence
  Synthetic construct
QVQLVQSGAEVKKPGSSVKVSCQPSGGTFNSYIFNWVRHVPGQGLEWMGGVVPVFGTTNYTQNFQGRLSITADESTRTAYMELSSLRSEDTALYYCATTYLASRIIVVRGVRNWFDSWGPGTLVTVSS

SEQ ID NO: 6532 - protein, 119 aa, Artificial Sequence
  Synthetic construct
QVQLQESGPGLVKPSQTLSLTCTVSGGSISSGSYYWSWIRQPAGKGLEWIGRIYTSGSTNYNPSLKSRVTISVDTSKNQFSLKLSSVTAADTAVYYCARDSVQLGIDYWGQGTLVTVSS

SEQ ID NO: 6533 - protein, 122 aa, Artificial Sequence
  Synthetic construct
QVQLQESGPGLVKPSGTLSLTCAVSGGSISSSNWWSWVRQPPGKGLEWIGEIYHSGSTNYNPSLKSRVTISVDKSKNQFSLKLSSVTAADTAVYYCARVGRLQKPSYGMDVWGQGTTVTVSS

SEQ ID NO: 6534 - protein, 118 aa, Artificial Sequence
  Synthetic construct
QVQLVQSGAEVKKPGSSVKVSCKASGGPFSSYAFTWVRQAPGQGLEWMGRIIPILGISNYAQKFQGRVTITADTSTSTAYMELSSLRSEDTAVYYCASGEELDPIDHWGQGTLVTVSS

SEQ ID NO: 6535 - protein, 120 aa, Artificial Sequence; identical to SEQ ID NO: 6037
  Synthetic construct

SEQ ID NO: 6536 - protein, 127 aa, Artificial Sequence
  Synthetic construct
EVQLVESGGGLVKPGGSLRLSCAASGFTFSSYSMNWVRQAPGKGLEWVSSISSSSSYIYYADSVKGRFTISRDNAKNSLYLQMNSLRAEDTAVYYCARAGYSSSSPDYYYYYDMDVWGQGTTVTVSS

SEQ ID NO: 6537 - protein, 123 aa, Artificial Sequence
  Synthetic construct
QVQLVQSGAEVKKPGASVKVSCTGSGYTFISYYMHWVRQAPGQGLEWMGMIKASGGSTNYAQKFQGRVSMTRDTSTSTVHMELGSLRSEDTAVYYCARGENILTGHYWWLDSWGQGTLVTVSS

SEQ ID NO: 6538 - protein, 126 aa, Artificial Sequence
  Synthetic construct
GVQLVESGGGLVKPGGSLRLSCAASGVTFSNYNINWVRQAPGKGLEWVSYISSSSSYIYYADSVKGRFTISRDNAKNSLYLEMNSLRAEDTAVYYCARVGGGSEWYSSGWFSFDYWGQGTLVTVSS

SEQ ID NO: 6539 - protein, 118 aa, Artificial Sequence
  Synthetic construct
QVQLQESGPGLVRPSETLSLSCSVSGASITSSYWGWIRQPPGKGLEWIGYIYYIGTTNYNPSLESRVTMSVDRSKSQFSLRLTSVTAADTAVYYCATWHGNRGAFEIWGQGTMVTVSS

SEQ ID NO: 6540 - protein, 122 aa, Artificial Sequence
  Synthetic construct
QVQLQESGPGLVKPSQTLSLTCTVSGGSISSGSYYWSWIRQPAGKGLEWIGRIYTSGSTNYNPSLKSRVTISVDTSKNQFSLKLSSVTAADTAVYYCARGRVVGAQYYFDYWGQGTLVTVSS

SEQ ID NO: 6541 - protein, 124 aa, Artificial Sequence; identical to SEQ ID NO: 5592
  Synthetic construct

SEQ ID NO: 6542 - protein, 123 aa, Artificial Sequence
  Synthetic construct
QVQLVESGGGVVQPGRSLRLSCAASGFTFSSYGMHWVRQAPGKGLEWVAVISYDGSNKYYVDSVKGRFTISRDNSKNTLYLQMNSLRAEDTAVYYCAKDRGYRYYFYYGMDVWGQGTTVTVSS

SEQ ID NO: 6543 - protein, 123 aa, Artificial Sequence
  Synthetic construct
QVQLVQSGAEVKKPGASVKVSCKGSGYTFISYYIHWVRQAPGQGLEWMGMIKASGGSTNYAQKFQGRVSMTRDTSTSTVYMELSSLRSEDTAVYYCARGENILTGHFWWFDPWGQGTLVTVSS

SEQ ID NO: 6544 - protein, 124 aa, Artificial Sequence; identical to SEQ ID NO: 5439
  Synthetic construct

SEQ ID NO: 6545 - protein, 133 aa, Artificial Sequence
  Synthetic construct
EVQLVESGGGLVKPGGSLRLSCAASGFTFSTYRMNWVRQAPGKGLEWVSSISSSSSYIYYADSVKGRLTISRDNAKNSLFLEMKSLRAEDTAVYYCARDADLGRGYSYGYWLEFDYYNGMDVWGQGTTVTVSS

SEQ ID NO: 6546 - protein, 115 aa, Artificial Sequence
  Synthetic construct
EIQLLESGGGSKRLGEPLTLSCTTSGFTFKTSPMNWVRQTPGKKFEWVATIGLTAHETYYADSLKGRLVISRDNSQSTLFLQIFRLTVDDTAIYYCVKENDFHLWGQGVLVTVSS

SEQ ID NO: 6547 - protein, 120 aa, Artificial Sequence
  Synthetic construct
QVQLVESGGGVVQPGRSLRLSCAASGFTFRNYGMHWVRQAPGKGLEWVGVIWDDGSMQYYGDSVKGRFTISRDNSKNTLYLQMNSLRAEDTAVYYCASDTGSYSNYFDYWGQGTLVTVSS

SEQ ID NO: 6548 - protein, 123 aa, Artificial Sequence
  Synthetic construct
QVQLVQSGAEVKKTGASVKVSCKTSGYTFTSYYIHWLRQAPGQGFQWMGWINPETGDTHFSKDFRDRVTMTRDTSINTAFMGLTGLKSDDTADYYCARLNFADSSNHDYFDSWGQGTPVRVSS

SEQ ID NO: 6549 - protein, 128 aa, Artificial Sequence
  Synthetic construct
QVQLVQSGAEVKKPGASVKVSCKASGYTFTSYYMHWVRQAPGQGLEWMGIINPSGGSTSYAQKFQGRVTMTRDTSTSTVYMELSSLRSEDTAVYYCARGRNYVWGSYRYRIPNWFDPWGQGTLVTVSS

SEQ ID NO: 6550 - protein, 130 aa, Artificial Sequence
  Synthetic construct
VVQLLESGGGLVQPGGSLRLSCAASGFTFNTHAMGWVRQAPGQGLEWVSVISGGGSGTFYPDSVKGRFTVSRDDSKNTLYLQMSSLRAEDTAVYYCAKGIFAYYFDETHYSKTFYFFDFWGQGTLVSVSS

SEQ ID NO: 6551 - protein, 125 aa, Artificial Sequence
  Synthetic construct
QVQLVQSGAEVKKPGASVKVSCKASGYTFTSYGISWVRQAPGQGLEWMGWISAYNGNTNYAQKLQGRVTMTTDTSTSTAYMELRSLRSDDTAVYYCARDLIRRKYNWNDYYFDYWGQGTLVTVSS

SEQ ID NO: 6552 - protein, 117 aa, Artificial Sequence
  Synthetic construct
EVQLVESGGGLVQPGGSLRLSCAASGFTFSSYWMHWVRQAPGKGLVWVSRINSDGSSTSYADSVKGRFTISRDNAKNTLYLQMNSLRAEDTAVYYCARARWYAIDYWGQGTLVTVSS

SEQ ID NO: 6553 - protein, 121 aa, Artificial Sequence
  Synthetic construct
QVQLVQSGSELKEPGASVKVSCKASGYTFTHYAMNWVRRAPGQSFEWVGWIDPNTGKPTYAQGFRGRFVFSLDTSVSTAYLQISSLKGEDTAIYYCVRDTVLEGTSTLDIWGQGTLVTVSS

SEQ ID NO: 6554 - protein, 121 aa, Artificial Sequence
  Synthetic construct
QVQLMQSGPEVTKPGASVTVSCQASGYTFTNYFIQWVRQLPGGRLEWMGIVDPKDDRTTYAQKFQDRVTMSGDTSVGKVYMTLTGLTSEDSGKYFCARGPRYLGELLTDFWGQGTLVTVSS

SEQ ID NO: 6555 - protein, 123 aa, Artificial Sequence
  Synthetic construct
QVRLVESGGGVVQPGRSLRLSCVASGFMFRTYGLHWVRQTPDMGLEWVAGLSHDGSKTYYEDSVKGRFTVSRDNTKNTLYLKMDNLRVDDTAVYYCVRDFLAVAGRGGYFHYWGQGVPVTVSS

SEQ ID NO: 6556 - protein, 127 aa, Artificial Sequence; identical to SEQ ID NO: 5678
  Synthetic construct

SEQ ID NO: 6557 - protein, 126 aa, Artificial Sequence
  Synthetic construct
QVQLQQWGAGLLKPSETLSLTCAVYGGSFSGYYWSWIRQPPGKGLEWIGEINHSGSTNYNPSLKSRVTISVDTSKNQFSLKLSSVTAADTAVYYCARGRAMVRGVGYYYYYGMDVWGQGTTVTVSS

SEQ ID NO: 6558 - protein, 123 aa, Artificial Sequence
  Synthetic construct
QVQLQESGPGLVKPSETLSLTCTVSGASISSYYWSWIRQPPGKGLEWIGYIYYSGSTNYNPSLKSRVTMSVDTSKNQFSLKLSSVTAADTAVYYCARGSCTGGSCYSVPFDYWGQGTLVTVSS

SEQ ID NO: 6559 - protein, 140 aa, Artificial Sequence
  Synthetic construct
EVQLVESGGGLVQPGGSLRLSCAASGFTFRSYWMSWVRQAPGKGLEWVANIKQDGSEKYYVDSVKGRFTTSRDNAKNSLYLQMHSLRAEDTAVYYCARVPTYYYGSGSSSARVKLPDYYTSSRYYLFDYWGQGTLVTVSS

SEQ ID NO: 6560 - protein, 122 aa, Artificial Sequence
  Synthetic construct
EVQLVESGGGLVKPGGSLRLSCAASGFTFSSYSMNWVRQAPGKGLEWVSSISSSSSYIYYADSVKGRFTISRDNAKNSLYLQMNSLRAEDTAVYYCARDTGTIFGVVIISYWGQGTLVTVSS

SEQ ID NO: 6561 - protein, 118 aa, Artificial Sequence
  Synthetic construct
EVQLVESGGGLVQPGGSLRLSCAASGFTFSSYWMSWVRQAPGKGLEWVANIKQDGSEKYYVDSVKGRFTISRDNAKNSLYLQMNSLRAEDTAVYYCASGVSRVLHGNWGQGTLVTVSS

SEQ ID NO: 6562 - protein, 123 aa, Artificial Sequence
  Synthetic construct
QVQLQESGPGLVKPSQTLSLTCTVSGGSISSGGYYWSWIRQHPGKGLEWIGYIYYSGSTYYNPSLKSRVTISVDTSKNQFSLKLSSVTAADTAVYYCARGGGGAVKEYYFDYWGQGTLVTVSS

SEQ ID NO: 6563 - protein, 122 aa, Artificial Sequence
  Synthetic construct
QVQLQESGPGLVKPSQTLSLTCTVSGGSISSGSYYWSWIRQPAGKGLEWIGRIYTSGSTNYNPSLKSRVTISVDTSKNQFSLKLSSVTAADTAVYYCARAGRYSYGLGFDYWGQGTLVTVSS

SEQ ID NO: 6564 - protein, 124 aa, Artificial Sequence
  Synthetic construct
EVQLVESGGGLVQPGGSLRLSCAASGFTFSSYSMNWVRQAPGKGLEWVSYISSSSSTIYYADSVKGRFTISRDNAKNSLYLQMNSLRDEDTAVYYCARTQGMVRGVFYGVIDYWGQGTLVTVSS

SEQ ID NO: 6565 - protein, 124 aa, Artificial Sequence
  Synthetic construct
EVQLVESGGGLVKPGGSLRLSCAASGFTFSNAWMSWVRQAPGKGLEWVGRIKSKTDGGTTDYAAPVKGRFTISRDDSKNTLYLQMNSLKTEDTAVYYCRGQSGSYYYYYGMDVWGQGTTVTVSS

SEQ ID NO: 6566 - protein, 123 aa, Artificial Sequence
  Synthetic construct
QVQLVQSGAEVKRPGASVKVSCKASGYTFTSYYLHWVRQAPGQGLEWMGIIKPSDGSTSYAQEFQGRVTMTWDSSTSTVYMELSSLRSEDTAVFYCARGLREYDSSGYYFDYWGQGTLVTVSS

SEQ ID NO: 6567 - protein, 123 aa, Artificial Sequence
  Synthetic construct
QVQLVQSGAEMQKPGASMKLSCKTSGYTFTSYYVHWVRQAPGEGLEWMGIIDPSGGSTTYSQNFQGRVSMTRDKSTSTVYMELRSLRSEDTAVYYCARDPGMFIHTAYYFDFWGQGSLVTVSS

SEQ ID NO: 6568 - protein, 125 aa, Artificial Sequence
  Synthetic construct
QVQLVQSGAEVKKPGASVKVSCKASGYTFTSYGISWVRQAPGQGLEWMGWISAYNGNTNYAQKLQGRVTMTTDTSTSTAYMELRSLRSDDTAVYYCARDRITMVRGVIITPFGYWGQGTLVTVSS

SEQ ID NO: 6569 - protein, 121 aa, Artificial Sequence
  Synthetic construct
QLQLQESGPGLVKPSETLSLTCTVSGGSITSGNYYWGWIRQPPGKGLEWIGNIYHNGRTYYNPSLKSRVTISVGTSKKQLFLKLRYVTAADTAVYYCAYGAYSSTSYVVYWGQGTLVTVSS

SEQ ID NO: 6570 - protein, 123 aa, Artificial Sequence
  Synthetic construct
EVQVVESGGDLVQPGGSLRLSCAASGFTFSTYAMNWVRQAPGKGLEWISYINSDSNIIYDADSVKGRFTISRDNAKNSLYLQLSSLRDEDTAVYYCARGGYYDSSGFRAFDIWGQGTMVTVSS

SEQ ID NO: 6571 - protein, 126 aa, Artificial Sequence
  Synthetic construct
QVQLVESGGGVVQPGRSLRLSCAASGFTFSSYGMHWVRQAPGKGLEWVAVIWYDGSNKYYADSVKGRFTISRDNSKNTLYLQMNSLRAEDTAVYYCARDGDRGSGSYYYYYGMDVWGQGTTVTVSS

SEQ ID NO: 6572 - protein, 120 aa, Artificial Sequence
  Synthetic construct
QVQLVQSGAEVKKPGASVKVSCKASGYSFTSYHFHWVRQAPGQGLEWMGIINPSGGSASYAQKFQGRVTMTRDTSTSTVYMELSSLRSEDTAVYYCARDYVYGSGPVGYWGQGTLLTVSS

SEQ ID NO: 6573 - protein, 126 aa, Artificial Sequence
  Synthetic construct
QVQLVESGGGVVQPGRSLRLSCAASGFTFSSYGMHWVRQAPGKGLEWVAVIWYDGSNKYYADSVKGRFTISRDNSKNTLYLQMNSLRAEDTAVYYCARKRATVRGAQTPNWYFDLWGRGTLVTVSS

SEQ ID NO: 6574 - protein, 127 aa, Artificial Sequence
  Synthetic construct
EVHLVESGGGLVKPGGSLRLSCAASGFSFSSFSMIWVRQAPGTGLEWVSSISSSGSYIYYADSVKGRFTISRDNAKNSLSLQMNSLRAEDTGVYYCASIPTFYHDSSGHYGDSVDYWGQGTLVTVSS

SEQ ID NO: 6575 - protein, 125 aa, Artificial Sequence
  Synthetic construct
QLQLQESGSGLVKPSQTLSLTCAVSGGSISSGGYSWSWIRQPPGKGLEWIGYIYHSGSTYYNPSLKSRVTISVDRSKNQFSLKLSSVTAADTAVYYCARTPSAGYGSGSYWFDYWGQGTLVTVSS

SEQ ID NO: 6576 - protein, 121 aa, Artificial Sequence
  Synthetic construct
EVQLVQSGAEVKKPGESLRISCKGSGYSFTSYWISWVRQMPGKGLEWMGRIDPSDSYTNYSPSFQGHVTISADKSISTAYLQWSSLKASDTAMYYCARRGGYNPVYAFDIWGQGTMVTVSS

SEQ ID NO: 6577 - protein, 119 aa, Artificial Sequence
  Synthetic construct
QVQLVQSGGEVKKPGASVKVSCKTSGYTFNTYGISWVRQAPGQGLEWIGWISGYNGETNYAEKVQDRVTMTTDTSTSTAYMELRSLRSDDTAVYYCARYCGGDCSLDYWGQGTLVTVSS

SEQ ID NO: 6578 - protein, 127 aa, Artificial Sequence
  Synthetic construct
QVQLVQSGAEVKKPGASVKVSCKASGYTFTGYYMHWVRQAPGQGLEWMGWINPNSGGTNYAQKFQGRVTMTRDTSISTAYMELSRLRSDDTAVYYCARAGLIVPAAILYYYYGMDVWGQGTTVTVSS

SEQ ID NO: 6579 - protein, 133 aa, Artificial Sequence
  Synthetic construct
QVQLVQSGGDVKKPGASVRVSCTASGYTLAGHGISWVRQRPGQGLEWMGWASSYSDNTNIAPKFQGRVTMTTDTSTSTVYMELRNLKSDDAAIYYCARDVAYSSSWDGLIPLVITTTIPFDVWGQGTMVTVSS

SEQ ID NO: 6580 - protein, 121 aa, Artificial Sequence
  Synthetic construct
EVQLVQSGAELKKPGTTVKISCKVSGHTFSDYYLHWVQQAPGKGLEWMGRVDPDDGETIYAEKFQGRVTITADTSTDTAYMELSSLRFEDTAVYYCARDKRDQLLYYFDHWGQGTLVTVSS

SEQ ID NO: 6581 - protein, 125 aa, Artificial Sequence
  Synthetic construct
QITLKESGPTLVEPTQTLTLTCTFTGFSLSTTGVGVGWIRQPPGKALEWLALIYWDDGKRYSPSLKSRLTITKDTSKNQVVLTMTNMDPVDTATYYCAHTYCTTTNCKFMAFDYWGQGTLVTVSS

SEQ ID NO: 6582 - protein, 116 aa, Artificial Sequence
  Synthetic construct
EVQLVESGGGLVKPGDSLRLSCAASGFTFSNAWMSWVRQAPGRGLEWVGRIKTKADGGTTDYAAAVKGRFTISRADSRNTLYLQMNSLKSEDTALYYCNTERGNYWGQGTLVTVSS

SEQ ID NO: 6583 - protein, 122 aa, Artificial Sequence
  Synthetic construct
DVYLVQSGAVVKKPGESLRISCSGSGYSFSKYWIGWVRQRPGKGLEWMGVIYPDDSDAKYNPSFEGQVSFSADKSASTAYLEWSSLAASDTGMYYCARRALHCSRFTCYWDWGPGTLVTVSS

SEQ ID NO: 6584 - protein, 125 aa, Artificial Sequence
  Synthetic construct
QVHLVESGGGVFQPGTSLRLSCAASGFTFRNHGIHWVRQAPGKGLEWVAVVGFDGSKEFYADSVEGRFTVSRDNSKNTVYLQMDSLRIEDTAMYYCAKEDYDSSAYYLPTGFDYWGPGTLVTVSS

SEQ ID NO: 6585 - protein, 125 aa, Artificial Sequence; identical to SEQ ID NO: 6584
  Synthetic construct

SEQ ID NO: 6586 - protein, 124 aa, Artificial Sequence
  Synthetic construct
QVQLVESGGGVVQPGRSLRLSCAASGFTFSSYGMHWVRQAPGKGLEWMAVLWYDGSNKYYADSVKGRFTISRDTSKNTLYLQMNSLRAEDTAVYYCARDQKNGELPYYYGMDVWGQGTTVTVSS

SEQ ID NO: 6587 - protein, 121 aa, Artificial Sequence
  Synthetic construct
EVQLVESGGGLVQPGGSLRLSCAASGFTFSSYAMHWVRQAPGKGLEYVSGISSNGGSTNYANSVKGRFTISRDNSKNTLYLQMGSLRAEDMAVYYCARGDSGYDYTGVDDWGQGTLVTVSS

SEQ ID NO: 6588 - protein, 122 aa, Artificial Sequence
  Synthetic construct
EVQLLESGGGLVQPGGSLRLSCAASGFTFSSYAMSWVRQAPGKGLEWVSAISGSGGSTYYADSVKGRFTISRDNSKNTLYLQMNSLRAEDTAVYYCAKDRNHYSNIGWFDPWGQGTLVTVSS

SEQ ID NO: 6589 - protein, 126 aa, Artificial Sequence
  Synthetic construct
EVQLVESGGGLVKPGGSLRLSCAASGLTFSSSGMNWVRQAPGKGLEWVSYISSSSSYIYYADSVKGRFTISRDNAKKSLYLEMNSLRAEDTAVYYCARVGGGGEWYSSGWFSFDSWGQGTLVTVSS

SEQ ID NO: 6590 - protein, 127 aa, Artificial Sequence
  Synthetic construct
EVQLVESGGGLVKPGGSLRLSCAASGFTFSSYSMNWVRQAPGKGLEWVSSISSSSSYIYYADSVKGRFTISRDNAKNSLYLQMNSLRAEDTAVYYCARDLSVTTPWSYRVSDGMDVWGQGTTVTVSS

SEQ ID NO: 6591 - protein, 118 aa, Artificial Sequence
  Synthetic construct
EVQLVQSGAEVKKPGDSLKISCKRSGYSFTTYWIGWVRQVPGKGLEWVAIINFGDSDIRYSPSFQGQVTISADKSISTAYLQWGSLKASDTAMYFCVSGSYFFYFDFWSQGTLITVSS

SEQ ID NO: 6592 - protein, 124 aa, Artificial Sequence
  Synthetic construct
QLQLRESGPGLVKSSQTLYVTCSVSGTSLRTSSYYWSWIRQHPERGLEWIGYIDSSGTTDYNPSLKSRVSISIDTSQNQFSLTVTSVTAADAAKYFCARTADADYLGGNWFDPWGHGTQVTVSS

SEQ ID NO: 6593 - protein, 121 aa, Artificial Sequence
  Synthetic construct
QVQLQESGPGLVKPSETLSLTCTISGGSFSPNYWTWLRQPPGKGLEWLGYIFHSGNPNYNPSLKGRLTLSVDTSKNQFSLRLSSVTAADTAVYYCARGGDYDTSGYAFDHWGQGILVTVSS

SEQ ID NO: 6594 - protein, 123 aa, Artificial Sequence; identical to SEQ ID NO: 6359
  Synthetic construct

SEQ ID NO: 6595 - protein, 129 aa, Artificial Sequence
  Synthetic construct
EVQLVESGGGLVQPGGSLRLSCAASGFTFSRYWMHWVRQAPGKGLVWVSRINSDGSSTRYADSVKGRFTISRDNAKNTLYLQMNSLRAEDTAVYYCARALHCSSTSCDQMYYYYGMDVWGQGTTVTVSS

SEQ ID NO: 6596 - protein, 126 aa, Artificial Sequence
  Synthetic construct
QAQVVESGGGVVQPGRSLRLSCTASRFTFSNYPIQWVRQAPGKGLEWVAVISKDATQKYYADSVKGRFTVSRDDSKNTVYLQMNSLTSDDTAVYYCAREDYYILTGHHTLGALDIWGQGTMVSVSS

SEQ ID NO: 6597 - protein, 122 aa, Artificial Sequence
  Synthetic construct
QVQLVQSGAEVKKPGASVKVSCKASGYTFSNYYIHWVRQAPGQGLEWMGIINPSVGSTSPALKFQGRVTMTRDTSTNTVYMELSTLRSEDTAVYYCARDAGPGRRQGYFDYWGQGTLVTVSS

SEQ ID NO: 6598 - protein, 123 aa, Artificial Sequence
  Synthetic construct
EVQLVQSRAEVKQPGESLRISCKGSGYSFPTYWIGWVRQMPGKGLEWIGVIYFDDSDTRYSPSFQGQVTISVDKSTTTAFLQWSSVKASDTAMYYCVRLALGSYTYYRQVDYWGQGTLVTVSP

SEQ ID NO: 6599 - protein, 118 aa, Artificial Sequence
  Synthetic construct
EVQVVESGGDLVQPGGSLRLSCVVSGFSLSNYWMSWVRQVPGKGLEWVASMNSDGSAKNYLDTVKGRFTISRDNPKNTLFLQVNSLTVEDTAVYYCARDVGFGRYDYWGQGTLVTVSS

SEQ ID NO: 6600 - protein, 124 aa, Artificial Sequence; identical to SEQ ID NO: 6211
  Synthetic construct

SEQ ID NO: 6601 - protein, 121 aa, Artificial Sequence
  Synthetic construct
QVHMVQSGAEVKKPGASVKVSCKASGYTFSGYYIQWVRQAPGQGLEWMGWINPNSGDTKYAQKFQGRVTMTRDTSISTAYMELSRLTSDDTAVYYCARGWSSGYKEGPGHWGQGTLVTVSL

SEQ ID NO: 6602 - protein, 118 aa, Artificial Sequence
  Synthetic construct
EEQLVESGGGLVKPGGSLRLSCAASGFIFTTYALSWVRQVPGKGLEWVSSISSRTNYIYYADSVKGRFAISRDNAKNSLYLEMNSLRADDTAVYYCARSGAQWHMDVWGQGTTVTVSS

SEQ ID NO: 6603 - protein, 123 aa, Artificial Sequence
  Synthetic construct
EVQLLESGGGLVQRGGSLRLSCTTSGFSFSDFAVSWVRQAPGRGLEWVSVISGRGDRIEYADSVKGRFTLSRDNSKNTVDLQMNRLRGDDSAVYYCAKGTGNSLIYNYGLDAWGQGTTVTVSS

SEQ ID NO: 6604 - protein, 76 aa, Artificial Sequence
  Synthetic construct
HRGATSYAQKFQDRVTMTKDTSTSTVYMELSSLRPEDTAVYYCVRAAANHHFLTDSYPRNWYFDLWGRGSLVTVSS

SEQ ID NO: 6605 - protein, 131 aa, Artificial Sequence
  Synthetic construct
EVQLLESGGGLVQPGGSLRLSCAASGFTFSSYAMSWVRQAPGKGLEWVSAISGSGGSTYYADSVKGRFTISRDNSKNTLYLQMNSLRAEDTAVYYCAKDRRGVYCSSTSCYTPKGYYFDYWGQGTLVTVSS

SEQ ID NO: 6606 - protein, 120 aa, Artificial Sequence
  Synthetic construct
QLQLQESGSGLVKPSQTLSLTCAVSGGSISSGGYSWSWIRQPPGKGLEWIGYIYHSGSTYYNPSLKSRVTISVDRSKNQFSLKLSSVTAADTAVYYCARYMTTVKTFDYWGQGTLVTVSS

SEQ ID NO: 6607 - protein, 60 aa, Artificial Sequence
  Synthetic construct
SADTSKNQISLQLKSVTPADTAVYYCARVGLEGTLVRGSIFGQHLGFDYWGQGTLVTVSA

SEQ ID NO: 6608 - protein, 117 aa, Artificial Sequence
  Synthetic construct
QVQLQESGPGLVKPSQTLSLTCTVSGGSIISDNLYWSWIRQPAGKGLEWIGRIYSSGSANYNPSLKSRVTISVDTSKNHFSLKLSSVTAADTAVYYCARDGYYMFIWGQGTLVTVSS

SEQ ID NO: 6609 - protein, 122 aa, Artificial Sequence
  Synthetic construct
QVQLQESGPGLVKPSETLSLTCNVSGGSVSSGSYYWSWIRQPPGRGLEWIGYIFHTGSTSYNPSLKSRVTISADTSKNQFSLRLTSVIAADTAVYFCAREQTGYSLRAFDIWGQGTMVTVSS

SEQ ID NO: 6610 - protein, 125 aa, Artificial Sequence
  Synthetic construct
EVQLVESGGGLVQPGGSLRLTCTASGFRTSAYWMAWVRQAPGKGLEWVANIRRDSTRKFYLDSVRGRFTISRDNSKNSLFLQMDSLRAEDTAVYYCVRDSDYVTNDSHNDVYDVWGQGTMVTVSS

SEQ ID NO: 6611 - protein, 123 aa, Artificial Sequence; identical to SEQ ID NO: 5437
  Synthetic construct

SEQ ID NO: 6612 - protein, 122 aa, Artificial Sequence
  Synthetic construct
EVQLVESGGGLVQPGGSLRLSCAASGFTFSSYWMHWVRQAPGKGLVWVSRINSDGSSTSYADSVKGRFTISRDNAKNTLYLQMNSLRAEDTAVYYCARAGRSGWFFSHTDYWGQGTLVTVSS

SEQ ID NO: 6613 - protein, 123 aa, Artificial Sequence
  Synthetic construct
QVQLQESGPRLVKPSQTLYLSCSVSGGSITFNFWSWIRQSPGRGLEWIGHIYYNGNTNYSPSLKGRVTLSVDASARQVYMQLTSMTAADAAVYYCARHLGRGQSWTTGDFDYWGQGIQIDVSS

SEQ ID NO: 6614 - protein, 122 aa, Artificial Sequence
  Synthetic construct
QVQLQESGPGLVKPSETLFLTCSVSGDSVSSGTHYWNWIRQPAGKGLQWIGRLYGSGTVTYNPSLESRGTISVDMSTNQFSLRLNSVTVADTAVYYCARGPYGDPDDRFDYWGQGTLVTVSS

SEQ ID NO: 6615 - protein, 120 aa, Artificial Sequence
  Synthetic construct
QVQLQESGPGLVKPSETLSLTCTVSGGSISSYYWSWIRQPPGKGLEWIGYIYYSGSTNYNPSLKSRVTISVDTSKNQFSLKLSSVTAADTAVYYCARVSTSCCAYWFDPWGQGTLVTVSS

SEQ ID NO: 6616 - protein, 123 aa, Artificial Sequence
  Synthetic construct
EVQLVESGGALVQPGGSLRLSCAASGFTFSTYWMHWVRQVPGEGLVWLSHIKNDGSRANYADSVKGRFTISRDNAKNTLYLQMNSLRAEDTAVYYCVRGGAEVVGAMSKVDYWGQGTLVTVSS

SEQ ID NO: 6617 - protein, 120 aa, Artificial Sequence
  Synthetic construct
QVQLVESGGGVVQPGRSLRLSCAASGFSFSSYGMHWVRQAPGKGLEWVALIWYDGSNKYYADSVKGRFTISRDNSKNTVYLQMISLTDEDTAVYYCGRDSGSYRGRLDPWGQGTLVTVSS

SEQ ID NO: 6618 - protein, 121 aa, Artificial Sequence
  Synthetic construct
QVQLQESGPGLVKPSQTLSLTCTVSGGSISSSGYYWSWLRQPAGKGLEYIGRMYSSGSTNSNPSLKSRVTMSVDTSKNQFSLKLSSVTAADTAVYYCARVNMQQYYAMDVWGQGTTVTVSS

SEQ ID NO: 6619 - protein, 121 aa, Artificial Sequence
  Synthetic construct
QVQLQESGPGLVKPSETLSLTCTVSGGSLSGYYWSWIRQPPGKGLEWIGYVYYSGSTKYNPSLKSRVTISVDTSKNQFSLKLSSVTAADTAVYYCARHLYNSGWMGAFDIWGQGTMVTVSS

SEQ ID NO: 6620 - protein, 125 aa, Artificial Sequence
  Synthetic construct
QVQLVQSGAEVKKPGASVKVSCKASGYTFTSYYMHWVRQAPGQGLEWMGIINPSGGSTSYAQKFQGRVTMTRDTSTSTVYMELSSLRSEDTAVYYCARARRYGSGSYTSNWFDPWGQGTLVTVSS

SEQ ID NO: 6621 - protein, 119 aa, Artificial Sequence
  Synthetic construct
QVQLVQSGAEVKKPGASVKVSCKASGYTFTGYYMHWVRQAPGQGLEWMGWINPNSGGTNYAQKFQGRVTMTRDTSISTAYMELSRLRSDDTAVYYCARRGGYDLPFDYWGQGTLVTVSS

SEQ ID NO: 6622 - protein, 118 aa, Artificial Sequence
  Synthetic construct
QVQLQESGPGLVKPSETLSLTCILFGGSMRNYFWSWIRQPPGKGLEYIGFIYYSGGIDYNPSFKNRVTISIDTSKNQFSLKLSSVTAADTAVYYCARIHDSHYAFDTWGQGTLVTVSS

SEQ ID NO: 6623 - protein, 129 aa, Artificial Sequence
  Synthetic construct
EVQLVESGGGLVQPGGSLRLSCAASGFTFSSYSMNWVRQAPGKGLEWVSYISSSSSTIYYADSVKGRFTISRDNAKNSLYLQMNSLRDEDTAVYYCAREREYYDFWSGYYRDYYGMDVWGQGTTVTVSS

SEQ ID NO: 6624 - protein, 116 aa, Artificial Sequence
  Synthetic construct
EVQLVESGGGLVKPGGSLRLSCVGSGLVFDDAWLSWVRQVPGKGLEWVGRIKSNAYGGTADHAAPVNGRFTISRDDSKNTMFLEMNSLKIEDTGVYYCCADFGDWWGQGTLVTVSS

SEQ ID NO: 6625 - protein, 122 aa, Artificial Sequence
  Synthetic construct
QVQLQESGPGLVKPSETLFLTCSVSGASITTRSYYWSWIRQPSGKGLQWIGRVSTAGTITYNPSLESRATISLDTPQNHFSLRLRSVTVADTAVYFCAGGPYGDPDDRFDFWGRGTLVTVSS

SEQ ID NO: 6626 - protein, 121 aa, Artificial Sequence; identical to SEQ ID NO: 5725
  Synthetic construct

SEQ ID NO: 6627 - protein, 126 aa, Artificial Sequence
  Synthetic construct
QVQLQQWGAGLVKTSETLSLTCAVYGETFGGYYWSWIRQSPEKGMEWLGEINQRGATNNNPTFKPRATLSVDTPKRQFSLTLTSVTAADTAVYYCARGRRWRSGYSGSGSVPFDVWGHGILVTVSS

SEQ ID NO: 6628 - protein, 129 aa, Artificial Sequence
  Synthetic construct
EVQLVQSGAEVKKPGESLRISCKGSGYSFTSYWISWVRQMPGKGLEWMGRIDPSDSYTNYSPSFQGHVTISADKSISTAYLQWSSLKASDTAMYYCARLEGPREWKIESGSYRVVRDIWGQGTMVTVSS

SEQ ID NO: 6629 - protein, 121 aa, Artificial Sequence
  Synthetic construct
EVQLVESGGGLVEPGGSLRLSCAASGFTFSGYSMAWFRQAPGKGLEWVSSISGDSRHIYYADSIKGRFTISRDNAKNSLYLQMNSLRAEDTAVYFCATGLQEIQRFAVGYWGQGTLVTVSS

SEQ ID NO: 6630 - protein, 126 aa, Artificial Sequence; identical to SEQ ID NO: 5486
  Synthetic construct

SEQ ID NO: 6631 - protein, 121 aa, Artificial Sequence
  Synthetic construct
EEQLVESGGGLIQPGGSLRLSCAASGFTVISTYMTWVRQAPGKGLEWVSVIFSGGFTDYADSVKGRFTISRDKSKNTLYLQMNSLRAEDTAVYYCAREETVGATPAGFDLWGQGTLVTVSS

SEQ ID NO: 6632 - protein, 122 aa, Artificial Sequence
  Synthetic construct
QVQLQESGPGLVKPSQTLSLTCSVSGGSISSGNYYWSWIRQPAGKGLEWIGRIYRTGGPNYNPSLKSRVTMSVDTSKNQFSLKLSSVTAADTAVYYCTRGADYALHYAMDVWGQGTTVTVSS

SEQ ID NO: 6633 - protein, 124 aa, Artificial Sequence
  Synthetic construct
QVQLVESGGGVVQPGRSLRLSCAASGFTFSSYGMHWVRQAPGKGLEWVAVISYDGSNKYYADSVKGRFTISRDNSKNTLYLQMNSLRAEDTAVYYCAKDLRWLPNYYYYGMDVWGQGTTVTVSS

SEQ ID NO: 6634 - protein, 127 aa, Artificial Sequence; identical to SEQ ID NO: 6008
  Synthetic construct

SEQ ID NO: 6635 - protein, 130 aa, Artificial Sequence
  Synthetic construct
EVQLLESGGGLVQPGGSLRLSCAASGFTFSSYAMSWVRQAPGKGLEWVSAISGSGGSTYYADSVKGRFTISRDNSKNTLYLQMNSLRAEDTAVYYCAKGRYCSSTSCYTGGYYYYGMDVWGQGTTVTVSS

SEQ ID NO: 6636 - protein, 123 aa, Artificial Sequence
  Synthetic construct
QVQLQQWGAGLLKPSETLSLTCAVYGGSFSGYYWSWIRQPPGKGLEWIGEINHSGSTNYNPSLKSRVTISVDTSKNQFSLKLSSVTAADTAVYYCARGGRYCSGGSCYIVSLWGQGTLVTVSS

SEQ ID NO: 6637 - protein, 121 aa, Artificial Sequence
  Synthetic construct
EVFLVESGGGLIQPGGSLRLSCSASGFTVSNNYMSWVRQAPGKGLEWVSIIYSGGSTYYADSVKGRFTISRDNSKNTLFLQMNSLRVEDTAVYYCARDPGYSYGKHYFDSWGQGTLVTVSS

SEQ ID NO: 6638 - protein, 119 aa, Artificial Sequence
  Synthetic construct
EVQLLESGGGLVQPGGSLRLSCAASGFTFSSYAMSWVRQAPGKGLEWVSAISGSGGSTYYADSVKGRFTISRDNSKNTLYLQMNSLRAEDTAVYYCAKGPSAAAGTYYWGQGTLVTVSS

SEQ ID NO: 6639 - protein, 126 aa, Artificial Sequence
  Synthetic construct
QVQLVESGGGVVQPGRSLRLSCAASGFTFSSYGMHWVRQAPGKGLEWVAVIWYDGSNKYYADSVKGRFTISRDNSKNTLYLQMNSLRAEDTAVYYCARAGFTVRGGNYYYYGMDVWGQGTTVTVSS

SEQ ID NO: 6640 - protein, 122 aa, Artificial Sequence
  Synthetic construct
QITLKESGPVLVKPTETLTLTCTVSGFSLSNTRMGVSWIRQPPGKALEWLTHIFSNDEKSYSTSLRSRLTISRDTSKSQVVLTMANMDPVDTATYFCARIGRGSNNNVLDYWGQGTLVTVSS

SEQ ID NO: 6641 - protein, 125 aa, Artificial Sequence; identical to SEQ ID NO: 5711
  Synthetic construct

SEQ ID NO: 6642 - protein, 120 aa, Artificial Sequence
  Synthetic construct
EVQLVESGGALVPPGESLRISCATSGFNFDAYTMHWVRQTPGKGLQWLSFITWNGGSTAYADSVRGRFSIFRDNRKGSLYLHMTRLTTEDTATYFCAREQPGRYSPLDQWGRGTLVTVSS

SEQ ID NO: 6643 - protein, 126 aa, Artificial Sequence
  Synthetic construct
QVQLVESGGGVVQPGRSLRLSCAASGFTFSTSGMHWVRQAPGKGLEWVAIIQYDGSDESYADSVKGRFTISKDNSKNTLYLQMNSLRAEDTAVYYCARDRGDCSSGRCYSDYIDYWGQGTLVIVSS

SEQ ID NO: 6644 - protein, 123 aa, Artificial Sequence; identical to SEQ ID NO: 5437
  Synthetic construct

SEQ ID NO: 6645 - protein, 122 aa, Artificial Sequence
  Synthetic construct
EVQLLESGGGLVQPGGSLRLSCAASGFTFSSYAMSWVRQAPGKGLEWVSAISGSGGSTYYADSVKGRFTISRDNSKNTLYLQMNSLRAEDTAVYYCAMPKSSSWFAGGMDVWGQGTTVTVSS

SEQ ID NO: 6646 - protein, 124 aa, Artificial Sequence
  Synthetic construct
QVHLVESGGGLVKPGGSLRLSCAASGFTFSDYYMSWIRQAPGKGLEWVSYISSSGSSIYYADSVKGRFTISRDNAKNSQYLQMNSLRAEDTALYYCARDWCGGFSCHIHAFDIWGQGTMVTVSS

SEQ ID NO: 6647 - protein, 125 aa, Artificial Sequence
  Synthetic construct
QVQLVESGGGVVQPGRSLRLSCAASGFTFSSYAMHWVRQAPGKGLEWVAVISYDGSNKYYADSVKGRFTISRDNSKNTLYLQMNSLRAEDTAVYYCARDRRAKRYGSGFDWFDPWGQGTLVTVSS

SEQ ID NO: 6648 - protein, 124 aa, Artificial Sequence
  Synthetic construct
QVQLVQSGAEVKKPGSSVKVSCKASGGTFSTHAISWVRQAPGQGLEWMGGIIPMFGTADYAQKFQGRVTITADESTRTAYMELSNLRSEDTAMYYCATRHYYDSSTYYYEGVYWGQGTLVTVSS

SEQ ID NO: 6649 - protein, 120 aa, Artificial Sequence
  Synthetic construct
QVQLVESGGGVVQPGRSLRLSCAASGFTFSSYGMHWVRQAPGKGLEWVAVIWYDGSNKYYADSVKGRFTISRDNSKNTLYLQMNSLRAEDTAVYYCARDSYSSSSYMDVWGQGTTVTVSS

SEQ ID NO: 6650 - protein, 117 aa, Artificial Sequence
  Synthetic construct
EVQLVESGGGLVKPGRSLRLSCTASGFTFGDYAMSWFRQAPGKGLEWVGFIRSKAYGGTTEYAASVKGRFTISRDDSKSIAYLQMNSLKTEDTAVYYCTTYGAQGYWGQGTLVTVSS

SEQ ID NO: 6651 - protein, 123 aa, Artificial Sequence
  Synthetic construct
EVQLAESGGRLVQPGGSLRLSCTASGFTFGAYWMSWVRQAPGKGLEWVANIKKDGSETYHAASVRGRFTVSRDNAKNSLYLQMNSLRAEDTATYFCARYHYGDVSDTTRFDLWGQGALVIVSS

SEQ ID NO: 6652 - protein, 127 aa, Artificial Sequence
  Synthetic construct
EVQLVESGGGLVKPGGSLRLSCAASGFTFSSYSMNWVRQAPGKGLEWVSSISSSSSYIYYADSVKGRFTISRDNAKNSLYLQMNSLRAEDTAVYYCARDRPSRYCSGGSCQRDTDYWGQGTLVTVSS

SEQ ID NO: 6653 - protein, 129 aa, Artificial Sequence
  Synthetic construct
EVQLVESGGGLVKPGGSLRLSCAASGFTFNSYSMNWVRQAPGKGLEWVSSISRSGSDIYYADSVKGRFTISRDNAKNSLYLQMNSLRAEDTAVYYCVRDQGFKAPGYCSGGSCYYFDYWGQGSLVTVSS

SEQ ID NO: 6654 - protein, 123 aa, Artificial Sequence
  Synthetic construct
EVQLLESGGGLVQPGGSLRLSCAASGFTFRSFAMSWVRQAPGKGLEWVSSIRESGDNIYYADSVKGRFTVSRDNSKNTLYLQMNSLRVEDTAVYYCAKDFFLYSYGGIQTAHWGQGTLVTVSS

SEQ ID NO: 6655 - protein, 118 aa, Artificial Sequence
  Synthetic construct
QVQLVESGGGLVKPGGSLRLSCTASGFTFSDSYMSWVRRTPGKGLEWVSFISNSGSATFYAGSVKGRFTVSRDNAKNLVFLQMNSLRPEDTAVYYCARWKSGTHFDYWGQGTLVTVSS

SEQ ID NO: 6656 - protein, 127 aa, Artificial Sequence
  Synthetic construct
QLQLQESGPGLVKPSETLSLTCTVSGGSISSSSYYWGWIRQPPGKGLEWIGSIYYSGSTYYNPSLKSRVTISVDTSKNQFSLKLSSVTAADTAVYYCAIIRGYCSSTSCYQYYFDYWGQGTLVTVSS

SEQ ID NO: 6657 - protein, 119 aa, Artificial Sequence
  Synthetic construct
VVQLVESGGGLVQPGGSLRLSCVASGFSFPTFDMHWARQARGKGLEWVSAIGAGGDTYYSVPVKGRFTISRDNENYSLFLQMTNLGPADTAVYFCARGDSADGGHYPFWGQGTLVSVPP

SEQ ID NO: 6658 - protein, 119 aa, Artificial Sequence
  Synthetic construct
EVQLVQSGAEVKKPGESLRISCKGSGYSFTSYWISWVRQMPGKGLEWMGRIDPSDSYTNYSPSFQGHVTISADKSISTAYLQWSSLKASDTAMYYCARHAGRNLIYDYWGQGTLVTVSS

SEQ ID NO: 6659 - protein, 124 aa, Artificial Sequence
  Synthetic construct
QLQLQESGPGLVKPSGTLSLTCSVSGGSISSSNYYWGWIRQPPGKGQEWIGSIYYSGSTYYNPSLKSRVTISVDTSKNRFSLKLSSVTAADTAVYYCARQGPYELKSHDAFDIWGQGTLVTVSS

SEQ ID NO: 6660 - protein, 123 aa, Artificial Sequence
  Synthetic construct
EVQLVESGGGLVQSGGSLRLSCSGTGFTFSTYPMHWVRQAPGKGLEYVSAISSYGDNPHYADSVKGRFTISRDNSKNTVFLQMRSLRAEDTAIYYCVRDLGWRSIASDGGDSWGQGTPVTVSS

SEQ ID NO: 6661 - protein, 127 aa, Artificial Sequence
  Synthetic construct
QVQLVQSGAEVKKPGSSVRVSCKASGGSFNSYSIAWVRQAPGQGLEWMGGIIPVSATTAYTQKFQGRVTISADGSTRTVYLEIRSLESDDTAVYYCARDGNYCTGDSCYWGNGFDIWGQGTMVTVSS

SEQ ID NO: 6662 - protein, 118 aa, Artificial Sequence
  Synthetic construct
QVQLVQSGAEVKKPGASVKVSCKTSGYIFTTYYVHWVRQAPGQGLEWVGMLNPNGGYTTYAQQFQGRVTMTGDTPTSTVYMELSSLRSEDTAVYYCARQRGSYFFDYWGQGTLVTVSS

SEQ ID NO: 6663 - protein, 133 aa, Artificial Sequence
  Synthetic construct
EVQLVESGGGLVKPGGSLRLSCAASGFTFSNAWMSWVRQAPGKGLEWVGRIKSKTDGGTTDYAAPVKGRFTISRDDSKNTLYLQMNSLKTEDTAVYYCTTLPIGIEPVRGSYRSRQNYYFDYWGQGTLVTVSS

SEQ ID NO: 6664 - protein, 112 aa, Artificial Sequence
  Synthetic construct
EVQLVESGGGLVKPGGSLRLSCAASGFTFSSYSMNWVRQAPGKGLEWVSSISSSSSYIYYADSVKGRFTISRDNAKNSLYLQMNSLRAEDTAVYYCARDGRWGQGTLVTVSS

SEQ ID NO: 6665 - protein, 116 aa, Artificial Sequence
  Synthetic construct
QVQLQESGPGLVKPSETLSLTCTVSGGSISSYYWSWIRQPPGKGLEWIGYIYYSGSTNYNPSLKSRVTISVDTSKNQFSLKLSSVTAADTAVYYCARRRGYSYDYWGQGTLVTVSS

SEQ ID NO: 6666 - protein, 122 aa, Artificial Sequence
  Synthetic construct
EVQLLESGGGLVQPGGSLRLSCAASGFTFSSYAMSWVRQAPGKGLEWVSAISGSGGSTYYADSVKGRFTISRDNSKNTLYLQMNSLRAEDTAVYYCAKDRRFVVPAAYFQHWGQGTLVTVSS

SEQ ID NO: 6667 - protein, 122 aa, Artificial Sequence
  Synthetic construct
QVQLVQSGAEVKKPGASVKVSCKASGYTFTGYYMHWVRQAPGQGLEWMGWINPNSGGTNYAQKFQGWVTMTRDTSISTAYMELSRLRSDDTAVYYCARARRVGYYYYGMDVWGQGTTVTVSS

SEQ ID NO: 6668 - protein, 116 aa, Artificial Sequence
  Synthetic construct
EVQLVESGGGLVQPGGSLKLSCAASGFTFSGSAMHWVRQASGKGLEWVGRIRSKANSYATAYAASVKGRFTISRDDSKNTAYLQMNSLKTEDTAVYYCTRYNGGYWGQGTLVTVSS

SEQ ID NO: 6669 - protein, 123 aa, Artificial Sequence; identical to SEQ ID NO: 5437
  Synthetic construct

SEQ ID NO: 6670 - protein, 125 aa, Artificial Sequence
  Synthetic construct
QVQLVESGGGVVQPGRSLRLSCAASGFTLTGQGMHWVRQAPGKGLEWVAVVWYDGSNEYYAESVKGRFTISSDTSKNTVYLQMNSLRAEDTALYYCGRNSVQSTTMIRHYVVDVWGQGTTVIVSS

SEQ ID NO: 6671 - protein, 119 aa, Artificial Sequence
  Synthetic construct
QVQLAQSGAEVKKPGASVRVSCKASGYTFTDYYLHWVRQAPGQGLEWMGRINPNSGGTAYAQKFQGRVTMTRDTSIKTAYMELNSLRSDDTAVYYCCLYENVWGAYSSWGQGTQVIVSS

SEQ ID NO: 6672 - protein, 123 aa, Artificial Sequence
  Synthetic construct
EVQLLESGGGLVQPGGSLRLSCVVSEFTFSSYAMSWVRQAPGKGLEWVSLIGDSGSETFYVDSVKGRFSISRDNSKNTLYLQINNLRVEDTAVYYCAKGLGNRWPLSRSFDSWGQGTLVTVSS

SEQ ID NO: 6673 - protein, 118 aa, Artificial Sequence
  Synthetic construct
QVQLVESGGGVVQPGRSLRLSCAASGFTFSAYGMHWVRQAPGKGLEWVAIIWNDGSNKYYGDSVKGRFTISRDNSKNTLYLQMNSLRAEDTAVYYCVRDINNGVFDFWGQGTLVTVSS

SEQ ID NO: 6674 - protein, 123 aa, Artificial Sequence
  Synthetic construct
QVRLQESGPGLVKPSETLSLTCTVSGGSVTSNDFYWSWVRQSSEKGLELVGWLYNRVGTDYNPSLKSRATIFVETSEDQFSLRLSSVTAADTAVYYCARGDGSYFGDRFFDTWGQGIVVTVSS

SEQ ID NO: 6675 - protein, 119 aa, Artificial Sequence
  Synthetic construct
QLQLQESGPGLVKPSETLSLTCTVSGGSISSSSYYWGWIRQPPGKGLEWIGSIYYSGSTYYNPSLKSRVTISVDTSKNQFSLKLSSVTAADTAVYYCARRRDAARLDYWGQGTLVTVSS

SEQ ID NO: 6676 - protein, 119 aa, Artificial Sequence
  Synthetic construct
EVQLVESGGGLVQPGGSLRLSCAASGFTFSSYWMHWVRQAPGKGLVWVSRINSDGSSTSYADSVKGRFTISRDNAKNTLYLQMNSLRAEDTAVYYCARANIVVVPLGHWGQGTLVTVSS

SEQ ID NO: 6677 - protein, 123 aa, Artificial Sequence
  Synthetic construct
QVQVVQSGAEVRKPGSSVKVSCEASGGTFSKYTFSWVRQAPGQGLEWMGRIIPILGIVNYAQKFQGRVTITADKSTSTVYMELSSLRPEDTAVYFCAVDTAMIPQPSRGIDVWGQGTTVTVSS

SEQ ID NO: 6678 - protein, 124 aa, Artificial Sequence; identical to SEQ ID NO: 5439
  Synthetic construct

SEQ ID NO: 6679 - protein, 125 aa, Artificial Sequence
  Synthetic construct
QVQLVQSGAEVKKPGASVKVSCKASGYTFTSYDINWVRQATGQGLEWMGWMNPNSGNTGYAQKFQGRVTMTRNTSISTAYMELSSLRSEDTAVYYCARGGSISRRAWYYYGMDVWGQGTTVTVSS

SEQ ID NO: 6680 - protein, 120 aa, Artificial Sequence
  Synthetic construct
EVQLVESGGALTQPGGSLRLSCAASGFKFDTYNMNWVRQAPGRALEWISFITTTGTTIYYADSVKGRFTISRDNAKNSLFLQMDSLRDDDTAVYYCARNRQWELQYFDSWGQGTQVTVSS

SEQ ID NO: 6681 - protein, 118 aa, Artificial Sequence
  Synthetic construct
DVQLVESGGGSFSPGESLRLSCAASGFSFVTSWMHWVRQAPGKGLEWVSRINDDGTSTRIAESVKGRFSVSRDNPRGMLYLQMDSLRVADTAVYYCARMGRWYDFDVWGQGVLVTVSS

SEQ ID NO: 6682 - protein, 120 aa, Artificial Sequence
  Synthetic construct
QVQLVQSGAEVKKPGASVKVSCKASGYTFTSYYMHWVRQAPGQGLEWMGIINPSGGSTSYAQKFQGRVTMTRDTSTSTVYMELSSLRSEDTAVYYCARDLSTYGDYAGPWGQGTLVTVSS

SEQ ID NO: 6683 - protein, 122 aa, Artificial Sequence
  Synthetic construct
QVQLQESGPGLVKPSQTLSLTCTVSGGSISSGGYYWSWIRQHPGKGLEWIGYIYYSGSTYYNPSLKSRVTISVDTSKNQFSLKLSSVTAADTAVYYCARGYYYGSGSYYRYWGQGTLVTVSS

SEQ ID NO: 6684 - protein, 115 aa, Artificial Sequence
  Synthetic construct
EVQLVESGGGLVQPGGSLRLSCAASGFTFSSYSMNWVRQAPGKGLEWVSYISSSSSTIYYADSVKGRFTISRDNAKNSLYLQMNSLRDEDTAVYYCAEGRHSSSWGQGTLVTVSS

SEQ ID NO: 6685 - protein, 119 aa, Artificial Sequence
  Synthetic construct
QVHLVESGGGVVQPGRSLRLSCTVSGFTLSSHAMHWVRQGPGKGLEWVAVISSDGTNKDYADSVKGRFTVSRDSPKNTLYLQMNSLRHDDTGIYYCVTPVGVAGATDSWGHGTLVTVSS

SEQ ID NO: 6686 - protein, 120 aa, Artificial Sequence
  Synthetic construct
QLQLQESGPGLVKPSETLSLTCIVSGGSIDSSGYYWGWIRQPPGKGLEWIGSIYYSGNTKYDSSLKSRATISVDTSKNQFSLKLTSVTAADTAVYFCARLETGYDLCDPWGQGTLVTVSS

SEQ ID NO: 6687 - protein, 121 aa, Artificial Sequence
  Synthetic construct
EVQLLESGGGLVQPGGSLRLSCAASGFTFSSYAMSWVRQAPGKGLEWVSAISGSGGSTYYADSVKGRFTISRDNSKNTLYLQMNSLRAEDTAVYYCAKGYKVQGSSSPDYWGQGTLVTVSS

SEQ ID NO: 6688 - protein, 122 aa, Artificial Sequence
  Synthetic construct
QVQLVESGGGVVQPGRSLRLSCAASGFTFSSYGMHWVRQAPGKGLEWVAVIWYDGSNKYYADSVKGRFTISRDNSKNTLYLQMNSLRAEDTAVYYCARVGEKYSAKNWFDPWGQGTLVTVSS

SEQ ID NO: 6689 - protein, 123 aa, Artificial Sequence
  Synthetic construct
QVQLVQSGADVKKPGASMKVSCKTSGYTFTDYYIHWVRQAPGQGLEWMGFINPNNIVTNSARKFQGRVTMTGDTSISTAYMDLNSLRSDDSAVYYCVRGGPVAGTRSVIFAYWGQGTLVTVSS

SEQ ID NO: 6690 - protein, 123 aa, Artificial Sequence; identical to SEQ ID NO: 5437
  Synthetic construct

SEQ ID NO: 6691 - protein, 118 aa, Artificial Sequence
  Synthetic construct
QVKLVESGGGVVQPGKSLRLSCAASGFSFSDYAMNWVRQAPGKGLEWVAGISYDEVNKYYADSVKGRFTISRDNSKNTLYLQMSNLRPDDTAVYHCATLPAAIDDDFWGQGTLVTVSS

SEQ ID NO: 6692 - protein, 119 aa, Artificial Sequence
  Synthetic construct
EVQLVESGGGLVKPGGSLRLACAGSGFVFSSYPMNWVRQAPGKGLEWVSSITGKSDYRDYADSVKGRINISRDNAKNSLFLQMNSLRAEDTAVYYCVREDYGDSRFDFWGQGTLVTVSS

SEQ ID NO: 6693 - protein, 121 aa, Artificial Sequence; identical to SEQ ID NO: 6205
  Synthetic construct

SEQ ID NO: 6694 - protein, 123 aa, Artificial Sequence
  Synthetic construct
EVQLLESGGGLVQPGGSLRLSCSASGFTFSRYAMHWVRQAPGKGLKYVSAVSNTGDSTYYADSVKGRFTISRDNSKNTLFLQMSSLRAEDTAVYYCVRDLGWRTIATDGGDFWGQGSLVTVSS

SEQ ID NO: 6695 - protein, 123 aa, Artificial Sequence
  Synthetic construct
QVQLVQSGAEVKKPGASVKVSCKASGYTFTSYAMHWVRQAPGQRLEWMGWINAGNGNTKYSQKFQGRVTITRDTSASTAYMELSSLRSEDTAVYYCARTWGSIAARKYAFDIWGQGTMVTVSS

SEQ ID NO: 6696 - protein, 126 aa, Artificial Sequence
  Synthetic construct
QVQLVQSGAEVKKPGASVKVSCKASGYTFTSYYMHWVRQAPGQGLEWMGIINPSGGSTSYAQKFQGRVTMTRDTSTSTVYMELSSLRSEDTAVYYCARDRATMRRGYYYYYGMDVWGQGTTVTVSS

SEQ ID NO: 6697 - protein, 122 aa, Artificial Sequence; identical to SEQ ID NO: 5716
  Synthetic construct

SEQ ID NO: 6698 - protein, 124 aa, Artificial Sequence
  Synthetic construct
EVQLVESGGGLVQPGGSLRLSCAASGFTFSSHWMSWVRQAPGKGLEWVANIKQDGSEKFYVDSVKGRFTISRDNAKNSLHLQMTNLRAEDTALYYCARDLYIVVPPAAGAFDYWGQGTLVTVSS

SEQ ID NO: 6699 - protein, 118 aa, Artificial Sequence
  Synthetic construct
EVQLVESGGGLVQPGRSLRLSCTASGFTFGDYAMSWFRQAPGKGLEWVGFIRSKAYGGTTEYAASVKGRFTISRDDSKSIAYLQMNSLKTEDTAVYYCTRGSSCPAYWGQGTLVTVSS

SEQ ID NO: 6700 - protein, 123 aa, Artificial Sequence
  Synthetic construct
EVQLVESGGGLVKPGRSLRLSCTASGFTFGDYAMSWFRQAPGKGLEWVGFIRSKAYGGTTEYAASVKGRFTISRDDSKSIAYLQMNSLKTEDTAVYYCTRASWRSSWYHFQHWGQGTLVTVSS

SEQ ID NO: 6701 - protein, 118 aa, Artificial Sequence
  Synthetic construct
EVQLVESGGGLVQPGGSLRLSCAASGFTFSSYWMHWVRQAPGKGLVWVSRINSDGSSTSYADSVKGRFTISRDNAKNTLYLQMNSLRAEDTAVYYCARGRAPNLFDYWGQGTLVTVSS

SEQ ID NO: 6702 - protein, 120 aa, Artificial Sequence
  Synthetic construct
QVQLVQSGAEVKKPGSSVKVSCKASGGTFRNYGISWVRQAPGQGLEWMGRFIPMLDMTAYAQKFRGRVTITADKSTSTAYIELTSLRSEDTAIYYCARDKHTWIGVVGYWGQGTLVTVSP

SEQ ID NO: 6703 - protein, 127 aa, Artificial Sequence
  Synthetic construct
QVQLQESGPGLVKPSGTLSLTCAVSGASISSSNWWTWVRQPPGKGLEWIGEIYHSGSTNYNPSLKSRVTISADNSKNQFSLNLSSVTAADTAVYFCAALAYCSNSGCPYYFYGLDAWGQGTTVTVSS

SEQ ID NO: 6704 - protein, 130 aa, Artificial Sequence
  Synthetic construct
QVQLVESGGGVVQPGRSLRLSCAASGFTFSSYAMHWVRQAPGKGLEWVAVISYDGSNKYYADSVKGRFTISRDNSKNTLYLQMNSLRAEDTAVYYCARDLKFSYYYGSGSYYNPSPLDYWGQGTLVTVSS

SEQ ID NO: 6705 - protein, 127 aa, Artificial Sequence
  Synthetic construct
QVQLVESGGGVVQPGRSLRLSCAASGFTFSSYGMHWVRQAPGKGLEWVAVIWYDGSNKYYADSVKGRFTISRDNSKNTLYLQMNSLRAEDTAVYYCARDYRRVTQFGRYYYYGMDVWGQGTTVTVSS

SEQ ID NO: 6706 - protein, 126 aa, Artificial Sequence
  Synthetic construct
EVQLVESGGGLVKPGGSLRLSCAASGFTFSSYSMNWVRQAPGKGLEWVSSISSSSSYIYYADSVKGRFTISRDNAKNSLYLQMNSLRAEDTAVYYCARDPHGTESLWFGESNLDYWGQGTLVTVSS

SEQ ID NO: 6707 - protein, 125 aa, Artificial Sequence
  Synthetic construct
EVQLVESGGGLVKPGGSLRLSCAASGFTFSSYSMNWVRQAPGKGLEWVSSISSSSSYIYYADSVKGRFTISRDNAKNSLYLQMNSLRAEDTAVYYCARERTWRWLQRNYWYFDLWGRGTLVTVSS

SEQ ID NO: 6708 - protein, 119 aa, Artificial Sequence
  Synthetic construct
QAQMVASGGGVVRPGRSLRLSCAASGFVFRSYGMHWVRQSPGKGLEWVATISFEGDTKYYLDSVKGRFIISRDNSKNTLFLQMNNLRPEDTALYFCAKAPGELWFLDLWGQGTRVTVSS

SEQ ID NO: 6709 - protein, 124 aa, Artificial Sequence; identical to SEQ ID NO: 5579
  Synthetic construct

SEQ ID NO: 6710 - protein, 130 aa, Artificial Sequence
  Synthetic construct
EVQLVESGGGLVQPGGSLRLSCAASGFTFSSYWMSWVRQAPGKGLEWVANIKQDGSEKYYVDSVKGRFTISRDNAKNSLYLQMNSLRAEDTAVYYCARDSPIPKVVPAANYYYYYGMDVWGQGTTVTVSS

SEQ ID NO: 6711 - protein, 120 aa, Artificial Sequence
  Synthetic construct
QVHLVQSEAEVKKPGSSVQVFCKASAGTFGAFATSWVRQAPGQGLEWLGKIIPIFDTTEYAQRFQDRITITVDDSRSSVSLALSSLTSEDTAIYFCARAGLGRDHKFDSWGQGTQVIVSS

SEQ ID NO: 6712 - protein, 122 aa, Artificial Sequence
  Synthetic construct
EVQLVESGGGLVQPGGSLKLSCAASGFTFSGSAMHWVRQASGKGLEWVGRIRSKANSYATAYAASVKGRFTISRDDSKNTAYLQMNSLKTEDTAVYFCTRALDNSGYYYDYWGQGTLVTVSS

SEQ ID NO: 6713 - protein, 129 aa, Artificial Sequence
  Synthetic construct
EVQLVESGGGLVKPGESLRLSCAASGFTFRSYTMNWVRQAPGKGLEWVSSVSISSTYIYYADSVKGRFTISRDNVENSLYLQMNSLRVDDTAVYYCARVDHYYGSGSPGDYFYNGMDVWGQGTTVTVSS

SEQ ID NO: 6714 - protein, 124 aa, Artificial Sequence; identical to SEQ ID NO: 6211
  Synthetic construct

SEQ ID NO: 6715 - protein, 124 aa, Artificial Sequence; identical to SEQ ID NO: 6033
  Synthetic construct

SEQ ID NO: 6716 - protein, 123 aa, Artificial Sequence; identical to SEQ ID NO: 5885
  Synthetic construct

SEQ ID NO: 6717 - protein, 126 aa, Artificial Sequence; identical to SEQ ID NO: 5543
  Synthetic construct

SEQ ID NO: 6718 - protein, 117 aa, Artificial Sequence
  Synthetic construct
EAQLVESGGGLTQPGGSLRLSCAASGFSVKQNYMDWIRQAPGKGLEWVSVLHSGGGSYYADSVKGRFTISRDNSRNTLFLQMSSLRVEDSAVYYCARETESGDFDLWGQGALVTVSS

SEQ ID NO: 6719 - protein, 124 aa, Artificial Sequence
  Synthetic construct
QVHLVQSGAEVKKPGASVKVSCKASGYNFYKFSIYWVRQAPGQRLEWMGWINSVSDKADYSQRFQGRVTISRDRSASTAYMELSNLRSEDTAVYYCAREALSGVWTSVPFYDTWGQGTLVTVSS

SEQ ID NO: 6720 - protein, 123 aa, Artificial Sequence; identical to SEQ ID NO: 5437
  Synthetic construct

SEQ ID NO: 6721 - protein, 126 aa, Artificial Sequence
  Synthetic construct
EVQLVESGGGLVKPGGSLRLSCAASGFTFSNAWMSWVRQAPGKGLEWVGRIKSKTDGGTTDYAAPVKGRFTISRDDSKNTLYLQMNSLKTEDTAVYYCTTGRTMVRGAPRRAFDIWGQGTMVTVSS

SEQ ID NO: 6722 - protein, 128 aa, Artificial Sequence; identical to SEQ ID NO: 5945
  Synthetic construct

SEQ ID NO: 6723 - protein, 126 aa, Artificial Sequence
  Synthetic construct
EVQLVESGGGLARPGGSLRLSCAASGFTFSNNWMHWVRQAPGKGLVWVSHINSDGNRTTYADSVKGRFTISRDNARNTVFLQMNSLRVEDTAVYYCARDPRYSKGADFYYSGMDVWGQGTTVTVSS

SEQ ID NO: 6724 - protein, 128 aa, Artificial Sequence
  Synthetic construct
QLQLQESGPGLVKPSETLSLTCTVSGGSIISYTYFWGWIRQPPGKGLEWIGSIYYSGSTYSNPSLKSRVTISVDTSRNQFSLKLSSVTAADTAMYYCARQGREYDILTGYDPGASDIWGQGTMVTVSS

SEQ ID NO: 6725 - protein, 125 aa, Artificial Sequence
  Synthetic construct
QVQLVESGGGVVQPGRSLRLSCAASGFTFSSYGMHWVRQAPGKGLEWVAVIWYDGSNKYYADSVKGRFTISRDNSKNTLYLQMNSLRAEDTAVYYCARDLRTYYYGSGRHSLGYWGQGTLVTVSS

SEQ ID NO: 6726 - protein, 122 aa, Artificial Sequence
  Synthetic construct
EVQLVESGGGLVKPGGSLRLSCAASGFTFSSYSMNWVRQAPGKGLEWVSSISSSSSYIYYADSVKGRFTISRDNAKNSLYLQMNSLRAEDTAVYYCARSGGPYYGSGSFDYWGQGTLVTVSS

SEQ ID NO: 6727 - protein, 124 aa, Artificial Sequence
  Synthetic construct
QVQLVHSGAEVKKPGASVKVSCQASGYTFTSHYMHWVRQAPGQGFEWMGVINPSDGATTYAQKFQGRLTMTRDTSTSTVYMELSSLRSDDTAVYRCARDTGEDVLLWFGAVDYWGQGTLVTVSS

SEQ ID NO: 6728 - protein, 127 aa, Artificial Sequence
  Synthetic construct
EVQLVESGGGLVQPGRSLRLSCTASGFTFVDYGMSWFRQAPGKGLEWVGVIRSKVYGGTTEYAASVKGRFTLSRDDSKSIAYLQMNSLKTEDTAVYYCTRDSREVWPGPDPENFDYWGQGTLVTVSS

SEQ ID NO: 6729 - protein, 129 aa, Artificial Sequence
  Synthetic construct
QVQLVQSGAEVKKPGASVKVSCKASGYTFTSYAMHWVRQAPGQRLEWMGWINAGNGNTKYSQKFQGRVTITRDTSASTAYMELSSLRSEDTAVYYCARGRKEGYCSSTSCHLFRWFDPWGQGTLVTVSS

SEQ ID NO: 6730 - protein, 122 aa, Artificial Sequence
  Synthetic construct
QVQLVQSGSELEKPGASVKLSCKASGYTFSDYAMHWVRQAPGQGLEWMGWINTNTEIPTYAPGLTGRFVFSLDTSISTVYLQINDLKTEDTGVYFCGRGCTSTSCFLDFEYWGQGTLLTVSS

SEQ ID NO: 6731 - protein, 123 aa, Artificial Sequence; identical to SEQ ID NO: 5437
  Synthetic construct

SEQ ID NO: 6732 - protein, 116 aa, Artificial Sequence
  Synthetic construct
QVQLVESGGGVVQPGRSLRLSCAASGFTFSSYGMHWVRQAPGKGLEWVAVIWYDGSNKYYADSVKGRFTISRDNSKNTLYLQMNSLRAEDTAVYYCARGKRYFDYWGQGTLVTVSS

SEQ ID NO: 6733 - protein, 119 aa, Artificial Sequence
  Synthetic construct
QVQLQESGPGLVKPSETLSLTCTVSGGSISSYYWSWIRQPPGKGLEWIGYIYYSGSTNYNPSLKSRVTISVDTSKNQFSLKLSSVTAADTAVYYCARNRGSALAPFDYWGQGTLVTVSS

SEQ ID NO: 6734 - protein, 124 aa, Artificial Sequence
  Synthetic construct
QLQLQESGPGLVKPSETLSLTCTVSGGSISSSSYYWGWIRQPPGKGLEWIGSIYYSGSTYYNPSLKSRVTISVDTSKNQFSLKLSSVTAADTAVYYCARRRERFHHYYYGMDVWGQGTTVTVSS

SEQ ID NO: 6735 - protein, 122 aa, Artificial Sequence
  Synthetic construct
EVQLVESGGGLVKPGGSLRLSCAASGFTFSSYSMNWVRQAPGKGLEWVSSISSSSSYIYYADSVKGRFTISRDNAKNSLYLQMNSLRAEDTAVYYCARDLSYGYKTDVWAYWGQGTLVTVSS

SEQ ID NO: 6736 - protein, 123 aa, Artificial Sequence
  Synthetic construct
EVQLVESGGGLVKPGGSLRLSCAASGFMFSGSYMAWARQAPGKGLEWVACISNSGTYTYYADSVKGRFSISRDNARKSLVLEMSSLRAEDTATYFCARVPQTGTTAIEAFDIWGQGAKVTVSS

SEQ ID NO: 6737 - protein, 123 aa, Artificial Sequence
  Synthetic construct
QVQLVQSGAEVKKPGASVKVSCKASGYTFTSYAMHWVRQAPGQRLEWMGWINAGNGNTKYSQKFQGRVTITRDTSASTAYMELSSLRSEDTAVYYCARTHGNWNYVHWYFDLWGRGTLVTVSS

SEQ ID NO: 6738 - protein, 121 aa, Artificial Sequence
  Synthetic construct
QVQLVESGGGVVQPGRSLRLSCAASGFTFSSYGMHWVRQAPGKGLEWVAVISYDGSNKYYADSVKGRFTISRDNSKNTLYLQMNSLRAEDTAVYYCAKGANWGLYSAFDIWGQGTMVTVSS

SEQ ID NO: 6739 - protein, 120 aa, Artificial Sequence
  Synthetic construct
QVQLVQSEAEVKKPGSSVKVSCRPSGGTFGRQSVSWVRQAPGQGLEWMGRIIPFLDITNYAVKFQARFIITADRGTAYLEVSSLTSDDTAVYYCATERNSGSSSSYMDVWGQGTTVTVSS

SEQ ID NO: 6740 - protein, 127 aa, Artificial Sequence
  Synthetic construct
QITLKESGPTLVKPTQTLTLTCTFSGFSLSTSGVGVGWIRQPPGKALEWLALIYWDDDKRYSPSLKSRLTITKDTSKNQVVLTMTNMDPVDTATYYCAHSGPTNFWSGSRTNWFDPWGQGTLVTVSS

SEQ ID NO: 6741 - protein, 121 aa, Artificial Sequence
  Synthetic construct
EVQLVESGGGLVQPGGSLRLSCAASGFTLSSYWMSWVRQAPGKGLEWVANIKQDGSEQYYVDSLKGRFTISRDNAKNSLYLQMNSLRAEDTAVYYCARSSKSAVAGIIDSWGQGTLVTVSS

SEQ ID NO: 6742 - protein, 127 aa, Artificial Sequence
  Synthetic construct
QVQLVESGGGVVQPGRSLRLSCAASGFTFSSYAMHWVRQAPGKGLEWVAVISYDGSNKYYADSVKGRFTISRDNSKNTLYLQMNSLRAEDTAVYYCAREKFTMVRGAHFIFRAFDIWGQGTMVTVSS

SEQ ID NO: 6743 - protein, 119 aa, Artificial Sequence
  Synthetic construct
EVQLLESGGGLVQPGGSLRLSCAASGFTFSSYAMSWVRQAPGKGLEWVSAISGSGGSTYYADSVKGRFTISRDNSKNTLYLQMNSLRAEDTAVYYCASVPRWLHVFDYWGQGTLVTVSS

SEQ ID NO: 6744 - protein, 125 aa, Artificial Sequence
  Synthetic construct
QVQLQESGPGLVKPSQTLSLTCTVSGGSISSGSYYWSWIRQPAGKGLEWIGRIYTSGSTNYNPSLKSRVTISVDTSKNQFSLKLSSVTAADTAVYYCAREATSSTSSFSYGMDVWGQGTTVTVSS

SEQ ID NO: 6745 - protein, 125 aa, Artificial Sequence
  Synthetic construct
EVQLLESGGGLVQPGGSLRLSCAASGFTFSSYAMSWVRQAPGKGLEWVSAISGSGGSTYYADSVKGRFTISRDNSKNTLYLQMNSLRAEDTAVYYCAKDKYSSTRRGAVNGMDVWGQGTTVTVSS

SEQ ID NO: 6746 - protein, 128 aa, Artificial Sequence
  Synthetic construct
QLQLQESGSGLVKPSQTLSLTCAVSGGSISSGGYSWSWIRQPPGKGLEWIGYIYHSGSTYYNPSLKSRVTISVDRSKNQFSLKLSSVTAADTAVYYCARVGTYYYGSGSYYTNWFDPWGQGTLVTVSS

SEQ ID NO: 6747 - protein, 125 aa, Artificial Sequence; identical to SEQ ID NO: 5711
  Synthetic construct

SEQ ID NO: 6748 - protein, 121 aa, Artificial Sequence
  Synthetic construct
EVQLLESGGGLVQPGGSLRLSCAASGFTFSSYAMSWVRQAPGKGLEWVSAISNSGGNTYYADSVKGRFTISRDNSKNTLYLQMNSLRAEDTAVYYCAKVGATMVRGVYDYWGQGTLVTVSS

SEQ ID NO: 6749 - protein, 128 aa, Artificial Sequence
  Synthetic construct
QLQLQESGPGLVKPSETLSLTCTVSGGSISSSSYYWGWIRQPPGKGLEWIGSIYYSGSTYYNPSLKSRVTISVDTSKNQFSLKLSSVTAADTAVYYCAKWELGDILTGYYPAEAFDIWGQGTMVTVSS

SEQ ID NO: 6750 - protein, 125 aa, Artificial Sequence
  Synthetic construct
QVQLQQWGAGLLKSSETLSLTCGVYGGSVKGYYWTWVRQTPRKGLEWIGESYHSGRPKYNPSLKSRVTISVDTVKNQISLEMTSVTAADSAVYYCARWGAHSSSWTPLGYAMDVWGHGTTVTVSS

SEQ ID NO: 6751 - protein, 121 aa, Artificial Sequence
  Synthetic construct
EVQLLESGGGLVQPGGSLRLSCAASGFTFSSYAMSWVRQAPGKGLEWVSAISGSGGSTYYADSVKGRFTISRDNSKNTLYLQMNSLRAEDTAVYYCAKGFGFGELLPFDYWGQGTLVTVSS

SEQ ID NO: 6752 - protein, 130 aa, Artificial Sequence
  Synthetic construct
EVQVVESGGGLVQPGRSLRLSCSASGFIFDNHAMHWVRQAPGKGLEWVSSISWNSGALHYADSVKGRFTISRDNAKNSLYLQMNSLRAEDTALYYCAKDIRAFRAFNYETAEYHYGMDVWGQGTTVTVSS

SEQ ID NO: 6753 - protein, 123 aa, Artificial Sequence; identical to SEQ ID NO: 44
  Synthetic construct

SEQ ID NO: 6754 - protein, 118 aa, Artificial Sequence
  Synthetic construct
EVQLVESGGGLIQPGGSLRLSCAASGFSVSDNYMNWVRQAPGKGLEWVSIIYLAGSTSYADSVKGRFTISRDNSKNTLYLQMNSLRADDTAVYYCASSLSRRKGIDYWGQGTLVTVSS

SEQ ID NO: 6755 - protein, 116 aa, Artificial Sequence
  Synthetic construct
QVQLQESGPGLVKPSQTLSLTCTVSGGSISSGSYYWSWIRQPAGKGLEWIGRIYTSGSTNYNPSLKSRVTISVDTSKNQFSLKLSSVTAADTAVYYCARDPPLRYWGQGTLVTVSS

SEQ ID NO: 6756 - protein, 126 aa, Artificial Sequence
  Synthetic construct
QLQLQESGPGLVKPSETLSLTCTVSAASMTGYYWSWFRQPPGKGLDWIGHISHNGATTYNPSVKSRITISIDMSKNQFSLKLTSATAADTAVYHCARLSLDCRRSSSCRGAWFDPWGQGTLVTVSS

SEQ ID NO: 6757 - protein, 127 aa, Artificial Sequence
  Synthetic construct
QVQLQESGPGLVKPSQTLSLTCTVSGGSISSGDYSWSWIRQPPGKGLEWIGYIYYSGTTYYNPSLKSRVTISVDTSKNQVSLKLSSVTAADTAVYYCASGLHYYGSGSYTGNYFDHWGQGTLVTVSS

SEQ ID NO: 6758 - protein, 119 aa, Artificial Sequence
  Synthetic construct
EVQLVESGGGLVKPGGSLRLSCAASGFTFSSYRMKWVRQAPGKGLEWVSSISSSSSYIYYADSVKGRFTISRDNAKNSLYLQMNSLRAEDTAVYYCARVGDYGDYFDYWGQGTLVTVSS

SEQ ID NO: 6759 - protein, 120 aa, Artificial Sequence
  Synthetic construct
QVQLVQSGAEVKKPGASVKVSCKASGYTFTSYGISWVRQAPGQGLEWMGWISAYNGNTNYAQKLQGRVTMTTDTSTSTAYMELRSLRSDDTAVYYCARSPRGRTGTWNYWGQGTLVTVSS

SEQ ID NO: 6760 - protein, 127 aa, Artificial Sequence
  Synthetic construct
QMDLQQWGGGLLKPSETLSLTCAVSGGSFSGFYWSWIRQSPGKGLEWIGEIIHSGITKSNPSLKSRVTISIDTSKNQFSLKLGSVTAADTAVYYCARGTGRSIPFVRGVKQTPFDYWGQGTVVTVSS

SEQ ID NO: 6761 - protein, 119 aa, Artificial Sequence
  Synthetic construct
QVQLQESGPGLVKPSETLSLTCTVSGGSISSYYWSWIRQPPGKGLEWIGYIYYSGSTNYNPSLKSRVTISVDTSKNQFSLKLSSVTAADTAVYYCARDTAMARDAFDIWGQGTMVTVSS

SEQ ID NO: 6762 - protein, 119 aa, Artificial Sequence; identical to SEQ ID NO: 6657
  Synthetic construct

SEQ ID NO: 6763 - protein, 118 aa, Artificial Sequence
  Synthetic construct
EVQLVESGGGLVQPGGSLRLSCAASGFTFSSYWMSWVRQAPGKGLEWVANIKQDGSEKYYVDSVKGRFTISRDNAKNSLYLQMNSLRAEDTAVYYCARARLRYFETTRGQGTLVTVSS

SEQ ID NO: 6764 - protein, 126 aa, Artificial Sequence
  Synthetic construct
EVQLVESGGGLVKPGGSLRLSCAASGFTFSSYSMNWVRQAPGKGLEWVSSISSSSSYIYYADSVKGRFTISRDNAKNSLYLQMNSLRAEDTAVYYCASAPKGGYYPNYYYYGMDVWGQGTTVTVSS

SEQ ID NO: 6765 - protein, 123 aa, Artificial Sequence
  Synthetic construct
QLQLQESGPGLVKPSETLSLTCTVSGGSISSSSYYWGWIRQPPGKGLEWIGSIYYSGSTYYNPSLKSRVTISVDTSKNQFSLKLSSVTATDTAVYYCARHDVVGAEVDAFDIWGQGTMVTVSS

SEQ ID NO: 6766 - protein, 120 aa, Artificial Sequence
  Synthetic construct
QVQLVQSGAEVKKPGASVKVSCKASGYTFTSYAMHWVRQAPGQRLEWMGWINAGNGNTKYSQKFQGRVTITRDTSASTAYMELSSLRSEDTAVYYCARGRGYGPVYFDYWGQGTLVTVSS

SEQ ID NO: 6767 - protein, 129 aa, Artificial Sequence
  Synthetic construct
EVQLVESGGGLAQPGRSQRLSCTASGFTFRDYSIIWFRQVPGKGLEWVGFIRNKPYGGAAEYAASVKGRFTISRDDSKSSAYLQMNSLKIEDTAVYYCTRCAVPDRAVALPLYYGLDLWGQGTTVIVSS

SEQ ID NO: 6768 - protein, 125 aa, Artificial Sequence
  Synthetic construct
QLQLQESGPGLVKPSETLSLTCTVSGGSTSSSSYYWGWIRQPPGKGLEWIGSISYSGRTFYNPSLRSRVTTSIDTSKNQFSLKLSSVTAADTAVYYCARRRGYQVPLYTYFFDYWGRGTLVTVSS

SEQ ID NO: 6769 - protein, 126 aa, Artificial Sequence
  Synthetic construct
QVQLVQSGAEVKKPGASVKVSCKASGYTFTGYYMHWVRQAPGQGLEWMGWINPNSGGTNYAQKFQGRVTMTRDTSISTAYMELSRLRSDDTAVYYCARVFRGIVVVPAAMPVGDYWGQGTLVTVSS

SEQ ID NO: 6770 - protein, 118 aa, Artificial Sequence; identical to SEQ ID NO: 5663
  Synthetic construct

SEQ ID NO: 6771 - protein, 119 aa, Artificial Sequence
  Synthetic construct
QVQLVQSGAEVKKPGASVKVSCKASGYSFTAYYMHWVRQAPRQGLEWMGWINPNSGGTNFAQKFQGRVIMTTDTSVGTAYMELSSLRSDDTAVYYCARELLTERALDLWGRGTMVTVSS

SEQ ID NO: 6772 - protein, 119 aa, Artificial Sequence
  Synthetic construct
EVQLVESGGGLVQPGGSLRLSCPASGFTLSSYVMHWVRQAPGKGLEYVLGISSNGGTTYNADSVKGRFIISRDNSKNTLYLQMSSLRAEDTAVYYCVKSSGSGSYFDYWGQGTLVTVSS

SEQ ID NO: 6773 - protein, 114 aa, Artificial Sequence
  Synthetic construct
QVQLVQSGTEVKKPGASVTISCKTSGYTFTSYYIHWVRQAPGQGLEWVGIINPGDGSTTYAQRFQGRVTVTRDTSTTTVYMELNSLRSEDTAIYFCLVNAGDHWGQGTLVTVSS

SEQ ID NO: 6774 - protein, 119 aa, Artificial Sequence
  Synthetic construct
QVQLQESGPGLVKPSGTLSLTCAVSGASISRSDWWTWVRQPPGKELEWIAEMSHSGTINYNPSLGSRVTISLDRSKNHFSLDLTSVTAADTAVYYCVRHADRSRGMDVWGQGTTVIVSS

SEQ ID NO: 6775 - protein, 124 aa, Artificial Sequence
  Synthetic construct
EVQLLESGGGLVQPGGSLRLSCAASGFTFSNYAMSWVRQAPGKGLEWVSTINASGGSTYYADSVKGRFTISRDNSKNTLYLQMNSLRAEDTAVYYCAKEGIVAVPASMFYFDYWGQGTLVTVSS

SEQ ID NO: 6776 - protein, 118 aa, Artificial Sequence
  Synthetic construct
QVQLQESGPGLVKPSGTLSLACGISGGNITNTNWWTWVRQAPGRGLEWIGEIHHSGSTNYNPSLKSRVTMSVDKSRNQFSLHLNSVTAADTAVYYCARYVGQNWFDPWGQGTLVTVSS

SEQ ID NO: 6777 - protein, 122 aa, Artificial Sequence
  Synthetic construct
EVHLVESGGGLIQPGGSLRLSCAVSGFSVSRNDLVWVRQAPGKGLECVSVMYSGSNTYHEDSVKGRFTISRDNSKNVLYLQMNSLRAEDAAAYYCARISGSDWGRRDYFDYWGQGTLVTVSS

SEQ ID NO: 6778 - protein, 124 aa, Artificial Sequence
  Synthetic construct
QVQLVESGGGVVQPGRSLRLSCAASGFTFSSYAMHWVRQAPGKGLEWVAVISYDGSNKYYADSVKGRFTISRDNSKNTLYLQMNSLRAEDTAVYYCARARVLYGSGSYSRFDPWGQGTLVTVSS

SEQ ID NO: 6779 - protein, 121 aa, Artificial Sequence
  Synthetic construct
EVQLVESGGGLVQPGGSLRLSCAASGFTFSSYWMHWVRQAPGKGLVWVSRINSDGSSTSYADSVKGRFTISRDNAKNTLYLQMNSLRAEDTAVYYCARDLCSSTSCYYDYWGQGTLVTVSS

SEQ ID NO: 6780 - protein, 119 aa, Artificial Sequence
  Synthetic construct
QVHLVQSGAEVKKPGASVRVSCKASGYTFTTFGISWVRQAPGQGLEWMGWISGSNGITNDAPKFRDRVTMTTDTSTTSAYMEVRSLTSDDTAVYFCARDYYNYGKFDYWGQGTQVTVSS

SEQ ID NO: 6781 - protein, 122 aa, Artificial Sequence
  Synthetic construct
QVQLVQSGAEVKKPGASVKVSCKVSGYTFTSYGISWVRQAPGQGLEWMGWISGYNGNTNYTQNLQGRVTMTTDTSTSTAYMELTSLRSDDTAVYYCARDHFRDTTYYGLDDWGQGTTVTVSS

SEQ ID NO: 6782 - protein, 125 aa, Artificial Sequence; identical to SEQ ID NO: 5711
  Synthetic construct

SEQ ID NO: 6783 - protein, 125 aa, Artificial Sequence; identical to SEQ ID NO: 5711
  Synthetic construct

SEQ ID NO: 6784 - protein, 121 aa, Artificial Sequence
  Synthetic construct
EVQLLESGGGLVQPGGSLRLSCAASGFPFTTHAMSWVRQAPGKGLEWVSVISGRDENTYHADSVKGRFSISRDSSNNTLYLEISSLRAEDTAIYYCAKGLTGWFLAPLDYWGQGTLVTVSS

SEQ ID NO: 6785 - protein, 118 aa, Artificial Sequence
  Synthetic construct
EVQLVESGGGLVQPGGSLRLSCAASGFAFSNYDIHWVRQPTGKGLEWVSAIGSGGDTFYSGSVKGRFTVSRATAKNSVYLQISSLRAGDTAVYYCARDDSNKKAFDIWGQGTTVTVSS

SEQ ID NO: 6786 - protein, 117 aa, Artificial Sequence
  Synthetic construct
QVQLVQSGAEVKKPGASVKVSCKTSGYTFTAYYMHWVRQAPGQGLEWMGWINPTGATNYAPNLQGRVTMTRDTSINTAYMELSYLRSDDTAVYYCATRGGPLPFNYWGQGTLVTVSS

SEQ ID NO: 6787 - protein, 121 aa, Artificial Sequence
  Synthetic construct
EVQLVQSGAEVKKPGATVKISCKVSGYTFTDYYMHWVQQAPGKGLEWMGLVDPEDGETIYAEKFQGRVTITADTSTDTAYMELSSLRSEDTAVYYCATVYRPAGATTGFGWGQGTLVTVSS

SEQ ID NO: 6788 - protein, 131 aa, Artificial Sequence
  Synthetic construct
QVHLVQSGTEVKKPGASVKVSCKASGYTFAAYYMAWVRQAPGQGLEWMGWMNPNSGDTNYAEKFQGRVTMTSDTSVSTAYMELTSLKSDDTAIYFCARGVTVIRGMIVLSPRRHSPYFDHWGRGTLVTVSS

SEQ ID NO: 6789 - protein, 118 aa, Artificial Sequence
  Synthetic construct
QVQLQESGPGLVKPSETLSLTCTVSGGSISTYYWSWIRQPPGKGLEWIGYIYYSGSTNYNPSLKSRVTISVDTSKNQFSLKLSSVTAADTAVYYCARSIGAVSWFDPWGQGTLVTVSS

SEQ ID NO: 6790 - protein, 123 aa, Artificial Sequence
  Synthetic construct
EVQLVESGGGLVQPGGSLRLSCSASGFIFSTYPMHWVRQAPGKGLEYVSAISSTGDNTYYADSVKGRFTISRDTSKNTLYLQMISLRAEDTAVYYCVKDLGWRSIAADGGDYWGQGTLVTVSS

SEQ ID NO: 6791 - protein, 124 aa, Artificial Sequence
  Synthetic construct
QLQLQESGPGLVKPSETLSLTCTVSGGSISSSSYYWGWIRQPPGKGLEWIGSIYYSGSTYYNPSLKSRVTISVDTSKNQFSLKLSSVTAADTAVYYCARLQAGYSGYSYYFDYWGQGTLVTVSS

SEQ ID NO: 6792 - protein, 127 aa, Artificial Sequence
  Synthetic construct
QVQLVQSGAEVKKPGASVKVSCKASGYTFTSYYMHWVRQAPGQGLEWMGIINPSGGSTSYAQKFQGRVTMTRDTSTSTVYMELSSLRSEDTAVYYCAREHRGRDHYYGSGRGAFDIWGQGTMVTVSS

SEQ ID NO: 6793 - protein, 118 aa, Artificial Sequence
  Synthetic construct
EVQLVESGGGLVKPGGSLRLSCAASGFTFSSYSMNWVRQAPGKGLEWVSSISSSSSYIYYADSVKGRFTISRDNAKNSLYLQMNSLRAEDTAVYYCARSRGYSGYDYWGQGTLVTVSS

SEQ ID NO: 6794 - protein, 122 aa, Artificial Sequence
  Synthetic construct
QVQLVESGGGVVQPGRSLRLSCAASGFTFSSYAMHWVRQAPGKGLEWVAVISYDGSNKYYADSVKGRFTISRDNSKNTLYLQMNSLRAEDTAVYYCARAGVQWLVRYGMDVWGQGTTVTVSS

SEQ ID NO: 6795 - protein, 130 aa, Artificial Sequence
  Synthetic construct
QVQLQQWGAGLLKPSETLSLTCAVYGGSFSGYYWSWIRQPPGKGLEWIGEINHSGSTNYNPSLKSRVTISVDTSKNQFSLKLSSVTAADTAVYYCARIRQIVVVPAETRRYYYYYGMDVWGQGTTVTVSS

SEQ ID NO: 6796 - protein, 125 aa, Artificial Sequence
  Synthetic construct
QVQLQQWGAGQVKPSETLSLTCDIYGGSFSNSYWSWIRQPPGKGLEWIGEINHSGKTNFNPSLKSRVTISVDPSKNQFSLKMSSVTAADTAVYFCARGGASTDGRFRTPLAFDHWGQGSLVTVSS

SEQ ID NO: 6797 - protein, 120 aa, Artificial Sequence
  Synthetic construct
QVQLQESGPGLVKPSQTLSLTCTVSGGSISSGSYYWSWIRQPAGKGLEWIGRIYTSGSTNYNPSLKSRVTISVDTSKNQFSLKLSSVTAADTAVYYCARGSRYQLLPRAWGQGTLVTVSS

SEQ ID NO: 6798 - protein, 122 aa, Artificial Sequence
  Synthetic construct
QLKLQESGPGLVKPSETLALTCSVSGASISSSNYYWGWIRQPPGKGLEWIVSIYYSGSTFYNPSLKSRVTTSVDTSTNQFSLKMTSVTAADTAVYYCATSSPFYDVTLIGSCGQGTLVTVSS

SEQ ID NO: 6799 - protein, 121 aa, Artificial Sequence
  Synthetic construct
QVQLEESGGGVVQPGRSLRLSCAASGFTFIAYDMHWVRQAPGKGLEWVAAISHDGNNMYYVDSVKGRFTISRDNSKNILYLQMNNLRGEDTAVYYCARDDPAWGAVTLDYWGQGTLVTVSS

SEQ ID NO: 6800 - protein, 121 aa, Artificial Sequence
  Synthetic construct
QVQLVQSGAEVKKPGASVKVSCKASGYTFTGYYMHWVRQAPGQGLEWMGWINPNSGGTNYAQKFQGRVTMTRDTSISTAYMELSRLRSDDTAVYYCARAPPYYYDSSGLQWGQGTLVTVSS

SEQ ID NO: 6801 - protein, 124 aa, Artificial Sequence
  Synthetic construct
QVQLQESGPGLVKPSQTLSLTCTVSGGSISSGSYYWSWIRQPAGKGLEWIGRIYTSGSTNYNPSLKSRVTISVDTSKNQFSLKLSSVTAADTAVYYCARSPVKNYYDSSGYYLWGQGTLVTVSS

SEQ ID NO: 6802 - protein, 119 aa, Artificial Sequence
  Synthetic construct
QLQLQESGPGLVKPSETLSLTCTVSGGSISSSSYYWGWIRQPPGKGLEWIGSIYYSGSTYYNPSLKSRVTISVDTSKNQFSLKLSSVTAADTAVYYCARRTTVTHFDYWGQGTLVTVSS

SEQ ID NO: 6803 - protein, 125 aa, Artificial Sequence
  Synthetic construct
QLQLQESGPGLVKPSETLSLTCTVSGGSISSSIYYWGWIRQPPGKGLEWIGNIYYSGSTYYSPSLKSRVTISVDTSKNQFSLKLSSVTAADTAVYYCARQRGYCSGGSCYRIDPWGQGTLVTVSS

SEQ ID NO: 6804 - protein, 131 aa, Artificial Sequence
  Synthetic construct
QVQLQQSGPGLVKPSQTLSVTCAISGDSVSSDSAAWNWIRQSPLRGPEWLGRTYFRSKWYNDYAESVKGRIIINPDTSKNQFSLQLNSVTPEDTAIYYCARFSCGSTTSCFSGQRDTVDVWGQGTTVTVSS

SEQ ID NO: 6805 - protein, 124 aa, Artificial Sequence
  Synthetic construct
QVQLQESGPGLVKPSGTLSLTCAVSGGSISSSNWWSWVRQPPGKGLEWIGEIYHSGSTNYNPSLKSRVTISVDKSKNQFSLKLSSVTAADTAVYYCARAPHNWNDVGGVRIDPWGQGTLVTVSS

SEQ ID NO: 6806 - protein, 118 aa, Artificial Sequence
  Synthetic construct
QVQLQESGPGLVKPSETLSLTCTVSGDSIRSYYWNWIRQSAGKGLEWIGRIYTSGTTNYNPSLERRVTMSIDTSKNQFSLRLTSVTAADTAVYYCAREDSVIIIFDYWGQGTLVTVSS

SEQ ID NO: 6807 - protein, 119 aa, Artificial Sequence
  Synthetic construct
QVQMVESGGGVVQPGKSLRLSCTASGFNLNDHGVHWVRQAAGQGMEWLAVIWHDGSFKFYAESVKGRFSISRDDSKNTVFLEMDNLKVEDTAFYFCARDKKIAVVLDVWGQGSLVTVSS

SEQ ID NO: 6808 - protein, 119 aa, Artificial Sequence
  Synthetic construct
QVQLVQSGAEVKKPGASVKVSCKASGYTFIDFYIHWVRQAPGQGLEWMGMINPRGGSTNYAQKFQGRVTMTRDTSTSTVYMEMSSLRSEDTALFYCARAEFNYAQFDLWGQGSLVSVSS

SEQ ID NO: 6809 - protein, 125 aa, Artificial Sequence
  Synthetic construct
EVQLLESGGGLVQPGGSLRLSCAASGFTFSSYAMSWVRQAPGKGLEWVSAISGSGGSTYYADSVKGRFTISRDNSKNTLYLQMNSLRAEDTAVYYCAKDRSMVRGVIVNNWFDPWGQGTLVTVSS

SEQ ID NO: 6810 - protein, 127 aa, Artificial Sequence
  Synthetic construct
EVQLVESGGGLVKPGGSLRLSCAASGFTFSNAWMSWVRQAPGKGLEWVGRIKSKTDGGTTDYAAPVKGRFTISRDDSKNTLYLQMNSLKTEDTAVYYCTTVGDSSGWYLRDYGMDVWGQGTTVTVSS

SEQ ID NO: 6811 - protein, 122 aa, Artificial Sequence
  Synthetic construct
QVQLVQSGAEVKKPGSSVKVSCKASGGTFSSYTISWVRQAPGQGLEWMGKISPILGMTNYAQKFQGRVTITADKSTSTAYMELSSLRSEDTAVYYCARDVGNPYYYYGMDVWGQGTTVTVSS

SEQ ID NO: 6812 - protein, 123 aa, Artificial Sequence
  Synthetic construct
QVQLVESGGGVVQPGRSLRLSCAASGFTFSSYGMHWVRQAPGKGLEWVAVISYDGSNKYYADSVKGRFTISRDNSKNTLYLQMNSLRAEDTAVYYCAKDLVRGVNPLYYFDYWGQGTLVTVSS

SEQ ID NO: 6813 - protein, 127 aa, Artificial Sequence
  Synthetic construct
EVQLVESGGGLIQPGGSLRLSCAASGFTVSSNYMSWVRQAPGKGLEWVSVIYSGGSTYYADSVKGRFTISRDNSKNTLYLQMNSLRAEDTAVYYCARAGPDNCSSTSCSRRRYFDYWGQGTLVTVSS

SEQ ID NO: 6814 - protein, 125 aa, Artificial Sequence
  Synthetic construct
EEQLEESGGGLVQPGGSLRLSCAASGFTVSNNYMSWVRQAPGKGLEWVSVIYSDGSTYYADSVKGRFTISRDNSKNTLYLQMNSLRAEDTAVYYCARDRQSCSGGGCYYTWFDPWGQGTLVTVSS

SEQ ID NO: 6815 - protein, 117 aa, Artificial Sequence
  Synthetic construct
QVQLQESGPGLVKSSGTLSLTCVVPGGSFSGSNWWNWVRQTPGKGLEWIGEIHHSGSTNYNPSLKSRVTLSVDKSNNQFSLKLDSVTAADTAVYYCARGISWYLQYWGQGILVTVSS

SEQ ID NO: 6816 - protein, 126 aa, Artificial Sequence
  Synthetic construct
QVQLQESGPGLVKPSETLSLTCTVSGGSISSYYWSWIRQPPGKGLEWIGYIYYSGSTNYNPSLKSRVTISVDTSKNQFSLKLSSVTAADTAVYYCARARYSSGWYGKNYYYGMDVWGQGTTVTVSS

SEQ ID NO: 6817 - protein, 126 aa, Artificial Sequence
  Synthetic construct
EVQLLESGGGLVQPGGSLRLSCAASGFTFSSYAMSWVRQAPGKGLEWVSAISGSGGSTYYADSVKGRFTISRDNSKNTLYLQMNSLRAEDTAVYYCAKGSRVVVAATWYYYGMDVWGQGTTVTVSS

SEQ ID NO: 6818 - protein, 129 aa, Artificial Sequence
  Synthetic construct
QLQLRESGPGLLQPSETLSLTCSVSGGSISSNYYYWGWIRQPPGKGLEWIGSVYHGGSTYYNPSLKSRVTISSDTSKNQFSLKLSSVTAADTAMYYCAISTKYYDFWSGYYGVGWLDPWGQGILVTVSS

SEQ ID NO: 6819 - protein, 120 aa, Artificial Sequence
  Synthetic construct
QVTLRESGPALVKPTQTLTLTCTFSGFSLTTSSMCVSWIRQPPGKALEWLALIDWDDDKYYSTSLKTRLTISKDTSQNQVVLTMTSMDPVDTGTYYCARFDSSDRVFDYWGQGTLVTVSS

SEQ ID NO: 6820 - protein, 121 aa, Artificial Sequence
  Synthetic construct
QVHLVQSGAEVKKPGASVRVSCKASDYTFTDYFIHWVRQAPGQGLECMGWINPGNGGTSYPQNFQGRVTMTRDTSLSTAYMELSSLTSDDTAVYYCAREGRYRNIYYFDYWGQGTLVTVSS

SEQ ID NO: 6821 - protein, 128 aa, Artificial Sequence
  Synthetic construct
EVQLLESGGGLVQPGGSLRLSCAASGFTFSSYAMSWVRQAPGKGLEWVSAISGSGGSTYYADSVKGRFTISRDNSKNTLYLQMNSLRAEDTAVYYCAKDRGYCSGGSCRRGYYGMDVWGQGTTVTVSS

SEQ ID NO: 6822 - protein, 128 aa, Artificial Sequence
  Synthetic construct
QVQLQESGPGLVKPSGTLSLTCAVSGGSISSSNWWNLVRQPPGKGLEWIGEIHHSGSTNYNPSLKSRVTISIDKSKNQFSLKLHSVTAADTAVYFCARGLDCSRSNCYSLGDNWLDPWGQGALVTVSS

SEQ ID NO: 6823 - protein, 123 aa, Artificial Sequence
  Synthetic construct
EEHLAESGGGLVRPGGSLRLSCAVSGFNLRSYGMNWVRQAPGKGLEWVAFVSNSGTYTYYADSAKGRLTISRDNAQNSVFLQMNSLRVDDTAVYYCARDSSVTYFGEGGIDIWGQGTMVSVSS

SEQ ID NO: 6824 - protein, 117 aa, Artificial Sequence; identical to SEQ ID NO: 5817
  Synthetic construct

SEQ ID NO: 6825 - protein, 133 aa, Artificial Sequence
  Synthetic construct
QVQLQESGPGLVKPSQTLSLTCTVSGGSISSGSYYWSWIRQPAGKGLEWIGRIYTSGSTNYNPSLKSRVTISVDTSKNQFSLKLSSVTAADTAVYYCARGRRGRKYSSSWYSNYYYYYGMDVWGQGTTVTVSS

SEQ ID NO: 6826 - protein, 121 aa, Artificial Sequence
  Synthetic construct
EVQLVESGGGLVQPGGSLRLSCAASGFTFSSYWMSWVRQAPGKGLEWVANIKQDGSEKYYVDSVKGRFTISRDNAKNSLYLQMNSLRAEDTAVYYCARGRNRALGPRFDPWGQGTLVTVSS

SEQ ID NO: 6827 - protein, 112 aa, Artificial Sequence
  Synthetic construct
EVQLVESGGGLVKPGGSLRLSCAASGFTFSSYSMNWVRQAPGKGLEWVSSISSSSSYIYYADSVKGRFTISRDNAKNSLYLQMNSLRAEDTAVYYCARSTSWGQGTLVTVSS

SEQ ID NO: 6828 - protein, 127 aa, Artificial Sequence
  Synthetic construct
QVQLVESGGGVVQPGKSLRLSCAASGFTFRNYPLHWVRQAPGKGLEWVAVITDDGKNEYYADSVKGRFTISRDNSKDTLYLQMNSLREEDSAVYYCARDPSWGSGWTNSLGSSFDVWGQGTLVAVSS

SEQ ID NO: 6829 - protein, 129 aa, Artificial Sequence
  Synthetic construct
QVQLVQSGAEVKKPGSSVKVSCKASGGTFSSYAISWVRQAPGQGLEWMGGIIPIFGTANYAQKFQGRVTITADESTSTAYMELSSLRSEDTAVYYCARSRYGSGSYFSYYYYYYGMDVWGQGTTVTVSS

SEQ ID NO: 6830 - protein, 130 aa, Artificial Sequence
  Synthetic construct
QVQLVESGGGVVQPGRSLRLSCAASGFTFSSYAMHWVRQAPGKGLEWVAVISYDGSNKYYADSVKGRFTISRDNSKNTLYLQMNSLRAEDTAVYYCAREPNPRKPYCSGGSCYSGWFDPWGQGTLVTVSS

SEQ ID NO: 6831 - protein, 126 aa, Artificial Sequence
  Synthetic construct
QITLKESGPTLVKPTQTLTLTCTFSGFSLTMNGEGVGWIRQPPGKALEWLALNYWDDDKRYSPSLANRLSITKDTSKDQVVLTMTNMAPVDTATYYCAHVGWHGLLGVPNYYFDHWGQGTLVTVSS

SEQ ID NO: 6832 - protein, 123 aa, Artificial Sequence; identical to SEQ ID NO: 5978
  Synthetic construct

SEQ ID NO: 6833 - protein, 129 aa, Artificial Sequence
  Synthetic construct
EMQLVESGGDLVQPGGSLKLACAASGFKFSASAIHWVRRAPGKGLEWVGRIRSKTNDYATTYAESVKDRFTISRDDSKDTAYLQMSSLKTEDTAMYYCTRALKDIILKVVALDNWLDPWGQGTLVTVSS

SEQ ID NO: 6834 - protein, 125 aa, Artificial Sequence; identical to SEQ ID NO: 5711
  Synthetic construct

SEQ ID NO: 6835 - protein, 127 aa, Artificial Sequence
  Synthetic construct
QVQLVQSGAEVKKPGASVKVSCKASGYTFTSYYMHWVRQAPGQGLEWMGIINPSGGSTSYAQKFQGRVTMTRDTSTSTVYMELSSLRSEDTAVYYCARGDYDYVWGSYRYPNYFDYWGQGTLVTVSS

SEQ ID NO: 6836 - protein, 118 aa, Artificial Sequence
  Synthetic construct
EVQLLESGGGLVQPGGSLRLSCAASGFTFSSYAMSWVRQAPGKGLEWVSAISGSGGSTYYADSVKGRFTISRDNSKNTLYLQMNSLRAEDTAVYYCAKASSGSYYRFWGQGTLVTVSS

SEQ ID NO: 6837 - protein, 121 aa, Artificial Sequence
  Synthetic construct
EVQVVESGGGLIQPGGSLRLSCAASGFTVSTNYMTWVRQAPGKGLEWVSVVYSSGSTFYADSVKGRFTISRDNSKNTLFLQMNSLRAEDTAIYYCARALGGNSNSPALGYWGQGTLVTVSS

SEQ ID NO: 6838 - protein, 120 aa, Artificial Sequence
  Synthetic construct
QVQLQESGPGLVKPSKTLSLTCTVSGGSINSYYWSWVRQPPGDGLEWIGYIYYSGSTNYNPSLKSRVTISVDTSKSQFSLRLTSVTAADTAVYYCARVPGGLVPAAFDSWGPGTLVTVSS

SEQ ID NO: 6839 - protein, 126 aa, Artificial Sequence
  Synthetic construct
EVQLVESGGGLVQPGGSLRLSCAASGFTFSSYWMSWVRQAPGKGLEWVANIKQDGSEKYYVDSVKGRFTISRDNAKNSLYLQMNSLRAEDTAVYYCARDRYYYGSGSYLKNWFDPWGQGTLVTVSS

SEQ ID NO: 6840 - protein, 118 aa, Artificial Sequence; identical to SEQ ID NO: 5663
  Synthetic construct

SEQ ID NO: 6841 - protein, 120 aa, Artificial Sequence
  Synthetic construct
QVQLQESGPGLLKPSQTLSLTCSVSGWSISSGPYYWNWIRQPAGKGLEWVGRIYTHGRTDYNPSLKSRVTISLDTSKNQFSLDLNSVNAADTAVYFCAREVDSWSTFDYWGRGTLVTVSS

SEQ ID NO: 6842 - protein, 127 aa, Artificial Sequence
  Synthetic construct
QLQLQESGPGLVKPSETLSLTCTVSGGSISSSSYYWGWIRQPPGKGLEWIGSIYYSGSTYYNPSLKSRVTISVDTSKNHFSLKLSSVTAADTAVYYCARLGRITMVRGVILNWFDPWGQGTLVTVSS

SEQ ID NO: 6843 - protein, 122 aa, Artificial Sequence
  Synthetic construct
EVQLVESGGRVVRPGGSLRLSCVASGFTFDDYYMSWVRQGPGKGLEWVSGVNWNGGSTGYADSVKARFTISRDNAKNSLYLQMDGLRAEDTALYYCARVGMLGERQDAFDVWGQGTMVTVSS

SEQ ID NO: 6844 - protein, 122 aa, Artificial Sequence
  Synthetic construct
QVQLVESGGGLVKPGGSLRLSCAASGFTFSDYYISWIRQSPGKGLEWVAFVSGSASYTNYVDSVKGRFTISRDNSKNSVFLQMDSLRAEDSAVYYCAREVPHVSGSLFVDYWGQGTLVTVSS

SEQ ID NO: 6845 - protein, 120 aa, Artificial Sequence
  Synthetic construct
EVQVVESGGGLVRPGGSLRVSCAVSGFSLSRYTMNWARQAPGKGLEWVSSLSTTTSNTYYADSVRGRFTMSSDSAKNSVFLQMNSLRAEDTALYYCARGLVGSTEAFDVWGPGTMVTVSS

SEQ ID NO: 6846 - protein, 121 aa, Artificial Sequence
  Synthetic construct
QVQLQESGPGLVKPSETLSLTCTVSGGSISSYYWSWIRQPPGKGLEWIGYIYYSGSTNYNPSLKSRVTISVDTSKNQFSLKLSSVTAADTAVYYCARGGMGSGYYDPVDYWGQGTLVTVSS

SEQ ID NO: 6847 - protein, 123 aa, Artificial Sequence; identical to SEQ ID NO: 6567
  Synthetic construct

SEQ ID NO: 6848 - protein, 124 aa, Artificial Sequence
  Synthetic construct
QVQLVQSGSELKKPGASVKVSCKASGYTFTNYAIVWVRQAPGQGLEWMGWINTNTGNPTYAQGFTGRYVFSLDTSVSTANLQISSLEAEDTAVYYCARVGDCFSTSCYSTFDSWGQGTLVTVSS

SEQ ID NO: 6849 - protein, 128 aa, Artificial Sequence
  Synthetic construct
EVQLVESGGGLVKPGGSLRLSCAASGFTFSSYSMNWVRQAPGKGLEWVSSISSSSSYIYYADSVKGRFTISRDNAKNSLYLQMNSLRAEDTAVYYCARVLRRSSSSRGLYYYYGMDVWGQGTTVTVSS

SEQ ID NO: 6850 - protein, 124 aa, Artificial Sequence
  Synthetic construct
QVQLVESGGGVVQPGRSLRLSCAASGFTFSSYAMHWVRQAPGKGLEWVAVISYDGSNKYYADSVKGRFTISRDNSKNTLYLQMNSLRAEDTAVYYCASHYDSSGRLRRGLLDYWGQGTLVTVSS

SEQ ID NO: 6851 - protein, 124 aa, Artificial Sequence
  Synthetic construct
QLQLQESGPGLVKPSETLSLTCTVSGGSISSSSYYWGWIRQPPGKGLEWIGSIYYSGSTYYNPSLKSRVTISVDTSKNQFSLKLSSVTAADTAVYYCASSVAGYDYYYYGMDVWGQGTTVTVSS

SEQ ID NO: 6852 - protein, 123 aa, Artificial Sequence; identical to SEQ ID NO: 5437
  Synthetic construct

SEQ ID NO: 6853 - protein, 124 aa, Artificial Sequence
  Synthetic construct
QVQLQESGPGLVKPSQTLSLTCTVSGGSINNGDYYWTWIRQPPGKGLEWIGNIYYIGSTYYNVSLESRVTISMDTSKNQFSLKLTSVTDADTAVYYCGRDRSVWGNYRIGIDQWGQGTLVTVSS

SEQ ID NO: 6854 - protein, 121 aa, Artificial Sequence
  Synthetic construct
QVQLQESGPGLVKPSQTLSLTCSVSGGFPSGGSYYWSWIRQAAGKGLEYIGRTYTSGSTNYNPSLKSRVTISVDTSKNQFFLKLSSVTAADTAVYYCARAAQDYYYGMDVWGPGTTVIVSS

SEQ ID NO: 6855 - protein, 127 aa, Artificial Sequence
  Synthetic construct
QVQLVESGGGVVQPGRSLRLSCAASGFIFRSYGMHWVRQAPGKGLEWVAIIWYDGSNEYYADSVKGRFAISRDNSKNTLYLQMNSLRAEDTAVYYCARVLFGSGTPKIYFSYGMDVWGQGTTVTVSA

SEQ ID NO: 6856 - protein, 121 aa, Artificial Sequence
  Synthetic construct
QVQLQESGPGLVKPSETLSLTCTVSGGSISTFYWSWLRQPPGKGLEWIGYSFHNGITKYNPSLKSRVTISVDTSKKQFSLKLSSMTAADTAVYFCARGGDYDSSAYAFDYWGQGTLVTVSS

SEQ ID NO: 6857 - protein, 115 aa, Artificial Sequence
  Synthetic construct
EVQLVESGGGLVQPGGSLRLSCAASGFTFSSYWMTWVRQAPGKGLEWVANIKQDGSEKYYVDSVKGRFTISRDNAKNSLYLQMNSLRAEDTAVYYCARSAKTDYWGQGTLVTVSS

SEQ ID NO: 6858 - protein, 118 aa, Artificial Sequence
  Synthetic construct
QVQLVQSGAEVKKPGASVKVSCKASGYTFTGYYMHWVRQAPGQGLEWMGWINPNSGGTNYAQKFQGRVTMTRDTSISTAYMELSRLRSDDTAVYYCARGSYYNKNDYWGQGTLVTVSS

SEQ ID NO: 6859 - protein, 120 aa, Artificial Sequence
  Synthetic construct
QLQLQESGPGLVKPSETLSLSCTVSGGSINRGTYYWAWIRQPPGQGLQWVASIYHSGSTYYNPSLKSRVTVSVDTSKNQFSLNLTSVTAADTAVYYCARQGDILYGLDVWGQGATVTVSS

SEQ ID NO: 6860 - protein, 122 aa, Artificial Sequence
  Synthetic construct
QVQLVESGGGVVQPGRSLRLSCAASGFTFSSYGMHWVRQAPGKGLEWVAVISYDGSNKYYADSVKGRFTISRDNSKNTLYLQMNSLRAEDTAVYYCAKDRSSWTIPDAFDIWGQGTMVTVSS

SEQ ID NO: 6861 - protein, 122 aa, Artificial Sequence
  Synthetic construct
QVQLQESGPGLVKPSETLFLTCDVSGDSINSGSHYWSWIRQPAGKGLQWIARFYFSGSITYSPSLESRIAMSADTSRNQFSLRLTSVTVADMAVYYCARGPYGDPDDHFDYWGQGTLVTVSS

SEQ ID NO: 6862 - protein, 117 aa, Artificial Sequence
  Synthetic construct
EVQLEESGGGLVQPGGSLRLSCAASGFTFSDYTMNWIRQAPGMGLEWISYISTRHNVIYYADSVKGRFTISRDNAKNSLYLQMNSLRDEDTATYYCARDRDWAFDYWGQGILVTVSS

SEQ ID NO: 6863 - protein, 120 aa, Artificial Sequence
  Synthetic construct
EVQLVESGGGLVQPGGSLRLSCAASGFTFSSYSMNWVRQAPGKGLEWVSYISSSSSTIYYADSVKGRFTISRDNAKNSLYLQMNSLRDEDTAVYYCARDRKGRWLPIDYWGQGTLVTVSS

SEQ ID NO: 6864 - protein, 126 aa, Artificial Sequence
  Synthetic construct
EVQLVESGGGLVKPGGSLRLSCAASGFTFSSYSMNWVRQAPGKGLEWVSSISSSSSYIYYADSVKGRFTISRDNAKNSLYLQMNSLRAEDTAVYYCARDGIVPAATLHYYYGMDVWGQGTTVTVSS

SEQ ID NO: 6865 - protein, 123 aa, Artificial Sequence
  Synthetic construct
EVQLLESGGGLAQPGESLTLSCAASGFRFVSSAMSWVRQFPGKSLEWVSAISGDGDSSFYVDSVMGRFTISRDNSKNTVSLRMNSLRDEDTAIYYCVKGDNSAWYETSSFDHWGLGTLVTVSS

SEQ ID NO: 6866 - protein, 124 aa, Artificial Sequence
  Synthetic construct
EVQLVESGGGLVKPGGSLRLSCAASGFTFSSYSMNWVRQAPGKGLEWVSSISSSSSYIYYADSVKGRFTISRDNAKNSLYLQMNSLRAEDTAVYYCARGPPYYYDSSGYYLGYWGQGTLVTVSS

SEQ ID NO: 6867 - protein, 119 aa, Artificial Sequence
  Synthetic construct
QVQLVESGGGVVQPGRSLRLSCATSGFTFNKYGMHWVRQAPGKGLEWVAIIWHDGDDKFYADAVKGRFTISRDNSKNTLYLQMNSLRAEDTAVYYCARSVEIRYYFDYWGQGTLVTVSS

SEQ ID NO: 6868 - protein, 124 aa, Artificial Sequence
  Synthetic construct
EVLLVESGGGLVKPGGSLRVSCAASGFTFSSYTINWVRQAPGKGLEWVSSISSSSSYIYYADSVKGRFTISRDNAKNSLYLQMNSLRAEDTAVYYCARGRRGLDGYNFGQIDYWGQGTLVTVSS

SEQ ID NO: 6869 - protein, 125 aa, Artificial Sequence
  Synthetic construct
EVQLVESGGGLVKPGGSLRLSCAASGFTFSSYSMNWVRQAPGKGLEWVSSISSSSSYIYYADSVKGRFTISRDNAKNSLYLQMNSLRAEDTAVYYCARDLINRGPRARSGAFDIWGQGTMVTVSS

SEQ ID NO: 6870 - protein, 127 aa, Artificial Sequence
  Synthetic construct
EVQLVESGGGLVQPGGSLRLSCAASGFNVNNNYMTWVRQAPGKGLEWVSVIYSGGNTYYSHSAKGRFSISRDSSKNTLYLQLTSLRGEDTAVYYCATRTPLGPYYGARRDLRALDYWGQGTLVTVSS

SEQ ID NO: 6871 - protein, 119 aa, Artificial Sequence
  Synthetic construct
EVQLVESGGGLVKPGGSLRLSCAGSGFSFTNAWMSWVRQVPGKGLEWVGRIKRKLDGGTTDYAAPVKGGFTISRDDSENTLYLQMNSLKTEDTGMYYCTTEEAGFLGHWGQGTLVTVSS

SEQ ID NO: 6872 - protein, 120 aa, Artificial Sequence
  Synthetic construct
QVQLVESGGGVVQPGRSLRLSCAASGFTFSSYGMHWVRQAPGKGLEWVAVISYDGSNKYYADSVKGRFTISRDNSKNTLYLQMNSLRAEDTAVYYCAKAAPYGSGPFDYWGQGTLVTVSS

SEQ ID NO: 6873 - protein, 118 aa, Artificial Sequence; identical to SEQ ID NO: 5663
  Synthetic construct

SEQ ID NO: 6874 - protein, 121 aa, Artificial Sequence
  Synthetic construct
QVQLQESGPGLVKPSETLSLTCTVSGGSISEYHWSWIRQPPGKGLEWIGYIYYTGSTKYNPSLKSRVTISVDTSKNQFSLKLSSVTAADTAVYYCARDGRAYSYGYGMDVWGQGTTVTVSS

SEQ ID NO: 6875 - protein, 120 aa, Artificial Sequence
  Synthetic construct
EVQLVQSGAEVKKPGESLKISCKGSGYSFTSYWIGWVRQMPGKGLEWMGIIYPGDSDTRYSPSFQGQVTISADKSISTAYLQWSSLKASDTAMYYCARGLSSGWYWFDPWGQGTLVTVSS

SEQ ID NO: 6876 - protein, 127 aa, Artificial Sequence
  Synthetic construct
QVQLVQSGAEVKKPGASVKVSCKASGYTFTGYYMHWVRQAPGQGLEWMGWINPNSGGTNYAQKFQGRVTMTRDTSISTAYMELSRLRSDDTAVYYCAREPLLGFGELLVAGPWFDPWGQGTLVTVSS

SEQ ID NO: 6877 - protein, 122 aa, Artificial Sequence
  Synthetic construct
QVQLQESGPGLVKPSETLSLTCTVSGGYISNYYWSWIRQPPGKGLEWIGYIYHSGSTIYNPSLKSRVTMSVDTSKNQFSLKVTSVTAADTAVYYCARELIIASYSSGWFDYWGQGSLVIVSA

SEQ ID NO: 6878 - protein, 121 aa, Artificial Sequence
  Synthetic construct
QVQLVESGGGVVQPGRSLRLSCVASGFTFSTYGMHWVRQAPGKGLEWVTMISHDGGYKEYADSVKGRFTVSRDNSKKTVYLQMNSLRPDDTAFYYCAKEDAHVYDDYVYSWGQGTLVTVSS

SEQ ID NO: 6879 - protein, 119 aa, Artificial Sequence
  Synthetic construct
QVQLQESGPGLVKPSETLSLTCSVSGGSMSSYYWSWMRQSPGKGLEWLGYIYHSGSTNYNPSLKSPATISIDTSKNQFSLTLNAVTAADTAVYYCARARSYGGRAIDYWGQGILVTVSS

SEQ ID NO: 6880 - protein, 125 aa, Artificial Sequence
  Synthetic construct
QLQLQESGSGLVKPSQTLSLTCAVSGGSISSGGYSWSWIRQPPGKGLEWIGYIYHSGSTYYNPSLKSRVTISVDRSKNQFSLKLSSVTAADTAVYYCARVSRIGRYYGSGWFDPWGQGTLVTVSS

SEQ ID NO: 6881 - protein, 123 aa, Artificial Sequence
  Synthetic construct
EVQLVESGGGLVQPGRSLRLSCVVSGFNFDDYAMHWVRQAPGKGLEWVSGISRNSDRVGYVDSVKGRFTMSRDNAKNTLYLQMNSLRGEDTAFYYCAREYGSEAYLDTFVDNWGQGTLVTVSS

SEQ ID NO: 6882 - protein, 133 aa, Artificial Sequence
  Synthetic construct
QVQLQQWGAGLLKPSETLSLTCAVYGGSFSGYYWSWIRQPPGKGLEWIGEINHSGSTNYNPSLKSRVTISVDTSKNQFSLKLSSVTAADTAVYYCARGHRYCSSTSCYLSPRRYYYYYGMDVWGQGTTVTVSS

SEQ ID NO: 6883 - protein, 118 aa, Artificial Sequence
  Synthetic construct
QVQLVQSGAEVRTPGASVKLSCKGSGYTFANYPLHWVRQAPGQGLEWMAIINPSGGSTYYAQKFRGRITLTTDTSTSTMYMELSSLRSEDTAVYFCARDAVLYSLDYWGQGTLVTVSS

SEQ ID NO: 6884 - protein, 126 aa, Artificial Sequence
  Synthetic construct
QVQLVQSGAEVKKPGSSVKVSCKASGGTFSSYAISWVRQAPGQGLEWMGRIIPILGIANYAQKFQGRVTITADKSTSTAYMELSSLRSEDTAVYYCARVYCSSTSCYMLDDAFDIWGQGTMVTVSS

SEQ ID NO: 6885 - protein, 125 aa, Artificial Sequence
  Synthetic construct
QFQLVESGGGVVQPGRSLRLSCVVSGFTFNNFAIHWVRQAPGMGLEWVAVISDDGNNKDYADSVRGRFIISRDKSKNTVFLQMNSLRLEDTAIYYCASPVTDAGGGGFSAKTDYWGQGIVVSVST

SEQ ID NO: 6886 - protein, 119 aa, Artificial Sequence
  Synthetic construct
EVQLVESGGGLVQPGGSLRLSCVASGFPFSSYAMNWVRQAPGKGLEWVSYISIGSDTIYYADSVKGRFTISRDTAKNSLYLQMNSLRDEDTAVYYCARDLRTNWYFDLWGRGTLVTVSS

SEQ ID NO: 6887 - protein, 117 aa, Artificial Sequence
  Synthetic construct
EVQLVESGGGLVKPGGSLRLSCAASGFTFSSYSMNWVRQAPGKGLEWVSSISSSSSYIYYADSVKGRFTISRDNAKNSLYLQMNSLRAEDTAVYYCARDKWWSFDYWGQGTLVTVSS

SEQ ID NO: 6888 - protein, 120 aa, Artificial Sequence
  Synthetic construct
QVQLIQSESEVKKPGASVSISCKTSGYIFSLYALSWVRQAPGQRPEWMGWINPNTGNPTYAQGFTGRYVFSLDPTATTTYLHIASLQTADTAVYYCARDATNSWSPFDYWGQGTAVTVSS

SEQ ID NO: 6889 - protein, 122 aa, Artificial Sequence
  Synthetic construct
QVQLVQSGAEVKRPGASVKVSCKTSGFMFTSYYMHWVRQAPGQGLEWMGVINPSGGSATYAQKFQGRATVTRDTSTSTIYMELSSLRSEDAAVYYCARDWFTDSLSGYFYAWGQGTLVTVSS

SEQ ID NO: 6890 - protein, 123 aa, Artificial Sequence
  Synthetic construct
QVQLEQSGAEVKKPGSSVKVSCKASGGAFNSYAFSWLRQAPGQGPEWMGGFLTPLGSHYSQKFQGRVTITADESTSTVHMEMRSLRSEDTAIYYCAGEKHSGTYHNYHDLDVWGQGTTVTVSS

SEQ ID NO: 6891 - protein, 117 aa, Artificial Sequence
  Synthetic construct
QVQLQQWGAGLLKPSETLSLTCGVSGGSFSGDLWSWVRQSPTKGLEWIGEVKHSTTSFYNPSLKSRITMSVDTSKNQFSLKMNSVTAADTAVYYCASLTYTPRVQHWGQGTLVTVSS

SEQ ID NO: 6892 - protein, 124 aa, Artificial Sequence
  Synthetic construct
QVQLVQSGAEVKKPGASVKVSCKASGYTFDDYFMHWVRQAPGQGLEWMGWINPNSGGTNYAQTFQGRVTMTSDTSINTAYMELSRLRSDDTAVYYCARRVTYSNIIKPEYFQHWGQGTPVTVSS

SEQ ID NO: 6893 - protein, 122 aa, Artificial Sequence
  Synthetic construct
QVQLVESGGGVVQPEKSVRLSCAASGFIFSTSVMHWVRQAPGKGLEWVAGISFDGIREHYADSVKGRFTISRDNSKSSLYLQVNSLKIEDTALYYCTREAGSSGRAGYFDDWGQGTLVTVSS

SEQ ID NO: 6894 - protein, 121 aa, Artificial Sequence
  Synthetic construct
EVQLVQSGAEAKKPGESLKISCKGSGYTFTTSWIGWVRQMPGRGLEWMAVIYPGDSETIYSPSFQGQVTISADKSISTAYLQWSSLKASDTGMYYCARHLDSSGYHLLDYWGQGTLVTVSS

SEQ ID NO: 6895 - protein, 121 aa, Artificial Sequence
  Synthetic construct
QVQLVESGGGVVQPGRSLRLSCAASGFTFSTYGMHWVRQAPGKGLEWVAFLSYDETEKHYADSVKGRFTISRDTSKNTLYLEMKRLRAEDTAVYYCAKVGGSGYSYGYYYWGQGTLVTVSS

SEQ ID NO: 6896 - protein, 123 aa, Artificial Sequence
  Synthetic construct
QVQLQESGPGLVKPSETLSLTCTVSGGSISNHYWSWMRQPPGKGLDWIGYIYYSGTTHYNPSLQSRVTISVDMSKNQFSLKLNSVTAADTAVYYCARDREDVYNAYPGSLDLWGHGTLVTVSS

SEQ ID NO: 6897 - protein, 117 aa, Artificial Sequence
  Synthetic construct
EVQLLESGGNLVQPGGSLRLSCLASGFTFNSYDMAWVRQAPGKGLEWVSQVSGSSYDTYYTDSVKGRFTISRDNSKDTFYLEINSLRVDDTAIYYCARASMSGMDVWGQGTTVTVSS

SEQ ID NO: 6898 - protein, 118 aa, Artificial Sequence
  Synthetic construct
DVQLVESGGGSFAPGESLRLSCAASGFSFVTSWMHWVRQAPGKGLEWVSRINDDGTSTRIAESVKGRFSVSRDNARDMLYLQMDSLRVADTAVYYCARMGRWYEFDVWGQGVLVTVSS

SEQ ID NO: 6899 - protein, 124 aa, Artificial Sequence; identical to SEQ ID NO: 5439
  Synthetic construct

SEQ ID NO: 6900 - protein, 122 aa, Artificial Sequence
  Synthetic construct
QVQLVESGGGVVQPGRSLRLSCAASGFTFSSYAMHWVRQAPGKGLEWVAVISYDGSNKYYADSVKGRFTISRDNSKNTLYLQMNSLRAEDTAVYYCARAPKRGYSYGCLDYWGQGTLVTVSS

SEQ ID NO: 6901 - protein, 130 aa, Artificial Sequence
  Synthetic construct
QVQLVESGGGVVQPGRSLRLSCAASGFTFSSYGMHWVRQAPGKGLEWVAVIWYDGSNKYYADSVKGRFTISRDNSKNTLYLQMNSLRAEDTAVYYCARDHREYYYGSGSSYYYYYGMDVWGQGTTVTVSS

SEQ ID NO: 6902 - protein, 126 aa, Artificial Sequence
  Synthetic construct
EVQLVQSGAEVKKPGESLRISCKGSGYSFTSYWISWVRQMPGKGLEWMGRIDPSDSYTNYSPSFQGHVTISADKSISTAYLQWSSLKASDTAMYYCARLGYSSSWYDYYYYGMDVWGQGTTVTVSS

SEQ ID NO: 6903 - protein, 120 aa, Artificial Sequence
  Synthetic construct
QLQLQESGPGLVKPSETLSLTCTVSGGSISSSSYYWGWIRQPPGKGLEWIGSIYYSGSTYYNPSLKSRVTISVDTSKNQFSLKLSSVTAADTAVYYCARGAGSRRPFGYWGQGTLVTVSS

SEQ ID NO: 6904 - protein, 123 aa, Artificial Sequence
  Synthetic construct
EVQLLESGGGLVQPGGSLRLSCAASGFTFSSYAMSWVRQAPGKGLEWVSAISGSGGSTYYADSVKGRFTISRDNSKNTLYLQMNSLRAEDTAVYYCARRGSGSYYNRHYFDYWGQGTLVTVSS

SEQ ID NO: 6905 - protein, 124 aa, Artificial Sequence
  Synthetic construct
QVQLVQSGAEVKKPGASVKVSCKASGYTFTGYYMHWVRQAPGQGLEWMGWINPNSGGTNYAQKFQGRVTMTRDTSISTAYMELSRLRSDDTAVYYCARDRGGGSGRFRSSMSYWGQGTLVTVSS

SEQ ID NO: 6906 - protein, 118 aa, Artificial Sequence
  Synthetic construct
QVQLVQSGAEVKKPGASVKVSCKASGYSFTGYYMHWVRQAPGQGLEWMGWINPNNGGTKYAQKFQGRVTVSRDTSINAVYMELRLRADDTAVYYCARDPGSSWYGDFWGQGTLVTVSS

SEQ ID NO: 6907 - protein, 115 aa, Artificial Sequence
  Synthetic construct
QVQLQQWGAGLLKPSETLSLTCAVYGGSFTNHYWNWIRQSPGKGLEWIGEIKHNGITKYNPSLKSRVTISVDTSKNQFSLNLSSVTAADTAVYYCARGLGVGDFWGQGTLVTVSS

SEQ ID NO: 6908 - protein, 121 aa, Artificial Sequence
  Synthetic construct
QVQLVQSGAEVKKPGASVKVSCKTSGYIFTRYPLHWVRQAPGQRLEWMGWINTGNGDTKYSQKFHDRVTFTRDTAASIIYMELRTLTSEDTGVYYCARLQVGAMGNGLDAWGQGTTVTVSS

SEQ ID NO: 6909 - protein, 125 aa, Artificial Sequence
  Synthetic construct
EVQLLESGGGLVQPGGSLRLSCAASGFTFNNYAMSWVRQAPGKGLEWVSAISSSGGNINIADYVKGRFTISRDNSKNTVYLHMNSLRAEDTAAYYCAKDANSFIALPAGNGMDAWGQGTTVTVSS

SEQ ID NO: 6910 - protein, 132 aa, Artificial Sequence
  Synthetic construct
QVQLQESGPGLVKPSGTLSLTCAVSGGSISSSNWWSWVRQPPGKGLEWIGEIYHSGSTNYNPSLKSRVTISVDKSKNQFSLKLSSVTAADTAVYYCARARGLRGGVIAAAGFGQDQRRIDYWGQGTLVTVSS

SEQ ID NO: 6911 - protein, 126 aa, Artificial Sequence
  Synthetic construct
QLQLQESGPGLVKPSETLSLTCTVSGGSISSSSYYWGWIRQPPGKGLEWIGSIYYSGSTYYNPSLKSRVTISVDTSKNQFSLKLSSVTAADTAVYYCACKYSSSWYEMTVYYFDYWGQGTLVTVSS

SEQ ID NO: 6912 - protein, 123 aa, Artificial Sequence
  Synthetic construct
EVQLVESGGGLVQPGGSLRLSCSDSGFTFKTYPMHWVRQAPGRGLEPVSAISSNGDITYYADSVKGRFTISRDNSKNTMSLQMKSLRPADTAMYYCVKDLGWRSIAEDGGDCWGQGTLVTVSS

SEQ ID NO: 6913 - protein, 121 aa, Artificial Sequence; identical to SEQ ID NO: 45
  Synthetic construct

SEQ ID NO: 6914 - protein, 121 aa, Artificial Sequence
  Synthetic construct
QVQLQESGPGLVKPSETLSLTCTVSSGSLSTYYWSWLRQPPGKGLEWIGYSFHNGITKYNPSLKSRVTISVDTSKKQFSLKLSSVTAADTAVYYCARGGDYDSSGYAFDYWGQGTLVSVSS

SEQ ID NO: 6915 - protein, 119 aa, Artificial Sequence
  Synthetic construct
QVTLRESGPALVKPTQTLTLTCTFSGFSLSTSGMCVSWIRQPPGKALEWLALIDWDDDKYYSTSLKTRLTISKDTSKNQVVLTMTNMDPVDTATYYCARTGPSGAFDIWGQGTMVTVSS

SEQ ID NO: 6916 - protein, 124 aa, Artificial Sequence
  Synthetic construct
EVQLVESGGGLVQPGRSLRLSCAASGFTFDDYAMHWVRQAPGKGLEWVSGISWNSGSIGYADSVKGRFTISRDNAKNSLYLQMNSLRAEDTALYYCAKDSSGGVEYSSSEFDYWGQGTLVTVSS

SEQ ID NO: 6917 - protein, 124 aa, Artificial Sequence
  Synthetic construct
QVQLVQAGAEVKKPGDSVKVSCKASGYIFTGYYMHWVRQAPGQGLEWMGWIKPNGGATHYAQKFQGRVTMTRDTSITTAYMELSGLRHDDTAVYYCARGGEYCNNINCYEIDFWGQGTLVIVSS

SEQ ID NO: 6918 - protein, 121 aa, Artificial Sequence
  Synthetic construct
QVQLVQSGAEVKKPGSSVKVSCKASGDTFSQDGLGWVRQAPGQGLEWMGRISPMEGIANYPQRFRGRVTITADKSTNTFHMEVRRLTLEDTAVYYCARRKSGRFPYSFDQWGQGTLVTVSS

SEQ ID NO: 6919 - protein, 133 aa, Artificial Sequence
  Synthetic construct
EVQLVESGGGLVKPGGSLRLSCAASGFTFNTYRMNWVRQAPGKGLEWVSSISSTSSYIYYADSVKGRLTISRDNAKNSLFLQMNGLRAEDTAVYYCARDADLGRGYSYGYWLEFDYYNGMDVWGQGTTVTVSS

SEQ ID NO: 6920 - protein, 123 aa, Artificial Sequence; identical to SEQ ID NO: 5437
  Synthetic construct

SEQ ID NO: 6921 - protein, 117 aa, Artificial Sequence
  Synthetic construct
EVQLVESGGGLVQPGGSVRLSCAASGLTFIEYWMSWVRQAPGKGLEWVANIEKDGSEKNYVDSVKGRFTISRDNAQNTLFLQMNSLRAEDTAVYYCASGIGWLIDYWGQGTLVAVSS

SEQ ID NO: 6922 - protein, 117 aa, Artificial Sequence
  Synthetic construct
QVQLVESGGGVVQPGRSLRLSCAASGFTFSSYAMHWVRQAPGKGLEWVAVISYDGSNKYYADSVKGRFTISRDNSKNTLYLQMNSLRAEDTAVYYCAREGFGELFGWGQGTLVTVSS

SEQ ID NO: 6923 - protein, 129 aa, Artificial Sequence
  Synthetic construct
QVQLQQSGPGLVKPSQTLSLTCAISGDSVSSNSAAWNWIRQSPSRGLEWLGRTYYRSKWYNDYAVSVKSRITINPDTSKNQFSLQLNSVTPEDTAVYYCARTPRWLHRQRWYYYGMDVWGQGTTVTVSS

SEQ ID NO: 6924 - protein, 120 aa, Artificial Sequence
  Synthetic construct
EVQLVESGGGLVKPGGSLRLSCAASGFTFSSYSMNWVRQAPGKGLEWVSSISSSSSYIYYADSVKGRFTISRDNAKNSLYLQMNSLRAEDTAVYYCARSGLRYSGSYMAWGQGTLVTVSS

SEQ ID NO: 6925 - protein, 119 aa, Artificial Sequence
  Synthetic construct
EVQLVESGGGLVQPGGSLRLSCAASGFTVSSNYMSWVRQAPGKGLEWVSVIYSGGSTYYADSVKGRFTISRDNSKNTLYLQMNSLRAEDTAVYYCARGGGGRQRYIDYWGQGTLVTVSS

SEQ ID NO: 6926 - protein, 128 aa, Artificial Sequence; identical to SEQ ID NO: 5945
  Synthetic construct

SEQ ID NO: 6927 - protein, 123 aa, Artificial Sequence
  Synthetic construct
QARLVQSGAEVKKPGASVMVSCAANGYTFDKYYIHWIRQAPGQGLEYMGWINPETGDSHAAPAFQVRVTMTRDTSRFTAYMELSGLTNVDTAVYYCAKDFWGLGHFRFGMDVWGQGTPVTVSP

SEQ ID NO: 6928 - protein, 124 aa, Artificial Sequence
  Synthetic construct
QVQLVQSGAEMRKSGASVMVSCKASGYTFTDHYIHWVRQAPGQGLEWLGWINTNTGATNYAQKFQGRVTMTRDTSIRTAYMDLTRLKSDDTANYYCAREADIIVATTNAAFDIWGQGTMVTVSS

SEQ ID NO: 6929 - protein, 121 aa, Artificial Sequence
  Synthetic construct
EVQLVESGGGLIQPGGSLRLSCAASGFTVSNNYMSWVRQAPGKGLEWVSVIYSGGSTYYADSVKGRFTISRDNSKNTLSLQMNSLRAEDTAVYYCARAFVVRPAAIYFDYWGQGTLVTVSS

SEQ ID NO: 6930 - protein, 128 aa, Artificial Sequence
  Synthetic construct
QVQLVESGGGLVKPGGSLRLSCAASGFTFSDYYMSWIRQAPGKGLEWVSYISSSGSTIYYADSVKGRFTISRDNAKNSLYLQMNSLRAEDTAVYYCAREGLGYCSGGSCYHRGPTGYWGQGTLVTVSS

SEQ ID NO: 6931 - protein, 116 aa, Artificial Sequence
  Synthetic construct
EVQLVQSGAEVKKPGESLTISCQTSGHRFSTYFINWVRQKPGKGLEWMGRIDPSDSYTNYSPSVQGHVIISADKSINTAYLQWRSLRASDTGMYYCVMKFTGEFPWGQGTLVTVSA

SEQ ID NO: 6932 - protein, 118 aa, Artificial Sequence
  Synthetic construct
EVHIRHSGTDVKKPGDTIKISCRVSGLILSDYVVHWVKQAPQKGLEWVGLIDPEDGERMYAEKFEDRVTIIVDTSTETINMEVVSLRSDDTGVYYCVVGQKVGPDEEWGQGSLVIVSS

SEQ ID NO: 6933 - protein, 123 aa, Artificial Sequence
  Synthetic construct
QVQLVQSGAEVKGPGASVKVSCKVSGYSFITYDITWVRQAPGQGLEWMGWISTKSGDTRYAQNVQGRVTMTTDTSTNTAYMELRNLKSDDTALYYCARTTPRGWEQWPVLEYWGQGTLVTVSS

SEQ ID NO: 6934 - protein, 121 aa, Artificial Sequence
  Synthetic construct
EVQLVESGGGLVKPGGSLRLSCTASGFTFNNAWMSWVRQVPGKGLEWVGRLKGKAHGEQKEYGAFVNGRFTVSRDDSKNTLYLQMNSLQIEDTAVYYCTTDGILGAPFDFWGQGTLVTVSS

SEQ ID NO: 6935 - protein, 118 aa, Artificial Sequence
  Synthetic construct
QITLKESGPTLVKPTQTLTLTCTFSGFSLSTSGKGVGWVRQPPGKALEWLALIFWDDDKRYSPSLKSRLIITKDTSKNQVVLTMSNMDPVDTATYYCIHSLGNYDDFWGQGALVTVSS

SEQ ID NO: 6936 - protein, 123 aa, Artificial Sequence
  Synthetic construct
QVQLVQSGAEVKKPGASVKVSCKASGYTFTSYDINWVRQATGQGLEWMGWMNPNSGNTGYAQKFQGRVTMTRNTSISTAYMELSSLRSEDTAVYYCARLEYQRYLHYYGMDVWGQGTTVTVSS

SEQ ID NO: 6937 - protein, 117 aa, Artificial Sequence
  Synthetic construct
QVQLVESGGGVVQPGMSLRLSCAASGFTFSFSPMHWVRQAPGKGLEWVAVISDDGSNKDFADSVKGRFTISRDNSKNTLYLQMNSLRGDDTAVYYCVTPVVERRDYWGQGTLVTVSS

SEQ ID NO: 6938 - protein, 119 aa, Artificial Sequence
  Synthetic construct
EVQLVESGGGLIQPGGSLRLSCAASGFTVSSNYMSWVRQAPGKGLEWVSVIYSGGSTYYADSVKGRFTISRDNSKNTLYLQMNSLRAEDTAVYYCARDHYGSGSYYDYWGQGTLVTVSS

SEQ ID NO: 6939 - protein, 132 aa, Artificial Sequence
  Synthetic construct
EVQLVESGGGLVQPGGSLRLSCAASGFTFSSYWMSWVRQAPGKGLEWVANIKQDGSEKYYVDSVKGRFTISRDNAKNSLYLQMNSLRAEDTAVYYCARHLGYCSGGSCYRRGRYYYYGMDVWGQGTTVTVSS

SEQ ID NO: 6940 - protein, 127 aa, Artificial Sequence; identical to SEQ ID NO: 5678
  Synthetic construct

SEQ ID NO: 6941 - protein, 122 aa, Artificial Sequence
  Synthetic construct
QVQLVQSGAEVKKPGSSVKVSCKASGGTFSSYAISWVRQAPGQGLEWMGGIIPIFGTANYAQKFQGRVTITADESTSTAYMELSSLRSEDTAVYYCARVYFRYTDADAFDIWGQGTMVTVSS

SEQ ID NO: 6942 - protein, 125 aa, Artificial Sequence
  Synthetic construct
QVQLQESGPGLVKPSQTLSLTCTVSGGSVNSGSDYWSWIRQRPGKGLEWIGYIYYSGTTNYNPSLKSRVTMSMDTSKNQFSLKVTSVTAADTAVYYCARAVDSYGSGSYGLFDPWGQGALVTVSS

SEQ ID NO: 6943 - protein, 120 aa, Artificial Sequence
  Synthetic construct
QVQLVESGGGVVQPGRSLRLSCSASGFTFSSYGMHWVRQPPGKGLEWVAVIWYDVKNTDYVDSVKGRFTISRDNSKNMLYLQMNSLRAEDTAVYFCARDGGDYVFYFDSWGQGTLVTVSS

SEQ ID NO: 6944 - protein, 127 aa, Artificial Sequence
  Synthetic construct
QVQLVESGGGVVQPGRSLRLSCAASGFTFSSYGMHWVRQAPGKGLEWVAVIWYDGSNKYYADSVKGRFTISRDNSKNTLYLQMNSLRAEDTAVYYCARGAQYNWNDADYYYYGMDVWGQGTTVTVSS

SEQ ID NO: 6945 - protein, 126 aa, Artificial Sequence
  Synthetic construct
QVQLQESGPGLVKPSQTLSLTCTVSGGSISSGSYYWSWIRQPAGKGLEWIGRIYTSGSTNYNPSLKSRVTISVDTSKNQFSLKLSSVTAADTAVYYCARGYCSSTSCYRTNWFDPWGQGTLVTVSS

SEQ ID NO: 6946 - protein, 118 aa, Artificial Sequence
  Synthetic construct
EAQLVESGGDLKKPGGSLRLSCVASGFSSSDAWMSWVRQAPGKGLEWVGRIRSKKDGGTIDYAATVTGRFTISRDESQNIFYLQMNSLRIEDTGIYYCGRGGHYFDPWGQGTLVTVSS

SEQ ID NO: 6947 - protein, 119 aa, Artificial Sequence; identical to SEQ ID NO: 5927
  Synthetic construct

SEQ ID NO: 6948 - protein, 123 aa, Artificial Sequence
  Synthetic construct
QVHLEQSGAEVKEPGSSVQVSCRVSGASFSSHAINWLRQAPGQGLEWMGAIIPLYGTADYAESLQDRLTITVDDSTTTAYMELSSLKSDDTAVYYCARATSGYTYGVVGFAPWGQGTLITVSS

SEQ ID NO: 6949 - protein, 121 aa, Artificial Sequence
  Synthetic construct
QVQLQESGPGLVKPSETLSLTCTVSGGSISSYYWSWIRQPAGKGLEWIGRIYTSGSTNYNPSLKSRVTMSVDTSKNQFSLKLSSVTAADTAVYYCARGAVRGVFNNWFDPWGQGTLVTVSS

SEQ ID NO: 6950 - protein, 123 aa, Artificial Sequence; identical to SEQ ID NO: 5437
  Synthetic construct

SEQ ID NO: 6951 - protein, 126 aa, Artificial Sequence
  Synthetic construct
EVQLLDSGGGSVQAGGSLRLSCAASGFTFSSYAMSWVRQAPGKGLEWVSSISTIGDVTYYADSVKGQFTVSRDNSKNTLYLEMNSLRVEDTAIYYCAKKGIIINSEVITHDAFDAWGQGTMVTVSS

SEQ ID NO: 6952 - protein, 130 aa, Artificial Sequence
  Synthetic construct
QVQLQESGPGLVKPSQTLSLTCTVSGGSISSGDYYWSWIRQPPGKGLEWIGYIYYSGSTYYNPSLKSRVTISVDTSKNQFSLKLSSVTAADTAVYYCAREKVSLYYDSSGYLGDNWFDPWGQGTLVTVSS

SEQ ID NO: 6953 - protein, 126 aa, Artificial Sequence
  Synthetic construct
QVQLVESGGGVVLPGRSLRLSCAASGFSFSTYGMHWVRQAPGKGLEWVAVIWYDGSYKLYEDSVRGRFTISRDNSRNTLYLQMNSLRADDTAVYYCARDLQQLVRGYFDSYGVDVWGRGTTVTVSS

SEQ ID NO: 6954 - protein, 120 aa, Artificial Sequence
  Synthetic construct
EVQLVESGGGLVKPGGSLRLSCAASGFTFSSYSMNWVRQAPGKGLEWVSSISSSSSYIYYADSVKGRFTISRDNAKNSLYLQMNSLRAEDTAVYYCARDYRGYGQQLGYWGQGTLVTVSS

SEQ ID NO: 6955 - protein, 126 aa, Artificial Sequence; identical to SEQ ID NO: 5543
  Synthetic construct

SEQ ID NO: 6956 - protein, 124 aa, Artificial Sequence
  Synthetic construct
QVQLVQSGAEVKKPGASVKVSCKASGYTFTSYYMHWVRQAPGQGLEWMGIINPSGGSTSYAQKFQGRVTMTRDTSTSTVYMELSSLRSEDTAVYYCARAPKRDPNYYYYGMDVWGQGTTVTVSS

SEQ ID NO: 6957 - protein, 118 aa, Artificial Sequence
  Synthetic construct
QVQLVQSGGGVVQPGGSLRLSCAASGFTFNGMHWVRQAPGKGLEWVAVISYDGSNRDYTDSVKGRFSISRDKSKNTVYLQMESLRAEDTAVYYCATPIAAGGSRNDHWGQGTLVIVSS

SEQ ID NO: 6958 - protein, 128 aa, Artificial Sequence
  Synthetic construct
QVLLVQSGAEVKKAGAAVKVSCKASGYTFTKSGVSWVRQAPGQGLEWMGWINSHNGNTNYKQKFQGRVTMTTDTSTSTAYLELRSLRSDDTAVYYCARVLTGDCTTVNCPPGYWFDPWGQGTLVTVSS

SEQ ID NO: 6959 - protein, 119 aa, Artificial Sequence
  Synthetic construct
QVQLVQSGAEVKKPGASVKVSCKASGYTFTSYGISWVRQAPGQGLEWMGWISAYNGNTNYAQKLQGRVTMTTDTSTSTAYMELRSLRSDDTAVYYCARQRYSNREVRPWGQGTLVTVSS

SEQ ID NO: 6960 - protein, 126 aa, Artificial Sequence
  Synthetic construct
EVQLVESGGGLVQPGKSLRLSCEASGFTFDQYAMHWVRQFPGKGLEWVAGISWKSDSIGYADSVKGRFSISRDNAKNSLYLQMDSLRAEDTALYYCVKDIVTAAIGGAAGGGMDVWGQGTTVTVSS

SEQ ID NO: 6961 - protein, 115 aa, Artificial Sequence
  Synthetic construct
EVQLVESGGGLVQPGGSLRLSCAASGFTFSRYWMNWVRQAPGKGLEWVANIKQDGSEKHVVDSMKGRFTISRDNAKNSLYLQMNSLRAEDTAIYYCSGGPRLAYWGRGTLVTVSS

SEQ ID NO: 6962 - protein, 131 aa, Artificial Sequence
  Synthetic construct
EEQLVQSGAEVKKPGDSLKISCKGSGYSFTTYWIGWVRQMPGKGLEWMGVIYLGDSDTRYSPSFQGQVTISADKSTGIAYLQWSSLKASDTAVYYCARAGYSGYYDRQGGYYYYYYGMDVWGQGTTVTVSS

SEQ ID NO: 6963 - protein, 121 aa, Artificial Sequence
  Synthetic construct
QVRLQESGPGLVKPSETLSLTCTVSGGSTSSYYWNWIRQSSVKGLEWIAYINDSGATNYNPSLKSRITISIDRSKKQISLKLTSVTAADTAVYYCARDYGEWEQYGTFPIWGQGTMVTVSS

SEQ ID NO: 6964 - protein, 118 aa, Artificial Sequence
  Synthetic construct
EVQLVESGGGLVQPGGSLRLSCAASGFTFSNFWMSWVRQTPGKGLEWLATIKDDGSEKVYVDSVKGRFSISRDNPRNSLFLQMNNLRAEDTAVYYCVRIVNGDKSFHWGQGAAVTVSS

SEQ ID NO: 6965 - protein, 125 aa, Artificial Sequence
  Synthetic construct
QVQLVQSGAEVKKPGASVKVSCKASGYTFTSYGISWVRQAPGQGLEWMGWISAYNGNTNYAQKLQGRVTMTTDTSTSTAYMELRSLRSDDTAVYYCARDVEMATIAGSGRWFDPWGQGTLVTVSS

SEQ ID NO: 6966 - protein, 126 aa, Artificial Sequence
  Synthetic construct
QVQLVESGGGVVQPGRSLRLSCAASGFTFSSYGMHWVRQAPGKGLEWVAVIWYDGSNKYYADSVKGRFTISRDNSKNTLYLQMNSLRAEDTAVYYCARERGRRDGYKYYYYGMDVWGQGTTVTVSS

SEQ ID NO: 6967 - protein, 131 aa, Artificial Sequence
  Synthetic construct
EVQLVESGGGLVKPGGSLRLSCAASGFTFSSYSMNWVRQAPGKGLEWVSSISSSSSYIYYADSVKGRFTISRDNAKNSLYLQMNSLRAEDTAVYYCAREAGYCSSTSCRWYVPRPQYTDYWGQGTLVTVSS

SEQ ID NO: 6968 - protein, 121 aa, Artificial Sequence
  Synthetic construct
QVQLVQSGAEVKKPGSSVKVSCKASGGTFSSYAISWVRQAPGQGLEWMGGIIPIFGTANYAQKFQGRVTITADESTSTAYMELSSLRSEDTAVYYCARAGKQLVQYYFDYWGQGTLVTVSS

SEQ ID NO: 6969 - protein, 122 aa, Artificial Sequence
  Synthetic construct
QVQLVQSGAEVKKPGASVKVSCKASGYTFTSYGISWVRQAPGQGLEWMGWISAYNGNTNYAQKLQGRVTMTTDTSTSTAYMELRSLRSDDTAVYYCARVRAAVAQRRYFDYWGQGTLVTVSS

SEQ ID NO: 6970 - protein, 121 aa, Artificial Sequence; identical to SEQ ID NO: 6005
  Synthetic construct

SEQ ID NO: 6971 - protein, 127 aa, Artificial Sequence; identical to SEQ ID NO: 5678
  Synthetic construct

SEQ ID NO: 6972 - protein, 125 aa, Artificial Sequence
  Synthetic construct
QITLKESGPTRVRPTQPLTLTCTFSGFSLDTSGVGVAWIRQPPGEALEWLAVIYWDDDKRFRPSLKSRLTIAKDTSKNQVVLTMSNMDPGDTGTYYCAHRRAEGGNWDGGCLDVWGPGTLVTVSS

SEQ ID NO: 6973 - protein, 123 aa, Artificial Sequence
  Synthetic construct
QVQLVESGGGVVQPGRSLRLSCAASGFIFSSYAMHWVRQAPGKGLEWVAVISYDGRNKYYADSVKGRFTISRDNSKNTLYLQMNSLRAEDTAVYYCARPTLPRYFDWSGHDYWGQGTLVTVSS

SEQ ID NO: 6974 - protein, 128 aa, Artificial Sequence
  Synthetic construct
LVQLQESGPGLVKPSETLSLTCTVSGGSISGPSWTWIRQPPGKTLEWIGYINYSGTTDSNPSLKSRVTISIDTSKNQFSLNLTSVTAADAAVYYCARGRMIILGEVIVPSRNYAMDVWGQGTTVTVSS

SEQ ID NO: 6975 - protein, 123 aa, Artificial Sequence; identical to SEQ ID NO: 5437
  Synthetic construct

SEQ ID NO: 6976 - protein, 129 aa, Artificial Sequence; identical to SEQ ID NO: 6653
  Synthetic construct

SEQ ID NO: 6977 - protein, 131 aa, Artificial Sequence
  Synthetic construct
QVQLQESGPGLVKPSGTLSLTCAVSGGSISSSNWWSWVRQPPGKGLEWIGEIYHSGSTNYNPSLKSRVTISVDKSKNQFSLKLSSVTAADTAVYYCARDRYYDFWSGIRTTGKRNYGMDVWGQGTTVTVSS

SEQ ID NO: 6978 - protein, 119 aa, Artificial Sequence
  Synthetic construct
EVQLVESGGGLVKPGGSLRLSCAASGFTFSSYSMNWVRQAPGKGLEWVSSISSSSSYIYYADSVKGRFTISRDNAKNSLYLQMNSLRAEDTAVYYCAREGGYSGPMGGWGQGTLVTVSS

SEQ ID NO: 6979 - protein, 126 aa, Artificial Sequence
  Synthetic construct
EVQLVESGGGVVQPGRSLRLSCAASGFNFDDYAMHWVRQPPGKGLEWVSGITWNSGSIGYADSVKGRFTISRDNAKNSLYLQMNSLRSEDTALYYCAKDILAYCTSTTCYGGFDYWGQGALVTVSS

SEQ ID NO: 6980 - protein, 124 aa, Artificial Sequence
  Synthetic construct
EVQLLESGGGLVQPGGSLRLSCAPSGFTFSAYVMSWVRQAPGKGLEWVSSISNSGGDIYYADSVKGRFTISRDNSKSTLYLQMNSLRAEDTAVYYCAKDHRVSVAASPEYFQHWGQGSLVTVSS

SEQ ID NO: 6981 - protein, 124 aa, Artificial Sequence
  Synthetic construct
EVQLVESGGGLVKPGGSLRLSCAASEFTFSNAWMSWVRQAPGKGLEWVGRIKSKTDGGTTDYAAPVKGRFTISRDDSKNTLYLQMNSLKTEDTAVYYCTHRSSTVGVPGAIDYWGQGTLVTVSS

SEQ ID NO: 6982 - protein, 127 aa, Artificial Sequence
  Synthetic construct
EVQLLESGGGLVQPGGSLRLSCAASGFTFSSYAMSWVRQAPGKGLEWVSAISGSGGSTYYADSVKGRFTISRDNSKNTLYLQMNSLRAEDTAVYYCAKGGNFWSRGALYYYYGMDVWGQGTTVTVSS

SEQ ID NO: 6983 - protein, 127 aa, Artificial Sequence
  Synthetic construct
EVQLVESGGGLVQPGGSLRLSCAASGFSFRDYAMHWVRQAPGKGLEHVAVIASNLYNTYYANSVKGRFTISRDNSKNTLYLQMDTLRTEDMAVYYCATLGGPFWNGYMTQYHGVDVWGQGTTVTVSS

SEQ ID NO: 6984 - protein, 119 aa, Artificial Sequence
  Synthetic construct
EVQLVESGGALIQPGGSLRLSCAVSGFSVSIDYMNWVRQAPGKGLEWVSVLYSGGGTYYADSVKGRFTISRDNSRNTLYLQMNSLRGEDTAMYYCAREISGSWYSFDYWGQGTLVTVSS

SEQ ID NO: 6985 - protein, 122 aa, Artificial Sequence
  Synthetic construct
QVQLVQSGAEVKKPGASVKVSCKASGYTFTSYDINWVRQATGQGLEWMGWMNPNSGNTGYAQKFQGRVTMTRNTSISTAYMELSSLRSEDTAVYYCARVVRWGSSSSVGGYWGQGTLVTVSS

SEQ ID NO: 6986 - protein, 120 aa, Artificial Sequence
  Synthetic construct
EVQLVESGGGLVKPGGSLRLSCAASGFTFSSYSMNWVRQAPGKGLEWVSSISSSSSYIYYADSVKGRFTISRDNAKNSLYLQMNSLRAEDTAVYYCARDERWLPYYFDYWGQGTLVTVSS

SEQ ID NO: 6987 - protein, 121 aa, Artificial Sequence
  Synthetic construct
EVHLVESGGALVQPGRSLRLSCAASRFTFDDYAMHWVRQAPGKGLEWVSSISWNSDNIVYADSVKGRFTISRDNAKNSLYLQMNSLRVEDTALYYCAKGGNLIISSYFEHWGQGTLVSVSS

SEQ ID NO: 6988 - protein, 120 aa, Artificial Sequence
  Synthetic construct
QLHLQESGPGLVKPSETLSLTCSVSRGSISNGGYYWGWIRQPPEKRLQWLGSFYYTGTTYYNPALNSRVTISADPSKNQFSLKVTSVTAADTAVYYCASIMYGGNIVESWGQGTLVTVFS

SEQ ID NO: 6989 - protein, 117 aa, Artificial Sequence
  Synthetic construct
EVQLVESGGDLVQPGGSLRLSCVGSGYSFSRYWMHWVRQVPGKGLVWVSRLNEDGSVTDYADSVKGRFTISRDNAKNTLYLQMISLRADDTAVYYCARDLRGASDSWGQGTLVTVSS

SEQ ID NO: 6990 - protein, 120 aa, Artificial Sequence
  Synthetic construct
QVQLVESGGGLVKPGGSLRLSCAASGFTFSDYYMSWIRQAPGKGLEWVSYISSSSSYTNYADSVKGRFTISRDNAKNSLYLQMNSLRAEDTAVYYCARETYGSGREFDIWGQGTMVTVSS

SEQ ID NO: 6991 - protein, 125 aa, Artificial Sequence
  Synthetic construct
EVQLLESGGGLVQPGTSLRLSCAASGFTFTSYAMNWVRQAPGKGLEWVSGISFSDGSTYYADSVKGRFTIYRDNSKNTLYLQMNSLRPEDTAVYYCAKESPLVIGADGSASLVNMNVWGQGTTVT

SEQ ID NO: 6992 - protein, 125 aa, Artificial Sequence; identical to SEQ ID NO: 5711
  Synthetic construct

SEQ ID NO: 6993 - protein, 126 aa, Artificial Sequence
  Synthetic construct
QVQLVESGGGVVQPGRSLRLSCAASGFTFSSYGMHWVRQAPGKGLEWVAVIWYDGSNKYYADSVKGRFTISRDNSKNTLYLQMNSLRAEDTAVYYCARDRRYPIAGQKKGYGMDVWGQGTTVTVSS

SEQ ID NO: 6994 - protein, 122 aa, Artificial Sequence
  Synthetic construct
QVQLQESGPGLVKPSQTLSLTCTVSGGSISSGTYYWTWIRQPAGKGLEWIGHIYATWSADYNPSLKSRVTISLDTSKNQFSLKLSSVTAADTAVYYCAGGITGTRHYGVDVWGQGTTVTVSS

SEQ ID NO: 6995 - protein, 128 aa, Artificial Sequence
  Synthetic construct
QITLKESGPTLVKPTQTLTLTCTFSGFSLSTSGVGVGWIRQPPGKALEWLALIYWDDDKRYSPSLKSRLTITKDTSKNQVVLTMTNMDPVDTATYYCAHRMAPPTPYNPRTNNWFDPWGQGTLVTVSS

SEQ ID NO: 6996 - protein, 125 aa, Artificial Sequence
  Synthetic construct
QVQLVQSGAEVRKPGASAKVSCKTSGYTFAGHYLHWVRQAPGQGLESMGWINPTSGGTYYPQKFQGRVTMTRDTSINTAYMELSRLISDDTAMYYCAKGGPTGNLNIGSDAFDFWGQGTMVTVSS

SEQ ID NO: 6997 - protein, 120 aa, Artificial Sequence
  Synthetic construct
QVQLVESGGGVGQPGGSLRLSCAASGFTFSSYAMHWVRHVPGKGLEWVAIISYEGNRKYYADSVKGRFTISRDNSKNTLYLQLDTLRPEDTAVYYCARAPGGGDWYINLWGRGTLVTVSS

SEQ ID NO: 6998 - protein, 128 aa, Artificial Sequence
  Synthetic construct
QVQLVESGGGVVQPGRSLRLSCAASGFTFSSYAMHWVRQAPGKGLEWVAVISYDGSNKYYADSVKGRFTISRDNSKNTLYLQMNSLRAEDTAVYYCARDRRGYSYASPGYYYYGMDVWGQGTTVTVSS

SEQ ID NO: 6999 - protein, 121 aa, Artificial Sequence
  Synthetic construct
QVQLVESGGGVVQPGRSLRLSCAASGFTFSSYGMHWVRQAPGKGLEWVAVISYDGSNKYYADSVKGRFTISRDNSKNTLYLQMNSLRAEDTAVYYCAKDRGRYYYYGMDVWGQGTTVTVSS

SEQ ID NO: 7000 - protein, 122 aa, Artificial Sequence
  Synthetic construct
EMNLLESGGGLVQPGGSLRLSCTASGFTFRDYAMSWVRQAPGKGLEWVAGIIGGGERTYNAESVKDRFFISRDNSKSTLYLEMNSLRAEDTALYYCAKDLRAADPYWYFDLWGRGTLVTISS

SEQ ID NO: 7001 - protein, 119 aa, Artificial Sequence; identical to SEQ ID NO: 6657
  Synthetic construct

SEQ ID NO: 7002 - protein, 126 aa, Artificial Sequence
  Synthetic construct
QVQLVESGGGVVQPGRSLRLSCAASGFTFSSYAMHWVRQAPGKGLEWVAVISYDGSNKYYADSVKGRFTISRDNSKNTLYLQMNSLRAEDTAVYYCARGGTMVRGVKGGVLGMDVWGQGTTVTVSS

SEQ ID NO: 7003 - protein, 126 aa, Artificial Sequence
  Synthetic construct
QVQLVQSGAEVKKPGASVKVSCKASGYTFTSYAMHWVRQAPGQRLEWMGWINAGNGNTKYSQKFQGRVTITRDTSASTAYMELSSLRSEDTAVYYCARVRDCSSTSCYKRGAFDIWGQGTMVTVSS

SEQ ID NO: 7004 - protein, 121 aa, Artificial Sequence
  Synthetic construct
QLQLQESGPGLLKPSDTLSLTCSVSGDSLRTLYWTWLRQPPGKGLEWIGYVLHSGSANYNPSLKSRVTISVDASKKQFFLRLTAVTAADTAVYYCARGGDYDSSGYAFDYWGQGNLVTVSS

SEQ ID NO: 7005 - protein, 118 aa, Artificial Sequence
  Synthetic construct
EVRLVESGGGLIQPGGSLRLSCAVSGFTVSDNYMHWVRQAPGKGLEWVSTLYLAGSTSYADSVRGRFTISRDDSKNTLDLQMNSLRAEDTAVYYCAASLSRRKGIDYWGQGTPVTVSS

SEQ ID NO: 7006 - protein, 128 aa, Artificial Sequence
  Synthetic construct
QVQVVESGGDVVQPGKSLRLSCAASGFNFGVYGMHWVRQAPGRGLEWVAVIWSDGSNKYYGDSMKGRFTISRDNSKKMLYLQMDSLRAEDTAVYYCAPGGHCFSNDCRRGGLGGMDVWGQGTTVTVSS

SEQ ID NO: 7007 - protein, 116 aa, Artificial Sequence
  Synthetic construct
QVQLEESGGGVVQPGRSLRLSCVGSGFLFNNYPMSWVRQTPAKGLEWVAIMAGDGQSVYGDSIRGRFTISRDDSKNTLYLEVNSLRPEDTGVYYCARGDIRGSGYWGRGTQVIVSS

SEQ ID NO: 7008 - protein, 123 aa, Artificial Sequence
  Synthetic construct
QVQLVESGGGVVQPGRSLRLSCAASGFTFSSYGMHWVRQAPGKGLEWVAVIWYDGSNKYYADSVKGRFTISRDNSKNTLYLQMNSLRAEDTAVYYCARDRMRAQYYYYGMDVWGQGTTVTVSS

SEQ ID NO: 7009 - protein, 121 aa, Artificial Sequence; identical to SEQ ID NO: 6878
  Synthetic construct

SEQ ID NO: 7010 - protein, 134 aa, Artificial Sequence
  Synthetic construct
QVQLQQWGAGLLKPSETLSLTCAVYGGSFSGYYWSWIRQPPGKGLEWIGEINHSGSTNYNPSLKSRVTISVDTSKNQFSLKLSSVTAADTAVYYCARPMKYYYGSGREHGPRSKNYYYYGMDVWGQGTTVTVSS

SEQ ID NO: 7011 - protein, 123 aa, Artificial Sequence
  Synthetic construct
EVQLVESGGGLVKPGGSLRLSCAASEFTLSSYSMTWVRLAPGKGLEWVSSISSSSIRIYYADSVKGRFAISRDNAKNSLFLQLNSLRAEDTAVYYCARCGGGACNQAGAMDVGGHGTTVSISS

SEQ ID NO: 7012 - protein, 119 aa, Artificial Sequence
  Synthetic construct
QVQLEESGGGLVKPGRSLRLSCAASGFTFRDYYMYWFRQAPGQGLEWVSYISGDGLYTNHVESLWGRITISRDNAKQVLYLEMDSLRAEDTAVYYCARKGYSHGYVDYWGRGALVTVSS

SEQ ID NO: 7013 - protein, 127 aa, Artificial Sequence
  Synthetic construct
QVTLKESGPTLVKPTQTLTLTCTFSGFSLSTNGVGVGWIRQPPGKALEWLALIYWDDDKRYNPSLKSRLTITKDISKNQVVLTMTNLDPVDTATYYCARRRGRLSTGSYYGRPFDYWGQGTLVTVSS

SEQ ID NO: 7014 - protein, 126 aa, Artificial Sequence
  Synthetic construct
QVQLVQSGAEVKKPGSSVKVSCKASGGTFSSYAISWVRQAPGQGLEWMGRIIDIVGLANYAQKFQGRVTITADKSTSTAYMELSSLRSEDTAVYYCARDGGYCSRTSCYRYGMDVWGQGTTVTVSS

SEQ ID NO: 7015 - protein, 124 aa, Artificial Sequence; identical to SEQ ID NO: 5439
  Synthetic construct

SEQ ID NO: 7016 - protein, 122 aa, Artificial Sequence
  Synthetic construct
QVQLQESGPGLVKPSQTLSLTCTVSGGSISSGGYYWSWIRQHPGKGLEWIGYIYYSGSTYYNPSLKSRVTISVDTSKNQFSLKLSSVTAADTAVYYCARSTRRAGFDAFDIWGQGTMVTVSS

SEQ ID NO: 7017 - protein, 123 aa, Artificial Sequence; identical to SEQ ID NO: 5437
  Synthetic construct

SEQ ID NO: 7018 - protein, 116 aa, Artificial Sequence
  Synthetic construct
EVHLVESGGRLVQRGGSVTLSCAASGFSFSAYSMNWVRQAPGKGLEWISFISNTGVTTKFADSVEGRFIIYRDNDKNLVSLQMDSLRDDDTGVYYCATDGGTFRSWGQGTLVTVSS

SEQ ID NO: 7019 - protein, 123 aa, Artificial Sequence
  Synthetic construct
EVQLVESGGGLVQPGGSLRLSCAASGFTFSSYWMHWVRQAPGKGLVWVSGINTDGSTTRYADSVKGRFSISRDNAKNTLYLQVNSLRAEDTAVFYCTRGGYSADDWVPGIDYWGQGTQVTVSS

SEQ ID NO: 7020 - protein, 125 aa, Artificial Sequence
  Synthetic construct
EVQLVESGGGLVQPGGSLRLSCAASGFTVSDYYMDWVRQAPGEGLEWVGRTTDKPGGSTTEYAASVKGRFTMSRDDSKNSLYLQMNSLTTEDTAVYYCARRYCIRSRCPNAFDMWGQGTMVTVSS

SEQ ID NO: 7021 - protein, 125 aa, Artificial Sequence; identical to SEQ ID NO: 5711
  Synthetic construct

SEQ ID NO: 7022 - protein, 125 aa, Artificial Sequence; identical to SEQ ID NO: 5711
  Synthetic construct

SEQ ID NO: 7023 - protein, 127 aa, Artificial Sequence
  Synthetic construct
QVQLQESGPGLVKPSQTLSLTCTVSGGSISSGDYYWSWIRQPPGKGLEWIGYIYYSGSTYYNPSLKSRVTISVDTSKNQFSLKLSSVTAADTAVYYCARDRLLWFGSHYYYYGMDVWGQGTTVTVSS

SEQ ID NO: 7024 - protein, 124 aa, Artificial Sequence
  Synthetic construct
QVQLVQSGAEVKKPGASVKVSCKASGYTFTSYYMHWVRQAPGQGLEWMGIINPSGGSTSYAQKFQGRVTMTRDTSTSTVYMELSSLRSEDTAVYYCARDASPEYSSGWSPYDYWGQGTLVTVSS

SEQ ID NO: 7025 - protein, 120 aa, Artificial Sequence
  Synthetic construct
QVQLVQSGAEVKRPGASVKVSCKASGYTFTNSAMNWVRQAPGQRLEWMGWINTANDNTKYSQKFQGRITITRDTSATTAYLELSRLRDEDTAMYYCATRPGMAVAGFDFWGQGTLVTVSS

SEQ ID NO: 7026 - protein, 118 aa, Artificial Sequence
  Synthetic construct
QVQLQESGPGLVKPSETLSLTCTVSGASVNSHHWSWIRQPPGKGLEWIGYVWKSGITNYNPSLKSRVTISADTANDQYSLRLSSVTAADTGVYYCAIYAEGQGGRGSWGQGTLVTVSS

SEQ ID NO: 7027 - protein, 129 aa, Artificial Sequence
  Synthetic construct
QVQLRQWGAGLLKPSETLSLTCAVYGGSFSGHYWSWIRQPPGKGLEWIGEINHSGTTNYNPSLKSRVSISVDTSKNQFSLILRSLTAADTAVYYCARRWGYRSVYTWTVAVTPAHFDYWGQGTLVTVSS

SEQ ID NO: 7028 - protein, 117 aa, Artificial Sequence
  Synthetic construct
QVQLVESGGGVVQPGRSLRLSCAASGFTFSSYAMHWVRQAPGKGLEWVAVISYDGSNKYYADSVKGRFTISRDNSKNTLYLQMNSLRAEDTAVYYCARGSGFLFDYWGQGTLVTVSS

SEQ ID NO: 7029 - protein, 125 aa, Artificial Sequence
  Synthetic construct
EVQLVQSGTEVKKPGESLTISCKGSGYSFTSYWIGWVRQVPGKGLEWMGRIDPSDSYTNYSPSFQGHVTISADKSISTAYLQWSSLKASDTAIYYCARHAAAGSTEIGASSLGYWGRGTLVTVSS

SEQ ID NO: 7030 - protein, 119 aa, Artificial Sequence
  Synthetic construct
QVQLVQSGAEVKKPGASVKVSCKASGYTFTGYYMHWVRQAPGQGLEWMGWINPNSGGTNYAQKFQGRVTMTRDTSISTAYMELSRLRSDDTAVYYCARGLRRELVKDYWGQGTLVTVSS

SEQ ID NO: 7031 - protein, 124 aa, Artificial Sequence; identical to SEQ ID NO: 6211
  Synthetic construct

SEQ ID NO: 7032 - protein, 123 aa, Artificial Sequence
  Synthetic construct
EVQLLESGGGLVQPGGSLRLSCAASGFTFSSYAMSWVRQAPGKGLEWVSAISGSGGSTYYADSVKGRFTISRDNSKNTLYLQMNSLRAEDTAVYYCAKDLVFGGSYRGIFDYWGQGTLVTVSS

SEQ ID NO: 7033 - protein, 126 aa, Artificial Sequence
  Synthetic construct
QLQLQESGPGLVKPSETLSLTCTVSGGSISSSSYYWGWIRQPPGKGLEWIGSIYYSGSTYYNPSLKSRVTISVDTSKNQFSLKLSSVTAADTAVYYCARQAAIYCSSTSCHQFDYWGQGTLVTVSS

SEQ ID NO: 7034 - protein, 123 aa, Artificial Sequence
  Synthetic construct
QVQLVQSGAEVKKPGASVKVSCKASGYTFTSYDINWVRQATGQGLEWMGWMNPNSGNTGYAQKFQGRVTMTRNTSISTAYMELSSLRSEDTAVYYCASRILLPNYYYYGMDVWGQGTTVTVSS

SEQ ID NO: 7035 - protein, 117 aa, Artificial Sequence
  Synthetic construct
QVQLVESGGDLVRPGGSLRLSCAAPGFSLNDYFMGWIRQVPGKGLEWVSYIGNGDRVIWYADSLKGRFTVSWDNIKNSLFLQMNTLRADDTAVYYCTAISHSSIDYWGQGTLVTVSS

SEQ ID NO: 7036 - protein, 124 aa, Artificial Sequence; identical to SEQ ID NO: 5592
  Synthetic construct

SEQ ID NO: 7037 - protein, 119 aa, Artificial Sequence; identical to SEQ ID NO: 5927
  Synthetic construct

SEQ ID NO: 7038 - protein, 125 aa, Artificial Sequence
  Synthetic construct
QVQLVESGGGVVQPGRSLRLSCAASGFTFSSYGMHWVRQAPGKGLEWVAVISYDGSNKYYADSVKGRFTISRDNSKNTLYLQMNSLRAEDTAVYYCAKRTALDNYGYYYYGMDVWGQGTTVTVSS

SEQ ID NO: 7039 - protein, 125 aa, Artificial Sequence
  Synthetic construct
QVQLVQSGAEVKKPGASVKVSCKASGYTFTSYYMHWVRQAPGQGLEWMGIINPSGGSTSYAQKFQGRVTMTRDTSTSTVYMELSSLRSEDTAVYYCARNSGYCSSTSCSYYFDYWGQGTLVTVSS

SEQ ID NO: 7040 - protein, 120 aa, Artificial Sequence
  Synthetic construct
EVQLVQSGAEVKKPGESLRISCKGSGYNFTNYWVTWVRQMPGKGLEWMGRIDPRDSYTKYGPSFQGHVTLSTEKSINTAYLQWNGLKASDTAIYYCARHYNILTGYFDYWGQGTLVTVSS

SEQ ID NO: 7041 - protein, 127 aa, Artificial Sequence
  Synthetic construct
QVQLVESGGGVVQPGRSLRLSCAASGFSFSRYAIHWVRQAPGKGLEWVAVISYEGSNKYYADSVEGRFTISRDNSKNTLFLQMNSLRTEDTAVYYCARVIVRVPAAVRGDYYAMDVWGQGTTVTVSS

SEQ ID NO: 7042 - protein, 123 aa, Artificial Sequence; identical to SEQ ID NO: 6359
  Synthetic construct

SEQ ID NO: 7043 - protein, 126 aa, Artificial Sequence
  Synthetic construct
EVQLLESGGGLVQPGGSLRLSCAASGFTFSSYAMSWVRQAPGKGLEWVSAISGSGGSTYYADSVKGRFTISRDNSKNTLYLQMNSLRAEDTAVYYCAKGGNCGGDCYLFYWYFDLWGRGTLVTVSS

SEQ ID NO: 7044 - protein, 123 aa, Artificial Sequence
  Synthetic construct
EVQLVQSGAEVKKPGESLRISCKGSGYSFTSYWISWVRQMPGKGLEWMGRIDPSDSYTNYSPSFQGHVTISADKSISTAYLQWSSLKASDTAMYYCARHPTRGTMVRGMVYAWGQGTLVTVSS

SEQ ID NO: 7045 - protein, 123 aa, Artificial Sequence; identical to SEQ ID NO: 6567
  Synthetic construct

SEQ ID NO: 7046 - protein, 128 aa, Artificial Sequence; identical to SEQ ID NO: 5945
  Synthetic construct

SEQ ID NO: 7047 - protein, 123 aa, Artificial Sequence
  Synthetic construct
QLQLQESGPGLVKPSETLSLTCTVSGGSISSSSYYWGWIRQPPGKGLEWIGSIYYSGSTYYNPSLKSRVTISVDTSKNQFSLKLSSVTAADTAVYYCARLNGSSGWYGYFDYWGQGTLVTVSS

SEQ ID NO: 7048 - protein, 123 aa, Artificial Sequence
  Synthetic construct
QVQLQESGPGLVKPSETLSLTCTVSGGSISNHYWSWMRQPPGKGLDWIGYIYYSGSTHYNPSLQSRVTISVDMSKNQFSLKLNSVTAADTAVYYCARDREDVYNAYPGSLDLWGHGTLVTVSS

SEQ ID NO: 7049 - protein, 124 aa, Artificial Sequence
  Synthetic construct
EVQLVESGGGLVKPGGSLGLSCAASGFTFSRYTMIWVRQATGKGLEWVSSISSSSSYIYYADSVRGRFTISRDNAKNSLYLQMNSLRAEDTAVYYCAREPGGATLSYYYGMDVWGQGTTVTVSA

SEQ ID NO: 7050 - protein, 129 aa, Artificial Sequence
  Synthetic construct
QVQLVQSGAEVKKPGSSVKVSCKASGGTFSSYTISWVRQAPGQGLEWMGRIIPILGIANYAQKFQGRVTITADKSTSTAYMELSSLRSEDTAVYYCARTSAARPSGGSGQSLEDAFDIWGQGTMVTVSS

SEQ ID NO: 7051 - protein, 127 aa, Artificial Sequence
  Synthetic construct
QVQLVESGGGVVQPGKSLRLSCAASGFTFSAQGMHWVRQAPGKGLEWVASIWYDGTNKYYGDSVKGRFTISRDNSKNTLYLHMNSLRAEDTALYYCAREVRVVVPGDQGPGLTFDIWGQGTMVTVSS

SEQ ID NO: 7052 - protein, 51 aa, Artificial Sequence
  Synthetic construct
DNSKSTVFLQMNNLRAEDTAMYFCVRDFLAAAGRGGFFNYWGQGVRVIVSS

SEQ ID NO: 7053 - protein, 126 aa, Artificial Sequence
  Synthetic construct
QVQLVQSGAEVKKPGASVKVSCKASGYTFTSYGISWVRQAPGQGLEWMGWISAYNGNTNYAQKLQGRVTMTTDTSTSTAYMELRSLRSDDTAVYYCARLYSSSWFNRYYYYGMDVWGQGTTVTVSS

SEQ ID NO: 7054 - protein, 127 aa, Artificial Sequence
  Synthetic construct
QVQLVQSGAEVKKPGASVKVSCKASGYTFTNYYIHWVRQAPGQGLECMGWINPNGGATKYAQKFQGRVTMTRDTSINTAHIELNGLTSDDTAVYYCARDSSDYYDNSGTPYNWFDPWGQGTLVTVSS

SEQ ID NO: 7055 - protein, 119 aa, Artificial Sequence
  Synthetic construct
QVQLVQSGAEVKKPGASVKVSCKASGYTFTGYYMHWVRQAPGQGLEWMGWINPNSGGTNYAQKFQGRVTMTRDTSISTAYMELSRLRSDDTAVYYCARWVYGGGAFDIWGQGTMVTVSS

SEQ ID NO: 7056 - protein, 122 aa, Artificial Sequence
  Synthetic construct
QVQLVESGGGVVQPGRSLRLSCAASGFTLSRYGMHWVRQAPGKGLEWVAMMSHDGSVTYYGDSVKGRFTISRDNSKNTLYLQLDSLRAEDTALYYCAKDPFRGLSFFHLDYWGQGVLVTVSS

SEQ ID NO: 7057 - protein, 126 aa, Artificial Sequence
  Synthetic construct
EVQLVESGGGLVQPGGSLRLSCAASGFTFSSYSMNWVRQAPGKGLEWVSYISSSSSTIYYADSVKGRFTISRDNAKNSLYLQMNSLRDEDTAVYYCARDGGYSSGWTDYYYGMDVWGQGTTVTVSS

SEQ ID NO: 7058 - protein, 120 aa, Artificial Sequence
  Synthetic construct
EVQLLESGGGLVQPGGSLRLSCAASGFTFSSYAMSWVRQAPGKGLEWVSAISGSGGSTYYADSVKGRFTISRDNSKNTLYLQMNSLRAEDTAVYYCAKTQWRYYYGMDVWGQGTTVTVSS

SEQ ID NO: 7059 - protein, 126 aa, Artificial Sequence
  Synthetic construct
QLQLQESGPGLVTPSETLSLTCTVSRGSITNTVYYWGWIRQPPGRGLEWIGNIYHSGTTYYNPSLKSRVTMSVDTAKNQFSLKLTSVTAADTAVYFCARQGRRDGYNWRLAHFDSWGQGTLVTVSS

SEQ ID NO: 7060 - protein, 119 aa, Artificial Sequence
  Synthetic construct
QVQLVESGGGVVQPGRSLRLSCAASGFTFSSYAMHWVRQAPGKGLEWVAVISYDGSNKYYADSVKGRFTISRDNSKNTLYLQMNSLRAEDTAVYYCARARAKKYYFDYWGQGTLVTVSS

SEQ ID NO: 7061 - protein, 127 aa, Artificial Sequence
  Synthetic construct
EVQLLESGGGLVQPGTSLRLSCAASGFTFTSYAMNWVRQAPGKGLEWVSGISFSDGSTYYADSVKGRFTIYRDNSKNTLYLQMNSLRPEDTAVYYCAKESPLVIGADGSASLVNMNVWGQGTTVTVS

SEQ ID NO: 7062 - protein, 120 aa, Artificial Sequence
  Synthetic construct
QVQLEQSGAEVKKPGASVRISCKASGDTFGNFYIHWVRQAPGQGPEWMGIINLNGDSPTYADNYQGRVTMTSDTSTSTVYMELTSLRSEDTAAYYCAREADMATTVFDSWGQGSLVTVSS

SEQ ID NO: 7063 - protein, 131 aa, Artificial Sequence
  Synthetic construct
EVQLVESGGGLVQPGRSLRLSCAASGFTFDDYAMHWVRQAPGKGLEWVSGISWNSGSIGYADSVKGRFTISRDNAKNSLYLQMNSLRAEDTALYYCAKDIGCTIFGVVIRCETTGYGMDVWGQGTTVTVSS

SEQ ID NO: 7064 - protein, 130 aa, Artificial Sequence
  Synthetic construct
QVQLQESGPGLVKPSQTLSLTCTVSGGSISSGSYYWSWIRQPAGKGLEWIGRIYTSGSTNYNPSLKSRVTISVDTSKNQFSLKLSSVTAADTAVYYCARDLGRYYYDSSGYYKRGWFDPWGQGTLVTVSS

SEQ ID NO: 7065 - protein, 127 aa, Artificial Sequence
  Synthetic construct
QLQLQESGPGLVKPSETLSLTCTVSGGSISSSSYYWGWIRQPPGKGLEWIGSIYYSGSTYYNPSLKSRVTISVDTSKNQFSLKLSSVTAADTAVYYCARRVVSETGTSFSPPAFDYWGQGTLVTVSS

SEQ ID NO: 7066 - protein, 126 aa, Artificial Sequence
  Synthetic construct
QLQLQESGPGLVKPSETLSLTCSVSGGSISSSSYYWGWIRQPPGMRLEWIGRIFYSGRTNHNPSLKSRVTISIDKSKNQFSLKLDSVTAADTAVYYCARQGLLFSISPENDAFDVWGQGTMVTVSS

SEQ ID NO: 7067 - protein, 117 aa, Artificial Sequence
  Synthetic construct
EVQLVQSGAEVQKPGATVKISCKVSGYIFTDYYIHWVRQAPGKGLEWMGLVDPENGETIYAEKFQGRVTITADTSTDTAYMDLSSLRSEDTAVYYCSTDRGASFDFWGQGTLVTVSS

SEQ ID NO: 7068 - protein, 114 aa, Artificial Sequence
  Synthetic construct
QVQLVQSGAEVKKPGASVKVSCKASGYTFTGYYMHWVRQAPGQGLEWMGWINPNSGGTNYAQKFQGRVTMTRDTSISTAYMELSRLRSDDTAVYYCARDKGSHWGQGTLVTVSS

SEQ ID NO: 7069 - protein, 120 aa, Artificial Sequence
  Synthetic construct
QVQLVQSGSELRKPGASVTVSCKASGYIFTNYAINWVRQAPGQGLEWMGWINTNTGNPTYAPGSTGRFVFSLDTSVSTAHLQISGLKAEDTAVYYCARAGSRGSYGMDVWGQGTTVTVSS

SEQ ID NO: 7070 - protein, 124 aa, Artificial Sequence
  Synthetic construct
QITLKESGPTLVRPTQTLTLTCSFSGFSLSTSGMGVAWIRQPPGKALEWLALISWDDDERYSPSLKTRLTITKDTSKNQVVLTMTTVDPVDTATYYCARMGIPEWLFGLSFDYWGQGTLVTVSS

SEQ ID NO: 7071 - protein, 119 aa, Artificial Sequence
  Synthetic construct
EELLLESGGGLVQPGKSLRLSCAASGFTFSSHAMNWVRQAPGKGLEWVATVSGSGTNTYTADSVKGRFTISRDNSKNTVFLQMNTLRAEDTAVYYCAKGEYARGPFGIWGQGTMVTVSS

SEQ ID NO: 7072 - protein, 124 aa, Artificial Sequence; identical to SEQ ID NO: 5439
  Synthetic construct

SEQ ID NO: 7073 - protein, 120 aa, Artificial Sequence
  Synthetic construct
QVRLVQSGAEAKSPGASVKVSCRASGYTFGDHYIYWVRQAPGQGLEWVGWINPRNGATDLAQAFKDRVTLTRDTSVDTAFLEIGGLTSDDSAFYYCARPLTAIYAGFDYWGQGTLVTVSS

SEQ ID NO: 7074 - protein, 129 aa, Artificial Sequence
  Synthetic construct
QVQLQESGPGLVKPSQTLSLTCTVSGGSISSGSYYWSWIRQPAGKGLEWIGRIYTSGSTNYNPSLKSRVTISVDTSKNQFSLKLSSVTAADTAVYYCARGRPKRGYGGNLSYYYGMDVWGQGTTVTVSS

SEQ ID NO: 7075 - protein, 120 aa, Artificial Sequence
  Synthetic construct
EVHLVESGGGLVQPGGSLRLSCAASGFTFSTHWMHWVRQAPGKGLVWVSGIHTGGGNTNYADSVKGRFTISRDNAKNTLYLQMNSLRVEDTAMYFCARDKWELLQGFDSWGQGTLVTVSS

SEQ ID NO: 7076 - protein, 123 aa, Artificial Sequence
  Synthetic construct
QIHLVQSGAEVKKPGASVKVSCKASGYIFSNYGISWVRQAPGQGLEWMGWISGHTGDTKYAQMFQGRVTMTTDTSTGTAYMELRSLRSDDTAVYYCTRDLWERHAAAAQSAHWGQGALIIVSS

SEQ ID NO: 7077 - protein, 121 aa, Artificial Sequence; identical to SEQ ID NO: 5906
  Synthetic construct

SEQ ID NO: 7078 - protein, 127 aa, Artificial Sequence
  Synthetic construct
QVQLQESGPGLVKPSQTLSLTCTVSGGSISSGSYYWSWIRQPAGKGLEWIGRIYTSGSTNYNPSLKSRVTISVDTSKNQFSLKLSSVTAADTAVYYCARGYYDFWSGYYTGRRFDPWGQGTLVTVSS

SEQ ID NO: 7079 - protein, 117 aa, Artificial Sequence
  Synthetic construct
EVQLVESGGGLVKPGRSLRLSCTASGFTFGDYAMSWFRQAPGKGLEWVGFIRSKAYGGTTEYAASVKGRFTISRDDSKSIAYLQMNSLKTEDTAVYYCSRGVIKSLWGQGTLVTVSS

SEQ ID NO: 7080 - protein, 125 aa, Artificial Sequence
  Synthetic construct
EVQLVQSGAEVKKPGESLRISCKGSGYSFTSYWISWVRQMPGKGLEWMGRIDLSDSYTNYSPSFQGHVTISADKSISTAYLQWSSLKASDTAMYYCARQGYDILTGYPSYGMDVWGQGTTVTVSS

SEQ ID NO: 7081 - protein, 118 aa, Artificial Sequence
  Synthetic construct
EVQLLESGGGLVQPGGSLRLSCVASGFTFSSYAMSWVRQAPGKGLEWVSGISATGGSTYYAESVKGRFTISRDKSKNTLYLQMNSLRAEDTAIYYCAKTSVLGPECYWGQGTLVTVSS

SEQ ID NO: 7082 - protein, 124 aa, Artificial Sequence; identical to SEQ ID NO: 5439
  Synthetic construct

SEQ ID NO: 7083 - protein, 130 aa, Artificial Sequence
  Synthetic construct
EVQLVESGGAVVQPGGSLRLSCAASGFNFDEYTMHWVRQVPGKGPEWVSLITWDGGTAHYADSVTGRFTTSRDNYENSLYLQMNSLRTEDTAMYYCAQGETGAYYDVLTGKAGYYGLDVWGQGTAVTVSS

SEQ ID NO: 7084 - protein, 122 aa, Artificial Sequence
  Synthetic construct
EVQLLESGGGLVQPGGSLRLSCAASGFTFSSYAMSWVRQAPGKGLEWVSPISGSGGGTYYADSVKGRFTISRDNSKNTLYLQMNSLRAEDTAVYYCAKSSILTGYYEVFDYWGQGTLVTVSS

SEQ ID NO: 7085 - protein, 124 aa, Artificial Sequence
  Synthetic construct
GVQLMESGGGLVQPGGSLRLSCAASGFTLSEYAMSWVRQAPGKGLEWVSVMSGSGGTTYYADSVKGRFTISRDNSNNMLYLQMNSLRAEDSAAYYCAKETSLLHYDTSAYSDYWGQGTLVTVSS

SEQ ID NO: 7086 - protein, 128 aa, Artificial Sequence
  Synthetic construct
QITLKESGPTLVKPTQTLTLTCTFSGFSLSTSGVGVGWIRQPPGKALEWLALIYWDDDKRYSPSLKSRLTITKDTSKNQVVLTMTNMDPVDTATYYCANRITIFGVVIKTEENWFDPWGQGTLVTVSS

SEQ ID NO: 7087 - protein, 120 aa, Artificial Sequence
  Synthetic construct
QVQLQESGPGLVKPSETLSLTCTVSGGSVSSKTYYWSWIRQPPGKGLEWIGYIYYSGSTEYNSALKSRVTISVDTSKNEFSLKVNSVTTADTAMYYCAAYHDILTGYPFWGQGTLVTVSS

SEQ ID NO: 7088 - protein, 121 aa, Artificial Sequence
  Synthetic construct
QVQLVESGGGVVQPGRSLRLSCAASGFTFSSYAMHWVRQAPGKGLEWVSVISYEGSNKKYADSLKGRFTISRDNSKNTLYLQMNSLRAEDTAIYYCARSHVLVWFGALDYWGQGTLVTVSS

SEQ ID NO: 7089 - protein, 123 aa, Artificial Sequence
  Synthetic construct
EVQLVESGGGLVKPGGSLRLSCATSGFSFSSFSMNWVRQAPGKGLEWVSYISSGSNSYYADSVKGRFTISRDNAKNSLYLQMNSLRAEDTAVYYCATDFPGNSPVAGTGFEYWGQGTLVTVST

SEQ ID NO: 7090 - protein, 117 aa, Artificial Sequence
  Synthetic construct
EVQLVESGGGLVKPGGSLRLSCAASGFTFSTYSMNWVRQAPGKGLEWVSSITSTSRFIKYAGSVKGRFTISRDNAKNSLYLQMNSLRAEDTAVYYCANEKFYYFESWGQGTLVTVSS

SEQ ID NO: 7091 - protein, 119 aa, Artificial Sequence
  Synthetic construct
QVQLVQSGAEVKKPGASVKVSCKASGYTFTGYYMHWVRQAPGQGLEWMGWINPNSGGTNYAQKFQGRVTMTRDTSISTAYMELSRLRSDDTAVYYCARGYGSGSYYRYWGQGTLVTVSS

SEQ ID NO: 7092 - protein, 120 aa, Artificial Sequence
  Synthetic construct
QVQLVESGGGVVQPGRSLRLSCAVSGFIFSDYGMHWVRQTPGKGLEWVAVIWHDGSNKFYADSVKGRFTISRDDSKNTLYLQMNSLTAEDTAVYYCARDDILTGYTIDYWGQGTLVTVSS

SEQ ID NO: 7093 - protein, 125 aa, Artificial Sequence
  Synthetic construct
QVQLQQWGAGLLKPSETLSLTCAVYGGSFSGYYWSWIRQPPGKGLEWIGEINHSGSTNYNPSLKSRVTISVDTSKNQFSLKLSSVTAADTAVYYCASRITMVRGVRIRRNWFDPWGQGTLVTVSS

SEQ ID NO: 7094 - protein, 123 aa, Artificial Sequence; identical to SEQ ID NO: 5437
  Synthetic construct

SEQ ID NO: 7095 - protein, 124 aa, Artificial Sequence
  Synthetic construct
EVHLVESGGGLVQPGGSLRLSCATSGFTFSSHWMHWVRQVPGKGPVWVARIRPEGTITDYADSVRGRFTASRDNTKSTLYLQMNSLRAEDTAVYYCARDLDFHTSCHYATFHYWGQGALVTVSP

SEQ ID NO: 7096 - protein, 116 aa, Artificial Sequence
  Synthetic construct
QVQLQQWGAGLLKPSETLSLTCAVYGGSFSAYFWSWIRQPPGKGLEWIGEINHSGSTNYNPSLKSRVIISVDASNNQLSLRLRSVTAADTAVYYCARAVRLRLDPWGQGTLVTVSS

SEQ ID NO: 7097 - protein, 124 aa, Artificial Sequence
  Synthetic construct
QVQLVESGGGVVQPGRSLRLSCAASGFTFSSYGMHWVRQAPGKGLEWVAVISYDGSNKYYADSVKGRFTISRDNSKNTLYLQMNSLRAEDTAVYYCAKGSGYSSGWYRGAFDIWGQGTMVTVSS

SEQ ID NO: 7098 - protein, 128 aa, Artificial Sequence
  Synthetic construct
EVQLVESGGGLVKPGGSLRLSCAASGFTFSNAWMSWVRQAPGKGLEWVGRIKSKTDGGTTDYAAPVKGRFTISRDDSKNTLYLQMNSLKTEDTAVYYCTTDYGVRYFDWLLPEEPLTWGQGTLVTVSS

SEQ ID NO: 7099 - protein, 117 aa, Artificial Sequence
  Synthetic construct
QVQLVQSGAEVRKPGASVKVSCKASGYSFSNYAMHWVRQAPGQRPEWMGWINGGNGNTKYSQNFQGRVTLTRDTSASTAYMELSSLTSEDTAVYYCARGSIVIHGYWGQGTLVSVSS

SEQ ID NO: 7100 - protein, 125 aa, Artificial Sequence
  Synthetic construct
QMQLVQSGPEVKKPGTSVKVSCKASGFTFTGSAMQWVRHARGQRLEWIGWVVVGSGHANYAQKFQQRVTITRDMSTNTAYMELSSLRSDDTAVYYCAASSTIGASDYHFYAMDVWGQGTTVTVSS

SEQ ID NO: 7101 - protein, 123 aa, Artificial Sequence
  Synthetic construct
QLQLQESGPGLVKPSETLSLTCTVSGGSISSSSYYWGWIRQPPGKGLEWIGSIYYSGSTYYNPSLKSRVTISVDTSKNQFSLKLSSVTAADTAVYYCARHGSSSWYPPYFQHWGQGTLVTVSS

SEQ ID NO: 7102 - protein, 122 aa, Artificial Sequence
  Synthetic construct
QVQLVQSGAEVKRSGASVKVSCKASGYTLSDYGFSWVRQAPGQGPEWMGWISGHNGNTMYAQKFQGRVIITTDISTTTVYMELRSLRSDDTAVYYCARAPYSGYDFMYFDYWGQGTLVTVSS

SEQ ID NO: 7103 - protein, 123 aa, Artificial Sequence
  Synthetic construct
EVQLVESGGGLVQPGGSLRLSCVASGFTFSSYWMHWVRQAPGKGLMWVSGINIDGSRTTYADSVKGRFTISRDNAKNTLYVQMNSLRAEDTAVYYCTRGGYSGYDWVPGIDYWGQGTLVTVSS

SEQ ID NO: 7104 - protein, 129 aa, Artificial Sequence
  Synthetic construct
QVQLVQSGAEVKKPGASVKVSCKASGYTFTGYYMHWVRQAPGQGLEWMGWINPNSGGTNYAQKFQGRVTMTRDTSISTAYMELSRLRSDDTAVYYCARRITMVRGGEPRWPRLNWFDPWGQGTLVTVSS

SEQ ID NO: 7105 - protein, 123 aa, Artificial Sequence; identical to SEQ ID NO: 5463
  Synthetic construct

SEQ ID NO: 7106 - protein, 120 aa, Artificial Sequence
  Synthetic construct
EVQLVESGGGLVQPGGSLRLSCAASGLTVSTTYMSWVRQAPGKGLEWVSVIYGGGTTYYADSVKGRFTVSRDNSKNTLYLQMNSLRTEDTAVYYCARYDGGNPPGGMDVWGQGTTVTVSS

SEQ ID NO: 7107 - protein, 125 aa, Artificial Sequence
  Synthetic construct
EVHLVESGGGSVQPGGSLRLSCVTSGFIFSSYDMNWVRQAPGKGLEWISFISSSSNTKYYADSVKGRFTISRDNTKNSLYLQMNSLRDDDTAVYYCAREADCTNSVCFPSTLDYWGQGTLVTVSS

SEQ ID NO: 7108 - protein, 118 aa, Artificial Sequence
  Synthetic construct
QLQLQESGPGLVKPSETLSLTCTVSGGSISSSSYYWGWIRQPPGKGLEWIGSIYYSGSTYYNPSLKSRVTISVDTSKNQFSLKLSSVTAADTAVYYCARQRSRYFDYWGQGTLVTVSS

SEQ ID NO: 7109 - protein, 123 aa, Artificial Sequence
  Synthetic construct
EVQLVESGGGLAQPGRSLRLSCAASGFTYDEYDMHWVRQVPGKGLEWVSGISWSSDTIVYADSVKGRFTISRDNAKNSLYLQMNSLRVEDTALYYCGKGYYYGSEHRNVIDYWGQGTLVTVSS

SEQ ID NO: 7110 - protein, 121 aa, Artificial Sequence
  Synthetic construct
QLHLQESGPGLVKPSETLSLTCTVSDDSISKSAFYWGWVRQPPGKGLEWIGSFYYSGSTLYNPSLKSRVIISVDTSKSHVSLELNSVTAADTAVYYCARLPFPGAEGFDQWGQGTLVTDSS

SEQ ID NO: 7111 - protein, 125 aa, Artificial Sequence
  Synthetic construct
QLQLQESGPGLVKPSETLSLTCTVSGGSIASNSYYWGWIRQPPGKGLEWIGSIYYGGSTYYNPSLKSRVSISVDTSKNQFSLKLSSVTAADTAVYYCATSPLATSSPVGYYFDYWGQGTLVTVSS

SEQ ID NO: 7112 - protein, 124 aa, Artificial Sequence
  Synthetic construct
QVQLVESGGGVVQPGRSLRLSCAASGFTFSSYGMHWVRQAPGKGLEWVAVIWYDGSNKYYADSVKGRFTISRDNSKNTLYLQMNSLRAEDTAVYYCARAGYSSGYKRVLFVDYWGQGTLVTVSS

SEQ ID NO: 7113 - protein, 123 aa, Artificial Sequence
  Synthetic construct
EVQLVESGGDLVQPGGSLRLSCSASGFTFSGYALHWVRQAPGKGLEYVSAISSTGDNTYYRDSVKGRFIISRDNSKNTMYLQMSSLRAEDTAIYYCVKDLGWRTISSAGGDYWGQGTLVTVSS

SEQ ID NO: 7114 - protein, 115 aa, Artificial Sequence; identical to SEQ ID NO: 5474
  Synthetic construct

SEQ ID NO: 7115 - protein, 125 aa, Artificial Sequence
  Synthetic construct
QEQLVESGGGVVQSGESLRLSCAASGFSFRSYGMHWVRQAAGKGLEWVSDISYDGNKKYYVDSVKGRFTISRGNFNNTLYLQMNSLRPEDTAVYYCATSPHMIKFGGVIGHLDCWGQGVQVTVSS

SEQ ID NO: 7116 - protein, 130 aa, Artificial Sequence
  Synthetic construct
EVQLVESGGGLVQPGGSLRLSCAASGFTFNSYSMNWVRQAPGKGLEWVSFISHSETMIYYADSVKGRFTVSRDNAKNSLYLQMNSLRDEDTAVYYCARDPPPTFYDFLTGSYNYFGMDVWGQGTTVTVSS

SEQ ID NO: 7117 - protein, 119 aa, Artificial Sequence
  Synthetic construct
EVQLVESGGGLIQPGGSLRLSCAASGFTVSSNYMSWVRQAPGKGLEWVSVIYSGGSTYYADSVKGRFTISRDNSKNTLYLQMNSLRAEDTAVYYCARRYSGHKGGFDPWGQGTLVTVSS

SEQ ID NO: 7118 - protein, 122 aa, Artificial Sequence
  Synthetic construct
EIHLVQSEGELKKPGESLTVSCEVSGYDFKMYWLGWVRQVPGKGLEWMGLIYPGDSDTLYRPSFEGQVTMSVDKSTNTAYLQWSSLKVADSARYYCARRGYSGFMGAWFDHWGQGTQVTVSS

SEQ ID NO: 7119 - protein, 127 aa, Artificial Sequence
  Synthetic construct
EVQLVESGGALVPPGGSLRLSCAASGPTFRSFWMHWVRQPPGKGLMWVSRINGDGSGASYADSVKDRFTISRDKAKNTLYLQMNSLRTEDTAVYYCAREEFDTLTGFRYHYYGMDVWGQGATVVVSS

SEQ ID NO: 7120 - protein, 121 aa, Artificial Sequence
  Synthetic construct
QVQLQESGPGLVKPSETLSLTCTVSGGSISSYYWSWIRQPAGKGLEWIGRIYTSGSTNYNPSLKSRVTMSVDTSKNQFSLKLSSVTAADTAVYYCARDRSGSYYKSPFDYWGQGTLVTVSS

SEQ ID NO: 7121 - protein, 127 aa, Artificial Sequence
  Synthetic construct
QVQLVESGGGLVKPGGSLRLSCAASGFTFSDYYMSWIRQAPGKGLEWVSYISSSSSYTNYADSVKGRFTISRDNAKNSLYLQMNSLRAEDTAVYYCARLNYYGSGSYYNAKYYFDYWGQGTLVTVSS

SEQ ID NO: 7122 - protein, 118 aa, Artificial Sequence
  Synthetic construct
QLQLQESGPGLVWLHRPCPSPALSLVAPPVVETPGAGSGSHQGRTCSGLVTSIIVGAPTSIRPSGVESPCQWTGQRTSSPTSLPPRTRPCIIVPEIWWDPLPTVLISGAKGKRSPSLQ

SEQ ID NO: 7123 - protein, 119 aa, Artificial Sequence
  Synthetic construct
EVQLVESGGGLIQPGGSLRLSCAASGFTVSSNYMSWVRQAPGKGLEWVSVIYSGGSTYYADSVKGRFTISRDNSKNTLYLQMNSLRAEDTAVYYCARALMVRGVHFDYWGQGTLVTVSS

SEQ ID NO: 7124 - protein, 124 aa, Artificial Sequence
  Synthetic construct
EVQLLESGGGLVQPGGSLRLSCAASGFTFSSYAMSWVRQAPGKGLEWVSAISGSGGSTYYADSVKGRFTISRDNSKNTLYLQMNSLRAEDTAVYYCAKLWYSSSSWYLSGMDVWGQGTTVTVSS

SEQ ID NO: 7125 - protein, 121 aa, Artificial Sequence; identical to SEQ ID NO: 6784
  Synthetic construct

SEQ ID NO: 7126 - protein, 118 aa, Artificial Sequence
  Synthetic construct
EVQLVESGGGLVQPGGSLRLSCAASGFTFSSYWMSWVRQAPGKGLEWVANIKQDGSEKYYVDSVKGRFTISRDNAKNSLYLQMNSLRAEDTAVYYCARAGWKKRMDVWGQGTTVTVSS

SEQ ID NO: 7127 - protein, 131 aa, Artificial Sequence
  Synthetic construct
QLQLQESGPGLVKPSETLSLTCTVSGGSISSSSYYWGWIRQPPGKGLEWIGSIYYSGSTYYNPSLKSRVTISVDTSKNQFSLKLSSVTAADTAVYYCARLERDCGGDCYSRRNPNWYFDLWGRGTLVTVSS

SEQ ID NO: 7128 - protein, 120 aa, Artificial Sequence
  Synthetic construct
QVQLVESGGGVVQPGRSLRLSCAASGFTFSTHGMHWVRQAPGKGLEWVSVIWFDGSNKFYVDSVKGRFTISRDNSKNTLYLQMNSLRAEDTAVYFCARDSHSSSGLLDFWGQGTLVTVSS

SEQ ID NO: 7129 - protein, 128 aa, Artificial Sequence
  Synthetic construct
QVQLQESGPGLVKPSQTLPLTCTVSGGSISSIGYYWSWIRQHPGKGLEWIGYIYYNEKTYYNPSLESRITISLDTSKNQFSLNLNSVTAADTAVYYCARYSLLDYGDYGGYYYAMDVWGQGTTVTVSS

SEQ ID NO: 7130 - protein, 124 aa, Artificial Sequence; identical to SEQ ID NO: 6033
  Synthetic construct

SEQ ID NO: 7131 - protein, 121 aa, Artificial Sequence
  Synthetic construct
EVQLVQSGAEAKKPGESLKISCKASGYSFSDYWIGWVRQVPGKGLEWMGIIYPGDFDTRYSPSFQGQVTISVDKSVSTAYLRWRSLKASDTAMYYCARAYSSNYYEYFQYWGQGTLVTVTS

SEQ ID NO: 7132 - protein, 121 aa, Artificial Sequence
  Synthetic construct
QVQLQESGPGLVKPSETLSLTCTVSGGSTRGYYWSWIRQPPGKGLEWIGYIYFTGSTNYNPSLNSRVTISLDTSKNQFSLNLNSVTAADTAVYYCARDGRAYNYGYGMDVWGQGTSVTVSS

SEQ ID NO: 7133 - protein, 123 aa, Artificial Sequence
  Synthetic construct
QVQLQQWGARLLKPSETLSLTCVVYGGSFSGYYWSWIRQPPGKGLEWIGEINHSGSTNYNSSLKRRVTISIDTSKNQFSLKLSSVTAADTAVYYCARVSGYSYGPGFKWFDPWGQGTLVSVSS

SEQ ID NO: 7134 - protein, 123 aa, Artificial Sequence; identical to SEQ ID NO: 5437
  Synthetic construct

SEQ ID NO: 7135 - protein, 120 aa, Artificial Sequence
  Synthetic construct
QVQLQQWGAGLLKPSETLSLTCAVSDGSFSGSYWSWIRQPPGKGLEWIGEINQSGITNYNPSLKSRVTISEDTSKNQFSLRLSSVTAADTAIYYCARVKTQVHGDYLDYWSRGTLVTVSS

SEQ ID NO: 7136 - protein, 133 aa, Artificial Sequence
  Synthetic construct
EVQLVESGGGLVQPGGYMRLSCAASGFIFSDHYMDWVRQAPGKGLEWIGRTRDKRNNYSTELAASVKGRFTISRDESENSLHLQLNSLRSEDTAVYYCVRGPSQYCSGGTCSSLGYFYPMDVWGQGTTVTVSS

SEQ ID NO: 7137 - protein, 121 aa, Artificial Sequence
  Synthetic construct
QMQLQQWGAGLLKPSETLSLACSVHGGSFSGFYWSWVRQPPGRGLEWIGEITLSGRTNYNPSLKSRVSISVDSSKNLFSLNLNFVTAADTAVYYCARLWNYGSEHWYFDLWGRGTLVTVSS

SEQ ID NO: 7138 - protein, 123 aa, Artificial Sequence
  Synthetic construct
EVQLVESGGGLVQPGGSLRLSCSASGLTFSNYPMHWVRQGPGKGLEFVSAISSHGDNTYYADSAKGRFIISRDNSKNILYLQMSSLRSEDTAVYYCVRDLGWRSIAADGGDSWGQGTLVTVSS

SEQ ID NO: 7139 - protein, 115 aa, Artificial Sequence
  Synthetic construct
QVQLQESGPGLVKPSQTLSLTCTVSGGSISSGSYYWSWIRQPAGKGLEWIGRIYTSGSTNYNPSLKSRVTISVDTSKNQFSLKLSSVTAADTAVYYCARGYQDPWGQGTLVTVSS

SEQ ID NO: 7140 - protein, 123 aa, Artificial Sequence
  Synthetic construct
EVQLVESGGGLVQPGGSLRLSCSASGLSFSRYAMHWVRQAPGKGLEYVSAISSYGDNTYYADSVKGRFTISRDNSKNTLYVQMSSLRTEDTAVYYCVHDLGWRSIAADGGDYWGQGTLVTVSS

SEQ ID NO: 7141 - protein, 119 aa, Artificial Sequence
  Synthetic construct
QVQLQESGPGLVRPSETLSLTCTVSGGSMSSYFWSWIRQPPGKGLEWIGYIYYSGSTNYNPSLKSRVTISIDTSRNQFSLELKSVTAADTAVYYCARVRKIVLDTFDIWGQGTMVTVSS

SEQ ID NO: 7142 - protein, 123 aa, Artificial Sequence
  Synthetic construct
EVQLVESGGGLVQPGGSLRLSCAASGFTFSSYWMSWVRQAPGKGLEWVANIKQDGSEKYYVDSVKGRFTISRDNAKNSLYLQMNSLRAEDTAVYYCARTYYDFWSGYYPFDYWGQGTLVTVSS

SEQ ID NO: 7143 - protein, 137 aa, Artificial Sequence
  Synthetic construct
QVQLQESGPGLVKPSQTLSLTCTVSGGSISSGGYYWSWIRQHPGKGLEWIGYIYYSGSTYYNPSLKSRVTISVDTSKNQFSLKLSSVTAADTAVYYCARGRDQYYYDSSGYYYSRTKQRPGYYFDYWGQGTLVTVSS

SEQ ID NO: 7144 - protein, 130 aa, Artificial Sequence
  Synthetic construct
EVQLLESGGGLVQPGGSLRLSCAASGFTFSSYAMSWVRQAPGKGLEWVSAISGSGGSTYYADSVKGRFTISRDNSKNTLYLQMNSLRAEDTAVYYCAKDFSPALPYCSGGSCKGYYFDYWGQGTLVTVSS

SEQ ID NO: 7145 - protein, 119 aa, Artificial Sequence
  Synthetic construct
QLQLQESGPGLVKPSETLSLTCTVSGGSISSSSYYWGWIRQPPGKGLEWIGSIYYSGSTYYNPSLKSRVTISVDTSKNQFSLKLSSVTAADTAVYYCARRGTRGYFEVWGQGTLVTVSS

SEQ ID NO: 7146 - protein, 117 aa, Artificial Sequence
  Synthetic construct
QVQLVESGGGVVQPGRSLRLSCAASGFTFRFSAMHWVRQAPGKGLEWVAVISDDGGNKDFADSVKGRFTISRDNSKNTLYLQMNSLGGDDTAVYYCATPVVERRDYWGQGTLVTVSS

SEQ ID NO: 7147 - protein, 124 aa, Artificial Sequence
  Synthetic construct
EVQLLESGGGLVQPGGSLRLSCAASGFTFSSYAMSWVRQAPGKGLEWVSAISGSGGSTYYADSVKGRFTISRDNSKNTLYLQMNSLRAEDTAVYYCAKRSTKYSSGWKNWFDPWGQGTLVTVSS

SEQ ID NO: 7148 - protein, 122 aa, Artificial Sequence
  Synthetic construct
EVQLAQSGAEVKKPGESLRISCKGFGYSFTDYWIGWVRQMPGKGPEWMGMIHPFDSDTRYSPAFQGQVTISVDKSITTAYLQWSSLKASDTAMYYCVRPRTSSNYFFVFHIWGQGTMVTVSS

SEQ ID NO: 7149 - protein, 119 aa, Artificial Sequence
  Synthetic construct
QVQLQQWGAGLLKPSETLSLTCAVYGGSFSGYYWSWIRQPPGKGLEWIGEINHSGSTNYNPSLKSRVTISVDTSKNQFSLKLSSVTAADTAVYYCARPMVRGRSGMDVWGQGTTVTVSS

SEQ ID NO: 7150 - protein, 129 aa, Artificial Sequence
  Synthetic construct
QVQLVQSGAEVKKPGASVKVSCKASGYTFTSYDINWVRQATGQGLEWMGWMNPNSGNTGYAQKFQGRVTMTRNTSISTAYMELSSLRSEDTAVYYCARGGSNSGSYPRRHYYYYGMDVWGQGTTVTVSS

SEQ ID NO: 7151 - protein, 128 aa, Artificial Sequence
  Synthetic construct
QLQLQESGPGLVKPSETLSLTCTVSGGSISSSSYYWGWIRQPPGKGLEWIGSIYYSGSTYYNPSLKSRVTISVDTSKNQFSLKLSSVTAADTAVYYCARQPYDFWSGYYLYYYGMDVWGQGTTVTVSS

SEQ ID NO: 7152 - protein, 126 aa, Artificial Sequence
  Synthetic construct
QVQLVQSGAEVKKPGSSVKVSCKASGGTFSSYTISWVRQAPGQGLEWMGRIIPILGIANYAQKFQGRVTITADKSTSTAYMELSSLRSEDTAVYYCARGGYCSSTSCYRNNWFDPWGQGTLVTVSS

SEQ ID NO: 7153 - protein, 121 aa, Artificial Sequence
  Synthetic construct
EVQLVESGGGLVQPGGSLRLSCAASGFTFSSYWMSWVRQAPGKGLEWVANIKQDGSEKYYVDSVKGRFTISRDNAKNSLYLQMNSLRAEDTAVYYCARGGARYSSGWPIWGGQGTLVTVSS

SEQ ID NO: 7154 - protein, 119 aa, Artificial Sequence
  Synthetic construct
QVQLQESGPGLVKPSETLSLTCTVSGGSISDYYWSWIRQPPGKGLEWIGDIYYSGNTNHNPSLRSRVAISVDMSKSQFSLTVYSVTAADTAVYYCARGGVIPAGYFQLWGQGTLVTVSS

SEQ ID NO: 7155 - protein, 118 aa, Artificial Sequence
  Synthetic construct
EVQLLESGGGLVQPGGSLRLSCAASGFTFSSYAMSWVRQAPGKGLEWVSAISGSGGSTYYADSVKGRFTISRDNSKNTLYLQMNSLRAEDTAVYYCAQAGFRSQGDYWGQGTLVTVSS

SEQ ID NO: 7156 - protein, 115 aa, Artificial Sequence
  Synthetic construct
QVQLVESGGGVVQPGRSLRLSCAASGFTFSSYGMHWVRQAPGKGLEWVAVIWYDGSNKYYADSVKGRFTISRDNSKNTLYLQMNSLRAEDTAVYYCARGLRSDYWGQGTLVTVSS

SEQ ID NO: 7157 - protein, 124 aa, Artificial Sequence; identical to SEQ ID NO: 5439
  Synthetic construct

SEQ ID NO: 7158 - protein, 130 aa, Artificial Sequence
  Synthetic construct
EAQLLESGGDLVAPGESLRLSCRASGFDFTSQTFSWVRQAPGQGLQWLSVISGGGETTVYADSVRGRFTIYRDNSKNTVFLQMTSLRAEDTAIYHCTTSMEFYSSGNLYIPLGSYSLDVWGPGTTVSVSS

SEQ ID NO: 7159 - protein, 120 aa, Artificial Sequence
  Synthetic construct
EVQVVESGGGLVKPGESLRVSCTVSGFTLNNVWVNWVRQAPGKGLEWLGRSKSGSDGVTTDYAAPVKGRFIISRHDSENTLFLHMNSLKTEDTAVYYCSTDSAYYPFDNWGQGTLVTVSS

SEQ ID NO: 7160 - protein, 120 aa, Artificial Sequence
  Synthetic construct
EVHLVESGGGLVQPGGSLRLSCAASGFTFSDYSMNWVRQAPGKGLEWLSYISPSGVTIYYADSVKGRFTISRDNAKSSLYLQLNSLSDEDTAIYYCARARFTYNYNFYYWGQGTLVTVSS

SEQ ID NO: 7161 - protein, 125 aa, Artificial Sequence
  Synthetic construct
QVQLQQWGAGLLKPSETLSLTCAVYGGSFSGYYWSWIRQPPGKGLEWIGEINHSGSTNYNPSLKSRVTISVDTSKNQFSLKLSSVTAADTAVYYCARGRYTAMVGRYYYYGMDVWGQGTTVTVSS

SEQ ID NO: 7162 - protein, 123 aa, Artificial Sequence
  Synthetic construct
QVHLVQSGGTVVQPGRSLRLSCVGSGFSIGSYAMQWVRQAPGKGLEWVAFVSYDATYRGYADSVRGRFTISRDNSENTLYLQMDSLRPEDTAVYYCARDEALVHGRPGYFDYWGQGTLVTVSS

SEQ ID NO: 7163 - protein, 125 aa, Artificial Sequence
  Synthetic construct
QVQLVESGGGVVQPGRSLRLSCAASGFTFSSYGMHWVRQAPGKGLEWVAVIWYDGSNKYYADSVKGRFTISRDNSKNTLYLQMNSLRAEDTAVYYCARGDKSTRWYPVSAQFDPWGQGTLVTVSS

SEQ ID NO: 7164 - protein, 130 aa, Artificial Sequence
  Synthetic construct
QVQLVQSGAEVKKPGASVKVSCKASGYTFTSYGISWVRQAPGQGLEWMGWISAYNGNTNYAQKLQGRVTMTTDTSTSTAYMELRSLRSDDTAVYYCARDSREISSGSYRYYYYYYGMDVWGQGTTVTVSS

SEQ ID NO: 7165 - protein, 120 aa, Artificial Sequence
  Synthetic construct
EVRLVESGGGVVQPGGSLRLSCAVSGFSFNNYGMHWIRQAPGKGLEWVAVIRYHGGNIYYADSVKGRFTISRDNSKNTLYLQMNSLRVEDTAVYYCARWPGGSGWHFDYWGQGTLVTVSS

SEQ ID NO: 7166 - protein, 127 aa, Artificial Sequence
  Synthetic construct
EVQLVESGGGLVQPGGSLRLSCAASGFTFSSYWMHWVRQAPGKGLVWVSRINSDGSSTSYADSVKGRFTISRDNAKNTLYLQMNSLRAEDTAVYYCARGRGYCSSTSCYAYNWFDPWGQGTLVTVSS

SEQ ID NO: 7167 - protein, 120 aa, Artificial Sequence
  Synthetic construct
EVQLLESGGGLEQPGGSLRLSCVASGFTFSSYAMSWVRQAPGKGLEWVSTITNSGGSTYYADSVKGRFTISRDNSKNTLYLQMNSLRAEDTAVYYCAKDLVRGEGLFDYWGQGTLVTVSS

SEQ ID NO: 7168 - protein, 123 aa, Artificial Sequence
  Synthetic construct
QVQLVQSGAEVKKPGASVKVSCKASGYTFTSYGISWVRQAPGQGLEWMGWISAYNGNTNYAQKLQGRVTMTTDTSTSTAYMELRSLRSDDTAVYYCARDAYVVGLGSKRSDYWGQGTLVTVSS

SEQ ID NO: 7169 - protein, 124 aa, Artificial Sequence; identical to SEQ ID NO: 5439
  Synthetic construct

SEQ ID NO: 7170 - protein, 128 aa, Artificial Sequence
  Synthetic construct
QVQLQESGPGLVKPSQTLSLTCTVSGGSISSGSYYWSWIRQPAGKGLEWIGRIYTSGSTNYNPSLKSRVTISVDTSKNQFSLKLSSVTAADTAVYYCARGRGGYSYGTTRRGGQFDYWGQGTLVTVSS

SEQ ID NO: 7171 - protein, 125 aa, Artificial Sequence
  Synthetic construct
QVTLKESGPVLVKPTETLTLTCTVSGFSLSNARMGVSWIRQPPGKALEWLAHIFSNDEKSYSTSLKSRLTISKDTSKSQVVLTMTNMDPVDTATYYCARIRNYYGSGIRSPFDYWGQGTLVTVSS

SEQ ID NO: 7172 - protein, 124 aa, Artificial Sequence
  Synthetic construct
EVQLVESGGGLVQPGGSLRLSCAASGFTVSSNYMSWVRQAPGKGLEWVSVIYSGGSTYYADSVKGRFTISRDNSKNTLYLQMNSLRAEDTAVYYCARGYYDFWSGYDGNWFDPWGQGTLVTVSS

SEQ ID NO: 7173 - protein, 122 aa, Artificial Sequence
  Synthetic construct
QLQLQESGPGLVMASQTLSLTCVVSGGSLTSGGNSWSWIRQPPGKDLQWIGHIYYSGSTYFNPSLRSRVTMSVDRSKNQFSLNLKSVTAADTAVYYCARDMVGPTTNGFDFWGQGKEVTVSS

SEQ ID NO: 7174 - protein, 125 aa, Artificial Sequence
  Synthetic construct
EVQLVESGGGLVKPGGSLRLSCAASGFTFSSYSMNWVRQAPGKGLEWVSSISSSSSYIYYADSVKGRFTISRDNAKNSLYLQMNSLRAEDTAVYYCARGRNTVREYYYYYGMDVWGQGTTVTVSS

SEQ ID NO: 7175 - protein, 125 aa, Artificial Sequence
  Synthetic construct
QVQLQQWGAGLLKPSETLSLTCAVYGGSFSGYYWSWIRQPPGKGLEWIGEINHSGSTNYNPSLKSRVTISVDTSKNQFSLKLSSVTAADTAVYYCARGTRGYSYGRSYYYGMDVWGQGTTVTVSS

SEQ ID NO: 7176 - protein, 121 aa, Artificial Sequence
  Synthetic construct
EVQLLESGGGLVQPGGSLRLSCAASGFTFSSYAMSWVRQAPGKGLEWVSAISGSGGSTYYADSVKGRFTISRDNSKNTLYLQMNSLRAEDTAVYYCAKPRRGYWVCPPRYWGQGTLVTVSS

SEQ ID NO: 7177 - protein, 123 aa, Artificial Sequence; identical to SEQ ID NO: 7140
  Synthetic construct

SEQ ID NO: 7178 - protein, 126 aa, Artificial Sequence
  Synthetic construct
EVQLLESGGGLVQPGGSLRLSCAASGFTFSSYAMSWVRQAPGKGLEWVSAISGSGGSTYYADSVQGRFTISRDNSKNTLYLQMNSLRAEDTAVYYCAKGHLYYYDSSGTPDAFDIWGQGTMVTVSS

SEQ ID NO: 7179 - protein, 125 aa, Artificial Sequence
  Synthetic construct
EVQLVESGGGLVKPGGSLRLSCSASGFIFNNAWMSWVRQAPGKGLEWVGRIKSKTEGGTTDYVAPVKGRFTISRDDSKNTLYLQMNSLKTEDTAVYYCTTDSHPRGYCSSTSCFWGQGTLVTVSS

SEQ ID NO: 7180 - protein, 113 aa, Artificial Sequence
  Synthetic construct
EVQLVESGGGLVQPGGSLRLSCAASGFTFSSYSMNWVRQAPGKGLEWVSYISSSSSTIYYADSVKGRFTISRDNAKNSLYLQMNSLRDEDTAVYYCARDCDYWGQGTLVTVSS

SEQ ID NO: 7181 - protein, 122 aa, Artificial Sequence
  Synthetic construct
QVQLVQSGAEVKKPGASVKVSCQTSGYTFTGYYIHWVRQAPGQGLEWMGWIGPHSGVTSYAQKFQGRVTMTRDMSISTAYMELSGLTSDDTAVYYCARIGLYFDSSGPFDYWGQGTLVTVSS

SEQ ID NO: 7182 - protein, 119 aa, Artificial Sequence
  Synthetic construct
QVQLVQSGAEVKKPGASVKVSCKASGYTFTSYYMHWVRQAPGQGLEWMGIINPSGGSTSYAQKFQGRVTMTRDTSTSTVYMELSSLRSEDTAVYYCARGYDILTGYQYWGQGTLVTVSS

SEQ ID NO: 7183 - protein, 124 aa, Artificial Sequence
  Synthetic construct
QIHLQESGPGQVEPSQTLSLTCSVSGGPTNSGDYFWSWIRQSPGRGLEWIAYIYYNGRTYSNPSLRSRVAISIDTSNNHFSLQLTSATAADTAVYFCARARYYGSGSLRFFDSWGQGTLVTVSS

SEQ ID NO: 7184 - protein, 120 aa, Artificial Sequence
  Synthetic construct
QVQLVESGGGVVQPGRSLRLSCVGSGFAFGTSPFHWVRQAPGKGLEWVAVVSSDGSFKRHAESVKGRFAISRDNSESALYLQMNSLRVDDTAVYYCARQIISGTWLFDHWGQGTLVIVSS

SEQ ID NO: 7185 - protein, 126 aa, Artificial Sequence; identical to SEQ ID NO: 5543
  Synthetic construct

SEQ ID NO: 7186 - protein, 122 aa, Artificial Sequence; identical to SEQ ID NO: 6389
  Synthetic construct

SEQ ID NO: 7187 - protein, 125 aa, Artificial Sequence
  Synthetic construct
EVQLVESGGGLVKPGGSLRLSCAASGFTFSSYSMNWVRQAPGKGLEWVSSISSSSSYIYYADSVKGRFTISRDNAKNSLYLQMNSLRAEDTAVYYCARDWGSYSSRHYYYGMDVWGQGTTVTVSS

SEQ ID NO: 7188 - protein, 123 aa, Artificial Sequence
  Synthetic construct
EVQLVQSGAEMKKPGDSLKMSCKASGYSFANFWVGWVRQVPGQGLEWMGIIYPTESETRYSPSFQGRVTISADTATTTTYLHFRSLQASDTGLYYCARQPSSVVGASNYFDSWGQGALVTVSS

SEQ ID NO: 7189 - protein, 118 aa, Artificial Sequence
  Synthetic construct
EVQLVQSEAEVKKPGATVKISCKVSGYTFTDNYIHWVQQAPGKGLEWMGLIDPQNGETLYVEKFQGRLTITADTSTDTAYMELNSLSSEDTAVYYCSTAPSRDDFDYWGQGTLVTVSS

SEQ ID NO: 7190 - protein, 124 aa, Artificial Sequence
  Synthetic construct
QVQLQESGPGLVKPSQTLSLTCTVSGGSISSGSYYWSWIRQPAGKGLEWIGRIYTSGSTNYNPSLKSRVTISVDTSKNQFSLKLSSVTAADTAVYYCARGGYSSSWKHNWFDPWGQGTLVTVSS

SEQ ID NO: 7191 - protein, 114 aa, Artificial Sequence
  Synthetic construct
QVQLQQWGAGLLKPSETLSLTCAVYGGSFSGYYWSWIRQPPGKGLEWIGEINHSGSTNYNPSLKSRVTISVDTSKNQFSLKLSSVTAADTAVYYCARGGYFDYWGQGTLVTVSS

SEQ ID NO: 7192 - protein, 124 aa, Artificial Sequence
  Synthetic construct
EVQLLESGGGLVQPGGSLRLSCAASGFTFSAYAMSWVRQSPGKGLEWVSSISNSGGSTYYADSVKGRFTISRDNSKNTLYLQMNSLTVADTAVYFCAKDHRVSVADSSEYFQHWGQGTRLTVSS

SEQ ID NO: 7193 - protein, 122 aa, Artificial Sequence
  Synthetic construct
QLQLQESGPGLVKPSETLSLTCTVSGGSISSSSYYWGWIRQPPGKGLEWIGSIYYSGSTYYNPSLKSRVTISVDTSKNQFSLKLSSVTAADTAVYYCARLSSGYYKSYFDYWGQGTLVTVSS

SEQ ID NO: 7194 - protein, 120 aa, Artificial Sequence
  Synthetic construct
EVQLVQSGAEVKKPGATVKISCKVSGYTFTDYYMHWVQQAPGKGLEWMGLVDPEDGETTYAEKFQGRVTITADTSTDTAYMELSSLRSEDTAVYYCATGYRSGYQTPCDWGQGTLVTVSS

SEQ ID NO: 7195 - protein, 126 aa, Artificial Sequence
  Synthetic construct
GLQLVESGGGLVKPGGSLRLSCAASGFTFSTYTMNWVRQAPGKGLEWVSSISGSGNYIYYADSLEGRFTISRDNAKNSLFLQMNSLRAEDTAVYYCARTTYYDILTTYYKGEFDYWGQGTLVTVSS

SEQ ID NO: 7196 - protein, 124 aa, Artificial Sequence
  Synthetic construct
EVQLVESGGVVVQPGGSLRLSCAASGFTFDDYTMHWVRQAPGKGLEWVSLISWDGGSTYYADSVKGRFTISRDNSKNSLYLQMNSLRTEDTALYYCAKDGSRYCSGGSCYMASWGQGTLVTVSS

SEQ ID NO: 7197 - protein, 119 aa, Artificial Sequence
  Synthetic construct
EVQLEESGGGLIHPGGSLRLSCAASGFSVSSNYMSWVRQAPEKGLEWVSVIYSGGSTDYAESVKGRFTISRDNSKNTLYLQMNNLRVEDTAVYYCARGIGYPRVYSDFWGQGTLVTVSS

SEQ ID NO: 7198 - protein, 130 aa, Artificial Sequence
  Synthetic construct
EMLLVESGGGLVKPGESLRLSCAGSGFTFSDVCMSWVRQAPGKGLEWVGRIKTNSDGGTADYAAPVKGRFILSRDDSENTMYLQMNSLQTDDTAVYYCTTEGFMGFGELLARYYYAMDVWGQGTTVTVSS

SEQ ID NO: 7199 - protein, 122 aa, Artificial Sequence
  Synthetic construct
QVQLVESGGGVVLPGRSLRLSCAASGFTFSNYDMHWVRQAPGKGLEWVAIISSDGGDKYYGDSVRGRFTISRDNSKNTLYMEMNSLRREDTAVYYCAKDEGSLLTLPPGDLWGQGTLVTVSS

SEQ ID NO: 7200 - protein, 129 aa, Artificial Sequence
  Synthetic construct
EVQLVESGGGLVKPGGSLRLSCAASGFTFSSYSMNWVRQAPGKGLEWVSSISSSSSYIYYADSVKGRFTISRDNAKNSLYLQMNSLRAEDTAVYYCARDGNSVTMVRGARYWEYYFDYWGQGTLVTVSS

SEQ ID NO: 7201 - protein, 129 aa, Artificial Sequence
  Synthetic construct
QVQLVQSGAEVKKPGSSVKVSCKASGGTFSSYAISWVRQAPGQGLEWMGRIIPILGIANYAQKFQGRVTITADKSTSTAYMELSSLRSEDTAVYYCAREVRAPNQLRTSIYYYYGMDVWGQGTTVTVSS

SEQ ID NO: 7202 - protein, 126 aa, Artificial Sequence
  Synthetic construct
QVQLVQSGAEVKKPGASVKVSCKASGYTFSSYGINWVRQAPGQGLEWMGWMSTYNGNTNYAQELQYRVTMTADTSTNTAYLELRSLTSDDTAVYYCAREGRGLGGSTGYYYVLDYWGQGTPVTVSS

SEQ ID NO: 7203 - protein, 119 aa, Artificial Sequence
  Synthetic construct
QMQLVQSGPEVREPGTSVKVSCEATGLSFPSSIIQWVRQARGQRLQWMGWIVVGSGYINVAEQFQDRVSMSWDRSTRSGFLEVRSLRAEDTALYYCVASPLIAAQLDFWGRGTPVNVSS

SEQ ID NO: 7204 - protein, 125 aa, Artificial Sequence
  Synthetic construct
QVKLVQSGAEVKKPGSSVKVSCKASGGIFSTYAFSWVRQAPGQGLEWMGGVIPFFATSNYAQKFQGRLTVTADQSTSTAYMELSSLGSDDTAVYYCASDHIDGTSYHTFYDLDVWGQGTPVTVSS

SEQ ID NO: 7205 - protein, 126 aa, Artificial Sequence; identical to SEQ ID NO: 6255
  Synthetic construct

SEQ ID NO: 7206 - protein, 116 aa, Artificial Sequence
  Synthetic construct
HVQLQQSGPGLVKPSQILSLTCAISGDSVSSNSATWNWIRQSPSRGLEWLGRTYYRSKWYKHYAESVKSRIAINPDTSKNQFFLQLNSVTPEDTAVYYCTKGLDVWGQGTTVTVSS

SEQ ID NO: 7207 - protein, 119 aa, Artificial Sequence
  Synthetic construct
EVQLVQSGVEVKKPGESLRISCKGSGYTFTNYWISWVRQTPGKGLEWMGRIDPSDSYTNYSPSFEGHVTISADKSISTAYLQWSSLEASDTAMYYCARFPGVLQKVDYWGQGTLVIVSS

SEQ ID NO: 7208 - protein, 118 aa, Artificial Sequence
  Synthetic construct
QLQLQESGPGLVKPSETLSLTCTVSGGSISSSSYYWGWIRQPPGKGLEWIGSIYYSGSTYYNPSLKSRVTISVDTSKNQFSLKLSSVTAADTAVYYCARGKYSSSFYWGQGTLVTVSS

SEQ ID NO: 7209 - protein, 118 aa, Artificial Sequence
  Synthetic construct
EVQLSESGGGLVQPGESLTLSCVASGFIFSNYVMTWVRQVPGKGLEWVAAVGASGYANYPDSMRGRFTISRDNSKSTLYLQMNNLRIDDTAVYYCGTLLGATTMIEFWGQGTLLTVSS

SEQ ID NO: 7210 - protein, 125 aa, Artificial Sequence
  Synthetic construct
QVQLVESGGGVVQPGRSLRLSCAASGFTFSSYGMHWVRQAPGKGLEWVAVIWYDGSNKYYADSVKGRFTISRDNSKNTLYLQMNSLRAEDTAVYYCARDYSSSSPHRYKKTFDYWGQGTLVTVSS

SEQ ID NO: 7211 - protein, 124 aa, Artificial Sequence
  Synthetic construct
EVQLVESGGGLVKPGGSLRLSCEGSGFSFSDYKMNWVRQAPGKGLEWVSSINDGGTYIYYAESVRGRVTISRDNARRSAYLQMNGLRVEDTAVYYCAGSYSAYDFSGDDAFDIWGQGTMVAVSS

SEQ ID NO: 7212 - protein, 122 aa, Artificial Sequence
  Synthetic construct
QVQLVQSGAEVKKPGSSVKVSCKASGGTFSSYAISWVRQAPGQGLEWMGGIIPIFGTANYAQKFQGRVTITADESTSTAYMELSSLRSEDTAVYYCALRTTLIAVAGSFDYWGQGTLVTVSS

SEQ ID NO: 7213 - protein, 121 aa, Artificial Sequence
  Synthetic construct
QVQLVESGGGVVQPGRSLRLSCAASGFTFSSYGMHWVRQAPGKGLEWVAVIWYDGSNKYYADSVKGRFTISRDNSKNTLYLQMNSLRAEDTAVYYCASQGDGYHKGWFDPWGQGTLVTVSS

SEQ ID NO: 7214 - protein, 123 aa, Artificial Sequence
  Synthetic construct
EVQLVESGGGLVQPGGSLRLSCSASGFTFSNYAMHWVRQAPGKGLEYVSAISNDGGSTYYAESVKGRFTISRDNSKNTLYLQTSNLRPEDTAVYYCVKDLGWRTIAADGGDYWGQGTLVTVSS

SEQ ID NO: 7215 - protein, 128 aa, Artificial Sequence; identical to SEQ ID NO: 5945
  Synthetic construct

SEQ ID NO: 7216 - protein, 129 aa, Artificial Sequence
  Synthetic construct
QVQLQESGPGLVKPSETLSLTCTVSGGSVSSGSYYWSWIRQPPGKGLEWIGYIYYSGSTNYNPSLKSRVTISVDTSKNQFSLKLSSVTAADTAVYYCARDAHRRVATSSYYYYYGMDVWGQGTTVTVSS

SEQ ID NO: 7217 - protein, 127 aa, Artificial Sequence
  Synthetic construct
QVQLVQSGAEVKKPGASVKVSCKASGYTFTSYYMHWVRQAPGQGLEWMGIINPSGGSTSYAQKFQGRVTMTRDTSTSTVYMELSSLRSEDTAVYYCARTRFPYSSGWYVGNNWFDPWGQGTLVTVSS

SEQ ID NO: 7218 - protein, 118 aa, Artificial Sequence
  Synthetic construct
QVQLVQSGAEVRKPGSSVKVSCKASGGTFSSYSISWVRQAPGQGLEWMGRIIPNVGVPNYAQKFQDRVTITADKSTSTAYMEVSSLRSEDTAVYYCARSPAWGESSTWGQGTLVTVSS

SEQ ID NO: 7219 - protein, 118 aa, Artificial Sequence
  Synthetic construct
QVQLVQSGAEVKKPGASVKVSCKASGYTFTGYYMHWVRQAPGQGLEWMGWINPNSGGTNYAQKFQGRVTMTRDTSISTAYMELSRLRSDDTAVYYCARGTRVGATWRWGQGTLVTVSS

SEQ ID NO: 7220 - protein, 120 aa, Artificial Sequence
  Synthetic construct
QVQLQESGPGLVKPSETLSLTCTVSGGSISSYYWSWIRQPAGKGLEWIGRIYTSGSTNYNPSLKSRVTMSVDTSKNQFSLKLSSVTAADTAVYYCARGPLYSSGWYSDYWGQGTLVTVSS

SEQ ID NO: 7221 - protein, 121 aa, Artificial Sequence
  Synthetic construct
QVLLVQSGAEVKKPGSSVKVSCKASGGTFSSYIMNWVRQAPGQGLEWMGRIIPILGITIYAQKLQGRVTITADTSTNTGYMELSSLRSEDTAVYYCARGAEDGPNDALHFWGQGTMVTVSS

SEQ ID NO: 7222 - protein, 124 aa, Artificial Sequence
  Synthetic construct
EVQLLESGGGLVQPGGSLRLSCAASGFTFAAYAMSWVRQAPGKGLEWVSSISNSGGDTYYADSVKGRFTISRDNSKNTLYLQMGSLRAEDTALYFCAKDHRVSVASSPEYFQQWGQGTLVTVSS

SEQ ID NO: 7223 - protein, 125 aa, Artificial Sequence
  Synthetic construct
EVQLLESGGGLVQPGGSLRLSCAASGFNFSTYAMSWARLTPGRGLEWLSGISGSAHSTYYADAAHGRFTISRDNSKNTLYLQMNSLRAEDTAVYYCANDRRVPTTDRDFFGMDVWGQGTTVTVSS

SEQ ID NO: 7224 - protein, 119 aa, Artificial Sequence
  Synthetic construct
QVQLVESGGGVVQPGRSLRLSCAASGFSFSDYAMHWVRQTPVKGLEWVAVISYDGSNKYYADSVKGRFTISRDNSKNTLYLQMNSLRAEDTAVYYCANMYYDILSGPYWGQGTLVTVSS

SEQ ID NO: 7225 - protein, 123 aa, Artificial Sequence
  Synthetic construct
QVQLVESGGGVVQPGRSLRLSCAASGFTFSSYGMHWVRQAPGKGLEWVAVIWYDGSNKYYADSVKGRFTISRDNSKNTLYLQMNSLRAEDTAVYYCASHYYGSGSYPRPFDYWGQGTLVTVSS

SEQ ID NO: 7226 - protein, 123 aa, Artificial Sequence
  Synthetic construct
EVQLVESGGGLVKPGRSLRLSCTASGFTFGDYAMSWFRQAPGKGLEWVGFIRSKAYGGTTEYAASVKGRFTISRDDSKSIAYLQMNSLKTEDTAVYYCTREGGYDSGDSFDIWGQGTMVTVSS

SEQ ID NO: 7227 - protein, 127 aa, Artificial Sequence
  Synthetic construct
EVQLVESGGGLVKPGGSLRLSCAASGFTFSTYTMNWVRQAPGKGLEWVSSISGSSSYIYYADSVKGRLIISRDNAKNSLYLQMNSLRAEDTALYYCARDQVFWFGDFTQDYYGMDVWGQGTTVTVSS

SEQ ID NO: 7228 - protein, 127 aa, Artificial Sequence
  Synthetic construct
EVQLVESGGGLVQPGGSLRLSCAASGFTFSSYWMHWVRQAPGKGLVWVSRINSDGSSTSYADSVKGRFTISRDNAKNTLYLQMNSLRAEDTAVYYCACFGGLSRTGYSSGWYLPPTWGQGTLVTVSS

SEQ ID NO: 7229 - protein, 121 aa, Artificial Sequence
  Synthetic construct
EVQLVESGGGLVKPGGSLRLSCAASGFTFSNAWMSWVRQAPGKGLEWVGRIKSKTDGGTTDYAAPVKGRVTISRDDSKNTLFLQMNSLKSEDTAVYYCTTYYYDSSALGYWGQGTLVTVSS

SEQ ID NO: 7230 - protein, 121 aa, Artificial Sequence
  Synthetic construct
QVQMVESGGGLVKPGGSLRLSCAASGFAFDDCYMSWIRQTPGKGLEWISYISSSSSYINYADSVKGRFTISRDNAKNSLYLQMNNLRVEDTAVYYCAIDYYESRGFYFKNWGQGTLVTVTS

SEQ ID NO: 7231 - protein, 120 aa, Artificial Sequence
  Synthetic construct
QVQLVQSGAEVKKPGASVKVSCKASGYTFTSYGISWVRQAPGQGLEWMGWISAYNGNTNYAQKLQGRVTMTTDTSTSTAYMELRSLRSDDTAVYYCARFMVRGVRQVDYWGQGTLVTVSS

SEQ ID NO: 7232 - protein, 124 aa, Artificial Sequence
  Synthetic construct
EVQLVESGGGLVQPGGSLRLSCAASGFTFSSYSMNWVRQAPGKGLEWVSYISSSSSTIYYADSVKGRFTISRDNAKNSLYLQMNSLRDEDTAVYYCARVRRSGSYRSYWYFDLWGRGTLVTVSS

SEQ ID NO: 7233 - protein, 121 aa, Artificial Sequence
  Synthetic construct
EVHLVESGGGLVQPGGSLRLSCAASGFTFSNYGMNWVRQAPGKGLEWISYISTTSSTIYYADSVKGRFTISRDNAKNSLYLQMNSLRDEDTAVYYCAEVKPAYQYYGMDVWGQGTTVTVSS

SEQ ID NO: 7234 - protein, 123 aa, Artificial Sequence; identical to SEQ ID NO: 5463
  Synthetic construct

SEQ ID NO: 7235 - protein, 126 aa, Artificial Sequence
  Synthetic construct
QVQLQESGPGLVKPSQTLSLTCTVSGGSISSGSYYWSWIRQPAGKGLEWIGRIYTSGSTNYNPSLKSRVTISVDTSKNQFSLKLSSVTAADTAVYYCARIGKGSGWLRKSGISDYWGQGTLVTVSS

SEQ ID NO: 7236 - protein, 132 aa, Artificial Sequence
  Synthetic construct
EVQLVESGGGLVQPGGSLKLSCAASGFTFSGSAMHWVRQASGKGLEWVGRIRSKANSYATAYAASVKGRFTISRDDSKNTAYLQMNSLKTEDTAVYYCTRLRKDSSPLRSSKYYYYYGMDVWGQGTTVTVSS

SEQ ID NO: 7237 - protein, 125 aa, Artificial Sequence
  Synthetic construct
EVQLVESGGGLVKPGGSLGLSCAASGFTFSNAWMSWVRQAPGKGLEWVGRIKKKADGGTIDYAAPVRGRFTISRDDSKNTLYLQMNSLKTEDTAVYYCTTDYDYFHSSGYYFDNWGQGTLVTVSS

SEQ ID NO: 7238 - protein, 125 aa, Artificial Sequence
  Synthetic construct
QVQLVESGGGVVQPGRSLRLSCAASGFTFSSYAMHWVRQAPGKGLEWVAVISYDGSNKYYADSVKGRFTISRDNSKNTLYLQMNSLRAEDTAVYYCARIRNNQSKYRNWYYFDYWGQGTLVTVSS

SEQ ID NO: 7239 - protein, 130 aa, Artificial Sequence
  Synthetic construct
QVQLVESGGGVVQPGRSLRLSCAASGFTFSHYGMHWVRQAPGQGLEWVGMTSADGSSQYYTDSVKGRFTISRDNSKKMLSLQMNSLRAGDTAVYYCAKRVDEYCGGGSCPKGYYYGLDVWGQGTTVTVSS

SEQ ID NO: 7240 - protein, 121 aa, Artificial Sequence
  Synthetic construct
EVQLVESGGGLVQPGGSLRLSCEASGFTFSAYWMHWVRQAPGRGLAWVARIHHEGSSSTHADTVEGRFTISRDNAKSTLYLQMNSLRAEDTAVYYCARGGSSNWPAAFQHWGQGTLVSVSS

SEQ ID NO: 7241 - protein, 122 aa, Artificial Sequence
  Synthetic construct
EVKLVESGGALVQPGGSLRLLCEASGFTFDSYSMVWVRQAPGKGLDWVSYISSRSSTIYYGDSVKGRFTISRDNAKNSLYLQMDSLRDEDTAVYYCARVGRFGSGGYPFDYWGQGTLVPVSS

SEQ ID NO: 7242 - protein, 124 aa, Artificial Sequence
  Synthetic construct
QVQLVQSGAEVKKPGASVKVSCKASGYTFTSYGISWVRQAPGQGLEWMGWISAYNGNTNYAQKLQGRVTMTTDTSTSTAYMELRSLRSDDTAVYYCARDRYCSSTSCYTWFDPWGQGTLVTVSS

SEQ ID NO: 7243 - protein, 120 aa, Artificial Sequence
  Synthetic construct
QVHLVESGGGVVQPGKSLRLSCAASGFTFSDFAMHWVRQAPGGGLEWVAVISNNENNRYYGDFVKGRFFISRDNTKNTLFLQMNSLTPDDTAVYFCVKAQGNWGPYFDSWGQGTLLTVLS

SEQ ID NO: 7244 - protein, 128 aa, Artificial Sequence; identical to SEQ ID NO: 5945
  Synthetic construct

SEQ ID NO: 7245 - protein, 127 aa, Artificial Sequence
  Synthetic construct
QVQLVESGGGLVKPGGSLRLSCAASGFTFSDYYMSWIRQAPGKGLEWVSYISSSSSYTNYADSVKGRFTISRDNAKNSLYLQMNSLRAEDTAVYYCARELRYYDILTGYYSDAFDIWGQGTMVTVSS

SEQ ID NO: 7246 - protein, 126 aa, Artificial Sequence
  Synthetic construct
EVQLVESGGGLVQPGGSLRLSCAASGFTFSSYWMSWVRQAPGKGLEWVANIKQDGSEKYYVDSVKGRFTISKDNAKNSLYLQMNSLRAEDTAVYYCARQKYCSSTSCYSRGGMDVWGQGTTVTVSS

SEQ ID NO: 7247 - protein, 132 aa, Artificial Sequence
  Synthetic construct
QVQLVESGGGVVQPGRSLRLSCAASGFTFSSYGMHWVRQAPGKGLEWVAVISYDGSNKYYADSVKGRFTISRDNSKNTLYLQMNSLRAEDTAVYYCAKDHRYCSSTSCTIGYYYYYYGMDVWGQGTTVTVSS

SEQ ID NO: 7248 - protein, 122 aa, Artificial Sequence
  Synthetic construct
EVQLVESGGGLVKPGRSLRLSCTASGFTFGDYAMSWFRQAPGKGLEWVGFIRSKAYGGTTEYAASVKGRFTISRDDSKSIAYLQMNSLKTEDTAVYYCTRYKWLRGQTVDYWGQGTLVTVSS

SEQ ID NO: 7249 - protein, 120 aa, Artificial Sequence
  Synthetic construct
EVQLVESGGGLVKPGGSLRLSCAASGFTFSSYSMNWVRQAPGKGLEWVSSISSSSSYIYYADSVKGRFTISRDNAKNSLYLQMNSLRAEDTAVYYCARAGWLQPHAFDIWGQGTMVTVSS

SEQ ID NO: 7250 - protein, 121 aa, Artificial Sequence
  Synthetic construct
QVQLVQSGVEVKKPGSSVKISCQTSGDTFSSYAFSWVRQAPGQGLEWLGGIIPLFGTPSYTQRLQGRVTITADDSTRTAYLELTSLRAEDTGIYYCARDSSRYFDWLPWYWGQGTQVIVTS

SEQ ID NO: 7251 - protein, 120 aa, Artificial Sequence
  Synthetic construct
QVQLQESGPGLVKPSQTLSLTCTVSGGSISSGTHYWNWIRQPAEKGLEWIGRIYPTGTTHYNPSLQSRVTISLDTSKNQFSLNLSSVTAADTAVYYCARDSSGDQRIDYWGQGTLVTVSS

SEQ ID NO: 7252 - protein, 121 aa, Artificial Sequence
  Synthetic construct
EVQLVESGGGFVKPGGSLRLSCAASGFTFSNAWMSWVRQAPGKGLEWVGRIKRKTDGGTTDYAAPVKGRFSISRDDSKNTLYLQMNSLKTEDTGVYYCSTPYMAAADTGPWGQGTLVTVSS

SEQ ID NO: 7253 - protein, 126 aa, Artificial Sequence
  Synthetic construct
QVQLQESGPGLVKPSQTLSLTCTVSGGSISSGSYYWSWIRQPAGKGLEWIGRIYTNGDTRYNPPLESRVTISADTSKNQFSLNVRSVTAADTAVYYCARANDFWSGSRGAFWFDPWGQGTLVTVSS

SEQ ID NO: 7254 - protein, 124 aa, Artificial Sequence
  Synthetic construct
QAQLQQWGAGLLKPSETLSLTCAVSGGSFSGYYWSWIRQPPGKGLEWIGEIIDSGSSNYNPSLKSRVSISVDTSKNQFSLKLSSVTAADTAVYYCARAIQNIVATFRGKYFQDWGQGTLVTVSS

SEQ ID NO: 7255 - protein, 126 aa, Artificial Sequence
  Synthetic construct
QVQLVESGGGVVQPGRSLRLSCAASGFTFSSYGMHWVRQAPGKGLEWVAVISYDGSNKYYADSVKGRFTISRDNSKNTLYLQMNSLRAEDTAVYYCAKTPRIGSGGRYYYYGMDVWGQGTTVTVSS

SEQ ID NO: 7256 - protein, 124 aa, Artificial Sequence; identical to SEQ ID NO: 5439
  Synthetic construct

SEQ ID NO: 7257 - protein, 122 aa, Artificial Sequence
  Synthetic construct
EVQLLESGGGLVKPGGSLRLSCAASGFTFSSYAMNWVRQAPGKGLEWVSIISATGGTTYYADFVKGQFTISRDNSKNTVYLQMDSLRDEDTAVYYCTFGQQLVRKGYYFDYWGQGTLVTVSS

SEQ ID NO: 7258 - protein, 121 aa, Artificial Sequence
  Synthetic construct
QVQLQESGPGLVKPSETLSLTCSASGDSIDKYYWTWIRQSPGKGLQWIGYIHYSGASNYSPSLKSRLTISLDPAKNQVSLQLRSVTAADTAVYYCATYLKLQINYYGLDVWGQGTTVTVSS

SEQ ID NO: 7259 - protein, 131 aa, Artificial Sequence
  Synthetic construct
EVQLVESGGGLVQPGGSLRLSCAASGFTFSSYSMNWVRQAPGKGLEWVSYISSSSSTIYYADSVKGRFTISRDNAKNSLYLQMNSLRDEDTAVYYCARVQWWFLASQSIAARRTRNAFDIWGQGTMVTVSS

SEQ ID NO: 7260 - protein, 125 aa, Artificial Sequence
  Synthetic construct
AVQLLESGGGLAQPGGSLRLSCAASGFIFSRYAMSWVRQAPGKGLEWVSAISDSGRTTYYADSAKGRFTISRDNSKKTLYLQMNSLRAEDTAIYYCARSFWGGYCSTTNCPLDFWGQGTLVTVSS

SEQ ID NO: 7261 - protein, 126 aa, Artificial Sequence; identical to SEQ ID NO: 5486
  Synthetic construct

SEQ ID NO: 7262 - protein, 119 aa, Artificial Sequence
  Synthetic construct
QLQLQESGPGLVKPSETLSLICNVSGVSISSRGYYWGWIRQPPGKGLDWIGSIYYSGSTYYKPSLFRRVTISIDTSKNQLSLKLNSVTAADTAVYYCARHKWGWDIDSWGQGSLVAVSS

SEQ ID NO: 7263 - protein, 119 aa, Artificial Sequence
  Synthetic construct
QVPLVQSGAEVRQPGSSVRVSCRPSGASPTIYTFSWVRQAPGQGLEWMGRIISRTGATYYAQKFQDRLTITADTSSGTAYMDLTSLRSEDTALYYCARDPTLRGLGDYWGQGTQVTVSS

SEQ ID NO: 7264 - protein, 123 aa, Artificial Sequence
  Synthetic construct
QLQLQESGPGLVKPSETLSLTCTVSGGSISSSSYYWGWIRQPPGKGLEWIGSIYYSGSTYYNPSLKSRVTISVDTSKNQFSLKLSSVTAADTAVYYCARQALYFDWLLQFDYWGQGTLVTVSS

SEQ ID NO: 7265 - protein, 117 aa, Artificial Sequence
  Synthetic construct
QVQLQESGPGLVKPSETLSLTCAVSGGSISSSNWWSWVRQSPGKGLEWIGEIHHSGSTNYNPSLKSRVTISVDKSKNQFSLRLDSVTAADTAVYYCAITIGWCVNYWAQGKLVTVSS

SEQ ID NO: 7266 - protein, 125 aa, Artificial Sequence
  Synthetic construct
EVQLLESGGGLVQPGESLRLSCAASGFTFNSHAMTWVRQAPGKGLEWVATIGGGGTNTFYADSVKGRVTISRDNSKDTVYLQVSSLKGEDTAVYYCAKGYQMLYTAHRFDAFDFWGQGTMVTVSS

SEQ ID NO: 7267 - protein, 126 aa, Artificial Sequence
  Synthetic construct
EVQLVESGGGLIQPGGSLRLSCAASGFTVSSNYMSWVRQAPGKGLEWVSVIYSGGSTYYADSVKGRFTISRDNSKNTLYLQMNSLRAEDTAVYYCAREELERRGPTQHYYYGMDVWGQGTTVTVSS

SEQ ID NO: 7268 - protein, 121 aa, Artificial Sequence
  Synthetic construct
EVQLVESGGGLVKPGGSLRLSCAASGFTFSNAWMSWVRQAPGKGLEWVGRIKSKTDGGTTDYAAPLKGRFTISRDDLKNTLYLQMNSLKTEDTAVYFCVSGWSLRGRSHYWGQGTLVTVSS

SEQ ID NO: 7269 - protein, 122 aa, Artificial Sequence; identical to SEQ ID NO: 6035
  Synthetic construct

SEQ ID NO: 7270 - protein, 123 aa, Artificial Sequence
  Synthetic construct
EVQLLESGGGLIQPGGSLRLSCAASGFTFSNYAMSWVRQAPGKGLEWVAAISDGGGSTFHADSVRGRLTISRDNSKTTLYLQMDSLRVEDTAVYYCVKRGPKAVVGSGYFDLWGRGTLVTVSS

SEQ ID NO: 7271 - protein, 122 aa, Artificial Sequence
  Synthetic construct
QVHLVQSGAEVKKPGSSVKVSCKASGDTFSGFAISWVRQAPGQGLEWMGRIISILGVANYAQKFQGRVTFTADKSTSTIYMELNSLTSEDTAVYFCARDRVETGGAYESDSWGQGTLVTVSS

SEQ ID NO: 7272 - protein, 122 aa, Artificial Sequence
  Synthetic construct
EVQLVESGGGLVQPGRSLRLSCAASGFTFDDYAMHWVRQAPGKGLEWVSRISWNSGNIGYAGSVKGRFTISRDNAKNSLYLQMNSLRAEDTALYYCAKDMSFGGSYPQPDYWGQGTLVTVSS

SEQ ID NO: 7273 - protein, 121 aa, Artificial Sequence
  Synthetic construct
QVQLQESGPGLVKPSQTLSLTCTVSGGSVSSGYYYWYWIRQPAGKGLEWLGRIYNRGGLTYNPALETRVSLSLDTSKNRFSLNLTSVTAADTAVYYCARLRGMSLWHFDLWGRGTLVTVSS

SEQ ID NO: 7274 - protein, 122 aa, Artificial Sequence
  Synthetic construct
QITLKESGPTLVKPTQTLTLTCTFSGFSLSTSGEGVGWIRQPPGKALEWLALIFWDDDKRYSPSLKSRLTITKDASRNQVVLTMTNMDPEDTATFYCVHSTFYGAYDPADYWGPGTLVTVSS

SEQ ID NO: 7275 - protein, 125 aa, Artificial Sequence
  Synthetic construct
QVQLVQSGAEVKKPGASVKVSCKASGYTFTSYGISWVRQAPGQGLEWMGWISAYNGNTNYAQKLQGRVTMTTDTSTSTAYMELRSLRSDDTAVYYCARAVRGVIPSFYYYGMDVWGQGTTVTVSS

SEQ ID NO: 7276 - protein, 126 aa, Artificial Sequence
  Synthetic construct
EVQLVQSGAEVRKPGESLKISCQGSGYNFAAHWIAWVRQMPGKGLECMGLIYPGDSTTTYRPSFRGQVTISVDKSTSTAYLQWSSLKASDTAMYYCARNYGSLSIPTGATTYLDYWGQGALVTVSS

SEQ ID NO: 7277 - protein, 122 aa, Artificial Sequence
  Synthetic construct
EVQLVESGGGLVKPGGSLRLSCAASGFTFSSYSMNWVRQAPGKGLEWVSSISSSSSYIYYADSVKGRFTISRDNAKNSLYLQMNSLRAEDTAVYYCARDVGRELHWHPGGIWGQGTLVTVSS

SEQ ID NO: 7278 - protein, 116 aa, Artificial Sequence
  Synthetic construct
EVQLLESGGGLVQPGGSLRLSCAASGFTFSSYAMSWVRQAPGKGLEWVSAISGSGGSTYYADSVKGRFTISRDNSKNTLYLQMNSLRAEDTAVYYCATSGSYFGYWGQGTLVTVSS

SEQ ID NO: 7279 - protein, 121 aa, Artificial Sequence
  Synthetic construct
QVQLVESGGGVVQPGRSLRLSCTASGFSLSNYGMHWVRQAPGKGLQWVTAIDFDGSFEYYADSVKGRFSISRDISKNTLYLQVNNLRAEDTAVYYCGRNSDPGHNWYFDLWGRGTLVKVSS

SEQ ID NO: 7280 - protein, 119 aa, Artificial Sequence
  Synthetic construct
QVQLVQSGAEVKKPGASVKVSCKASGYTFTSYYMHWVRQAPGQGLEWMGIINPSGGRTSYAQKFQGRVTMTRDTSTSTVYMDLSSLRSEDTAVYYCARSLGDSSGLDYWGQGTLVTVSS

SEQ ID NO: 7281 - protein, 128 aa, Artificial Sequence
  Synthetic construct
QVQLQESGPGLVKPSQTLSLTCTVSGGSISSGSYYWSWIRQPAGKGLEWIGRIYTSGSTNYNPSLKSRVTISVDTSKNQFSLKLSSVTAADTAVYYCARALSIAASLGGYYYYGMDVWGQGTTVTVSS

SEQ ID NO: 7282 - protein, 120 aa, Artificial Sequence
  Synthetic construct
RVQLVESGGGLVKPGGSLRLSCAASGFTFSDYYMTWIRQAPGKGLEWVSYISPSGSTIYYADSVKGRFTISRDNAKNSLYLQVNSLRAEDTAVYYCARGTWVDHFGVDYWGQGTLVTVSS

SEQ ID NO: 7283 - protein, 126 aa, Artificial Sequence
  Synthetic construct
QERLAQSGDEVKEPGASVQVSCQASGYMFSDYNIHWVRQAPGHAPEWLGWINTNSHSTLFGKKFQGRVTMTVDTAMKTVYMDLRSLRPDDTAVYYCARHRIYRETTKIVEGGMDVWGQGTTVSVSS

SEQ ID NO: 7284 - protein, 117 aa, Artificial Sequence
  Synthetic construct
EVQLVESGGGLVKPGGSLRLSCAASGFTFSSYSLNWVRLAPGKGLEWVSSISSSSSYIFYADSVKGRFTISRDNAKNSLYLQMTSLRAEDTAVYYCARGNSGNYSDWGQGTLVTVSS

SEQ ID NO: 7285 - protein, 122 aa, Artificial Sequence
  Synthetic construct
QVQLQESGPGLVKPSQTLSLTCTVSGGSISSGSYYWSWIRQPAGKGLEWIGRIYTSGSTNYNPSLKSRVTISVDTSKNQFSLKLSSVTAADTAVYYCARVTGEDMTYGMDVWGQGTTVTVSS

SEQ ID NO: 7286 - protein, 118 aa, Artificial Sequence
  Synthetic construct
EVQLVESGGGLVKPGGSLRLSCAASGFTFSNAWMSWVRQAPGKGLEWVGRIKSKTDGGTTDYAAPVKGRFTISRDDSKNTLYLQMNSLKTEDTAVYYCTTSSIGRGYWGQGTLVTVSS

SEQ ID NO: 7287 - protein, 121 aa, Artificial Sequence; identical to SEQ ID NO: 5725
  Synthetic construct

SEQ ID NO: 7288 - protein, 119 aa, Artificial Sequence
  Synthetic construct
QVHLQQWGAGLLKPSETLSLTCAVYGGSFSGYYWNWIRQPPGKGLEWIGEIKHGGSTNYNPSLKSRVTLSIDASKNQFFLNLRSVSAADTAVYYCARGYGAYTANYNSWGQGTLVTVSS

SEQ ID NO: 7289 - protein, 122 aa, Artificial Sequence
  Synthetic construct
QLQLQESGPGLVKPSETLSLTCTVSGGSISSSSYYWGWIRQPPGKGLEWIGSIYYSGSTYYNPSLKSRVTISVDTSKNQFSLKLSSVTAADTAVYYCARRWGRAYYYGMDVWGQGTTVTVSS

SEQ ID NO: 7290 - protein, 125 aa, Artificial Sequence
  Synthetic construct
QVQLVESGGGVVQPGRSLRLSCAASGFTFSSYAMHWVRQAPGKGLEWVAVISYDGSNKYYADSVKGRFTISRDNSKNTLYLQMNSLRAEDTAVYYCARETRSRKYYYDSSGYGHWGQGTLVTVSS

SEQ ID NO: 7291 - protein, 125 aa, Artificial Sequence
  Synthetic construct
EVQLVESGGGLIQPGGSLRLSCAASGFIVSSNYMSWVRQAPGKGLKWVSVIYNGGDTYYADSVKGRFTISRDNSKNTMYLQMNSLRVEDTAVYFCARGAVTGYYPHYSYYGMDVWGQGTTVTVSS

SEQ ID NO: 7292 - protein, 122 aa, Artificial Sequence; identical to SEQ ID NO: 46
  Synthetic construct

SEQ ID NO: 7293 - protein, 123 aa, Artificial Sequence; identical to SEQ ID NO: 5437
  Synthetic construct

SEQ ID NO: 7294 - protein, 126 aa, Artificial Sequence
  Synthetic construct
RVTLKESGPVLVKPSETLTLTCTVSGFSLFSGQMGVTWIRQPPGRALQWVAYLFPNGEQSFRPSLQSRLTISKDPFNNQVVLTLANIHPADTGTYYCARVQQLGLRHYHYYDVDVWGQGTTVTVSA

SEQ ID NO: 7295 - protein, 117 aa, Artificial Sequence
  Synthetic construct
QVQLVQSGSELKKPGASVKVSCKASGYTFTGNVMSWVRQAPGQGLEWMGWINTNTGNPTYAQGFTGRFVFSLDTSVSTAYLQISSLEAEDTALYYCARGSSSAMDVWGQGTTVTVSS

SEQ ID NO: 7296 - protein, 119 aa, Artificial Sequence
  Synthetic construct
QVQLVQSGAEVRKPGASVKVSCTASGDGFTTYYMHWVRQAPGQGLEWMGIMNPSDGTTTYAQNFQGRVTMTRDTSTSTVYMELSSLRSDDTAVYYCAGSDWYPYYFDYWGQGTLVTVSS

SEQ ID NO: 7297 - protein, 127 aa, Artificial Sequence
  Synthetic construct
EVQLVESGGGLVQPGGSLRLSCAASGFTFSSYSMNWVRQAPGKGLEWVSYISSSSSTIYYADSVKGRFTISRDNAKNSLYLQMNSLRDEDTAVYYCARDSVVVARLTGVEAYGMDVWGQGTTVTVSS

SEQ ID NO: 7298 - protein, 126 aa, Artificial Sequence
  Synthetic construct
DEELAESGGGLVRPGRSLRLSCTGSGSAFNTYNLIWVRQAPGGGLEWISYISSTGSVVYYADSVKGRFTMSRDNDKSSLFLQMNGLAVEDSALYFCARGMSSLSESGQSYWYFDLWGRGTLVTVSS

SEQ ID NO: 7299 - protein, 131 aa, Artificial Sequence
  Synthetic construct
EVQLVESGGGLVQPGGSLRLSCAASGFTFSDHYMDWVRQAPGKGLEWVGRTRNKANSYTTEYAASVKGRFTISRDDSKNSLYLQMNSLKTEDTAVYYCARGGYSYGGKFRVRYYYYGMDVWGQGTTVTVSS

SEQ ID NO: 7300 - protein, 120 aa, Artificial Sequence
  Synthetic construct
QVQLQESGPGLVKPSETLSLTCNVSGASIRSYYWSWIRQSPGKGLEWIGYMYNSGSTTYNPSLKSRVTISEDTSKNQFSLKLRSVTAADTAVYYCARVFDWFSLWYFDLWGRGTLVTVSS

SEQ ID NO: 7301 - protein, 119 aa, Artificial Sequence
  Synthetic construct
QITLKESGPTLVKPTQTLTLTCSFSGFSLSTSGEGVGWIRQPPGKALEWLALIYWDDDKRYSPALKSRLTITKYTSRNQVVLTMTNVDPVATATYYCAHRLRADAFDIWGQGTMVTVSA

SEQ ID NO: 7302 - protein, 123 aa, Artificial Sequence; identical to SEQ ID NO: 5437
  Synthetic construct

SEQ ID NO: 7303 - protein, 123 aa, Artificial Sequence
  Synthetic construct
QVQLVQSGAEVKKPGASVKVSCKASGYTFTSYYMHWVRQAPGQGLEWMGIINPSGGSTSYAQKFQGRVTMTRDTSTSTVYMELSSLRSEDTAVYYCARDQAPYGSEKTQFDYWGQGTLVTVSS

SEQ ID NO: 7304 - protein, 121 aa, Artificial Sequence; identical to SEQ ID NO: 6837
  Synthetic construct

SEQ ID NO: 7305 - protein, 124 aa, Artificial Sequence
  Synthetic construct
QVQLVQSGAEVKKPGASVKVSCKASGYTFTSYGISWVRQAPGQGLEWMGWISAYNGNTNYAQKLQGRVTMTTDTSTSTAYMELRSLRSDDTAVYYCARASRYSGSYYYYGMDVWGQGTTVTVSS

SEQ ID NO: 7306 - protein, 121 aa, Artificial Sequence
  Synthetic construct
QITLKESGPTLVKPTQTLTLTCSFSGFSLSTGGVAVGWIRQPPGKALEWLAVIYWDDDKRYSPFLKSRLTVTKDTSKDQVFLTLTNMDPVDTATYFCAHRYYYSVDAFDIWGQGTMVTVSS

SEQ ID NO: 7307 - protein, 127 aa, Artificial Sequence
  Synthetic construct
QVQLVESGGGVVQPGGSLRLSCAASGFIFRNYAMHWVRQAPGKGLEWVAVVWYDGSDQYYEDSVKGRFTISRDNSKDTLYLQMNIVTDEDSGVYHCARGGPEMNFDSSGYYSHFDYWGQGALVTVSS

SEQ ID NO: 7308 - protein, 121 aa, Artificial Sequence
  Synthetic construct
QVQLVQSGAEVKKPGASVTLSCKASGYSFTSYYMHWVRQAPGQGLEWMGMINPNGGSTTYAQRFQGRVTMTSDTSTSTVYMELSSLRSEDTAVYYCARASIVGATRRFDSWGQGTLVTVSS

SEQ ID NO: 7309 - protein, 127 aa, Artificial Sequence
  Synthetic construct
QVQLVESGGGVVQPGRSLRLSCEASGFTLSDYGIHWVRQAPGKGLEWVAVISYDGDKKYHADSVKGRFRISRDNSNNALFLQMDSLRAEDTAVYYCVSAGYYYGSGGYENHYGMDVWGQGTTVTVSS

SEQ ID NO: 7310 - protein, 116 aa, Artificial Sequence; identical to SEQ ID NO: 6582
  Synthetic construct

SEQ ID NO: 7311 - protein, 126 aa, Artificial Sequence
  Synthetic construct
QVQLQESGPGLVKPSQTLSLSCTVSGGSIRSPKYYWNWIRQPAGRGLEWIGRIFSSGSANYNPSLEGRVTMSLDTSKSQFSLKLTSVTAADTAVYYCARDQGECSSNSCYRWFDPWGQGTLVTVSS

SEQ ID NO: 7312 - protein, 127 aa, Artificial Sequence
  Synthetic construct
QVQLVQSGAEVKKPGASVKVSCKASGYTFTSYDINWVRQATGQGLEWMGWMNPNSGNTGYAQKFQGRVTMTRNTSISTAYMELSSLRSEDTAVYYCARAQKPRYSSGWYKRGPLPYWGQGTLVTVSS

SEQ ID NO: 7313 - protein, 118 aa, Artificial Sequence
  Synthetic construct
QVQLVQSGAEVKKPGASVKVSCKASGYTFTSYGISWVRQAPGQGLEWMGWISAYNGNTNYAQKLQGRVTMTTDTSTSTAYMELRSLRSDDTAVYYCARGGSYRHFDYWGQGTLVTVSS

SEQ ID NO: 7314 - protein, 129 aa, Artificial Sequence
  Synthetic construct
QVQLQESGPGLVKPSQTLSLTCTVSGGSLSSGSYYWSWIRQPAGRGLEWIGRVYISGTTNYNPSLKSRVTMSVDASTNQFSLMLSSVTAADTAVYYCVRDLYEQLVAGEYFHYYGMDVWGQGITVTVSS

SEQ ID NO: 7315 - protein, 129 aa, Artificial Sequence
  Synthetic construct
QVTLKESGPVLVKPTETLTLTCTVSGFSLSNARMGVSWIRQPPGKALEWLAHIFSNDEKSYSTSLKSRLTISKDTSKSQVVLTMTNMDPVDTATYYCARALWYSRSSKFLPVGVAFDIWGQGTMVTVSS

SEQ ID NO: 7316 - protein, 123 aa, Artificial Sequence; identical to SEQ ID NO: 5437
  Synthetic construct

SEQ ID NO: 7317 - protein, 127 aa, Artificial Sequence
  Synthetic construct
QVQLQESGPGLVKPSQTLSLTCSVSGGSISSGSFYWNWFRQPAGTGLEWIGRVYNSGSTSYNPSLKSRVSISVDTSKNHFSLKLSSVTAADTAVYYCVRAEVVVVLPAAAYDAFDIWGPGTKVTVSP

SEQ ID NO: 7318 - protein, 123 aa, Artificial Sequence
  Synthetic construct
EVQLVESGGGLVQPGGSLRLSCSASGFTFSYFAMHWVRQAPEKGLEYVSAISNDGGTKNYADSVQGRFSVSRDNSKNTLYLQMNNLRPEDTAVYYCVRDLGWRTIAATGGDFWGQGTLVTVSS

SEQ ID NO: 7319 - protein, 125 aa, Artificial Sequence
  Synthetic construct
EVQLVESGGGLFKPGGSMRLSCAASGFNFDIYSMNWVRQAPGKGLEWVSAISSTGLYKYYAGSLEGRIAISRDNANHLVYLQMNDLRDDDTGVYYCARDSRVPCSGGSCYGLDVWGQGTTIFVSS

SEQ ID NO: 7320 - protein, 129 aa, Artificial Sequence
  Synthetic construct
EVQLLESGGGLVQPGGSLRLSCAASGFTFSNYAMSWVRQAPGKGLEWVSAISGSGGSTYYADSVKGRFTISRDNSKNTLYLQMNSLRAEGTAVYYCAKAIGRGDYGSGTYPYYYGMDVWGQGTTVTVSS

SEQ ID NO: 7321 - protein, 123 aa, Artificial Sequence
  Synthetic construct
GERLVESGGGLVQPGGSLRLSCSASGFTFSSFAMHWVRQAPGKGLEYVSAISNSGDGTHHARSVKGRFTISRDNSKNTLYLQMTSLRTDDTAMYYCVKDLGWRTIAADGGDSWGQGTLVTVSS

SEQ ID NO: 7322 - protein, 128 aa, Artificial Sequence
  Synthetic construct
QVPLQESGPGLVKPSETLSLTCTVSGGSISSYYWSWIRQPPGKGLEWIGYVSYSGSPTYNPSLKSRLTISVDRSKNQFSLRLTSVTAADTAVYFCARLTKEVRGKRWPYYYYYGLDAWGQGTTVIVSP

SEQ ID NO: 7323 - protein, 125 aa, Artificial Sequence
  Synthetic construct
EVQLVESGGGLVQPGGSLRLSCAASGFTVSSNYMSWVRQAPGKGLEWVSVIYSGGSTYYADSVKGRFTISRDNSKNTLYLQMNSLRAEDTAVYYCARDTASDSVVVPATTGGDYWGQGTLVTVSS

SEQ ID NO: 7324 - protein, 124 aa, Artificial Sequence
  Synthetic construct
QVQLVQSGAEVKKPGASVKVSCKASGYTFTSYGISWVRQAPGQGLEWMGWISAYNGNTNYAQKLQGRVTMTTDTSTSTAYMELRSLRSDDTAVYYCARVLFVGQQLFTRKIDYWGQGTLVTVSS

SEQ ID NO: 7325 - protein, 121 aa, Artificial Sequence
  Synthetic construct
EVQLMESGGGLVKSGGSVRLSCTASGFSFHNFAMGWVRRAPGKGLEWVSAISGSGGTTYYADSVRGRVTISRDNSKSTVSLEMHSLRAGDTAVYYCARHEEDYDSSGPDYWGQGTQVTVSA

SEQ ID NO: 7326 - protein, 122 aa, Artificial Sequence
  Synthetic construct
QVQLQESGPGLVKPSETLFLTCTVSGGSINSRSYYWNWIRQPAGKGLQWIGRVYTTGTITYNPSLESRGTISVDTSQNQFSLSLTSVTVADTAVYYCARGPYGDPDDHFDFWGRGTLVTVSS

SEQ ID NO: 7327 - protein, 120 aa, Artificial Sequence; identical to SEQ ID NO: 6888
  Synthetic construct

SEQ ID NO: 7328 - protein, 123 aa, Artificial Sequence
  Synthetic construct
EVQLVESGGGLVQPGGSLRLSCAASGFTFSNYNMNWVRQAPGKGPEWISYISSSSSIIYYADSVKGRFTISRDNAKNLLYLQMNNLRDEETAVYYCARDQTYPNSFYYGMDVWGHGTTVTVSS

SEQ ID NO: 7329 - protein, 124 aa, Artificial Sequence
  Synthetic construct
QVQLQESGPGLVKPSETLSLTCTVSGGSISSYYWSWIRQPPGKGLEWIGYIYYSGSTNYNPSLKSRVTISVDTSKNQFSLKLSSVTAADTAVYYCARSIVGATTYYYYYGMDVWGQGTTVTVSS

SEQ ID NO: 7330 - protein, 122 aa, Artificial Sequence
  Synthetic construct
QVQLVQSGAEVKKPGASVKVSCKASGYTFTSYYMHWVRQAPGQGLEWMGIINPSGGSTSYAQKFQGRVTMTRDTSTSTVYMELSSLRSEDTAVYYCARGRSRLSDLDAFDIWGQGTMVTVSS

SEQ ID NO: 7331 - protein, 127 aa, Artificial Sequence
  Synthetic construct
EVQLMESGGAVVQPGGSLRLSCVASGFTFDDSTMHWVRQAPGKGLEWVSLIHWDGRRIYYADSVKGRFTISRDNSKNSLYLQMNSLRSEDTALYYCAKDASRPEYSSKWDHGYFHHWGQGTLVIVSS

SEQ ID NO: 7332 - protein, 119 aa, Artificial Sequence
  Synthetic construct
QVQLQESGPGLVKPSETLSLTCNVSGASITDYFWSWIRQSPGRGLEWIGYIHFGGSTNYNPSLKSRVSILVGSSKDQFSLRLRSVTAADTAVYYCARHIGQNTGYFDPWGRGTLVTVSS

SEQ ID NO: 7333 - protein, 120 aa, Artificial Sequence
  Synthetic construct
EVQLVESGGGLVQPGGSLRLSCAASGFTFSNYWMHWVRQAPGKGLVWVSRINSDGSTTSYADSVKGRFTISRDNAKNTLYLYMNSLRAEDTAVYYCARGQRSSGWYQGYWGQGTLVTVSS

SEQ ID NO: 7334 - protein, 122 aa, Artificial Sequence
  Synthetic construct
QLHLQESGPGLVKPSETLSLTCTVSGGSMNNNDYYWGWIRQPPGEGLEWIAAINYSGTTSYNPSLESRVTISIDKSKNQFSLKLRSVTAADTAVYYCARRGYHANSAALDIWGQGTMVTVSS

SEQ ID NO: 7335 - protein, 127 aa, Artificial Sequence
  Synthetic construct
QVQLVESGGGVVQPGKSLRLSCAASGFTFRNYPLHWVRQAPGKGLEWVAVITDDGNNEYYADSVKGRFTISRDNSKDTLYLQMNSLRDEDSAVYYCARDPSWGSGWTNSLGSSFDFWGQGTLVTVSS

SEQ ID NO: 7336 - protein, 133 aa, Artificial Sequence
  Synthetic construct
QVQLQESGPGLVKPSETLSLTCTVSGDSVLSGNHYWSWIRQTPGTGLEWIGNILYSGRPRYNPSLKSRVTMSIDTSKNLFALRMTSVTAADTGVYYCARQFFREGESIYDVLTLTAWGFFGSWGQGTPITVSS

SEQ ID NO: 7337 - protein, 126 aa, Artificial Sequence
  Synthetic construct
EVQLVESGGGLVQPGGSLRLSCAASGFTFNIYTMNWVRQAPGKGLEWVSYISSSSRDIYYADSVRGRFTISRDNGKKSLYLQMNSLRDEDTAVYYCARGHYYDSSPYYSEGGFDYWGQGALVTVSS

SEQ ID NO: 7338 - protein, 126 aa, Artificial Sequence
  Synthetic construct
EVQLVESGGDLLKPGGSLRLSCAASGFSFNNAWMSWVRQTPGKGLEWVGRIKSKDDGGTGEYGAAVKGRVTVSRDDLKNMIYLQMKSLKTEDTGVYYCTTEVMWFGDTPGAVFESWGQGTTVTVSS

SEQ ID NO: 7339 - protein, 124 aa, Artificial Sequence
  Synthetic construct
EVQLVESGGGLVQPGGSLRLSCAASGFTFAAYAMTWVRQAPGKGLEWVSAVTNSGGDTYYADSVKGRFTISRDNSKNTLYLQMNSLRAEDTAVYYCAKDHPVAVVIEEIILHHWGQGTLVTVSS

SEQ ID NO: 7340 - protein, 119 aa, Artificial Sequence
  Synthetic construct
QVQLQESGPGLVKPSQTLSLTCTVSGDSISTRGHYWSWVRQHPGKGLEWIGYIHYNGRTHHNPSLKSRISLTIDASESQFSLRLGSVTAADTAVYYCARSPDFRLFDHWGQGILVTVSS

SEQ ID NO: 7341 - protein, 124 aa, Artificial Sequence
  Synthetic construct
EVQLLESGGGLVQPGGSLRLSCAASGFTFSSYAMSWVRQAPGRGLEWVSTISSSGVTTDYADSVKGRFTISRDNSKNILYLQMNSLGAEDTALYYCTKDDRATRYSSNWFLDYWGQGTLVTASS

SEQ ID NO: 7342 - protein, 132 aa, Artificial Sequence
  Synthetic construct
EVQLVESGGGLVKPGGSLRLSCAASGFTFSSYSMNWVRQAPGKGLEWVSSISSSSSYIYYADSVKGRFTISRDNAKNSLYLQMNSLRAEDTAVYYCARDLRYYGSGSYIRPKNYYYYGMDVWGQGTTVTVSS

SEQ ID NO: 7343 - protein, 121 aa, Artificial Sequence
  Synthetic construct
QVQLVESGGGVVQPGKSLRLSCTDSEFTFITYAMHWVRQAPGKRLEWVAAISNDGKYKYHADSVKGRFTISRDNSKNTLYLQMNSLTTEDAAVYYCARGSGISGLWYFDLWGRGTLVTVSS

SEQ ID NO: 7344 - protein, 118 aa, Artificial Sequence
  Synthetic construct
EVQLVESGGGLIQPGGSLRLSCSASGFIVNDNYMSWVRQAPGRGPEWVSVIYGDGAARYAESVRGRFTISRDNSKNTLYLQMNSLKAEDTAVYFCALGRKDYGDYYHWGQGTLVSVSS

SEQ ID NO: 7345 - protein, 125 aa, Artificial Sequence
  Synthetic construct
QVQLVQSGAEVKKPGSSVKVSCKASGGTFSSYAISWVRQAPGQGLEWMGRIIPILGIANYAQKFQGRVTITADKSTSTAYMELSSLRSEDTAVYYCATSMTTVTTVFYYYGMDVWGQGTTVTVSS

SEQ ID NO: 7346 - protein, 125 aa, Artificial Sequence
  Synthetic construct
QVQLQESGPGLVKPSQTLSLTCTVSGGSISSGDYYWSWIRQPPGKGLEWIGYIYYSGSTYYNPSLKSRVTISVDTSKNQFSLKLSSVTAADTAVYYCARERAYDCSSTSCYLDYWGQGTLVTVSS

SEQ ID NO: 7347 - protein, 119 aa, Artificial Sequence
  Synthetic construct
QLQLQESGPGLVKPSETLSLTCTVSGGSISSSSYYWGWIRQPPGKGLEWIGSIYYSGSTYYNPSLKSRVTISVDTSKNQFSLKLSSVTAADTAVYYCARDAMYSGFDYWGQGTLVTVSS

SEQ ID NO: 7348 - protein, 123 aa, Artificial Sequence
  Synthetic construct
QVQLVQSGAEVKKPGASVKVSCKASGYTFTGYYMHWVRQAPGQGLEWMGWINPNSGGTNYAQKFQGRVTMTRDTSISTAYMELSRLRSDDTAVYYCARLYYYGSGSYYNLDYWGQGTLVTVSS

SEQ ID NO: 7349 - protein, 122 aa, Artificial Sequence
  Synthetic construct
EVQLVQSGAEVKKPGATVKISCKVSGYTFTDYYMHWVQQAPGKGLEWMGLVDPEDGETIYAEKFQGRVTITADTSTDTAYMELSSLRSEDTAVYYCATDLGYFDRRGGFDYWGQGTLVTVSS

SEQ ID NO: 7350 - protein, 119 aa, Artificial Sequence
  Synthetic construct
EVQLLESGGGLVQPGGSLRLSCAASGFTFSSYAMSWVRQAPGKGLEWVSAISGSGGSTYYADSVKGRFTISRDNSKNTLYLQMNSLRAEDTAVYYCAKDQGSGPPRGYWGQGTLVTVSS

SEQ ID NO: 7351 - protein, 122 aa, Artificial Sequence
  Synthetic construct
EVLLAQSGAEVKKPGTRAKISCKVSGYTFTDHYVHWIQQAPGKGLEWMGRIDPENGHTVYAEKFQARLTLTADTSIDTAYLELSGLIFDDTATYFCATDLPVDNADLRLNFWGQGTLLTVSS

SEQ ID NO: 7352 - protein, 133 aa, Artificial Sequence
  Synthetic construct
EVQLVESGGGLVKPGGSLRLSCAASGFTFSNYRMNWVRQAPGKGLEWVSSISGGSSYIYYADSVKGRLTISRDNAKNSLFLQMNSLSVEDTAVYYCARDADLGHGYSYGYWLEFDHYNGMDVWGQGTTVTVSS

SEQ ID NO: 7353 - protein, 129 aa, Artificial Sequence
  Synthetic construct
EVQLVESGGGLIQPGGSLRLSCAASGFTVSSNYMSWVRQAPGKGLEWVSVIYSGGSTYYADSVKGRFTISRDNSKNTLYLQMNSLRAEDTAVYYCAREKYYYDSSGYYKQYYYYGMDVWGQGTTVTVSS

SEQ ID NO: 7354 - protein, 124 aa, Artificial Sequence
  Synthetic construct
QVQLQESGPGLMKPSETLSLTCTVSGASITNTNYYWAWIRQPPGKGLECIGSIYYSGNTYHNPSLKSRVTMSVDTSKNEFSLKLSSVTAADTAAYYCATLTPVTAAGTGLFPDWGQGTLVTVSS

SEQ ID NO: 7355 - protein, 117 aa, Artificial Sequence
  Synthetic construct
QVQLQESGPGLVKPSGTLSLTCAVSGGSISSSNWWSWVRQPPGKGLEWVGEIYHSGSTNYNPSLKSRVTISLDKSKNQFSLKLSSVTAADTAVYYCANVHNYYFDYWGQGTLVTVSS

SEQ ID NO: 7356 - protein, 127 aa, Artificial Sequence
  Synthetic construct
EVQLVESGGGLVKPGGSLRLSCAASGFTFSSYSMNWVRQAPGKGLEWVSSISSSSSYIYYADSVKGRFTISRDNAKNSLYLQMNSLRAEDTAVYYCARFGPRVVPAARYYYYGMDVWGQGTTVTVSS

SEQ ID NO: 7357 - protein, 120 aa, Artificial Sequence
  Synthetic construct
QITLKESGPTLVKPTQTLTLTCTFSGFSLSTSGVGVGWIRQPPGKALEWLALIYWDDDKRYSPSLKSRLTITKDTSKNQVVLTMTNMDPVDTATYYCAHRFFSSGCFDYWGQGTLVTVSS

SEQ ID NO: 7358 - protein, 123 aa, Artificial Sequence
  Synthetic construct
QVQLVQSGAEVKKPGASVKVSCKASGYTFTSYGISWVRQAPGQGLEWMGWISAYNGNTNYAQKLQGRVTMTTDTSTSTAYMELRSLRSDDTAVYYCARVYRYNVLRFLEWSYWGQGTLVTVSS

SEQ ID NO: 7359 - protein, 121 aa, Artificial Sequence
  Synthetic construct
EVQLLESGGGLVQPGGSLGLSCAASGFTFNTYAMTWVRQAPGRGLEWVSTINISGGSTYYADSVTGRFTISRDNSRNTLYLQMNSLRAEDTAVYYCAKRGVALRAHGFDFWGQGTMVTVSS

SEQ ID NO: 7360 - protein, 122 aa, Artificial Sequence
  Synthetic construct
EVQLVESGGGLVKPGGSLRLSCSASGFTFDSYTMNWIRQFPGKGLEWVSSISGSTTYIYYPDSLKGRFTISRDNAKNSLFLQMNSLRAEDTAVYYCARGEPLYRSILMGDIWGRGTMVTVSS

SEQ ID NO: 7361 - protein, 124 aa, Artificial Sequence
  Synthetic construct
EVQLLESGGGFVQPGESLRLSCAASGFTFSSYAMSWVRQAPGKGLEWVSVISSNGANTYYADSVKGRFAISRDKSKNRVSLQMNSLRAEDTAVYFCARDGLYSSVEYYYGMDVWGQGTTVTVSS

SEQ ID NO: 7362 - protein, 122 aa, Artificial Sequence
  Synthetic construct
QVKLVQSTVEIGKPGASVNVSCLASDDTFSTYGVAWVRQAPGQGLEWVGWISAYNGDTDYAQKFRGRVTMTADTSTSIAYLELRSLRSDDTAVYYCARAGGGVVTSTPFDHWGQGTLVTVSS

SEQ ID NO: 7363 - protein, 130 aa, Artificial Sequence
  Synthetic construct
QVQLQESGPGLVKPSQTLSLTCTVSGGSISSGSYYWSWIRQPAGKGLEWIGRIYTSGSTNYNPSLKSRVTISVDTSKNQFSLKLSSVTAADTAVYYCASSYCSSTSCKRRYYYYYGMDVWGQGTTVTVSS

SEQ ID NO: 7364 - protein, 134 aa, Artificial Sequence
  Synthetic construct
QVQLQESGPGLVKPSQTLSLTCTVSGGSISSGSYYWSWIRQPAGKGLEWIGRIYTSGSTNYNPSLKSRVTISVDTSKNQFSLKLSSVTAADTAVYYCARGPRGRRETYSSSWYVAYYYYGMDVWGQGTTVTVSS

SEQ ID NO: 7365 - protein, 120 aa, Artificial Sequence
  Synthetic construct
QVQLVESGGGVVQPGRSLRLSCAASGFTFSSYGMHWVRQAPGKGLEWVAVISYDGSNKYYADSVKGRFTISRDNSKNTLYLQMNSLRAEDTAVYYCAKAFSGSYRPFDYWGQGTLVTVSS

SEQ ID NO: 7366 - protein, 126 aa, Artificial Sequence
  Synthetic construct
QVQLVESGGGLVKPGGSLRLSCAASGFTFSDYYMSWIRQAPGKGLEWVSYISSSGSTIYYADSVKGRFTISRDNAKNSLYLQMNSLRAEDTAVYYCAREDGSGSYYGPPYLNGDVWGQGTTVTVSS

SEQ ID NO: 7367 - protein, 119 aa, Artificial Sequence
  Synthetic construct
QVQLVESGGGVVQPGRSLRLSCAASGFTFSNYAMHWVRQAPGKGLEWVALIWYDATKKSYADSVKGRFTISRDNSKNTLFLQMNSLSAEDTALYFCARALGGVLGPDYWGQGALVTVSS

SEQ ID NO: 7368 - protein, 121 aa, Artificial Sequence
  Synthetic construct
EVQLVESGGGLVKPGGSLRLSCAASGFTFSSYSMNWVRQAPGKGLEWVSSISSSSSYIYYADSVKGRFTISRDNAKNSLYLQMNSLRAEDTAVYYCASYPTRWEKYGMDVWGQGTTVTVSS

SEQ ID NO: 7369 - protein, 122 aa, Artificial Sequence
  Synthetic construct
QVQLVESGGGVVQPGRSLRLSCAASGFIFDHFGMHWVRQAPGKGLEWVAVISYDGADTYYADSVRGRITISRDNSKNTLYLQMNSLRAEDTAVYYCAKGRDVTTVTEYFQHWGQGTLVTVSS

SEQ ID NO: 7370 - protein, 121 aa, Artificial Sequence
  Synthetic construct
EVQLLESGGGLVQPGGSLRLSCAASGFTFSSYAMSWVRQAPGKGLEWVSAISGSGGSTYYADSVKGRFTISRDNSKNTLYLQMNSLRAEDTAVYYCAKGPSSGYCNYFDYWGQGTLVTVSS

SEQ ID NO: 7371 - protein, 120 aa, Artificial Sequence
  Synthetic construct
EVQLLESGGGLVQPGGSLRLSCAASGFTFSSYAMSWVRQAPGKGLEWVSAISGSGGSTYYADSVKGRFTISRDNSKNTLYLQMNSLRAEDTAVYYCAKGEGSGWYYFDYWGQGTLVTVSS

SEQ ID NO: 7372 - protein, 124 aa, Artificial Sequence
  Synthetic construct
QVQLQESGPGVVKPSGTLSLTCAVSGASISRGNWWSWVRQPPGKGLEWIGEIYHSGNTNYRPSLKSRVTISVDKSKNEFSLRLTSVTAADTAVYYCARDTALMTTVTTGALDVWGLGTMVTVSS

SEQ ID NO: 7373 - protein, 123 aa, Artificial Sequence
  Synthetic construct
QVQLVESGGGVVQPGRALRLSCAASGFSFTIYSINWVRQAPGKGLEWVAVISDDGNNNYFADSVQGRFTISRDNSKNTVYLQMNSLRVEDTAVYYCARSPMIRGVPAALFDYWGQGTLVTVSS

SEQ ID NO: 7374 - protein, 121 aa, Artificial Sequence
  Synthetic construct
QVQLVQSGAEVKKPGASVKVSCKTSGLTFPNYGVSWVRQAPGQGLEWMGWISAYNGDTNYAQRLQGRVTMTTDTSTSTAYMELRSLRSDDTALYYCALLWFGEFYRGENYWGQGTLVTVSS

SEQ ID NO: 7375 - protein, 126 aa, Artificial Sequence
  Synthetic construct
QVQLVESGGGVVQPGRSLRLSCAASGFTFSSYGMHWVRQAPGKGLEWVAVISYDGSNKYYADSVKGRFTISRDNSKNTLYLQMNSLRAEDTAVYYCAKERLKPTRTTVNVNWFDPWGQGTLVTVSS

SEQ ID NO: 7376 - protein, 119 aa, Artificial Sequence
  Synthetic construct
QVTLRESGPAMVTPTETLTLTCSFSGFSLNTDRVCVTWVRQPPGKALEWLGLIDWDGEALYRTPLKPRLTISKDTSKNLVTFTMTHMDPVDTATYYCARMTSQGYIDFWGQGTLVSVSS

SEQ ID NO: 7377 - protein, 123 aa, Artificial Sequence
  Synthetic construct
EVQLVESGGGLVKPGGSLRLSCAASGFTFSSYSMNWVRQAPGKGLEWVSSISSSSSYIYYADSVKGRFTISRDNAKNSLYLQMNSLRAEDTAVYYCAREHYGDYDGRNWFDPWGQGTLVTVSS

SEQ ID NO: 7378 - protein, 118 aa, Artificial Sequence
  Synthetic construct
QLQLQESGPGLVKPSETLSLTCTVSGGSISSSSYYWGWIRQPPGKGLEWIGSIYYSGSTYYNPSLKSRVTISVDTSKNQFSLKLSSVTAADTAVYYCARKGRGYSYGWGQGTLVTVSS

SEQ ID NO: 7379 - protein, 118 aa, Artificial Sequence
  Synthetic construct
EVRLVESGGHLVQPGGSLRVSCIASGFSFSTTWMTWVRQAPGKGLEWLANIREDGGAKNYADSVRGRFTISRDNDKNSVYLEMNGLRVEDSAVYYCARDTNWGVFDYWGQGSLVTVSS

SEQ ID NO: 7380 - protein, 127 aa, Artificial Sequence
  Synthetic construct
QLQLQESGPGLVKPSETLSLTCTVSGGSISSSSYYWGWIRQPPGKGLEWIGSIYYSGSTYYNPSLKSRVTISVDTSKNQFSLKLSSVTAADTAVYYCATIRITMVRTHNQHYGMDVWGQGTTVTVSS

SEQ ID NO: 7381 - protein, 127 aa, Artificial Sequence
  Synthetic construct
SVQLVQSGTEVKRPGASVRVSCKASGYTFTNYAMHWVRQAPGQGLEWMGWINVDNSNTLYSEKFQGRVTISADTSAATVYMDLNSLKSDDTAVYFCARSPLFVVVASAQSTGWIDPWGQGTLVVVSS

SEQ ID NO: 7382 - protein, 124 aa, Artificial Sequence
  Synthetic construct
EVQLVESGGGLVKPGGSLRLSCAASGFTFSSYSMNWVRQAPGKGLEWVSSISSSSSYIYYADSVKGRFTISRDNAKNSLYLQMNSLRAEDTAVYYCAREGKGITMVRGAPFDPWGQGTLVTVSS

SEQ ID NO: 7383 - protein, 120 aa, Artificial Sequence
  Synthetic construct
QVRLQESGPGLVKPSGTLSLTCSVSGDSVSSNNWWSWVRQPPGKGLEWVGEISPDGRTNYNPSLESRVTISSDKSRNQFSLNLNSVTAADTAVYYCARETWDDISGYDYWGQGTLVTVSS

SEQ ID NO: 7384 - protein, 130 aa, Artificial Sequence
  Synthetic construct
QLQLQESGPGLVKPSETLSLTCTVSGGSISSSSYYWGWIRQPPGKGLEWIGSIYYSGSTYYNPSLKSRVTISVDTSKNQFSLKLSSVTAADTAVYYCARHSGLFSYDFWSGYPQYYFDYWGQGTLVTVSS

SEQ ID NO: 7385 - protein, 124 aa, Artificial Sequence
  Synthetic construct
QVYLQESGPGLVKPWETLSLTCTVSGGPVSSDDTYWTWIRQPPGKELEYIGNIYHSGTTKYNPSLESRVTISMGESKKQFSLRLTSVTAADTATYYCARFIYFGTGSKNGIDVWGQGTTVTVSS

SEQ ID NO: 7386 - protein, 124 aa, Artificial Sequence
  Synthetic construct
QLQLRESGPGLVKPSETLSLTCTVSGGSISSSSYYWGWIRQPPGKGLEWIGTIYYSGSTYYNPSLKSRVTISVDTSKNQFSLRLSSVTAADTAVYYCARLVRRGREQRGAFDIWGQGTMVTVSS

SEQ ID NO: 7387 - protein, 125 aa, Artificial Sequence
  Synthetic construct
QVQLVESGGGVVQPGRSLRLSCAASGFSFSYYAMHWVRQAPGKGLEWVASLSYDGSNKYFADSVKGRFTISRDNPQNTLYLQMNSLRPEDTALYYCARDGGGYCIGGSCYGFDYSGQGTLVTVSS

SEQ ID NO: 7388 - protein, 126 aa, Artificial Sequence
  Synthetic construct
QVQLVESGGGVVQPGRSLRLSCAASGFTFSAFGMHWVRQAPGKGLEWVAVISYHGSITYYADSLKGRFTISKDNSKNTLYLQMNSLRAEDTAVYYCAKKDYHYSGITADYWYFDHWGRGTLVTVSS

SEQ ID NO: 7389 - protein, 122 aa, Artificial Sequence
  Synthetic construct
EVQLVESGGGLVKPGGSLRLSCAASGFTFSSYSMNWVRQAPGKGLEWVSSISSSSSYIYYADSVKGRFTISRDNAKNSLYLQMNSLRAEDTAVYYCARDSFSGSYRNAFDIWGQGTMVTVSS

SEQ ID NO: 7390 - protein, 120 aa, Artificial Sequence
  Synthetic construct
EVQLLESGGGLVQPGGSLRLSCAVSGITFNTYAMSWVRQAPGKGLEWVSAFSFSGTYYADSVKGRFTISRDNSKNTLFLQMNDLRADDTAVYYCAKDDSATRGKYYFGYWGQGTLVTVSS

SEQ ID NO: 7391 - protein, 119 aa, Artificial Sequence
  Synthetic construct
QVQLVQSGAEVKKPGASVKVSCKASGYTFTTYYVHWVRQAPGQGLEWMGIIYPKDGSTTYAQKFQGRVTMTRDTSTSTVYMELSSLRSEDTAVYYCARDLIRTGHTDYWGQGTLVTVSS

SEQ ID NO: 7392 - protein, 118 aa, Artificial Sequence
  Synthetic construct
QVQLQESGPGLLKPSETLSLTCAVSGGSMANYYWGWIRQSPGKGLDWIAYIYYDGKTNVHSSLRSRVTISVDTSKNQFSLELTSVTAADTAVYYCARTRPGRELFDYWGQGTLVTVSS

SEQ ID NO: 7393 - protein, 121 aa, Artificial Sequence
  Synthetic construct
QVQLVQSGAEVKKPGASVKVSCKASGYTFTGYYMHWVRQAPGQGLEWMGWINPNSGGTNYAQKFQGRVTMTRDTSISTAYMELSRLRSDDTAVYYCARARVVRGAIILGPWGQGTLVTVSS

SEQ ID NO: 7394 - protein, 130 aa, Artificial Sequence
  Synthetic construct
EVQLVESGGGLVQPGGSLRLSCAASGFTFSSYWMSWVRQAPGKGLEWVANIKQDGSEKYYVDSVKGRFTISRDNAKNSLYLQMNSLRAEDTAVYYCARDGGDYDSSEIGRGYYYYGMDVWGQGTTVTVSS

SEQ ID NO: 7395 - protein, 124 aa, Artificial Sequence
  Synthetic construct
QVLMVQSEATMQKPGASVKVSCQTSGYTFTNYYIYWLRQAPGQGPEWMAVVNPSDSRANRAQKFHKRLTLTIDAPGSTVFMELSSLGVDDTAMYYCARGESLYLGPYRGKCDSWGQGTQVTVST

SEQ ID NO: 7396 - protein, 119 aa, Artificial Sequence
  Synthetic construct
EVQLVESGGGLVQPGGSRRLSCAASGFPLSSYWMHWIRQAPGKGLEWVANIKKDGSETNYLESVRGRFSISRDNAKNSLYLQMNNLRAEDTAFYYCARAISWDPHFDYWGQGALVTVSS

SEQ ID NO: 7397 - protein, 123 aa, Artificial Sequence; identical to SEQ ID NO: 5437
  Synthetic construct

SEQ ID NO: 7398 - protein, 126 aa, Artificial Sequence
  Synthetic construct
QVQLVQSGAEVKKPGASVKVSCKVSGYTLTELSMHWVRQAPGKGLEWMGGFDPEDGETIYAQKFQGRVTMTEDTSTDTAYMELSSLRSEDTAVYYCATRWGVGRGHYYYYYGMDVWGQGTTVTVSS

SEQ ID NO: 7399 - protein, 125 aa, Artificial Sequence
  Synthetic construct
EVQLLESGGGLVKPGGSLRLSCAAFGFSFKTCTMNWVRQAPGKGLEWVSSISASNNYIYYADSVKGRTTISRDNAKNLLYLQLNSLRVEDTAVYYCARDYQLVREALEDDAFDIWGQGTMVTVSS

SEQ ID NO: 7400 - protein, 121 aa, Artificial Sequence
  Synthetic construct
EVQLLESGGGLVQPGGSLRLSCAASGFTFRTYAMTWVRQAPGKGLEWVSAISGSGGTTYYADSVKGRFTISRDNAKNTLYLQMNSLRVEDTAIYYCAKPVVVPVDLQFDQWGQGTQVTVSS

SEQ ID NO: 7401 - protein, 133 aa, Artificial Sequence
  Synthetic construct
QVQLVESGGGVVQPGRSLRLSCAASGFTFSRYAMHWVRQAPGKGLEWVTVILHNESKKYYADSVKGRFTISRDNSKNTLYMQMSSLRPEDTAVYYCARDLTDYYGSGTYVASDSYYYFGMDVWGQGTTVTVSS

SEQ ID NO: 7402 - protein, 124 aa, Artificial Sequence
  Synthetic construct
EVQVVESGGGLVLPGGSLRLSCAASGFTFSNYWMHWVRQVPGKGLAWVSRINNDGSTTSYADFVKGRFTISRDNANNMMYLQMNSLRAEDTALYYCARDFCSTTSCYTSSPGNWGQGTLVTVSS

SEQ ID NO: 7403 - protein, 127 aa, Artificial Sequence
  Synthetic construct
EVQLVESGGGLVQPGGSLRLSCAASGFTFSSYWMSWVRQAPGKGLEWVANIKQDGSEKYYVDSVKGRFTISRDNAKNSLYLQMNSLRAEDTAVYYCARGGYCSSTSCYRRKGGVDYWGQGTLVTVSS

SEQ ID NO: 7404 - protein, 128 aa, Artificial Sequence
  Synthetic construct
QLQLQESGSGLVKPSQTLSLTCAVSGDSISSGGYSWNWIRQPPGKGLEWIGYIYHSGTTYYNPSLKSRVTISVDKFKNQFSLKLSSVTAADTAVYYCARARHYGSGNYYRARYYFDYWGQGTLVTVSS

SEQ ID NO: 7405 - protein, 120 aa, Artificial Sequence
  Synthetic construct
EVQLVQSGAEVKKPGDSLKISCQVSGYSFTSYWFGWVRQMPGKGLECLGIIRPADSNTRYSPSFQGQVSISADRSINTAYLQWSSLKASDTAIYYCARLYGDSWRHFDYWGQGTLVTVSS

SEQ ID NO: 7406 - protein, 129 aa, Artificial Sequence
  Synthetic construct
QVQLVQSGAEVKKPGASVKVSCKASGYTFTSYAMHWVRQAPGQRLEWMGWINAGNGNTKYSQKFQGRVTITRDTSASTAYMELSSLRSEDTAVYYCARDRYGVRYQLLKRNYYYGMDVWGQGTTVTVSS

SEQ ID NO: 7407 - protein, 124 aa, Artificial Sequence
  Synthetic construct
QVQLQESGPGLVKPSQTLSLTCTVSGGSISSGGYYWSWIRQHPGKGLEWIGYIYYSGSTYYNPSLKSRVTISVDTSKNQFSLKLSSVTAADTAVYYCARDRSDDYAYYYGMDVWGQGTTVTVSS

SEQ ID NO: 7408 - protein, 124 aa, Artificial Sequence
  Synthetic construct
QVQLVQSGAEVKKPGASVKVSCKASGYTFTSYDINWVRQATGQGLEWMGWMNPNSGNTGYAQKFQGRVTMTRNTSISTAYMELSSLRSEDTAVYYCAREIRFLEWLSNYGMDVWGQGTTVTVSS

SEQ ID NO: 7409 - protein, 120 aa, Artificial Sequence
  Synthetic construct
EVQLLESGGGLVQPGGSLRLSCAASGFTFSSYAMSWVRQAPGKGLEWVSAISGSGGSTYYADSVKGRFTISRDNSKNTLYLQMNSLRAEDTAVYYCASQWIQLWHLEDYWGQGTLVTVSS

SEQ ID NO: 7410 - protein, 124 aa, Artificial Sequence
  Synthetic construct
QVQLVQSGSELKKPGASVKVSCKASGYTFTSYAMNWVRQAPGQGLEWMGWINTNTGNPTYAQGFTGRFVFSLDTSVSTAYLQISSLKAEDTAVYYCARTHTSKYDFWSGYYDYWGQGTLVTVSS

SEQ ID NO: 7411 - protein, 122 aa, Artificial Sequence
  Synthetic construct
QVQLQESGPGLVKPSETLSLTCTVSGGSVSSGSYYWSWIRQPPGKGLEWIGYIYYSGSTNYNPSLKSRVTISVDTSKNQFSLKLSSVTAADTAVYYCARDRRRIHYYGMDVWGQGTTVTVSS

SEQ ID NO: 7412 - protein, 126 aa, Artificial Sequence
  Synthetic construct
QVQLVQSGAEVKKPGASVKVSCKASGYMFSNYGISWVRQAPGQGLEWMGWISAYNGDTKYAQNLQGRVTLTTDTSASIAYMELWSLRSDDTAVYYCARLRDDYFGSGSPGHYFDCWGQGTLVTVSS

SEQ ID NO: 7413 - protein, 125 aa, Artificial Sequence; identical to SEQ ID NO: 5711
  Synthetic construct

SEQ ID NO: 7414 - protein, 124 aa, Artificial Sequence; identical to SEQ ID NO: 5439
  Synthetic construct

SEQ ID NO: 7415 - protein, 118 aa, Artificial Sequence
  Synthetic construct
EVQLVQSGGGLVQPGGSLRLSCAASGFTFGTYVMHWVRQAPGKGLTWVSRISHDGNDISYADFVKGRFTVSRDNAKNTLYLQMNSLTVEDTAEYFCGRDVNLVFFDYWGQGTPVTVSS

SEQ ID NO: 7416 - protein, 123 aa, Artificial Sequence
  Synthetic construct
QVQLVESGGGVVQPGRSLRLSCAASGFSLSGYGMHWVRQAPGKGLEWVAVIWYDGTNKYYGDSVKGRFTISRDDSKNTLYLQMNSLRAEDTAVYYCARDPFRGSSAYYLRDYWGQGTLVTVSS

SEQ ID NO: 7417 - protein, 118 aa, Artificial Sequence
  Synthetic construct
EVQLLESGGGLVQPGGSLRLSCVASEFTFSRHAMSWVRQAPGKGLEWVSAINGNGGSTMYADSVKGRFTVSRDNYKNTLYLQMNSLRAEDTAVYYCAKEKTGYTFDYWGQGTLVTVSS

SEQ ID NO: 7418 - protein, 117 aa, Artificial Sequence
  Synthetic construct
QVHLQESGPGLVKPSGTLSLICTVSGVSFSGSNWWTWVRQPPGKGLEWIGEIHHSGSTNYNPSLKSRVTMSVDKSNNQFSLKLDSVTAADTAVYYCTSSSGWHSNYWGQGTLVTVSS

SEQ ID NO: 7419 - protein, 126 aa, Artificial Sequence
  Synthetic construct
EVQLVESGGGLIQPGGSLRLSCVASGFAVTNNYMSWVRQAPGKGLEWVSVIHDNGATTHADSVKGRFSISRDNSKNTVYLQMNSLRVEDTAVYYCARDLAVHLFHSTGLGDAFDIWGQGTGVTVSS

SEQ ID NO: 7420 - protein, 123 aa, Artificial Sequence
  Synthetic construct
QVQLVESGGGVVQPGRSLRLSCAASGFSFSIYAINWVRQAPGKGLEWVAVISDDGNNNYFADSVKGRFTISRDNSKNTVYLQMNSLRLEDTAVYYCARSPMIRGVPAALFDYWGQGTLVTVSS

SEQ ID NO: 7421 - protein, 122 aa, Artificial Sequence
  Synthetic construct
EVQLVQSGAEVKKPGESLRISCKGSGYNFPNYWIHWVRQLPGKGLEWMGRIDPTDSYSNYSPSFQGQVTISTDNSISTAYLQWSSLKASDTAIYYCATPGEPNKYYYGLDVWGQGTTVTVSS

SEQ ID NO: 7422 - protein, 119 aa, Artificial Sequence
  Synthetic construct
EVQLLESGGGFVQPGGSLRLSCAASGFTFSTHGMNWVRQAPGKGLEWVSGISGSGGSTYYADSVKGRFTISRDNSKNTLFLQMNSLRAEDTAIYYCAQRTVGDTTNGFWGQGTLVTVAS

SEQ ID NO: 7423 - protein, 124 aa, Artificial Sequence
  Synthetic construct
EVQLVQSGAEVKKPGESLKISCKGSGYSFSTYWIGWVRQTPGKGLEWMGVIYPADSDTRYSPSFQGQVTISVDKSISTANLQWGSLKASDTAMYYCVRPPWNYGSRQDDSSDMWGQGTMVTVSS

SEQ ID NO: 7424 - protein, 115 aa, Artificial Sequence
  Synthetic construct
EVQLLESGGGLVQPGGSLRLSCAASGFTFSSSPMSWVRQAPGQGLEWVSAISGSGGSTYHADSVKGRFTISRDNSKDTLYLQMNSLRAEDTAVYFCAKTIVGEQWGQGTLVTVSS

SEQ ID NO: 7425 - protein, 126 aa, Artificial Sequence
  Synthetic construct
EVQLVESGGGLVKPGGSLRLSCAASGFTFSSYSMNWVRQAPGKGLEWVSSISSSSSYIYYADSVKGRFTISRDNAKNSLYLQMNSLRAEDTAVYYCARDQPRRRPGYYYYYGMDVWGQGTTVTVSS

SEQ ID NO: 7426 - protein, 123 aa, Artificial Sequence
  Synthetic construct
QVHLVESGGGVVQPGRSLRLSCVASGFMFRSYGLHWVRQSPGMGLEWVASISHDGRNEYYEDSVKGRLTISRDNSKSTVFLQMNNLRAEDTAMYFCVRDFLAAAGRGGFFNYWGQGVRVIVSS

SEQ ID NO: 7427 - protein, 126 aa, Artificial Sequence
  Synthetic construct
QLQLQESGPGLVKPSETLSLTCTVSGGSISSSSYYWGWIRQPPGKGLEWIGSIYYSGSTYYNPSLKSRVTISVDTSKNQFSLKLSSVTAADTAVYYCARKGRRRGSTYYYYGMDVWGQGTTVTVSS

SEQ ID NO: 7428 - protein, 125 aa, Artificial Sequence; identical to SEQ ID NO: 5711
  Synthetic construct

SEQ ID NO: 7429 - protein, 115 aa, Artificial Sequence
  Synthetic construct
QVQLQESGPGLVKPSETLSLTCTVSGGSISSYYWSWIRQPAGKGLEWIGRIYTSGSTNYNPSLKSRVTMSVDTSKNQFSLKLSSVTAADTAVYYCASEGGFFDYWGQGTLVTVSS

SEQ ID NO: 7430 - protein, 129 aa, Artificial Sequence
  Synthetic construct
QVQLQESGPGLVKPSQTLSLTCTVSGGSISSGSYYWSWIRQPAGKGLEWIGRIYTSGSTNYNPSLKSRVTISVDTSKNQFSLKLSSVTAADTAVYYCARVKTLRGYGSGSYRLGWFDPWGQGTLVTVSS

SEQ ID NO: 7431 - protein, 128 aa, Artificial Sequence
  Synthetic construct
EVQLVESGGGLVQAGGSLRLSCTVSGFTFSTYWMSWVRQARGKGLECVASINQDGSENYYVDSVKGRFTISRDNAKNSLYLQMNSLRAEDTAIYYCARDSRWELWRVGYYYYYGMDVWGQGTTVTVSS

SEQ ID NO: 7432 - protein, 126 aa, Artificial Sequence
  Synthetic construct
QLQLQESGPGLVKPSETLSLTCTVSGGSISSSSYYWGWIRQPPGKGLEWIGSIYYSGSTYYNPSLKSRVTISVDTSKNQFSLKLSSVTAADTAVYYCARRFSVSSSWYFQPNFDYWGQGTLVTVSS

SEQ ID NO: 7433 - protein, 119 aa, Artificial Sequence
  Synthetic construct
EVQLVESGGNVEQPGGSVRLSCVVSGFSISAYSIHWVRQAPGRGLEWIFYISSTSSTIYSADSVKGRFTISRDNGKKSVFLQMSSLTVEDTAVYYCVREAEYFFGLDAWGQGTTVTVSP

SEQ ID NO: 7434 - protein, 118 aa, Artificial Sequence
  Synthetic construct
EVQLVESGGGLVHPGGSLRLSCAVSGSMFSKYWMTWVRQAPGKGLEWVANIKPDGSEKFYVDSVKGRFTISRDNTKNSLYLQMDSLRAEDTAVYYCSGGSGSKRGDYWGQGTLATVSS

SEQ ID NO: 7435 - protein, 120 aa, Artificial Sequence
  Synthetic construct
QVQLVESGGALVKPGGSLRLSCAASGLTFSDFYMSWIRQAPGKGLEWVSHISGSGNIIYYANSVKGRFTISRDNAKSSLYLQMNSLRAEDTAVYYCARGYSYSSGSYKFWGQGTLVTVSS

SEQ ID NO: 7436 - protein, 124 aa, Artificial Sequence
  Synthetic construct
QVQLVESGGGVVQPGRSLRLSCAASGFTFSSYGMHWVRQAPGKGLEWVAVISYDGSNKYYADSVKGRFTISRDNSKNTLYLQMNSLRAEDTAVYYCAKSVGSGSYYGADAFDIWGQGTMVTVSS

SEQ ID NO: 7437 - protein, 123 aa, Artificial Sequence; identical to SEQ ID NO: 5437
  Synthetic construct

SEQ ID NO: 7438 - protein, 121 aa, Artificial Sequence
  Synthetic construct
EVQLVESGGGLVQPGGSLRLSCAASGFTFSSYWMHWVRQAPGKGLVWVSRINSDGSSTSYADSVKGRFTISRDNAKNTLYLQMNSLRAEDTAVYYCARVRHRFGESPLSYWGQGTLVTVSS

SEQ ID NO: 7439 - protein, 128 aa, Artificial Sequence
  Synthetic construct
EVQLVESGGGLVQPGGSLRLSCAASGFTVSSNYMSWVRQAPGKGLEWVSVIYSGGSTYYADSVKGRFTISRDNSKNTLYLQMNSLRAEDTAVYYCARGGYCSSTSCYRAQKNGAFDIWGQGTMVTVSS

SEQ ID NO: 7440 - protein, 126 aa, Artificial Sequence
  Synthetic construct
EVQLVESGGGLVKPGGSLRLSCAASGFTFSNAWMSWVRQAPGKGLEWVGRIKSKTDGGTTDYAAPVKGRFTISRDDSKNTLYLQMNSLKTEDTAVYYCTTDRRPFWGSYLENFDYWGQGTLVTVSS

SEQ ID NO: 7441 - protein, 127 aa, Artificial Sequence
  Synthetic construct
QVQLQESGPGLVKPSQTLSLTCTVSGGSISSGDYCWSWIRQPAGRGLEWIGRVYTTGSTNYNPSLTSRPAISMDTSKNQFSLELNSVTAADTAVYYCAREPVNTWPNYYYYYGFDVWGQGTTVTVSS

SEQ ID NO: 7442 - protein, 124 aa, Artificial Sequence; identical to SEQ ID NO: 5439
  Synthetic construct

SEQ ID NO: 7443 - protein, 124 aa, Artificial Sequence; identical to SEQ ID NO: 5439
  Synthetic construct

SEQ ID NO: 7444 - protein, 121 aa, Artificial Sequence
  Synthetic construct
EVQLVESGGGLVKPGGSLRLSCAASGFTFSDYSINWVRQAPGKGLEWVSSISDDGSYIYYADSVKGRFTISRDNAKNSLYLQMNNVRVDDSAVYYCARDCRVDCYSGFDFWGQGTLVTVSS

SEQ ID NO: 7445 - protein, 120 aa, Artificial Sequence
  Synthetic construct
EVQLVESGGGLVQPGGSLRLSCAASGFTFSNYDMHWVRQATGKGLEWVAAIGMGGDTYYAGSVRGRFTISREDAEKSLYLQMDSLRAGDTAVYFCARDSGDYSYYGMDVWGLGTTVTVSS

SEQ ID NO: 7446 - protein, 119 aa, Artificial Sequence
  Synthetic construct
QVQLQQSGAGLLKPSETLSLTCAVYGGSFSGYSWSWLRQPPGKGLAWIGEINHSGTTNYNPSLKSRVSISVDTSKKEFSLRLSSVTAADTAVYYCARGPFPKNSRFDPWGQGTLVTVSS

SEQ ID NO: 7447 - protein, 122 aa, Artificial Sequence
  Synthetic construct
EVQLVESGGGLVKPGGSLRLSCAASGFTFSSYSMNWVRQAPGKGLEWVSSISSSSSYIYYADSVKGRFTISRDNAKNSLYLQMNSLRAEDTAVYYCARDPPRLYDSSGYDYWGQGTLVTVSS

SEQ ID NO: 7448 - protein, 131 aa, Artificial Sequence
  Synthetic construct
QVQLVQSGAEVKKPGSSVKVSCKASGGTFSSYAISWVRQAPGQGLEWMGRIIPILGIANYAQKFQGRVTITADKSTSTAYMELSSLRSEDTAVYYCARAPTYCSSTSCYRGPYSYYGMDVWGQGTTVTVSS

SEQ ID NO: 7449 - protein, 122 aa, Artificial Sequence
  Synthetic construct
EVQLVESGGGLVKPGGSLRLSCGASGFTFKSYSMNWVRQAPGKGLEWVSSIDDSSTYTYYADSVRGRFTISRDNAKNSLYLQMNSLRVEDTAVYYCARDGPRLGGLDAFDIWGQGTVVTVSS

SEQ ID NO: 7450 - protein, 128 aa, Artificial Sequence
  Synthetic construct
EVQLVESGGGLVQPGGSLKLSCAASGFTFSGSAMHWVRQASGKGLEWVGRIRSKANSYATAYAASVKGRFTISRDDSKNTAYLQMNSLKTEDTAVYYCTRQKYCSSTSCYYYYGMDVWGQGTTVTVSS

SEQ ID NO: 7451 - protein, 124 aa, Artificial Sequence
  Synthetic construct
QVQLQESGPGLVKPSQTLSLTCAVSGDSISTSRDYWSWVRQHPGKGLEWIGYIYYSGSTYYNPSLKSRVTISVDTSKNQFSLTLSSVTAADTAVYYCARDKYFGSSGYNYFDYWGQGTLVTVSS

SEQ ID NO: 7452 - protein, 126 aa, Artificial Sequence
  Synthetic construct
QVQLVESGGGVVQPGRSLRLSCAASGFTFSSYAMHWVRQAPGKGLEWVAVISYDGSNKYYADSVKGRFTISRDNSKNTLYLQMNSLRAEDTAVYYCARGNRIQLWSIYYYYGMDVWGQGTTVTVSS

SEQ ID NO: 7453 - protein, 127 aa, Artificial Sequence
  Synthetic construct
QVQLVQSGAEVKKPGASVKVSCKASGYTFMNYAMHWVRQAPGQRLEWMGWINAGNGDTKHSQKFQGRVTITRDTSANTAYMELSSLRSEDTAVYYCARGIYCSTINCFALVDWIDPWGQGTLVTVSS

SEQ ID NO: 7454 - protein, 121 aa, Artificial Sequence; identical to SEQ ID NO: 6205
  Synthetic construct

SEQ ID NO: 7455 - protein, 120 aa, Artificial Sequence
  Synthetic construct
EVQLVESGGGLVKSGRSLRLSCTASGFTFGDYAMSWFRQAPGKGLEWVGFIRSKAYGGTTDYAASVKGRFTISRDDSKSIAYLQMNSLKTEDTAVYYCTRVFAYDSPDYWGQGTLVTVSS

SEQ ID NO: 7456 - protein, 124 aa, Artificial Sequence
  Synthetic construct
QVQLVESGGGVVQPGRSLRLSCAASGFTFRSYAMHWVRQAPGKGLEWVAVIWYDGSYKYYLDSVKGRFTISRDDSKNTLYLQMKNLRAEDTAVYFCARDGSDYDREDTGYFDYWGQGVLVSVSS

SEQ ID NO: 7457 - protein, 121 aa, Artificial Sequence
  Synthetic construct
QVQLQESGPGLVKPSETLSLTCTVSGGSISGYYWSWIRQSPGKGLEWIGYIYYSGSTKYNPSLKSRVTISVDTSKNQFSLKLSSVTAADTAVYYCARGGEYHYGSGRFDPWGQGTLVTVSS

SEQ ID NO: 7458 - protein, 118 aa, Artificial Sequence
  Synthetic construct
EVQLVESGGGLVQPGGSLRLSCAASGFTFSSYWMTWVRQAPGKGLEWVANIKHDGSETSYVESVRGRFSISRDNANNSLDLQMNSLRAEDTALYYCARGALWFGETKWGQGTPVTVSS

SEQ ID NO: 7459 - protein, 126 aa, Artificial Sequence
  Synthetic construct
LSQLQESGPRLVKPSETLSLTCTVSGGAVSFFYWNWIRQSPGKGLEWIGSIYYSGTTNYNPSLNSRVAISVDTSKGQIHLRLSSVTVADTAVYFCARDRSTWFSGKYHLRGAFDMWGPGTFVTVSS

SEQ ID NO: 7460 - protein, 119 aa, Artificial Sequence
  Synthetic construct
EVQLVESGGGLIQPGGSLRLSCAASGFTVSSNYMSWVRQAPGKGLEWVSVIYSGGSTYYADSVKGRFTISRDNSKNTLYLQMNSLRAEDTAVYYCARRMTTGLWAFDIWGQGTMVTVSS

SEQ ID NO: 7461 - protein, 129 aa, Artificial Sequence
  Synthetic construct
QVQLVQSGAEVKKPGASVKVSCKASGYTFSTYGISWVRQAPGQGLEWMGWISAKNGDRKDAQKFQDRVTMTTDTSTSTVYMELRSLRPDDTAVYYCARDLIVVVPAGMVSGISYAMEVWGQGTTVTVSS

SEQ ID NO: 7462 - protein, 128 aa, Artificial Sequence
  Synthetic construct
QVQLVESGGGVVQPGRSLRLSCAASGFTFSSYGMHWVRQAPGKGLEWVAVISYDGSNKYYADSVKGRFTISRDNSKNTLYLQMNSLRAEDTAVYFCAKPVLNAYCSGGSCYLHWFDPWGQGTLVTVSS

SEQ ID NO: 7463 - protein, 129 aa, Artificial Sequence
  Synthetic construct
EVQLEESGGGLVKPGGSLRLSCAASKFTFSIYNMNWVRQTPGKGLEWVSSISRSGTYIFYADSVKGRFTISRDNAKNSLYLQMNSLRVDDTAVYFCARGGGVVPAAIPLDHYYYGMDLWGQGTTVTVSS

SEQ ID NO: 7464 - protein, 121 aa, Artificial Sequence
  Synthetic construct
EVQLLESGGGLVQPGGSLRLSCAASGFTFSTYAMSWVRQAPGKGLEWVSGLSGSGRSTYYADSVKGRFTISRDNSKNTLYLQMNSLRAEDTAVYYCAKDPFVGGNGRFDSWGQGTLVTVSS

SEQ ID NO: 7465 - protein, 120 aa, Artificial Sequence
  Synthetic construct
EVQLVESGGGLVQPGGSLRLSCAASGFTFSIYSMNWVRQAPGKGLEWVSYISSSSSTIYYADSVKGRFTISRDNAKNSLYLQMNSLRDEDTAVYYCASLPMVVVTKNDYWGQGTLVTVSS

SEQ ID NO: 7466 - protein, 120 aa, Artificial Sequence
  Synthetic construct
QVQLQESGPGLVKPSQDLSLTCTVSGDSIGYGGYYWSWIRQHPGKGLEWLGYIYDSGSTSYSPSLKSRIIISLDTSKNQFSLRLTSVTAADTAIYYCARAYSDSWGFDYWGQGTLVTVSS

SEQ ID NO: 7467 - protein, 123 aa, Artificial Sequence
  Synthetic construct
EVQLVESGGGLAQPGGSLRLSCAASGFTFSQYGMMWVRQVPGKGLEWVSIISRSGSSRKYADSVMGRFTISRDNDNNSLYLQMNSLRDEDTAMYYCARGTPYDDSGVVIAYFWGQGTLVTVSS

SEQ ID NO: 7468 - protein, 124 aa, Artificial Sequence; identical to SEQ ID NO: 5439
  Synthetic construct

SEQ ID NO: 7469 - protein, 123 aa, Artificial Sequence
  Synthetic construct
QLHLQESGPGLVRPSETLSLTCRVSGASVNDFYWNWIRQSPGKGLEWIGYSGTFKYNPSFKSRITVSVDTSKNQFSLKLASVTAADTAVYFCARGSCDDGACHPAPASGFDPWGPGILVTVSS

SEQ ID NO: 7470 - protein, 127 aa, Artificial Sequence
  Synthetic construct
QLQLQESGPGLVKPSETLSLTCGVSGGSISSSSYYWGWVRQPPGKGLEWIGSIYYSGTTYYNPSLKSRVTISVDTSKNQFALNLNSVTAADTALYYCARHYCSGTSCLISHWYFDLWGRGTLVAVSS

SEQ ID NO: 7471 - protein, 122 aa, Artificial Sequence; identical to SEQ ID NO: 7118
  Synthetic construct

SEQ ID NO: 7472 - protein, 133 aa, Artificial Sequence
  Synthetic construct
QVQLQESGPGLVKPSQTLSLTCTVSGGSISSGSYYWSWIRQPAGKGLEWIGRIYTSGSTNYNPSLKSRVTISVDTSKNQFSLKLSSVTAADTAVYYCARARYRSLGYCSSTSCSKTYWYFDLWGRGTLVTVSS

SEQ ID NO: 7473 - protein, 125 aa, Artificial Sequence
  Synthetic construct
QVQLVESGGGVVQPGRSLRLSCAASGFTFSSYAMHWVRQAPGKGLEWVAVISYDGSNKYYADSVKGRFTISRDNSKNTLYLQMNSLRAEDTAVYYCAREPPRPYYYGSGSYYDYWGQGTLVTVSS

SEQ ID NO: 7474 - protein, 121 aa, Artificial Sequence; identical to SEQ ID NO: 6878
  Synthetic construct

SEQ ID NO: 7475 - protein, 123 aa, Artificial Sequence; identical to SEQ ID NO: 5437
  Synthetic construct

SEQ ID NO: 7476 - protein, 118 aa, Artificial Sequence
  Synthetic construct
EVQLVESGGGLVHPGGSLRLSCKASGFTFFSYAMAWVRQAPGKGLEWVATISRNDRSSHYVDSVKGRFTISRDNSKNTLFLQMDSLRAEDTALYYCAKDLGSSGGGYWGQGTLVTVSS

SEQ ID NO: 7477 - protein, 121 aa, Artificial Sequence
  Synthetic construct
QVQLVQSASELKRPGASVTISCRASGYTFTTSSVTWVRQAPGQGLQWMGWINTNTGNPTYVQGLTGRFVFSFDSSVSTAFLHINNLRTDDTAVYFCARIHGGLPGTDFDYWGQGSLVNVSS

SEQ ID NO: 7478 - protein, 131 aa, Artificial Sequence
  Synthetic construct
QLQLQESGPGLVKPSETLSLTCTVSGGSISSSSYYWGWIRQPPGKGLEWIGSIYYSGSTYYNPSLKSRVTISVDTSKNQFSLKLSSVTAADTAVYYCARHGGGKGVRTPGGHRPAGVCDYWGQGTLVTVSS

SEQ ID NO: 7479 - protein, 127 aa, Artificial Sequence; identical to SEQ ID NO: 6185
  Synthetic construct

SEQ ID NO: 7480 - protein, 127 aa, Artificial Sequence
  Synthetic construct
EVQLVESGGGLVQPGGSLRLSCAASGFTFSSYDMHWVRQATGKGLEWVSAIGTAGDTYYPGSVKGRFTISRENAKNSLYLQMNSLRAGDTAVYYCARGVGGYSSSWYPVSYYGMDVWGQGTTVTVSS

SEQ ID NO: 7481 - protein, 125 aa, Artificial Sequence
  Synthetic construct
QVQLVESGGGVVQPGRSMRLSCEASGFTFNTYGMHWVRQAPGKGLEWVALILYDGGDKYYADSVKGRFTISRDNSKNTLYLQMNSLRGEDTAVYYCAKDWKDSSWIYYYYAMDVWGQGTTVTVSS

SEQ ID NO: 7482 - protein, 120 aa, Artificial Sequence
  Synthetic construct
QVQLVQSGAEVKKPGSSVKVSCKVSGGTFSTYTTSWVRQAPGHGLEWLGGVTPIFGTTKYAERFQGRLTITADGLTNTVFMELTSLRSEDTAVYYCARDLITVRGGFDFWGQGTPVTVSS

SEQ ID NO: 7483 - protein, 126 aa, Artificial Sequence
  Synthetic construct
QVQLQESGPGLVKPSGTLSLTCAVSGGSISSSNWWSWVRQPPGKGLEWIGEIYHSGSTNYNPSLKSRVTISVDKSKNQFSLKLSSVTAADTAVYYCARDRRTRAAKNYYYYGMDVWGQGTTVTVSS

SEQ ID NO: 7484 - protein, 119 aa, Artificial Sequence
  Synthetic construct
QVQLVESGGGVVQPGRSLRLSCAASGFTFSNYGMHWVRQAPGKGLEWLALISVDGNNKFYSDSVKGRFTISRDNSRNTLYLQMNSLRPEDTAVYFCARFGAEQGNFDYWGQGTLVTVSS

SEQ ID NO: 7485 - protein, 124 aa, Artificial Sequence
  Synthetic construct
QVQLVQSGAEVKKPGASVKVSCKASGYTFTSYGISWVRQAPGQGLEWMGWISAYNGNTNYAQKLQGRVTMTTDTSTSTAYMELRSLRSDDTAVYYCARDRRILTGYFTDAFDIWGQGTMVTVSS

SEQ ID NO: 7486 - protein, 120 aa, Artificial Sequence
  Synthetic construct
EVQLVESGGGLVQPGGSLRLSCSASGFTFSSYAMHWVRQAPGKGLEYVSAISSNGGSTYYADSVKGRFTISRDNSKNTLYLQMSSLRAEDTAVYYCVKDPPQTLIVARHWGQGTLVTVSS

SEQ ID NO: 7487 - protein, 129 aa, Artificial Sequence
  Synthetic construct
QVQLVQSGAEVKRPGASVKVSCKTSGYTFTDHYMHWMRQAPGQGPEWMGWMNSNSGGTNYAQKFQGRVTLTRDTSISTAYMEVSSLRSDDTAMYYCVRGGPINYVSDTHYHEQPPFAYWGQGTLVTVSS

SEQ ID NO: 7488 - protein, 122 aa, Artificial Sequence
  Synthetic construct
QVQLVESGGGLVKPGGSLRLSCAASGFTFSDYYMSWIRQAPGKGLEWVSYISSSSSYTNYADSVKGRFTISRDNAKNSLYLQMNSLRAEDTAVYYCARAKVGGGSYYALEYWGQGTLVTVSS

SEQ ID NO: 7489 - protein, 119 aa, Artificial Sequence
  Synthetic construct
RVQLQESGPGLVKSSQTLSLTCTVSGGSIGSGSYYWSWIRRPAGKGLEWIGRINPSGNTNYSPSLKSRVTILVDTSKNQFSLKLSSVTAADTAVYYCARDGSILEMDPWGQGLLVTVSS

SEQ ID NO: 7490 - protein, 121 aa, Artificial Sequence
  Synthetic construct
EVQVLESGGGLEQPGGSLRLSCAASGFTFSNYAMNWVRQAPGKGLEWVSGISGSGGSTYYAGSLKGRFTISRDNSKNTLYLQINSLRAEDTAIYYCAKGKDTAVDDSIDVWGQGTTVTVSS

SEQ ID NO: 7491 - protein, 126 aa, Artificial Sequence
  Synthetic construct
EVQLLESGGGLVQPGGSLRLSCAASGFTFSSYAMSWVRQAPGKGLEWVSAISGSGGSTYYADSVKGRFTISRDNSKNTLYLQMNSLRAEDTAVYYCANHGYCSSTSCYTRKGFDYWGQGTLVTVSS

SEQ ID NO: 7492 - protein, 123 aa, Artificial Sequence; identical to SEQ ID NO: 5437
  Synthetic construct

SEQ ID NO: 7493 - protein, 122 aa, Artificial Sequence
  Synthetic construct
QVQLVESGGGVVQPGRSLRLSCAASGFTFSSYAMHWVRQAPGKGLEWVAVISYDGSNKYYADSVKGRFTFSRDNSKNTLYLQMNSLRAEDTAVYYCARGGIMGATPPHFDYWGQGTLVTVSS

SEQ ID NO: 7494 - protein, 124 aa, Artificial Sequence
  Synthetic construct
EVQLLESGGGLVQPGGSLRLSCAASGFTFSSYAMSWVRQAPGKGLEWVSAISGSGGSTYYADSVKGRFTISRDNSKNTLYLQMNSLRAEDTAVYYCAKDLGKYSGSYPTWFDPWGQGTLVTVSS

SEQ ID NO: 7495 - protein, 122 aa, Artificial Sequence
  Synthetic construct
EVQLVQSGAEVKKPGATVKISCKVSGSTFIDDYMHWVQQAPGKGLEWMGLVDPEDGETIYAEKFQGRVTITADTSTNTAYMELNSLRSEDTAVYYCAREYQGSGYEANFDYWGQGTLVTVSS

SEQ ID NO: 7496 - protein, 109 aa, Artificial Sequence
  Synthetic construct
LRLSCAASGLSFSSDNINWVRQAPGRGLEWVSYISSTSNYIYYADSVKGRFTISRDNAKNSVYLQMDSLRAEDTAVYYCARVGGGGEWYNSGWFSFDSWGQGSLVTVSS

SEQ ID NO: 7497 - protein, 121 aa, Artificial Sequence
  Synthetic construct
QVHLQESGPGLVKPSGTLSLTCVVSGGSISGNYWWTWVRQSPGRGPEWIAETYHSGGTNYNPSLKSRVTMSVDKSKKQFSLNLSSVTAADAAVYYCARRIATPTEDAFDIWGQGTKVTVSS

SEQ ID NO: 7498 - protein, 129 aa, Artificial Sequence
  Synthetic construct
QVQLVQSGGEVKKPGASVKVSCKASGYTFTSFGITWVRQAPGQGLEWMGWISGYNGKTQYAHNFQDRVTMTTDTSTNTAYMELRSLKSDDTAVYYCARDPPRGYESLYYYDRDYYFDYWGQGTLVTVSS

SEQ ID NO: 7499 - protein, 124 aa, Artificial Sequence
  Synthetic construct
QLQLQESGPGLVKPSETLSLTCTVSGGSISSSSYYWGWIRQPPGKGLEWIGSIYYSGSTYYNPSLKSRVTISVDTSKNQFSLKLSSVTAADTAVYYCARHHRAGKVVPAAIDYWGQGTLVTVSS

SEQ ID NO: 7500 - protein, 119 aa, Artificial Sequence
  Synthetic construct
EVQLVESGGGLVQPGGSLKLSCAASGFTFSGSAMHWVRQASGKGLEWVGRIRSKANSYATAYAASVKGRFTISRDDSKNTAYLQMNSLKTEDTAVYYCTRSMVRGVDYWGQGTLVTVSS

SEQ ID NO: 7501 - protein, 127 aa, Artificial Sequence
  Synthetic construct
QVQLVQSGAEVKKPGASVKVSCKASGYTFTSYDINWVRQATGQGLEWMGWMNPNSGNTGYAQKFQGRVTMTRNTSISTAYMELSSLRSEDTAVYYCARGASIAAVGYYYYYYGMDVWGQGTTVTVSS

SEQ ID NO: 7502 - protein, 121 aa, Artificial Sequence
  Synthetic construct
EVQLVESGGGLVKPGGSLRLSCAASGFTFSSYSMNWVRQAPGKGLEWVSSISSSSSYIYYADSVKGRFTISRDNAKNSLYLQMNSLRAEDTAVYYCARVRRAVAGGGFDPWGQGTLVTVSS

SEQ ID NO: 7503 - protein, 122 aa, Artificial Sequence
  Synthetic construct
EVRLVESGGGLVKPGGSLRLSCGASGFTFKSYSMNWVRQAPGKGLEWVSSIDDSSTYTYYADSVRGRFTISRDNAKNSLYLQMNSLRVEDTAVYYCARDGPRLGGLDAFDIWGQGTVVTVSS

SEQ ID NO: 7504 - protein, 118 aa, Artificial Sequence
  Synthetic construct
QVQLVESGGGVVQPGRSLRLSCAASGFTFSSYGMHWVRQAPGKGLEWVAVISYDGSNKYYADSVKGRFTISRDNSKNTLYLQMNSLRAEDTAVYYCAKGRGVRYFAQWGQGTLVTVSS

SEQ ID NO: 7505 - protein, 126 aa, Artificial Sequence; identical to SEQ ID NO: 5486
  Synthetic construct

SEQ ID NO: 7506 - protein, 123 aa, Artificial Sequence
  Synthetic construct
EVQLVQSGAEVKKPGESLKISCKVSGYIFTNYWIGWVRQMPGKGLEWMGIIYPGDFDTTYSPSFQGQVTISADKSISTAYLQWSSLKASDTAMYYCARGSVTYYTFGGVFDYWGQGTLVTVSS

SEQ ID NO: 7507 - protein, 126 aa, Artificial Sequence
  Synthetic construct
QVQLQESGPGLVKPSETLSLTCTVSGGSFSNNFWGWIRLPPGRGLEWIGYIHYSGGTTYNPSLQSRVTISVDRSKNQFSLKLSSVTATDTAVYYCARAAYHYDSSGYISEGYFDYWGQGTLVTVSS

SEQ ID NO: 7508 - protein, 124 aa, Artificial Sequence
  Synthetic construct
QVQLVESGGGVVQPGRSLRLSCAASGFTFSSYGMHWVRQAPGKGLEWVAVISYDGSNKYYADSVKGRFTISRDNSKNTLYLQMNSLRAEDTAVYYCAKERRYCSGGSCYYFDYWGQGTLVTVSS

SEQ ID NO: 7509 - protein, 125 aa, Artificial Sequence
  Synthetic construct
EVQLVESGGGLVKPGGSLRLSCAASGFTFSSYSMNWVRQAPGKGLEWVSSISSSSSYIYYADSVKGRFTISRDNAKNSLYLQMNSLRAEDTAVYYCARRTFDYYGSGSYYWVDYWGQGTLVTVSS

SEQ ID NO: 7510 - protein, 121 aa, Artificial Sequence
  Synthetic construct
EVQLVESGGGLVQPGGSLRLSCTASGFTFNSYTMNWVRQAPGKGLEWVSYISTTSNTIYYADSVKGRFTMSRDNAKSSLYLQMNSLRDEDTAVYYCARGLRAYSGHGFDYWGQGTGVTVSS

SEQ ID NO: 7511 - protein, 126 aa, Artificial Sequence
  Synthetic construct
QVTLKESGPVLVKPTETLTLTCTVSGFSLSNARMGVSWIRQPPGKALEWLAHIFSNDEKSYSTSLKSRLTISKDTSKSQVVLTMTNMDPVDTATYYCARTTYYYGSGSSGANFDYWGQGTLVTVSS

SEQ ID NO: 7512 - protein, 120 aa, Artificial Sequence
  Synthetic construct
EVQLVESGGGLVQPGGSLRLSCATSGLFFNSNSMNWVRQAPGKGLEWISYISSSGSNIFYADSVKGRFTISRDSAKSSLYLQMHSLRDEDTAVYYCATSTVSTSGYFDYWGQGTLVAVSS

SEQ ID NO: 7513 - protein, 121 aa, Artificial Sequence; identical to SEQ ID NO: 5906
  Synthetic construct

SEQ ID NO: 7514 - protein, 117 aa, Artificial Sequence
  Synthetic construct
QVQLVQSGAEVKKPGASVKVSCKASGYTFTGYYMHWVRQAPGQGLEWMGWINPNSGGTNYAQKFQGRVTMTRDTSISTAYMELSRLRSDDTAVYYCARTSIAATHYWGQGTLVTVSS

SEQ ID NO: 7515 - protein, 120 aa, Artificial Sequence
  Synthetic construct
EVQVVDSGGGLVKPGGSLRLSCAASGFNFDSYTMNWVRQAPGKGLEWVSSISGSGTYINYADSVKGRFTISRDNAKSSLWLQMNSLRTEDTAVYYCAREGYSSGNSFDYWGQGTLVTVSS

SEQ ID NO: 7516 - protein, 119 aa, Artificial Sequence
  Synthetic construct
QVQLQESGPGLVKPSQTLSLTCTVSGGSISSGSYYWSWIRQPAGKGLEWIGRIYTSGSTNYNPSLKSRVTISVDTSKNQFSLKLSSVTAADTAVYYCARGLTRSAHDYWGQGTLVTVSS

SEQ ID NO: 7517 - protein, 116 aa, Artificial Sequence
  Synthetic construct
EVQLVESGGGLVKPGGSLRLSCAASGFTFSSYSMNWVRQAPGKGLEWVSSISSSSSYIYYADSVKGRFTISRDNAKNSLYLQMNSLRAEDTAVYYCAREHSYGTYWGQGTLVTVSS

SEQ ID NO: 7518 - protein, 125 aa, Artificial Sequence
  Synthetic construct
EVELVEAGGGLAQPGGSLRLSCAASGFTFTAYGMFWVRQAPGKGLEWISYISTSGGRQDYADSVKGRFIVSRDNANNSVFLQMNSLTDDDTAVYYCARSAKRELGGSRGDPFDPWGQGTLVTVSS

SEQ ID NO: 7519 - protein, 130 aa, Artificial Sequence
  Synthetic construct
EVQLVESGGGLVQPGGSLRLSCAASGFTFSSYWMHWVRQAPGKGLVWVSRINSDGSSTSYADSVKGRFTISRDNAKNTLYLQMNSLRAEDTAVYYCARGGYCSSTSCYTGRTHSRVGDYWGQGTLVTVSS

SEQ ID NO: 7520 - protein, 120 aa, Artificial Sequence
  Synthetic construct
DVQLVESGGGLVKPGGSLRLSCAASGFTFGAFSMNWVRQAPGKGLEWISFISSSSSYIYYADSVKGRFTISRDNARNSLSLQMNSLRAEDTAVYYCATTPTCTGDCFDYWGQGTLVTVSS

SEQ ID NO: 7521 - protein, 119 aa, Artificial Sequence
  Synthetic construct
EVQLVESGGGLVQPGGSLRLSCAASGFTFSSYIMNWVRQAPGKGLEWVAYISTSSIDIFYADSVKGRFTISRDNGKNSLYLQMNSLRDDDTAVYYCARRAVADDPFDIWGQGTMVIVSS

SEQ ID NO: 7522 - protein, 119 aa, Artificial Sequence
  Synthetic construct
QVQLQESGPGLVKPSQTLSLTCTISGDSIGYGGYYWSWIRQPPGKGLEWLGYIYDSGSTSYNPSLKSRVFMSLDTSKSQFSLRLTSVTAADTAIYYCARAYSDSWGFDYWGQGTLVTVS

SEQ ID NO: 7523 - protein, 124 aa, Artificial Sequence; identical to SEQ ID NO: 5439
  Synthetic construct

SEQ ID NO: 7524 - protein, 126 aa, Artificial Sequence
  Synthetic construct
QVQLVQSGVEVKKPGASVKVSCMASGYTFTRYGISWVRQAPGQGLEWMGWISAHNGNTEYAQKLQGRVTMTTETSTNTAYMELRSLKSDDTAVYYCARDLVAYSSGWYGGSWLAPWGQGTLLIVSS

SEQ ID NO: 7525 - protein, 128 aa, Artificial Sequence
  Synthetic construct
EVQLVQSGAEVKKPGESLKISCKGSGYSFTSYWIGWVRQMPGKGLEWMGIIYPGDSDTRYSPSFQGQVTISADKSISTAYLQWSSLKASDTAMYYCARQGTYYYGSGSYSTRGSFDYWGQGTLVTVSS

SEQ ID NO: 7526 - protein, 121 aa, Artificial Sequence
  Synthetic construct
QVQLQESGPGLLRPSETLSLTCTVSGVSISSSNYYWGWVRQPPGKGLEWLGTIYYSVRSYYNPSLGGRVSISVDSAKSQFSLKLTSVTAADTAFYYCARRISVAGTSFDYWGQGTLVIVSS

SEQ ID NO: 7527 - protein, 124 aa, Artificial Sequence; identical to SEQ ID NO: 5963
  Synthetic construct

SEQ ID NO: 7528 - protein, 123 aa, Artificial Sequence
  Synthetic construct
QVQLHESGPGLVKPSETLSLTCTVSGGSVDSDGLYWSWIRQAPGKGLEFIGYLHNGAGTDYNRSLKSRVVISAGTSKDQFSLRLNSVTTADTAVYFCARGDGSYFGDRFMDTWGQGILVSVSS

SEQ ID NO: 7529 - protein, 126 aa, Artificial Sequence
  Synthetic construct
EVQLVESGGGLVKPGGSLRLSCAASGFTFSSYSMNWVRQAPGKGLEWVSSISSSSSYIYYADSVKGRFTISRDNAKNSLYLQMNSLRAEDTAVYYCARVVGSGSYRWDTTYFFDYWGQGTLVTVSS

SEQ ID NO: 7530 - protein, 118 aa, Artificial Sequence
  Synthetic construct
EVQLLASGGDSVQPGGSLRLSCAASGFTFSSAGMNWVRQAPGKGPDWVSAISATGSNTYYADSVKGRFTISRDNSKNMLYLQMNSLRADDTAVYYCAKGRLLREPDYWGQGTLVTVSS

SEQ ID NO: 7531 - protein, 123 aa, Artificial Sequence; identical to SEQ ID NO: 6359
  Synthetic construct

SEQ ID NO: 7532 - protein, 127 aa, Artificial Sequence; identical to SEQ ID NO: 5678
  Synthetic construct

SEQ ID NO: 7533 - protein, 126 aa, Artificial Sequence
  Synthetic construct
EVQLVESGGGLVQPGGSLRLFCTASGFTFSTYSMNWVRQAPGKGPEWVSYISTISATIYYADSVKGRFTISRDNAKNSLYLQMNSLRDEDTAVYYCARDYTSETLLGYFYYAMDVWGQGTTVTVSS

SEQ ID NO: 7534 - protein, 126 aa, Artificial Sequence
  Synthetic construct
QVQLVQSGAEVKKPGSSVKVSCKASGGTFSSYAISWVRQAPGQGLEWMGGIIPIFGTANYAQKFQGRVTITADESTSTAYMELSSLRSEDTAVYYCAKYYYDSSGYYYDVDAFDIWGQGTMVTVSS

SEQ ID NO: 7535 - protein, 120 aa, Artificial Sequence; identical to SEQ ID NO: 47
  Synthetic construct

SEQ ID NO: 7536 - protein, 122 aa, Artificial Sequence
  Synthetic construct
EVRLVESGGALIQPGGSLKLSCVVSGVGISHNYLSWVRQAPGKGPEWVSSLYSDTKTYYRDSVKGRFTISRDNYRNTLYLQMSNLRPDDTAVYYCARHPPNDYVSGRTFDYWGLGTLVTVSS

SEQ ID NO: 7537 - protein, 122 aa, Artificial Sequence
  Synthetic construct
QVQLQESGPGLVKPSQTLSLTCTVSGGSISSGDFYWSWFRQPAGKTLEWIGRIYTSGKTNYNRSLNSRVTISVDTSKNQFSLKLTSLTAADTAVYYCARGVFDTNGFYYAYWGQGTLVTVSS

SEQ ID NO: 7538 - protein, 126 aa, Artificial Sequence
  Synthetic construct
EVQLVESGGGLVKPGGSLRLSCAASGFTFSSYSMNWVRQAPGKGLEWVSSISSSSSYIYYADSVKGRFTISRDNAKNSLYLQMNSLRAEDTAVYYCARDRGYCSSTSCYRAWFDPWGQGTLVTVSS

SEQ ID NO: 7539 - protein, 124 aa, Artificial Sequence
  Synthetic construct
QVQLVESGGGVVQPGRSLRLSCAASGFTFSSYGMHWVRQAPGKGLEWVAVISYDGSNKYYADSVKGRFTISRDNSKNTLYLQMNSLRAEDTAVYYCAKERSSSGWYERGYFQHWGQGTLVTVSS

SEQ ID NO: 7540 - protein, 123 aa, Artificial Sequence
  Synthetic construct
EVQLVESGGGLVQPGGSLRLSCSASGFTFSSYAMHWVRQAPGKGLEYVSAISSNGGSTYYADSVKGRFTISRDNSKNTLYLQMSSLRAEDTAVYYCVKDRKWLRFSGGPFDYWGQGTLVTVSS

SEQ ID NO: 7541 - protein, 119 aa, Artificial Sequence
  Synthetic construct
QVQLQESGPGLVKPSETLSLTCTVSGGSISSYYWSWIRQPPGKGLEWIGYIYYSGSTNYNPSLKSRVTISVDTSKNQFSLKLSSVTAADTAVYYCARRKYSSSSFFDYWGQGTLVTVSS

SEQ ID NO: 7542 - protein, 125 aa, Artificial Sequence
  Synthetic construct
QLQLQESGPGLVKPSETLSLTCTVSGGSISSSSYYWGWIRQPPGKGLEWIGSIYYSGSTYYNPSLKSRVTISVDTSKNQFSLKLSSVTAADTAVYYCARHVYSSSWYGGRSIDYWGQGTLVTVSS

SEQ ID NO: 7543 - protein, 121 aa, Artificial Sequence
  Synthetic construct
EVQLVQSGAEVKKPGESLKISCEGSGYTFSNYWIGWVRQLPGKGLEWMGIIYPGDSDTSYSPSFQGQVTISADKSISTAYLQWSSLKASDTAMYYCARQRGNYEARAFDIWGHGTMVTVSS

SEQ ID NO: 7544 - protein, 127 aa, Artificial Sequence
  Synthetic construct
QVQLVQSGAEVKKPGASVKVSCKASGYTFTSYGISWVRQAPGQGLEWMGWISAYNGNTNYAQKLQGRVTMTTDTSTSTAYMELRSLRSDDTAVYYCARDSAVGATRGDYYYYGMDVWGQGTTVTVSS

SEQ ID NO: 7545 - protein, 128 aa, Artificial Sequence
  Synthetic construct
QVQLVQSGAEVKKPGASVKVSCKASGYTFSGYYIHWVRQAPGQGLEWMGWINPKNGGTNYAQKFQGRVTMTRDTSISTAYMELSRLRSDDTAVYYCARSRLIPAATPRAVPNHCFDYWGLGTPVTVSS

SEQ ID NO: 7546 - protein, 125 aa, Artificial Sequence
  Synthetic construct
QVQLVQSGAEVKKPGSSVRVSCKASGGTFNTYSIAWVRQAPGQGLEWMGRIIPILDIANSAQKFRGRVTITADKSTSTAYMELSSLRSEDTAVYYCAREQRYCTSVTCYGAVDSWGQGTLVTVSS

SEQ ID NO: 7547 - protein, 119 aa, Artificial Sequence
  Synthetic construct
EVQLVESGGGLVQPGGSLRLSCAGSGFSYWMSWVRQAPGKGLEWVATIKQDGSEKYYKDFLKGRFTVSRDNAKNSLYLQMNSLGAEDTAVYYCVTERQGSEGHSIFDHWGQGTRVTVSS

SEQ ID NO: 7548 - protein, 131 aa, Artificial Sequence
  Synthetic construct
QVQLVESGGGVVQPGRSLRLSCAASGFTFSSYGMHWVRQAPGKGLEWVAVISYDGSNKYYADSVKGRFTISRDNSKNTLYLQMNSLRAEDTAVYYCAKDRDRAYRPAFWFGDSPSYGMDVWGQGTTVTVSS

SEQ ID NO: 7549 - protein, 123 aa, Artificial Sequence; identical to SEQ ID NO: 5463
  Synthetic construct

SEQ ID NO: 7550 - protein, 122 aa, Artificial Sequence
  Synthetic construct
QVQLVESGGGVVQPGRSLRLSCAASGFTFSSYGMHWVRQAPGKGLEWVAVISYDGSNKYYADSVKGRFTISRDNSKNTLYLQMNSLRAEDTAVYYCAKAPGASYYYYGMDVWGQGTTVTVSS

SEQ ID NO: 7551 - protein, 125 aa, Artificial Sequence
  Synthetic construct
EVQLVESGGGLVQPGGSLKLSCAASGFTFSGSAMHWVRQASGKGLEWVGRIRSKANSYATAYAASVKGRFTISRDDSKNTAYLQMNSLKTEDTAVYYCTRPGYSDNYYYYGMDVWGQGTTVTVSS

SEQ ID NO: 7552 - protein, 123 aa, Artificial Sequence
  Synthetic construct
EVQLLESGGGLVQPGGSLRLSCAASGFTFSSYAMSWVRQAPGKGLEWVSAISGSGGSTYYADSVKGRFTISRDNSKNTLYLQMNSLRAEDTAVYYCAKDTKKSMVRGGRFDYWGQGTLVTVSS

SEQ ID NO: 7553 - protein, 121 aa, Artificial Sequence
  Synthetic construct
EVQLLESGGGLVQPGGSLRLSCAASGFTFSSYAMSWVRQAPGKGLEWVSAISGSGGSTYYADSVKGRFTISRDNSKNTLYLQMNSLRAEDTAVYYCAKRGFTMVRGAYDYWGQGTLVTVSS

SEQ ID NO: 7554 - protein, 129 aa, Artificial Sequence
  Synthetic construct
QVQLQESGPGLVKPSETLSLTCTVSGGSVSSGSYYWSWIRQPPGKGLEWIGYIYYSGSTNYNPSLKSRVTISVDTSKNQFSLKLSSVTAADTAVYYCARVVRRGSGSYRPYYYYGMDVWGQGTTVTVSS

SEQ ID NO: 7555 - protein, 121 aa, Artificial Sequence
  Synthetic construct
QAQLVQSGAEVRKPGASVKVSCKASGYIFTNYFIHWVRQAPGQGLEWVGRVNADSGVTEHAQRFQGRLTMTRDRSLTSALMELSALRSDDTAVYYCVRDKVDTPFWELDPWGQGTLVIVSS

SEQ ID NO: 7556 - protein, 125 aa, Artificial Sequence
  Synthetic construct
QVQLQESGPGLVKPSQTLSLTCTVSGGSISSGGYYWSWIRQHPGKGLEWIGYIYYSGSTYYNPSLKSRVTISVDTSKNQFSLKLSSVTAADTAVYYCARDYYDSSGYEGWGMDVWGQGTTVTVSS

SEQ ID NO: 7557 - protein, 118 aa, Artificial Sequence
  Synthetic construct
EVQLVESGGGLVQPGGSLRLSCAASGFTFRNYWISWVRQAPGKGLEWLANMNTDGSEKYYVDSVKGRFTISRDNAKNSLYLQMNSLRAEDTAVYYCARDLARGYFDYWGQGTLVTVSS

SEQ ID NO: 7558 - protein, 121 aa, Artificial Sequence
  Synthetic construct
QVNLVESGGGVVLPGGALRLSCAGSGFSFRGYAMHWVRQAPGKGLEWMAYISYDGGVRHYADSVKGRFTVSRHNSNNTLFLQMNTLRTDDSAIYYCARADGFLSAAEFDHWGQGTPVTVSS

SEQ ID NO: 7559 - protein, 54 aa, Artificial Sequence
  Synthetic construct
SRVTMSVDTPKNKFSLKLSSVTAADTAVYYCARARTTYNRLDFWGQGTLVIVSS

SEQ ID NO: 7560 - protein, 123 aa, Artificial Sequence; identical to SEQ ID NO: 5437
  Synthetic construct

SEQ ID NO: 7561 - protein, 127 aa, Artificial Sequence
  Synthetic construct
DVQLLQSGAEAKKPGATMKISCKVSGYTFIDYYLHWVKQAPGKGLEWIGLIDPETAEVTYADKFQDRVSITADTSIDTAYMEMSGLKSDDTAVYYCTTLASWGNCSETRCFDEFDVWGQGTVVTVSS

SEQ ID NO: 7562 - protein, 120 aa, Artificial Sequence
  Synthetic construct
QVQLVESGGGVVQPGRSLRLSCAASGPTLGTYAMHWVRQPPGKGLEWVAVTSYAGTDKNYADSVKGRFTISRDNSRNTVYLQMNSLRPEDTAVYYCAIFPGVDTVVADYWGQGTLVIVSS

SEQ ID NO: 7563 - protein, 120 aa, Artificial Sequence
  Synthetic construct
EVQLVESGGGLVQPGGSLRLSCAASGFTFSSYWMTWVRQAPGKGLEWVANIKQDGSEKYYVDSVKGRFTISRDNAKNSLYLQMSSLRADDTAVYYCARARMTGTKIPAYWGQGTLVTVSS

SEQ ID NO: 7564 - protein, 123 aa, Artificial Sequence
  Synthetic construct
EVQLLESGGGLVQPGGSLRLSCAASGFTFSSYAMSWVRQAPGKGLEWVSAISGSGGSTYYADSVKGRFTISRDNSKNTLYLQMNSLRAEDTAVYYCAKEPAAAGPYYYGMDVWGQGTTVTVSS

SEQ ID NO: 7565 - protein, 128 aa, Artificial Sequence
  Synthetic construct
EVQLVESGGGLVQPGGSLRLSCAASGFTFSSYWMSWVRQAPGKGLEWVANIKQDGSEKYYVDSVKGRFTISRDNAKNSLYLQMNSLRAEDTAVYYCARVGLNRRGVIISYYYYGMDVWGQGTTVTVSS

SEQ ID NO: 7566 - protein, 124 aa, Artificial Sequence
  Synthetic construct
QVQLVESGGGVVQPGRSLRLSCAASGFTFSSYGMHWVRQAPGKGLEWVAVISYDGSNKYYADSVKGRFTISRDNSKNTLYLQMNSLRAEDTAVYYCAKGGGYSYGRIYWYFDLWGRGTLVTVSS

SEQ ID NO: 7567 - protein, 123 aa, Artificial Sequence
  Synthetic construct
EVQLVESGGGLVKPGRSLRLSCTASGFTFGDYAMSWFRQAPGKGLEWVGFIRSKAYGGTTEYAASVKGRFTISRDDSKSIAYLQMNSLKTEDTAVYYCTRLKRYLYKLFAGFWGQGTLVTVSS

SEQ ID NO: 7568 - protein, 125 aa, Artificial Sequence
  Synthetic construct
QVQLVESGGGVVQPGRSLRLSCAASGFTFSSYGMHWVRQAPGKGLEWVAVISYDGSNKYYADSVKGRFTISRDNSKNTLYLQMNSLRAEDTAVYYCAKLHLAYYDILTGYQFDYWGQGTLVTVSS

SEQ ID NO: 7569 - protein, 132 aa, Artificial Sequence; identical to SEQ ID NO: 48
  Synthetic construct

SEQ ID NO: 7570 - protein, 120 aa, Artificial Sequence
  Synthetic construct
QIELQESGPGLVKPSQTLSLTCTVSGGSISSGGYYWSWIRQHPEKGLEWIGYVYYLGTTHYNPSLRSRVTISLDASQNQFSLKMNSMTVADTAVYYCARERLTFGGIDYWGQGTLVTVSS

SEQ ID NO: 7571 - protein, 121 aa, Artificial Sequence
  Synthetic construct
QVQLVQSGAEVKKPGASVKVSCKASGYTFTSYGISWVRQAPGQGLEWMGWISAYNGNTNYAQKLQGRVTMTTDTSTSTAYMELRSLRSDDTAVYYCARNSGSYYARSFDYWGQGTLVTVSS

SEQ ID NO: 7572 - protein, 130 aa, Artificial Sequence
  Synthetic construct
DVQLMESGGGLVKPGGSLRLSCAASGFNFTNAWMKWVRQVPGKGLEWIGLIKSKADGGTAEYAAPAEGRFIISRDDSKNTMYMELNNLKSEDTARYYCATDEGYGYCIGAGGCYSAMDSWGQGAVVTVAS

SEQ ID NO: 7573 - protein, 125 aa, Artificial Sequence
  Synthetic construct
QVQLQESGPGLVKPSDTLSLTCAVSGSSITSTNWWGWIRQPPGKGLEWIGCMYYSGTTYYNPSLKSRVTMSVDTSKNQLSLNLKSVTAVDTAVYYCARTMGFRGFSYYYYGLDVWGQGTTVTVSS

SEQ ID NO: 7574 - protein, 120 aa, Artificial Sequence; identical to SEQ ID NO: 5542
  Synthetic construct

SEQ ID NO: 7575 - protein, 123 aa, Artificial Sequence
  Synthetic construct
QVQLVESGGGVVQPGRSLRLSCAASGFTFSSYAMHWVRQAPGKGLEWVAVISYDGSNKYYADSVKGRFTISRDNSKNTLYLQMNSLRAEDTAVYYCARGAVRFSYYYYGMDVWGQGTTVTVSS

SEQ ID NO: 7576 - protein, 120 aa, Artificial Sequence
  Synthetic construct
EVQLLESGGGLVQPGGSLRLSCAASGFTFSSYAMSWVRQAPGKGLEWVSAISGSGGSTYYADSVKGRFTISRDNSKNTLYLQMNSLRAEDTAVYYCAKIIVVVPGCFDYWGQGTLVTVSS

SEQ ID NO: 7577 - protein, 122 aa, Artificial Sequence
  Synthetic construct
QVTLKESGPVLVKPTETLTLTCTVSGFSLSNARMGVSWIRQPPGKALEWLAHIFSNDEKSYSTSLKSRLTISKDTSKSQVVLTMTNMDPVDTATYYCARIVWKSGSRLSDYWGQGTLVTVSS

SEQ ID NO: 7578 - protein, 125 aa, Artificial Sequence
  Synthetic construct
QIALKESGPTLVEPTQTLTLTCSFSGFSLSAGAVGVGWIRQPPGKALEWLAVIYGEGDNRYTSSLNARLTVTDDSSKNQVVLTMTNMDPVDTATYYCAHTVYKFAPGTYYYFDHWGQGTLVTVSS

SEQ ID NO: 7579 - protein, 118 aa, Artificial Sequence
  Synthetic construct
EVQLLESGGGLVQPGGSLRLSCAASGFTFSSYAMSWVRQAPGKGLEWVSAISGSGGSTYYADSVKGRFTISRDNSKNTLYLQMNSLRAEDTAVYYCAKGGVFQLTGYWGQGTLVTVSS

SEQ ID NO: 7580 - protein, 118 aa, Artificial Sequence
  Synthetic construct
QVQLQESGPGLVKPSETLSLTCTVSGGSISSYFWSWIRQPPGKGLEWIGYVFYSGSTNYNPSLKSRVTISVDTPKNKFSLKLSSVTAADTAVYYCARARTTYNRLDFWGQGTLVIVSS

SEQ ID NO: 7581 - protein, 119 aa, Artificial Sequence
  Synthetic construct
EVQLVQSGAEVKKPGESLRLSCKGSGDSFTGNWISWVRQMPGKGLEWMGRIDPSDSYTNYSPSFQGHVTLSADKSITTAYLQWSSLKASDTAIYYCARHRIVAGGFDYWGQGTLVTVSS

SEQ ID NO: 7582 - protein, 123 aa, Artificial Sequence
  Synthetic construct
QIQLVQSGAEVKKPGASVRVSCKASSYTFSNYGVTWVRQAPRQGLEWMGWISGHTGDTKYAQMFQGRVTMTADTSTGTAYLELRSLTSDDTAVYYCSTDLWERHRAPAQSHHWGQGTLVTVSS

SEQ ID NO: 7583 - protein, 126 aa, Artificial Sequence
  Synthetic construct
QLQLQESGPGLVKPSETLSLTCTVSGGSISSSSYYWGWIRQPPGKGLEWIGSIYYSGSTYYNPSLKSRVTISVDTSKNQFSLKLSSVTAADTAVYYCARLRKVLRYFDWLPHFDYWGQGTLVTVSS

SEQ ID NO: 7584 - protein, 119 aa, Artificial Sequence; identical to SEQ ID NO: 5653
  Synthetic construct

SEQ ID NO: 7585 - protein, 129 aa, Artificial Sequence
  Synthetic construct
EVQLVESGGGLVKPGGSLRLSCAVSGFTFINAWMSWVRQAPGKGLEWVGRIKSKTDGGTTDYAAPVKGRFTISRDDSKNTLFLQMNSLKTEDTAVYYCTTGYSGYDFLAKKERYYFDYWGQGTLVTVSS

SEQ ID NO: 7586 - protein, 122 aa, Artificial Sequence
  Synthetic construct
EVQLVESGGGMIEPGGSLRLSCLVSGFTFDDYAMHWVRQVPGKGLEWVSGINWNSGGRDYAAPVKGRFTISRDNTRNILYLQMDNLRVDDTAFYYCAKDVQAAAPYWHLDVWGRGTLVTVSS

SEQ ID NO: 7587 - protein, 134 aa, Artificial Sequence
  Synthetic construct
QVQLVQSGAEVKKPGASVKVSCKASGYTFTGYYMHWVRQAPGQGLEWMGWINPNSGGTNYAQKFQGWVTMTRDTSISTAYMELSRLRSDDTAVYYCASSVEYSSSWSKQGVKSDYYYYYGMDVWGQGTTVTVSS

SEQ ID NO: 7588 - protein, 121 aa, Artificial Sequence
  Synthetic construct
QVHLVESGGGVVQPGRSLRLSCAASGFSFNNYGMHWLRQAPGKGLEWVAVIWFDGSHQFYADSVKGRFTIARDNSKHTVSLQMNSLRAEDTAVYYCARDWALGAKFYFDYWGQGTLVTVSS

SEQ ID NO: 7589 - protein, 115 aa, Artificial Sequence
  Synthetic construct
QVQLVQSGAEVKKPGASLKVSCKASGYTFTGYYIHWVRQAPGQGLEWMGWINPNSGDTKYAQNFQGRVTMTRDTSITTAYMELSRLKSDDTAVYYCARLGSADYWGQGTLVTVSS

SEQ ID NO: 7590 - protein, 121 aa, Artificial Sequence; identical to SEQ ID NO: 7132
  Synthetic construct

SEQ ID NO: 7591 - protein, 126 aa, Artificial Sequence
  Synthetic construct
QVQLVESGGGVVQPGRSLRLSCAASGFTFSSYGMHWVRQAPGKGLEWVAVIWYDGSNKYYADSVKGRFTISRDNSKNTLYLQMNSLRAEDTAVYYCARVRYNWNEGRYYYYGMDVWGQGTTVTVSS

SEQ ID NO: 7592 - protein, 119 aa, Artificial Sequence; identical to SEQ ID NO: 49
  Synthetic construct

SEQ ID NO: 7593 - protein, 115 aa, Artificial Sequence
  Synthetic construct
EVQLVESGGGLVKPGGSLRLSCAASGFTFSSYSMNWVRQAPGKGLEWVSSISSSSSYIYYADSVKGRFTISRDNAKNSLYLQMNSLRAEDTAVYYCASGGSLGYWGQGTLVTVSS

SEQ ID NO: 7594 - protein, 122 aa, Artificial Sequence
  Synthetic construct
QVQLVQSGAEVKKPGASVKVSCKASGYTFTSYYMHWVRQAPGQGLEWMGIINPSGGSTSYAQKFQGRVTMTRDTSTSTVYMELSSLRSEDTAVYYCARSLMVRGVIHGMDVWGQGTTVTVSS

SEQ ID NO: 7595 - protein, 123 aa, Artificial Sequence
  Synthetic construct
QVQLQESGPGLVKPSETLSLTCTVAGGSIRSYYWSWIRQPPGKGLEWIGYIYYSGSTNYNPSLKSRVTISVDTSKNQFSLKLNSVTAADTAVYYCARGQYCTNGVCYFEIDYWGQGTLVTVSS

SEQ ID NO: 7596 - protein, 126 aa, Artificial Sequence
  Synthetic construct
EVQLVESGGGLVQPGGSLRLSCAASGFTFSSYSMNWVRQAPGKGLEWVSYISSSSSTIYYADSVKGRFTISRDNAKNSLYLQMNSLRDEDTAVYYCARVRGYCSSTSCYPDAFDIWGQGTMVTVSS

SEQ ID NO: 7597 - protein, 120 aa, Artificial Sequence
  Synthetic construct
QVQLVESGGGVVQPGRSLRLSCAASGFTFSSYGMHWVRQAPGKGLEWVAVISYHGDNEYYADSVKGRFTISRDNSKSTLYLQMNTLTAEDTAVYYCAKDAVEYSSVFDYWGQGTLVTVSS

SEQ ID NO: 7598 - protein, 127 aa, Artificial Sequence
  Synthetic construct
EVQLVQSGAEVKKPGESLKISCKGSGYSFTSYWIGWVRQMPGKGLEWMGIIYPGDSDTRYSPSFQGQVTISADKSISTAYLQWSSLKASDTAMYYCARRNYYGSGSYYTPYNWFDPWGQGTLVTVSS

SEQ ID NO: 7599 - protein, 124 aa, Artificial Sequence
  Synthetic construct
QVQLVQSGAELKKPGASVKVSCKASGYSFTTYGISWVRQAPGQGLEWMGWISGYNGNTKFTQKFQDRVTMTTDTSTSTAYMELRSLRSDDTAVYFCARDAAYYYDRSRRWFDSWGQGTLVTVSS

SEQ ID NO: 7600 - protein, 123 aa, Artificial Sequence
  Synthetic construct
QLQLQESGPGLVRPSETLSLTCTVSGGSINSNNYYWAWIRQPPGKGLEWIGSIYYIGTAYNSPSLKSRVTMSVDTSKGQFSLNLYSVTAADTAIYYCASLNMGYSDTYSFDYWGQGTLVTVSS

SEQ ID NO: 7601 - protein, 119 aa, Artificial Sequence
  Synthetic construct
QVQLQESGPGLVQASETLSLTCTVSGGSLSPHFWSWIRYSPGKGLDLIGYVYYNGSPKYSPSLASRVTISVDLSREQLSLTLRSVTAADTAVYYCARGPSRSTPIVAYWGQGILVSVSS

SEQ ID NO: 7602 - protein, 123 aa, Artificial Sequence
  Synthetic construct
QVQLVESGGGVVQPGRALRLSCAASGFSFSIYSINWVRQAPGKGLEWVAVISDDGNNNYFADSVKGRFTISRDNSKNTVYLQINSLRVEDTAVYYCARSPMIRGVPAALFDYWGQGTLVTVSS

SEQ ID NO: 7603 - protein, 132 aa, Artificial Sequence
  Synthetic construct
QVQLVQSGAEVKKPGASVKVSCKASGYTFTSYGISWVRQAPGQGLEWMGWISAYNGNTNYAQKLQGRVTMTTDTSTSTAYMELRSLRSDDTAVYYCARDHRYCSSTSCYKGEPYYYYGMDVWGQGTTVTVSS

SEQ ID NO: 7604 - protein, 118 aa, Artificial Sequence; identical to SEQ ID NO: 50
  Synthetic construct

SEQ ID NO: 7605 - protein, 116 aa, Artificial Sequence
  Synthetic construct
QVQLVESGGGGVQPGRSLRLSCAASGFTFSAYGMHWVRQAPGKGLEWVAVISYDGSNKYYADSVKGRFTISRDNSKNTVSLQMNSLRADDTAVYYCAKDYFTFDSWGQGTLVTVSS

SEQ ID NO: 7606 - protein, 124 aa, Artificial Sequence
  Synthetic construct
EVQLLESGGGLVQPGGSLRLSCAASGFTFSSYAMSWVRQAPGKGLEWVSAISGSGGSTYYADSVKGRFTISRDNSKNTLYLQMNSLRAEDTAVYYCAKDPTTVGRYYYYGMDVWGQGTTVTVSS

SEQ ID NO: 7607 - protein, 124 aa, Artificial Sequence
  Synthetic construct
QVQLQESGPGLVKPSQTLSLTCTVSGGSISSGSYYWSWIRQPAGKGLEWIGRIYTSGSTNYNPSLKSRVTISVDTSKNQFSLKLSSVTAADTAVYYCARGRTRGVYYYYGMDVWGQGTTVTVSS

SEQ ID NO: 7608 - protein, 121 aa, Artificial Sequence; identical to SEQ ID NO: 5906
  Synthetic construct

SEQ ID NO: 7609 - protein, 121 aa, Artificial Sequence
  Synthetic construct
EVQLLESGGGLVQPGGSLRLSCAASGFTFSSYAMSWVRQAPGKGLEWVSAISGSGGSTYYADSVKGRFTISRDNSKNTLYLQMNSLRAEDTAVYYCAKVHRYNWNPPSGYWGQGTLVTVSS

SEQ ID NO: 7610 - protein, 120 aa, Artificial Sequence
  Synthetic construct
QVQLQESGPGLVKPSQTLSLTCTISGDSIGYGGYYWSWIRQPPGKGLEWLGYIYDSGSTSYNPSLKSRVFMSLDTSKSQFSLRLTSVTAADTAIYYCARAYSDSWGFDYWGQGTLVTVSS

SEQ ID NO: 7611 - protein, 121 aa, Artificial Sequence
  Synthetic construct
EVKLVESGGGLVQPGGSLRLSCAVSGFTFKYYYMTWVRQAPGKGLEWVANIKQDGSEKYYVDSVKGRFTISRDNAKNSLYLQMNSLRAEDTAVYYCAREELRDLLYYFDYWGQGTLVTVSS

SEQ ID NO: 7612 - protein, 118 aa, Artificial Sequence
  Synthetic construct
EVQLVESGGGLIQPGGSLRLSCAASGFTVSSNYMSWVRQAPGKGLEWVSVIYSGGSTYYADSVKGRFTISRDNSKNTLYLQMNSLRAEDTAVYYCARARGIRGVMAYWGQGTLVTVSS

SEQ ID NO: 7613 - protein, 118 aa, Artificial Sequence
  Synthetic construct
EVQLVESGGGLVQPGGSLRLSCAASGFTFSSYWMSWVRQAPGKGLEWVANIKQDGSEKYYVDSVKGRFTISRDNAKNSLYLQMNSLRAEDTAVYYCAVKWESRSLDYWGQGTLVTVSS

SEQ ID NO: 7614 - protein, 125 aa, Artificial Sequence
  Synthetic construct
QLQLQESGPGLVKPSETLSLTCTVSGGSISSSSYYWGWIRQPPGKGLEWIGSIYYSGSTYYNPSLKSRVTISVDTSKNQFSLKLSSVTAADTAVYYCARHRMVRGVRWIPPFDPWGQGTLVTVSS

SEQ ID NO: 7615 - protein, 128 aa, Artificial Sequence
  Synthetic construct
EVQLVQSGAEVKKPGESLRISCKGSGYSFTSYWISWVRQMPGKGLEWMGRIDPSDSYTNYSPSFQGHVTISADKSISTAYLQWSSLKASDTAMYYCARAFGSSSWYTRGRPVYGMDVWGQGTTVTVSS

SEQ ID NO: 7616 - protein, 122 aa, Artificial Sequence
  Synthetic construct
EVQLVQSGAEVKKPGESLKISCKGSGYSFTSYWIGWVRQMPGKGLEWMGIIYPGDSDTRYSPSFQGQVTISADKSISTAYLQWSSLKASDTAMYYCARPQIRVGALTHFDYWGQGTLVTVSS

SEQ ID NO: 7617 - protein, 122 aa, Artificial Sequence
  Synthetic construct
QVQLVESGGGVVQPGRSLRLSCAASGFTFSSYAMHWVRQAPGKGLEWVAVISYDGSNKYYADSVKGRFTISRDNSKNTLYLQMNSLRAEDTAVYYCARVRGRQQLPNWFDPWGQGTLVTVSS

SEQ ID NO: 7618 - protein, 130 aa, Artificial Sequence
  Synthetic construct
QLQLQESGPGLVKPSETLSLTCTVSGGSISSSSYYWGWIRQPPGKGLEWIGSIYYSGSTYYNPSLKSRVTISVDTSKNQFSLKLSSVTAADTAVYYCARHVANCSSTSCYARRVGWFDPWGQGTLVTVSS

SEQ ID NO: 7619 - protein, 124 aa, Artificial Sequence
  Synthetic construct
QIHLQQSGPGLVKPSQTLSLSCAIYGDRVSSDSAAWNWVRQSPSRGLEWLGRTYYSSKWFYDYSPSVQGRVTIKPDTTRNQFSLQLDSVTPEDSAIYYCARDARGYEGYHLHYWGQGTLVTVSS

SEQ ID NO: 7620 - protein, 123 aa, Artificial Sequence
  Synthetic construct
QLQLQESAPGLVKPSETLSLTCTVSGGSINNHNYYWGWIRQPPGTGLEWIGTISNSGGTHYNPSLKSRVTMSVDTSENQLSLTLNSVTAADTGLYYCANFFGSSWKRGWFDSWGQGTLVTVSS

SEQ ID NO: 7621 - protein, 125 aa, Artificial Sequence
  Synthetic construct
EVQLVESGGGLVKPGGSLRLSCAASGFTFSNAWMSWVRQAPGKGLEWVGRIKSKTDGGTTDYAAPVKGRFTISRDDSKNTLYLQMNSLKTEDTAVYYCTTGYRHWLVRGRYFDYWGQGTLVTVSS

SEQ ID NO: 7622 - protein, 127 aa, Artificial Sequence
  Synthetic construct
QVQLVESGGGVVQPGRSLRLSCAASGFTFSSYGMHWVRQAPGKGLEWVAVISYDGSNKYYADSVKGRFTISRDNSKNTLYLQMNSLRAEDTAVYYCAKSEATVTGGRQYYYYGMDVWGQGTTVTVSS

SEQ ID NO: 7623 - protein, 116 aa, Artificial Sequence
  Synthetic construct
QVQLVESGGGVVQPGRSLRLSCAASGFTFRSYPIHWLRQAPGKGPEWVAVISYDGSKTYYIDSVRGRFTISRDNSKNTVYLQMSGLRAEDTAVYYCATLVTSGGGWGQGTLVTVSS

SEQ ID NO: 7624 - protein, 120 aa, Artificial Sequence
  Synthetic construct
EVQLLESGGGLVQPGGSLRLSCAASGFTFSSYAMSWVRQAPGKGLEWVSAISGSGGSTYYADSVKGRFTISRDNSKNTLYLQMNSLRAEDTAVYYCAKGSPSGRWYFDYWGQGTLVTVSS

SEQ ID NO: 7625 - protein, 121 aa, Artificial Sequence
  Synthetic construct
QDQLQESGPGLVKPSQTLSLNCSVSGGSISSGGFYWIWIRHHPGKGLEWIGYIYNTGSVYYNASLRSRASISIDTSKNQFSLMLSSVTAADTAVYYCARGRGTGSDYVDSWGQGTLVTVSS

SEQ ID NO: 7626 - protein, 122 aa, Artificial Sequence
  Synthetic construct
QVQLVESGGGVVQPGRSLRLSCAASGFTFSSYAMHWVRQAPGKGLEWVAVISYDGSNKYYADSVKGRFTISRDNSKNTLYLQMNSLRAEDTAVYYCARGIVATTRPYYFDYWGQGTLVTVSS

SEQ ID NO: 7627 - protein, 122 aa, Artificial Sequence
  Synthetic construct
QVQLVQSGAEVKKPGASVKVSCKASGYTFTGYYMHWVRQAPGQGLEWMGWINPNSGGTNYAQKFQGRVTMTRDTSISTAYMELSRLRSDDTAVYYCARVVPVYSSGRRSDYWGQGTLVTVSS

SEQ ID NO: 7628 - protein, 128 aa, Artificial Sequence
  Synthetic construct
QVQLVESGGGLVKPGGSLRLSCAASGFTFSDYYMSWIRQAPGKGLEWVSYISSSSSYTNYADSVKGRFTISRDNAKNSLYLQMNSLRAEDTAVYYCARYRATAYYYGSGSSPYYFDYWGQGTLVTVSS

SEQ ID NO: 7629 - protein, 119 aa, Artificial Sequence
  Synthetic construct
EVQLVESGGGLVQPGGSLRLSCAASGFTFSSYDMHWVRQATGKGLEWVSAIGTAGDPYYPGSVKGRFTISRENAKNSLYLQMNSLRAGDTAVYYCARGSTGTTPDFDYWGQGTLVTVSS

SEQ ID NO: 7630 - protein, 120 aa, Artificial Sequence
  Synthetic construct
QVQLQQWGAGLLKPSETLSLTCAVYGGSFSGYYWSWIRQPPGKGLEWIGEINHSGSTNYNPSLKSRVTISVDTSKNQFSLKLSSVTAADTAVYYCARGGVTTVTTGFDPWGQGTLVTVSS

SEQ ID NO: 7631 - protein, 126 aa, Artificial Sequence
  Synthetic construct
QLQLQESGPRLVKPSETLSVTCTLSGGPINGTSYCWGWIRQPPGKGLEWIGSIYYRGKTYHNPSLKSRVIMSVDTSKNQVSLKLSSVTAADTAVYYCARQYNDILSGYELGWFDPWGQGILVTVAS

SEQ ID NO: 7632 - protein, 122 aa, Artificial Sequence
  Synthetic construct
QVHLRQWGAGLLKPSETLSLTCTVDGGSLSSYSWGWIRQPPGKGLEWIAEISHSGSTIYNPSLKSRVTMSIATSKNQFSLNLTSVTAADTAVYFCARVEYAYSYGNYYFDFWGQGTLVSVSS

SEQ ID NO: 7633 - protein, 123 aa, Artificial Sequence
  Synthetic construct
EVQLLESGGGLVQPGGSLRLSCAASGFTFSSYAMSWVRQAPGKGLEWVSAISGSGGSTYYADSVKGRFTISRDNSKNTLYLQMNSLRAEDTAVYYCAKSGVGLIVGATIVYYWGQGTLVTVSS

SEQ ID NO: 7634 - protein, 134 aa, Artificial Sequence
  Synthetic construct
QVQLVQSGAEVKKPGSSVKVSCKASGGTFSSYAISWVRQAPGQGLEWMGRIIPILGIANYAQKFQGRVTITADKSTSTAYMELSSLRSEDTAVYYCARAGMEGYCSSTSCHNERYYYYYGMDVWGQGTTVTVSS

SEQ ID NO: 7635 - protein, 122 aa, Artificial Sequence
  Synthetic construct
EVQLVQSGAEVKKPGESLRISCQGSGYRFTSSWINWVRQMPGKGLVWMGSIDPSDSYTNYSPSFQGHVTISVDKSITTAYLQWSSLEASDSAIYYCAMGTIAWAGRKGADFWGQGTLVTVSS

SEQ ID NO: 7636 - protein, 115 aa, Artificial Sequence; identical to SEQ ID NO: 5474
  Synthetic construct

SEQ ID NO: 7637 - protein, 126 aa, Artificial Sequence
  Synthetic construct
EVQLVESGGGLVKPGGSLRLSCEASGFSLSTSDMNWVRQAPGKGLEWVSYISRSSSYIYYADSVKGRFTISRDNARNSVYLQMNSLSAEDTAVYFCARVGGGDEWYSSGWFSFDNWGQGTLVTVSS

SEQ ID NO: 7638 - protein, 124 aa, Artificial Sequence
  Synthetic construct
QVQLLESGPGLVKPSQTLSLTCSVSGASISSTTDYWSWIRQPAGKGLEWIGRIYPSGATNYNPSFRSRVTISRDTSKNQISLELTSVTAADTAVFYCARDRPPTDFSGWTFDSWGQGTLVTVSS

SEQ ID NO: 7639 - protein, 121 aa, Artificial Sequence
  Synthetic construct
QVQLVQSGAEVKKPGASVKVSCKASGYTFTSYAMQWVRQAPGQRLEWMGWINAGNGNTKYSQKFQDRITITRDTSASTAYMELSSLRSEDTAVYYCARVWWTGSDRGFDYWGQGTLVTVSS

SEQ ID NO: 7640 - protein, 126 aa, Artificial Sequence
  Synthetic construct
QVQLQESGPGLVKPSQTLSLTCTVSGGSISSGSYYWSWIRQPAGKGLEWIGRIYTSGSTNYNPSLKSRVTISVDTSKNQFSLKLSSVTAADTAVYYCARGAGIAALPRRKGGMDVWGQGTTVTVSS

SEQ ID NO: 7641 - protein, 119 aa, Artificial Sequence
  Synthetic construct
QVQLVESGGGVVQPGRSLRLSCAASGFTFSSYGMHWVRQAPGKGLEWVAVIWYDGSNKYYADSVKGRFTISRDNSKNTLYLQMNSLRAEDTAVYYCAGADYAENWFDPWGQGTLVTVSS

SEQ ID NO: 7642 - protein, 123 aa, Artificial Sequence
  Synthetic construct
QVQLVQSGAEVKKPGASVKVSCKASGYTFTSFDINWVRQATGQGLEWMGWMNPNSGDTGYSQKFQGRVTMTRSTSISTAYMELSSLRSEDTAVYYCARGKDTPAYYYYLMDVWGQGTTVTVSS

SEQ ID NO: 7643 - protein, 122 aa, Artificial Sequence
  Synthetic construct
QVQLVESGGTLVRPGGSLKLSCGASGFDFSYYYMSWIRQAPGKGLEWVSYISNSAATIHYADSVKGRFTVSRDNAKNSLSLQLDNLKTDDTAVYFCARDKADDGATTTYDLWGQGTLVTVSS

SEQ ID NO: 7644 - protein, 122 aa, Artificial Sequence
  Synthetic construct
CQVLVESGGGLVKPGESLRLSCAASGFTFSNFYISWLRQAPGKGLEWVSYISSRGNAIYYTDSVEGRFTMSRDNAGNSVSLQMNSLRPEDTAVYYCARDRDYNGERAYFDSWGQGTLVTVSS

SEQ ID NO: 7645 - protein, 124 aa, Artificial Sequence; identical to SEQ ID NO: 5439
  Synthetic construct

SEQ ID NO: 7646 - protein, 129 aa, Artificial Sequence
  Synthetic construct
QVQLVQSGAEVKKPGASVKVSCKASGYTFTSYYMHWVRQAPGQGLEWMGIINPSGGSTSYAQKFQGRVTMTRDTSTSTVYMELSSLRSEDTAVYYCARGLYYDFWSGYYDYYYYGMDVWGQGTTVTVSS

SEQ ID NO: 7647 - protein, 117 aa, Artificial Sequence
  Synthetic construct
QVQLQESGPGLVKPSETLSLTCTVSGGSISSYYWSWIRQPPGKGLEWIGYIYYSGSTNYNPSLKSRVTISVDTSKNQFSLKLSSVTAADTAVYYCARDQSSGWYLDWGQGTLVTVSS

SEQ ID NO: 7648 - protein, 125 aa, Artificial Sequence; identical to SEQ ID NO: 5711
  Synthetic construct

SEQ ID NO: 7649 - protein, 128 aa, Artificial Sequence
  Synthetic construct
EVQLVESGGGLVKPGGSLRLSCAASGFTFSSYSMNWVRQAPGKGLEWVSSISSSSSYIYYADSVKGRFTISRDNAKNSLYLQMNSLRAEDTAVYYCARSRYCSSTSCYSGQTEYFQHWGQGTLVTVSS

SEQ ID NO: 7650 - protein, 133 aa, Artificial Sequence
  Synthetic construct
QLQLQESGPGLLRPSETLSLTCTVSAGSIGSSYFSWGWIRQPPGKGLEWIGSMSQRGGRYYSPTLKSRVTINVDTSTNHFSLKLSSLTASDTGVYFCVRHKNLRETTFANERSGSWHSYFDYWGRGVRVTVSS

SEQ ID NO: 7651 - protein, 129 aa, Artificial Sequence
  Synthetic construct
QVLLQQSGPGLLKPSQTLSVTCAISGDSVSSNSATWNWIRQSPSRGLEWLGRAYYRSRWFNDYADSVRSRININSDTSMNQFSLHLNSVTPEDTAVYYCTRATTHYNSIWATEGGMDVWGQGTTVTVSS

SEQ ID NO: 7652 - protein, 123 aa, Artificial Sequence
  Synthetic construct
QVQLRQWGAGLLKPSETLSLTCAVYGRSFSGYYWSWIRQPPGKGLEWIGEINHSGSTNYNPSLKSRLTISVDTSTNQFSLKLSSVTAADTAVYYCARARGNRNYYYYYGMDVWGQGTTVTVSS

SEQ ID NO: 7653 - protein, 122 aa, Artificial Sequence
  Synthetic construct
EIRLVQSGGELKKPGESLKISCKIFEYDFSAYWLGWVRQVPGKGLEWVGLIYPGDSDTSYSPSFEGQVTMSVDKSSKTAYLEWSSLRVSDSATYYCARRGYSAFMGAWFDYWGQGTPVTVSS

SEQ ID NO: 7654 - protein, 124 aa, Artificial Sequence
  Synthetic construct
QVQLVESGGGVVQPGRSLRLSCAASGFTFSSYGMHWVRQAPGKGLEWVAVIWYDGSNKYYADSVKGRFTISRDNSKNTLYLQMNSLRAEDTAVYYCARGGLRWVLSGSYWVDYWGQGTLVTVSS

SEQ ID NO: 7655 - protein, 119 aa, Artificial Sequence
  Synthetic construct
EVQLVQSGAEVKKPGESLKISCKGSGYSFSKYWIAWVRQMPGKGLEWMGIIYPGDSDTRYSPSFQGQVTFSADKSINTAYLQWSSLKASDTAIYYCATDDSGTGYSDHWGQGTLVTVSS

SEQ ID NO: 7656 - protein, 123 aa, Artificial Sequence
  Synthetic construct
EVQLVQSRAEVKQPGESLRISCKGSAYSFPTYWIGWVRQMSGKGLEWIGVIYFDDSDARYSPSFQGQVTISVDKSTTTAYLQWSSVRASDTAMYYCVRLALGSYSYYRQVDYWGQGTLVTVSP

SEQ ID NO: 7657 - protein, 123 aa, Artificial Sequence; identical to SEQ ID NO: 5437
  Synthetic construct

SEQ ID NO: 7658 - protein, 125 aa, Artificial Sequence
  Synthetic construct
EVQLVESGGGLVKPGGSLRLSCAASGFTFSSYSMNWVRQAPGKGLEWVSSISSSSSYIYYADSVKGRFTISRDNAKNSLYLQMNSLRAEDTAVYYCAREGRTRRWLQLCGPFDYWGQGTLVTVSS

SEQ ID NO: 7659 - protein, 124 aa, Artificial Sequence; identical to SEQ ID NO: 5616
  Synthetic construct

SEQ ID NO: 7660 - protein, 121 aa, Artificial Sequence
  Synthetic construct
QVDLQESGPGLVRDSGTLSLYCTVSGVSIIDYYWSWIRQSPGKGLEWIGYVYDGGSTSYNPSLKSRVTISVDRSRNHLSLRLDSVTAADTAVYFCARGDDYNYILYQFDYWGQGILVTVSS

SEQ ID NO: 7661 - protein, 125 aa, Artificial Sequence
  Synthetic construct
QVQLVESGGGVVQPGKSLRLSCSTSGFSLTGHGMHWVRQAPGKGLEWVALVYYDGSNEYYAESVKGRFTISSDNSKNTVYLQMNSLRAEDTALYYCGRNSVQSSVMIRHYVVDVWGQGTTVIVSS

SEQ ID NO: 7662 - protein, 120 aa, Artificial Sequence
  Synthetic construct
EVQLVESGGGLVQPGGSLRLSCAASGFTFSRYYMSWVRQAPGKGLECVSVIYSDSTTYYVDSVKGRFTITRDNSKNALFLQMNSLRDEDTAVYFCARYEGGHPPGGMDVWGQGTTVTVSS

SEQ ID NO: 7663 - protein, 120 aa, Artificial Sequence
  Synthetic construct
QLQLQESGPGLVTPSETLSLTCTVSGGSISSSGYYWAWIRQPPGKGLEWIGCIYYSGSTYYNPSLKSRVTISVDTSKNQVSLKLTSVTAADTAIYYCARTDAIDFLFYYWGQGALVTVSS

SEQ ID NO: 7664 - protein, 122 aa, Artificial Sequence
  Synthetic construct
QVQLQESGPGLVKPSQTLSLTCTVSGGSISSGGYYWSWIRQHPGKGLEWIGYIYYSGSTYYNPSLKSRVTISVDTSKNQFSLKLSSVTAADTAVYYCARARDGYSPDHFDYWGQGTLVTVSS

SEQ ID NO: 7665 - protein, 125 aa, Artificial Sequence; identical to SEQ ID NO: 5711
  Synthetic construct

SEQ ID NO: 7666 - protein, 125 aa, Artificial Sequence
  Synthetic construct
EVQLLESGGGLVQPGGSLRLSCAASGFTFSSYAMSWVRQAPGKGLEWVSAISGSGGSTYYADSVKGRFTISRDNSKNTLYLQMNSLRAEDTAVYYCAKGPNMAYGDYYYYGMDVWGQGTTVTVSS

SEQ ID NO: 7667 - protein, 115 aa, Artificial Sequence; identical to SEQ ID NO: 7424
  Synthetic construct

SEQ ID NO: 7668 - protein, 127 aa, Artificial Sequence; identical to SEQ ID NO: 6760
  Synthetic construct

SEQ ID NO: 7669 - protein, 123 aa, Artificial Sequence
  Synthetic construct
EVQLVESGGGLVKPGGSLRLSCVASGFAFNRYTINWVRQAPGKGLEWVSCITGSSSYIFYADSVRGRFTISRDNAKNSLYLQMDSLRTEDTAVYYCAKFSGWEGGHQYYFDDWGQGTLVTVSS

SEQ ID NO: 7670 - protein, 123 aa, Artificial Sequence
  Synthetic construct
QVQLVQSGAEVKKPGASVKVSCKASGYTFTNFHMHWVRRAPGQGLEWMGVINPTGDSTDYALKFQGRLTVTRDTSTSTVYMELSSLRSEDTALYYCARGMKGYAYALPLVDYWGQGTLVTVSS

SEQ ID NO: 7671 - protein, 117 aa, Artificial Sequence
  Synthetic construct
QVQLQESGPGLVKPSETLSLTCFVSGSSINSHYWAWIRQPPGKGLEWIGYIFYSGSTFYSPSLKGRVSISVDTSQNQFSLNLTSVTAADTAIYYCARVRTVTSLDVWGQGTAVTVSS

SEQ ID NO: 7672 - protein, 121 aa, Artificial Sequence
  Synthetic construct
EVQLVQSGAEVRKSGESLKISCEGSGYRFTTYWIGWVRQMPGQGLEWMGIIYPGDSDTKYSPSFQGQVTISADKSTSTAYLQWSSLKASDTAMYYCVRARGQLWPNAFDYWGQGTQVTVSP

SEQ ID NO: 7673 - protein, 123 aa, Artificial Sequence
  Synthetic construct
QVQLVQSGAEVKKPGASVKVSCKASGYTFTSYAMHWVRQAPGQRLEWMGWINAGNGNTKYSQKFQGRVTITRDTSASTAYMELSSLRSEDTAVYYCARGIAAQVRLGYYFDYWGQGTLVTVSS

SEQ ID NO: 7674 - protein, 118 aa, Artificial Sequence
  Synthetic construct
QVHLVQSGAEVKRPGASVKVSCKASGYTFTNYYVHWVRQAPGQGLEWMAWINPNNGATNFAQSFQGRVTLTRDTSISTAYMEVISLRSDDTATYYCLSIVGANHRQRWGQGTLVTVSS

SEQ ID NO: 7675 - protein, 119 aa, Artificial Sequence
  Synthetic construct
EVQLVESGGGLVQPGGSLRLSCVASGFTFRDYWMNWVRQTPGKGLEWVANIKPDGREEKYVGSVKGRFTISRDNAKDSVFLEMNSLRVDDTAVYYCGRVDYNEDGTAYWGQGTLVIVSS

SEQ ID NO: 7676 - protein, 123 aa, Artificial Sequence
  Synthetic construct
EVQLLESGGGLVQPGGSLRLSCAASGFTFSSYAMSWVRQAPGKGLEWVSAISGSGGSTYYADSVKGRFTISRDNSKNTLYLQMNSLRAEDTAVYYCAKESRRESYYYYGMDVWGQGTTVTVSS

SEQ ID NO: 7677 - protein, 133 aa, Artificial Sequence; identical to SEQ ID NO: 6919
  Synthetic construct

SEQ ID NO: 7678 - protein, 122 aa, Artificial Sequence
  Synthetic construct
EVQLVQSGAEVKKPGESLKISCKASGYSFTSHWIGWVRQMPGKGLEWMGIIYPSDSDTKYSPSFQGQVTISVDKSINTAYLQWSSLKASDTAIYYCARPAALAARMYYFDYWGQGTLVTVSS

SEQ ID NO: 7679 - protein, 120 aa, Artificial Sequence
  Synthetic construct
QVQLVESGGGVVQPGRSLRLSCAASGFTFSSYGMHWVRQAPGKGLEWVAVISYDGSNKYYADSVKGRFTISRDNSKNTLYLQMNSLRAEDTAVYYCAKSRYFDWLLHDYWGQGTLVTVSS

SEQ ID NO: 7680 - protein, 116 aa, Artificial Sequence
  Synthetic construct
QVQLVESGGGVVEPGTSLKLSCAASGFSFSTYAMHWVRQSPGEGLEWLALISFDSKNIGYADSVRGRFTISRDNSKKTLFLQMNSLRVEDTAVYYCARDQPPNDYWGQGTLVSVSP

SEQ ID NO: 7681 - protein, 121 aa, Artificial Sequence
  Synthetic construct
QVQLVQSGAEVKKPGASVKVSCKASGYTFTGYYMHWVRQAPGQGLEWMGWINPNSGGTNYAQKFQGRVTMTRDTSISTAYMELSRLRSDDTAVYYCARGYCSGGSCYFDYWGQGTLVTVSS

SEQ ID NO: 7682 - protein, 121 aa, Artificial Sequence; identical to SEQ ID NO: 6205
  Synthetic construct

SEQ ID NO: 7683 - protein, 122 aa, Artificial Sequence
  Synthetic construct
QVQLQESGPGLVKPSQTLSLTCTVSGGSISSGSYYWSWIRQPAGKGLEWIGRIYTSGSTNYNPSLKSRVTISVDTSKNQFSLKLSSVTAADTAVYYCARTRPLYYYYGMDVWGQGTTVTVSS

SEQ ID NO: 7684 - protein, 122 aa, Artificial Sequence
  Synthetic construct
EVQLVESGGGLVKPGGSLRLSCGASGFTFNSYSMNWVRQAPGKGLEWVSSIDDSSTYTYYADSVRGRFTISRDNAKNSLYLQMNSLRAEDTAVYYCARDGPRLGGLDAFDIWGQGTVVTVSS

SEQ ID NO: 7685 - protein, 124 aa, Artificial Sequence
  Synthetic construct
EVQLLESGGGLVQPGGSLRLSCAASGFTFSSYAMSWVRQAPGKGLEWVSAISGSGGSTYYADSVKGRFTISRDNSKNTLYLQMNSLRAEDTAVYYCAKVASRYSSSWYRGVDYWGQGTLVTVSS

SEQ ID NO: 7686 - protein, 121 aa, Artificial Sequence
  Synthetic construct
QVQLQESGPGLVKPSQTLSLTCSVSDGSMNSNRYLWTWIRQPAGKGLEWIGRIYSSGTINYNPSLKSRVTMSVDTSKKQFSLKLTSVTAADSAVYYCARENADNYYGMDVWGQGTTVTVSS

SEQ ID NO: 7687 - protein, 118 aa, Artificial Sequence
  Synthetic construct
EVQLVESGGNLVQPGGSLRLSCAASGFTFSSYSMNWVRQAPGKGLEWISYISSTSNTIYSADSVKGRFTISRDNAKDSLYLQMNSLRDADTAVYYCVTSISARLQAAWGQGTLVTVSS

SEQ ID NO: 7688 - protein, 124 aa, Artificial Sequence
  Synthetic construct
QVLLHESGPGLVKPSQTLSLTCTVSGDSIGNGVHYWTWIRQPAGKRLQWIGRIYTNGRPTYNPSLKSRLTMSLDTSKNQFSLRLTSVTAADTAVYYCAKEIQYYDSRENWVDPWGQGTLVTVSS

SEQ ID NO: 7689 - protein, 118 aa, Artificial Sequence
  Synthetic construct
QVQLVQSGAEVKKPGASVKVSCKASGYTFTSYAMHWVRQAPGQRLEWMGWINAGNGNTKYSQKFQGRVTITRDTSASTAYMELSSLRSEDTAVYYCARARGGWYFDYWGQGTLVTVSS

SEQ ID NO: 7690 - protein, 128 aa, Artificial Sequence
  Synthetic construct
QVQLKESGPGLVKPAETLSLTCTVSGGSVRSTSHYWSWVRQSPGKGREWIGYIYDSGSTKYNPSLESRVTMSVDTSKNQFSLKLRSVSAADTAVYYCARGIVVVPTATIVNYYGLDVWGQGTTVTVST

SEQ ID NO: 7691 - protein, 120 aa, Artificial Sequence
  Synthetic construct
EVQLLESGGGLVQPGGSLRLSCAASGFTFSSYAMSWVRQAPGKGLEWVSAISGSGGSTYYADSVKGRFTISRDNSKNTLYLQMNSLRAEDTAVYYCAKVRGYGCYAFDYWGQGTLVTVSS

SEQ ID NO: 7692 - protein, 126 aa, Artificial Sequence
  Synthetic construct
QVQLVESGGGVVQPGRSLRLSCTASRFPFSKYAIHWVRQAPGKGLEWVAVISYDGTNQYYADSVKGRFTISRDNSKNTLYLQMNSLTSDDTAVYYCAREDYFVLTGHTTLGALDIWGQGTMVTVSS

SEQ ID NO: 7693 - protein, 126 aa, Artificial Sequence
  Synthetic construct
QVQLVQSGAEVKKPGASVKVSCKASGYTFSRYGINWVRQAPGQGLEWLGWTSTFIHDTNYAQRLQGRVTLTTDTSTSTAYMELRSLRSDDTAVYYCARGPRIVEPSVYYYYGMDVWGQGTTVTVSS

SEQ ID NO: 7694 - protein, 124 aa, Artificial Sequence; identical to SEQ ID NO: 5439
  Synthetic construct

SEQ ID NO: 7695 - protein, 124 aa, Artificial Sequence
  Synthetic construct
EVQLVESGGGLVKPGGSLRLSCAASGFTFSSYSMNWVRQAPGKGLEWVSSISSSSSYIYYADSVKGRFTISRDNAKNSLYLQMNSLRAEDTAVYYCARFITMVRGDDNKGFDYWGQGTLVTVSS

SEQ ID NO: 7696 - protein, 121 aa, Artificial Sequence
  Synthetic construct
EVQLVQSGAEVKKPGESLKISCKGSGYSFTSYWIGWVRQMPGKGLEWMGIIYPGDSDTRYSPSFQGQVTISADKSISTAYLQWSSLKASDTAMYYCARRGYYDSSGYSVYWGQGTLVTVSS

SEQ ID NO: 7697 - protein, 127 aa, Artificial Sequence
  Synthetic construct
DVQLVQSGAEVKRPGATVKISCKVSGYTFTDYYMHWVQQAPGKGLEWMGLVDPGDGETIYAEKFQGRVTITADTSTDTVYLDLSSLRSEDTAVYFCATGSEDIGVVPATKDYGMDVWGQGTTVTVST

SEQ ID NO: 7698 - protein, 123 aa, Artificial Sequence
  Synthetic construct
QVQLVESGGGVVQPGRSLRLSCAASGFTFSSYAMHWVRQAPGKGLEWVAVISYDGSNKYYADSVKGRFTISRDNSKNTLYLQMNSLRAEDTAVYYCARDPRRGSSWHWYFDLWGRGTLVTVSS

SEQ ID NO: 7699 - protein, 125 aa, Artificial Sequence
  Synthetic construct
EVQLVQSGAEVKKPGESLRISCKGSGYSFTSYWISWVRQMPGKGLEWMGRIDPSDSYTNYSPSFQGHVTISADKSISTAYLQWSSLKASDTAMYYCARHWPSMEQQLVRGGFDPWGQGTLVTVSS

SEQ ID NO: 7700 - protein, 118 aa, Artificial Sequence
  Synthetic construct
QVQLVESGGGVVQPGRSLRLSCAASGFTFSSYAMHWVRQAPGKGLEWVAVISYDGSNKYYADSVKGRFTISRDNSKNTLYLQMNSLRAEDTAVYYCARGIWAEPADYWGQGTLVTVSS

SEQ ID NO: 7701 - protein, 121 aa, Artificial Sequence
  Synthetic construct
QVQLVQSGAEVKKPGASVKVSCKASGYTFTGYYMHWVRQAPGQGLEWMGWINPNSGGTNYAQKFQGRVTMTRDTSISTAYMELSRLRSDDTAVYYCARVYYGSRWGAFDIWGQGTMVTVSS

SEQ ID NO: 7702 - protein, 132 aa, Artificial Sequence
  Synthetic construct
EIQLLQSGGGLVQPGGSLRLSCVGTGFTFSSYAMSWVRQAPGKGLEWISGVGGSGVTTHHAGSVQGRFNISRDNSKSTLYLQMNGLRTEDTAVYYCAKDRENYLGSGSYSNGLHYKYGLDVWGQGTSVIVSS

SEQ ID NO: 7703 - protein, 118 aa, Artificial Sequence
  Synthetic construct
EVQLVESGGGLVQPGGSLRLACEVSDFAFSSYVMHWVRQAPGKGLVWVSRIPTDDISPTYADSVRGRFTISRDNAKKAVYLQMNSLRDEDTAVYYCARDVSWRIFDLWGRGTLVTVSS

SEQ ID NO: 7704 - protein, 114 aa, Artificial Sequence
  Synthetic construct
EVQLVESGGGLIQPGGSLTLSCVASGFTVSDNHVSWVRQAPGKGLEWVAIFSGDGRRKYAESAEGRFTISRDSLKNMVYLQMNSLRVEDTGVYHCMGYGGNSVWGRGTLVAVSS

SEQ ID NO: 7705 - protein, 121 aa, Artificial Sequence
  Synthetic construct
EVQLLESGGGLVQPGGSLRLSCAASGFTFSSYAMSWVRQAPGKGLEWVSAISGSGGSTYYADSVKGRFTISRDNSKNTLYLQMNSLRAEDTAVYYCAKYEYNWNPGYFDYWGQGTLVTVSS

SEQ ID NO: 7706 - protein, 124 aa, Artificial Sequence
  Synthetic construct
QVQLVQSGAEMKKSGASVMVSCQASGYTFTDHYIHWVRQAPGQGLEWLGWINTNTGATNYAQKFQGRVTMTRDTSIRTAYLDLSRLKSDDTATYYCAREADIIVATTNAAFDIWGQGTLVTVSS

SEQ ID NO: 7707 - protein, 125 aa, Artificial Sequence
  Synthetic construct
QVQLVQSGSELKKPGASVTVSCKASGYIFSDYAMNWVRQAPGQGLEWMGWINTNTENPTYAQAFTGRFVFSLDTSVSTAFLQISSLKAEDTAVYYCARSRGECSSARCQDAFDIWGQGTVVTVSS

SEQ ID NO: 7708 - protein, 117 aa, Artificial Sequence
  Synthetic construct
EVLLVESGGGLVQPGGSLRLSCVGSGFTFSGFWMGWVRQAPGKGLEWVAHTRGDGRETYYVESVKGRVTISRDNAKNSLYLQMTSLGAEDTAIYYCARLDFRSSDYWGHGTLVTVSS

SEQ ID NO: 7709 - protein, 122 aa, Artificial Sequence
  Synthetic construct
QVQLQQWGAGLLKPSETLSLTCAVYGGSFSGYYWSWIRQPPGKGLEWIGEINHSGSTNYNPSLKSRVTISVDTSKNQFSLKLSSVTAADTAVYYCARKLNMVRGVTGRFDPWGQGTLVTVSS

SEQ ID NO: 7710 - protein, 124 aa, Artificial Sequence
  Synthetic construct
QVRLQQWGAGLLKPSDTLSLTCAVTGGSTGDIYWAWIRQSPGTGLEWIAELNHRGTTNYSPSLKRRVTISLDSSTNHFSLKLNSVTAADTAVYYCAKWPVGYCSSINCREGDVWGPGTHVTVSS

SEQ ID NO: 7711 - protein, 124 aa, Artificial Sequence
  Synthetic construct
QVQLVESGGGVVQPGRSLRLSCAASGFTFSHYAFYWVRQAPGKGLEWVAIISFDGDNEYYADSVKGRFTISRDDSKNTLYVQMSSLRTEDTAVYFCARGPPRTIVATAPWLEYWGQGILVTVSS

SEQ ID NO: 7712 - protein, 128 aa, Artificial Sequence
  Synthetic construct
QVQLQESGPGLVKASQTLSLTCTVSGGSLNSGSHYWTWIRQPAGKGLEWIGRIYPSGPTQYNPSLKSPVTISMDTSKNQFSLRLNSVTAADTAVYYCAGEFVIPAGKSQYYYYGMDVWGRGTTVTVSS

SEQ ID NO: 7713 - protein, 125 aa, Artificial Sequence
  Synthetic construct
EVQLVESGGGLVKPGGSLRLSCAASGFTFSSYSMNWVRQAPGKGLEWVSSISSSSSYIYYADSVKGRFTISRDNAKNSLYLQMNSLRAEDTAVYYCARDLVVPAAIYLSHGMDVWGQGTTVTVSS

SEQ ID NO: 7714 - protein, 128 aa, Artificial Sequence
  Synthetic construct
QVQLQESGPGLVRPSGALSLTCAVSGGSITTSNWWSWVRQPPGKGLEWIGEIYHSGTTNYNPSLKSRVTISIDASKNQISLKLSSVTAADTAVYYCARDSPAQYYYDDSGDSDALDTWGQGTMVIVSS

SEQ ID NO: 7715 - protein, 129 aa, Artificial Sequence
  Synthetic construct
QVQLQESGPGLVKPSQTLSLTCTVSGGSISSGGYYWSWIRQHPGKGLEWIGYIYYSGSTYYNPSLKSRVTISVDTSKNQFSLKLSSVTAADTAVYYCARVARPRGWSGQQLVERGFDYWGQGTLVTVSS

SEQ ID NO: 7716 - protein, 123 aa, Artificial Sequence; identical to SEQ ID NO: 5437
  Synthetic construct

SEQ ID NO: 7717 - protein, 123 aa, Artificial Sequence; identical to SEQ ID NO: 5437
  Synthetic construct

SEQ ID NO: 7718 - protein, 123 aa, Artificial Sequence
  Synthetic construct
QVQLVESGGGVVQPGRSLRLSCAASGFTFSSYAMHWVRQAPGKGLEWVAVISYDGSNKYYADSVKGRFTISRDNSKNTLYLQMNSLRAEDTAVYYCARELGQQLVYYYGMDVWGQGTTVTVSS

SEQ ID NO: 7719 - protein, 124 aa, Artificial Sequence
  Synthetic construct
EVQLVESGGGLVQPGRSLRLSCAASGFTFDDYAMHWVRQAPGKGLEWVSGISWNSGSIGYADSVKGRFTISRDNAKNSLYLQMNSLRAEDTALYYCAKGHPSGYSSSWYGFDYWGQGTLVTVSS

SEQ ID NO: 7720 - protein, 124 aa, Artificial Sequence
  Synthetic construct
QVHLVQSGAEVRKPGASVKVSCKASGYNFGTYGINWVRQAPGQGPEWLGWISTYSGNPYYAQTFEGRVTMTRDISTGTVYMELRSLTSDDTAVYYCARDKDRGVMTPREAFDIWGQGTTVTVSS

SEQ ID NO: 7721 - protein, 126 aa, Artificial Sequence
  Synthetic construct
EVELLESGGGLVQPGGSLRLSCVDSGFIFTTYVMTWVRQAPGKGLEWVSSFSGSDGRTYYADSVKGRFTISRDNSKNILYLQLSRLRADDTATYYCAKGRRAGGVTAAGNQPFDSWGQGTLVTVSS

SEQ ID NO: 7722 - protein, 120 aa, Artificial Sequence
  Synthetic construct
QVQLVQSGAEVKKPGASVKVSCKASGYTFTGYYMHWVRQAPGQGLEWMGWINPNSGGTNYAQKFQGRVTMTRDTSISTAYMELSRLRSDDTAVYYCARASWKGGSKFDPWGQGTLVTVSS

SEQ ID NO: 7723 - protein, 122 aa, Artificial Sequence
  Synthetic construct
QVQLVESGGGVVQPGRSLRLSCAASGFTFSSYGMHWVRQAPGKGLEWVAVISYDGSNKYYADSVKGRFTISRDNSKNTLYLQMNSLRAEDTAVYYCAKSCHRSRYYYGMDVWGQGTTVTVSS

SEQ ID NO: 7724 - protein, 117 aa, Artificial Sequence
  Synthetic construct
EVLLVQSGAEVKKPGATVKISCKVSGYSFTDYYIHWVRQAPGKGLEWVGLVDPENEDAMYAENFQGRVTITADTSEDTAYMELGRLGDEDTAVYYCSTDRGGSFNRWGQGTLVTVSS

SEQ ID NO: 7725 - protein, 126 aa, Artificial Sequence
  Synthetic construct
QLQLQESGPGLVRPSETLSLTCTVSGASITTTAYYWGWIRQPPGKGLEWIGSIYYRGNTYYNPSLKSRVTISVDTSRNQFSLNLSSVTAGDTAVYYCARQYFEILTGFTPGWFDPWGQGTLVTSSS

SEQ ID NO: 7726 - protein, 124 aa, Artificial Sequence
  Synthetic construct
EVQLVESGGGLVQPGGSLRLSCVASGFSLASFAMHWVRQAPGKGLEWVSGVSWNSDNVVYADSVKGRFTISRDNAKNSLYLQLSGLTADDTALYYCAKDFSSSGEVVSNWFDTWGQGTRVTVSS

SEQ ID NO: 7727 - protein, 128 aa, Artificial Sequence
  Synthetic construct
QVQLQESGPGLVKPSETLSLTCTVSGGSISSYYWSWIRQPAGKGLEWIGRIYTSGSTNYNPSLKSRVTMSVDTSKNQFSLKLSSVTAADTAVYYCARDRGYSYGNPRHYYYYYGMDVWGQGTTVTVSS

SEQ ID NO: 7728 - protein, 127 aa, Artificial Sequence
  Synthetic construct
EVQLLESGGGLVQPGGSLRLSCAASGFTFSSYAMSWVRQAPGKGLEWVSAISGSGGSTYYADSVKGRFTISRDNSKNTLYLQMNSLRAEDTAVYYCAKEAGARMPKHYYYYYGMDVWGQGTTVTVSS

SEQ ID NO: 7729 - protein, 128 aa, Artificial Sequence
  Synthetic construct
QVQLVQSGAEVKKPGASVKVSCKASGYTFTGYYMHWVRQAPGQGLEWMGWINPNSGGTNYAQKFQGWVTMTRDTSISTAYMELSRLRSDDTAVYYCARGMKRRAYYYDSSGSNGMDVWGQGTTVTVSS

SEQ ID NO: 7730 - protein, 124 aa, Artificial Sequence
  Synthetic construct
QVQLVQSGAEVKKPGASVKVSCKASGYTFTSYAMHWVRQAPGQRLEWMGWINAGNGNTKYSQKFQGRVTITRDTSASTAYMELSSLRSEDTAVYYCARDLIRFVAAAGTWFDPWGQGTLVTVSS

SEQ ID NO: 7731 - protein, 121 aa, Artificial Sequence
  Synthetic construct
QLHLQESGPGLVKPSETLSLTCTVSDDSISKSAFYWGWVRQPPGKGLEWIGSFYYSGSTLYNPSLKSRVIISVDTSKSHVSLELNSVTAADTAVYYCARLPFPGAEGFDQWGQGTLVTVSS

SEQ ID NO: 7732 - protein, 120 aa, Artificial Sequence
  Synthetic construct
QLQLQESGPGLVKPSETLSLTCTVSGDSITSATYYWAWIRQPPGKGLEWIATISYSGTAHYSPSLQGRVTISADTSKNQFSLNVRSVTASDTAVYYCARRIAAAEKFDFWGQGTIVTVSS

SEQ ID NO: 7733 - protein, 127 aa, Artificial Sequence
  Synthetic construct
QAQLVQSGAEIKKPGASVKVSCKASGYTFTGYYMHWVRQAPGQGLEWMGWINPNSGGTNYAQKFQGRVTMTRDTSISTAYMDLSRLKSDDTAVYYCARDSETSNLNYYGSGSYYNHWGQGTLVTVSS

SEQ ID NO: 7734 - protein, 121 aa, Artificial Sequence
  Synthetic construct
DVELLESGGGPVPPGGSLRLSCAASGFIFSDFAMSWVRQAAGKGPEWVSTMTGSGAASDHADAVRGRFIMSRDTSTRTVFLQMTSLRVEDSGVYYCARGRNSSHYDVFDVWGQGTTVTVSS

SEQ ID NO: 7735 - protein, 121 aa, Artificial Sequence
  Synthetic construct
EVQLVESGGGLVKPGGSLRLSCAASGFTFTYYNMNWVRQAPGRGLEWVSSISSSSSYIYFADSVKGRFTISRDNAKNSLYLQMNSLRAEDTAVYYCARDGLRFGDLFLDYWGQGTLVTVSS

SEQ ID NO: 7736 - protein, 120 aa, Artificial Sequence
  Synthetic construct
QIELQESGPGLVKPSQTLSLTCTVSGGSISSGGYYWSWIRQHPEKGLEWIGYVYYLGTTHYNPSLRSRVTISLDASQNQFSLKMNSMTVADTAVYYCARERLTFGGIDYWGQGALVTVSS

SEQ ID NO: 7737 - protein, 132 aa, Artificial Sequence
  Synthetic construct
EVQLVQSGAEVKKPGESLRISCKASGYRFSSYWISWVRQMPGKGLEWMGRIDPTDSYTNYSPSFQGHVTLSSDKSINTAYLQWSSLKASDTAMYYCARHEMLGDYSAYATSGGHKRYAMDVWGQGTTVTVSS

SEQ ID NO: 7738 - protein, 119 aa, Artificial Sequence
  Synthetic construct
EVHLLESGGDLVQPGGSLRLSCAASGFTFSTYIMNWVRQAPGKGLEWVATITANGFGTYYTDSVKGRFTISRDNSKDTLYLQMNSLRVGDTAIYYCTERGPNWGFFRYWGPGILVTVSS

SEQ ID NO: 7739 - protein, 121 aa, Artificial Sequence
  Synthetic construct
EVKLVESGGTSMQPGGSLRLSCVASGFIFSNYNMAWVRQAPGKGLDWLSYITNTGRTIYYADSVKGRFTISRDNAENSLYLHMSSLKDDDAAVYFCARVGDGGYGPNFDHWGQGTLVSVSS

SEQ ID NO: 7740 - protein, 128 aa, Artificial Sequence
  Synthetic construct
QVQLQESGPGLVKPSQTLSLTCTVSGGSINSDSYYWSWIRQPAGKGLEWIGRIYTSGGTNYNPSLKSRVAISVDTSKNQFSLKLSSVTAADTAVYYCARSNFGSGSFLFYYYYGIDVWGQGTTVTVSS

SEQ ID NO: 7741 - protein, 119 aa, Artificial Sequence
  Synthetic construct
QVQLVESGGGVVQPGSSLRLSCAASGFIFNNYGMHWVRQAPGKGLEWVAVIWYDGSKKMYADSVKGRFTISRDNYKNTLYLEVDSLRVEDTALYFCASATTVIGAFDIWGQGTVVIVSS

SEQ ID NO: 7742 - protein, 125 aa, Artificial Sequence
  Synthetic construct
QLQLQESGPGLVKPSETLSLTCTVSGGSISSSSYYWGWIRQPPGKGLEWIGSIYYSGSTYYNPSLKSRVTISVDTSKNQFSLKLSSVTAADTAVYYCARLIFDWLLGAMYYFDYWGQGTLVTVSS

SEQ ID NO: 7743 - protein, 124 aa, Artificial Sequence
  Synthetic construct
QAQLVQSGPEVKKPGASVKVSCKTSGYPFTRDGISWVRQAPGEGLEWMGWISTYNGKADYLQKFQGRVTMTTDSSKSTIYMELRSLRSDDTAVYYCARSPHDHESSGYYAFDIWGQGTMVTVSS

SEQ ID NO: 7744 - protein, 128 aa, Artificial Sequence
  Synthetic construct
EVQLVESGGGLVKPGGSLRLSCAASGFTFSSYSMNWVRQAPGKGLEWVSSISSSSSYIYYADSVKGRFTISRDNAKNSLYLQMNSLRAEDTAVYYCARDHRRITGTKEGYYYYGMDVWGQGTTVTVSS

SEQ ID NO: 7745 - protein, 123 aa, Artificial Sequence
  Synthetic construct
QVQLVESGGGVVQPGRSLRLSCAASGFTFSSYGMHWVRQAPGKGLEWVAVIWYDGSNKYYADSVKGRFTISRDNSKNTLYLQMNSLRAEDTAVYYCARDRHSYPSNIGFIDYWGQGTLVTVSS

SEQ ID NO: 7746 - protein, 125 aa, Artificial Sequence
  Synthetic construct
QVQLQESGPGLVKPSDTLSLTCAVSGSSITSTNWWGWIRQPPGKGLEWIGCIYYSGTTYYNPSLKSRVTMSVDTSKNQFSLKLNSVTAVDTAVYYCARTMGFRGFSYYYYGLDVWGQGTTVTVSS

SEQ ID NO: 7747 - protein, 123 aa, Artificial Sequence; identical to SEQ ID NO: 5437
  Synthetic construct

SEQ ID NO: 7748 - protein, 125 aa, Artificial Sequence
  Synthetic construct
QVQLQQWGAGLLKPSETLSLTCAVYGGSFSGYYWSWIRQPPGKGLEWIGEINHSGSTNYNPSLKSRVTISVDTSKNQFSLKLSSVTAADTAVYYCARERGYSYGYHRSGWYFDLWGRGTLVTVSS

SEQ ID NO: 7749 - protein, 119 aa, Artificial Sequence
  Synthetic construct
QVQLQESGPGLVKPSETLSLTCTVSGGSISSYYWSWIRQPAGKGLEWIGRIYTSGSTNYNPSLKSRVTMSVDTSKNQFSLKLSSVTAADTAVYYCARTMVRGRMGFDYWGQGTLVTVSS

SEQ ID NO: 7750 - protein, 124 aa, Artificial Sequence
  Synthetic construct
EVHLVESGGGLVQPGGSLRLSCATSGFTFSSHWMHWVRQVPGKGPVWVARIRPEGTITDYADSVRGRFTASRDNTKSTLYLQMNSLRAEDTAVYYCARDLDFHTSFHYATFHYWGQGALVTVSP

SEQ ID NO: 7751 - protein, 124 aa, Artificial Sequence
  Synthetic construct
EVHLVDSGGGVVRPGGSLRLSCAASGFTFDDYGMSWVRQIPGKGLEWVSGINYNGGNTAYADSVKGRFTISRDNAKNSLYLQMNSLRAEDTALYHCVRLDCVDTRCFTTPPDYWGQGTLVTVSS

SEQ ID NO: 7752 - protein, 127 aa, Artificial Sequence
  Synthetic construct
EVQLVESGGGLVQPGGSLRLSCAASGFTFSSYSMNWVRQAPGKGLEWVSYISSSSSTIYYADSVKGRFTISRDNAKNSLYLQMNSLRDEDTAVYYCASDRVIAAAGNYYYYYGMDVWGQGTTVTVSS

SEQ ID NO: 7753 - protein, 122 aa, Artificial Sequence
  Synthetic construct
EVQLVQSGAEVKKPGESLKISCKGSGYSFTSYWIGWVRQMPGKGLEWMGIIYPGDSDTRYSPSFQGQVTISADKSISTAYLQWSSLKASDTAMYYCARRRYSSSWYDAFDIWGQGTMVTVSS

SEQ ID NO: 7754 - protein, 120 aa, Artificial Sequence
  Synthetic construct
QVQLQESGPGLVKPSGTLSLTCAVSGGSISSSNWWSWVRQPPGKGLEWIGEIYHSGSTNYNPSLKSRVTISVDKSKNQFSLKLSSVTAADTAVYYCASMTTAWYYGMDVWGQGTTVTVSS

SEQ ID NO: 7755 - protein, 123 aa, Artificial Sequence
  Synthetic construct
EVELVESGGDLVKPGGSLRLSCAASGFTFSGYSMTWVRQAPGKGLEWVSSISGGSDYIYYADSVKGRFTISRDNANNLLFLQMSSLRAEDTALYFCARCGGGRCNQAGAMDVWGQGTTVTVSS

SEQ ID NO: 7756 - protein, 129 aa, Artificial Sequence
  Synthetic construct
EVQLVQSGAEVKKPGESLKISCKGSGYSFTSYWIGWVRQMPGKGLEWMGIIYPGDSDTRYSPSFQGQVTISADKSISTAYLQWSSLKASDTAMYYCARQGSRRGYSYGKRYYYYGMDVWGQGTTVTVSS

SEQ ID NO: 7757 - protein, 121 aa, Artificial Sequence
  Synthetic construct
QVQLQESGPGLVKPSETLSLTCTVSSGSISTYYWSWLRQSPGKGLEWIGYSFHNGITNYNPSLRSRITISVDTSKKQFSLKLSSVTAADTAVYYCARGGDYDSSGYAFDYWGQGILVTVSS

SEQ ID NO: 7758 - protein, 117 aa, Artificial Sequence
  Synthetic construct
EVQLVASGGGLVKPGGSLRLSCAASGFAFSGYSMNWVRQAPGKGLDWVSFISSSGRSTYYADSVKGRFTISRDNAKNSLYLQMNSLRAEDTAVYYCARYTDYRFDFWGQGTLVTVSS

SEQ ID NO: 7759 - protein, 128 aa, Artificial Sequence; identical to SEQ ID NO: 5945
  Synthetic construct

SEQ ID NO: 7760 - protein, 119 aa, Artificial Sequence
  Synthetic construct
QVQLVQSGAEVKKPGASVKISCKASGYIFTNYYIQWVRQAPGQGLEWMGVINPSGGTTSDAQRFQDRLTMTIDTSTSTAYMELSSLTSEDTAVYYCARCVVTTDPLDIWGRGTMVTVSS

SEQ ID NO: 7761 - protein, 120 aa, Artificial Sequence
  Synthetic construct
QVQLVESGGGVVQPGRSLRVSCAASGFSLRNYGMHWVRQAPGKGLEWVAGVGYDGSNEYYGDSVKGRFTISRDNSKNTVYLQMNSLRVEDTAVYHCARGSGSISCVLDVWGHGTTVTVSS

SEQ ID NO: 7762 - protein, 125 aa, Artificial Sequence; identical to SEQ ID NO: 5711
  Synthetic construct

SEQ ID NO: 7763 - protein, 120 aa, Artificial Sequence
  Synthetic construct
EVQLVESGGGLVQPGGSLRVSCAVSGFTVSSNYMSWVRQAPGKGLEWVSVIYSGGSTYYADSVKGRFTISRDNSKNTLFLQMNSLTTEDTAVYYCARYEGGHPPGGMDVWGQGTTVTVSS

SEQ ID NO: 7764 - protein, 119 aa, Artificial Sequence
  Synthetic construct
QVQLVESGGGVVQPGRSLRLSCAASGFTFSRFPIHWVRQAPGKGLEWVAVISYDGSRKYYADSVKGRFTISRDNSKNTLYLQMSSLRAEDTAIYYCARSYSSSWYFEFWGQGTLVTVSS

SEQ ID NO: 7765 - protein, 126 aa, Artificial Sequence
  Synthetic construct
EVQLVESGGGLVKPGGSLRLSCAASGVSFSTYNINWVRQAPGKGLEWVSYISSTSSYIYYADSVKGRFTISRDNARNSVYLQMDSLGAEDTAVYYCARVGGGSEWYNSGWFSFDSWGQGTLVTVSS

SEQ ID NO: 7766 - protein, 127 aa, Artificial Sequence
  Synthetic construct
QVQLQESGPGLVKPSQTLSLTCTVSGGSISSGSYYWSWIRQPAGKGLEWIGRIYTSGSTNYNPSLKSRVTISVDTSKNQFSLKLSSVTAADTAVYYCARGHVLRFLRPHPGSWFDPWGQGTLVTVSS

SEQ ID NO: 7767 - protein, 123 aa, Artificial Sequence
  Synthetic construct
QVRLVESGGGVVQPGGSLRLSCAASGFTFRNYAMHWVRQAPGEGLEWVALISSDGNSKYYGDSVRGRFTVSRGNSKNTLSLQMNNLEAEDTAVYYCAAQRAWVFRVQMWAEYWGQGTLVSVSS

SEQ ID NO: 7768 - protein, 126 aa, Artificial Sequence
  Synthetic construct
EVQLVESGGGLVEPGGSLRLSCAASGFAFGNYAMNWVRQAPGKGPEWVSTISGSGTPTYYADSVRGRATISRDNSKNALYLQMSDLRAADTAIYYCAKGFWACTPYTCSTGPFDSWGQGIPVTVSS

SEQ ID NO: 7769 - protein, 123 aa, Artificial Sequence; identical to SEQ ID NO: 5437
  Synthetic construct

SEQ ID NO: 7770 - protein, 130 aa, Artificial Sequence
  Synthetic construct
QVQLVQSGAEMKPPGASVKVSCKASGFNLNNHYIHWVRQAPGQGLEWMGMSNPTGSLPMYARKFQDRITMTKDTSTNTVYMDLHSLTTEDTAVYFCARDRKDLYCGNDCFYYYYYGMDVWGQGTTVTVSS

SEQ ID NO: 7771 - protein, 122 aa, Artificial Sequence
  Synthetic construct
QVQLVQSGAEVKKPGASVKVSCKASGYTFTSYDINWVRQATGQGLEWMGWMNPNSGNTGYAQKFQGRVTMTRNTSISTAYMELSSLRSEDTAVYYCARGLRGPRRFGEFLYWGQGTLVTVSS

SEQ ID NO: 7772 - protein, 129 aa, Artificial Sequence
  Synthetic construct
QVQLQESGPGLVKPSQTLSLTCTVSGGSISSGSYYWSWIRQPAGKGLEWIGRIYTSGSTNYNPSLKSRVTISVDTSKNQFSLKLSSVTAADTAVYYCARERYVVVPAAGDYYYYGMDVWGQGTTVTVSS

SEQ ID NO: 7773 - protein, 121 aa, Artificial Sequence
  Synthetic construct
EVQLVESGGGLVKPGGSLRLSCAASGFTFSSYSMNWVRQAPGKGLEWVSSISSSSSYIYYADSVKGRFTISRDNAKNSLYLQMNSLRAEDTAVYYCARDPGIAAGYGMDVWGQGTTVTVSS

SEQ ID NO: 7774 - protein, 120 aa, Artificial Sequence
  Synthetic construct
QVQLQESGPGLVKPSQTLSLTCTVSGGSIGSGGYYWNWVRQHPGKGLEWIGYIYDSGSTYYSPSLKSRLTISLDTSKNQFSLRLTSVTAADTAVYYCARAYSDSWGFDYWGQGSLVTVPS

SEQ ID NO: 7775 - protein, 121 aa, Artificial Sequence
  Synthetic construct
QVHLVESGGGVVQPGRSLRLSCTASGFTFSNYGMYWVRQAPGKGLEWVSVIWHDGSTKKYAASVTGRFTVSRDNSKNTLYLQMNSLRAEDTAVYYCVRDRGLRFLYGLDVWGQGTTVSVSS

SEQ ID NO: 7776 - protein, 129 aa, Artificial Sequence; identical to SEQ ID NO: 6713
  Synthetic construct

SEQ ID NO: 7777 - protein, 120 aa, Artificial Sequence
  Synthetic construct
EVQLVESGGGLVQPGGSLRLSCAASGFTFRNYWMHWVRQAPGKGLVWVARIQSGVSSTSYADSVNGRFTISRDNAKNTLYLQMNSLRVEDTAVYYCARDKWELLQGFDYWGQGTLVTVSS

SEQ ID NO: 7778 - protein, 118 aa, Artificial Sequence
  Synthetic construct
QVQVQQWGAGLLKPSETLSLTCAVYGGSFSGHYWSWLRQPPGKGLEWIGEINHGGSTTYNPSLKSRVTMSVDTPRSQFSLKLSSVTAADSAVYYCARFSLGVDAFDIWGQGTMVTVSS

SEQ ID NO: 7779 - protein, 123 aa, Artificial Sequence; identical to SEQ ID NO: 5437
  Synthetic construct

SEQ ID NO: 7780 - protein, 123 aa, Artificial Sequence
  Synthetic construct
EVQLVESGGGLVQPGGSLRLSCSASRFTLKNYAMHWVRQAPGKGLEYVSAISSDGGSTYYADSVKGRFTISRDNSKKTMFLQMTSLRAEDTAMYYCVRDMGWRSIAADGGDSWGQGTLVTVSS

SEQ ID NO: 7781 - protein, 129 aa, Artificial Sequence
  Synthetic construct
QVQLQQSGPGLVKPSQTLSLTCAISGDSVSSNSAAWNWIRQSPSRGLEWLGRTYYRSKWYNDYAVSVKSRITINPDTSKNQFSLQLNSVTPEDTAVYYCARGPKNYGSGRQLNNWFDPWGQGTLVTVSS

SEQ ID NO: 7782 - protein, 121 aa, Artificial Sequence
  Synthetic construct
QVTVKESGPVLVQPTETLTLTCTVSGFSLTDPTMGVSWVRQPPGKALEWLAHILSLDINSYSSSLRSRLTISKDISKSQVVLSMTNVDPVDTATYFCVRMEYDSGWYFDLWGQGIRVNVSS

SEQ ID NO: 7783 - protein, 126 aa, Artificial Sequence
  Synthetic construct
QVHLQESGPGLVKPSQTLFLTCTVSGDSISSGGHYWSWVRQHPGKGLEWIGYIYYRGDTYYNPSLRSRVTISLDTSQNQFSLKLSSVTAADTALYYCARASAGRDILTGYVPLDYWGQGTLVTVSS

SEQ ID NO: 7784 - protein, 121 aa, Artificial Sequence
  Synthetic construct
EVQLLESGGGLVQPGGSLRLSCTASGFTFSSYAMSWVRQTPGKGPEWVATLTGSGGSTYHADSVKGRFTISRDNSNNTVYLQMNSLRAEDTAVYYCAKALRISMTSKFDYWGQGMLVTVSS

SEQ ID NO: 7785 - protein, 127 aa, Artificial Sequence
  Synthetic construct
QVQLQQWGAGLLKPSETLSLTCAVSGGSFSNYFWAWIRQAPGKGLEWIAEINHSGSISYNPSLKSRVIMSVDASKNQFSLKLTSVTAADTALYYCARGTYQNSAFWSGYFPHWFDPWGQGTLITVSS

SEQ ID NO: 7786 - protein, 123 aa, Artificial Sequence
  Synthetic construct
EEYLVESGGGLVQPGGSLKLSCTASGFIFSGSAMHWVRQASGKGLEWLGRIRSQANGYATAYAASVRGRFTISRDDSQNTAYLQMNGLKTEDTAVYYCSRQKGLSGGTHFDHWGQGTLVTVSS

SEQ ID NO: 7787 - protein, 122 aa, Artificial Sequence
  Synthetic construct
EVQLVESGGGLVQPGGSLRLSCSASGFMFDTYDMHWVRHTPGKGLEYVSSISSHGGSTYYADSVKGRFTISRDNSKNMVFLQMSSLRSEDTAVYYCVHASGEKNRNDAFDIWGQGTMVTVFS

SEQ ID NO: 7788 - protein, 127 aa, Artificial Sequence
  Synthetic construct
QVQLVESGGGVVQPGRSLRLSCAASGFTFSSYGMHWVRQAPGKGLEWVAVISYDGSNKYYADSVKGRFTISRDNSKNTLYLQMNSLRAEDTAVYYCAKDQGRGVVTRLIYYYGMDVWGQGTTVTVSS

SEQ ID NO: 7789 - protein, 129 aa, Artificial Sequence
  Synthetic construct
QVQLVESGGGVVQPGRSLRLSCAASGFTFSNYGLHWVRHAPGKGLEWVAVIWHDGSNKYYADSVRGRFTISRDNSKNTVYLQMNSLRAEDTALYYCARDLEYQLRVTHNQYFYYGMDVWGQGTTVTVSS

SEQ ID NO: 7790 - protein, 117 aa, Artificial Sequence
  Synthetic construct
QVHLVESGGGVVQPGRSLRLSCAASGFTFSFYGMHWVRQAPGKGLEWLAVLSSDGNTEYYADSVKGRFTISRDNSKNTLYLQMNSLRAEDSAVYYCATIYGDSFDYWGQGTLVTVSS

SEQ ID NO: 7791 - protein, 123 aa, Artificial Sequence; identical to SEQ ID NO: 5463
  Synthetic construct

SEQ ID NO: 7792 - protein, 124 aa, Artificial Sequence
  Synthetic construct
LIQLVESGGDVVRPGGSLKLSCATSGFGFSDYPMHWVRQTPGRGLEWVAIISHTGRDQLYRESVKGRFIVSRDNTKDTLDLQMTGLTVDDTALYFCATGEHSESSLQSPTLAYWGQGTQVIVSS

SEQ ID NO: 7793 - protein, 128 aa, Artificial Sequence; identical to SEQ ID NO: 5945
  Synthetic construct

SEQ ID NO: 7794 - protein, 116 aa, Artificial Sequence
  Synthetic construct
QVQLVESGGGVVQPGRSLRLSCAASKFTFSIYTMHWVRQAPGKGLEWVALISDDGRTTYHADSVQGRFTISRDNSKNTLYLQMNSLRPEDTAVYYCARDDSGFDYWGQGTLVTVSS

SEQ ID NO: 7795 - protein, 125 aa, Artificial Sequence
  Synthetic construct
QVQLVQSGAEVKKPGASVKVSCKVSGYTLTELSMHWVRQAPGKGLEWMGGFDPEDGETIFAQKFQGRVTMTEDTSTDTAYMELSSLRSEDTAVYYCEVMGVVVPAAKSIYGMDVWGQGTTVTVSS

SEQ ID NO: 7796 - protein, 123 aa, Artificial Sequence
  Synthetic construct
QEQLVQSGAEVTKPGSSVKVSCKPSGGSLRNYAISWVRQAPGQGLEWMGGIIPILHTTNYAQKFQGRVTMTADESTSTAYMELSSLRSEDTAMYYCARDRDYSYATDWYFDLWGRGTLVTVSS

SEQ ID NO: 7797 - protein, 118 aa, Artificial Sequence; identical to SEQ ID NO: 5663
  Synthetic construct

SEQ ID NO: 7798 - protein, 129 aa, Artificial Sequence; identical to SEQ ID NO: 6713
  Synthetic construct

SEQ ID NO: 7799 - protein, 123 aa, Artificial Sequence
  Synthetic construct
EVQLVESGGGLVQPGGSLRLSCSASGFTFSSYPMHWVRQAPGKGLEYVSAISSTDDSTYYADSVKGRFTISRDSSKNTLYLQMSSLRPDDTAIYYCVRDLAWRSIAADGGDHWGQGTLVTVSS

SEQ ID NO: 7800 - protein, 125 aa, Artificial Sequence
  Synthetic construct
QVQLQESGPGLVKPSQTLSLTCTVSGGSISSGSYYWSWIRQPAGKGLEWIGRIYTSGSTNYNPSLKSRVTISVDTSKNQFSLKLSSVTAADTAVYYCASLPITISPGYYYGMDVWGQGTTVTVSS

SEQ ID NO: 7801 - protein, 122 aa, Artificial Sequence
  Synthetic construct
QVQLVESGGGVVQPGRSLRLSCAASGFTFSSYAMHWVRQAPGKGLEWVAVISYDGSNKYYADSVKGRFTISRDNSKNTLYLQMNSLRAEDTAVYYCARDRGGLYGTDAFDIWGQGTMVTVSS

SEQ ID NO: 7802 - protein, 124 aa, Artificial Sequence
  Synthetic construct
QLQLQESGPGLVKPSETLSLTCTVSGGSISSSSYYWGWIRQPPGKGLEWIGSIYYSGSTYYNPSLKSRVTISVDTSKNQFSLKLSSVTAADTAVYYCARNRRAIRSGSNWFDPWGQGTLVTVSS

SEQ ID NO: 7803 - protein, 121 aa, Artificial Sequence
  Synthetic construct
QVQLVESGGGVVPPGRSLRLSCAASGFAFSSFGMHWVRQAPGKGLEWLAVISYDGSHEYYADSVKGRFTISRDNSKNTLYLQMNSLRVEDTAMYYCAVPKWDLMHGYLQNWGQGTLVTVSS

SEQ ID NO: 7804 - protein, 123 aa, Artificial Sequence
  Synthetic construct
EVQLVQSGAEVKKPGESLKISCQASGYTFTNFWIGWVRQIPGKGLEWMGIIYPGDSDTTYSPSFQGQITISADKSIATAYLQWSSLTASDTAIYYCARGSVTYYTFGGVFDSWGQGTLVTVSS

SEQ ID NO: 7805 - protein, 122 aa, Artificial Sequence
  Synthetic construct
QGLLVQSGAEVKKPGASVKVSCKASGYTFTSFGISWLRQAPGQGLKWMGWISGYSGNTNYSQTFQGRVTMTTDTSTSTAYMELKNLRSDDTAVYYCVRDHYSVLNRYGMDVWGQGTTVAVSS

SEQ ID NO: 7806 - protein, 125 aa, Artificial Sequence
  Synthetic construct
QLQLQESGPGLVKPSETLSLTCTVSGGSISSSSYYWGWIRQPPGKGLEWIGSIYYSGSTYYNPSLKSRVTISVDTSKNQFSLKLSSVTAADTAVYYCARLLPKYSSSSINWFDPWGQGTLVTVSS

SEQ ID NO: 7807 - protein, 123 aa, Artificial Sequence
  Synthetic construct
QVQLVQSGSEVKKPGASVKVSCKASGYTFTSYGFNWVRQAPGQGLEWMGWISAYNGNTNYAQKLQGRVTMTTDTSTSTAYMELRSLRSDDTAVYYCARGGYRSGWYPRNFDYWGQGTLVSVSS

SEQ ID NO: 7808 - protein, 121 aa, Artificial Sequence
  Synthetic construct
QVQLVESGGGVVQPGRSLRLSCAASGFTFSSYAMHWVRQAPGKGLEWVAVISYDGSNKYYADSVKGRFTISRDNSKNTLYLQMNSLRAEDTAVYYCARDDYGDYVGYFQHWGQGTLVTVSS

SEQ ID NO: 7809 - protein, 128 aa, Artificial Sequence
  Synthetic construct
QVQLVQSGAEVKKPGSSVKVSCKASGGTFSSYAISWVRQAPGQGLEWMGRIIPILGIANYAQKFQGRVTITADKSTSTAYMELSSLRSEDTAVYYCASPHTAKLHKKYYYYYYGMDVWGQGTTVTVSS

SEQ ID NO: 7810 - protein, 126 aa, Artificial Sequence
  Synthetic construct
EVQLVESGGGLVKPGGSLRLSCAASGFSLSTSGMNWVRQAPGKGLEWVSYISRSSSYIYYADSVKGRFTISRDNARNSLYLQMDSLRAEDTAVYYCARVGGGDEWYSSGWFSFDNWGQGILVTVSS

SEQ ID NO: 7811 - protein, 119 aa, Artificial Sequence
  Synthetic construct
QVQLVQSGAEVKKPGASVKVSCKASGYTFTSYAMHWVRQAPGQRLEWMGWINAGNGNTKYSQKFQGRVTITRDTSASTAYMELSSLRSEDTAVYYCARGIYSGSYYAHWGQGTLVTVSS

SEQ ID NO: 7812 - protein, 118 aa, Artificial Sequence
  Synthetic construct
EVQLVESGGGLVKPGGSLRLSCAASGFTFSTYSMNWVRQAPGKGLEWVSSISHSNHYIYYADSVKGRFTISRGNTKNSLYLQMSSLRVEDTAVYYCARGGSNWLHDFWGQGTLVTVSS

SEQ ID NO: 7813 - protein, 122 aa, Artificial Sequence
  Synthetic construct
EVQLVQSGAEVKKPGESLKISCKGSGYSFTSFWIGWVRQMPGKGLEWMGIIYPGDSDIRYSPSFQGQVTISADKSITTAYLQWNSLKASDTAIYYCARFEGKMSLGYGFDIWGQGTTVTVSS

SEQ ID NO: 7814 - protein, 129 aa, Artificial Sequence
  Synthetic construct
QVQLVQSGAEVKKPGASVKVSCKASGYTFTSYYMHWVRQAPGQGLEWMGIINPSGGSTSYAQKFQGRVTMTRDTSTSTVYMELSSLRSEDTAVYYCARDPYYYDSSGYYYYYYYGMDVWGQGTTVTVSS

SEQ ID NO: 7815 - protein, 121 aa, Artificial Sequence
  Synthetic construct
EVQLVDSGGGLEQPGRSLRLSCVASGFVFNDYAMHWVRQPPGKGLEWVSGISWNSRSIGYGDSVKGRFTISRDNAKNSLYLQMNSLRIEDTAVYYCVKDDSAFPGSDLAAWGQGTLVTVSA

SEQ ID NO: 7816 - protein, 126 aa, Artificial Sequence
  Synthetic construct
QVQLQESGPGLVKPSETLSLTCTVSGGSIGSYYWSWTRQPPGKGLEWIGYIYYSGSTTYNPSLKRRVTMSVDTSKNQFSLKLTSVAAADTAVYYCARSITMVREVISRSYYVMDVWGQGTTVTVSS

SEQ ID NO: 7817 - protein, 125 aa, Artificial Sequence
  Synthetic construct
EVQLVQSGAEVKKPGESLRISCKGSGYSFTSYWISWVRQMPGKGLEWMGRIDPSDSYTNYSPSFQGHVTISADKSISTAYLQWSSLKASDTAMYYCARHGEYGGSPYYYYGMDVWGQGTTVTVSS

SEQ ID NO: 7818 - protein, 123 aa, Artificial Sequence
  Synthetic construct
QVHLQESGPGLVKPSETLSLTCTVSGGSVSSYYCAWIRQIPGKGLEWIGHVSNRGSTNYNPSFRSRVTISKDTSNNQFSLKLTSMNTADTAIYYCASAPPGEFWSGRRAFDIWGQGTLVTVSS

SEQ ID NO: 7819 - protein, 122 aa, Artificial Sequence; identical to SEQ ID NO: 6325
  Synthetic construct

SEQ ID NO: 7820 - protein, 125 aa, Artificial Sequence
  Synthetic construct
EVQLVESGGGLVKPGGSLRLSCTASGFTFINAWMNWVRQAPGKGLEWVGRLKSNADGGTTDYAAPVKGRFTISRDDSKNTLYLQMNSLKTEDTAMYYCTTDLVELLWFGERTVVWGHGTTVTVSS

SEQ ID NO: 7821 - protein, 120 aa, Artificial Sequence
  Synthetic construct
QVQLQESGPGLVKPSQTLSLTCTVSGGSISSGSYYWSWIRQPAGKGLEWIGRIYTSGSTNYNPSLKSRVTISVDTSKNQFSLKLSSVTAADTAVYYCARVRAFSKLVDPWGQGTLVTVSS

SEQ ID NO: 7822 - protein, 118 aa, Artificial Sequence
  Synthetic construct
QVHLVESGGGVVQPGRSLRLSCAASGFPFSSYGMHWVRQAPGKGLEWVAFILSDGSNKWSADSVKGRFTISRDNSRNTLYLQMNSLRAEDTAVYRCVKDKPGAGFDYWGQGTLVTVSS

SEQ ID NO: 7823 - protein, 121 aa, Artificial Sequence; identical to SEQ ID NO: 5544
  Synthetic construct

SEQ ID NO: 7824 - protein, 121 aa, Artificial Sequence
  Synthetic construct
QVQLQESGPGLVKPSETLSLTCTVSGGSITGYYWNWFRQAPGKGLEWIGYNSHSGTSNYNPSLKSRVTVSVDTSKNEFFLKVNSVTPADTAVYYCARAPWVAGAFGWFDPWGQGTLVTVSS

SEQ ID NO: 7825 - protein, 119 aa, Artificial Sequence
  Synthetic construct
QVQLVQSGAEVKKPGASVKVSCKASGYTFTSYGISWVRQAPGQGLEWMGWISAYNGNTNYAQKLQGRVTMTTDTSTSTAYMELRSLRSDDTAVYYCARRDWLLHGVDYWGQGTLVTVSS

SEQ ID NO: 7826 - protein, 116 aa, Artificial Sequence
  Synthetic construct
EVQLVESGGGLVQPGGSLRLSCAASGFTFSGYVMSWVRQAPGKGLEWVATIKQDGGEKYYVDSVKGRFTISRDNAKDSLHLQMNSLRGEDTAVYYCARAARGVDYWGQGTLVTVSS

SEQ ID NO: 7827 - protein, 119 aa, Artificial Sequence
  Synthetic construct
QVQLQESGPGLVKPSETLSLTCSVAGGSIGSGSYYWTWIRQPPGKGLEWIGCIYYSGSTKKNSSLTSRLTLSADASKNQFSLKLSSISAADTAVYYCARGSRVTSFALWGQGALVTVSS

SEQ ID NO: 7828 - protein, 124 aa, Artificial Sequence; identical to SEQ ID NO: 5439
  Synthetic construct

SEQ ID NO: 7829 - protein, 120 aa, Artificial Sequence
  Synthetic construct
QVQLVQSGAEVKKPGASVKVSCKASGYTFTSYYMHWVRQAPGQGLEWMGIINPSGGSTSYAQKFQGRVTMTRDTSTSTVYMELSSLRSEDTAVYYCARVEREWLRLYDYWGQGTLVTVSS

SEQ ID NO: 7830 - protein, 119 aa, Artificial Sequence
  Synthetic construct
QVQLVQSGAEVKKPGASVKVFCKASGYTFTSYYMHWVRQAPGQGLEWMGIINPTGGRTSYAQKFQGRVTMTRDTSTSTVYMELSSLRFEDTAVYYCARSLGDSSGLDYWGQGTLVTVSS

SEQ ID NO: 7831 - protein, 122 aa, Artificial Sequence
  Synthetic construct
QVQLQESGPGLVKPSQTLSLTCTVSSGSFNTTSHYWNWIRQPAGKGLEWIGRVYARGSPNYNPSLRSRVTISVDTSKNQFSLKLSSVTAADTAVYFCARGADYLLYYAMDVWGQGTAVTVSS

SEQ ID NO: 7832 - protein, 127 aa, Artificial Sequence
  Synthetic construct
EVQLVESGGGLVQPGGSLRLSCAASGFTFSSYWMHWVRQAPGKGLVWVSRINSDGSSTSYADSVKGRFTISRDNAKNTLYLQMNSLRAEDTAVYYCARDQQVGGSSYYYYYYGMDVWGQGTTVTVSS

SEQ ID NO: 7833 - protein, 132 aa, Artificial Sequence
  Synthetic construct
EVQLVESGGGLVQPGGSLRLSCAASGFTFSSYWMSWVRQAPGKGLEWVANIKQDGSEKYYVDSVKGRFTISRDNAKNSLYLQMNSLRAEDTAVYYCARGLGYCSGGSCHRKRGYYYYGMDVWGQGTTVTVSS

SEQ ID NO: 7834 - protein, 120 aa, Artificial Sequence
  Synthetic construct
EVQLLESGGGLVQPGGSLRLSCAASGFSFNSYGMTWVRQARGTGLEWVSSISGGGDLKYYRDSVKGRFTASRDNSRNMLYLEMNNLRVEDTAVYYCAKLLAVGRWYFEYWGQGTLVTVSS

SEQ ID NO: 7835 - protein, 125 aa, Artificial Sequence
  Synthetic construct
QGHLVESGGGVVQPGRSLRLSCAASGFNFYTTAIHWVRQAPGKGLEWVALIYYDGTNEYYAESVKGRFTISRDNSRNTLYLQMNSLRADDTAVYYCATNPPRRSSMIRDYHFDYWGQGTLVTVSS

SEQ ID NO: 7836 - protein, 125 aa, Artificial Sequence; identical to SEQ ID NO: 5711
  Synthetic construct

SEQ ID NO: 7837 - protein, 126 aa, Artificial Sequence
  Synthetic construct
QVQLQESGPGLVKPSGTLSLTCAVSGGSISSSNWWSWVRQPPGKGLEWIGEIYHSGSTNYNPSLKSRVTISVDKSKNQFSLKLSSVTAADTAVYYCARDSREWLRSYYYYYGMDVWGQGTTVTVSS

SEQ ID NO: 7838 - protein, 122 aa, Artificial Sequence
  Synthetic construct
QLQLQESGSGLVKPSQTLSLTCAVSGGSISSGGYSWSWIRQPPGKGLEWIGYIYHSGSTYYNPSLKSRVTISVDRSKNQFSLKLSSVTAADTAVYYCARATSGSSRGAFDIWGQGTMVTVSS

SEQ ID NO: 7839 - protein, 128 aa, Artificial Sequence
  Synthetic construct
QLQLQESGSGLVKPSQTLSLTCTVSGGSISRGGFSWTWIRQPPGKGLEWIGYIYHNGNTYYNPSLEGRVTISLDRSKDQFSLNLISVTAADTAVYYCARDRVIMIRGVIKSQYGLDVWGQGTTVTVSS

SEQ ID NO: 7840 - protein, 123 aa, Artificial Sequence
  Synthetic construct
QVQLQESGPGLVKPSQTLSLTCTVSGGSITSANYFWSWVRQHPVKGLEWIGYIHHSGRAYYNPSLKSRLTLSVDTSKNQFSLKLNSVTAADTAVYYCAREVNLEDDSDAFDIWGQGAMVTVSS

SEQ ID NO: 7841 - protein, 122 aa, Artificial Sequence
  Synthetic construct
QVQLVESGGGVVQPGRSLRLSCAASGFTFSSYGMHWVRQAPGKGLEWVAVIWYDGSNKYYADSVKGRFTISRDNSKNTLYLQMNSLRAEDTAVYYCARDLWLRVRGVIFDYWGQGTLVTVSS

SEQ ID NO: 7842 - protein, 125 aa, Artificial Sequence
  Synthetic construct
QVQLVESGGGVVQPGRSLRLSCAASGFTFSSYAMHWVRQAPGKGLEWVAVISYDGSNKYYADSVKGRFTISRDNSKNTLYLQMNSLRAEDTAVYYCARDRRRWELLRGTAYFDYWGQGTLVTVSS

SEQ ID NO: 7843 - protein, 122 aa, Artificial Sequence
  Synthetic construct
EVQLVQSGAEVKKSGTSVKISCKASGYTFTDYYMHWVQQAPGKGLEWMGLVDPVDGETMYPEKFQGRVTITADTSKDTSYIELSSLRSEDTAMYYCAIATSSYGRVYGMDVWGQGTTVTVSS

SEQ ID NO: 7844 - protein, 123 aa, Artificial Sequence
  Synthetic construct
QVQLQQWGAGLLKPSETLSLTCAVFGESFSGHYWSWIRQPPGRGLEWIGEINHGGSTNYSPSLKSRVTISVDTPKKQFSLKLTSVTAADTAVYFCARTPYFYGAGSYRHFDYWGQGTLVTVSS

SEQ ID NO: 7845 - protein, 124 aa, Artificial Sequence
  Synthetic construct
QVQLVESGGGVGQPGGSLRLSCEVSGVTFTGYGMHWVRQAPGKGLEWVAAIWYDGTNEYYADSVKGRFSISTDTPKNTVYLQMNSLRAEDTAVYYCARNTKTSTIIWHFVMDVWGQGSTVTVSP

SEQ ID NO: 7846 - protein, 129 aa, Artificial Sequence
  Synthetic construct
EVQLVESGGGLVQPGGSLRLSCAASGFTFSSYSMNWVRQAPGKGLEWVSYISSSSSTIYYADSVKGRFTISRDNAKNSLYLQMNSLRDEDTAVYYCARSDRADRIAARQRPYYYGMDVWGQGTTVTVSS

SEQ ID NO: 7847 - protein, 122 aa, Artificial Sequence
  Synthetic construct
QVQLQESGPGLVKPSETLSLTCTVSDGSINSYYWSWIRQPPGKGLEWIGYIYYSGSANYNPSLKSRVTISVDTSKNQFSLKLNSVTAADTALYYCAREKRPYSGTYQGFDSWGQGTLVTVSS

SEQ ID NO: 7848 - protein, 120 aa, Artificial Sequence
  Synthetic construct
EVQLLQSGGGFVQPGGSLRLSCTASGLTFSSYAMSWVRQAPGKGLEWVSAISGSGDGSHYADFAKGRFSVSRDNSRNTLSLEVSSLRVDDTAMYYCTRSPGVAKAAALLWGQGTLVNVSS

SEQ ID NO: 7849 - protein, 126 aa, Artificial Sequence; identical to SEQ ID NO: 7631
  Synthetic construct

SEQ ID NO: 7850 - protein, 124 aa, Artificial Sequence
  Synthetic construct
EVQLVESGGGLVQPGGSLRLSCAASGFTFSSYWMHWVRQAPGKGLVWVSRINSDGSSTSYADSVKGRFTISRDNAKNTLYLQMNSLRAEDTAVYYCARAGYCSSTSCYRWFDPWGQGTLVTVSS

SEQ ID NO: 7851 - protein, 124 aa, Artificial Sequence
  Synthetic construct
EVHLVEFGGGSLQPGRSLRLSCAASGFTFDDYAMHWVRQAPGKGLEWVSGIGWNSGTMDYADSVKGRFTISRDNAKNSLYLQMNSLRPEDTAFYYCVKDREYNLRRGQMAFDYWGQGTLVTVSS

SEQ ID NO: 7852 - protein, 126 aa, Artificial Sequence
  Synthetic construct
EVQLVESGGGLVKPGGSLRLSCAASGFTFSDAWMSWVRQPPGKGLEWVGRIKSKSDGGTTDYAAPVKGRFTISRDDSKNTLSLQMNRLKTEDTAVYYCTTEAYGAYGGSAADFDYWGQGTLVTVSS

SEQ ID NO: 7853 - protein, 126 aa, Artificial Sequence
  Synthetic construct
QVQLVQSGAEVKKPGASVKVSCKASGYTFTSYYMHWVRQAPGQGLEWMGIINPSGGSTSYAQKFQGRVTMTRDTSTSTVYMELSSLRSEDTAVYYCARGRAYNWNARPSVSWFDPWGQGTLVTVSS

SEQ ID NO: 7854 - protein, 128 aa, Artificial Sequence
  Synthetic construct
EVQLVESGGGLVKPGGSLRLSCATSGFTFSRYSMNWVRQAPGKGLEWVSSISSSSSFLYYADSVKGRFTISRDSAKNSLYLQMTSLRAEDTAVYYCARDEGIAAPGNSRDFYYGMDVWGQGTPVTVSS

SEQ ID NO: 7855 - protein, 123 aa, Artificial Sequence
  Synthetic construct
EVQLVESGGGLVKPGGSLRLSCAASGFTFSTHSMTWVRQAPGKGLEWVSSISHTSVYIYYADSVKGRFTISRDNARNSLLLQMNSLRAEDTAVYYCAKCGGGACNQAGAMDVWGQGTTVTVSS

SEQ ID NO: 7856 - protein, 121 aa, Artificial Sequence; identical to SEQ ID NO: 5544
  Synthetic construct

SEQ ID NO: 7857 - protein, 124 aa, Artificial Sequence
  Synthetic construct
EVQLVESGGGLIQPGGSLRLSCAASGFTFSSYAMHWVRQAPGKGLKYVSAISSNGGGTYYADSVKGRFTISRDNSKNTLYLQMSSLKAEDTAVYYCVKDEQSFVGYCSGGSCQWGQGTLVTVSS

SEQ ID NO: 7858 - protein, 113 aa, Artificial Sequence
  Synthetic construct
EVQLVESGGDLVQPGGSLRLSCAASGFIVNSNYMTWVRQAPGKGLEWVSTIDGGGKTYYADAVKGRFTISRDVSKNTLYLRMNSLRLEDTAVYSCARGWLYNWGPGTSVTVSP

SEQ ID NO: 7859 - protein, 125 aa, Artificial Sequence
  Synthetic construct
EVQLVESGGGLVQPGGSLRLSCAASGFTFSSYWMHWVRQAPGKGLVWVSRINSDGRSTSYADSVKGRFTISRDNAKSTLYLQMNSLRAEDTAVYYCARVGTIAMVRDIISRYTSWGQGTLVTVSS

SEQ ID NO: 7860 - protein, 122 aa, Artificial Sequence
  Synthetic construct
EVQLVESGGDRVQPGGSLRLSCAASEFTFSNFWMHWVRQTPGKGLEWVSRISSDGATITYADSVKGRFTISRDNTKKMLFLQMNSLRVEDTAVYYCVREDFGRRGEFYFDHWGQGTLVPVSS

SEQ ID NO: 7861 - protein, 125 aa, Artificial Sequence
  Synthetic construct
QVQLVESGGGVVQPGRSLRLSCAASGFTFSSYGMHWVRQAPGKGLEWVAVIWYDGSNKYYADSVKGRFTISRDNSKNTLYLQMNSLRAEDTAVYYCARDSRRHSYYDSSGYYNYWGQGTLVTVSS

SEQ ID NO: 7862 - protein, 120 aa, Artificial Sequence
  Synthetic construct
EVQLVESGGGLFQPGGSLRLSCEASGFTFTNYWMHWVRQAPGKGLVWVSYINSDESITDYADSVKGRFTISRDNAKNTLYLQMNSLRAEDTAVYYCARAYESGSSTLLFWGQGTLVTVSS

SEQ ID NO: 7863 - protein, 123 aa, Artificial Sequence
  Synthetic construct
QVQLQESGPGLVKPSQTLSLTCTVSGGSISSGSYYWSWIRQPAGKGLEWIGRIYTSGSTNYNPSLKSRVTISVDTSKNQFSLKLSSVTAADTAVYYCARGKRSSWMTWNMDVWGQGTTVTVSS

SEQ ID NO: 7864 - protein, 128 aa, Artificial Sequence
  Synthetic construct
EVQLVESGGDLVQPGGSLRLSCAASGFSLSPYAMHWVRQAPGKGLEHVSAIGSGGSTYYANSVNGRFTISRDNSKNTLYLQMGSLRPEDMAVYYCARDRAAEAYCGADCSLGWCFDLWGRGALVTVSS

SEQ ID NO: 7865 - protein, 120 aa, Artificial Sequence
  Synthetic construct
EVQLLESGGGVVQPGGSLRLSCEASGFTFRSYAMSWVRQAPGKGLEWVSGLSGSGNTTHYADSVKGRFTISRDNSKNLLYLQMNSLRAEDTAVYYCAKDPQYQLLRFDFWGQGTLVTVSS

SEQ ID NO: 7866 - protein, 123 aa, Artificial Sequence
  Synthetic construct
EVQLVESGGALVQPGGSLRLSCTASGFSFSTYSMNWVRLAPGKGLEWVSHISSDTSPIYYADSMKGRFTISRDNAKNSLFLQMNSLRDEDTAVYYCARGGYYDGSGYYYLEYWGQGTLVTVSS

SEQ ID NO: 7867 - protein, 125 aa, Artificial Sequence
  Synthetic construct
QVQLVQSGAEVKKPGASVKVSCKASGYTFTSYGISWVRQAPGQGLEWMGWISAYNGNTNYAQKLQGRVTMTTDTSTSTAYMELRSLRSDDTAVYYCARLRPGYSYGYFVADFDYWGQGTLVTVSS

SEQ ID NO: 7868 - protein, 127 aa, Artificial Sequence
  Synthetic construct
QVQLVESGGGVVQPGKSLRLSCAASGFTFRNYPLHWVRQAPGKGLEWVAVITDDGNNEYYADSVKGRFTISRDNSKDTLYLQMNSLRDEDSAVYYCARDPSWGSGWTNSLGSSFDLWGQGTLVTVSS

SEQ ID NO: 7869 - protein, 117 aa, Artificial Sequence
  Synthetic construct
EVQLVESGGGLIQPGGSLRLSCAASGFTVSSNYMTWVRQAPGKGLEWVSLIYSGGRTYYADSVKGRFTISRDNSKNTLYLQMNSLRAEDTAVYYCARSVSYYGMDVWGQGTTVTVSS

SEQ ID NO: 7870 - protein, 128 aa, Artificial Sequence
  Synthetic construct
QVQLVQSGAEVKKPGASVKVSCKASGYTFTSYYMHWVRQAPGQGLEWMGIINPSGGNTIYAQKFQGRVTMTRDTSTSTVYMELGSLRSEDTAVYYCARDAAYFYGSGDLLGYYGMDVWGQGTTVTVSS

SEQ ID NO: 7871 - protein, 118 aa, Artificial Sequence
  Synthetic construct
QVQLVQSGAEVKKSGASVKVSCKASGDTFTTYYIHWVRQAPGQGLEWMGRINPSGNRPSYAQKLHGRVTLTTDTSTTTVYMELSSLRYEDTAIYYCARAWDYDSPDHWGQGTLVTVSS

SEQ ID NO: 7872 - protein, 124 aa, Artificial Sequence
  Synthetic construct
QVQLVESGGGLVKPGGSLRLSCAASGFTFSDYYMSWIRQAPGKGLEWVSYISSSGSTIYYADSVKGRFTISRDNAKNSLYLQMNSLRAEDTAVYYCARDSFLQLVYYYYGMDVWGQGTTVTVSS

SEQ ID NO: 7873 - protein, 121 aa, Artificial Sequence
  Synthetic construct
EVQLVQSEAEVRKPGESVKISCKVSGYSFTTYWIGWVRQMPGKGLEWMGTIYPGDSDTRYSPSFRGQVTISADKSINTAYLQWSSLKASGTAIYYCARARAQLWPNAFDYWGQGTLVTVSS

SEQ ID NO: 7874 - protein, 114 aa, Artificial Sequence
  Synthetic construct
EVQLVESGGDLIQPGGSLRLSCAVSGFNVRDNHVGWVRQAPGKGLECVSIMSHRGEIYYADSVKGRFTISRDSSRNTVFLQMNNMRAEDTAKYHCVGYGGNSVWGRGTLVTVSS

SEQ ID NO: 7875 - protein, 117 aa, Artificial Sequence; identical to SEQ ID NO: 6226
  Synthetic construct

SEQ ID NO: 7876 - protein, 115 aa, Artificial Sequence
  Synthetic construct
EVQLVESGGGLVKPGGSLRLSCAASGFTFSSYSMNWVRQAPGKGLEWVSSISSSSSYIYYADSVKGRFTISRDNAKNSLYLQMNSLRAEDTAVYYCARGGGILLWGQGTLVTVSS

SEQ ID NO: 7877 - protein, 122 aa, Artificial Sequence
  Synthetic construct
QVQLVQSGAEVKKPGASVKVSCKASGYTFTSYGISWVRQAPGQGLEWMGWISAYNGNTNYAQKLQGRVTMTTDTSTSTAYMELRSLRSDDTAVYYCARIRGKPYYYYGMDVWGQGTTVTVSS

SEQ ID NO: 7878 - protein, 122 aa, Artificial Sequence
  Synthetic construct
EVRLVESGGGLVQPGKSLRLSCTASGVISGRYAMHWVRQVSGKGPEWVSGINWEGDDIAYADPVKGRFVISRDDDNNSLYLQMNSLRFEDTAMYYCVRHMRRTLSNDAFEIWGHGTMVNVSS

SEQ ID NO: 7879 - protein, 124 aa, Artificial Sequence; identical to SEQ ID NO: 5439
  Synthetic construct

SEQ ID NO: 7880 - protein, 120 aa, Artificial Sequence
  Synthetic construct
EVQLVEAGGGLVQPGGSLRLSCAASGFHFVTYGMNWVRQAPGSGLEWISYISGNRDTILYADSVKGRFTISRDNGDNSLYLQMNGLRDDDTAMYYCVKGSTHTNNWFDSWGQGTLVTVSS

SEQ ID NO: 7881 - protein, 123 aa, Artificial Sequence
  Synthetic construct
DVQLVESGGGLVQPGGSLRLSCSGSGFTFSRYAMHWVRQAPGKGLKYVSAVSNDGSSTSYADSVKGRFTISRDNSRNTVFLQMNSLRTEDAAVYYCVRDLGWRSIAADGGDSWGQGTLVSVSS

SEQ ID NO: 7882 - protein, 118 aa, Artificial Sequence
  Synthetic construct
EVQLLESGGGLVQPGGSLRVSCVASGFTFSNYAMTWVRQAPGKGLEWVSGITGSGDNTFYADSVKGRCTISRDNSNNTLYLQISSLGVEDTAVYYCAKEGRGNGFDPWGQGTLVTVSS

SEQ ID NO: 7883 - protein, 121 aa, Artificial Sequence
  Synthetic construct
QLQLQESGPGLVKPSETLSLTCTVSGGSISSSSYYWGWIRQPPGKGLEWIGSIYYSGSTYYNPSLKSRVTISVDTSKNQFSLKLSSVTAADTAVYYCARHSAGSSRYFDYWGQGTLVTVSS

SEQ ID NO: 7884 - protein, 125 aa, Artificial Sequence
  Synthetic construct
QVQLQQWGAGLLKPSETLSLTCAVYGGSFSGYYWSWIRQPPGKGLEWIGEINHSGSTNYNPSLKSRVTISVDTSKNQFSLKLSSVTAADTAVYYCARGWKRRYSSSSYHGWFDPWGQGTLVTVSS

SEQ ID NO: 7885 - protein, 120 aa, Artificial Sequence
  Synthetic construct
QVQLVQSGAEVKKPGASVKVSCKASGYTFTSYYMHWVRQAPGQGLEWMGIINPSGGSTSYAQKFQGRVTMTRDTSTSTVYMELSSLRSEDTAVYYCARDSRYFDWFLGYWGQGTLVTVSS

SEQ ID NO: 7886 - protein, 131 aa, Artificial Sequence
  Synthetic construct
QVQLVESGGGVVQPGRSLRLSCAASGFTFSSYAMHWVRQAPGKGLEWVAVISYDGSNKYYADSVKGRFTISRDNSKNTLYLQMNSLRAEDTAVYYCARTSAGYYGSGSYYKGGWRGGMDVWGQGTTVTVSS

SEQ ID NO: 7887 - protein, 120 aa, Artificial Sequence
  Synthetic construct
ELHLVESGGGLVQAARSIRLSCAASGFNLDDHSMHWVRQVPGKGLEWVSGINWNSGMIKYADSVRGRFTISRDNAQSSIYLQMNSLRTDDTGFYYCTRGSSFWIGSLDVWGQGVLVTVSS

SEQ ID NO: 7888 - protein, 123 aa, Artificial Sequence
  Synthetic construct
QVQLQESGPGLVKPSQTLSLTCTVSGGSISSGSYYWSWIRQPAGKGLEWIGRIYTSGSTNYNPSLKSRVTISVDTSKNQFSLKLSSVTAADTAVYYCARGTVYGGRAEYFQHWGQGTLVTVSS

SEQ ID NO: 7889 - protein, 127 aa, Artificial Sequence; identical to SEQ ID NO: 5678
  Synthetic construct

SEQ ID NO: 7890 - protein, 120 aa, Artificial Sequence
  Synthetic construct
QLLLRESGSGLVKPSQTLSLTCAISGGSISSGGYAWSWIRQPPGKGLEWIGHIYHSGSTDFNPSLKSRVTMSVDRSKNQFSLKLSSVTAADTAVYYCATNYGGNTPFDYWGQGTLVTVSS

SEQ ID NO: 7891 - protein, 125 aa, Artificial Sequence
  Synthetic construct
QVQLQESGPGLVRPSETLSLTCTVSGASISQYHWSWIRQSPGKGLEWIGHIYNSGSTNYNASLKSRVTMLLDTSRNQFSLKLTSVTAADTAVYYCARDKTTPRSGGFYYYGMDVWGQGTTVTVSS

SEQ ID NO: 7892 - protein, 132 aa, Artificial Sequence
  Synthetic construct
QVQLVESGGGVVQPGRSLRLSCAASGFTFSSYAMHWVRQAPGKGLEWVAVISYDGSNKYYADSVKGRFTISRDNSKNTLYLQMNSLRAEDTAVYYCARARKRHGDYYGSGRGQNYYYGMDVWGQGTTVTVSS

SEQ ID NO: 7893 - protein, 126 aa, Artificial Sequence
  Synthetic construct
QVQLQESGPGLVKSSQTLSLTCSVSGDSMRNGYYYWSWIRQPAGKGLEWIGRFYSTENTNFHPSLRSRVAISVETSKNQFSLRLNSVTAADTAVYYCARARDFWRGSEGAFWFDTWGQGILVTVSS

SEQ ID NO: 7894 - protein, 126 aa, Artificial Sequence
  Synthetic construct
EVQLVESGGGLVQPGGSLRLSCAASGFTFSSYWMSWVRQAPGKGLEWVANIKQDGSEKYYVDSVKGRFTISRDNAKNSLYLQMNSLRAEDTAVYYCARVRRAGYSYATGYYGMDVWGQGTTVTVSS

SEQ ID NO: 7895 - protein, 123 aa, Artificial Sequence
  Synthetic construct
EVQLVESGGGLVQPGGSLRLSCAASGFTFSSYWMSWVRQAPGKGLEWVANIKQDGSEKYYVDSVKGRFTISRDNAKNSLYLQMNSLRAEDTAVYYCARDRKYYDILTGAFDYWGQGTLVTVSS

SEQ ID NO: 7896 - protein, 125 aa, Artificial Sequence; identical to SEQ ID NO: 6972
  Synthetic construct

SEQ ID NO: 7897 - protein, 131 aa, Artificial Sequence
  Synthetic construct
QVQLQQSGPGLVKPSQTLSLTCAISGDSVSSNSAAWNWIRQSPSRGLEWLGRTYYRSKWYNDYAVSVKSRITINPDTSKNQFSLQLNSVTPEDTAVYYCARDHYDFWSGRRRHTHNWFDPWGQGTLVTVSS

SEQ ID NO: 7898 - protein, 122 aa, Artificial Sequence
  Synthetic construct
QVQLQQWGAGLLKPSETLSLTCAVYGGSFSGYYWSWIRQPPGKGLEWIGEINHSGSTNYNPSLKSRVTISVDTSKNQFSLKLSSVTAADTAVYYCASLIAAVGYYYYGMDVWGQGTTVTVSS

SEQ ID NO: 7899 - protein, 118 aa, Artificial Sequence
  Synthetic construct
EVQLVESGGGLVQPGGSLRLSCAASGFTFSDYYMDWVRQGPGKGLEWVGRIRNKANSYTAEYAASVRGRFTISRDDSKNSLYLQMNSLKTEDTAVYYCARGRNSFDYWGQGTLVTVSS

SEQ ID NO: 7900 - protein, 123 aa, Artificial Sequence; identical to SEQ ID NO: 5978
  Synthetic construct

SEQ ID NO: 7901 - protein, 120 aa, Artificial Sequence; identical to SEQ ID NO: 7610
  Synthetic construct

SEQ ID NO: 7902 - protein, 120 aa, Artificial Sequence
  Synthetic construct
QVQLQESGPGLVKPSQTLSLTCTVSGGSISSGDYYWSWIRQPPGKGLEWIGYIYYSGSTYYNPSLKSRVTISVDTSKNQFSLKLSSVTAADTAVYYCARSRKWLRLPDYWGQGTLVTVSS

SEQ ID NO: 7903 - protein, 123 aa, Artificial Sequence
  Synthetic construct
EGQLLESGGDLIQAGGSLRLSCAASGYTFSTYGMSWVRQAPGKGLEWVSGISDSGDRSYYTDSVKGRFTISRDNSKNTVYLQMNSLRAEDTAVYYCAKEAPYTAVTYYGFDVWGHGTTVTVSS

SEQ ID NO: 7904 - protein, 122 aa, Artificial Sequence
  Synthetic construct
QVQLQESGPGLVQPSQTLSLACAVSGGSINTGGYYWSWIRQRPGKGLEWIGHIHHTGGTHYNPSLKSRLTISVDMSKNQFSLKLRSVTAADTAVFYCARVRDSSSSQFFDYWGQGSLVTVSS

SEQ ID NO: 7905 - protein, 123 aa, Artificial Sequence
  Synthetic construct
EVQLVESGGGLVQPGGSLRLSCAASGFTFSSYWMSWVRQAPGKGLEWVANIKQDGSEKYYVDSVKGRFTISRDNAKNSLYLQMNSLRAEDTAVYYCAREPVNYYDSSGYYDYWGQGTLVTVSS

SEQ ID NO: 7906 - protein, 127 aa, Artificial Sequence
  Synthetic construct
QVQLQESGPGLVKPSGTLSLTCAVSGASISSSNWWTWVRQPPGKGLEWIGEIYHSGSTNYNPSLKSRVTISADNSKNQFSLNLNSVTAADTAVYFCAALAYCSNSGCPYYFYGLDVWGQGTTVTVSS

SEQ ID NO: 7907 - protein, 135 aa, Artificial Sequence
  Synthetic construct
QVQLVQSGAEVKKPGASVKVSCKASGYTFTSYYMHWVRQAPGQGLEWMGIINPSGGSTSYAQKFQGRVTMTRDTSTSTVYMELSSLRSEDTAVYYCAREEGGYDFWSGYYKSGWTIYYYYGMDVWGQGTTVTVSS

SEQ ID NO: 7908 - protein, 121 aa, Artificial Sequence
  Synthetic construct
EVQLLESGGGLVQPGGSLRLSCAASGFTFSSYAMSWVRQAPGKGLEWVSAISGSGGNTYYADSVKGRFTISRDNSKNTLYLQMNSLRAEDTAVYYCAKSKSDSTRGLFGYWGQGTLVTVSS

SEQ ID NO: 7909 - protein, 118 aa, Artificial Sequence
  Synthetic construct
EVQLVESGGGLVQPGGSLRISCAASGFSLSDYYMSWVRQAPGEGLEWLANIKGDGSTKNYVDSVKGRFTISRDNGRNSLYLEMNSLRAEDTAVYYCGRDQSRGATDFWGQGTLVTVSS

SEQ ID NO: 7910 - protein, 123 aa, Artificial Sequence
  Synthetic construct
EVQLLESGGGLVQPGGSLRLSCAASGFTFRNYAMNWVRQAPGKGLEWVSHIGGSGGSTYYADSVKGRFTISRDDSKNTLYLQMNSLRGEDTAVYHCAKDYLAGNGIFDPFDIWGQGTMVTVSS

SEQ ID NO: 7911 - protein, 128 aa, Artificial Sequence; identical to SEQ ID NO: 5945
  Synthetic construct

SEQ ID NO: 7912 - protein, 119 aa, Artificial Sequence
  Synthetic construct
QVQLQESGPGLVKPSGTLSLTCAVSGDSISRDHWWSWVRQPPGKELEWIGEMSHTGIIKYNPSLGSRVTISVDRSKNQFFLNLTSVTAADTAVFYCARHAEESRGMDVWGQGTTVIVSS

SEQ ID NO: 7913 - protein, 119 aa, Artificial Sequence
  Synthetic construct
QVQLQESGPGLVKPSETLSLTCTVSGDSIRSNYWNWIRQPPGKGLQWIGNIHYSGSTNYNPSLKSRVTISVDTSKNQFSLKLSSVTAADRALYYCARGGGDSNSFLYYWGQGTLVTVSS

SEQ ID NO: 7914 - protein, 120 aa, Artificial Sequence
  Synthetic construct
QVQLQESGPGLVRPSQTLSLNCTVSSGSISSGLYYWSWIRQPAGKGLEWIGRIYSSGITQYNPSLKSRVTISTDTSKNQFSLKLKSVTAADTAVYYCAKGNSSSWPLDYWGQGVLVTVSS

SEQ ID NO: 7915 - protein, 121 aa, Artificial Sequence
  Synthetic construct
QVQLQESGPGLVKPSETLSLTCSLSSGSLSSNYWTWLRQPPGMGLEWLGYIFHNGKTNYNPSLKSRLTLSVDTSKSHFSLRLSSVTAADTAVYYCARGGDYDSSGYAFDLWGRGTLVTVSS

SEQ ID NO: 7916 - protein, 120 aa, Artificial Sequence
  Synthetic construct
EVQLVESGGGLVKPGGSLRLSCAASGFTFSSYSMNWVRQAPGKGLEWVSSISSSSSYIYYADSVKGRFTISRDNAKNSLYLQMNSLRAEDTAVYYCARDLHLMVRGVRPWGQGTLVTVSS

SEQ ID NO: 7917 - protein, 120 aa, Artificial Sequence
  Synthetic construct
EVQLVESGGGLVQPGGSLRLSCAASGFTVSSNYMSWVRQAPGKGLEWVSVIYSGGSTYYADSVKGRFTISRDNSKNTLYLQMNSLRAEDTAVYYCARQYGYNSKYYFDYWGQGTLVTVSS

SEQ ID NO: 7918 - protein, 123 aa, Artificial Sequence
  Synthetic construct
EVHLVESGGGLVQPGGSLRLSCAASGFTFSSYWMHWVRQAPGKGLMWVSGINTDGSRTTYADSVKGRFTISRDNAKSTLYVQVNSLRVEDTAVYYCTRGGYSDYDWVPGIDFWGQGTLVTVSS

SEQ ID NO: 7919 - protein, 127 aa, Artificial Sequence; identical to SEQ ID NO: 5678
  Synthetic construct

SEQ ID NO: 7920 - protein, 123 aa, Artificial Sequence
  Synthetic construct
EVQLVESGGGLVQPGGSLRLSCAASGFTFSSYSMNWVRQAPGKGLEWVSYISSSSSTIYYADSVKGRFTISRDNAKNSLYLQMNSLRDEDTAVYYCARRYYDILTGYYYYDYWGQGTLVTVSS

SEQ ID NO: 7921 - protein, 124 aa, Artificial Sequence
  Synthetic construct
QLQLQESGPGLVKPSETLSLTCTVSGGSISSSSYYWGWIRQPPGKGLEWIGSIYYSGSTYYNPSLKSRVTISVDTSKNQFSLKLSSVTAADTAVYYCARHPAYCGGDCYNFDYWGQGTLVTVSS

SEQ ID NO: 7922 - protein, 118 aa, Artificial Sequence
  Synthetic construct
EVQLLESGGGLVQPGGSLRLSCAASGFTFSTYAMTWVRQAPGKGLEWVSTVIGSGTTYNADSVKGRFTISRDNSKNTLYLQMNSLRAEDTAVYYCAKDHSSGWYVDYWGQGSLVTVSS

SEQ ID NO: 7923 - protein, 121 aa, Artificial Sequence
  Synthetic construct
QVQLVQSGAEVKKPGASVKVSCKASGYTFISYAIHWVRQAPGQRLEWMGWINAGKNNTKYSQRFQGRVALSSDTSASTAYMELRGLRSEDTAVYYCAKIEYGDYINWLDRWGQGTLVTVSS

SEQ ID NO: 7924 - protein, 123 aa, Artificial Sequence
  Synthetic construct
EVQLVESGGGVIEPGGSLRLSCTASGFIFNRAWMDWVRQAPGKGLEWVGRIKSKTDDETTDYAAPVKGKFTISRDDSKNTLYLQMNSLKSEDTAVYYCTTTRPPPAPPTFDLWGQGTMVIVSS

SEQ ID NO: 7925 - protein, 133 aa, Artificial Sequence; identical to SEQ ID NO: 6545
  Synthetic construct

SEQ ID NO: 7926 - protein, 126 aa, Artificial Sequence
  Synthetic construct
QVQLVESGGGVVQPGRSLRLSCAASGFTFSSYAMHWVRQAPGKGLEWVAVISYDGSNKYYADSVKGRFTISRDNSKNTLYLQMNSLRAEDTAVYYCARVRRHSSSWRYYYYGMDVWGQGTTVTVSS

SEQ ID NO: 7927 - protein, 119 aa, Artificial Sequence
  Synthetic construct
QVQLVESGGGVVQPGRSLRLSCAASGFSFSSFGMHWARQAPGKGLEWVAVVSSSGDAEYYADTVKGRFSIYRDNSKNTLYLQMNSLRSDDTAVYFCAKEIGIADLFDYWGQGTLVTVST

SEQ ID NO: 7928 - protein, 125 aa, Artificial Sequence
  Synthetic construct
QVQLVESGGGVVQPGRSLRLSCAASGFTFSSYGMHWVRQAPGKGLEWVAVISYDGSNKYYADSVKGRFTISRDNSKNTLYLQMNSLRAEDTAVYYCAKAGGYYYGSGSYYRPDYWGQGTLVTVSS

SEQ ID NO: 7929 - protein, 121 aa, Artificial Sequence
  Synthetic construct
QVKLVQSGAEVKKPGASVKVSCKASGYSFTNYYIHWVRQAPGQGLEWMGIINPSYDSTNYAQKFQGRVTMTSDTSTSTVYMELSSLRSDDTAVYYCARDSQAFPPNWFDSWGQGTLVTVSS

SEQ ID NO: 7930 - protein, 118 aa, Artificial Sequence; identical to SEQ ID NO: 7081
  Synthetic construct

SEQ ID NO: 7931 - protein, 118 aa, Artificial Sequence
  Synthetic construct
QAQLQQSGPGLVKPSQTLSLTCAISGDSVSSNKTAWNWIRQSPSRGLEWLGRTYYRSKWYNDYAVSMESRITINPDTSKNQFSLQLNSVTPEDTAVYYCARGWGFHSWGQGTLVTVSS

SEQ ID NO: 7932 - protein, 116 aa, Artificial Sequence
  Synthetic construct
QVQLQESGPGLVKPSETLSLTCTVSGGSISSYYWSWIRQAAGKGLEWIGHMYSGGSTNYNPSLKSRVTMSVDTSKNQFSLKLSSVTAADTAVYYCARGGSTALRLWGQGTLVTVSS

SEQ ID NO: 7933 - protein, 123 aa, Artificial Sequence; identical to SEQ ID NO: 5437
  Synthetic construct

SEQ ID NO: 7934 - protein, 127 aa, Artificial Sequence
  Synthetic construct
QVQLVQSGAEVKKPGASVKVSCKASGYTFTGYYMHWVRQAPGQGLEWMGWINPNSGGTNYAQKFQGRVTMTRDTSISTAYMELSRLRSDDTAVYYCARARRHRGVITPYYYYGMDVWGQGTTVTVSS

SEQ ID NO: 7935 - protein, 117 aa, Artificial Sequence
  Synthetic construct
EVQLVQSGAEVKKPGATVKISCKVSGYTFTDYYIHWVQQAPGKGLEWMGLVDPEDGETIYAEKFQGRVTITADTSTDTGYMELSSLRSEDTARYYCSTDRGGSFEYWGQGTLVTVSS

SEQ ID NO: 7936 - protein, 126 aa, Artificial Sequence
  Synthetic construct
QVQLQESGPGLVKPSQTVSLSCGVSGASLEKSDYYWGWIRQSPGKGLEWIGSFYFGGNSYYSPSLRSRVTISVDTSRNDFSLELTSVTAADTAVYYCARHRPSPPGRGRPGWFDPWGQGILVTVSS

SEQ ID NO: 7937 - protein, 132 aa, Artificial Sequence
  Synthetic construct
QVQLVQSGTEVKKPGASVKVSCKASGYTFTNYGISWVRQAPGQGLEWMGWISVYNGNTRYTQNFQGRVTMTTDTSTNTAYMELRSLRSDDTAVYYCARDPRFCSTSTCHPGNSHYYYGMDAWGQGTTVIVSS

SEQ ID NO: 7938 - protein, 120 aa, Artificial Sequence; identical to SEQ ID NO: 7774
  Synthetic construct

SEQ ID NO: 7939 - protein, 121 aa, Artificial Sequence
  Synthetic construct
EVHLLESGGGLVQPGGSLRLSCGASGFIFSNFAMNWVRQAPGKGLEWVSGISGSGGSTNYADSVKGRFTIFRDNAKNTLYLQMNSLRAGDTAVYYCAKDSGDSGGFHFDYWGQGTLVTVSS

SEQ ID NO: 7940 - protein, 120 aa, Artificial Sequence; identical to SEQ ID NO: 7562
  Synthetic construct

SEQ ID NO: 7941 - protein, 122 aa, Artificial Sequence
  Synthetic construct
EVQLVESGGGLVQPGGSLKLSCAASGFTFSGSAMHWVRQASGKGLEWVGRIRSKANSYATAYAASVKGRFTISRDDSKNTAYLQMNSLRTEDTAVYYCTRALDSRGYYYDYWGQGTLVTVSS

SEQ ID NO: 7942 - protein, 122 aa, Artificial Sequence
  Synthetic construct
QVQLQESGPGLVKPSETLSLTCSVSGGSGFGGTFYWSWLRQSPGKGLEWIGYIAHSGSTNYRPSLGSRISVSADKSKSQFYLTLSPVTAADTAIYYCARVTKYSQSHQFDVWGQGLQVTVSS

SEQ ID NO: 7943 - protein, 121 aa, Artificial Sequence
  Synthetic construct
EVQLLESGGGLVQPGGSLRLSCAASGFTFSSYAMSWVRQAPGKGLEWVSAISGSGGSTYYADSVKGRFTISRDNSKNTLYLQMNSLRAEDTAVYYCAKTRVGYGDYYFDYWGQGTLVTVSS

SEQ ID NO: 7944 - protein, 123 aa, Artificial Sequence; identical to SEQ ID NO: 5437
  Synthetic construct

SEQ ID NO: 7945 - protein, 123 aa, Artificial Sequence
  Synthetic construct
QLQLQESGSGLVKPSQTLSLTCAVSGGSISSGYSWSWIRQPPGKGLEWIGYIYHSGSTYYNPSLKTRVTISVDRSKNQFSLKLSSVTAADTAVYYCARGAVIVGDTHDAFDIWGQGTMVTVSS

SEQ ID NO: 7946 - protein, 126 aa, Artificial Sequence
  Synthetic construct
EVQLVQSEAEVKKPGESLKISCQASGYYFDKNWIGWVRQTPGKGLEWLGVIHPRDSDTRYNPSFQGQVTISADQSISTAFLQWNSLKASDTAIYYCARHISDGRPNRYYFFGLDLWGQGTTVTVSS

SEQ ID NO: 7947 - protein, 120 aa, Artificial Sequence
  Synthetic construct
QVQLQQWGAGLLKPSETLSLTCAVYGGSFSGYYWSWIRQPPGKGLEWIGEINHSGSTNYNPSLKSRVTISVDTSKNQFSLKLSSVTAADTAVYYCARKRGRYYYYGMDVWGQGTTVTVSS

SEQ ID NO: 7948 - protein, 128 aa, Artificial Sequence
  Synthetic construct
EVQLLESGGGLVQPGGSLRLSCAASGFTFSSYAMSWVRQAPGKGLEWVSAISGSGGSTYYADSVKGRFTISRDNSKNTLYLQMNSLRAEDTAVYYCAKTPLKQYCSGGSCYPRHFQHWGQGTLVTVSS

SEQ ID NO: 7949 - protein, 130 aa, Artificial Sequence
  Synthetic construct
EVQLVESGGGLVQPGGSLTLSCAASGFTFSDHYMDWLRQAPGKGLEWVGRIRNKANSFTTTYAASVEGRFTVSRDDSKNLLYLQMRSLKTDDTAIYYCGRVALCGATTGVCPPGRHFDYWGQGVLVTVSS

SEQ ID NO: 7950 - protein, 128 aa, Artificial Sequence
  Synthetic construct
EVQLVESGGGLVQPGGSLKLSCAASGFTFSGSAMHWVRQASGKGLEWVGRIRSKANSYATAYAASVKGRFTISRDDSKNTAYLQMNSLKTEDTAVYYCTRQSRTYCGGDCYFASFGYWGQGTLVTVSS

SEQ ID NO: 7951 - protein, 125 aa, Artificial Sequence
  Synthetic construct
QVQLVQSGAEVKKPGASVKVSCKASGYTFTGYYMHWVRQAPGQGLEWMGWINPNSGGTNYAQKFQGRVTMTRDTSISTAYMELSRLRSDDTAVYYCARVKQQLVSTIWYYGMDVWGQGTTVTVSS

SEQ ID NO: 7952 - protein, 117 aa, Artificial Sequence
  Synthetic construct
EVQLVESGGGLVQPGGSLRLSCAASGFMFSSYWMYWVRQVPGKGLVWVSRINSDGSSTSYADSVKGRLTISRDNAKNTLYLQMNSLRAEDTAVYYCVRGLEGGTAYWGQGTLVTVSS

SEQ ID NO: 7953 - protein, 125 aa, Artificial Sequence
  Synthetic construct
EVQLVESGGGLVQPGGSLKLSCAASGFTFSGSAMHWVRQAPGKGLEWVGRIRSKANSYATGYAASVSGRFTISRDDPKNTAFLQMNSLKTEDTAVYYCVGPPLDDAWDRNWFDPWGQGTLVTVSS

SEQ ID NO: 7954 - protein, 122 aa, Artificial Sequence
  Synthetic construct
EVQLLESGGGLVQPGGSLRLSCAASGFTFSNYAMSWVRQAPGKGLEWVSVITGSGGSTYYADSVKGRFTISRDKSKNTVYLQMNSLRAEDTAVYFCAKDTGGTIFGVSFDCWGQGTLVTVSS

SEQ ID NO: 7955 - protein, 124 aa, Artificial Sequence
  Synthetic construct
QVQLLESGPGLVKPSETLSLTCTVSGDSITNYYWSWIRQSPGKGLEWIGYIYTSGPTHYNPSLKSRVTISGDRSKNQFSLKLTSVTAADTAVYYCARDHSDSRDFYFNGVFDIWGQGTLVTVSS

SEQ ID NO: 7956 - protein, 125 aa, Artificial Sequence; identical to SEQ ID NO: 5679
  Synthetic construct

SEQ ID NO: 7957 - protein, 125 aa, Artificial Sequence
  Synthetic construct
QVQLVESGGGVVQPGRSLRLSCAASGFTFSSYAMHWVRQAPGKGLEWVAVISYDGSNKYYADSVKGRFTISRDNSKNTLYLQMNSLRAEDTAVYYCARGKQSSKWSGSGSYSDYWGQGTLVTVSS

SEQ ID NO: 7958 - protein, 120 aa, Artificial Sequence
  Synthetic construct
EVQLVESGGDLVQPGGSLRLSCAASGVTVSNNYMSWVRQAPGKGLEFVALIYSVGTTSYADSVKGRFTISRDSSKNTVYLQMSSLRVDATAVYYCAREAPGIAAAGGGGWGQGTLVTVSS

SEQ ID NO: 7959 - protein, 123 aa, Artificial Sequence
  Synthetic construct
QVQLVESGGGVVQPGRSLRLSCAASGFTFSSYAMHWVRQAPGKGLEWVAVISYDGSNKYYADSVKGRFTISRDNSKNTLYLQMNSLRAEDTAVYYCARASTRGVHSPSPFGYWGQGTLVTVSS

SEQ ID NO: 7960 - protein, 128 aa, Artificial Sequence
  Synthetic construct
QVQLVQSGAEVKKPGASVKVSCKASGYTFTSYAMHWVRQAPGQRLEWMGWINAGNGNTKYSQKFQGRVTITRDTSASTAYMELSSLRSEDTAVYYCARAAACARSSTSCYRANWFDPWGQGTLVTVSS

SEQ ID NO: 7961 - protein, 124 aa, Artificial Sequence
  Synthetic construct
EVQLLESGGGLVQPGGSLRLSCAASGFTFSSYAMSWVRQAPGKGLEWVSAISGSGGSTYYADSVKGRFTISRDKSKNTLYLQMSSLRAEDTAVYYCAKWASSGYYYYYYGMDVWGQGTTVTVSS

SEQ ID NO: 7962 - protein, 119 aa, Artificial Sequence
  Synthetic construct
QVQLQESGPGLVKPSETLSVTCSVSGGSMRAYYWNWIRQPPGKGLEWIGSAYYSGTTYYNPFLKSRVTMSVDTSNNQFSLHLRSVTAADTAVYSCAAMVRGGLHFFDYWGQGSLVTVSS

SEQ ID NO: 7963 - protein, 128 aa, Artificial Sequence
  Synthetic construct
QVQLMESGGGLVRPGGALRLSCRVSGFIFSDAYMNWVRQAPGKGLEWVGRISTNSAGGTVDYADPAKDRFIISRDDSKSTLYLQMNSLKPADSAIYYCTTHFVGRLVNTSTSEYFDYWGQGTLVTVSS

SEQ ID NO: 7964 - protein, 128 aa, Artificial Sequence
  Synthetic construct
EVQVVESGGGLVKPGRSLRLSCAASGFTFGDYTMSWFRQAPGKGLEWVGFIRSKAYSGSTENAASVKGRFTLSRDDSKSIAYLHMNSLKTEDTAMYYCSRIPAENYDILTGYGLFDCWGQGTLVTVSS

SEQ ID NO: 7965 - protein, 129 aa, Artificial Sequence
  Synthetic construct
EVQLVESGGGLVQPGGSLRLSCAASGFTFSSYSMNWVRQAPGKGLEWVSYISSSSSTIYYADSVKGRFTISRDNAKNSLYLQMNSLRDEDTAVYYCARDLRFQKILGYCSSTSCTSGYWGQGTLVTVSS

SEQ ID NO: 7966 - protein, 118 aa, Artificial Sequence
  Synthetic construct
EVQLVESGGDLIQPGGSLRLSCAASGFAVSGTFMSWVRQAPGKGLEWVSAIYNDGKTYYGDSVEGRFGISRDNSRDTLYLQMNSLRAEDTAVYYCARGIVGLNQLDSWGQGTLVTVSS

SEQ ID NO: 7967 - protein, 119 aa, Artificial Sequence
  Synthetic construct
CQLLVESGGGVVQPGRSLRLSCEASEFSFYTYPMHWVRQAPGKGLEWVTLISHDGTNKYYADSVKGRFTISRDNSKNTLYLEMNSLRADDTAVYYCARRGNWGSAFDIWGQGTLVTVSS

SEQ ID NO: 7968 - protein, 120 aa, Artificial Sequence
  Synthetic construct
EVQLVQSGAEVKKPGESLKISCKGSGYSFTSYWIGWVRQMPGKGLEWMGIIFPGDSDTRYSPSFQGQVTISADKSISTAYLQWSSLKASDTAMYYCARAWELPGSWFDPWGQGTLVTVSS

SEQ ID NO: 7969 - protein, 125 aa, Artificial Sequence
  Synthetic construct
QVHLVQSGAEVRKPGSSVKVSCKASGGTFTSYAISWVRQAPRQGLEFMGRIIPVLNIPNYTQKFQGRVTITADRSTTTIYMELSSLRSEDTAIYYCARDLWSGYNVAAEYGMDVWGQGTTVTVSS

SEQ ID NO: 7970 - protein, 118 aa, Artificial Sequence
  Synthetic construct
QVQLQESGPGLVKPSQTLSLTCTVSGGSISSGSYYWSWIRQPAGKGLEWIGRIYTSGSTNYNPSLKSRVTISVDTSKNQFSLKLSSVTAADTAVYYCARGKGVLFSLWGQGTLVTVSS

SEQ ID NO: 7971 - protein, 126 aa, Artificial Sequence
  Synthetic construct
EVQLLESGGGLVRPGGSLRLSCAASGFTFSSNAMSWVRQAPGKGLEWVSGISGSGTKIYDADSAKGRFTISRDNYRNTLYLQMNSLRAEDTAVYYCAKVDYRSSGLAKYYHGMDVWGQGTTVTVSS

SEQ ID NO: 7972 - protein, 123 aa, Artificial Sequence
  Synthetic construct
QVQLQESGPGLVKASETLSLICTVSGGSISDHYWSWIRQPPGKGLEWIGYIYSSGSTNYSPSLKSRLTISVDRSKNQFSLRLSSVTAADTAVYYCARTKLPGAYYYYYDMDVWGQGTTVTVSS

SEQ ID NO: 7973 - protein, 123 aa, Artificial Sequence; identical to SEQ ID NO: 5463
  Synthetic construct

SEQ ID NO: 7974 - protein, 127 aa, Artificial Sequence
  Synthetic construct
EVQLLESGGALAQPGWSLRLSCAASGFTFRSQAMSWVRQAPGKGLEWVSSISGNGGSMSYTDSVKGRFTISRDNSKNTLYLQMNSLRAEDTAIYYCAKDELWVDLLSGYQWYYFDWWGQGTLVTVPS

SEQ ID NO: 7975 - protein, 122 aa, Artificial Sequence
  Synthetic construct
EVQLVESGGGLVKPGGSLRLSCAASGFTFSSYSMNWVRQAPGKGLEWVSSISSSSSYIYYADSVKGRFTISRDNAKNSLYLQMNSLRAEDTAVYYCARVGYSGSYAGAFDIWGQGTMVTVSS

SEQ ID NO: 7976 - protein, 122 aa, Artificial Sequence
  Synthetic construct
GVQLLESGGGLVRPGGSLRLSCEASGFPFSSYSLSWVRQAPGKGLEWVATISYTAGRSFYADSVQGRITISRDDSKDTLYLQMNRLRVEDTAMYFCTTMGGPAARWVGFDYWGQGTLVTVSP

SEQ ID NO: 7977 - protein, 126 aa, Artificial Sequence
  Synthetic construct
QVQLVQSGAEVKKPGSSVKVSCKASGGTFSSYAISWVRQAPGQGLEWMGRIIPILGIANYAQKFQGRVTITADKSTSTAYMELSSLRSEDTAVYYCARDLRRGGSSWQRPYGMDVWGQGTTVTVSS

SEQ ID NO: 7978 - protein, 120 aa, Artificial Sequence
  Synthetic construct
QLQLQESGPGLVKPSETLSLTCTVAGASTSSGSYYWGWIRQPPGKGLEWIATIYSSGSTYYNPSLKSRVTISVDTSKSQFSLKVSSVTAADTAVYFCARAGVVYGNFQNWGQGTLVTVSS

SEQ ID NO: 7979 - protein, 122 aa, Artificial Sequence
  Synthetic construct
EVQLVQSGAEVKKPGESLKISCKGSGYSFTSYWIGWVRQMPGKGLEWMGIIYPGDSDTRYSPSFQGQVTISADKSISTAYLQWSSLKASDTAMYYCARHRRYSSSWNWFDPWGQGTLVTVSS

SEQ ID NO: 7980 - protein, 125 aa, Artificial Sequence
  Synthetic construct
EVQLVESGGGLVQPGGSVRLSCAASGFTLDDYAMHWVRQAPGKGLEWVSSISWTSGSIEYADSVKGRFTISRDNAKNSLSLQMNSLRLEDTAFYFCAKDMGWGLRSSLPTGFDYWGPGTLVTVSA

SEQ ID NO: 7981 - protein, 126 aa, Artificial Sequence; identical to SEQ ID NO: 51
  Synthetic construct

SEQ ID NO: 7982 - protein, 126 aa, Artificial Sequence; identical to SEQ ID NO: 5543
  Synthetic construct

SEQ ID NO: 7983 - protein, 123 aa, Artificial Sequence
  Synthetic construct
QVHLVQSGAEVKKPGSSVKVSCKASGGTFSSHSISWVRQAPGQGLEWMGRIIPILNLANSAQKFQGRVTITADKSTSTAYMQLSSLGSEDTAVYYCARGAGVSTTDWSWFDPWGQGTLVTVSS

SEQ ID NO: 7984 - protein, 129 aa, Artificial Sequence
  Synthetic construct
QVQLVQSGAEVKKPGSSVKVSCKASGGTFSSYAISWVRQAPGQGLEWMGRIIPILGIANYAQKFQGRVTITADKSTSTAYMELSSLRSEDTAVYYCARERRTRGYSYGQPKYYYGMDVWGQGTTVTVSS

SEQ ID NO: 7985 - protein, 130 aa, Artificial Sequence
  Synthetic construct
QVQLQESGPGLVKPSETLSLTCNVSNGSISSYYWSWIRQSPGKGLEWIGHVHGSGTTNYNLSLKSRVVISRDTSKNQVSLKLKSVTAADTAIYYCARGAWGITVFGVLTPGDLNNWFDPWGQGTLVTVSS

SEQ ID NO: 7986 - protein, 127 aa, Artificial Sequence
  Synthetic construct
QVQLQESGPGLVKPSQTLSLTCTVSGGSISSGSYYWSWIRQPAGKGLEWIGRIYTSGSTNYNPSLKSRVTISVDTSKNQFSLKLSSVTAADTAVYYCARDWRFYGSGSYYPRWFDPWGQGTLVTVSS

SEQ ID NO: 7987 - protein, 121 aa, Artificial Sequence
  Synthetic construct
EVQLVESGGGLVQPGRSLRLSCAASGFNFDDYAMHWVRQVPGKGLEWVSCISWNSGSIAYADSVKGRFTISRDSAKKSLYMQMNSLRAEDTALYYCVKAGGSGWDWHFDLWGRGTLVTVSS

SEQ ID NO: 7988 - protein, 121 aa, Artificial Sequence
  Synthetic construct
HVQLEQSGTAVKKTGASVTISCVASGYTFPNYYIHWVRHVPAHGLEWMGIVDPKTDATTYSPKFQHRVTMAADMSTQTVYLQLHTLTLDDSGEYYCARGSRDSGALVIETWGPGTPITVSP

SEQ ID NO: 7989 - protein, 121 aa, Artificial Sequence
  Synthetic construct
QVQLVESGGGVVQPGRSLRLSCAASGFIFSTYAMHWVRQAPGKGLEWVAVISYDGSNQYYADSVKGRFTISRDNSKNMLYLQMNSLRAEDTAVYYCAKALLWLRGNWFDPWGQGTLVTVSS

SEQ ID NO: 7990 - protein, 123 aa, Artificial Sequence
  Synthetic construct
QVQLQESGPGLVKPSETLSLTCTVSGGSISSYYWSWIRQPPGKGLEWIGYIYYSGSTNYNPSLKSRVTISVDTSKNQFSLKLSSVTAADTAVYYCARVAYDILTGYEYYFDYWGQGTLVTVSS

SEQ ID NO: 7991 - protein, 121 aa, Artificial Sequence
  Synthetic construct
QVQLQESGPGLVKPSGTLSLTCTVSGGSLSTYYWSWLRQPPGKGLEWIGYSFHNGITNYNPSLKSRVTISVDSAKNQFSLKLSSMTAADTAVYYCARGGDYDSSAYAFDYWGQGTLVTVSS

SEQ ID NO: 7992 - protein, 132 aa, Artificial Sequence
  Synthetic construct
EVQLGESGGGLVKPGGSLRLSCAASGFTFSDYGMNWVRQAPGKGLEWVSLISSSSSYIYYADSVKGRFTISRDNAKNSLYLQMNSLRAEDTAVYYCARDDGYYYDSSAYRGGVYEYNGMDVWGQGTTVTVSS

SEQ ID NO: 7993 - protein, 127 aa, Artificial Sequence
  Synthetic construct
QLQLQESGPGLVKPSETLSLTCTVSGGSISSSSYYWGWIRQPPGKGLEWIGSIYYSGSTYYNPSLKSRVTISVDTSKNQFSLKLSSVTAADTAVYYCARHNAYYDSSGYYLYYFDYWGQGTLVTVSS

SEQ ID NO: 7994 - protein, 121 aa, Artificial Sequence
  Synthetic construct
QVQLQQWGAGLLKPSETLSLTCAVYGGSFSGYYWSWIRQPPGKGLEWIGEINHSGSTNYNPSLKSRVTISVDTSKNQFSLKLSSVTAADTAVYYCARGPGWGYRRRFMDVWGQGTTVTVSS

SEQ ID NO: 7995 - protein, 129 aa, Artificial Sequence
  Synthetic construct
QVQLQESGPGLVKPSQTLSLTCTVSGGSISSGSYYWSWIRQPAGKGLEWIGRIYTSGSTNYNPSLKSRVTISVDTSKNQFSLKLSSVTAADTAVYYCARDGRYRGSSSRYYYYYGMDVWGQGTTVTVSS

SEQ ID NO: 7996 - protein, 121 aa, Artificial Sequence
  Synthetic construct
QLQLQESGPGLVKPSETLSLICTVSGGSISSRSNHWGWIRQPPGKGLEWIGSIDYSGNTHYSPSLKSRVTISVDTSKNQFSLKVRSVTATDTAVYYCAVRATAAAPSVDYWGQGTLVTVSS

SEQ ID NO: 7997 - protein, 121 aa, Artificial Sequence; identical to SEQ ID NO: 6205
  Synthetic construct

SEQ ID NO: 7998 - protein, 124 aa, Artificial Sequence
  Synthetic construct
QVQLVESGGGVVQPGGSLRLSCAASGFTFSNYGMHWVRQAPGKGLEWVAGIWYDGSKRFYADSVKGRFTISRDKSKNTLYLQMNSLRAEDTAVFYCAKETEVVDTSMIYGMDVWGQGTMVTVSS

SEQ ID NO: 7999 - protein, 124 aa, Artificial Sequence; identical to SEQ ID NO: 6033
  Synthetic construct

SEQ ID NO: 8000 - protein, 132 aa, Artificial Sequence; identical to SEQ ID NO: 6435
  Synthetic construct

SEQ ID NO: 8001 - protein, 122 aa, Artificial Sequence
  Synthetic construct
EVQLVESGGGLVKPGGSLRLSCAASGFTFSSYSMNWVRQAPGKGLEWVSSISSSSSYIYYADSVKGRFTISRDNAKNSLYLQMNSLRAEDTAVYYCARESGHYDSSGYYDYWGQGTLVTVSS

SEQ ID NO: 8002 - protein, 116 aa, Artificial Sequence
  Synthetic construct
QVQLRESGPGLVKPSDTLSLTCSVSGGSMINHYWSWIRQPPGKGLEWIGFIHSGGATNYNPSLKSRVTISIDTSNSQFSLKLKYVSSADTAVYYCAREPGAAPDFWGQGTLVTVSS

SEQ ID NO: 8003 - protein, 123 aa, Artificial Sequence
  Synthetic construct
EVQLVESGGGLVQPGGSLRLSCAASGFTFSSYWMSWVRQAPGKGLEWVANIKQDGSEKYYVDSVKGRFTISRDNAKNSLYLQMNSLRAEDTAVYYCARDTPYYYDSSGYYSDWGQGTLVTVSS

SEQ ID NO: 8004 - protein, 124 aa, Artificial Sequence; identical to SEQ ID NO: 6033
  Synthetic construct

SEQ ID NO: 8005 - protein, 123 aa, Artificial Sequence
  Synthetic construct
EVQLLESGGGLVQPGGSLRLSCAASGFTFSSYAMSWVRQAPGKGLEWVSAISGSGGSTYYADSVKGRFTISRDNSKNTLYLQMNSLRAEDTAVYYCAKDIVVVVAARGYFDYWGQGTLVTVSS

SEQ ID NO: 8006 - protein, 121 aa, Artificial Sequence
  Synthetic construct
QVQLQESGPGLVKPSQTLSLTCTVSGGSVSSGSYYWSWIRQPAGKGLEWIGRIDSSGTTNHNPSLKSRVTMSVDTSKNQFSLNLSSVTAADTAVYYCAGALIVATTRFDYWGQGTPVTVSS

SEQ ID NO: 8007 - protein, 130 aa, Artificial Sequence; identical to SEQ ID NO: 7083
  Synthetic construct

SEQ ID NO: 8008 - protein, 122 aa, Artificial Sequence
  Synthetic construct
QVQLVQSGAEVKKPGSAVRVSCKASGGTFSSDIISWVRQAPGQGLEWMGRIIPYLGKTNYARTFEGRVTITADKSTSTAYMELNSLKSEDTAVYYCTRSAPGGDTVFRFDPWGQGTMVTVSS

SEQ ID NO: 8009 - protein, 121 aa, Artificial Sequence
  Synthetic construct
QVQLQESGPGLVKPSQTLSLTCTVSDDSINSRHYLWTWVRQPAGKGLEWVGRIYSSGQTDYNPSLKSRITMSVDTSRNQFSLRLTSVTAADTAVYYCARENSDYYYGMDVWGQGTTVTVSS

SEQ ID NO: 8010 - protein, 127 aa, Artificial Sequence
  Synthetic construct
EVQLVESGGGLVQPGGSLRLSCAASGFTFSSYDMHWVRQATGKGLEWVSAIGTAGDTYYPGSVKGRFTISRENAKNSLYLQMNSLRAGDTAVYYCARGLPRVGSYSRQRANWYFDLWGRGTLVTVSS

SEQ ID NO: 8011 - protein, 125 aa, Artificial Sequence
  Synthetic construct
EVQLVESGGGLVQPGGSLRLSCAASGFTFSSYWMHWVRQAPGKGLVWVSRINSDGSSTSYADSVKGRFTISRDNAKNTLYLQMNSLRAEDTAVYYCARAYRNYYGSGSLNTYYYWGQGTLVTVSS

SEQ ID NO: 8012 - protein, 123 aa, Artificial Sequence
  Synthetic construct
EVQLVESGGGLVQPGGSLRLSCSVSGLTYIRYPMHWVRQAPGRGLEYVSAISSYGDSTYYADSVKGRFTISRDNSKNTLYLQMSSLRVEDTAVYRCVRDLGWRSIAADGGDSWGQGTLVTVSS

SEQ ID NO: 8013 - protein, 131 aa, Artificial Sequence
  Synthetic construct
QVQLQQWGAGLLKPSETLSLTCAVYGGSFSGYYWSWIRQPPGKGLEWIGEINHSGSTNYNPSLKSRVTISVDTSKNQFSLKLSSVTAADTAVYYCARPTYYYDSSGHKRGPRRNLRAFDIWGQGTMVTVSS

SEQ ID NO: 8014 - protein, 121 aa, Artificial Sequence
  Synthetic construct
EVQLVESGGGLVKPGGSLRLSCAASGFTFSTYTMNWVRQAPGKGLEWVSSISASSSYIYYADSMKGRITVSRDNAKNSLYLQMNSLGVEDTALYFCARHVSGSSISPLGYWGRGTLVTVSS

SEQ ID NO: 8015 - protein, 123 aa, Artificial Sequence; identical to SEQ ID NO: 5437
  Synthetic construct

SEQ ID NO: 8016 - protein, 121 aa, Artificial Sequence
  Synthetic construct
QVQLVQSGTEVKQPGASVKVSCKASGFPFIGYYMHWVRQAPGQGLEWMGWINPKSGGTSSARKFRGRITMTRDTSTSTAYMELSRLRSDDTAVYYCARISRDSGSPWFDYWGQGALVIVSS

SEQ ID NO: 8017 - protein, 128 aa, Artificial Sequence
  Synthetic construct
EVQLLESGGGLVQPGTSLRLSCAASGFTFTSYAMNWVRQAPGKGLEWVSGISFSDGSTYYADSVKGRFTIYRDNSKNTLYLQMNSLRPEDTAVYYCAKESPLVIGADGSASLVNMNVWGQGTTVTVSS

SEQ ID NO: 8018 - protein, 122 aa, Artificial Sequence
  Synthetic construct
QVQLVESGGGVVQPGRSLRLSCAASGFTFSSYGMHWVRQAPGKGLEWVAVISYDGSNKYYADSVKGRFTISRDNSKNTLYLQMNSLRAEDTAVYYCAKVAYSSSWHYYFDYWGQGTLVTVSS

SEQ ID NO: 8019 - protein, 133 aa, Artificial Sequence
  Synthetic construct
QVQLVESGGGVVQPGRSLRLSCAASGFTFSSYGMHWVRQAPGKGLEWVAVIWYDGSNKYYADSVKGRFTISRDNSKNTLYLQMNSLRAEDTAVYYCARGDTAYCSSTSCSIPSDYYYYGMDVWGQGTTVTVSS

SEQ ID NO: 8020 - protein, 119 aa, Artificial Sequence
  Synthetic construct
LVQLVQSGAEVKKPGASVKVSCKASGYTFTGYYMHWVRQAPGQGLEWMGWINPNSGVTNYAQNFQGRVTMTRDTSISTAYMELSRLRSDDTAVYYCVPTNSWAYYFDYWGQGTLVTVSS

SEQ ID NO: 8021 - protein, 124 aa, Artificial Sequence
  Synthetic construct
QVQLVQSGAEVKKPGASVKVSCKASGYTFTDYYIHWVRQAPGQGLEWLGWINPNTGATNYAQSFLGRVTMTSDTSISTAHMDLRGLRSDDAALYYCAREADIIVATTNDAFDIWGQGTKVTVSS

SEQ ID NO: 8022 - protein, 133 aa, Artificial Sequence
  Synthetic construct
QVQLVQSGAEVKKPGASVRVSCKASGYTLTGHGISWVRQRPGLGLEWMGWASSYNDNANIAQKFQGRVIMSTDTSTGTVYMELSSLKSDDAAIYYCARDVAYSSSWDGLIPLVITSTIPFDVWGQGTVVTVSS

SEQ ID NO: 8023 - protein, 121 aa, Artificial Sequence
  Synthetic construct
EVQLLESGGGLVQPGGSLRLSCAASGFTFSSYAMSWVRQAPGKGLEWVSAISGSGGSTYYADSVKGRFTISRDNSKNTLYLQMNSLRAEDTAVYYCACDPPRRGWLPFDYWGQGTLVTVSS

SEQ ID NO: 8024 - protein, 127 aa, Artificial Sequence
  Synthetic construct
EVQLVESGGGLVKPGGSLRLSCAASGFTFSSYSMNWVRQAPGKGLEWVSSISSSSSYIYYADSVKGRFTISRDNAKNSLYLQMNSLRAEDTAVYYCARVPEKYYYGSGSYYPLMDVWGQGTTVTVSS

SEQ ID NO: 8025 - protein, 121 aa, Artificial Sequence
  Synthetic construct
QVQLQESGPGLVKPSQTLSLTCTVSDDSINSRRYLWTWIRQPAGKGLEWIGRIYSSGNTDYNPSLKTRVTMSVDTAKNHFSLRLSSVTAADTAIYYCARENSDYYYGMDVWGQGTTVTVSS

SEQ ID NO: 8026 - protein, 127 aa, Artificial Sequence
  Synthetic construct
QVQLEQSGAEVKKPGSSVKVSCKVSGGSFSTHAISWVRQAPGQRPEWMGGIMPIFGESKDTQKFEGRVTFTVDEFTNTAYMELRSLKSEDTAVYYCVRDPEPYTATVRYNHYWHGMDVWGPGTTVTV

SEQ ID NO: 8027 - protein, 115 aa, Artificial Sequence
  Synthetic construct
QVQLVESGGGVVQPGRSLRLSCAGSGFTFSSYDMHWVRQAPGKGLEWVAVKSYDGNNKDYADSVKGRFTISRDNSKNTLYLQMNSLRAEDTAVYYCARGRSMDVWGQGSTVTVSS

SEQ ID NO: 8028 - protein, 121 aa, Artificial Sequence
  Synthetic construct
QVQLQESGPGLVKSSETLSLTCTVSGGSMSTYYWSWIRQPPGKGLEWLGNIYYSGSTNYNPSLKSRVTISVDTSKNQFSLKLSSVTAADTAVYYCARDGLARRWYNWFDPWGQGTLVTVSS

SEQ ID NO: 8029 - protein, 124 aa, Artificial Sequence; identical to SEQ ID NO: 5439
  Synthetic construct

SEQ ID NO: 8030 - protein, 119 aa, Artificial Sequence
  Synthetic construct
QVQLVQSGAEVKKPGASVKVSCKASGYTFTSYAMHWVRQAPGQRLEWMGWINAGNGNTKYSQKFQGRVTITRDTSASTAYMELSSLRSEDTAVYYCARCVVVVGLTDYWGQGTLVTVSS

SEQ ID NO: 8031 - protein, 121 aa, Artificial Sequence
  Synthetic construct
QVQLQESGPGLVKPSQTLSLTCTVSGGSISSGSYYWSWIRQPAGKGLEWIGRIYTSGSTNYNPSLKSRVTISVDTSKNQFSLKLSSVTAADTAVYYCARALRGSSGYLGYWGQGTLVTVSS

SEQ ID NO: 8032 - protein, 125 aa, Artificial Sequence
  Synthetic construct
EVQLVESGGGLVQPGGSLRLSCTTSGFTFSETWMAWVRQAPGKGLEWVANINNDGWTDHYVDSVQGRFTISRDNAKSSLYLQMNSLRAEDTAVYYCARDGTLTFNSRSYDALDIWGQGTMVTVSS

SEQ ID NO: 8033 - protein, 123 aa, Artificial Sequence
  Synthetic construct
EVQLVESGGGLVQPGGSLRLSCAASGFTFSSYSMNWVRQAPGKGLEWVSYISSSSSTIYYADSVKGRFTISRDNAKNSLYLQMNSLRDEDTAVYYCARDMSGSYYYYYGMDVWGQGTTVTVSS

SEQ ID NO: 8034 - protein, 121 aa, Artificial Sequence; identical to SEQ ID NO: 7132
  Synthetic construct

SEQ ID NO: 8035 - protein, 119 aa, Artificial Sequence
  Synthetic construct
EVQLVESGGDLVQPGGSLRLTCEASGITFKSYSMNWVRQAPGKGLEWVSYIGTNHNLIYYSDSVKGRFTISRDNDKRSLFLHMNSLRDEDTAVYYCVVSVEWLLSPDYWGQGILVTVSS

SEQ ID NO: 8036 - protein, 120 aa, Artificial Sequence
  Synthetic construct
EVLLVESGGALVQPGGSLTLSCSASGFAFSNYAMHWIRLAPGRVLEHVSTISSNSDGTYYADSVKGRFTIYRDNSKYTVYLQMNSLSPADTGIYYCAKDTRRWGNWFDPWGPGTQVIVSS

SEQ ID NO: 8037 - protein, 117 aa, Artificial Sequence
  Synthetic construct
QVQLVESGGGVVQPGRSVRLSCVGSGFTFSEPGMHWVRQAPGKGLEWVAVISNDGSDKQYGDAVRGRFTISRDNSRNTVYLQLSNLRPEDTAVYYCATQSRGSLDHWGQGTLVTVSS

SEQ ID NO: 8038 - protein, 124 aa, Artificial Sequence
  Synthetic construct
EVQLVESGGGLVQPGGSLKLSCAASGFTFSGSAMHWVRQASGKGLEWVGRIRSKANSYATAYAASVKGRFTISRDDSKNTAYLQMNSLKTEDTAVYYCTRRLDYGDSRNGMDVWGQGTTVTVSS

SEQ ID NO: 8039 - protein, 125 aa, Artificial Sequence; identical to SEQ ID NO: 5711
  Synthetic construct

SEQ ID NO: 8040 - protein, 120 aa, Artificial Sequence; identical to SEQ ID NO: 7106
  Synthetic construct

SEQ ID NO: 8041 - protein, 117 aa, Artificial Sequence
  Synthetic construct
EVHLVQSGAEVKKPGATVKISCKVSGYTFTDYYMQWVRQAPGKGLEWMGLIDPEDGDTIYAERFQDRFTITADASTDTAYLDLRSLRYEDTAVYYCSTGRNSNFEFWGQGTLVTVSS

SEQ ID NO: 8042 - protein, 128 aa, Artificial Sequence
  Synthetic construct
QVQLVQSGAEVKKPGASVKVSCKASGYTFTSYGISWVRQAPGQGLEWMGWISAYNGNTNYAQKLQGRVTMTTDTSTSTAYMELRSLRSDDTAVYYCAAGGFYSSGWFNPYYYYGMDVWGQGTTVTVSS

SEQ ID NO: 8043 - protein, 126 aa, Artificial Sequence
  Synthetic construct
EVQLVQSGAEVKKPGESLKISCKASGYNFATYWIGWVRQMPGKGLEWMGIIHPGDPDTRYSPSFHGQVTISVDKSISTAYLQWRSLKASDTAMYYCARPGYYDSTSYSIVDAFDVWGQGTMVTVSS

SEQ ID NO: 8044 - protein, 121 aa, Artificial Sequence
  Synthetic construct
QVQLQESGPGLVKPSQTLSLTCSVSGGSVSSDNYYWSWIRQPAGKGLEWIGRIYSSGTTGYNPALKSRVTISLDTSKNQFSLQLSAVTVADTAVYYCAKDHNWNDWFFDLWGRGTLVTVSS

SEQ ID NO: 8045 - protein, 124 aa, Artificial Sequence; identical to SEQ ID NO: 7845
  Synthetic construct

SEQ ID NO: 8046 - protein, 133 aa, Artificial Sequence; identical to SEQ ID NO: 6919
  Synthetic construct

SEQ ID NO: 8047 - protein, 121 aa, Artificial Sequence
  Synthetic construct
EVQLVESGGDLVQPGGSLRLSCAASGFASSSYWMSWVRQAPGKGLEWVATIKLDGSERYYVASVEGRFTLSRDNAKNSLYLQMNSLRPEDTAVYYCAREGIPVGYRVLDIWGQGTMVTVSS

SEQ ID NO: 8048 - protein, 128 aa, Artificial Sequence
  Synthetic construct
QVRLQESGPELVKPSGTLSLTCAVSGGSISSSNWWSWVRQPPGKGLEWIGEISHSGTTNYNPSLKGRVTISVDRSKNQFSLKLTSVTAADTAVYFCARDSPAQYYYDNSGDSDALDIWGQGTMVTVSS

SEQ ID NO: 8049 - protein, 127 aa, Artificial Sequence; identical to SEQ ID NO: 6185
  Synthetic construct

SEQ ID NO: 8050 - protein, 120 aa, Artificial Sequence
  Synthetic construct
EVQLVESGGGLVQPGGSLRLSCAASGFTFSSYWMHWVRQVPGKGLVWVSRINSDGSTTRYADYVKGRFTISRDNAKNTLYLQMNSLRAEDTALYYCARVGAVAGRAFDIWGQGTMVTVSS

SEQ ID NO: 8051 - protein, 119 aa, Artificial Sequence; identical to SEQ ID NO: 7741
  Synthetic construct

SEQ ID NO: 8052 - protein, 123 aa, Artificial Sequence; identical to SEQ ID NO: 5978
  Synthetic construct

SEQ ID NO: 8053 - protein, 121 aa, Artificial Sequence
  Synthetic construct
EVQLVESGGGLVKPGGSLRLSCAASGFSFRSYSMNWVRQAPGKGLEWVSLISSSSTYMYYADSVKGRFTISRDNAKNSLYLQMNSLRAEDTAFYYCAKTYYYDSSALFDYWGQGTLVTVSS

SEQ ID NO: 8054 - protein, 120 aa, Artificial Sequence; identical to SEQ ID NO: 7562
  Synthetic construct

SEQ ID NO: 8055 - protein, 120 aa, Artificial Sequence
  Synthetic construct
EVQLLESGGGLVQPGGSLRLSCAASGFTFSSYAMNWVRQAPGKGLEWVSMIRDSGGTTYYPNSVKGRFTISRDNSKNMLYLQMNSLRAEDTAVYFCAKAVDSTTLSVGYWGQGTLVTVSS

SEQ ID NO: 8056 - protein, 123 aa, Artificial Sequence
  Synthetic construct
EVHLVESGGDLVQPGGSLRLSCGASGFTFSRYWMHWVRQAPGKGPVWVSRIDSDGTTTTYADSVKGRFTSSRDNSKNTLYLQMSSLRPEDTAVYYCARSSPPDYDGAGAIDSWGQGTLVTVSS

SEQ ID NO: 8057 - protein, 123 aa, Artificial Sequence
  Synthetic construct
QVQLVESGGGVVQPGRSLRLSCAASGFTFSTYGMHWARQAPGKGLEWVAGVSYDGSDKYHAESVKGRFTISRDNSKNTLYLQMNSLRVDDTAVYYCARKGRYCNSVSCPLDFWGQGTLVTVSS

SEQ ID NO: 8058 - protein, 127 aa, Artificial Sequence
  Synthetic construct
EVQLVESGGGLVKPGGSLRLSCAASGFTFSNAWMSWVRQAPGKGLEWVGRIKSKTDGGTTDYAAPVKGRFTISRDDSKNTLYLQMNSLKTEDTAVYYCTTDPDYDFWSGYYYPLDYWGQGTLVTVSS

SEQ ID NO: 8059 - protein, 120 aa, Artificial Sequence
  Synthetic construct
EVQLVESGGGLVKPGGSLRLSCAASGFTFSSYSMNWVRQAPGKGLEWVSSISSSSSYIYYADSVKGRFTISRDNAKNSLYLQMNSLRAEDTAVYYCARASRGIAAPGDYWGQGTLVTVSS

SEQ ID NO: 8060 - protein, 121 aa, Artificial Sequence
  Synthetic construct
QVQLQESGPGLVKPSETLSLTCTVSSGSISYYYWSWIRQPPGKGLEWIGYAYNSGTTNFNPSLKSRVTISVDTSKNQFSLKLSSVTAADTAVYYCARGGVYGSRLGWFDPWGQGTQVTVSS

SEQ ID NO: 8061 - protein, 122 aa, Artificial Sequence
  Synthetic construct
EVQLLESGGGLVQPGGSLRLSCAASGFTFSSYAMSWVRQAPGKGLEWVSAISGSGGSTYYADSVKGRFTISRDNSKNTLYLQMNSLRAEDTAVYYCAKAVTRGSSGWYRNYWGQGTLVTVSS

SEQ ID NO: 8062 - protein, 125 aa, Artificial Sequence; identical to SEQ ID NO: 52
  Synthetic construct

SEQ ID NO: 8063 - protein, 121 aa, Artificial Sequence; identical to SEQ ID NO: 53
  Synthetic construct

SEQ ID NO: 8064 - protein, 124 aa, Artificial Sequence; identical to SEQ ID NO: 54
  Synthetic construct

SEQ ID NO: 8065 - protein, 107 aa, Artificial Sequence
  Synthetic construct
DIQMTQSPSSLSASVGDRVTITCRASRSITSYINWYQQKPGKAPKLLIYAASTLQSGVPSRFSGSGSGTDFTLTISSLQPEDFATYYCQRSFSTPWTFGPGTKVEIK

SEQ ID NO: 8066 - protein, 105 aa, Artificial Sequence
  Synthetic construct
EIVLTQSPGTLSLSPGERATLSCRASQSVSSSYLAWYQQKPGQAPRLLIYGASSRATGIPDRFSGSGSGTDFTLTISRLEPEDFAVYYCQQYGRTFGGGTKVEIK

SEQ ID NO: 8067 - protein, 110 aa, Artificial Sequence
  Synthetic construct
QSALTQPASVSGSPGQSITISCTGTSSDVGTYNLVSWYQQNPGKAPKLIISEVNKRPSGVSNRFSGSKSGNTASLTISGLQAEDEADYYCCSYARGSIFVFGPGTKVTVL

SEQ ID NO: 8068 - protein, 113 aa, Artificial Sequence
  Synthetic construct
EIVMTQSPLFLAVTPGEPASITCRSSQSLSEPGGRHIFLDWYLQKPGQSPQLLIYTLSYRAPGVPDRFSGSGSDTAFTLHISRVEADDVGVYFCMQRLEFPLIFGGGTQLEIK

SEQ ID NO: 8069 - protein, 106 aa, Artificial Sequence
  Synthetic construct
SYELTQPPSVSVSPGQTASITCSGDKLGDKYACWYQQKPGQSPVLVIYQDSKRPSGIPERFSGSNSGNTATLTISGTQAMDEADYYCQAWDSSTAVFGTGTKVTVL

SEQ ID NO: 8070 - protein, 107 aa, Artificial Sequence
  Synthetic construct
DIKMTQSPSSLSASVGDRVTITCRASESVNSFLNWYQQKPGKAPKLLIYAASLSLGGVPSRFSGNESATGFTLTISSLQPDDFATYFCQQAYIAPLTFGGGTKVEMK

SEQ ID NO: 8071 - protein, 108 aa, Artificial Sequence
  Synthetic construct
SYELTQPPSVSVSPGQTARITCSGDVLAKQHAYWYQQKPGQAPLLVIYKDTERPSGIPERFSGSSSGTAVTLTISGVQAEDEADYYCHSAGSSATDVLFGGGTKLTVL

SEQ ID NO: 8072 - protein, 108 aa, Artificial Sequence
  Synthetic construct
AIQLTQSPSSLSASVGDRVTITCRASQDISSALVWYQQKPGKTPKVLIYDASSLEIGVPSRFSGSGSGTHFTLTISSLQPEDFATYYCQQFSNYPALTFGGGTKVEFK

SEQ ID NO: 8073 - protein, 111 aa, Artificial Sequence
  Synthetic construct
QSVLTQPPSVSAAPGQKVTISCSGSSSNIGNNFVSWYQQLPGTAPKLLIYDNNKRPSGIPDRFSGSKSGTSATLGITGLQTGDEADYYCGTWDSSLSVYVVFGGGTKLTVL

SEQ ID NO: 8074 - protein, 107 aa, Artificial Sequence
  Synthetic construct
AIRITQSPSSLSASTGDRVTITCRASQGISSYLAWYQQKPGKAPKLLIYAASTLQSGVPSRFSGSGSGTDFTLTISCLQSEDFATYYCQQYYSYPFTFGPGTKVDIK

SEQ ID NO: 8075 - protein, 110 aa, Artificial Sequence
  Synthetic construct
QSVLTQPPSVSAAPGQKVTISCSGSSSNIGNNYVSWYQQLPGTAPKLLIYDNNKRPSGIPDRFSGSKSGTSATLGITGLQTGDEADYYCGTWDSSLSAWVFGGGTKLTVL

SEQ ID NO: 8076 - protein, 110 aa, Artificial Sequence
  Synthetic construct
QSVLTQPPSVSAAPGQKVTISCSGSTSNIRNNYVSWYQLLPGTAPRLLIYDNYKRPSGIPDRFSASKSGSSATLGITGLQTGDEADYYCGTWDYSLSAVVFGGGTKLTVL

SEQ ID NO: 8077 - protein, 108 aa, Artificial Sequence
  Synthetic construct
SYVLTQTPSMSVAPGQTASITCGGVNIVNKAVHWYQQRPGQAPLLVIYYDRERPSGIPDRFTGSNSGNTASLTIRRVEAGDEADYFCQVWEINTHQVFFGGGTRLTVL

SEQ ID NO: 8078 - protein, 110 aa, Artificial Sequence
  Synthetic construct
QSALTQPRSVSGSPGQSVTISCTGTSSDVGGYNYVSWYQQHPGKAPKLMIYDVSKRPSGVPDRFSGSKSGNTASLTISGLQAEDEADYYCCSYAGSYTWVFGGGTKLTVL

SEQ ID NO: 8079 - protein, 110 aa, Artificial Sequence
  Synthetic construct
QSVLTQPPSVSAAPGQKVTISCSGSSSNIGNNYVSWYQQLPGTAPKLLIYDNNKRPSGIPDRFSGSKSGTSATLGITGLQTGDEADYYCGTWDSSLSALVFGGGTKLTVL

SEQ ID NO: 8080 - protein, 107 aa, Artificial Sequence
  Synthetic construct
DIQMTQSPSSLSASIGDRVSFTCRASRAISNYLAWYQLRPGKEPRLLIYGGSTLQSGVPSRFSASGSGTDFTLTISSLQPEDVATYYCQKYASASPSFGPGTKVDIK

SEQ ID NO: 8081 - protein, 114 aa, Artificial Sequence
  Synthetic construct
DIVMTQSPLSLPVTPGEPASISCRSSQSLLDRNGHNYLDWYLQKPGQSPQLLIYLGSNRASGVPDRFSGSGSGTEFTLKISRVEAEDVGVYYCMQALQTPRAWTFGQGTKVEIK

SEQ ID NO: 8082 - protein, 107 aa, Artificial Sequence
  Synthetic construct
EIVMTQSPATLSVSPGERATLSCRASQSVSSNLAWYQQKPGQAPRLLIYGASTRATGIPARFSGSGSGTEFTLTISSLQSEDFAVYYCQQYNNWPTLFGQGTKVEIK

SEQ ID NO: 8083 - protein, 106 aa, Artificial Sequence
  Synthetic construct
ETVLTQSPVIVSLSPGESATLSCRASQSIGTYVAWYQQKPGQPLRLLIYGASNRATGIPARFSGRGSGTDFLLTISSLEPEDAAVYYCQQRANWPTFGQGTRVEIK

SEQ ID NO: 8084 - protein, 110 aa, Artificial Sequence
  Synthetic construct
NFMLTQPHSVSESPGKTVTISCTRSSGSIASIYVQWHQQRPGSAPTTVIFEDNRRPSGVPDRFSGSIDSSSNSASLTISGLKTEDEADYYCQSYDSNKVVFGGGTKLTVL

SEQ ID NO: 8085 - protein, 111 aa, Artificial Sequence
  Synthetic construct
QTVVTQEPSLTVSPGGTVTLTCVSSTGAVTSGFYANWFQQKPGQAPRPLIYATSKKHSWTPARFSGSLLEGKAALTLSGVQPEDEAEYYCLLYFGLPQPWVFGGGTKLTVL

SEQ ID NO: 8086 - protein, 113 aa, Artificial Sequence
  Synthetic construct
DIVMTQSPDSLAVSLGERATINCKSSQSVLYSSNNKNYLAWYQQKPGQPPKLLIYWASTRESGVPDRFSGSGSGTDFTLTISSLQAEDVAVYYCQQYYSTPYTFGQGTKLEIK

SEQ ID NO: 8087 - protein, 111 aa, Artificial Sequence
  Synthetic construct
QSALTQPASVSGSPGQSITISCTGTTSDVGGYNLVSWYQQHPGKAPKLIIYEGSKRPSGVSNRFSGSKSGITASLTISGLQAEDEADYYCCSYSGSRTSVIFGGGTKLTVL

SEQ ID NO: 8088 - protein, 107 aa, Artificial Sequence
  Synthetic construct
ESVLTQSPATLSLSPGERATLSCRASQSVSSYLAWYQQKPGQAPRLLIYDASNRATGIPARFSGSGSGTDFTLTISSLEPEDFAVYYCQQRSNWPLTFGQGTRLEIK

SEQ ID NO: 8089 - protein, 111 aa, Artificial Sequence
  Synthetic construct
QSVLTQPPSVSGAPGQRVTISCTGSSSNIGAGYDVHWYRLLPGTAPKLLIYGNKNRPAGVPHRFSGSKSGTSASLAITGLQAEDEADYYCQAFDSSLSEYVFGTGTKVTVL

SEQ ID NO: 8090 - protein, 107 aa, Artificial Sequence
  Synthetic construct
DMQMTQSPSSLSASVGDRVTVTCRTSQNIGTYLNWYQQKPGKAPKFLIHAASSLQSGVPSRFSGSGSGTDFTLTISGLQPEDVATYYCQQSYSTPPTFGGGTKVEIK

SEQ ID NO: 8091 - protein, 107 aa, Artificial Sequence
  Synthetic construct
DIQMTQSPSSLSASVGDRVTITCRASRGINNYLNWYQQKSGKAPKLLIYAASTLQSGVPSRFSGSGSGTDFTLTINTLQPEDFATYYCQQSYNTPRTFGQGTKVDIK

SEQ ID NO: 8092 - protein, 105 aa, Artificial Sequence
  Synthetic construct
SYELTQPPSVSVSPGQTASITCSGDKLGDKYACWYQQKPGQSPVLVIYQDSKRPSGIPERFSGSNSGNTATLTISGTQAMDEADYYCQAWDSSVVFGGGTKLTVL

SEQ ID NO: 8093 - protein, 107 aa, Artificial Sequence
  Synthetic construct
AIRITQSPSSLSASTGDRVTITCRASQGISSYLAWYQQKPGKAPKLLIYAASTLQSGVPSRFSGSGSGTDFTLTISCLQSEDFATYYCQQYYSYPLTFGGGTKVEIK

SEQ ID NO: 8094 - protein, 109 aa, Artificial Sequence
  Synthetic construct
EIVLTQSPGTLSLSPGERGTLSCRASQSVGISRIAWYQQRPGQPPRLLIYDVSTRAPGTPDRFSGSGSGTEFTLIISRLEPEDCAVYWCQQFGFSSPTTFGGGTKVEIK

SEQ ID NO: 8095 - protein, 113 aa, Artificial Sequence
  Synthetic construct
DIVMTQSPDSLAVSLGERATINCKSSQSVLYSSNNKNYLAWYQQKPGQPPKLLIYWASTRESGVPDRFSGSGSGTDFTLTISSLQAEDVAVYYCQQYYSTPPTFGQGTKVEIK

SEQ ID NO: 8096 - protein, 107 aa, Artificial Sequence
  Synthetic construct
DIQMTQSPSSLSASIGDRVTITCRASQTVSSYLNWYQQKPGKAPKLLIYTTSNLQSGVPSRFSGSGSATDFTLTITSLQPEDFATYYCQQSYTTPYTFGQGTKLDIK

SEQ ID NO: 8097 - protein, 107 aa, Artificial Sequence
  Synthetic construct
EIVMTQSPATLSVSPGERATLSCRASQNVNSNLAWHQQKPGQAPRLLIYGASIRATGIPVRFSGSGSGTDFTLTISSLQSEDFAVYYCQQYDNWPRTFGQGTKVEIK

SEQ ID NO: 8098 - protein, 109 aa, Artificial Sequence
  Synthetic construct
EIVLTQSPGTLSLSPGERATLSCRASQSVSSTYLAWYQQKPGQAPRLLIYGTSKRATGIPDRFSGSGSGTDFTLAISRLEPEDFAVYYCQQYGSSPPWTFGQGTKVEIK

SEQ ID NO: 8099 - protein, 108 aa, Artificial Sequence
  Synthetic construct
EIVMTQSPATLSVSPGERATLSCRASQSVSSNLAWYQQKPGQAPRLLIYGASTRATGIPARFSGSGSGTEFTLTISSLQSEDFAVYYCQQYNNWPPWTFGQGTKVEIK

SEQ ID NO: 8100 - protein, 106 aa, Artificial Sequence
  Synthetic construct
DIQMTQSPSTLSASVGDRVTITCRASQSISSWLAWYQQKPGKAPKLLIYKASSLESGVPSRFSGSGSGTEFTLTISSLQPDDFATYYCQQYNSYRTFGQGTKVEIK

SEQ ID NO: 8101 - protein, 107 aa, Artificial Sequence
  Synthetic construct
DIQMTQSPSTLSASVGDRVTITCRASQSISSWLAWYQQKSGRAPKLLIYKASNLESGVPSRFSGSGSGTEFSLTISSLQPDDFATYYCQHYNTFPLTFGGGTKVEIK

SEQ ID NO: 8102 - protein, 110 aa, Artificial Sequence
  Synthetic construct
QAGLTQPPSVSKDLGQTATLTCTGSSSNVGNQGAAWLQQHQGHPPKLLSYRNNSRPSGISERFSPSRSGNTASLTITGLQPADEADYYCSAWDNNLEAYVFGPGTKVTVL

SEQ ID NO: 8103 - protein, 111 aa, Artificial Sequence
  Synthetic construct
QSVLTQPPSVSGAPGQRVTISCTWSSSNIGAVYGVHWYQQLPGTAPKLLIYDNVNRPSGVPDRFSASKSGTSASLAITGLQAEDEADYYCQSHDSSLNIYVFGSGTKVTVL

SEQ ID NO: 8104 - protein, 109 aa, Artificial Sequence
  Synthetic construct
DIVLTQSPGTLSLSPGERVTLSCRASQSVYSNYLAWYQQKPGQAPRLLIYGASSRATGIPDRFSGSGSGTDFTLTISRLEPEDFAVYYCQQYGSSLSYTFGQGTKLEIK

SEQ ID NO: 8105 - protein, 108 aa, Artificial Sequence
  Synthetic construct
AIRMTQSPSSFSASTGDRVTITCRASQGISSYLAWYQQKPGKAPKLLIYAASTLQSGVPSRFSGSGSGTDFTLTISCLQSEDFATYYCQQYYSYPLLTFGGGTKVEIK

SEQ ID NO: 8106 - protein, 108 aa, Artificial Sequence
  Synthetic construct
DIQMTQSPSTLSASVGDRVTITCRASQSISSWLAWYQQKPGKAPKLLIYKASSLESGVPSRFSGSGSGTEFTLTISSLQPDDFATYYCQQYNSYSPWTFGQGTKVEIK

SEQ ID NO: 8107 - protein, 109 aa, Artificial Sequence
  Synthetic construct
EIVLTQSPGTLSLSPGERATLSCRASQSVSSSYLAWYQQKPGQAPRLLIYGAFSRATGIPDRFSGSGSGTDFTLTISRLEPEDFAVYYCQQYGSSPPYTFGQGTKLEIK

SEQ ID NO: 8108 - protein, 112 aa, Artificial Sequence
  Synthetic construct
DIVMTQSPLSLPVTPGEPASISCRSSQSLLHSSGYNYLDWYLQKPGQSPQLLIYLGSYRASGVPDRFSGSGSGTDFTLKISRVEADDVGVYYCMQALQTPWTFGQGTKVEIK

SEQ ID NO: 8109 - protein, 106 aa, Artificial Sequence
  Synthetic construct
AIQLTQSPSSLSASVGDRVTITCRASQGISSYLAWYQQKPGKAPKLLIYAASTLQSGVPSRFSGSGSGTDFTLTISSLQPEDFATYYCQQLNSYPLFGGGTKVEIK

SEQ ID NO: 8110 - protein, 107 aa, Artificial Sequence
  Synthetic construct
DIQMTQSPSSVSASVGDRVTITCRASQGISSWLAWYQQKPGKAPKLLIYAASSLQSGVPSRFSGSGSGTDFTLTISSLQPEDFATYYCQQANSFPLTFGGGTKVEIK

SEQ ID NO: 8111 - protein, 107 aa, Artificial Sequence
  Synthetic construct
DIQMTQSPSTLSASVGDRVTITCRASQSISNWVAWYQQKPGKAPKLLIYQASRLESGVPSRFSGSGSGTEFTLAISSLQPDDFATYYCQQYISYVLTFGGGTKVEIK

SEQ ID NO: 8112 - protein, 107 aa, Artificial Sequence; identical to SEQ ID NO: 8091
  Synthetic construct

SEQ ID NO: 8113 - protein, 108 aa, Artificial Sequence
  Synthetic construct
EIVLTQSPATLSLSPGERATLSCRASQSVSSYLAWYQHKPGQAPRLLIYDASNRATGIPARFSGSGSGTDFTLTISSLEPEDFAVYYCQLRVNWPRVTFGQGTRLEIK

SEQ ID NO: 8114 - protein, 107 aa, Artificial Sequence
  Synthetic construct
AIQLTQSPSSLSASVGDRVTITCRASQGISSYLAWYQQKPGKAPKLLIYAASTLHSGVPSRFSGSGSGTDFTLTISSLQPEDFATYYCQQLNSYPPTFGPGTKVGIE

SEQ ID NO: 8115 - protein, 108 aa, Artificial Sequence
  Synthetic construct
DIQMTQSPSTLSASVGDRVTITCRASQSISSWLAWYQQKPGKAPKLLIYKASSLESGVPSRFSGSGSGTEFTLTISSLQPDDFATYYCQQYNSYSGGTFGQGTKVEIK

SEQ ID NO: 8116 - protein, 108 aa, Artificial Sequence
  Synthetic construct
EIVLTQSPGTLSLSPGERATLSCRASQSVSSSYLAWYQQKPGQAPRLLIYGASSRATGIPDRFSGSGSGTDFTLTISRLEPEDFAVYYCQQYGSSRGTFGQGTKLEIK

SEQ ID NO: 8117 - protein, 107 aa, Artificial Sequence
  Synthetic construct
DIQMTQSPSSLSASVGDRVTITCRASQGISNYLAWFQQKPGKAPKSLIYATSSLQSGVPSKFSGSGSGTDFTLTISSLQPEDFATYYCQQYNTYPFTFGPGTKVDIK

SEQ ID NO: 8118 - protein, 112 aa, Artificial Sequence
  Synthetic construct
DIVMTQSPDSLAVSLGERATINCKSSQSVLYSSNNKNYLAWYQQKPGQPPKLLIYWASTRESGVPDRFSGSGSGTDFTLTISSLQAEDVAVYYCQQYYSTPRFGQGTKLEIK

SEQ ID NO: 8119 - protein, 107 aa, Artificial Sequence
  Synthetic construct
DIQMTQSPSAMSASVGDRVTITCRASQGISNYLAWFQQKPGKVPKRLIYAASSLQSGVPSRFSGSGSGTEFTLTISSLQPEDFATYYCLQHNSYPWTFGQGTKVEIK

SEQ ID NO: 8120 - protein, 106 aa, Artificial Sequence
  Synthetic construct
DIQMTQSPPSLSASVGDRVTITCQASQDINNYLSWYQQKAGKAPKLLIFDASNLEPGVPSRFSGSGSGTHFTFTISSLQPEDVATYYCQQYDSLWTFGQGTKVEIK

SEQ ID NO: 8121 - protein, 110 aa, Artificial Sequence
  Synthetic construct
QSALTQPPSASGSPGQSVTISCTGTSSGVGGHDLVSWYHQHPGKVPKLIIYEVNKRPSGVPDRFSGSKSGNTASLTVSGLQAEDEGDYYCSSYGGNHNLDFGTGTKVTVL

SEQ ID NO: 8122 - protein, 111 aa, Artificial Sequence
  Synthetic construct
QSALTQPASVSGSPGQSITISCTGTSSDVGTYNLVSWYQEHPGKAPKLMIYEVSKRPSGVSNRFSGSKSGNTASLTISGLQAEDEADYYCCSYAGSRTLWVFGTGTKVTVL

SEQ ID NO: 8123 - protein, 107 aa, Artificial Sequence
  Synthetic construct
VIWMTQSPSLLSASTGDRVTISCRMSQGISSYLAWYQQKPGKAPELLIYAASTLQSGVPSRFSGSGSGTDFTLTISCLQSEDFATYYCQQYYSFPPTFGQGTKVEIK

SEQ ID NO: 8124 - protein, 108 aa, Artificial Sequence
  Synthetic construct
SYELIQPPSVSVSPGQTASITCSGEKLGDEYASWYQQQPGQAPVLIIYQNNKRPSGIPERISGSNSGNTATLTISGTQAMDEADYYCQAWDSSTAVYVFGPGTKVTVL

SEQ ID NO: 8125 - protein, 109 aa, Artificial Sequence
  Synthetic construct
QSVLTQPPSVSAAPGQKVTISCSGSSSNIGNNFVSWYQQLPGTAPKLLIYDNNERPAGIPDRFSGSKSGTSATLDITGLQTGDEADYYCASWDSNLRVVFGAGTKLTVL

SEQ ID NO: 8126 - protein, 107 aa, Artificial Sequence
  Synthetic construct
AIRITQSPSSLSASTGDRVTITCRASQGISSYLAWYQQKPGKAPKLLIYAASTLQSGVPSRFSGSGSGTDFTLTISCLQSEDFATYYCQQYYSYPYTFGQGTKLEIK

SEQ ID NO: 8127 - protein, 107 aa, Artificial Sequence
  Synthetic construct
AIRMTQSPSSFSASTGDRVTITCRASQGISSYLAWYQQKPGKAPKLLIYAASTLQSGVPSRFSGSGSGTDFTLTISCLQSEDFATYYCQQYYSYPWTFGQGTKVEIK

SEQ ID NO: 8128 - protein, 111 aa, Artificial Sequence
  Synthetic construct
QLVLTQSPSASASLGAPVKLTCTLSSGHSSYAIAWHQQQPEKGPRYLMKLYSDGSHDKGDGIPDRFSGSSSGAERYLTISSLRSEDEADYYCQTWGNGVGVFGGGTKLTVL

SEQ ID NO: 8129 - protein, 107 aa, Artificial Sequence
  Synthetic construct
DIQMTQSPSSLSASVGDRVTITCRASQGISNYLAWFQQKPGKAPKSLIYAASSLQSGVPSKFSGSGSGTDFTLTISSLQPEDFATYYCQQYNSYPLTFGGGTKVEIK

SEQ ID NO: 8130 - protein, 111 aa, Artificial Sequence
  Synthetic construct
QSVLTQPPSVSGAPGQRVTISCTGSSSNIGAGYDVHWYQQLPGTAPKLLIYGNSNRPSGVPDRFSGSKSGTSASLAITGLQAEDEADYYCQSYDSSLSGYVFGIGTKVTVL

SEQ ID NO: 8131 - protein, 112 aa, Artificial Sequence
  Synthetic construct
DIVMTQSPLSLPVTPGEPASISCRSSQSLLHSNGYNYLDWYLQKPGQSPQLLIYLGSNRASGVPDRFSGSGSGTDFTLKISRVEAEDVGVYYCMQALQTPFTFGPGTKVDIK

SEQ ID NO: 8132 - protein, 111 aa, Artificial Sequence
  Synthetic construct
QSVLTQPPSVSGAPGQSVTISCTGSSSNIGAAYEVHWYQQLPGTAPKLLIYNTNSRPSGVPDRLSGSRSGTSASLAITGLQAADEADYYCQSYDSGLRDYVFGSGTKVTVL

SEQ ID NO: 8133 - protein, 107 aa, Artificial Sequence
  Synthetic construct
AIRITQSPSSLSASTGDRVTITCRASQGISSYLAWYQQKPGKAPKLLIYAASTLQSGVPSRFSGSGSGTDFTLTISCLQSEDFATYYCQQYYSYPRTFGQGTKVEIK

SEQ ID NO: 8134 - protein, 111 aa, Artificial Sequence
  Synthetic construct
QLVLTQSPSASASLGASVKLTCTLSSGHNNHAIAWLQQQPEKGPRYLMKVNTDGSHSKGDGIPDRFSGSFSGADHYLTISSLQSEDEAAYFCQTWDTGIGVFGGGTKLTVL

SEQ ID NO: 8135 - protein, 113 aa, Artificial Sequence
  Synthetic construct
DVVMTQSPLSLPVTLGQPASISCRSSQSLVHSDGYTYLTWFHQRPGQSPRRLIYKVFNRDSGVPDRFSGSGSGTDFTLKISRVEAEDVGIYYCMQGTHWPLYTFGQGTKLEIK

SEQ ID NO: 8136 - protein, 110 aa, Artificial Sequence
  Synthetic construct
QSVLTQPPSASGTPGQRVTISCSGSSSSIGGDHVNWYQQFPGTAPKFLIYNNDQRPSGVPDRFSASKSGTSASLTISGLQSEDEADYFCAAWDASLRTWVFGGGTKVTVL

SEQ ID NO: 8137 - protein, 107 aa, Artificial Sequence; identical to SEQ ID NO: 8133
  Synthetic construct

SEQ ID NO: 8138 - protein, 110 aa, Artificial Sequence; identical to SEQ ID NO: 8075
  Synthetic construct

SEQ ID NO: 8139 - protein, 110 aa, Artificial Sequence
  Synthetic construct
QSALTQPRSVSGSPGQSVTISCTGTSSDVGGYNYVSWYQQHPGKAPKLLISGVNKRPSGIPDRFSGSKSGNTASLTISGLQAEDEADYFCCSYAGSYPWLFGGGTKLTVL

SEQ ID NO: 8140 - protein, 109 aa, Artificial Sequence
  Synthetic construct
QSVLTQPPSVSAAPGQKVTISCSGSTSNIGNSYVSWYQQLPGTAPKVLIFDNNERPSGIPDRFSGSKSGTSATLDITGLQTGDEGDYYCATWDSSLHWVFGGGTKLTVL

SEQ ID NO: 8141 - protein, 107 aa, Artificial Sequence; identical to SEQ ID NO: 8133
  Synthetic construct

SEQ ID NO: 8142 - protein, 112 aa, Artificial Sequence
  Synthetic construct
DVVMTQSPLSLPVTLGQPASISCRSSQSLGHSDGNTYLNWFQQRPGQSPRRLIYKVSNRDSGVPDRFSGSGSGTDFTLKISRVEAEDVGVYYCMQGTHWPYTFGQGTKLEIK

SEQ ID NO: 8143 - protein, 106 aa, Artificial Sequence
  Synthetic construct
EIVLTQSPATLSLSPGERATLSCRASQSVSSYLAWYQQKPGQAPRLLIYDASNRATGIPARFSGSGSGTDFTLTISSLEPEDFAVYYCQQRSNWITFGQGTRLEIK

SEQ ID NO: 8144 - protein, 106 aa, Artificial Sequence
  Synthetic construct
KIVMTQSPATLSVSPGDRATLSCRASETIRTTVAWYQQKPGQAPRLLIYGVSTRATGVPARFSGTGSGTDFTLTISSLQSEDSAVYYCQQYNQWYTFGPGTKLEIR

SEQ ID NO: 8145 - protein, 110 aa, Artificial Sequence
  Synthetic construct
QTVVTQEPSLSVSPGGTITVTCGLSSGLVTANHHPSWQQQTPGQPPRTLIYNTNTRSSGVPDRFVGSVLGSKAALTITGAQEDDDSDYYCVLYMGNGLYVFGTGTKVTVL

SEQ ID NO: 8146 - protein, 110 aa, Artificial Sequence
  Synthetic construct
QSALTQPASVSGSPGQSITISCTGTTSDIGSYDLVSWYQQNPGKAPKLMIYEGTKRPSGVSNRFSGSKSGNTASLTISGLQPEDEADYYCCSYAGSRSVVFGGGTKVTVL

SEQ ID NO: 8147 - protein, 112 aa, Artificial Sequence
  Synthetic construct
QSVLTQPPSVSGAPGQTVTISCTGSSSNIGAGYDVHWYQQLPGAAPNLLIYRNDNRPSGVPDRFSGSKSGTSASLAITGLRTEDEADYYCQSYDSRLSGHWVFGGGTKLTVL

SEQ ID NO: 8148 - protein, 108 aa, Artificial Sequence
  Synthetic construct
EIVLTQSPGTLSLSPGERATLSCRASQSVSSSYLAWYQQKPGQAPRLLIYGASSRATGIPDRFSGSGSGTDFTLTISRLEPEDFAVYYCQQYGSSVLTFGGGTKVEIK

SEQ ID NO: 8149 - protein, 115 aa, Artificial Sequence
  Synthetic construct
QAVLTQPSSLSASPGASASLTCTLRSGINVGTYRIYWYQQKPGSPPQYLLRYKSDSDKQQGSGVPSRFSGSKDASANAGILLISGLQSEDEADYYCMIWHSSAWVFGGGTKLTVL

SEQ ID NO: 8150 - protein, 107 aa, Artificial Sequence
  Synthetic construct
VIWMTQSPSLLSASTGDRVTISCRMSQGISSYLAWYQQKPGKAPELLIYAASTLQSGVPSRFSGSGSGTDFILTISCLQSEDFATYYCQQYYSFPPAFGQGTKVEIK

SEQ ID NO: 8151 - protein, 108 aa, Artificial Sequence
  Synthetic construct
EIVLTQSPGTLSLSPGERATLSCRASQSVSSSYFAWYQQKPGQAPRLLIYGASSRATGIPDRFSGSGSGTDFTLTISSLEPEDFAVYYCQQYGSSPLTFGQGTRLEIK

SEQ ID NO: 8152 - protein, 107 aa, Artificial Sequence
  Synthetic construct
AIRMTQSPSSFSASTGDRVTITCRASQGISSYLAWYQQKPGKAPKLLIYAASTLQSGVPSRFSGSGSGTDFTLTISCLQSEDFATYYCQQYYSYPLTFGGGTKVEIK

SEQ ID NO: 8153 - protein, 109 aa, Artificial Sequence
  Synthetic construct
EIVMTQSPATLSASPGERATLSCTASHTVNTNVAWYQQKPGQAPRLLIYDASTRATGIPARFSGSGSVTEFTLTISGLQSEDFVVYYCQQYREWPPMYTFGQGTKLEIK

SEQ ID NO: 8154 - protein, 112 aa, Artificial Sequence
  Synthetic construct
QSVLTQPPSVSGAPGQRVTISCTGSSSNIGAGYDVHWYQQLPGTAPKLLIYGNSNRPSGVPDRFSGSKSGTSASLAITGLQAEDEADYYCQSYDSSLSGSWVFGGGTKLTVL

SEQ ID NO: 8155 - protein, 107 aa, Artificial Sequence
  Synthetic construct
SHELTQPPSEAVSPGQTARITCSADTLPKQFVYWYQQRPGQAPVLIIYKDRQRPSGIPERFSGSSSGTTVTLTISGVQAEDEADYYCQSEDKSGIVVFGGGTKLTVL

SEQ ID NO: 8156 - protein, 107 aa, Artificial Sequence
  Synthetic construct
DIQMTQSPSSLSASVGDVVTITCRASQMISRHLNWYQQKPGEAPNLLIYAASNLQSGVPSRFSGSGSGTDFTLTISSLQPEDFATYYCQQSYSTPYIFGQGTKLEIK

SEQ ID NO: 8157 - protein, 107 aa, Artificial Sequence
  Synthetic construct
DIQMTQSPPSLSASVGDRVTVTCRASQSILSYLHWYQHKPGKAPKLLVYAASSLQSGVPSRFSGSGSGTDFTLTITSLQPEDFATYYCQQSYSTPYTFGQGTKLEIN

SEQ ID NO: 8158 - protein, 108 aa, Artificial Sequence; identical to SEQ ID NO: 8071
  Synthetic construct

SEQ ID NO: 8159 - protein, 110 aa, Artificial Sequence
  Synthetic construct
QSVLSQPPSASGTPGQRVTMSCSGSSSNIGTKTVNWYQQFPGTAPKLLIYNNNERPSGVPGRFSGSKSGTSASLAISGLQSDDEADYYCAAWDDSLNGPVFGGGTKLTVL

SEQ ID NO: 8160 - protein, 108 aa, Artificial Sequence
  Synthetic construct
EIVLTQSPVTLSLSPGERATLSCKASQSVHTYLGWYQQKPGQAPRLLIYDASNRATGIPARFNGSGSGTDFTLTISSLEPEDFALYYCQQRFNWPPLTFGGGTKIEIK

SEQ ID NO: 8161 - protein, 108 aa, Artificial Sequence; identical to SEQ ID NO: 55
  Synthetic construct

SEQ ID NO: 8162 - protein, 108 aa, Artificial Sequence
  Synthetic construct
SSDLTQDPAVSVALGQTVRITCQGDSFRTCYASWYQQKPGQAPVVVIYGKNNRPSGIPDRLSGSSTGDTASLTITGAQAEDEADYYCFCRDNSGRQWVFGGGTKLTVL

SEQ ID NO: 8163 - protein, 110 aa, Artificial Sequence
  Synthetic construct
QSALTQPASVSGSPGQSITISCSGTRFDIGDYNHVSWYQQHPGKAPKLVIYDVNNRPSGVSSRFSGSKSGNTASLTISGLQAEDEADYYCCSYTRSSTRVFGGGTKLTVL

SEQ ID NO: 8164 - protein, 110 aa, Artificial Sequence
  Synthetic construct
QSVLTQPPSVSAAPGQKVTISCSGSSSNIGNNYVSWYQQLPGTAPKLLIYDNNKRPSGIPDRFSGSKSGTSATLGITGLQTGDEADYYCGTWDSSLSVVVFGGGTKLTVL

SEQ ID NO: 8165 - protein, 109 aa, Artificial Sequence
  Synthetic construct
EIVLTQSPGTLSLSPGERATLSCRASQSVSSSYLAWYQQKPGQAPRLLIYGASSRATGIPDRFSGSGSGTDFTLTISRLEPEDFAVYYCQQYGSSPLYTFGQGTKLEIK

SEQ ID NO: 8166 - protein, 111 aa, Artificial Sequence
  Synthetic construct
QSVLTQPPSVSGAPGQRVTISCTGSSSNIGAGYDVHWYQQLPGAAPKLLISANNNRPSGVPDRFSGSKSGTSASLAITGLQGEDEADYYCQSYDVSLGGGVFGGGTKLTVL

SEQ ID NO: 8167 - protein, 111 aa, Artificial Sequence
  Synthetic construct
QLVLTQSPSASASLGASVKLTCTLSSGHSSYAIAWHQQQPEKGPRYLMKLNSDGSHTKGDGIPDRFSGSSSGAERYLTISSLQSEDEADYYCQTWGTGLYVFGTGTKVTVL

SEQ ID NO: 8168 - protein, 109 aa, Artificial Sequence
  Synthetic construct
EIVLTQSPGTLSLSPGERATLSCRASQSVRSSCLAWYQQKPGQAPRLLIYGASSRATGIPDRFSGSGSGTDFTLTISRLEPEDFAVYYCQQYGSSPPLTFGGGTKVEIK

SEQ ID NO: 8169 - protein, 107 aa, Artificial Sequence
  Synthetic construct
SFELTQPSSLSVSPGQTAKITCSGNILAKKYVRWFQQKPGQAPVLVIYKDSERPSGIPERISGSTSGTTVTLTISGAQVEDEADYYCYSATDNNRGVFGGGTTLTVL

SEQ ID NO: 8170 - protein, 111 aa, Artificial Sequence
  Synthetic construct
QLVLTQSPSASASLGASVKLTCTLNSGHNIYGIAWHQQQPEKGPRYLMKVNTDGSHNKGDGIPDRFSGSSSGADHYLTISSLQSEDEADYYCQTWTTGIAVFGGGTKLTVI

SEQ ID NO: 8171 - protein, 110 aa, Artificial Sequence
  Synthetic construct
QSALTQPASVSGSPGQSITISCTGTSSDVGGYNYVSWYQQPPGKAPKLIIYDVSERPSGVSNRFSGSKSGNTASLTISGLQAEDEADYYCSSYSRVTTCVFGTGTRVTVL

SEQ ID NO: 8172 - protein, 110 aa, Artificial Sequence
  Synthetic construct
QSALTQPASVSGSPGQSITISCTGTSSDVGGYNYVSWYQQHPGKAPKLMILDVSKRPSGVSNRFSGSKSGNTASLTISGLQAEDESDYYCSSYTSISTVVFGGGTKLTVL

SEQ ID NO: 8173 - protein, 106 aa, Artificial Sequence
  Synthetic construct
DIQMTQSPSSLSASVGDRVIITCQASQDIRNYLSWYQQKPGKAPKLLIYDASNLETGVPLRFSGSGSGTDFTFTISSLQPEDIATYYCQQYDNLWTFGQGTKVEIK

SEQ ID NO: 8174 - protein, 110 aa, Artificial Sequence
  Synthetic construct
QSALTQPASVSGSPGQSITISCTGTSSDVGSYNLVSWYQQHPGKAPKLMIYEVSKRPSGVSDRFSGSKSGNTASLTISGLQAEDEADYYCCSYASSSTGVFGTGTKVTVL

SEQ ID NO: 8175 - protein, 107 aa, Artificial Sequence
  Synthetic construct
DIQMTQSPSSVSASVGDRVTITCRASRGISSSLAWYQQKPGKAPKLLIYAASSLQSGVPSRFSGSGSGTDFTLTISSLQPEDFATYFCQQANSFRWTFGQGTKVEIK

SEQ ID NO: 8176 - protein, 107 aa, Artificial Sequence
  Synthetic construct
DIQMTQSPSSLSASVGDRVTITCRASQSISSYLNWYQQKPGKAPKLLIYAASSLQSGVPSRFSGSGSGTDFTLTISSLQPEDFATYYCQQSYSTPRTFGQGTKVEIK

SEQ ID NO: 8177 - protein, 107 aa, Artificial Sequence; identical to SEQ ID NO: 8093
  Synthetic construct

SEQ ID NO: 8178 - protein, 110 aa, Artificial Sequence
  Synthetic construct
QSALTQPPSVSGSPGQSVTISCTGTSSDVGGYNYVSWYQQQPGKAPKLMIYDVSKRPSGVPDRFSGSKSGNTASLTISGLQAEDEADYYCCSYAGSYTVVFGGGTKLTVL

SEQ ID NO: 8179 - protein, 114 aa, Artificial Sequence
  Synthetic construct
DIVLTQSPDSLAVSLGERATINCKSSQSLLYRPNNKNSLAWYQQKPGQPPKLLIYWASTRESGVPDRFSGSGSGTDFTLTISSLQAEDVALYYCQQYYDSLTWTFGQGTKVEIK

SEQ ID NO: 8180 - protein, 111 aa, Artificial Sequence
  Synthetic construct
QSALTQPASVSGSPGQSITISCTGTSSDVGGYHYVSWYQQHPDKAPKLMIYDVSHRPSGVSNRFSGSKSGNTASLTISGLQADDEADYFCSSYTSSSPLDVFGTGTKVTVL

SEQ ID NO: 8181 - protein, 107 aa, Artificial Sequence
  Synthetic construct
SSELTQDPAVSVALGQTVRITCQGDSLRSFYASWYQQKAGQAPVLVIYNRKNRPSGIPDRFSGSNLGDTASLTITGAQAEDEADYYCNSRDSSGSLVFGGGTKLTVL

SEQ ID NO: 8182 - protein, 112 aa, Artificial Sequence
  Synthetic construct
DVVVTQSPLSLPVTLGQSASISCRSSQSLIHSDGNTYLNWFQQRPGQSPRRLIYKVFNRDSGVPDRFSGSGSGTDFTLRISRVEAEDVGVYYCLQFTHWPRTFGQGTKLEIK

SEQ ID NO: 8183 - protein, 112 aa, Artificial Sequence
  Synthetic construct
DIVMTQTPLSLSVTPGQPASISCKSSQSLLHSDGKTSLYWYLQKPGQSPQLLIYEVSYRFSGVPNRFSGSGSGTDFTLKISRVEAEDVGVYYCMQGIQLLFTFGPGTKVDIK

SEQ ID NO: 8184 - protein, 113 aa, Artificial Sequence
  Synthetic construct
DIVMTQSPLSLSVTPGQPASISCKSSQSLLHSDGKTYLYWFLHKPGQSPQLLIYEVSSRLSGVPDRFSGSGSGTDFTLKISRVEAEDVGVYYCMQGIHLPSFTFGPGTKVDIK

SEQ ID NO: 8185 - protein, 106 aa, Artificial Sequence
  Synthetic construct
DIQMTQSPSTLSASVGDRVTITCRASQSISSWLAWYQQKPGKAPKLLIYKASSLESGVPSRFSGSGSGTEFTLTISSLQPDDFATYYCQQYNSYYTFGQGTKLEIK

SEQ ID NO: 8186 - protein, 111 aa, Artificial Sequence
  Synthetic construct
QSVLTQPPSVSGAPGQRVTISCTGSSSNIGAAYDVHWYIQLPGTAPKLLISGNKNRPSGVPDRFSGSKSGTSASLAISGLQAEDEADYHCQSYDSSLSGYVFGTGTKVTVL

SEQ ID NO: 8187 - protein, 107 aa, Artificial Sequence
  Synthetic construct
DIQMTQSPSTLSASVGDRVTITCRASQSISTWLAWYQQKPGKAPKVLIYKASSLESGVPSRFSGSGSGTEFTLTISSLQPDDFATYHCQQYNSYPFTFGPGTKVDIK

SEQ ID NO: 8188 - protein, 108 aa, Artificial Sequence
  Synthetic construct
DIQMTQSPSTLSASVGDRVTITCRASQRINNWLAWYQQKPGKAPKLLIYEASSLASGVPSRFSGSASGTEFTLTISSLQPDDFATYYCQQYNSYSPYTFGQGTKLEIK

SEQ ID NO: 8189 - protein, 112 aa, Artificial Sequence
  Synthetic construct
DIEMTQSPDSLAVSLGERATINCKSSQSILHTSNNKNYLAWYQQKPGQPPKLLIYWASTRESEVPDRFSGSGSGTDFTLTISSLQAEDVAVYFCHQYYDTPSFGQGTRLEIK

SEQ ID NO: 8190 - protein, 107 aa, Artificial Sequence
  Synthetic construct
AIHLTQSPSSLSASVGDRVTITCRASQGISSALAWYQQKPGKPPKLLIYDSSSLESGVPSRFSGSGSGTDFTLTISSLQPEDFATYYCQQFYNYVVTFGGGTKVEIK

SEQ ID NO: 8191 - protein, 106 aa, Artificial Sequence
  Synthetic construct
DIQMTQSPSTLSASVGDRVTITCRASQSISSWLAWYQQKPGKAPKLLIYKASSLESGVPSRFSGSGSGTEFTLTISSLQPDDFATYYCQQYNSYSAFAQGTKLEIK

SEQ ID NO: 8192 - protein, 108 aa, Artificial Sequence
  Synthetic construct
EIVLTQSPATLSLSPGERATLSCRASQSVSSYLAWYQQKPGQAPRLLISGASNRASGIPARFSGSGFGTDFTLTISSLEPEDFAVYFCLQRSRWPLFTLGPGTKVDIK

SEQ ID NO: 8193 - protein, 112 aa, Artificial Sequence
  Synthetic construct
DVVMTQSPLSLPVTLGQPASLSCRSSQSLVHSDGNTYLNWFQQRPGQSPRRLIYKVSERDSGVPDRFSGSGSGTDFTLKISRVEAEDVGVYYCMQGTHWPGTFGQGTKLEIK

SEQ ID NO: 8194 - protein, 107 aa, Artificial Sequence
  Synthetic construct
DIQMTQSPSSLSASVGDRVTLTCRASQNVIKYLSWYQQKPGKAPRLLVFSASTLESGVPTRFSGSGSGTDFTLTISSLQPDDIATYYCQQSYGIPRTFGQGTKVEIK

SEQ ID NO: 8195 - protein, 115 aa, Artificial Sequence; identical to SEQ ID NO: 8149
  Synthetic construct

SEQ ID NO: 8196 - protein, 107 aa, Artificial Sequence
  Synthetic construct
DIQMTQSPSSLSASVGDRVTITCRTSQNINRYLNWYQQKAEKAPKLLIYAASTLQSGVPSRFSGSGSGTDYTLTISSLQPEDSANYYCQQSYGPPFTFGPGTKVDIK

SEQ ID NO: 8197 - protein, 111 aa, Artificial Sequence
  Synthetic construct
NILMTQTPLSLSVTPGQPASISCKSSQSLLHVDGKIYMYWYLQKPGQSPQLLIYEVSSRFTGVPDRFSGSGSETDFTLTISRVEAEDVGVYYCMQGLNLLSFGGGTWLEIK

SEQ ID NO: 8198 - protein, 110 aa, Artificial Sequence; identical to SEQ ID NO: 56
  Synthetic construct

SEQ ID NO: 8199 - protein, 108 aa, Artificial Sequence
  Synthetic construct
EIVLTQSPVTLSLSPGERATLSCRASQSVASNYLAWYQLKPGQAPRLLIYGASSRATGIPDRFSGSGSGSDFTLTISRLEPADFAMFYCQQYGSSPYTFGQGTKLEIK

SEQ ID NO: 8200 - protein, 107 aa, Artificial Sequence
  Synthetic construct
DIQMTQSPSTLSASVGDRVTITCRASQSISSWLAWYQQKPGKAPKLLIYKASSLESGVPSRFSGSGSGTEFTLTISSLQPDDFATYYCQQYNSYPWTFGQGTKVEIK

SEQ ID NO: 8201 - protein, 113 aa, Artificial Sequence
  Synthetic construct
DIVMTQSPDSLAVSLGERATINCKSSQNVLYGSNNKNYLAWYQHKTGQPPKLLIYWASTRESGVPDRFSGSGSGTDFTLTISSLQAEDVAVYFCQQYYSTPRTFGQGTKVEIK

SEQ ID NO: 8202 - protein, 108 aa, Artificial Sequence
  Synthetic construct
AIRMTQSPSSFSASTGDRVTITCRASQGISSYLAWYQQKPGKAPKLLIYAASTLQSGVPSRFSGSGSGTDFTLTISCLQSEDFATYYCQQYYSYPSITFGQGTRLEIK

SEQ ID NO: 8203 - protein, 108 aa, Artificial Sequence
  Synthetic construct
EIVLTQSPDTLSLSPGERATLSCRASQSLSSSHLGWYQQKPGQAPRLVIYGASNRATGILDRFSGSGSGTDFTLTISRLEPEDFAVYYCLQYGTLPWTFGQGTKVEIK

SEQ ID NO: 8204 - protein, 107 aa, Artificial Sequence
  Synthetic construct
DIQMTQSPSTLSASVGDRVTITCRASQKISISLAWYQQRPGQAPRLLIYKASTLESGVPSRFVGSGSETDFTLTINSLQSEDFATYFCQQYHTYPLTFAGGTRVDFK

SEQ ID NO: 8205 - protein, 110 aa, Artificial Sequence
  Synthetic construct
QAVVTQEPSLTVSPGGTVTLTCGSSTGAVTSGHYPYWFQQKPGQAPRTLIYDTSNKHSWTPARFSGSLLGGKAALTLSGAQPEDEAEYYCLLSYSGAERVFGGGTKLTVL

SEQ ID NO: 8206 - protein, 107 aa, Artificial Sequence
  Synthetic construct
DIQMTQSPSTLSASVGDRVTITCRASQSISSWLAWYQQKPGKAPKLLIYKASSLESGVPSRFSGSGSGTEFTLTISSLQPDDFATYYCQQYNSYLYTFGQGTKLEIK

SEQ ID NO: 8207 - protein, 108 aa, Artificial Sequence
  Synthetic construct
DIQMTQSPSSLSASVGDRVTITCRASQSIGNYLNWYQHKPGKAPKLLIYATSTLQSGVPSRFSGSGSGTDFTLTISSLQPEDFATYYCQQYYITPPYTFGQGTKLEIK

SEQ ID NO: 8208 - protein, 106 aa, Artificial Sequence
  Synthetic construct
DVQMTQSPSTLSASVGDRVTITCRASQSISTWLAWYQQKPGKAPNLLIYEASSLENGVPSRFSGSGSGTEFTLTISSLQPDDFATYYCQQYNTFWTFAQGTKVEIK

SEQ ID NO: 8209 - protein, 110 aa, Artificial Sequence
  Synthetic construct
QSVLTQPPSVSAAPGQTLTISCSGSSSNIGDNYVSWYQQLPGTAPKLLIYDDNKRPSGIPDRFSGSKSGTSATLAITGLQTGDEGDYYCAAWDSSLRAGVFGGGTKVTVL

SEQ ID NO: 8210 - protein, 106 aa, Artificial Sequence
  Synthetic construct
DIQMTQSPSTLSASVGDRVTITCRASQSISSWLAWYQQKPGKAPKLLIYKASSLESEVPSRFSGSGSGTEFTLTISSLQPDDFATYYCQQYNNYWTFGQGTKVEIK

SEQ ID NO: 8211 - protein, 107 aa, Artificial Sequence
  Synthetic construct
DIQMTQSPSSLSASVGDRVTITCRASQDITTFLAWFQQKPGKAPRSLIYATSILHTGVPSRFSGSGSGTDFTLTINTLQPEDFATYYCQQYSSYPLTFGGGTKVEIK

SEQ ID NO: 8212 - protein, 110 aa, Artificial Sequence
  Synthetic construct
QSVLTQPPSVSAAPGQKVTISCSGSSSNIGNNYVSWYQQLPGTAPKLLIYDNNKRPSGIPDRFSGSKSGTSATLGITGLQTGDEADYYCGTWDSSLSAGVFGGGTKLTVL

SEQ ID NO: 8213 - protein, 112 aa, Artificial Sequence
  Synthetic construct
EIVLTQFPLSLPVTPGEPASISCRASESLLDTDGNTYLDWYLQRPGQSPQLLIYTLSYRASGVPDRFSGSGSGTDFTLRISRVEAEDIGVYYCMQRLEFPLTFGGGTRVEIK

SEQ ID NO: 8214 - protein, 108 aa, Artificial Sequence
  Synthetic construct
SYELTQPPSVSVSPGQTARITCSGDALPKKYAYWYQQKSGQAPVLVIYEDSKRPSGIPERFSGSSSGTMATLTISGAQVEDEADYYCYSTDSSGNHYVFGTGTKVTVL

SEQ ID NO: 8215 - protein, 111 aa, Artificial Sequence
  Synthetic construct
QSVLTQPPSVSAAPGQKVTISCSGSSSNIGNNYVSWYQQLPGTAPKLLIYDNNKRPSGIPDRFSGSKSGTSATLGITGLQTGDEADYYCGTWDSSLSASWVFGGGTKLTVL

SEQ ID NO: 8216 - protein, 108 aa, Artificial Sequence
  Synthetic construct
SYVLTQPPSVSVAPGKTARIPCGGDNIGSKSVHWYQQRPGQAPEVVILHDSDRPSGIPERFSGSNSGSTATLTISTVEAGDEADYYCQVWDSSSNHAIFGGGTKLTVL

SEQ ID NO: 8217 - protein, 107 aa, Artificial Sequence
  Synthetic construct
EIVLTQSPATLSLSPGERATLSCRASQSVSSYLVWYQQKPGQAPRLLIYDASNRGTGIPARFSGSGSGTDFTLTISSLEPEDFAVYYCQQRSNWPLTFGGGTKVEIK

SEQ ID NO: 8218 - protein, 107 aa, Artificial Sequence; identical to SEQ ID NO: 8129
  Synthetic construct

SEQ ID NO: 8219 - protein, 110 aa, Artificial Sequence
  Synthetic construct
QSALTQPASVSGSPGQSITLSCTGTSSDVGGYIYVSWYQQHPGKAPKLMVYDVTKRPSGVSNRFSGSKSGNTAALTISGLQADDEADYYCSSYTSRSTVVFGGGTRLTVL

SEQ ID NO: 8220 - protein, 110 aa, Artificial Sequence
  Synthetic construct
QSVVTQPPSASGTPGQRVTISCSGSTSNIWNNYVYWYQQLPGTAPRLLIYRNNQRPSGVPDRFSGSKSGTSASLAITGLRSEDEADYFCAAWDDRLNGVVFGGGTKLTVL

SEQ ID NO: 8221 - protein, 113 aa, Artificial Sequence
  Synthetic construct
DVVMTQSPLSLPVTLGQPASITCRSSHSLVHSDGNTYLNWFQQRPGQSPRRLIYKVSNRDSGVPDRFSGSGSGTDFTLKINRVEAEDVGVYYCMQGTHWPPYTFGQGTKLEIR

SEQ ID NO: 8222 - protein, 112 aa, Artificial Sequence
  Synthetic construct
DIVMTQSPLSLPVTPGEPASVSCRSSQSLLHSNGFNYLDWYLQKPGQSPQLLIYWGSNRASGVPDRFSGSGSGTDFTLKINRVEAEDVGVYYCMQALQTPFTFGPGTKVDIK

SEQ ID NO: 8223 - protein, 112 aa, Artificial Sequence
  Synthetic construct
DIVLTQSPLSLPVIPGEPASISCRSSQSLLHSNGYNYLNWYLQKPGQSPHLLIYVRSNRASGVPDRFRGSGSGTDFTLEISRVEAEDVGVYYCMQALETPYTFGQGTKLEIK

SEQ ID NO: 8224 - protein, 107 aa, Artificial Sequence
  Synthetic construct
DIQMTQSPSSLSASVGDRVTITCQASQDISNYLNWYQQKPGKAPKLLIYDASNLETGVPSRFSGSGSGTDFTFTISSLQPEDIATYYCQQYDNLPLTFGGGTKVEIK

SEQ ID NO: 8225 - protein, 112 aa, Artificial Sequence
  Synthetic construct
QSALTQPASVSGSPGQSISISCTGTSGDIGLYKHFSWYQVHPGKAPKLMIYDVSSRPSRVSYRFSGSKSGSTASLTISGLQAEDEAYYYCCSYTSSSTLEVVFGGGTKLTVL

SEQ ID NO: 8226 - protein, 110 aa, Artificial Sequence
  Synthetic construct
QSVLTQPPSAAGTPGQRVTIFCSGSSSNIGTNFVYWYQQVPGTGPKLLIYRNTQRPSGVPDRFSGSKSGTSASLAVSGLRSEDEADYYCAAWDDSLSGVIFGGGTKLTVL

SEQ ID NO: 8227 - protein, 112 aa, Artificial Sequence
  Synthetic construct
DIVMTQSPLSLPVTPGEPASISCRSSQSLLHRNGYNYLDWYLQKPGQSPQVLIYLGSNRASGVPDRFSGSGSGTDFTLKISRVEAEDVGVYYCMQGLQTPWTFGQGTKVEIK

SEQ ID NO: 8228 - protein, 107 aa, Artificial Sequence
  Synthetic construct
DIQMTQSPSSLSASVGDRVTITCRASQGISNYLAWYQQKPGKVPKLLIYAASTLQSGVPSRFSGSGSGTDFTLTISSLQPEDVATYYCQKYNSALWTFGQGTKVEIK

SEQ ID NO: 8229 - protein, 107 aa, Artificial Sequence
  Synthetic construct
DIQMTQSPSSLSASVGDRVTITCRTNQGISNYLAWYQQKPGKVPKVLIYAASTLQSGVPSRFSGSGSGTDFTLTISSLQPEDVATYYCQNYNSAPYTFGQGTRLEIR

SEQ ID NO: 8230 - protein, 108 aa, Artificial Sequence
  Synthetic construct
DIQMTQSPSSLSASVGDRVTITCRASQSISSYLNWYQQKPGKAPKLLIYAASSLQSGVPSRFSGSGSGTDFTLTISSLQPEDFATYYCQQSYSTPVFTFGPGTKVDIK

SEQ ID NO: 8231 - protein, 107 aa, Artificial Sequence; identical to SEQ ID NO: 8127
  Synthetic construct

SEQ ID NO: 8232 - protein, 107 aa, Artificial Sequence
  Synthetic construct
SYELTQPPSVSVSPGQTASITCSGDKLGDKYACWYQQKPGQSPVLVIYQDSKRPSGIPERFSGSNSGNTATLTISGTQAMDEADYYCQAWDSSTAWVFGGGTKLTVL

SEQ ID NO: 8233 - protein, 110 aa, Artificial Sequence
  Synthetic construct
QSALTQPASVSGSPGQSITISCTGSSSDVGGYNHVSWYQQHPGKAPKLMIYDVTNRPSGVSNRFSGSKSGNTASLTISGLQAEDEADYYCCSYTTSSTRVFGGGTKLTVL

SEQ ID NO: 8234 - protein, 107 aa, Artificial Sequence
  Synthetic construct
EIVMTQSPATLSVSPGERATLSCRASQSVSSNLAWYQQKPGQAPRLLIYGASTRATGIPARFSGSGSGTEFTLTISSLQSEDFAVYYCQQYNNWPQTFGQGTKVEIK

SEQ ID NO: 8235 - protein, 109 aa, Artificial Sequence
  Synthetic construct
AIRITQSPSSLSASTGDRVTITCRASQGISSYLAWYQQKPGKAPKLLIYAASTLQSGVPSRFSGSGSGTDFTLTISCLQSEDFATYYCQQYYSYPPMYTFGQGTKLEIK

SEQ ID NO: 8236 - protein, 111 aa, Artificial Sequence
  Synthetic construct
QSVLTQPPSVSAAPGQKVTISCSGSSSNIGNNYVSWYQQLPGTAPKLLIYDNNKRPSGIPDRFSGSKSGTSATLGITGLQTGDEADYYCGTWDSSLSAGQVFGTGTKVTVL

SEQ ID NO: 8237 - protein, 108 aa, Artificial Sequence
  Synthetic construct
EIVMTQSPATLSVSPGERATLSCRASQSVSSNLAWYQQRPGQAPRLLIYAASTRATGIPARFSGSGSGTEYTLTISSLQSEDFAVYYCQQYNIWPPLTFGGGTKVEIK

SEQ ID NO: 8238 - protein, 106 aa, Artificial Sequence
  Synthetic construct
DIQMTQSPSTLSASVGDRVTITCRASQSISRWLAWYQQKPGKAPKLLIYKASSLESGVPSRISGNGSGTEFTLTISSLQPDDFATYYCQQYNSSPTFGQGTKLEIK

SEQ ID NO: 8239 - protein, 107 aa, Artificial Sequence; identical to SEQ ID NO: 8065
  Synthetic construct

SEQ ID NO: 8240 - protein, 110 aa, Artificial Sequence; identical to SEQ ID NO: 8146
  Synthetic construct

SEQ ID NO: 8241 - protein, 108 aa, Artificial Sequence
  Synthetic construct
EIVLTQSPGTLSLSPGETATLSCRAGQSVSDNSLAWYQQKPGQAPRLLIYGASSRATDIPGRFSGSGSGTDFILTISRLEPEDFAMYYCQQYDSSPITFGQGTRLEIK

SEQ ID NO: 8242 - protein, 112 aa, Artificial Sequence
  Synthetic construct
DIVMTQSPLSLPVTPGEPASISCRSSQSLLNSDGYTYLDWYLQKPGQSPQLLIYLGSNRASGVPDRFSGSGSGTDFTLKISRVEAEDVGVYYCMQGLQTPPTFGQGTKVEIK

SEQ ID NO: 8243 - protein, 107 aa, Artificial Sequence
  Synthetic construct
EIVLTQSPDFQSVTPKEKVTITCRASQSIGSSLHWYQQKPDQSPKLLIKYASQSISGVPSRFSGSGSGTDFTLTINSLEAEDAAAYYCHQSSSLPRTFGQGTKVEIK

SEQ ID NO: 8244 - protein, 107 aa, Artificial Sequence
  Synthetic construct
AIQMTQSPSSLSASVGDRVTITCRASQDIRDDLGWYQQKPGKAPKLLIYVASTLQSGVPPRFSGSGSGTDFTLTISSLQPEDFAIYYCLQDHTYPLTFGGGTKVEIK

SEQ ID NO: 8245 - protein, 110 aa, Artificial Sequence; identical to SEQ ID NO: 8067
  Synthetic construct

SEQ ID NO: 8246 - protein, 106 aa, Artificial Sequence
  Synthetic construct
DIQMTQSPSTLSASVGDTVTITCRASQSIGRWLAWYQQKPGEAPNLLIYKSSILKNGVSSRFSGSGSETEFTLTISSLQPDDFAAYYCQHYDGYWTFGQGTKVDIK

SEQ ID NO: 8247 - protein, 110 aa, Artificial Sequence
  Synthetic construct
NFMLSQPHSVSESPGKTITISCTRNSGSIASNYVQWYQQRPGSSPTSVIYEDDKRPSGVPDRFSGSIDSSSNSASLTISGLKPEDEGDYYCQSYERNIWVFGGGTKLTVL

SEQ ID NO: 8248 - protein, 107 aa, Artificial Sequence
  Synthetic construct
DIHMTQSPSSVSASVGDRVTITCRASQRINNWLAWYQQKPGKAPKLLIYTASSLQSGVPSRFSGSASGTDFTLTISSLQPEDSGTYYCQQVNSFPLTFGPGTKVEIK

SEQ ID NO: 8249 - protein, 107 aa, Artificial Sequence
  Synthetic construct
AIQLTQSPSSLSASVGDRVTITCRASQGISSYLAWYQQKPGKAPKLLIYAASTLQSGVPSRFSGSGSGTDFTLTISSLQPEDFATYYCQQLNSYPLTFGGGTKVEIK

SEQ ID NO: 8250 - protein, 109 aa, Artificial Sequence
  Synthetic construct
QSVLTQPPSVSAAPGQKVTISCSGSSSNIGNNYVSWYQQLPGTAPKLLIYDNNKRPSGIPDRFSGSKSGTSATLGITGLQTGDEADYYCGTWDSSLDWVFGGGTKLTVL

SEQ ID NO: 8251 - protein, 107 aa, Artificial Sequence; identical to SEQ ID NO: 8065
  Synthetic construct

SEQ ID NO: 8252 - protein, 110 aa, Artificial Sequence
  Synthetic construct
QSALTQPASVSGSPGQSITISCTGASSDIGGYDFVSWYQQHPGKAPKLIIHGVNTRPSGVSSRFSDSRSATTASLTISGLQAEDEADYYCCVYSNKNVYVFGGGTKVTVL

SEQ ID NO: 8253 - protein, 107 aa, Artificial Sequence
  Synthetic construct
EVVLTQSPGTLSLSPGDRATLSCRASQSVTSSFLAWYQQKPGQAPRLLIYGTSNRATSIPDRFSGSGFGTEFTLTISRLEPEDFAVYYCQQYDSSFTFGPGTKVVLK

SEQ ID NO: 8254 - protein, 107 aa, Artificial Sequence; identical to SEQ ID NO: 8152
  Synthetic construct

SEQ ID NO: 8255 - protein, 110 aa, Artificial Sequence
  Synthetic construct
QSALTQPASVSGSPGQSITISCTGTSSDVGSYNLVSWYQQHPGKAPKLMIYEVSKRPSGVSNRFSGSKSGNTASLTISGLQAEDEADYYCCSYAGSSTWVFGGGTKLTVL

SEQ ID NO: 8256 - protein, 108 aa, Artificial Sequence
  Synthetic construct
SYELTQPPSVSVSPGQTARITCSGDALPKKYAYWYQQKSGQAPVLVIYEDSKRPSGIPERFSGSSSGTMATLTISGAQVEDEADYYCYSTDSSGNHKVFGGGTKLTVL

SEQ ID NO: 8257 - protein, 111 aa, Artificial Sequence
  Synthetic construct
QSALTQPASVSGSPGQSITISCTGTSSDVGSYNLVSWYQQHPGKAPKLMIYEGSKRPSGVSNRFSGSKSGNTASLTISGLQAEDEADYYCCSYAGSSTFVVFGGGTKLTVL

SEQ ID NO: 8258 - protein, 108 aa, Artificial Sequence
  Synthetic construct
EIVLTQSPGTLSLSPGERATLSCRASQSVSSSYLAWYQQKPGQAPRLLIYGASSRATGIPDRFSGSGSGTDFTLTISRLEPEDFAVYYCQQYGSSPWTFGQGTKVEIK

SEQ ID NO: 8259 - protein, 111 aa, Artificial Sequence
  Synthetic construct
QSALTQPASVSGSPGQSITIPCTGTGNDVGAFDFVSWYQQHPGKAPKLILHDVTNRPSGISNRFSGSKSGNTASLTISGLRAEDEADYYCSSYRNSNTLVVFGTGTQVTVL

SEQ ID NO: 8260 - protein, 113 aa, Artificial Sequence
  Synthetic construct
VIVLTQSPLSLPVTPGEPASISCRSSQSLLDSKSGYIYLDWYVQKPGQSPQLLIYTISYRASGVPDRFIGSGSDTDFTLKISRVEAEDVGVYYCMHRLEFPLTFGGGTKLEIK

SEQ ID NO: 8261 - protein, 110 aa, Artificial Sequence
  Synthetic construct
NFMLTQPHSVSESPGKTATISCTRSSGNIASNYVQWYQQRPGSSPTCVIYDDNERPSGVPDRFSGSIDSSSNSASLTISGLKTEDEADYYCQSYDSSSWVFGGGTKLTVL

SEQ ID NO: 8262 - protein, 111 aa, Artificial Sequence
  Synthetic construct
QSVLTQPPSASGTPGQSVTMSCSGSSSNIGSNPVNWYQKVPEGAPKLLIFGDDQRPSGVPDRFSGAKSGTSASLAISGLQSEDEADYYCAAWDDSLNGHVVFGGGTKLTVL

SEQ ID NO: 8263 - protein, 113 aa, Artificial Sequence
  Synthetic construct
DIVMTQSPDSLAVSLGERATINCKSSQSVLYSSSNKNYLAWYQQKPGQPPKLLIYWASTRESGVPDRFSGSGSGTDFTLTISSLQAEDVAVYYCQQYFSTPWTFGQGTKVEIK

SEQ ID NO: 8264 - protein, 111 aa, Artificial Sequence
  Synthetic construct
QSALTQPRSVSGSPGQSVTISCIGTSSEVGGYNYVSWYQQHPDKAPKLMIYDVNKRPSGVPDRFSGFKSANAASLTISGLRAEDEADYYCCSYAGRNTYWVFGGGTKLTVV

SEQ ID NO: 8265 - protein, 106 aa, Artificial Sequence
  Synthetic construct
DIQMTQSPSTLSASVGDRVTITCRASQSISSWLAWYQQKPGKAPKLLIYKASSLESGVPSRFSGSGSGTEFTLTISSLQPDDFATYYCQQYNSYWTFGQGTKVEIK

SEQ ID NO: 8266 - protein, 112 aa, Artificial Sequence
  Synthetic construct
DIVMTQSPDSLAVSLGERATINCKSSQSVLYSSNNKDYLAWYQQKPGQPPKLLISWASTRESGVPDRFSGSGSGTDFTLTISSLQSEDVALYYCQQYSTTLSFGQGTKVEIK

SEQ ID NO: 8267 - protein, 107 aa, Artificial Sequence
  Synthetic construct
EIVLTQSPATLSLSPGERATLSCRASQSVSSYLAWYQQKPGQAPRLLIYDASNRATGIPARFSGSGSGTDFTLTISSLEPEDFAVYYCQQRSNWPLTFGGGTKVEIK

SEQ ID NO: 8268 - protein, 109 aa, Artificial Sequence
  Synthetic construct
SYVLTQPPSVSVAPGQTARISCAGDNIDQNHVNWYQQRPGQAPVLVIHYDGDRPSGIPERFSGSNSANTAALTITSVEAGDEADYYCLIYDNTLDHPYVFGSGTKLTVS

SEQ ID NO: 8269 - protein, 107 aa, Artificial Sequence
  Synthetic construct
DIQMTQSPSTLSASVGDRVTITCRASQSISSWLAWYQQKPGKAPKLLIYKASSLESGVPSRFSGSGSGTEFTLTISSLQPDDFATYYCQQYNSYWWTFGQGTKVEIK

SEQ ID NO: 8270 - protein, 108 aa, Artificial Sequence
  Synthetic construct
AIRITQSPSSLSASTGDRVTITCRASQGISSYLAWYQQKPGKAPKLLIYAASTLQSGVPSRFSGSGSGTDFTLTISCLQSEDFATYYCQQYYSYPRLTFGGGTKVEIK

SEQ ID NO: 8271 - protein, 112 aa, Artificial Sequence
  Synthetic construct
DIVMTQSPLSLPVTPGEPASISCRSSQSLLHSNGYNYLDWYLQKPGQSPQLLIYLGSNRASGVPDRFSGSGSGTDFTLKISRVEAEDVGVYYCMQALQTPRTFGQGTKVEIK

SEQ ID NO: 8272 - protein, 107 aa, Artificial Sequence
  Synthetic construct
VIQLTQSPSSLSASVGDTVTITCRASHDIGSDLGWYQQKPGKAPKLLIYAASNLQDGVPSRFSGTGSGTDFTLFIKSLQPEDFAVYYCLQDYNLPWTFGQGTRVEVK

SEQ ID NO: 8273 - protein, 109 aa, Artificial Sequence
  Synthetic construct
QSALTQPASVSASPGQSITISCTGSSSDFGTYHYVAWYQQHPANAPKLLLYDVSNRPAGVSNRFSGSKSGNTASLTISWLQAEDEADYYCSSHTSTSVLFGGGTKLTVL

SEQ ID NO: 8274 - protein, 107 aa, Artificial Sequence
  Synthetic construct
SFELTQPPSVSVSPGQTARITCSADALPNQYAYWYQQKPGQAPVLVIYKDTERPSGIPERFSGSSSGTTVTLTISGVQAEDEADYYCQSADSSATVVFGGGTRLTVL

SEQ ID NO: 8275 - protein, 112 aa, Artificial Sequence; identical to SEQ ID NO: 57
  Synthetic construct

SEQ ID NO: 8276 - protein, 113 aa, Artificial Sequence
  Synthetic construct
DIVMTQSPDSLAVSLGERATINCKSSQSVLYSSNNKNYLAWYQQKPGQPPKLLIYWASTRESGVPDRFSGSGSGTDFTLTISSLQAEDVAVYYCQQYYSTPLTFGGGTKVEIK

SEQ ID NO: 8277 - protein, 113 aa, Artificial Sequence; identical to SEQ ID NO: 8086
  Synthetic construct

SEQ ID NO: 8278 - protein, 110 aa, Artificial Sequence; identical to SEQ ID NO: 8220
  Synthetic construct

SEQ ID NO: 8279 - protein, 110 aa, Artificial Sequence
  Synthetic construct
QSVLTQSPSLSAAPGQNVAISCSGSDYNIGNNFVSWYQQLPGTAPKLLIYDNNERPSGIPDRFSGSAAGTSATLGITGLQAGDEGDYYCATWDGGLNSYVFGTGTRVTVR

SEQ ID NO: 8280 - protein, 110 aa, Artificial Sequence
  Synthetic construct
QSALTQPASVSGSPGQSITISCTGTSSDVGSYNLVSWYQQHPGKAPKLMIYEGSKRPSGVSNRFSGSKSGNTASLTISGLQAEDEADYYCCSYAGSSTLVFGGGTKLTVL

SEQ ID NO: 8281 - protein, 110 aa, Artificial Sequence
  Synthetic construct
QSVLTQPTSVSGSPGQSITISCTGTSSDVGGYNYVSWYQQHPGKAPKLMIYDVSKRPSGVSNRFSGSKSGNTASLTISGLQAEDEADYYCSSYTSSTTQVFGTGTKVTVL

SEQ ID NO: 8282 - protein, 107 aa, Artificial Sequence
  Synthetic construct
DIQMTQSPSTLSASVGDRVTITCRASQSISSWLAWYQQKPGKAPKLLIYKASSLESGVPSRFSGSGSGTEFTLTISSLQPDDFATYYCQQYNSYSYTFGQGTKLEIK

SEQ ID NO: 8283 - protein, 107 aa, Artificial Sequence
  Synthetic construct
SYELTQSPSVSVSPGQTARITCSSDALPNQYTYWYQQKPGQAPILIIYKDTARASGIPERFSASTSGTTVTLTISEVQAADEADYHCLSADSNANYVFGPGTKVTVL

SEQ ID NO: 8284 - protein, 110 aa, Artificial Sequence; identical to SEQ ID NO: 8220
  Synthetic construct

SEQ ID NO: 8285 - protein, 110 aa, Artificial Sequence
  Synthetic construct
SSEVTQDPAVSVALGQTVKITCHGDSLGSYCVNWYQQKPRQAPVLVIYGDNKRPSGIPDRFSGSRSGNTASLLITGAQAEDEADYYCSSRDSNTYLRGMVFGGGTKLTVF

SEQ ID NO: 8286 - protein, 113 aa, Artificial Sequence; identical to SEQ ID NO: 8276
  Synthetic construct

SEQ ID NO: 8287 - protein, 113 aa, Artificial Sequence; identical to SEQ ID NO: 8086
  Synthetic construct

SEQ ID NO: 8288 - protein, 107 aa, Artificial Sequence
  Synthetic construct
EIVLTQSPGTLSLSPGERATLSCRASQSVNNNYLAWYQQRPGQAPRLLIYGASTRATGIPDRFTGSGSGTDFTLIINRLEPEDFAVYYCQQYGTSHKFGRGTRVEIK

SEQ ID NO: 8289 - protein, 109 aa, Artificial Sequence
  Synthetic construct
EVVLTQSPGTLSLSPGERATLSCRASQTVSSSYLAWYQQKPGQAPRLLIYATSSRAAGIPDRFSGSGSGTDFTLTINRLEPEDFAVYYCQQFGRSSPLTFGGGTKVEIK

SEQ ID NO: 8290 - protein, 110 aa, Artificial Sequence
  Synthetic construct
QSALTQPASVSGSPGQSITISCTGTSSDVGSYGLVSWYQQHPGRAPKLMIYEVSKRPSGVSNRFSGSKSGDTASLTISGLQAEDEADYYCCSYAGSSTWVFGGGTKLTVL

SEQ ID NO: 8291 - protein, 106 aa, Artificial Sequence
  Synthetic construct
SHELTQPSSVSVSPGQTATIACSGDVLKNRYARWFQQRPGQAPVLILYGDTERPTGVPERFSGSSTGTTVTLTISGAHVDDEADYYCYCAAGNEGIFGGGTKLTVL

SEQ ID NO: 8292 - protein, 110 aa, Artificial Sequence
  Synthetic construct
QSVLTQPPSASGTPGQRVTISCSGSSSNIGSNTVNWYQQLPGTAPKLLIYSNNQRPSGVPDRFSGSKSGTSASLAISGLQSEDEADYYCAAWDDSLNAVVFGGGTKLTVL

SEQ ID NO: 8293 - protein, 113 aa, Artificial Sequence; identical to SEQ ID NO: 8086
  Synthetic construct

SEQ ID NO: 8294 - protein, 107 aa, Artificial Sequence
  Synthetic construct
DIQMTQSPSSLSASVGDRVTITCRASQGISNYLAWYQQKPGKVPKLLIYAASTLQSGVPSRFSGSGSGTDFTLTISSLQPEDVATYYCQKYNSAPRTFGQGTKVEIK

SEQ ID NO: 8295 - protein, 110 aa, Artificial Sequence
  Synthetic construct
QSVLTQSPSTSGTPGQRVTISCSGSTSNIGSNTVNWYQQVPGTAPKLLIYSNNQRPSGVPDRFSGSKSGTSASLAISGLQSEDEADYYCATWDDSLNVVVFGGGTKLTVL

SEQ ID NO: 8296 - protein, 107 aa, Artificial Sequence
  Synthetic construct
DIQMTQSPSSLSASVGDRVNITCRASQRIGTSLNWYQQTPGMAPKLLIYAESSLQSGVPSRFSGSGSGTDFTLTISSLQPDDFATYYCQQSYNIPRTFGQGTKVEIK

SEQ ID NO: 8297 - protein, 108 aa, Artificial Sequence
  Synthetic construct
EIALTQSPGTLSLSPGERATLTCVASQRIGSNHLAWYQQKPGQAPRLLVYGASRRAAGVADRFSGSGSATHFILTITRLEPEDDAVYYCQQYDASPLSFGGGTKVEIK

SEQ ID NO: 8298 - protein, 107 aa, Artificial Sequence
  Synthetic construct
EIVLTQSPATLSLSPGERATLSCRASQSVSSYLAWYQQKPGQAPRLLIFDASKRATGIPARFSGSGSGTDFTLTISSLEPEDFAVYYCQQRTNWSYTFGQGTKLEIK

SEQ ID NO: 8299 - protein, 109 aa, Artificial Sequence
  Synthetic construct
AIQLTQSPSSLSASLGDRVTITCRASQGIGNSLLWYQLKPGKPPKVLIYDASSLESGVPSRFSGSGSGTDFSLTISSLQPEDFATYYCQQFANYPQELSFGGGTKVEIK

SEQ ID NO: 8300 - protein, 110 aa, Artificial Sequence
  Synthetic construct
QSVLTQPPSASGTAGQRVTISCSGGSSNIGSHTVNWYQQLPGTAPKLFIYTNNQRPSGVPARFSGSKSGTSASLAISGLQSEDEADYYCAVWDDSLSGPVFGGGTKVTVL

SEQ ID NO: 8301 - protein, 111 aa, Artificial Sequence
  Synthetic construct
HSALTQPASVSGSPGQSITISCTGTNDDVGSYNYVSWYQQYPGKAPKLMIYDVSDRPSGISNRFSGSKSGNTASLTISGLQAEDEADYYCTSYSIGSTLVVFGGGTKLTVL

SEQ ID NO: 8302 - protein, 110 aa, Artificial Sequence
  Synthetic construct
QSVLTQPPSVSAAPGQKVTISCSGSSSNIGNNYVSWYQQLPGTAPKLLIYDNNKRPSGIPDRFSGSKSGTSATLGITGLQTGDEADYYCGTWDSSLSAAVFGGGTQLTVL

SEQ ID NO: 8303 - protein, 112 aa, Artificial Sequence
  Synthetic construct
DVVMTQSPLSLPVTLGQSASISCRSSQSVVHIDGNTYLYWFHQRPGQSPRRLIYKVSNRDSGVPDRFSGSGSGTDFTLKISRVEAEDVGVYYCMQGTHWPRTFGHGTKVEIK

SEQ ID NO: 8304 - protein, 107 aa, Artificial Sequence
  Synthetic construct
DIQMTQSPSTLSASVGDRVTITCRASQSISSWLAWYQQKPGKAPKLLIYKASSLESGVPSRFSGSGSGTEFTLTISSLQPDDFATYYCQQYNSYPYTFGQGTKLEIK

SEQ ID NO: 8305 - protein, 112 aa, Artificial Sequence
  Synthetic construct
DIVMTQSPLSLPVTPGEPASISCRSSQSLLHSNGYNYLDWYLQKPGQSPQLLIYLGSNRASGVPDRFSGSGSGTDFTLKISRVEAEDVGVYYCMQALQTPWTFGQGTKVEIK

SEQ ID NO: 8306 - protein, 109 aa, Artificial Sequence
  Synthetic construct
KLVLTQSPGTLSLSPGERVTLSCRASQTIRSNYLAWYQHKPGQPPRLLIYDASSRAAGIPDRFSGSGSGTDFTLTISRLEPEDFAVYTCQQYGSSPPYTFGQGTNLQIK

SEQ ID NO: 8307 - protein, 110 aa, Artificial Sequence
  Synthetic construct
QSVLTQPPSASGTPGQRVTISCSGSSSNIGRDYVFWYQQLPGTAPKFLIYSNNQRPSGVPDRFSGSKSGTSASLAISGLRSEDEADYYCATWDGSLSAWVFGGGTKLTVL

SEQ ID NO: 8308 - protein, 111 aa, Artificial Sequence
  Synthetic construct
QSVLTQPPSASGTPGQRVTISCSGSSSSIGSNYVYWYQQLPGTSPKLLIYRNNQRPSGVPDRFSGSKSGTSASLAISGLRSEDEADYYCAAWDDSLSGRVVFGGGTKVTVL

SEQ ID NO: 8309 - protein, 111 aa, Artificial Sequence
  Synthetic construct
QSVLTQPPSASGTPGQRVTISCSGSSSNIGSNYVYWYQQLPGTAPKLLIYRNNQRPSGVPDRFSGSKSGTSASLAISGLRSEDEADYYCAAWDDSLSGRYVFGTGTKVTVL

SEQ ID NO: 8310 - protein, 107 aa, Artificial Sequence
  Synthetic construct
AIRVTQSPASLSASTGDRVIITCRASQDISNFLAWYQQKPGQAPKLLVYGATTLRSGVPSRFSGRGSGTEFTLIISFLQSEDFATYYCQQYYDYPLTFGPGTKVDIK

SEQ ID NO: 8311 - protein, 106 aa, Artificial Sequence; identical to SEQ ID NO: 8291
  Synthetic construct

SEQ ID NO: 8312 - protein, 107 aa, Artificial Sequence
  Synthetic construct
SYELTQPSSVSVSPGQTARITCSGDVLAKKYARWFQQKPGQAPVLVIYKDSERPSGIPERFSGSSSGTTVTLTISGAQVEDEADYYCYSAADNNQGVFGGGTKLTVL

SEQ ID NO: 8313 - protein, 113 aa, Artificial Sequence
  Synthetic construct
DIVMTQSPDSLAVSLGERATINCKSSQSVLYSSNNKNYLAWYQQKPGQPPKLLIYWASTRESGVPDRFSGSGSGTDFTLTISSLQAEDVAVYYCQQYYSTPQTFGQGTKVEIK

SEQ ID NO: 8314 - protein, 107 aa, Artificial Sequence
  Synthetic construct
DIQMTQSPSTLSASIGDRVTITCRASQSISSWLAWYQQKPGKAPKLLIYKASSLKSGVPSRFSGSGSGTEFTLTISSLQPDDFATYYCQHYNSYPWTFGQGTKVEIK

SEQ ID NO: 8315 - protein, 112 aa, Artificial Sequence
  Synthetic construct
DIVMTQSPLSLPVTPGEPASISCRSSQSLLHSNGYNYLDWYLQKPGQSPQLLIYLGSNRASGVPDRFSGSGSGTDFTLKISRVEAEDVGVYYCMQALQTPYTFGQGTKLEIK

SEQ ID NO: 8316 - protein, 112 aa, Artificial Sequence
  Synthetic construct
DIVMTQTPLSLSVTPGQPASISCKSSQSLLHSDGKTYLYWYLQKPGQSPQLLIYEVSSRFSGVPDRFSGSGSGTDFTLKISRVEAEDVGVYYCMQGIHLPRTFGQGTKVEIK

SEQ ID NO: 8317 - protein, 110 aa, Artificial Sequence
  Synthetic construct
QSVLTQPPSASGTPGQWVTISCSGSSSDIGSSTVNWYQQFPGTAPKLLIYSNHLRPSGVPDRFSGSKSGTSASLAISGLQSEDEADYYCAAWDDGLNGYVFGTGTRVTVP

SEQ ID NO: 8318 - protein, 107 aa, Artificial Sequence
  Synthetic construct
DIQMTQSPSSLSASIGDRVIISCRASQTISAHLTWYQHKPKKAPRLLIFGASSLQDGVPSRFSGSGSGTDFTLTISSLQSEDYATYYCQQSHSAPYTFGPGTKVDIR

SEQ ID NO: 8319 - protein, 107 aa, Artificial Sequence; identical to SEQ ID NO: 8065
  Synthetic construct

SEQ ID NO: 8320 - protein, 107 aa, Artificial Sequence
  Synthetic construct
DIQMTQSPSSLSASVGDRVIITCRASQSINNYLNWYQQKPGKAPKVLIYAASSLHRGVPSRFSGSGSGTDFTLTISSLQPEDFATYFCQQSYSSPRTFGQGTKVDMK

SEQ ID NO: 8321 - protein, 107 aa, Artificial Sequence
  Synthetic construct
DIQMTQSPSSLSASVGDRATITCRASQSINIYLHWYQQKPGKAPKLLIYAASTLHTGVPTRFSGSGSGTDFTLTIRSLQPEDFATYYCQQSYSTPPTFGQGTKVEIK

SEQ ID NO: 8322 - protein, 109 aa, Artificial Sequence
  Synthetic construct
QSVLTQPPSASGTPGQRVTISCSGSSSNIGSNTVNWYQQLPGTAPKVLIYSNNQRPSGVPDRFSGSKSGTSASLAISGLQSEDEADYYCSAWDDSLKAVFGGGTRLTVL

SEQ ID NO: 8323 - protein, 107 aa, Artificial Sequence
  Synthetic construct
ENVLTQSPGTLSLSPGERATLSCRAGQTVKSNYLAWYQRKPGQAPRLLIYGASNRAAGIPDRFSGSGSGTDFTLTISRLEPEDCALYYCQQYGSSPTFGQGTKVEIK

SEQ ID NO: 8324 - protein, 111 aa, Artificial Sequence
  Synthetic construct
NFMLTQPHSVSESPGKTVTISCTRSSGSIASDYVQWYQQRPGSSPTTVIYEDNERPSGVPDRFSGSIDSSSNSASLTISGLKTEDEADYYCQSYDSSLTWVFGGGTKLTVL

SEQ ID NO: 8325 - protein, 108 aa, Artificial Sequence
  Synthetic construct
EIVLTQSPGTLSLSPGERATLSCRASQSVTRSSLAWYQQKPGQAPRLLIYGASSRATGIPDRFSGSGSGTDFTLTISRLEPEDFAVYYCQQYGSSPRIFGQGTKLEIR

SEQ ID NO: 8326 - protein, 108 aa, Artificial Sequence
  Synthetic construct
SYELTQPPSVSVSPGQTAKISCSGDALAKIYAHWYQQKAGQAPTLVMYKDTVRPSGIPERFSGSSSGTTVTLTISGAQAEDEADYYCQSADSSGSYEVFGGGTKLTVL

SEQ ID NO: 8327 - protein, 109 aa, Artificial Sequence
  Synthetic construct
SSELTQDPAVSVALGQTVRITCQGDSLRSYYASWYQQKPGQAPVLVIYGKNNRPSGIPDRFSGSSSGNTASLTITGAQAEDEADYYCNSRDSSGNHLGVFGTGTKVTVL

SEQ ID NO: 8328 - protein, 103 aa, Artificial Sequence; identical to SEQ ID NO: 58
  Synthetic construct

SEQ ID NO: 8329 - protein, 110 aa, Artificial Sequence
  Synthetic construct
QSVLTQPPSVSAAPGQKVTISCSGSSSNIGNGYVFWYQQLPGTAPKLLIYDNNKRPSGISDRFSGSKSGTSATLGITGLQTGDEADYYCGTWDISLSDGVFGGGTKLTVL

SEQ ID NO: 8330 - protein, 111 aa, Artificial Sequence
  Synthetic construct
QLVLSQSPSVSASLGASVKLTCTLSSAHSTYAITWHQQQPEKGPRYLMSLNSDGSHTKGDGVPDRFSGSSSGPERFLIISSLQSDDEADYYCQTWGIGVVVFGGGTKLTVL

SEQ ID NO: 8331 - protein, 108 aa, Artificial Sequence
  Synthetic construct
SSELTQDPAVSVALGQTVRITCQGDSLRSNYASWYQQRPGQAPVLVIYDENNRPSGIPDRFSGSTSGNTASLTITGAQAEDEADYYCNSRDRSGNHWVFGGGTKLTVL

SEQ ID NO: 8332 - protein, 109 aa, Artificial Sequence; identical to SEQ ID NO: 8306
  Synthetic construct

SEQ ID NO: 8333 - protein, 106 aa, Artificial Sequence
  Synthetic construct
DIQLTQSPSTLSASVGDRVTITCRASQSFTNWLAWYQQKPGKAPKVLIYKTSKLQNGVPSRFSGGGSGTEFTLTINSLQPDDFATYYCQQYNSPYTFGQGTKLEIK

SEQ ID NO: 8334 - protein, 110 aa, Artificial Sequence
  Synthetic construct
QSVLTQPPSVSAAPGQKVTISCSGSSSNIGNNYVSWYQQLPGTAPKLLIYDNNKRPSGIPDRFSGSKSGTSATLGITGLQTGDEADYYCGTWDSSLSGGVFGGGTKLTVL

SEQ ID NO: 8335 - protein, 106 aa, Artificial Sequence; identical to SEQ ID NO: 8291
  Synthetic construct

SEQ ID NO: 8336 - protein, 107 aa, Artificial Sequence
  Synthetic construct
DIQMTQSPSSLSASVGDRVTITCRASQSISNYLNWYQQKPGKAPNLLIYAASTLQSGVPSRFSGSGSGTYFTLTISSLQPADSATYYCQQTYSTPYTFGQGTDLEIK

SEQ ID NO: 8337 - protein, 107 aa, Artificial Sequence
  Synthetic construct
DIQMTQSPSTLSASVGDRVTITCRASQSISSWLAWYQQKPGKAPKLLIYKASSLESGVPSRFSGSGSGTEFTLTISSLQPDDFATYYCQQYNSYSQTFGQGTKVEIK

SEQ ID NO: 8338 - protein, 107 aa, Artificial Sequence; identical to SEQ ID NO: 8091
  Synthetic construct

SEQ ID NO: 8339 - protein, 105 aa, Artificial Sequence
  Synthetic construct
EIVLTQSPTIVSLLPGETATLSCRPSQSVSRLAWYQQQPGQPPRLLIYDATRRATGIPDRFSGSGSGTDFTLTISGLEPEDFAVFYCQQYDGSPTFGPGTKVDVD

SEQ ID NO: 8340 - protein, 107 aa, Artificial Sequence
  Synthetic construct
EIVMTQSPATLSVSPGERATLSCRASQSVSSNLAWYQQKPGQAPRLLIYGASTRATGIPARFSGSGSGTEFTLTISSLQSEDFAVYYCQQYNNWPYTFGQGTKLEIK

SEQ ID NO: 8341 - protein, 108 aa, Artificial Sequence
  Synthetic construct
EIVLTQSPGTLSLSPGETATLSCRASQSVSSSQLAWYQQKPGQAPRLVIYGASFRATDIPDRFSGSGSGTDFTLTISRLEPEDFAVYYCQQYGSLPITFGQGTRLEIK

SEQ ID NO: 8342 - protein, 105 aa, Artificial Sequence; identical to SEQ ID NO: 8339
  Synthetic construct

SEQ ID NO: 8343 - protein, 110 aa, Artificial Sequence
  Synthetic construct
QSVLTQPPSVSAAPGQKVTISCSGSSSNIGNNYVSWYQQLPGTAPKLLIYDNNKRPSGIPDRFSGSKSGTSATLGITGLQTGDEADYYCGTWDSSLSAQVFGGGTKLTVL

SEQ ID NO: 8344 - protein, 110 aa, Artificial Sequence
  Synthetic construct
DIQMTQSPPSLSASVGDRVTITCQASQDISNYLNWYQHKPGKAPKLLIYDASNLETGVPSRFSGSGSGTDFTFTINPLQPEDIATYYCQLYDNLPPGMYTFGQGTKLEIK

SEQ ID NO: 8345 - protein, 107 aa, Artificial Sequence
  Synthetic construct
AIQLTQSPSSLSASVGDRVTITCRASQGIGNYLAWYQQKPGKAPKLLIYLAATLQSGVPSRFSGSGSGTDFTLTISSLQPEDFAIYYCQQLNIYPRTFGQGTKVEVK

SEQ ID NO: 8346 - protein, 107 aa, Artificial Sequence; identical to SEQ ID NO: 8065
  Synthetic construct

SEQ ID NO: 8347 - protein, 107 aa, Artificial Sequence; identical to SEQ ID NO: 8065
  Synthetic construct

SEQ ID NO: 8348 - protein, 109 aa, Artificial Sequence
  Synthetic construct
EIVLTQSPGTLSLSPGETASLSCRASQSVSTTHLAWYQQKPGQAPRLLIYGASSRAPGIPDRFSGSGSGTDFTLTINRLEPEDFAVYYCHQCSTSPPYTFGPGTKLEFK

SEQ ID NO: 8349 - protein, 108 aa, Artificial Sequence
  Synthetic construct
EVVLTQSPGTLSLSAGERATLSCRTSQSVSSSSLGWYHQKPGQAPRLLIFGASNRAPGIPDRFSGSGSGTDFSLTISRLEPEDFAVYYCQQYGSSPFTFGGGTRVEIK

SEQ ID NO: 8350 - protein, 109 aa, Artificial Sequence
  Synthetic construct
EIVLTQSPGTLSLSPGERATLSCRASQSVSSSSLAWYQQKPGQAPRLLIYGASSRATGIPDRFSGSGSGTDFTLTISRLEPEDFAVYYCQHYGTSPMYTFGQGTKLEIK

SEQ ID NO: 8351 - protein, 108 aa, Artificial Sequence
  Synthetic construct
EVVLTQSPGTLSLSAGERATLSCRTSQTVSSSALGWYHQKPGQAPRLLIFGASNRAPGIPDRFSGSGSGTDFSLTISRLEPEDCGVYYCQQYGSSPFTFGGGTRVEIK

SEQ ID NO: 8352 - protein, 110 aa, Artificial Sequence; identical to SEQ ID NO: 8067
  Synthetic construct

SEQ ID NO: 8353 - protein, 107 aa, Artificial Sequence
  Synthetic construct
AIQLTQSPSSLSASVGDRVTIACRASQGIGTYLAWYQQKPGKAPSLLIYSASTLQSGVPSRFSGSGSGTEFALTISGLQPEDFATYYCQQLNIYPRTFGQGTRVEVK

SEQ ID NO: 8354 - protein, 110 aa, Artificial Sequence; identical to SEQ ID NO: 8067
  Synthetic construct

SEQ ID NO: 8355 - protein, 107 aa, Artificial Sequence
  Synthetic construct
EIVLTQSPATLSLSPGERATLSCRASQSVSSYLAWYQQKPGQAPRLLIYDASNRATGIPARFSGSGSGTDFTLTISSLEPEDFAVYYCQQRSNWLITFGQGTRLEIK

SEQ ID NO: 8356 - protein, 107 aa, Artificial Sequence
  Synthetic construct
DIQMTQSPSSLSASVGDRVTITCRASQSISSYLNWYQQKPEKAPKLLIYAASSLQSGVPSRFSGSGSGTDFTLTISSLQPEDFATYYCQQSYSTPWTFGQGTKVEIK

SEQ ID NO: 8357 - protein, 112 aa, Artificial Sequence; identical to SEQ ID NO: 8305
  Synthetic construct

SEQ ID NO: 8358 - protein, 113 aa, Artificial Sequence
  Synthetic construct
DIVMTQSPDSLAVSLGERATINCKSSQTVLYSSNNRNYLAWYQQRPGQPPRLLIYWASSRESGVPDRFSGSGSATDFTLTISSLQAEDVAVYYCQQYYSSPPTFGQGTKVEIK

SEQ ID NO: 8359 - protein, 108 aa, Artificial Sequence
  Synthetic construct
SSELTQDPAVSVALGQTVRITCQGDSLRSYYASWYQQKPGQAPVLVIYGKNNRPSGIPDRFSGSSSGNTASLTITGAQAEDEADYYCNSRDSSGNPLVFGGGTKLTVL

SEQ ID NO: 8360 - protein, 107 aa, Artificial Sequence; identical to SEQ ID NO: 8340
  Synthetic construct

SEQ ID NO: 8361 - protein, 114 aa, Artificial Sequence
  Synthetic construct
DIVMTQSPESLAVSLGERATIRCKAAQTLFSDSNNKNYLAWYQQRRGHPPKLLIYWASTRAFGVPDRFSGAGSGTDFTLTINDLQAEDVATYYCQQYGSTSGYTFGQGTRVEVK

SEQ ID NO: 8362 - protein, 110 aa, Artificial Sequence
  Synthetic construct
QSALTQPASVSGSPGQSITISCTGTSSDVGGYNYVSWYQQHPGKAPKLMIYDVSNRPSGVSNRFSGSKSGNTASLTISGLQAEDEADYYCSSYTSSSTQVFGGGTKLTVL

SEQ ID NO: 8363 - protein, 107 aa, Artificial Sequence
  Synthetic construct
DIQMTQSPSSLSASVGDRVTITCRSNQNINKYLNWFQQKPGKAPKLLIYAASTLESGVPSRFSGSGSGTDFTLTISSLQPEDFATYYCQQSYSTPITFGQGTRLDIK

SEQ ID NO: 8364 - protein, 108 aa, Artificial Sequence
  Synthetic construct
EIVLTQSPGTLSLSPGERATLSCRASQSVSSSYLAWYQQKPGQAPRLLIYGASSRATGIPDRFSGSGSGTDFTLTISRLEPEDFAVYYCQQYGSSPFTFGPGTKVDIK

SEQ ID NO: 8365 - protein, 107 aa, Artificial Sequence; identical to SEQ ID NO: 8065
  Synthetic construct

SEQ ID NO: 8366 - protein, 107 aa, Artificial Sequence
  Synthetic construct
DIQMTQSPSSLSASVGDRVTITCHASQDISHYLNWFQQRPGKAPKLLIYDASILETGVSSRFRGSGSATDFTLTISSLQPEDFATYYCQQYDAPPLTFGGGTKVEVK

SEQ ID NO: 8367 - protein, 112 aa, Artificial Sequence
  Synthetic construct
QSALTQPASVSGSPGQSITISCTGTSSDVGGYNYVSWYQQHPGKAPKLMIYDVSKRPSGVSNRFSGSKSGNTASLTISGLQAEDEADYYCSSYTSSSTFDYVFGTGTKVTVL

SEQ ID NO: 8368 - protein, 107 aa, Artificial Sequence; identical to SEQ ID NO: 8110
  Synthetic construct

SEQ ID NO: 8369 - protein, 107 aa, Artificial Sequence
  Synthetic construct
SYELTQPPSVSVSPGQTASITCSGDKLGDKYACWYQQKPGQSPVLVIYQDSKRPSGIPERFSGSNSGNTATLTISGTQAMDEADYYCQAWDSSTAVVFGGGTKLTVL

SEQ ID NO: 8370 - protein, 107 aa, Artificial Sequence
  Synthetic construct
EIVMTQSPATLSVSPGERATLSCRASQSVSSNLAWYQQKPGQAPRLLIYGASTRATGIPARFSGSGSGTEFTLTISSLQSEDFAVYYCQQYNNWPRTFGQGTKLEIK

SEQ ID NO: 8371 - protein, 110 aa, Artificial Sequence; identical to SEQ ID NO: 8212
  Synthetic construct

SEQ ID NO: 8372 - protein, 110 aa, Artificial Sequence
  Synthetic construct
QSALTQPASVSGSPGQSITISCTGTSSDVGGYNYVSWYQQHPGKAPKLMIYDVSNRPSGVSNRFSGSKSGNTASLTISGLQAEDEADYYCSSYTSSSTLVFGGGTKLTVL

SEQ ID NO: 8373 - protein, 114 aa, Artificial Sequence
  Synthetic construct
DIVMTQSPDSLAVSLGERATINCKSSQSVLYSSNNKNYLAWYQQKPGQPPKLLIYWASTRESGVPDRFSGSGSGTDFTLTISSLQAEDVAVYYCQQYYSTPPWTFGQGTKVEIK

SEQ ID NO: 8374 - protein, 110 aa, Artificial Sequence; identical to SEQ ID NO: 8220
  Synthetic construct

SEQ ID NO: 8375 - protein, 110 aa, Artificial Sequence
  Synthetic construct
QSALTQPASVSGSPGQSITISCTGTNSDLGSYNLVSWYQQHPGKAPKLIIYEAIKRPLGVSSRFSGSRSGKTASLTISGLQGEDEADYYCCSYAGASTVKCGGGTKLTVL

SEQ ID NO: 8376 - protein, 108 aa, Artificial Sequence
  Synthetic construct
SSELTQDPAVSVALGQTVRITCQGDSLRSYYASWYQQKPGQAPVLVIYGKNNRPSGIPDRFSGSSSGNTASLTITGAQAEDEADYYCNSRDSSGNHRVFGGGTKLTVL

SEQ ID NO: 8377 - protein, 112 aa, Artificial Sequence
  Synthetic construct
DVVMTQSPLSLPVTLGQPASISCRSSQSLVHSDGNTYLNWFQQRPGQSPRRLIYKVSNRDSGVPDRFSGSGSGTDFTLKISRVEAEDVGVYYCMQGTHWPPTFGQGTKVEIK

SEQ ID NO: 8378 - protein, 107 aa, Artificial Sequence; identical to SEQ ID NO: 8152
  Synthetic construct

SEQ ID NO: 8379 - protein, 108 aa, Artificial Sequence
  Synthetic construct
EIVLTQSPGTLSLSPGERATLSCRASQNFGSYYLAWFQQKPGQAPRLLVHGASSRAPGIPDRFSGSGSGTDFTLTISRLEPEDFAVYYCHQYGRSPLTFGGGTKVEIK

SEQ ID NO: 8380 - protein, 110 aa, Artificial Sequence
  Synthetic construct
EVVLTQSPGTLSLSPGERATLSCGASQTVSNTYVAWYQQRPGQAPRLLIYAASSRATGIPDRFSGGGSGTDFTLTITRLEPEDFAVYYCQYCGGSPRMFTFGQGTKVEIK

SEQ ID NO: 8381 - protein, 107 aa, Artificial Sequence; identical to SEQ ID NO: 8065
  Synthetic construct

SEQ ID NO: 8382 - protein, 113 aa, Artificial Sequence
  Synthetic construct
DIVMTQSPDSLAVSLGERATVNCKSSQSVLNTSNNKNYLAWYQQKPGQSPNLLIYWASTRESGVPDRFSGSGSGTDFTLTISSLQAEDVAVYYCLQYYNAPYTFGQGTKLEIK

SEQ ID NO: 8383 - protein, 111 aa, Artificial Sequence; identical to SEQ ID NO: 8122
  Synthetic construct

SEQ ID NO: 8384 - protein, 106 aa, Artificial Sequence
  Synthetic construct
SSELTQPPSVSVSPGRTANITCSGHKLSDEYACWYQQKPGQAPVLIIFQDSKRPSGIPERFSGSNSGNTATLTISGTQPMDEADYYCQAWGTTSAVFGGGTKLIVL

SEQ ID NO: 8385 - protein, 112 aa, Artificial Sequence
  Synthetic construct
DVVMTQSPLSLPVSLGQPASISCRSSQSLVHSDGNTYLNWFQQRPGQSPRRLIYKVSNRDSGVPDRFSGSGSGTDFTLKISRVEAEDVGVYYCMQGAHWPVTFGPGTKVDIK

SEQ ID NO: 8386 - protein, 112 aa, Artificial Sequence
  Synthetic construct
ILVLTQSPLSLSVALGQPASISCKSTRSLEHSDGSIRLNWFHQRPGQSPRRLIFNVFGRSSGVPDRFSGSGSGTDFTLTISRVEAEDIGTYYCFQGTFWPLTFGGGTKLEIR

SEQ ID NO: 8387 - protein, 108 aa, Artificial Sequence
  Synthetic construct
EIVLTQSPGTLSLSPGERATLSCRASQSVSSSYLAWYQQKPGQAPRLLIYGASSRATGIPDRFSGSGSGTDFTLTISRLEPEDFAVYYCQQYGSSPQTFGQGTKVEIK

SEQ ID NO: 8388 - protein, 111 aa, Artificial Sequence
  Synthetic construct
QLVLTQSPSASASLGAPVTLTCTLSSGHTNYAIAWHQQKPERGPQFLMKVNSDGNFIQGVGVPDRFSGSSSGAERYLTISSLQSEDEADYYCQTWDTGIKVFGGGTRLTVL

SEQ ID NO: 8389 - protein, 107 aa, Artificial Sequence
  Synthetic construct
AIRITQSPSSLSASTGDRVTITCRASQGISSYLAWYQQKPGKAPKLLIYAASTLQSGVPSRFSGSGSGTDFTLTISCLQSEDFATYYCQQYYSYSITFGQGTRLEIK

SEQ ID NO: 8390 - protein, 109 aa, Artificial Sequence; identical to SEQ ID NO: 8306
  Synthetic construct

SEQ ID NO: 8391 - protein, 113 aa, Artificial Sequence; identical to SEQ ID NO: 8313
  Synthetic construct

SEQ ID NO: 8392 - protein, 113 aa, Artificial Sequence
  Synthetic construct
DIVMTQSPDSLALSLGERATINCKSSQSVLNSSTNKNYLAWYQQKPGQPPKLLIYWAFTRESGVPDRFRGSGSGTDFTLIISSLQAEDVAVYYCQQYYNTPYTFGQGTNLEIK

SEQ ID NO: 8393 - protein, 108 aa, Artificial Sequence
  Synthetic construct
EIVMTQSPATLSVSPGERATLSCRASQSVSSNLAWYQQKPGQAPRLLIYGASTRATGIPARFSGSGSGTEFTLTISSLQSEDFAVYYCQQYNNWPPITFGQGTRLEIK

SEQ ID NO: 8394 - protein, 105 aa, Artificial Sequence
  Synthetic construct
SYDLSQPPSVSVSPGQTASITCSGDKLGDKYTCWYQQRPGQSPVLVIYQDNKRPSGIPERFSGSNSGNTATLTISGTQAVDEADYYCQAWDINTFFGGGTKLTVL

SEQ ID NO: 8395 - protein, 107 aa, Artificial Sequence
  Synthetic construct
EIVLTQSPATLSLSPGEGATLSCRASQSVLKYLAWYQQRPGQAPRLLIYDVSNRATGVPARFSGSGSGTDFTLTISGLEPEDFAVYYCQQRTNWPPTFGGGTKVEIK

SEQ ID NO: 8396 - protein, 107 aa, Artificial Sequence
  Synthetic construct
SYELTQPPSVSVSPGQTASITCSGDKLGDKYACWYQQKPGQSPVLVIYQDSKRPSGIPERFSGSNSGNTATLTISGTQAMDEADYYCQAWDSSTPYVFGTGTKVTVL

SEQ ID NO: 8397 - protein, 107 aa, Artificial Sequence
  Synthetic construct
DIQMTQSPSTLSASVGDRVTITCRASQSISSWLAWYQQKPGKAPKLLIYKASSLESGVPSRFSGSGSGTEFTLTISSLQPDDFATYYCQQYNSYSWTFGQGTKVEIK

SEQ ID NO: 8398 - protein, 113 aa, Artificial Sequence
  Synthetic construct
DIVMTQTPLSLPVTPGEPASISCRSSQSLLNSDDGNTYLDWYLQKPGQSPQLLIYTLSYRASGVPDRFSGSGSGTDFTLKISRVEAEDVGVYYCMQRIEFPITFGQGTRLEIK

SEQ ID NO: 8399 - protein, 110 aa, Artificial Sequence
  Synthetic construct
QSVLTQPPSASGTPGQRVTISCSGSSSNIGSNYVYWYQQFPGTAPRLLIYRNNQRPSGVPDRFSGSKSGTSGSLAISGLRSEDEADYYCAAWDDGLSGVVFGGGTKVTIL

SEQ ID NO: 8400 - protein, 108 aa, Artificial Sequence
  Synthetic construct
SYVLTQPPSVSVAPGKTASLTCGGNNIGSKSVHWYQQRPGQAPVVVIYYNSDRPSGIPERFSGSNSGNTATLTITRVEAGDEADYYCQVWDSRSEHYVFGTGTTVTVL

SEQ ID NO: 8401 - protein, 106 aa, Artificial Sequence
  Synthetic construct
AIRMTQSPSSFSASTGDRVTITCRASQGISSYLAWYQQKPGKAPKLLIYAASTLQSGVPSRFSGSGSGTDFTLTISCLQSEDFATYYCQQYYSYPSFGQGTKVEIK

SEQ ID NO: 8402 - protein, 108 aa, Artificial Sequence
  Synthetic construct
DIQMTQSPSTLSASVGDRVTITCRASQSISSWLAWYQQKPGKAPKLLIYKASSLESGVPSRFSGSGSGTEFTLTISSLQPDDFATYYCQQYNSYSRYTFGQGTKLEIK

SEQ ID NO: 8403 - protein, 110 aa, Artificial Sequence
  Synthetic construct
QPVLTQPPSASGTPGQRVIISCSGSSSNIGGNYANWYQQFPGTAPKLLIQNDSQRPSGVPARFSASKSGTSASLAISGLRSEDEADYYCSSWDDSRSGPVFGGGTRLTVL

SEQ ID NO: 8404 - protein, 111 aa, Artificial Sequence
  Synthetic construct
LSALTQPASVSGSPGQSITISCTGTSSDIGVYNYVSWYQQHPGKAPKLIIYDVSNRPSGVSNRFSGSKSDNTASLTISGLQAEDEADYYCSLYIGRTSLVVFGGGTKLTVL

SEQ ID NO: 8405 - protein, 107 aa, Artificial Sequence; identical to SEQ ID NO: 8091
  Synthetic construct

SEQ ID NO: 8406 - protein, 106 aa, Artificial Sequence
  Synthetic construct
DIQMTQSPSTLSASVGDRVTITCRASQSISSWLAWYQQKPGKAPKLLIYKASSLESGVPSRFSGSGSGTEFTLTISSLQPDDFATYYCQQYNSWQTFGGGTKVEIK

SEQ ID NO: 8407 - protein, 107 aa, Artificial Sequence
  Synthetic construct
EIVLTQSPAILSLSPGERASLSCRASQSVNDYLAWYQQKPGQAPRLLIYDASNRAAGIPVRFSGSGSETDFTLTISSLEPEDFALYYCEHRRDWLGTFGQGTKVEIR

SEQ ID NO: 8408 - protein, 108 aa, Artificial Sequence
  Synthetic construct
DIQMTQSPSSLSASVGDRVTITCRASQSISSYLNWYQQKPGKAPKLLIYAASSLQSGVPSRFSGSGSGTDFTLTISSLQPEDFATYYCQQSYSTPPYTFGQGTKLEIK

SEQ ID NO: 8409 - protein, 106 aa, Artificial Sequence; identical to SEQ ID NO: 8265
  Synthetic construct

SEQ ID NO: 8410 - protein, 107 aa, Artificial Sequence
  Synthetic construct
EIVLTQSPDLQSVAPKEKVTITCRASQTIGSSLHWYQQKADQSPKLLIKFASQSISGVPSRFSGSGSGTDFALTIDGLEAEDAATYYCHQTSTLPRTFGQGTKVEIK

SEQ ID NO: 8411 - protein, 110 aa, Artificial Sequence; identical to SEQ ID NO: 8220
  Synthetic construct

SEQ ID NO: 8412 - protein, 110 aa, Artificial Sequence; identical to SEQ ID NO: 8067
  Synthetic construct

SEQ ID NO: 8413 - protein, 115 aa, Artificial Sequence
  Synthetic construct
QAVLTQPSSLSASPGASASLTCTLRSGINVGTYRIYWYQQKPGSPPQYLLRYKSDSDKQQGSGVPSRFSGSKDASANAGILLISGLQSEDEADYYCMIWHSSAVVFGGGTKLTVL

SEQ ID NO: 8414 - protein, 107 aa, Artificial Sequence; identical to SEQ ID NO: 8065
  Synthetic construct

SEQ ID NO: 8415 - protein, 113 aa, Artificial Sequence
  Synthetic construct
DIVMTQSPDSLAVSLGERATINCKSSQSVLYSSNNKNYLAWYQQKPGQPPKLLIYWASTRESGVPDRFSGSGSGTDFTLTISSLQAEDVAVYYCQQYYSTPKTFGQGTKVEIK

SEQ ID NO: 8416 - protein, 112 aa, Artificial Sequence
  Synthetic construct
DIVMTQSPLSLPVTPGEPASISCRSSQSLLNGNGYNYLNWYLQKPGQSPQLLIYLGSTRASGVPDRFSGSGSGTDFTLKISRVEAEDVGVYYCMQALQTLFTFGGGTKVEIK

SEQ ID NO: 8417 - protein, 107 aa, Artificial Sequence
  Synthetic construct
DIQMTQSPSSVSASVGDRVTITCRASQGISNWLAWYQQKPGKPPKLLIYAASSLQSGVPSRFSGSGSGTDFTLTISSLQPDDFATYYCQQANSFPLTFGGGTRVEIK

SEQ ID NO: 8418 - protein, 108 aa, Artificial Sequence
  Synthetic construct
EIVLTQSPGTLSLSPGVRATLSCRASQSVSSNYLAWYQQKPGQAPRLLIYGASNRATGIPDRFSGSGSGTDFTLTISRLEPEDFAVYYCQQYGSSPWTFGQGTKVEIK

SEQ ID NO: 8419 - protein, 110 aa, Artificial Sequence; identical to SEQ ID NO: 8067
  Synthetic construct

SEQ ID NO: 8420 - protein, 111 aa, Artificial Sequence
  Synthetic construct
QSALTQPASVSGSPGQSISISCTGTSSDVGGYNYVSWYQQHPGKAPKLMIYDVSNRPSGVSNRFSGSKSGNMASLTISGLQAEDEADYYCSSYTSSSTYVVFGGGTKLTVL

SEQ ID NO: 8421 - protein, 107 aa, Artificial Sequence
  Synthetic construct
DIQMTQSPSSLSASVGDRVTITCRPSQSINTFLNWYHQKPGKVPKLLIYGASSLQSGVSSRFSGSGSGTDFTLTINSLQPEDFATYYCQQSYSAPYTFGQGTNVEIK

SEQ ID NO: 8422 - protein, 108 aa, Artificial Sequence
  Synthetic construct
EIVLTQSPGTLSLSPGERATLSCRASQSVSSSYLAWYQQKPGQAPRLLIYGASSRATGIPDRFSGSGSGTDFTLTISRLEPEDFAVYYCQQYGSSPPTFGQGTKVEIK

SEQ ID NO: 8423 - protein, 107 aa, Artificial Sequence; identical to SEQ ID NO: 8065
  Synthetic construct

SEQ ID NO: 8424 - protein, 108 aa, Artificial Sequence; identical to SEQ ID NO: 8203
  Synthetic construct

SEQ ID NO: 8425 - protein, 110 aa, Artificial Sequence
  Synthetic construct
QSMVTQPPSVSGTPGLRISISCSGSSSNIGSKTVNWYQQLPGTAPKLLIYSNNQRPSGVPDRFSGSKSGTSASLAISGLQSEDEADYYCAVWDDSLNGRVFGTGTKVTVL

SEQ ID NO: 8426 - protein, 109 aa, Artificial Sequence
  Synthetic construct
SSELTQDPAVSVALGQTVRITCQGDSLRSYYASWYQQKPGQAPVLVIYGKNNRPSGIPDRFSGSSSGNTASLTITGAQAEDEADYYCNSRDSSGNHLRVFGGGTKLTVL

SEQ ID NO: 8427 - protein, 110 aa, Artificial Sequence
  Synthetic construct
QSVLTQPPSESGTPGQRVIISCSGLSSNIGNNLVNWYQQLPGTAPRLLIFKNIQRPSGVPDRFSGSKSGTSASLAISGLQSEDEADYFCSAWDDSLNGPVFGGGTRLTVL

SEQ ID NO: 8428 - protein, 108 aa, Artificial Sequence
  Synthetic construct
DIQMTQSPSTLSASVGDRVTITCRASQSISRWLAWYQLKPGKAPKVLIYKTSRLESGVPSRFSGSGSGTEFTLTISSLQPDDFATYYCQQYDTYSTWTFGQGTKVEIK

SEQ ID NO: 8429 - protein, 107 aa, Artificial Sequence
  Synthetic construct
DIQMTQSPSSLSASVGDRVTITCRASQGISNYLAWFQQKPGKAPKSLIYAASSLRSGVPSQFSGSGSGTDFTLTISSLQPEDFATYYCQQYNSYPLTFGQGTRLEIK

SEQ ID NO: 8430 - protein, 110 aa, Artificial Sequence; identical to SEQ ID NO: 8146
  Synthetic construct

SEQ ID NO: 8431 - protein, 110 aa, Artificial Sequence
  Synthetic construct
QSVLTQPPSASGTPGQRVTISCSGSSSNIGSNYVYWYQQLPGTAPKLLIYRNNQRPSGVPDRFSGSKSGTSASLAISGLRSEDEADYYCAAWDDSLSGRVFGGGTKLTVL

SEQ ID NO: 8432 - protein, 107 aa, Artificial Sequence
  Synthetic construct
EIVLTQSPATLSLSPGERATLSCRASQSVSSYLAWYQQKPGQAPRLLIYDASNRATGIPARFSGSGSGTDFTLTISSLEPEDFAVYYCQQRSNWPLTFGGGTRVEIK

SEQ ID NO: 8433 - protein, 112 aa, Artificial Sequence
  Synthetic construct
DIVMTQTPLSLSVTPGQPASISCKSSQSLLRGDGKTHLYWYLQNPGQSPQLLIYEVSNRFSGVPHRFSGSGSGTDFTLEISRVEAEDVGVYYCMQSRQLPWTFGQGTKVEIN

SEQ ID NO: 8434 - protein, 109 aa, Artificial Sequence
  Synthetic construct
EIVLTQSPGTLSLSPGERATLSCRASQSVSSSYLAWYQQKPGQAPRLLIYDVSSRATGIPDRFSGSGSGTDFTLTISRLEPEDFAVYYCQQYGTSPLFTFGPGTKVDVK

SEQ ID NO: 8435 - protein, 107 aa, Artificial Sequence
  Synthetic construct
AIRMTQSPSSFSASTGDRVTITCRASQGISSYLAWYQQKPGKAPKLLIYAASTLQSGVPSRFSGSGSGTDFTLTISCLQSEDFATYYCQQYYSYPRTFGQGTKVEIK

SEQ ID NO: 8436 - protein, 107 aa, Artificial Sequence
  Synthetic construct
AIQMSQSPSSLSASVGDRVTITCRASQYIKNDVAWYQQKPGKAPKLLIYAASTLQSGVPSRFSGSGSGTAFTLTISSLQPEDFATYYCLQEYGYPRTFGQGTKVEVK

SEQ ID NO: 8437 - protein, 107 aa, Artificial Sequence
  Synthetic construct
AIQMTQSPSSLSASVGDRVTITCRASQDIRNDLGWYQQKPGKAPKLLIYIASTLQTGVPSRFSGSGSGTDFTLTISSLQPEDSATYYCLQDHTYPLTFGGGTKVEIR

SEQ ID NO: 8438 - protein, 107 aa, Artificial Sequence
  Synthetic construct
EIVLTQSPGTLSLSPGERATLSCRASQSVSSSYLAWYQQKPGQAPRLLIYGASSRATGIPDRFSGSGSGTDFTLTISRLEPEDFAVYYCQQYGSSPGFGQGTKVEIK

SEQ ID NO: 8439 - protein, 112 aa, Artificial Sequence
  Synthetic construct
DIVMTQSPDSLAVSLGERATINCKSSQSILYSSNNKNYLGWYQQKPGQPPKLLIYWASTRESGVPDRFSGSGSGTDFTLTISGLQAEDVAVYYCQQYYSTPSFGGGTKVEIK

SEQ ID NO: 8440 - protein, 107 aa, Artificial Sequence
  Synthetic construct
EIVLTQSPGTLSLSPGERATLSCRASQSVSSSYLAWYQQKPGQAPRLLIYGASSRATGIPDRFSGSGSGTDFTLTISRLEPEDFAVYYCQQYGSSRTFGQGTKVEIK

SEQ ID NO: 8441 - protein, 107 aa, Artificial Sequence; identical to SEQ ID NO: 8224
  Synthetic construct

SEQ ID NO: 8442 - protein, 108 aa, Artificial Sequence
  Synthetic construct
EIVLTQSPATLSLSPGERATLSCRASQSVSSYLAWYQQKPGQAPRLLIYDASNRATGIPARFSGSGSGTDFTLTISSLEPEDFAVYYCQQRSNWPPITFGQGTRLEIK

SEQ ID NO: 8443 - protein, 110 aa, Artificial Sequence
  Synthetic construct
QTVVTQEPSLTVSPGGTVTLTCAFSTGSVTSGNYPNWFQQKPGQAPRALIYSTTKKHSWTPARFSGSLVGDKAALTLSGVQPEDEAEYFCLNVDGGTQYVFGTGTRVTVL

SEQ ID NO: 8444 - protein, 107 aa, Artificial Sequence
  Synthetic construct
EIVLTQSPATLSLSPGERATLSCRASQSVSSYLAWYQQKPGQAPRLLIYDASNRATGIPARFSGSGSGTDFTLTISSLEPEDFAVYYCQQRSNWPITFGQGTRLEIK

SEQ ID NO: 8445 - protein, 107 aa, Artificial Sequence
  Synthetic construct
DIQMTQSPSTLSASVGDRVTITCRASQSINDRLAWYQQKPGKAPKLLMYKASSLESGVPSRFSGSGSGTEFTLTVSSLQPDDFATYYCQQYNSYSRTFGQGTKVEIK

SEQ ID NO: 8446 - protein, 108 aa, Artificial Sequence
  Synthetic construct
AIQLTQSPSSLSASVGDRVTITCRASQAISNYLAWYQQKPGKAPKLLIYDASTLESGVPSRFSGSGSGTDFTLTISSLQPEDFATYYCQQFNNYPLITFGQGTRLEIK

SEQ ID NO: 8447 - protein, 108 aa, Artificial Sequence
  Synthetic construct
EIVMTQSPATLYVSPGERATLSCRASQSIGNNLAWYQQRVGQAPRLLIYGASTRATGIPARFSGSGTGTEFTLIISSLQSEDFAVYYCQQYNNWPTITFGQGTRLEIK

SEQ ID NO: 8448 - protein, 108 aa, Artificial Sequence
  Synthetic construct
EIVLTQSPGTLSLSPGERATLSCRASQSVSSSYLAWYQQKPGQAPRLLIYGASSRATGIPDRFSGSGSGTDFTLTISRLEPEDFAVYYCQQYGSSTWTFGQGTKVEIK

SEQ ID NO: 8449 - protein, 111 aa, Artificial Sequence
  Synthetic construct
QSVVTQPPSASGTPGQRVTISCSGSYSNIGSNDVFWYQHVPGTAPKLLIYNNDQRPSGVPDRFSGSRSGASASLAISGLRSEDEADYFCAGWDDSLSGTVVFGGGTKLVVL

SEQ ID NO: 8450 - protein, 110 aa, Artificial Sequence
  Synthetic construct
QSALTQPASVSGSPGQSITISCTGTSSDVGGYNYVSWYQQHPGKAPKLMIYDVSNRPSGVSNRFSGSKSGNTASLTISGLQAEDEADYYCSSYTSSSTCVFGTGTKVTVL

SEQ ID NO: 8451 - protein, 111 aa, Artificial Sequence
  Synthetic construct
QSVLTQPPSVSGAPGQRVTMSCTGSNSNIGAGYDVHWYQHLPGTAPKLLIFNNDNRPSGVPDRFSGSKSGISASLAITGLQAEDEADYYCQSYDSILSGSLFGGGTKLAVL

SEQ ID NO: 8452 - protein, 112 aa, Artificial Sequence
  Synthetic construct
QSALTQPASVSGSPGQSITISCTGTSSDIRYYKHVSWYQQHPGKAPKLMIFDDSSRPSGVSNRFSGSKSGNTASLTISGLQAEDEADYYCSSYTGTMTLAVTFGAGTRLTVL

SEQ ID NO: 8453 - protein, 107 aa, Artificial Sequence
  Synthetic construct
DIQMTQSPSSVSASVGDRVTITCRASQDISNWLAWYQQKPGKAPKLLIYAASSLQSGVPSRFSGSGSGTDFTLTISSLQPEDFATYFCQQANSFPITFGQGTRLEIK

SEQ ID NO: 8454 - protein, 107 aa, Artificial Sequence; identical to SEQ ID NO: 8093
  Synthetic construct

SEQ ID NO: 8455 - protein, 110 aa, Artificial Sequence
  Synthetic construct
QSVVTQPPSTSGSPGQRVTISCSGSRSNIGSNIVNWYQQLPGTAPKLLIYGNDQRHSGVPDRFSGSKSGTSASLAISGLQSEDEAVYYCATWDDSLNGRVFGGGTKVTVL

SEQ ID NO: 8456 - protein, 105 aa, Artificial Sequence; identical to SEQ ID NO: 8339
  Synthetic construct

SEQ ID NO: 8457 - protein, 110 aa, Artificial Sequence
  Synthetic construct
QAVVTQEPSLTVSPGGTVTLTCGSSTGAVTSGHYPYWFQQKPGQAPRTLIYDTSNKHSWTPARFSGSLLGGKAALTLSGAQPEDEAEYYCLLSYSGARWVFGGGTKLTVL

SEQ ID NO: 8458 - protein, 107 aa, Artificial Sequence
  Synthetic construct
AIQLTQSPSSLSASVGDRVTITCRASQAISSFFAWYQQKPGKAPKLLISAVSTLQSGVPSRFSGSGSGTDFTLTISSLQPEDFATYYCQQLNGYPPTFGPGTKVEIR

SEQ ID NO: 8459 - protein, 107 aa, Artificial Sequence
  Synthetic construct
EIVMTQSPATMSVSPGERASLSCRASQSISSNLGWYQQKPGQPPRLLIYGATTRATGIPARFSGSGSGTEFTLTISSLQSEDFAVYYCQQYNNWPRTFGQGTKVEIK

SEQ ID NO: 8460 - protein, 106 aa, Artificial Sequence
  Synthetic construct
SYELTQPSSVSVSPGQTARITCSGHVLAKEYARWFQQKPGQAPVLVIYKDSERPSGIPERFSGSSSGTTVTLTISGARVEDDADYYCYSAADNRGVFGTGTKVTVL

SEQ ID NO: 8461 - protein, 107 aa, Artificial Sequence
  Synthetic construct
DIQMTQSPSSLSASVGDRVTITCRASQDISNWLAWYQQKPEKAPKSLIYAASNLQSGVPSRFSGSGSGTDFTLTISSLQPEDFATYYCQQYNSYPPTFGQGTRLEIK

SEQ ID NO: 8462 - protein, 109 aa, Artificial Sequence; identical to SEQ ID NO: 8306
  Synthetic construct

SEQ ID NO: 8463 - protein, 111 aa, Artificial Sequence
  Synthetic construct
GIVMTQSPLSLPVTPGEPASISCRSSQSLLHSNGYNYLDWYLQKPGQSPQVLIYLGSNRASGVPDRFSGSGSGTDFTLKISRVEAEDVGVYYCMQALQTPTFGQGTKLEIK

SEQ ID NO: 8464 - protein, 108 aa, Artificial Sequence
  Synthetic construct
SSELTQDPAMSVALGQTVRITCQGDSLRLFPSWYQQKPGQAPVLVIYGKNNRPSGIPDRFSGSTSGNTASLTITGAQAEDEADYYCNSRDTSDNHLRLFGGGTKLTVL

SEQ ID NO: 8465 - protein, 110 aa, Artificial Sequence
  Synthetic construct
QSVLTQPPSVSAAPGQKVTISCSGSSSNIGGNYVSWYQHLPGTAPKLLIYDNNKRPSGIPDRFSGSKSGTSATLGITGLQTGDEADYYCGTWDTSLSAGVFGGGTKLTVL

SEQ ID NO: 8466 - protein, 109 aa, Artificial Sequence
  Synthetic construct
EIVMTQSPATLSVSPGERATLSCRASQSVSTNLGWYQQKPGQAPRLLIYGASTRATGVPARFSGSGSGTEFTLTISSLQSEDFAVYYCLQYNNWPPRFTFGPGTKVDIK

SEQ ID NO: 8467 - protein, 108 aa, Artificial Sequence
  Synthetic construct
SYVLTQPPSVSVAPGETARLTCGGKNIESESVHWYQQKPGQAPVLVISFDSHRPSGIPARLSGSNSGNTATLTISGVEAGDEADYYCQVLDSTSGHRVFGGGTKLTVL

SEQ ID NO: 8468 - protein, 114 aa, Artificial Sequence
  Synthetic construct
DIVMTQSPDSLAVSLGERATINCKSRQSVLYTPNNKNYLAWYQQKPGQPPKLLIYWASTRASGVPERFSGSGSGTDFTLSISSLQAEDVAVYYCQQYYSTVSITFGQGTRLEIK

SEQ ID NO: 8469 - protein, 110 aa, Artificial Sequence
  Synthetic construct
QSVLTQPPSASGTPGQRVTISCSGVDSNIGSNSVNWFQQLPGPAPRLLIFDSNQRPSGVPDRFSASKSGTSASLAISGLQSEDEGDYYCSSWDDSLSIVIFGGGTKLTVL

SEQ ID NO: 8470 - protein, 111 aa, Artificial Sequence
  Synthetic construct
QSVLTQPPSVSAAPGQKVTISCSGSSSNIGNNYVSWYQQLPGTAPKLLIYDNNKRPSGIPDRFSGSKSGTSATLGITGLQTGDEADYYCGTWDSSLSVFYVFGTGTKVTVL

SEQ ID NO: 8471 - protein, 112 aa, Artificial Sequence; identical to SEQ ID NO: 8271
  Synthetic construct

SEQ ID NO: 8472 - protein, 108 aa, Artificial Sequence
  Synthetic construct
EIVLTQSPGTLSLSPGERVTLSCRASQTVSSSYLAWYQQKPGQAPRLLIYDASSRATGIPARFSGSGSGTDFTLTISRLEPEDFAVYYCQEYGGSPGTFGQGTKVEIK

SEQ ID NO: 8473 - protein, 107 aa, Artificial Sequence
  Synthetic construct
DIQMTQSPSTLSASVGDRVTITCRASQSISSWLAWYQQKPGKAPKLLIYKASSLESGVPSRFSGSGSGTEFTLTISSLQPDDFATYYCQQYNSYPFTFGPGTKVDIK

SEQ ID NO: 8474 - protein, 107 aa, Artificial Sequence
  Synthetic construct
EIVMTQSPATLSVSPGERATLSCRASQSVGRNLAWYQQKPGQAPRVLISGASTRATGITARFGGSGSGTEFTLTISSLQSEDFGIYYCQQYNNWPPAFGQGTKLEIK

SEQ ID NO: 8475 - protein, 112 aa, Artificial Sequence
  Synthetic construct
DIVMTQTPLSSPVTLGQPASISCRSSQSLVHSDGNTYLSWLQQRPGQPPRLLIYKISNRFSGVPDRFSGSGAGTDFTLKISRVEAEDVGVYYCTQATQFPLTFGGGTKVEIK

SEQ ID NO: 8476 - protein, 113 aa, Artificial Sequence
  Synthetic construct
DIVMTQTPLSLSVTPGQPASISCKSSQSLLHSDGKTYLYWYLQKPGQSPQLLIYEVSNRFSGVPDRFSGSGSGTDFTLKISRVEAEDVGVYYCMQSIQLPRLTFGGGTKVEIK

SEQ ID NO: 8477 - protein, 108 aa, Artificial Sequence
  Synthetic construct
DIVLTQSPDTLSLSPGDRATLSCRASQSVVSNQLAWYQQKAGQAPRLLIYDASTRATGIPDRFSGSGSGTDYTLTITRLDPEDFAVYYCQQYQTSRFTFGPGTKVDIN

SEQ ID NO: 8478 - protein, 110 aa, Artificial Sequence
  Synthetic construct
QSVLTQPPSASGTPGQRVTISCSGSSSNIGSKYVYWYQQLPGTAPKLLIYRNNQRPSGVPDRFSGSKSGTSASLAISGLRSEDEADYYCAAWDDSLSGRVFGGGTKLTVL

SEQ ID NO: 8479 - protein, 107 aa, Artificial Sequence
  Synthetic construct
DIQMSQSPSSLSASVGDTVTITCQASQNIRKYLNWYQQKPGKVPELLIYEASKLEAGVPLRFRGGGFGTNFTLTITNVQPTDVATYVCLQNEYSPLTFGGGTSVDLR

SEQ ID NO: 8480 - protein, 110 aa, Artificial Sequence; identical to SEQ ID NO: 8146
  Synthetic construct

SEQ ID NO: 8481 - protein, 105 aa, Artificial Sequence; identical to SEQ ID NO: 8339
  Synthetic construct

SEQ ID NO: 8482 - protein, 107 aa, Artificial Sequence
  Synthetic construct
EIVLTQSPATLSLSPGERATLSCRASQSVSSYLAWYQQKPGQAPRLLIYDASNRATGIPARFSGSGSGTDFTLTISSLEPEDFAVYYCQQRSNWRVTFGPGTKVDIK

SEQ ID NO: 8483 - protein, 113 aa, Artificial Sequence
  Synthetic construct
DIVMTQSPLSLPVTPGEPASISCRSSQSLLHSNGYNYLDWYLQKPGQSPQLLIYLGSNRASGVPDRFSGSGSGTDFTLKISRVEAEDVGVYYCMQALQTPELTFGGGTKVEIK

SEQ ID NO: 8484 - protein, 110 aa, Artificial Sequence
  Synthetic construct
QSVLTQPPSISAAPGQKVTISCSGSRSNIGNNFVSWYQQVPGKAPKLLIYDNNKRPSDIPDRFSGSKSGTSATLGITGLQSGDEADYYCGTWDSRLSAGVFGGGTTVTVL

SEQ ID NO: 8485 - protein, 107 aa, Artificial Sequence
  Synthetic construct
DIQLTQSPSSLSASVGDRVTITCRASQSINTYLNWYQQKPGKAPKLLIYAAFNLESGVPSRFSGSRSGTDFTLTISSLQPEDIATYYCQQSYSSPRSFGQGTEVEMK

SEQ ID NO: 8486 - protein, 110 aa, Artificial Sequence
  Synthetic construct
QSALTQPASVSGSPGQSISISCTGTSSDVGGYTYVSWYQQHPGKAPKLMIYDVSKRPSGVSDRFSGSKSGNTASLTISGLQAEDEAHYYCSSYRSSSTWVFGGGTKLTVL

SEQ ID NO: 8487 - protein, 107 aa, Artificial Sequence; identical to SEQ ID NO: 8133
  Synthetic construct

SEQ ID NO: 8488 - protein, 107 aa, Artificial Sequence
  Synthetic construct
DIQMTQSPSTLSASVGDRVTITCRASQSISRWLAWYQQKPGKAPKLLIYKASNLESGVPSRFSGSGSGTEFTLTISSLQPDDFATYYCQHYNNYPWTFGQGTKVEIK

SEQ ID NO: 8489 - protein, 107 aa, Artificial Sequence
  Synthetic construct
DVQMTQSPPSVSASVGDTVTISCRASRNIDNWLAWYQQKAGQAPKLLIYTASTLEDGVPYRFSGRGSGTHFTLTIRGLQPEDFATYYCQQAHSFPKTFGQGTTVDIK

SEQ ID NO: 8490 - protein, 105 aa, Artificial Sequence; identical to SEQ ID NO: 8339
  Synthetic construct

SEQ ID NO: 8491 - protein, 108 aa, Artificial Sequence
  Synthetic construct
SYVLTQPPSVSVAPGKTARITCGGNNIGSKSVHWYQQKPGQAPVLVIYYDSDRPSGIPERFSGSNSGNTATLTISRVEAGDEADYYCQVWDSSSDHPVFGGGTKLTVL

SEQ ID NO: 8492 - protein, 107 aa, Artificial Sequence
  Synthetic construct
AIRITQSPSSLSASTGDRVTITCRASQGISSYLAWYQQKPGKAPKLLIYAASTLQSGVPSRFSGSGSGTDFTLTISCLQSEDFATYYCQQYYSYPRTFGQGTKLEIK

SEQ ID NO: 8493 - protein, 109 aa, Artificial Sequence
  Synthetic construct
QAVVTQEPSLTVSPGGTVTLTCGSSTGAVTSGHYPYWFQQKPGQAPRTLIYDTSNKHSWTPARFSGSLLGGKAALTLSGAQPEDEAEYYCLLSYSGAVVFGGGTKLTVL

SEQ ID NO: 8494 - protein, 107 aa, Artificial Sequence; identical to SEQ ID NO: 8435
  Synthetic construct

SEQ ID NO: 8495 - protein, 107 aa, Artificial Sequence
  Synthetic construct
DIQMTQSPSSLSASVGDRVTIACRTSQTIINYLNWYQQKPGKAPKLLIYAASSLQSGVPSRFTGSGSGTDFILTISSLQPEDFATYYCQQSYSNPFTFGGGTKVEIK

SEQ ID NO: 8496 - protein, 108 aa, Artificial Sequence
  Synthetic construct
EIVLTQSPATLSLSPGERATLSCRASQSVSDYLAWYQQKPGQAPRLLIYDASNRATGIPARFSGSGSGTDFTLTISSLEPEDFAIYYCQQRSNWPPVTFGQGTRLEIK

SEQ ID NO: 8497 - protein, 106 aa, Artificial Sequence; identical to SEQ ID NO: 8265
  Synthetic construct

SEQ ID NO: 8498 - protein, 112 aa, Artificial Sequence
  Synthetic construct
QSALTQPRSVSGSPGQSVTISCTGTSSDVGGYNYVSWYQQHPGKAPKLMIYDVSKRPSGVPDRFSGSKSGNTASLTISGLQAEDEADYYCCSYAGSYTSYVVFGGGTKLTVL

SEQ ID NO: 8499 - protein, 107 aa, Artificial Sequence
  Synthetic construct
DIQMTQSPSALSASVGDSVSITCRSSQSFNYWLAWYQQKPGKAPKLLMSRASRLESGVPARFSGSGAGMEFTLTINSLQPDDSATYYCQQYNSHPWTFGQGTKVEIK

SEQ ID NO: 8500 - protein, 108 aa, Artificial Sequence
  Synthetic construct
EIVLTQSPGTLSLSPGERATLSCRASQSVSSSHLAWYQHKPGQAPRLLIYGASSRATGIPDRFSGSGSGTDFTLTISRLEPEDFAVYYCQQYGTSPRTFGPGTKVDIK

SEQ ID NO: 8501 - protein, 107 aa, Artificial Sequence
  Synthetic construct
DIQMTQSPSSLSASVGDRVTITCRASQSISSYLNWYQQKPGKAPKLLIYAASSLQSGVPSRFSGSGSGTDFTLTISSLQPEDFATYYCQQSYSTPWTFGQGTKVEIK

SEQ ID NO: 8502 - protein, 111 aa, Artificial Sequence
  Synthetic construct
QSVLTQSPSASGPPGQTVTISCSGSFSDIGSGYVYWYQQVPGAAPKLLISRNDQRPSGVPGRFSGSKSGSSASLTISGLRSEDEAEYYCAAWDDSLSGRLVFGGGTKVTVV

SEQ ID NO: 8503 - protein, 107 aa, Artificial Sequence
  Synthetic construct
AIRITQSPSSLSASTGDRVTITCRASQGISSYLAWYQQKPGKAPKLLIYAASTLQSGVPSRFSGSGSGTDFTLTISCLQSEDFATYYCQQYYSYPQTFGQGTKVEIK

SEQ ID NO: 8504 - protein, 107 aa, Artificial Sequence
  Synthetic construct
EIVMTQSPATLSVSPGERATLSCRASQSVSSNLAWYQQKPGQAPRLLIYGASTRATGIPARFSGSGSGTEFTLTISSLQSEDFAVYYCQQYNNWPRTFGQGTKVEIK

SEQ ID NO: 8505 - protein, 107 aa, Artificial Sequence; identical to SEQ ID NO: 8133
  Synthetic construct

SEQ ID NO: 8506 - protein, 107 aa, Artificial Sequence
  Synthetic construct
DIQMTQSPSSLSTSIGDRVTITCQASQDISNYLTWYQQKPGEAPKLLIYDASNLESGVPSRFSGSGSGTDFTFTISSLQPEDIATYYCQQYDDLPLTFGGGTKVEIK

SEQ ID NO: 8507 - protein, 109 aa, Artificial Sequence
  Synthetic construct
SSELTQDPAVSVALGQTVRITCQGDSLRSYYASWYQQKPGQAPVLVIYGKNNRPSGIPDRFSGSSSGNTASLTITGAQAEDEADYYCNSRDSSGNHLVVFGGGTKLTVL

SEQ ID NO: 8508 - protein, 107 aa, Artificial Sequence; identical to SEQ ID NO: 8501
  Synthetic construct

SEQ ID NO: 8509 - protein, 110 aa, Artificial Sequence
  Synthetic construct
SSELTQDPAVSVALGQTVRITCQGDSLRSYYASWYQQKPGQAPVLVIYGKNNRPSGIPDRFSGSSSGNTASLTITGAQAEDEADYYCNSRDSSGNHLLYVFGTGTKVTVL

SEQ ID NO: 8510 - protein, 107 aa, Artificial Sequence
  Synthetic construct
DIQMTQSPSSLSASVGDRVTITCRASQTVSTYLNWYQQKPGRAPKLLIYGASSLQNGVPSRFSGSGSGTEFTLTIISLQPEDFATYYCQQSDSIPVTFGGGTKVEMK

SEQ ID NO: 8511 - protein, 107 aa, Artificial Sequence; identical to SEQ ID NO: 8267
  Synthetic construct

SEQ ID NO: 8512 - protein, 110 aa, Artificial Sequence; identical to SEQ ID NO: 59
  Synthetic construct

SEQ ID NO: 8513 - protein, 107 aa, Artificial Sequence
  Synthetic construct
DIQMTQSPSTLSASVGDRVTITCRASQSISNWLAWYQQKPGKAPNLLIYSASSLESGVPSRFSGSGSGTEFTLTISSLQPDDFATYYCQQYNSYPRTFGQGTKLEIR

SEQ ID NO: 8514 - protein, 111 aa, Artificial Sequence
  Synthetic construct
QLVLTQSPSASASLGASVKLTCTLSSGHSSYAIAWHQQQPEKGPRYLMKLNSDGSHSKGDGIPDRFSGSSSGAERYLTISSLQSEDEADYYCQTWGTGLTVFGGGTKLTVL

SEQ ID NO: 8515 - protein, 110 aa, Artificial Sequence
  Synthetic construct
QSALTQAASMSGSPGQSITISCTGTSSDVGGYNYVSWYQQHPGKAPKLMIYDVSKRPSGVSNRFSGSKSGNTASLTISGLQAEDEADYYCISYRSSSTRVFGGGTKLTVL

SEQ ID NO: 8516 - protein, 116 aa, Artificial Sequence
  Synthetic construct
QPVLAQSPSASASLGASVTLTCTLSSGYSNYKVDWYQQRPGKGPRFVMRVGTGGIVGSKGDGIPDRFSVSGSGLNRYLTIKNIQEEDESDYHCGADHGSGSNFVWVFGGGTKLTVL

SEQ ID NO: 8517 - protein, 108 aa, Artificial Sequence
  Synthetic construct
EIVLTQSPATLSLSPGERAALFCRASQSVSTYLAWYQQKPGQSPRLLIYDASNRATGIPARFSGSGSGTDFTLTISSLEPEDFAVYYCQQRYNWPSFTFGPGTKVDIK

SEQ ID NO: 8518 - protein, 107 aa, Artificial Sequence
  Synthetic construct
AIQMTQSPSSLSASVGDRVTITCRASQGIRNDLGWYQQKPGKAPKLLIYAASSLQNGVPSRFSGSGSGTDFTLTISSLQPEDFATYYCLQDYNYPRTFGQGTKVEIK

SEQ ID NO: 8519 - protein, 106 aa, Artificial Sequence
  Synthetic construct
DIQMTQSPSSLSASVGDRVTITCRASQTIRSYLNWYQQKPGKAPKLLIYDASNLETGVPSRFSGGGSGTDFTFTISSLQPEDIATYYCQQYDNLFTFGQGTRLEIK

SEQ ID NO: 8520 - protein, 112 aa, Artificial Sequence
  Synthetic construct
DIVMTQTPLSSPVTLGQPASISCRSSQSLVHSDGNIYLSWLQQRPGQPPRLLIYQISNRFSGVPDRFSGSGAGTDFTLKISRVEAEDVGIYYCAQGTHFPHTFGQGTKLEIK

SEQ ID NO: 8521 - protein, 107 aa, Artificial Sequence
  Synthetic construct
DIQMTQSPSSLSASVGDRVTITCRASQSISSYLNWYQQKPGKAPKLLIYAASSLQSGVPSRFSGSGSGTDFTLTISSLQPEDFATYYCQQSYSTPPTFGQGTKVEIK

SEQ ID NO: 8522 - protein, 107 aa, Artificial Sequence
  Synthetic construct
DIQMTQSPSSLSASVGDRATITCRASQSINRNLNWYQQKPGKAPTLLIFAASSLHHGVPSRFSGSGSGTDFSLTFSSLQPEDSATYYCQQSYSTPPTFGGGTRVEIR

SEQ ID NO: 8523 - protein, 108 aa, Artificial Sequence
  Synthetic construct
EIVLTQSPGTLSLSPGERATLSCRASQSLSSSYLAWYQQKPGQAPRLLIYGAFTRATGIPDRFSGSGSETDFTLTISRLEPEDFAVFYCQQLGSSPYTFGQGTKLEIT

SEQ ID NO: 8524 - protein, 107 aa, Artificial Sequence; identical to SEQ ID NO: 8065
  Synthetic construct

SEQ ID NO: 8525 - protein, 110 aa, Artificial Sequence
  Synthetic construct
QSTLTQPASVSGSPGQSITISCKGTSSDVGSFNLVSWYQQHPGKAPKLMIFEVYQRPSGVSNRFSGSKSGSTASLTISGLQAEDEADYYCCSFTSDHTWVFGGGTRLTVL

SEQ ID NO: 8526 - protein, 109 aa, Artificial Sequence
  Synthetic construct
QSVLTQPPSASGTPGQRVTISCSGSNSNIGFTYVYWYQQLPGTAPKLLIYRNNQRPSGVPDRFSGSKSGTSASLAISGLRSEDEADYYCAAWGDNMSVLFGGGTKLTVL

SEQ ID NO: 8527 - protein, 110 aa, Artificial Sequence; identical to SEQ ID NO: 8226
  Synthetic construct

SEQ ID NO: 8528 - protein, 106 aa, Artificial Sequence
  Synthetic construct
DIQMTQSPSTLSASVGDRVTITCRASQSISSWLAWYQQKPGKAPKLLIYKASSLESGVPSRFSGSGSGTEFTLTISSLQPDDFATYYCQQYNSWWTFGQGTKVEIK

SEQ ID NO: 8529 - protein, 110 aa, Artificial Sequence; identical to SEQ ID NO: 8067
  Synthetic construct

SEQ ID NO: 8530 - protein, 107 aa, Artificial Sequence
  Synthetic construct
DIQMTQAPSSLSASVGDRVTIACRASQNINIYLNWYQQKPGKAPKLLIYAASNLQSGVPSRFIGSGSGTDFTLTISGLQSEDFATYYCQQSFDSPRTFGGGTKVEMK

SEQ ID NO: 8531 - protein, 107 aa, Artificial Sequence
  Synthetic construct
DIQMTQSPSSLSASVGDRVTITCRASQSITNYLNWFQQKPGKAPKLLIYAASSLPSGVPSRFSGSGSGTDFTLTISSLQPEDFATYFCQQSFTIPVTFGGGTKVDIK

SEQ ID NO: 8532 - protein, 107 aa, Artificial Sequence
  Synthetic construct
DTQMTQSPSSLSASVGDRVTITCRASQRIRNFLGWFQQKPGKAPKSLIYDVSVLQSGVPSRFSGSGSGTDFTLTISSLQPEDFATYYCQQYDNYPYTFGQGTNLEIR

SEQ ID NO: 8533 - protein, 105 aa, Artificial Sequence; identical to SEQ ID NO: 8339
  Synthetic construct

SEQ ID NO: 8534 - protein, 107 aa, Artificial Sequence
  Synthetic construct
AIQLTQSPSSLSASVGDRVTITCRASQGISSALAWYQQKPGKAPKLLIYDASSLESGVPSRFSGSGSGTDFTLTISSLQPEDFATYYCQQFNNYVVTFGGGTKVEIK

SEQ ID NO: 8535 - protein, 108 aa, Artificial Sequence
  Synthetic construct
DIQMTQSPSTLSASVGDRVTITCRASQSISSWLAWYQQKPGKAPKLLIYKASSLESGVPSRFSGSGSGTEFTLTISSLQPDDFATYYCQQYNSYSSYTFGQGTKLEIK

SEQ ID NO: 8536 - protein, 107 aa, Artificial Sequence
  Synthetic construct
EIVMTQSPATLSVSPGERATLSCRASQSVSSNLAWYQQKPGQAPRLLIYGASTRATGIPARFSGSGSGTEFTLTISSLQSEDFAVYYCQQYNNWLRTFGQGTKVEIK

SEQ ID NO: 8537 - protein, 113 aa, Artificial Sequence
  Synthetic construct
DIVMTQSPDSLAVSLGERATINCKSSQSVLYSSNNKNYLAWYQQKPGQPPKLLIYWASTRESGVPDRFSGSGSGTDFTLTISSLQAEDVAVYYCQQYYSTLLTFGGGTKVEIK

SEQ ID NO: 8538 - protein, 111 aa, Artificial Sequence
  Synthetic construct
QSALTQPASVSGSPGQSITISCTGTSSDVGNYDLVSWYQQHPGKAPKLVISEVSKRPSGVSNRFSGSKSGNTASLTISGLQAEDEADYYCCSFATDSSFYVFGTGTKVSVL

SEQ ID NO: 8539 - protein, 107 aa, Artificial Sequence; identical to SEQ ID NO: 8304
  Synthetic construct

SEQ ID NO: 8540 - protein, 108 aa, Artificial Sequence
  Synthetic construct
SYELTQPPSVAVSPGQTARITCSGDALSKKYAYWYQQKPGQAPVVVIYKDSERPSGIPERFSGSSSGTTVTLTISGVQAEDEADYYCQSADSDGTYVVFGGGTKLTVL

SEQ ID NO: 8541 - protein, 113 aa, Artificial Sequence
  Synthetic construct
DIVMTQSPDSLAVSLGERATINCKSSQSVLYSSNNKNYLAWYQQKPGQPPKLLIYWASTRESGVPDRFSGSGSGTDFTLTISSLQAEDVAVYYCQQYYSTLRTFGQGTKVEIK

SEQ ID NO: 8542 - protein, 108 aa, Artificial Sequence
  Synthetic construct
EVVMTQSPATLSVSPGESATLSCRASQSVSKDLAWYQLKPGQAPRLLIYGVYVRANGVPARFSGSGSETEFTLTISSLQSEDFAVYYCQQYNNWPPYTFGQGTKLEIK

SEQ ID NO: 8543 - protein, 111 aa, Artificial Sequence
  Synthetic construct
DIVMTQTPLSLSVTPGQPASISCKSSQSLLHSDGKTYLYWYLQKPGQSPQLLIYEVSSRFSGVPDRFSGSGSGTDFTLKISRVEAEDVGVYYCMQGIHLPTFGQGTKVEIK

SEQ ID NO: 8544 - protein, 110 aa, Artificial Sequence
  Synthetic construct
QSVLTQPPSVSAAPGQRVTISCSGSSSNIGDIYVSWYQHLPGTAPKLLIYDSNKRPSGIPARFSASKSGTSATLDITGLQTGDEADYYCGAWDKSLSAHVFGSGTRVTVL

SEQ ID NO: 8545 - protein, 107 aa, Artificial Sequence
  Synthetic construct
SYELTQPSSVSVSPGQTARITCSGDVLAKKYARWFQQKPGQAPVLVIYKDSERPSGIPERFSGSSSGTTVTLTISGAQVEDEADYYCYSAADNNQRVFGGGTKLTVL

SEQ ID NO: 8546 - protein, 106 aa, Artificial Sequence; identical to SEQ ID NO: 8265
  Synthetic construct

SEQ ID NO: 8547 - protein, 109 aa, Artificial Sequence; identical to SEQ ID NO: 8306
  Synthetic construct

SEQ ID NO: 8548 - protein, 107 aa, Artificial Sequence
  Synthetic construct
DIQMTQFPSTLSASVGDRVTITCRASQSIGRWLAWYQQKPGRAPKLLIYRTSDLESGVPSRFSGSGSGTEFTLTISSLQPDDFATYYCQQYDNYSLTFGGGTNVEIK

SEQ ID NO: 8549 - protein, 112 aa, Artificial Sequence
  Synthetic construct
DVVMTQSPLSLPVTLGQPASISCRSSQSLVHSDGNTYLIWLQQRPGQSPRRLIYKVSNRDSGVPDRFSGSGSGTDFTLKISRVEAEDIGIYYCMQGTHWPYTFGQGTKLEIK

SEQ ID NO: 8550 - protein, 113 aa, Artificial Sequence
  Synthetic construct
DIVMTQSPDSLAVSLGERATINCKSSQSVLYSSNNKNYLAWYQQKPGQPPKLLIYWASTRESGVPDRFSGSGSGTDFTLTISSLQAEDVAVYYCHQYYRTPYTFGQGTKLEIK

SEQ ID NO: 8551 - protein, 110 aa, Artificial Sequence
  Synthetic construct
QSVLTQPPSVSAAPGQKVTISCSGSSSNIGNNYVSWYQQLPGTAPKLLIYDNNKRPSGIPDRFSGSKSGTSATLGITGLQTGDEADYYCGTWDSSLSAAVFGGGTKLTVL

SEQ ID NO: 8552 - protein, 111 aa, Artificial Sequence
  Synthetic construct
QSVLTQPPSVSAAPGQKVTISCSGSSSNIGNNYVSWYQQLPGTAPKLLIYDNNKRPSGIPDRFSGSKSGTSATLGITGLQTGDEADYYCGTWDSSLSAGVVFGGGTKLTVL

SEQ ID NO: 8553 - protein, 107 aa, Artificial Sequence; identical to SEQ ID NO: 8065
  Synthetic construct

SEQ ID NO: 8554 - protein, 107 aa, Artificial Sequence; identical to SEQ ID NO: 8249
  Synthetic construct

SEQ ID NO: 8555 - protein, 108 aa, Artificial Sequence
  Synthetic construct
FYVLTQPPSVSVAPGKTARITCGGNNIGSKRVHWYQQRPGQAPVLVIYDDSDRPLRIPERFSGSKSGNTATLTISRVEAGDEADYYCQVWDSSSDHVVFGGGTKLTVL

SEQ ID NO: 8556 - protein, 107 aa, Artificial Sequence
  Synthetic construct
EIVLTQSPATLSLSPGERATLSCRASQSVSSFLAWYQQRPGQAPRLLIYDASKRAAGIPARFSGSGSGTDFTLTISTLEPEDFAVYYCQQRDSWPDTFGGGTKVEIK

SEQ ID NO: 8557 - protein, 107 aa, Artificial Sequence
  Synthetic construct
SYELTQPPSVSVSPTQTASITCSGERLGAKHVCWYQLKPGQSPVLVIYEDSKRPSGIPERFSGSNSGDTATLSISGTQAVDEAEYFCQAWDGGTEVVFGGGTKLTVL

SEQ ID NO: 8558 - protein, 107 aa, Artificial Sequence; identical to SEQ ID NO: 8126
  Synthetic construct

SEQ ID NO: 8559 - protein, 109 aa, Artificial Sequence
  Synthetic construct
SSELTQDPAVSVALGQTVRITCQGDSLRSYYASWYQQKPGQAPVLVIYHKNNRPSGIPDRFSGSSSGNTASLTITGAQAEDEADYYCNSRDNSGNHLRVFGGGTKLTVL

SEQ ID NO: 8560 - protein, 108 aa, Artificial Sequence
  Synthetic construct
AIQLTQFPSSLSASIGDRITITCRASQGIGSALAWYQQKPGRAPKVLIYDASSLESGVPSRFSGSGSGTEFTLTISSLQPEDFATYSCQQFNNYPEITFGGGTKVEIK

SEQ ID NO: 8561 - protein, 108 aa, Artificial Sequence
  Synthetic construct
EIVMTQSPATLSVSPGERATLSCRASQSVSSNLAWYQQKPGQAPRLLIYGASTRATGIPARFSGSGSGTEFTLTISSLQSEDFAVYYCQQYNNWPPYTFGQGTKLEIK

SEQ ID NO: 8562 - protein, 111 aa, Artificial Sequence
  Synthetic construct
QSALTQPPSASGSPGQSVTISCTGTSSDVGGYNYVSWYQQHPGKAPKFMIYEVSKRPSGVPDRFSGSKSGNTASLTVSGLQAEDEADYYCSSYAGSNNFEVFGTGTKITVL

SEQ ID NO: 8563 - protein, 110 aa, Artificial Sequence; identical to SEQ ID NO: 8067
  Synthetic construct

SEQ ID NO: 8564 - protein, 107 aa, Artificial Sequence; identical to SEQ ID NO: 8304
  Synthetic construct

SEQ ID NO: 8565 - protein, 108 aa, Artificial Sequence
  Synthetic construct
PYVLTQPPSVSEAPGKTASIACGGNNIGSKGVQWYQQKPGQAPILVISYNSDRPAGIPERFSGSNSGNTATLTISRIEAGDEADYHCQVWDSTSGHPIFGGGTRLTVL

SEQ ID NO: 8566 - protein, 107 aa, Artificial Sequence
  Synthetic construct
DIQMTQSPSAMSASVGDRVTITCRASQGISNYLAWFQQKPGKVPKRLIYAASSLQSGVPSRFSGSGSGTEFTLTISRLQPEDFATYYCLQHNSYPYTFGQGTKLEIK

SEQ ID NO: 8567 - protein, 107 aa, Artificial Sequence
  Synthetic construct
DIQMTQSPSTLSASVGDRVTITCRASQSISSWLAWYQLKPGKAPKLLIFKASSLESGVPSRFSGSGSGTEFTLTISSLQPDDFATYYCQQYNSYLYTFGQGTKLEIK

SEQ ID NO: 8568 - protein, 107 aa, Artificial Sequence
  Synthetic construct
DIQMTQSPTSLSASVGDRVTITCRASQSITNYLNWYQQKPGKAPNLLIYTASSVQSGVPSRFSGGGFGTDFTLTITNLQPEDFATYYCQQSHSPPFTFGPGTKVDFK

SEQ ID NO: 8569 - protein, 107 aa, Artificial Sequence
  Synthetic construct
DIQMSQSPSSLSASAGDRVTITCRASQTISNSLNWYQQKPGTPPELLIYAASSLQSGVPSRFSGTGSETEFTLTISSLHPEDFATYWCQQSFRTPWTFGQGTKVEIK

SEQ ID NO: 8570 - protein, 106 aa, Artificial Sequence
  Synthetic construct
SSDLTQPPSVSVSPGQTASITCSGDDLGNKYVCWYQQKPGQSPVVVIYQDTKRPSGIPERFSASNSGNTATLTISGTQAMDEADYYCQTWDSRTVVFGTGTKVTVL

SEQ ID NO: 8571 - protein, 110 aa, Artificial Sequence
  Synthetic construct
QSALAQPASVSGSPGQSVTVSCSGTSSDVGAYNYVSWYQHHPGKAPKLMIYDVIKRPSGVSNRFSGSKSGSSASLTISGLQTEDEAYYYCSSYTSTSTFVFGSGTKVTVL

SEQ ID NO: 8572 - protein, 106 aa, Artificial Sequence
  Synthetic construct
EIVMTQSPATLSVSPGERATLSCRASQSVSSNLAWYQQKPGQAPRLLIYGASTRATGIPARFSGSGSGTEFTLTISSLQSEDFAVYYCQQYNNWRTFGQGTKVEIK

SEQ ID NO: 8573 - protein, 107 aa, Artificial Sequence
  Synthetic construct
EIQMTQSPSSLSASVGDRVTITCRASQNINNYLNWYHQKPGKAPKLLIYSTSNLQSGVPSRFSGSGSGTDFTLTISSLQPEDFATYYCQQTYNIPRTFGQGTRVDVK

SEQ ID NO: 8574 - protein, 111 aa, Artificial Sequence
  Synthetic construct
QSVLTQPPSVSGAPGQRVTISCTGSSANIGAGYDVHWYQQVPGTAPHLLIYSNTNRPSGVPDRFSGSKSGTSASLAITGLLAEDEADYYCQSYDSSLSDVVFGGGTKLTVL

SEQ ID NO: 8575 - protein, 108 aa, Artificial Sequence; identical to SEQ ID NO: 8561
  Synthetic construct

SEQ ID NO: 8576 - protein, 107 aa, Artificial Sequence
  Synthetic construct
DIQMTQSPSAMSASVGDRVTITCRASQGISNYLAWFQQKPGKVPKRLIYAASSLQSGVPSRFSGSGSGTEFTLTISSLQPEDFATYYCLQHNSYPRTFGQGTKVEIK

SEQ ID NO: 8577 - protein, 108 aa, Artificial Sequence
  Synthetic construct
EIVLTQSPGTLSLSPGERATLSCRASQLVTNNLLAWYQQRPGQAPRLIIYDASNRATGIPDRFSGTGSGTDFTLTINRLEPEDFAVYFCQQYGLSPYTFGQGAKVEIK

SEQ ID NO: 8578 - protein, 108 aa, Artificial Sequence
  Synthetic construct
AIRMTQSPSSFSASTGDRVTITCRASQGISSYLAWYQQKPGKAPKLLIYAASTLQSGVPSRFSGSGSGTDFTLTISCLQSEDFATYYCQQYYSYPPYTFGQGTKLEIK

SEQ ID NO: 8579 - protein, 111 aa, Artificial Sequence
  Synthetic construct
DVVMTQSPLSLSVTLGQPASISCRSSQRLVHSDGNTYFNWFQQRPGQSPRRLIYKVSNRDSGVPDRFSGSGSGTDFTLKISRVEAEDVGVYYCMEGTQRPTFGQGTRLEIK

SEQ ID NO: 8580 - protein, 106 aa, Artificial Sequence
  Synthetic construct
PYEVTQTPSVFVSPGQTATITCSGDKLDDKYVCWYQQRPGQSPLLIIYEDDKRPSGVPERFSGSNSGNTATLTITETQPADEAVYHCQAWDSSSVTFGGGTRLTVL

SEQ ID NO: 8581 - protein, 110 aa, Artificial Sequence
  Synthetic construct
QSVLTQPPSASGTPGQRVTISCSGSSSNIGSNYVFWYQQLPGTAPKLLIYTDNQRPSGVPDRFSGSKSGTSASLAISGLRSEDEADYYCAAWDDRLSGVLFGGGTKLAVL

SEQ ID NO: 8582 - protein, 107 aa, Artificial Sequence; identical to SEQ ID NO: 8133
  Synthetic construct

SEQ ID NO: 8583 - protein, 106 aa, Artificial Sequence
  Synthetic construct
SYELTQPSSVSVSPGQTARITCSGDLLARKYGRWFQQKPGQAPVLVIYRDTERPSGIPERFSGSSSGTTVALTISGAQVEDEADYYCYSAADNQGVFGGGTKLTVL

SEQ ID NO: 8584 - protein, 110 aa, Artificial Sequence
  Synthetic construct
QSVLTQPPSASGTPGQRVTISCSGSSSNIGSNYVYWYQQLPGTAPKLLIYRNNQRPSGVPDRFSGSKSGTSASLAISGLRSEDEADYYCAAWDDSLSGYVFGTGTKVTVL

SEQ ID NO: 8585 - protein, 107 aa, Artificial Sequence
  Synthetic construct
DIQMTQSPSTLSASVGDRVTITCRASQSISSWLAWYQQKPGKAPKLLIYKASSLESGVPSRFSGSGSGTEFTLTISSLQPDDFATYYCQQYNSYSATFGGGTKVEIK

SEQ ID NO: 8586 - protein, 108 aa, Artificial Sequence
  Synthetic construct
EIVLTQSPGTLSLSPGERATFSCRASQSVSSSRLVWYQQKPGQAPRLLIYDASNRATGIPDRFSGSGSGTDFTLTISRLEPEDFAVYYCQQYGSSPFTFGPGTKVDVK

SEQ ID NO: 8587 - protein, 108 aa, Artificial Sequence
  Synthetic construct
PYELTQPPSVSVSPGQTARITCSADVLPKQYTHWYQQKPGQAPVLVRYNDNERPSGIPERFSGSSSGTIVTLTISGVQAEDEGDYYCQSSDSSGTHMVFGGGTKLTVL

SEQ ID NO: 8588 - protein, 110 aa, Artificial Sequence; identical to SEQ ID NO: 8067
  Synthetic construct

SEQ ID NO: 8589 - protein, 107 aa, Artificial Sequence
  Synthetic construct
DIQMTQSPSTLSASVGDRVTITCRASQSISSWLAWYQQKPGKAPKLLIYKASSLESGVPSRFSGSGSGTEFTLTISSLQPDDFATYYCQQYNSYPGTFGQGTKLEIK

SEQ ID NO: 8590 - protein, 107 aa, Artificial Sequence
  Synthetic construct
DIQMTQSPSSLSASVGDRVTITCRASQDISNFLAWYQQKPGKIPKLLIYAASILQSGVPSRFSGSGSGTDFTLTISSLKPEDVATYYCQKYNSAPFTFGGGSRVDIK

SEQ ID NO: 8591 - protein, 108 aa, Artificial Sequence
  Synthetic construct
EIVLTQSPASLSLSPGERVTLSCRASQSVNTWIAWYQQKPGQAPRLLIYDASNRATGIPARFSGSGSGTDFTLTISSLEPEDFAVYYCQQRTNWPPLTFGGGTKVEIK

SEQ ID NO: 8592 - protein, 110 aa, Artificial Sequence
  Synthetic construct
QAVVTQEPSLTVSPGGTVTLTCGSSTGAVTRGHYPYWFQQKPGQAPRTLIYDTSQKHSWTPARFSGSLLGGKAALTLSGAQPEDEAEYYCLLSYTDARPAFGGGTKLTVV

SEQ ID NO: 8593 - protein, 109 aa, Artificial Sequence
  Synthetic construct
EIVLTQSPATLSLSPGERATLSCRASQSVSSYLAWYQQKPGQAPRLLIYDASNRATGIPARFSGSGSGTDFTLTISSLEPEDFAVYYCQQRSNWPPVFTFGPGTKVDIK

SEQ ID NO: 8594 - protein, 107 aa, Artificial Sequence; identical to SEQ ID NO: 8065
  Synthetic construct

SEQ ID NO: 8595 - protein, 111 aa, Artificial Sequence
  Synthetic construct
QSALTQPASVSGSPGQSITISCTGTSSDVGSYNLVSWYQQHPGKAPKLMIYEGSKRPSGVSNRFSGSKSGNTASLTISGLQAEDEADYYCCSYAGSSTSVVFGGGTKLTVL

SEQ ID NO: 8596 - protein, 107 aa, Artificial Sequence
  Synthetic construct
DIQMTQSPSTLSASVGDRVTITCRASQSISSWLAWYQQKPGKAPKLLIYKASSLESGVPSRFSGSGSGTEFTLTISSLQPDDFATYYCQQYNSYSRTFGQGTKVEIK

SEQ ID NO: 8597 - protein, 106 aa, Artificial Sequence
  Synthetic construct
DIQMTQSPSTLSASVGDRVTITCRASQSISSWLAWYQHKPGKAPKLLIYKASILESGVPSRFSGSVSGTEFTLTINSLQPDDFATYFCQQYNSQWTFGQGTKVEIK

SEQ ID NO: 8598 - protein, 107 aa, Artificial Sequence; identical to SEQ ID NO: 8065
  Synthetic construct

SEQ ID NO: 8599 - protein, 111 aa, Artificial Sequence
  Synthetic construct
DVVITQSPLFLSVTPGQPASISCRSNQNLVHSSGNTYFNWFHQRPGQSPRRLIYQVSKRDPGVPDRFSGSGSGTDFTLTISSVEPEDVGAYYCQQGTHRPAFGQGTKLEIK

SEQ ID NO: 8600 - protein, 112 aa, Artificial Sequence
  Synthetic construct
DIVMTQSPLSLPVTPGEPASLSCRSSQSLLQRNGKNYLDWYWQKPGQSPRLLIYLGVTRASGVSDRFSGSGSGTNFTLKISRVEAEDVGVYYCMQGLQPPGTFGPGTKLEIK

SEQ ID NO: 8601 - protein, 110 aa, Artificial Sequence
  Synthetic construct
QSALTQPASVSGSPGQSITISCTGTSSDVGGYNYVSWYQQHPGKAPKLMIYDVSKRPSGVSNRFSGSKSGNTASLTISGLQAEDEADYYCSSYTSSSTLVFGGGTKLTVL

SEQ ID NO: 8602 - protein, 112 aa, Artificial Sequence
  Synthetic construct
DIVMTQSPLSLPVTLGQSASISCRSSQGLVHSDGNIYLNWFQQRPGQSPRRLIYKVSNRDSGVPDRFSGSGSGTDFTLKISRVEAEDVGLYYCMQATHWPRAFGQGTKVEIK

SEQ ID NO: 8603 - protein, 108 aa, Artificial Sequence
  Synthetic construct
EIVLTQSPGTLSLSPGERVTLSCRTSQSLSSRNLAWYQQKPGQAPRLLIYGASSRATGIPDRFSGSGSGTDFTLTISRLEPEDFAVYYCQQYSSSPGTFGQGTKVESK

SEQ ID NO: 8604 - protein, 111 aa, Artificial Sequence
  Synthetic construct
QSPLTQPASVSGFPGQSITISCTGTGSHLGNYKYVSWYQQHPGKAPKLIVYNFTNRPSGASNRFSGSKSGNTASLTISGLQAEDEADYYCSAYTSSNTLVVFGAGTKLTVL

SEQ ID NO: 8605 - protein, 106 aa, Artificial Sequence
  Synthetic construct
DIQMTQSPSSLSASVGDRVTITCRASQSISSYLNWYQQKPGKAPKLLIYAASSLQSGVPSRFSGSGSGTDFTLTISSLQPEDFATYYCQQSYSTYTFGQGTKLEIK

SEQ ID NO: 8606 - protein, 110 aa, Artificial Sequence; identical to SEQ ID NO: 8226
  Synthetic construct

SEQ ID NO: 8607 - protein, 107 aa, Artificial Sequence; identical to SEQ ID NO: 8065
  Synthetic construct

SEQ ID NO: 8608 - protein, 108 aa, Artificial Sequence
  Synthetic construct
EIVLTQSPGTLSLSPGERATLSCRASQSVSSSYLAWYQQKPGQAPRLLIYGASSRATGIPDRFSGSGSGTDFTLTISRLEPEDFAVYYCQQYGSSPLTFGGGTKVEIK

SEQ ID NO: 8609 - protein, 107 aa, Artificial Sequence; identical to SEQ ID NO: 8065
  Synthetic construct

SEQ ID NO: 8610 - protein, 111 aa, Artificial Sequence
  Synthetic construct
QLVLTQSPSASASLGASVKLTCTLSSGHSSYAIAWHQQQPEKGPRYLMKLNSDGSHSKGDGIPDRFSGSSSGAERYLTISSLQSEDEADYYCQTWGTGIRVFGGGTKLTVL

SEQ ID NO: 8611 - protein, 108 aa, Artificial Sequence
  Synthetic construct
SYELTQPPSVAVSPGQTARITCSGDALPKKYAYWYQQKPGQAPVVVIYKDSERPSGIPERFSGSSSGTTVTLTISGVQAEDEADYYCQSADSDGTYVVFGGGTKLTVL

SEQ ID NO: 8612 - protein, 108 aa, Artificial Sequence
  Synthetic construct
EIVMTQSPATLSVSPGERATLSCRASQSVNSNLAWYQQKPGQAPRLLIYGASTRATGIPARFSGSGSGTEFTLTISSLQSQDFAVYYCQQYNYWPPLTFGQGTKLEIK

SEQ ID NO: 8613 - protein, 113 aa, Artificial Sequence
  Synthetic construct
DIVMTQSPDSLAVSLGERATINCKSSQSVLYSPANKNYLAWYQQKPGQPPKLLFYWASTRESGVPDRFSGGGSGTDFTLTISRLQAEDVAIYYCQQYYFNPRTFGRGTKLELK

SEQ ID NO: 8614 - protein, 110 aa, Artificial Sequence
  Synthetic construct
QSALTQPASVSGSPGQSITISCTGTSSDVGGYNYVSWYQQHPGKAPKLMIYDVSKRPSGVSNRFSGSKSGNTASLTISGLQAEDEADYYCSSYTSSSTVVFGGGTKLTVL

SEQ ID NO: 8615 - protein, 107 aa, Artificial Sequence; identical to SEQ ID NO: 8065
  Synthetic construct

SEQ ID NO: 8616 - protein, 110 aa, Artificial Sequence
  Synthetic construct
SYVLTQPPSVSVAPGETARVTCGGNNIGTTSVHWYQQRPGQAPILVIYYDSDRPSGIPERFSGSNSGNTATLTISRVEAGDEADYYCQVWDSRSALPNVIFGGGTKLTVL

SEQ ID NO: 8617 - protein, 112 aa, Artificial Sequence
  Synthetic construct
DVVMTQSPLSLPVTLGQPASISCRSSQSLVHSDGNTYLNWFQQRPGQSPRRLIYKVSNRDSGVPDRFSGSGSGTDFTLKISRVEAEDVGVYYCMQGTHWLLTFGGGTKVEIK

SEQ ID NO: 8618 - protein, 109 aa, Artificial Sequence; identical to SEQ ID NO: 8306
  Synthetic construct

SEQ ID NO: 8619 - protein, 106 aa, Artificial Sequence
  Synthetic construct
DIQMTQSPFILSASVGDRVTITCRASQSISRWLAWYQQKPGIAPKLLIYKASTLQRGAPSRFSANGSATVFTLTISSLQPDDFATYYCQQYKTSVTFGQGTKLEIK

SEQ ID NO: 8620 - protein, 110 aa, Artificial Sequence
  Synthetic construct
QTVVTQEPSFSVFPGGTVTLTCGLSSGSVSTSYYPSWYQQTPGQAPRTLIYNTNTRSSGVPDRFSGSILGNKAALTITGAQADDESDYYCVLNMGSGLYVFGTGTKVTIL

SEQ ID NO: 8621 - protein, 110 aa, Artificial Sequence
  Synthetic construct
QSVVTQPPSASGTPGQRVTISCSGSTSNIWNNYVYWYQQLPGTAPKLLIYRNNQRPSGVPDRFSGSKSGTSASLAITGLRSEDEADYFCAAWDDRLKGVVFGGGTKLTVL

SEQ ID NO: 8622 - protein, 112 aa, Artificial Sequence
  Synthetic construct
DVVLTQSPLSLPVTLGQPASISCRSSQGLVHTNGNTYLNWFHQRPGQSPRRLIYQVSNRDSGVPDRFSGSGSGTDFTLNINRVEAEDVGVYYCMQGTEWPRTFGQGTKVEIK

SEQ ID NO: 8623 - protein, 107 aa, Artificial Sequence
  Synthetic construct
DIQMTQSPSSLSASVGDTVTMTCRASQSVTRYLNWYQHKPGKAPKLLIYTTSNLHDGVPSRFSGSGSETEFTLTINSLQPEDFATYYCQHSYSNPRTFGPGTTVEIR

SEQ ID NO: 8624 - protein, 110 aa, Artificial Sequence
  Synthetic construct
QSVLTQPPSASGTPGQRVTISCSGSNSNIGRNTVNWYQHLPGTAPKLLIYNNIQRPSGVPDRFSGSKSGTSASLAISGLQSEDEADYYCSTYDDNLNGPLFGGGTKLTVL

SEQ ID NO: 8625 - protein, 107 aa, Artificial Sequence
  Synthetic construct
VIWMTQSPSLLSASTGDRVTISCRMSQGISSYLAWYQQKPGKAPELLIYAASTLQSGVPSRFSGSGSGTDFILTISCLQSEDFATYYCQQYYSFPRTFGQGTKVEIK

SEQ ID NO: 8626 - protein, 110 aa, Artificial Sequence; identical to SEQ ID NO: 8067
  Synthetic construct

SEQ ID NO: 8627 - protein, 107 aa, Artificial Sequence
  Synthetic construct
DIQMTQSPSSLSASVGDRVTITCRASQTINKFLNWYQRKPGKAPKVLVYAASNLQSGVPSRFSGSGSGTDFTLSISSLQPEDFATYFCQQSFSPPWTFGQGTKVEVK

SEQ ID NO: 8628 - protein, 107 aa, Artificial Sequence; identical to SEQ ID NO: 8126
  Synthetic construct

SEQ ID NO: 8629 - protein, 108 aa, Artificial Sequence
  Synthetic construct
SYVLTQSPSVSVAPGKTARITCGGSDVGSKRVHWYQQKPGQAPVMVIYDDSDRPSGIPERFSGSNSGNTATLTISRVEAGDEADYYCHVRDSSSEHVVFGGGTKLTVL

SEQ ID NO: 8630 - protein, 107 aa, Artificial Sequence; identical to SEQ ID NO: 8110
  Synthetic construct

SEQ ID NO: 8631 - protein, 107 aa, Artificial Sequence
  Synthetic construct
DIQMTQSPSSLSASVGDRVTITCRASQSINNFLNWYQQKPGKAPNLLIYTASNLETGVPSRFSGSGSGTDFTLTISSLQPEDFAIYHCQQSYTVTWTFGQGTKVEIK

SEQ ID NO: 8632 - protein, 110 aa, Artificial Sequence
  Synthetic construct
NFMLTQPHSVSESPGKTVTFSCTRSSGSIASNYVQWYQQRPGSFPTTVIYEDKQRPPGVPDRFSGSIDSSSNSASLTISGLKTEDEADYYCQSSDINSWVFGGGTKLTVL

SEQ ID NO: 8633 - protein, 108 aa, Artificial Sequence
  Synthetic construct
SYVLTQPPSVSVAPGMTASIACGGDNIGSKSVHWYQQKPGQAPILVIYYDTDRPSGIPERFSGSNSGNTAILTISSVEAGDEADYHCQVWDSIRNYVVFGGGTKLTVL

SEQ ID NO: 8634 - protein, 110 aa, Artificial Sequence
  Synthetic construct
QSALTQPASVSGSPGQSITISCTGTSRDVGGYNYVSWYQQHPDKAPKLIIYDVTKRPSGVSRRFSGSKSGDTASLTISGLQAEDEADYYCSSYTSDSTVVFGGGTKLTVL

SEQ ID NO: 8635 - protein, 110 aa, Artificial Sequence
  Synthetic construct
NFMLTQPHSVSESPGKTVTISCTRSSGSIASNYVQWYQQRPGSSPTTVIYEDNQRPSGVPDRFSGSIDSSSNSASLTISGLKTEDEADYYCQSYDSSNRVFGGGTKLTVL

SEQ ID NO: 8636 - protein, 115 aa, Artificial Sequence
  Synthetic construct
QAVVTQPSSLSASPGASASLTCSLRSDIDVLAFRVYWYQQRPGSPPHYLLSYHSDSDNQRGPGLPRRFSGSKDASANAAILFISGLQSEDEADYFCMIWYNSASVFGTGTKVTVL

SEQ ID NO: 8637 - protein, 109 aa, Artificial Sequence; identical to SEQ ID NO: 8306
  Synthetic construct

SEQ ID NO: 8638 - protein, 110 aa, Artificial Sequence
  Synthetic construct
SSVLTQPPSVSVAPGKTASITCGGDNIGSKTVHWYQQRPGQAPVLVVYFDTDRPSGIPERFSGTKSGNTATLIISRVEAGDEADYYCQVWDRSSDHYNYAFGTGTTVTVL

SEQ ID NO: 8639 - protein, 107 aa, Artificial Sequence
  Synthetic construct
GIQMTQSPSSLSASVGDRVTITCQASQDITNYLNWYQQKAGKAPNLLIYAASNLETGVPSRFTGSGSGTHFTLTISSLQPEDFATYYCQQYDNLPPTFGGGTKVEIK

SEQ ID NO: 8640 - protein, 112 aa, Artificial Sequence
  Synthetic construct
DIVMTQSPLSLFVTPGEPASISCRSSQSLLHSNGYTYFDWYLQKPGQSPQLLIYLGSYRAPGVPDRFTGSGSGTDFALKISRVEAEDVGIYYCMQGLQTQITFGQGTRLEIK

SEQ ID NO: 8641 - protein, 111 aa, Artificial Sequence
  Synthetic construct
QSVLTQPPSVSGAPGQRVTLSCTGSNSNIGAGYDVHWYQQFPGTAPRLLIYGKTNRPSGVPDRFSGSKSGTSASLAITGLQAEDEADYYCQSYDSRLSGWVFGGGTKVTVL

SEQ ID NO: 8642 - protein, 111 aa, Artificial Sequence
  Synthetic construct
QSVLTQPPSVSGAPGQTVTISCTGNNSNIGAGYDVHWYRLLPGTAPKLLIYGNRNRPSGVTDRFSGSKSGTSASLAITGLQAEDEADYYCQAFDSRLSSYVFGSGTKVTVL

SEQ ID NO: 8643 - protein, 107 aa, Artificial Sequence; identical to SEQ ID NO: 8521
  Synthetic construct

SEQ ID NO: 8644 - protein, 107 aa, Artificial Sequence; identical to SEQ ID NO: 8133
  Synthetic construct

SEQ ID NO: 8645 - protein, 109 aa, Artificial Sequence
  Synthetic construct
DIQMTQSPSSLSASVGDRVTITCQASQDISNYLNWYQQKPGKAPKLLIYDASNLETGVPSRFSGSGSGTDFTFTISSLQPEDIATYYCQQYDNLPPRLTFGGGTKVEIK

SEQ ID NO: 8646 - protein, 113 aa, Artificial Sequence
  Synthetic construct
DVVMTQSPLSLPVTLGQPASISCRSSQSLVHSDGNTYLNWFQQRPGQSPRRLIYKVSNRDSGVPDRFSGSGSGTDFTLKISRVEAEDVGVYYCMQGTHWPPLTFGGGTKVEIK

SEQ ID NO: 8647 - protein, 107 aa, Artificial Sequence
  Synthetic construct
DIQLTQSPSFLSASLGDRVTITCRASQGISSYLAWYQQKPGKAPKLLIYAASTLQSGVPARFSGSGSGTEFTLTISSLQPEDFATYYCQQLNSYPTTFGQGTRLEIK

SEQ ID NO: 8648 - protein, 108 aa, Artificial Sequence; identical to SEQ ID NO: 8099
  Synthetic construct

SEQ ID NO: 8649 - protein, 107 aa, Artificial Sequence
  Synthetic construct
DIQMTQSPSSLSASVGDRVTITCRASQSINTYLNWYQQKSGKAPKLLIYAASSLQSGVPARFSGSGSGTDFTLTISSLQPEDFAAYYCQQSYSPPPTFGQGTKVEIK

SEQ ID NO: 8650 - protein, 109 aa, Artificial Sequence
  Synthetic construct
EIVLTQSPGTLSLSPGERATLSCRASQSVSSSYLAWYQQKPGQAPRLLIYGASSRATGIPDRFSGSGSGTDFTLTISRLEPEDFAVYYCQQYGSSPGLTFGGGTKVEIK

SEQ ID NO: 8651 - protein, 108 aa, Artificial Sequence
  Synthetic construct
EIVLTQSPGTLSLSPGERATLSCRASQSVSSSYLAWYQQKPGQAPRLLIYGASSRATGIPDRFSGSGSGTDFTLTISRLEPEDFAVYYCQQYGSSRLTFGGGTKVEIK

SEQ ID NO: 8652 - protein, 109 aa, Artificial Sequence
  Synthetic construct
QSALTQPASVSGSPGQSITISCTGTSSDVGGYYYVSWYQQHPGKAPKLMIYDVSNRPSGVSNRFSGSKSGNTASLTISGLQAEDEADYYCSSYTRTNVVFGGGTKLTVL

SEQ ID NO: 8653 - protein, 107 aa, Artificial Sequence
  Synthetic construct
EIVLTQSPGTLSLSPGERATLSCRASQSVSSSYLAWYQQKPGQAPRLLIYGASSRATGIPDRFSGSGSGTDFTLTISRLEPEDFAVYYCQQYGRKLTFGGGTKVEIK

SEQ ID NO: 8654 - protein, 112 aa, Artificial Sequence
  Synthetic construct
DIVMTQSPLSLPVTPGEPASISCRSSQSLLHSNGYNYLDWYLQKPGQSPQLLIYLGSNRASGVPDRFSGSGSGTDFTLKISRVEAEDVGVYYCMQALQTPRTFGPGTKVDIK

SEQ ID NO: 8655 - protein, 110 aa, Artificial Sequence
  Synthetic construct
QSALTQPRSVSGSPGQSVTISCTGTSSDVGGYNYVSWYQQHPGKAPKLMIYDVSQRPSGVPDRFSGSKSGNTASLTISALQAEDEADYYCCSYAGRFTSLFGGGTKVTVL

SEQ ID NO: 8656 - protein, 105 aa, Artificial Sequence; identical to SEQ ID NO: 8339
  Synthetic construct

SEQ ID NO: 8657 - protein, 111 aa, Artificial Sequence
  Synthetic construct
QSVLTQPPSASGTPGQRVTISCSGSSSNIGSYYVYWYQQLPGTAPKLLIYRNDQRPSGVPDRFSGSKSGTSASLAISGLRSEDEADYYCAAWDDSLSGPYVFGTGTKVTVL

SEQ ID NO: 8658 - protein, 107 aa, Artificial Sequence
  Synthetic construct
DIQMTQSPSSLSASVGDRVTITCRASQSISSYLNWYQQKPGKAPKLLIYAASSLQSGVPSRFSGSGSGTDFTLTISSLQPEDFATYYCQQSYSTPYTFGQGTKLEIK

SEQ ID NO: 8659 - protein, 113 aa, Artificial Sequence
  Synthetic construct
DIVMTQSPDSLVVSLGERATINCKSSQSVLYSSNNKNNLAWYQQKPGQPPKLLIYWASTRESGVPDRFSGSGSGTDFTLTISSLQAEDVAVYYCQQYYSTPFTFGQGTKLEIK

SEQ ID NO: 8660 - protein, 107 aa, Artificial Sequence
  Synthetic construct
EIVMTQSPATLSVPPGERATLSCRASQSVTNNLAWYQQKPGQVPRLLIYAVSTRATGIPARFSGSGSGTEFTLTISSLQSEDFAVYYCQQYSNWPRTFGQGTKVEIK

SEQ ID NO: 8661 - protein, 113 aa, Artificial Sequence
  Synthetic construct
DIVLTQSPDSLAVSLGERATINCKSSQSVLYSSNNKNHLAWYQQKPGQPPKLLIFWASARESGVPDRFSGSGSGTDFTLTISSLQAEDVAVYYCQQYYNTPRTFGQGTKVEIK

SEQ ID NO: 8662 - protein, 107 aa, Artificial Sequence
  Synthetic construct
DIQMTQSPSTLSASVGDRVTITCRASQSISSWLAWYQQKPGKAPKLLIYKASSLESGVPSRFSGSGSGTEFTLTISSLQPDDFATYYCQQYNSYPLTFGGGTKVEIK

SEQ ID NO: 8663 - protein, 109 aa, Artificial Sequence
  Synthetic construct
EIVLTQSPATLSLSPGERATLSCRASQSVSSYLAWYQQKPGQAPRLLIYDASNRATGIPARFSGSGSGTDFTLTISSLEPEDFAVYYCQQRSNWPPRYTFGQGTKLEIK

SEQ ID NO: 8664 - protein, 107 aa, Artificial Sequence
  Synthetic construct
EIVMTQSPATLSVSPGERATLSCRASQTVSINLAWYQQKPGQAPRLLIYGASTRATGIPGRFSGSGSGTEFTLSISSLQSEDFAIYYCQQYNNWPYTFGQGTRLEIK

SEQ ID NO: 8665 - protein, 109 aa, Artificial Sequence
  Synthetic construct
DIQMTQSPSSLSASVGDRVSITCRASQSISGYVNWYQQKPGKAPRLLIYVASNLQSGVPSRFSGSGSGTDFTLTISSLQPEDSATYYCQQSFFTPRELTFGGGTKVEIK

SEQ ID NO: 8666 - protein, 114 aa, Artificial Sequence
  Synthetic construct
DVVMTQSPLSLPVTLGQPASISCRSSRSLLHSDGNTYLSWFQQRPGQSPRRLIYKVSNRDSGVPDRFSGSGSGTDFTLKISRVEADDVGVYYCMQATHWPPGYTFGQGTKLEIK

SEQ ID NO: 8667 - protein, 107 aa, Artificial Sequence
  Synthetic construct
DIQMTQSPSSLSASVGDRVTITCRASQSISSYLNWYQQKPGKAPKLLIYAASSLQSGVPSRFSGSGSGTDFTLTISSLQPEDFATYYCQQSYSTRWTFGQGTKVEIK

SEQ ID NO: 8668 - protein, 107 aa, Artificial Sequence
  Synthetic construct
DIQMTQSPSSVSASVGDSVTITCRASQGIRSWLAWYQQKPGKAPNLLIYAASSLQSGVPSRFSGSGSGTDFTLTISSLQPEDFATYYCQQANSLPYTFGQGTKLEIK

SEQ ID NO: 8669 - protein, 107 aa, Artificial Sequence; identical to SEQ ID NO: 8658
  Synthetic construct

SEQ ID NO: 8670 - protein, 112 aa, Artificial Sequence
  Synthetic construct
LSALTQPASVSASPGQSITIPCTGINNDVGGHPYVSWYQHHPGKAPRLIIYDVTERPSGVSGRFSGSKSGNTASLTVSGLRAEDEGYYYCSAYTSTIENIWIFGGGTMLTVL

SEQ ID NO: 8671 - protein, 108 aa, Artificial Sequence
  Synthetic construct
DIQMTQSPSTLSATVGDRVTITCRASQSISGWLAWYQQKPGRAPKLLIYKASSLENGVPSRFSGSGSGTEFTLTISSLQPDDFATYYCQQYNSYSPYTFGQGTKLEIK

SEQ ID NO: 8672 - protein, 107 aa, Artificial Sequence
  Synthetic construct
EIVMTQSPATLSVSPGERATLSCRASQSVSSNLAWYQQKPGQAPRLLIYGASTRATGIPARFSGSGSGTEFTLTISSLQSEDFAVYYCQQYNNWPLTFGGGTKVEIK

SEQ ID NO: 8673 - protein, 110 aa, Artificial Sequence
  Synthetic construct
QSALTQPASVSGSPGQSITISCTGTSGDVGGYNYVSWYQQHPGKAPKLMIYDVSHWAPGVSTRFSASKAGNTASLTISGLQADDEADYYCCSYRSGGTYVFGTGTKVTVL

SEQ ID NO: 8674 - protein, 112 aa, Artificial Sequence; identical to SEQ ID NO: 8316
  Synthetic construct

SEQ ID NO: 8675 - protein, 107 aa, Artificial Sequence; identical to SEQ ID NO: 8444
  Synthetic construct

SEQ ID NO: 8676 - protein, 107 aa, Artificial Sequence
  Synthetic construct
DIQMTQSPSTLSASVGDGVTITCRASQSISNWLAWYQQKPGKAPKLLIYKASSLESGVPSRFSGSGSGTEFTLTISNLQPDDFATYYCQHYNNYPFTFGPGTRLEIK

SEQ ID NO: 8677 - protein, 107 aa, Artificial Sequence
  Synthetic construct
DIQMTQSPSTLSASVGDRVTMTCRASQSISNWLAWYQQKPGKAPKLLIYKASSLESGVPSRFSGSGSGTEFTLTISSLQPDDFATYYCQQYNSFSRTFGQGTKVEIR

SEQ ID NO: 8678 - protein, 108 aa, Artificial Sequence
  Synthetic construct
EIVLTQSPGTLSLSPGERATLSCRASQSISRSYLAWYQQNPGQTPRLLIYGTSNRATGIPDRFSGSGSGTDFTLTISRLEPEDFAVYYCQQSASSPWTFGQGTKVEIK

SEQ ID NO: 8679 - protein, 109 aa, Artificial Sequence
  Synthetic construct
EVVLTQSPATLSLSPGERATLTCRASQSVSNYLAWYQQKPGQAPRLLIYDASNRATGIPARFSGSGSGTDFSLTISSLEPEDFALYYCQQRTNWPPSITFGQGTRLEIK

SEQ ID NO: 8680 - protein, 104 aa, Artificial Sequence
  Synthetic construct
QSALTQPASVSGSPGQSITISCTGVTSDLVSWYQQHSGKAPKLIIYAVHNRPSGVSNRFSDSKSGDTASLTISGLQPEDEAFYYCCSYISATYVFGTGTKVTVL

SEQ ID NO: 8681 - protein, 111 aa, Artificial Sequence
  Synthetic construct
QVVLTQSPSASASLGASVKLTCTLSSGHSNYAIAWHQQQPEKGPRFFMKVNSDGSHIKGDGIPDRFSGSSSGAERYLTISSLQSEDEADYYCQTWGTGTVVFGGGTKLTVL

SEQ ID NO: 8682 - protein, 107 aa, Artificial Sequence; identical to SEQ ID NO: 8127
  Synthetic construct

SEQ ID NO: 8683 - protein, 107 aa, Artificial Sequence; identical to SEQ ID NO: 8065
  Synthetic construct

SEQ ID NO: 8684 - protein, 110 aa, Artificial Sequence
  Synthetic construct
QPVLTQPPSASGTPGQGVTITCSGSSSNIGRNTVTWYQHFPGSAPKLLIYTENQRPSGVPDRFSGSKSGTSASLAISGLQSEDDGDYYCAVWDDGLNGVVFGGGTKLTVL

SEQ ID NO: 8685 - protein, 110 aa, Artificial Sequence
  Synthetic construct
QSVLTQPPSASGTPGQRVTISCSGSSSNIGSNYVYWYQQLPGTAPKLLIYRNNQRPSGVPDRFSGSKSGTSASLAISGLRSEDEADYYCAAWDDSLSGPVFGGGTKLTVL

SEQ ID NO: 8686 - protein, 107 aa, Artificial Sequence
  Synthetic construct
DIQMTQSPSSLSASVGDTVSITCRASQGISNYLAWFQQKPGKAPKSLIYAAYNLHSGVPSRFSGGGSGTDFRLTIISLQPEDFATYYCQQYNSYPYTFGQGTKLEIK

SEQ ID NO: 8687 - protein, 113 aa, Artificial Sequence
  Synthetic construct
DIVMTQSPDSLAVSLGERATINCKSSQSVLYSSNNKNYLAWYQQKPGQPPKLLIYWASTRESGVPDRFSGSGSGTDFTLTISSLQAEDVAVYYCQQYYSTPSSFGGGTKVEIK

SEQ ID NO: 8688 - protein, 112 aa, Artificial Sequence
  Synthetic construct
DVVMTQSPLSLPVTLGQPASISCRSSQSLVHSDGNTYLNWFQQRPGQSPRRLIYKVSNRDSGVPDRFSGSGSGTDFTLRISRVEAEDVGVYYCMQGTHWPRAFGGGTKVEIK

SEQ ID NO: 8689 - protein, 109 aa, Artificial Sequence
  Synthetic construct
QSVLTQSPSTSGTPGQRVTISCSGSGSNIERHFVYWYQQLSGTAPKVLIYRDDQRPSGVPARFSGSKSGASASLTIGGLRPEDEAVYYCATWDDSVGGVFGGGTKVTVL

SEQ ID NO: 8690 - protein, 107 aa, Artificial Sequence; identical to SEQ ID NO: 8501
  Synthetic construct

SEQ ID NO: 8691 - protein, 107 aa, Artificial Sequence
  Synthetic construct
EIVLTQSPATLSLSPGERATLSCRASQTVSSYLAWYQQKPGQAPRLLIFAASNRAPGIPARFSGSGSGTDFTLTISSLEPEDFAVYYCQQRSDWPRTFGQGTKVEIR

SEQ ID NO: 8692 - protein, 111 aa, Artificial Sequence
  Synthetic construct
QSVLTQPPSVSGAPGQRVTISCTGSSSNIGAGYDVHWYQQLPGTAPKLLIYGNSNRPSGVPDRFSGSKSGTSASLAITGLQAEDEADYYCQSYDSSLSGSVFGGGTKLTVL

SEQ ID NO: 8693 - protein, 109 aa, Artificial Sequence
  Synthetic construct
QSALTQPASVSGSPGQSITISCTGTSSDVGSYNLVSWYQQHPGKAPKLMIYEVSKRPSGVSNRFSGSKSGNTASLTISGLQAEDEADYYCCSYAGSSYVFGTGTKVTVL

SEQ ID NO: 8694 - protein, 107 aa, Artificial Sequence
  Synthetic construct
EIVLTQSPATLSLSPGDRATLSCRASQSVSSYLAWYQQKPGQAPRLLIYLASKRASGIPARFSGSGSGTDFTLTISSLEPEDFAVYYCQQRSNWPLTFGGGTKVEIK

SEQ ID NO: 8695 - protein, 107 aa, Artificial Sequence
  Synthetic construct
DIQMTQSPSAMSASVGDRVTITCRASQGISNYLAWFQQKPGKVPKRLIYAASSLQSGVPSRFSGSGSGTEFTLTISSLQPEDFATYYCLQHNSYPLTFGGGTKVEIK

SEQ ID NO: 8696 - protein, 107 aa, Artificial Sequence
  Synthetic construct
EIVMTQSPATLSVSPGERATLSCRASQSVSSNLAWYQQKPGQAPRLLIYGASTRATGIPARFSGSGSGTEFTLTISSLQSEDFAVYYCQQYNNWPNTFGQGTKLEIK

SEQ ID NO: 8697 - protein, 106 aa, Artificial Sequence
  Synthetic construct
EIVLTQSPATLSLSPGERATLSCRASQSVSSYLAWYQQKPGQAPRLLIYDASNRATGIPARFSGSGSGTDFTLTISSLEPEDFAVYYCQQRSNWFTFGGGTKVEIK

SEQ ID NO: 8698 - protein, 107 aa, Artificial Sequence
  Synthetic construct
DIQMTQSPSTLSASVGDRVTITCRASQNISRWLAWYQQKPGKAPKLLIYKASSLQSGVPSRFSGSGSGTEFTLTISSLQPDDFAAYYCQQYNTNPLTFGGGTKVEIR

SEQ ID NO: 8699 - protein, 107 aa, Artificial Sequence
  Synthetic construct
DIQMTQSPSAMSASVGDRVTITCRASQGISHYLAWFQQKPGKVPKRLIYAASTLQGGVPSRFSGSGSGTEFTLTISSLQPEDFATYYCLQHNTYPWTFGQGTKVEIK

SEQ ID NO: 8700 - protein, 108 aa, Artificial Sequence
  Synthetic construct
DIQMTQSPSSLSASVGDRVTITCRASQSISSYLNWYQQKPGKAPKLLIYAASSLQSGVPSRFSGSGSGTDFTLTISSLQPEDFATYYCQQSYSTRALTFGGGTKVEIK

SEQ ID NO: 8701 - protein, 108 aa, Artificial Sequence
  Synthetic construct
SSELTQDPAVSVTLGQTVTITCQGDNLRSYYATWYQQKPRQAPLLVIYGKNRRPSGIPDRFSGSSSGNTASLTITGSQAEDEADYYCTSRDSGGNHWVFGGGTKLTVL

SEQ ID NO: 8702 - protein, 107 aa, Artificial Sequence
  Synthetic construct
SYELTQPPSVSVSPGQTARITCSGDALPKQYAYWYQQKPGQAPVLVIYKDSERPSGIPERFSGSSSGTTVTLTISGVQAEDEADYYCQSADSSGTYVFGTGTKVTVL

SEQ ID NO: 8703 - protein, 108 aa, Artificial Sequence
  Synthetic construct
EIVLTQSPGTLSLSPGERATLSCRASQSVSSSYLAWFQQKPGQAPRLLIFGASSRATGIPDRFSGSGSGTDFTLSISRLEPEDFAVYYCQQYGTSPRTFGQGTKVEIK

SEQ ID NO: 8704 - protein, 112 aa, Artificial Sequence
  Synthetic construct
DVVLTQSPLSLPVTLGQPASISCRSSQGLVHTNGNTYLNWFHQRPGQSPRRLIYQVSNRDSGVPDRFSGSGSGTDFTLKISRVEAEDVGVYYCMQGTEWPRTFGQGTKVEIK

SEQ ID NO: 8705 - protein, 107 aa, Artificial Sequence; identical to SEQ ID NO: 8065
  Synthetic construct

SEQ ID NO: 8706 - protein, 107 aa, Artificial Sequence
  Synthetic construct
DIQMTQSPSSLSASVGDRVTITCRASQSISSYLNWYQQKPGKAPKLLIYAASSLQSGVPSRFSGSGSGTDFTLTISSLQPEDFATYYCQQSYSTPRTFGPGTKVDIK

SEQ ID NO: 8707 - protein, 110 aa, Artificial Sequence
  Synthetic construct
QSVLTQPPSASGTPGQRVTISCSGSTSNIGSNTVNWYQQLPGTAPKLLIYSHNQRPSGVPDRFSGSKSGTSASLAISGLQSEDEAGYYCAAWDDSLNGWVFGGGTKLTVL

SEQ ID NO: 8708 - protein, 107 aa, Artificial Sequence
  Synthetic construct
DIQMTQSPSSLSASVGDRVTIACRASQGISNYLAWYQQRPGKVPKLLISAVSSLQSGVPSRFSGSGSGTDFTLTISSLQPEDVATYYCQKYNSAPVTFGPGTKVDIK

SEQ ID NO: 8709 - protein, 107 aa, Artificial Sequence
  Synthetic construct
DIQMTQSPSSLSASMGDRVTITCRASQSIRRSLNWYQQRRGKAPELLIYAASTLQSGVPSRFSGSGFGTEFTLTISRLQPDDLGTYYCQQSYTAPRSFGQGTKVDIK

SEQ ID NO: 8710 - protein, 107 aa, Artificial Sequence
  Synthetic construct
AIQMTQSPSSLSASVGDRVTMTCRASQNIITYLNWYHQKLGTAPKLLIHSASTLQSGVPSRFSGSGSGTDFTLTISSLQPEDFGTYYCQQSYSDTRTFGQGTKVDLK

SEQ ID NO: 8711 - protein, 108 aa, Artificial Sequence
  Synthetic construct
SYVLTQPPSVSVAPGRTATITCGGNSIGSKSVHWYQQRPGQAPVVVVYYDSDRPSGIPERFSGSNSGNTATLTISRVEAGDEADYYCQVWDSSRYHVVFGGGTKLTVL

SEQ ID NO: 8712 - protein, 107 aa, Artificial Sequence
  Synthetic construct
DIQMTQSPSSLSTSVGDRVTITCRASQNINTYLNWYQQKPGKAPKLLIYDTSNLQSGVPSRFSGSGSGTDFTLTISNLQPEDFATYYCQQNYNTVPTFGQGTKVEIK

SEQ ID NO: 8713 - protein, 111 aa, Artificial Sequence
  Synthetic construct
EIVMTQSPLSLSVTPGESASISCRSSQSLHTNGYNSLDWYLQKPGQSPQLLIYLTSTRAPGVPDRISGSGSGTDFTLKISRVDAEDVGVYFCMQGLQTPPTFGPGTKLDIK

SEQ ID NO: 8714 - protein, 107 aa, Artificial Sequence
  Synthetic construct
DIQMTQSPSAMSASVGDRVTITCRASQGIINYLAWFQQKPGKVPKRLIYDASSLESGVPSRFSGSGFGTEFTLTISSLQPEDFATYYCLQHNSYPLTFGGGTKVEIK

SEQ ID NO: 8715 - protein, 110 aa, Artificial Sequence
  Synthetic construct
NFMLTQPHSVSESPGKTVTITCTRSSGSIATYYVQWYQQRPGSAPTTVINEDSQRPSGVPDRFSGSIDSTSNSASLTISGLKTEDEADYYCQSYDNNFVVFGGGTKLTVL

SEQ ID NO: 8716 - protein, 107 aa, Artificial Sequence; identical to SEQ ID NO: 8176
  Synthetic construct

SEQ ID NO: 8717 - protein, 107 aa, Artificial Sequence
  Synthetic construct
EIVMTQSPATLSVSPGERATLSCRASQSVSSNLAWYQQKPGQAPRLLIYGASTRATGIPARFSGSGSGTEFTLTISSLQSEDFAVYYCQQYNNWLITFGQGTRLEIK

SEQ ID NO: 8718 - protein, 110 aa, Artificial Sequence
  Synthetic construct
QSVLTQPPSVSGTPGQRVTISCSGSSSNIGNDLVNWYQQLPGTAPKLLIYSNNQRPAGVPDRFSGSKSGTSASLAINGLQSEDEADYYCAAWDDTLNGRIFGGGTKLTVL

SEQ ID NO: 8719 - protein, 110 aa, Artificial Sequence
  Synthetic construct
QSVLSQPPSVSATPGQTIVITCSGSIADIGSHTVNWYQQLPGAAPRLLIYRSDQRPSGVSDRFSGSKSGASASLAISGLQSGDEGDYFCATWHDKLNGPLFGGGTKLTVL

SEQ ID NO: 8720 - protein, 107 aa, Artificial Sequence; identical to SEQ ID NO: 8298
  Synthetic construct

SEQ ID NO: 8721 - protein, 111 aa, Artificial Sequence
  Synthetic construct
QSALTQPASVSGSPGQSITISCTGTSSDVGGYNYVSWYQQHPGKAPKLMIYDVSKRPSGVSNRFSGSKSGNTASLTISGLQAEDEADYYCSSYTSSSTFYVFGTGTKVTVL

SEQ ID NO: 8722 - protein, 111 aa, Artificial Sequence
  Synthetic construct
QSVLTQPPSVSGAPGQRVTISCTGSSFNIGAGYVVHWYQRLPGTAPKVLIYGNNNRPSGVPDRFSGSKSGTSASLAITGLQAEDEADYYCQSFDSSLSAYVFGTGTKVTVL

SEQ ID NO: 8723 - protein, 112 aa, Artificial Sequence
  Synthetic construct
QSVLTQPPSVSGAPGQRVTISCAGSSSNIGTTYPVHWYQQLPGTAPKLLIYRNNTRPSGVPDRFSGSRSGSSASLAITGLQAEDEADYYCQSFDRRLGGEMVFGGGTKLTVL

SEQ ID NO: 8724 - protein, 110 aa, Artificial Sequence; identical to SEQ ID NO: 8171
  Synthetic construct

SEQ ID NO: 8725 - protein, 109 aa, Artificial Sequence
  Synthetic construct
QTVVTQEPSLTVSPGGTVTLTCASSTGAVTSGYYPNWFQQKPGQAPRALIYSTSNKHSWTPARFSGSLLGGKAALTLSGVQPEDEAEYYCLLYYGGAQVFGGGTKLTVL

SEQ ID NO: 8726 - protein, 107 aa, Artificial Sequence
  Synthetic construct
EIVLTQSPATLSLSPGERATLSCRASQSISTYLGWYQQKPGQAPRLLIYDASKRATGIPARFIGSGSGTDFTLTISSLEPEDFAVYYCQKRSNWPFTFGPGTKVEIK

SEQ ID NO: 8727 - protein, 112 aa, Artificial Sequence
  Synthetic construct
DIVMTQTPLSSPVTLGQPASISCRSSQSLVHSDGNTYLSWLQQRPGQPPRLLIYKISNRFSGVPDRFSGSGAGTDFTLKISRVEAEDVGVYYCTQATQFPWTFGQGTKVEIK

SEQ ID NO: 8728 - protein, 103 aa, Artificial Sequence
  Synthetic construct
EIVLTQSPATLSLSPGERATLSCRASQSVSSYLAWYQQKPGQAPRLLIYDASNRATGIPARFSGSGSGTDFTLTISSLEPEDFAVYYCQQRKTFGQGTKLEIK

SEQ ID NO: 8729 - protein, 108 aa, Artificial Sequence
  Synthetic construct
EIVLTQSPGTLSLSPGERATLSCRASQSVSNNYLVWYQQKPGQAPRLLIYGASSRATGIPDRFSGSGSGTDFTLTISRLEPEDFAVYYCQQYCCSPRTFGQGTKVEIK

SEQ ID NO: 8730 - protein, 107 aa, Artificial Sequence
  Synthetic construct
GIQMTQSPSSLSASVGDRVSITCRASQSISTYLNWYQQKPGKAPKLLIYAASSFHSGVPSRFSGSGSGTDFTLTISSLQPEDFATYFCQQSYSTQYTFGQGTKLDIK

SEQ ID NO: 8731 - protein, 107 aa, Artificial Sequence; identical to SEQ ID NO: 8065
  Synthetic construct

SEQ ID NO: 8732 - protein, 107 aa, Artificial Sequence
  Synthetic construct
DIQMTQSPSSLSASVGDRVTITCRASQSISSYLNWYQQKPGKAPKLLIYAASSLQSGVPSRFSGSGSGTDFTLTISSLQPEDFATYYCQQSYSTQWTFGQGTKVEIK

SEQ ID NO: 8733 - protein, 108 aa, Artificial Sequence; identical to SEQ ID NO: 8106
  Synthetic construct

SEQ ID NO: 8734 - protein, 109 aa, Artificial Sequence
  Synthetic construct
EIVMTQSPATLSVSPGERATLSCRASQSVSSNLAWYQQKPGQAPRLLIYGASTRATGIPARFSGSGSGTEFTLTISSLQSEDFAVYYCQQYNNWPPKYTFGQGTKLEIK

SEQ ID NO: 8735 - protein, 107 aa, Artificial Sequence
  Synthetic construct
DIQMTQSPSSLSASVGDRVTITCRASQGISNYLAWYQQKPGKVPKLLIYAASTLQSGVPSRFSGSGSGTDFTLTISSLQPEDVATYYCQKYNSAPLTFGGGTKVEIK

SEQ ID NO: 8736 - protein, 107 aa, Artificial Sequence; identical to SEQ ID NO: 8065
  Synthetic construct

SEQ ID NO: 8737 - protein, 107 aa, Artificial Sequence
  Synthetic construct
SSELTQPPSVSVSPGQTARITCSAAALPSQFTFWYQQKPGQAPLLLIYLDTERPSGIPERFSGSTSGTTVTLTISGVQAEDEADYYCQSADSYGTLLFGGGTKLTVL

SEQ ID NO: 8738 - protein, 108 aa, Artificial Sequence
  Synthetic construct
SSVLTQPPSMSAAPGQTARIPCEGDIVGEESVHWYQQRPGRAPVLVISYDTDRPSGIPERFSGSKSGKTATLTITRVEVGDEGDFYCQVWDGLREHFVFGSGTRVTVL

SEQ ID NO: 8739 - protein, 108 aa, Artificial Sequence
  Synthetic construct
SYVLTQPPSVSVAPGRTARITCGGNNIGSKSVHWYLQKPGQAPALVVYYDSDRPSGIPERFSGSSSGNTATLTISRVEAEDEADYYCQVWDSSSDHAVFGGGTQLTVL

SEQ ID NO: 8740 - protein, 105 aa, Artificial Sequence; identical to SEQ ID NO: 8339
  Synthetic construct

SEQ ID NO: 8741 - protein, 115 aa, Artificial Sequence
  Synthetic construct
QAVLTQPSSLSASPGASASLTCTLRSGINVGTYRIFWYQQKPGSPPQYLLRYKSDSDNHQGSGVPSRFSGFKDVSANAGILLISGLQSEDEADYYCMVWHSGAWVFGGGTKLTVL

SEQ ID NO: 8742 - protein, 107 aa, Artificial Sequence; identical to SEQ ID NO: 8110
  Synthetic construct

SEQ ID NO: 8743 - protein, 110 aa, Artificial Sequence
  Synthetic construct
QTVVTQEPSFSVSPGGTVTLTCGLSSGSVSTSYYPSWYQQTPGQAPRTLIYSTNTRSSGVPDRFSGSILGNKAALTITGAQADDESDYYCVLYMGSGIWVFGGGTRLTVL

SEQ ID NO: 8744 - protein, 109 aa, Artificial Sequence
  Synthetic construct
GIVLTQSPGTLSLSPGERATLSCRASQSVSINYLAWYQQKPGQAPRLLIYGTSSRATGIPDRFSGSGSGTDFTLTISRLEPEDFAVYYCQQYGSSPVYTFGQGTKLEIK

SEQ ID NO: 8745 - protein, 108 aa, Artificial Sequence
  Synthetic construct
EIVLTQSPGTLSLSPGERATLSCRASQSVSSSYLAWYQQKPGQAPRLLIYGASSRATGIPDRFSGSGSGTDFTLTISRLEPEDFAVYYCQQYGSSLFTFGPGTKVDIK

SEQ ID NO: 8746 - protein, 107 aa, Artificial Sequence
  Synthetic construct
DIQMTQSPSTLSASVGDRVTITCRASQSISSWLAWYQQKPGKAPKLLIYKASSLESGVPSRFSGSGSGTEFTLTISSLQPDDFATYYCQQYNSYSGTFGQGTKVEIK

SEQ ID NO: 8747 - protein, 107 aa, Artificial Sequence
  Synthetic construct
DIQMTQSPSSLSASVGDRVTITCQASQDISNYLNWYQQKPGKAPKLLIYDASNLETGVPSRFSGSGSGTDFTFTISSLQPEDIATYYCQQYDNLPFTFGPGTKVDIK

SEQ ID NO: 8748 - protein, 109 aa, Artificial Sequence
  Synthetic construct
EIVMTQSPATLSVSPGERVTLSCRASQSVRSNLAWYQQKPGQAPRLLIYGASTRATGIPARFSGSGSGTEFTLTISSLQSEDFAVYYCQQYNNWPPMYTFGQGTKLEIK

SEQ ID NO: 8749 - protein, 112 aa, Artificial Sequence
  Synthetic construct
QSALTQPASVSGSPGQSITISCTGSSSNVGNYKHVSWFQKHPGKAPQLMIYDVSSRPSGVSNRFSGSKSGNTASLTISGLQAEDEADYYCSSYTSSSTLEVVFGGGTKLTVL

SEQ ID NO: 8750 - protein, 110 aa, Artificial Sequence
  Synthetic construct
QSVLTQAPSASGTPGQSVTISCSGGNTNIGRNPVSWYQQVPAMAPKVLTHSTDKRLTGVPDRFSASKSGASAFLAISGLQSEDEADYYCATWDDSLNGWVFGGGTRLTVL

SEQ ID NO: 8751 - protein, 107 aa, Artificial Sequence; identical to SEQ ID NO: 8397
  Synthetic construct

SEQ ID NO: 8752 - protein, 110 aa, Artificial Sequence
  Synthetic construct
QAVVTQEPSFSVSPGGTVTLTCALDSGSVSTTHYPSWYQQSPGQAPRTLLYSTNSRSSGVPDRFSGSIVGKKAALTITGAQAEDESDYYCVLYLGSGIVVFGGGTKLTVL

SEQ ID NO: 8753 - protein, 110 aa, Artificial Sequence
  Synthetic construct
QSALTQPASVSGSPGQSITISCTGTSSDVGGYNYVSWYQQHPGKAPKLMIYDVSKRPSGVSNRFSGSKSGNTASLTISGLQAEDEADYYCSSYTSSSTFVFGTGTKVTVL

SEQ ID NO: 8754 - protein, 107 aa, Artificial Sequence
  Synthetic construct
AIRITQTPASLSASAGDRVIITCRASQSISNFLAWYQQKPGQAPKLLIYGATTLRSGVPSRFSGRGSGTEFTLIISFLQSEDFATYYCQQYYDYPLTFGPGTKLDIK

SEQ ID NO: 8755 - protein, 114 aa, Artificial Sequence
  Synthetic construct
DIVMTQSPLSLPVTPGEPASISCRSSQSLLQSDGYDYLDWYYQKPGQSPQLLIYLASRRASGVPDRFRGSGSGTDFTLRISRVEAEDVGLYYCMQALQNPPRYTFGQGTKLEIK

SEQ ID NO: 8756 - protein, 109 aa, Artificial Sequence; identical to SEQ ID NO: 8306
  Synthetic construct

SEQ ID NO: 8757 - protein, 112 aa, Artificial Sequence
  Synthetic construct
DIVMTQSPLSLPVTPGEPASISCRSSQSLLHSNGYNYLDWYLQKPGQSPQLLIYLGSHRASGVPDRFSGSGSGTDFTLKISKVEAEDFGIFYCMEALQPPYTFGQGTQLEIK

SEQ ID NO: 8758 - protein, 108 aa, Artificial Sequence
  Synthetic construct
DIQLTQSPSSLSASVGDRVTITCRASQSIGSYLNWYQQKPGKAPELLIYGASSLPSGVPSRFSGSESGTDFTLTISSLQPEDFATYYCQQSYNAPPFTFGPGTKVDVK

SEQ ID NO: 8759 - protein, 107 aa, Artificial Sequence
  Synthetic construct
DIQMTQSPSSLSASVGDRVTITCRASQSISSYLNWYQQKPGKAPKLLIYAASSLQSGVPSRFSGSGSGTDFTLTISSLQPEDFATYYCQQSYSTLHTFGPGTKVDIK

SEQ ID NO: 8760 - protein, 108 aa, Artificial Sequence; identical to SEQ ID NO: 8703
  Synthetic construct

SEQ ID NO: 8761 - protein, 113 aa, Artificial Sequence
  Synthetic construct
DIVMTQSPLSLPVTPGEPASISCRSSQSLLHSNGYNYLDWYLQKPGQSPQLLIYLGSNRASGVPDRFSGSGSGTDFTLKISRVEAEDVGVYYCMQALQTPPFTFGPGTKVDIK

SEQ ID NO: 8762 - protein, 110 aa, Artificial Sequence
  Synthetic construct
QSALTQPPSVSGSPGQSVTISCTGTSSDIGSYDRVSWYHQPPGTAPKLLIYQANKRPSGVPARFSGSQFGNTASLTISGLRAEDEGDYYCSSFTVSNTYVFGAGTKVTVL

SEQ ID NO: 8763 - protein, 107 aa, Artificial Sequence
  Synthetic construct
DIQLTQSPSFLSASIGDRVTITCRASQGISTYLAWYQQKPGKAPSLLIYAASTLQSGVPSRFSGSGSGTEFTLTVSSLQPEDSATYYCQQLNAYPLTFGGGTKVEIR

SEQ ID NO: 8764 - protein, 110 aa, Artificial Sequence
  Synthetic construct
QSALTQPRSVSGSPGQSVAISCTGTSSDVGTYNYVSWYQHHPGKAPKLMIFDVTKRPSGVPDRFSGSKSGNTASLTISGLQTEDEANYYCCSYAGSYTVLFGGGTKLTVL

SEQ ID NO: 8765 - protein, 110 aa, Artificial Sequence
  Synthetic construct
QSVLTQPPSMSAAPGQRITISCSGAYSNVGINYVSWFQQLPGTAPKLLIYDDDKRPSGIPDRFSGSKSGTSATLGISGLLTGDEAIYYCATWDSTLSNGVFGGGTKVTVL

SEQ ID NO: 8766 - protein, 108 aa, Artificial Sequence
  Synthetic construct
EIVLTQSPGTLSLSPGERATLSCRASQSVSSSYLAWYQQKPGQAPRLLIYGASSRATGIPDRFSGSGSGTDFTLTISRLEPEDFAVYYCQQYGSSPRTFGQGTKLEIK

SEQ ID NO: 8767 - protein, 107 aa, Artificial Sequence
  Synthetic construct
SSELTQDPAVSVALGQTVRITCQGDSLRSYYASWYQQKPGQAPVLVIYGKNNRPSGIPDRFSGSSSGNTASLTITGAQAEDEADYYCNSRDSSGNVVFGGGTKLTVL

SEQ ID NO: 8768 - protein, 110 aa, Artificial Sequence
  Synthetic construct
QSALTQPASVSGSPGQSITISCTGASSDIIGYNYVSWYQQHPGKAPKLILYDVTKRPSGVSNRFSGSKAGNTASLTISGLQAEDEADYYCNSYTSSSTLVFGGGTKLTVL

SEQ ID NO: 8769 - protein, 113 aa, Artificial Sequence
  Synthetic construct
DIVMTQSPLSLPVTPGEPASISCRSSQSLLHSNGYNYLDWYLQKPGQSPQLLIYLGSNRASGVPDRFSGSGSGTDFTLKISRVEAEDVGVYYCMQALQTPPWTFGQGTKVEIK

SEQ ID NO: 8770 - protein, 107 aa, Artificial Sequence; identical to SEQ ID NO: 8269
  Synthetic construct

SEQ ID NO: 8771 - protein, 108 aa, Artificial Sequence
  Synthetic construct
SSELTQDPAVSVALGQTVRITCQGDSLRSYYASWYQQKPGQAPVLVIYGKNNRPSGIPDRFSGSSSGNTASLTITGAQAEDEADYYCNSRDSSGNHLVFGGGTKLTVL

SEQ ID NO: 8772 - protein, 107 aa, Artificial Sequence
  Synthetic construct
DIQMTQSPSSLSASVGDRVTITCRASQSISSYLNWYQQKPGKAPKLLIYAASSLQSGVPSRFSGSGSGTDFTLTISSLQPEDFATYYCQQSYSTPDTFGQGTKLEIK

SEQ ID NO: 8773 - protein, 108 aa, Artificial Sequence
  Synthetic construct
EIVLTQSPGTLSLSPGERATLSCRASEPVSSSYFAWFQQKPGQTPRLLIYGASTRATGIPDRFSGSGSGTDFTLTISRLEPEDFAVYYCQQYGVSLSTFGQGTKLEIK

SEQ ID NO: 8774 - protein, 108 aa, Artificial Sequence
  Synthetic construct
DIQMTQSPSSLSASVGDRVTVTCRASQSIINFLNWYQQKPGKAPALLIYAASSLQSGVPSRFSGSGSGTDFTLTISSLQPEDFATYYCQQTYSAPLYTFGQGTKLEIK

SEQ ID NO: 8775 - protein, 108 aa, Artificial Sequence
  Synthetic construct
AIRMTQSPSSFSASTGDRVTITCRASQGISSYLAWYQQKPGKAPKLLIYAASTLQSGVPSRFSGSGSGTDFTLTISCLQSEDFATYYCQQYYSYPPITFGQGTRLEIK

SEQ ID NO: 8776 - protein, 107 aa, Artificial Sequence; identical to SEQ ID NO: 8576
  Synthetic construct

SEQ ID NO: 8777 - protein, 107 aa, Artificial Sequence; identical to SEQ ID NO: 8435
  Synthetic construct

SEQ ID NO: 8778 - protein, 112 aa, Artificial Sequence
  Synthetic construct
QPVLTQSSSASASLGSSVKLTCTLSSGHSSYIIAWHQQQPGKAPRYLMKLEGSGSYNKGSGVPDRFSGSSSGADRYLTISNLQSEDEADYYCETWDSNIHGVFGGGTKLTVL

SEQ ID NO: 8779 - protein, 107 aa, Artificial Sequence
  Synthetic construct
DIQLTQSPSSVSASVGDRVTITCRASQSVRTWLAWYQQKPGKAPKVLIYGASTLQSGVPSRFSGSGSGTDFTLTISSLQPEDFATYYCQQADSFPFTFGPGTKVDIK

SEQ ID NO: 8780 - protein, 107 aa, Artificial Sequence
  Synthetic construct
QSILTQPPSVSGAPGQRVTISCSEIGANYGVHWYQQLPGAPPKLLIYDNVNRPSGVPERFSGSRSGPSASLAIAGLQAEDEATYFCQSYDNGLTGPRFGGGTKLTVL

SEQ ID NO: 8781 - protein, 107 aa, Artificial Sequence; identical to SEQ ID NO: 8473
  Synthetic construct

SEQ ID NO: 8782 - protein, 107 aa, Artificial Sequence; identical to SEQ ID NO: 8504
  Synthetic construct

SEQ ID NO: 8783 - protein, 107 aa, Artificial Sequence
  Synthetic construct
DIQMTQSPSSLSASVGDRVTITCRASQDISDFLAWFRQKPGEAPKSLIYSASTLQSGVPSKFSGSGSGTDFTLTISSLQPEDFATYYCQQYDSYPLTFGGGTKVEIK

SEQ ID NO: 8784 - protein, 108 aa, Artificial Sequence
  Synthetic construct
EIVLTQSPATLSLSPGERATLSCRASQSVSSYLAWYQQKPGQAPRLLIYDASNRATGIPARFSGSGSGTDFTLTISSLEPEDFAVYYCQQRSNWPPYTFGQGTKLEIK

SEQ ID NO: 8785 - protein, 110 aa, Artificial Sequence
  Synthetic construct
EIVLTQSPGTLSLSPGERATLSCRASQSVSSSYLAWYQQKPGQAPRLLIYGASSRATGIPDRFSGSGSGTDFTLTISRLEPEDFAVYYCQQYGSSPPRYTFGQGTKLEIK

SEQ ID NO: 8786 - protein, 106 aa, Artificial Sequence
  Synthetic construct
AIQMTQSPSSLSASVGDRVIITCRASQNIRDNLGWFQQKPGSAPKLLIYAASNLHSGVPSRFSGSGSGTDFTLTITSVQPEDFATYYCLQDFRYLTFGGGTKVEIK

SEQ ID NO: 8787 - protein, 107 aa, Artificial Sequence; identical to SEQ ID NO: 8435
  Synthetic construct

SEQ ID NO: 8788 - protein, 110 aa, Artificial Sequence
  Synthetic construct
QSVLTQPPSASGTPGQRVTISCSGGSSNIGSNTVNWYQQLPGTAPKLLIYSNNQRPSGVPDRFSGSKSGTSASLAISGLQSEDEADYYCAAWDDSLTGPLFGGGTKLTVL

SEQ ID NO: 8789 - protein, 107 aa, Artificial Sequence
  Synthetic construct
DIQMTQSPSSLSASIGDRVTITCRASQNISHYLNWYQQKPGKAPTLLIFAASSLQRRVPSRFSGGGSVTDFTLNINSLQADDFATYFCQQGSSPPWTFGQGTKVEIK

SEQ ID NO: 8790 - protein, 107 aa, Artificial Sequence; identical to SEQ ID NO: 8200
  Synthetic construct

SEQ ID NO: 8791 - protein, 107 aa, Artificial Sequence
  Synthetic construct
DIQLTQSPSFLSASVGDRVTVTCRASQGISNYLAWYQQKPGKAPKLLIYAASTLQSGVPSRFSGSGSGTEFTLTISSLQPEDFATYYCQQLNTYPRTFGQGTKLEIK

SEQ ID NO: 8792 - protein, 107 aa, Artificial Sequence; identical to SEQ ID NO: 8133
  Synthetic construct

SEQ ID NO: 8793 - protein, 111 aa, Artificial Sequence
  Synthetic construct
QSALTQPASVSGSPGQSITISCTGSSSDVGNYNLVSWYQQHPGGAPKLIIYEVNKRPSGISNRFSGSKSGNAASLTISGLQAEDEADYHCCSYGPTGTSILFGGGTKLTVL

SEQ ID NO: 8794 - protein, 112 aa, Artificial Sequence
  Synthetic construct
DIVMTQTPLSLSVTPGQPASISCKSSQRLLHSDGKTYLYWYRQRPGQSPQLLIYETSSRFSGVPETFSGRGSGTYFTLTISRVEAEDVGVYYCMQGTYLPITFGQGTRLEIK

SEQ ID NO: 8795 - protein, 107 aa, Artificial Sequence; identical to SEQ ID NO: 8200
  Synthetic construct

SEQ ID NO: 8796 - protein, 110 aa, Artificial Sequence
  Synthetic construct
QSVVTQPPSASGTPGQRVTISCSGSSSNIGSNTVNWYQQLPGMAPKLLIYSNNRRPSGVPDRFSGSKSGTSASLAISGLQSEDEADYYCATWDDSLNGPVFGTGTKVTVL

SEQ ID NO: 8797 - protein, 113 aa, Artificial Sequence
  Synthetic construct
DIVMTQSPDSLAVSLGERATINCKSSQSVLYSSNNKNYLAWYQQKPGQPPKLLIYWASTRESGVPDRFSGSGSGTDFTLTISSLQAEDVAVYYCQQYYSTPPTFGPGTKVDIK

SEQ ID NO: 8798 - protein, 108 aa, Artificial Sequence
  Synthetic construct
EIVLTQSPATLSLSPGESATLSCRASESVYRYLGWYQQKPGQPPRLLIYDSFKRATGIPARFSGGGSGTDYTLTISSLEPEDFAIYYCHDRSNWPRGTFGGGTKVEIK

SEQ ID NO: 8799 - protein, 108 aa, Artificial Sequence
  Synthetic construct
SSELTQDPAVSVALGQTVRITCQGDSLRTYHASWYQQKPGQAPILLIHGKNNRPSGIPDRFSYSKSGNTASLAITGAQAEDEADYYCNSRDSSGGHVVFGEGTKLTVL

SEQ ID NO: 8800 - protein, 107 aa, Artificial Sequence
  Synthetic construct
EIVMTQSPATLSVSPGERATLSCRASQSVSSNLAWYQQKPGQAPRLLIYGASTRATGIPARFSGSGSGTEFTLTISSLQSEDFAVYYCQQYNNWRGTFGQGTKVEIK

SEQ ID NO: 8801 - protein, 103 aa, Artificial Sequence
  Synthetic construct
SSELTQDPAVSVALGQTVRITCQGDSLRSYYASWYQQKPGQAPVLVIYGKNNRPSGIPDRFSGSSSGNTASLTITGAQAEDEADYYCNSRDRIFGTGTKVTVL

SEQ ID NO: 8802 - protein, 107 aa, Artificial Sequence
  Synthetic construct
DIQMTQSPSSLSASVGDRVTITCRASQSISSYLNWYQQKPGKAPKLLIYAASSLQSGVPSRFSGSGSGTDFTLTISSLQPEDFATYYCQQSYSTLWTFGQGTKVEIK

SEQ ID NO: 8803 - protein, 107 aa, Artificial Sequence [sequence omitted]

SEQ ID NO: 8804 - protein, 107 aa, Artificial Sequence
  Synthetic construct
DIQMTQSPSTLSASVGDRVTITCRASQSISSWLAWYQQKPGKAPKLLIYKASSLESGVPSRFSGSGSGTEFTLTISSLQPDDFATYYCQQYNSYSRTFGQGTKLEIK

SEQ ID NO: 8805 - protein, 107 aa, Artificial Sequence
  Synthetic construct
SFDLTQPPSVSVSPGQTASISCSGDKLGYKYASWYQQKPGQSPLLIIYQDNKRPSGIPERFSGSNSGNTATLTISGTQAIDEAAYHCQAWDSSSPLVFGGGTFLTVL

SEQ ID NO: 8806 - protein, 110 aa, Artificial Sequence
  Synthetic construct
QSALTQPASVSGSPGQSITISCTGTSSDVGSYNLVSWYQQHPGKAPKLMIYEVSKRPSGVSNRFSGSKSGNTASLTISGLQAEDEADYYCCSYAGSSTLVFGGGTKLTVL

SEQ ID NO: 8807 - protein, 110 aa, Artificial Sequence; identical to SEQ ID NO: 8067
  Synthetic construct

SEQ ID NO: 8808 - protein, 107 aa, Artificial Sequence
  Synthetic construct
DIQMTQSPSSLSASVGDRVTITCRASQSISNDLNWYQQKSGKAPKLLVYAASTLQSGVPSRFSGSGSGTDFTLTISSLQPEDSATYSCQQSYAMPLTFGQGTRLEIK

SEQ ID NO: 8809 - protein, 107 aa, Artificial Sequence; identical to SEQ ID NO: 8304
  Synthetic construct

SEQ ID NO: 8810 - protein, 108 aa, Artificial Sequence
  Synthetic construct
LSHCTGAPSVSVAPGKTASITCVINNIGGKSVHWYQQKPGQAPVLVIYYDRDRPSGIPERFSGSNSGNTATLTISRVEAGDEADYYCQVWDRSSDHVVFGGGTTLTVL

SEQ ID NO: 8811 - protein, 107 aa, Artificial Sequence; identical to SEQ ID NO: 8152
  Synthetic construct

SEQ ID NO: 8812 - protein, 108 aa, Artificial Sequence
  Synthetic construct
EIVLTQSPGTLSLSPGERATLSCRASQSVSSSYLAWYQQKPGQAPRLLIYGASSRATGIPDRFSGSGSGTDFTLTISRLEPEDFAVYYCQQYGSSPGTFGQGTKVEIK

SEQ ID NO: 8813 - protein, 106 aa, Artificial Sequence
  Synthetic construct
SYELTQPPSVSVSPGQTASITCSGDKLGDKYASWYQQKPGQSPVLIIYQNTRRPSGIPERFSGSSSGNTATLTISGTHAMDEADYYCQAWDSNTVVFGGGSKLTVL

SEQ ID NO: 8814 - protein, 107 aa, Artificial Sequence; identical to SEQ ID NO: 8504
  Synthetic construct

SEQ ID NO: 8815 - protein, 107 aa, Artificial Sequence; identical to SEQ ID NO: 8596
  Synthetic construct

SEQ ID NO: 8816 - protein, 113 aa, Artificial Sequence
  Synthetic construct
DIVMTQSPDSLAVSLGERATINCKSSQSVLYSSNNKNYLAWYQQKPGQPPKLLIYWASTRESGVPDRFSGSGSGTDFTLTISSLQAEDVAVYYCQQYYTTPLTFGGGTKVEIK

SEQ ID NO: 8817 - protein, 108 aa, Artificial Sequence; identical to SEQ ID NO: 8703
  Synthetic construct

SEQ ID NO: 8818 - protein, 111 aa, Artificial Sequence
  Synthetic construct
QSALTQPASVSGSPGQSITISCTGTSSDVGGYNYVSWYQQHPGKAPKLMIYDVSKRPSGVSNRFSGSKSGNTASLTISGLQAEDEADYYCSSYTSSSTPYVFGTGTKVTVL

SEQ ID NO: 8819 - protein, 107 aa, Artificial Sequence
  Synthetic construct
DIQMTQSPSSLSASIGDRVTISCRASERINTYLNWYQAKPGKAPELLIYAASSLQSGVPSRFSGSGSGTEFTLTISSLQPEDSATYYCQQSYGTPVTFGGGTKVEIR

SEQ ID NO: 8820 - protein, 107 aa, Artificial Sequence; identical to SEQ ID NO: 8658
  Synthetic construct

SEQ ID NO: 8821 - protein, 112 aa, Artificial Sequence
  Synthetic construct
DIVMTQTPLSLSVTPGQPASISCKSSQSLLHSDGKTYLYWYLQKPGQSPQLLIYEVSNRFSGVPDRFSGSGSGTDFTLKISRVEAEDVGVYYCMQSIQLPLTFGGGTKVEIK

SEQ ID NO: 8822 - protein, 107 aa, Artificial Sequence; identical to SEQ ID NO: 8658
  Synthetic construct

SEQ ID NO: 8823 - protein, 110 aa, Artificial Sequence
  Synthetic construct
QSVLTQPPSVSAAPGQKVTISCSGSSSNIGNNYVSWYQQLPGTAPKLLIYDNNKRPSGIPDRFSGSKSGTSATLGITGLQTGDEADYYCGTWDSSLSAYVFGTGTKVTVL

SEQ ID NO: 8824 - protein, 108 aa, Artificial Sequence
  Synthetic construct
SSELTQPPSVSVSPGQTARITCSGDALPKQYGYWYQQKPGQAPVLVIYKDSERPSGIPERFSGSSSGTTVTLTISGVQAEDEADYHCQSADSSGTYWVFGGGTKLTVL

SEQ ID NO: 8825 - protein, 113 aa, Artificial Sequence
  Synthetic construct
DIVLTQSPDSLAVSLGERATINCKSSQSVLYSSNNKNHLAWYQQKPGQPPKLLIFWASARESGVPDRFSGSGSGTDFTLTISSLQAEDVAVYYCQQYYNTPRTFGRGTKVEIK

SEQ ID NO: 8826 - protein, 113 aa, Artificial Sequence; identical to SEQ ID NO: 8086
  Synthetic construct

SEQ ID NO: 8827 - protein, 113 aa, Artificial Sequence
  Synthetic construct
DIVMTQSPDSLAVSLGERATINCKSSQTILYSSNSKNYLAWYQQKPGQPPNLLIYWSSARQYGVPDRFSGNGSGTDFTLTISSLRAEDVAVYYCQQYYSNPYTFGQGTKLEIR

SEQ ID NO: 8828 - protein, 107 aa, Artificial Sequence; identical to SEQ ID NO: 8492
  Synthetic construct

SEQ ID NO: 8829 - protein, 112 aa, Artificial Sequence; identical to SEQ ID NO: 8213
  Synthetic construct

SEQ ID NO: 8830 - protein, 107 aa, Artificial Sequence
  Synthetic construct
EIVLTQSPATLSLSPGGRATLSCRASQSLGFELAWYQQKPGQPPRLLIYDASYRATGIPVRFSGTGSGTDFTLTISSLEPEDFAMYYCQHRTLWPLTFGGGTKVEIK

SEQ ID NO: 8831 - protein, 107 aa, Artificial Sequence
  Synthetic construct
DIQMTQSPSSLSASVGDRVTITCRASQSISNYLNWYQHKPGIAPKLVIYSASTLQSGVPPRFSGSGSGTDFTLTITSLQPEDFATYYCQQGYRTPWTFGQGTKVEIK

SEQ ID NO: 8832 - protein, 108 aa, Artificial Sequence
  Synthetic construct
EIVMTQSPATLSVSPGERATLSCRASQSVSSNLAWYQQKPGQAPRLLIYGASTRATGIPARFSGSGSGTEFTLTISSLQSEDFAVYYCQQYNNWPLWTFGQGTKVEIK

SEQ ID NO: 8833 - protein, 107 aa, Artificial Sequence
  Synthetic construct
EVVLTQSPATLSLSPGERATLFCRASQNVTKYLGWYQQTPGQAPRLLIYDTSNRATDTPPRFSGSGSGTDFTLTISSLEPEDFAVYFCQQRSRWPGTFGQGTRVEVK

SEQ ID NO: 8834 - protein, 107 aa, Artificial Sequence
  Synthetic construct
VIQLTQSPSSLSASLGDRVTITCRASQDISTYLAWYQQKPGKAPKLLIYAASTLQSGVPSRFSGSGSGTDFSLTISSLQPEDFATYYCLQSSSYTFTFGPGTKVDIK

SEQ ID NO: 8835 - protein, 106 aa, Artificial Sequence
  Synthetic construct
DIQMTQSPSTLSASVGDRVTITCRASQSLSRWLAWYQQKPGKAPNLLIYKASSLESGVPSRFSGNGSGTEFTLTISSLQPDDFATYYCQQYNTFPTFGQGTKLEIK

SEQ ID NO: 8836 - protein, 107 aa, Artificial Sequence
  Synthetic construct
DIQLTQSPSFLSASVGDRVTITCRASQGISYYLAWYQKKPGKAPKLLIYAASSLQSAVPSRFSGSGSGTEFTLTISSLQPEDFATYYCQQLHSYPITFGQGTRLERE

SEQ ID NO: 8837 - protein, 112 aa, Artificial Sequence
  Synthetic construct
DIVLTQTPLSLSVTPGQPASISCKSSQSLLHSDGKTYLYWYLQKPGQAPQLLVYELSSRFSGVPDRFSGSGSGTDFTLKISRVEAEDVGVYYCMQGIDLPWTFGLGTKVEIK

SEQ ID NO: 8838 - protein, 113 aa, Artificial Sequence
  Synthetic construct
DIVMTQSPDSLAVSLGERATINCKSSQSVLYSSNNKNYLAWYQQKPGQPPKLLIYWASTRESGVPDRFSGSGSGTDFTLTISSLQAEDVAVYYCQQYYSTPRTFGQGTKVEIK

SEQ ID NO: 8839 - protein, 113 aa, Artificial Sequence; identical to SEQ ID NO: 8661
  Synthetic construct

SEQ ID NO: 8840 - protein, 107 aa, Artificial Sequence
  Synthetic construct
DIQMTQSPSSLSASVGDRVTITCQASQDISNYLNWYQQKPGKAPKLLIYDASNLETGVPSRFSGSGSGTDFTFTISSLQPEDIATYYCQQYDNLPYTFGQGTKLEIK

SEQ ID NO: 8841 - protein, 107 aa, Artificial Sequence
  Synthetic construct
EIVLTQSPDFQSVTPKEKVTITCRASQSIGSSLHWYQQKPDQSPKLLIKYASQSISGVPSRFSGSGSGTDFTLTINSLEAEDAATYYCHQSSSLPITFGQGTRLEIK

SEQ ID NO: 8842 - protein, 108 aa, Artificial Sequence
  Synthetic construct
EIVMTQSPATLSVSPGDRATLSCRASQSVSSNLAWYQQKPGQTPRLLIYGASTRATGIPARFSGSGSGTEFTLTISSLQSEDFAVYYCQHYNNWPPHTFGQGTKLEIK

SEQ ID NO: 8843 - protein, 108 aa, Artificial Sequence; identical to SEQ ID NO: 8766
  Synthetic construct

SEQ ID NO: 8844 - protein, 107 aa, Artificial Sequence
  Synthetic construct
DIQMTQSPSSLSASVGDRVTITCRASQGISNYLAWFQQKPGKAPKSLIYGSSSLQSGVPSKFSGSGSGTDFTLTISSLQPEDFATYYCQQYNSFPITFGQGTRLEIK

SEQ ID NO: 8845 - protein, 110 aa, Artificial Sequence
  Synthetic construct
QSVLTQPPSASGTPGQRVTISCSGSDSNIGTNNVNWYQQLPGTAPKLLIYSNHQRPSGVPDRFSGSKSDTSASLAISGLQSEDEADYYCVAWDDSLDGWEFGGGTKLTVL

SEQ ID NO: 8846 - protein, 111 aa, Artificial Sequence
  Synthetic construct
DVVMTQSPLSLPVTLRQPASISCRSSQSLVHTDGNTYLSWFHQRPGQSPRRLIYRVSNRDSGVPDRFSGSGSGSDFTLKISRVEAEDVGIYFCMQGTHWPTFGQGTRLEIK

SEQ ID NO: 8847 - protein, 112 aa, Artificial Sequence
  Synthetic construct
QSVLTQPPSVSGAPGQRVTISCTGSSSNIGAGYDVHWYQQLPGTAPKLLIYGNSNRPSGVPDRFSGSKSGTSASLAITGLQAEDEADYYCQSYDSSLSGSRVFGGGTKLTVL

SEQ ID NO: 8848 - protein, 107 aa, Artificial Sequence
  Synthetic construct
DIQVTQSPSSLSASVGDRVTVTCRTSQSISTYLNWYQQKPGKAPNLLIYTASNLHTGVPSRFSGSGSGTDFTLTISSLLPEDFATYYCQQSYSSPFTFGPGTKVDIK

SEQ ID NO: 8849 - protein, 107 aa, Artificial Sequence
  Synthetic construct
EIVLTQSPGTLSLSPGERATLSCRASQSVSSSYFAWYRQKPGQGPRLLIYGASSRATGIPDRFSGSGSGTDFILTISRLEPEDFAIYYCQQYETLITFGQGTRLEIK

SEQ ID NO: 8850 - protein, 110 aa, Artificial Sequence; identical to SEQ ID NO: 60
  Synthetic construct

SEQ ID NO: 8851 - protein, 106 aa, Artificial Sequence; identical to SEQ ID NO: 8291
  Synthetic construct

SEQ ID NO: 8852 - protein, 107 aa, Artificial Sequence; identical to SEQ ID NO: 8200
  Synthetic construct

SEQ ID NO: 8853 - protein, 113 aa, Artificial Sequence; identical to SEQ ID NO: 8276
  Synthetic construct

SEQ ID NO: 8854 - protein, 110 aa, Artificial Sequence; identical to SEQ ID NO: 8146
  Synthetic construct

SEQ ID NO: 8855 - protein, 107 aa, Artificial Sequence
  Synthetic construct
DIQMTQSPSSLSASVGDRVTITCQANHDISNNLNWYHQRPGQAPNLLIYDAVNLKRGVPSRFSGSGSGTDFTLTISDLQPDDFGTYYCQQCETLPFTFGPGTILDIK

SEQ ID NO: 8856 - protein, 108 aa, Artificial Sequence
  Synthetic construct
EIVLTQSPGTLSLSPGERATLSCRASQSFSSSYLAWYQQKPGQAPRLLIYGASSRATGIPDRFSGSGSGTDFTLTITRLEPEDFVVYYCQQYGSSPWTFGQGTKVEIK

SEQ ID NO: 8857 - protein, 107 aa, Artificial Sequence; identical to SEQ ID NO: 8294
  Synthetic construct

SEQ ID NO: 8858 - protein, 110 aa, Artificial Sequence; identical to SEQ ID NO: 8075
  Synthetic construct

SEQ ID NO: 8859 - protein, 107 aa, Artificial Sequence; identical to SEQ ID NO: 8706
  Synthetic construct

SEQ ID NO: 8860 - protein, 105 aa, Artificial Sequence; identical to SEQ ID NO: 8339
  Synthetic construct

SEQ ID NO: 8861 - protein, 107 aa, Artificial Sequence
  Synthetic construct
AIRITQSPSSLSASTGDRVTITCRASQGISSYLAWYQQKPGKAPKLLIYAASTLQSGVPSRFSGSGSGTDFTLTISCLQSEDFATYYCQQYYSYLITFGQGTRLEIK

SEQ ID NO: 8862 - protein, 115 aa, Artificial Sequence
  Synthetic construct
DIQMTQSPATLSASVGDRVTITCRASQNVNRYLAWYQYKPGKAPKLLIYGASSLQNGVPSRFSGSGSGTEFTLTISSLQPDDFATYFCQQYNSFSPTFRNPYSRTFGQGTTVEIK

SEQ ID NO: 8863 - protein, 107 aa, Artificial Sequence
  Synthetic construct
DVQMTQSPSTLSASIGDRVTITCRASQSISTWLAWYQQKPGKAPKLLIYRASRSESGVPSRFTGSGSGTEFTLTISSLQPDDFATYYCQQYETYPLTFGGGTKVEIK

SEQ ID NO: 8864 - protein, 107 aa, Artificial Sequence
  Synthetic construct
AIRMTQSPSSFSASTGDRVTITCRASQGISSYLAWYQQKPGKAPKLLIYAASTLQSGVPSRFSGSGSGTDFTLTISCLQSEDFATYYCQQYYSYPRTFGGGTKVEIK

SEQ ID NO: 8865 - protein, 108 aa, Artificial Sequence; identical to SEQ ID NO: 8491
  Synthetic construct

SEQ ID NO: 8866 - protein, 110 aa, Artificial Sequence
  Synthetic construct
QSVLTQPPSASETPGQRVTISCSGSRSNIGSHIVSWYRHLPGTAPELLIYYNDQRAPGAPDRFSGSKSGTSASLGISGLQSEDEADYYCAAWDDSLNEFVFGTGTKVTVL

SEQ ID NO: 8867 - protein, 107 aa, Artificial Sequence
  Synthetic construct
DIQMTQSPSSLSASVGDRVTITCRASQSINFYLNWYQQKPGKAPQFLIYAASTLQSGVPSRFSGSGSGTDFTLTISSLQPEDFATYYCQQTHSIPITFGQGTRLEIK

SEQ ID NO: 8868 - protein, 115 aa, Artificial Sequence; identical to SEQ ID NO: 8636
  Synthetic construct

SEQ ID NO: 8869 - protein, 110 aa, Artificial Sequence
  Synthetic construct
QSVLTQPPSTSAPPGQRVTISCSGSDSNIGNNYLYWYLQVPGAAPKLLIFRNNKRSSGVPDRFSGSKSGTSASLAISGLRSDDEGDYYCAAWDDTLSAVLFGGGTRLTVL

SEQ ID NO: 8870 - protein, 113 aa, Artificial Sequence; identical to SEQ ID NO: 8838
  Synthetic construct

SEQ ID NO: 8871 - protein, 110 aa, Artificial Sequence; identical to SEQ ID NO: 8212
  Synthetic construct

SEQ ID NO: 8872 - protein, 108 aa, Artificial Sequence
  Synthetic construct
EIVLTQSPGTLSLSPGERATLSCRASQSVSSSYLAWYQQKPGQAPRLLIYGASSRATGIPDRFSGSGSGTDFTLTISRLEPEDFAVYYCQQYGSSPRTFGQGTKVEIK

SEQ ID NO: 8873 - protein, 107 aa, Artificial Sequence; identical to SEQ ID NO: 8133
  Synthetic construct

SEQ ID NO: 8874 - protein, 107 aa, Artificial Sequence; identical to SEQ ID NO: 8435
  Synthetic construct

SEQ ID NO: 8875 - protein, 107 aa, Artificial Sequence
  Synthetic construct
EIVMTQSPATLSVSPGERATLSCRASQSVSSNLAWYQQKPGQAPRLLIYGASTRATGIPARFSGSGSGTEFTLTISSLQSEDFAVYYCQQYNNWRRTFGQGTKVEIK

SEQ ID NO: 8876 - protein, 107 aa, Artificial Sequence
  Synthetic construct
DIQMTQSPSSVSASVGDRVIITCRASQGISSWLAWYQQKPGKAPKLLIYAASSLQSGVPSRFSGSGSGTDFILTISSLQPEDFATYYCQQANSFPVTFGPGTKVDIK

SEQ ID NO: 8877 - protein, 106 aa, Artificial Sequence
  Synthetic construct
EIVLTQSPATLSLFPGETATLSCRASQSVGASLAWYRQKPGQAPRLLIYDATNRAAGIPARFSGSGSGTDFTLTISSLEPEDFAVYYCQCRSKWSIFGQGTRLEVE

SEQ ID NO: 8878 - protein, 110 aa, Artificial Sequence
  Synthetic construct
QSALTQPASVSGSPGQSITISCTAVTADFESFNFVSWHQQHPGKAPKLIIYNVHERPSGVSNRFSGSKSGNTAALTISGLQPEDEADYFCFSYTPTRIWVFGGGTKVTVL

SEQ ID NO: 8879 - protein, 111 aa, Artificial Sequence
  Synthetic construct
QSALTQPASVSGSPGQSITISCTGTSSDVGGYNYVSWYQQHPGKAPKLMIYDVSKRPSGVSNRFSGSKSGNTASLTISGLQAEDEADYYCSSYTSSSTSYVFGTGTKVTVL

SEQ ID NO: 8880 - protein, 106 aa, Artificial Sequence
  Synthetic construct
EIVLTQSPATLSLSPGDRATLSCRASQSVGTYVAWYQQKPGQAPRLLIHEASYRATGVPARFSGSGSGTDFTLTISSLEPEDFAVYYCQQRSSWRTFGQGTKLEIK

SEQ ID NO: 8881 - protein, 105 aa, Artificial Sequence; identical to SEQ ID NO: 8339
  Synthetic construct

SEQ ID NO: 8882 - protein, 110 aa, Artificial Sequence
  Synthetic construct
QSVLTQPPSVSAAPGQKVAISCSGSSSNIGNNYVSWYQHLPGTAPKLLIYDNNNRPSGIPDRFSGSKSGTSAALAITGLQTGDEADYYCATWDSSLSVVVFGGGTKLTVL

SEQ ID NO: 8883 - protein, 110 aa, Artificial Sequence; identical to SEQ ID NO: 8146
  Synthetic construct

SEQ ID NO: 8884 - protein, 113 aa, Artificial Sequence; identical to SEQ ID NO: 8838
  Synthetic construct

SEQ ID NO: 8885 - protein, 108 aa, Artificial Sequence
  Synthetic construct
SYELTQTPSVSVSPGETARISCSGDALPNQYAFWYRQKPGQAPLLLIYQDVKRPSGIPERFSGSTSGTTVTLIISGVQAEDAADYYCQSTDPTETFVLFGGGTKLTVL

SEQ ID NO: 8886 - protein, 114 aa, Artificial Sequence
  Synthetic construct
DIVMTQSPLSLPVTPGEPASISCRSSQSLLHSNGYNYLDWYLQKPGQSPQLLIYLGSNRASGVPDRFSGSGSGTDFTLKISRVEAEDVGVYYCMQALQTPPEYTFGQGTKLEIK

SEQ ID NO: 8887 - protein, 110 aa, Artificial Sequence
  Synthetic construct
QSVLTQPPSVSAAPGQKVTISCSGSSFNIGNNYVSWYQQLPGTAPKLLIYDDSNRPSGIPDRFSGSKSGTSATLGITGLQSADEADYYCATWDSSLSAVVFGGGTKLTVL

SEQ ID NO: 8888 - protein, 108 aa, Artificial Sequence
  Synthetic construct
SSELTQDPAVSVALGQTVRITCQGDSLRSYYASWYQQKPGQAPVLVIYGKNNRPSGIPDRFSGSSSGNTASLTITGAQAEDEADYYCNSRDSSGNHVVFGGGTKLTVL

SEQ ID NO: 8889 - protein, 110 aa, Artificial Sequence
  Synthetic construct
QSVLTQPPSVSAAPGQKVTISCSGSTSNIGNNKVFWYQQFPGTAPKLLIYDNNKRPSGIPDRVSGSTSGTSATLDIIGLQTEDEADYHCGTWDNGLSGVVFGGGTKLTVL

SEQ ID NO: 8890 - protein, 107 aa, Artificial Sequence
  Synthetic construct
SYELTQPSSVSVSPGQTARITCSGDVLAKKYARWFQQKPGQAPVLVIYKDSERPSGIPERFSGSSSGTTVTLTISGAQVEDEADYYCYSAADNNLGVFGGGTKLTVL

SEQ ID NO: 8891 - protein, 105 aa, Artificial Sequence; identical to SEQ ID NO: 8339
  Synthetic construct

SEQ ID NO: 8892 - protein, 113 aa, Artificial Sequence
  Synthetic construct
DIVMTQSPDSLAVSLGERATINCKSSQSVAYNSNNKNYLAWYQQKPGQPPKLLINWASTRESGVPDRFSGSGSGTDFTLTISSLQAEDVAVYYCQQYYSIPWTFGQGTKVEIR

SEQ ID NO: 8893 - protein, 108 aa, Artificial Sequence
  Synthetic construct
SYELTQPPSVSVSPGQTARITCSGDALPKQYAYWYQQKPGQAPVLVIYKDSERPSGIPERFSGSSSGTTVTLTISGVQAEDEADYYCQSADSSGTYYVFGTGTKVTVL

SEQ ID NO: 8894 - protein, 108 aa, Artificial Sequence
  Synthetic construct
DIQMTQSPSTLSASVGDRVTITCRASQSISSWLAWYQQKPGKAPKLLIYKASSLESGVPSRFSGSGSGTEFTLTISSLQPDDFATYYCQQYNSYPAFTFGPGTKVDIK

SEQ ID NO: 8895 - protein, 110 aa, Artificial Sequence
  Synthetic construct
QSVLTQPPSVSAAPGQRVTISCSGSTSNIGNNYVSWYQQLPGTVPKLLIYDDNKRPSGIPDRFSGSKSGTSATLGITGLQTGDEADYYCGTWDYNLSAVVFGGGTKLTVL

SEQ ID NO: 8896 - protein, 110 aa, Artificial Sequence
  Synthetic construct
DFMLTQPHSVSGSPGQTITISCTRSSGNIASNYVQWFQQRPGSAPTTLIYEDNRRPSGVPDRFSASIDTSSNSASLSISGLQTEDEADYYCQSYEISNVVFGGGTTLTIL

SEQ ID NO: 8897 - protein, 110 aa, Artificial Sequence
  Synthetic construct
QSALTQPPSASGSPGQSVTISCTGTSSDVGGYNYVSWYQQHPGKAPKLMIYEVSKRPSGVPDRFSGSKSGNTASLTVSGLQAEDEADYYCSSYAGSNNHVFGTGTKVTVL

SEQ ID NO: 8898 - protein, 109 aa, Artificial Sequence
  Synthetic construct
SSELTQDPSVSVALGQTVRITCQGDSLTNYYANWYQQKPGQAPVLLVYGKDIRPSGIPDRFSASSSANTASLTITGARAEDEADYYCNSRGSGGDHHVAFGGGTKLTVL

SEQ ID NO: 8899 - protein, 110 aa, Artificial Sequence
  Synthetic construct
QSALTQPRSVSGSPGQSVTISCSGASSDVGGYNYVSWYQLHPGRAPKLMIFAVTKRPSGVPFRFSGSKSGNTASLTISGLQAEDEADYYCCSKAGGFTWVFGGGTKLTVL

SEQ ID NO: 8900 - protein, 107 aa, Artificial Sequence
  Synthetic construct
DIQMTQSPSSLSASIGDRVTIACRASQDISHYLAWYQQKPGKVPKLLIYAASTLQSGVPSRFSGSGSGTDFTLTISSLQPEDVATYYCHRYNSVLVTFGQGTKVEIK

SEQ ID NO: 8901 - protein, 108 aa, Artificial Sequence
  Synthetic construct
SYVLTQPPSVSVAPGKTARITCGGNNIVGKSVHWYQQTPGQAPVLVIYYDSVRPSVIPERFSGSNSGDTATLTISRVEAGDEADYYCQVWDGSSDRVVFGGGTKLTVL

SEQ ID NO: 8902 - protein, 108 aa, Artificial Sequence
  Synthetic construct
AIRMTQSPSSFSASTGDRVTITCRASQGISSYLAWYQQKPGKAPKLLIYAASTLQSGVPSRFSGSGSGTDFTLTISCLQSEDFATYYCQQYYSYPPWTFGQGTKVEIK

SEQ ID NO: 8903 - protein, 107 aa, Artificial Sequence
  Synthetic construct
DIQMTQSPSTLSASVGDRVTIICRASQSISNYLNWYQQKPGKAPKLLIYDASSLQSGAPSRFSGSGSGTDFTLTISSLQPEDFATYYCQQSFSTPRTFGQGTKVDLK

SEQ ID NO: 8904 - protein, 108 aa, Artificial Sequence
  Synthetic construct
EIVLTQSPATLSLSPGERATLSCRASQSVSSYLAWYQQKPGQAPRLLIYDASNRATGIPARFSGSGSGTDFTLTISSLEPEDFAVYYCQQRSNWKVYTFGQGTKLEIK

SEQ ID NO: 8905 - protein, 114 aa, Artificial Sequence; identical to SEQ ID NO: 8373
  Synthetic construct

SEQ ID NO: 8906 - protein, 111 aa, Artificial Sequence
  Synthetic construct
QSALTQPASVSGSPGQSITISCTGTSSDVGSYNYVSWYQQHPGKAPKVIIYDVSNRPSGVSNRFSGSKAGNTASLTISGLQAEDESDYYCASYTTSSSRVVFGGGTKLTVL

SEQ ID NO: 8907 - protein, 110 aa, Artificial Sequence
  Synthetic construct
EIVLTQSPGTLSLSPGERATLSCRASQSVSSSYLAWYQQKPGQAPRLLIYGASSRATGIPDRFSGSGSGTDFTLTISRLEPEDFAVYYCQQYGSSPPGYTFGQGTKLEIK

SEQ ID NO: 8908 - protein, 107 aa, Artificial Sequence
  Synthetic construct
VIWMTQSPSLLSASTGDRVTISCRMSQGISSYLAWYQQKPGKAPELLIYAASTLQSGVPSRFSGSGSGTDFTLTISCLQSEDFATYYCQQYYSFPRTFGQGTKVEIK

SEQ ID NO: 8909 - protein, 108 aa, Artificial Sequence
  Synthetic construct
EIVMTQSPATLSVSPGERATLSCRASQSVSSNLAWYQQKPGQAPRLLIYGASTRATGIPARFSGSGSGTEFTLTISSLQSEDFAVYYCQQYNNWPPFTFGPGTKVDIK

SEQ ID NO: 8910 - protein, 105 aa, Artificial Sequence; identical to SEQ ID NO: 8339
  Synthetic construct

SEQ ID NO: 8911 - protein, 109 aa, Artificial Sequence; identical to SEQ ID NO: 8098
  Synthetic construct

SEQ ID NO: 8912 - protein, 107 aa, Artificial Sequence; identical to SEQ ID NO: 8093
  Synthetic construct

SEQ ID NO: 8913 - protein, 112 aa, Artificial Sequence
  Synthetic construct
DIVMTQSPLSLPVTPGEPASISCRSSQSLLHFSGNYFLDWYLQKPGQSPQLLIYSASIRASGVPDRFSGSGSGTDFTLRISSVEAEDVGIYYCLQALQTPPTFGPGTKVAIK

SEQ ID NO: 8914 - protein, 108 aa, Artificial Sequence
  Synthetic construct
SHVLTQPPSVSVAPGKTASITCGVNNIGGKSVHWYQQKPGQAPVLVIYYDRDRPSGIPERFSGSNSGNTATLTISRVEAGDEADYYCQVWDRSSDHVVFGGGTTLTVL

SEQ ID NO: 8915 - protein, 109 aa, Artificial Sequence
  Synthetic construct
EIVLTQSPGTLSLSPGERATLSCRASQSVSSSYLAWYQQKPGQAPRLLIYGASSRATGIPDRFSGSGSGTDFTLTISRLEPEDFAVYYCQQYGSSQLYTFGQGTKLEIK

SEQ ID NO: 8916 - protein, 110 aa, Artificial Sequence; identical to SEQ ID NO: 8685
  Synthetic construct

SEQ ID NO: 8917 - protein, 111 aa, Artificial Sequence
  Synthetic construct
QSVLTQPPSVSGAPGQRVTISCTGSSANIGAGYDVHWYQQLPGTAPKLLIYGNRNRPSGVPDRFSGSKSGTSASLAITWLQAEDEADYYCQSYDSSLSGYVFGTGTKVTVL

SEQ ID NO: 8918 - protein, 106 aa, Artificial Sequence
  Synthetic construct
DVQMTQSPSTLSASVGDTVTITCRASQNINKWLAWYQQKPGEAPKLLIYKASNLHRGVPSRFSGSGSETEFTLTITSLQPDDFATYYCQQYDFFWAFGQGTKVDMK

SEQ ID NO: 8919 - protein, 111 aa, Artificial Sequence
  Synthetic construct
DVVMTQSPLSLPVTLGQPASISCRSSQSLVHSDGNTYLNWFQQRPGQSPRRLIYKVSNRDSGVPDRFSGSGSGTDFTLKISRVEAEDVGVYYCMQGTHLWTFGQGTKVEIK

SEQ ID NO: 8920 - protein, 113 aa, Artificial Sequence; identical to SEQ ID NO: 8276
  Synthetic construct

SEQ ID NO: 8921 - protein, 108 aa, Artificial Sequence
  Synthetic construct
EIVLTQSPDTLSLSPGEGATLSCRASQSVSDHYLAWYQYKPGQAPRLVIYGATSRATDIPERFSGSESGTDFTLTISRLDPEDFAIYYCHQYGTSPITFGQGTRLEIK

SEQ ID NO: 8922 - protein, 107 aa, Artificial Sequence
  Synthetic construct
AIRITQSPSSLSASTGDRVTITCRASQGISSYLAWYQQKPGKAPKLLIYAASTLQSGVPSRFSGSGSGTDFTLTISCLQSEDFATYYCQQYYSYPVTFGQGTRLEIK

SEQ ID NO: 8923 - protein, 111 aa, Artificial Sequence
  Synthetic construct
NFMLTQPHSVSESPGKTVTISCTRYSGSIASNYVQWYQQRPGSAPTTVIYEDKERPSGVPDRFSGSIDRSSNSASLTISGLKTEDEADYYCQSYDGNNFVVFGGGTKLTVL

SEQ ID NO: 8924 - protein, 110 aa, Artificial Sequence
  Synthetic construct
QSALTQPASVSGSPGQSITISCTGTSSDVGGYNYVSWYQQHPGKAPKLMIYDVSKRPSGVSNRFSGSKSGNTASLTISGLQAEDEADYYCSSYTSSSTYVFGTGTKVTVL

SEQ ID NO: 8925 - protein, 110 aa, Artificial Sequence
  Synthetic construct
QSVLTQPPSASGTPGQRVTMSCSGGTSNIGSNYVFWYQQLPGTAPKLLIYTDNQRPSGVPDRFSGSKSGTSASLAISGLRSEDEADYYCAAWDDSLSGVVFGGGTKLTVL

SEQ ID NO: 8926 - protein, 107 aa, Artificial Sequence
  Synthetic construct
DMQMTQSPSSLSASVGDRVTITCRASQGISNYLAWFQQKPGKAPKSLIYAASSLQSGVPSRFSGSASGTDFTLTISSLQPEDFATYYCQQYNNYPWTFGQGTKVEIK

SEQ ID NO: 8927 - protein, 106 aa, Artificial Sequence
  Synthetic construct
DIQMTQSPSSLSASVGDRVTITCRASQSISSYLNWYQQKPGKAPKLLIYAASSLQSGVPSRFSGSGSGTDFTLTLSSLQPEDFATYYCQQSYTRYTFGQGTKLEIK

SEQ ID NO: 8928 - protein, 110 aa, Artificial Sequence
  Synthetic construct
QTVVTQEPSFSVSPGGTVTLTCGLSSGSVSTSYYPSWYQQTPGQAPRTLIYSTNTRSSGVPDRFSGSILGNKAALTITGAQADDESDYYCVLYMGSGSWVFGGGTKLTVL

SEQ ID NO: 8929 - protein, 107 aa, Artificial Sequence; identical to SEQ ID NO: 8065
  Synthetic construct

SEQ ID NO: 8930 - protein, 114 aa, Artificial Sequence
  Synthetic construct
DIVMTQSPDSLAVSLGERATINCKSSQSVLYSSNNKNYLAWFQQKPGQPPKLLIYWASTRESGVPDRFSGSGSGTDFTLTISSLQAEDVAVYYCQQYYNTLSYTFGQGTKLEIK

SEQ ID NO: 8931 - protein, 112 aa, Artificial Sequence
  Synthetic construct
DFVMTQSPLSLPVTPGEPASISCRSSQSLLQSNGYNYLDWYLQKPGQSPHLLIYLGSNRASGVPDRFSGSGSGTDFTLKISRVEAEDVGVYYCMQALQTPLTFGQGTRLEIK

SEQ ID NO: 8932 - protein, 108 aa, Artificial Sequence; identical to SEQ ID NO: 8872
  Synthetic construct

SEQ ID NO: 8933 - protein, 108 aa, Artificial Sequence; identical to SEQ ID NO: 8561
  Synthetic construct

SEQ ID NO: 8934 - protein, 108 aa, Artificial Sequence; identical to SEQ ID NO: 8812
  Synthetic construct

SEQ ID NO: 8935 - protein, 110 aa, Artificial Sequence
  Synthetic construct
QSVLTQPPSVSAAPGQKVTISCSGSSSNIGNNYVSWYQQLPGTAPKLLIYDNNKRPSGIPDRFSGSKSGTSATLGITGLQTGDEADYYCGTWDSSLSAKVFGGGTKLTVL

SEQ ID NO: 8936 - protein, 112 aa, Artificial Sequence
  Synthetic construct
DVVMTQSPLSLPVTLGQPASISCRSSQSLVHSGGDTYLNWFQQRPGQSPRRLIYKVSNRDSGVPDRFSGSGSGTDFTLKISRVEAEDVGVYYCMQGTHWPRTFGQGTKVEIK

SEQ ID NO: 8937 - protein, 110 aa, Artificial Sequence; identical to SEQ ID NO: 8601
  Synthetic construct

SEQ ID NO: 8938 - protein, 107 aa, Artificial Sequence; identical to SEQ ID NO: 8658
  Synthetic construct

SEQ ID NO: 8939 - protein, 110 aa, Artificial Sequence
  Synthetic construct
QSVLTQPASVSGSPGQSITISCSGSSRDIGTYNYVSWYQKYPDEAPRRILFDVSQRPSGISDRFSGSKSGNTASLTISGLQPVDAAEYFCSSFTVTNKHVFGTGTKVIVL

SEQ ID NO: 8940 - protein, 107 aa, Artificial Sequence; identical to SEQ ID NO: 8435
  Synthetic construct

SEQ ID NO: 8941 - protein, 107 aa, Artificial Sequence; identical to SEQ ID NO: 8200
  Synthetic construct

SEQ ID NO: 8942 - protein, 107 aa, Artificial Sequence; identical to SEQ ID NO: 8596
  Synthetic construct

SEQ ID NO: 8943 - protein, 109 aa, Artificial Sequence; identical to SEQ ID NO: 8663
  Synthetic construct

SEQ ID NO: 8944 - protein, 108 aa, Artificial Sequence
  Synthetic construct
DIQMTQSPSTLFASVGDRVAITCRASQSISSWLAWYQQKPGKAPKLLISKASTLEDGVPSRFSGSGSGTDFSLTISSLQPDDFATYYCQQYDHYPELSFGAGTNVEIK

SEQ ID NO: 8945 - protein, 107 aa, Artificial Sequence
  Synthetic construct
EIVLTQSPATLSLSPGERATLSCRASQSVGTYLAWYQQKSGQAPRLLIYDASNRAPGIPARFSGSGSETDFTLTISSLEPEDFAVYYCQQRNNWPLTFGGGTKVEIE

SEQ ID NO: 8946 - protein, 108 aa, Artificial Sequence; identical to SEQ ID NO: 8591
  Synthetic construct

SEQ ID NO: 8947 - protein, 107 aa, Artificial Sequence
  Synthetic construct
AIQLTQSPSSLSASVGDRVTITCRASQGISNFFAWYQQKPGKAPKLLIYAASSLQSGVPSRFSGSGSGTDFTLIIDSLQPEDFATYYCQQLSSYPPTFGPGTKVDIK

SEQ ID NO: 8948 - protein, 109 aa, Artificial Sequence
  Synthetic construct
SSELTQDPAVSVALGQTVRITCQGDTLRTFYASWYQQKPGQAPILVIYDKNRRPSGIPDRFSGSSSGNTASLTITGAQAEDEADYHCKSRDNKGNHPDVFGGGTKLTVL

SEQ ID NO: 8949 - protein, 112 aa, Artificial Sequence
  Synthetic construct
DIVMTQPPLSLPVTPGEPAAISCRSSQSLLHSNGYNYLHWYVQRPGQSPQLLIHLASNRASGVPDRFSGSGSGTDFTLKISRVEAEDVGFYYCMQALRIPYTFGQGTKLEIK

SEQ ID NO: 8950 - protein, 110 aa, Artificial Sequence
  Synthetic construct
QSVLTQPPSASGTPGQRVTISCSGSSSNIGSNYVYWYQQLPGTAPKLLIYRNNQRPSGVPDRFSGSKSGTSASLAISGLRSEDEADYYCAAWDDSLSGVVFGGGTKLTVL

SEQ ID NO: 8951 - protein, 108 aa, Artificial Sequence
  Synthetic construct
EIVLTQSPGTLSLSPGERATLSCRASQSVRSTHLAWYQQKPGQAPRLLIYGASSRATGIPDRFSGSGSGTDFTLTISRLEPEDFAVYYCQQYRSSPYTFGQGTKVEIK

SEQ ID NO: 8952 - protein, 107 aa, Artificial Sequence
  Synthetic construct
DIQMTQSPSSLSASVGDRVTITCRASQSISSYLNWYQQKPGKAPKFLIYAASSLQSGVPARFRGSGSGTDFTLTISSLQPEDFATYYCQQSYSLPHTFGQGTKLEIK

SEQ ID NO: 8953 - protein, 110 aa, Artificial Sequence
  Synthetic construct
QSVLTQPPSVSAAPGQKVTISCSGSGSNIGHSYVSWYQHLPGTAPKLLIYDNNKRPSGIPDRFSGSKSGTSATLAITGLQTGDEADYSCGTWDSSLSAVVFGGGTKVTVL

SEQ ID NO: 8954 - protein, 107 aa, Artificial Sequence
  Synthetic construct
ESVLTQSPATLSLSPGERATLSCRASQSVGTNLAWYQQKPGQSPRLLIYDASSRATGIPARFGGSGSGTDFTLTISSLEPEDFAVYYCQQRTKWPPSFGQGTKVEIK

SEQ ID NO: 8955 - protein, 107 aa, Artificial Sequence
  Synthetic construct
DIQMTQSPSSLSASVGDRVTITCRASQGITNYVAWYQQKPGKVPRVLIYAASALQSGVPSRFSGSGSGTHFTLTISSLQPEDAATYYCQKYNSAPFTFGPGTKVDIK

SEQ ID NO: 8956 - protein, 111 aa, Artificial Sequence
  Synthetic construct
DVVLTQSPLSLPVTLGQPASISCRSSQSLVHSTGDTYLTWFHQRPGQSPRRLVYEVSKRDSGVPDRFSGSGSGTDFTLRISRVEAEDVGVYYCLQATHWPTFGQGTRLEIQ

SEQ ID NO: 8957 - protein, 107 aa, Artificial Sequence; identical to SEQ ID NO: 8576
  Synthetic construct

SEQ ID NO: 8958 - protein, 108 aa, Artificial Sequence
  Synthetic construct
DFQLTQSPSSLSASVGDRVTITCRASHGFSHYLAWYQQKPGKVPKLLIYGASTLQSGVPSRFSGGGSGTDFTLTISSLQPEDVATYYCQRYNSAPSVTFGQGTRVDIK

SEQ ID NO: 8959 - protein, 111 aa, Artificial Sequence
  Synthetic construct
NFILTQPHSVSESPGKTVTISCTRSSGSIASNFVQWYQQRPGSAPTTVIYDDNQRPSGVPDRFSGSIDSSSNSASLTISGLKTEDEAEYYCQSYDNTNHAVFGGGTQLAVL

SEQ ID NO: 8960 - protein, 107 aa, Artificial Sequence; identical to SEQ ID NO: 8440
  Synthetic construct

SEQ ID NO: 8961 - protein, 113 aa, Artificial Sequence; identical to SEQ ID NO: 8276
  Synthetic construct

SEQ ID NO: 8962 - protein, 107 aa, Artificial Sequence
  Synthetic construct
AIRMTQSPSSFSASTGDRVTITCRASQGISSYLAWYQQKPGKAPKLLIYAASTLQSGVPSRFSGSGSGTDFTLTISCLQSEDFATYYCQQYYSYPLTFGPGTKVDIK

SEQ ID NO: 8963 - protein, 107 aa, Artificial Sequence
  Synthetic construct
EIQMTQSPSTLFASVGDRVTLTCRASETINKWLAWYQQKPGRAPKLLIHGTSTLHTGVSSRFSGSRSGTDFTLTISSLQPDDFATYYCQQYNTDSGRFGQGTKVEIK

SEQ ID NO: 8964 - protein, 108 aa, Artificial Sequence
  Synthetic construct
SSELTQDPAVSVALGQTVRITCHGDSLRSYYASWYQQKPGQAPVLVIYGKNNRPSGIPDRFSGSSSGNTASLTITGAQAEDEADYFCNSRDSSDNHLVFGGGTKLTVL

SEQ ID NO: 8965 - protein, 108 aa, Artificial Sequence
  Synthetic construct
EIVMTQSPATLSVSPGERATLSCRASQSIGSDLAWYQQRRGQAPRLLISGASTRATGIPARFSGSGSETEFTLTISSLQSEDFAVYYCQQYNNWPPLTFGGGTKVEIK

SEQ ID NO: 8966 - protein, 107 aa, Artificial Sequence; identical to SEQ ID NO: 8397
  Synthetic construct

SEQ ID NO: 8967 - protein, 109 aa, Artificial Sequence
  Synthetic construct
SYVLTQPPSVSVAPGKTARITCGGNSIASKSVHWYQQKPGQAPVLVIYSDRNRPSEIPGRFSGSNSGNTATLTISNVEAGDEADYYCQVWDNGGEHHVVFGGGTHLTVL

SEQ ID NO: 8968 - protein, 107 aa, Artificial Sequence
  Synthetic construct
AIRITQSPSSLSASTGDRVTITCRASQGISSYLAWYQQKPGKAPKLLIYAASTLQSGVPSRFSGSGSGTDFTLTISCLQSEDFATYYCQQYYSYPPTFGQGTKVEIK

SEQ ID NO: 8969 - protein, 107 aa, Artificial Sequence
  Synthetic construct
DIQLTQSPSSLSASVGDRVTITCRSTHSIIRYLNWYQQKPGKVPKLLMSAASNLQSGVPSRFSGSGSGTDFALTISSLQPEDFATYYCQQSYSTPWTFGQGTKVEIK

SEQ ID NO: 8970 - protein, 112 aa, Artificial Sequence
  Synthetic construct
QSALTQPASVSGSPGQSITISCTGTSSDVGGYNYVSWYQQHPGKAPKLMIYDVSKRPSGVSNRFSGSKSGNTASLTISGLQAEDEADYYCSSYTSSSTPLYVFGTGTKVTVL

SEQ ID NO: 8971 - protein, 107 aa, Artificial Sequence
  Synthetic construct
DIQMTQSPSSLSASVGDRVTITCRASQGISNYLAWFQQKPGKAPKSLIYAASSLQSGVPSKFSGSGSGTDFTLTISSLQPEDFATYYCQQYHSYPWTFGQGTKVEIK

SEQ ID NO: 8972 - protein, 107 aa, Artificial Sequence; identical to SEQ ID NO: 8596
  Synthetic construct

SEQ ID NO: 8973 - protein, 106 aa, Artificial Sequence
  Synthetic construct
SYELTQPPSASVSPGQTASITCSGDKLGDEYASWYQQKPGHSPVLVIFQDSKRPSGVPERFSGSISGNTVTLTISGTQPMDEADYYCQSWGASGAVFGGGTKLTVL

SEQ ID NO: 8974 - protein, 108 aa, Artificial Sequence
  Synthetic construct
EIVLTQSPGTLSLSPGERATLSCRASQSVSSSYLAWYQQKPGQAPRLLIYGASSRATGIPDRFSGSGSGTDFTLTISRLEPEDFAVYYCQQYGSSRITFGQGTRLEIK

SEQ ID NO: 8975 - protein, 109 aa, Artificial Sequence
  Synthetic construct
SYEVTQPPSVSVSPGQTATITCSGDRLGHRSVSWYQQRPGQSPLLVIYEDTKRPSGIPERLSGSNSGNTATLSISGAQTMDAADYFCQAWDSTSTWDVVFGGGTKLTVL

SEQ ID NO: 8976 - protein, 107 aa, Artificial Sequence
  Synthetic construct
ETVMTQSPVTLSVSPGERATLSCRAGQSVSSKLAWYQQKPGQAPRLLIYGASTRATGIPARFSGSGSGTEFTLTISSLQSEDFAVYYCQQYNNWPYTFGQGTKVEIK

SEQ ID NO: 8977 - protein, 106 aa, Artificial Sequence; identical to SEQ ID NO: 8605
  Synthetic construct

SEQ ID NO: 8978 - protein, 110 aa, Artificial Sequence; identical to SEQ ID NO: 8067
  Synthetic construct

SEQ ID NO: 8979 - protein, 112 aa, Artificial Sequence
  Synthetic construct
QSVLTQPPSVSGAPGQRVTISCTGSNSNIGANFDVHWYQQLPGKAPKLLIHGDTQRPSGVPDRFSGSKSGTSASLAITGLQADDEADYFCQSYDNSLGGFVIFGGGTRLTVL

SEQ ID NO: 8980 - protein, 110 aa, Artificial Sequence; identical to SEQ ID NO: 8226
  Synthetic construct

SEQ ID NO: 8981 - protein, 107 aa, Artificial Sequence; identical to SEQ ID NO: 8114
  Synthetic construct

SEQ ID NO: 8982 - protein, 107 aa, Artificial Sequence; identical to SEQ ID NO: 8435
  Synthetic construct

SEQ ID NO: 8983 - protein, 111 aa, Artificial Sequence
  Synthetic construct
QSALTQPASVSGSPGQSITISCTGTSNIVGSYNYVSWYQQHPGKAPKLIIYEATKRPSGVSYRFSGSRSGNTASLTISGLQADDEAIYYCAPYTISSRPDVFGGGTEVTVL

SEQ ID NO: 8984 - protein, 111 aa, Artificial Sequence
  Synthetic construct
QSVLTQPPSASGAPGRRVTVSCSGSGSNIGRGTVNWYQQLPGTAPKLLIYGNNERPSGVPDRFSGSQSGTSASLAISGLQSEDEAEYFCASWDDSHPGRYVFGTGTKVTVL

SEQ ID NO: 8985 - protein, 111 aa, Artificial Sequence
  Synthetic construct
QSVLTQPPSVSGAPGQRVTISCTGGSSNIGIGFDVHWYQQLPGTAPKLLIYGNTNRPSGVPDRFSGSKSGTSASLAITGLQAEDEADYHCQSYDNSLSGYVFGTGTKVTVL

SEQ ID NO: 8986 - protein, 109 aa, Artificial Sequence
  Synthetic construct
HSALAQPASMSGSPGQSITISCTGTSGDVGGYNFVSWYQQHPGKAPKLIIYDVSNRPSGISNRFSGFKSGITASLTISGLQAEDEANYYCSSFKSTTLDFGGGTKVTVI

SEQ ID NO: 8987 - protein, 110 aa, Artificial Sequence
  Synthetic construct
QSVLTQPPSASGTPGQRVTIFCSGSSSNIGTNFVYWYQQLPGTGPKLLIYRNTQRPSGVPDRFSGSKSGTSASLAVSGLRSEDEADYYCAAWDDSLSGVVFGGGTKLTVL

SEQ ID NO: 8988 - protein, 109 aa, Artificial Sequence
  Synthetic construct
EIVLTQSPGTLSLSPGERATLSCRASQSVSSSYLAWYQQKPGQAPRLLIYGASSRATGIPDRFSGSGSGTDFTLTISRLEPEDFAVYYCQQYGSSPPITFGQGTRLEIK

SEQ ID NO: 8989 - protein, 113 aa, Artificial Sequence
  Synthetic construct
DIVMTQSPDSLAVSLGERATINCKSSQSVLYSSNNKNYLAWYQQKPGQPPKLLIYWASTRESGVPDRFSGSGSGTDFTLTISSLQAEDVAVYYCQQYYSTPWTFGQGTKVEIK

SEQ ID NO: 8990 - protein, 108 aa, Artificial Sequence
  Synthetic construct
SYELTQPPSVSVSPGQTASITCSGDKLGDKYACWYQQKPGQSPVLVIYQDSKRPSGIPERFSGSNSGNTATLTISGTQAMDEADYYCQAWDSSTACWVFGGGTKLTVL

SEQ ID NO: 8991 - protein, 107 aa, Artificial Sequence
  Synthetic construct
EIVLTQSPATLSLSPGERATLSCRASQSVSSYLAWYQQKPGQAPRLLIYDASNRATGIPARFSGSGSGTDFTLTISSLEPEDFAVYYCQQRSNWPPSFGQGTRLEIK

SEQ ID NO: 8992 - protein, 106 aa, Artificial Sequence
  Synthetic construct
SYELTQPPSVSVSPGQTANITCSGDKLGDKYACWYQQKPGQSPVLVIYQDSKRPSGIPERFSGSNSGNTATLTISGTQAMDEADYYCQAWDSSTVVFGGGTKLTVL

SEQ ID NO: 8993 - protein, 109 aa, Artificial Sequence
  Synthetic construct
EIVMTQSPATLSVSPGERATLSCRASQNVNTNVAWHQQKPGQAPRLLIYSASTRATGIPARFSGSGSGTEFTLTISSLQSEDFAVYYCQQYDNWPPMYTFGQGTKLEIK

SEQ ID NO: 8994 - protein, 110 aa, Artificial Sequence
  Synthetic construct
QSVLTQPPSVSAAPGQKVTISCSGSSSNIGNSHVSWYQQLPGTAPKLLIYDTNKRPTGIPDRFSGSKSGTSATLGITGLQTGDEADYYCATWDSSLSAMVFGGGTTLTVL

SEQ ID NO: 8995 - protein, 110 aa, Artificial Sequence
  Synthetic construct
QSVLTQPPSASGTPGQRVTISCSGSSSNIGSNYVYWYQQLPGTAPKLLIYRNNQRPSGVPDRFSGSKSGTSASLAISGLRSEDEADYYCAAWDDSLSVVVFGGGTKLTVL

SEQ ID NO: 8996 - protein, 107 aa, Artificial Sequence; identical to SEQ ID NO: 8065
  Synthetic construct

SEQ ID NO: 8997 - protein, 108 aa, Artificial Sequence; identical to SEQ ID NO: 8106
  Synthetic construct

SEQ ID NO: 8998 - protein, 109 aa, Artificial Sequence
  Synthetic construct
DIQMTQSPSTLSASVGDRVTITCRASQSISSWLAWYQQKPGKAPKLLIYKASSLESGVPSRFSGSGSGTEFTLTISSLQPDDFATYYCQQYNSYSRTITFGQGTRLEIK

SEQ ID NO: 8999 - protein, 112 aa, Artificial Sequence
  Synthetic construct
DIVLTQSPLSLPVTPGEPASISCRSSQSLLHSNGYNYVDWYLQKPGQSPQLLIFLSSNRASGVPDRFSGSGSGTDFTLKISRVEAEDVGVYYCMQTLDTPVTFGPGTKVDIR

SEQ ID NO: 9000 - protein, 109 aa, Artificial Sequence; identical to SEQ ID NO: 8306
  Synthetic construct

SEQ ID NO: 9001 - protein, 107 aa, Artificial Sequence; identical to SEQ ID NO: 8065
  Synthetic construct

SEQ ID NO: 9002 - protein, 107 aa, Artificial Sequence
  Synthetic construct
DIQMTQSPSTLSASVGDRVTITCRASQSISSWLAWYQQKPGKAPKLLIYKASSLESGVPSRFSGSGSGTEFTLTISSLQPDDFATYYCQQYNSYSRVFGQGTKLEIK

SEQ ID NO: 9003 - protein, 106 aa, Artificial Sequence
  Synthetic construct
DIQMTQSPSTLSASVGDRVTITCRASQSISSWLAWYQQKPGKAPKILIYKASSLESGVPSRFSGSGSGTEFTLTISSLQPDDFATYYCQQYISYWTFGQGTKVEIK

SEQ ID NO: 9004 - protein, 110 aa, Artificial Sequence
  Synthetic construct
NFMLTQPHSVSESPGKTVTISCTRSSGSIASNYVQWYQQRPGSSPTTVIYEDNQRPSGVPDRFSGSIDSSSNSASLTISGLKTEDEADYYCQSYDSSNWVFGGGTKLTVL

SEQ ID NO: 9005 - protein, 108 aa, Artificial Sequence
  Synthetic construct
SYVLTQPPSVSVAPGKTARITCGGNNIGSKSVHWYQQKPGQAPILVMYYDNDRPSGIPERFSGSNSGNTATLTISGVEAGDEADYYCQVWDSISAHYVFGTGTTVTVL

SEQ ID NO: 9006 - protein, 107 aa, Artificial Sequence
  Synthetic construct
DIQMTQSPSSLSASVGDRVTITCRASQSISNYLNWYQQKPGKAPKVLIYAASSLQSGVPSRFSGSGSGTDFTLTISSLQPEDFATYFCQQSYSPPLTFGGGTEVEIK

SEQ ID NO: 9007 - protein, 106 aa, Artificial Sequence
  Synthetic construct
EIVLTQSPATLSLSPGERATLSCRASQSVSSYLAWYQQKPGQAPRLLIYDASNRATGIPARFSGSGSGTDFTLTISSLEPEDFAVYYCQQRSNWRTFGQGTKVEIK

SEQ ID NO: 9008 - protein, 112 aa, Artificial Sequence
  Synthetic construct
DVVMTQSPLSLPVTLGQPASISCRSSQSLLHSDGNTYLNWFQQRPGQSPRRLIYKVSNRDSGVPDRFSGSGSGTDFTLKISRVEAEDVGVYYCMQGTHWPRTFGQGTKLEIK

SEQ ID NO: 9009 - protein, 111 aa, Artificial Sequence
  Synthetic construct
QSALTQPPSLSGAPGQTVTISCTRSVSKNGAYYNVHWYQQLPGTAPRLLIFNYNNRPSGVPDRFSGSGSGTSASLAITGLQAEDAADYYCQSYDDSLSGYVFGTGTHVTVL

SEQ ID NO: 9010 - protein, 106 aa, Artificial Sequence; identical to SEQ ID NO: 8185
  Synthetic construct

SEQ ID NO: 9011 - protein, 107 aa, Artificial Sequence
  Synthetic construct
DIELTQSPSFLSASTGDRVTITCRASQGISNYLAWYQQKPGKAPKLLIYAASTLQSGVPSRFSGSGSGTEFTLTINSLQPEDFATYYCQQLDSYSWMFAQGTKVEIK

SEQ ID NO: 9012 - protein, 106 aa, Artificial Sequence; identical to SEQ ID NO: 8291
  Synthetic construct

SEQ ID NO: 9013 - protein, 107 aa, Artificial Sequence
  Synthetic construct
AIRMTQSPSSFSASTGDRVTITCRASQGISSYLAWYQQKPGKAPKLLIYAASTLQSGVPSRFSGSGSGTDFTLTISCLQSEDFATYYCQQYYSYPPTFGQGTKLEIK

SEQ ID NO: 9014 - protein, 107 aa, Artificial Sequence
  Synthetic construct
DIQMTQSPSSVSASVGDRVTITCRASQGISSWLAWYQQKSGKAPNLLIYAASTLQSGVPSRFSGSGSGTDFTLTISSLQPEDFATYYCQQTKSFPITFGQGTRLDIK

SEQ ID NO: 9015 - protein, 112 aa, Artificial Sequence
  Synthetic construct
DIVMTQTPLSSPVTLGQPASISCRSSQSLVHSDGNTYLSWLQQRPGQPPRLLIYKISNRFSGVPDRFSGSGAGTDFTLKISRVEAEDVGVYYCTQATQFPYTFGQGTKLEIK

SEQ ID NO: 9016 - protein, 108 aa, Artificial Sequence
  Synthetic construct
EIVLTQSPGTLSLSPGERATLSCRASQSVPNGYLAWYQQRPGRAPRLLIYGTSTRATGIPDRFSGSGSGTDFTLTISRLEPEDFAVYYCQRYGSSPLTFGGGTKVEIK

SEQ ID NO: 9017 - protein, 116 aa, Artificial Sequence
  Synthetic construct
QPVLAQPPSASASLGASVTLTCTLTSDYKSYEVDWYQQRPGKGPRFVMRVGPNGIVGSKGEGIPERFSVLASGLSRFLTITDIEEDDESDYHCGADHGAGDMFVYVFGGGTKLTVL

SEQ ID NO: 9018 - protein, 113 aa, Artificial Sequence
  Synthetic construct
DIVMTQSPDSLAVSLGERATISCKSSQSILYSSNKKNYLAWYQQKPGHPPKLLIHWASTRESGVPDRFSGSGSETHFTLTISSLQAEDVGVYYCQQYFSIPLTFGGGTKVEIK

SEQ ID NO: 9019 - protein, 111 aa, Artificial Sequence
  Synthetic construct
NFILTQPHSVSESPGKTVTISCTRSSGNIANNYVQWYQQRPGSSPTTVIYEDNQRPSGVPDRFSGSIDTSSNSASLTISGLRTEDEADYFCQSYDSGNPMVFGGGTRLTVL

SEQ ID NO: 9020 - protein, 113 aa, Artificial Sequence
  Synthetic construct
DIVMTQSPDSLAVSLGERATINCKSSQTILYSSANKNNIAWYQQKPGQPPKLLIFWASTRESGVPDRFSGSGSGTDFTLTISSLQAEDVAVYYCQQYYSTPYTFGQGTKLEIY

SEQ ID NO: 9021 - protein, 107 aa, Artificial Sequence; identical to SEQ ID NO: 8133
  Synthetic construct

SEQ ID NO: 9022 - protein, 111 aa, Artificial Sequence
  Synthetic construct
DIVMTQSPLSLPVTPGEPASISCRSSQSLLHSRGYNYVDWYLQKPGQSPQLLIYLGSNRAPGVPDRFSGSGSGTDFTLKISRVEAEDVGVYYCMQALRSWTFGQGTKVEIK

SEQ ID NO: 9023 - protein, 108 aa, Artificial Sequence
  Synthetic construct
SYVLTQTPSVSVAPGETARITCEGTNIATKSVHWYQQRPGQAPVLVIYHDADRPTGIPERFSGSNSGNTATLTISRVEGGDEADYFCQVWDTRTDHVIFGGGTKLTVL

SEQ ID NO: 9024 - protein, 110 aa, Artificial Sequence; identical to SEQ ID NO: 8067
  Synthetic construct

SEQ ID NO: 9025 - protein, 107 aa, Artificial Sequence [sequence omitted]

SEQ ID NO: 9026 - protein, 112 aa, Artificial Sequence
  Synthetic construct
ILVMTQTPLSLSVTPGQPASISCKSSQSLLHSDGKIYLYWFLQKPGQSPQLLIYELSSRFSGVPDRFSGSGSGTDFTLKISRVEAEDVGVYYCMQSTHHPLTFGGGTKVEIK

SEQ ID NO: 9027 - protein, 106 aa, Artificial Sequence
  Synthetic construct
EIVVTQSPVTLSVSPGERVTLSCRASQSISTNLAWYQQKPGQAPRLLIYGAYTRATDIPARFSGSGSGTEFTLTISSLQSEDFAVYYCQQYNNWHTFGQGTKVEIK

SEQ ID NO: 9028 - protein, 110 aa, Artificial Sequence
  Synthetic construct
QSALTQPPSVSGSPGQSVTISCTGTSSDVGGYNRVSWYQQPPGTAPKLMIYEVSNRPSGVPDRFSGSKSGNTASLTISGLQAEDEAVYYCSSYTISFTVVFGGGTKLTVL

SEQ ID NO: 9029 - protein, 107 aa, Artificial Sequence
  Synthetic construct
AIRMTQSPSSFSASTGDRVTITCRASQGISSYLAWYQQKPGKAPKLLIYAASTLQSGVPSRFSGSGSGTDFTLTISCLQSEDFATYYCQQYYSYPHTFGQGTKLEIK

SEQ ID NO: 9030 - protein, 112 aa, Artificial Sequence
  Synthetic construct
DVVMTQSPLSLPVTLGQPASISCRSSQSLVHSDGNTYLNWFQQRPGQSPRRLIYKVSNRDSGVPDRFSGSGSGTDFTLKISRVEAEDVGVYYCMQGTHWPPLFGPGTKVDIK

SEQ ID NO: 9031 - protein, 110 aa, Artificial Sequence
  Synthetic construct
QSVLTQPPSASGSPGQRVTISCSGSSSKIGTSTVNWYQQLPGTAPKLLIYNSNQRPSGVPDRFSGSKSGTSASLAISGLQSEDEGDYYCSAWHDSLNGVVFGGGTKLTVL

SEQ ID NO: 9032 - protein, 110 aa, Artificial Sequence
  Synthetic construct
QSALTQPASVSGSPGQSITISCTGSSSDIGAYNYVSWYQRHPDKGPKLLIYDVYKRPSGLSARFSGSKSGNTASLTISGLQAEDEADYFCGSYTTTSTYVFGTGTRVTVL

SEQ ID NO: 9033 - protein, 108 aa, Artificial Sequence
  Synthetic construct
DIQMTQSPSSLSASVGDRVTITCRASQGISNYLAWFQQKPGKAPKSLIYSASTLQSGVPSKFSGSGFGTDFTLTISSLQPEDFATYYCQQYKSYPSITFGQGTRLEIK

SEQ ID NO: 9034 - protein, 113 aa, Artificial Sequence
  Synthetic construct
DVVMTQSPLSLPVTLGQPASISCRSSQSLAHSDGNTYLNWFHQRPGQSPRRLIYKVSLRDSGVPDRFSGSGSGTDFTLRISRVEAEDVGVYYCMQGTHWPPFTFGPGTKVEIR

SEQ ID NO: 9035 - protein, 108 aa, Artificial Sequence
  Synthetic construct
EIVLTQSPATLSLSPGERATLSCRASQSVSSYLAWYQQKPGQAPRLLIYDASNRATGIPARFSGSGSGTDFTLTISSLEPEDFAVYYCQQRSNWPPWTFGQGTKVEIK

SEQ ID NO: 9036 - protein, 107 aa, Artificial Sequence
  Synthetic construct
DIQMTQSPFSLSASVGDRVTITCRASQSISTYLNWYQQKPGRAPNLLISAASTLQSGVPSRFTGSGSATEFTLTISSLQPEDFGTYFCQQSYVTPRTFGQGTKLEIK

SEQ ID NO: 9037 - protein, 108 aa, Artificial Sequence; identical to SEQ ID NO: 8387
  Synthetic construct

SEQ ID NO: 9038 - protein, 106 aa, Artificial Sequence
  Synthetic construct
DIQLTQSPSTLSASVGDRVTITCRASQTINNCLAWYQQKPGKAPKLLIYKTSNLESGVPSRFSGSGSGTEFTLTISSLQPDDFATYYCQQYNNYRTFGQGTKVEIK

SEQ ID NO: 9039 - protein, 107 aa, Artificial Sequence
  Synthetic construct
AYVLSQTPSVSVAPGQTARVTCGGDNIGSRSVHWYQQKPGQAPLLVIYYNSDRPSGIPERFFGSNSGNMATLTISGVEAGDEADYYCQVWDRASDGVFGGGTKVTVL

SEQ ID NO: 9040 - protein, 112 aa, Artificial Sequence
  Synthetic construct
DVVMTQSPLSLPVTLGQPASISCRSSQSLVHSDGNTYLNWFQQRPGQSPRRLIYKVSNRDSGVPDRFSGSGSGTDFTLRINRVEAEDVGVYYCMQGTHWPRAFGGGTKVEIK

SEQ ID NO: 9041 - protein, 107 aa, Artificial Sequence
  Synthetic construct
DIQMTQSPSSMSASVGDRVTITCRASQYISNYLNWYQHKSGKAPTLLIYGASTLERGVPARFSGSGAGTDFTLTISSLQPEDFATYTCQQSYNLPRTFALGTKVEVN

SEQ ID NO: 9042 - protein, 106 aa, Artificial Sequence; identical to SEQ ID NO: 8173
  Synthetic construct

SEQ ID NO: 9043 - protein, 112 aa, Artificial Sequence
  Synthetic construct
QSALTQPASVSGSPGQSITISCSGTSSDVGTYNLVSWYQQYPGKAPKLMISEVTKRPSGISDRFSGSKSGNTASLTISGLQAEDEGDYYCCSYAGGTTFQWVFGGGTKLTVL

SEQ ID NO: 9044 - protein, 108 aa, Artificial Sequence
  Synthetic construct
EIVLTQSPDTLSLSPGEGATLSCRASQSVSDHYLAWYQHKPGQAPRLVIYGATSRATDIPDRFSGSESGTDFTLTISRLDPEDFAMYYCHQYGSSPITFGQGTRLEIK

SEQ ID NO: 9045 - protein, 112 aa, Artificial Sequence
  Synthetic construct
QSVLTQPPSVSGAPGQRVTISCTGSSSNIGAGYDVHWYQQLPGTAPKLLIYGNSNRPSGVPDRFSGSKSGTSASLAITGLQAEDEADYYCQSYDSSLSASYVFGTGTKVTVL

SEQ ID NO: 9046 - protein, 111 aa, Artificial Sequence; identical to SEQ ID NO: 8122
  Synthetic construct

SEQ ID NO: 9047 - protein, 113 aa, Artificial Sequence
  Synthetic construct
DIVMTQSPDSLDVSLGERATINCKSSQSVLYSSNNKNYLAWYQQKPGQPPKLLIYWASTRESGVPDRFSGSGSGTDFTLTISSLQAEDVAVYYCQQYYSIPLTFGGGTKVEIK

SEQ ID NO: 9048 - protein, 107 aa, Artificial Sequence
  Synthetic construct
DIQMTQSPSSVSASVGDRVTITCRASQGISSWLAWYQQKPGKAPKLLIYAASSLQSGVPSRFSGSGSGTDFTLTISSLQPEDFATYYCQQANSFPFTFGPGTKVDIK

SEQ ID NO: 9049 - protein, 112 aa, Artificial Sequence
  Synthetic construct
DIVMTQSPLSLPVTPGEPASISCRSSQSLLHSNGYNYLDWYLQKPGQSPHLLIYLGSNRASGVPDRFSGSGSGTDFTLKISRVEAEDVGVYYCMQALQTPLTFGGGTKVEIK

SEQ ID NO: 9050 - protein, 106 aa, Artificial Sequence; identical to SEQ ID NO: 8291
  Synthetic construct

SEQ ID NO: 9051 - protein, 107 aa, Artificial Sequence
  Synthetic construct
DIQMTQSPPSLSASVGDRVTITCRASEYISNYLNWYHQKPGKAPKLLIYAASSLQSEVPSRFSGSGSGTDFTLTISSLQPEDFTTYYCQQSYSFPITFGQGTRLEIK

SEQ ID NO: 9052 - protein, 110 aa, Artificial Sequence
  Synthetic construct
QTVVTQEPSLTVSPGGTVTLTCAFTTGAVTSGSYANWFQQKPGQAPRPLIFGTDKRHSSTPARFSASLLGDKAALTLSGVQPEDEAEYHCLLDTGAAFWVFGAGTKLTVL

SEQ ID NO: 9053 - protein, 112 aa, Artificial Sequence
  Synthetic construct
DIVMTQSPLSLVVTLGQSASISCRSSHSVVHTNGITYLNWFHQRPGQPPRRLIYQVSNRDSGVPDRFSGSGSGTDFTLKISRVEADDVGVYYCMQGTDWPRTFGQGTKVEIK

SEQ ID NO: 9054 - protein, 108 aa, Artificial Sequence
  Synthetic construct
DIQMTQSPSSVSASVGDRVTITCRASQGISSWLAWYQQKPGKAPKLLIYAASSLQSGVPSRFSGSGSGTDFTLTISSLQPEDFATYYCQQANSFPPLTFGGGTKVEIK

SEQ ID NO: 9055 - protein, 113 aa, Artificial Sequence
  Synthetic construct
DIVMTQSPDSLAVSLGERATINCKSSQSILYSINNKKYLAWYQQKAGQPPKLLISWASTRESGVPGRFSGSGSGTDFTLTISSLQPEDVAIYYCLQYYTTPQTFGQGTKVEIK

SEQ ID NO: 9056 - protein, 105 aa, Artificial Sequence
  Synthetic construct
DIQMTQSPSTLSASVGDRVTITCRASQSISRWLAWYQQKPGKAPKLLIYQASSLESGVSSRFSGSGSGTEFTLTISSLLPDDFATYYCQQYNSWTFGQGTKVEIK

SEQ ID NO: 9057 - protein, 110 aa, Artificial Sequence; identical to SEQ ID NO: 8067
  Synthetic construct

SEQ ID NO: 9058 - protein, 107 aa, Artificial Sequence; identical to SEQ ID NO: 8536
  Synthetic construct

SEQ ID NO: 9059 - protein, 107 aa, Artificial Sequence; identical to SEQ ID NO: 61
  Synthetic construct

SEQ ID NO: 9060 - protein, 110 aa, Artificial Sequence; identical to SEQ ID NO: 8443
  Synthetic construct

SEQ ID NO: 9061 - protein, 110 aa, Artificial Sequence; identical to SEQ ID NO: 8592
  Synthetic construct

SEQ ID NO: 9062 - protein, 107 aa, Artificial Sequence
  Synthetic construct
DIQLTQSPSSLSASVGDRVTITCRPSQNIGTSLHWYQQKPGKAPKRLIYGASSLQSGVPSRFSGSGSGTEFTLTISSLQPEDFATYYCQQSYSTFYTFGQGTKLETK

SEQ ID NO: 9063 - protein, 109 aa, Artificial Sequence
  Synthetic construct
EIVLTQSPGTLSLSPGERATLSCRASQSVSSTYLAWYQQKPGQAPRLLIYGASSRATGTPDRFSGSGSGTEFTLTISRLEPEDFAVYYCQQYGSSAKFTFGPGTKVDIK

SEQ ID NO: 9064 - protein, 106 aa, Artificial Sequence; identical to SEQ ID NO: 8291
  Synthetic construct

SEQ ID NO: 9065 - protein, 107 aa, Artificial Sequence; identical to SEQ ID NO: 8672
  Synthetic construct

SEQ ID NO: 9066 - protein, 110 aa, Artificial Sequence
  Synthetic construct
QSALTQPASVSGSPGQSITISCTGTSSDVGGYNYVSWYQQHPGKAPKLMIYDVSKRPSGVSNRFSGSKSGNTASLTISGLQAEDEADYYCSSYTSSSTWVFGGGTKLTVL

SEQ ID NO: 9067 - protein, 111 aa, Artificial Sequence
  Synthetic construct
QLVLTQSPSASASLGASVKLTCTLSSGHSSYAIAWHQQQPEKGPRYLMKLNSDGSHSKGDGIPDRFSGSSSGAERYLTISSLQSEDEADYYCQTWGTGSRVFGGGTKLTVL

SEQ ID NO: 9068 - protein, 107 aa, Artificial Sequence
  Synthetic construct
DIQMTQSPSTLSASVGDRVTITCRASQSISTWLAWYQQKPGKAPKLLIHRASILENGVPSRFSGSGSGTQFTLTISNLQPDDFATYYCHQYNSYSRMFGQGTKVDIR

SEQ ID NO: 9069 - protein, 111 aa, Artificial Sequence
  Synthetic construct
QSALTQPASVSGSPGQSITISCTGTSSDVGGYNYVSWYQQHPGKAPKLMIYDVSNRPSGVSNRFSGSKSGNTASLTISGLQAEDEADYYCSSYTSSSTRYVFGTGTKVTVL

SEQ ID NO: 9070 - protein, 112 aa, Artificial Sequence
  Synthetic construct
DIVMTQTPLSSPVTLGQPASISCRSSQSLVHSDGNTYLSWLQQRPGQPPRLLIYKISNRDSGVPDRFSGSGAGTDFTLKISRVEAEDVGVYYCAQATQFPYTFGQGTKLQIK

SEQ ID NO: 9071 - protein, 106 aa, Artificial Sequence
  Synthetic construct
DIQLTQSPSFLSASVGDRVTITCRASQGISSYLAWYQQKPGKAPKLLIYAASTLQSGVPSRFSGSGSGTEFTLTISSLQPEDFATYYCQQLNSYPFFGGGTKVEIK

SEQ ID NO: 9072 - protein, 108 aa, Artificial Sequence
  Synthetic construct
AIRITQSPSSLSASTGDRVTITCRASQGISSYLAWYQQKPGKAPKLLIYAASTLQSGVPSRFSGSGSGTDFTLTISCLQSEDFATYYCQQYYSYPPLTFGGGTKVEIK

SEQ ID NO: 9073 - protein, 107 aa, Artificial Sequence; identical to SEQ ID NO: 8437
  Synthetic construct

SEQ ID NO: 9074 - protein, 112 aa, Artificial Sequence
  Synthetic construct
QLVLTQSPSASASLGASVKLTCTLSSGHSSYAIAWHQQQPEKGPRYLMKLNSDGSHSKGDGIPDRFSGSSSGAERYLTISSLQSEDEADYYCQTWGTGIRGVFGGGTKLTVL

SEQ ID NO: 9075 - protein, 108 aa, Artificial Sequence
  Synthetic construct
SYELTQPPSVSVSPGQTARITCSGDALPNQYAYWYQQKPGLAPILVIYKDSERPSGIPERFSGSSSGTTVTLTISGVQAEDEADYYCQSADNSGSYYVFGTGTKVTVL

SEQ ID NO: 9076 - protein, 110 aa, Artificial Sequence
  Synthetic construct
QSVLTQSPSAAGTPGQRVTIFCSGSSSNIGTNFVYWYQQVPGTGPKLLIYRNTQRPSGVPDRFSGSKSGTSASLAVSGLRSEDEADYYCAAWDDSLSGVIFGGGTKLTVL

SEQ ID NO: 9077 - protein, 110 aa, Artificial Sequence
  Synthetic construct
QSVLTQPPSASGTPGQRVTISCFGSSSNIGNHYVHWYFQLPGTAPKLLIYENNQRPSGVPDRFSGSKSGTSASLAISGLRSEDEGDYYCGAWDDSLTGVAFGGGTKLTVL

SEQ ID NO: 9078 - protein, 109 aa, Artificial Sequence
  Synthetic construct
QSVLTQPPSASGTPGQRVTISCSGSSSNIGSNYVYWYQQLPGTAPKLLIYRNNQRPSGVPDRFSGSKSGTSASLAISGLRSEDEADYYCAAWDDSLSGVFGGGTKLTVL

SEQ ID NO: 9079 - protein, 113 aa, Artificial Sequence
  Synthetic construct
DIVMTQSPDSLAVSLGERATINCKSSQSVLYSSNNKNYLAWYQQKPGQPPKLLIYWASTRESGVPDRFSGSGSGTDFTLTISSLQAEDVAVYYCQQYYSTPITFGQGTRLEIK

SEQ ID NO: 9080 - protein, 107 aa, Artificial Sequence
  Synthetic construct
DIQMTQSPSSLSASVGDRVTITCRASQGISNYLAWFQQKPGKAPKSLIYAASSLQSGVPSKFSGSGSGTDFTLTISSLQPEDFATYYCQQYNSYPYTFGQGTKLEIK

SEQ ID NO: 9081 - protein, 110 aa, Artificial Sequence
  Synthetic construct
QSVLTQPPSVSGTPGQRVIISCSGSSSDIGTNTVNWYQHLPGAAPKVLIYRNDQRLSGVPDRFSGAKSGSSASLAINGLQSEDEADYYCSTWDDSLNNVLFGGGTKLTVL

SEQ ID NO: 9082 - protein, 115 aa, Artificial Sequence
  Synthetic construct
QAVLTQPSSLSASPGASASLTCTLRSDIKIDPYTISWYQQKPGSPPQYLLSYKSDLDKHQGSGVPSRFSGSKAASANAAILIISGVQSDDEADYYCLIWHHDVVVFGGGTKVTVL

SEQ ID NO: 9083 - protein, 110 aa, Artificial Sequence; identical to SEQ ID NO: 8907
  Synthetic construct

SEQ ID NO: 9084 - protein, 108 aa, Artificial Sequence
  Synthetic construct
SYELTQPPSVSVSPGQTARITCSGDPLPKQYAYWYQQKPGQAPVVVIYKDSERPSGIPARFSGSSSGTTVTLTISEVQVEDEADYYCQSADSSGNYRVFGTGTKVTVL

SEQ ID NO: 9085 - protein, 109 aa, Artificial Sequence
  Synthetic construct
EIVLTQSPGTLSLSPGERATLSCRASQSVSSSYLAWYQQKPGQAPRLLIYGASSRATGIPDRFSGSGSGTDFTLTISRLEPEDFAVYYCQQYGSSPRLTFGGGTKVEIK

SEQ ID NO: 9086 - protein, 110 aa, Artificial Sequence; identical to SEQ ID NO: 8212
  Synthetic construct

SEQ ID NO: 9087 - protein, 109 aa, Artificial Sequence
  Synthetic construct
EIVLTQSPGTLSLSPGERATLSCRASQSVGSSYLGWYQQKPGQAPRLLIYGASTRATGIPDRFSGSGSGTDFTLTISRLEPEDFAVYYCQQYGSSPGYTFGQGTKLEIK

SEQ ID NO: 9088 - protein, 112 aa, Artificial Sequence
  Synthetic construct
DIVMTQSPLSLPVTPGEPASISCRSSQSLLHSNGYNYLDWYLQKPGQSPQLLIYLGSNRASGVPDRFSGSGSGTDFTLKISRVEAEDVGVYYCMQALQTPLTFGGGTKVEIK

SEQ ID NO: 9089 - protein, 107 aa, Artificial Sequence; identical to SEQ ID NO: 8435
  Synthetic construct

SEQ ID NO: 9090 - protein, 113 aa, Artificial Sequence
  Synthetic construct
DIVMTQSPDSLAVSLGERATINCQSSQTVLFPSNNKNYLAWYQQKPGHPPKLLISWASTREYGVPDRFSGSGSGTSFTLTISNLQAEDVAIYYCQQHHTSPRTFGQGTRVEIK

SEQ ID NO: 9091 - protein, 107 aa, Artificial Sequence; identical to SEQ ID NO: 8658
  Synthetic construct

SEQ ID NO: 9092 - protein, 112 aa, Artificial Sequence
  Synthetic construct
QSVLTQPPSVSGAPGQRVTISCTGSSSNIGAGYDVHWYQQLPGAAPKLLIYGNNKRPSRVPDRFSGSKSGTSASLAITGLQADDEADYYCQSYDSSLSGFVVFGGGTKLTVL

SEQ ID NO: 9093 - protein, 109 aa, Artificial Sequence
  Synthetic construct
EIVMTQSPATLSVSPGERATLSCRASQSVSSNLAWYQQKPGQAPRLLIYGASTRATGIPARFSGSGSGTEFTLTISSLQSEDFAVYYCHQYNSWPSRFTFGPGTKVDIK

SEQ ID NO: 9094 - protein, 105 aa, Artificial Sequence; identical to SEQ ID NO: 8339
  Synthetic construct

SEQ ID NO: 9095 - protein, 106 aa, Artificial Sequence; identical to SEQ ID NO: 8265
  Synthetic construct

SEQ ID NO: 9096 - protein, 111 aa, Artificial Sequence
  Synthetic construct
QSALTQPASVSGSPGQSITISCTGTSSDVGGYNYVSWYQQHPGKAPKLMIYDVSNRPSGVSNRFSGSKSGNTASLTISGLQAEDEADYYCSSYTSSSTLVVFGGGTKLTVL

SEQ ID NO: 9097 - protein, 107 aa, Artificial Sequence
  Synthetic construct
DIQLTQSPSSLSASVGDRVTITCRASQSISNYLNWYQQKPGKAPKRMIYTASSLQSGVPSRFSGSGSGTDFTLTISSLQPEDFATYYCQQSYRTPPTFGQGTKLEIK

SEQ ID NO: 9098 - protein, 112 aa, Artificial Sequence
  Synthetic construct
QSALTQPASVSGSPGQSITISCTGTSNDVGGYNFVSWYQQHPGKAPKLIIYDVYKRPSGLSNRFSGSKSGNTASLTISGLQAEDEADYYCSSKTSSNTFGAIFGGGTKLTVL

SEQ ID NO: 9099 - protein, 109 aa, Artificial Sequence; identical to SEQ ID NO: 8306
  Synthetic construct

SEQ ID NO: 9100 - protein, 107 aa, Artificial Sequence; identical to SEQ ID NO: 8804
  Synthetic construct

SEQ ID NO: 9101 - protein, 108 aa, Artificial Sequence; identical to SEQ ID NO: 8771
  Synthetic construct

SEQ ID NO: 9102 - protein, 108 aa, Artificial Sequence; identical to SEQ ID NO: 8400
  Synthetic construct

SEQ ID NO: 9103 - protein, 110 aa, Artificial Sequence
  Synthetic construct
QAGLTQPPSVSKGLRQTATLTCTGNSNNVGNQGAAWLQQHQGHPPKLLSYRNNNRPSGISERLSASRSGNTASLTITGLQPEDEADYYCSAWDSSLSAVVFGGGTKLTVL

SEQ ID NO: 9104 - protein, 111 aa, Artificial Sequence; identical to SEQ ID NO: 8610
  Synthetic construct

SEQ ID NO: 9105 - protein, 111 aa, Artificial Sequence
  Synthetic construct
QSVLTQPPSVSAAPGQKVTISCSGSSSNIGNNYVSWYQQLPGTAPKLLIYDNNKRPSGIPDRFSGSKSGTSATLGITGLQTGDEADYYCGTWDSSLSAGQVFGGGTKLTVL

SEQ ID NO: 9106 - protein, 108 aa, Artificial Sequence
  Synthetic construct
SSELTQPPSVSVSPGQTARITCSGDALTKQFAYWYQQKPGQAPGLVIYKDRERPSGIPERFSGSNSGTTVTLTISGVQAEDEADYYCQSADSSSTYVLFGGGTKLTVL

SEQ ID NO: 9107 - protein, 109 aa, Artificial Sequence
  Synthetic construct
SYELTQPPSVSVSPGQTARITCSGDALPKQYAYWYQQKPGQAPVLVIYKDSERPSGIPERFSGSSSGTTVTLTISGVQAEDEADYYCQSADSSGTYPRVFGGGTKLTVL

SEQ ID NO: 9108 - protein, 110 aa, Artificial Sequence
  Synthetic construct
QSALTQPASVSGSPGQSITLSCTGTSSDVGGYIYVSWYQLHPGKAPKLIIYDVTKRPSGVSNRFSGSKSGDTAALTISGLQAEDEADYYCSSYTSRSTLVFGGGTRLTVL

SEQ ID NO: 9109 - protein, 107 aa, Artificial Sequence; identical to SEQ ID NO: 8065
  Synthetic construct

SEQ ID NO: 9110 - protein, 110 aa, Artificial Sequence
  Synthetic construct
QSVLTQPPSASGTPGQRVIISCSGSSSNIRSNSVNWYQQFPGTAPKLLIHSNNQRPSGVPDRFSGSKSGTSASLAISGLQSEDEADYYCSAWDGSLNDVIFGGGTKLTVL

SEQ ID NO: 9111 - protein, 110 aa, Artificial Sequence
  Synthetic construct
LPALSQPPSTSGRPGQSVTISCSGSNSNIGGNFVHWYQQVPGTAPKLVIFKNSQRPSDVPGRFSASKSGTSASLAINGLRSEDEADYFCGAWDDDLNANLFGTGTKVTVL

SEQ ID NO: 9112 - protein, 110 aa, Artificial Sequence
  Synthetic construct
QAVVTQEPSLTVSPGGTVTLTCGSSTGAVTSGHYPYWFQQKPGQAPRTLIYDTSNKHSWTPARFSGSLLGGKAALTLSGAQPEDEAEYYCLLSYSGAYVVFGGGTKLTVL

SEQ ID NO: 9113 - protein, 107 aa, Artificial Sequence; identical to SEQ ID NO: 9011
  Synthetic construct

SEQ ID NO: 9114 - protein, 107 aa, Artificial Sequence; identical to SEQ ID NO: 8576
  Synthetic construct

SEQ ID NO: 9115 - protein, 108 aa, Artificial Sequence
  Synthetic construct
DIQMTQSPSTLSASVGDRVTITCRASQSISSWLAWYQQKPGKAPKLLIYKASSLESGVPSRFSGSGSGTEFTLTISSLQPDDFATYYCQQYNSYSRRTFGQGTKVEIK

SEQ ID NO: 9116 - protein, 107 aa, Artificial Sequence
  Synthetic construct
EIVMTQSPATLSVSPGERATLSCRASQSVSSNLAWYQQKPGQAPRLLIYGASTRATGIPARFSGSGSGTEFTLTISSLQSEDFAVYYCQQYNNWPLTFGPGTKVDIK

SEQ ID NO: 9117 - protein, 113 aa, Artificial Sequence; identical to SEQ ID NO: 8086
  Synthetic construct

SEQ ID NO: 9118 - protein, 111 aa, Artificial Sequence
  Synthetic construct
QSVLTQPPSASGTPGQRVTISCSGSSSNIGSNYVYWYQQLPGTAPKLLIYRNNQRPSGVPDRFSGSKSGTSASLAISGLRSEDEADYYCAAWDDSLSGRGVFGGGTKLTVL

SEQ ID NO: 9119 - protein, 109 aa, Artificial Sequence
  Synthetic construct
SSELTQDPAVSVALGQTVRITCQGDSLRSYYASWYQQKPGQAPVLVIYGKNNRPSGIPDRFSGSSSGNTASLTITGAQAEDEADYYCNSRDSSGNHLRVFGTGTKVTVL

SEQ ID NO: 9120 - protein, 106 aa, Artificial Sequence
  Synthetic construct
SYELTQPPSVSVSPGQTASITCSGDKLGDKYACWYQQKPGQSPVLVIYQDSKRPSGIPERFSGSNSGNTATLTISGTQAMDEADYYCQAWDSSTEVFGGGTKLTVL

SEQ ID NO: 9121 - protein, 108 aa, Artificial Sequence
  Synthetic construct
DIQMTQSPSSLSASAGDRVTITCRASQSINNFVNWYQQKPGKAPRLLIYAASRLQTGVPSRFSGSGSETDFTLTISGLQPEDFATYYCQQSYSSPQLTFGPGTKVDIK

SEQ ID NO: 9122 - protein, 107 aa, Artificial Sequence
  Synthetic construct
DIQMTQSPSSLSASVGDRVSISCRASQGISTFLAWFQQRPGEAPKPLIYAASKLQSGVPSRFSGSDSGPDFTLTIDNLQPEDSATYYCKQYNSYPYTFGQGTKVEIK

SEQ ID NO: 9123 - protein, 108 aa, Artificial Sequence
  Synthetic construct
QSALTQPASVSGSPGQSITISCTGTSSDVGSYNLVSWYQQHPGKAPKLMIYEGSKRPSGVSNRFSGSKSGNTASLTISGLQAEDEADYYCCSYAGSTVFGGGTKLTVL

SEQ ID NO: 9124 - protein, 107 aa, Artificial Sequence
  Synthetic construct
AIQLTQSPSSLSASVGDRVTITCRASQGIGTYLAWYQQKPGRAPNLLIYAASTLQSGVPSRFSGSGSGTDFSLTISSLQPEDFGTYYCQQLNTYPRTFGQGTRVEIK

SEQ ID NO: 9125 - protein, 110 aa, Artificial Sequence
  Synthetic construct
QSVLTQPPSVSAAPGQKVTISCSGSSSNIGNNYVSWYQQLPGTAPKLLIYDNNKRPSGIPDRFSGSKSGTSATLGITGLQTGDEADYYCGTWDSSLSAEVFGGGTKLTVL

SEQ ID NO: 9126 - protein, 112 aa, Artificial Sequence
  Synthetic construct
QSALTQPASVSGSPGQSITISCTGTTSAVGGYNFVSWYQQHPGKAPKLIIYDVSSRPSGISNRFSGSKSGNTASLTISGLQAEDEADYYCTSYRSSSTLEVLFGGGTKLTVL

SEQ ID NO: 9127 - protein, 108 aa, Artificial Sequence
  Synthetic construct
DIQMTQSPSSLSASVGDRITITCQASQDISNHLNWYRQKPGKAPELLIYDAFNLETGVPSRFSGSGSGTDFTFTISSLHPEDIATYYCQQFDSVPPYTFGQGTKLEIK

SEQ ID NO: 9128 - protein, 106 aa, Artificial Sequence
  Synthetic construct
EIVMTQSPATLSLSPGERATLSCRASQNIGTFLTWYQKKPGQPPRLLIYDVSKRATGIPARFSGSGSGTDFTLTISSLEPEDSAVYYCQQRMSWLTFGGGTKVEIK

SEQ ID NO: 9129 - protein, 107 aa, Artificial Sequence
  Synthetic construct
DVQLTQSPSSLSASVGDRVTITCRASQAISNFLAWFQQKPGKAPNLLIYAASSLHSGVPSRFSGSGSGTQFTLTINSLQPEDVATYYCHKYNGAPKTFGQGTKVEVK

SEQ ID NO: 9130 - protein, 107 aa, Artificial Sequence
  Synthetic construct
DIQMTQSPSSLSASVGDRVTITCRASQGISSFLAWYQQKPGRIPKLLIYAASTLQPGVPSRFSGSGSGTDFTLTISSLQPEDVATYYCQKYNSAPLTFGGGTKVEIK

SEQ ID NO: 9131 - protein, 107 aa, Artificial Sequence; identical to SEQ ID NO: 8304
  Synthetic construct

SEQ ID NO: 9132 - protein, 108 aa, Artificial Sequence
  Synthetic construct
EIVLTQSPGTLSLSPGERATLSCRASQSVSSSYLAWYQQKPGQAPRLLIYGASSRATGIPDRFSGSGSGTDFTLTISRLEPEDFAVYYCQQYGSSPETFGQGTKVEIK

SEQ ID NO: 9133 - protein, 107 aa, Artificial Sequence; identical to SEQ ID NO: 8435
  Synthetic construct

SEQ ID NO: 9134 - protein, 110 aa, Artificial Sequence
  Synthetic construct
QTVVTQEPSFSVSPGGTVTLTCGLSSGSVSTSYYPSWYQQTPGQAPRTLIYSTNTRSSGVPDRFSGSILGNKAALTITGAQADDESDYYCVLYMGSGMVVFGGGTKLTVL

SEQ ID NO: 9135 - protein, 112 aa, Artificial Sequence; identical to SEQ ID NO: 8316
  Synthetic construct

SEQ ID NO: 9136 - protein, 112 aa, Artificial Sequence
  Synthetic construct
QSALTQPASVSGSPGQSITISCTGTSSDVGGYNYVSWYQQHPGKAPKLMIYDVSKRPSGVSNRFSGSKSGNTASLTISGLQAEDEADYYCSSYTSSSTLRYVFGTGTKVTVL

SEQ ID NO: 9137 - protein, 108 aa, Artificial Sequence
  Synthetic construct
DIQMTQSPSSLSASVGDRVTITCRASQGISNYLAWYQQKPGKVPKLLIYAASTLQSGVPSRFSGSGSGTDFTLTISSLQPEDVATYYCQKYNSAPRYTFGQGTKLEIK

SEQ ID NO: 9138 - protein, 110 aa, Artificial Sequence
  Synthetic construct
QSVLTQPPSLSAAPGQKVTISCSGGTSNIGINDVSWYQRLPGTAPKFLIYDNYMRPSGVPGRISGSKSGTTATLAITGLETGDAAEYFCATWDNSLKTVVFGGGTTVTVL

SEQ ID NO: 9139 - protein, 111 aa, Artificial Sequence
  Synthetic construct
QSVLTQPPSASGTPGQRVTISCSGSSSNIGSNYVYWYQQLPGTAPKLLIYRNNQRPSGVPDRFSGSKSGTSASLAISGLRSEDEADYYCAAWDDSLSGNWVFGGGTKLTVL

SEQ ID NO: 9140 - protein, 107 aa, Artificial Sequence
  Synthetic construct
EIVMTQSPATLSVSPGERATLSCRASQSVGRNLAWYQQKPGQPPRVLISGASTRATGITARFSGSGSGTEFTLTISSLLSEDFGIYYCQQYNNWPPAFGQGTKLEIK

SEQ ID NO: 9141 - protein, 109 aa, Artificial Sequence
  Synthetic construct
EIVLTQSPATLSLSPGERATLSCRASQSVSSYLAWYQQKPGQAPRLLIYDASNRATGIPARFSGSGSGTDFTLTISSLEPEDFAVYYCQQRSNWPPGLTFGGGTKVEIK

SEQ ID NO: 9142 - protein, 114 aa, Artificial Sequence
  Synthetic construct
DIVMTQSPDSLAVSLGERATINCKSSQSVLYSSNNKNYLAWYQQKPGQPPKLLIYWASTRESGVPDRFSGSGSGTDFTLTISSLQAEDVAVYYCQQYYRTPPHTFGQGTKLEIK

SEQ ID NO: 9143 - protein, 110 aa, Artificial Sequence
  Synthetic construct
QSALTQPASVSGSPGQSITISCTGTSSDVGSYNLVSWYQQHPGKAPKLMIYEGSKRPSGVSNRFSGSKSGNTASLTISGLQAEDEADYYCCSYAGSSTFLFGGGTKLTVL

SEQ ID NO: 9144 - protein, 106 aa, Artificial Sequence
  Synthetic construct
SYDLTQPPSLSVSPGQTATIACSGERLGDRYTSWYQQKPGQSPLLVIYEETRRPSGIPERFSASTSVDTTTLTITETQAADEATYFCQAWITSEVVFGGGTNLTVL

SEQ ID NO: 9145 - protein, 106 aa, Artificial Sequence
  Synthetic construct
EIVLTQSPATLSLSPGERATLSCRASQSVSSYLAWYQQKPGQAPRLLIYDASNRATGIPARFSGSGSGTDFTLTISSLEPEDFAVYYCQQRSNWLTFGGGTKVEIK

SEQ ID NO: 9146 - protein, 110 aa, Artificial Sequence
  Synthetic construct
QSVLTQPPSASGTPGQWVSISCSGSTSNIGSNTVNWYQHLPGTAPKLLVSGNNQRPSGVPGRFSASKSGTSASLAISGLQSEDEAHYYCAAWDDSLNVVVFGGGTKLTVL

SEQ ID NO: 9147 - protein, 113 aa, Artificial Sequence
  Synthetic construct
DVVLTQSPLSLPVSLGQPASISCRSSQSLVHSDGNTYLNWFHQRPGQSPRRLIYKISNRDSGVPDRFSGSGSGTDFTLKISRVEAEDVGVYYCMQATHWPPKTFGQGTKLEIK

SEQ ID NO: 9148 - protein, 112 aa, Artificial Sequence
  Synthetic construct
DVVLTQTPLSSPVIVGQPASISCRSSQSLVHRDGNTYLSWLQQRPGQPPRLLIYQVSKRLSGVPDRFSGSGAGTQFTLEISRVEIDDVGVYYCSQDSRFPLTFGQGTRVEIT

SEQ ID NO: 9149 - protein, 111 aa, Artificial Sequence
  Synthetic construct
QSVLTQPPSVSGAPGQRVTISCTGSSSNIGAGYDVHWYQQLPGTAPKLLIYGSSNRPSGVPDRFSGSKSGTSASLAITGLQAEDEADYYCQSYDSSLSAVVFGGGTKLTVL

SEQ ID NO: 9150 - protein, 107 aa, Artificial Sequence; identical to SEQ ID NO: 8065
  Synthetic construct

SEQ ID NO: 9151 - protein, 106 aa, Artificial Sequence
  Synthetic construct
DIQMTQSPSSLSASVGDRVTITCRASQSISSYLNWYQQKPGKAPKLLIYAASSLQSGVPSRFSGSGSGTDFTLTISSLQPEDFATYYCQQSYSTRTFGQGTKVEIK

SEQ ID NO: 9152 - protein, 112 aa, Artificial Sequence
  Synthetic construct
DIVMTQSPDSLAVSLGERATINCKSSQSVLYSSNNKNYLAWYQQKPGQPPKLLIYWASTRESGVPDRFSGSGSGTDFTLTISSLQAEDVAVYYCQQYYSTPTFGQGTKVEIK

SEQ ID NO: 9153 - protein, 110 aa, Artificial Sequence
  Synthetic construct
QSVLTQPPSASGTPGQRVTISCSGSSSNIGSNYVYWYQQLPGTAPKLLIYRNNQRPSGVPDRFSGSKSGTSASLAISGLRSEDEADYYCAAWDDSLSGLVFGGGTKLTVL

SEQ ID NO: 9154 - protein, 107 aa, Artificial Sequence
  Synthetic construct
AIRMTQSPSSFSASTGDRVTITCRASQGISSYLAWYQQKPGKAPKLLIYAASTLQSGVPSRFSGSGSGTDFTLTISCLQSEDFATYYCQQYYSYPYTFGQGTKLEIK

SEQ ID NO: 9155 - protein, 111 aa, Artificial Sequence
  Synthetic construct
QSVLTQPPSVSGAQGQTVTISCSGSNSNIGAPYDVHWYQHVAGTAPKLLIHGNGNRPSGVPDRFSGSKSGSSATLAITGLQTDDEGLYYCQSRDTNLGGAVFGGGTMLTVE

SEQ ID NO: 9156 - protein, 110 aa, Artificial Sequence
  Synthetic construct
QSALTQPASVSGSPGQSITISCTGASSDDGGYMLVSWYQQHPGKAPILMIYDVSKRPSGISNRFSGSKSGNTASLTISGLQAEDEADYYCTSYTSSSTLQFGGGTKLSVL

SEQ ID NO: 9157 - protein, 110 aa, Artificial Sequence
  Synthetic construct
QSALTQPASVSGSPGQSITISCTGTSSDVGGYNYVSWYQQHPGKAPKLMIYDVSNRPSGVSNRFSGSKSGNTASLTISGLQAEDEADYYCSSYTSSSTRVFGGGTKLTVL

SEQ ID NO: 9158 - protein, 113 aa, Artificial Sequence
  Synthetic construct
DIVMTQSPDSLSVSLGERATINCKSSQSVLYSSNNKNYLAWYQQRPGQPPKLLIYWASTRESGVPDRFSGSGSGTDFTLTISSLQAEDVAVYYCQQYDSTPWTFGQGTKVEIK

SEQ ID NO: 9159 - protein, 113 aa, Artificial Sequence
  Synthetic construct
DIVMTQSPDSLAVSLGERATINCKSSQSVLSSSNNHNYLAWYQQKPGQPPKLLIYWASTRESGVRDRFSGSGSGTDFTLTISSLQAEDVAVYYCQQYYSTPLTFGGGTKVEIK

SEQ ID NO: 9160 - protein, 111 aa, Artificial Sequence; identical to SEQ ID NO: 8610
  Synthetic construct

SEQ ID NO: 9161 - protein, 107 aa, Artificial Sequence; identical to SEQ ID NO: 8133
  Synthetic construct

SEQ ID NO: 9162 - protein, 110 aa, Artificial Sequence
  Synthetic construct
QSVLTQPPSMSAAPGQKVTISCSGSSSNIGNNYVSWYQQLPGTAPKLLIYDNYKRPSGVPDRFSGSRSGTSATLGITGLQTGDEADYYCGTWDSSLSAGVFGTGTKVTVL

SEQ ID NO: 9163 - protein, 109 aa, Artificial Sequence; identical to SEQ ID NO: 8665
  Synthetic construct

SEQ ID NO: 9164 - protein, 112 aa, Artificial Sequence
  Synthetic construct
DIVMTQTPLSLSVTPGQPASISCKSSQSLLHSDGKTYLYWYLQKPGQSPQLLIYEVSSRFSGVPDRFSGSGSGTDFTLKISRVEAEDVGVYYCMQGIHLLYTFGQGTKLEIK

SEQ ID NO: 9165 - protein, 110 aa, Artificial Sequence
  Synthetic construct
EIVLTQSPGTLSLFPGERATLSCRASQSVSIIYLAWYQQKPGQAPRLLIYGASNRATGIPDRFSGSGSGTDFTLTISRLEPEDFALYYCQHYGSSPPEFTFGGGTKVEIK

SEQ ID NO: 9166 - protein, 107 aa, Artificial Sequence
  Synthetic construct
AIQLTQSPSSLSASVGDRVTITCRASQGISSYLAWYQQKPGKAPKLLIYATSTLQSGVPSRFSGSGSGTDFTLTISSLQPEDFATYYCQQLNSYPPTFGPGTKVDIR

SEQ ID NO: 9167 - protein, 109 aa, Artificial Sequence
  Synthetic construct
EIVLTQSPGTLSLSPGESATLSCRASHAFSTHYMAWYQQKPGQAPRLLMYETSIRVTDIPDRFSGSGSGTDFTLTISRLEPEDFALYYCQHYGNSPPITFGQGTRLEIK

SEQ ID NO: 9168 - protein, 107 aa, Artificial Sequence; identical to SEQ ID NO: 8340
  Synthetic construct

SEQ ID NO: 9169 - protein, 110 aa, Artificial Sequence; identical to SEQ ID NO: 8220
  Synthetic construct

SEQ ID NO: 9170 - protein, 112 aa, Artificial Sequence
  Synthetic construct
DIVMTQTPLSLSVTPGQPASISCKSSQSLLHSDGKTYLYWYLQKPGQSPQLLIYEVSSRFSGVPDRFSGSGSGTDFTLKISRVEAEDVGVYYCVQGIHLPWTFGQGTKVEIK

SEQ ID NO: 9171 - protein, 110 aa, Artificial Sequence; identical to SEQ ID NO: 9165
  Synthetic construct

SEQ ID NO: 9172 - protein, 110 aa, Artificial Sequence; identical to SEQ ID NO: 8067
  Synthetic construct

SEQ ID NO: 9173 - protein, 109 aa, Artificial Sequence
  Synthetic construct
EIVLTQSPGTLSLSPGERATLSCRASQSVSSSYLAWYQQKPGQAPRLLIYGASSRATGIPDRFSGSGSGTDFTLTISRLEPEDFAVYYCQQFGSSPPLTFGGGTKVDIK

SEQ ID NO: 9174 - protein, 112 aa, Artificial Sequence
  Synthetic construct
NIVMTQSPLSLSVALGQPASISCRSSHGLEHSDGTTYVSWFQQRPGQSPRRLIFSVSNRDSGVPDRFSGSASGSDFTLHISRVETEDAGIYYCLQTSHWPRAFGQGTKVEIK

SEQ ID NO: 9175 - protein, 112 aa, Artificial Sequence
  Synthetic construct
DIVLTQTPLSSPVTLGQPASFSCRSSQSLLHSDGNTYLSWLQQRPGQPPRLLIYKVSNRFSGVPDRFSGSGAGTDFTLKISRVEAEDVGVYYCTQAKQFPFTFGQGTKLEIK

SEQ ID NO: 9176 - protein, 107 aa, Artificial Sequence
  Synthetic construct
DIQMTQSPSSLSASVGDTVSIACRASQSIGSYLNWYRQRPGKAPEPLIYAASRLQSGVQSRFSAGGSGTDFLLTISGLQPEDFATYYCQQTFTSSRTFGQGTKIEIK

SEQ ID NO: 9177 - protein, 108 aa, Artificial Sequence
  Synthetic construct
DIQMTQSPSTLSASVGDRVTITCRASQSISSWLAWYQQKPGKAPKLLIYKASSLESGVPSRFSGSGSGTEFTLTISSLQPDDFATYYCQQYNSYSELTFGGGTKVEIK

SEQ ID NO: 9178 - protein, 109 aa, Artificial Sequence
  Synthetic construct
DIQMTQSPSTLSAFVGDRVTITCRASQSISTWLAWFQQKPGEAPKLLIYKASSLEKGVPSRFSGNGSGTEFTLTISSLQPDDFATYYCQQYHSYSPTNTFGPGTKVDIK

SEQ ID NO: 9179 - protein, 113 aa, Artificial Sequence
  Synthetic construct
DVVMTQSPLSLPVTLGQPASISCRSSQSLVHSDGNTYLNWFQQRPGQSPRRLIYKVSNRDSGVPDRFSGSGSGTDFTLKISRVEAEDVGVYYCMQGTHWPRRTFGQGTKVEIK

SEQ ID NO: 9180 - protein, 107 aa, Artificial Sequence; identical to SEQ ID NO: 8735
  Synthetic construct

SEQ ID NO: 9181 - protein, 115 aa, Artificial Sequence
  Synthetic construct
QAVLTQPSSLSASPGATASLTCTLRSGVNVGTYRIYWCQQKPGSPPHYLLRYKSDSDKQQGSGVPSRFSGSKDASANAGILLISGLQSEDEADYYCMIWHSGTWEFGGGTTLTVL

SEQ ID NO: 9182 - protein, 112 aa, Artificial Sequence
  Synthetic construct
DIVMTQSPESLAVSPGETVTLRCEAAQSLFSKNQNYLAWYQQKRGQPPQLLIYWASTRAFGVPDRFSGAGSGTDFTLTISGLQPEDVATYYCQQYHSSSGYTFGQGTRVEVR

SEQ ID NO: 9183 - protein, 110 aa, Artificial Sequence
  Synthetic construct
QSVLTQPPSVSAAPGQRVTISCSGSNSNIGNNAVSWYQQVPGKAPKLLIYYEELKPSGVSERFSGSKSGTSASLAISGLQSEDEADYYCATWDDNLGGWVFGGGTKVTVL

SEQ ID NO: 9184 - protein, 109 aa, Artificial Sequence; identical to SEQ ID NO: 8306
  Synthetic construct

SEQ ID NO: 9185 - protein, 107 aa, Artificial Sequence; identical to SEQ ID NO: 8536
  Synthetic construct

SEQ ID NO: 9186 - protein, 107 aa, Artificial Sequence
  Synthetic construct
DIQMTQSPSTLSASVGDRVTITCRASQSISSWLAWYQQKPGKAPKLLIYKASSLENGVPSRFSGSGSGTEFTLTISSLQPDDFATYYCQHYNSYPVTFGQGTKLEIK

SEQ ID NO: 9187 - protein, 107 aa, Artificial Sequence
  Synthetic construct
DIQMTQSPSTLSASIGDRVTITCRASQSISSWLAWYQQKPGKAPKLLIYKASSLESGVPSRFSGSGSGTEFTLTISSLQPDDFATYYCQQYNSYSGTFGQGTKVEIK

SEQ ID NO: 9188 - protein, 107 aa, Artificial Sequence
  Synthetic construct
AIRITQSPSSLSASTGDRVTITCRASQGISSYLAWYQQKPGKAPKLLIYAASTLQSGVPSRFSGSGSGTDFTLTISCLQSEDFATYYCQQYYSYPLTFGPGTKVDIK

SEQ ID NO: 9189 - protein, 107 aa, Artificial Sequence
  Synthetic construct
DIQMTQSPSSVSASVGDRVTITCRASQGISSWLAWYQQKPGKAPKLLIYAASSLQSGVPSRFSGSGSGTDFTLTISSLQPEDFATYYCQQANSFPQTFGGGTKVEIK

SEQ ID NO: 9190 - protein, 111 aa, Artificial Sequence
  Synthetic construct
QSALTQPRSVSGSPGQSVTISCTGTSSDVGGYNYVSWYQQHPGKAPKLMIYDVSKRPSGVPDRFSGSKSGNTASLTISGLQAEDEADYYCCSYAGSYTFRVFGTGTKVTVL

SEQ ID NO: 9191 - protein, 113 aa, Artificial Sequence; identical to SEQ ID NO: 8086
  Synthetic construct

SEQ ID NO: 9192 - protein, 111 aa, Artificial Sequence
  Synthetic construct
QLVLTQSPSASASLGASVKLTCTLSSGHSSYAIAWHQQQPEKGPRYLMKLNSDGSHSKGDGIPDRFSGSSSGAERYLTISSLQSEDEADYYCQTWGTGIQVFGGGTKLTVL

SEQ ID NO: 9193 - protein, 107 aa, Artificial Sequence
  Synthetic construct
DIQMTQSPSSLSASVGDRVTITCRASQSISSYLNWYQQKPGKAPKLLIYAASSLQSGVPSRFSGSGSGTDFTLTISSLQPEDFATYYCQQSYSTPVTFGQGTKVEIK

SEQ ID NO: 9194 - protein, 113 aa, Artificial Sequence
  Synthetic construct
DIVMTQSPDSLAVSLGERATINCKSSRSVLYSANNKNYLAWYQQKPGQPPKLIISWATTRESGVPDRFSGSGSGTDFTLTINSLQAADVAVYHCQQYYTTPYTFGQGTKLEIK

SEQ ID NO: 9195 - protein, 108 aa, Artificial Sequence
  Synthetic construct
EIVLTQSPGTLSLSPGERASLSCRASQSVNANYLAWYQRKPGQAPRLLIYDASTRATGIPDRFSGSGSGTDFTLTISRLETEDFAVYYCQQYGGSPPTFGQGTKVESK

SEQ ID NO: 9196 - protein, 107 aa, Artificial Sequence; identical to SEQ ID NO: 8596
  Synthetic construct

SEQ ID NO: 9197 - protein, 112 aa, Artificial Sequence
  Synthetic construct
DIVMTQSPLSLPVTPGEPASISCRSSQSLIHSNGYNYLEWYLQKPGQSPQLLIFFGSMRASGVPDRFSGSGSGTDFTLKISRVEAEDVGIYYCMQSLQTPLTFGGGTKVEIK

SEQ ID NO: 9198 - protein, 107 aa, Artificial Sequence
  Synthetic construct
EIVLTQSPASLSLSPGERATLSCRASQSVRNFLAWYQQKPGQAPRLLIFDASKRATGIPARFSGSGSGTDFTLTISSLEPEDFAVYYCQQGNNFQWTFGQGSKVEIK

SEQ ID NO: 9199 - protein, 107 aa, Artificial Sequence; identical to SEQ ID NO: 8127
  Synthetic construct

SEQ ID NO: 9200 - protein, 107 aa, Artificial Sequence
  Synthetic construct
DIQMTQSPSTLSASVGDRVTITCRASQSISTWLAWYQQKPGKAPKLLIQKASSLEIGVPSRFGGSGSGTEFTLTISSLQPEDFATYFCQQYNGYPWTFGQGTKVESK

SEQ ID NO: 9201 - protein, 109 aa, Artificial Sequence
  Synthetic construct
EIVMTQSPATLSVSPGERATLSCRASQSVSSNLAWYQQKPGQAPRLLIYGASTRATGIPARFSGSGSGTEFTLTISSLQSEDFAVYYCQQYNNWPLSITFGQGTRLEIK

SEQ ID NO: 9202 - protein, 108 aa, Artificial Sequence
  Synthetic construct
EIVLTQSPGTLSLSPGERATLPCRASQSINSKYLAWYQQRPGQAPKLLIYSASSRATGIPERFSGSGSGTDFTLTISRLEPEDFAVYYCQQYDKSPYTFGQGTKLEIK

SEQ ID NO: 9203 - protein, 107 aa, Artificial Sequence
  Synthetic construct
AIRMTQSPSSFSASTGDRVTITCRASQGISSYLAWYQQKPGKAPKLLIYAASTLQSGVPSRFSGSGSGTDFTLTISCLQSEDFATYYCQQYYSYPFTFGPGTKVDIK

SEQ ID NO: 9204 - protein, 107 aa, Artificial Sequence; identical to SEQ ID NO: 8397
  Synthetic construct

SEQ ID NO: 9205 - protein, 107 aa, Artificial Sequence
  Synthetic construct
EIVMTQSPATLSVSPGERATLSCRASQSISINLAWYQQKPGQAPRLLIYGASTRATGLPARFGGSGSGTEFTLTISSLQSEDSAVYYCQQYNRRPLTFGPGTKVDIK

SEQ ID NO: 9206 - protein, 108 aa, Artificial Sequence
  Synthetic construct
SYELTQPPSVSVSPGQTARITCSADALPKQYAYWYQQKPGQAPVLVIYKDSERPSGIPERFSGSSSGTTVTLTISGVQAEDEADYYCQSADSSGTYYVFGTGTKVTVL

SEQ ID NO: 9207 - protein, 112 aa, Artificial Sequence
  Synthetic construct
DVVMTQSPLSLPVTLGQPASISCRSSQSLVHSDGNIYLHWFQQRPGQSPRRLIYKVSDRDSGVPDRFSGSGSGTDFTLRISRVEAEDVGVYFCMQGTHWPITFGQGTRLEIK

SEQ ID NO: 9208 - protein, 110 aa, Artificial Sequence
  Synthetic construct
QSALTQPASVSGSPGQSITISCTGTISDIGSYNLVSWYQQHPDKAPKLLIYEVSKRPSGVSTRFSGSKSGNTASLTISQLQAEDEADYYCCSYAGSGTVLFGGGTKLTVL

SEQ ID NO: 9209 - protein, 113 aa, Artificial Sequence
  Synthetic construct
DIVMTQSPDSLAVSLGERATINCKSSQSVLWSSNNRNYLAWYQHKPGQPPKLLIYWASTRESGVPDRFSGSGSGTDFTLTISSLQAEDVAVYYCQQYYNTPFTFGQGTKLEIK

SEQ ID NO: 9210 - protein, 110 aa, Artificial Sequence
  Synthetic construct
QSALTQPASVSGSPGQSITISCTGTSSDVGAYNYVSWYQQHPGKAPKLMIYDVSKRPSGVSNRFSGSKSGNTASLTISGLQAEDEADYYCSSYTSSSTWVFGGGTKLTVL

SEQ ID NO: 9211 - protein, 111 aa, Artificial Sequence
  Synthetic construct
QSVLTQPPSVSAAPGQRVTISCSGSSSNIGKNFVSWYQHVPGTVPKLLIYDNSERPSGIPDRFSGFKSGTSATLDISGLQTGDEADYYCGAWDGSLSAGWVFGGGTKVTLL

SEQ ID NO: 9212 - protein, 107 aa, Artificial Sequence; identical to SEQ ID NO: 8114
  Synthetic construct

SEQ ID NO: 9213 - protein, 111 aa, Artificial Sequence
  Synthetic construct
VIVLTQTPLSLSVTPGQPASISCKSSQSLLHGDGKTYLYWYVQKAGQSPQLLIYKTSNRFSGVPERFSGSGSGTDFTLKISRVEAEDVGIYYCLQGINPWTFGQGTKVEIK

SEQ ID NO: 9214 - protein, 107 aa, Artificial Sequence
  Synthetic construct
AIQLTQSPSSLSASVGDTVTITCRAGQGISTYLAWYQQKPGKAPKLLIYAASTLQSGVPSRFSGSGSGTDFTLTISSLQPEDFATYYCQQLNSYPFTFGPGTKVDIK

SEQ ID NO: 9215 - protein, 107 aa, Artificial Sequence
  Synthetic construct
DIQMTQSPSAMSASVGDRVTITCRASQGISNFLAWFQQKPGKVPKRLIYAASSLQSGVPSRFSGSGSGTEFTLTISSLQPEDFATYYCLQHNNYPWTFGQGTKVEIK

SEQ ID NO: 9216 - protein, 107 aa, Artificial Sequence
  Synthetic construct
EIVLTQSPATLSLSPGERATLSCRASQSVSSYLAWYQQKPGQAPRLLIYDASNRATGIPARFSGSGSGTDFTLTISSLEPEDFAVYYCQQRSNWPRTFGQGTKLEIK

SEQ ID NO: 9217 - protein, 107 aa, Artificial Sequence
  Synthetic construct
AIQLTQSPSSLSASVGDRVTITCRASQGVSSFLAWYQQKPGKAPKLLIYAASTLQSGVPSRFSGSGSGTDFTLTISSLQPEDFATYYCQQLNGYPPTFGPGTKVDLK

SEQ ID NO: 9218 - protein, 111 aa, Artificial Sequence; identical to SEQ ID NO: 9096
  Synthetic construct

SEQ ID NO: 9219 - protein, 109 aa, Artificial Sequence
  Synthetic construct
EIVMTQSPATLSVSPGERATLSCRASQSISNNLAWYQHKHGQAPRLLIYGASTRATGIPARFSGSGSGTEFTLTISSLQSEDIAVYYCQRYNNWPPEGTFGQGTKVEIK

SEQ ID NO: 9220 - protein, 108 aa, Artificial Sequence
  Synthetic construct
EVVLTQSPATLSLSPGDRATLSCRASQSLSNSYLAWYQQRPGQAPRLLIYHASRRATGIPDRFSGGGSGTDYTLTISRLEPEDFAVYFCHQYGGSPWTFGQGTRVEIK

SEQ ID NO: 9221 - protein, 107 aa, Artificial Sequence
  Synthetic construct
AIQLTQSPSSLSASVGDRVTITCRASQGIGTYLAWYQQKPGRAPNLLIYTASTLQSGVPSRFSGSGSGTDFSLTISSLQPEDFGTYYCQQLNTYPRTFGQGTRVEIK

SEQ ID NO: 9222 - protein, 110 aa, Artificial Sequence
  Synthetic construct
QSVLTQPPSAAGTPGQRVTIFCSGSSSNIGTNFVYWYQQVPGTGPKLLIYRNTQRPSGVPDRFSGSKSGTSASLAVSGLRSEDEADYYCAAWDDSLSGVVFGGGTKLTVL

SEQ ID NO: 9223 - protein, 108 aa, Artificial Sequence
  Synthetic construct
SYEVTQPPSVSVSPGQTARITCSGDALPKQYAYWYQQKPGQAPVLVIYKDSERPSGIPERFSGSSSGTTVTLTISGVQAEDEADYYCQSADSSGTYGVFGGGTKLTVL

SEQ ID NO: 9224 - protein, 109 aa, Artificial Sequence
  Synthetic construct
QSALTQPASVSGSPGQSITLSCTGVNSDVGYNYVSWYQQHAGKVPKLLMYHVSKRPSGISDRFSGSKSGNTASLTISGLQTEDEADYYCCSLTNSGAWLFGGVTKLTVQ

SEQ ID NO: 9225 - protein, 108 aa, Artificial Sequence
  Synthetic construct
EIVLTQSPGTLSLSPGERATLSCRASQSVSSNYLAWYQQKPGQAPSLLIYGASSRATGIPDRFSGSGSGTDFTLTISRLEPEDFAVYYCQQYGSSPRTFGQGTKVEIK

SEQ ID NO: 9226 - protein, 110 aa, Artificial Sequence
  Synthetic construct
QAVVTQEPSLTVSPGGTVTLTCGSSTGTVTRGHYPYWFQQKPGQAPRTLIYDTSQKHSWTPARFSGSLLGGKAALTLSGAQPEDEAEYYCLLSYTDARPAFGGGTKLTVV

SEQ ID NO: 9227 - protein, 112 aa, Artificial Sequence
  Synthetic construct
DIVMTQTPLSLSVTPGQPASISCKSSQSLQLSARKTCLYWFLQKPGQSPQLLIYDVSNRFSGVPDRFSGSGSETDFTLKIGRVEADDVGLYYCMQGLELPHTFGQGTKLEIK

SEQ ID NO: 9228 - protein, 113 aa, Artificial Sequence; identical to SEQ ID NO: 8661
  Synthetic construct

SEQ ID NO: 9229 - protein, 110 aa, Artificial Sequence
  Synthetic construct
QSVLTQPPSASGTPGQRVTISCSGSSSNIGSNYVDWYQQFPGTAPKLLIYRNNQRPSGVPDRFSGSKSGTSASLAISGLRSEDEADYYCAPWDDSLSGPVFGGGTKLTVL

SEQ ID NO: 9230 - protein, 108 aa, Artificial Sequence
  Synthetic construct
SYVLTQPPSVSVAPGKTATFTCGGDNIRIRSVHWYQQKAGQAPILVIYYDSDRPSGIPERFSGSNSGNTATLTISRVEAGDEADYYCQVWDSISDHVIFGGGTKLTVL

SEQ ID NO: 9231 - protein, 107 aa, Artificial Sequence
  Synthetic construct
DIQMTQSPSSLSASVGDRVTITCRASQAINNYLAWYQQKPGKVPQILIYAASSLQSGVPSRFSGSGSGTEFTLTISSLQPEDVATYYCQKFNSAPWTFGQGTRVEIK

SEQ ID NO: 9232 - protein, 109 aa, Artificial Sequence
  Synthetic construct
EIVLTQSPDTLSLSPGERATLSCRASQSVSSSHLAWYQQKPGQAPRLLIYGASSRATGIPDRFSGGGSGTDFTLTISGLEPEDFAVYYCQQYGSSPRLTFGGGTKVEIK

SEQ ID NO: 9233 - protein, 107 aa, Artificial Sequence
  Synthetic construct
EIVLTQSPATLSLSPGERATLSCRASQSVSSYLAWYQQKPGQAPRLLIYDASNRATGIPARFSGSGSGTDFTLTISSLEPEDFAVYYCQQRSNWPQTFGQGTKVEIK

SEQ ID NO: 9234 - protein, 112 aa, Artificial Sequence
  Synthetic construct
DVVMTQSPLSLPVTLGQPASISCRSSQSLVHSDGNTYLNWFQQRPGQSPRRLIYKVSNRDSGVPDRFSGSGSGTDFTLKISRVEAEDVGVYYCMQGTHWPLTFGGGTKVEIK

SEQ ID NO: 9235 - protein, 108 aa, Artificial Sequence
  Synthetic construct
SYELTQPPSVSVSPGQTATITCSGDALPKRYVYWYQQKPGQAPVVVIYKDTERPSGIPERFSGSASGTTVTLTISGVRAEDEADYYCQSPDSSGTYEVFGGGTKLTIL

SEQ ID NO: 9236 - protein, 107 aa, Artificial Sequence
  Synthetic construct
EIVMTQSPASLSVSPGERATLSCRASQSVSSNLAWYQHKPGQAPSLLIYAASTRATGIPARFSGSGSGTEFTLTISSLQSEDFAVYYCQQYNIWPNTFGQGTKLEIK

SEQ ID NO: 9237 - protein, 108 aa, Artificial Sequence
  Synthetic construct
DVQLTQSPSSLSASVGDRVTITCQASQDISNYLNWYQQKPGKAPKLLIYDASHLETGVPSRFSGSGSGTDFTFTITSLQPEDIATYHCQQFENVPPVTFGGGTKVEIK

SEQ ID NO: 9238 - protein, 107 aa, Artificial Sequence
  Synthetic construct
VIQMTQSPSSLSASVGDRVTITCRASQSIRQDLGWYQQKPGKAPTLLIYGASTLQRGVSSRFSGSGSGTDFTLTISSLQPEDFATYYCLQDDDYPRTFGQGTRVEIK

SEQ ID NO: 9239 - protein, 108 aa, Artificial Sequence; identical to SEQ ID NO: 8703
  Synthetic construct

SEQ ID NO: 9240 - protein, 107 aa, Artificial Sequence
  Synthetic construct
DIQMTQSPSTLSASVGDRVTITCRASQSISSWLAWYQQKPGKAPKLLIYKASSLESGVPSRFSGSGSGTEFTLTISSLQPDDFATYYCQQYNSFPYTFGQGTKLEIK

SEQ ID NO: 9241 - protein, 111 aa, Artificial Sequence
  Synthetic construct
QSALTQPASVSGSPGQTITISCTGTSTDVGGHSFVSWYQQHPPKAPKLMIYDVDRRPSGISYRFSASKSGNTASLTISGLQAEDEADYFCSSYTSTGAFVLFGGGTRLTVL

SEQ ID NO: 9242 - protein, 106 aa, Artificial Sequence
  Synthetic construct
SYELTQAPSASVSPGQTASITCSGDKLGDEYASWYQQKPGQSPVLVIFQDNKRPSGVPERFSGSISGNTATLTISGTQPMDEADYYCQSWGASGAVFGGGTKLTVL

SEQ ID NO: 9243 - protein, 107 aa, Artificial Sequence
  Synthetic construct
DIQMTQSPSSLSASVGDRVTITCRASQSISSYLNWYQQKPGKAPKLLIYAASSLQSGVPSRFSGSGSGTDFTLTISSLQPEDFATYYCQQSYSTPITFGQGTRLEIK

SEQ ID NO: 9244 - protein, 113 aa, Artificial Sequence
  Synthetic construct
DIVMTQSPDSLTVSLGERATVNCKSSQSVLNSYNNKNDLAWYQQKPGQSPKLLIYWASTRESGVPDRFSGSGSGTDFTLTISSLQAEDVAIYYCQQYYITPYTFGQGTKLEIK

SEQ ID NO: 9245 - protein, 110 aa, Artificial Sequence
  Synthetic construct
QSVLTQPPSVSAAPGQNVTISCSGSSSNIGDNYVSWYQQLPGTAPKLLIYDNNKRPSGIPDRFSGSKSGTSATLGITGLQTGDEADYHCGTWDNSLSAGVFGGGTKLAVL

SEQ ID NO: 9246 - protein, 107 aa, Artificial Sequence
  Synthetic construct
AIQLTQSPSSLSASVGDRVTITCRASQAFNTYLAWYQQKPGKAPRLLIYAASTLQSGVPSRFSGSGSGTDFTLTISSLQPEDFATYYCQQVNTYPRTFGQGTKLEIK

SEQ ID NO: 9247 - protein, 107 aa, Artificial Sequence
  Synthetic construct
DIQMTQSPSSVSASVGDRVTITCRASQGISSWLAWYQQKPGKAPKLLIYAASSLQSGVPSRFSGSGSGTDFTLTISSLQPEDFATYYCKQANSFPITFGQGTRLEIK

SEQ ID NO: 9248 - protein, 110 aa, Artificial Sequence; identical to SEQ ID NO: 9066
  Synthetic construct

SEQ ID NO: 9249 - protein, 107 aa, Artificial Sequence
  Synthetic construct
AIRITQSPSSLSASTGDRVTITCRASQGISSYLAWYQQKPGKAPKLLIYAASTLQSGVPSRFSGSGSGTDFTLTISCLQSEDFATYYCQQYYSYPQTFGPGTKVDIK

SEQ ID NO: 9250 - protein, 108 aa, Artificial Sequence; identical to SEQ ID NO: 8703
  Synthetic construct

SEQ ID NO: 9251 - protein, 108 aa, Artificial Sequence
  Synthetic construct
EIVLTQSPGTLSLSPGERATLSCRASQSVSSSYLAWYQQKPGQAPRLLIYGASSRATGIPDRFSGSGSGTDFTLTISRLEPEDFAVYYCQQYGSSPHTFGGGTKVEIK

SEQ ID NO: 9252 - protein, 112 aa, Artificial Sequence
  Synthetic construct
DVVVTQSPLSLAVTLGQPAALSCRSSQSLGHIDGNTYFYWFHQRPGQSPRRLIYRVSNRDSGVPDRFSGSGSGTDFTLRISRVEAEDAGVYYCMQGTHWPRTFGQGTKVEIK

SEQ ID NO: 9253 - protein, 106 aa, Artificial Sequence
  Synthetic construct
SYELTQPPSESVSPGQTASITCSGEKVGDEYTSWYQQRPGQSPVLLIFQETKRPSGIPERFSGSLSGNTATLTISGTQPMDEADYYCQSWGASGAVFGGGTRLTVL

SEQ ID NO: 9254 - protein, 107 aa, Artificial Sequence; identical to SEQ ID NO: 8353
  Synthetic construct

SEQ ID NO: 9255 - protein, 107 aa, Artificial Sequence
  Synthetic construct
EIVLTQSPGTLSLSPGERATLSCRASQSLSNSFLAWYQHKPGQAPRLLIFDASSRATGIPDRFSGSGSGTDFTLTISRLEPEDFAVYYCQQYRVSYTFGQGTKVEIK

SEQ ID NO: 9256 - protein, 106 aa, Artificial Sequence; identical to SEQ ID NO: 9145
  Synthetic construct

SEQ ID NO: 9257 - protein, 107 aa, Artificial Sequence
  Synthetic construct
DIQLTQSPSFLSASVGDRVTITCRASQGISSYLAWYQQKPGKAPKLLIYAASTLQSGVPSRFSGSGSGTEFTLTISSLQPEDFATYYCLQLNSYPLTFGGGTKVEIK

SEQ ID NO: 9258 - protein, 107 aa, Artificial Sequence; identical to SEQ ID NO: 8114
  Synthetic construct

SEQ ID NO: 9259 - protein, 106 aa, Artificial Sequence
  Synthetic construct
SYDLTQPPSVSVSPGQAASITCTGDKLDNKYVSWYQQRSGQSPVLVIYQGSQRPSGIPERFSGSNSGNTATLTISGTQAMDEADYYCQTWDSSTVVFGGGTKLTVL

SEQ ID NO: 9260 - protein, 107 aa, Artificial Sequence
  Synthetic construct
DIQLTQSPSFLSASVGDRVTITCRASQGVSSYLAWYQQKPGKAPNLLIYAASSLQSGVPSRFSGSGSGTEFTLTISSLQPEDFATYYCQQLNTYPRTFGQGTKLEII

SEQ ID NO: 9261 - protein, 110 aa, Artificial Sequence
  Synthetic construct
QSALTQPASVSGSPGQSITISCTGTSSDVGSYNLVSWYQQHPGKAPKLMIYEVSKRPSGVSNRFSGSKSGNTASLTISGLQAEDEADYYCCSYAGSSLYVFGTGTKVTVL

SEQ ID NO: 9262 - protein, 115 aa, Artificial Sequence; identical to SEQ ID NO: 8636
  Synthetic construct

SEQ ID NO: 9263 - protein, 110 aa, Artificial Sequence; identical to SEQ ID NO: 8614
  Synthetic construct

SEQ ID NO: 9264 - protein, 107 aa, Artificial Sequence
  Synthetic construct
AIRMTQSPSSFSASTGDRVTITCRASQGISSYLAWYQQKPGKAPKLLIYAASTLQSGVPSRFSGSGSGTDFTLTISCLQSEDFATYYCQQYYSYPPTFGQGTKVEIK

SEQ ID NO: 9265 - protein, 112 aa, Artificial Sequence
  Synthetic construct
QSALTQPASVSGSPGQSITISCTGTSSDIGSYNHVSWYQQHPGKAPKLIIYEVNKRPSGVSNRFSGSKSGKTASLTISGLQTVDEADYYCCSYAGNSAFPYVFGTGTKVNVL

SEQ ID NO: 9266 - protein, 107 aa, Artificial Sequence; identical to SEQ ID NO: 8200
  Synthetic construct

SEQ ID NO: 9267 - protein, 107 aa, Artificial Sequence; identical to SEQ ID NO: 8658
  Synthetic construct

SEQ ID NO: 9268 - protein, 111 aa, Artificial Sequence
  Synthetic construct
QLVLTQSPSASASLGASVNLTCTLSSGHSSYAIAWHQRQPEKGPRYLMRLNSDGSRSEGDGIPDRFSGSSSGAERYLTISSLQSEDEADYYCQTWGSGIVVFGGGTHLTVL

SEQ ID NO: 9269 - protein, 105 aa, Artificial Sequence; identical to SEQ ID NO: 8339
  Synthetic construct

SEQ ID NO: 9270 - protein, 109 aa, Artificial Sequence
  Synthetic construct
QSVLTQPPSVSAAPGQNVTISCSGGYSDIGDYYVSWYQHFPGAAPKLLIYDDDMRHAGIPDRFSASKSGTSASLHIAGLQTGDEADYYCATWDAGLRVVFGGGTKVTVL

SEQ ID NO: 9271 - protein, 110 aa, Artificial Sequence
  Synthetic construct
QSALTQPRSVSGSPGQSVTISCTGTSSDVGGYNYVSWYQQHPDKAPRLMIYDVSRRPSGVPDRFSGSKSGNTASLTISGLQAEDEADYYCCSHAGRYIWVFGGGTKLTVL

SEQ ID NO: 9272 - protein, 107 aa, Artificial Sequence; identical to SEQ ID NO: 8065
  Synthetic construct

SEQ ID NO: 9273 - protein, 107 aa, Artificial Sequence; identical to SEQ ID NO: 8596
  Synthetic construct

SEQ ID NO: 9274 - protein, 106 aa, Artificial Sequence
  Synthetic construct
GIQMTQSPSSLSASVGDRVTITCRASQSISNYLNWYQQKPGEAPKLLIFAAASLQNRVPSRFSGSGSGTDFTLTISSLQPEDFATYYCQQSYTTRTFGQGTKVEIK

SEQ ID NO: 9275 - protein, 107 aa, Artificial Sequence
  Synthetic construct
EIVMTQSPATLSVSPGERATLSCRASQSVSSNLAWYQQKPGQAPRLLIYGASTRATGIPARFSGSGSGTEFTLTISSLQSEDFAVYYCQQYNNWPLTFGQGTKVEIK

SEQ ID NO: 9276 - protein, 108 aa, Artificial Sequence
  Synthetic construct
DIQMTQSPSTLSASVGDRVTITCRASQSISKWLAWYQQKSGKAPKLLIYKASSLESGVPSRFSGSGSGTEFTLTISSLQPEDFATYYCQQYNNYFKWTFGQGTKVDIK

SEQ ID NO: 9277 - protein, 107 aa, Artificial Sequence; identical to SEQ ID NO: 8340
  Synthetic construct

SEQ ID NO: 9278 - protein, 112 aa, Artificial Sequence
  Synthetic construct
DVVMTQSPLSLPVTLGQPASISCRSSQSLVHSDGNTYLNWFQQRPGQSPRRLIYKVSNRDSGVPDRFSGSGSGTDFTLKISRVEAEDVGVYYCMQGTHWPLTFGPGTKVDIK

SEQ ID NO: 9279 - protein, 107 aa, Artificial Sequence
  Synthetic construct
DIQMTQSPSSLSASVGDTITVTCRASQSIFTYLNWYQQTPGKAPKLLIYATSNLQSGVPSRFSGSGSATDFTLTIRNLQPEDFAVYFCQQSYSSPLTFGGGTKVEIR

SEQ ID NO: 9280 - protein, 113 aa, Artificial Sequence
  Synthetic construct
DIVMTQSPDSLAVSLGERATINCKSSQSVLYSSNNKNYLAWYQQKPGQPPKLLIYWASTRESGVPDRFSGSGSGTDFTLTISSLQAEDVAVYYCQQYYSTPRTFGQGTKLEIK

SEQ ID NO: 9281 - protein, 108 aa, Artificial Sequence
  Synthetic construct
EIVMTQSPATLSVSPGERVTLSCRASQSISSNLAWYQQKSGQGPRLLIYGASTRATDIPARFSGSGSGTEFTLTIASLQSEDFAVYYCQQYKDWPPWTFGQGTKVEIK

SEQ ID NO: 9282 - protein, 109 aa, Artificial Sequence
  Synthetic construct
QSVLTQPPSASGTPGQRVTISCSGSTSNIGSNTVNWYQQLPGAAPKMLIYSNNERPSGVPDRFSGSKSGTSASLAISGLQSEDEAHYYCAAWDDSLSALFGGGTKLTVL

SEQ ID NO: 9283 - protein, 108 aa, Artificial Sequence
  Synthetic construct
PYVLTQPPSVSEAPGKTARIACGGNNIETKGVQWYQQKPGQAPILVISYSSDRPAGIPERFSGSKSGNTATLTISSIEAGDEADYHCQVWDSDSGHPIFGGGTRLTVL

SEQ ID NO: 9284 - protein, 110 aa, Artificial Sequence
  Synthetic construct
QSALTQPASVSGSPGQSITISCTGTSSDVGSYNLVSWYQQHPGKAPKLMIYEVSKRPSGVSNRFSGSKSGNTASLTISGLQAEDEADYYCCSYAGSSTYVFGTGTKVTVL

SEQ ID NO: 9285 - protein, 111 aa, Artificial Sequence
  Synthetic construct
QPVLTQSPSATASPGASVRLTCTLSSGHRNYAIAWHQQHSGTSPRFLMRLNSDGSHRKGDGIPDRFSGSSSGAERHLIISSLQSEDEADYFCQTWATGVVVFGGGTKLTVL

SEQ ID NO: 9286 - protein, 107 aa, Artificial Sequence
  Synthetic construct
DIQMTQSPSSLSASVGDRVTITCRASQSISSYLNWYQQKPGKAPKLLIYAASSLQSGVPSRFSGSGSGTDFTLTISSLQPEDFATYYCQQSYSTPVTFGQGTKLEIK

SEQ ID NO: 9287 - protein, 108 aa, Artificial Sequence
  Synthetic construct
EIVMTQSPATLSVSPGERATLSCRASQSLSRSLAWYQKKPGQAPRLLIYGASTRAAGIPARFSGSGSGTEFTLTISSLQSEDFAVYYCQQYNNWPPLTFGGGTKVEIK

SEQ ID NO: 9288 - protein, 112 aa, Artificial Sequence
  Synthetic construct
QSALTQPASVSGSPGQSITISCTGTSSDIGRYKSVIWYQQHPGEAPKLVIYDVTSRPSGVSTRFSGSKSGSTASLTISGLQAEDEADYYCASYTGTSTLEVVFGGGTKLAVL

SEQ ID NO: 9289 - protein, 108 aa, Artificial Sequence
  Synthetic construct
EIVLTQSPGTLSLSPGERATLSCRTSENVATSYLAWYQQRPGQAPRLLIYGSSNRATGIPDRFSGSGSGTDFTLTINRLEPEDFAVYFCQQFGRSPRTFGQGTKVEFK

SEQ ID NO: 9290 - protein, 107 aa, Artificial Sequence
  Synthetic construct
DIQMTQSPSAMSTSVGDRVTITCRASQGISNYLAWFQQKPGKVPKRLIYAASSLQSGVPSRFSGSGSGTEFTLTISSLQPEDFATYYCLQHNSYPYTFGQGTKLEIK

SEQ ID NO: 9291 - protein, 112 aa, Artificial Sequence
  Synthetic construct
QSVLTQPPSASGTPGQRVTISCSGSSSNIGSNYVYWYQQLPGTAPKLLIYRNNQRPSGVPDRFSGSKSGTSASLAISGLRSEDEADYYCAAWDDSLSGPDVVFGGGTKLTVL

SEQ ID NO: 9292 - protein, 109 aa, Artificial Sequence
  Synthetic construct
DVVMTQSPLSLPVTLGQPASISCRSSQSLVHSDGNTYLNWFQQRPGQSPRRLIYKVSNRDSGVPDRFSGSGSGTDFTLKISRVEAEDVGVYYCMQGTHRFGQGTKVEIK

SEQ ID NO: 9293 - protein, 110 aa, Artificial Sequence
  Synthetic construct
QTVVTQEPSLTVSPGGTVTLTCASSTGAVTSGYYPNWFQQKPGQAPRALIYSTSNKHSWTPARFSGSLLGGKAALTLSGVQPEDEAEYYCLLYYGGAQGVFGGGTKLTVL

SEQ ID NO: 9294 - protein, 108 aa, Artificial Sequence; identical to SEQ ID NO: 8608
  Synthetic construct

SEQ ID NO: 9295 - protein, 107 aa, Artificial Sequence; identical to SEQ ID NO: 8658
  Synthetic construct

SEQ ID NO: 9296 - protein, 110 aa, Artificial Sequence; identical to SEQ ID NO: 8614
  Synthetic construct

SEQ ID NO: 9297 - protein, 107 aa, Artificial Sequence; identical to SEQ ID NO: 8065
  Synthetic construct

SEQ ID NO: 9298 - protein, 107 aa, Artificial Sequence
  Synthetic construct
DIQMTQSPSSVSASVGDRVTITCRASQDINSWLAWYQQKPGKAPSLLIYSASRLESGVPSRFSGSGSGTDFTLTISSLQPEDFATYYCQQANSFPLTYGPGTNVDIK

SEQ ID NO: 9299 - protein, 108 aa, Artificial Sequence
  Synthetic construct
EIVLTQSPGTLSLSPGERATLSCRASQSVSSSYLAWYQQRPGLAPRLLIYGASNRATGIPDRFSGSGSGTDFTLTISRLEPEDFAVYYCQQFDTSPLTFGGGTKVEIK

SEQ ID NO: 9300 - protein, 107 aa, Artificial Sequence
  Synthetic construct
DIQLTQSPSFLSASVGDRVTITCRASQDISSYLAWYQQKPGKAPKFLIHAASTLQSGVPSRFSGSGSGTEFTLTISSLQPEDFATYYCQQVKSFSLTFGGGTRVEIK

SEQ ID NO: 9301 - protein, 107 aa, Artificial Sequence
  Synthetic construct
EIVMTQSPATLSVSPGERATLSCRASQSVSRKLAWYQQKPGQAPRLLIYGASTRATGIPARFSGSGSETEFTLTISSLQSEDFAVYYCQQFNNWPRTFGPGTKVEIK

SEQ ID NO: 9302 - protein, 111 aa, Artificial Sequence
  Synthetic construct
QSVLTQPPSVSAAPGQSVTISCTGNFYNIGAGYDVHWYQQLPGTAPKLLIFRNRNRPSGVPFRFSGSKSGASASLAITGLQPDDEGTYYCQSHDRSLSGTVFGGGTQLTVL

SEQ ID NO: 9303 - protein, 111 aa, Artificial Sequence
  Synthetic construct
QSALTQPPSASGSPGQSVTISCTGTSSDVGGYNYVSWYQQHPGKAPKLMIYEVSKRPSGVPDRFSGSKSGNTASLTVSGLQAEDEADYYCSSYAGSNNSDVFGTGTKVTVL

SEQ ID NO: 9304 - protein, 112 aa, Artificial Sequence
  Synthetic construct
DIVMTQSPLSLPVTPGEPASISCRSSQSLLHSNGYNYLDWYLQKPGQSPQLLIYLGSNRASGVPDRFSGSGSGTDFTLKISRVEAEDVGVYYCMQALQTPLTFGQGTKVEIK

SEQ ID NO: 9305 - protein, 107 aa, Artificial Sequence
  Synthetic construct
EIVLTQFPGTLSLSPGERATLSCRASQSVTTSLAWYQQKPGQAPRLLIYGASSRATGIPDRFSGSGSGTDFTLTISRLEPGDFAVYYCQQYGTSSWTFGQGTKVEIK

SEQ ID NO: 9306 - protein, 110 aa, Artificial Sequence; identical to SEQ ID NO: 8067
  Synthetic construct

SEQ ID NO: 9307 - protein, 107 aa, Artificial Sequence
  Synthetic construct
DIQMTQSPSSLSASVGDRVTITCRASQGISNYLAWYQQKPGKVPKLLIYAASTLQSGVPSRFSGSGSGTDFTLTISSLQPEDVATYYCQKYNSAPYTFGQGTKLEIK

SEQ ID NO: 9308 - protein, 107 aa, Artificial Sequence
  Synthetic construct
DIQLTQSPSSVSASVGDRVTITCRASQDISRWLAWYQQKPGKPPKLLVYAASNLQSGVSSRFSGSGSGTDFTLTISRLQPEDFAIYYCQQANSFPRTFGQGTKVEIK

SEQ ID NO: 9309 - protein, 110 aa, Artificial Sequence
  Synthetic construct
QSVLTQPPSMSAAPGQTVAISCSGSTSNIGYNSVSWYQQFPDTAPQLLIYDNNKRPSGIPDRFSGSRSATSATLVIRDFQIGHEADYYCGTWDSSLKAMVFGGGTRLTVL

SEQ ID NO: 9310 - protein, 113 aa, Artificial Sequence; identical to SEQ ID NO: 8989
  Synthetic construct

SEQ ID NO: 9311 - protein, 107 aa, Artificial Sequence
  Synthetic construct
EIVMTQSPATLSVSPGERATLSCRASQSVSSNLAWYQQKPGQAPRLLIYGASTRATGIPARFSGSGSGTEFTLTISSLQSEDFAVYYCQQYNNWPEAFGGGTKVEIK

SEQ ID NO: 9312 - protein, 115 aa, Artificial Sequence; identical to SEQ ID NO: 8149
  Synthetic construct

SEQ ID NO: 9313 - protein, 107 aa, Artificial Sequence
  Synthetic construct
EIVLTQSPATLSLSPGERATLSCKASQSVSVYLAWYQQKPGQAPRLLIYDASKRATGIPGRFSGSGSGTDFTLTISSLEPEDFAVYYCQRRSNWPFTFGPGTRVDIK

SEQ ID NO: 9314 - protein, 108 aa, Artificial Sequence
  Synthetic construct
SFLLTQPPSVSEAPGKTARITCGGNNIGSKSVHWYQQKPGQAPVLVIYYDTDRPSGIPERFSGSNSGNTATLTITRVEAGDEADYYCQVWDSSSDHVVFGGGTKLTVL

SEQ ID NO: 9315 - protein, 110 aa, Artificial Sequence
  Synthetic construct
QSVLTQPPSASGTPGQRVTISCSGSSSNIGSNYVYWYQQLPGTAPKLLIYRNNQRPSGVPDRFSGSKSGTSASLAISGLRSEDEADYYCAAWDDSLSGWVFGGGTKLTVL

SEQ ID NO: 9316 - protein, 107 aa, Artificial Sequence; identical to SEQ ID NO: 8152
  Synthetic construct

SEQ ID NO: 9317 - protein, 107 aa, Artificial Sequence
  Synthetic construct
EIVLTQSPGTLSLSPGERATLSCRASQSVGGYLVWYQQKPGQAPRLLIYGASTRATGIPDRFSGSGSGTDFTLTITRLEPEDFGVFYCQQYGTSPYTFGQGTKLQIK

SEQ ID NO: 9318 - protein, 107 aa, Artificial Sequence; identical to SEQ ID NO: 8065
  Synthetic construct

SEQ ID NO: 9319 - protein, 110 aa, Artificial Sequence
  Synthetic construct
QAVVTQEPSVTVSPGGTVTLTCASTTGAVTSEHHPYWIQQKPGQAPMTLIFDTSNKHSWTPARFSGSLLGGKAALTLSGALPEDEADYYCLLSYSAVRRVFGGGTKVTVL

SEQ ID NO: 9320 - protein, 107 aa, Artificial Sequence
  Synthetic construct
DIQMTQSPSSLSASVGDRVTITCRASQSISTYLNWYQQKPGKAPKLLIYIATNLQTGVPSRFSGSGSGTDFTLTISSLEAEDFAIYYCQQSYLTPPTFGGGTRVETK

SEQ ID NO: 9321 - protein, 107 aa, Artificial Sequence; identical to SEQ ID NO: 8833
  Synthetic construct

SEQ ID NO: 9322 - protein, 112 aa, Artificial Sequence
  Synthetic construct
QSALTQPVSVSGSPGQSITISCTGTNNDIGDYSFVSWYQQHPGKAPKLIIFDVSSRPSGVSHRFSASKSGNTASLTISGLQAEDEADYYCLSYITRTTLEVVFGGGTKLTVL

SEQ ID NO: 9323 - protein, 106 aa, Artificial Sequence
  Synthetic construct
EIVMTQSPATLSVSPGERATLSCRASQSVSSNLAWYQQKPGQAPRLLIYGASTRATGIPARFSGSGSGTEFTLTISSLQSEDFAVYYCQQYNNWPSFGQGTKLEIK

SEQ ID NO: 9324 - protein, 112 aa, Artificial Sequence
  Synthetic construct
QSALTQPASVSGSPGQSITISCTGTSSDVGSYNLVSWYQQHPGKAPKLMIYEGSKRPSGVSNRFSGSKSGNTASLTISGLQAEDEADYYCCSYAGSSTLHVVFGGGTKLTVL

SEQ ID NO: 9325 - protein, 110 aa, Artificial Sequence; identical to SEQ ID NO: 8344
  Synthetic construct

SEQ ID NO: 9326 - protein, 107 aa, Artificial Sequence
  Synthetic construct
EIVLTQSPATLSLSPGERATLSCRASQSVGSYLAWYQQRPGQAPRLLIYDASNRATGIPGRFSGSGSGTDFTLTISSLEPEDFAVYYCQQRSHWPLTFGGGTKVEIK

SEQ ID NO: 9327 - protein, 114 aa, Artificial Sequence
  Synthetic construct
DIVMTQSPDSLAVSLGERATINCKSSQSVLYSSNNKNYLAWYQQKPGQPPKLLIYWASTRESGVPDRFSGSGSGTDFTLTISSLQAEDVAVYYCQQYYSTPRRTFGQGTKVEIK

SEQ ID NO: 9328 - protein, 107 aa, Artificial Sequence
  Synthetic construct
EIVMTQSPATLSVSPGERATLSCRASQSVSSNLAWYQQKPGQAPRLLIYGASTRATGIPARFSGSGSGTEFTLTISSLQSEDFAVYYCQQYNNWLYTFGQGTKLEIK

SEQ ID NO: 9329 - protein, 113 aa, Artificial Sequence; identical to SEQ ID NO: 9079
  Synthetic construct

SEQ ID NO: 9330 - protein, 110 aa, Artificial Sequence
  Synthetic construct
NFVLTQPHSVSESPGKTVTISCTRSSGSIASNYVQWYQQRPGSAPTTVISEDHQRPSGVPDRFSGSIDSSSNSASLTISGLKTEDEADYYCQSYENNIVVFGGGTKLTVL

SEQ ID NO: 9331 - protein, 108 aa, Artificial Sequence
  Synthetic construct
EIVLTQSPGTLSLSPGERVTLSCRASQSLSSSYLAWYQQKPGQVPRLLIYDASSRATGIPDRFSGSGSGTDFTLTISRLEPEDFAVYYCQQLGGSPYTFGQGTKLEIK

SEQ ID NO: 9332 - protein, 107 aa, Artificial Sequence
  Synthetic construct
VIWMTQSPSLLSASTGDRVTISCRMSQGISSYLAWYQQKPGKAPELLIYAASTLQSGVPSRFSGSGSGTDFTLTISCLQSEDFATYYCQQYYSFPLTFGGGTKVEIK

SEQ ID NO: 9333 - protein, 108 aa, Artificial Sequence
  Synthetic construct
SSELTQDPAVSVALGQTVRITCQGDSLRSYYASWYQQKPGQAPVLVIYGKNNRPSGIPDRFSGSSSGNTASLTITGAQAEDEADYYCNSRDSSGNHWVFGGGTKLTVL

SEQ ID NO: 9334 - protein, 110 aa, Artificial Sequence
  Synthetic construct
QSVLTQPPSASGTPGQRVTISCSGSSSNIGSNTVNWYQQLPGTAPKLLIYSNNQRPSGVPDRFSGSKSGTSASLAISGLQSEDEADYYCAAWDDSLNGWVFGGGTKLTVL

SEQ ID NO: 9335 - protein, 107 aa, Artificial Sequence
  Synthetic construct
DIQLTQSPSFLSASVGDRVTITCRASQGISSYLAWYQQKPGKAPKLLIYAASTLQSGVPSRFSGSGSGTEFTLTISSLQPEDFATYYCQQLNSYPFTFGPGTKVDIK

SEQ ID NO: 9336 - protein, 107 aa, Artificial Sequence
  Synthetic construct
EIVMTQSPATLSVSPGDGATLSCRASQSIANNLAWYQQKPGQAPRLLIKDISIRATDVPARFSGSGSGTEFTLTISSLQSEDFAVYYCQQFNDWPITFGQGTRLEIK

SEQ ID NO: 9337 - protein, 108 aa, Artificial Sequence; identical to SEQ ID NO: 8207
  Synthetic construct

SEQ ID NO: 9338 - protein, 107 aa, Artificial Sequence
  Synthetic construct
DIQMTQSPSSVSASVGDRVTITCRASQGISSWLAWYQQKPGKAPKLLIYAASSLQSGVPSRFSGSGSGTDFTLTISSLQPEDFATYYCQQANSFPITFGQGTRLEIK

SEQ ID NO: 9339 - protein, 112 aa, Artificial Sequence
  Synthetic construct
DIVLTQTPLSSPVTLGQPASISCKSSQSVVHSDGNTYLSWLHQRPGQPPRLLIYQISNRFSGVPDRFSGSGAGTDFTLKISRVEAEDVGVYYCTQATQLPYTFGQGTKLEIK

SEQ ID NO: 9340 - protein, 112 aa, Artificial Sequence
  Synthetic construct
DIVMTQSPLSLPVTPGEPASISCRSSQSLLHSNGYNYLAWYLQKPGQSPQLLIYLGSNRASGVPDRFSGSGSGTDFTLKISRVEAEDVGVYYCMQALQTPLTFGGGTKVEIK

SEQ ID NO: 9341 - protein, 107 aa, Artificial Sequence
  Synthetic construct
DIQMTQSPSSVSASVGDRVTITCRASQGISIWLAWYQQKPREAPKLLIYAASSLQSGVPSRFSGSGSGTEFSLTISSLQPEDFATYYCQQGNSFPVTFGGGTKVEIK

SEQ ID NO: 9342 - protein, 113 aa, Artificial Sequence; identical to SEQ ID NO: 8661
  Synthetic construct

SEQ ID NO: 9343 - protein, 113 aa, Artificial Sequence; identical to SEQ ID NO: 8825
  Synthetic construct

SEQ ID NO: 9344 - protein, 107 aa, Artificial Sequence; identical to SEQ ID NO: 8513
  Synthetic construct

SEQ ID NO: 9345 - protein, 110 aa, Artificial Sequence; identical to SEQ ID NO: 8171
  Synthetic construct

SEQ ID NO: 9346 - protein, 108 aa, Artificial Sequence
  Synthetic construct
EIVLTQSPGTLSLSPGERATLSCRTSQSVSSNYFSWYQQKAGQAPRLLIFGASSRATGIPDRFSGSGSGTDFTLTISRLEPEDFAVYFCQQYGNSSFTFGQGTKLEIK

SEQ ID NO: 9347 - protein, 107 aa, Artificial Sequence
  Synthetic construct
DIQMTQSPSSLSASVGDRVTITCRASQRISSYLNWYQQRPGKAPQLLIYAASNLQDGVPSRFSGSGSGTDFTLTIRSLQPEDFATYHCQQSYNSPHTFGQGTKLEIK

SEQ ID NO: 9348 - protein, 107 aa, Artificial Sequence; identical to SEQ ID NO: 8065
  Synthetic construct

SEQ ID NO: 9349 - protein, 108 aa, Artificial Sequence; identical to SEQ ID NO: 8561
  Synthetic construct

SEQ ID NO: 9350 - protein, 107 aa, Artificial Sequence; identical to SEQ ID NO: 8573
  Synthetic construct

SEQ ID NO: 9351 - protein, 106 aa, Artificial Sequence
  Synthetic construct
SYELTQPPSVSVSPGQTASIPCSGSELRNRYTCWYQKKPGQSPLMIIYQDSRRPSGIPERFSGSSSGTTATLTISGTQAIDEADYYCQAWDSGTALFGGGTKLTVL

SEQ ID NO: 9352 - protein, 111 aa, Artificial Sequence
  Synthetic construct
QSVLTQPPSASGTPGQRVTISCSGSTSNIGSNYVYWYQQLPGTAPKLLIYRNNQRPSGVPDRFSGSKSGTSASLAISGLRSEDEADYYCAAWDDSLRGNYVFGTGTKVTVL

SEQ ID NO: 9353 - protein, 111 aa, Artificial Sequence
  Synthetic construct
QSALTQPPSASGSPGQSVTISCTGTSSDVGGYNYVSWYQQHPGKAPKLMIYEVSKRPSGVPDRFSGSKSGNTASLTVSGLQAEDEADYYCSSYAGSNNFVVFGGGTKLTVL

SEQ ID NO: 9354 - protein, 112 aa, Artificial Sequence
  Synthetic construct
QSALTQPASVSGSPGQSITISCTGTSSDVGSYNLVSWYQQHPGKAPKLMIYEVSKRPSGVSNRFSGSKSGNTASLTISGLQAEDEADYYCCSYAGSSTPDYVFGTGTKVTVL

SEQ ID NO: 9355 - protein, 109 aa, Artificial Sequence
  Synthetic construct
EIVLTQSPGTLSLSPGESATLSCRASQSVNNYLAWYQQKPGQAPRLLIYDASNRATGIPARFSGSGSGTDFTLTISSLEPEDFAVYYCQQRSNWPPSLTFGGGTRVEIK

SEQ ID NO: 9356 - protein, 112 aa, Artificial Sequence
  Synthetic construct
DVVMTQSPLSLPVTLGQPASISCRSSQSLVHSDGNTYLNWFHQRPGQSPRRLIYKVSNRDSGVPDRFSGSGSGTDFTLKISRVEAEDVGIYYCMQSTHLRYTFGQGTKLEIK

SEQ ID NO: 9357 - protein, 110 aa, Artificial Sequence; identical to SEQ ID NO: 8924
  Synthetic construct

SEQ ID NO: 9358 - protein, 107 aa, Artificial Sequence
  Synthetic construct
SYELTQPSSVSVSPGQTVTITCSGDLLAKRYGRWFQQKPGQAPTLIIYKDNERPSGIPERFSGSSSGTTVTLTITGAQVEDAADYYCYSAADDRLAVFGGGTKVTVL

SEQ ID NO: 9359 - protein, 107 aa, Artificial Sequence; identical to SEQ ID NO: 8065
  Synthetic construct

SEQ ID NO: 9360 - protein, 108 aa, Artificial Sequence
  Synthetic construct
EIVLTQSPATLSLSPGERATLSCRASQSVSSYLAWYQQKPGQAPRLLIYDASNRATGIPARFSGSGSGTDFTLTISSLEPEDFAVYYCQQRSNWPLFTFGPGTKVDIK

SEQ ID NO: 9361 - protein, 107 aa, Artificial Sequence
  Synthetic construct
EIVMTQSPATLSVSPGERATLSCRASQSVSSNLAWYQQKPGQAPRLLIYGASTRATGIPARFSGSGSGTEFTLTISSLQSEDFAVYYCQQYNNWPRTFGGGTKVEIK

SEQ ID NO: 9362 - protein, 111 aa, Artificial Sequence
  Synthetic construct
DIVMTQSPLSLPVTPGEPASISCRSSQSLLHSNGYNYLDWYLQKPGQSPQLLIYLGSNRASGVPDRFSGSGSGTDFTLKISRVEAEDVGVYYCMQALQTFTFGPGTKVDIK

SEQ ID NO: 9363 - protein, 106 aa, Artificial Sequence
  Synthetic construct
DIQMTQSPSSLSASVGDRVTITCRASQSISSYLNWYQQKPGKAPKLLIYAASSLQSGVPSRFSGSGSGTDFTLTISSLQPEDFATYYCQQSYSTPTFGQGTRLEIK

SEQ ID NO: 9364 - protein, 108 aa, Artificial Sequence
  Synthetic construct
SYVLTQSPSMSAAPGETASILCGGNNIGNKNVHWYQQKPGQAPVLVVSYNRVRPSGIPERFSGSNSGSTATLTISRVEAGDEADYYCQVWDSRNDHVIFGGGTKLTVL

SEQ ID NO: 9365 - protein, 107 aa, Artificial Sequence
  Synthetic construct
VIWMTQSPSLLSASTGDRVTISCRMSQGISSYLAWYQQKPGKAPELLIYAASTLQSGVPSRFSGSGSGTDFILTISCLQSEDFATYYCQQYYSFPYTFGQGTKLEIK

SEQ ID NO: 9366 - protein, 107 aa, Artificial Sequence; identical to SEQ ID NO: 8804
  Synthetic construct

SEQ ID NO: 9367 - protein, 107 aa, Artificial Sequence
  Synthetic construct
DIQMTQFPSSVSASVGDRVTITCRAARDVDKNLVWYQQKPGKAPQLLIYAASTLQSGVPSRFSGSGAGTEFTLTISSLQFEDFATYYCQQADTFPPTFGPGTRVAIK

SEQ ID NO: 9368 - protein, 110 aa, Artificial Sequence
  Synthetic construct
QSALTQPASVSGSPGQSITISCTGTSSDVGGYNYVSWYQQHPGKAPKLMIYDVSKRPSGVSNRFSGSKSGNTASLTISGLQAEDEADYYCSSYTSSSTFEFGGGTKLTVL

SEQ ID NO: 9369 - protein, 108 aa, Artificial Sequence
  Synthetic construct
EIVMTQSPATLSVSPGERATLSCRASQSVRTTLAWYQQKPGQAPRLLIYGASTRATGIPARFSASGSGTEFSLTISSLQSEDFAVYYCQHYSNWPPWTFGQGTKVEFK

SEQ ID NO: 9370 - protein, 110 aa, Artificial Sequence
  Synthetic construct
QSVLTQPPSVSAAPGQKVTISCSGSSSNIGNNYVSWYQQLPGTAPKLLIYDNNKRPSGIPDRFSGSKSGTSATLGITGLQTGDEADYYCGTWDSSLRDVVFGGGTKLTVL

SEQ ID NO: 9371 - protein, 107 aa, Artificial Sequence; identical to SEQ ID NO: 8304
  Synthetic construct

SEQ ID NO: 9372 - protein, 107 aa, Artificial Sequence; identical to SEQ ID NO: 8176
  Synthetic construct

SEQ ID NO: 9373 - protein, 107 aa, Artificial Sequence; identical to SEQ ID NO: 8110
  Synthetic construct

SEQ ID NO: 9374 - protein, 111 aa, Artificial Sequence
  Synthetic construct
QSALTQPASVSGSPGQSITISCTGTSSDVGSYNLVSWYQQHPGKAPKLMIYEGSKRPSGVSNRFSGSKSGNTASLTISGLQAEDEADYYCCSYAGSSTYVVFGGGTKLTVL

SEQ ID NO: 9375 - protein, 105 aa, Artificial Sequence; identical to SEQ ID NO: 8339
  Synthetic construct

SEQ ID NO: 9376 - protein, 107 aa, Artificial Sequence
  Synthetic construct
EIVLTQSPDFQSVTPKEKVTITCRASQSIGSSLHWYQQKPDQSPKLLIKYASQSISGVPSRFSGSGSGTDFTLTINSLEAEDAATYYCHQSSSLGYTFGQGTKLEIK

SEQ ID NO: 9377 - protein, 108 aa, Artificial Sequence; identical to SEQ ID NO: 9035
  Synthetic construct

SEQ ID NO: 9378 - protein, 109 aa, Artificial Sequence
  Synthetic construct
QTVVTQEPSVTVSPGGTVTLTCASSTGAVTSGHHPNWFQWKPGQAPRALLYSTNLRHSWTPARFSGSLLGDKAALTLSDVQPEDEADYYCLLSYDDVRVFGGGTKLAVL

SEQ ID NO: 9379 - protein, 108 aa, Artificial Sequence; identical to SEQ ID NO: 8402
  Synthetic construct

SEQ ID NO: 9380 - protein, 106 aa, Artificial Sequence
  Synthetic construct
SYELIQPPSVSVSPGQTATITCSADKLGDKYASWYQQQPGQSPVLVIYQDSRRPSGIPERFSGSNSGNTATLTISGTQAMDEADYYCQTWGSTTVVFGAGTKLTVL

SEQ ID NO: 9381 - protein, 107 aa, Artificial Sequence; identical to SEQ ID NO: 62
  Synthetic construct

SEQ ID NO: 9382 - protein, 107 aa, Artificial Sequence
  Synthetic construct
DIQMTQSPSSLSASVGDRVTITCRASQGINNYLNWYQQKPGKAPNLLIYTASTLQSGVPSRFSGSGSGTDFTLTISSLQPEDFATYYCQQSSSDPPTFGQGTRLEIK

SEQ ID NO: 9383 - protein, 107 aa, Artificial Sequence; identical to SEQ ID NO: 8370
  Synthetic construct

SEQ ID NO: 9384 - protein, 110 aa, Artificial Sequence
  Synthetic construct
QSALTQPASVSGSAGQSITIFCTGTSSDVGNYYLVSWYQQYPGKAPKLIIYEDGERPSGVSDRFSGSKSASTAFLTISGLQPEDEATYYCCSYGRTVTFVLGGGTKVTVL

SEQ ID NO: 9385 - protein, 108 aa, Artificial Sequence
  Synthetic construct
EIVMTQSPATLFVSPGERATLSCRASQSVSSNLAWYQQKAGQAPRLLIYGASTRATGIPARFSGSGSGTEFTLTISSLQSEDFAVYYCQQYNNWPPWTFGQGTKVEIK

SEQ ID NO: 9386 - protein, 112 aa, Artificial Sequence
  Synthetic construct
QLVLTQSPSASASLGASVKLTCTLSSGHSSYAIAWHQQQPEKGPRYLMKLNSDGSHSKGDGIPDRFSGSSSGAERYLTISSLQSEDEADYYCQTWGTGIHVVFGGGTKLTVL

SEQ ID NO: 9387 - protein, 107 aa, Artificial Sequence
  Synthetic construct
EIVLTQSPGTLSLSPGERATLSCRASQSVSSSYLAWYQQKPGQAPRLLIYGASSRATGIPDRFSGSGSGTDFTLTISRLEPEDFAVYYCQQYGSSYTFGQGTKLEIK

SEQ ID NO: 9388 - protein, 107 aa, Artificial Sequence
  Synthetic construct
EIVLTQSPGTLSLSPGERATLSCRTSQSVSSYLAWYQQKPGQAPRLLIYDATIRATGIPARFSGSGSGTDFTLTVSSLEPEDFAVYYCQQRSDWPLTFGGGTKVEIK

SEQ ID NO: 9389 - protein, 110 aa, Artificial Sequence; identical to SEQ ID NO: 8995
  Synthetic construct

SEQ ID NO: 9390 - protein, 111 aa, Artificial Sequence; identical to SEQ ID NO: 9285
  Synthetic construct

SEQ ID NO: 9391 - protein, 107 aa, Artificial Sequence
  Synthetic construct
EIVLTQSPATLSLSPGERATLSCRASQSVSSYLAWYQQKPGQAPRLLIYDASNRATGIPARFSGSGSGTDFTLTISSLEPEDFAVYYCQQRSNWPGTFGQGTRLEIK

SEQ ID NO: 9392 - protein, 107 aa, Artificial Sequence; identical to SEQ ID NO: 8658
  Synthetic construct

SEQ ID NO: 9393 - protein, 110 aa, Artificial Sequence
  Synthetic construct
QSALTQPRSVSGSPGQSVTISCTGTSSDVGGYNYVSWYQQHPGKAPKLMIYDVSKRPSGVPDRFSGSKSGNTASLTISGLQAEDEADYYCCSYAGSYTFVFGTGTKVTVL

SEQ ID NO: 9394 - protein, 103 aa, Artificial Sequence
  Synthetic construct
EIVLTQSPGTLSLSPGERATLSCRASQSVSSSYLAWYQQKPGQAPRLLIYGASSRATGIPDRFSGSGSGTDFTLTISRLEPEDFAVYYCQARTFGQGTKLEIK

SEQ ID NO: 9395 - protein, 108 aa, Artificial Sequence
  Synthetic construct
DIQMTQSPSSLSASVGDRVTITCRASQSIGSYLNWYQQKPGKAPKLLIYAASTLHSGVPSRFSGSGSGTDFTLTIRSLQPEDFADYYCQQSFSTAIVTFGPGTKVDIK

SEQ ID NO: 9396 - protein, 110 aa, Artificial Sequence
  Synthetic construct
QSVLTQPPSASGTPGQRVTISCSGSTSNIGTNTVNWYQQLPGTAPKLLIYTNNQRPSGVPDRFSGSKSGTSASLAISGLQSEDEADYHCSAWDDSLSGWVFGGGTKVTVL

SEQ ID NO: 9397 - protein, 113 aa, Artificial Sequence; identical to SEQ ID NO: 8276
  Synthetic construct

SEQ ID NO: 9398 - protein, 106 aa, Artificial Sequence; identical to SEQ ID NO: 8291
  Synthetic construct

SEQ ID NO: 9399 - protein, 108 aa, Artificial Sequence
  Synthetic construct
SSELTQDPAVSVALGQTVRITCQGDSLRTYFASWYQQKPGQAPVLVIFAKNNRPSGIPDRFSGSSSGNTASLTITGAQAEDEADYHCHSRDSSGNPWVFGGGTKLTVL

SEQ ID NO: 9400 - protein, 111 aa, Artificial Sequence
  Synthetic construct
QSVLTQPPSVSGAPGQRVTISCTGSSSNIGAGYDVHWYQQLPGTAPKLLIFGNTNRPSGVPDRFSGSKSGTSASLAITGLQAEDEADYYCQSYDTSLSGSVFGGGTKLTVL

SEQ ID NO: 9401 - protein, 110 aa, Artificial Sequence
  Synthetic construct
QSALTQPPSASGSPGQSVTISCTGTSSDIGGYNFVSWYQQHPGKVPKLMIYEVNKRPSGVPDRFSGSKSGNTASLTVSGLHPEDEADYYCSSLAGSNNYVFGTGTKVTVL

SEQ ID NO: 9402 - protein, 112 aa, Artificial Sequence
  Synthetic construct
NIVVTQSPLSLPVTPGEPASISCRSSQSLHSNEHNYLDWYRQRPGQSPQLLIFWASNRASGVPDRISGTGSGTDFTLKISRVEAEDVGVYYCVQTLQAPPYTFGRGTRLEIR

SEQ ID NO: 9403 - protein, 109 aa, Artificial Sequence
  Synthetic construct
EIVLTQSPGTLSLSPGERATLSCRASQSVSSSYLAWYQQKPGQAPRLLIYGASSRATGIPDRFSGSGSGTDFTLIISRLEPEDFAVYYCQQYGSSPPLTFGGGTKVEIK

SEQ ID NO: 9404 - protein, 113 aa, Artificial Sequence
  Synthetic construct
DIVMTQSPDSLAVSLGERATINCKSSQSLLYYSNSKNYLAWYQQKPGQPPKLLISWASTRESGVPDRFSGSGSGTDFTLTIASLQPEDVAIYFCQQSYGVPPTFGQGTNVEVK

SEQ ID NO: 9405 - protein, 109 aa, Artificial Sequence
  Synthetic construct
SYVLTQPPSVSVAPGKTARITCGGNNIGDRSVHWYQQKPGQAPVLVIYYDKDRPSGIPERFSGSISGNTATLTISRVEAGDEADYYCQVRDSTSGRPYVFGSGTKVTVL

SEQ ID NO: 9406 - protein, 107 aa, Artificial Sequence; identical to SEQ ID NO: 8282
  Synthetic construct

SEQ ID NO: 9407 - protein, 109 aa, Artificial Sequence
  Synthetic construct
QSALTQPASVSGSPGQSITISCTGTSSDVGGYNYVSWYQQHPGKAPKLMIYDVSNRPSGVSNRFSGSKSGNTASLTISGLQAEDEADYYCSSYTSSSRVFGGGTKLTVL

SEQ ID NO: 9408 - protein, 107 aa, Artificial Sequence
  Synthetic construct
DIQMTQSPSSLSASVGDRVTITCRASQSISSHLNWYQLKPGKAPILVIYAASNLQGGVPSRFSGSGYGTDFTLTISSLQPEDFATYFCQQSYTTPRTFGQGTKVDLK

SEQ ID NO: 9409 - protein, 110 aa, Artificial Sequence
  Synthetic construct
QSVLTQPPSASGTPGQRVTISCSGSSSNIGNNLVSWYQQLPGTAPKLLFYRNNQRPSGVPDRFSGSKSGTSASLAISGLRSEDEADYYCAAWDDSLSGVVFGGGTKLTVL

SEQ ID NO: 9410 - protein, 105 aa, Artificial Sequence; identical to SEQ ID NO: 8339
  Synthetic construct

SEQ ID NO: 9411 - protein, 105 aa, Artificial Sequence; identical to SEQ ID NO: 8339
  Synthetic construct

SEQ ID NO: 9412 - protein, 107 aa, Artificial Sequence
  Synthetic construct
EVVLTQSPATLSLSPGERATLSCRASQNVNNYLGWYQQTPGQAPRLLIYDTSNRATGTPPRFSGSGSGTDFTLTISSLEPEDFAVYFCQQRSRWPGTFGQGTRVEVK

SEQ ID NO: 9413 - protein, 106 aa, Artificial Sequence
  Synthetic construct
SYELTQPPSVSVSLGRTVTITCSGDKLGDKYVSWYQQKPGQSPVLVIYQDNKRPSGIPERFSGSNSGNTATLTISGTQALDEADYYCQAWGSSTVIFGGGTKLTVL

SEQ ID NO: 9414 - protein, 108 aa, Artificial Sequence
  Synthetic construct
EIVLTQSPGTLSLSPGERATFSCRASQSVSSSRLVWYQQKPGQAPRLLIYDASNRATGIPDRFSGSGSGTDFTLTINRLEPEDFAVYYCQQYGSSPYTFGPGTKVDVK

SEQ ID NO: 9415 - protein, 107 aa, Artificial Sequence; identical to SEQ ID NO: 8397
  Synthetic construct

SEQ ID NO: 9416 - protein, 107 aa, Artificial Sequence
  Synthetic construct
DIQMTQSPSSVSASVGDRVTITCRASQDIRNWLAWYQQKPGKVPQLLIHGASSLQTGVPSRFSGSGSGTDFTLTISSLQPEDFATYYCQQANSFPITFGQGTKLEIK

SEQ ID NO: 9417 - protein, 113 aa, Artificial Sequence
  Synthetic construct
DIVMTQSPDSLAVSLGERATINCKSSQSVLYSSNNKNYLAWYQQRPGQPPKLLIYWASTRESGVPDRFSGSGSGTDFTLTISSLQAEDVAVYYCQQYYNTPFTFGPGTKVDIK

SEQ ID NO: 9418 - protein, 112 aa, Artificial Sequence
  Synthetic construct
QSALTQPASVSGSPGQSITISCTGTSSDVGNYKHFSWYQEHPGKAPKLIIYDVTSRPSGVSDRFSGSKSGNTASLTISGLQAEDEADYYCSSYTSSSTLEVVFGGGTKLTVL

SEQ ID NO: 9419 - protein, 107 aa, Artificial Sequence
  Synthetic construct
AIRITQSPSSLSASTGDRVTITCRASQGISSYLAWYQQKPGKAPKLLIYAASTLQSGVPSRFSGSGSGTDFTLTISCLQSEDFATYYCQQYYSYPQTFGQGTKLEIK

SEQ ID NO: 9420 - protein, 109 aa, Artificial Sequence
  Synthetic construct
AIQLTQSPSSLSASVGDRVTITCRASQGISSYLAWYQQKPGKAPKLLIYAASTLQSGVPSRFSGSGSGTDFTLTISSLQPEDFATYYCQQLNSYPPALTFGGGTKVEIK

SEQ ID NO: 9421 - protein, 107 aa, Artificial Sequence
  Synthetic construct
EIVMTQSPATLSVSPGERATLSCRASQSVSSNLAWYQQKPGQAPRLLIYGASTRATGIPARFSGSGSGTEFTLTISSLQSEDFAVYYCQQYNNWFATFGGGTKVEIK

SEQ ID NO: 9422 - protein, 107 aa, Artificial Sequence
  Synthetic construct
DIQMTQSPSSLSASVGDRVTITCRASQGISNYLAWYQQKPGKVPKLLIYAASTLQSGVPSRFSGSGSGTDFTLTISSLQPEDVATYYCQKYNSAPFTFGPGTKVDIK

SEQ ID NO: 9423 - protein, 109 aa, Artificial Sequence
  Synthetic construct
EIVLTQSPATLSLSPGERATLSCRASQSVSSYLAWYQQKPGQAPRLLIYDASNRATGIPARFSGSGSGTDFTLTISSLEPEDFAVYYCQQRSNWPPLYTFGQGTKLEIK

SEQ ID NO: 9424 - protein, 108 aa, Artificial Sequence
  Synthetic construct
DIQLTQSPSTLSASVGDRVTITCRASQRINSWLAWYQQKPGKAPKLLIYEASTLQDGVPSNFSGSVSGTEFTLTISSLQPDDFATYYCQQYNSYSPYTFGGGTKVEIK

SEQ ID NO: 9425 - protein, 112 aa, Artificial Sequence
  Synthetic construct
DIVMTQSPLSLPVTPGEPASISCRSSQSLLHSNGYNYLDWYLQKPGQSPQLLIYLGSNRASGVPDRFSGSGSGTDFTLKISRVEAEDVGVYYCMQALQTPITFGQGTRLEIK

SEQ ID NO: 9426 - protein, 111 aa, Artificial Sequence
  Synthetic construct
QSALTQPPSASGSPGQSVTISCTGTSSDVGGYNYVSWYQQHPGKGPKLMIFEVNKRPSGVPDRFSGSKSGNTASLTVSGLQADDEADYYCSSYAGSNTLVVFGGGTKLTVL

SEQ ID NO: 9427 - protein, 107 aa, Artificial Sequence
  Synthetic construct
DIQMTQSPSAMSASVGDRVTITCRASQGISNYLVWFQQKPGKVPKRLIYAASGLQGGVPSRFSGSGSGTEFTLTISSLQPEDFATYYCLQHNTYPYTFGQGTKLEIK

SEQ ID NO: 9428 - protein, 112 aa, Artificial Sequence
  Synthetic construct
QLVLTQSPSASASLGASVKLTCTLSSGHSSYAIAWHQQQPEKGPRYLMKLNSDGSHSKGDGIPDRFSGSSSGAERYLTISSLQSEDEADYYCQTWGTGINWVFGGGTKLTVL

SEQ ID NO: 9429 - protein, 110 aa, Artificial Sequence; identical to SEQ ID NO: 8950
  Synthetic construct

SEQ ID NO: 9430 - protein, 110 aa, Artificial Sequence; identical to SEQ ID NO: 9315
  Synthetic construct

SEQ ID NO: 9431 - protein, 110 aa, Artificial Sequence
  Synthetic construct
QSVLTQPPSASGTPGQRVTISCSGSSSNIGSNTITWYQQLPGTAPKLLIYSNNQRPSGVPDRFSGSKSGTSASLAISGLQSEDEADYYCATWDDSLNGWVFGGGTKLTVL

SEQ ID NO: 9432 - protein, 111 aa, Artificial Sequence
  Synthetic construct
DVVMTQSPLSLPVTLGQPASISCRSSRSLEHSDGTTYLNWFQQRPGQSPRRLIYKVSIRDSGVPDRFSGSGSGSDFRLEISRVEAEDVGTYYCMQGTHFLTFGGGTKVEIK

SEQ ID NO: 9433 - protein, 108 aa, Artificial Sequence
  Synthetic construct
EIVLTQSPGTLSLSPGERATLSCRASQSVSSSYLAWYQQKPGQAPRLLIYGASSRATGIPDRFSGSGSGTDFTLTISRLEPEDFAVYYCQQYGSSQYTFGQGTKLEIK

SEQ ID NO: 9434 - protein, 107 aa, Artificial Sequence
  Synthetic construct
DIQMTQSPSSLSASVGDRVTITCQASQDISNFLNWYQQKPGKAPKPLIYDASNLEAGVPSRFSGSGSGTHFAFTITSLQPEDIGIYFCQQYDNVPYTFGQGTRLEIK

SEQ ID NO: 9435 - protein, 113 aa, Artificial Sequence
  Synthetic construct
DIVMTQTPLSLPVTPGESASISCRSSQSLFDDSDGYTYVDWYLQKPGQSPQLLIYSLTYRASGVPDRFSGSGSGTDFTLKISRVEPEDVGIYYCMQRLEFPLTFGGGTRVEIK

SEQ ID NO: 9436 - protein, 111 aa, Artificial Sequence
  Synthetic construct
NFILTQPHSVSESPGKTVSISCTRSSGSIDSNYVHWYQQRPGGAPTTVISEDNRRPSGVPDRFSGSIDSSSNSASLTISGLKSEDEADYFCQSYDTSNLVVFGGGTHLTVL

SEQ ID NO: 9437 - protein, 110 aa, Artificial Sequence; identical to SEQ ID NO: 8924
  Synthetic construct

SEQ ID NO: 9438 - protein, 108 aa, Artificial Sequence
  Synthetic construct
SSELTQDPAVSVALGQTVRITCQGDSLRSYYASWYQQKPGQAPVLVIYGKNNRPSGIPDRFSGSSSGNTASLTITGAQAEDEADYYCNSRDSSGNLVVFGGGTKLTVL

SEQ ID NO: 9439 - protein, 108 aa, Artificial Sequence
  Synthetic construct
EIVLTQSPGTLSLSPGERATLSCRASQSVSSSYLAWYQQKSGQAPRLLIYGASSRATGIPDRFSGSGSGTDFTLTISRLEPEDFAVYFCQQYGSSVYTFGQGTKLDIK

SEQ ID NO: 9440 - protein, 107 aa, Artificial Sequence
  Synthetic construct
SSELTQDPAVSVALGQTVRITCQGDSLRSYYASWYQQKPGQAPVLVIYGKNNRPSGIPDRFSGSSSGNTASLTITGAQAEDEADYYCNSRDSSGSVVFGGGTKLTVL

SEQ ID NO: 9441 - protein, 109 aa, Artificial Sequence
  Synthetic construct
EIVLTQSPATLSLSPGERATLSCRASQSVSSYLAWYQQKPGQAPRLLIYDASNRATGIPARFSGSGSGTDFTLTISSLEPEDFAVYYCQQRSNWPPAYTFGQGTKLEIK

SEQ ID NO: 9442 - protein, 107 aa, Artificial Sequence
  Synthetic construct
EIVMTQSPATLSVSPGERATLSCRASQSVSSNLAWYQQKPGQAPRLLIYGASTRATGIPARFSGSGSGTEFTLTISSLQSEDFAVYYCQQYNNWPQTFGQGTKVESK

SEQ ID NO: 9443 - protein, 112 aa, Artificial Sequence
  Synthetic construct
QSVLTQPPSVSGAPGQRVTISCAGSSSNIGTGYDVHWYQQLPGTAPKLLIYANNKRPSGVPDRFSGSKSGASASLAITGLQAEDEATYYCQSYDISLSGFVVFGGGTKLTVL

SEQ ID NO: 9444 - protein, 107 aa, Artificial Sequence; identical to SEQ ID NO: 8746
  Synthetic construct

SEQ ID NO: 9445 - protein, 106 aa, Artificial Sequence
  Synthetic construct
SYELTQPPSVSVSPGQTASITCSGDKLGDKYACWYQQKPGQSPVLVIYQDSKRPSGIPERFSGSNSGNTATLTISGTQAMDEADYYCQAWDSSIVVFGGGTKLTVL

SEQ ID NO: 9446 - protein, 111 aa, Artificial Sequence
  Synthetic construct
QVVLTQSPSASASLGASVKLTCTLTSGHTSYAIAWHQQQPDKGPRYLMKVNSDGSHTKGDGIPDRFSGSSSGSERYLIISSLQSEDEADYYCQTWDTGTVLFGGGTKLTVV

SEQ ID NO: 9447 - protein, 108 aa, Artificial Sequence
  Synthetic construct
EIVLTQSPATLSLSPGERATLSCRASQSLTSDLAWYQQKPGQAPRLLIFDASNRATGIPARFSGGGSGTDFTLTISSLEPEDLAVYYCQQRTIWPPDTFGQGTKLEIK

SEQ ID NO: 9448 - protein, 106 aa, Artificial Sequence
  Synthetic construct
SYEVTQPPSVSVSPGQTARITCSGDKLGDKYTCWYQQKSGQSPVLVMYQDTKRPSGIPERFSASNSGNTATLTISGTQAMDEADYYCQAWDGSTGVFGGGTKLTVL

SEQ ID NO: 9449 - protein, 107 aa, Artificial Sequence; identical to SEQ ID NO: 8596
  Synthetic construct

SEQ ID NO: 9450 - protein, 107 aa, Artificial Sequence
  Synthetic construct
DIQLTQSPSFLSASVGDRLTITCRASQGVRSYLAWYQQRPGKAPKLLIYAASTLQSGVPSRFSGSGSGTDFTLTISSLQPEDFATYYCQQLNSYPVTFGPGTTVHIK

SEQ ID NO: 9451 - protein, 110 aa, Artificial Sequence
  Synthetic construct
QSVLTQPPSVSAAPGQKVTISCSGSSSNIGRNFVSWYRQVPGTAPRLIMYDNSLRPLEIPGRFSGSKSDTSATLAITGLQPGDEADYYCGTWDSSLNAYVFGTETRVTVL

SEQ ID NO: 9452 - protein, 107 aa, Artificial Sequence
  Synthetic construct
EIVLTQSPATLSLSPGERATLSCRASQSVSSYLAWYQQKPGQAPRLLIYDASNRATGIPARFSGSGSGTDFTLTISSLEPEDFAVYYCQRRSNWPFTFGPGTKVDIR

SEQ ID NO: 9453 - protein, 113 aa, Artificial Sequence
  Synthetic construct
DIVMTQSPLSLPVTPGEPASISCRSSQSLLHSNGYNYLDWYLQKPGQSPQLLIYLGSNRASGVPDRFSGSGSGTDFTLKISRVEAEDVGVYYCMQALQTPAWTFGQGTKVEIK

SEQ ID NO: 9454 - protein, 110 aa, Artificial Sequence
  Synthetic construct
QSVLTQPPSVSAAPGQKVTISCSGSSSNIGNNYVSWYQQLPGTAPKLLIYDNNKRPSGIPDRFSGSKSGTSATLGITGLQTGDEADYYCGTWDSSLSAVVFGGGTKLTVL

SEQ ID NO: 9455 - protein, 108 aa, Artificial Sequence
  Synthetic construct
EIVLTQSPGTLSLSPGERATLSCRASQSVSSSYLAWYQQKPGQAPRLLIYGASSRATGIPDRFSGSGSGTDFTLTISRLEPEDFAVYYCQQYGSSPQTFGGGTKVEIK

SEQ ID NO: 9456 - protein, 107 aa, Artificial Sequence
  Synthetic construct
DIQMTQSPSSLSASVGDRVTITCRASQSISRYLNWYQQRAGTAPKVLIYAASSLQSGVPSRFSGSGSGTDFTLTISSLQPEDFATYYCQQSSSTPYTFGQGTKLEIK

SEQ ID NO: 9457 - protein, 112 aa, Artificial Sequence
  Synthetic construct
DIVMTQTPLSLSVTPGQPASISCKSSQSLLHSDGKTYLYWYLQKPGQSPQLLIYEVSSRFSGVPDRFSGSGSGTDFTLKISRVEAEDVGVYYCMQGIHLPHTFGGGTKVEIK

SEQ ID NO: 9458 - protein, 111 aa, Artificial Sequence; identical to SEQ ID NO: 8610
  Synthetic construct

SEQ ID NO: 9459 - protein, 108 aa, Artificial Sequence
  Synthetic construct
EIVLTQSPATLSLSPGERATLSCRASQRVSRSYLAWYQQRPGQAPRLLIYGASSRATGIPDRFSGSGSGTDFTLSISRLEPEDFAVYYCQQYGNSPQTFGQGTKVEIK

SEQ ID NO: 9460 - protein, 110 aa, Artificial Sequence; identical to SEQ ID NO: 8226
  Synthetic construct

SEQ ID NO: 9461 - protein, 106 aa, Artificial Sequence
  Synthetic construct
SYDLIQPPSVSVFVGQTANIACSGDKLGDKYVCWYQQKSGQSPVLVMYSDTKRPSGIPERFSASTSGDTATLTIRETQTMDEADYFCQVWDSVTAIFGGGTQLTVL

SEQ ID NO: 9462 - protein, 105 aa, Artificial Sequence; identical to SEQ ID NO: 8339
  Synthetic construct

SEQ ID NO: 9463 - protein, 107 aa, Artificial Sequence
  Synthetic construct
EIVLTQSPATLSLSPGERATLSCRASQSVSSYLAWYQQKPGQAPRLLIYDASNRATGIPARFSGSGSGTDFTLTISSLEPEDFAVYYCQQRSNWPATFGGGTKVEIK

SEQ ID NO: 9464 - protein, 113 aa, Artificial Sequence
  Synthetic construct
DIVMTQSPDSLAVSLGERATINCKSSQSVLYSSNNKNYLAWYQQKPGQPPKLLIYWASTRESGVPDRFSGSGSGTDFTLTISSLQAEDVAVYYCQQYYSTPQTFGPGTKVDIK

SEQ ID NO: 9465 - protein, 108 aa, Artificial Sequence
  Synthetic construct
EIVLTQSPGTLSLSPGERVTLSCRASQSVGSTSLAWYQQRPGQAPRLLIYGASSRAPGIPDRFSGGGSGTDFTLTISRLEPEDVAVYYCQHYGSSPLTFGGGTKVEIK

SEQ ID NO: 9466 - protein, 106 aa, Artificial Sequence
  Synthetic construct
SYELTQPPSVSVSPGQTVSITCSGDKLGDKYAYWYQQKPGQSPVLVIYQDNRSPSGIPERFSGSNSGNTATLTISGTQALDEADYYCQAWDTNVAIFGGGTKLTVL

SEQ ID NO: 9467 - protein, 107 aa, Artificial Sequence; identical to SEQ ID NO: 8093
  Synthetic construct

SEQ ID NO: 9468 - protein, 106 aa, Artificial Sequence; identical to SEQ ID NO: 8291
  Synthetic construct

SEQ ID NO: 9469 - protein, 111 aa, Artificial Sequence
  Synthetic construct
QSALTQPASVSGSPGQSIAISCTGTTVYLGDYNYVSWYHQPPGKAPKLLIYEVTYRPSGISSRFSGSKSGNTASLTISGLQAEDEGDYYCSSYSSSSRLYVFGSGTKVTVL

SEQ ID NO: 9470 - protein, 107 aa, Artificial Sequence; identical to SEQ ID NO: 8267
  Synthetic construct

SEQ ID NO: 9471 - protein, 110 aa, Artificial Sequence
  Synthetic construct
QSALTQPASVSGSPGQSITISCTGTSGDVGGYDFVSWYQQYPGKAPKLVIYDVSKRPSGVSNHFSGSKSGNTASLTISGLQAEDEAEYYCSSFTSRASYVFGSGTKVTVL

SEQ ID NO: 9472 - protein, 112 aa, Artificial Sequence
  Synthetic construct
QSVLTQPPSASGTPGQRVTISCSGSRSNIGSNAVNWYQQLPGTAPKLLIFNNNQRPSGVPDRFSGSKSGTSASLDISGLQSEDEADYFCAAWDDSLNGPHSVFGTGTKVTVL

SEQ ID NO: 9473 - protein, 107 aa, Artificial Sequence
  Synthetic construct
DIQMTQSPSAISASVGDRVTIACRASQGINKYLAWIQQKPGKAPKRLIYTASNLQDGVPSRFSGSGSGTEFTLTISSLQPEDFGTYYCLQHDRYPPTFGQGTQVEIK

SEQ ID NO: 9474 - protein, 109 aa, Artificial Sequence
  Synthetic construct
QSVLTQPPSASGTPGQRVTISCSGSSSNIGSNYVYWYQQLPGTAPKLLIYRNNQRPSGVPDRFSGSKSGTSASLAISGLRSEDEADYYCAAWDDSLSVLFGGGTKLTVL

SEQ ID NO: 9475 - protein, 108 aa, Artificial Sequence
  Synthetic construct
EIVLTQSPGTLSLSPGERASLSCRASQSVNANYLAWYQRKPGQAPRLLIYDASTRATGIPDRFSGSGSGTDFTLTISRLETEDFAVYYCQQYGSSPPTFGQGTKVESK

SEQ ID NO: 9476 - protein, 110 aa, Artificial Sequence
  Synthetic construct
QSVLTQPPSMSAAPGQKVTISCSGSTSNIGNNYVSWFQQLPGTAPKLLIYDNSNRPSGIPDRFSGSKSGTSASLGITGLQTGDEADYYCSTWDSSLRAAVFGGGTQLTVL

SEQ ID NO: 9477 - protein, 112 aa, Artificial Sequence; identical to SEQ ID NO: 9425
  Synthetic construct

SEQ ID NO: 9478 - protein, 106 aa, Artificial Sequence
  Synthetic construct
EIVLTQSPATLSLSPGERATLSCRASQSVSSYLAWYQQKPGQAPRLLIYDASNRATGIPARFSGSGSGTDFTLTISSLEPEDFAVYYCQQRSNWWTFGQGTKVEIK

SEQ ID NO: 9479 - protein, 107 aa, Artificial Sequence
  Synthetic construct
DIQLTQSPSFLSASVGDRVTITCRASQGISSYLAWYQQKPGKAPKLLIYAASTLQSGVPSRFSGSGSGTEFTLTISSLQPEDFATYYCQQLNSYPLTFGGGTKVEIK

SEQ ID NO: 9480 - protein, 107 aa, Artificial Sequence; identical to SEQ ID NO: 8065
  Synthetic construct

SEQ ID NO: 9481 - protein, 108 aa, Artificial Sequence
  Synthetic construct
EIVLTQSPGTLSLSPGERATLSCRASQSIDNDYLAWYQQIPGQAPRLLIYGASSRAAGIPDRFSGSGSGTDFTLTINRLEPEDFAVYYCQQYGTSPRTFGQGSKVEIK

SEQ ID NO: 9482 - protein, 107 aa, Artificial Sequence
  Synthetic construct
AIQLTQSPSSLSASVGDRVTITCRASQGFSTYLAWYQQKPGKAPKLLIYGASTLQSGVPSRFSGSGSGTEFTLTISSLQPEDFATYYCQQLNVFPLTFGGGTKVEIK

SEQ ID NO: 9483 - protein, 112 aa, Artificial Sequence
  Synthetic construct
QSVLTQPPSVSGAPGQRVTISCTGTTSNIGAGYDVHWYQQLPGSAPKLLIYGDSNRPSGVPDRFSGSKSGTSASLAITGLQAEDEADYYCQSYDTNLSGFWVFGGGTKLTVL

SEQ ID NO: 9484 - protein, 107 aa, Artificial Sequence
  Synthetic construct
AIQLTQSPSSLSASVGDRVTITCRASQGIGSYLAWYQQRPGKAPKLLIYLAATLQSGVPSRFSGSGSGTDFTLTISSLQPEDFAIYYCQQLNIYPRTFGQGTKVEVK

SEQ ID NO: 9485 - protein, 112 aa, Artificial Sequence
  Synthetic construct
DVVMTQSPLSLPVTLGQPASISCRSSQSLVHSDGNTYLNWFQQRPGQSPRRLIYKVSNRDSGVPDRFSGSGSGTDFTLKISRVEAEDVGVYYCMQGTHWPITFGQGTRLEIK

SEQ ID NO: 9486 - protein, 112 aa, Artificial Sequence
  Synthetic construct
DIVMTQTPLSSPVTLGQPASISCRSSQSLVHSDGNTYLSWLQQRPGQPPRLLIYKISNRFSGVPDRFSGSGAGTDFTLKISRVEAEDVGVYYCTQATQFPRTFGQGTKLEIK

SEQ ID NO: 9487 - protein, 107 aa, Artificial Sequence
  Synthetic construct
DIQMTQSPSTLSASVGDRVTITCRASQSVSHWLAWYQQKPGKAPNLLIYKASNLITGVPSRFSGSESGTEFTLTISGLQPDDLATYYCQQYQIYPLTFGGGTRVEVK

SEQ ID NO: 9488 - protein, 108 aa, Artificial Sequence
  Synthetic construct
EIVMTQSPATLSVSPGERATLSCRASQSVSSNLAWYQQKPGQAPRLLIYGASTRATGIPARFSGSGSGTEFTLTISSLQSEDFAVYYCQQYNNWPRYTFGQGTKLEIK

SEQ ID NO: 9489 - protein, 106 aa, Artificial Sequence
  Synthetic construct
SYELTQPPSVSVSPGQTANIPCSGAELGDEYACWYQQKPGQSPVLVIFQDTKRPSGIPERFSGSNSGNTATLTISGTLPMDEADYYCQTWGTSGAVFGGGTKLTVL

SEQ ID NO: 9490 - protein, 111 aa, Artificial Sequence
  Synthetic construct
QSALTQPASVSGSPGQSITISCTGASSDVGSYNLVSWYQHHPGKAPKLMLYEVTKRPSGVSDRFFGSQSGNTASLTISGLQAEDEADYYCCSYAGRSVSWVFGGGTKLTVL

SEQ ID NO: 9491 - protein, 112 aa, Artificial Sequence
  Synthetic construct
DIVMTQSPDSLAVSLGERATINCKSSQSVLYSSNNKNYLAWYQQKPGQPPKLLIYWASTRESGVPDRFSGSGSGTDFTLTISSLQAEDVAVYYCQQYYSTRTFGQGTKVEIK

SEQ ID NO: 9492 - protein, 111 aa, Artificial Sequence; identical to SEQ ID NO: 8610
  Synthetic construct

SEQ ID NO: 9493 - protein, 107 aa, Artificial Sequence
  Synthetic construct
DIQLTQSPSSLSASVGDRVTLTCRTSQSVTKYLNWYQQKPGKAPKLLVSGASTLQSGVPSRFRGGGFDFVFTLTIDSLQPEDLATYYCQQSYVSPHTFGQGTKLEIK

SEQ ID NO: 9494 - protein, 111 aa, Artificial Sequence
  Synthetic construct
QSVLTQPPSVSGAPGQRVTISCTGSSSNIGATYDVHWYQQLPGTAPKLLMYGNSNRPSGVPDRFSGSKSGTSASLAITGLQTEDEADYYCQSYDRSLNCFVFGTGTRVTVL

SEQ ID NO: 9495 - protein, 110 aa, Artificial Sequence
  Synthetic construct
LSALTQPASVSGSPGQSITISCTGSTSDVGSYDLVSWYQQLPGEAPKLMIYDVNKRPSGVSNRFSGSKSGNTASLTISGLQAEDEADYYCCSYAGSRTVVFGGGTKLTVL

SEQ ID NO: 9496 - protein, 107 aa, Artificial Sequence
  Synthetic construct
DIQMTQSPSTLSASVGDRVTITCRASQSISSWLAWYQQKPGKAPKLLIYEASTLESGVPSRFSGSGSGTEFTLTISSLQPDDFATYYCQQYNSYSRTFGQGTKVEIK

SEQ ID NO: 9497 - protein, 109 aa, Artificial Sequence; identical to SEQ ID NO: 8507
  Synthetic construct

SEQ ID NO: 9498 - protein, 110 aa, Artificial Sequence
  Synthetic construct
QSVLSQPPSASGTPGQRVTISCSGSSSNIGSNTVNWYQQLPGTAPKLLIHSDSQRPSGVPDRFSGSKSGTSASLDISGLQSEDEADYYCAAWDDSLTGYFFGGGTKVTVL

SEQ ID NO: 9499 - protein, 111 aa, Artificial Sequence
  Synthetic construct
QSVVTQPPSVSGAPGQRVIISCTGSSSNIGAPYGVHWYQQLPGAAPKLLIFDTNNRPSGVPDRFSGSKSGTSASLAISGLQAEDEADYYCQTYDNSLSGYVFGTGTKVTVL

SEQ ID NO: 9500 - protein, 107 aa, Artificial Sequence; identical to SEQ ID NO: 8152
  Synthetic construct

SEQ ID NO: 9501 - protein, 106 aa, Artificial Sequence; identical to SEQ ID NO: 8291
  Synthetic construct

SEQ ID NO: 9502 - protein, 107 aa, Artificial Sequence
  Synthetic construct
DILMTQSPSSLSASVGDRVTITCRASQSISSYLNWYQQKPGKAPKLLIYAASSLQSGVPSRFSGSGSGTDFTLTISSLQPEDFATYYCQQSYITPRTFGPGTKVDIQ

SEQ ID NO: 9503 - protein, 110 aa, Artificial Sequence; identical to SEQ ID NO: 8450
  Synthetic construct

SEQ ID NO: 9504 - protein, 110 aa, Artificial Sequence; identical to SEQ ID NO: 8950
  Synthetic construct

SEQ ID NO: 9505 - protein, 113 aa, Artificial Sequence
  Synthetic construct
DIVMTQSPDSLAVSLGERATINCKSSQSVLLSSNNKNYLAWYQQKPGQPPKVLIYWASTRESGVPDRFSGSGSGTDFTLTVSSLQAEDVAVYYCQQYYNTPYTFGQGTKLEIR

SEQ ID NO: 9506 - protein, 110 aa, Artificial Sequence
  Synthetic construct
QSVLTQPPSASGTPGQRVTISCSGTSSNIGSNSVNWYQQFPGAAPKLLIYSNNQRPSGVPDRFSDSKSGTSASLAISGLQSEDEADYYCAVWDDSLHGPVFGGGTRLTVL

SEQ ID NO: 9507 - protein, 111 aa, Artificial Sequence
  Synthetic construct
QSALTQPRSVSGSPGQSVTISCTGTISDVGIYDYVSWYQQHPGKAPRLIIFDVFKRPSGVPDRFSGSKSANTASLTISGLRAEDEADYHCCSYAGSYTPWVFGGGTKLTVL

SEQ ID NO: 9508 - protein, 109 aa, Artificial Sequence
  Synthetic construct
EIVLTQSPGTLSLSPGERATLSCRASQSVSSSYLAWYQQKPGQAPRLLIYGASSRATGIPDRFSGSGSGTDFTLTISRLEPEDFAVYYCQQYGSSPPYTFGQGTKLEIK

SEQ ID NO: 9509 - protein, 111 aa, Artificial Sequence
  Synthetic construct
QSVLMQPPSVSGAPGQRVTISCTGSRSNIGAGYDVHWYQQFPGTAPKLLIYGNNNRPSGVPDRFSGSKSGTSVSLAITGLQAEDEADYFCQSYDNRLSAWVFGGGTKVTVL

SEQ ID NO: 9510 - protein, 110 aa, Artificial Sequence; identical to SEQ ID NO: 9066
  Synthetic construct

SEQ ID NO: 9511 - protein, 111 aa, Artificial Sequence
  Synthetic construct
QSVLTQPPSMSGAPGQRVTISCTGSSSNIGAGYDVHWYHQLPGKAPRLLIYGNTNRPSGVPDRFSGSKSGTSASLAITGLQAEDDGDYYCQSYDSSLRLRVFGGGTKLTVL

SEQ ID NO: 9512 - protein, 111 aa, Artificial Sequence
  Synthetic construct
QSALTQPASVSGSPGQSITISCTGTSSDVGSYNLVSWYQQHPGKAPKLMIYEGSKRPSGVSNRFSGSKSGNTASLTISGLQAEDEADYYCCSYAGSSTLVVFGGGTKLTVL

SEQ ID NO: 9513 - protein, 107 aa, Artificial Sequence
  Synthetic construct
EIVLTQSPATLSLSPGQRATLSCRASQSVGGYLAWYQQKPGQPPRLLIYDASNRAAGIPARFSGSGSGTDFTLIISSLEPEDFAVYYCQRRSNWPFTFGQGTRLEIK

SEQ ID NO: 9514 - protein, 108 aa, Artificial Sequence
  Synthetic construct
EIVLTQSPGTLSLSPGERATLSCRASQSVSGTYLAWYQHKPGQAPRLLIYGASSRATGIPDRFSGSGSGTDFTLTISRLEPEDFAVYYCEQYGSPPLTFGGGAKVEIK

SEQ ID NO: 9515 - protein, 111 aa, Artificial Sequence
  Synthetic construct
QSVLTQPPSVSAAPGQKVTISCSGSSSNIGNNYVSWYQQLPGTAPKLLIYDNNKRPSGIPDRFSGSKSGTSATLGITGLQTGDEADYYCGTWDSSLSAGRVFGGGTKLTVL

SEQ ID NO: 9516 - protein, 108 aa, Artificial Sequence
  Synthetic construct
QVVLTQSPVTLSLSPGERATLSCRASQSINGSYLAWYQQKPGLAPRLLIYGTSTRASGIPDRFSGSGTGTDFTLTISRLEPEDFAMYYCQQYLRSGITFGPGTKVDIQ

SEQ ID NO: 9517 - protein, 111 aa, Artificial Sequence
  Synthetic construct
QSALTQPASVSGSPGQSVTISCTGTSTDIGGYDYVSWYQQHPGKAPKLVIYDVTNRPSGVSDRFSGSKSGNTASLTISGLRAEDEADYHCSSYTTSTSYLLFGGGTKLTVL

SEQ ID NO: 9518 - protein, 112 aa, Artificial Sequence
  Synthetic construct
ETVMTQSPLSLPVTLGQPASISCRSSQSLVHSDGNTYLNWFHQRPGQSPRRLIYRVSNRDSGVPDRFSGSGSDTDFTLRISRVEAEDVGVYFCMQGTNWPRSFGGGTKVEIK

SEQ ID NO: 9519 - protein, 110 aa, Artificial Sequence
  Synthetic construct
QSALTQPASVSGSPGQAITIPCTGTSSDVGGYNYVSWYQQKPGRAPKLIIYDVSVRPSGISNRFSGSKSGNTASLTISGLQAEDEADYYCGAFTTSSTRVFGGGTMLTVL

SEQ ID NO: 9520 - protein, 106 aa, Artificial Sequence
  Synthetic construct
EIVLTQSPATLSLSPGERATLSCRASQSVRSYLAWYQQKPGQAPRLLIYDASNRATGIPARFSGSGSGTDFTLTISSLEPEDFAVYYCQQRSNRVTFGGGTKVELK

SEQ ID NO: 9521 - protein, 107 aa, Artificial Sequence
  Synthetic construct
DIQMTQSPSALSASVGDRVTITCRASQSISRWLAWYQQKPGKAPRLLISRSSTLEGGVPSRFSGSGSGTEFTLTISSLQPDDSATYYCQHYDSYSVTFGQGTKVEIK

SEQ ID NO: 9522 - protein, 106 aa, Artificial Sequence
  Synthetic construct
QSALTQPASVSGSPGQSITITCTGANSDFYYVSWYQQRPDKAPKLIIYDFRIRPSGISNRFSGAKSGNTASLIISGLQPEDEADYYCSSYLTSSPLFGGGTKLTVL

SEQ ID NO: 9523 - protein, 108 aa, Artificial Sequence
  Synthetic construct
SYELTQPPSVSVSPGQTASITCSGDKLGNKYVCWYQQKPGQSPLLVIYQDTMRPSGIPERFSGSNSGNTATLTISGTQAMDEADYYCQAWDTVTALYVFGTGTKVTVL

SEQ ID NO: 9524 - protein, 107 aa, Artificial Sequence
  Synthetic construct
DIQMTQSPSTLSASVGDRVTITCRASQSITSWLAWYQQKPGTAPKLLIYKASTLESGVPSRFSGSGSGTDFSLTISSLQPDDFATYYCQQYSSYSWTFGQGTKVEIK

SEQ ID NO: 9525 - protein, 109 aa, Artificial Sequence
  Synthetic construct
HSVLTQAPSASGTPGQRVTISCSGSNSNIGRSSVDWYQHLPGTAPKLLIHNSQRPSGIPDRFSASRSGTSASLAISGLQSEDEADYYCAAWDGSLNGLVFGGGTKLTVL

SEQ ID NO: 9526 - protein, 110 aa, Artificial Sequence
  Synthetic construct
QSVLTQPPSMSAAPGQTVAISCSGSSSNIGYNSVSWYQQFPDTAPQLLIYDNNKRPSGIPDRFSGSRSATSATLVIRDFQIGHEADYYCGTWDSNLKAMVFGGGTRLTVL

SEQ ID NO: 9527 - protein, 110 aa, Artificial Sequence; identical to SEQ ID NO: 8067
  Synthetic construct

SEQ ID NO: 9528 - protein, 107 aa, Artificial Sequence [sequence omitted]

SEQ ID NO: 9529 - protein, 110 aa, Artificial Sequence
  Synthetic construct
QSVLTQPPSASGTPGQRVTISCSGSSSNIGSNYVYWYQQLPGTAPKLLIYRNNQRPSGVPDRFSGSKSGTSASLAISGLRSEDEADYYCAAWDDSLSAVVFGGGTKLTVL

SEQ ID NO: 9530 - protein, 110 aa, Artificial Sequence; identical to SEQ ID NO: 8601
  Synthetic construct

SEQ ID NO: 9531 - protein, 109 aa, Artificial Sequence
  Synthetic construct
AIQLTQSPSSLSASVGDRVTITCRASQGISSYLAWYQQKPGKAPKLLIYAASTLQSGVPSRFSGSGSGTDFTLTISSLQPEDFATYYCQQLNSYPPGITFGPGTKVDIK

SEQ ID NO: 9532 - protein, 110 aa, Artificial Sequence; identical to SEQ ID NO: 9066
  Synthetic construct

SEQ ID NO: 9533 - protein, 110 aa, Artificial Sequence; identical to SEQ ID NO: 9284
  Synthetic construct

SEQ ID NO: 9534 - protein, 110 aa, Artificial Sequence
  Synthetic construct
QSVLTQPPSVSAAPGQKVTISCSGSSSNIGNNYVSWYQHLPGTAPKLLIYDNNKRPSGIPDRFSGSKSGTSATLGITGLQTGDEADYHCGTWDSSLSAVVFGGGTKLTVL

SEQ ID NO: 9535 - protein, 107 aa, Artificial Sequence
  Synthetic construct
DIQMTQSPSSLSASIGDRVTITCQASQDISNYLNWYQQKPGKAPKLLIYDASTLETGVPSRFSGRGSGTDFSFTISSLQPEDIATYYCQQYDNVLWTFGQGTKVEIK

SEQ ID NO: 9536 - protein, 113 aa, Artificial Sequence
  Synthetic construct
DIVVTQSPDSLAVSLGERATINCKSSQSVLYSSNNKNYLAWYQQNPGQPPKLLIYWASTRESGVPDRFSGSGSGTDFTLTISGLQAEDVAVYYCQQYYSAPPTFGQGTKVGIK

SEQ ID NO: 9537 - protein, 107 aa, Artificial Sequence
  Synthetic construct
EIVLTQSPVTLSLSPGERATLSCRASQSVSSYLAWYQQKPGQAPRLLIYDGSTRATGIPARFGGSGSGTDFTLTISSLEPEDFAVYYCQQRRLWPPSFGQGTKVEVR

SEQ ID NO: 9538 - protein, 110 aa, Artificial Sequence; identical to SEQ ID NO: 9334
  Synthetic construct

SEQ ID NO: 9539 - protein, 107 aa, Artificial Sequence
  Synthetic construct
EIVMTQSPATLSVSPGERATLSCRASQSVSSNLAWYQQKPGQAPRLLIYGASTRATGIPARFSGSGSGTEFTLTISSLQSEDFAVYYCQQYNNWPPTFGQGTKVEIK

SEQ ID NO: 9540 - protein, 112 aa, Artificial Sequence
  Synthetic construct
QSALTQPVSVSGSPGQSITISCTATSSDFGSYNFVSWYQQHPGKAPKLMIFDVSSRPSGVSNRFSGSKSGNTASLTISGLQAEDEADYYCSSYTSSSTLEVLFGGGTKLTVL

SEQ ID NO: 9541 - protein, 109 aa, Artificial Sequence; identical to SEQ ID NO: 63
  Synthetic construct

SEQ ID NO: 9542 - protein, 107 aa, Artificial Sequence
  Synthetic construct
AIQLTQSPSSLSASVGDRVTITCRASQVIGNYLAWYQQRPGKAPKLLIYLAATLQSGVPSRFSGSGSGTDFTLTISSLQPEDFAIYYCQQLNIYPRTFGQGTKVEVK

SEQ ID NO: 9543 - protein, 107 aa, Artificial Sequence; identical to SEQ ID NO: 8397
  Synthetic construct

SEQ ID NO: 9544 - protein, 107 aa, Artificial Sequence
  Synthetic construct
SSELTQDPAVSVALGQTVRITCQGDSLRSYYASWYQQKPGQAPVLVIYGKNNRPSGIPDRFSGSSSGNTASLTITGAQAEDEADYYCNSRDSSGNHVFGTGTKVTVL

SEQ ID NO: 9545 - protein, 111 aa, Artificial Sequence
  Synthetic construct
QPVLTQSSSASASLGSSVNLTCILSSGHSSYIIAWHQQQPGKAPRYLMNLLPSGRYNKGSGVPDRFSGSSSGADRYLTISNLQSEDEADYYCETWDSVNWVFGGGTKLAVL

SEQ ID NO: 9546 - protein, 111 aa, Artificial Sequence
  Synthetic construct
QSALTQPASVSGSPGQSITISCTGSSSDIGGYDYVSWYQQHSGEAPKLLIYHVNNRPSGVSSRFSGSKSGNTASLSISGLQAEDEADYYCSSYTSTSTYVLFGGGTKLTVL

SEQ ID NO: 9547 - protein, 109 aa, Artificial Sequence
  Synthetic construct
EIVLTQSPGTLSLSPGERATLSCRASQSVSSSYLAWYQQKPGQAPRLLIYGASSRATGIPDRFSGSGSGTDFTLTISRLEPEDFAVYYCQQFGTSPPLTFGGGTKVEIK

SEQ ID NO: 9548 - protein, 107 aa, Artificial Sequence; identical to SEQ ID NO: 8065
  Synthetic construct

SEQ ID NO: 9549 - protein, 108 aa, Artificial Sequence
  Synthetic construct
EIVLTQSPGTLSLSPGERATLSCRASQSVTRNYLAWYQQKPGQAPRLVIYDAFNRATGIPDRFSGSGSGTDFTLTISRLEPEDFAVYYCQQYAHSPQTFGQGTRLEIK

SEQ ID NO: 9550 - protein, 111 aa, Artificial Sequence
  Synthetic construct
QLVLTQSPSASASLGASVKLTCTLSSGHSSYAIAWHQQQPEKGPRYLMKLNSDGSHSKGDGIPDRFSGSSSGAERYLTISSLQSEDEADYYCQTWGTGIQVFGTGTKVTVL

SEQ ID NO: 9551 - protein, 107 aa, Artificial Sequence
  Synthetic construct
DIQMTQSPSSLSASVGDRVTITCRASQSISSYLNWYQQKPGKAPKLLIYAASSLQSGVPSRFSGSGSGTDFTLTISSLQPEDFATYYCQQSYSTLLTFGGGTKVEIK

SEQ ID NO: 9552 - protein, 107 aa, Artificial Sequence
  Synthetic construct
EIVMTQSPATLSVSPGERATLSCRASQSVSSNLAWYQQKPGQAPRLLIYGASTRATGIPARFSGSGSGTEFTLTISSLQSEDFAVYYCQQYNNWPPLFGQGTKLEIK

SEQ ID NO: 9553 - protein, 107 aa, Artificial Sequence; identical to SEQ ID NO: 8735
  Synthetic construct

SEQ ID NO: 9554 - protein, 107 aa, Artificial Sequence; identical to SEQ ID NO: 8573
  Synthetic construct

SEQ ID NO: 9555 - protein, 110 aa, Artificial Sequence
  Synthetic construct
QSVLTQPPSASGTPGQRVTISCSGRNSNIGSNPVNWYQQLPGAAPKVLIYSDKKRLSGVPERFSGSRFGSSASLAISGLQFDDEADYYCGAWDDNLNGYVLGPGTKVTVL

SEQ ID NO: 9556 - protein, 107 aa, Artificial Sequence
  Synthetic construct
DIQMTQSPSTLSASLGDRVTFTCRASQSISGWLAWYQQRPGKAPKLLIHKASTLESGVPSRFSGSGSGTDFTLTISSLQPDDFATYYCQQYNSYPFTFGPGTKVDIK

SEQ ID NO: 9557 - protein, 109 aa, Artificial Sequence
  Synthetic construct
EIVMTQSPATLSVSPGERATLSCRASQSVSSNLAWYQQKPGQAPRLLIYGASTRATGIPARVSGSGSGTEFTLTISSLQSEDFAVYYCQQYNNWPPAWTFGQGTKVEIK

SEQ ID NO: 9558 - protein, 106 aa, Artificial Sequence; identical to SEQ ID NO: 8100
  Synthetic construct

SEQ ID NO: 9559 - protein, 106 aa, Artificial Sequence
  Synthetic construct
DIQMTQSPSSLSASVGDRVTITCQASQDIDNSLNWYQQKPGKAPKLLIDDASKLQTGVPSRFSGSGSGTDFTFTISGLQPEDFATYYCQQYAHLPTFGGGTKVEVK

SEQ ID NO: 9560 - protein, 106 aa, Artificial Sequence
  Synthetic construct
DIVLTQSPDTLSLSPGERATLSCRASQSVGQHLAWYQHKSGQTPRLLIYDASKRATGIPARFRGSGSGTHFTLTIDSLESDDFAVYYCQQRSNMVSFGGGAEVERK

SEQ ID NO: 9561 - protein, 108 aa, Artificial Sequence
  Synthetic construct
EIVMTQSPATLSVSPGERVTLSCRASQSISNTLAWYQQKPGQAPRLLIYGASTRATGIPARFSGSGSGTEFTLTISSLQSEDFAVYYCHQYNKWPPITFGGGTKVEIK

SEQ ID NO: 9562 - protein, 112 aa, Artificial Sequence
  Synthetic construct
DVVMTQSPLSLPVTLGQPASISCRCSQSLVHSDGNTYLNWFQQRPGQSPRRLIYKVSNRDPGVPDRFSGSGSVTDFTLKISRVEAEDVGVYYCMQGTHWPLSFGQGTKVEIK

SEQ ID NO: 9563 - protein, 110 aa, Artificial Sequence
  Synthetic construct
QSVLTQPPSASGTPGQRVTISCSGSSSNIGSNTVNWYQQLPGTAPKLLIYGFNQRPSGVPDRFSGSKSGTSASLAISGLQSEDEADYYCAAWDDSLAAYVFGTGTKVTVL

SEQ ID NO: 9564 - protein, 110 aa, Artificial Sequence; identical to SEQ ID NO: 8280
  Synthetic construct

SEQ ID NO: 9565 - protein, 107 aa, Artificial Sequence
  Synthetic construct
EIVLTQSPATLSLSPGERATLSCRASQSVSRYLAWYQQKPGQAPRLLIYDASNRATGIPARFSGSGSGTDFTLTISSLEPEDFAVYYCQRRSNWPFTFGPGTKVDIK

SEQ ID NO: 9566 - protein, 110 aa, Artificial Sequence; identical to SEQ ID NO: 8431
  Synthetic construct

SEQ ID NO: 9567 - protein, 108 aa, Artificial Sequence; identical to SEQ ID NO: 8745
  Synthetic construct

SEQ ID NO: 9568 - protein, 109 aa, Artificial Sequence; identical to SEQ ID NO: 8306
  Synthetic construct

SEQ ID NO: 9569 - protein, 107 aa, Artificial Sequence
  Synthetic construct
EIVLTQSPDFQSVTPKEKVTITCRASQSIGSSLHWYQQKPDQSPKLLIKYASQSISGVPSRFSGSGSGTDFTLTINSLEAEDAATYYCHQSSSLPQTFGQGTKVEIK

SEQ ID NO: 9570 - protein, 110 aa, Artificial Sequence
  Synthetic construct
QSVLTQPPSASGTPGQRVTISCSGGRSNIGGNYVYWFQQLPGTAPKLLIYTNNQRPSGVPDRFSGSKSDTAASLAISGLRSEDEADYYCVSWDDSLTAVVFGGGTKLTVL

SEQ ID NO: 9571 - protein, 110 aa, Artificial Sequence
  Synthetic construct
QTVVTQEPSFSVSPGGTVTLTCGLNSGSVSTTYYPSWYQQTPGQTPRTLIYSTNTRSSGVPDRFSGSILGNKAALTITGAQTDDESDYYCVLYMGSGISVFGGGTKLTVL

SEQ ID NO: 9572 - protein, 109 aa, Artificial Sequence
  Synthetic construct
QTVVTQEPSLTVSPGGTVTLTCASSTGAVTSGYYPNWFQQKPGQAPRALIYSTSNKHSWTPARFSGSLLGGKAALTLSGVQPEDEAEYYCLLYYGGAYVFGTGTKVTVL

SEQ ID NO: 9573 - protein, 108 aa, Artificial Sequence; identical to SEQ ID NO: 8099
  Synthetic construct

SEQ ID NO: 9574 - protein, 108 aa, Artificial Sequence
  Synthetic construct
LPGLTQPASVSGSPGQSITISCTGASGDIGDYNFVSWYQQHPGKTPRLIIYDVTNRPSGVSSRFSGSKSGNTASLMISGLQAEDEADYYCSSYTTNVLFGGGTRLTVL

SEQ ID NO: 9575 - protein, 108 aa, Artificial Sequence; identical to SEQ ID NO: 8555
  Synthetic construct

SEQ ID NO: 9576 - protein, 112 aa, Artificial Sequence
  Synthetic construct
DIVMTQNPLSLSVTPGQPATFSCRSSVTLLHTDGKTHLYWYLQRPGQSPQLLISEVSNRFSGVPDRFSGSGSGTQFTLEISRVEAEDVGIYYCMQSIQVPHTFGQGTRLELK

SEQ ID NO: 9577 - protein, 107 aa, Artificial Sequence; identical to SEQ ID NO: 8304
  Synthetic construct

SEQ ID NO: 9578 - protein, 107 aa, Artificial Sequence; identical to SEQ ID NO: 8065
  Synthetic construct

SEQ ID NO: 9579 - protein, 107 aa, Artificial Sequence
  Synthetic construct
SYELTQPPSVSVSPGQTARITCSGDALPNRYSYWYQQKPGQAPILVIYKDTERPSGIPERFSASTSGTTVTLTITGVQAEDEADYYCQSTDNSGTYVFAAGTKVTVL

SEQ ID NO: 9580 - protein, 107 aa, Artificial Sequence
  Synthetic construct
SSELTQDPAVSVALGQTVRITCQGDSLRSYYASWYQQKPGQAPVLVIYGKNNRPSGIPDRFSGSSSGNTASLTITGAQAEDEADYYCNSRDSSGNYVFGTGTKVTVL

SEQ ID NO: 9581 - protein, 110 aa, Artificial Sequence
  Synthetic construct
QSVLTQAPSASATPGQRVTISCSGSSSNVGTYIVNWYQQLPGTAPKLLIYRNNLRPSGIPDRFSGSRSGTSASLAIGGLQSEDEADYYCAAWDDSLNGVVFGGGTKLTVL

SEQ ID NO: 9582 - protein, 110 aa, Artificial Sequence
  Synthetic construct
QSVLTQPPSVSAAPGQKVTISCSGSSSNIGNNYVSWYQQLPGTAPKLLIYDNNKRPSGIPDRFSGSKSGTSATLGITGLQTGDEADYYCGTWDSSLSARVFGTGTKVTVL

SEQ ID NO: 9583 - protein, 110 aa, Artificial Sequence; identical to SEQ ID NO: 8171
  Synthetic construct

SEQ ID NO: 9584 - protein, 108 aa, Artificial Sequence; identical to SEQ ID NO: 8888
  Synthetic construct

SEQ ID NO: 9585 - protein, 107 aa, Artificial Sequence
  Synthetic construct
EIVLTQSPATLSLSPGERATLSCRASQSVSSYLAWYQQKPGQAPRLLIYDASNRATDIPARFSGSGSGTDFTLTISSLEPEDFAVYYCQKRSNWPFTFGPGTRVDIK

SEQ ID NO: 9586 - protein, 107 aa, Artificial Sequence
  Synthetic construct
DIQMTQSPSSLSASIGDVVTITCRASQNIANYLNWYQQKPGKAPKLLIYAASSLQSGVPSRFSGGGSGTDYTLTITSLQPEDFATYYCQQSFASPYTFARGSKLEIK

SEQ ID NO: 9587 - protein, 113 aa, Artificial Sequence
  Synthetic construct
DVVMTQSPLSLPVTLGQPASISCRSSQSLVHSDGNTYLNWFQQRPGQSPRRLIYKVSNRDSGVPDRFSGSGSGTDFTLKISRVEAEDVGVYYCMQGTHWPALTFGGGTKVEIK

SEQ ID NO: 9588 - protein, 106 aa, Artificial Sequence
  Synthetic construct
SYELTQPPSVSVSPGQTASISCSGDGLGGKYVSWYQQKPGQSPVLVIYRDSKRPSGIPERFSGSNSGNTATLAISGTQAVDEADYYCQAWDNRRGFFGTGTKVTVL

SEQ ID NO: 9589 - protein, 108 aa, Artificial Sequence
  Synthetic construct
QAVVTQEPSLTVSPGGTVTLTCGSSTGAVTSGHYPYWFQQKPGQAPRTLIYDATNKHSWTPARFSGSLLGGKAALTLSGAQPEDEAEYYCLLLCSDWVFGGGTKLTVL

SEQ ID NO: 9590 - protein, 107 aa, Artificial Sequence
  Synthetic construct
DIQMTQSPSTLSASVGDRVTITCRASQSVSSWLAWYQQKPGKAPRLLIYKASILDTGVPSRFSGSGSGTEFTLTITSLQPDDFGTYYCQHYNSYSVTFGQGTKVEAK

SEQ ID NO: 9591 - protein, 107 aa, Artificial Sequence; identical to SEQ ID NO: 8488
  Synthetic construct

SEQ ID NO: 9592 - protein, 113 aa, Artificial Sequence
  Synthetic construct
DIVMTQSPDSLAVSLGDRATINCKSSQSVLFNPNNKNYLAWYQQKPGQPPKLLFYWASTRESGVPDRFSASGSGTDFTLTISGLQAEDVAVYYCQQYYSTLWTFGQGTKVEIK

SEQ ID NO: 9593 - protein, 107 aa, Artificial Sequence; identical to SEQ ID NO: 8658
  Synthetic construct

SEQ ID NO: 9594 - protein, 107 aa, Artificial Sequence
  Synthetic construct
AIQLTQSPSSLSASVGDRVTITCRASQGISSYLAWYQQKPGKAPKLLIYAASTLQSGVPSRFSGSGSGTDFTLTISSLQPEDFATYYCQQLNSYPRTFGQGTKVEIK

SEQ ID NO: 9595 - protein, 111 aa, Artificial Sequence
  Synthetic construct
QPVLTQSSSASASLGSSVKLTCTLSSGHSSYIIAWHQQQPGKAPRYLMKLEGSGSYNKGSGVPDRFSGSSSGADRYLTISNLQSEDEADYYCETWDSNTRVFGGGTKLTVL

SEQ ID NO: 9596 - protein, 109 aa, Artificial Sequence
  Synthetic construct
QSALTQPASVSGSPGQSITISCTGTSSDVGSYNLVSWYQQHPGKAPKLMIYEGSKRPSGVSNRFSGSKSGNTASLTISGLQAEDEADYYCCSYAGSEVVFGGGTKLTVL

SEQ ID NO: 9597 - protein, 108 aa, Artificial Sequence; identical to SEQ ID NO: 8442
  Synthetic construct

SEQ ID NO: 9598 - protein, 108 aa, Artificial Sequence
  Synthetic construct
DIQMTQSPSTLSASVGDRVTITCRASQAINNWLAWYQQKSGEGPKLLIYGASILRDGVPSRFSGTASGTDFTLTISSLQPEDFATYYCQQGSSFPHLTFGGGTKVEIK

SEQ ID NO: 9599 - protein, 109 aa, Artificial Sequence; identical to SEQ ID NO: 8306
  Synthetic construct

SEQ ID NO: 9600 - protein, 105 aa, Artificial Sequence
  Synthetic construct
EIVLTQSPSMVSLLPGETATLSCRASQSVSRLAWYQQQPGQPPRLLIYDATRRVTGIPDRFSGSGSGTDFTLTISGLEPEDFAVFYCQQYDGSPTFGPGTKVDVD

SEQ ID NO: 9601 - protein, 110 aa, Artificial Sequence
  Synthetic construct
QSALTQPPSASGSPGQSVTISCTGTSSDVGGYNYVSWYQQHPGKAPKLMIYEVSKRPSGVPDRFSGSKSGNTASLTVSGLQAEDETDYYCSSYAGGNNFVFGGGTRLTVL

SEQ ID NO: 9602 - protein, 108 aa, Artificial Sequence
  Synthetic construct
EIVLTQSPGTLSLSPGQRATLSCRASQSITNNYLAWYQQKPGQAPRLLIYGASNRATGIPDRFSGSGSGTDFTLTISRLEPEDFAVFYCQQHGSSPITFGQGTRLEIQ

SEQ ID NO: 9603 - protein, 107 aa, Artificial Sequence; identical to SEQ ID NO: 8065
  Synthetic construct

SEQ ID NO: 9604 - protein, 108 aa, Artificial Sequence
  Synthetic construct
EIVLTQSPATLSVSPGERVTLSCRASQSIRTNLAWFQQKSGQGPRLLIYGASTRATDIPARFSGSGSGTEFTLTISSLQSEDFAVYYCQQYKDWPPWTFGQGTKVEIK

SEQ ID NO: 9605 - protein, 107 aa, Artificial Sequence
  Synthetic construct
DIQMTQSPSTLSASVGDRVTITCRASQSISSWLAWYQQKPGKAPKLLIYKASSLESGVPSRFSGSGSGTEFTLTISSLQPDDFATYYCQQYNSYPRTFGQGTKVEIK

SEQ ID NO: 9606 - protein, 111 aa, Artificial Sequence; identical to SEQ ID NO: 8610
  Synthetic construct

SEQ ID NO: 9607 - protein, 106 aa, Artificial Sequence
  Synthetic construct
DIQMTQSPSTLSASVGDRVTITCRASQSIRSWLAWYQQKPGKVPKLLIYQASNLESGVPSRFSGSGSGTEFTLTISSLQADDSATYYCQQYNSFSTFGQGTEVEIK

SEQ ID NO: 9608 - protein, 107 aa, Artificial Sequence
  Synthetic construct
DIQMTQSPSSLSASIGDRVTITCQASQGISNYLNWYQQKPGKAPKLLIYDASNLETGVPSRFSGSGSGTDFTFTISSLQPEDIATYYCQQFDSLPITFGQGTRLDIK

SEQ ID NO: 9609 - protein, 107 aa, Artificial Sequence
  Synthetic construct
DIQMTQSPSSLSASVGDRVTITCRASQGISNYLAWYQQKPGRVPKLLIYAASTLQSGVPSRLSGSGSGTDFTLTISSLQPEDVATYYCQNYISAPLTFGGGTKVDIK

SEQ ID NO: 9610 - protein, 107 aa, Artificial Sequence
  Synthetic construct
AIRMTQSPSSFSASTGDRVTITCRASQGISSYLAWYQQKPGKAPKLLIYAASTLQSGVPSRFSGSGSGTDFTLTISCLQSEDFATYYCQQYYSYPWAFGQGTKVEIK

SEQ ID NO: 9611 - protein, 108 aa, Artificial Sequence
  Synthetic construct
EIVLTQSPGTLSLSPGDRATLSCRASQSVSNNFLAWYQQKPGQAPRLLIYGASNRATGIPDRFSGSGSGTDFTLGISRLEPEDSAVYFCHQYSTSPRSFGQGTKLELK

SEQ ID NO: 9612 - protein, 110 aa, Artificial Sequence
  Synthetic construct
QTVVTQEPSFSVSPGGTVTLTCGLTSGSVSTSNYPSWYQQTPGQAPRTLIYSTTTRSSGVPDRFSGSILGNKAALTITGAQADDESDYYCLLYMSYGMRVFGGGTRLTVL

SEQ ID NO: 9613 - protein, 108 aa, Artificial Sequence; identical to SEQ ID NO: 8872
  Synthetic construct

SEQ ID NO: 9614 - protein, 111 aa, Artificial Sequence; identical to SEQ ID NO: 8610
  Synthetic construct

SEQ ID NO: 9615 - protein, 110 aa, Artificial Sequence
  Synthetic construct
NFMLTQPHSVSASPGKTATISCTRSSGSIASYYVQWFQQRPGSSPTTVIYEHTQRPSGVPDRFSGSIDRSSNSASLTISGLKTEDEADYYCQSYDGTNWVFGGGTKLTVL

SEQ ID NO: 9616 - protein, 111 aa, Artificial Sequence
  Synthetic construct
QSVLTQPPSVSGAPGQRVTISCTGGSSNIGANYAVHWYKQVPGTAPKLLIFGDTHRPSGVPDRFSASKSGTSASLAISGLQAEDEADYYCQSYDRSLSASVFGGGTTLTVL

SEQ ID NO: 9617 - protein, 112 aa, Artificial Sequence
  Synthetic construct
DIVMTQTPLSLSVTPGQPASISCKSSRSLLHSDGKNYLYWYLQKPGQSPQLLIYDVFSRFSGVPDRFSGSGSGTDFILKISRVEAEDVGLYYCMQAIDVPYTFGQGTKLEIK

SEQ ID NO: 9618 - protein, 107 aa, Artificial Sequence
  Synthetic construct
EIVLTQSPGTLSLSPGERATLSCRASQSVSSSYLAWYQQKPGQAPRLLIYGASSRATGIPDRFSGSGSGTDFTLTISRLEPEDFAVYYCQQYGSSPLFGPGTKVDIK

SEQ ID NO: 9619 - protein, 108 aa, Artificial Sequence; identical to SEQ ID NO: 8701
  Synthetic construct

SEQ ID NO: 9620 - protein, 105 aa, Artificial Sequence; identical to SEQ ID NO: 8339
  Synthetic construct

SEQ ID NO: 9621 - protein, 108 aa, Artificial Sequence
  Synthetic construct
AIRMTQSPSSFSASTGDRVTITCRASQGISSYLAWYQQKPGKAPKLLIYAASTLQSGVPSRFSGSGSGTDFTLTISCLQSEDFATYYCQQYYSYPQITFGQGTRLEIK

SEQ ID NO: 9622 - protein, 113 aa, Artificial Sequence
  Synthetic construct
DIVMTQSPLSLPVTPGEPASISCKSSQSLLHSNGYNYLDWYLQKPGQSPQLLIYLGSDRASGVPDRFSGSGSGTDFTLKISRVEAEDVGVYYCMQALQTPRWTFGQGTKVEIK

SEQ ID NO: 9623 - protein, 107 aa, Artificial Sequence
  Synthetic construct
SYELTQPPSVSVSPGQTASITCSGDKLGDKYACWYQQKPGQSPVLVIYQDSKRPSGIPERFSGSNSGNTATLTISGTQAMDEADYYCQAWDSSTGGVFGGGTKLTVL

SEQ ID NO: 9624 - protein, 110 aa, Artificial Sequence
  Synthetic construct
QAGLTQPPSLSKGLRQTATLTCTGNSTNVANLGVAWLQQYQGHPPKLLSYRNDNRPSWISERFSASRSGNTASLTITGLQPEDEADYYCSTWDSSLNAVIFGGGTKLTVL

SEQ ID NO: 9625 - protein, 111 aa, Artificial Sequence
  Synthetic construct
QVVLTQSPSASASLGASVKLTCTLSGGHSNYAIAWHQQQPEKGPRNLMKVNSDGSHTKGDGIPDRFSGSSSGAEYYLTISGLQSEDEADYYCQTWDTGYAVFGGGTKLTVL

SEQ ID NO: 9626 - protein, 110 aa, Artificial Sequence; identical to SEQ ID NO: 8950
  Synthetic construct

SEQ ID NO: 9627 - protein, 110 aa, Artificial Sequence
  Synthetic construct
QSALTQPASVSGSPGQSITISCTGTSSDVGGYNYVSWYQQHPGKAPKLMIYDVSNRPSGVSNRFSGSKSGNTASLTISGLQAEDEADYYCSSYTSSSPVVFGGGTKLTVL

SEQ ID NO: 9628 - protein, 107 aa, Artificial Sequence
  Synthetic construct
DIQLTQSPSSLSASVGDRVTITCRASQSVTRYLNWYQQKPGKAPNLLIYGISTLYSGVPSRFSGSGSGTDFTLTINSLQPEDFGTYYCQQTYSSVYSFGQGTRLEVK

SEQ ID NO: 9629 - protein, 111 aa, Artificial Sequence; identical to SEQ ID NO: 9285
  Synthetic construct

SEQ ID NO: 9630 - protein, 112 aa, Artificial Sequence
  Synthetic construct
DIVMTQTPLSLSVTPGQPASISCKSSQSLLHSDGKTYLYWYLQKPGQSPQLLIYEVSSRFSGVPDRFSGSGSGTDFTLKISRVEAEDVGVYYCMQGIHLPPTFGQGTKVEIK

SEQ ID NO: 9631 - protein, 111 aa, Artificial Sequence
  Synthetic construct
QSALTQPASVSGSPGQSITISCTGTSSDVGSYNLVSWYQQHPGKAPKLMIYEVSKRPSGVSNRFSGSKSGNTASLTISGLQAEDEADYYCCSYAGSSTFYVFGTGTKVTVL

SEQ ID NO: 9632 - protein, 107 aa, Artificial Sequence
  Synthetic construct
AIQLTQSPSSLSASVGDRVTITCRASQGVGSYLAWYQQKPGKAPKLLIYVATTLQSGVPSRFSGSGSGTDFTLTISSLQPEDFATYYCQQVNTYPRTFGQGTKVEIK

SEQ ID NO: 9633 - protein, 107 aa, Artificial Sequence
  Synthetic construct
DIQMTQSPSSLSASVGDRVTITCRASETIINYLSWYQQKPGKAPNLLIYTASSLQNGVPSRFSGSGSGTDFTLTISNLQPEDFATYYCQQNYNDPPSFGQGTKLEIK

SEQ ID NO: 9634 - protein, 108 aa, Artificial Sequence
  Synthetic construct
SYVLTQSPSVSVAPGETARIPCVGSNIGGKNVHWYQQKSGLAPVLVIHDDSGRPSGIPDRFSGSKSGNTATLTISRVDAGDEADYYCQVWDSSSDHVVFGGGTKLTVL

SEQ ID NO: 9635 - protein, 106 aa, Artificial Sequence
  Synthetic construct
EIVMTQSPATLSVSPGERATLSCRASQSVGTNLAWFQQRPGQAPRLLIYGASTRTTDVPARFSGSGSGTEFTLTISSLQSEDFAIYYCQQYNKWYTFGQGTKLEIK

SEQ ID NO: 9636 - protein, 113 aa, Artificial Sequence; identical to SEQ ID NO: 8276
  Synthetic construct

SEQ ID NO: 9637 - protein, 112 aa, Artificial Sequence
  Synthetic construct
DVVLTQSPLSLPVTLGQPASISCRSSQSLVSSDGNTYLNWFQQRPGQSPRRLIYMISKRESGVPDRFSGSGSGPYFRLEISRVEAEDVAIYYCMQATHWPRTFGQGTKLEIK

SEQ ID NO: 9638 - protein, 109 aa, Artificial Sequence
  Synthetic construct
EIVMTQSPATLSVSPGERATLSCRASQSVSSNLAWYQQKPGQAPRLLIYGASTRATGIPARFSGSGSGTEFTLTISSLQSEDFAVYYCQQYNNWPPRRTFGQGTKVEIK

SEQ ID NO: 9639 - protein, 107 aa, Artificial Sequence
  Synthetic construct
DIQLTQSPSTVSASVGDGVTITCRASQTVSNWLAWYQQKPGKAPKLLIFGASRLESGVPSRFSGSGSGTEFTLTISSLQPEDFATYYCQHYNGYPFTFGQGTRLEIK

SEQ ID NO: 9640 - protein, 108 aa, Artificial Sequence
  Synthetic construct
EFVLTQSPGTLSLSPGETGTLSCRASQSVPSDQLAWYQHKPGQAPRLLIYGAFSRAAGIPDRFSGSGTGTDFTLTIRRLEPEDIAVYYCQQYDTTPFTFGPGTRVDVK

SEQ ID NO: 9641 - protein, 106 aa, Artificial Sequence
  Synthetic construct
DVQMTQSPSTLSASVGHRVTITCRASQSISSWLAWYQQKPGKAPKLLIYKASSLESGVPSRFSGSGSGTEFTLTISSLQPDDSATYYCQEYNSVWTFGQGTKVEIK

SEQ ID NO: 9642 - protein, 110 aa, Artificial Sequence
  Synthetic construct
QSVLTQPPSVSAAPGQKVTISCSGSSSNIGNNYVSWYQQLPGTAPKLLIYDNNKRPSRIPDRFSGSKSGTSATLGITGLQTGDEADYYCGTWDSGLSAGVFGGGTKLTVL

SEQ ID NO: 9643 - protein, 110 aa, Artificial Sequence; identical to SEQ ID NO: 8067
  Synthetic construct

SEQ ID NO: 9644 - protein, 106 aa, Artificial Sequence
  Synthetic construct
DIQMTQSPSSLSASVGDRVTITCRASQSISSYLNWYQQKPGKAPKLLIYAASSLQSGVPSRFSGSGSGTDFTLTISSLQPEDFATYYCQQSYSTPTFGQGTKVEIK

SEQ ID NO: 9645 - protein, 107 aa, Artificial Sequence; identical to SEQ ID NO: 8065
  Synthetic construct

SEQ ID NO: 9646 - protein, 107 aa, Artificial Sequence
  Synthetic construct
EIVMTQSPVILSVSPGERAILSCRASQSVRDNVGWYQQKRGQAPRLLLYGATTRAADVPARFSGSGSGTEFTLTISSLQSEDFAVYYCQQYHTWPRTFGQGTKVEIK

SEQ ID NO: 9647 - protein, 110 aa, Artificial Sequence
  Synthetic construct
QSVLTQSPSASGTPGQRVTISCSGSSSNIGTNYVYWYSQLPGTAPKLLIYRNSQRPSGVPDRFSGSKSGTSASLAISGLRSEDEADYYCAAWDDSLSGVIFGGGTKLTVL

SEQ ID NO: 9648 - protein, 107 aa, Artificial Sequence
  Synthetic construct
DIQMTQSPSSLSASVGDRVTITCRASQSISSSLNWYQYKPGKAPKLLIYAASSLQSGVPSRFSGSGSGTEFALTITSLQPEDFATYYCQQSYTLPLTFGGGTKVEIK

SEQ ID NO: 9649 - protein, 105 aa, Artificial Sequence; identical to SEQ ID NO: 8339
  Synthetic construct

SEQ ID NO: 9650 - protein, 105 aa, Artificial Sequence; identical to SEQ ID NO: 8339
  Synthetic construct

SEQ ID NO: 9651 - protein, 107 aa, Artificial Sequence
  Synthetic construct
SYELTQPPSVSVSPGQTARITCSGDALPKQYAYWYQQKPGQAPVLVIYKDSERPSGIPERFSGSSSGTTVTLTISGVQAEDEADYYCQSADSSGTRVFGGGTKLTVL

SEQ ID NO: 9652 - protein, 113 aa, Artificial Sequence; identical to SEQ ID NO: 8276
  Synthetic construct

SEQ ID NO: 9653 - protein, 108 aa, Artificial Sequence
  Synthetic construct
EIVMTQSPATLSVSPGERATLSCRASQSVSNNLAWYQQKPGQAPRLLIYAASTRATGIPARFSGSGSGTEFTLTISSLQSEDFAVYYCQQYDDWPPLTFGGGTKVEIK

SEQ ID NO: 9654 - protein, 109 aa, Artificial Sequence
  Synthetic construct
AIQMTQSPSTLSASVGDTVTVTCRASQSVGTWLAWFQQKPGKAPQLLIYKASNLESGVPSRFSGGGSGTQFTLTISSLQPDDFATYYCQQYGYADSSWTFGQGTKVEVQ

SEQ ID NO: 9655 - protein, 114 aa, Artificial Sequence
  Synthetic construct
DIVMTQSPDSLAVSLGERATINCKSSQSVLYSSNNQNYLAWYQQKPGQPPKLLIYWASTRESGVPERFSGSGSGTDFTLTISSLQAEDVAVYYCQQYYSTPTLTFGGGTKVEIK

SEQ ID NO: 9656 - protein, 109 aa, Artificial Sequence
  Synthetic construct
SSELTQDPAVSVALGQTVRITCQGDSLRSYYASWYQQKPGQAPVLVIYGKNNRPSGIPDRFSGSSSGNTASLTITGAQAEDEADYYCNSRDSSGNHNYVFGTGTKVTVL

SEQ ID NO: 9657 - protein, 112 aa, Artificial Sequence
  Synthetic construct
QSALTQPASVSGSPRQSITISCTGTSSDVGNYDYVSWYQQHPGKAPKLIIYDVARRPSGVSNRFSGAKSGNTASLTISGLQAEDEADYYCSSYTRTSTSLYVFGSGTKVTVL

SEQ ID NO: 9658 - protein, 109 aa, Artificial Sequence
  Synthetic construct
EIVLTQSPATLSLSPGERATLSCRASQSVSSYLAWYQQKPGQAPRLLIYDASNRATGIPARFSGSGSGTDFTLTISSLEPEDFAVYYCQQRSNWPPLFTFGPGTKVDIK

SEQ ID NO: 9659 - protein, 113 aa, Artificial Sequence; identical to SEQ ID NO: 8661
  Synthetic construct

SEQ ID NO: 9660 - protein, 113 aa, Artificial Sequence; identical to SEQ ID NO: 8276
  Synthetic construct

SEQ ID NO: 9661 - protein, 108 aa, Artificial Sequence; identical to SEQ ID NO: 8888
  Synthetic construct

SEQ ID NO: 9662 - protein, 107 aa, Artificial Sequence
  Synthetic construct
DIQMTQSPSSLSASVGDRVTITCRASQSISSYLNWYQQKPGKAPKLLIYAASSLQSGVPSRFSGSGSGTDFTLTISSLQPEDFATYYCQQSYSTPPTFGQGTKLEIK

SEQ ID NO: 9663 - protein, 113 aa, Artificial Sequence
  Synthetic construct
DVVMTQSPLSLPVTLGQPASISCRSSQSLAHNDGNTYLTWFQQRPGQSPRRLIYRVSNRDSGVPDRFSGSGSGTDFTLKISRVEADDVGIYYCMQGTHWPLLTFGGGTKVEIK

SEQ ID NO: 9664 - protein, 110 aa, Artificial Sequence; identical to SEQ ID NO: 8220
  Synthetic construct

SEQ ID NO: 9665 - protein, 108 aa, Artificial Sequence; identical to SEQ ID NO: 8555
  Synthetic construct

SEQ ID NO: 9666 - protein, 112 aa, Artificial Sequence; identical to SEQ ID NO: 9425
  Synthetic construct

SEQ ID NO: 9667 - protein, 112 aa, Artificial Sequence
  Synthetic construct
QLVLTQSPSASASLGASVKLTCTLSSGHSSYAIAWHQQQPEKGPRYLMKLNSDGSHSKGDGIPDRFSGSSSGAERYLTISSLQSEDEADYYCQTWGTGAHVVFGGGTKLTVL

SEQ ID NO: 9668 - protein, 106 aa, Artificial Sequence
  Synthetic construct
SYDLTQPPSVSVSPGQTATIACSGDKLGHIYASWYQQKPGQSPVLVVYQDNKRPSGIPERFSGSNSGNTATLTISGTLAMDEADYYCQAWDTGTVVFGGGTKLTVL

SEQ ID NO: 9669 - protein, 110 aa, Artificial Sequence
  Synthetic construct
QSALTQPPSASGSPGQSVTISCTGTSSDVGGYNYVSWYQQHPGKAPKLMIYEVSKRPSGVPLRFSGSKSGSTASLTVSGLQSEDEADYYCSSYAGNNRGVFGGGTKLTVL

SEQ ID NO: 9670 - protein, 110 aa, Artificial Sequence
  Synthetic construct
QSVLTQPPSAAGTPGQRVTIFCSGSSSNIGTNFVYWYQQVPGTGPKLLIYRNTQRPSGVPDRFSGSKSGTSASLAVSGLRSEDDADYYCAAWDDSLSGVIFGGGTKLTVL

SEQ ID NO: 9671 - protein, 106 aa, Artificial Sequence
  Synthetic construct
DIQMTQSPSTLSASVGDRVTITCRASQSISSWLAWYQQKPGKAPKLLIYKASSLESGVPSRFSGSGSGTEFTLTISSLQPDDFATYYCQQYNSYFSFGGGTKVEIK

SEQ ID NO: 9672 - protein, 107 aa, Artificial Sequence
  Synthetic construct
DIQMTQSPSSLSASVGDRVTITCRASQGISNYLAWYQQKPGKVPKLLIYAASTLQSGVPSRFSGSGSGTDFTLTISSLQPEDVATYYCQKYNSAPWTFGQGTKVEIK

SEQ ID NO: 9673 - protein, 108 aa, Artificial Sequence; identical to SEQ ID NO: 9475
  Synthetic construct

SEQ ID NO: 9674 - protein, 107 aa, Artificial Sequence; identical to SEQ ID NO: 8573
  Synthetic construct

SEQ ID NO: 9675 - protein, 114 aa, Artificial Sequence
  Synthetic construct
DIVMTQSPDSLAVSLGERATINCKSSQSVLYSSNNKNYLAWYQQKPGQPPKLLIYWASTRESGVPDRFSGSGSGTDFTLTISSLQAEDVAVYYCQQYYSTLPYTFGQGTKLEIK

SEQ ID NO: 9676 - protein, 107 aa, Artificial Sequence; identical to SEQ ID NO: 9524
  Synthetic construct

SEQ ID NO: 9677 - protein, 107 aa, Artificial Sequence
  Synthetic construct
AIRITQSPSSLSASTGDRVTITCRASQGISSSLAWYQQKPGKAPKLLIYGASTLQSGVPSRFSGSGSGTEFTLTISCLQSEDFATYYCQQYYNYPWAFGQGTKLEIK

SEQ ID NO: 9678 - protein, 107 aa, Artificial Sequence; identical to SEQ ID NO: 9551
  Synthetic construct

SEQ ID NO: 9679 - protein, 107 aa, Artificial Sequence
  Synthetic construct
DIQMTQSPSSLSASVGDRVTITCRASQSISIYLNWYQQRPGKAPKLLIYAASSLESGVPSRFSGSGSGTDFSLSITSLQPEDFATYYCQKSDSAPFTFGPGTKVDIK

SEQ ID NO: 9680 - protein, 108 aa, Artificial Sequence; identical to SEQ ID NO: 8701
  Synthetic construct

SEQ ID NO: 9681 - protein, 106 aa, Artificial Sequence
  Synthetic construct
DIQMTQSPSTLSASVGDRVTITCRASQSISSWLAWYQQKPGKAPKLLIYKASSLESGVPSRFSGSGSGTEFTLTISSLQPDDFATYYCQQYNSYSTFGQGTKVEIK

SEQ ID NO: 9682 - protein, 113 aa, Artificial Sequence
  Synthetic construct
DVVMTQSPDSLAVSLGERATINCKSSQNLLYSPNNKNYLVWYQQKPGQPPKALIYWASTRESGVPDRFSGSGSGTDFTLTISSLQAEDVAVYYCQQYYHTPYTFGQGTKLEIK

SEQ ID NO: 9683 - protein, 110 aa, Artificial Sequence; identical to SEQ ID NO: 9066
  Synthetic construct

SEQ ID NO: 9684 - protein, 110 aa, Artificial Sequence
  Synthetic construct
QSVLTQPPSVSAAPGQKVTISCSGSSSNIGNNYVSWYQHLPGTAPKLLIHDNVKRPSGIPDRFSGSKSGTSATLGITGLQTGDEADYYCVTWDISLRAVVFGGGTKVTVL

SEQ ID NO: 9685 - protein, 108 aa, Artificial Sequence; identical to SEQ ID NO: 8376
  Synthetic construct

SEQ ID NO: 9686 - protein, 112 aa, Artificial Sequence; identical to SEQ ID NO: 8315
  Synthetic construct

SEQ ID NO: 9687 - protein, 112 aa, Artificial Sequence
  Synthetic construct
DIVMTQSPLSLPVTPGEPASISCRSSQSLLHRNGYNYLDWYLQKPGQSPQVLMYLGSNRASGVPDRFSGSGSGTDFTLKISRVEAEDVGVYYCMQGLQTPWTFGQGTKVEIK

SEQ ID NO: 9688 - protein, 109 aa, Artificial Sequence
  Synthetic construct
EIVMTQSPATLSVSPGERATLSCRASQSVSSNLAWYQQKPGQAPRLLIYGASTRATGIPARFSGSGSGTEFTLTISSLQSEDFAVYYCQQYNNWPPVYTFGQGTKLEIK

SEQ ID NO: 9689 - protein, 108 aa, Artificial Sequence; identical to SEQ ID NO: 8701
  Synthetic construct

SEQ ID NO: 9690 - protein, 107 aa, Artificial Sequence
  Synthetic construct
DIQMTQSPSSLSASVGDRVTITCRASQSIGTNLNWYQQQPGKAPKLLIYAASSLQSGVPSRFSGSGSGTDFTLTINSLQPEDFATYYCQQSYSPPYTFGQGTKLEIK

SEQ ID NO: 9691 - protein, 111 aa, Artificial Sequence
  Synthetic construct
DIVMTQTPLSLSVTPGQPASISCKSSQSLLHSDGKTYLYWYLQKPGQSPQLLIYEVSSRFSGVPDRFSGSGSGTDFTLKISRVEAEDVGVYYCMQGIHPYTFGQGTKLEIK

SEQ ID NO: 9692 - protein, 107 aa, Artificial Sequence
  Synthetic construct
EIVLTQSPDFQSVTPKEKVTITCRASQSIGSSLHWYQQKPDQSPKLLIKYASQSISGVPSRFSGSGSGTDFTLTINSLEAEDAATYYCHQSSSFPYTFGQGTKLEIK

SEQ ID NO: 9693 - protein, 106 aa, Artificial Sequence
  Synthetic construct
SYELTQPPSVSVSPGQTASITCSGDKLGDKYACWYQQKPGQSPVLVIYQDSKRPSGIPERFSGSNSGNTATLTISGTQAMDEADYYCQAWDSSTDVFGGGTKLTVL

SEQ ID NO: 9694 - protein, 107 aa, Artificial Sequence
  Synthetic construct
DIQMTQSPSSLAASVGDRVTITCRASQSISRHLNWYQQKPGKAPNLLIYDASSLQSGVPSRFSGSGSGTDFTFTISSLQPEDFATYYCQQTYTDPFTFGPGTKVEIK

SEQ ID NO: 9695 - protein, 107 aa, Artificial Sequence
  Synthetic construct
EILLTQSPATLSLSPGERATLSCRASQSISNYLAWYQQKPGQAPRLLVWGAFNRAPGIPARFSGSGSGTDFTLTISSLEPEDFAVYYCQQRGDWPRTFGQGTKVEIK

SEQ ID NO: 9696 - protein, 106 aa, Artificial Sequence
  Synthetic construct
EIVLTQSPATLSLSPGERATLSCRASQSVSSYLAWYQQKPGQAPRLLIYDASNRATGIPARFSGSGSGTDFTLTISSLEPEDFAVYYCQQRSNPLTFGGGTKVEIK

SEQ ID NO: 9697 - protein, 108 aa, Artificial Sequence
  Synthetic construct
SYELTQPPSVSVSPGQTASVTCSGDNLGDKYACWYQQKPGQSPVLVIYQDNKRPSGIPERFSGSNSGNTATLTISGTQTLDEADYYCQAWDTNTAFFVFGPGTKVTVL

SEQ ID NO: 9698 - protein, 110 aa, Artificial Sequence
  Synthetic construct
QSVLTQPPSASATPGQRVTISCSGSGSNIGRNTVSWYQHLPGTAPKLLIYYNNKRPSGVPDRFSGSNSGTAASLAISGLQSEDDADYYCAAWDDSLKGYVFGTGTKVTVL

SEQ ID NO: 9699 - protein, 107 aa, Artificial Sequence
  Synthetic construct
EIVLTQSPPTLSVSPGERATLSCRASQSVSTYLAWYHQKPGQAPRLLIYDASKRATGIPARFSGSGSGTDFTLIISNLEPEDFAVYYCQQRYNWPITFGQGTRLEIK

SEQ ID NO: 9700 - protein, 110 aa, Artificial Sequence; identical to SEQ ID NO: 8067
  Synthetic construct

SEQ ID NO: 9701 - protein, 110 aa, Artificial Sequence
  Synthetic construct
QPVLTQPPSASGTSGQRVTISCLGGPSNVGINFVFWYQQFLGKAPKLLIYSTIHRPSGVPDRFSGSKSDSSAFLSISDVQSEDEADYFCAAWDNRLAGPLFGGGTNLTVL

SEQ ID NO: 9702 - protein, 107 aa, Artificial Sequence; identical to SEQ ID NO: 8501
  Synthetic construct

SEQ ID NO: 9703 - protein, 107 aa, Artificial Sequence
  Synthetic construct
DVQMTQSPSSLSASVGDRVTITCRASQSISNYLNWYQQRPGKAPKLLIYSASSLQSGVPSRFSGSGSGTDFTLSISSLQPEDFATYSCQQSYSIPLTFGQGTKVEIK

SEQ ID NO: 9704 - protein, 110 aa, Artificial Sequence
  Synthetic construct
QSALTQPASVSESPGQSITISCTGSTTDVGANNYVSWYQHHPGKAPKLIIYDVRQRPSGVSYRFSGSKSGNTASLTVSGLQTEDEADYYCAAVTPTNTWVFGGGTKLTVL

SEQ ID NO: 9705 - protein, 108 aa, Artificial Sequence
  Synthetic construct
SYELTQPPSVSVSPGQTARITCSGDELPKKYVFWYQQRSGQAPVMVIYEDTLRPSGIPERFSGSSSGTLATLTITGAQVEDEGDYYCFSTDSSGDHGVFGGGTKLTVL

SEQ ID NO: 9706 - protein, 107 aa, Artificial Sequence
  Synthetic construct
AIQLTQSPSSLSASVGDRVTITCRASQGISSALAWYQQKPGKAPKLLIYDASSLESGVPSRFSGSGSGTDFTLTISSLQPEDFATYYCQQFNNYPWTFGQGTKVEIK

SEQ ID NO: 9707 - protein, 113 aa, Artificial Sequence; identical to SEQ ID NO: 8086
  Synthetic construct

SEQ ID NO: 9708 - protein, 107 aa, Artificial Sequence
  Synthetic construct
DIQMTQSPSSLSASVGDRVTITCRASQSISSYLNWYQQKPGKAPKLLISAASSLQSGVPSRFSGSGSGTDFTLTISSLQPEDFATYYCQQSYSTPQTFGQGTKVEIK

SEQ ID NO: 9709 - protein, 107 aa, Artificial Sequence
  Synthetic construct
DIQMTQSPSSLSASVGGRVTITCRASQSISSYLNWYQQKPGKAPKLLIYAASSLQSGVPSRFSGSGSGTDFTLTISSLQPEDFATYYCQQSFSTFLTFGGGTNVEIK

SEQ ID NO: 9710 - protein, 110 aa, Artificial Sequence; identical to SEQ ID NO: 8067
  Synthetic construct

SEQ ID NO: 9711 - protein, 111 aa, Artificial Sequence
  Synthetic construct
DIVMTQSPLSLPVTLGQPASISCRSSQSLVHTDGNTYLIWLQQRPGQSPRRLIYKVSHRDSGVPDRFSGSGSGTDFTLKISRVEAEDVGLYYCMQGTHWPTFGQGTRLEIK

SEQ ID NO: 9712 - protein, 107 aa, Artificial Sequence
  Synthetic construct
DIQMTQSPSSLSASVGDRVTITCRASQSISNYLNWYQQKPGKAPKLLIYAASSLQSGVPSRFSGSGSGTDFTLTISSLQPEDFATYYCQQSYSTLLTFGGGTKVEIK

SEQ ID NO: 9713 - protein, 110 aa, Artificial Sequence
  Synthetic construct
QSVLTQPPSASVTPGQRVTISCSGGSSNIGGNFVSWYQQLPGTAPKVLIYMNNRRPSGVPDRFSGSKSGTSASLAISGLRSEDEADYYCAAWDDNLSGRVFGGGTKLTVL

SEQ ID NO: 9714 - protein, 107 aa, Artificial Sequence
  Synthetic construct
SYELTQPPSVSVSPGQTASITCSGDKLGDKYACWYQQKPGQSPVLVIYQDIKRPSGIPERFSGSNSGNTATLTISGTQAMDEADYYCQAWDSNTAVVFGGGTKLTVL

SEQ ID NO: 9715 - protein, 111 aa, Artificial Sequence
  Synthetic construct
QSALTQPASVSGSPGQSITISCTGTSSDIGRYKYVCWYQQHPDKAPKLILYDVSKRPSGISDRFSGAKSGDTASLTISGLQAEDEADYYCSSYSSGSTLYVFGTGTKVSVL

SEQ ID NO: 9716 - protein, 107 aa, Artificial Sequence
  Synthetic construct
DIQMTQSPSSLSASIGDRVTITCRASQGISNYLAWYQQKPGKVPKLLIYAASTLQSGVPSRFSGNGSGTDFTLTISGLQPEDVATFYCQNYNSGPQTFGQGTKVEIK

SEQ ID NO: 9717 - protein, 112 aa, Artificial Sequence
  Synthetic construct
QSVLTQPPSVSGAPGQRVTISCTGSSSNIGAGYDVHWYQQLPGTAPKLLIYGNSNRPSGVPDRFSGSKSGTSASLAITGLQAEDEADYYCQSYDSSLSVLYVFGTGTKVTVL

SEQ ID NO: 9718 - protein, 111 aa, Artificial Sequence
  Synthetic construct
QSVLTQPPSMSGAPGQRVTISCTGSSSNIGANYDVHWYQQFPGTAPKLLIYDTSGRPSGVPDRFSASKSGTSASLAITGLQAEDEADYYCQSYDSSLSGWVFGAGTKVTVL

SEQ ID NO: 9719 - protein, 108 aa, Artificial Sequence; identical to SEQ ID NO: 8872
  Synthetic construct

SEQ ID NO: 9720 - protein, 107 aa, Artificial Sequence
  Synthetic construct
DIQMTQSPSSLSASVGDRVTITCRASQGINNYLAWFRQKPGKAPESLIYAASSLRSGVPSKFSGSGSGTDFTLTISSLQPEDFATYYCQQFNSYPFTFGPGTKVDIK

SEQ ID NO: 9721 - protein, 107 aa, Artificial Sequence; identical to SEQ ID NO: 8110
  Synthetic construct

SEQ ID NO: 9722 - protein, 107 aa, Artificial Sequence; identical to SEQ ID NO: 8065
  Synthetic construct

SEQ ID NO: 9723 - protein, 110 aa, Artificial Sequence; identical to SEQ ID NO: 8146
  Synthetic construct

SEQ ID NO: 9724 - protein, 109 aa, Artificial Sequence
  Synthetic construct
QSVLTQSPSASGTPGQRVTISCSGSDSNIGRNSVSWFQQLPGTAPKLLIYSNNQRPSGVPDRFSGSKSGTSASLAISGLQSEDEADYYCAAWDESLKGVFGGGTKLTVL

SEQ ID NO: 9725 - protein, 106 aa, Artificial Sequence; identical to SEQ ID NO: 8265
  Synthetic construct

SEQ ID NO: 9726 - protein, 110 aa, Artificial Sequence
  Synthetic construct
NFMLTQPHSVSESPGKTVTISCTRSSGSIASNYVQWYQQRPGSSPTTVIYEDNQRPSGVPDRFSGSIDSSSNSASLTISGLKTEDEADYYCQSYDSSTWVFGGGTKLTVL

SEQ ID NO: 9727 - protein, 110 aa, Artificial Sequence
  Synthetic construct
QSALTQPASVSGAPGQSITISCTGTSSDVGAYNYVIWYQQHTGNVPKLMIYDVNKRPSGVSDRFSGSRSGNTASLTISGLQPEDEAVYYCSAYTTSGSTVFGGGTQLTVL

SEQ ID NO: 9728 - protein, 108 aa, Artificial Sequence
  Synthetic construct
EIVMTQSPATLSVSPGERATLSCRASQSISNNLAWYQQKPGQAPRLLIYGASTRATGIPAKFSGSGSGTEFTLTITSLQSEDFAVYYCQHYNNWPPWTFGQGTKVEIK

SEQ ID NO: 9729 - protein, 108 aa, Artificial Sequence
  Synthetic construct
DIQMTQSPSTLSASVGDRVTITCRASQSISSWLAWYQQKPGKAPKLLIYKASSLESGVPSRFSGSGSGTEFTLTISSLQPDDFATYYCQQYNSYSGLTFGGGTKVEIK

SEQ ID NO: 9730 - protein, 108 aa, Artificial Sequence
  Synthetic construct
DIQMTQSPSTLSASVGDRVTITCRASQSLTGWLAWYQQKPGKAPKLLIYEASSLGNGVPSRFTGSGSGTEFTLTISSLQPDDFATYYCQQYTTYRALSFGGGTRVEIK

SEQ ID NO: 9731 - protein, 110 aa, Artificial Sequence
  Synthetic construct
QSVLTQPPSASGTPGQRVTIFCSGSSSNIGTNFVYWYQQLPGTGPKLLIYRNNQRPSGVPDRFSGSKSGTSASLAVSGLRSEDEADYYCAAWDDSLSGVVFGGGTKLTVL

SEQ ID NO: 9732 - protein, 112 aa, Artificial Sequence; identical to SEQ ID NO: 8315
  Synthetic construct

SEQ ID NO: 9733 - protein, 107 aa, Artificial Sequence; identical to SEQ ID NO: 8091
  Synthetic construct

SEQ ID NO: 9734 - protein, 108 aa, Artificial Sequence
  Synthetic construct
SYVLTQAPSVSVAPGKTARISCGGNNIGGKSVHWYQQKPGQAPVLVIHYDRVRPSGIPERFSGSNSDNTATLTISWVEAGDEADYYCQVWDGSSNRVVFGGGTKLTVL

SEQ ID NO: 9735 - protein, 107 aa, Artificial Sequence
  Synthetic construct
DIQMTQSPSSLSASVGDRVTITCQASQDINYYLNWYQQKPGKAPKLLIYDASNLETGVPSRFSGSGSGTDFTFTVSSLQPEDIATYYCQQYDNVPLTFGPGTKVDIK

SEQ ID NO: 9736 - protein, 106 aa, Artificial Sequence
  Synthetic construct
DIQMTQSPSSLSASVGDRVTITCRASQSISSYLNWYQQKPGKAPKLLIYAASSLQSGVPSRFSGSGSGTDFTLTISSLQPEDFATYYCQQSYSTPFFGGGTKVEIK

SEQ ID NO: 9737 - protein, 108 aa, Artificial Sequence
  Synthetic construct
EIVLTQSPGTLSLSPGERATLSCRASQSVSNFYLGWYQQKPGQAPRLLIYGASRRATGIPDRFSGSGSGTDFTLTISRLEPEDFAVYYCQQYGRSPYTFGQGTKLEIK

SEQ ID NO: 9738 - protein, 107 aa, Artificial Sequence; identical to SEQ ID NO: 9062
  Synthetic construct

SEQ ID NO: 9739 - protein, 107 aa, Artificial Sequence
  Synthetic construct
DIQMTQSPSTLSASVGDRVTITCRASQSISSWLAWYQQKPGKAPKLLIYKASSLESGVPSRFSGSGSGTEFTLTISSLHPDDFATYYCQQYSDFPWTFGLGTKVDVK

SEQ ID NO: 9740 - protein, 107 aa, Artificial Sequence
  Synthetic construct
DIQMTQSPSTLSASVGDRVTITCRASQSISSWLAWYQQKPGKAPKLLIYKASSLESGVPSRFSGSGSGTEFTLTISSLQPDDFATYYCQQYNQWALTFGGGTKVEIK

SEQ ID NO: 9741 - protein, 112 aa, Artificial Sequence
  Synthetic construct
HSALTQPASVSGSPGQSITISCTGTSSDIGGNNFVSWFQQHPGKAPKLMIFDVSSRPSGISNRFSGSKSGNTASLTISGLQAEDEADYYCASYTSRSTLEVEFGGWTKLTVL

SEQ ID NO: 9742 - protein, 110 aa, Artificial Sequence; identical to SEQ ID NO: 8102
  Synthetic construct

SEQ ID NO: 9743 - protein, 108 aa, Artificial Sequence; identical to SEQ ID NO: 9705
  Synthetic construct

SEQ ID NO: 9744 - protein, 113 aa, Artificial Sequence
  Synthetic construct
DVVMTQSPLSLPVTLGQPASISCTSSQSLVHRNGNTFLNWFQQRPGQSPRRLIYWVSNRDSGVPDRFSGSGSGTNFTLKINRVEAEDVGVYYCMQGTHWPPFTFGGGTKVEIK

SEQ ID NO: 9745 - protein, 108 aa, Artificial Sequence; identical to SEQ ID NO: 8902
  Synthetic construct

SEQ ID NO: 9746 - protein, 113 aa, Artificial Sequence
  Synthetic construct
DIVMTQSPDSLSVSLGGRATINCRASQNVLLESNNKNFVAWFQQRPGQSPKLLIYWASVRDNGVPDRFTGSGSGTDFTLTISNLQAEDVAVYYCQQYYLPPWTFGQGTRVEIR

SEQ ID NO: 9747 - protein, 107 aa, Artificial Sequence
  Synthetic construct
EIVLTQSPGTLSLSPGDIGTLSCRASQSLISRYLAWYQQKPGQAPRLLIFGASTRASGTPERFSGSGSGTDFTLTISRLEPEDFAVYYCQQSYSSPTFGPGTKVEIK

SEQ ID NO: 9748 - protein, 107 aa, Artificial Sequence; identical to SEQ ID NO: 8133
  Synthetic construct

SEQ ID NO: 9749 - protein, 111 aa, Artificial Sequence
  Synthetic construct
QSVLTQPPSASGTPGQRVTISCSGSSSNIGSNTVNWYQQLPGTAPKLLIYSNNQRPSGVPDRFSGSKSGTSASLAISGLQSEDEADYYCAAWDDSLNGPWVFGGGTKLTVL

SEQ ID NO: 9750 - protein, 111 aa, Artificial Sequence
  Synthetic construct
DVVMTQSPLSLPVTLGQPASISCRSSRSLVHSDGTTYLSWFQQRPGQSPRRLIYKVSIRDSGVPDRFSGSGSGSDFRLEISRVEAEDVGTYYCMQGTHFLTFGGGTKVQIK

SEQ ID NO: 9751 - protein, 107 aa, Artificial Sequence
  Synthetic construct
EIVMTQSPATLSVSPGERATLSCRASQSVSSNLAWYQQKPGQAPRLLIYGASTRATGIPARFSGSGSGTEFTLTISSLQSEDFAVYYCQQYNNWRVTFGQGTRLEIK

SEQ ID NO: 9752 - protein, 107 aa, Artificial Sequence; identical to SEQ ID NO: 9154
  Synthetic construct

SEQ ID NO: 9753 - protein, 107 aa, Artificial Sequence; identical to SEQ ID NO: 9412
  Synthetic construct

SEQ ID NO: 9754 - protein, 108 aa, Artificial Sequence; identical to SEQ ID NO: 8561
  Synthetic construct

SEQ ID NO: 9755 - protein, 107 aa, Artificial Sequence; identical to SEQ ID NO: 9154
  Synthetic construct

SEQ ID NO: 9756 - protein, 110 aa, Artificial Sequence
  Synthetic construct
QSALTQPASVSGSPGQSVTISCTGTSSDVGSYKYVSWYQQHPGKAPKLMIYDVSHRPSGVSNRFSGSKSGNTASLTISGLQAEDEADYYCSSYTSSNTQVFGTGTKVTVL

SEQ ID NO: 9757 - protein, 110 aa, Artificial Sequence
  Synthetic construct
QSALTQPPSVSGAPGQSVTISCTGTTSDVGNYNRVSWYQQSPGTAPKLLIFEVINRPSGVPDRFSASKSGNTASLTISGLQAEDEADYYCNSYTSSGTLVFGTGTKVTVL

SEQ ID NO: 9758 - protein, 113 aa, Artificial Sequence; identical to SEQ ID NO: 8825
  Synthetic construct

SEQ ID NO: 9759 - protein, 109 aa, Artificial Sequence
  Synthetic construct
EIVLTQSPATLSLSPGERATLSCRASQSDSSYVAWYQQKPGQAPRILIYDVSNRATGIPARFSGSGSETDFTLTISSLEPEDFAVYYCQHRSNWPLLITFGQGTRLDIK

SEQ ID NO: 9760 - protein, 107 aa, Artificial Sequence
  Synthetic construct
DIQMTQSPSSLSASVGDRVTITCRASQGISTYLNWYQQKPGKAPNLLISAASSLQSGVPSRFSGSGSGTDFTLTISSLQPEDFATYYCQQSYLTPRTFGPGTTVDIK

SEQ ID NO: 9761 - protein, 107 aa, Artificial Sequence
  Synthetic construct
DIQMTQSPSSLSASVGDRVTITCRASQTISNSLNWYQQKPGKAPKLLIYTASSLQSGVPSRFSGSGSGTDFTLTISSLQPEDFATYYCQQSYSTPRTFGLGTKVEIK

SEQ ID NO: 9762 - protein, 107 aa, Artificial Sequence; identical to SEQ ID NO: 8065
  Synthetic construct

SEQ ID NO: 9763 - protein, 107 aa, Artificial Sequence
  Synthetic construct
DIQMTQSPSSLSASVGDSVTITCRASQNIDSFLNWYQQKPGKAPNLLVYAASSLQSGVPSRFSGSGSGTDFTLTISSLQPEDFATYYCQQSYSTLITFGQGTRLEIK

SEQ ID NO: 9764 - protein, 107 aa, Artificial Sequence
  Synthetic construct
DILMTQSPSTLSASVGDRVTITCRASQSITDWLAWYQQKPGRAPKLLIYKASTLESGVPSRFSGSGSGTEFTLTISSLQPDDSATYYCQQYNHYPLTFGGGSKVEIR

SEQ ID NO: 9765 - protein, 111 aa, Artificial Sequence; identical to SEQ ID NO: 8793
  Synthetic construct

SEQ ID NO: 9766 - protein, 112 aa, Artificial Sequence
  Synthetic construct
QSALTQPASVSGSPGQSITISCTGISSDVGPYKHVSWYQEHPGKAPKLLIYDVSGRPSGVSNRFSGSKSGNTASLTISGLQAEDEAEYYCASYTSSSTLEVVFGGGTKLTVL

SEQ ID NO: 9767 - protein, 115 aa, Artificial Sequence; identical to SEQ ID NO: 8149
  Synthetic construct

SEQ ID NO: 9768 - protein, 112 aa, Artificial Sequence
  Synthetic construct
QSALTQPASVSGSPGQSITISCTGTSSDFGLYKHVSWYQQYPGKAPKLIIYDVTSRPSGVSNRLSGSKSGNVASLTISGLQAEDEADYYCTSYTSTSTLEVVFGGGTKLTVL

SEQ ID NO: 9769 - protein, 109 aa, Artificial Sequence
  Synthetic construct
EIVLTQSPGTLSLSPGERATLSCRASQSVSSSYLAWYQQKPGQAPRLLIYGASNRAAGVPDRFSGSGSGTHFTLTISRLEPEDFAVYYCQQYGISPRYTFGQGTKLEIK

SEQ ID NO: 9770 - protein, 108 aa, Artificial Sequence
  Synthetic construct
DIQMTQSPSSLSASVGDRVTITCRASQSISSYLNWYQQKPGKAPKLLIYAASSLQSGVPSRFSGSGSGTDFTLTISSLQPEDFATYYCQQSYSTPTWTFGQGTKVEIK

SEQ ID NO: 9771 - protein, 107 aa, Artificial Sequence; identical to SEQ ID NO: 8397
  Synthetic construct

SEQ ID NO: 9772 - protein, 107 aa, Artificial Sequence; identical to SEQ ID NO: 8435
  Synthetic construct

SEQ ID NO: 9773 - protein, 107 aa, Artificial Sequence; identical to SEQ ID NO: 8126
  Synthetic construct

SEQ ID NO: 9774 - protein, 107 aa, Artificial Sequence
  Synthetic construct
EIVLTQSPATLSLSPGERATLSCRASQSVSSYLAWYQQKPGQAPRLLIYDASNRATGIPARFSGSGSGTDFTLTISSLEPEDFAVYYCQRRSNWPFTFGPGTKVDIK

SEQ ID NO: 9775 - protein, 108 aa, Artificial Sequence; identical to SEQ ID NO: 8099
  Synthetic construct

SEQ ID NO: 9776 - protein, 106 aa, Artificial Sequence
  Synthetic construct
EIVLTQSPATLSLSPGERATLSCRASQSVSSYLAWYQQKPGQAPRLLIYDASNRATGVPARFSGSGSGTDFTLTISSLEPEDFAVYYCQQRSNSITFGQGTRLEIK

SEQ ID NO: 9777 - protein, 108 aa, Artificial Sequence; identical to SEQ ID NO: 8872
  Synthetic construct

SEQ ID NO: 9778 - protein, 111 aa, Artificial Sequence
  Synthetic construct
DIVMTQSPLSLPVTPGEPASISCRSSQSLLHSNGYNYLDWYLQKPGQSPQLLIYLGSNRASGVPDRFSGSGSGTDFTLKISRVEAEDVGVYYCMQALQPHTFGQGTKLEIK

SEQ ID NO: 9779 - protein, 112 aa, Artificial Sequence
  Synthetic construct
DIVMTQTPLSSPVTLGQPASISCRSSQSLVHSDGNTYLSWLQQRPGQPPRLLIYKISNRFSGVPDRFSGSGAGTDFTLKISRVEAEDVGVYYCTQATQFPITFGQGTRLEIK

SEQ ID NO: 9780 - protein, 113 aa, Artificial Sequence; identical to SEQ ID NO: 8095
  Synthetic construct

SEQ ID NO: 9781 - protein, 111 aa, Artificial Sequence
  Synthetic construct
QLVLTQSPSASASLGASVKLTCTLSSGHSSYAIAWHQQQPEKGPRYLMKLNSDGSHSKGDGIPDRFSGSSSGAERYLTISSLQSEDEADYYCQTWGTGFWVFGGGTKLTVL

SEQ ID NO: 9782 - protein, 110 aa, Artificial Sequence
  Synthetic construct
QSVLTQPPSTSGTPGQRVIISCSGSRFNIGSNYVYWYHQLPGMAPKLLIYKNDQRPSGVPDRFSGSKSGTSASLAISGLRSEDEADYYCATWDDSVSGVVFGGGTKLTVL

SEQ ID NO: 9783 - protein, 107 aa, Artificial Sequence
  Synthetic construct
DIQMTQSPSSLSASVGDRVTITCRASQGISNYLAWFQQKPGKAPKSLIYAASSLQSGVPSKFSGSGSGTDFTLTISSLQPEDFATYYCQQYNRYPGTFGQGTRLEIK

SEQ ID NO: 9784 - protein, 110 aa, Artificial Sequence; identical to SEQ ID NO: 8924
  Synthetic construct

SEQ ID NO: 9785 - protein, 110 aa, Artificial Sequence; identical to SEQ ID NO: 8067
  Synthetic construct

SEQ ID NO: 9786 - protein, 112 aa, Artificial Sequence
  Synthetic construct
EILLTQAPLSSPVPPGQAASLSCRASQTLEHSDGYTYLSWLHQRSGQTPRLLIYKVSNRFSGVPDRFSGGGAGAVFTLNISRVEPADAGTYYCTQSKQFPYTFGRGTRLEIK

SEQ ID NO: 9787 - protein, 106 aa, Artificial Sequence
  Synthetic construct
EIVLTQSPDTLSLSPGERATLSCRASQSVSSYLAWHQQKPGQPPRLLIYGASSRATGIPDRFSGSGSGTHFTLTITRLEPEDFAIYYCQQYGSSYTFGQGTRLESK

SEQ ID NO: 9788 - protein, 107 aa, Artificial Sequence
  Synthetic construct
DIQMTQSPSSVSASVGDRVSITCRASQDIRNWLAWYQQKPGRGPTLLIYAASTLESGVPSRFSGSRSGTDFTLTISSLQPEDFATYYCQQANSFPITFGQGTRLEIK

SEQ ID NO: 9789 - protein, 110 aa, Artificial Sequence
  Synthetic construct
QSVLTQPPSASGTPGQRVTISCSGSSSNIGSNYVYWYQQLPGTAPKLLIYRNNQRPSGVPDRFSGSKSGTSASLAISGLRSEDEADYYCAAWDDSLSGAVFGGGTQLTVL

SEQ ID NO: 9790 - protein, 106 aa, Artificial Sequence
  Synthetic construct
EIVLTQFPATLSLSPGETATLSCRASQSVSTYLGWYQQRPGQAPRLLIHDASIRAPDIPVRFSGSGSGTDFTLTISSLEPEDSAVYYCQHRSNGYNFGPGTKLEIK

SEQ ID NO: 9791 - protein, 107 aa, Artificial Sequence; identical to SEQ ID NO: 8119
  Synthetic construct

SEQ ID NO: 9792 - protein, 111 aa, Artificial Sequence; identical to SEQ ID NO: 8610
  Synthetic construct

SEQ ID NO: 9793 - protein, 110 aa, Artificial Sequence
  Synthetic construct
QSALTQPASVSGSPGQSITISCTGTNSDIGAYNYVSWYQQRPGKGPKLMIYDVTKRPSGVSNRFSGSKSGNTASLTISGLQAEDEADYYCNSYTTSSTWVFGGGTKLTVL

SEQ ID NO: 9794 - protein, 111 aa, Artificial Sequence; identical to SEQ ID NO: 8818
  Synthetic construct

SEQ ID NO: 9795 - protein, 110 aa, Artificial Sequence
  Synthetic construct
QLVLTQSPSASASLGASVKLTCTLSSGRSSYAIAWHQQQPEKGPRYLIRINSDGSHSKGDGIPDRFSGSSSGAERYLTISSLQSEDEADYYCQTWGAGRVFGGGTKLTVL

SEQ ID NO: 9796 - protein, 110 aa, Artificial Sequence
  Synthetic construct
QTVVTQEPSLTVSPGGTVTLTCASSTGAVTSGYYPNWFQQKPGQAPRALIYSTSNKHSWTPARFSGSLLGGKAALTLSGVQPEDEAEYYCLLYYGGALWVFGGGTKLTVL

SEQ ID NO: 9797 - protein, 110 aa, Artificial Sequence; identical to SEQ ID NO: 8067
  Synthetic construct

SEQ ID NO: 9798 - protein, 107 aa, Artificial Sequence [sequence omitted]

SEQ ID NO: 9799 - protein, 108 aa, Artificial Sequence
  Synthetic construct
EIVLTQSPGTLSLSPGERATLSCRASQSVSSSYLAWYQQKPGQAPRLLIYGASSRATGIPDRFSGSGSGTDFTLTISRLEPEDFAVYYCQQYGSSPVTFGGGTKVEIK

SEQ ID NO: 9800 - protein, 108 aa, Artificial Sequence
  Synthetic construct
EIVMTQSPATLSVSPGERATLSCRASQSVSSNLAWYQQKPGQAPRLLIYGASTRATGIPARFSGSGSGTEFTLTISSLQSEDFAVYYCQQYNNWPPLTFGGGTKVEIK

SEQ ID NO: 9801 - protein, 112 aa, Artificial Sequence
  Synthetic construct
DIVLTQSPLSLPVTPGEPASISCRSSQSLLHSNGYNYLDWYLQKPGRSPQLLIYLASRRASGVPDRFSGSGSGTDFTLKISRVEADDVGIYYCMQALQTPLTFGGGTRVEIK

SEQ ID NO: 9802 - protein, 107 aa, Artificial Sequence
  Synthetic construct
DIQMTQSPSTLSASVGDRVTITCRASQSISSWLAWYQQKPGKAPKLLIYKASSLESGVPSRFSGSGSGTEFTLTISSLQPDDFATYYCQQYNSYSKTFGQGTKVEIK

SEQ ID NO: 9803 - protein, 107 aa, Artificial Sequence; identical to SEQ ID NO: 8176
  Synthetic construct

SEQ ID NO: 9804 - protein, 107 aa, Artificial Sequence; identical to SEQ ID NO: 8282
  Synthetic construct

SEQ ID NO: 9805 - protein, 112 aa, Artificial Sequence; identical to SEQ ID NO: 9768
  Synthetic construct

SEQ ID NO: 9806 - protein, 107 aa, Artificial Sequence; identical to SEQ ID NO: 8176
  Synthetic construct

SEQ ID NO: 9807 - protein, 113 aa, Artificial Sequence
  Synthetic construct
DVVMTQSPLSLPVTLGQPASISCRSSQSLVHSDGNTYLNWFQQRPGQSPRRLIYKISNRDSGVPDRFSGSGSGTDFTLKISRVEAEDVGVYYCVQGTHWPPLTFGGGTKVEIK

SEQ ID NO: 9808 - protein, 111 aa, Artificial Sequence
  Synthetic construct
QSALTQPASVSGSPGQSITISCTGTSSDVGGYNYVSWYQQHPGKAPKLMIYDVSNRPSGVSNRFSGSKSGNTASLTISGLQAEDEADYYCSSYTSSSTPYVFGTGTKVTVL

SEQ ID NO: 9809 - protein, 107 aa, Artificial Sequence
  Synthetic construct
GIVLTQSPATLSLSPGERATLSCRASQSVGNYLAWYQQKPGQAPRLLIFDASNRATGIPARFSGSGSGTDFTLTISSLESEDFAVYYCQQRGNWPLTFGGGTKVEIK

SEQ ID NO: 9810 - protein, 113 aa, Artificial Sequence
  Synthetic construct
DIVMTQSPDSLAVSLGERATINCKSSQSVLYSSNNKNYLAWYQQKPGQPPKLLIYWASTRESGVPDRFSGSGSGTDFTLTISSLQAEDVAVYYCQQYYSTPHTFGQGTKLEIK

SEQ ID NO: 9811 - protein, 110 aa, Artificial Sequence
  Synthetic construct
QSVLTQPPSMSAAPGQKVTFSCSGSNSNVGNNYVSWYQQIPETAPKLLLYENNKRPAGIPDRFSGSKSGTSATLSITGLNTGDEGDYYCGTWDSSLSAVVFGGGTKLTVL

SEQ ID NO: 9812 - protein, 111 aa, Artificial Sequence
  Synthetic construct
QPVLTQSPSASAPLGGSVKLTCTLSSGYRNHAIAWHQQQPQKGPRYLMKLNSDGSHIKGGGIPDRFSGSSSGAERYLTISSLQSEDEADYYCQTWDSDIVFFGGGTNLAVL

SEQ ID NO: 9813 - protein, 110 aa, Artificial Sequence; identical to SEQ ID NO: 8171
  Synthetic construct

SEQ ID NO: 9814 - protein, 116 aa, Artificial Sequence; identical to SEQ ID NO: 9017
  Synthetic construct

SEQ ID NO: 9815 - protein, 107 aa, Artificial Sequence; identical to SEQ ID NO: 8596
  Synthetic construct

SEQ ID NO: 9816 - protein, 110 aa, Artificial Sequence
  Synthetic construct
QSALTQPPSVSGSPGQSVTISCTGTSRDVGSYNSVSWYRQHPGEAPQAIIYDVYKRPPGVPDRFSGSKSGNTASLTISGLQAGDEADYFCCSYAGRYTHVFGTATKVTVL

SEQ ID NO: 9817 - protein, 111 aa, Artificial Sequence
  Synthetic construct
QAVLTQPPSVSAAPGQKVTISCSGSSSNIGNNYVSWFQQLPGTAPKLIIYDDNKRPSGIPDRFSGSKSGTSATLRITGLQTGDEADYYCGAWDPSLSAGRVFGGGTKLTVL

SEQ ID NO: 9818 - protein, 113 aa, Artificial Sequence; identical to SEQ ID NO: 8095
  Synthetic construct

SEQ ID NO: 9819 - protein, 113 aa, Artificial Sequence; identical to SEQ ID NO: 8989
  Synthetic construct

SEQ ID NO: 9820 - protein, 107 aa, Artificial Sequence
  Synthetic construct
DIQMTQSPSSLSASVGDRVIITCQANQDISDSLNWYQQKPGKAPKLLIYDASKLEPGVPSRFSGSGSGTHFTFTIMSLQPEDIATYYCQQFDNLPITFGQGTRLEIK

SEQ ID NO: 9821 - protein, 107 aa, Artificial Sequence; identical to SEQ ID NO: 8152
  Synthetic construct

SEQ ID NO: 9822 - protein, 107 aa, Artificial Sequence
  Synthetic construct
DIQMTQSPSTLSASVGDRVTITCRASQSISNWLAWYQQKPGKAPKLLIYKASSLESGVPSRFSGSGSGTEFTLTISSLQPDDFATYYCQQYNSYPWTFGQGTKVEIK

SEQ ID NO: 9823 - protein, 106 aa, Artificial Sequence
  Synthetic construct
SYDLTQPPSVSVSPGQTASITCSGDKLGDQYACWYQQKPGQSPVLVIFQDNRRPSGIPERFSGSNSGNTATLTISGTQAMDEADYYCQAWDSSSGVFGGGTKLSVL

SEQ ID NO: 9824 - protein, 107 aa, Artificial Sequence; identical to SEQ ID NO: 8658
  Synthetic construct

SEQ ID NO: 9825 - protein, 107 aa, Artificial Sequence
  Synthetic construct
DIQMTQSPSSLSASVGDRVTITCRASQSISNYLNWYQQRPEKAPKLLIYAASNLQSGVPSRFSGSGSGTDFTLTISSLQPEDSATYYCQQSYSTPQTFGQGTKLEIK

SEQ ID NO: 9826 - protein, 107 aa, Artificial Sequence
  Synthetic construct
DIQMTQSPSSLSASVGDRITITCRTSQNINTYLNWYQRRPGKAPNLLIYAASSAHTGVPGRFRGSGSGTDFTLTISSLQPEDFATYYCQQTYSVPWTFGQGTKVEIK

SEQ ID NO: 9827 - protein, 109 aa, Artificial Sequence
  Synthetic construct
QSLLTQPPSASGTPGQRVTISCSGSSSNIGSNYVYWYQHLPGTAPKLLIYRNDQRPSGVPDRFSGSKSGTSASLAISGLRSEDEALYYCAAWDDSLFVVFGGGTRLTVL

SEQ ID NO: 9828 - protein, 107 aa, Artificial Sequence; identical to SEQ ID NO: 8176
  Synthetic construct

SEQ ID NO: 9829 - protein, 107 aa, Artificial Sequence [sequence omitted]

SEQ ID NO: 9830 - protein, 108 aa, Artificial Sequence
  Synthetic construct
ETVMTQSPATLSVSPGERVTLSCRASHSVSSNLAWYQQKAGQAPRLLIYGASNRATGIPARFSGSGSGTEFTLTIISLQSEDFAVYYCQQYNNWPPYTFGQGTKLEIK

SEQ ID NO: 9831 - protein, 108 aa, Artificial Sequence
  Synthetic construct
EVVLTQSPVTLSVSLGERATFSCRATESVGVKLAWYHQKPGQAPRLLVFDASTRATGIPARFSGSGSGTDFTLTISSLQSEDFGLYFCQQYGIWPPITFGQGTRLEIK

SEQ ID NO: 9832 - protein, 112 aa, Artificial Sequence
  Synthetic construct
DVVLTQSPLSLPVTLGQPASISCRPSQSLVHTDGNTYLNWFHQRPGQSPRRLIYKVSNRDSGVPDRFSGSGSGTEFTLKISRVEAEDVGVYYCMQGTEWPRTFGQGTKVEIK

SEQ ID NO: 9833 - protein, 111 aa, Artificial Sequence
  Synthetic construct
QSALTQPPSLSETPGQRVTISCSGSSSNVEHKYVYWYQQVPGTAPRLIVYRDNLRPSGVSDRFSGSKSGTSASLAISGLRSDDEAIYFCAAWDDSLYGHLLFGGGTKLTVL

SEQ ID NO: 9834 - protein, 108 aa, Artificial Sequence
  Synthetic construct
EIVLTQSPGTLSLSPGERATLSCRASESISSRSLAWFQQKPGQAPRLLISDASSRATGVPHRFSGRGSGTDFTLTISRLEPEDFAVYFCQQYSSFPRTFGQGTKVEVK

SEQ ID NO: 9835 - protein, 107 aa, Artificial Sequence
  Synthetic construct
DIQMTQSPSTLSASVGDRVTITCRASQSIRHWLAWYQQKPGKAPKLLIYKATSLESGVPSRFSGSGSGTDFTLTISSLQPDDFATYYCQQYDRYWWTFGQGTKVEIK

SEQ ID NO: 9836 - protein, 108 aa, Artificial Sequence
  Synthetic construct
EIVMTQSPATLSVSPGERATLSCRASQSVSSNLAWYQQKPGQAPRLLIYGASTRATGIPARFSGSGSGTEFTLTISSLQSEDFAVYYCQQYNNWPMYTFGQGTKLEIK

SEQ ID NO: 9837 - protein, 106 aa, Artificial Sequence
  Synthetic construct
DIVMTQSPATLSVSPGDAATLSCRASQSVNNALAWYQQKPGRAPRLLISYVATRATGIPARFSGSGSGTEFTLTISSLQSEDSAVYYCQQYHRWPTFGQGTKVEIK

SEQ ID NO: 9838 - protein, 107 aa, Artificial Sequence
  Synthetic construct
AIRMTQSPSSFSASTGDRVTITCRASQGISSYLAWYQQKPGKAPKLLIYAASTLQSGVPSRFSGSGSGTDFTLTISCLQSEDFATYYCQQYYSYPQTFGQGTKVEIK

SEQ ID NO: 9839 - protein, 110 aa, Artificial Sequence
  Synthetic construct
QSGLTQPPSASGTPGQGVTISCSGGSSNIGSNAVHWYQHLPGTAPRLLIYTNRQRPSGVPDRFSGSKSGTSASLAISGLQSDDEADYYCAVWDDSLNGWVFGGGTKLTVL

SEQ ID NO: 9840 - protein, 110 aa, Artificial Sequence
  Synthetic construct
QTVVTQEPSFSVSPGGTVTLTCGLSSGSVSTSYYPSWYQQTPGQAPRTLIYSTNTRSSGVPDRFSGSILGNKAALTITGAQADDESDYYCVLYMGSGIWVFGGGTKLTVL

SEQ ID NO: 9841 - protein, 107 aa, Artificial Sequence; identical to SEQ ID NO: 8093
  Synthetic construct

SEQ ID NO: 9842 - protein, 112 aa, Artificial Sequence
  Synthetic construct
QSALTQPASVSGSPGQSITISCTGTSSDVGGYNYVSWYQQHSGKAPKLMIYEVTSRPSGVSDRFSGSKSGNTASLTISGLQAEDEADYYCCSYRGSSTLDVVFGGGTKLTVL

SEQ ID NO: 9843 - protein, 107 aa, Artificial Sequence; identical to SEQ ID NO: 8573
  Synthetic construct

SEQ ID NO: 9844 - protein, 109 aa, Artificial Sequence; identical to SEQ ID NO: 9085
  Synthetic construct

SEQ ID NO: 9845 - protein, 108 aa, Artificial Sequence; identical to SEQ ID NO: 9800
  Synthetic construct

SEQ ID NO: 9846 - protein, 108 aa, Artificial Sequence
  Synthetic construct
EIVLTQSPGTLSLSPGERATLSCRASQSVSGSFLAWHQQIPGQAPRLLIYAASSRATGIPDRFSGSGSGTDFTLTISRLEPEDSAVYYCQQYGSSPLTFGGGTKVEIK

SEQ ID NO: 9847 - protein, 108 aa, Artificial Sequence
  Synthetic construct
DIQMTQSPSTLSASVGDRVTITCRASQSISSWLAWYQQKPGKAPKLLIYKASSLESGVPSRFSGSGSGTEFTLTISSLQPDDFATYYCQQYNSYSTWTFGQGTKVEIK

SEQ ID NO: 9848 - protein, 103 aa, Artificial Sequence
  Synthetic construct
AIQLTQSPSSLSASVGDRVTITCRASQGISSALAWYQQKPGKAPKLLIYDASSLESGVPSRFSGSGSGTDFTLTISSLQPEDFATYYCQQFFTFGGGTKVEIK

SEQ ID NO: 9849 - protein, 108 aa, Artificial Sequence
  Synthetic construct
SSELTQDPAVSVALGQTVKITCQGDSLRTYYASWYQQKPGQAPVLVFYGKNNRPSGIPDRFSGSSSGNTASLTITGAQAEDEADYYCNSRDTSDNRVVFGGGTKLTVL

SEQ ID NO: 9850 - protein, 107 aa, Artificial Sequence
  Synthetic construct
DIQMTQSPSSLSASVGDRVTITCQASQDISNSLNWYQQKPGKAPKLLIFDGSNLEPGVPSRFSGSGSGTEFAFTISSLQPEDIATYYCQQFDHLPITFGQGTRLDIK

SEQ ID NO: 9851 - protein, 112 aa, Artificial Sequence
  Synthetic construct
NIKLTQSPLSLPVTPGEPASISCRSSQSLLHRNGYNYLDWYLQKPGQSPQLLIYLSSSRASGVPDRFSGSGSHTDFTLKISRVEAEDVGVYYCMQALETPLTFGGGTKVEIK

SEQ ID NO: 9852 - protein, 109 aa, Artificial Sequence
  Synthetic construct
EIVLTQSPGTLSLSPGERATLSCRASQIICSSCLAWYQQIPGRAPRLLIYGASSRATGIPDRFSGSGSGTDFTLTISRLEPEDFAMYYCQQYNSSPPITFGQGTRLQIK

SEQ ID NO: 9853 - protein, 110 aa, Artificial Sequence
  Synthetic construct
QSALTQPASVSGSPGQSITISCTGTSSDVGGYNYVSWYQQHPGKAPKLMIYDVSKRPSGVSNRFSGSKSGNTASLTISGLQAEDEADYYCSSYTSSRLYVFGTGTKVTVL

SEQ ID NO: 9854 - protein, 113 aa, Artificial Sequence
  Synthetic construct
DVVMTQSPLSLPVTLGQPASISCRSSQSLVHSDGNTYLNWFQQRPGQSPRRLIYKVSNRDSGVPDRFSGSGSGTDFTLKISRVEAEDVGVYYCMQGTHWPLYTFGQGTKLEIK

SEQ ID NO: 9855 - protein, 108 aa, Artificial Sequence
  Synthetic construct
SSELTQDPAVSVALGQTVRITCQGDSLRSYYASWYQQKPGQAPLLVIYGKNNRPSGIPDRFSGSNSGNTASLTITGAQAEDEADYYCNSRDSSGNHVVFGGGTKLTVL

SEQ ID NO: 9856 - protein, 107 aa, Artificial Sequence
  Synthetic construct
DIQMTQSPSTLSASVGDRVTITCRASQSISSWLAWYQQKPGKAPKLLIYKASSLESGVPSRFSGSGSGTEFTLTISSLQPDDFATYYCQQYNSYSGTFGGGTKVEIK

SEQ ID NO: 9857 - protein, 112 aa, Artificial Sequence
  Synthetic construct
QSVLTQPPSVSGAPGQRVTISCTGSSSNIGAGYDVNWYHQLPGTAPKLLIYGNTNRPSGVPDRFSGSKSGTSASLAITGLQAEDEADYYCQSYDSGLSGLDVFGTGTKVTVL

SEQ ID NO: 9858 - protein, 108 aa, Artificial Sequence
  Synthetic construct
SYVLTQPPSVSVAPGKTARITCEGDNIESKNVNWYQQKPGQAPVLVMYYDTERPSGIPERFSGSNSGNTATLTIRGVEAGDEADYFCQVWINIGDHRVFAGGTRLAVL

SEQ ID NO: 9859 - protein, 110 aa, Artificial Sequence
  Synthetic construct
QSVLTQPPSASGTPGQRVTISCSGSSSNIGSNYVYWYQQLPGTAPKLLIYRNNQRPSGVPDRFSGSKSGTSASLAISGLRSEDEADYYCAAWDDSLSGQVFGTGTKVTVL

SEQ ID NO: 9860 - protein, 106 aa, Artificial Sequence
  Synthetic construct
DIQMTQSPSTLSASVGDRVTITCRASQSISSWLAWYQQKPGKAPKLLIYKASSLESGVPSRFSGSGSGTEFTLTISSLQPDDFATYYCQQYNSGWTFGQGTKVEIK

SEQ ID NO: 9861 - protein, 112 aa, Artificial Sequence
  Synthetic construct
DIVMTQSPLSLPVTPGEPASISCRSSQSLLHSNGYNYLDWYLQKPGQSPQLLIYLGSNRASGVPDRFSGSGSGTDFTLKISRVEAEDIGIYYCMQALQIPPTFGGGTKVEIK

SEQ ID NO: 9862 - protein, 107 aa, Artificial Sequence; identical to SEQ ID NO: 8091
  Synthetic construct

SEQ ID NO: 9863 - protein, 111 aa, Artificial Sequence
  Synthetic construct
DIVMTQSPLSLPVTPGEPASISCRSSQSLLHSNGYNYLDWYLQKPGQSPQLLIYLGSNRASGVPDRFSGSGSGTDFTLKISRVEAEDVGVYYCMQALQTYTFGQGTKLEIK

SEQ ID NO: 9864 - protein, 109 aa, Artificial Sequence
  Synthetic construct
QSALTQPASVSGSPGQSITISCTGTSSDVGGYNYVSWYQQHPGKAPKLMIYDVSNRPSGVSNRFSGSKSGNTASLTISGLQAEDEADYYCSSYTSSTVVFGGGTKLTVL

SEQ ID NO: 9865 - protein, 112 aa, Artificial Sequence
  Synthetic construct
DIVMTQTPLSLSVTPGQPASISCKSSQSLLHRDGKTYLFWYLQKPGQSPQLLIYEVSSRFSGVPDRFSGSGSGTDFTLKISRVEAEDVGIYYCMQGLHIPWTFGQGTQVEIK

SEQ ID NO: 9866 - protein, 113 aa, Artificial Sequence; identical to SEQ ID NO: 8276
  Synthetic construct

SEQ ID NO: 9867 - protein, 110 aa, Artificial Sequence
  Synthetic construct
QSVLTQPPSASGTPGQRVTISCSGSSSNIGSNTVNWYQQLPGTAPKLLIYSNNQRPSGVPDRFSGSKSGTSASLAISGLQSDDEADYYCAAWDDSLTGVVFGGGTKLTVL

SEQ ID NO: 9868 - protein, 108 aa, Artificial Sequence
  Synthetic construct
EIVLTQSPGTLSLSPGERATLSCRASPSVSGYYLAWYQQKPGQAPRLLIYGTSNRATAIPDRFTGSGSGIDFTLTISRVEPEDFAVYYCQQYGSTPYTFGQGTKLEIK

SEQ ID NO: 9869 - protein, 109 aa, Artificial Sequence; identical to SEQ ID NO: 8993
  Synthetic construct

SEQ ID NO: 9870 - protein, 111 aa, Artificial Sequence; identical to SEQ ID NO: 8610
  Synthetic construct

SEQ ID NO: 9871 - protein, 109 aa, Artificial Sequence
  Synthetic construct
ELVLTQSPGALSLSPGERATLSCRASQNVSDNYLAWYQQKPGQAPRLLIYAASSRAAGVPDRFSGSGSGTDFTLTISRLESEDSAVYYCQNYGHSPTWTFGQGTKVEIK

SEQ ID NO: 9872 - protein, 107 aa, Artificial Sequence; identical to SEQ ID NO: 8573
  Synthetic construct

SEQ ID NO: 9873 - protein, 109 aa, Artificial Sequence; identical to SEQ ID NO: 9508
  Synthetic construct

SEQ ID NO: 9874 - protein, 108 aa, Artificial Sequence
  Synthetic construct
AIQLTQSPSSLSASVGDRVTITCRASQGISSYLAWYQQKPGKAPKLLIYAASTLQSGVPSRFSGSGSGTDFTLTISSLQPEDFATYYCQQLNSYRPITFGQGTRLEIK

SEQ ID NO: 9875 - protein, 111 aa, Artificial Sequence
  Synthetic construct
DIVMTQSPLSLPVTPGEPASISCRSSQSLLHSNGYNYLDWYLQKPGQSPQLLIYLGSNRASGVPDRFSGSGSGTDFTLKISRVEAEDVGVYYCMQALQKLTFGGGTKVEIK

SEQ ID NO: 9876 - protein, 107 aa, Artificial Sequence; identical to SEQ ID NO: 8200
  Synthetic construct

SEQ ID NO: 9877 - protein, 106 aa, Artificial Sequence
  Synthetic construct
DIQLTQSPSFLSASVGDRVTITCRASQGISSYLAWYQQKPGKAPKLLIYAASTLQSGVPSRFSGSGSGTEFTLTISSLQPEDFATYYCQQLNSYPHFGPGTKVDIK

SEQ ID NO: 9878 - protein, 108 aa, Artificial Sequence
  Synthetic construct
GLVLTQSPGTLSLSPGESATLSCRASQTVRNSYLGWYQQKLGHPPRLLIYATSSRAPDIPDRFSGSGSGTDFTLTISRLEPEDFAMYYCLQYGNSPRTFGQGTKVEIK

SEQ ID NO: 9879 - protein, 106 aa, Artificial Sequence
  Synthetic construct
SFELTQPPSVSVSPGQTASITCSGDKLGDTYVSWYQQRPGQSPILVIYQDFMRPSGIPERFSGSNSGNTATLTISGTQTMDEADYFCQAWDSRTRVFGGGTKLTVL

SEQ ID NO: 9880 - protein, 110 aa, Artificial Sequence
  Synthetic construct
QSVLTQSPSASGTPGQRVTISCSGSSSNIGSNYVYWYQQLPGTAPKLLIYRNNQRPSGVPDRFSGSKSGTSASLAISGLRSEDEADYYCAAWDDSLSGVVFGGGTKLTAL

SEQ ID NO: 9881 - protein, 107 aa, Artificial Sequence
  Synthetic construct
SHELTQPPSVSVSPGQTATITCSGDKLGDRYICWYQQKPGQPPVVVIYEDIKRPSGIPERFSGSHSGNTATLTISGTQAMDEADYYCQAWDSSTEVVFGGGTKLTVL

SEQ ID NO: 9882 - protein, 112 aa, Artificial Sequence
  Synthetic construct
QSVLTQPPSASGTPGQRVTISCSGSTSNIGSNYVYWYQQLPGTAPKVLIYKNKLRPSGVPDRFSGSKSGTSASLVISGLRSEDEADYHCSAWDDSLSTPNVVFGGGTKLTVL

SEQ ID NO: 9883 - protein, 107 aa, Artificial Sequence; identical to SEQ ID NO: 9335
  Synthetic construct

SEQ ID NO: 9884 - protein, 110 aa, Artificial Sequence; identical to SEQ ID NO: 8067
  Synthetic construct

SEQ ID NO: 9885 - protein, 107 aa, Artificial Sequence
  Synthetic construct
DIQMTQSPSSLSASVGDRVTITCRASQTIGTFLNWYHQKPGRAPNLLIYAVSNLQTGLPARFSGSGSGTDFTLTISGLQPEDLGTYYCQQSDITPWTFGQGTKVEIN

SEQ ID NO: 9886 - protein, 108 aa, Artificial Sequence
  Synthetic construct
DIQMTQSPSSVSASVGDRVTITCRASQDISSWLAWYQQKPGKAPKLLIYSASTLHSGVPSRFSGSGSGTDFTLTISNLQPEDSATYFCQQAKNFPHFTFGPGTKVNIR

SEQ ID NO: 9887 - protein, 110 aa, Artificial Sequence; identical to SEQ ID NO: 9454
  Synthetic construct

SEQ ID NO: 9888 - protein, 107 aa, Artificial Sequence
  Synthetic construct
EIVLTQSPATLSLSPGERATLSCRASQSVSSYLAWYQQKPGQAPRLLIYDSSNMATGIPARFSGSGSGTDFTLTISSLEPEDSAVYYCQQRSNWPLTFGGGTKVEIK

SEQ ID NO: 9889 - protein, 107 aa, Artificial Sequence; identical to SEQ ID NO: 8114
  Synthetic construct

SEQ ID NO: 9890 - protein, 112 aa, Artificial Sequence
  Synthetic construct
DIVMTQSSFSLPVTLGQPASISCRSSQSLVHSDGNTYLHWFQQRPGQSPRRLIYKVSNRDSGVPDRFSGSGSGTDFTLKISRVEAEDVGVYYCMQGTQWPPTFGGGTKVEIK

SEQ ID NO: 9891 - protein, 107 aa, Artificial Sequence
  Synthetic construct
DIQMTQTPSSLSASIGDRVTITCRASPGISNSLAWYQQKPGKVPKVVIYSASTLQSGVPSRFSGSGSGTDFTLTISSLQPEDVATYYCLQYDSAPWTFGQGTRVDTK

SEQ ID NO: 9892 - protein, 109 aa, Artificial Sequence; identical to SEQ ID NO: 8988
  Synthetic construct

SEQ ID NO: 9893 - protein, 112 aa, Artificial Sequence
  Synthetic construct
QSVLTQPPSVSGAPGQSVTISCTGSSSNIGAGYDVHWYQQLPGTAPKLLIHTNTKRPSGVPDRFSGSKSGTSASLAITGLQAEDEADYYCQSYDSSLSGYVVFGGGTKLTVL

SEQ ID NO: 9894 - protein, 108 aa, Artificial Sequence
  Synthetic construct
SLVLTQSPSVSVAPGQTARVTCAGYNFERKTVHWYQQKPGQAPVLVMYYDNDRPSGIPERFSGSNSGNTATLTISRVEGGDEAEYYCHIWDNRSDQYAFGSGTQVIVL

SEQ ID NO: 9895 - protein, 108 aa, Artificial Sequence
  Synthetic construct
EIVMTQSPATLSVSPGERATLSCRASQSVSSNLAWYQQKPGQAPRLLIYGASTRATGIPARFSGSGSGTEFTLTISSLQSEDFAVYYCQQYNNWPGYTFGQGTKLEIK

SEQ ID NO: 9896 - protein, 106 aa, Artificial Sequence
  Synthetic construct
DIQMTQSPSTLSASVGDRVTITCRASQSISYWLAWYQQKPGKAPKFLIYKASSLESGVPSRFSGSGSGTEFTLTISSLQPDDFATYYCQQYNSYWTFGQGTKVEIK

SEQ ID NO: 9897 - protein, 109 aa, Artificial Sequence; identical to SEQ ID NO: 8663
  Synthetic construct

SEQ ID NO: 9898 - protein, 112 aa, Artificial Sequence
  Synthetic construct
DMVMTQTPLSLSVSPGQPASISCKSSQSLLHSDGKTYLYWYLQRPGQSPQLLIYEVSSRFSGVPDRFSGSGSGTDFTLKISRVEAEDVGVYYCMEGIHLPWTFGQGTKVEIK

SEQ ID NO: 9899 - protein, 109 aa, Artificial Sequence
  Synthetic construct
EIVLTQSPANLSVSPGDGVALSCRASQTINSYLAWYQHRPGQAPRLLIYGATTRADGIPARFSGSGSGTDFTLTISSLQSEDFGFFYCQHYYSWPLGGSFGGGTKVEIK

SEQ ID NO: 9900 - protein, 111 aa, Artificial Sequence
  Synthetic construct
QSALTQPASVSGSPGQSITISCTGTSSDVGAYNYVSWYQQRPGKAPKLMIYDVSKRPSGLSNRFSGAKSGNTASLTISGLQAEDEADYYCGSFTISSTNYVFGTGTKVTVL

SEQ ID NO: 9901 - protein, 110 aa, Artificial Sequence
  Synthetic construct
QTAVTQEPSLSVSPGGTVTLTCGLSSGSVSTSYSPSWYQQTPGQAPRTLIYNKNTRSSGVPSRFSGFILGNKAALTITGAQAEDECDYFCVLYLGTGSVLFGGGTKLTVL

SEQ ID NO: 9902 - protein, 107 aa, Artificial Sequence
  Synthetic construct
EIVLTQSPDFQSVSPKEKVIITCRASQSISNLLHWYQQKPDQSPKLLIKFASQSVSGVPSRFSGGGSGTDFSLTINSLEADDAATYYCHQTASIPHTFGPGTKLEIK

SEQ ID NO: 9903 - protein, 107 aa, Artificial Sequence; identical to SEQ ID NO: 8152
  Synthetic construct

SEQ ID NO: 9904 - protein, 110 aa, Artificial Sequence
  Synthetic construct
QSALTQPPSVSGSPGQSVTISCTGTASDIGSFNRVSWYQQPPGTAPKLIMYEVFNRPSGVPDRFSGSKSGNTASLTISGLQAEDEADYFCSSYTSSSLYVFGTGTQVTVL

SEQ ID NO: 9905 - protein, 107 aa, Artificial Sequence
  Synthetic construct
DIQMTQSPSTLSASVGDRVTITCRASQSISSWLAWYQQKPGKAPKLLIYKASSLESGVPSRFSGSGSGTEFTLTISSLQPDDFATYYCQQYNSYRRTFGQGTKVEIK

SEQ ID NO: 9906 - protein, 107 aa, Artificial Sequence
  Synthetic construct
DIQMTQSPSSLSASVGDRVTITCRASQSISSYLNWYQQKPGKAPKLLIYAASSLQSGVPSRFSGSGSGTDFTLTISSLQPEDFATYYCQQSYSTLFTFGPGTKVDIK

SEQ ID NO: 9907 - protein, 109 aa, Artificial Sequence
  Synthetic construct
SSELTQDPAVSVALGQTVRITCQGDNLRNYYASWYQQKPGQAPLLVIYDKNNRPSGIPDRFSGSNSGYTASLTITGAQAEDEADYYCFSRDSSGNHQAVFGGGTKLTVL

SEQ ID NO: 9908 - protein, 108 aa, Artificial Sequence
  Synthetic construct
SYVLTQPPSVSVAPGTTARISCGGDNIGSKSVHWYQQKPGRAPVLVIYDDSDRPSGIPERFSGSNSGNTATLSISRVEAGDEADYYCHVWDSRSDHVVVGGGTKLTVL

SEQ ID NO: 9909 - protein, 108 aa, Artificial Sequence
  Synthetic construct
EIVLTQSPGTLSLSPGERATLSCRASQSVSSSYLAWYQQKPGQAPRLLIYGASSRATGIPDRFSGSGSGTDFTLTISRLEPEDFAVYYCQQYGSSPYTFGQGTKLEIK

SEQ ID NO: 9910 - protein, 110 aa, Artificial Sequence
  Synthetic construct
QSVLTQPPSASGTPGQRVTISCSGTISNIGSNRVNWYQQLPGTAPKLLIYNNNQRPSGVPDRFSGSKSGTSASLGISGLQSEDEADYYCAAWDDSLKGWVFGGGTKLTVL

SEQ ID NO: 9911 - protein, 110 aa, Artificial Sequence
  Synthetic construct
QSVLMQPPSVSATPGQRVSISCSGSSSNIGNNYVSWYQQLPGTAPKLLIYDNVKRPSGIPDRFSGSKSGTSATLGITGLQTGDEADYYCATWDSSLPGEIFGGGTKLTVL

SEQ ID NO: 9912 - protein, 112 aa, Artificial Sequence
  Synthetic construct
DIVMTQTPLSLSVTPGQPASISCKSSQSLLHSDGRTYLYWFLQRPGQSPQLLIYAVSSRFSGVPDRFSGSGSGTDFTLKISRVEAEDVGVYYCLEATHPPYTFGPGTKLEMK

SEQ ID NO: 9913 - protein, 107 aa, Artificial Sequence; identical to SEQ ID NO: 8658
  Synthetic construct

SEQ ID NO: 9914 - protein, 108 aa, Artificial Sequence
  Synthetic construct
SYELTQPPSVSVSPGQTARITCSGDALPKKYAYWYQQKSGQAPVLVIYEDSKRPSGIPERFSGSSSGTMATLTISGAQVEDEADYYCYSTDSSGNYWVFGGGTKLTVL

SEQ ID NO: 9915 - protein, 107 aa, Artificial Sequence; identical to SEQ ID NO: 8353
  Synthetic construct

SEQ ID NO: 9916 - protein, 110 aa, Artificial Sequence
  Synthetic construct
QSVLTQPPSASGTPGQRVAISCSGSSSNIGNNYVYWYQQLPGTAPKLLIYSNSERPSGVPDRFSGSKSGTSASLAISGLRSEDEADYYCATWDDSLSGAVFGGGTHLTVL

SEQ ID NO: 9917 - protein, 112 aa, Artificial Sequence; identical to SEQ ID NO: 9088
  Synthetic construct

SEQ ID NO: 9918 - protein, 108 aa, Artificial Sequence
  Synthetic construct
DIQMTQSPSTLSASVGDRVTITCRASQSISSWLAWYQQKPGKAPKLLIYKASSLESGVPSRFSGSGSGTEFTLTISSLQPDDFATYYCQQYNSYSLYTFGQGTKLEIK

SEQ ID NO: 9919 - protein, 107 aa, Artificial Sequence
  Synthetic construct
DIQMTQSPSSLSASVGDRVTITCRASQGISNSLAWYQQKPGKVPKLLIYAASTLQSGAPSRFSGSGSGTDFTLTISSLQPEDVATYYCQKYNSAPLTFGGGTKVEIR

SEQ ID NO: 9920 - protein, 110 aa, Artificial Sequence; identical to SEQ ID NO: 64
  Synthetic construct

SEQ ID NO: 9921 - protein, 107 aa, Artificial Sequence; identical to SEQ ID NO: 8065
  Synthetic construct

SEQ ID NO: 9922 - protein, 112 aa, Artificial Sequence
  Synthetic construct
DVALTQSPLSLPVTLGQPASISCRSSQSLEHSDGYTYLLWFQQRPGQSPRRLIFRVSQRDSGVPDRFSGRGTGTEFTLEISRVEAEDIGVYYCMQGVHWPLTFGPGTKLEIN

SEQ ID NO: 9923 - protein, 107 aa, Artificial Sequence
  Synthetic construct
DIQMTHSPSSLSASVGDRVTITCRASQSISNYLNWYQQKPGKAPKLLIYAASSLQSGVPSRFSGSGSGTDFTLTISSLQPEDFATYYCQQSYSTPLTFGGGTKVEIK

SEQ ID NO: 9924 - protein, 110 aa, Artificial Sequence
  Synthetic construct
QSALTQPASVSGSPGQSITISCTGTNSDLGSYNLVSWYQQHPGKAPKLMIYEAIKRPLGASSRFSGSRSGKTASLTISGLQGEDEADYYCCSYAGASTVKCGGGTKLTVL

SEQ ID NO: 9925 - protein, 107 aa, Artificial Sequence; identical to SEQ ID NO: 8340
  Synthetic construct

SEQ ID NO: 9926 - protein, 112 aa, Artificial Sequence
  Synthetic construct
QSALTQPASVSASVGQSTTISCTGTYSDIGSFNYVSWYQHHPGKAPKLIIYDVHQRPSGVSTRFSGSKSGNTASLTISGLQPEDEAYYFCCSYRSASTSLWVFGGGTNLSVL

SEQ ID NO: 9927 - protein, 111 aa, Artificial Sequence
  Synthetic construct
DIVMTQSPLSLPVTPGEPASISCRSSQSLLHSNGYNYLDWYLQKPGQSPQLLIYLGSNRASGVPDRFSGSGSGTDFTLKISRVEAEDVGVYYCMQALQTLTFGGGTKVEIK

SEQ ID NO: 9928 - protein, 107 aa, Artificial Sequence
  Synthetic construct
EIVMTQSPATLSVSPGERATLSCGASQTIQSNLAWYQQKPGQAPRLLIYGASTRATSIPARFSGSGSGTEFTLTISSLQSEDFAVYSCQQYNDWPPTFGQGTKVEIK

SEQ ID NO: 9929 - protein, 110 aa, Artificial Sequence
  Synthetic construct
RSALTQPASVSGSPGQSIIISCTGTSGDIGYSNFVSWYQQHPDKAPKLLIYDVNKRPSGVSNRFSGSKSGNAASLTISRLQTEDEADYYCSSYSRSSTLVFGGGTKVTVL

SEQ ID NO: 9930 - protein, 107 aa, Artificial Sequence; identical to SEQ ID NO: 8065
  Synthetic construct

SEQ ID NO: 9931 - protein, 112 aa, Artificial Sequence
  Synthetic construct
DIVMTQSPLSLPVTPGEPASISCRSSQSLLHSNGYNYLDWYLQKPGQSPQLLIYLGSNRASGVPDRFSGSGSGTDFTLKISRVEAEDVGVYYCMQALQTSYTFGQGTKLEIK

SEQ ID NO: 9932 - protein, 108 aa, Artificial Sequence; identical to SEQ ID NO: 9465
  Synthetic construct

SEQ ID NO: 9933 - protein, 107 aa, Artificial Sequence; identical to SEQ ID NO: 8369
  Synthetic construct

SEQ ID NO: 9934 - protein, 110 aa, Artificial Sequence
  Synthetic construct
QSVLTQPPSVSAAPGQKVTISCSGSNTNIGDNPVSWYQQFPGTAPKFLIYDNNKRPSGIPDRFSGSKSGTSATLGITGLQTGDEADYYCATWDNNLNAGVFGGGTKLTVL

SEQ ID NO: 9935 - protein, 107 aa, Artificial Sequence
  Synthetic construct
DIQMTQSPSAMSASVGDRVTITCRASQGISDYLAWFQQKPGKVPQRLIYAASSLQSKVPSRFSGSGSGTEFTLTITSLQPEDFATYYCLQYYSYPFTFGPGTKVDIR

SEQ ID NO: 9936 - protein, 112 aa, Artificial Sequence
  Synthetic construct
DIVMTQSPLSLPVTPGEPASISCRSSQSLLHSNGYNYLHWYLQKPGQSPQLLMYLVSNRASGVPDRFSGSGSGTDFTLKISRVEAEDVGVYYCMQALQTPLTFGGGTKVEIK

SEQ ID NO: 9937 - protein, 107 aa, Artificial Sequence
  Synthetic construct
SYELTQPSSVSVSPGQTARITCSGDILTKEYARWFQQKPGQAPVVLIHKDTERPSGIPERFSGSSSGTTVTLTIRGAQVEDEADYYCYSAADNNLGIFGGGTKLTVL

SEQ ID NO: 9938 - protein, 110 aa, Artificial Sequence; identical to SEQ ID NO: 9210
  Synthetic construct

SEQ ID NO: 9939 - protein, 111 aa, Artificial Sequence
  Synthetic construct
QSVLTQPPSVSGAPGQRVTISCTGSRSNIGASYDVHWYQHLPGTAPKLLIYGNTNRPSGVPDRFSGSKSRTSASLTITGLQAEDEADYYCQSYDISLTGSIFGEGTKLTVL

SEQ ID NO: 9940 - protein, 106 aa, Artificial Sequence
  Synthetic construct
DIQMTQSPSSLSASVGDRVTITCRASQSISSYLNWYQQKPGKAPKLLIYAASSLQSGVPSRFSGSGSGTDFTLTISSLQPEDFATYYCQQSYSTHTFGQGTKLEIK

SEQ ID NO: 9941 - protein, 110 aa, Artificial Sequence; identical to SEQ ID NO: 9454
  Synthetic construct

SEQ ID NO: 9942 - protein, 110 aa, Artificial Sequence
  Synthetic construct
QSVLTQPPSASGTPGQRVTISCSGGSSNIGSNYVYWYQQLPGTSPRLVMYRNNQRPSGVPDRFSGSKSGTSASLAISGLRSEDEADYYCAAWDDSLSGVVFGGGTKVTVL

SEQ ID NO: 9943 - protein, 110 aa, Artificial Sequence; identical to SEQ ID NO: 8685
  Synthetic construct

SEQ ID NO: 9944 - protein, 107 aa, Artificial Sequence; identical to SEQ ID NO: 8065
  Synthetic construct

SEQ ID NO: 9945 - protein, 109 aa, Artificial Sequence
  Synthetic construct
EIVLTQSPATLSLSPGERATLSCRASQSVSTYLAWYQQKHGQAPRPLIYDASHRATGIPARFNGSGSGTDFSLTISSLEPEDFAVYYCQQRSTRPLLFTFGPGTKVDFK

SEQ ID NO: 9946 - protein, 112 aa, Artificial Sequence
  Synthetic construct
HSALTQPASVSGSPGQSITISCTGTSRDVGGYNYVSWYQQHSGKAPKLMIYEVSSRPSGVSIRFSGSKSGNTASLTIAGLQAEDEADYYCCSYRGSSTLDVVFGGGTKVTVL

SEQ ID NO: 9947 - protein, 107 aa, Artificial Sequence
  Synthetic construct
DTQMTQSPSFLSASVGDTVTITCRASHIISEFLNWYQHIPGKAPKLLIYAASNLQSGVPSRFSGSRSGTVFTLTINSLQPEDFATYYCQQSYSPPRTFGQGTKIEIK

SEQ ID NO: 9948 - protein, 112 aa, Artificial Sequence
  Synthetic construct
DIVMTQSPLSLPVTPGEPASISCRSSQSLLHSNGYNYLDWYLQKPGQSPQLLIYLGSNRASGVPDRFSGSGSGTDFTLKISRVEAEDVGIYYCMQALQTPRTFGQGTKVEIK

SEQ ID NO: 9949 - protein, 112 aa, Artificial Sequence
  Synthetic construct
QSALTQPASVSGSPGQSITISCTGSSSHIGSHSFVSWYQQHPGKAPKLIIFDVSSRPSGISSRFSGSKFANTASLTISGLQAEDEADYYCTAYPTRSTLEVVFGGGTKVTVL

SEQ ID NO: 9950 - protein, 107 aa, Artificial Sequence
  Synthetic construct
DIQMTQSPSSLSASIGDRVTITCQASQDITKSLNWYQQKPGKAPKLLINEASNLEIGVPTRFSGSGSGTDFTFIISSLQPEDIATYYCQQYDNHSLTFGGGTKVEIK

SEQ ID NO: 9951 - protein, 107 aa, Artificial Sequence; identical to SEQ ID NO: 9216
  Synthetic construct

SEQ ID NO: 9952 - protein, 106 aa, Artificial Sequence; identical to SEQ ID NO: 9681
  Synthetic construct

SEQ ID NO: 9953 - protein, 110 aa, Artificial Sequence
  Synthetic construct
QSALTQPASVSASPGQSITISCTGTSGDVGGYDYVSWYQQHPGAAPKLIIYDVIKRPSGVSHRFSGSKSGNTASLTISGLQTEDEADYHCISFTSGSSWVFGGGTRLTVL

SEQ ID NO: 9954 - protein, 106 aa, Artificial Sequence
  Synthetic construct
SYELTQPPSESVSPGQTASITCSGDKVGDEYTSWYQQKPGQSPVLVIFQETKRPSGIPERFSGSISGNTATLTISGTQPMDEADYYCQSWGASGAVFGGGTKLTVL

SEQ ID NO: 9955 - protein, 108 aa, Artificial Sequence; identical to SEQ ID NO: 9516
  Synthetic construct

SEQ ID NO: 9956 - protein, 109 aa, Artificial Sequence
  Synthetic construct
SYVLTQPPSMSVAPGKTARITCGGNNIGSKNVHWYQQKPGQAPALVIFYDSHRPSGIPERFSGSNSGNTATLTISGVEAGDEADYFCQVWDTSSDHRGVFGGGTKLTVL

SEQ ID NO: 9957 - protein, 109 aa, Artificial Sequence
  Synthetic construct
EIVLTQSPGTLSLSPGERATLSCRASQSVSSSYLAWYQQKPGQAPRLLIYGASSRATGIPDRFSGSGSGTDFTLTISRLEPEDFAVYYCQQYGSSPGFTFGPGTKVDIK

SEQ ID NO: 9958 - protein, 113 aa, Artificial Sequence
  Synthetic construct
DIVMTQSPDSLAVSLGERATINCKSSQSVLYSSNNKNYLAWYQQKPGQPPKLLIYWASTRESGVPDRFSGSGSGTDFTLTISSLQAEDVAVYYCQQYYSTPLTFGPGTKVDIK

SEQ ID NO: 9959 - protein, 111 aa, Artificial Sequence
  Synthetic construct
QLVLTQSPSASASLGASVKLTCTLSSGHSSYAIAWHQQQPEKGPRYLMKLNSDGSHIRGDGIPDRFSGSSSGAERYLTISSLQSEDEAEYYCQTWGTGIRVFGGGTKLTVL

SEQ ID NO: 9960 - protein, 112 aa, Artificial Sequence
  Synthetic construct
QSVLVQPPSVSGAPGQRVTISCTGSSSNIGTGYDVHWYQQFPGKAPKVLIYRNNNRPSGVPDRFSGSKSGTSASLTISGLQSEDEADYYCQSQDSSRSASVVFGGGTKVTVL

SEQ ID NO: 9961 - protein, 113 aa, Artificial Sequence
  Synthetic construct
DIVMTQSPDSLPVSLGERATINCKSSQSVLYSSNNKNYLAWYQQKPGQPPKLLIYWASTRESGVPDRFSGSGSGTDFTLTISSLQAEDVAVYYCQQYYSTPYTFGQGTKLEIK

SEQ ID NO: 9962 - protein, 106 aa, Artificial Sequence
  Synthetic construct
AIQMTQSPSSLSASVGDRVIITCRASQDIRNDLGWFQQKPGSAPKLLIYAASNLHSGVPSRFSGSGSGTDFTLTISSLQPEDFATYYCLQDYNYLTFGGGTKVEIK

SEQ ID NO: 9963 - protein, 107 aa, Artificial Sequence
  Synthetic construct
DIQMTQSPSSLSASVGDRVTITCRASQSISRYLNWYQQKAGTAPKLLIYAASSLQSGVPSRFSGSGSGTDFTLTISSLQPEDFATYYCQQSSSTPYTFGQGTKLEIK

SEQ ID NO: 9964 - protein, 108 aa, Artificial Sequence
  Synthetic construct
ETVLTQSPGTLSLSPGETATLSCRASLMVSTTYLAWYQQKPGQAPRLLIFSTSKRATDIPDRFSGSGSGTDFTLTISKLEPEDFAVYYCQQSDGSLQTFGQGTRVEMK

SEQ ID NO: 9965 - protein, 111 aa, Artificial Sequence
  Synthetic construct
QSVLTQPPSVSGAPGQRVTVSCTGSSSNIGAAYDVHWYIQLPGTAPKLLISGNKNRPSGVPDRFSGSKSGTSASLAISGLQAEDEADYYCQSYDSSLSGYVFGTGTKVTVL

SEQ ID NO: 9966 - protein, 107 aa, Artificial Sequence
  Synthetic construct
EIVLTQSPGTLSLSPGERATLSCRASQSVPGSYLAWYQQRPGQAPRLLIYGASSRTTGIPDRFSGSGSGTDFTLTISRLETEDFAVYYCQQYGTSPTFGGGTKVDIK

SEQ ID NO: 9967 - protein, 110 aa, Artificial Sequence
  Synthetic construct
QSVLTQPPSVSAAPGQKVTISCSGSSSNIGNNHVSWYQQLPGTAPKLLIYDNNKRPSGIPDRFSGSKSGTSATLGITGLQTGDEADYHCGTWDSSLSAVVFGGGTKLTVL

SEQ ID NO: 9968 - protein, 111 aa, Artificial Sequence
  Synthetic construct
QSVLTQPPSASGTPGQRVSVSCSGSRSNIGTYAVSWYQQFPRSAPKLLIYDDNRRPSGVPDRFSGSKSGTSASLAISGLQSDDEAHYYCATWDDSLNGLVVFGGGTNLTVL

SEQ ID NO: 9969 - protein, 107 aa, Artificial Sequence
  Synthetic construct
DIQLTQSPSSLSASVGDTVTITCRARQGISNYLVWFQQKPGKAPKSLIYAASTLQSGVPSKFSGSGSGTDFTLTISSLQPEDFATYYCHQYNSFPYTFGQGTKLEIK

SEQ ID NO: 9970 - protein, 108 aa, Artificial Sequence; identical to SEQ ID NO: 8888
  Synthetic construct

SEQ ID NO: 9971 - protein, 109 aa, Artificial Sequence
  Synthetic construct
EIVLTQSPGTLSLSPGERATLSCRASQSVSSDYLAWYQRKPGQPPRLFIYGASTRATGIPDRFIGSGSGTDFTLTISRLEPEDFAVYYCQQYDASSPPTFGQGTKVEVK

SEQ ID NO: 9972 - protein, 110 aa, Artificial Sequence
  Synthetic construct
GIVLTQSPGTLSLSPGETATLSCRASQSVHSRYLGWYQQKPGQAPRVLIYGASNRAAGIPDRFSGSGSGTDFTLTISRLEPEDFAVYYCQQYDASPPWYTFGQGTKLEIK

SEQ ID NO: 9973 - protein, 112 aa, Artificial Sequence
  Synthetic construct
DIVMTQSPLSLPVTPGEPASISCRSSQSLLHSNGYNYLDWYLQKPGQSPQLLIYLGSNRASGVPDRFSGSGSGTDFTLKISRVEAEDVGVYYCMQALQTPFTFGQGTKLEIK

SEQ ID NO: 9974 - protein, 107 aa, Artificial Sequence; identical to SEQ ID NO: 8804
  Synthetic construct

SEQ ID NO: 9975 - protein, 113 aa, Artificial Sequence; identical to SEQ ID NO: 8313
  Synthetic construct

SEQ ID NO: 9976 - protein, 110 aa, Artificial Sequence; identical to SEQ ID NO: 8806
  Synthetic construct

SEQ ID NO: 9977 - protein, 107 aa, Artificial Sequence; identical to SEQ ID NO: 8504
  Synthetic construct

SEQ ID NO: 9978 - protein, 108 aa, Artificial Sequence
  Synthetic construct
DIQMTQSPSTLSASVGDRVTITCRASQSISSWLAWYQQKPGKAPKLLIYKASSLESGVPSRFSGSGSGTEFTLTISSLQPDDFATYYCQQYNSYFAWTFGQGTKVEIK

SEQ ID NO: 9979 - protein, 109 aa, Artificial Sequence
  Synthetic construct
SYELTQPPSVSVSPGQTARITCSGDSLSKIYTYWFQQKSGRAPLLVIYEDNRRPSGIPERFSGSSSGSMATLTISEAQAQDEADYYCYSATTTDSQAPVFGGGTKLTVL

SEQ ID NO: 9980 - protein, 109 aa, Artificial Sequence
  Synthetic construct
EIVLTQSPGTLSLSPGERATLSCRASQSVSSKYLGWYQQKPGHAPRLLIYGASSRATGIPDRFTGSGSGTDFTLTIRRLEPEDSAVYYCQHFGTSPPLTFGGGTKVEIK

SEQ ID NO: 9981 - protein, 106 aa, Artificial Sequence
  Synthetic construct
EIVMTQSPATLSVSPGERATLSCRASQSVSSNLAWYQQKPGQAPRLLIYGASTRATGIPARFSGSGSGTEFTLTISSLQSEDFAVYYCQQYNNWRSFGQGTKLEIK

SEQ ID NO: 9982 - protein, 107 aa, Artificial Sequence
  Synthetic construct
DIQMTQSPSTLSASVGDRVTITCRASQSISHWLAWYQQKPGRGPKLLIYKASNLESGVPSRFSGSGSGTEFTLTVTSLQPDDFASYYCQQYNTYPETFGQGTKVEIK

SEQ ID NO: 9983 - protein, 108 aa, Artificial Sequence
  Synthetic construct
DIQMTQSPSTLSASVGDRVTITCRASQSISSWLAWYQQKPGKAPKVLIYKASSLESGVPSRFSGSGSGTEFTLTISSLQPDDFATYYCQQYNSYSPYTFGQGTKLEIK

SEQ ID NO: 9984 - protein, 107 aa, Artificial Sequence [sequence omitted]

SEQ ID NO: 9985 - protein, 112 aa, Artificial Sequence
  Synthetic construct
DIVMTQSPDSLAVSLGERATINCKSSQSVLYSSNNKNYLAWYQQKPGQPPKLLIYWASTRESGVPDRFSGSGSGTDFTLTISSLQAEDVAVYYCQQYYSTPVFGQGTKLEIK

SEQ ID NO: 9986 - protein, 107 aa, Artificial Sequence
  Synthetic construct
DIQMTQSPSAMSASVGDRVTITCRASQGISNYLAWFQQKPGKVPKRLIYAASSLQSGVPSRFSGSGSGTEFTLTISSLQPEDFATYYCLQHNSYPYTFGQGTKLEIK

SEQ ID NO: 9987 - protein, 108 aa, Artificial Sequence
  Synthetic construct
EIVMTQSPATLSVSPGERATVSCRASQSVSNDLAWYQQKPGQAPRLLIYGASTRAAGIPARFSGSGSGTEFTLTISSLQSEDFAVYYCQQYNNWPPYTFGQGTKLEIK

SEQ ID NO: 9988 - protein, 111 aa, Artificial Sequence
  Synthetic construct
QSALTQPASVSGSPGQSITVSCTGTSTDIGGYNYVSWYQQYPAKAPKLIIYDVTKRPSGVSNRFSGSKSGNTASLTISGLQTEDEADYYCGSYTTSTTTWVFGGGTKLTVL

SEQ ID NO: 9989 - protein, 107 aa, Artificial Sequence
  Synthetic construct
DIQMTQSPSTLSASVGDRVTITCRASQSINNWLAWYQQKPGKAPKLLIYKASSLESGVPSRFSGSGSGTEFTLTISSLQPDDFATYYCQQYNSFSRTFGQGTKVEIR

SEQ ID NO: 9990 - protein, 108 aa, Artificial Sequence
  Synthetic construct
EVVLTQSPGSLSLSPGEGATLSCRASQSVTSNYLAWYQQKPGQAPRLLIYGVSSRAPGIPDRFSGSGSGADFTLTISRLEPEDLGVYYCQQYGSAPRTFGQGTKLEIK

SEQ ID NO: 9991 - protein, 110 aa, Artificial Sequence; identical to SEQ ID NO: 9454
  Synthetic construct

SEQ ID NO: 9992 - protein, 107 aa, Artificial Sequence [sequence omitted]

SEQ ID NO: 9993 - protein, 107 aa, Artificial Sequence; identical to SEQ ID NO: 8735
  Synthetic construct

SEQ ID NO: 9994 - protein, 111 aa, Artificial Sequence; identical to SEQ ID NO: 8692
  Synthetic construct

SEQ ID NO: 9995 - protein, 110 aa, Artificial Sequence
  Synthetic construct
DIVMTQTPLSLSVTPGQPASISCKSSQSLTGGDEKADLNWYLQRPGQSPQLLIFEVSSRFSGVPDRFSASGSGTEFTLKISRVEAEDVGLYYCMQGSQFTFGPGTRLDIK

SEQ ID NO: 9996 - protein, 112 aa, Artificial Sequence; identical to SEQ ID NO: 9457
  Synthetic construct

SEQ ID NO: 9997 - protein, 108 aa, Artificial Sequence
  Synthetic construct
EIVLTQSPGTLSLSPGERATLSCRASRSVSAIYLAWYQQKRGQAPRLLIHGASSRATGIPDRFSGSGSGTDFTLTISRLEPEDFAVYYCQHYGSSLYTFGQGTKLEIK

SEQ ID NO: 9998 - protein, 107 aa, Artificial Sequence; identical to SEQ ID NO: 8133
  Synthetic construct

SEQ ID NO: 9999 - protein, 107 aa, Artificial Sequence
  Synthetic construct
DIQMTQSPSSLSASVGDRVTITCRASQGISSWLAWYQQKPEKAPKSLIYAASSLQSGVPSRFSGSGSGTDFTLTISSLQPEDFATYYCQQYNSYPLTFGGGTKVEIK

SEQ ID NO: 10000 - protein, 107 aa, Artificial Sequence
  Synthetic construct
DIQMTQSPSSLSASVGDRVTIICRASQSISNYLNWYQQKPGKAPKLLIYDASSLQSGVPSRFSGSGSGTDFTLTISSLQPEDFATYYCQQSFRTPRTFGQGTKVDIK

SEQ ID NO: 10001 - protein, 108 aa, Artificial Sequence
  Synthetic construct
EIVLTQSPATLSLSPGERATLSCRANQTVSSYLAWYQQKPGQAPRLLIYDASNRASGIPARFSGSGSGTDFTLTISSLEPEDFAIYYCQQRINWPPVTFGQGTRLEIK

SEQ ID NO: 10002 - protein, 106 aa, Artificial Sequence
  Synthetic construct
DIQMTQSPSSLSASVGDRVTITCRASQSISSYLSWYQQEPGKAPRLLIYAASSLQSGVPSRFSGSGSGTDFTLTISSLHREDFATYYCQQGYSTPTFGQGTKVEIK

SEQ ID NO: 10003 - protein, 107 aa, Artificial Sequence; identical to SEQ ID NO: 8152
  Synthetic construct

SEQ ID NO: 10004 - protein, 107 aa, Artificial Sequence
  Synthetic construct
EVVLTQSPGTLSLSPGERATLSCRASQSVSSSSLAWYQQKPGQAPRLLIYGTSNRATSIPDRFSGSGFGTEFTLTISGLEPEDSAVYYCQQYDSSFTFGPGTTVDCK

SEQ ID NO: 10005 - protein, 110 aa, Artificial Sequence
  Synthetic construct
QSVLTQPPSASGTPGQRVTISCSGSSSNIGSNTVNWYQQLPGTAPKLLIYSNNQRPSGVPDRFSGSKSGTSASLAISGLQSEDEADYYCAAWDDSLNGAVFGGGTQLTVL

SEQ ID NO: 10006 - protein, 111 aa, Artificial Sequence
  Synthetic construct
QLVLTQSPSASASLGASVKLTCTLSSGHSSYAIAWHQQQPEKGPRYLMKLNSDGSHSKGDGIPDRFSGSSSGAERYLTISSLQSEDEADYYCQTWGTGIWVFGGGTKLTVL

SEQ ID NO: 10007 - protein, 112 aa, Artificial Sequence
  Synthetic construct
DIVVTQSPDSLAVSLGERATINCKSSQSAFYSPTNRDHLAWYQQKPGQPPKLLIYWASIRESGVPDRFSGSGSGTDFTLTISSLQAEDVAVYYCQQYAPIKMFGQGTKLEIK

SEQ ID NO: 10008 - protein, 107 aa, Artificial Sequence; identical to SEQ ID NO: 8127
  Synthetic construct

SEQ ID NO: 10009 - protein, 108 aa, Artificial Sequence
  Synthetic construct
SSDLTQDPAVSVALGQTVTITCQGDSLRSFYATWYQQKPGQAPVLVISNKNRPPGIPDRFSNSNSGGTASLTITGAQAEDEADYYCQSRDIGDNPFVLFGGGTKLTVL

SEQ ID NO: 10010 - protein, 108 aa, Artificial Sequence; identical to SEQ ID NO: 8099
  Synthetic construct

SEQ ID NO: 10011 - protein, 108 aa, Artificial Sequence
  Synthetic construct
EIVLTQSPGTLSLSPGERATLSCRASQSVRGGYLAWYQQKPGQAPRLLIYRASNRATGIPGRFSGSGSGTDFTLAISRLEPEDFAVYYCQQYGNSPDTFGQGTKLEIK

SEQ ID NO: 10012 - protein, 111 aa, Artificial Sequence
  Synthetic construct
QSALTQPASVSGSPGQSITISCTGTSSDVGGYNYVSWYQQHPGKAPKLMIYDVSNRPSGVSNRFSGSKSGNTASLTISGLQAEDEADYYCSSYTSSSTLYVFGTGTKVTVL

SEQ ID NO: 10013 - protein, 107 aa, Artificial Sequence
  Synthetic construct
GIQMTQSPSSLSASVGDRVSITCRTRQNIFTYVNWYHQKPGEGPNLLVYGANNLHNGVPSRFSGSGSETEFTLTIRGLQPEDFGTYFCQQSYITPWTFGQGTKVEIK

SEQ ID NO: 10014 - protein, 107 aa, Artificial Sequence
  Synthetic construct
DIQMTQSPSTLSASVGDRVTITCRASQSISSWLAWYQQKPGKAPKLLIYEASSLESGVPSRFSGSGSGTEFTLTISSLQPDDFATYYCQQYDSDSHTFGQGTKLEIK

SEQ ID NO: 10015 - protein, 107 aa, Artificial Sequence
  Synthetic construct
DIQMTQSPSAMSASVGDRVTITCRASQGINNYLAWFQQKPGEVPKRLIYTASSLESGVPSRFSGSGSGTEFTLTISSLQPEDFATYYCLQHKSYPLTFGGGTKVEIK

SEQ ID NO: 10016 - protein, 110 aa, Artificial Sequence
  Synthetic construct
QTVVTQEPAVSVSPGGTVTLTCGLSPGSVSTADYASWYQQTPGQAPRTLIYNTNSRFSGVPDRFSGSILGNKAALTITGAQADDESDYHCALYRGNGIWVFGGGTKLTVL

SEQ ID NO: 10017 - protein, 113 aa, Artificial Sequence; identical to SEQ ID NO: 8838
  Synthetic construct

SEQ ID NO: 10018 - protein, 108 aa, Artificial Sequence
  Synthetic construct
DIQMTQSPSSLSASVGDRVTITCRASQSINNYLNWYQQKPGKAPKVLIYVASSLQSGVPSRFSGSGSGREFTLTISSLRPEDSATYYCQQSYSNPRYTFGQGTNLEIK

SEQ ID NO: 10019 - protein, 110 aa, Artificial Sequence
  Synthetic construct
QSVLTQPPSASGTPGQRVTISCSGSSSNIRNNIVNWYQQLPGTAPKLLIYSNNQRPSGVPDRISGSKFGTSASLAISGLQSEDEADYYCAAWDDSLNAYVFGTGTKVTVL

SEQ ID NO: 10020 - protein, 110 aa, Artificial Sequence
  Synthetic construct
QSVVSQPPSASGTPGQTVTISCSGITSNIGDNTVNWYRQFPGTAPKLLIYKNDQRPSGVPDRFSGSKSGTSASLAISGLQSEDEADYYCATWDDGLDGPVFGGGTRLTVL

SEQ ID NO: 10021 - protein, 107 aa, Artificial Sequence; identical to SEQ ID NO: 9672
  Synthetic construct

SEQ ID NO: 10022 - protein, 111 aa, Artificial Sequence
  Synthetic construct
DIVMTQTPLSLSVTPGQPASISCKSSQSLLHSDGKTYLYWYLQKPGQSPQLLIYEVSSRFSGVPDRFSGSGSGTDFTLKISRVEAEDVGVYYCMQGIHLRTFGQGTKVEIK

SEQ ID NO: 10023 - protein, 110 aa, Artificial Sequence
  Synthetic construct
QSALTQPASVSGSPGQSITIYCSGSASDIGAFNYVSWYQQHPGKAPKLLIFSVTKRPSGVSDRFSASKSGSTATLSISDLQAEDEADYYCNSYTTSTFMVFGGGTRVTVL

SEQ ID NO: 10024 - protein, 110 aa, Artificial Sequence
  Synthetic construct
QSVLTQPPSVSAAPGQKVTISCSGAYSNIGHNYVSWYQQLPGAAPKLLIYDDNRRPSGIPDRFSGSKSGTSATLAITGLQAGDEADYYCGTWDSSLTTGMFGGGTKLTVL

SEQ ID NO: 10025 - protein, 107 aa, Artificial Sequence; identical to SEQ ID NO: 8065
  Synthetic construct

SEQ ID NO: 10026 - protein, 113 aa, Artificial Sequence
  Synthetic construct
DIVMTQSPLSLPVTPGEPASISCRSSQSLLHSNGYNYLDWYLQKPGQSPQLLIYLGSNRASGVPDRFSGSGSGTDFTLKISRVEAEDVGVYYCMQALQTLLFTFGPGTKVDIK

SEQ ID NO: 10027 - protein, 107 aa, Artificial Sequence
  Synthetic construct
NIQMTQSPSSLSASVGDRVTITCRASQTINKYLNWYLQRPGKAPKFLIYAATTLQSGVPARFSGSGSGTDFTLTINGLQPEDFATYYCQQSYAFPITFGQGTRLEIR

SEQ ID NO: 10028 - protein, 106 aa, Artificial Sequence
  Synthetic construct
SSELTQPSSVSVSPGQTAKITCSGDVLSRKYGRWFQQKPGQAPVLVIYKDTERPSGIPERFSGSSSGTTVTLTISGAQVEDEAVYYCYSATDYQGLFGGGTRLTVL

SEQ ID NO: 10029 - protein, 108 aa, Artificial Sequence
  Synthetic construct
SYELTQPPSVSVSPGQTARITCSADALAKQYAYWYQQKPGQAPVLVIYKDSERPSGIPERFAGSSSGTTVTLTISGVQAEDEADYYCQSSDSSGTSVVFGGGTKLTVL

SEQ ID NO: 10030 - protein, 111 aa, Artificial Sequence
  Synthetic construct
QFVLTQSPSASASLGASVKLTCTLSSGHNSYTIAWHQHQSEKGPRYLMKVNSDGSHSKGDGIPDRFSGSSSGAERYLIISSLQSEDEADYYCQTWGTGIWVFGGGTKLTVL

SEQ ID NO: 10031 - protein, 107 aa, Artificial Sequence; identical to SEQ ID NO: 8802
  Synthetic construct

SEQ ID NO: 10032 - protein, 112 aa, Artificial Sequence
  Synthetic construct
QSVLTQPPSVSGAPGQRVTISCTGSSSNIGAGYDVHWYQQLPGTAPKLLIYDNSNRPSGVPDRFSGSKSGTSASLAITGLQAEDEADYYCQSYDSSLSGSGVFGTGTKVTVL

SEQ ID NO: 10033 - protein, 108 aa, Artificial Sequence
  Synthetic construct
SYVLTQPPSVSVAPGKTANITCGGSNIENNNLYWYQQKAGQAPLLIIYYHTDRPSGIPERFSGANSGNTATLTISRVEAGDEADYYCQVWDSTNDRVVFGGGTKLTVL

SEQ ID NO: 10034 - protein, 110 aa, Artificial Sequence; identical to SEQ ID NO: 8372
  Synthetic construct

SEQ ID NO: 10035 - protein, 109 aa, Artificial Sequence
  Synthetic construct
SYELTQPPSVSVSPGQTARITCSGDALPKQYAYWYQQKPGQAPVLVIYKDSERPSGIPERFSGSSSGTTVTLTISGVQAEDEADYYCQSADSSGTYPEVFGGGTKLTVL

SEQ ID NO: 10036 - protein, 107 aa, Artificial Sequence; identical to SEQ ID NO: 8176
  Synthetic construct

SEQ ID NO: 10037 - protein, 107 aa, Artificial Sequence
  Synthetic construct
AIQLTQSPSSLSASVGDRVTITCRASQGISSYLAWYQQKPGKAPKLLIYAASTLQSGVPSRFSGSGSGTDFTLTISSLQPEDFATYYCQQLNSYPPTFGGGTKVEIK

SEQ ID NO: 10038 - protein, 110 aa, Artificial Sequence; identical to SEQ ID NO: 9454
  Synthetic construct

SEQ ID NO: 10039 - protein, 107 aa, Artificial Sequence
  Synthetic construct
DIQMTQSPSSLSASVGDRVTITCRASQSISSYLNWYQQKPGKAPKLLIYAASSLQSGVPSRFSGSGSGTDFTLTISSLQPEDFATYYCQQSYSTPRTFGQGTKLEIK

SEQ ID NO: 10040 - protein, 108 aa, Artificial Sequence
  Synthetic construct
SYELTQPPSVSVSPGQTARITCSGDALPKHFAYWYQQRPGQAPILLIYKDTERPSGIPERFSASGTGTTVTLTISGVQAEDEADYYCQSTDSSAIYEVFGGGTKLTVL

SEQ ID NO: 10041 - protein, 105 aa, Artificial Sequence
  Synthetic construct
QVVLTQSPVTLSLSPGERATLSCRPSQSVSRLAWYQQQPGQPPRLLIYDATRRATGIPDRFSGSGSGTDFTLTISGLEPEDFAVFYCQQYDGSPTFGPGTKVDVD

SEQ ID NO: 10042 - protein, 110 aa, Artificial Sequence; identical to SEQ ID NO: 8067
  Synthetic construct

SEQ ID NO: 10043 - protein, 115 aa, Artificial Sequence
  Synthetic construct
QAVLTQPSSLSASPGASASLTCTLRSGVSVGSYSIHWYQQKPRSPPQFLLRYTSDSDYQRGSGVPSRFSGSKDVSDNAGILIISGLQFEDEADYYCMIWDGRRVVFGGGTNLTVL

SEQ ID NO: 10044 - protein, 107 aa, Artificial Sequence
  Synthetic construct
DIQMTQSPSSLSASVGDRVTITCRASQTVSTYLNWYQQKPGKAPKLLIYGASSLQNGVPSRFSGSGSGTEFTLTIISLQPEDFATYYCQQSDSIPVTFGGGTKVEIK

SEQ ID NO: 10045 - protein, 106 aa, Artificial Sequence
  Synthetic construct
DIRMTQSPSSLSASVGDRVTITCRASQSISKYLNWYQQKPGKAPKLLVSAASSLQSGVPSRFSGSGSATDFTLTISSLQPEDFATYYCQQSYSTPTFGGGTKVEIK

SEQ ID NO: 10046 - protein, 107 aa, Artificial Sequence
  Synthetic construct
SYELTQSPSVSVSPGQTARITCSSDALPNQYTYWYQQKPGQAPILIIYKDTARASGIPERFSASTSGTTVTLTISEVQAADEAHYHCLSADSNANYVFGPGTKVTVL

SEQ ID NO: 10047 - protein, 108 aa, Artificial Sequence
  Synthetic construct
EIVLTQSPATLSLSPGERATLSCRASQSVSSNLAWYQQKHGQAPRLLIYTASNRATGIPARFSGSGSGTDFTLTISSLEPEDSAVYYCQQRSQWPPVTFGQGTKLEIK

SEQ ID NO: 10048 - protein, 108 aa, Artificial Sequence; identical to SEQ ID NO: 10001
  Synthetic construct

SEQ ID NO: 10049 - protein, 110 aa, Artificial Sequence
  Synthetic construct
QSALTQPPSASGSPGQSVTISCTGTSSDVGGYNYVSWYQQHPGEVPKLMIYEVSKRPSGVPDRFSGSKSGNTASLTVSGLQVDDEADYYCSSYAGGNNLVFGGGTKLTVL

SEQ ID NO: 10050 - protein, 113 aa, Artificial Sequence
  Synthetic construct
DIVMTQSPLSLPVTPGEPASISCRSSQSLLHSNGYNYLDWYLQKPGQSPQLLIYLGSNRASGVPDRFSGSGSGTDFTLRISRVEAEDVGVYYCMQALQTPPYTFGQGTKLEIK

SEQ ID NO: 10051 - protein, 111 aa, Artificial Sequence
  Synthetic construct
QSVLTQPPSASGTPGQSVTISCSGSSSNIGSNYVYWYQQVPGTTPKLLIYRNNQRPSGVPDRFSGSKSGTSASLAISGLRSEDEADYYCAVWDDNLRGPYVFGTGTKVTVL

SEQ ID NO: 10052 - protein, 107 aa, Artificial Sequence
  Synthetic construct
DIQMTQSPSAMSASVGDRVTITCRASQGISNYLAWFQQKPGKVPKRLIYEVSNLQSGVPSRFSGSGSGTEFTLTISSLQPEDFATYYCLQHKSYPLTFGGGTKVEIK

SEQ ID NO: 10053 - protein, 111 aa, Artificial Sequence
  Synthetic construct
DIVMTQSPLSLPVTPGEPASISCRSSQSLLHSNGYNYLDWYLQKPGQSPQLLIYLGSNRASGVPDRFSGSGSGTDFTLKISRVEAEDVGVYYCMQALQSWTFGQGTKVEIK

SEQ ID NO: 10054 - protein, 110 aa, Artificial Sequence
  Synthetic construct
QSVLTQPPSMSEAPGQRVTISCSGSNSNIGNNAVSWYQQLPGKAPKVLIYYEDLLPSGVSDRFSSSKSGTSASLAITGLQSEDEAIYYCATWDDGLNGWVFGGGTKLTVL

SEQ ID NO: 10055 - protein, 112 aa, Artificial Sequence
  Synthetic construct
DIVMTQSPLSLPVTPGEPASISCRSSQSLLHSNGYNYLDWYLQKPGQSPQLLIYLGSNRASGVPDRFSGSGSGTDFTLKISRVEAEDVGVYYCMQALQTPHTFGQGTRLEIK

SEQ ID NO: 10056 - protein, 105 aa, Artificial Sequence; identical to SEQ ID NO: 8339
  Synthetic construct

SEQ ID NO: 10057 - protein, 107 aa, Artificial Sequence; identical to SEQ ID NO: 8435
  Synthetic construct

SEQ ID NO: 10058 - protein, 106 aa, Artificial Sequence
  Synthetic construct
EIVMTQSPATLSVSPGERATLSCRASQSVSSNLAWYQQKPGQAPRLLIYGASTRATGIPARFSGSGSGTEFTLTISSLQSEDFAVYYCQQYNNWLTFGGGTKVEIK

SEQ ID NO: 10059 - protein, 107 aa, Artificial Sequence
  Synthetic construct
DIQMTQSPSSLSASVGDRVTITCRTSQSISTYLNWYQQKPGKAPNLLIYAASTLQSGVPSRFSGSGSGTDFTLTINYLQPEDFATYYCQQTYSIPRTFGQGTKVEIK

SEQ ID NO: 10060 - protein, 111 aa, Artificial Sequence
  Synthetic construct
QSALTQPASVSGSPGQSITISCTGTSSDVGGYNYVSWYQQHPGKAPKLMIYDVSNRPSGVSNRFSGSKSGNTASLTISGLQAEDEADYYCSSYTSSSTRVVFGGGTKLTVL

SEQ ID NO: 10061 - protein, 111 aa, Artificial Sequence
  Synthetic construct
QSVLTQPPSASGTPGRRVTLSCSGSRSIIGGNINWYQQLPGTAPKLLIHSNDQRPSGVPDRFSGSKSGASASLAISGLRSEDEGFYYCAAWNDNLNGPLVVFGGGTKLTVL

SEQ ID NO: 10062 - protein, 107 aa, Artificial Sequence
  Synthetic construct
DIQMTQSPSTLSASVGDRVTITCRASQSISSWLAWYQQKPGKAPELLIYAASTLESGVPSRFSGSGSGTEFTLTISSLQPDDFATYYCQQYSVCPLTFGGGTKVEIK

SEQ ID NO: 10063 - protein, 108 aa, Artificial Sequence
  Synthetic construct
EIVLTQSPDTLSLSPGEGATLSCRASQSVSDHYLAWYQHKPGQAPRLVIYGATSRATDIPDRFSGSESGTDFTLTISRLDPEDFAMYYCQQYGSSPITFGQGTRLEIN

SEQ ID NO: 10064 - protein, 107 aa, Artificial Sequence; identical to SEQ ID NO: 8133
  Synthetic construct

SEQ ID NO: 10065 - protein, 107 aa, Artificial Sequence
  Synthetic construct
DIQMTQSPSTLSASVGDRVTITCRASQSISDWLAWYQQKPGKAPKLLIYKASNLETGVPSRFSGSGSGAEFTLTITDLQPDDFATYFCLQDNTYSYTFGQGTRLEMK

SEQ ID NO: 10066 - protein, 114 aa, Artificial Sequence
  Synthetic construct
DIVMTQSPDSLAVSLGERATINCKSSQSVLYSSNNKNYLAWYQQKPGQPPKLLIYWASTRESGVPDRFSGSGSGTDFTLTISSLQAEDVAVYYCQQYYSTPGLTFGGGTKVEIK

SEQ ID NO: 10067 - protein, 109 aa, Artificial Sequence
  Synthetic construct
EIVLTQSPGTLSLSPGERATLSCRASQSVSSSYLAWYQQKPGQAPRLLIYGASSRATGIPDRFSGSGSGTDFTLTISRLEPEDFAVYYCQQYGSSRGLTFGGGTKVEIK

SEQ ID NO: 10068 - protein, 108 aa, Artificial Sequence
  Synthetic construct
AIRMTQSPSSFSASTGDRVTITCRASQGISSYLAWYQQKPGKAPKLLIYAASTLQSGVPSRFSGSGSGTDFTLTISCLQSEDFATYYCQQYYSYGWLTFGGGTKVEIK

SEQ ID NO: 10069 - protein, 108 aa, Artificial Sequence
  Synthetic construct
SSELTQDPAVSVASGQTVRITCQGDSLRNYYAAWYQQKPGQAPEVVMYGKNDRPSGIPDRFSGSSSGNTASLTITVAQAEDEADYYCSSRDISGNLVVFGGGTKLTVL

SEQ ID NO: 10070 - protein, 110 aa, Artificial Sequence; identical to SEQ ID NO: 8067
  Synthetic construct

SEQ ID NO: 10071 - protein, 110 aa, Artificial Sequence; identical to SEQ ID NO: 8067
  Synthetic construct

SEQ ID NO: 10072 - protein, 107 aa, Artificial Sequence
  Synthetic construct
DIQLTQSPSFLSASVGDRVTITCRASQGISSYLAWYQHKPGKAPNLLIYAASTLQSGVPSRFSGSGSGTEFTLAISSLQPEDFATYYCQHLDSYPWPFGHGTKVEIK

SEQ ID NO: 10073 - protein, 109 aa, Artificial Sequence
  Synthetic construct
DIQMTQSPSSLSASVGDRVTITCRASQSVSRYLHWYQQKPGKAPKLLIYGASSLQSGVPSRFSGSGSGTDFTLTISSLQPEDFATYYCQQSYSTPPDRTFGGGTKVEIK

SEQ ID NO: 10074 - protein, 110 aa, Artificial Sequence
  Synthetic construct
QSVLTQPPSVSGTPGQRVTISCSGSSSNSGSNYVYWYQQLPGKAPKLLIYTDSERPSGVPDRFSGSKSGTSASLAISGLRSEDEAEYYCSAWDDTLSGPVFGGGTKLTVL

SEQ ID NO: 10075 - protein, 108 aa, Artificial Sequence; identical to SEQ ID NO: 8442
  Synthetic construct

SEQ ID NO: 10076 - protein, 108 aa, Artificial Sequence
  Synthetic construct
SYELTQPPSVSVSPGQTARITCSADALPKQYAYWYQQKPGQAPVLVIYKDSERPSGIPERFSGSSSGTTVTLTISGVQAEDEADYYCQSADSSGTYVVFGGGTKLTVL

SEQ ID NO: 10077 - protein, 107 aa, Artificial Sequence
  Synthetic construct
AIQLTQSPSSLSASVGDRVTITCRASQGISSYLAWYQQRAGKAPKLLISGASTLQSGVPSRFSGSGSGTDFTLTISSLQPEDFATYYCQQLDSYPWSFGQGTKVEIK

SEQ ID NO: 10078 - protein, 108 aa, Artificial Sequence
  Synthetic construct
EIVLTQSPGTLSLSPGERATLSCRASQSVSSSYLAWYQQKPGQAPRLLIYGASSRATGIPDRFSGSGSGTDFTLTISRLEPEDFAVYYCQQYGSSPTTFGQGTKVEIK

SEQ ID NO: 10079 - protein, 106 aa, Artificial Sequence
  Synthetic construct
EIVLTQSPATLSLSPGERATLSCRASQSVSTYLAWYQQRPGQAPRLLIYDASNRATGIPARFSGSGSGTDFTLTISSLEPEDFGVYYCQQRSYYLTFGGGTKVEIK

SEQ ID NO: 10080 - protein, 108 aa, Artificial Sequence
  Synthetic construct
AIQLTQSPSSLSASVGDRVTITCRASQGISSYLAWYQQKPGKAPKLLIYAASTLQSGVPSRFSGSGSGTDFTLTISSLQPEDFATYYCQQLNSYLPLTFGGGTKVEIK

SEQ ID NO: 10081 - protein, 108 aa, Artificial Sequence
  Synthetic construct
SSELTQDPAVSVALGQTVRITCQGDSLRNYFASWYQQKPGQAPILVFHGKNNRPSGISDRFSGSSSGNTASLTITGAQAGDEADYYCNSRDSSGKHWVFGGGTKLTVL

SEQ ID NO: 10082 - protein, 107 aa, Artificial Sequence; identical to SEQ ID NO: 8833
  Synthetic construct

SEQ ID NO: 10083 - protein, 107 aa, Artificial Sequence
  Synthetic construct
DIQMTQSPSAMSASVGDRVTITCRASQGISNYLAWFQQKPGKVPKRLIYAASSLQSGVPSRFSGSGSGTEFTLTISSLQPEDFATYYCLQHNSYPYTLGQGTKLEIK

SEQ ID NO: 10084 - protein, 107 aa, Artificial Sequence
  Synthetic construct
DIQMTQSPSALSASVGDRVTITCRASQSISSWLAWYQQIPGKAPNLLIYRASNLDSGVPSRFSGSGSGTEFTLTISGLQPDDSATYYCQQYSGFSRTFGQGTKVEIK

SEQ ID NO: 10085 - protein, 111 aa, Artificial Sequence
  Synthetic construct
QSVLTQPPSVSGAPGQRVTISCTGSSSNIGAGYDVHWYQQLPGTAPKLLIYTNNDRPSGVPDRFSGSKSGTSASLAITGLQAEDEADYYCQSYDSSLSGSVFGGGTKLTVL

SEQ ID NO: 10086 - protein, 110 aa, Artificial Sequence
  Synthetic construct
QSALTQPASVSGSPGQSITISCTGTSSDIGSYNYVSWYQQHPGKAPKLMIFHVSNWPSGVSNRFSGSKSGNTASLTISGLQAEDEADYYCSSYIGANSVVFGGGTKLTVL

SEQ ID NO: 10087 - protein, 108 aa, Artificial Sequence
  Synthetic construct
SSELTQDPAVSVALGHTVIITCQGDSLRTSYPNWYQQKPGQAPVLIMFGQNNRPSGIPDRFSSSGSGDTVFLTITGAQAEDEADYYCNCRDSSGNHLMFGGGTTLTVL

SEQ ID NO: 10088 - protein, 107 aa, Artificial Sequence; identical to SEQ ID NO: 8267
  Synthetic construct

SEQ ID NO: 10089 - protein, 107 aa, Artificial Sequence
  Synthetic construct
EKVMTQSPATLSVSPGERATLSCRASHSVSDYLAWYQQKPGQAPRLLIYGASTRAAGIPARFSGSGSGTEFTLTISSLQSEDSAVYYCQQYNNWPRTFGQGTKVEIK

SEQ ID NO: 10090 - protein, 113 aa, Artificial Sequence
  Synthetic construct
DIVMTQSPDSLAVSLGERATINCKSSQSVLYSSNNKNYLAWYQQKPGQPPKLLIYWASTRNSGVPDRFSGSGSGTDFTLTISSLQAEDVAVYYCQQYYSTPPTFGPGTKVDIK

SEQ ID NO: 10091 - protein, 107 aa, Artificial Sequence
  Synthetic construct
EIVMTQSPATLSVSPGERATLSCRASQSLDNNLAWYQQRPGQAPRLLISDASTRATGIPARFSGSGSGTEFTLTISSLQSEDFAVYYCQQYSKWPRTFGQGTKVEMK

SEQ ID NO: 10092 - protein, 111 aa, Artificial Sequence
  Synthetic construct
QSLLTQPPSSSGTPGQRVTISCSGSNSNIGGNTVSWYQQLPGTAPKLLIYRNNQRPSGVPDRFSGSKSGTSASLAISGLQSEDEANYYCASWDDSLNGFYVFGTGTKVTVL

SEQ ID NO: 10093 - protein, 112 aa, Artificial Sequence
  Synthetic construct
DVVMTQSPLSLPVTLGQPASISCRSSQSLVHSDGNTYLNWFQQRPGQSPRRLIYKVSNRDSGVPDRFSGSGSGTDFTLKISRVEAEDVGVYYCMQGTHWPRTFGQGTKLEIK

SEQ ID NO: 10094 - protein, 107 aa, Artificial Sequence
  Synthetic construct
DIQMTQSPSSVSASVGDSVTITCRASQGIRSWLAWYQQKPGKAPNLLIFAASSLQSGVPSRFSGSGSGTDFTLTISSLQPEDFATYYCQQANSLPYTFGQGTKLEIR

SEQ ID NO: 10095 - protein, 107 aa, Artificial Sequence
  Synthetic construct
ETVMTQPPASLSVSPGERATLSCRASQSVSTNLAWYQQKSGQAPRLLIYGTSTRATGIPARFSGSGSGTDFTLTISSLQSEDFAVYYCQQYDNWPPTFGPGTKVDIK

SEQ ID NO: 10096 - protein, 110 aa, Artificial Sequence; identical to SEQ ID NO: 8067
  Synthetic construct

SEQ ID NO: 10097 - protein, 108 aa, Artificial Sequence
  Synthetic construct
SFELTQPPSVSVSPGQTARITCSGDSLANHYSYWYQQTPGQAPVMVIYKNIKRPSGIPERFSASRSGTTVTLTISGVQTEDEADYYCQSADSDTVSVLFGGGTRLTVL

SEQ ID NO: 10098 - protein, 109 aa, Artificial Sequence
  Synthetic construct
DIQMTQSPSSLSASVGDRVTITCQASQDISNYLNWYQQKPGKAPKVLIHDASNVETGVPSRFSGSGSGTHFTFTISSLQPEDIATYYCQQYNNFPLSIAFGQGTRLEIK

SEQ ID NO: 10099 - protein, 113 aa, Artificial Sequence; identical to SEQ ID NO: 9746
  Synthetic construct

SEQ ID NO: 10100 - protein, 107 aa, Artificial Sequence; identical to SEQ ID NO: 8249
  Synthetic construct

SEQ ID NO: 10101 - protein, 107 aa, Artificial Sequence; identical to SEQ ID NO: 8596
  Synthetic construct

SEQ ID NO: 10102 - protein, 112 aa, Artificial Sequence; identical to SEQ ID NO: 9637
  Synthetic construct

SEQ ID NO: 10103 - protein, 108 aa, Artificial Sequence; identical to SEQ ID NO: 8703
  Synthetic construct

SEQ ID NO: 10104 - protein, 107 aa, Artificial Sequence
  Synthetic construct
DIQMTQSPATLSASVGDRVTITCRASQSISRWLAWYQQTPGQAPKLLIYKASSLESGVPSRFSGSGSGTEFTLTISSLQPDDFATYYCHQYNNFTWTFGQGTKVEIK

SEQ ID NO: 10105 - protein, 109 aa, Artificial Sequence
  Synthetic construct
QAVVTQEPSLTVSPGGTVTLTCGSNIGDVSYGNYAHWFQQKPGQAPRTLIYDTTARHSWTPVRFSGSVLGDKAALTLSGARPEDEAEYFCLLSYNDYRVFGGGTKVTVL

SEQ ID NO: 10106 - protein, 109 aa, Artificial Sequence
  Synthetic construct
EIVMTQSPATLSVSPGERATLSCRASQSVSSNLAWYQQKPGQAPRLLIYGASTRATGIPARFSGSGSGTEFTLTISSLQSEDFAVYYCQQYNNWPLVWTFGQGTKVEIK

SEQ ID NO: 10107 - protein, 106 aa, Artificial Sequence; identical to SEQ ID NO: 8813
  Synthetic construct

SEQ ID NO: 10108 - protein, 107 aa, Artificial Sequence; identical to SEQ ID NO: 9188
  Synthetic construct

SEQ ID NO: 10109 - protein, 110 aa, Artificial Sequence
  Synthetic construct
QSVLTQPPSTSATPGQRVTISCSGSNSNIGSNTVSWYQRLPGPAPRLLIYINNQRPSGVPDRFSGSKSGTSASLAISGLRSEDEAIYYCAAWDDTLNGVLFGGGTKLTVL

SEQ ID NO: 10110 - protein, 107 aa, Artificial Sequence
  Synthetic construct
DIQMTQSPSSLSASVGDRVTITCRASQSVYNFMNWYQQKPETAPKLLISGVSSLQGGVPSRFSGSGSGTDFTLTISGLQPEDFATYYCQQSYTSPPAFGQGTRVEIK

SEQ ID NO: 10111 - protein, 108 aa, Artificial Sequence; identical to SEQ ID NO: 9909
  Synthetic construct

SEQ ID NO: 10112 - protein, 111 aa, Artificial Sequence
  Synthetic construct
QSVLTQPPSVSGAPGQTVTISCTGSNSNIGAGYDVHWYHLLPGTAPKLLIYGNSNRPSGVPDRFSGSKSGTSASLAITGLQAEDEADYYCQAFDSRLSSYVFGSGTKVTVL

SEQ ID NO: 10113 - protein, 107 aa, Artificial Sequence
  Synthetic construct
DIQMTQSPSTLSASVGDRVTITCRASQSISSWLAWYQQKPGKAPKLLIYKASSLESGVPSRFSGSGSGTEFTLTISSLQPDDFATYYCQQYNSYSPTFGPGTKVDIK

SEQ ID NO: 10114 - protein, 113 aa, Artificial Sequence
  Synthetic construct
DIVMTQSPLSLPVTPGEPASISCRSSQSLLHSNGYNYLDWYLQKPGQSPQLLIYLGSNRASGVPDRFSGSGSGTDFTLKISRVEAEDVGVYYCMQALQTPKWTFGQGTKVEIK

SEQ ID NO: 10115 - protein, 108 aa, Artificial Sequence
  Synthetic construct
EIVLTQSPGTLSLSPGERATLSCRTSQSVSSSSLGWYHQKPGQAPRLLIFGASNRASGIPDRFSGSGSGTDFTLTISRLEPDDFAVYYCQQYGSSPFTFGGGTRVEIK

SEQ ID NO: 10116 - protein, 113 aa, Artificial Sequence
  Synthetic construct
DIVMTQSPDSLAVSLGERATINCKSSQSVLYSSNNKNYLAWYQQKPGQPPKLLIYWASTRESGVPDRFSGSGSGTDFTLTISSLQAEDVAVYYCQQYYSTPFTFGPGTKVDIK

SEQ ID NO: 10117 - protein, 111 aa, Artificial Sequence
  Synthetic construct
QSVLTQPPSVSGAPGQRVTISCTGSNSNIGAGYDVHWYQQLPGTAPKIVIYGNNHRPSGVPDRFSGSKSGTSASLAITGLQAEDEADYHCHSFDSSLSGSVFGGGTKVTVL

SEQ ID NO: 10118 - protein, 112 aa, Artificial Sequence
  Synthetic construct
DIVLTQSPLSLSVTPGEPASISCRSSQSLLHDIGHNYLDWYLQKPGQSPQLLIYMGSNRASGVPDRFSGSGSGTDFTLKISRVEAEDVGVYYCMQALETPLAFGQGTRLEIK

SEQ ID NO: 10119 - protein, 110 aa, Artificial Sequence; identical to SEQ ID NO: 9315
  Synthetic construct

SEQ ID NO: 10120 - protein, 107 aa, Artificial Sequence
  Synthetic construct
EIVLTQSPATLSLSPGERATLSCRASHSVSHYLAWYQQKPGQAPRLLIYDTFTRAPGIPARFSGSGSGTDFTLTISSLQPEDFATYYCQRSFSTPWTFGPGTKVEIK

SEQ ID NO: 10121 - protein, 107 aa, Artificial Sequence
  Synthetic construct
EIVLTQSPATLSLSPGERATLSCRASQSVSSYLAWYQQKPGQAPRLLIYDASNRATGIPARFSGSGSGTDFTLTISSLEPEDFAVYYCQQRSNWPPTFGGGTKVEIK

SEQ ID NO: 10122 - protein, 108 aa, Artificial Sequence
  Synthetic construct
AIRITQSPSSLSASTGDRVTITCRASQGISSYLAWYQQKPGKAPKLLIYAASTLQSGVPSRFSGSGSGTDFTLTISCLQSEDFATYYCQQYYSYPPWTFGQGTKVEIK

SEQ ID NO: 10123 - protein, 107 aa, Artificial Sequence
  Synthetic construct
AIQLTQSPSSLSAFVGDRVTITCRASQGISNFLAWYQQKPGKAPKLLIYAASTLQSGVPSRFSGSGSGTDFTLTISSLQPEDFATYYCQQLNSNPRTFGQGTKLEIK

SEQ ID NO: 10124 - protein, 107 aa, Artificial Sequence
  Synthetic construct
AVQLTQSPSSLSASVGDRVTITCRASQGINTYVAWYQQKPGKAPELLIYAVSTLQSGVPSRFSGGGSGTVFTLTIRNLQPEDYATYYCQQLHIYPPTFGPGTKVDIK

SEQ ID NO: 10125 - protein, 107 aa, Artificial Sequence
  Synthetic construct
DTQLTQSPSSLSASVGDRVTISCRAGQNINNFLNWYQLKPGKAPKLLIYSISTLQSGIPSRFGGSGSGTDFTLTITNLQPEDFAIYYCQQSYIPPYTFGQGTNLEIK

SEQ ID NO: 10126 - protein, 107 aa, Artificial Sequence
  Synthetic construct
EIVLTQSPGTLSLSPGDTATLSCRASQSVSSSYLAWYQQKPGQAPRVLIYGTSRRATGIPDRFTGSGSGTDFTLTISRLDPEDFAVYYCQRYGPSTTFGQGTKVEIK

SEQ ID NO: 10127 - protein, 107 aa, Artificial Sequence; identical to SEQ ID NO: 8127
  Synthetic construct

SEQ ID NO: 10128 - protein, 108 aa, Artificial Sequence
  Synthetic construct
EIVLTQSPATLSLSPGERATLSCRASQSVSSYLAWYQQKPGQAPRLLIYDASNRATGIPARFSGSGSGTDFTLTISSLEPEDFAVYYCQQRSNWPPWTFGPGTKVDIK

SEQ ID NO: 10129 - protein, 108 aa, Artificial Sequence; identical to SEQ ID NO: 8902
  Synthetic construct

SEQ ID NO: 10130 - protein, 107 aa, Artificial Sequence; identical to SEQ ID NO: 8093
  Synthetic construct

SEQ ID NO: 10131 - protein, 107 aa, Artificial Sequence
  Synthetic construct
AIQLTQSPSSLSASVGDRVTITCRASQGISSYLAWYQQRAGKAPKLLISGASTLQSGVPSRFSGSGSGTDFTLTIGSLQPEDFATYYCQQLDSYPWSFGQGTKVEIK

SEQ ID NO: 10132 - protein, 107 aa, Artificial Sequence; identical to SEQ ID NO: 10121
  Synthetic construct

SEQ ID NO: 10133 - protein, 107 aa, Artificial Sequence; identical to SEQ ID NO: 8114
  Synthetic construct

SEQ ID NO: 10134 - protein, 108 aa, Artificial Sequence
  Synthetic construct
EIVLTQSPGTLSLSPGERGTLSCRASQSVSSSYLAWYQQKPGQAPRLLIYGASSRATGIPDRFSGGGSGTDFTLTINRLEPEDFAVYYCQQYGNSPPTFGQGTKVEVK

SEQ ID NO: 10135 - protein, 106 aa, Artificial Sequence
  Synthetic construct
DIQMTQSPSSLSASVGDRVTITCRASQGIANYLAWYQQKPGKVPKLLIYAASTLQSGVPSRFSGSGSGTDFTLTISSLQPEDVGTYYCQKYNSALSFGQGTRLEIK

SEQ ID NO: 10136 - protein, 107 aa, Artificial Sequence; identical to SEQ ID NO: 9264
  Synthetic construct

SEQ ID NO: 10137 - protein, 108 aa, Artificial Sequence; identical to SEQ ID NO: 8393
  Synthetic construct

SEQ ID NO: 10138 - protein, 107 aa, Artificial Sequence
  Synthetic construct
DIQMTQSPSSVSASVGDRVTITCRASQGINIWLAWYQQKPGKAPKLLIYDASILQSGVPSRFSGSGSGTDFTLTISSLQPDDFASYYCQQASSFPRTFGQGTKVEIK

SEQ ID NO: 10139 - protein, 108 aa, Artificial Sequence
  Synthetic construct
DIQMTQSPSSLSASVGDRVTITCRASQSISSYLNWYQQKPGKAPKLLIYAASSLQSGVPSRFSGSGSGTDFTLTISSLQPEDFATYYCQQSYSTLSLTFGGGTKVEIK

SEQ ID NO: 10140 - protein, 108 aa, Artificial Sequence
  Synthetic construct
SYVLTQSPSVSVAPGETARITCGGKNIGTKSVHWYRQKPGQAPVLVIYYDRDRPSGIPERVSGSNSGNTATLTISGVEAGDEADYYCQVWDSSSDHKVFGGGTKLTVL

SEQ ID NO: 10141 - protein, 111 aa, Artificial Sequence
  Synthetic construct
QSVLTQPPSVSGAPGQTASISCTGSSSNIGALYDVHWYRQFPGEAPKLLIYGDTNRPSGVPDRFSGSKSGVSASLAITGLQAEDEATYYCQSYDRTLSGLVFGGGTKLTVL

SEQ ID NO: 10142 - protein, 107 aa, Artificial Sequence
  Synthetic construct
SYELTQPPSVSVSLGQMARITCSGEALPKKYAYWYQQKPGQFPVLVIYKDSERPSGIPERFSGSSSGTIVTLTISGVQAEDEADYYCLSADSSATWVFGGGTKLTVL

SEQ ID NO: 10143 - protein, 107 aa, Artificial Sequence
  Synthetic construct
DIQMTQSPSSVAASVGDRVTITCRASQDISSWLAWYQQKPGKAPKVLIYKASSLQTGVPSRFSGSGSGTDFTLTISNLQPEDFATYYCQQANSFPPTFGGGTKVEIK

SEQ ID NO: 10144 - protein, 107 aa, Artificial Sequence; identical to SEQ ID NO: 8093
  Synthetic construct

SEQ ID NO: 10145 - protein, 107 aa, Artificial Sequence
  Synthetic construct
AIRITQSPSSLSASTGDRVTITCRASQGISSYLAWYQQKPGKAPKLLIYAASTLQSGVPSRFSGSGSGTDFTLTISCLQSEDFATYYCQQYYSYPRAFGQGTKVEIK

SEQ ID NO: 10146 - protein, 106 aa, Artificial Sequence
  Synthetic construct
DIQMTQSPSSLSASVGDRVTITCRASQNINTWLAWYQQKPGRAPKLLIFMTSVLQSGVPSRFSGSGSGPEFTLTISNLQPDDFATYYCQQYSNFWTFGQGTKVEVK

SEQ ID NO: 10147 - protein, 110 aa, Artificial Sequence; identical to SEQ ID NO: 9840
  Synthetic construct

SEQ ID NO: 10148 - protein, 109 aa, Artificial Sequence
  Synthetic construct
EIVLTQSPGTLSLSPGERATLSCRASQSVNSRYLAWYQQKPGQAPRLLIYGASSRATGIPDRFSGSGSGTDFTLTISRLEPEDFAVYYCQQYDKSPQFTFGPGTKVDVK

SEQ ID NO: 10149 - protein, 106 aa, Artificial Sequence
  Synthetic construct
SFELTQPPSVSVSPGQTASITCSGDKLGEKYAYWYQQKPGQSPVLIVYQDLKRPSGISERFSGSNSGNTATLTISETQAMDEADYYCQAWDRTLYVFGTGTKVTVL

SEQ ID NO: 10150 - protein, 107 aa, Artificial Sequence
  Synthetic construct
DIQMTQSPSSVSAFVGDSVTITCRASQGIRSWLAWYQQKPGKAPNLLIYAASSLQSGVPSRFSGSGSGTDFTLTISSLQPEDFATYYCLQANSLPYTFGQGTKLEIK

SEQ ID NO: 10151 - protein, 110 aa, Artificial Sequence; identical to SEQ ID NO: 8067
  Synthetic construct

SEQ ID NO: 10152 - protein, 108 aa, Artificial Sequence
  Synthetic construct
EIVLTQSPGTLSLSPGERATLSCRTSQSFGSRYLAWYQHKPGQAPTLLIYGASTRATGIPDRFSGSGSGTDFTLTISRLETEDFAVYYCQQYGSLPRTFGQGTKVEIK

SEQ ID NO: 10153 - protein, 108 aa, Artificial Sequence; identical to SEQ ID NO: 8578
  Synthetic construct

SEQ ID NO: 10154 - protein, 110 aa, Artificial Sequence
  Synthetic construct
QSVLTQPPSVSGAPGQSDFISCSGSSSNIGKNFVYWYQQLPGMAPKVVIYRNNQRPAGVPDRFSGSKSGTSASLAISGLRPEDEADYYCASWDDNLRGVLFGGGTKLTVL

SEQ ID NO: 10155 - protein, 108 aa, Artificial Sequence; identical to SEQ ID NO: 8591
  Synthetic construct

SEQ ID NO: 10156 - protein, 111 aa, Artificial Sequence
  Synthetic construct
QSALSQTPSEFAAPGQTVTIFCTGTYYNIGAGYPVHWYQHFPGSAPKLLIFRDRNRPSGVPGRFSGSRSGNSASLAITGVQPSDEATYYCQSHDRSLGTTVFGGGTNLTVL

SEQ ID NO: 10157 - protein, 110 aa, Artificial Sequence
  Synthetic construct
NFMLTQPHSVSESPGKTVTISCTRSSGSIASNYVQWYQQRPGSAPTTVIYEDNQRPSGVPDRFSGSIDSSSNSASLTISGLKTEDEADYYCQSYDSSNQVFGGGTKLTVL

SEQ ID NO: 10158 - protein, 113 aa, Artificial Sequence
  Synthetic construct
DVVMTQSPLSLPVTLGQPASISCRSSQSLVHSDGNTYLIWILQRPGQSPRRLIYKVSNRDSGVPDRFSGSGSGTDFTLKISRVEAEDVGVYYCMQGTHWPPSTFGEGTKVEIK

SEQ ID NO: 10159 - protein, 110 aa, Artificial Sequence
  Synthetic construct
QSVLTQPPSASGTPGQRVTIFCSGSSSNIGTNFVYWYQQLPGTGPKLLIYRNAQRPSGVPDRFSGSKSGTSASLAVSGLRSEDEANYYCAAWDDGLSGVVFGGGTKLTVL

SEQ ID NO: 10160 - protein, 109 aa, Artificial Sequence; identical to SEQ ID NO: 8306
  Synthetic construct

SEQ ID NO: 10161 - protein, 112 aa, Artificial Sequence
  Synthetic construct
QSVLTQPPSVSGAPGQRVTISCTGSSSNIGAGYDVHWYQQFPGTAPKLLISGSNNRPSGVPDRFSGSKSGTSASLAITGLQAEDEADYYCQSYDSGLTGGRVFGGGTKLTVL

SEQ ID NO: 10162 - protein, 108 aa, Artificial Sequence; identical to SEQ ID NO: 8784
  Synthetic construct

SEQ ID NO: 10163 - protein, 107 aa, Artificial Sequence; identical to SEQ ID NO: 65
  Synthetic construct

SEQ ID NO: 10164 - protein, 108 aa, Artificial Sequence
  Synthetic construct
AYELTQPPSVSVSPGQTARITCSADILSNKYGHWYQQKPGQAPVMLIYKDTERPSGIPERFSGSNSGTTVTLTINGVQPEDEADYYCQSADSSGTFYVFGTGTRVTVL

SEQ ID NO: 10165 - protein, 106 aa, Artificial Sequence
  Synthetic construct
DIQMTQSPSSLPASVGDRVTITCRASQSVSRYLNWYQQKPGKPPKLLIYGASSLQSGVPSRFSGSGSGTDFSLTISSLQPEDFATYYCQLSYSTLTFGGGTKLEIK

SEQ ID NO: 10166 - protein, 108 aa, Artificial Sequence; identical to SEQ ID NO: 8099
  Synthetic construct

SEQ ID NO: 10167 - protein, 107 aa, Artificial Sequence; identical to SEQ ID NO: 8504
  Synthetic construct

SEQ ID NO: 10168 - protein, 107 aa, Artificial Sequence; identical to SEQ ID NO: 8234
  Synthetic construct

SEQ ID NO: 10169 - protein, 113 aa, Artificial Sequence
  Synthetic construct
DIVMTQSPDSLAVSLGERATINCKSSQSVLYSSNNKNYLAWYQQKPGQPPKLLIYWASTRESGVPDRFSGSGSGTDFTLTISSLQAEDVAVYYCQQYYSTPCTFGGGTKVEIK

SEQ ID NO: 10170 - protein, 106 aa, Artificial Sequence
  Synthetic construct
DIQMTQSPSSLSASVGDRVTITCRASQSISSYLNWYQQKPGKAPKLLIYAASSLQSGVPSRFSGSGSGTDFTLTISSLQPEDFATYYCQQSYKGLTFGGGTKVEIK

SEQ ID NO: 10171 - protein, 108 aa, Artificial Sequence
  Synthetic construct
EIVLTQSPGTLSLSPGERATLSCRASQSLSSSYVAWYQQKAGQAPRLLMYGASSRATGIPDRFSGSGSGTDFTLTISRLEPEDFAVYYCQQYVSSPRTFGQGTKVEIK

SEQ ID NO: 10172 - protein, 110 aa, Artificial Sequence; identical to SEQ ID NO: 8146
  Synthetic construct

SEQ ID NO: 10173 - protein, 107 aa, Artificial Sequence
  Synthetic construct
DIQMTQSPSSLSASVGDVVSITCRASQMISRHLNWYQQKPGEAPNLLIYAASNLQSGVPSRFSGSGSGTDFTLTISSLQPEDFATYYCQQSYSTPYIFGQGTRLEIK

SEQ ID NO: 10174 - protein, 112 aa, Artificial Sequence
  Synthetic construct
QLVVTQSPSASASLGASVKLTCTLSSGHNTYAIAWHQQQPEKGPRYLMKVNSDGSHIKGDGIPDRFSGSSSGAERFLTISSLQSDDEADYYCQTWGTDIRGVFGGGTKLTVL

SEQ ID NO: 10175 - protein, 107 aa, Artificial Sequence
  Synthetic construct
DIQMTQSPSTLSASVGDRVTITCRASQSIGSWLAWYQQKPGKPPNLLIYKASSLESGVPSRFSGSGWGTEFTLTISSLQPDDLATYYCQQYHSNMYTFGQGTKLEIK

SEQ ID NO: 10176 - protein, 112 aa, Artificial Sequence; identical to SEQ ID NO: 9088
  Synthetic construct

SEQ ID NO: 10177 - protein, 107 aa, Artificial Sequence; identical to SEQ ID NO: 8091
  Synthetic construct

SEQ ID NO: 10178 - protein, 115 aa, Artificial Sequence
  Synthetic construct
QAVLTQPSSLSASPGASASLTCTLRSGINVGTYRIYWYQQKPGSPPQYLLRYKSDSDKQQGSGVPSRFSGSKDASANAGILLISGLQSEDEADYYCMIWHSSAAVFGGGTQLTVL

SEQ ID NO: 10179 - protein, 106 aa, Artificial Sequence
  Synthetic construct
SYELTQPPSVSVSPGQTASITCSGDKLGDKYACWYQQKPGQSPVLVIYQDSKRPSGIPERFSGSNSGNTATLTISGTQAMDEADYYCQAWDSSTVVFGGGTKLTVL

SEQ ID NO: 10180 - protein, 107 aa, Artificial Sequence; identical to SEQ ID NO: 8840
  Synthetic construct

SEQ ID NO: 10181 - protein, 107 aa, Artificial Sequence; identical to SEQ ID NO: 8133
  Synthetic construct

SEQ ID NO: 10182 - protein, 112 aa, Artificial Sequence; identical to SEQ ID NO: 8315
  Synthetic construct

SEQ ID NO: 10183 - protein, 109 aa, Artificial Sequence
  Synthetic construct
QAVVTQEPSVTVSPGGTVTLTCGSSTGPVTTTHYPYWFQQRPGQAPKTLIYDTNNKHSWTPARFSGSLLGGKAALTLSGAQPEDEAEYHCLLSYGTVYIFGLGTKVTVL

SEQ ID NO: 10184 - protein, 108 aa, Artificial Sequence; identical to SEQ ID NO: 8099
  Synthetic construct

SEQ ID NO: 10185 - protein, 111 aa, Artificial Sequence
  Synthetic construct
DIVMTQTPLSLSVTPGQPASFSCKSSQSLLHSDGRTYLYWYLQRPGQSPQLLIYEVSRRFSGVPDRFSGSGSGTDFTLKISRVEAEDVGIYYCMQGLDLRTFGPGTKVDIK

SEQ ID NO: 10186 - protein, 106 aa, Artificial Sequence
  Synthetic construct
SFDLTQPLSLSVALGQTARITCGGSDIADRSVHWYQQRPGQAPVLVIYRDKRRPPGVSERFSGSKSGNAATLIVTRAQAEDDAVYFCQVWAGTVVVFGGGTSLTVL

SEQ ID NO: 10187 - protein, 108 aa, Artificial Sequence
  Synthetic construct
QSTLTQPASVSGSPGESITISCTGTSSDVGFYDLVSWYQHHPDKAPKLIIYEASQRPSGVSNRFSASKSGNTASLTISGLQAEDEATYYCCSYARFVVFGGGTKLTVL

SEQ ID NO: 10188 - protein, 107 aa, Artificial Sequence; identical to SEQ ID NO: 8065
  Synthetic construct

SEQ ID NO: 10189 - protein, 108 aa, Artificial Sequence
  Synthetic construct
SYELTQPPSVSVSAGQTARITCSGDELTNEFTYWYQQKPGQAPSLVMYKDTERPSWIPDRFSGSTSGTTLTLIISGVQPADEAVYYCQSTYKTKTYQVFGPGTKLIVL

SEQ ID NO: 10190 - protein, 106 aa, Artificial Sequence
  Synthetic construct
DIQMTQSPSSLSASVGDRVTITCQASQDIRNYLSWYQQKPGKAPKLLIYDASNLETGVPLRFSGSGSGTDFTFTISSLQPEDIATYYCQQYDNLWTFGQGTKVEIK

SEQ ID NO: 10191 - protein, 107 aa, Artificial Sequence
  Synthetic construct
DIQMTQSPSTLSASVGDRVTITCRASQSISTWLAWYLQKPGKAPKLLIYKASSLESGVPSRFSGSGSGTEFTLTISSLQPDDFATYYCQQYNSYSWTFGQGTKVEIK

SEQ ID NO: 10192 - protein, 107 aa, Artificial Sequence
  Synthetic construct
EIVLTQSPATLSLSPGERATLSCRASQSVSSYLAWYQQKPGQAPRLLIYDASNRATGIPARFSGSGSGTDFTLTISSLEPEDFAVYYCQQRSNWPPTFGQGTKLEIK

SEQ ID NO: 10193 - protein, 109 aa, Artificial Sequence
  Synthetic construct
AIRITQSPSSLSASTGDRVTITCRASQGISSYLAWYQQKPGKAPKLLIYAASTLQSGVPSRFSGSGSGTDFTLTISCLQSEDFATYYCQQYYSYPSALTFGGGTKVEIK

SEQ ID NO: 10194 - protein, 107 aa, Artificial Sequence; identical to SEQ ID NO: 8397
  Synthetic construct

SEQ ID NO: 10195 - protein, 112 aa, Artificial Sequence; identical to SEQ ID NO: 8727
  Synthetic construct

SEQ ID NO: 10196 - protein, 112 aa, Artificial Sequence
  Synthetic construct
DIVMTQTPLSLSVTPGQPASISCKSSQSLLHSDGKTYLYWYLQKPGQSPQLLIYEVSSRFSGVPDRFSGSGSGTDFTLKISRVEAEDVGVYYCMQGIHLPYTFGQGTKLEIK

SEQ ID NO: 10197 - protein, 113 aa, Artificial Sequence; identical to SEQ ID NO: 66
  Synthetic construct

SEQ ID NO: 10198 - protein, 110 aa, Artificial Sequence
  Synthetic construct
QPALTQPASVSGSPGQSITISCTGTSSDVDDYKFVSWYQQHPGKAPKLIIYDVSRRPSGVSNRFSGSKSGNTASLTISGLQAEDEADYYCSSYAGSSTLLFGGGTNLIVL

SEQ ID NO: 10199 - protein, 107 aa, Artificial Sequence
  Synthetic construct
DIQMTQSPSSLSASVGDRVTITCRASQSISSYLNWYQQKPGKAPKLLIYAASSLQSGVPSRFSGSGSGTDFTLTISSLQPEDFATYYCQQSYSTRYTFGQGTKLEIK

SEQ ID NO: 10200 - protein, 112 aa, Artificial Sequence
  Synthetic construct
NIVMTQSPLSLPVTPGEPASISCRSSQSLLHSNGHDYLDWFLQKPGQSPQFLIYLGSYRASGIPDKFSGSGSGADFTLNISRVEAGDVGIYYCMQGLQVPYTFGQGTKLEIK

SEQ ID NO: 10201 - protein, 108 aa, Artificial Sequence
  Synthetic construct
QSALTQPASVSGSPGQSITLSCTGTSSDIGTSNYISWYQQYPGKAPKLIIFDVTNRPSGVSNRFSGSKSGHTASLTISGLQAEDEADYYCASYTSSVVFGGGTKLTVL

SEQ ID NO: 10202 - protein, 111 aa, Artificial Sequence; identical to SEQ ID NO: 8170
  Synthetic construct

SEQ ID NO: 10203 - protein, 109 aa, Artificial Sequence
  Synthetic construct
SYELTQPPSVSVSPGQTARITCSGDALPKQYAYWYQQKPGQAPVLVIYKDSERPSGIPERFSGSSSGTTVTLTISGVQAEDEADYYCQSADSSGTYPWVFGGGTKLTVL

SEQ ID NO: 10204 - protein, 107 aa, Artificial Sequence
  Synthetic construct
DIQMTQSPSSLSASVGDRVTITCRASQSISSYLNWYQQKPGKAPKLLIYAASSLQSGVPSRFSGSGSGTDFTLTISSLQPEDFATYYCQQSYSTTWTFGQGTKVEIK

SEQ ID NO: 10205 - protein, 108 aa, Artificial Sequence
  Synthetic construct
AIRMTQSPSSFSASTGDRVTITCRASQGISSYLAWYQQKPGKAPKLLIYAASTLQSGVPSRFSGSGSGTDFTLTISCLQSEDFATYYCQQYYSYPRYTFGQGTKLEIK

SEQ ID NO: 10206 - protein, 108 aa, Artificial Sequence
  Synthetic construct
KSVLTQSPDTLSVSPGERASLSCTASPPVRSDFLAWYQQRTGQPPRLLIYGASRRATGIPDRFSGSGSGTHFTLTITRLEPDDFAVYYCQQYGDSPVTFGQGTRLETK

SEQ ID NO: 10207 - protein, 109 aa, Artificial Sequence
  Synthetic construct
EIVLTQSPGTLSLSPGERATLSCRASQSVSSSYLAWYQQKPGQAPRLLIYGASSRATGIPDRFSGSGSGTDFTLTISRLEPEDFAVYYCQQYGSSPLITFGQGTRLEIK

SEQ ID NO: 10208 - protein, 108 aa, Artificial Sequence
  Synthetic construct
QSTLTQPASVSGSPGESITISCTGTSSDVGFYDLVSWYQHHPDKAPKLIIYEASQRPSGVSNRFSGSKSGNTASLTISGLQAEDEATYYCCSYARFVVFGGGTKLTVL

SEQ ID NO: 10209 - protein, 110 aa, Artificial Sequence
  Synthetic construct
QSALTQPASVSGSPGQAITISCTGTRSDVGSYDYVSWYQQHPGKAPKLVISDVSKRPSGVSNRFSGSKSGYTASLTISGLQAEDEADYYCSSYTTSSTLVFGGGTKLSVL

SEQ ID NO: 10210 - protein, 110 aa, Artificial Sequence
  Synthetic construct
QSAPTQPASVSGSPGQSITISCTGSGGDVGANNYVSWYQHHPGQAPKLIIYDVSQRPSGVSARFSGSKSGDTASLTVSGLQAEDEADYYCAPCTTSNTWVFGGGTKLTVL

SEQ ID NO: 10211 - protein, 112 aa, Artificial Sequence; identical to SEQ ID NO: 8315
  Synthetic construct

SEQ ID NO: 10212 - protein, 110 aa, Artificial Sequence; identical to SEQ ID NO: 8281
  Synthetic construct

SEQ ID NO: 10213 - protein, 107 aa, Artificial Sequence
  Synthetic construct
EIVLTQSPATLSLSPGERATLSCRASQSVSSYLAWYQQKPGQAPRLLIYDASDKATGIPARFSGSGSGTDFTLTISSLEPEDFAVYYCQQRSNWPLTFGGGTKVEIK

SEQ ID NO: 10214 - protein, 110 aa, Artificial Sequence
  Synthetic construct
QSGLTQPASVSGSPGQSVTISCAGTSADVGGFTLVSWYQHYPGQAPRLIIYEDRKRPSGVSVRFSASKSGNTASLTISGLQAEDEAHYYCCSYRGIGYLIFGGGTKLTVL

SEQ ID NO: 10215 - protein, 112 aa, Artificial Sequence
  Synthetic construct
DIVMTQSPLSLPVTPGEPASISCRSSQSLLHSNGYNYLDWYLQKPGQSPQLLIYLGSNRASGVPDRFSGSGSGTDFTLKISRVEAEDVGVYYCMQALQTPRAFGPGTKVDIK

SEQ ID NO: 10216 - protein, 107 aa, Artificial Sequence
  Synthetic construct
DVVLTQSPGTLSLSPGERATLSCRASQTVNSNYLAWYQQKPGQPPRLLIYGASSRATGVPDRFSGSGSGTDFTLTISRLEPEDFAVYYCQQYGTSPTFGQGTKVEVK

SEQ ID NO: 10217 - protein, 107 aa, Artificial Sequence
  Synthetic construct
SYELTQPPSVSVSPGQTARITCSGDALPKKYAYWYQQKSGQAPVMVIYEDSKRPSGIPERFSGSSSGTMATLTISGVQVEDEADYYCYSTDSAAGDVFGSGTKVTVL

SEQ ID NO: 10218 - protein, 107 aa, Artificial Sequence; identical to SEQ ID NO: 9760
  Synthetic construct

SEQ ID NO: 10219 - protein, 112 aa, Artificial Sequence
  Synthetic construct
DIVMTQSPLSLPVTPGEPASISCRSSQSLLHSNGYNYLDWYLQKPGQSPQLLIYLGSNRASGVPDRFSGSGSGTDFTLKISRVEAEDVGVYYCMQALQTFFTFGPGTKVDIK

SEQ ID NO: 10220 - protein, 106 aa, Artificial Sequence; identical to SEQ ID NO: 67
  Synthetic construct

SEQ ID NO: 10221 - protein, 112 aa, Artificial Sequence
  Synthetic construct
DIVMTQTPLSSPVTLGQPASISCRSSQSLVHSDGNTYLSWLQQRPGQPPRLLIYKISNRFSGVPDRFSGSGAGTDFTLKISRVEAEDVGVYYCTQATQFPRTFGQGTKVEIK

SEQ ID NO: 10222 - protein, 107 aa, Artificial Sequence
  Synthetic construct
DIQMTQSPSTLSASVGDRVTITCRASQSISSWLAWYQQKPGKAPKLLIYKASSLESGVPSRFSGSGSGTEFTLTISSLQPDDFATYYCQQYNSYLFTFGPGTKVDIK

SEQ ID NO: 10223 - protein, 109 aa, Artificial Sequence
  Synthetic construct
QSVLTQPPSVSAAPGQKVTISCSGSSSNIGNNYVSWYQQLPGTAPKLLIYDNNKRPSGIPDRFSGSKSGTSATLGITGLQTGDEADYYCGTWDGSLRGVFGGGTKLTVL

SEQ ID NO: 10224 - protein, 107 aa, Artificial Sequence
  Synthetic construct
DIQMTQSPSTLSASVGDRVTITCRASQSISSWLAWYQQKPGKAPKLLIYKASSLESGVPSRFSGSGSGTEFTLTISSLQPDDFATYYCQQYNSYQFTFGPGTKVDIK

SEQ ID NO: 10225 - protein, 111 aa, Artificial Sequence
  Synthetic construct
EIVMTQTPLSLSVTPGQPASISCRSSQSLLHGDGKTYLHWYLQRPGQSPQLLIYELSRRFSGVPDRFSGSGSGTHFTLKISRVEAEDVGIYYCMQGINLYTFGQGTKLEIK

SEQ ID NO: 10226 - protein, 111 aa, Artificial Sequence
  Synthetic construct
QSVLTQPPSVSGAPGQRVTISCTGSSSNIGAGYDVHWYQQLPGTAPKLLIYGNSNRPSGVPDRFSGSKSGTSASLAITGLQAEDEADYYCQSYDSSLSGYVFGTGTKVTVL

SEQ ID NO: 10227 - protein, 106 aa, Artificial Sequence
  Synthetic construct
SYELTQPLSVSVALGQTARITCGGNNIGNKNVHWYQQKSGQAPLLVIYRDTSRPSGIPERFSGYNSGNTATLTISGAQAGDEADYYCQVWDTSSWVFGGGTKLTVQ

SEQ ID NO: 10228 - protein, 109 aa, Artificial Sequence
  Synthetic construct
SSELTQDPAVSVALGQTVRVTCQGDSLRSYSASWYQQKPGQAPVLLVFGKNNRPSGIPDRFSGSSSGNKASLIITGAQAEDEADYYCSSRGTSGVRNWVFGGGTSLTVL

SEQ ID NO: 10229 - protein, 109 aa, Artificial Sequence
  Synthetic construct
SSDLTQDPAVSVALGQTVRITCQGDSLRSFFASWYQVKPGQAPLLVIYGKNDRPSGIPDRFSGSDSGTTASLTITGAQAEDEADYYCASRESGGDSLLLFAGGTKLTVL

SEQ ID NO: 10230 - protein, 108 aa, Artificial Sequence
  Synthetic construct
EIVLTQSPATLSLSPGERATLSCRANQTVSSYLAWYQQKPGQAPRLLIYDASNRASGIPARFSASGSGTDFTLTISSLEPEDFAIYYCQQRINWPPVTFGQGTRLEIK

SEQ ID NO: 10231 - protein, 112 aa, Artificial Sequence
  Synthetic construct
DIVMTQSPLSLPVTPGEPASISCRSSQSLLHSNGYNYLDWYLQKPGQSPQLLIYLGSNRASGVPDRFSGSGSGTDFTLKISRVEAEDVGVYYCMQALQTPRTFGQGTKLEIK

SEQ ID NO: 10232 - protein, 106 aa, Artificial Sequence; identical to SEQ ID NO: 68
  Synthetic construct

SEQ ID NO: 10233 - protein, 111 aa, Artificial Sequence
  Synthetic construct
NFMLTQPHSVSESPGKTVTISCTRSSGSIASNYVQWYQQRPGSSPTTVIYEDNQRPSGVPDRFSGSIDSSSNSASLTISGLKTEDEADYYCQSSDSNSLWVFGGGTKLTVL

SEQ ID NO: 10234 - protein, 107 aa, Artificial Sequence; identical to SEQ ID NO: 8435
  Synthetic construct

SEQ ID NO: 10235 - protein, 107 aa, Artificial Sequence
  Synthetic construct
DIQMTQSPSTLSASVGDRVTITCRASQSISSWLAWYQQKPGKAPKLLIYKASSLESGVPSRFSGSGSGTEFTLTISSLQPDDFATYYCQQYNSYSETFGQGTKVEIK

SEQ ID NO: 10236 - protein, 111 aa, Artificial Sequence; identical to SEQ ID NO: 10141
  Synthetic construct

SEQ ID NO: 10237 - protein, 110 aa, Artificial Sequence; identical to SEQ ID NO: 8212
  Synthetic construct

SEQ ID NO: 10238 - protein, 107 aa, Artificial Sequence; identical to SEQ ID NO: 10150
  Synthetic construct

SEQ ID NO: 10239 - protein, 106 aa, Artificial Sequence
  Synthetic construct
SYELTQAPSVSVSPGQTASITCSGDKLGNKYACWYQQKQGQSPVLLIYHNTQRPSGIPERFSGSNTGNTATLTISGTQAMDEADYYCQAWDSTTAVFGGGTKLTVL

SEQ ID NO: 10240 - protein, 114 aa, Artificial Sequence
  Synthetic construct
DIVMTQSPDSLAVSLGERATINCKSSQSVLYSSNNKNYLAWYQQKPGQPPKLLIYWASTRESGVPDRFSGSGSGTDFTLTISSLQAEDVAVYYCQQYYSTPPYTFGQGTKLEIK

SEQ ID NO: 10241 - protein, 107 aa, Artificial Sequence; identical to SEQ ID NO: 8667
  Synthetic construct

SEQ ID NO: 10242 - protein, 108 aa, Artificial Sequence; identical to SEQ ID NO: 9836
  Synthetic construct

SEQ ID NO: 10243 - protein, 110 aa, Artificial Sequence; identical to SEQ ID NO: 9103
  Synthetic construct

SEQ ID NO: 10244 - protein, 109 aa, Artificial Sequence
  Synthetic construct
QSALTQPRSVSGSPGQSVTISCTGTSSDVGGYNYVSWYQQHPGKAPKLMIYDVSKRPSGVPDRFSGSKSGNTASLTISGLQAEDEADYYCCSYAGSPVVFGGGTKLTVL

SEQ ID NO: 10245 - protein, 106 aa, Artificial Sequence
  Synthetic construct
DIQMTQSPSSVSASVGDRVTITCRASQGISSWLAWYQQKPGKAPKLLIYAASSLQSGVPSRFSGSGSGTDFTLTISSLQPEDFATYYCQQANSFPTFGQGTRLEIK

SEQ ID NO: 10246 - protein, 107 aa, Artificial Sequence; identical to SEQ ID NO: 8504
  Synthetic construct

SEQ ID NO: 10247 - protein, 107 aa, Artificial Sequence
  Synthetic construct
AIRITQSSSSLSASTGDRVTISCRASQNIGDFLAWYQQKPGKAPKLLIYAASILQTGVPSRFSGSGSGADYTLTISGLQSDDFATYYCQQYLSFPWTFGLGTKVEKK

SEQ ID NO: 10248 - protein, 106 aa, Artificial Sequence
  Synthetic construct
EVVLTQSPATLSLSPGDRATLSCRASQSIASYLGWYQLKPGQPPRLLIYDASNRATGIPARFSGSGSGTDFTLTIASLEPEDFAVYYCQQRSHWLTFGGGTKVEIK

SEQ ID NO: 10249 - protein, 113 aa, Artificial Sequence; identical to SEQ ID NO: 8276
  Synthetic construct

SEQ ID NO: 10250 - protein, 115 aa, Artificial Sequence; identical to SEQ ID NO: 8149
  Synthetic construct

SEQ ID NO: 10251 - protein, 107 aa, Artificial Sequence
  Synthetic construct
DIQMTQSPSAMSASVGDRVTFTCRASQGISNSLAWFQQKPGEVPKRLIYSASTLQNGVPSRFSGSGSGTEFTLTISSLQPEDFATYYCLQHNSYPYTFGQGTKLEIK

SEQ ID NO: 10252 - protein, 113 aa, Artificial Sequence; identical to SEQ ID NO: 8095
  Synthetic construct

SEQ ID NO: 10253 - protein, 106 aa, Artificial Sequence
  Synthetic construct
DIQMTQSPSSLSASVGDRVTITCRASQSIGNSLNWYQQKPGRAPNVVIHSVSTLQSGVPSRFSGSGSGTDFTLTITNLQPEDFATYYCQQSYRKVSFGGGTKVQIK

SEQ ID NO: 10254 - protein, 108 aa, Artificial Sequence
  Synthetic construct
EIVLTQSPGTLSLSPGERATLSCRASQSVSSSYLAWYQQKPGQAPRLLIYGASSRATGIPDRFSGSGSGTDFTLTISRLEPEDFAVYYCQQYGSSPLTFGQGTKLEIK

SEQ ID NO: 10255 - protein, 107 aa, Artificial Sequence
  Synthetic construct
DIQMTQSPSTLSASVGDRVTITCRASQSISSWLAWYQQKPGKAPKLLIYKASSLESGVPSRFSGSGSGTEFTLTISSLQPDDFATYYCQQYNSFMWTFGQGTKVEIK

SEQ ID NO: 10256 - protein, 109 aa, Artificial Sequence
  Synthetic construct
EIVLTQSPATLSLSPGERATLSCRASQSVSSYLAWYQQKPGQAPRLLIYDASNRATGIPARFSGSGSGTDFTLTISSLEPEDFAVYYCQQRSNWPPTYTFGQGTKLEIK

SEQ ID NO: 10257 - protein, 110 aa, Artificial Sequence; identical to SEQ ID NO: 8924
  Synthetic construct

SEQ ID NO: 10258 - protein, 106 aa, Artificial Sequence
  Synthetic construct
SYELTQPPSVSVSPGQTASITCSGDKLGDKYACWYQQKPGQSPVLVIYQDSKRPSGIPERFSGSNSGNTATLTISGTQAMDEADYYCQAWDSSTAVFGGGTKLTVL

SEQ ID NO: 10259 - protein, 109 aa, Artificial Sequence
  Synthetic construct
DVVLTQSPGTLSLSPGERATLSCRASRSVSSSYLAWYQQKPGQTPTLLIYGASRRVTGIPDRFSGSGSGTDFTLTISRLEPEDFAVYYCQQYGSSPGFTFGPGTKVDIK

SEQ ID NO: 10260 - protein, 108 aa, Artificial Sequence
  Synthetic construct
SSELTQGPAVSVALGQTVRITCQGDSLRVYHASWYQQKPGQAPVLVIYGNKNRPSGIPDRFSGSSSGDTASLTIAGAQAEDEADYYCNSRDSVGNPVVFGGGTKVTVL

SEQ ID NO: 10261 - protein, 110 aa, Artificial Sequence
  Synthetic construct
QLVLTQSPSASASLGASVKLTCTLSSGHSSYAIAWHQQQPEKGPRYLMKLNSDGSHSKGDGIPDRFSGSSSGAERYLTISSLQSEDEADYYCQTWGTGILFGGGTKLTVL

SEQ ID NO: 10262 - protein, 113 aa, Artificial Sequence
  Synthetic construct
DIVMTQSPLSLPVTPGEPASISCRSSQSLLHSNGYNYLDWYLQKPGQSPQLLIYLGSNRASGVPDRFSGSGSGTDFTLKISRVEAEDVGVYYCMQALQTPPYTFGQGTKLEIK

SEQ ID NO: 10263 - protein, 110 aa, Artificial Sequence
  Synthetic construct
SFMLTQPHSVSESPGKTVTISCSRSSGSIASNYVQWYQQRPGSPPTIVIYEDKQRPSGVPDRFSGSIDSSSNSASFTISGLKTEDEADYYCQSSDINNWVFGGGTKLTVL

SEQ ID NO: 10264 - protein, 110 aa, Artificial Sequence; identical to SEQ ID NO: 8102
  Synthetic construct

SEQ ID NO: 10265 - protein, 107 aa, Artificial Sequence
  Synthetic construct
AIQLTQSPSSLSASVGDRVTITCRASQGISNFFAWYQQKPGKAPKLLIYAASSLQSGVPSRFSGSGSGTDFTLIIDSLQPEDFATYYCQQLSSYPPTFGPGTKVEIK

SEQ ID NO: 10266 - protein, 107 aa, Artificial Sequence
  Synthetic construct
DIHMTQSPSSLSASVGDRVIITCRASQRISNYLNWFQQKPGEAPKLLISGASSLQRGAPSRFSGSGSGTNFTLTISSLRPEDLAIYFCQQSYSTPQTFGQGTKLEIK

SEQ ID NO: 10267 - protein, 113 aa, Artificial Sequence
  Synthetic construct
DIVMTQSPDSLAVSLGERATINCKSSQSVLYRSNNKNYLAWYQQKPGQPPKLLIYWASTRESGVPDRFSGSGSGTDFTLTISSLQAEDVAVYYCQQYYSTPWTFGQGTKVEIK

SEQ ID NO: 10268 - protein, 108 aa, Artificial Sequence; identical to SEQ ID NO: 8258
  Synthetic construct

SEQ ID NO: 10269 - protein, 107 aa, Artificial Sequence; identical to SEQ ID NO: 8119
  Synthetic construct

SEQ ID NO: 10270 - protein, 108 aa, Artificial Sequence
  Synthetic construct
SSELTQDPAVSVALGQTVRITCQGDSLRSYYASWYQQKPGQAPILVIYGENNRPSGIPDRFSGSTSGNTASLTITGAQAEDEGDYYCHSRDNSGNHLVFGGGTKLTVL

SEQ ID NO: 10271 - protein, 108 aa, Artificial Sequence
  Synthetic construct
DIQMTQSPTSLSASVGDRVTLSCRASQSIGTSLNWYQQKSGKAPTLLIYLASRLQSGVPPRFSGSGSGTDFTLTISNLQPEDFATYFCQQSTTNPPFTFGPGTTVEVK

SEQ ID NO: 10272 - protein, 108 aa, Artificial Sequence
  Synthetic construct
EIVLTQSPGTLSLSPGDRAILSCRASQSVRRNFLAWYHQKPGQAPKVLIYNASNRATGIPDRFSGSGSGTDFTLTISRLEPEDFAVYYCQQYGSSPRTFGQGTKVEIN

SEQ ID NO: 10273 - protein, 110 aa, Artificial Sequence; identical to SEQ ID NO: 8067
  Synthetic construct

SEQ ID NO: 10274 - protein, 109 aa, Artificial Sequence; identical to SEQ ID NO: 8988
  Synthetic construct

SEQ ID NO: 10275 - protein, 113 aa, Artificial Sequence; identical to SEQ ID NO: 8095
  Synthetic construct

SEQ ID NO: 10276 - protein, 105 aa, Artificial Sequence; identical to SEQ ID NO: 8339
  Synthetic construct

SEQ ID NO: 10277 - protein, 108 aa, Artificial Sequence
  Synthetic construct
EIVLTQSPGTLSLSPGERATLSCRASQSVSSSYLAWYQQKPGQAPRLLIYGASSRATGIPDRFSGSGSGTDFTLTISRLEPEDFAVYYCQQYGSSLWTFGQGTKVEIK

SEQ ID NO: 10278 - protein, 110 aa, Artificial Sequence
  Synthetic construct
QSVLTQPPSVSAAPGQKVTISCSGSTSTIGANFVSWYQHLPETAPRLLIYDNNKRPSGIPDRFSGSKSGTSATLDITGLQTGDEADYYCESWDSSLDAVVFGGGTKLTVL

SEQ ID NO: 10279 - protein, 109 aa, Artificial Sequence
  Synthetic construct
EIVLTQSPGSLCLSPGERATLSCRASESVSSSYLAWYQQKPGQAPRLLIYGASSRASAVPDRFSGSGSGTDFTLTISRLEPEDFAVYYCQLYGGSPPYPFGQGTKLEIK

SEQ ID NO: 10280 - protein, 108 aa, Artificial Sequence
  Synthetic construct
SSELTQDPAVSVALGQTVRITCQGDSLRNYYASWYHQKPGQAPVLVIYHKNNRPSGIPDRFSGSSSGDTASLTITGAQAEDEADYYCNSRDSSGNLVVFGGGTKLTVL

SEQ ID NO: 10281 - protein, 113 aa, Artificial Sequence
  Synthetic construct
DIVMTQSPDSLSVSLGERATFNCRSSQSVFFESQNNNFVAWYQQKPGQPPKLLVYWASTRAFGVPDRFTGSGSGTDFTLTISSLQAEDVAVYYCQQYYLSPWTFGQGTKVEVK

SEQ ID NO: 10282 - protein, 107 aa, Artificial Sequence; identical to SEQ ID NO: 8695
  Synthetic construct

SEQ ID NO: 10283 - protein, 108 aa, Artificial Sequence
  Synthetic construct
SSEVTQDPAVSVALGQTVKITCQGDGLRSYFPSWYQQKPGQAPVLLIFGKNKRPSGIPDRFSGSSSGDTASLTITGAQAEDEGDYYCNCRDSSGNHVVFGGGTKVTVQ

SEQ ID NO: 10284 - protein, 110 aa, Artificial Sequence
  Synthetic construct
QAVVTQEPSLTVSPGGTVTLTCGSSTGAVTRGHYPYWFQQKPGQAPRTLIYDTSQKHSWTPARFSGSLVGGKAALTLSGAQPEDEAEYYCLLSYTDARPAFGGGTKLTVL

SEQ ID NO: 10285 - protein, 107 aa, Artificial Sequence; identical to SEQ ID NO: 8065
  Synthetic construct

SEQ ID NO: 10286 - protein, 107 aa, Artificial Sequence
  Synthetic construct
DIQMTQSPSTLSASVGDRVTITCRASQSISSWLAWYQQKPGKAPKLLIYKASSLESGVPSRFSGSGSGTEFTLTISSLQPDDFATYYCQQYNSYYYTFGQGTKLEIK

SEQ ID NO: 10287 - protein, 107 aa, Artificial Sequence; identical to SEQ ID NO: 8244
  Synthetic construct

SEQ ID NO: 10288 - protein, 110 aa, Artificial Sequence
  Synthetic construct
QSALTQPPSVSAAPGQKVTVSCSGSSSNIGNNHVTWYQQLPGTAPKLLIYDSNKRPSGIPDRFSGSKSGTSATLGITGLQTGDEADYYCGTWDSSLSTVIFGGGTKLTVL

SEQ ID NO: 10289 - protein, 107 aa, Artificial Sequence
  Synthetic construct
DIQMTQSPSSVSASIGDRVTITCRASQDISTWLAWYQQKPGKAPSLLIYFASRLESGVPSRFSGSGSGTDFTLTISSLQPEDFATYYCQQANSFPLTYGPGTNVDIK

SEQ ID NO: 10290 - protein, 108 aa, Artificial Sequence
  Synthetic construct
PYVLTQPPSVSVAPGKTARITCGGDNIRGKSVHWYQQRPGQAPVLVIYYDSDRPSVIPERFSGSNSENTATLTISRVEAGDEADYFCQVWDGSSHRWVFGGGTKLTVL

SEQ ID NO: 10291 - protein, 109 aa, Artificial Sequence
  Synthetic construct
QSALTQPASVSGSPGQSITISCTGTGSDFGAYHYVSWYQQHPGKAPKLMIYDFTNRPSGVSNRFSGSKSGNTASLTISGLQAEDEADYYCNSYTSSTTFFGGGTKLTVL

SEQ ID NO: 10292 - protein, 111 aa, Artificial Sequence
  Synthetic construct
NFMLTQPHSVSESPGKTVTISCTRSSGSIASNYVQWYQQRPGSAPTTVIYEDNQRPSGVPDRFSGSIDSSSNSASLTISGLKTEDEADYYCQSYDSSIYVVFGGGTKLTVL

SEQ ID NO: 10293 - protein, 105 aa, Artificial Sequence; identical to SEQ ID NO: 8339
  Synthetic construct

SEQ ID NO: 10294 - protein, 112 aa, Artificial Sequence; identical to SEQ ID NO: 10231
  Synthetic construct

SEQ ID NO: 10295 - protein, 107 aa, Artificial Sequence
  Synthetic construct
DIQMTQSPSAMSASVGDRVTITCRASQGISNYLAWFQQKPGKVPKRLIYEASSLQSGVPSRFSGSGSGTEFTLTISSLQPEDFATYYCLQHKSYPLTFGGGTKVEIK

SEQ ID NO: 10296 - protein, 107 aa, Artificial Sequence; identical to SEQ ID NO: 9388
  Synthetic construct

SEQ ID NO: 10297 - protein, 108 aa, Artificial Sequence
  Synthetic construct
EIVLTQSPGTLSLSPGERATLSCRASQSLSSSYLAWYQQKPGQAPRLLIYGASSRATGIPDRFSGGGSGTDFTLTISRLEPEDFAVYHCQQYGTSSWTFGQGTKVEIK

SEQ ID NO: 10298 - protein, 110 aa, Artificial Sequence
  Synthetic construct
QSVLTQPPSASGTPGQRVTISCSGSSSNVGSNTVSWFQQLPGMAPKVLIYSDNRRPSGVPDRLSGSRSGTSASLAISGLQSEDEAEYFCAAWDDSLNGVVFGGGTRLTVL

SEQ ID NO: 10299 - protein, 109 aa, Artificial Sequence
  Synthetic construct
QSVLTQPPSVSAAPGQQVTISCSGSTSNIGKSFVSWYQHLPGAAPKLLIYDNDKRPSGIPDRFSGSKSGTSATLAITELQTGDEADYYCGTWDSSLTAVFGAGTQLTVL

SEQ ID NO: 10300 - protein, 110 aa, Artificial Sequence
  Synthetic construct
QSVLTQPPSASGTPGQRVTISCSGSSSKIGSSTVNWYQHLPGTAPKLLIYNNDQRPSGVPDRFSGSKSDTSASLAISGLQSEDEADYYCSSWRDSLNGVVFGGGTRLTVL

SEQ ID NO: 10301 - protein, 113 aa, Artificial Sequence; identical to SEQ ID NO: 8276
  Synthetic construct

SEQ ID NO: 10302 - protein, 112 aa, Artificial Sequence
  Synthetic construct
QLVLTQSPSASASLGASVKLTCTLSSGHSNYAIAWHQQQSDKGPRYLMKVNSDGSHNKGDGIPDRFSGSSSGAERYLTISSLQSEDEAEYYCQTWGTGTNYVFGSGTKVTVL

SEQ ID NO: 10303 - protein, 111 aa, Artificial Sequence
  Synthetic construct
QSVLTQPPSVSGAPGQRVTISCTGSSSNIGATSHVHWYQQLPGTAPKLLIYDNSNRPSGVPDRFSGSKSGTSASLAITGLQTEDEADYYCQSYDRSLTAYVFGGGTRVTVL

SEQ ID NO: 10304 - protein, 107 aa, Artificial Sequence
  Synthetic construct
AIRMTQSPSSFSASTGDRVTITCRASQGISSYLAWYQQKPGKAPKLLIYAASTLQSGVPSRFSGSGSGTDFTLTISCLQSEDFATYYCQQYYSYPFTFGGGTKVEIK

SEQ ID NO: 10305 - protein, 109 aa, Artificial Sequence; identical to SEQ ID NO: 9547
  Synthetic construct

SEQ ID NO: 10306 - protein, 112 aa, Artificial Sequence
  Synthetic construct
QSALTQPASVSGSPGQSITVSCTGTSSDVGGYNYVSWYQQHPGQAPKLLIYDVNKRPSGVSNRFSGSKSGNTASLTISGLQAEDEADYYCSSRTSITTSGVLFGGGTKLTVL

SEQ ID NO: 10307 - protein, 107 aa, Artificial Sequence; identical to SEQ ID NO: 8234
  Synthetic construct

SEQ ID NO: 10308 - protein, 107 aa, Artificial Sequence
  Synthetic construct
DIQMTQSPSSLSASVGDRVTITCRASQDITNYLAWYQQKPGKVPKLLIYGASTLQSGVPSRFSGSGSGTDFTLTISSLQPEDVATYYCQKYNRAPWTFGQGTKVEIK

SEQ ID NO: 10309 - protein, 109 aa, Artificial Sequence
  Synthetic construct
SSELTQDPAVSVALGQTVRITCQGDSLRSYYASWYQQKPGQAPVLVIYGKNNRPSGIPDRFSGSSSGNTASLTITGAQAEDEADYYCNSRDSSGNPYYVFGTGTKVTVL

SEQ ID NO: 10310 - protein, 107 aa, Artificial Sequence; identical to SEQ ID NO: 8833
  Synthetic construct

SEQ ID NO: 10311 - protein, 112 aa, Artificial Sequence
  Synthetic construct
DIVMTQSPLSLPVTPGEPASISCRSSQSLLHSNGYNYLDWYLQKPGQSPQLLIYLGSNRASGVPDRFSGSGSGTDFTLKISRVEAEDVGVYYCMQALQTLLTFGGGTKVEIK

SEQ ID NO: 10312 - protein, 107 aa, Artificial Sequence; identical to SEQ ID NO: 10077
  Synthetic construct

SEQ ID NO: 10313 - protein, 112 aa, Artificial Sequence
  Synthetic construct
DIVMTQTPLSLSVTPGQPASISCKSSQSLLHSDGKTYLYWYLQKPGQSPQLLIYEVSSRFSGVPDRFSGSGSGTDFTLKISRVEAEDVGVYYCMQGIHLPWTFGQGTKVEIK

SEQ ID NO: 10314 - protein, 107 aa, Artificial Sequence
  Synthetic construct
DIQLTQSPSFLSASVGDRVTITCRASQAFSIYLAWYQQRPGKAPRLLISAASTLQSGVPSRFSGSGSGTEFTLTISSLQPEDFATYYCQQVNVYPRTFGQGTKVEIK

SEQ ID NO: 10315 - protein, 112 aa, Artificial Sequence
  Synthetic construct
DVVMTQSPLSLPVTLGQPASISCRSSQSLVHSDGNTYLIWFQQRPGQSPRRLIYKVSNRDSGVPDRFSGSGSGTDFTLKISRVEAEDVGVYYCMQGTHWPPTFGQGTKLEIK

SEQ ID NO: 10316 - protein, 110 aa, Artificial Sequence
  Synthetic construct
QSVLTQPPSASETAGQRVTISCSGGRSNIGVNAVNWYQQLPGRAPKVLIYSNSQRPSGVPGRFSGSKSGTSASLAISGLQSEDEAMYYCAAWDDRVNAMIFGGGTQLAVL

SEQ ID NO: 10317 - protein, 110 aa, Artificial Sequence
  Synthetic construct
QSALTQPPSASGSPGQSVTISCTGTSSDVGGYNYVSWYQQHPGKAPKLMIYEVTKRPSGVPYRFSGSKSGNTASLTVSGLQAEDEADYYCSSYAGSNNVVFGGGTKLTVL

SEQ ID NO: 10318 - protein, 107 aa, Artificial Sequence
  Synthetic construct
ETTLTQSPVFMSATPGDTVTISCKASQDIDEEMNWYQQKPGEAPIFLIEEATTLAPGIPPRFSGSGFGTDFTLTIKSIKSEDAGYYFCLQHENFPFTFGQGTKLEIK

SEQ ID NO: 10319 - protein, 108 aa, Artificial Sequence
  Synthetic construct
EIVLTQSPATLSLSPGERATLSCGASQSVSSSYLAWYQQKPGLAPRLLIYDASSRATGIPDRFSGSGSGTDFTLTISRLEPEDFAVYYCQQYGSSPNTFGQGTKLEIK

SEQ ID NO: 10320 - protein, 109 aa, Artificial Sequence
  Synthetic construct
QSALTQPASVSGSPGQSITLSCTGISSDVNYKYVSWYQQHAGKVPKLMIYEVINRPSGVPDRFSGSKSGNTASLTISGLQAEDEADYYCCSLTSSGAWIFGGVTKLTVL

SEQ ID NO: 10321 - protein, 108 aa, Artificial Sequence
  Synthetic construct
EIVMTQSPATLSVSPGERATLSCRASQSVNSNLAWYQQKPGQAPRLLIHGTSTRATGIPDRFSGSGSGTEFTLTISSLQSEDFAVYYCQQYEKWPPWTFGQGTKVEIK

SEQ ID NO: 10322 - protein, 110 aa, Artificial Sequence; identical to SEQ ID NO: 8067
  Synthetic construct

SEQ ID NO: 10323 - protein, 106 aa, Artificial Sequence; identical to SEQ ID NO: 8265
  Synthetic construct

SEQ ID NO: 10324 - protein, 107 aa, Artificial Sequence; identical to SEQ ID NO: 8304
  Synthetic construct

SEQ ID NO: 10325 - protein, 110 aa, Artificial Sequence
  Synthetic construct
QSVLTQPPSVSAAPGQKVTISCSGSSSNIGNNYVSWYQQLPGTAPKLLIYDNNKRPSGIPDRFSGSKSGTSATLGITGLQTGDEADYYCGTWDSSLSSVVFGGGTKLTVL

SEQ ID NO: 10326 - protein, 107 aa, Artificial Sequence
  Synthetic construct
AIQLTQSPSSLSASVGDRVTITCRASQGISSYLAWYQQKPGKAPKLLIYAASTLQSGVPSRFSGSGSGTDFTLTISSLQPEDFATYYCQQLNSYPPTFGQGTKVEIK

SEQ ID NO: 10327 - protein, 109 aa, Artificial Sequence
  Synthetic construct
EIVMTQSPATLSVSPGERATLSCRASQSVSSNLAWYQQKPGQAPRLLIYGASTRATGIPARFSGSGSGTEFTLTISSLQSEDFAVYYCQQYNNWPPMYTFGQGTKLEIK

SEQ ID NO: 10328 - protein, 112 aa, Artificial Sequence
  Synthetic construct
DVVMTQSPLSLPVTLGQPASISCRSSQSLVHSDGNTYLNWFQQRPGQSPRRLIYKVSNRDSGVPDRFSGSGSGTDFTLKISRVEAEDVGVYYCMQGTHWPWTFGQGTKVEIK

SEQ ID NO: 10329 - protein, 110 aa, Artificial Sequence
  Synthetic construct
QSALTQPASVSGSPGQSITISCTGTSSDVGGYNYVSWYQQYPGKAPKLMIYDVSKRPSGVSNRFSGSKSDNTASLTISGLQAEDEADYYCSSYTSSSTWVFGGGTKLTVL

SEQ ID NO: 10330 - protein, 109 aa, Artificial Sequence
  Synthetic construct
ENVLTQSPGTLSLSPGERATLSCRASQSVNSNYLAWYQQKPGQAPRLLIYATSSRATGVPDRFSGSGSGTDFTLTISRLEPEDFAVYYCQRYGSSPRVTFGQGTKLEIK

SEQ ID NO: 10331 - protein, 109 aa, Artificial Sequence
  Synthetic construct
QTVVTQEPSVTVSPGGTVTLTCGSSTGAVTRGYHPNWFQQKPGQAPRALIYDTDNRHPWTPARFSGSFLGGKAALTLSGVQPEDEAEYYCLLVSGGSFVFGTGTQVTVL

SEQ ID NO: 10332 - protein, 110 aa, Artificial Sequence
  Synthetic construct
QAVLTQEPSLTVSPGGTVTLTCGSSTGPVTSGHYLYWLQQKPGQGPRTLISDTTNKHSWTPARFSGSLLGGKAALTLSGAQPEDEADYYCFLSYENERGVFGGGTKLTVL

SEQ ID NO: 10333 - protein, 107 aa, Artificial Sequence; identical to SEQ ID NO: 8435
  Synthetic construct

SEQ ID NO: 10334 - protein, 107 aa, Artificial Sequence; identical to SEQ ID NO: 9556
  Synthetic construct

SEQ ID NO: 10335 - protein, 107 aa, Artificial Sequence
  Synthetic construct
DIQMTQSPSSLSASVGDRVTITCQASQNIRDFLNWYQQKPGKAPQLLIYDISNLETGVPPRFSGGGSGTDFTLTITSLQPEDIATYYCQQFSDLPWTFGQGTKVEIK

SEQ ID NO: 10336 - protein, 112 aa, Artificial Sequence
  Synthetic construct
DAVMTQSPLSLPVTLGQPASISCRSSQSLAHSDGNTYLNWFQQRPGQSPRRLIYKVSNRDSGVPDRFSGSGSDTDFTLTISRVEAEDVGVYYCMQSIHWPWTFGQGTKVEIK

SEQ ID NO: 10337 - protein, 107 aa, Artificial Sequence
  Synthetic construct
EIVLTQSPDFQSVTPKEKVTITCRASQSIGSSLHWYQQKPDQSPKLLIKYASQSISGVPSRFSGSGSGTDFTLTINSLEAEDAATYYCHQSSSLRDTFGQGTRLEIK

SEQ ID NO: 10338 - protein, 112 aa, Artificial Sequence
  Synthetic construct
DIVLTQTPLSSPITLGQPASISCRSSQSLAHDDGSTYLSWLHQRPGQPPRLLIYKVSNRFSGVPDRFSGSGAGTHFTLKISRVEAEDVGVYYCTQATQFPHTFGQGTKLEIK

SEQ ID NO: 10339 - protein, 111 aa, Artificial Sequence
  Synthetic construct
QSVLTQPPSASGTPGQRITISCSGTTSNLGTNYVYWYQHLPGTAPKLLIYRDNQRPSGVPDRFSGSRSGTSASLAVSGLRSEDEGHYYCAAWDDSLSGPVVFGGGTKVTVL

SEQ ID NO: 10340 - protein, 107 aa, Artificial Sequence; identical to SEQ ID NO: 8573
  Synthetic construct

SEQ ID NO: 10341 - protein, 111 aa, Artificial Sequence
  Synthetic construct
QSVLTQPPSVSGAPGQRVTISCTGSSSNIGAGYDVHWYQQLPGTAPKLLIYGNSNRPSGVPDRFSGSKSGTSASLAITGLQAEDEADYYCQSYDSSLSGWVFGGGTKLTVL

SEQ ID NO: 10342 - protein, 107 aa, Artificial Sequence
  Synthetic construct
AIQLTHSPSSLSASVGDRVIITCRASQGISSALAWYQQKPGKPPKLLIYDSSSLESGVPSRFSGSGSGTHFTLTISSLQPEDFATYYCQQFYSYPLTFGGGTKVDIK

SEQ ID NO: 10343 - protein, 106 aa, Artificial Sequence
  Synthetic construct
EIVMTQSPATLSVSPGERATLSCRASQSVSSNLAWYQQKPGQAPRLLIYGASTRATGIPARFSGSGSGTEFTLTISSLQSEDFAVYYCQQYNNWYTFGQGTKLEIK

SEQ ID NO: 10344 - protein, 107 aa, Artificial Sequence; identical to SEQ ID NO: 8065
  Synthetic construct

SEQ ID NO: 10345 - protein, 107 aa, Artificial Sequence; identical to SEQ ID NO: 10065
  Synthetic construct

SEQ ID NO: 10346 - protein, 109 aa, Artificial Sequence
  Synthetic construct
EIVLTQSPGTLSLSPGERATLSCRASQSVSSSYLAWYQQKPGQAPRLLIYGASSRATGIPDRFSGSGSGTDFTLTISRLEPEDFAVYYCQQYGSSPPGTFGQGTKVEIK

SEQ ID NO: 10347 - protein, 110 aa, Artificial Sequence
  Synthetic construct
QTVVTQEPSFSVSPGGTVTLTCGLSSGSVSTSYYPSWYQQTPGQAPRTLIYSTNTRSSGVPDRFSGSILGNKAALTITGAQADDESDYYCVLYMGSGIWVFGTGTKVTVL

SEQ ID NO: 10348 - protein, 109 aa, Artificial Sequence
  Synthetic construct
EIVLTQSPATLSLSPGERATLSCRASHSVNTYLAWYQQKPGQAPRLLIYDASNRATGIPARFSGSGSGTDFTLTISSLEPEDFAVYYCLLRTNWPLMYTFGQGTKLEIK

SEQ ID NO: 10349 - protein, 107 aa, Artificial Sequence
  Synthetic construct
DIHMTQSPSSLSASIGDRVTISCRASQNISGYLNWYQQIQGKAPKLLIYAASSLQSGVPSRFSGSTSETDFTLTISSLQPEDFGTYYCQQSYTTPFTFGPGTKLDIR

SEQ ID NO: 10350 - protein, 112 aa, Artificial Sequence; identical to SEQ ID NO: 10231
  Synthetic construct

SEQ ID NO: 10351 - protein, 106 aa, Artificial Sequence
  Synthetic construct
DIQMTQSPSTLSASVGDRVTITCRASQSISSWLAWYQQKPGKAPKLLIYKASSLESGVPSRFSGSGSGTEFTLTISSLQPDDFATYYCQQYNSYSTFGQGTRLEIK

SEQ ID NO: 10352 - protein, 107 aa, Artificial Sequence
  Synthetic construct
EIVLTQSPATLSLSPGERATLSCRASQDVSSYLSWFQQRPGQPPRLLIYGASNRAPGIPARFSGRGSGTDFTLTISSLEPEDFAIYYCQQRGSWPRTFGQGTKVEFK

SEQ ID NO: 10353 - protein, 108 aa, Artificial Sequence
  Synthetic construct
EIVLTQSPGTLSLSPGERATLSCRASQSVSSSYLAWYQQKPGQAPRLLIYGASRRATGIPDRFSGSGSGTDFALTISRLEPEDFAVYYCQQYGSSPRTFGQGTKVEIK

SEQ ID NO: 10354 - protein, 113 aa, Artificial Sequence
  Synthetic construct
DIVMTQSPDSLAVSLGERATINCKSSQSVFYGSSNKNYLAWYQQKPGQPPKLLIYWASTRESGVPDRFIGSGSGTDFTLTITSLQAEDVAVYYCQQYHVPPVTFGGGTKVEIK

SEQ ID NO: 10355 - protein, 110 aa, Artificial Sequence
  Synthetic construct
EIVLTQSPGTLSLSPGERATLSCRASQSVSSSYLAWYQQKPGQAPRLLIYGASSRATGIPDRFSGSGSGTDFTLTISRLEPEDFAVYYCQQYGSSPPLYTFGQGTKLEIK

SEQ ID NO: 10356 - protein, 112 aa, Artificial Sequence; identical to SEQ ID NO: 8305
  Synthetic construct

SEQ ID NO: 10357 - protein, 107 aa, Artificial Sequence
  Synthetic construct
DIQLTQSPSFLSASVGDRVTITCRASQGISSYLAWYQQKPGKAPKLLIYAASTLQSGVPSRFSGSGSGTEFTLTISSLQPEDFATYYCQQLNSYPITFGPGTKVDIK

SEQ ID NO: 10358 - protein, 110 aa, Artificial Sequence; identical to SEQ ID NO: 8280
  Synthetic construct

SEQ ID NO: 10359 - protein, 107 aa, Artificial Sequence; identical to SEQ ID NO: 9062
  Synthetic construct

SEQ ID NO: 10360 - protein, 106 aa, Artificial Sequence
  Synthetic construct
PYELAQPPSVSVSPGQTASITCSGDKLGDKYVGWYQQRPGQPPLLVIYQDTKRPSGIPERFSGSNSGDAATLTVSGTQPLDEAVYYCQTYDSSTMIFGGGTKLTVL

SEQ ID NO: 10361 - protein, 107 aa, Artificial Sequence; identical to SEQ ID NO: 8596
  Synthetic construct

SEQ ID NO: 10362 - protein, 111 aa, Artificial Sequence
  Synthetic construct
QLVLTQSPSASASLGASVTLTCTLSIGHSTYAIAWHQQQPGKAPRFLMRLSNFGAHIKGDGVPNRFSGSSSGADRYLTISDLHSEDEADYYCQSWDTVGVLFGRGTRLTVL

SEQ ID NO: 10363 - protein, 111 aa, Artificial Sequence
  Synthetic construct
QPVLTQSSSASASLGSSVKLTCTLSSGHSSYIIAWHQQQPGKAPRYLMKLEDSGSYDKGGGVPDRFSGSSSGADRYLTISNLQSEDEADYYCETWDSNTRVFGGGTKLTVL

SEQ ID NO: 10364 - protein, 110 aa, Artificial Sequence
  Synthetic construct
QPALTQPASVSGSPGQSITISCTGTSSDVDDYKFVSWYQQHPGKAPKLIIYDVSRRPSGVSNRFSGSKSGNTASLTISGLQAEDEADYYCSSYAGSSTLLFGGGTTLIVL

SEQ ID NO: 10365 - protein, 107 aa, Artificial Sequence
  Synthetic construct
DIQMTQSPSTLSASVGDRVTMTCRASQSINSWLAWYQQKPGNVPKLLIYKASSVESGVPSRFSGSGSETEFSLTISSLQPEDFATYYCQQYNSYPWTFGQGTKVEIK

SEQ ID NO: 10366 - protein, 107 aa, Artificial Sequence
  Synthetic construct
EIVLTQSPATLSLSPGESATLSCRASQDISSQLAWYQQKLGQPPRLLIYDVSSWATGIPARFSGSGSGTDFTLTISSLEPEDSAVYYCQQRNKWPLTFGQGTKLEIK

SEQ ID NO: 10367 - protein, 108 aa, Artificial Sequence
  Synthetic construct
SYVLTQPPSMSAAPGQTARIPCEGDIVGEESVHWYQQRPGRAPVLVISYDSDRPSGIPERFSGSKSGKTATLTITRVEAGDEGDFYCQVWDGLREHFVFGSGTRVTVL

SEQ ID NO: 10368 - protein, 113 aa, Artificial Sequence
  Synthetic construct
DIVVTQSPDSLAVSLGERATINCKSSQSVVYSSNNKNYLAWYQQKPGQPPKLLIYWASTRESGVPDRFSGSGSGTDFTLTISSLQAEDVAVYYCQQCYSAPWTFGQGTKVEIK

SEQ ID NO: 10369 - protein, 106 aa, Artificial Sequence; identical to SEQ ID NO: 8519
  Synthetic construct

SEQ ID NO: 10370 - protein, 108 aa, Artificial Sequence; identical to SEQ ID NO: 8909
  Synthetic construct

SEQ ID NO: 10371 - protein, 110 aa, Artificial Sequence; identical to SEQ ID NO: 8067
  Synthetic construct

SEQ ID NO: 10372 - protein, 107 aa, Artificial Sequence
  Synthetic construct
DIQMTQSPSTLSASVGDRVTITCRASQSISSWLAWYQQKPGKAPKLLIYKASSLESGVPSRFSGSGSGTEFTLTISSLQPDDFATYYCQQYNSFALTFGGGTKVEIK

SEQ ID NO: 10373 - protein, 107 aa, Artificial Sequence; identical to SEQ ID NO: 8224
  Synthetic construct

SEQ ID NO: 10374 - protein, 108 aa, Artificial Sequence
  Synthetic construct
QSALTQPASVSGSPGQSITISCTGTSSDVGGSKYVSWYQQHPGKAPKLIIYDVTNRPSGVSNRFSGSKSGHAASLTISGLQAEDEADYYCASYTSSVVFGGGTKLTVL

SEQ ID NO: 10375 - protein, 107 aa, Artificial Sequence; identical to SEQ ID NO: 8065
  Synthetic construct

SEQ ID NO: 10376 - protein, 106 aa, Artificial Sequence
  Synthetic construct
EIVMTQSPATLSVSPGERATLSCRASQSVSSNLAWYQQKPGQAPRLLIYGASTRATGIPARFSGSGSGTEFTLTISSLQSEDFAVYYCQQYNNWRTFGQGTKLEIK

SEQ ID NO: 10377 - protein, 107 aa, Artificial Sequence; identical to SEQ ID NO: 9662
  Synthetic construct

SEQ ID NO: 10378 - protein, 110 aa, Artificial Sequence; identical to SEQ ID NO: 8146
  Synthetic construct

SEQ ID NO: 10379 - protein, 111 aa, Artificial Sequence
  Synthetic construct
QSVLTQPPSASGTPGQRVTISCSGSSSNIGRHWVYWYQVLPGTAPKVLIYRNYQRPSGVPDRFSGSKSGTSASLAISGLRSEDEADYYCAAWDDSLSAHVVFGGGTKLTVL

SEQ ID NO: 10380 - protein, 107 aa, Artificial Sequence
  Synthetic construct
EIVLTQSPATLSLSPGERATLSCRASQSVSSYLAWYQQKPGQAPRLLIYDASNRATGIPARFSGSGSGTDFTLTISSLEPEDFAVYYCQQRSNWPITFGPGTKVDIK

SEQ ID NO: 10381 - protein, 108 aa, Artificial Sequence; identical to SEQ ID NO: 8099
  Synthetic construct

SEQ ID NO: 10382 - protein, 109 aa, Artificial Sequence
  Synthetic construct
EIVLTQSPGTLSLSPGERATLSCRASQSVSSSYLAWYQQKPGQAPRLLIYGASSRATGIPDRFSGSGSGTDFTLTISRLEPEDFAVYYCQQYGSSPPLTFGGGTKVEIK

SEQ ID NO: 10383 - protein, 107 aa, Artificial Sequence
  Synthetic construct
DIQLTQSPSTLSASVGDGVTITCRASQSLSNWLAWYQQKPGKAPKLLMSKASSLESGVPSRFSGSGSGTEFTLTISSLQPEDFATYYCQHYNGYPFAFGQGTRLEIK

SEQ ID NO: 10384 - protein, 107 aa, Artificial Sequence; identical to SEQ ID NO: 8282
  Synthetic construct

SEQ ID NO: 10385 - protein, 107 aa, Artificial Sequence
  Synthetic construct
AIQLTQSPSSLSASVGDRVSITCRASQGIGSYLAWYQQRPGKAPKLLIYLAATLQSGVPSRFSGSGSGTDFTLAISSLQPEDFAIYYCQQLNIYPRTFGQGTKVEVK

SEQ ID NO: 10386 - protein, 108 aa, Artificial Sequence
  Synthetic construct
DIQMTQSPSSLSAFVGDRVTITCRASQSISTYLNWYQQKAGTAPRLLIYAASTLHSGAPSRFSGSGSGTDFTLTISTLQPEDFATYYCQQSYTTPPWTFGQGTKVEVN

SEQ ID NO: 10387 - protein, 107 aa, Artificial Sequence; identical to SEQ ID NO: 8573
  Synthetic construct

SEQ ID NO: 10388 - protein, 108 aa, Artificial Sequence
  Synthetic construct
PYVLTQPPSVSVAPGKTARVTCGGNNIGGKSVHWYQQRPGQAPVLVIYYENDRPSGVPERFSGSNSGNTATLTISRVEVGDEADYYCQVWDSSSDRGVFGGGTKLTVL

SEQ ID NO: 10389 - protein, 117 aa, Artificial Sequence
  Synthetic construct
QSALTQPASVSGSPGQSITISCTGASSDVGTYKYVSWYQQKPGKAPKLMIYDVTIRPSGVSNRFSGSKSGDTASLTISGLQAEDEADYYCSSYIRKSVYTDSSMQVIFGGGTKVTVL

SEQ ID NO: 10390 - protein, 105 aa, Artificial Sequence; identical to SEQ ID NO: 8339
  Synthetic construct

SEQ ID NO: 10391 - protein, 108 aa, Artificial Sequence
  Synthetic construct
PYVLTQPPSVSVAPGKTASITCGGNNIVGKSVHWYQQKPGQAPVLVINYDRDRPSGIPERFSGSNSGNTATLTISRVEAGDEADYYCQVWEGSSNRMVFGGGTKLTVL

SEQ ID NO: 10392 - protein, 106 aa, Artificial Sequence
  Synthetic construct
SYELTQPPSLSVSPGQTASITCSGDHLGDKDAYWYQQKPGQSPILVIYQSTKRPSGIPERFSGSNSGNTATLTISGTQAMDEADYYCQAWDSSSVVFGGGTKLTVL

SEQ ID NO: 10393 - protein, 107 aa, Artificial Sequence
  Synthetic construct
AIQLTQSPSSLSASVGDRVTITCRASQAISNFFAWYQQKPGKAPKLLISAVSTLQNGVPSRFSGSGSGTDFTLTISSLQPEDFATYYCQQLNGYPPTFGPGTKVEIR

SEQ ID NO: 10394 - protein, 107 aa, Artificial Sequence; identical to SEQ ID NO: 10235
  Synthetic construct

SEQ ID NO: 10395 - protein, 110 aa, Artificial Sequence
  Synthetic construct
NFQLTQPHSVSESPGKTVTISCTRSSGSISSNYVQWYQQRPGSSPTTVIYEDNQRPSGVPHRFSGSIDSSSNSASLTISGLTTEDEADYYCQSYDNNNVIFGGGTKLIVL

SEQ ID NO: 10396 - protein, 109 aa, Artificial Sequence; identical to SEQ ID NO: 8306
  Synthetic construct

SEQ ID NO: 10397 - protein, 107 aa, Artificial Sequence; identical to SEQ ID NO: 8065
  Synthetic construct

SEQ ID NO: 10398 - protein, 110 aa, Artificial Sequence
  Synthetic construct
QSVLTQPPSVSAAPGQKVSISCSGDTRNIANNYVAWYQQIPGTAPKLLIYDTHKRPSGIPDRFSGSKSGSSATLDITGLQPGDEADYFCGTWDSSLSAGVFGGGTRLTVL

SEQ ID NO: 10399 - protein, 113 aa, Artificial Sequence; identical to SEQ ID NO: 8989
  Synthetic construct

SEQ ID NO: 10400 - protein, 111 aa, Artificial Sequence
  Synthetic construct
QSVLTQPPSASGTPGQRVTISCSGSSSNIGSNYVYWYQQLPGTAPKLLIYRNNQRPSGVPDRFSGSKSGTSASLAISGLRSEDEADYYCAAWDDSLSGSWVFGGGTKLTVL

SEQ ID NO: 10401 - protein, 110 aa, Artificial Sequence; identical to SEQ ID NO: 9066
  Synthetic construct

SEQ ID NO: 10402 - protein, 107 aa, Artificial Sequence
  Synthetic construct
DIQMTQSPSSVSASVGDRVTITCRASQGIRSWLAWYQQKPGKAPNLLIYAASSLQSGVPTRFSGSGSGTEFTLTISSLQPEDFATYYCQQANSLPYTFGQGTKLEIK

SEQ ID NO: 10403 - protein, 112 aa, Artificial Sequence
  Synthetic construct
EIVMTQTPLSSPVTLGQPASMSCRASQSLVHSDGNTYLSWLQQRPGQPPRLLIYKISRRFSGVPDRFSGSGAGTDFTLEISKVEAEDVGVYYCTQATQFPITFGQGTRLEIK

SEQ ID NO: 10404 - protein, 107 aa, Artificial Sequence; identical to SEQ ID NO: 9341
  Synthetic construct

SEQ ID NO: 10405 - protein, 107 aa, Artificial Sequence
  Synthetic construct
DIQMTQSPSSLSASVGDRVTITCRASQSISNYLNWYQQKPGKAPKFLIYSASTLQSGVPSRFSGSGSGTDFTLTISSLQPEDFATYYCQQSYNGPQTFGQGTKVEIK

SEQ ID NO: 10406 - protein, 107 aa, Artificial Sequence
  Synthetic construct
AIQMTQSPSSLSASVGDRVTITCRASQDIRNDLGWYQHKPGTAPKLLIYAASTLPSGVPSRFSGSGSGTDFTLTISSLQPEDFATYFCLQDYNYPRTFGQGTKVEVK

SEQ ID NO: 10407 - protein, 107 aa, Artificial Sequence; identical to SEQ ID NO: 10065
  Synthetic construct

SEQ ID NO: 10408 - protein, 112 aa, Artificial Sequence
  Synthetic construct
HSALTQPASVSGSPGQSITISCTGTSSDIGTYSFVSWYQQHPGKAPKLMIFDVSSRPSGVSHRFSGSKSVNTASLTISGLQAEDEADYFCTSYPNRNTLEVIFGGGTKLTVL

SEQ ID NO: 10409 - protein, 106 aa, Artificial Sequence
  Synthetic construct
EIVMTQSPATLSVSPGERATLSCRASQSVSSNLAWYQQKPGQAPRLLIYGASTRATGIPARFSGSGSGTEFTLTISSLQSEDFAVYYCQQYNNWWTFGQGTKVEIK

SEQ ID NO: 10410 - protein, 106 aa, Artificial Sequence
  Synthetic construct
PYEVTQPPSVSVSPGQTAFITCSGDELGQKYVCWYHQKPGQSPALIIYHDSKRSSGIPDRFSGSNSGDTATLTISGTQAMDEGDYYCQAWDKNTVLFGGGTRLTVL

SEQ ID NO: 10411 - protein, 107 aa, Artificial Sequence
  Synthetic construct
DIQMTQSPSTLSASVGDRVTVTCRASQSVSRLLAWYQQKPGKAPNLLIYKASSLDSGVPSRFSGSGSGTEFTLTISGLQPDDFATYYCQQYNSYPWTFGQGTKVEVK

SEQ ID NO: 10412 - protein, 108 aa, Artificial Sequence
  Synthetic construct
SSELTQDPAVSVALGQTVRITCQGDSLRSYYANWFQQKPGQAPVLVIYGKHNRPSGIPDRFSGSSSGNTASLTIAGAQAEDEADYYCNSRDSSGNLVVFGGGTKLTVL

SEQ ID NO: 10413 - protein, 108 aa, Artificial Sequence
  Synthetic construct
EVVLTQSPGTLPLSPGERATLSCRASQSVSSGYLAWYQQKPGQAPRLLIYGASTRATGIPDRFSGSGSGTDFALTISRLEPEDFAVYYCQQYGISPYTFGQGTKLEIA

SEQ ID NO: 10414 - protein, 106 aa, Artificial Sequence
  Synthetic construct
DIQMTQSPSAMSASVGDRVTITCRASQAISNYVAWFQQKPGKGPKRLIYAASSLQSGVPSRFSGSGSGTEFTLTISSLQPEDFAIYYCLQYDTYPTFGQGTKLEIR

SEQ ID NO: 10415 - protein, 106 aa, Artificial Sequence
  Synthetic construct
SFDLTQPPSVSVSPGQTARITCSGDRLTDKYVCWYQKKPGQSPVLVIYQDAKRPSGIPERFSGSNSGNTAILTISGTQAMDEADYYCQAWDRSAAVFGGGTKLTVL

SEQ ID NO: 10416 - protein, 108 aa, Artificial Sequence
  Synthetic construct
AIRITQSPSSLSASTGDRVTITCRASQGISSYLAWYQQKPGKAPKLLIYAASTLQSGVPSRFSGSGSGTDFTLTISCLQSEDFATYYCQQYYSYPPSTFGGGTKVEIK

SEQ ID NO: 10417 - protein, 108 aa, Artificial Sequence
  Synthetic construct
EIVLTQSPATLSLSPGERATLSCRASQSVSSSLAWYQQKPGQAPRLLIYDTSNRATGVPARFSGSGSETDFTLTINSLEPEDFALYYCQQRTNWEGVTFGGGTKMEIK

SEQ ID NO: 10418 - protein, 113 aa, Artificial Sequence; identical to SEQ ID NO: 8646
  Synthetic construct

SEQ ID NO: 10419 - protein, 107 aa, Artificial Sequence; identical to SEQ ID NO: 8091
  Synthetic construct

SEQ ID NO: 10420 - protein, 112 aa, Artificial Sequence
  Synthetic construct
DVVVTQAPLTLSVTPGQPASISCSSSQSLLHTDGQTYLYWFLQKPGQSPQLLIYEVSRRFSGVSDRLSGSGSGTHFTLKISRVEAEDVGIYYCMQGLHVPHTFGQGTKLEIK

SEQ ID NO: 10421 - protein, 107 aa, Artificial Sequence; identical to SEQ ID NO: 8573
  Synthetic construct

SEQ ID NO: 10422 - protein, 106 aa, Artificial Sequence
  Synthetic construct
DIQMTQSPSSLSASVGDRVTITCQASQDISNYLNWYQQKPGKAPKLLIYDASNLETGVPSRFSGSGSGTYFSFTISSLQPEDIATYYCQQYDNLYTFGQGTKLEIK

SEQ ID NO: 10423 - protein, 107 aa, Artificial Sequence
  Synthetic construct
DIQMTQSPSSLSASVGDRVTITCQASQDISNSLNWYQQRPGKAPKLLIYDASNLETGVPSRFSGSGSGTDFTFTITSLQPEDIATYYCQQYDNLPRTFGQGTKVEIK

SEQ ID NO: 10424 - protein, 108 aa, Artificial Sequence
  Synthetic construct
DIVLTQSPGTLSLSPGERATLSCRASQSVSSFYLAWYQQKPGQAPRLLIYGASSRATGIPDRFSGSGSGTDFTLTISRLEPEDFAVYYCQQYGSSPRTFGQGTKVEIK

SEQ ID NO: 10425 - protein, 106 aa, Artificial Sequence; identical to SEQ ID NO: 8291
  Synthetic construct

SEQ ID NO: 10426 - protein, 107 aa, Artificial Sequence
  Synthetic construct
DIQMTQSPSSVSASVGDRVTITCRASQGISIWLAWYQQKPGKAPKLLIYAASSLQSGVPSRFSGSGSGTDFSLTISSLQPEDFATYYCQQGNSFPVTFGGGTKVEIK

SEQ ID NO: 10427 - protein, 112 aa, Artificial Sequence
  Synthetic construct
QSALTQPASVSGSPGQSITISCTGTSGDIGLYKHFSWYQVHPGKAPKLMIYDVSSRPSRVSNRFSGSKSGNTASLTISGLQAEDEAYYYCCSYTTSSTLEVVFGGGTKLTVL

SEQ ID NO: 10428 - protein, 107 aa, Artificial Sequence
  Synthetic construct
EIVLTQSPATLSLSPGERATLSCRASQSVSSYLAWYQQKPGQAPRLLIYDASNRATGIPARFSGSGSGTDFTLTISSLEPEDFAVYYCQQRSNWPYTFGQGTKLEIK

SEQ ID NO: 10429 - protein, 106 aa, Artificial Sequence
  Synthetic construct
DIQMTQSPSTLSASVGDRVTITCRASQSISSWLAWYQQKPGKAPKLLIYKASSLESGVPSRFSGSGSGTEFTLTISSLQPDDFATYYCQQYNSLYTFGQGTKLEIK

SEQ ID NO: 10430 - protein, 107 aa, Artificial Sequence; identical to SEQ ID NO: 9551
  Synthetic construct

SEQ ID NO: 10431 - protein, 106 aa, Artificial Sequence
  Synthetic construct
DIQMTQSPSTLSASVGDRVTITCRASQRIGTWLAWYQQKPGKAPKLLIYEASTLESGVPSRFSGSGSGTEFTLTISSLQPDDFATYYCQQYNSFSRFGPGTKLEIR

SEQ ID NO: 10432 - protein, 108 aa, Artificial Sequence
  Synthetic construct
EIVLTQSPGTLSLSPGERATLSCRASQSVSSGYFAWYQQKPRQAPRLLLYGVSNRATGIPDRFSGSGSGTDFSLTISRLEPEDFAVYYCQQYGSLPPTFGQGTKVEIK

SEQ ID NO: 10433 - protein, 110 aa, Artificial Sequence
  Synthetic construct
QSVLTQPPSASGTPGQRVTISCSGSSSNIGSNYVYWYQQFPGTAPKLLISRNSQRPSGVPDRFSGAKSGTSASLAISGLRSEDEADYYCAASDDTLSVVVFGGGTKLTVL

SEQ ID NO: 10434 - protein, 107 aa, Artificial Sequence
  Synthetic construct
EIVLTQSPDFQSVTPKEKVTITCRASQSIGSSLHWYQQKPDQSPKLLIKYASQSISGVPSRFSGSGSGTDFTLTINSLEAEDAATYYCHQSSSLPYTFGQGTKLEIK

SEQ ID NO: 10435 - protein, 110 aa, Artificial Sequence
  Synthetic construct
QSVLTQPPSASGTPGQRVTISCSGSSSNIGSNTVNWFQQLPGAAPKLLIFNDSQRPSGVPDRFSGSKSGTSASLAISGLQSEDEADYYCAAWDDSLNVVVFGGGTELTVL

SEQ ID NO: 10436 - protein, 108 aa, Artificial Sequence
  Synthetic construct
DIQMTQSPSSLSASVGDRVTITCQASQDISNYLNWYQQKPGKAPKLLIYDASNLETGVPSRFSGSGSGTDFTFTISSLQPEDIATYYCQQYDNLPPWTFGQGTKVEIK

SEQ ID NO: 10437 - protein, 110 aa, Artificial Sequence; identical to SEQ ID NO: 8212
  Synthetic construct

SEQ ID NO: 10438 - protein, 107 aa, Artificial Sequence
  Synthetic construct
AIQLTQSPSSLSASVGDRVTITCRASQGISNFFAWYQQKPGKAPKLLIYGASNLQSGVPSRFSGSGSGTDFTLIIDSLQPEDFATYYCQQLSSYPPTFGPGTKVDIK

SEQ ID NO: 10439 - protein, 107 aa, Artificial Sequence
  Synthetic construct
EIVLTQSPATLSLSPGERATLSCRASQSVSSYLAWYQQKPGQAPRLLIYDASNRATGIPARFSGSGSGTDFTLTISSLEPEDFAVYYCQQRSNWRYTFGQGTKLEIK

SEQ ID NO: 10440 - protein, 108 aa, Artificial Sequence
  Synthetic construct
SYVLTQPPSVSVAPGKTASIPCVGDNLRSKAVHWYQQRPGQAPILVIYFDGDRPSGIPDRFSGSNSGNTATLTISRVEAGDEADYYCQVWDSSSDHVVFGGGTKLTVL

SEQ ID NO: 10441 - protein, 108 aa, Artificial Sequence
  Synthetic construct
SYELTQPPSVSVSPGQTARITCSGDALTTQYAYWYQQKPGQAPMLLIYKDAERPSGIPERFSGSSSGITVTLTISGVQAEDEAAYHCQSTDSSGSQWVFGGGTKLTVL

SEQ ID NO: 10442 - protein, 108 aa, Artificial Sequence; identical to SEQ ID NO: 9909
  Synthetic construct

SEQ ID NO: 10443 - protein, 107 aa, Artificial Sequence
  Synthetic construct
YIQMTQTPSAMSASVGDRVTITCRASQDISNYLAWFQQKPGKVPKRLIYTTSILERGVPSRFSGGGSGTFFTLTINNLQPEDFAVYYCLQHRDYPYTFGQGTKLEIK

SEQ ID NO: 10444 - protein, 108 aa, Artificial Sequence
  Synthetic construct
EIVLTQSPGTLSLSPGERATLSCRASQSISISYLAWYQQKPGQAPRLLIYGASSRAAGTPDRFSGSGSGTDFTLTISRLEAEDSAVYHCHQFDSSPWTFGQGTKVEIK

SEQ ID NO: 10445 - protein, 107 aa, Artificial Sequence; identical to SEQ ID NO: 8200
  Synthetic construct

SEQ ID NO: 10446 - protein, 107 aa, Artificial Sequence
  Synthetic construct
DIQMTQSPSSLSASTGDRVTITCRASQGISNYLAWYQQKPGEVPKLIIFTASTLQSGVPSRFSGSGSGTDFTLTISSLQPEDVATYYCQKYDSAPWTFGQGTKVEIK

SEQ ID NO: 10447 - protein, 110 aa, Artificial Sequence; identical to SEQ ID NO: 8953
  Synthetic construct

SEQ ID NO: 10448 - protein, 111 aa, Artificial Sequence
  Synthetic construct
NFILTQPHSVSESPGRTVTISCTRSSGSIASNYVQWYQQRPGSSPTTVIYEDNDRPSGVPDRFSGSIDSSSNSASLTISGLKTDDEADYYCQSYDSSNHWVFGGGTKLTIL

SEQ ID NO: 10449 - protein, 107 aa, Artificial Sequence; identical to SEQ ID NO: 8110
  Synthetic construct

SEQ ID NO: 10450 - protein, 113 aa, Artificial Sequence
  Synthetic construct
DIVMTQSPDSLAVSLGERATINCKSSRSLLYGSSNKDYLAWYQQKPGQPPKLLIYWASTREFGVPDRFSGSGSGTDFTLTISSLQAEDVALYYCHQYYDYSYTFGQGTKLEIK

SEQ ID NO: 10451 - protein, 110 aa, Artificial Sequence; identical to SEQ ID NO: 8172
  Synthetic construct

SEQ ID NO: 10452 - protein, 109 aa, Artificial Sequence
  Synthetic construct
EIVLTQSPGTLSLSPGERATLSCRASRNLSKNYLAWYQQRPGQAPRLLIYGAFNRATGIPDRFSGSGSGTDFTLTISRLEPEDFAVYYCQQYGSAIIYTFGQGTKLEIK

SEQ ID NO: 10453 - protein, 105 aa, Artificial Sequence
  Synthetic construct
DIQMTQSPSSLSASVGDRVTITCRASQSISSYLNWYQQKPGKAPKLLIYAASSLQSGVPSRFSGSGSGTDFTLTISSLQPEDFATYYCQQSYSNTFGPGTKVDIK

SEQ ID NO: 10454 - protein, 112 aa, Artificial Sequence
  Synthetic construct
DVVMTQSPLSLPVTLGQPASISCRSSQSLVHSDGNTYLNWFHQRPGQSPRRLIYKVSNRDSGVPDRFSGSGSGTDFTLKISRVEAEDVGVYYCMQGTHWPYTFGQGTKLEIK

SEQ ID NO: 10455 - protein, 110 aa, Artificial Sequence
  Synthetic construct
HSALTQPASVSGSPGQSITISCTGTSSDVGNFNIVSWYQQYPGEAPKLLIFEVTKRPSGISNRFSGSKSGNTASLTISGLQAEDEADYYCCSYTGVVAWVFGGGTRLTVL

SEQ ID NO: 10456 - protein, 110 aa, Artificial Sequence; identical to SEQ ID NO: 8067
  Synthetic construct

SEQ ID NO: 10457 - protein, 113 aa, Artificial Sequence; identical to SEQ ID NO: 8989
  Synthetic construct

SEQ ID NO: 10458 - protein, 108 aa, Artificial Sequence
  Synthetic construct
SYVLTQPPSVSVAPGKTARITCGGSNIGTKTVHWYQQRPGQAPVVVIYDDSDRPSGIPERFSGSNSGNTATLTISRVEAGDEADYYCQLRDSSSDHVVFGGGTKLTVL

SEQ ID NO: 10459 - protein, 107 aa, Artificial Sequence
  Synthetic construct
DIQLTQSPSVLSASVGDRVTITCRASQGISSYLAWYQQKPGKAPNLLVYAASTLQSGVPSRFSGSGSGTEFALTISSLQPEDFATYYCQQLNTYPRTFGQGTKLEIK

SEQ ID NO: 10460 - protein, 110 aa, Artificial Sequence
  Synthetic construct
EIVLTQSPGTLSLSPGERATLSCRASQSVSSSYLAWYQQKPGQAPRLLIYGASSRATGIPDRFSGSGSGTDFTLTISRLEPEDFAVYYCQQYGSSPPVLTFGGGTKVEIK

SEQ ID NO: 10461 - protein, 112 aa, Artificial Sequence
  Synthetic construct
DIVMTQSPLSLPVTPGEPASISCRSSQSLLHSNGYNYLDWYLQKPGQSPQLLIYLGSNRASGVPDRFSGSGSGTDFTLKISRVEAEDVGVYYCMQALQTPQTFGPGTKVDIK

SEQ ID NO: 10462 - protein, 109 aa, Artificial Sequence
  Synthetic construct
QTVLTQSPASLSLSPGERATLSCRASQNVTSNYLAWYQQRPGQAPRLLIYGASSRATGIPDRFSGSGSGTDFTLTISRLEPEDFTVYYCQHFDTSPQATFGQGTRLELK

SEQ ID NO: 10463 - protein, 107 aa, Artificial Sequence
  Synthetic construct
DIQMTQSPSSVSASVGDRVTITCRASQGISNWLAWYQQKPGKAPNLLIYAASNLQSGVPSRFSGSGSGTDFTLTISSLQPEDFATYYCQQAYSFPLTFGGGTKVEIR

SEQ ID NO: 10464 - protein, 105 aa, Artificial Sequence; identical to SEQ ID NO: 8339
  Synthetic construct

SEQ ID NO: 10465 - protein, 109 aa, Artificial Sequence
  Synthetic construct
EIVLTQSPGTLSLSPGERATLSCRASQSVSSSYLAWYQQKPGQAPRLLIYGASSRATGIPDRFSGSGSGTDFTLTISRLEPEDFAVYYCQQYGSSPRGTFGQGTKLEIK

SEQ ID NO: 10466 - protein, 107 aa, Artificial Sequence; identical to SEQ ID NO: 8176
  Synthetic construct

SEQ ID NO: 10467 - protein, 107 aa, Artificial Sequence
  Synthetic construct
DIQMTQSPSTLSASVGDRVTITCRASQDISDWLAWYQQKPGKSPKLLIYKASTLESGVPSRFSGSGSGTEFTLTISSLQPDDFATYYCQQYKSYSYTFGPGTKVEIK

SEQ ID NO: 10468 - protein, 107 aa, Artificial Sequence
  Synthetic construct
EILMTQSPATLSVSPGERATLSCRASQSVNSNLAWYQQKPGQAPRLLIYGASTRAAGIPARFSGSGSGTEFTLTISSLQSEDFAVYYCQHYNERPLTFGGGTKVEIK

SEQ ID NO: 10469 - protein, 113 aa, Artificial Sequence; identical to SEQ ID NO: 8086
  Synthetic construct

SEQ ID NO: 10470 - protein, 107 aa, Artificial Sequence
  Synthetic construct
VIWMTQSPSLLSASTGDRVTISCRMSQGISSYLAWYQQKPGKAPELLIYAASTLQSGVPSRFSGSGSGTDFTLTISCLQSEDFATYYCQQYYSFPPTFGQGTKLEIK

SEQ ID NO: 10471 - protein, 111 aa, Artificial Sequence
  Synthetic construct
QSVMTQPPSASGAPGQTVTISCFGSSSNVGTNYVYWYQQFPGTAPKLLIYRNNHRPSGVPDRFSASKSGTSASLAISGLRSEDEADYYCAAWDDSLSGRWVFGGGTKLTVL

SEQ ID NO: 10472 - protein, 113 aa, Artificial Sequence
  Synthetic construct
DIVMTQSPDSLAVSLGERATVNCKSSQSIFLTSNNKNYLAWYQQKPGQPPKVLIYWASTRESGVPDRFSGSGSGTDFTLTISSLQAEDVAVYYCQQYYSAPRTFGQGTKVEIK

SEQ ID NO: 10473 - protein, 107 aa, Artificial Sequence
  Synthetic construct
GIQMTQSPSAVSASVGDRVTITCRASQGISNWLAWYQKRPGEAPKLLIYGASNLQSGVPSRFSGSGSGADFTLTISSLQPEDFATYFCQQANSFPLTFGGGTKVEMK

SEQ ID NO: 10474 - protein, 107 aa, Artificial Sequence; identical to SEQ ID NO: 9422
  Synthetic construct

SEQ ID NO: 10475 - protein, 107 aa, Artificial Sequence
  Synthetic construct
DIQMTQSPSTLSASVGDRVTITCRASQSISSWLAWYQQKPGKAPNLLFYQASTLESGVPSRFSGSGSGTDFTLTISGLQPDDFATYYCQQYNNFPWTFGQGTKVEIK

SEQ ID NO: 10476 - protein, 111 aa, Artificial Sequence
  Synthetic construct
NFLLTQSHSMSESPGKTVTISCTRIGGSIALNYVQWYQHRPGSSPTTVIYDHNQRPSGVPERFSGSIDTSSNSASLTISGLKTEDEATYYCQSFDDNNLWVFGGGTTLTVL

SEQ ID NO: 10477 - protein, 109 aa, Artificial Sequence; identical to SEQ ID NO: 10259
  Synthetic construct

SEQ ID NO: 10478 - protein, 113 aa, Artificial Sequence; identical to SEQ ID NO: 8537
  Synthetic construct

SEQ ID NO: 10479 - protein, 108 aa, Artificial Sequence
  Synthetic construct
DIQMTQSPPSLSASVGDRVTVTCRASQSIGTYLNWYQQRPGKAPKLLIYTASSLQSGVPSRFSGSGSGTDFTLTISSLQPEDFATYFCQQYYITPPYTFGQGTKLEIK

SEQ ID NO: 10480 - protein, 111 aa, Artificial Sequence
  Synthetic construct
QLVLTQSPSASASLGASVKLTCTLSSGHSSYAIAWHQQQPQKGPRYLMKVNSDGSHSKGDGIPDRFSGSSSGAERYLTISSLQSEDEADYYCQTWGTGIRVFGGGTKLTVL

SEQ ID NO: 10481 - protein, 108 aa, Artificial Sequence
  Synthetic construct
EIVLTQSPGTLSLSPGERATLSCRASQSVSSSYLAWYQQKPGQAPRLLIYGASSRATGIPDRFSGSGSGTDFTLTISRLEPEDFAVYYCQQYGSSPSTFGQGTKVEIK

SEQ ID NO: 10482 - protein, 112 aa, Artificial Sequence
  Synthetic construct
DIVMTQSPLSLPVTPGEPASISCRSSQSLLHSNGYNYLDWYLQKPGQSPQLLIYLGSNRASGVPDRFSGSGSGTDFTLKISRVEAEDVGVYYCMQALQTQITFGQGTRLEIK

SEQ ID NO: 10483 - protein, 107 aa, Artificial Sequence
  Synthetic construct
DIQMTQSPSTLSASVGDGVTITCRASQSISSWLAWYQQKPGKAPKLLISKASSLESGVPSRFSGSGSGTEFTLTISSLQPDDFATYYCQHYNGYPFTFGQGTRLEIK

SEQ ID NO: 10484 - protein, 110 aa, Artificial Sequence; identical to SEQ ID NO: 8172
  Synthetic construct

SEQ ID NO: 10485 - protein, 110 aa, Artificial Sequence
  Synthetic construct
NFMLTQPHSVSESPGKTVTISCTRSSGSIVSSYVQWYQQRPGSSPTTVIYEDNQRPSGVPDRFSGSIDSSSNSASLTISGLKSGDEADYYCQSYGSSTWVFGGGTKLTVL

SEQ ID NO: 10486 - protein, 112 aa, Artificial Sequence
  Synthetic construct
DVVMTQSPLSLPVTLGQPASISCRSTQSLVHSDGNTYLHWFQQRPGQSPRRLISKVSNRDSGVPDRFTGSGSGTDFTLKISRVEAEDVGVYYCMQSIYWPWTFGQGTKVEIE

SEQ ID NO: 10487 - protein, 112 aa, Artificial Sequence
  Synthetic construct
DIVMTQSPLSLPVTPGEPASISCRSSQSLLHSNGYNYLDWYLQKPGQSPQLLIYLGSNRASGVPDRFSGSGSGTDFTLKISRVEAEDVGVYYCMQGLQTPLTFGGGTKVEIK

SEQ ID NO: 10488 - protein, 108 aa, Artificial Sequence
  Synthetic construct
SSELTQDPVVSVALGQTVRITCQGDSLNKHHASWYQQKPGQAPVLVKYGDNNRPSGVPDRFSGSRSGNTASLTITGAQAEDEADYYCSSRDRSGDRYVFATGTKVTVL

SEQ ID NO: 10489 - protein, 107 aa, Artificial Sequence
  Synthetic construct
AIRMTQSPSSFSASTGDRVTITCRASQGISSYLAWYQQKPGKAPKLLIYAASTLQSGVPSRFSGSGSGTDFTLTISCLQSEDFATYYCQQYYSYPPTFGPGTKVDIK

SEQ ID NO: 10490 - protein, 113 aa, Artificial Sequence
  Synthetic construct
AIVVSQSPDSLAVSLGERATINCKSSQSIFYSSNNKNYLAWYQQKPGQSPKVLIYWASTRQSGVPDRFSGGGSGTDFTLTISSLQAEDVAVYYCQQYFITPYTFGQGTKLEIK

SEQ ID NO: 10491 - protein, 108 aa, Artificial Sequence
  Synthetic construct
EIVLTQSPGTLSLSPGERATLSCRASQSVSSSYLAWYQQKPGQAPRLLIYGASSRATGIPDRFSGSGSGTDFTLTISRLEPEDFAVYYCQQYGSSHITFGQGTRLEIK

SEQ ID NO: 10492 - protein, 113 aa, Artificial Sequence
  Synthetic construct
DIVMTQSPDSLAVSLGERATINCKSSRTLLFSSNNENYLAWYQKKPGQPPKLLIYWASTRQSGVPDRFSGSGSGTDFTLTISSLQAEDVATYYCQQYYHTPVTFGGGTKVEIK

SEQ ID NO: 10493 - protein, 110 aa, Artificial Sequence
  Synthetic construct
NFLLTQPHSMSASPGKTVTISCTRSSGSIASDYVQWYQQRPGSSPTTVIYEDNQRPSGVPDRFSGSIDSPSNSASLTISGLKTEDEADYYCQSYDNSGGVFGGGTKLTVL

SEQ ID NO: 10494 - protein, 108 aa, Artificial Sequence
  Synthetic construct
EIVLTQSPATLSLSPGERATLSCRASQSVSHYLAWYQHKPGQAPRLLIYDASNRATGIPARFSGSGSGTDFTLTISSLEPEDFAVYYCQQRNKRPPYTFGPGTKLEIK

SEQ ID NO: 10495 - protein, 110 aa, Artificial Sequence; identical to SEQ ID NO: 8950
  Synthetic construct

SEQ ID NO: 10496 - protein, 107 aa, Artificial Sequence; identical to SEQ ID NO: 9963
  Synthetic construct

SEQ ID NO: 10497 - protein, 106 aa, Artificial Sequence
  Synthetic construct
DIQMTQSPSTLSASVGDRVTITCRASQSISSWLAWYQQKPGKAPKLLIYKASSLESGVPSRFSGSGSGTEFTLTISSLQPDDFATYYCQQYNNYYTFGQGTKLEIK

SEQ ID NO: 10498 - protein, 107 aa, Artificial Sequence
  Synthetic construct
ETTLTQSPAFMSAAPGDKVNISCKASQDIDDDVNWYQQKPGEPAIFIIQEATTLVPGISPRFSGSGYGTDFTLTINNIESEDAAYYFCLQHDNFPLSFGPGTKVEIK

SEQ ID NO: 10499 - protein, 107 aa, Artificial Sequence
  Synthetic construct
DIQMTQSPSAMSASVGDRVTITCRASQAISNYLAWFQQKPGQVPKRLIYSASSLQSGVPSRFTGSGSGTEFTLTISSLQPEDFATYYCLQHYNYPATFGQGTRLEIK

SEQ ID NO: 10500 - protein, 107 aa, Artificial Sequence; identical to SEQ ID NO: 8294
  Synthetic construct

SEQ ID NO: 10501 - protein, 110 aa, Artificial Sequence
  Synthetic construct
QSVLTQPPSASGTPGQSVTISCAGSNSNIKSSTVNWYQQLPGTAPKLLIYNTYQRPSGVPDRFSGSKSDTSASLAISGLQSEDEADYFCAAWDGSLGDVVFGGGTKLTVL

SEQ ID NO: 10502 - protein, 110 aa, Artificial Sequence
  Synthetic construct
QAVVTQEPSLTVSPGGTVTLTCASSTGSVTSRHYPYWFQQKPGQAPRTLIYDVKNKHSWTPARFSGSLLGDKAALTLSGARPEDEAEYFCFLSYGGTRGVFGGGTKLTVL

SEQ ID NO: 10503 - protein, 108 aa, Artificial Sequence; identical to SEQ ID NO: 9346
  Synthetic construct

SEQ ID NO: 10504 - protein, 108 aa, Artificial Sequence; identical to SEQ ID NO: 8387
  Synthetic construct

SEQ ID NO: 10505 - protein, 112 aa, Artificial Sequence
  Synthetic construct
DIVMTQSPLSLPVTPGEPASISCRSSQSLLHSNGYNYLDWYLQKPGQSPQLLIYLGSNRASGVPDRFSGSGSGTDFTLKISRVEAEDVGVYYCMQALQTPGTFGPGTKVDIK

SEQ ID NO: 10506 - protein, 107 aa, Artificial Sequence
  Synthetic construct
SYGLTQPLSVSVALGQTATITCGGNNIGSKNVHWYQQKPGQAPVLVIYRDDKRPSGIPERFSGLNSGSTATLTISRAQAGDEADYYCQVYDYPPAWVFGGGTKLTVL

SEQ ID NO: 10507 - protein, 110 aa, Artificial Sequence; identical to SEQ ID NO: 8067
  Synthetic construct

SEQ ID NO: 10508 - protein, 108 aa, Artificial Sequence
  Synthetic construct
EVVLTQSPATLSLSPGDSVTLSCRASQNIDIYLAWYQQKPGQSPRLLIWDASNRATGIPARFSGSGSGTDFTLSISGLESEDFAVYYCQQRKTWPPITFGQGTRLEMR

SEQ ID NO: 10509 - protein, 112 aa, Artificial Sequence
  Synthetic construct
QSALTQPASVSGSPGQSITISCTGTTSGVGGFSFVSWYQQHPGKAPKLLIFDGSSRPSGISNRFSASKSGNTASLTISGLQADDEADYYCISYRRSNTLEVVFGGGTKLTVL

SEQ ID NO: 10510 - protein, 107 aa, Artificial Sequence
  Synthetic construct
DIQLTQSPSSLSASVGDRVTITCRASQSINTYLNWYQQKPGKAPKLLIYAAFNLESGVPSRFSGSRSGTDFTLTISSLQPEDIATYYCQQSYSSPRSFGQGTEVEIK

SEQ ID NO: 10511 - protein, 109 aa, Artificial Sequence
  Synthetic construct
AIRITQSPSSLSASTGDRVTITCRASQGISSYLAWYQQKPGKAPKLLIYAASTLQSGVPSRFSGSGSGTDFTLTISCLQSEDFATYYCQQYYSYPRGLTFGGGTKVEIK

SEQ ID NO: 10512 - protein, 109 aa, Artificial Sequence
  Synthetic construct
EIVLTQSPGTLSLSPGERATLSCRASQSVSSSYLAWYQQKPGQAPRLLIYGASSRATGIPDRFSGSGSGTDFTLTISRLEPEDFAVYYCQQYGSSRMYTFGQGTKLEIK

SEQ ID NO: 10513 - protein, 110 aa, Artificial Sequence
  Synthetic construct
QSALTQPASVSGSPGQSITISCTGTSSDVGSYNLVSWYQQHPGKAPKLMIYEGSKRPSGVSNRFSGSKSGNTASLTISGLQAEDEADYYCCSYAGSSTVVFGGGTKLTVL

SEQ ID NO: 10514 - protein, 107 aa, Artificial Sequence; identical to SEQ ID NO: 9422
  Synthetic construct

SEQ ID NO: 10515 - protein, 106 aa, Artificial Sequence
  Synthetic construct
DIQMTQSPSTLSASVGQSVTITCRASEDIGAWLAWYQQKRGKAPKALIYRADTLESGVPSRFRGSGHGREFTLTISGLQPDDSATYFCQEYNTMWTFGQGTKVEIE

SEQ ID NO: 10516 - protein, 109 aa, Artificial Sequence
  Synthetic construct
SSELTQDPAVSVALGQTVRITCQGDSLRSYYASWYQQKPGQAPVLVIYGKNNRPSGIPDRFSGSSSGNTASLTITGAQAEDEADYYCNSRDSSGNPHVVFGGGTKLTVL

SEQ ID NO: 10517 - protein, 109 aa, Artificial Sequence; identical to SEQ ID NO: 8306
  Synthetic construct

SEQ ID NO: 10518 - protein, 110 aa, Artificial Sequence
  Synthetic construct
QSVLTQPPSVSAAPGQKVTISCSGGRSNIGNSYVSWYQQLPGTAPKLLIYDNNKRPSGIPDRFSGSKSGTSATLGITGLQTGDEADYYCGTWDSSLNVYVFGTGTKVTVL

SEQ ID NO: 10519 - protein, 107 aa, Artificial Sequence
  Synthetic construct
ETTLTQSPAFMSATPGDRVNISCKASRDIDDDVNWYQQKPGEAPIFIILEGTRLLPGIPPRFSGSGYGTDFTLTINNIQSEDAAYYFCLQHDDFPYTFGQGTKLEIK

SEQ ID NO: 10520 - protein, 110 aa, Artificial Sequence
  Synthetic construct
QSALTQPASVSGSPGQSITISCTGTSSDVGSYNLVSWYQQHPGKAPKLMIYEVSKRPSGVSNRFSGSKSGNTASLTISGLQAEDEADYYCCSYAGSSFVVFGGGTKLTVL

SEQ ID NO: 10521 - protein, 107 aa, Artificial Sequence
  Synthetic construct
SNDLSQPPSLSVSPGQTASISCSGDTLGRNFAAWYKQKPGQSPVLVLYQDTKRPSGIPERLSGSKSGNTATLTISGTQALDEADYYCQAWAPTTEVAFGGGTKLTVL

SEQ ID NO: 10522 - protein, 107 aa, Artificial Sequence
  Synthetic construct
DIQMTQSPSSLSASVGDRVTITCRASQSISSYLNWYQQKPGKAPKLLIYAASSLQSGVPSRFSGSGSGTDFTLTISSLQPEDFATYYCQQSYSTPQTFGQGTKVEIK

SEQ ID NO: 10523 - protein, 111 aa, Artificial Sequence
  Synthetic construct
QSALTQPASVSGSPGQSITISCTGTSSDVGGYNYVSWYQQHPGKAPKLMIYDVSNRPSGVSNRFSGSKSGNTASLTISGLQAEDEADYYCSSYTSSSTLGVFGTGTKVTVL

SEQ ID NO: 10524 - protein, 105 aa, Artificial Sequence; identical to SEQ ID NO: 9600
  Synthetic construct

SEQ ID NO: 10525 - protein, 106 aa, Artificial Sequence
  Synthetic construct
EIVLTQSPATLSLSPGERATLSCRASQSVSSYLAWYQQKPGQAPRLLIYDASNRATGIPARFSGSGSGTDFTLTISSLEPEDFAVYYCQQRSNWYTFGQGTKLEIK

SEQ ID NO: 10526 - protein, 107 aa, Artificial Sequence
  Synthetic construct
DIQMTQSPSSLSASVGDRVTITCRASQSISSYLNWYQQKPGKAPKLLIYAASSLQSGVPSRFSGSGSGTDFTLTISSLQPEDFATYYCQQSYSTPVTFGPGTKVDIK

SEQ ID NO: 10527 - protein, 107 aa, Artificial Sequence
  Synthetic construct
DIQMTQSPSSVSASAGDRVTITCRASQDIRKSLAWFQQKPGKAPKPLIYSASSLQSGAPSKFSGSGSGTDFTLTISSLQPEDFATYYCQQYDRYPYIFGQGTKLEIK

SEQ ID NO: 10528 - protein, 110 aa, Artificial Sequence; identical to SEQ ID NO: 8226
  Synthetic construct

SEQ ID NO: 10529 - protein, 107 aa, Artificial Sequence; identical to SEQ ID NO: 10150
  Synthetic construct

SEQ ID NO: 10530 - protein, 107 aa, Artificial Sequence; identical to SEQ ID NO: 8127
  Synthetic construct

SEQ ID NO: 10531 - protein, 107 aa, Artificial Sequence
  Synthetic construct
DIQMTQSPSSLSASVGDEVTITCRASRSLSTYLNWYQQQPGKAPKLLIYAASTLKSGVPSRFSGSGFGTDFTLTISSLQPEDFATYYCQQSYSTPRTFGQGTKLEIK

SEQ ID NO: 10532 - protein, 105 aa, Artificial Sequence
  Synthetic construct
SFELTQPPSLSVSPGQTASITCSGDKLGDKYVSWYQQKPGQSPVLVIHQDSRRPSGIPERFSGSNSGNTATLTISGTQTMDEADYYCQAWDNVLVFGGGTKLTVL

SEQ ID NO: 10533 - protein, 108 aa, Artificial Sequence
  Synthetic construct
EIVLTQSPGTLSLSPGERATLSCRASQSVSSSYLAWYQQKPGQAPRLLIYGASSRATGIPDRFSGSGSGTDFTLTISRLEPEDFAVYYCQQYGSSPRAFGGGTKVEIK

SEQ ID NO: 10534 - protein, 108 aa, Artificial Sequence
  Synthetic construct
EIVLTQSPGTLSLSPGERVTLSCRASQSLSSSYLAWYQQKPGQVPRLLIYDASSRATGIPDRFSGSGSGTDFTLTISRLEPEDFAVYYCQQLGSSPYTFGQGTKLEIR

SEQ ID NO: 10535 - protein, 112 aa, Artificial Sequence
  Synthetic construct
QSVLTQPPSVSGAPGQRVTISCTGSSSNIGAGYDVHWYQQLPGTAPKLLIYGNSNRPSGVPDRFSGSKSGTSASLAITGLQAEDEADYYCQSYDSSLSVFYVFGTGTKVTVL

SEQ ID NO: 10536 - protein, 113 aa, Artificial Sequence
  Synthetic construct
DIVMTQSPDSLAVSLGERATINCKSSQSVLYSSNNKNYLAWYQQKPGQPPKLLIYWASTRESGVPDRFSGSGSGTDFTLTISSLQAEDVAVYYCQQYYSTSLTFGGGTKVEIK

SEQ ID NO: 10537 - protein, 111 aa, Artificial Sequence
  Synthetic construct
QSVLTQPPSVSGAPGQRVTVSCTWSSSNIGAVYGVHWYQQLPGTAPKLLIYDNINRPSGVPDRFSASKSVTSASLAITGLQAEDEADYYCQSHDSSLNIYVFGSGTKVAVL

SEQ ID NO: 10538 - protein, 109 aa, Artificial Sequence
  Synthetic construct
EIVLTQSPATLSLSPGERATLSCRASQSVTSGYLAWYQQKPGQVPRLLIYGASSRATGIPDRFSGSGSGTDFTLTISRLEPEDFAVYYCQQYGRSPLLIFGQGTRLEIK

SEQ ID NO: 10539 - protein, 107 aa, Artificial Sequence; identical to SEQ ID NO: 8573
  Synthetic construct

SEQ ID NO: 10540 - protein, 113 aa, Artificial Sequence
  Synthetic construct
DIVMTQSPLSLPVTPGEPASISCRSSQSLLRSNEHSYLDWYLQKPGQPPQLLIFWGSNRASGVPDRISGSGSGTDFTLKISRVEAEDVGVYYCVQTLQAPPYIFGRGTRLEIK

SEQ ID NO: 10541 - protein, 106 aa, Artificial Sequence
  Synthetic construct
SYELTQPPSVSVSPGQTAIIACSGDKLGDKYASWYQHKPGQSPVLVIYQDSKRPSGIPERFSGSNSGNTATLTISGTQAMDDADYYCQAWDSSTVIFGGGTKVTVL

SEQ ID NO: 10542 - protein, 107 aa, Artificial Sequence
  Synthetic construct
DIQMTQSPSSLSASVGDRVTITCRASQAISNYLAWYQQKPGKVPRLLIYGASTLQSGVPSRFSGSGSGTDFTLTINSLQPEDVATYYCQKYNSAPLTFGPGTEVDIK

SEQ ID NO: 10543 - protein, 107 aa, Artificial Sequence
  Synthetic construct
AIQLTQSPSSLSASVGDRVTITCRASQGIGSYLAWYQQKPGKAPHLLIYLASTLQSGVPSRFSGSGSGTEFTLTISSLQPEDFSTYYCQQLNTYPRTFGQGTRVEIK

SEQ ID NO: 10544 - protein, 107 aa, Artificial Sequence; identical to SEQ ID NO: 8152
  Synthetic construct

SEQ ID NO: 10545 - protein, 109 aa, Artificial Sequence
  Synthetic construct
SYVLTQPPSVSVAPGKTARITCGGNNIGSKSVHWYQQKPGQAPVLVIYYDSDRPSGIPERFSGSNSGNTATLTISRVEAGDEADYYCQVWDSSSDPLYVFGTGTKVTVL

SEQ ID NO: 10546 - protein, 110 aa, Artificial Sequence; identical to SEQ ID NO: 8226
  Synthetic construct

SEQ ID NO: 10547 - protein, 109 aa, Artificial Sequence; identical to SEQ ID NO: 8306
  Synthetic construct

SEQ ID NO: 10548 - protein, 108 aa, Artificial Sequence
  Synthetic construct
EIVLTQSPGTLSLSPGERATLSCRASQSVSSSYLAWYQQKPGQAPRLLIYGASSRATGIPDRFSGSGSGTDFTLTISRLEPEDFAVYYCQQYGSPFFTFGPGTKVDIK

SEQ ID NO: 10549 - protein, 107 aa, Artificial Sequence
  Synthetic construct
EIVLTQSPATLSLSPGERATLSCRASQSVSSYLAWYQQKPGQAPRLLIYDASNRATGIPARFSGSGSGTDFTLTISSLEPEDFAVYYCQQRSNWPPTFGPGTKVDIK

SEQ ID NO: 10550 - protein, 108 aa, Artificial Sequence
  Synthetic construct
EIVLTQSPATLSLSPGERATLSCRASQSVTTYLAWYQQKPGQAPRLLIFDASSRATGIPARFSGSGSGTEFTLTISSLEPEDFAVYYCQQRSFWPRFSFGPGTKVDIK

SEQ ID NO: 10551 - protein, 106 aa, Artificial Sequence
  Synthetic construct
SYELTQPPSVSVSPGQTASITCSGDKLGDKSACWFQQKPGRSPVLVVYQDTKRPSGIPERFSGSNSANKATLTISGTQTMDEADYYCQVWDGSTAIFGGGTKLTVL

SEQ ID NO: 10552 - protein, 113 aa, Artificial Sequence
  Synthetic construct
DIVMTQSPDSLAVSLGERATINCKSSQSVFYSSTNKNYLAWYQQKPGQPPKLLLYWTSTRESGVPDRFSGSGSGTDFTLTISSLQAEDVAVYYCHQYYATPYTFGQGTKLEIR

SEQ ID NO: 10553 - protein, 109 aa, Artificial Sequence; identical to SEQ ID NO: 9173
  Synthetic construct

SEQ ID NO: 10554 - protein, 111 aa, Artificial Sequence; identical to SEQ ID NO: 9096
  Synthetic construct

SEQ ID NO: 10555 - protein, 111 aa, Artificial Sequence
  Synthetic construct
QLVLTQSPSASASLGASIKLTCTLTSGHTYAVAWHQHQPEKGPQFLMKINSDGSHYRGAGIPDRFSGSRSGTEYYLTIFSLRSEDEADYYCQAWAAGIHWVFGGGTKLTVL

SEQ ID NO: 10556 - protein, 110 aa, Artificial Sequence; identical to SEQ ID NO: 8924
  Synthetic construct

SEQ ID NO: 10557 - protein, 107 aa, Artificial Sequence
  Synthetic construct
AIQMTQSPSSLSASVGDRVTITCRASQGIRIDLGWYQQKPGTAPKLLIYAASFLQSGVPSRFSGSGSDTDFTLTISSLQPEDFATYYCLQDYNYPLTFGGGTKVEIK

SEQ ID NO: 10558 - protein, 107 aa, Artificial Sequence; identical to SEQ ID NO: 9709
  Synthetic construct

SEQ ID NO: 10559 - protein, 107 aa, Artificial Sequence
  Synthetic construct
EIVLTQSPGTLSLSPGDRATLSCRASQSISSQLAWHQRKPGQAPRLLIYGASSRATGIPDRFSGSGSGTDFTLTITRLEPEDFAVYYCQQYGRSPYTFGQGTKLEIK

SEQ ID NO: 10560 - protein, 107 aa, Artificial Sequence
  Synthetic construct
EIVLTQSPGTLSLSPGERATLSCRASQSVSSSYLAWYQQKPGQAPRLLIYGASSRATGIPDRFSGSGSGTDFTLTISRLEPEDFAVYYCQQYGSSQTFGQGTKVGIK

SEQ ID NO: 10561 - protein, 107 aa, Artificial Sequence; identical to SEQ ID NO: 8065
  Synthetic construct

SEQ ID NO: 10562 - protein, 107 aa, Artificial Sequence
  Synthetic construct
DIQMTQSPSSLSASVGDRVTITCRASQSISSYLNWYQQKPGKAPKLLIYAASSLQSGVPSRFSGSGSGTDFTLTISSLQPEDFATYYCQQSYSTPFTFGPGTKVDIK

SEQ ID NO: 10563 - protein, 107 aa, Artificial Sequence
  Synthetic construct
EIVLTQSPATLSLSPGERATLSCRASQSVSSYLAWYQQKPDQAPRLLIYQASKRATGIPARFRGSGSGTDFTLTISSLEAEDFAVYYCQQRSDWPRTFGQGTKVEIK

SEQ ID NO: 10564 - protein, 107 aa, Artificial Sequence
  Synthetic construct
DIQMTQSPSSVSASVGDRVTIMCRASQDIRNWLDWYQQKPGQPPKLLIFAASTLQSGVPSRFSGSGSGTDFSLTISSLQPEDFATYYCQQASSFPVTFGPGTRLEIK

SEQ ID NO: 10565 - protein, 108 aa, Artificial Sequence
  Synthetic construct
EIVLTQSPGTLSLSPGERATLSCRASQGISISYFAWYQQKPGQPPRLLIYAASRRATGIPDRFSGSGSGTDFTLTISRLEPEDFAVYYCHQYGDSLYTFGQGTKLEIK

SEQ ID NO: 10566 - protein, 107 aa, Artificial Sequence; identical to SEQ ID NO: 10402
  Synthetic construct

SEQ ID NO: 10567 - protein, 111 aa, Artificial Sequence
  Synthetic construct
NFMLTQPHSVSESPGKTVTISCTRSSGNIASNYVQWYQQRPASAPTTVIYEDNRRPSGVPHRFSGSIDSSSNSASLTISGLRTEDEADYYCQSYDRTNHVVFGGGTELTVL

SEQ ID NO: 10568 - protein, 106 aa, Artificial Sequence; identical to SEQ ID NO: 10190
  Synthetic construct

SEQ ID NO: 10569 - protein, 112 aa, Artificial Sequence
  Synthetic construct
DIVMTQSPLSLPVTPGEPASISCRSSQSLLHSNGYNYLGWFLQKPGQSPQLLIYLGSNRASGVPDRFSGSGSGTDFTLKISRVEAEDVGVYYCMQALQTPLTFGGGTKVEIK

SEQ ID NO: 10570 - protein, 108 aa, Artificial Sequence
  Synthetic construct
SYELTQPTSLSVSPGQTARITCSGDALPNQYSYWYQHKAGQSPRLLISRDNERPAGVPGRFAASSLETVATLTITGVQADDEADYYCLSPNSDSSYWVFGGGTRLTVL

SEQ ID NO: 10571 - protein, 107 aa, Artificial Sequence; identical to SEQ ID NO: 8133
  Synthetic construct

SEQ ID NO: 10572 - protein, 107 aa, Artificial Sequence; identical to SEQ ID NO: 8065
  Synthetic construct

SEQ ID NO: 10573 - protein, 106 aa, Artificial Sequence
  Synthetic construct
DIQMTQSPSSLSASVGDRVTITCRASQSISTYLNWYQHKPGKAPKLLIYTASNLQTGVPSRFSGSGSGTDFTLTISSLQPEDFATYYCQQSYSTLTFGGGTKVDIS

SEQ ID NO: 10574 - protein, 112 aa, Artificial Sequence
  Synthetic construct
DVVMTQSPLSLPVTLGQPASISCRSSQSLVHSDGNTYLNWFHQRPGQSPRRLVYQVSKRDSGVPDRFSGSGSGSDFTLRINRVEAEDVGVYYCMQGSHWPPTFGQGTKVEVK

SEQ ID NO: 10575 - protein, 107 aa, Artificial Sequence; identical to SEQ ID NO: 10039
  Synthetic construct

SEQ ID NO: 10576 - protein, 106 aa, Artificial Sequence; identical to SEQ ID NO: 8265
  Synthetic construct

SEQ ID NO: 10577 - protein, 112 aa, Artificial Sequence
  Synthetic construct
DVVMTQTPLSLSVTPGQPASISCKSSQSLFHSTGRTYLYWYLQKPGQSPQLLIYYVSSRFSGVPDRFSGSGSGTDFTLKISRVEAEDVGVYYCMQGINLPVTFGQGTKLEIK

SEQ ID NO: 10578 - protein, 110 aa, Artificial Sequence
  Synthetic construct
QSVLTQPPSASGTPGQRVTISCSGSSSNIGSNTVNWYQQLPGTAPKLLIYSNNQRPSGVPDRFSGSKSGTSASLAISGLQSEDEADYYCAAWDDSLNGPVFGGGTKLTVL

SEQ ID NO: 10579 - protein, 107 aa, Artificial Sequence [sequence omitted]

SEQ ID NO: 10580 - protein, 110 aa, Artificial Sequence
  Synthetic construct
QLVLTQSPSASASLGASVKLTCTLSSGHNSYAIAWHQQQPEKGPRYLMILNSDGSHNKGDGITDRFSGSSSGAERYLTISSLQSEDEADYYCQTWGTGVQFGGGTKLTVL

SEQ ID NO: 10581 - protein, 110 aa, Artificial Sequence
  Synthetic construct
QSALTQPASVSESPGQSITISCTGTSSDVGGYNFVSWYQQHPGKAPKLMIYDVTKRPSGVSNRFSGSKSGNTASLTISGLQTEDEADYYCSSYVRGGTVVFGGGTKLTVL

SEQ ID NO: 10582 - protein, 110 aa, Artificial Sequence
  Synthetic construct
QSALTQPASVSGSPGQSITISCTGTSSNVGAYNYVSWYQQHPGKAPKLMIYDVSNRPSGVSNRFSGSKSGNTASLTISGLHTEDEADYYCSSFTNSSTLVFGGGTMLTVL

SEQ ID NO: 10583 - protein, 107 aa, Artificial Sequence
  Synthetic construct
VIQMTQSPSALSASVGDRVTITCQASQDINNYLNWYQQKPGKAPKLLMYDASTLETGVPSRFSGSGSGTDFTLTISSLQPEDIATYYCQHYDKVPPTFGGGTKVAII

SEQ ID NO: 10584 - protein, 110 aa, Artificial Sequence; identical to SEQ ID NO: 8307
  Synthetic construct

SEQ ID NO: 10585 - protein, 111 aa, Artificial Sequence; identical to SEQ ID NO: 10006
  Synthetic construct

SEQ ID NO: 10586 - protein, 108 aa, Artificial Sequence
  Synthetic construct
EIVMTQSPATLSVSPGERATLSCTASQSVGTNLAWYQQRPGQRPRLLIYGASTRATGIPVRFSGSGSGTEFTLTISSLQSEDFAVYYCQQYHKSPPDTFGPGTKVDIR

SEQ ID NO: 10587 - protein, 107 aa, Artificial Sequence; identical to SEQ ID NO: 8119
  Synthetic construct

SEQ ID NO: 10588 - protein, 108 aa, Artificial Sequence; identical to SEQ ID NO: 8099
  Synthetic construct

SEQ ID NO: 10589 - protein, 107 aa, Artificial Sequence
  Synthetic construct
DIQMTQSPSSLSASVGDRVTITCRASQSISSYLNWYQQKAGKAPKLLIYAASSLQSGVPSRFSGSGSGTDFSLTISSLQPEDFTTYYCQQSYSTPWTFGQGTKVEIK

SEQ ID NO: 10590 - protein, 110 aa, Artificial Sequence
  Synthetic construct
QSVLTQAPSASGTPGQRVTISCSGSSSNIGKNTVNWYQQLPGTAPKLLMYGNTERPSGVPDRFSGSKSGTSVSLAISGLQSEDEADYYCAAWDDSLNGLLFGGGTKLTVL

SEQ ID NO: 10591 - protein, 108 aa, Artificial Sequence; identical to SEQ ID NO: 8885
  Synthetic construct

SEQ ID NO: 10592 - protein, 108 aa, Artificial Sequence
  Synthetic construct
EIVLTQSPGTLSLSPGERATLSCRASQSVRSNYLAWYQQKPGQAPRLLIYGASSRATGIPDRFSGSGSGTDFTLTIRRLVPEDFAVYYCQQYGSSPFTFGPGTKVDVK

SEQ ID NO: 10593 - protein, 111 aa, Artificial Sequence; identical to SEQ ID NO: 8610
  Synthetic construct

SEQ ID NO: 10594 - protein, 107 aa, Artificial Sequence
  Synthetic construct
DIHMAQSPSSLSASVGDRVTITCRASQNIHTFLNWYQQIPGKAPKLLIFAASSLQSGVPSRFSGSGSGTDFTLTITSLQPEDFATYHCQQSYSAPHTFGQGTKLEIK

SEQ ID NO: 10595 - protein, 107 aa, Artificial Sequence
  Synthetic construct
DIQMTQSPSTLSASVGDRVTITCRASQSISYWLAWYQQKPGKAPKLLIYKASTLESGVPSRFSGSGSGTEFTLTISSLQPDDFATYYCQQYNSYSYTFGPGTKLEIK

SEQ ID NO: 10596 - protein, 110 aa, Artificial Sequence
  Synthetic construct
QSALTQPASVSGSPGQSITISCTGTSSDVGGYNYVSWYQQHPGKAPKVMIYDVSKRPSGVSNRFSGSKSGNTASLTISGVQAEDEADYYCSSYTSSSTFVFGTGTKVTVL

SEQ ID NO: 10597 - protein, 113 aa, Artificial Sequence
  Synthetic construct
DIVMTQSPDSLAVSLGGRATINCKSSQSVLNSSNNKTSLAWYQQKSGQPPKLLIFWASTRESGVPDRFSGSGSGTDFTLTISSLQAEDVAVYYCQQYYSTLFTFGPGTKVDIK

SEQ ID NO: 10598 - protein, 108 aa, Artificial Sequence; identical to SEQ ID NO: 9909
  Synthetic construct

SEQ ID NO: 10599 - protein, 107 aa, Artificial Sequence
  Synthetic construct
DIQMTQSPSSVSASVGDRVTITCRASQGISRWLAWYQQKPGQAPKLLIFDASSLQSGVPSRFSGSGSGTDFTLTISSLQPEDSATYYCQQANSFPWTFGQGTKVEIK

SEQ ID NO: 10600 - protein, 109 aa, Artificial Sequence
  Synthetic construct
QSALTQPASVSGSPGQSITISCTGTSSDVGYNYVSWFQQHPGTAPQVIIYDVSNRPSGVSNRFSGSKSGNTASLTISGLQAEDEADYYCSSYTLSTTVIFGGGTKLTVL

SEQ ID NO: 10601 - protein, 107 aa, Artificial Sequence; identical to SEQ ID NO: 8091
  Synthetic construct

SEQ ID NO: 10602 - protein, 112 aa, Artificial Sequence
  Synthetic construct
QSVLTQPPSVSGAPGQRVTISCTGSTSNIGAGYDVHWYQQLPGTAPRLLIYGNNNRPSGVPDRFSGSKSGTSASLAITGLQAEDEGDYYCQSYDDSVGGSRVFGGGTKLTVL

SEQ ID NO: 10603 - protein, 112 aa, Artificial Sequence; identical to SEQ ID NO: 9386
  Synthetic construct

SEQ ID NO: 10604 - protein, 107 aa, Artificial Sequence
  Synthetic construct
EIVLTQSPATLSLSPGDKASLSCRASHSLGRFLAWYQQRPGQSPRLLIYDASIRAAGVPTRFAGNGSQIDFTLTINSLEPADFAVYYCQQRVNWPLTFGGGTKVEVK

SEQ ID NO: 10605 - protein, 110 aa, Artificial Sequence
  Synthetic construct
QSALTQPASVSGSPGQSITISCTGTSSDVGSYNLVSWYQQHPGKAPKLMIYEGSKRPSGVSNRFSGSKSGNTASLTISGLQAEDEADYYCCSYAGSSTYVFGTGTKVTVL

SEQ ID NO: 10606 - protein, 110 aa, Artificial Sequence
  Synthetic construct
QSALTQPASVSGSPGQSITISCTGTSSDVGGYNYVSWYQQHPDKAPKLIIYDVTKRPSGVSNRFSGSKSGNTASLTISGLQPEDEADYYCNSYTTSATVLFGGGTRLTVL

SEQ ID NO: 10607 - protein, 113 aa, Artificial Sequence; identical to SEQ ID NO: 10116
  Synthetic construct

SEQ ID NO: 10608 - protein, 107 aa, Artificial Sequence
  Synthetic construct
EIVLTQSPVTLSLSPGERATLSCRASQSVRNYLAWYQQKPGQAPRLLIYDASNRAAGIPARFSGSGYGTDFTLTISSLEPEDFAVYYCQQRGSWPPAFGGGTKVEIK

SEQ ID NO: 10609 - protein, 106 aa, Artificial Sequence; identical to SEQ ID NO: 69
  Synthetic construct

SEQ ID NO: 10610 - protein, 110 aa, Artificial Sequence; identical to SEQ ID NO: 8171
  Synthetic construct

SEQ ID NO: 10611 - protein, 110 aa, Artificial Sequence
  Synthetic construct
QSALTQPPSVSGSPGQSVTISCTGTSSDVGTYNRVSWYQQSPGTAPKLMIYEVNNRPSGVPDRFSGSKSGNTASLTISGLQAEDEADYYCSSYTSSSTVVFGGGTKLTVL

SEQ ID NO: 10612 - protein, 113 aa, Artificial Sequence; identical to SEQ ID NO: 9079
  Synthetic construct

SEQ ID NO: 10613 - protein, 108 aa, Artificial Sequence
  Synthetic construct
QSVLTQPASVSGSPGQSITISCTGTSNDVGNYNYVSWYQQHPGRAPKLIIYEVTKRPSGVSDRFSGSKSGNTASLTISGLQAEDEAVYHCSSYTSRIVFGGGTKLTVL

SEQ ID NO: 10614 - protein, 107 aa, Artificial Sequence; identical to SEQ ID NO: 8672
  Synthetic construct

SEQ ID NO: 10615 - protein, 109 aa, Artificial Sequence
  Synthetic construct
EIVLTQSPGTLSLSPGERATLSCRASQSVSSNYLAWYQQKPGQAPRLLIYGASSRATGIPDRFSGSGSGTDFTLTISRLEPEDFAVYYCQQYGSSPPYTFGQGTKLEIK

SEQ ID NO: 10616 - protein, 114 aa, Artificial Sequence
  Synthetic construct
DFVMNQFPDSLAVSLGERATIECKSAQSLFHDSMKRDALAWFQKKPGQPPKLLIYWASTRASGVPERFSGSGSGTDFTLSITGLQAEDVATYFCQQYIGSKTYTFGQGTKIEIR

SEQ ID NO: 10617 - protein, 112 aa, Artificial Sequence
  Synthetic construct
DIVMTQTPLSLSVTPGQPASISCKSSQSLLHSEGKTFLYWYLHKPGQSPQLLIYEVSNRFSGVPDRFSGSGSGTDFTLTISRVEAEDVGLYYCMQSIQLPWTFGQGTKVEIK

SEQ ID NO: 10618 - protein, 108 aa, Artificial Sequence; identical to SEQ ID NO: 9909
  Synthetic construct

SEQ ID NO: 10619 - protein, 107 aa, Artificial Sequence
  Synthetic construct
AIQLTQSPSSLPASVGDRVTITCRASQGIGNYLAWYQQKPGKAPKLLIYLAATLQSGVPSRFSGSGSGTDFTLTISSLQPEDFAIYYCQQLNIYPRTFGQGTKVEVK

SEQ ID NO: 10620 - protein, 107 aa, Artificial Sequence
  Synthetic construct
QIVMTQSPATLSVSPGERATLSCRASQSINNDLAWYRQKPGQAPRLLIYGASTRATGIPATFSGSGSGTEFTLTISSLQSEDFAVYYCQQYNNWPRTFGQGTKVEIK

SEQ ID NO: 10621 - protein, 107 aa, Artificial Sequence
  Synthetic construct
AIRMTQSPSSFSASTGDRVTITCRASQGISSYLAWYQQKPGKAPKLLIYAASTLQSGVPSRFSGSGSGTDFTLTISCLQSEDFATYYCQQYYSYQLTFGGGTKVEIK

SEQ ID NO: 10622 - protein, 106 aa, Artificial Sequence
  Synthetic construct
EIVLTQSPATLSLSPGERATLSCRASQSVSSYLAWYQQKPGQAPRLLIYDASNRATGIPARFSGSGSGTDFTLTISSLEPEDFAVYYCQQRSNPITFGQGTRLEIK

SEQ ID NO: 10623 - protein, 106 aa, Artificial Sequence
  Synthetic construct
AIRMTQSPSSFSASTGDRVTITCRASQGISSYLAWYQQKPGKAPKLLIYAASTLQSGVPSRFSGSGSGTDFTLTISCLQSEDFATYYCQQYYRGYTFGQGTKLEIK

SEQ ID NO: 10624 - protein, 110 aa, Artificial Sequence
  Synthetic construct
QSALTQPASVSGSPGQSITMSCTGTSGDVGGYNYVSWYQQYPGKAPKLMIYDVSNRPSGVSNRFSGSKSGNTASLTISGLQAEDEADYYCSSFTSSITVVFGGGTKLTVL

SEQ ID NO: 10625 - protein, 107 aa, Artificial Sequence; identical to SEQ ID NO: 8833
  Synthetic construct

SEQ ID NO: 10626 - protein, 110 aa, Artificial Sequence
  Synthetic construct
QSVLGQPPSASGTPGQRVTISCSGSSSNIGSNVVNWYQQVPGTAPKLLIYSNYQRPSGVPARFSASKSVTSASLAISGLQSEDEAEYYCAAWDDSLNGQVFGSGTKVTVL

SEQ ID NO: 10627 - protein, 113 aa, Artificial Sequence; identical to SEQ ID NO: 8825
  Synthetic construct

SEQ ID NO: 10628 - protein, 109 aa, Artificial Sequence; identical to SEQ ID NO: 9063
  Synthetic construct

SEQ ID NO: 10629 - protein, 106 aa, Artificial Sequence
  Synthetic construct
EIVMTQSPATLSVSPGERATLSCRASQSVSSNLAWYQQKPGQAPRLLIYGASTRATGIPARFSGSGSGTEFTLTISSLQSEDFAVYYCQQYNNWPAFGQGTKVEIK

SEQ ID NO: 10630 - protein, 111 aa, Artificial Sequence
  Synthetic construct
EIVMTQTPISLSVTPGQSASISCKSSQSLLHSNGHTYLYWYLQRPGQSPQILIYEVFNRLPGVPDRFSGSGSGTDFTLKISRVEAEDVGIYYCLQGIQLRTFGQGTKVEIK

SEQ ID NO: 10631 - protein, 111 aa, Artificial Sequence; identical to SEQ ID NO: 8610
  Synthetic construct

SEQ ID NO: 10632 - protein, 113 aa, Artificial Sequence; identical to SEQ ID NO: 8661
  Synthetic construct

SEQ ID NO: 10633 - protein, 108 aa, Artificial Sequence
  Synthetic construct
EIVLTQSPGTLSLSPGERATLSCRASQSVSSSYLAWYQQKPGQAPRLLIYGASSRATGIPDRFSGSGSGTDFTLTISRLEPEDFAVYYCQQYGSSPNTFGQGTKLEIK

SEQ ID NO: 10634 - protein, 109 aa, Artificial Sequence
  Synthetic construct
QIVLTQSPGTLSLSPGERATLSCRASQSVSSSYLAWYQQKPGQSPRLLIYAASIRATGIPDRFSGSASGTDFTLTISRLEPEDFAVYYCQQYGSSPLYTFGQGTKLEIK

SEQ ID NO: 10635 - protein, 111 aa, Artificial Sequence; identical to SEQ ID NO: 9711
  Synthetic construct

SEQ ID NO: 10636 - protein, 106 aa, Artificial Sequence
  Synthetic construct
DIQMTQSPSSLPASVGDKVTITCRASQSIANYLNWYQQRPGKAPKLLIYAASSLQTGVPSRFSGSRSGTDFTLTISNLQAEDFATYYCQQSYGSGTFGQGTRVEIK

SEQ ID NO: 10637 - protein, 107 aa, Artificial Sequence
  Synthetic construct
DIQLTQSPSFLSASVGDRVTITCRASQGFSTYLAWYQQRPGNAPKLLIYAASTLQRGVPSRFSGSGSGTEFTLTISSLQPEDFATYYCQQINVYPRTFGQGTKVEIK

SEQ ID NO: 10638 - protein, 107 aa, Artificial Sequence
  Synthetic construct
EIVMTQSPATLSVSPGERATLSCRASQSVSSNLAWYQQKPGQAPRLLIYGASTRATGIPARFSGSGSGTEFTLTISSLQSEDFAVYYCQQYNNWPKTFGQGTKVEIK

SEQ ID NO: 10639 - protein, 108 aa, Artificial Sequence
  Synthetic construct
DIQMTQSPSSLSASVGDRVTITCRASQSISSYLNWYQQKPGKAPKLLIYAASSLQSGVPSRFSGSGSGTDFTLTISSLQPEDFATYYCQQSYSTPPWTFGQGTKLEIK

SEQ ID NO: 10640 - protein, 112 aa, Artificial Sequence
  Synthetic construct
QSALTQPASVSGSPGQSITISCTGTSSDFGSYKSVTWYQQHPGKAPKLLIYDGSGRPSGVSNRFSGSKSGNTASLTISALQAEDEADYYCSSYTGTSTLEVLFGGGTKLTVL

SEQ ID NO: 10641 - protein, 108 aa, Artificial Sequence
  Synthetic construct
EIVMTQSPATLSVSPGERATLSCRASQSVSSNLAWYQQKPGQAPRLLIYGASTRATGIPARFSGSGSGTEFTLTISSLQSEDFAVYYCQQYNNWLRFTFGPGTKVDIK

SEQ ID NO: 10642 - protein, 108 aa, Artificial Sequence
  Synthetic construct
EIVLTQSPDTLSLSPGERATLSCRASQSLSSSYLAWYRQKPGQAPRLLIYGASSRATGIPDRFSGSGSGTDFTLTINRLEPEDFAVYYCQQYGSSPLAFGGGTKVEIR

SEQ ID NO: 10643 - protein, 107 aa, Artificial Sequence; identical to SEQ ID NO: 8065
  Synthetic construct

SEQ ID NO: 10644 - protein, 113 aa, Artificial Sequence
  Synthetic construct
QSVLTQPPSLSGAPGQRVTISCTGSSSNIGAGYDVHWYQQLPGSAPKLLIYGNNNRPSGVPARFSGSKSGTSASLAITGLQAEDEADYYCQSYDSSLNGRLYVFGTGTKVTVL

SEQ ID NO: 10645 - protein, 108 aa, Artificial Sequence; identical to SEQ ID NO: 8701
  Synthetic construct

SEQ ID NO: 10646 - protein, 110 aa, Artificial Sequence
  Synthetic construct
EIVMTQSPATLSVSPGERATLSCRASQSVSSNLAWYQQKPGQAPRLLIYGASTRATGIPARFSGSGSGTEFTLTISSLQSEDFAVYYCQQYNNWPPTSLTFGGGTKVEIK

SEQ ID NO: 10647 - protein, 107 aa, Artificial Sequence
  Synthetic construct
AIRITQSPSSLSASTGDRVTITCRASQGISSYLAWYQQKPGKAPKLLIYAASTLQSGVPSRFSGSGSGTDFTLTISCLQSEDFATYYCQQYYSYPWTFGQGTKVEIK

SEQ ID NO: 10648 - protein, 107 aa, Artificial Sequence
  Synthetic construct
EIVLTQSPGTLSLSPGERATLSCRASQSVSSNFLAWYQQKPGQAPRLLIYGASSRAAGIPENFSGSGSGTDFTLTISRLEPEDFAVYYCQHYGSSLTFGGGTRVEIK

SEQ ID NO: 10649 - protein, 107 aa, Artificial Sequence
  Synthetic construct
DIQMTQSPSTLSAAVGDRVTITCRASQSINSWLAWYQQKPGKAPKLLIYKASSLGSGVPSRFSGSGSGTEFILTISSLQPDDFATYFCQHYNSYPFTFGPGTKLDIK

SEQ ID NO: 10650 - protein, 112 aa, Artificial Sequence
  Synthetic construct
DVVMSQSPLSLPVTLGQPASISCRSSQSLVHSDGNSYLHWFQQRPGQSPRRLIYKVSNRDSGVPDRFSGSGSGTDFTLKISRVEAEDVGIYYCMQGTHWPITFGQGTRLEIK

SEQ ID NO: 10651 - protein, 108 aa, Artificial Sequence; identical to SEQ ID NO: 8872
  Synthetic construct

SEQ ID NO: 10652 - protein, 107 aa, Artificial Sequence; identical to SEQ ID NO: 8503
  Synthetic construct

SEQ ID NO: 10653 - protein, 107 aa, Artificial Sequence
  Synthetic construct
DIQLTQSPSFLSASVGDRVTITCRASQGFSTYLAWYQQKPGEAPKLLIYAASTLQPGVPSRFSGSGSGTEFTLTISSLQPEDFATYYCQQVNIYPRTFGQGTKVEIK

SEQ ID NO: 10654 - protein, 112 aa, Artificial Sequence
  Synthetic construct
DVLMTQSPLSLPVALGQAASISCRSSQGVVHTDGNTYVNWFQQRPGQSPRRLIYKVSNRDSGVPDRFSGSGSGTDFTLKISRVEAEDVGVYYCMQGTEWPRTFGQGTKLEIT

SEQ ID NO: 10655 - protein, 111 aa, Artificial Sequence; identical to SEQ ID NO: 8657
  Synthetic construct

SEQ ID NO: 10656 - protein, 108 aa, Artificial Sequence
  Synthetic construct
EIVLTQSPGSLSLSPGERATLSCRASQSVSSSFLAWYQQKPGQAPRLLIYGASSRATGIPDRFSGSGSGTDFTLTISRLEPEDFAVYYCQQYGSSPRTFGQGTRVAFK

SEQ ID NO: 10657 - protein, 110 aa, Artificial Sequence; identical to SEQ ID NO: 8067
  Synthetic construct

SEQ ID NO: 10658 - protein, 109 aa, Artificial Sequence
  Synthetic construct
DIQMTQSPSSLSASVGDRVTITCRASQGISNYLAWYQQKPGKVPKLLIYAASTLQSGVPSRFSGSGSGTDFTLTISSLQPEDVATYYCQKYNSAPPWVTFGPGTKVDIK

SEQ ID NO: 10659 - protein, 107 aa, Artificial Sequence
  Synthetic construct
DIQMTQSPSTLSASVGDRVTITCRASQSISSWLAWYQQKPGKAPKLLIYKASSLESGVPSRFSGSGSGTEFTLTISSLQPDDFATYYCQQYNSYSPTFGQGTKLEIK

SEQ ID NO: 10660 - protein, 107 aa, Artificial Sequence
  Synthetic construct
AIQMTQSPSSLSASVGDSVTFTCRASQDIGDELGWYQQKPGRAPRLLIYAASSLQSGVPSRFSGSGSGTEFTLTISSLQPDDFATYYCLQDFNYPRIFGQGTKLEIK

SEQ ID NO: 10661 - protein, 108 aa, Artificial Sequence; identical to SEQ ID NO: 8258
  Synthetic construct

SEQ ID NO: 10662 - protein, 107 aa, Artificial Sequence; identical to SEQ ID NO: 9760
  Synthetic construct

SEQ ID NO: 10663 - protein, 111 aa, Artificial Sequence
  Synthetic construct
QSALTQPASVSGSPGQSITISCTGTSGDVGSYTLVSWYQQRPGKAPKLMIYEVTKRPSGVSSRFSGSKSGNTASLTISGLQTEDEADYYCCSYAGSTTFAVFGGGTKLTVL

SEQ ID NO: 10664 - protein, 107 aa, Artificial Sequence
  Synthetic construct
EIVMTQSPASLSVSPGARVTLSCRASQTITTFLAWYQQKPGQGARLLVYDAGTRATGVPLRFSGSGSGTDFTLTISSLQSEDFAVYFCQQYHAWPLTFGGGTRVETK

SEQ ID NO: 10665 - protein, 112 aa, Artificial Sequence
  Synthetic construct
DIVMTQSPLSLSVTPGQPASISCRSSEGLIHSDGSIYFNWFHQRPGQSPRRLIYDVSERDSGAPDRFSGSGSGTDFTLTISRVGPEDAGTYYCMQTTHWPWTFGQGTKVEVK

SEQ ID NO: 10666 - protein, 106 aa, Artificial Sequence
  Synthetic construct
AIRITQSPSSLSASTGDRVTITCRASQGISSYLAWYQQKPGKAPKLLIYAASTLQSGVPSRFSGSGSGTDFTLTISCLQSEDFATYYCQQYYSYPSFGQGTRLEIK

SEQ ID NO: 10667 - protein, 105 aa, Artificial Sequence; identical to SEQ ID NO: 8339
  Synthetic construct

SEQ ID NO: 10668 - protein, 108 aa, Artificial Sequence; identical to SEQ ID NO: 9734
  Synthetic construct

SEQ ID NO: 10669 - protein, 107 aa, Artificial Sequence
  Synthetic construct
EIVLTQSPATLSLSPGDRATLSCRASQSVSKYLAWYQQKPGQAPRLLIFDSSIRVTGIPARFSGGGSGTDFTLTISSLEPEDFAVYFCQQRDIWPRTFGQGTRVEIK

SEQ ID NO: 10670 - protein, 108 aa, Artificial Sequence
  Synthetic construct
EIVLTQSPGTLSLSPGERATLSCRASQSVSSSYLAWYQQKPGQAPRLLIYGASSRATGIPDRFSGSGSGTDFTLTISRLEPEDFAVYYCQQYGSSPPGFGQGTRLEIK

SEQ ID NO: 10671 - protein, 106 aa, Artificial Sequence
  Synthetic construct
DIQMTQSPSTLSAFVGDRVTITCRASQRISGWLAWYQQKPGVAPRLLIYKASTLEYGVPSRFSGSGSGTEFTLTISSLQPDDVATYYCQQYNSFLTFGGGTKVEIK

SEQ ID NO: 10672 - protein, 107 aa, Artificial Sequence
  Synthetic construct
EIVMTQSPATLSVSPGERATLSCRASQSVGRNLAWYQQKPGQAPRVLISGASTRATGMTARFSGSGSGTEFTLTISSLQSEDFGIYYCQQYNNWPPAFGQGTKLEIK

SEQ ID NO: 10673 - protein, 107 aa, Artificial Sequence; identical to SEQ ID NO: 10473
  Synthetic construct

SEQ ID NO: 10674 - protein, 109 aa, Artificial Sequence; identical to SEQ ID NO: 9547
  Synthetic construct

SEQ ID NO: 10675 - protein, 107 aa, Artificial Sequence
  Synthetic construct
EKVMTQSPATLSVSPGERATLSCRASQSIRTNLAWYQLKPGQPPRLLIYGTSTRATGIPGRFSGSGSGTEFTLTISSLQSEDVAVYSCQQYDDWPRTFGQGTKVEIK

SEQ ID NO: 10676 - protein, 107 aa, Artificial Sequence
  Synthetic construct
ALQLTQSPSSLSASVGDRVTITCRASQAISSALAWYQQKPGKAPKLLIYDSSSLESGVSSRFSGSGSGTDFTLTISSLQPEDFATYYCQQFYNYPLTFGGGTKVELK

SEQ ID NO: 10677 - protein, 106 aa, Artificial Sequence; identical to SEQ ID NO: 8813
  Synthetic construct

SEQ ID NO: 10678 - protein, 108 aa, Artificial Sequence
  Synthetic construct
DIQMTQSPSSLSASVGDRVTITCRASQSISTYLNWYQQKPGKAPKLLIYAASSLQSGVPSRFSGSGSGTDFTLTISSLQPEDFATYYCQETYSIPQWTFGQGTKVEIK

SEQ ID NO: 10679 - protein, 106 aa, Artificial Sequence; identical to SEQ ID NO: 8519
  Synthetic construct

SEQ ID NO: 10680 - protein, 110 aa, Artificial Sequence; identical to SEQ ID NO: 8226
  Synthetic construct

SEQ ID NO: 10681 - protein, 107 aa, Artificial Sequence
  Synthetic construct
EIVMTQSPVTLSVSPGERATLSCRASQSVGNNLAWYQQKPGQAPRLLIYGASTWATGVPAKFSGSGSGTEFTLTISSLQSGDFAVYYCQQYDSWPLTFGGGTKVEIK

SEQ ID NO: 10682 - protein, 106 aa, Artificial Sequence; identical to SEQ ID NO: 10190
  Synthetic construct

SEQ ID NO: 10683 - protein, 110 aa, Artificial Sequence
  Synthetic construct
QSVLTQPPSASGTPGQRVTISCSGSSSNIGTNYVYWYQQFPGTAPKLLIYRNNQRPSGVPDRFSGSKSGTSASLAIGGLRSEDEADYYCAAWDDNLSGVLLGGGTKLTVL

SEQ ID NO: 10684 - protein, 108 aa, Artificial Sequence
  Synthetic construct
EIVLTQSPGTLSLSPGERATLSCRASQGVSGKYLAWFQQKPGQTPRLLIYGTFYRATGIPDRFSGSGSGTDFTLTISRLEPPDFAVYYCQQYGYSSLTFGAGTKVEIR

SEQ ID NO: 10685 - protein, 113 aa, Artificial Sequence
  Synthetic construct
DIVMTQSPDSLAVSLGERATINCRSSQSVLYTSNNKNYLAWYQQEPGQPPKLLIYWASTRESGVPDRFSGSGSGTDFTLTINSLQAEDVAVYYCQQYYTTPLTFGGGTKVEIK

SEQ ID NO: 10686 - protein, 109 aa, Artificial Sequence
  Synthetic construct
EIVLTQSPATLSLSPGERATLSCRASQSVSSYLAWYQQKPGQAPRLLIYDASNRATGIPARFSGSGSGTDFTLTISSLEPEDFAVYYCQQRSNWPPSLTFGGGTKVEIK

SEQ ID NO: 10687 - protein, 107 aa, Artificial Sequence; identical to SEQ ID NO: 8110
  Synthetic construct

SEQ ID NO: 10688 - protein, 111 aa, Artificial Sequence
  Synthetic construct
QSVLTQPPSVSGAPGQRVTISCTGSSSNIGAGYDVHWYQQLPGTAPKLLIYANTNRPSGVPDRFSGSKSGTSASLAITGLQAEDEADYYCQSYDTSLSGGVFGGGTKLTVL

SEQ ID NO: 10689 - protein, 107 aa, Artificial Sequence; identical to SEQ ID NO: 8282
  Synthetic construct

SEQ ID NO: 10690 - protein, 107 aa, Artificial Sequence; identical to SEQ ID NO: 65
  Synthetic construct

SEQ ID NO: 10691 - protein, 110 aa, Artificial Sequence; identical to SEQ ID NO: 71
  Synthetic construct

SEQ ID NO: 10692 - protein, 107 aa, Artificial Sequence; identical to SEQ ID NO: 72
  Synthetic construct

SEQ ID NO: 10693 - protein, 8 aa, Artificial Sequence
  Synthetic construct
GYSFATYW

SEQ ID NO: 10694 - protein, 8 aa, Artificial Sequence
  Synthetic construct
GYTFTSYA

SEQ ID NO: 10695 - protein, 8 aa, Artificial Sequence
  Synthetic construct
GYPFTRDG

SEQ ID NO: 10696 - protein, 8 aa, Artificial Sequence
  Synthetic construct
GLSFRDSG

SEQ ID NO: 10697 - protein, 8 aa, Artificial Sequence
  Synthetic construct
GYTFTSYG

SEQ ID NO: 10698 - protein, 8 aa, Artificial Sequence
  Synthetic construct
GFNFSNYA

SEQ ID NO: 10699 - protein, 8 aa, Artificial Sequence
  Synthetic construct
GFSVSSNY

SEQ ID NO: 10700 - protein, 10 aa, Artificial Sequence
  Synthetic construct
GGSMNNNIYY

SEQ ID NO: 10701 - protein, 10 aa, Artificial Sequence
  Synthetic construct
GGSISSGDYY

SEQ ID NO: 10702 - protein, 8 aa, Artificial Sequence
  Synthetic construct
GYTFTGYY

SEQ ID NO: 10703 - protein, 8 aa, Artificial Sequence
  Synthetic construct
GYTFTGYY

SEQ ID NO: 10704 - protein, 8 aa, Artificial Sequence
  Synthetic construct
GSPLTGYY

SEQ ID NO: 10705 - protein, 8 aa, Artificial Sequence
  Synthetic construct
TFTLSDYT

SEQ ID NO: 10706 - protein, 8 aa, Artificial Sequence
  Synthetic construct
GYTFTSYG

SEQ ID NO: 10707 - protein, 8 aa, Artificial Sequence
  Synthetic construct
GFTFSSYD

SEQ ID NO: 10708 - protein, 8 aa, Artificial Sequence
  Synthetic construct
GYTFTKYY

SEQ ID NO: 10709 - protein, 8 aa, Artificial Sequence
  Synthetic construct
GFTFSSYS

SEQ ID NO: 10710 - protein, 8 aa, Artificial Sequence
  Synthetic construct
GFTFSSYA

SEQ ID NO: 10711 - protein, 10 aa, Artificial Sequence
  Synthetic construct
GDFINSAGYT

SEQ ID NO: 10712 - protein, 8 aa, Artificial Sequence
  Synthetic construct
DFTFGSYV

SEQ ID NO: 10713 - protein, 10 aa, Artificial Sequence
  Synthetic construct
GGSISSGNYY

SEQ ID NO: 10714 - protein, 10 aa, Artificial Sequence
  Synthetic construct
GGSISSGGYS

SEQ ID NO: 10715 - protein, 8 aa, Artificial Sequence
  Synthetic construct
GYRITNYA

SEQ ID NO: 10716 - protein, 10 aa, Artificial Sequence
  Synthetic construct
GGSTSSGGYY

SEQ ID NO: 10717 - protein, 8 aa, Artificial Sequence
  Synthetic construct
GFIFDSYG

SEQ ID NO: 10718 - protein, 8 aa, Artificial Sequence
  Synthetic construct
GYTFNTYG

SEQ ID NO: 10719 - protein, 8 aa, Artificial Sequence
  Synthetic construct
GFTFNDAW

SEQ ID NO: 10720 - protein, 8 aa, Artificial Sequence
  Synthetic construct
GFTFSSYA

SEQ ID NO: 10721 - protein, 8 aa, Artificial Sequence
  Synthetic construct
GFTFSSYG

SEQ ID NO: 10722 - protein, 8 aa, Artificial Sequence
  Synthetic construct
GFTFSHFA

SEQ ID NO: 10723 - protein, 8 aa, Artificial Sequence
  Synthetic construct
GFTFSSYG

SEQ ID NO: 10724 - protein, 8 aa, Artificial Sequence
  Synthetic construct
GFTFSAHW

SEQ ID NO: 10725 - protein, 8 aa, Artificial Sequence
  Synthetic construct
GYTFDNYG

SEQ ID NO: 10726 - protein, 8 aa, Artificial Sequence
  Synthetic construct
GFNFNNYA

SEQ ID NO: 10727 - protein, 8 aa, Artificial Sequence
  Synthetic construct
GFTFSSYA

SEQ ID NO: 10728 - protein, 8 aa, Artificial Sequence
  Synthetic construct
GFIFSNAW

SEQ ID NO: 10729 - protein, 8 aa, Artificial Sequence
  Synthetic construct
GYSFTNYY

SEQ ID NO: 10730 - protein, 8 aa, Artificial Sequence
  Synthetic construct
AFDFSAYG

SEQ ID NO: 10731 - protein, 8 aa, Artificial Sequence
  Synthetic construct
GSTFTGYY

SEQ ID NO: 10732 - protein, 10 aa, Artificial Sequence
  Synthetic construct
GGSISGGNYY

SEQ ID NO: 10733 - protein, 10 aa, Artificial Sequence
  Synthetic construct
GGSISSSSYY

SEQ ID NO: 10734 - protein, 8 aa, Artificial Sequence
  Synthetic construct
GYTFTSYD

SEQ ID NO: 10735 - protein, 8 aa, Artificial Sequence
  Synthetic construct
GFTFSNHG

SEQ ID NO: 10736 - protein, 8 aa, Artificial Sequence
  Synthetic construct
GYSFTDYH

SEQ ID NO: 10737 - protein, 8 aa, Artificial Sequence
  Synthetic construct
GYSFTSYW

SEQ ID NO: 10738 - protein, 8 aa, Artificial Sequence
  Synthetic construct
GFTFSSYG

SEQ ID NO: 10739 - protein, 8 aa, Artificial Sequence
  Synthetic construct
GFTFRSFT

SEQ ID NO: 10740 - protein, 8 aa, Artificial Sequence
  Synthetic construct
GFTFNDAW

SEQ ID NO: 10741 - protein, 8 aa, Artificial Sequence
  Synthetic construct
GFTFSGYG

SEQ ID NO: 10742 - protein, 8 aa, Artificial Sequence
  Synthetic construct
GFSFSTYA

SEQ ID NO: 10743 - protein, 10 aa, Artificial Sequence
  Synthetic construct
GFSLSTSGVG

SEQ ID NO: 10744 - protein, 8 aa, Artificial Sequence
  Synthetic construct
GYTFTSYG

SEQ ID NO: 10745 - protein, 8 aa, Artificial Sequence
  Synthetic construct
GFSLSSYA

SEQ ID NO: 10746 - protein, 8 aa, Artificial Sequence
  Synthetic construct
GFTFSSYG

SEQ ID NO: 10747 - protein, 8 aa, Artificial Sequence
  Synthetic construct
GFTFSSYW

SEQ ID NO: 10748 - protein, 8 aa, Artificial Sequence
  Synthetic construct
GFSFSSYA

SEQ ID NO: 10749 - protein, 8 aa, Artificial Sequence
  Synthetic construct
GFTVTRNY

SEQ ID NO: 10750 - protein, 8 aa, Artificial Sequence
  Synthetic construct
GFTFTRYW

SEQ ID NO: 10751 - protein, 8 aa, Artificial Sequence
  Synthetic construct
GFTFSSYA

SEQ ID NO: 10752 - protein, 8 aa, Artificial Sequence
  Synthetic construct
GFTINSNY

SEQ ID NO: 10753 - protein, 8 aa, Artificial Sequence
  Synthetic construct
GGSIYSYY

SEQ ID NO: 10754 - protein, 8 aa, Artificial Sequence
  Synthetic construct
GYTFTSYA

SEQ ID NO: 10755 - protein, 8 aa, Artificial Sequence
  Synthetic construct
GYSFTSYW

SEQ ID NO: 10756 - protein, 8 aa, Artificial Sequence
  Synthetic construct
GFTFDDYT

SEQ ID NO: 10757 - protein, 8 aa, Artificial Sequence
  Synthetic construct
GFTFSSYA

SEQ ID NO: 10758 - protein, 8 aa, Artificial Sequence
  Synthetic construct
GFTFSSYG

SEQ ID NO: 10759 - protein, 8 aa, Artificial Sequence
  Synthetic construct
GFTFSSYG

SEQ ID NO: 10760 - protein, 10 aa, Artificial Sequence
  Synthetic construct
GFSLSTNGVG

SEQ ID NO: 10761 - protein, 8 aa, Artificial Sequence
  Synthetic construct
GFTFSSYG

SEQ ID NO: 10762 - protein, 8 aa, Artificial Sequence
  Synthetic construct
GGTFNIHA

SEQ ID NO: 10763 - protein, 10 aa, Artificial Sequence
  Synthetic construct
GGSIRSGSYS

SEQ ID NO: 10764 - protein, 8 aa, Artificial Sequence
  Synthetic construct
GYTFADYP

SEQ ID NO: 10765 - protein, 8 aa, Artificial Sequence
  Synthetic construct
GFTFSSYA

SEQ ID NO: 10766 - protein, 8 aa, Artificial Sequence
  Synthetic construct
GYTFTSYG

SEQ ID NO: 10767 - protein, 8 aa, Artificial Sequence
  Synthetic construct
GGIFSGHA

SEQ ID NO: 10768 - protein, 10 aa, Artificial Sequence
  Synthetic construct
GFSLTTSGVA

SEQ ID NO: 10769 - protein, 8 aa, Artificial Sequence
  Synthetic construct
GFTFSSYG

SEQ ID NO: 10770 - protein, 8 aa, Artificial Sequence
  Synthetic construct
GFTFSSYA

SEQ ID NO: 10771 - protein, 8 aa, Artificial Sequence
  Synthetic construct
GFTFSSYA

SEQ ID NO: 10772 - protein, 8 aa, Artificial Sequence
  Synthetic construct
GFTFSEYS

SEQ ID NO: 10773 - protein, 8 aa, Artificial Sequence
  Synthetic construct
GGSLSGHF

SEQ ID NO: 10774 - protein, 8 aa, Artificial Sequence
  Synthetic construct
GFTFSTYR

SEQ ID NO: 10775 - protein, 8 aa, Artificial Sequence
  Synthetic construct
GFSFSNYW

SEQ ID NO: 10776 - protein, 8 aa, Artificial Sequence
  Synthetic construct
GGSFSGYY

SEQ ID NO: 10777 - protein, 10 aa, Artificial Sequence
  Synthetic construct
GFSLSNARMG

SEQ ID NO: 10778 - protein, 10 aa, Artificial Sequence
  Synthetic construct
GGSISSGSYY

SEQ ID NO: 10779 - protein, 8 aa, Artificial Sequence
  Synthetic construct
GYTFSSYW

SEQ ID NO: 10780 - protein, 8 aa, Artificial Sequence
  Synthetic construct
GFTFSSYW

SEQ ID NO: 10781 - protein, 8 aa, Artificial Sequence
  Synthetic construct
GFSITNNC

SEQ ID NO: 10782 - protein, 8 aa, Artificial Sequence
  Synthetic construct
GFTFSSYG

SEQ ID NO: 10783 - protein, 10 aa, Artificial Sequence
  Synthetic construct
GVSLTSNVKC

SEQ ID NO: 10784 - protein, 8 aa, Artificial Sequence
  Synthetic construct
GYTFSGYY

SEQ ID NO: 10785 - protein, 10 aa, Artificial Sequence
  Synthetic construct
GDSVSTHTAA

SEQ ID NO: 10786 - protein, 8 aa, Artificial Sequence
  Synthetic construct
GFSVSSNY

SEQ ID NO: 10787 - protein, 10 aa, Artificial Sequence
  Synthetic construct
GGSISSGDYY

SEQ ID NO: 10788 - protein, 8 aa, Artificial Sequence
  Synthetic construct
GFTFNNYA

SEQ ID NO: 10789 - protein, 8 aa, Artificial Sequence
  Synthetic construct
GYRFDIFD

SEQ ID NO: 10790 - protein, 8 aa, Artificial Sequence
  Synthetic construct
GHTYSNYW

SEQ ID NO: 10791 - protein, 10 aa, Artificial Sequence
  Synthetic construct
GASISSGTYY

SEQ ID NO: 10792 - protein, 8 aa, Artificial Sequence
  Synthetic construct
GFTFSSYG

SEQ ID NO: 10793 - protein, 8 aa, Artificial Sequence
  Synthetic construct
GGTFSSYA

SEQ ID NO: 10794 - protein, 8 aa, Artificial Sequence
  Synthetic construct
GGSISYYY

SEQ ID NO: 10795 - protein, 8 aa, Artificial Sequence
  Synthetic construct
GFTFTDNY

SEQ ID NO: 10796 - protein, 8 aa, Artificial Sequence
  Synthetic construct
GFTFSTYR

SEQ ID NO: 10797 - protein, 8 aa, Artificial Sequence
  Synthetic construct
GFTFTKYW

SEQ ID NO: 10798 - protein, 8 aa, Artificial Sequence
  Synthetic construct
GFSFSSDA

SEQ ID NO: 10799 - protein, 8 aa, Artificial Sequence
  Synthetic construct
GFTFRNHA

SEQ ID NO: 10800 - protein, 8 aa, Artificial Sequence
  Synthetic construct
GFTFSDSA

SEQ ID NO: 10801 - protein, 8 aa, Artificial Sequence
  Synthetic construct
GPTLGAYA

SEQ ID NO: 10802 - protein, 8 aa, Artificial Sequence
  Synthetic construct
GFTFSSYA

SEQ ID NO: 10803 - protein, 8 aa, Artificial Sequence
  Synthetic construct
GFTFDSYA

SEQ ID NO: 10804 - protein, 8 aa, Artificial Sequence
  Synthetic construct
GFTFSSYW

SEQ ID NO: 10805 - protein, 8 aa, Artificial Sequence
  Synthetic construct
GFTFSSYG

SEQ ID NO: 10806 - protein, 8 aa, Artificial Sequence
  Synthetic construct
GFTFSTYA

SEQ ID NO: 10807 - protein, 8 aa, Artificial Sequence
  Synthetic construct
GFMFSSYG

SEQ ID NO: 10808 - protein, 10 aa, Artificial Sequence
  Synthetic construct
GFSLSTSGVG

SEQ ID NO: 10809 - protein, 8 aa, Artificial Sequence
  Synthetic construct
GGSITSDS

SEQ ID NO: 10810 - protein, 8 aa, Artificial Sequence
  Synthetic construct
GFIFTDAW

SEQ ID NO: 10811 - protein, 8 aa, Artificial Sequence
  Synthetic construct
GFTFSSYW

SEQ ID NO: 10812 - protein, 8 aa, Artificial Sequence
  Synthetic construct
GFTFSNYW

SEQ ID NO: 10813 - protein, 8 aa, Artificial Sequence
  Synthetic construct
GFTFDDYA

SEQ ID NO: 10814 - protein, 8 aa, Artificial Sequence
  Synthetic construct
GFSFNIYT

SEQ ID NO: 10815 - protein, 8 aa, Artificial Sequence
  Synthetic construct
GYTFTDYY

SEQ ID NO: 10816 - protein, 8 aa, Artificial Sequence
  Synthetic construct
NGSFSNYY

SEQ ID NO: 10817 - protein, 8 aa, Artificial Sequence
  Synthetic construct
GFTFSPYW

SEQ ID NO: 10818 - protein, 9 aa, Artificial Sequence
  Synthetic construct
GGSITSSNW

SEQ ID NO: 10819 - protein, 8 aa, Artificial Sequence
  Synthetic construct
GFTFSSYG

SEQ ID NO: 10820 - protein, 8 aa, Artificial Sequence
  Synthetic construct
GFTFSNYA

SEQ ID NO: 10821 - protein, 8 aa, Artificial Sequence
  Synthetic construct
GYPFTSYY

SEQ ID NO: 10822 - protein, 8 aa, Artificial Sequence
  Synthetic construct
GISLTDYY

SEQ ID NO: 10823 - protein, 8 aa, Artificial Sequence
  Synthetic construct
GGSFSGYY

SEQ ID NO: 10824 - protein, 8 aa, Artificial Sequence
  Synthetic construct
GASMSDSY

SEQ ID NO: 10825 - protein, 8 aa, Artificial Sequence
  Synthetic construct
GFNVSDNY

SEQ ID NO: 10826 - protein, 8 aa, Artificial Sequence
  Synthetic construct
GFNVYDNY

SEQ ID NO: 10827 - protein, 10 aa, Artificial Sequence
  Synthetic construct
GGSFSNNYYF

SEQ ID NO: 10828 - protein, 8 aa, Artificial Sequence
  Synthetic construct
GFTFSSYG

SEQ ID NO: 10829 - protein, 9 aa, Artificial Sequence
  Synthetic construct
DGSMSAGHW

SEQ ID NO: 10830 - protein, 8 aa, Artificial Sequence
  Synthetic construct
GFTFSSYA

SEQ ID NO: 10831 - protein, 8 aa, Artificial Sequence
  Synthetic construct
GYSFTDYY

SEQ ID NO: 10832 - protein, 8 aa, Artificial Sequence
  Synthetic construct
GFIFSSYA

SEQ ID NO: 10833 - protein, 8 aa, Artificial Sequence
  Synthetic construct
GYTFTGYY

SEQ ID NO: 10834 - protein, 10 aa, Artificial Sequence
  Synthetic construct
GFSLSNARMG

SEQ ID NO: 10835 - protein, 8 aa, Artificial Sequence
  Synthetic construct
GFTFADYA

SEQ ID NO: 10836 - protein, 8 aa, Artificial Sequence
  Synthetic construct
GDTLTSHT

SEQ ID NO: 10837 - protein, 8 aa, Artificial Sequence
  Synthetic construct
GYEFFYYW

SEQ ID NO: 10838 - protein, 8 aa, Artificial Sequence
  Synthetic construct
GFTFSSYS

SEQ ID NO: 10839 - protein, 8 aa, Artificial Sequence
  Synthetic construct
GLTFRSYA

SEQ ID NO: 10840 - protein, 8 aa, Artificial Sequence
  Synthetic construct
GFTFSSYG

SEQ ID NO: 10841 - protein, 10 aa, Artificial Sequence
  Synthetic construct
GVSISSSSFF

SEQ ID NO: 10842 - protein, 8 aa, Artificial Sequence
  Synthetic construct
GGSISSYY

SEQ ID NO: 10843 - protein, 8 aa, Artificial Sequence
  Synthetic construct
GYTFTSYY

SEQ ID NO: 10844 - protein, 8 aa, Artificial Sequence
  Synthetic construct
GFTFSIYG

SEQ ID NO: 10845 - protein, 8 aa, Artificial Sequence
  Synthetic construct
GFAFAAYT

SEQ ID NO: 10846 - protein, 8 aa, Artificial Sequence
  Synthetic construct
GFTFSSYA

SEQ ID NO: 10847 - protein, 8 aa, Artificial Sequence
  Synthetic construct
GFTFSDYS

SEQ ID NO: 10848 - protein, 8 aa, Artificial Sequence
  Synthetic construct
GYSFSNYW

SEQ ID NO: 10849 - protein, 8 aa, Artificial Sequence
  Synthetic construct
GFSFSSYW

SEQ ID NO: 10850 - protein, 10 aa, Artificial Sequence
  Synthetic construct
GVSIGSTNYH

SEQ ID NO: 10851 - protein, 8 aa, Artificial Sequence
  Synthetic construct
GYTFISYN

SEQ ID NO: 10852 - protein, 10 aa, Artificial Sequence
  Synthetic construct
GGSISSGSYY

SEQ ID NO: 10853 - protein, 8 aa, Artificial Sequence
  Synthetic construct
GFSFSTYP

SEQ ID NO: 10854 - protein, 8 aa, Artificial Sequence
  Synthetic construct
GFTFSSYW

SEQ ID NO: 10855 - protein, 10 aa, Artificial Sequence
  Synthetic construct
RGSITNTVYY

SEQ ID NO: 10856 - protein, 10 aa, Artificial Sequence
  Synthetic construct
GFSLSNARMG

SEQ ID NO: 10857 - protein, 8 aa, Artificial Sequence
  Synthetic construct
GYSFTSYY

SEQ ID NO: 10858 - protein, 8 aa, Artificial Sequence
  Synthetic construct
GFTFSDYY

SEQ ID NO: 10859 - protein, 8 aa, Artificial Sequence
  Synthetic construct
GFTFSSYA

SEQ ID NO: 10860 - protein, 8 aa, Artificial Sequence
  Synthetic construct
GFTFDDYA

SEQ ID NO: 10861 - protein, 10 aa, Artificial Sequence
  Synthetic construct
GASISSGTYY

SEQ ID NO: 10862 - protein, 8 aa, Artificial Sequence
  Synthetic construct
GFTFSSYA

SEQ ID NO: 10863 - protein, 8 aa, Artificial Sequence
  Synthetic construct
GGSFSGYY

SEQ ID NO: 10864 - protein, 10 aa, Artificial Sequence
  Synthetic construct
GGSISSGSYY

SEQ ID NO: 10865 - protein, 8 aa, Artificial Sequence
  Synthetic construct
GFTFSNFA

SEQ ID NO: 10866 - protein, 8 aa, Artificial Sequence
  Synthetic construct
GYTFTSYW

SEQ ID NO: 10867 - protein, 8 aa, Artificial Sequence
  Synthetic construct
GYSFATYW

SEQ ID NO: 10868 - protein, 8 aa, Artificial Sequence
  Synthetic construct
GLTLSDFY

SEQ ID NO: 10869 - protein, 8 aa, Artificial Sequence
  Synthetic construct
GFSFSNFA

SEQ ID NO: 10870 - protein, 8 aa, Artificial Sequence
  Synthetic construct
GFTFSSYS

SEQ ID NO: 10871 - protein, 8 aa, Artificial Sequence
  Synthetic construct
GYSFTDYF

SEQ ID NO: 10872 - protein, 8 aa, Artificial Sequence
  Synthetic construct
GYPFTRDG

SEQ ID NO: 10873 - protein, 8 aa, Artificial Sequence
  Synthetic construct
DTRSANFA

SEQ ID NO: 10874 - protein, 8 aa, Artificial Sequence
  Synthetic construct
GFTFSSYW

SEQ ID NO: 10875 - protein, 8 aa, Artificial Sequence
  Synthetic construct
GYTFDNYD

SEQ ID NO: 10876 - protein, 8 aa, Artificial Sequence
  Synthetic construct
GYTFTSYD

SEQ ID NO: 10877 - protein, 8 aa, Artificial Sequence
  Synthetic construct
GFTVSSNY

SEQ ID NO: 10878 - protein, 8 aa, Artificial Sequence
  Synthetic construct
GYSFATYW

SEQ ID NO: 10879 - protein, 8 aa, Artificial Sequence
  Synthetic construct
GFSFSDFW

SEQ ID NO: 10880 - protein, 10 aa, Artificial Sequence
  Synthetic construct
GFSLNADRMS

SEQ ID NO: 10881 - protein, 10 aa, Artificial Sequence
  Synthetic construct
GGSISSSSYY

SEQ ID NO: 10882 - protein, 10 aa, Artificial Sequence
  Synthetic construct
GGSISSSSYY

SEQ ID NO: 10883 - protein, 8 aa, Artificial Sequence
  Synthetic construct
GFTFSSYG

SEQ ID NO: 10884 - protein, 8 aa, Artificial Sequence
  Synthetic construct
GYTFTGYY

SEQ ID NO: 10885 - protein, 8 aa, Artificial Sequence
  Synthetic construct
GYTFTSYA

SEQ ID NO: 10886 - protein, 10 aa, Artificial Sequence
  Synthetic construct
GGSISRESYH

SEQ ID NO: 10887 - protein, 8 aa, Artificial Sequence
  Synthetic construct
GFTLSNHG

SEQ ID NO: 10888 - protein, 8 aa, Artificial Sequence
  Synthetic construct
GFTFSHYY

SEQ ID NO: 10889 - protein, 8 aa, Artificial Sequence
  Synthetic construct
GYSFTTYF

SEQ ID NO: 10890 - protein, 8 aa, Artificial Sequence
  Synthetic construct
GFTFSGSA

SEQ ID NO: 10891 - protein, 8 aa, Artificial Sequence
  Synthetic construct
GFTFDDYA

SEQ ID NO: 10892 - protein, 10 aa, Artificial Sequence
  Synthetic construct
GGSISSSSYY

SEQ ID NO: 10893 - protein, 10 aa, Artificial Sequence
  Synthetic construct
GGSISSSSHY

SEQ ID NO: 10894 - protein, 8 aa, Artificial Sequence
  Synthetic construct
GFTFSSYS

SEQ ID NO: 10895 - protein, 8 aa, Artificial Sequence
  Synthetic construct
GFTFRNYW

SEQ ID NO: 10896 - protein, 8 aa, Artificial Sequence
  Synthetic construct
GGTFSSYA

SEQ ID NO: 10897 - protein, 8 aa, Artificial Sequence
  Synthetic construct
GFTFSSYG

SEQ ID NO: 10898 - protein, 8 aa, Artificial Sequence
  Synthetic construct
GYTFTGYY

SEQ ID NO: 10899 - protein, 8 aa, Artificial Sequence
  Synthetic construct
GFTFTSSA

SEQ ID NO: 10900 - protein, 10 aa, Artificial Sequence
  Synthetic construct
GFSLSNPRMG

SEQ ID NO: 10901 - protein, 8 aa, Artificial Sequence
  Synthetic construct
GFTFTTCV

SEQ ID NO: 10902 - protein, 10 aa, Artificial Sequence
  Synthetic construct
GASVKSDKSY

SEQ ID NO: 10903 - protein, 8 aa, Artificial Sequence
  Synthetic construct
GFTFSSYG

SEQ ID NO: 10904 - protein, 8 aa, Artificial Sequence
  Synthetic construct
GYTFTSYA

SEQ ID NO: 10905 - protein, 8 aa, Artificial Sequence
  Synthetic construct
GYSFSNYW

SEQ ID NO: 10906 - protein, 8 aa, Artificial Sequence
  Synthetic construct
GFTFSSHA

SEQ ID NO: 10907 - protein, 8 aa, Artificial Sequence
  Synthetic construct
GYTFTSYG

SEQ ID NO: 10908 - protein, 8 aa, Artificial Sequence
  Synthetic construct
GFTFSSYA

SEQ ID NO: 10909 - protein, 10 aa, Artificial Sequence
  Synthetic construct
GGSISSSSYY

SEQ ID NO: 10910 - protein, 8 aa, Artificial Sequence
  Synthetic construct
GFTFSKYG

SEQ ID NO: 10911 - protein, 8 aa, Artificial Sequence
  Synthetic construct
GYSFSNYW

SEQ ID NO: 10912 - protein, 10 aa, Artificial Sequence
  Synthetic construct
GGSIRSNNDY

SEQ ID NO: 10913 - protein, 8 aa, Artificial Sequence
  Synthetic construct
GGTFSSYA

SEQ ID NO: 10914 - protein, 8 aa, Artificial Sequence
  Synthetic construct
GFTFGDYA

SEQ ID NO: 10915 - protein, 8 aa, Artificial Sequence
  Synthetic construct
GFTFSSSP

SEQ ID NO: 10916 - protein, 8 aa, Artificial Sequence
  Synthetic construct
GYSFTSYW

SEQ ID NO: 10917 - protein, 8 aa, Artificial Sequence
  Synthetic construct
GFTFKSYD

SEQ ID NO: 10918 - protein, 8 aa, Artificial Sequence
  Synthetic construct
GFTFSDYY

SEQ ID NO: 10919 - protein, 8 aa, Artificial Sequence
  Synthetic construct
GFTVSSNY

SEQ ID NO: 10920 - protein, 8 aa, Artificial Sequence
  Synthetic construct
GGSFSGYY

SEQ ID NO: 10921 - protein, 8 aa, Artificial Sequence
  Synthetic construct
GFPFSTYS

SEQ ID NO: 10922 - protein, 8 aa, Artificial Sequence
  Synthetic construct
GGTLSTYG

SEQ ID NO: 10923 - protein, 8 aa, Artificial Sequence
  Synthetic construct
GFSFDKYA

SEQ ID NO: 10924 - protein, 8 aa, Artificial Sequence
  Synthetic construct
GFTFSTYS

SEQ ID NO: 10925 - protein, 10 aa, Artificial Sequence
  Synthetic construct
GGPISSSIYY

SEQ ID NO: 10926 - protein, 10 aa, Artificial Sequence
  Synthetic construct
GFSLTTSGVG

SEQ ID NO: 10927 - protein, 8 aa, Artificial Sequence
  Synthetic construct
GYTFTRYY

SEQ ID NO: 10928 - protein, 8 aa, Artificial Sequence
  Synthetic construct
GYTLTELS

SEQ ID NO: 10929 - protein, 8 aa, Artificial Sequence
  Synthetic construct
GLIFYDAW

SEQ ID NO: 10930 - protein, 8 aa, Artificial Sequence
  Synthetic construct
GYTFTGYY

SEQ ID NO: 10931 - protein, 8 aa, Artificial Sequence
  Synthetic construct
GFTFSSYG

SEQ ID NO: 10932 - protein, 8 aa, Artificial Sequence
  Synthetic construct
GFAFGNYA

SEQ ID NO: 10933 - protein, 8 aa, Artificial Sequence
  Synthetic construct
GFSFSDSA

SEQ ID NO: 10934 - protein, 8 aa, Artificial Sequence
  Synthetic construct
GFTFSNYA

SEQ ID NO: 10935 - protein, 8 aa, Artificial Sequence
  Synthetic construct
GYTFTSYG

SEQ ID NO: 10936 - protein, 8 aa, Artificial Sequence
  Synthetic construct
GFTFENYW

SEQ ID NO: 10937 - protein, 8 aa, Artificial Sequence
  Synthetic construct
GFTFKSYD

SEQ ID NO: 10938 - protein, 8 aa, Artificial Sequence
  Synthetic construct
GYTFTSYG

SEQ ID NO: 10939 - protein, 8 aa, Artificial Sequence
  Synthetic construct
GYTFTSYG

SEQ ID NO: 10940 - protein, 8 aa, Artificial Sequence
  Synthetic construct
GYTFTSYG

SEQ ID NO: 10941 - protein, 8 aa, Artificial Sequence
  Synthetic construct
GFTFSSYA

SEQ ID NO: 10942 - protein, 8 aa, Artificial Sequence
  Synthetic construct
GYTFTSYY

SEQ ID NO: 10943 - protein, 8 aa, Artificial Sequence
  Synthetic construct
GFTFSDYH

SEQ ID NO: 10944 - protein, 10 aa, Artificial Sequence
  Synthetic construct
GGSISSGVFS

SEQ ID NO: 10945 - protein, 8 aa, Artificial Sequence
  Synthetic construct
GYSFATYW

SEQ ID NO: 10946 - protein, 10 aa, Artificial Sequence
  Synthetic construct
GGSIRSGDYY

SEQ ID NO: 10947 - protein, 8 aa, Artificial Sequence
  Synthetic construct
GFTFSHYW

SEQ ID NO: 10948 - protein, 10 aa, Artificial Sequence
  Synthetic construct
GDSVSSNSAA

SEQ ID NO: 10949 - protein, 8 aa, Artificial Sequence
  Synthetic construct
GFPFSIYG

SEQ ID NO: 10950 - protein, 8 aa, Artificial Sequence
  Synthetic construct
GYSFTNFW

SEQ ID NO: 10951 - protein, 8 aa, Artificial Sequence
  Synthetic construct
GGSFSGYY

SEQ ID NO: 10952 - protein, 8 aa, Artificial Sequence
  Synthetic construct
GYTFTGHY

SEQ ID NO: 10953 - protein, 8 aa, Artificial Sequence
  Synthetic construct
GYTFTSYA

SEQ ID NO: 10954 - protein, 8 aa, Artificial Sequence
  Synthetic construct
GFTFSEFW

SEQ ID NO: 10955 - protein, 10 aa, Artificial Sequence
  Synthetic construct
GGSISSRSYY

SEQ ID NO: 10956 - protein, 8 aa, Artificial Sequence
  Synthetic construct
GFKLITYA

SEQ ID NO: 10957 - protein, 8 aa, Artificial Sequence
  Synthetic construct
GFTFSSHA

SEQ ID NO: 10958 - protein, 8 aa, Artificial Sequence
  Synthetic construct
GFAFGNYA

SEQ ID NO: 10959 - protein, 8 aa, Artificial Sequence
  Synthetic construct
GGSISSFY

SEQ ID NO: 10960 - protein, 8 aa, Artificial Sequence
  Synthetic construct
GFTFSSYG

SEQ ID NO: 10961 - protein, 8 aa, Artificial Sequence
  Synthetic construct
GFTFKSYD

SEQ ID NO: 10962 - protein, 8 aa, Artificial Sequence
  Synthetic construct
GFTFSDYY

SEQ ID NO: 10963 - protein, 8 aa, Artificial Sequence
  Synthetic construct
GYTFTSYG

SEQ ID NO: 10964 - protein, 8 aa, Artificial Sequence
  Synthetic construct
GFTFNDAW

SEQ ID NO: 10965 - protein, 10 aa, Artificial Sequence
  Synthetic construct
GFSLATSGVG

SEQ ID NO: 10966 - protein, 8 aa, Artificial Sequence
  Synthetic construct
GYSFTSYW

SEQ ID NO: 10967 - protein, 8 aa, Artificial Sequence
  Synthetic construct
GFTVSNNF

SEQ ID NO: 10968 - protein, 10 aa, Artificial Sequence
  Synthetic construct
GFSLATSGVG

SEQ ID NO: 10969 - protein, 10 aa, Artificial Sequence
  Synthetic construct
GFSLSTSGVG

SEQ ID NO: 10970 - protein, 8 aa, Artificial Sequence
  Synthetic construct
GYTFTTYY

SEQ ID NO: 10971 - protein, 8 aa, Artificial Sequence
  Synthetic construct
GGSLSTFY

SEQ ID NO: 10972 - protein, 8 aa, Artificial Sequence
  Synthetic construct
GYSFATYW

SEQ ID NO: 10973 - protein, 8 aa, Artificial Sequence
  Synthetic construct
GYSFATYW

SEQ ID NO: 10974 - protein, 10 aa, Artificial Sequence
  Synthetic construct
GFALSTSGMC

SEQ ID NO: 10975 - protein, 8 aa, Artificial Sequence
  Synthetic construct
GYTFTDHH

SEQ ID NO: 10976 - protein, 8 aa, Artificial Sequence
  Synthetic construct
RGTFISYG

SEQ ID NO: 10977 - protein, 8 aa, Artificial Sequence
  Synthetic construct
GYTFTDHH

SEQ ID NO: 10978 - protein, 8 aa, Artificial Sequence
  Synthetic construct
GYPFTRDG

SEQ ID NO: 10979 - protein, 8 aa, Artificial Sequence
  Synthetic construct
GGSLSTYY

SEQ ID NO: 10980 - protein, 8 aa, Artificial Sequence
  Synthetic construct
GYPFTRDG

SEQ ID NO: 10981 - protein, 8 aa, Artificial Sequence
  Synthetic construct
GGSFSGYY

SEQ ID NO: 10982 - protein, 8 aa, Artificial Sequence
  Synthetic construct
GFTFSNYW

SEQ ID NO: 10983 - protein, 10 aa, Artificial Sequence
  Synthetic construct
GGSISSGSYY

SEQ ID NO: 10984 - protein, 10 aa, Artificial Sequence
  Synthetic construct
GASVSSRTFA

SEQ ID NO: 10985 - protein, 9 aa, Artificial Sequence
  Synthetic construct
GGSISSSNW

SEQ ID NO: 10986 - protein, 10 aa, Artificial Sequence
  Synthetic construct
GGSISSGSYY

SEQ ID NO: 10987 - protein, 8 aa, Artificial Sequence
  Synthetic construct
GYTFTNYF

SEQ ID NO: 10988 - protein, 8 aa, Artificial Sequence
  Synthetic construct
GFTFSSYS

SEQ ID NO: 10989 - protein, 8 aa, Artificial Sequence
  Synthetic construct
GFAFSNYV

SEQ ID NO: 10990 - protein, 8 aa, Artificial Sequence
  Synthetic construct
GYTFTSYG

SEQ ID NO: 10991 - protein, 8 aa, Artificial Sequence
  Synthetic construct
GYSFATYW

SEQ ID NO: 10992 - protein, 8 aa, Artificial Sequence
  Synthetic construct
GFTFGDYF

SEQ ID NO: 10993 - protein, 8 aa, Artificial Sequence
  Synthetic construct
GYTFTSYG

SEQ ID NO: 10994 - protein, 8 aa, Artificial Sequence
  Synthetic construct
GFTFSSYS

SEQ ID NO: 10995 - protein, 9 aa, Artificial Sequence
  Synthetic construct
GGSISSSNW

SEQ ID NO: 10996 - protein, 8 aa, Artificial Sequence
  Synthetic construct
GFTFSSYA

SEQ ID NO: 10997 - protein, 8 aa, Artificial Sequence
  Synthetic construct
GFTFSSYA

SEQ ID NO: 10998 - protein, 8 aa, Artificial Sequence
  Synthetic construct
GFTFSSYG

SEQ ID NO: 10999 - protein, 8 aa, Artificial Sequence
  Synthetic construct
GYTFTSYY

SEQ ID NO: 11000 - protein, 8 aa, Artificial Sequence
  Synthetic construct
GYSFSNYW

SEQ ID NO: 11001 - protein, 8 aa, Artificial Sequence
  Synthetic construct
GDGFTSYY

SEQ ID NO: 11002 - protein, 8 aa, Artificial Sequence
  Synthetic construct
GFTFSSYS

SEQ ID NO: 11003 - protein, 8 aa, Artificial Sequence
  Synthetic construct
GYTFTSYG

SEQ ID NO: 11004 - protein, 10 aa, Artificial Sequence
  Synthetic construct
GFSLSTSGMC

SEQ ID NO: 11005 - protein, 10 aa, Artificial Sequence
  Synthetic construct
GDSIISSSSY

SEQ ID NO: 11006 - protein, 10 aa, Artificial Sequence
  Synthetic construct
GGSISSGSDY

SEQ ID NO: 11007 - protein, 8 aa, Artificial Sequence
  Synthetic construct
GYSFATYW

SEQ ID NO: 11008 - protein, 8 aa, Artificial Sequence
  Synthetic construct
GFTFSNYW

SEQ ID NO: 11009 - protein, 8 aa, Artificial Sequence
  Synthetic construct
GFTFTRYW

SEQ ID NO: 11010 - protein, 8 aa, Artificial Sequence
  Synthetic construct
GGSITESY

SEQ ID NO: 11011 - protein, 8 aa, Artificial Sequence
  Synthetic construct
GFTFSSSA

SEQ ID NO: 11012 - protein, 8 aa, Artificial Sequence
  Synthetic construct
GFTFSNYP

SEQ ID NO: 11013 - protein, 8 aa, Artificial Sequence
  Synthetic construct
GGTFSSYA

SEQ ID NO: 11014 - protein, 8 aa, Artificial Sequence
  Synthetic construct
GLTFSGYW

SEQ ID NO: 11015 - protein, 8 aa, Artificial Sequence
  Synthetic construct
GFTFSSYS

SEQ ID NO: 11016 - protein, 8 aa, Artificial Sequence
  Synthetic construct
GFAFGNYA

SEQ ID NO: 11017 - protein, 10 aa, Artificial Sequence
  Synthetic construct
GGSISSGGYY

SEQ ID NO: 11018 - protein, 8 aa, Artificial Sequence
  Synthetic construct
GGSFSGYS

SEQ ID NO: 11019 - protein, 10 aa, Artificial Sequence
  Synthetic construct
GGSISSSSYY

SEQ ID NO: 11020 - protein, 8 aa, Artificial Sequence
  Synthetic construct
EFTFSDYW

SEQ ID NO: 11021 - protein, 9 aa, Artificial Sequence
  Synthetic construct
GGSINSGYY

SEQ ID NO: 11022 - protein, 10 aa, Artificial Sequence
  Synthetic construct
GGSISSGSYY

SEQ ID NO: 11023 - protein, 8 aa, Artificial Sequence
  Synthetic construct
GYSFTSYW

SEQ ID NO: 11024 - protein, 8 aa, Artificial Sequence
  Synthetic construct
GVIFSSYA

SEQ ID NO: 11025 - protein, 10 aa, Artificial Sequence
  Synthetic construct
GGSISSGSYY

SEQ ID NO: 11026 - protein, 8 aa, Artificial Sequence
  Synthetic construct
GFSFSIYT

SEQ ID NO: 11027 - protein, 8 aa, Artificial Sequence
  Synthetic construct
GFTFGDYA

SEQ ID NO: 11028 - protein, 10 aa, Artificial Sequence
  Synthetic construct
GGSISSGSYY

SEQ ID NO: 11029 - protein, 8 aa, Artificial Sequence
  Synthetic construct
GYTFNTYG

SEQ ID NO: 11030 - protein, 8 aa, Artificial Sequence
  Synthetic construct
GFSFSSYA

SEQ ID NO: 11031 - protein, 8 aa, Artificial Sequence
  Synthetic construct
GFTFNDAW

SEQ ID NO: 11032 - protein, 8 aa, Artificial Sequence
  Synthetic construct
GYTFTGYY

SEQ ID NO: 11033 - protein, 8 aa, Artificial Sequence
  Synthetic construct
GFSVNTLY

SEQ ID NO: 11034 - protein, 10 aa, Artificial Sequence
  Synthetic construct
GGSISSSSYY

SEQ ID NO: 11035 - protein, 8 aa, Artificial Sequence
  Synthetic construct
GFTFSSYS

SEQ ID NO: 11036 - protein, 8 aa, Artificial Sequence
  Synthetic construct
GFTFSVYA

SEQ ID NO: 11037 - protein, 8 aa, Artificial Sequence
  Synthetic construct
GYSFSNYW

SEQ ID NO: 11038 - protein, 8 aa, Artificial Sequence
  Synthetic construct
GYPFTRDG

SEQ ID NO: 11039 - protein, 8 aa, Artificial Sequence
  Synthetic construct
GYTFTSYG

SEQ ID NO: 11040 - protein, 8 aa, Artificial Sequence
  Synthetic construct
GYSFATYW

SEQ ID NO: 11041 - protein, 8 aa, Artificial Sequence
  Synthetic construct
GFTFSSYG

SEQ ID NO: 11042 - protein, 8 aa, Artificial Sequence
  Synthetic construct
GFTFRNYG

SEQ ID NO: 11043 - protein, 8 aa, Artificial Sequence
  Synthetic construct
GFSFSSSV

SEQ ID NO: 11044 - protein, 8 aa, Artificial Sequence
  Synthetic construct
GGSTSFYY

SEQ ID NO: 11045 - protein, 8 aa, Artificial Sequence
  Synthetic construct
GYPFTRDG

SEQ ID NO: 11046 - protein, 8 aa, Artificial Sequence
  Synthetic construct
GNTFSSYT

SEQ ID NO: 11047 - protein, 8 aa, Artificial Sequence
  Synthetic construct
GYRFFGHW

SEQ ID NO: 11048 - protein, 10 aa, Artificial Sequence
  Synthetic construct
GGSISSSSYY

SEQ ID NO: 11049 - protein, 8 aa, Artificial Sequence
  Synthetic construct
GYSFATYW

SEQ ID NO: 11050 - protein, 8 aa, Artificial Sequence
  Synthetic construct
GYSFTDYY

SEQ ID NO: 11051 - protein, 8 aa, Artificial Sequence
  Synthetic construct
GDSITSYY

SEQ ID NO: 11052 - protein, 8 aa, Artificial Sequence
  Synthetic construct
GFTVSSNY

SEQ ID NO: 11053 - protein, 8 aa, Artificial Sequence
  Synthetic construct
GFTFSTYA

SEQ ID NO: 11054 - protein, 8 aa, Artificial Sequence
  Synthetic construct
GFIFSSYA

SEQ ID NO: 11055 - protein, 10 aa, Artificial Sequence
  Synthetic construct
GFSLSTSGVG

SEQ ID NO: 11056 - protein, 8 aa, Artificial Sequence
  Synthetic construct
GFTFSSYS

SEQ ID NO: 11057 - protein, 8 aa, Artificial Sequence
  Synthetic construct
GFTFRSYG

SEQ ID NO: 11058 - protein, 8 aa, Artificial Sequence
  Synthetic construct
GYTFTDYY

SEQ ID NO: 11059 - protein, 8 aa, Artificial Sequence
  Synthetic construct
GFTFSDAW

SEQ ID NO: 11060 - protein, 8 aa, Artificial Sequence
  Synthetic construct
GFTFSSYA

SEQ ID NO: 11061 - protein, 8 aa, Artificial Sequence
  Synthetic construct
SDSFEGYF

SEQ ID NO: 11062 - protein, 8 aa, Artificial Sequence
  Synthetic construct
GYPFTDYF

SEQ ID NO: 11063 - protein, 8 aa, Artificial Sequence
  Synthetic construct
GGSISSYY

SEQ ID NO: 11064 - protein, 8 aa, Artificial Sequence
  Synthetic construct
GFTFSSYN

SEQ ID NO: 11065 - protein, 8 aa, Artificial Sequence
  Synthetic construct
GFTFSSYS

SEQ ID NO: 11066 - protein, 8 aa, Artificial Sequence
  Synthetic construct
GYTFTSYY

SEQ ID NO: 11067 - protein, 8 aa, Artificial Sequence
  Synthetic construct
GFTVSSNY

SEQ ID NO: 11068 - protein, 8 aa, Artificial Sequence
  Synthetic construct
GFNLGSYG

SEQ ID NO: 11069 - protein, 8 aa, Artificial Sequence
  Synthetic construct
GGSISSYY

SEQ ID NO: 11070 - protein, 8 aa, Artificial Sequence
  Synthetic construct
GFTFRFSA

SEQ ID NO: 11071 - protein, 8 aa, Artificial Sequence
  Synthetic construct
EFAFSDYT

SEQ ID NO: 11072 - protein, 8 aa, Artificial Sequence
  Synthetic construct
GFTFSSYA

SEQ ID NO: 11073 - protein, 8 aa, Artificial Sequence
  Synthetic construct
GFTFSSYA

SEQ ID NO: 11074 - protein, 8 aa, Artificial Sequence
  Synthetic construct
GFTFNKFW

SEQ ID NO: 11075 - protein, 8 aa, Artificial Sequence
  Synthetic construct
GYSFTSYW

SEQ ID NO: 11076 - protein, 8 aa, Artificial Sequence
  Synthetic construct
GFTFRTYT

SEQ ID NO: 11077 - protein, 8 aa, Artificial Sequence
  Synthetic construct
GFTFSRWA

SEQ ID NO: 11078 - protein, 8 aa, Artificial Sequence
  Synthetic construct
GFIFDNAW

SEQ ID NO: 11079 - protein, 8 aa, Artificial Sequence
  Synthetic construct
GFTFSSYA

SEQ ID NO: 11080 - protein, 8 aa, Artificial Sequence
  Synthetic construct
VGSFTGYY

SEQ ID NO: 11081 - protein, 10 aa, Artificial Sequence
  Synthetic construct
GFSLATSGVG

SEQ ID NO: 11082 - protein, 8 aa, Artificial Sequence
  Synthetic construct
GFTFSSYA

SEQ ID NO: 11083 - protein, 8 aa, Artificial Sequence
  Synthetic construct
GVSFSTYN

SEQ ID NO: 11084 - protein, 8 aa, Artificial Sequence
  Synthetic construct
GFMFSGYT

SEQ ID NO: 11085 - protein, 8 aa, Artificial Sequence
  Synthetic construct
GYTFTTYA

SEQ ID NO: 11086 - protein, 8 aa, Artificial Sequence
  Synthetic construct
GFTFSSYA

SEQ ID NO: 11087 - protein, 8 aa, Artificial Sequence
  Synthetic construct
GFAFGNYA

SEQ ID NO: 11088 - protein, 8 aa, Artificial Sequence
  Synthetic construct
GFTFNTYT

SEQ ID NO: 11089 - protein, 10 aa, Artificial Sequence
  Synthetic construct
GGSISSDSYY

SEQ ID NO: 11090 - protein, 8 aa, Artificial Sequence
  Synthetic construct
GFTFNDFY

SEQ ID NO: 11091 - protein, 8 aa, Artificial Sequence
  Synthetic construct
GYSFTSYW

SEQ ID NO: 11092 - protein, 8 aa, Artificial Sequence
  Synthetic construct
GFGFINFG

SEQ ID NO: 11093 - protein, 8 aa, Artificial Sequence
  Synthetic construct
GYSFTNHY

SEQ ID NO: 11094 - protein, 8 aa, Artificial Sequence
  Synthetic construct
GFMFGDYS

SEQ ID NO: 11095 - protein, 8 aa, Artificial Sequence
  Synthetic construct
GFTFSSYA

SEQ ID NO: 11096 - protein, 9 aa, Artificial Sequence
  Synthetic construct
GGSISSSNW

SEQ ID NO: 11097 - protein, 10 aa, Artificial Sequence
  Synthetic construct
GGSISSGGHY

SEQ ID NO: 11098 - protein, 8 aa, Artificial Sequence
  Synthetic construct
GGSFSGYY

SEQ ID NO: 11099 - protein, 10 aa, Artificial Sequence
  Synthetic construct
GFSLSTSGMC

SEQ ID NO: 11100 - protein, 8 aa, Artificial Sequence
  Synthetic construct
GFTFSSYD

SEQ ID NO: 11101 - protein, 8 aa, Artificial Sequence
  Synthetic construct
GYRFTTSW

SEQ ID NO: 11102 - protein, 8 aa, Artificial Sequence
  Synthetic construct
GFTFSDAW

SEQ ID NO: 11103 - protein, 8 aa, Artificial Sequence
  Synthetic construct
GDIFDNNA

SEQ ID NO: 11104 - protein, 10 aa, Artificial Sequence
  Synthetic construct
GFSLATSGVG

SEQ ID NO: 11105 - protein, 8 aa, Artificial Sequence
  Synthetic construct
GFTFSSYA

SEQ ID NO: 11106 - protein, 8 aa, Artificial Sequence
  Synthetic construct
GGTFSSYT

SEQ ID NO: 11107 - protein, 8 aa, Artificial Sequence
  Synthetic construct
GGTFSKSA

SEQ ID NO: 11108 - protein, 8 aa, Artificial Sequence
  Synthetic construct
GFTFSNYA

SEQ ID NO: 11109 - protein, 8 aa, Artificial Sequence
  Synthetic construct
GNTFTNYA

SEQ ID NO: 11110 - protein, 8 aa, Artificial Sequence
  Synthetic construct
GGSFSGYY

SEQ ID NO: 11111 - protein, 8 aa, Artificial Sequence
  Synthetic construct
GGSTSSYY

SEQ ID NO: 11112 - protein, 10 aa, Artificial Sequence
  Synthetic construct
GGSITTGRYF

SEQ ID NO: 11113 - protein, 10 aa, Artificial Sequence
  Synthetic construct
GFSLATSGVG

SEQ ID NO: 11114 - protein, 10 aa, Artificial Sequence
  Synthetic construct
GGSISSGGYY

SEQ ID NO: 11115 - protein, 8 aa, Artificial Sequence
  Synthetic construct
GFTFSSYW

SEQ ID NO: 11116 - protein, 8 aa, Artificial Sequence
  Synthetic construct
GFTFSSYA

SEQ ID NO: 11117 - protein, 8 aa, Artificial Sequence
  Synthetic construct
GYTFTSYY

SEQ ID NO: 11118 - protein, 10 aa, Artificial Sequence
  Synthetic construct
GGSISSVGDY

SEQ ID NO: 11119 - protein, 8 aa, Artificial Sequence
  Synthetic construct
GFTFRTYA

SEQ ID NO: 11120 - protein, 8 aa, Artificial Sequence
  Synthetic construct
GFTFSSYG

SEQ ID NO: 11121 - protein, 8 aa, Artificial Sequence
  Synthetic construct
GFTFSSYG

SEQ ID NO: 11122 - protein, 10 aa, Artificial Sequence
  Synthetic construct
GASIGTSPYN

SEQ ID NO: 11123 - protein, 8 aa, Artificial Sequence
  Synthetic construct
GFTFSSYA

SEQ ID NO: 11124 - protein, 8 aa, Artificial Sequence
  Synthetic construct
GYTFTSYY

SEQ ID NO: 11125 - protein, 8 aa, Artificial Sequence
  Synthetic construct
GFTFNHYA

SEQ ID NO: 11126 - protein, 8 aa, Artificial Sequence
  Synthetic construct
GFTFSSYG

SEQ ID NO: 11127 - protein, 8 aa, Artificial Sequence
  Synthetic construct
GFTFSSYG

SEQ ID NO: 11128 - protein, 8 aa, Artificial Sequence
  Synthetic construct
GFTFSSYG

SEQ ID NO: 11129 - protein, 8 aa, Artificial Sequence
  Synthetic construct
GGSLNGYY

SEQ ID NO: 11130 - protein, 8 aa, Artificial Sequence
  Synthetic construct
GGSISSYY

SEQ ID NO: 11131 - protein, 10 aa, Artificial Sequence
  Synthetic construct
GGSISSSSYY

SEQ ID NO: 11132 - protein, 8 aa, Artificial Sequence
  Synthetic construct
GYTFTSYY

SEQ ID NO: 11133 - protein, 8 aa, Artificial Sequence
  Synthetic construct
GFSLSGYG

SEQ ID NO: 11134 - protein, 10 aa, Artificial Sequence
  Synthetic construct
GGSISSSSYY

SEQ ID NO: 11135 - protein, 8 aa, Artificial Sequence
  Synthetic construct
GYTFTSYA

SEQ ID NO: 11136 - protein, 8 aa, Artificial Sequence
  Synthetic construct
GGSFSGNS

SEQ ID NO: 11137 - protein, 8 aa, Artificial Sequence
  Synthetic construct
GYTFTSYG

SEQ ID NO: 11138 - protein, 8 aa, Artificial Sequence
  Synthetic construct
GYTFNDYY

SEQ ID NO: 11139 - protein, 8 aa, Artificial Sequence
  Synthetic construct
GFTFSDYW

SEQ ID NO: 11140 - protein, 10 aa, Artificial Sequence
  Synthetic construct
GDSISSSNYY

SEQ ID NO: 11141 - protein, 8 aa, Artificial Sequence
  Synthetic construct
EFTFTRDW

SEQ ID NO: 11142 - protein, 8 aa, Artificial Sequence
  Synthetic construct
GFIFNNYG

SEQ ID NO: 11143 - protein, 8 aa, Artificial Sequence
  Synthetic construct
GFTFKTYA

SEQ ID NO: 11144 - protein, 8 aa, Artificial Sequence
  Synthetic construct
GFTFSSYW

SEQ ID NO: 11145 - protein, 8 aa, Artificial Sequence
  Synthetic construct
GFIFTDYY

SEQ ID NO: 11146 - protein, 9 aa, Artificial Sequence
  Synthetic construct
GDSISSSHW

SEQ ID NO: 11147 - protein, 8 aa, Artificial Sequence
  Synthetic construct
GYSFATYW

SEQ ID NO: 11148 - protein, 8 aa, Artificial Sequence
  Synthetic construct
GFTFSSYA

SEQ ID NO: 11149 - protein, 8 aa, Artificial Sequence
  Synthetic construct
GFTFRNYA

SEQ ID NO: 11150 - protein, 8 aa, Artificial Sequence
  Synthetic construct
GFTFSSYW

SEQ ID NO: 11151 - protein, 8 aa, Artificial Sequence
  Synthetic construct
GFTFSSYA

SEQ ID NO: 11152 - protein, 8 aa, Artificial Sequence
  Synthetic construct
GYPFTRDG

SEQ ID NO: 11153 - protein, 10 aa, Artificial Sequence
  Synthetic construct
GGSINNEGFY

SEQ ID NO: 11154 - protein, 8 aa, Artificial Sequence
  Synthetic construct
GFIFSSYG

SEQ ID NO: 11155 - protein, 8 aa, Artificial Sequence
  Synthetic construct
GFIFSDHH

SEQ ID NO: 11156 - protein, 10 aa, Artificial Sequence
  Synthetic construct
GFSLATSGVG

SEQ ID NO: 11157 - protein, 10 aa, Artificial Sequence
  Synthetic construct
GTSIGSGTYF

SEQ ID NO: 11158 - protein, 8 aa, Artificial Sequence
  Synthetic construct
GFTVSSNY

SEQ ID NO: 11159 - protein, 10 aa, Artificial Sequence
  Synthetic construct
GGSISSGSYY

SEQ ID NO: 11160 - protein, 10 aa, Artificial Sequence
  Synthetic construct
GGSISSGSYY

SEQ ID NO: 11161 - protein, 8 aa, Artificial Sequence
  Synthetic construct
GFTFSTYA

SEQ ID NO: 11162 - protein, 8 aa, Artificial Sequence
  Synthetic construct
GFTFSSYA

SEQ ID NO: 11163 - protein, 8 aa, Artificial Sequence
  Synthetic construct
GFTFRDYA

SEQ ID NO: 11164 - protein, 8 aa, Artificial Sequence
  Synthetic construct
GFTFSNAW

SEQ ID NO: 11165 - protein, 8 aa, Artificial Sequence
  Synthetic construct
GFTFRSHW

SEQ ID NO: 11166 - protein, 8 aa, Artificial Sequence
  Synthetic construct
GFTVSSNY

SEQ ID NO: 11167 - protein, 8 aa, Artificial Sequence
  Synthetic construct
GYTFATYG

SEQ ID NO: 11168 - protein, 8 aa, Artificial Sequence
  Synthetic construct
GFTVSSNY

SEQ ID NO: 11169 - protein, 8 aa, Artificial Sequence
  Synthetic construct
GFTFSSYG

SEQ ID NO: 11170 - protein, 8 aa, Artificial Sequence
  Synthetic construct
GFAFGNYA

SEQ ID NO: 11171 - protein, 8 aa, Artificial Sequence
  Synthetic construct
GYSFTTYW

SEQ ID NO: 11172 - protein, 8 aa, Artificial Sequence
  Synthetic construct
GFTFNNYW

SEQ ID NO: 11173 - protein, 8 aa, Artificial Sequence
  Synthetic construct
GLTFRSSG

SEQ ID NO: 11174 - protein, 10 aa, Artificial Sequence
  Synthetic construct
GGSISSGGYS

SEQ ID NO: 11175 - protein, 8 aa, Artificial Sequence
  Synthetic construct
GFTFSSYS

SEQ ID NO: 11176 - protein, 8 aa, Artificial Sequence
  Synthetic construct
GYSFATYW

SEQ ID NO: 11177 - protein, 8 aa, Artificial Sequence
  Synthetic construct
GFTFSSYW

SEQ ID NO: 11178 - protein, 8 aa, Artificial Sequence
  Synthetic construct
GYTFTSYY

SEQ ID NO: 11179 - protein, 10 aa, Artificial Sequence
  Synthetic construct
GGSIGSSSYH

SEQ ID NO: 11180 - protein, 10 aa, Artificial Sequence
  Synthetic construct
GFSLGTTGMC

SEQ ID NO: 11181 - protein, 8 aa, Artificial Sequence
  Synthetic construct
GGSFSGYY

SEQ ID NO: 11182 - protein, 8 aa, Artificial Sequence
  Synthetic construct
GFTVSSNQ

SEQ ID NO: 11183 - protein, 10 aa, Artificial Sequence
  Synthetic construct
GASISNNIYY

SEQ ID NO: 11184 - protein, 8 aa, Artificial Sequence
  Synthetic construct
GFTFSSYW

SEQ ID NO: 11185 - protein, 8 aa, Artificial Sequence
  Synthetic construct
GGSISSYY

SEQ ID NO: 11186 - protein, 8 aa, Artificial Sequence
  Synthetic construct
GYPFTRDG

SEQ ID NO: 11187 - protein, 8 aa, Artificial Sequence
  Synthetic construct
GFTFSSYA

SEQ ID NO: 11188 - protein, 8 aa, Artificial Sequence
  Synthetic construct
GFTFSDSY

SEQ ID NO: 11189 - protein, 8 aa, Artificial Sequence
  Synthetic construct
GFTFSKTY

SEQ ID NO: 11190 - protein, 8 aa, Artificial Sequence
  Synthetic construct
GFTFSNYN

SEQ ID NO: 11191 - protein, 8 aa, Artificial Sequence
  Synthetic construct
GFIFSGDY

SEQ ID NO: 11192 - protein, 8 aa, Artificial Sequence
  Synthetic construct
GGSFSGYS

SEQ ID NO: 11193 - protein, 8 aa, Artificial Sequence
  Synthetic construct
GFSFSDYN

SEQ ID NO: 11194 - protein, 10 aa, Artificial Sequence
  Synthetic construct
GASITSSDYY

SEQ ID NO: 11195 - protein, 8 aa, Artificial Sequence
  Synthetic construct
GFTFSSYA

SEQ ID NO: 11196 - protein, 10 aa, Artificial Sequence
  Synthetic construct
GGSINSGSHY

SEQ ID NO: 11197 - protein, 8 aa, Artificial Sequence
  Synthetic construct
GFTFDSYS

SEQ ID NO: 11198 - protein, 8 aa, Artificial Sequence
  Synthetic construct
GYTFTSYA

SEQ ID NO: 11199 - protein, 8 aa, Artificial Sequence
  Synthetic construct
GGTFSSYA

SEQ ID NO: 11200 - protein, 8 aa, Artificial Sequence
  Synthetic construct
GFTFSNYG

SEQ ID NO: 11201 - protein, 8 aa, Artificial Sequence
  Synthetic construct
GFTFSSYW

SEQ ID NO: 11202 - protein, 8 aa, Artificial Sequence
  Synthetic construct
GFTFSSYF

SEQ ID NO: 11203 - protein, 8 aa, Artificial Sequence
  Synthetic construct
GFIFSSFD

SEQ ID NO: 11204 - protein, 8 aa, Artificial Sequence
  Synthetic construct
GGYFSGYY

SEQ ID NO: 11205 - protein, 8 aa, Artificial Sequence
  Synthetic construct
GFTFSSYG

SEQ ID NO: 11206 - protein, 8 aa, Artificial Sequence
  Synthetic construct
GFTFSRYA

SEQ ID NO: 11207 - protein, 8 aa, Artificial Sequence
  Synthetic construct
GFTFSNYA

SEQ ID NO: 11208 - protein, 8 aa, Artificial Sequence
  Synthetic construct
GFTFSGSA

SEQ ID NO: 11209 - protein, 8 aa, Artificial Sequence
  Synthetic construct
GYTFTGYY

SEQ ID NO: 11210 - protein, 8 aa, Artificial Sequence
  Synthetic construct
GVSFRNYW

SEQ ID NO: 11211 - protein, 8 aa, Artificial Sequence
  Synthetic construct
GYPFTRDG

SEQ ID NO: 11212 - protein, 8 aa, Artificial Sequence
  Synthetic construct
GFTVSSNY

SEQ ID NO: 11213 - protein, 8 aa, Artificial Sequence
  Synthetic construct
GGTFSNYS

SEQ ID NO: 11214 - protein, 8 aa, Artificial Sequence
  Synthetic construct
GFTFSSHW

SEQ ID NO: 11215 - protein, 8 aa, Artificial Sequence
  Synthetic construct
GYSFPTYW

SEQ ID NO: 11216 - protein, 8 aa, Artificial Sequence
  Synthetic construct
GYTFTSYG

SEQ ID NO: 11217 - protein, 8 aa, Artificial Sequence
  Synthetic construct
GYSFATYW

SEQ ID NO: 11218 - protein, 10 aa, Artificial Sequence
  Synthetic construct
GGSISSSSYY

SEQ ID NO: 11219 - protein, 8 aa, Artificial Sequence
  Synthetic construct
GFTFSSYS

SEQ ID NO: 11220 - protein, 8 aa, Artificial Sequence
  Synthetic construct
GYTVSSNY

SEQ ID NO: 11221 - protein, 8 aa, Artificial Sequence
  Synthetic construct
GYSFATYW

SEQ ID NO: 11222 - protein, 8 aa, Artificial Sequence
  Synthetic construct
GFTFSISS

SEQ ID NO: 11223 - protein, 10 aa, Artificial Sequence
  Synthetic construct
GVSFTTPGVN

SEQ ID NO: 11224 - protein, 8 aa, Artificial Sequence
  Synthetic construct
GFTFSSYS

SEQ ID NO: 11225 - protein, 8 aa, Artificial Sequence
  Synthetic construct
GFPFSTDA

SEQ ID NO: 11226 - protein, 8 aa, Artificial Sequence
  Synthetic construct
GFTVSSNY

SEQ ID NO: 11227 - protein, 10 aa, Artificial Sequence
  Synthetic construct
GGSISSGNYC

SEQ ID NO: 11228 - protein, 8 aa, Artificial Sequence
  Synthetic construct
GFTFSSYS

SEQ ID NO: 11229 - protein, 8 aa, Artificial Sequence
  Synthetic construct
GFTFSRYW

SEQ ID NO: 11230 - protein, 8 aa, Artificial Sequence
  Synthetic construct
GYSFATYW

SEQ ID NO: 11231 - protein, 8 aa, Artificial Sequence
  Synthetic construct
GFTFSSYA

SEQ ID NO: 11232 - protein, 8 aa, Artificial Sequence
  Synthetic construct
GYSFATYW

SEQ ID NO: 11233 - protein, 8 aa, Artificial Sequence
  Synthetic construct
GFTVSSNY

SEQ ID NO: 11234 - protein, 8 aa, Artificial Sequence
  Synthetic construct
GFSFRDYA

SEQ ID NO: 11235 - protein, 8 aa, Artificial Sequence
  Synthetic construct
GYTFTTYA

SEQ ID NO: 11236 - protein, 8 aa, Artificial Sequence
  Synthetic construct
GYNFTSYG

SEQ ID NO: 11237 - protein, 8 aa, Artificial Sequence
  Synthetic construct
GFTFSSYA

SEQ ID NO: 11238 - protein, 8 aa, Artificial Sequence
  Synthetic construct
GYSFATYW

SEQ ID NO: 11239 - protein, 9 aa, Artificial Sequence
  Synthetic construct
GGSVTTGHY

SEQ ID NO: 11240 - protein, 8 aa, Artificial Sequence
  Synthetic construct
GFTFSGSA

SEQ ID NO: 11241 - protein, 8 aa, Artificial Sequence
  Synthetic construct
GFAFGNYA

SEQ ID NO: 11242 - protein, 8 aa, Artificial Sequence
  Synthetic construct
GNTFTSYW

SEQ ID NO: 11243 - protein, 8 aa, Artificial Sequence
  Synthetic construct
GDSISSYY

SEQ ID NO: 11244 - protein, 8 aa, Artificial Sequence
  Synthetic construct
GYSFSSYW

SEQ ID NO: 11245 - protein, 8 aa, Artificial Sequence
  Synthetic construct
GVNFRSYS

SEQ ID NO: 11246 - protein, 10 aa, Artificial Sequence
  Synthetic construct
GASIDSSQDY

SEQ ID NO: 11247 - protein, 8 aa, Artificial Sequence
  Synthetic construct
GGTFNSYG

SEQ ID NO: 11248 - protein, 9 aa, Artificial Sequence
  Synthetic construct
GGSISSSNW

SEQ ID NO: 11249 - protein, 8 aa, Artificial Sequence
  Synthetic construct
GYPFTRDG

SEQ ID NO: 11250 - protein, 10 aa, Artificial Sequence
  Synthetic construct
GGSVSSGTYY

SEQ ID NO: 11251 - protein, 8 aa, Artificial Sequence
  Synthetic construct
GYTFTGYY

SEQ ID NO: 11252 - protein, 8 aa, Artificial Sequence
  Synthetic construct
GYTFTSFY

SEQ ID NO: 11253 - protein, 8 aa, Artificial Sequence
  Synthetic construct
GYSFTSYW

SEQ ID NO: 11254 - protein, 8 aa, Artificial Sequence
  Synthetic construct
GYSFTNYW

SEQ ID NO: 11255 - protein, 8 aa, Artificial Sequence
  Synthetic construct
GYNFISSW

SEQ ID NO: 11256 - protein, 8 aa, Artificial Sequence
  Synthetic construct
GVTYAADA

SEQ ID NO: 11257 - protein, 8 aa, Artificial Sequence
  Synthetic construct
GFVFEDHA

SEQ ID NO: 11258 - protein, 8 aa, Artificial Sequence
  Synthetic construct
GFTFSSYA

SEQ ID NO: 11259 - protein, 8 aa, Artificial Sequence
  Synthetic construct
GYLFTAHS

SEQ ID NO: 11260 - protein, 8 aa, Artificial Sequence
  Synthetic construct
GFAFGNYA

SEQ ID NO: 11261 - protein, 8 aa, Artificial Sequence
  Synthetic construct
GFTFSTYA

SEQ ID NO: 11262 - protein, 8 aa, Artificial Sequence
  Synthetic construct
GDSFSNYY

SEQ ID NO: 11263 - protein, 9 aa, Artificial Sequence
  Synthetic construct
GGSISTNYY

SEQ ID NO: 11264 - protein, 8 aa, Artificial Sequence
  Synthetic construct
GDTFTSNG

SEQ ID NO: 11265 - protein, 8 aa, Artificial Sequence
  Synthetic construct
GFSFSNYG

SEQ ID NO: 11266 - protein, 8 aa, Artificial Sequence
  Synthetic construct
GYTFTGYY

SEQ ID NO: 11267 - protein, 8 aa, Artificial Sequence
  Synthetic construct
GFTVSSNY

SEQ ID NO: 11268 - protein, 8 aa, Artificial Sequence
  Synthetic construct
GGTFSSYA

SEQ ID NO: 11269 - protein, 8 aa, Artificial Sequence
  Synthetic construct
GFTFSSYA

SEQ ID NO: 11270 - protein, 8 aa, Artificial Sequence
  Synthetic construct
GFTFRSYG

SEQ ID NO: 11271 - protein, 8 aa, Artificial Sequence
  Synthetic construct
GYTFTGYY

SEQ ID NO: 11272 - protein, 8 aa, Artificial Sequence
  Synthetic construct
GFTFSDHY

SEQ ID NO: 11273 - protein, 8 aa, Artificial Sequence
  Synthetic construct
GYTFTGYY

SEQ ID NO: 11274 - protein, 8 aa, Artificial Sequence
  Synthetic construct
GFTFSSYW

SEQ ID NO: 11275 - protein, 8 aa, Artificial Sequence
  Synthetic construct
GVTFTSYA

SEQ ID NO: 11276 - protein, 8 aa, Artificial Sequence
  Synthetic construct
GGSISSYY

SEQ ID NO: 11277 - protein, 8 aa, Artificial Sequence
  Synthetic construct
GYTFTSYG

SEQ ID NO: 11278 - protein, 8 aa, Artificial Sequence
  Synthetic construct
GYTFTNYG

SEQ ID NO: 11279 - protein, 10 aa, Artificial Sequence
  Synthetic construct
GFSLATSGVG

SEQ ID NO: 11280 - protein, 8 aa, Artificial Sequence
  Synthetic construct
GFTFSSYD

SEQ ID NO: 11281 - protein, 10 aa, Artificial Sequence
  Synthetic construct
GGSISSGSYY

SEQ ID NO: 11282 - protein, 8 aa, Artificial Sequence
  Synthetic construct
GFTFSNTW

SEQ ID NO: 11283 - protein, 8 aa, Artificial Sequence
  Synthetic construct
GSNVRNND

SEQ ID NO: 11284 - protein, 10 aa, Artificial Sequence
  Synthetic construct
GGSITTGGYY

SEQ ID NO: 11285 - protein, 8 aa, Artificial Sequence
  Synthetic construct
GYTFTSYA

SEQ ID NO: 11286 - protein, 8 aa, Artificial Sequence
  Synthetic construct
GFTFSSYA

SEQ ID NO: 11287 - protein, 8 aa, Artificial Sequence
  Synthetic construct
GFIMSSYW

SEQ ID NO: 11288 - protein, 8 aa, Artificial Sequence
  Synthetic construct
GFTFSDYG

SEQ ID NO: 11289 - protein, 10 aa, Artificial Sequence
  Synthetic construct
GDSVSSTSAA

SEQ ID NO: 11290 - protein, 8 aa, Artificial Sequence
  Synthetic construct
GFTFSSYS

SEQ ID NO: 11291 - protein, 10 aa, Artificial Sequence
  Synthetic construct
GDSIGYGGYY

SEQ ID NO: 11292 - protein, 8 aa, Artificial Sequence
  Synthetic construct
GYSFTSYW

SEQ ID NO: 11293 - protein, 8 aa, Artificial Sequence
  Synthetic construct
GFTFRSSA

SEQ ID NO: 11294 - protein, 10 aa, Artificial Sequence
  Synthetic construct
GGSIRNSNYY

SEQ ID NO: 11295 - protein, 10 aa, Artificial Sequence
  Synthetic construct
GGSISSSSYY

SEQ ID NO: 11296 - protein, 8 aa, Artificial Sequence
  Synthetic construct
GFTFRSCA

SEQ ID NO: 11297 - protein, 10 aa, Artificial Sequence
  Synthetic construct
GGSISSGSYY

SEQ ID NO: 11298 - protein, 8 aa, Artificial Sequence
  Synthetic construct
GYTFTGYY

SEQ ID NO: 11299 - protein, 8 aa, Artificial Sequence
  Synthetic construct
GFTFSSYS

SEQ ID NO: 11300 - protein, 10 aa, Artificial Sequence
  Synthetic construct
GGSVYSSNYC

SEQ ID NO: 11301 - protein, 8 aa, Artificial Sequence
  Synthetic construct
GFTFSDYY

SEQ ID NO: 11302 - protein, 8 aa, Artificial Sequence
  Synthetic construct
GFTFDSYW

SEQ ID NO: 11303 - protein, 8 aa, Artificial Sequence
  Synthetic construct
RFTFSDFW

SEQ ID NO: 11304 - protein, 8 aa, Artificial Sequence
  Synthetic construct
GFTFSSYA

SEQ ID NO: 11305 - protein, 8 aa, Artificial Sequence
  Synthetic construct
GFTFSSYS

SEQ ID NO: 11306 - protein, 8 aa, Artificial Sequence
  Synthetic construct
GYSFATYW

SEQ ID NO: 11307 - protein, 8 aa, Artificial Sequence
  Synthetic construct
ESTFRIHN

SEQ ID NO: 11308 - protein, 8 aa, Artificial Sequence
  Synthetic construct
GYTFTSYY

SEQ ID NO: 11309 - protein, 8 aa, Artificial Sequence
  Synthetic construct
GFTFSSHW

SEQ ID NO: 11310 - protein, 8 aa, Artificial Sequence
  Synthetic construct
GFTVSSNY

SEQ ID NO: 11311 - protein, 8 aa, Artificial Sequence
  Synthetic construct
GFTFSNYA

SEQ ID NO: 11312 - protein, 8 aa, Artificial Sequence
  Synthetic construct
GGLLSSYW

SEQ ID NO: 11313 - protein, 8 aa, Artificial Sequence
  Synthetic construct
GFTFSSYG

SEQ ID NO: 11314 - protein, 8 aa, Artificial Sequence
  Synthetic construct
GYTFTDYY

SEQ ID NO: 11315 - protein, 8 aa, Artificial Sequence
  Synthetic construct
GFTFGDYA

SEQ ID NO: 11316 - protein, 8 aa, Artificial Sequence
  Synthetic construct
GFTFSSYS

SEQ ID NO: 11317 - protein, 8 aa, Artificial Sequence
  Synthetic construct
GYTFTDYY

SEQ ID NO: 11318 - protein, 8 aa, Artificial Sequence
  Synthetic construct
GFTFSSYG

SEQ ID NO: 11319 - protein, 8 aa, Artificial Sequence
  Synthetic construct
GYSFTSYW

SEQ ID NO: 11320 - protein, 10 aa, Artificial Sequence
  Synthetic construct
GGSISSGSYY

SEQ ID NO: 11321 - protein, 8 aa, Artificial Sequence
  Synthetic construct
GFTFSDYG

SEQ ID NO: 11322 - protein, 8 aa, Artificial Sequence
  Synthetic construct
GFTFSIYT

SEQ ID NO: 11323 - protein, 10 aa, Artificial Sequence
  Synthetic construct
GGSISSSSYY

SEQ ID NO: 11324 - protein, 8 aa, Artificial Sequence
  Synthetic construct
GFTFTSYA

SEQ ID NO: 11325 - protein, 10 aa, Artificial Sequence
  Synthetic construct
GGSISSGGYS

SEQ ID NO: 11326 - protein, 8 aa, Artificial Sequence
  Synthetic construct
GYSFATYW

SEQ ID NO: 11327 - protein, 8 aa, Artificial Sequence
  Synthetic construct
GVNFRSYS

SEQ ID NO: 11328 - protein, 8 aa, Artificial Sequence
  Synthetic construct
GYSFATYW

SEQ ID NO: 11329 - protein, 8 aa, Artificial Sequence
  Synthetic construct
GFTFSSYA

SEQ ID NO: 11330 - protein, 8 aa, Artificial Sequence
  Synthetic construct
GFTFGDYS

SEQ ID NO: 11331 - protein, 8 aa, Artificial Sequence
  Synthetic construct
GYSFSRNW

SEQ ID NO: 11332 - protein, 10 aa, Artificial Sequence
  Synthetic construct
GASISSDYFY

SEQ ID NO: 11333 - protein, 8 aa, Artificial Sequence
  Synthetic construct
GASMFSHY

SEQ ID NO: 11334 - protein, 8 aa, Artificial Sequence
  Synthetic construct
GFTFSTYA

SEQ ID NO: 11335 - protein, 10 aa, Artificial Sequence
  Synthetic construct
GGSISRGGYY

SEQ ID NO: 11336 - protein, 8 aa, Artificial Sequence
  Synthetic construct
GFTFVDFF

SEQ ID NO: 11337 - protein, 8 aa, Artificial Sequence
  Synthetic construct
GGSFSGYY

SEQ ID NO: 11338 - protein, 8 aa, Artificial Sequence
  Synthetic construct
GATFSSYA

SEQ ID NO: 11339 - protein, 8 aa, Artificial Sequence
  Synthetic construct
GGSFSGYY

SEQ ID NO: 11340 - protein, 8 aa, Artificial Sequence
  Synthetic construct
GFTFSRYG

SEQ ID NO: 11341 - protein, 8 aa, Artificial Sequence
  Synthetic construct
GFLFSDYI

SEQ ID NO: 11342 - protein, 8 aa, Artificial Sequence
  Synthetic construct
GYRFTFYY

SEQ ID NO: 11343 - protein, 8 aa, Artificial Sequence
  Synthetic construct
GFTFSTYS

SEQ ID NO: 11344 - protein, 10 aa, Artificial Sequence
  Synthetic construct
GFSLSTSGVG

SEQ ID NO: 11345 - protein, 10 aa, Artificial Sequence
  Synthetic construct
GVSITGAGYS

SEQ ID NO: 11346 - protein, 8 aa, Artificial Sequence
  Synthetic construct
GYTFTGYY

SEQ ID NO: 11347 - protein, 8 aa, Artificial Sequence
  Synthetic construct
GFTFRNHA

SEQ ID NO: 11348 - protein, 8 aa, Artificial Sequence
  Synthetic construct
GFTFSSYG

SEQ ID NO: 11349 - protein, 8 aa, Artificial Sequence
  Synthetic construct
GITLTDIG

SEQ ID NO: 11350 - protein, 8 aa, Artificial Sequence
  Synthetic construct
GFTFSSYA

SEQ ID NO: 11351 - protein, 8 aa, Artificial Sequence
  Synthetic construct
GFTFSSYS

SEQ ID NO: 11352 - protein, 10 aa, Artificial Sequence
  Synthetic construct
GGSIRSGSYY

SEQ ID NO: 11353 - protein, 8 aa, Artificial Sequence
  Synthetic construct
GYSFITYG

SEQ ID NO: 11354 - protein, 8 aa, Artificial Sequence
  Synthetic construct
GYSFATYW

SEQ ID NO: 11355 - protein, 8 aa, Artificial Sequence
  Synthetic construct
GYTFTSYA

SEQ ID NO: 11356 - protein, 8 aa, Artificial Sequence
  Synthetic construct
GFTFSSYA

SEQ ID NO: 11357 - protein, 8 aa, Artificial Sequence
  Synthetic construct
GFTFSSYW

SEQ ID NO: 11358 - protein, 8 aa, Artificial Sequence
  Synthetic construct
GFTFDDYT

SEQ ID NO: 11359 - protein, 8 aa, Artificial Sequence
  Synthetic construct
GYSFATYW

SEQ ID NO: 11360 - protein, 8 aa, Artificial Sequence
  Synthetic construct
GGAFINSA

SEQ ID NO: 11361 - protein, 8 aa, Artificial Sequence
  Synthetic construct
GYSFATYW

SEQ ID NO: 11362 - protein, 8 aa, Artificial Sequence
  Synthetic construct
GFTFNKYW

SEQ ID NO: 11363 - protein, 10 aa, Artificial Sequence
  Synthetic construct
GFSLATSGVG

SEQ ID NO: 11364 - protein, 8 aa, Artificial Sequence
  Synthetic construct
GFTFSDSW

SEQ ID NO: 11365 - protein, 8 aa, Artificial Sequence
  Synthetic construct
GFTFSSYA

SEQ ID NO: 11366 - protein, 8 aa, Artificial Sequence
  Synthetic construct
GFTFSRYG

SEQ ID NO: 11367 - protein, 10 aa, Artificial Sequence
  Synthetic construct
GGSISGGSYY

SEQ ID NO: 11368 - protein, 8 aa, Artificial Sequence
  Synthetic construct
GFTFSSYW

SEQ ID NO: 11369 - protein, 8 aa, Artificial Sequence
  Synthetic construct
GFTFSSYS

SEQ ID NO: 11370 - protein, 8 aa, Artificial Sequence
  Synthetic construct
GFTFSSYS

SEQ ID NO: 11371 - protein, 8 aa, Artificial Sequence
  Synthetic construct
GFTFSSYG

SEQ ID NO: 11372 - protein, 8 aa, Artificial Sequence
  Synthetic construct
GFTFTTYP

SEQ ID NO: 11373 - protein, 8 aa, Artificial Sequence
  Synthetic construct
EFTLSYYY

SEQ ID NO: 11374 - protein, 8 aa, Artificial Sequence
  Synthetic construct
GFTFSSYA

SEQ ID NO: 11375 - protein, 10 aa, Artificial Sequence
  Synthetic construct
GNSIRDDHYY

SEQ ID NO: 11376 - protein, 8 aa, Artificial Sequence
  Synthetic construct
GYTFTGYY

SEQ ID NO: 11377 - protein, 8 aa, Artificial Sequence
  Synthetic construct
GFTFENYW

SEQ ID NO: 11378 - protein, 10 aa, Artificial Sequence
  Synthetic construct
GASISGTYHY

SEQ ID NO: 11379 - protein, 8 aa, Artificial Sequence
  Synthetic construct
GFAFGNYA

SEQ ID NO: 11380 - protein, 8 aa, Artificial Sequence
  Synthetic construct
GFTFSRHW

SEQ ID NO: 11381 - protein, 8 aa, Artificial Sequence
  Synthetic construct
GFPFNTYS

SEQ ID NO: 11382 - protein, 8 aa, Artificial Sequence
  Synthetic construct
GFTFSSYA

SEQ ID NO: 11383 - protein, 8 aa, Artificial Sequence
  Synthetic construct
GYSFATYW

SEQ ID NO: 11384 - protein, 8 aa, Artificial Sequence
  Synthetic construct
GFTFSSYA

SEQ ID NO: 11385 - protein, 8 aa, Artificial Sequence
  Synthetic construct
GFDFRTYG

SEQ ID NO: 11386 - protein, 8 aa, Artificial Sequence
  Synthetic construct
GLSLSSYS

SEQ ID NO: 11387 - protein, 8 aa, Artificial Sequence
  Synthetic construct
GYTFSDYG

SEQ ID NO: 11388 - protein, 8 aa, Artificial Sequence
  Synthetic construct
GFTFDNYA

SEQ ID NO: 11389 - protein, 8 aa, Artificial Sequence
  Synthetic construct
GFTFSSYG

SEQ ID NO: 11390 - protein, 10 aa, Artificial Sequence
  Synthetic construct
GGSISSSSYY

SEQ ID NO: 11391 - protein, 8 aa, Artificial Sequence
  Synthetic construct
GFSFSDHY

SEQ ID NO: 11392 - protein, 8 aa, Artificial Sequence
  Synthetic construct
GFTFGDYA

SEQ ID NO: 11393 - protein, 10 aa, Artificial Sequence
  Synthetic construct
GGSISSGSYY

SEQ ID NO: 11394 - protein, 8 aa, Artificial Sequence
  Synthetic construct
GFTFSSYA

SEQ ID NO: 11395 - protein, 8 aa, Artificial Sequence
  Synthetic construct
GFTFSSYA

SEQ ID NO: 11396 - protein, 8 aa, Artificial Sequence
  Synthetic construct
GFEFSRYG

SEQ ID NO: 11397 - protein, 8 aa, Artificial Sequence
  Synthetic construct
GFTFSSYK

SEQ ID NO: 11398 - protein, 10 aa, Artificial Sequence
  Synthetic construct
GGSISSGSYY

SEQ ID NO: 11399 - protein, 8 aa, Artificial Sequence
  Synthetic construct
GFTVSSNY

SEQ ID NO: 11400 - protein, 8 aa, Artificial Sequence
  Synthetic construct
GGSISSYY

SEQ ID NO: 11401 - protein, 8 aa, Artificial Sequence
  Synthetic construct
LFTFSNYD

SEQ ID NO: 11402 - protein, 8 aa, Artificial Sequence
  Synthetic construct
GFTFNNYG

SEQ ID NO: 11403 - protein, 10 aa, Artificial Sequence
  Synthetic construct
GGSFDDGDHF

SEQ ID NO: 11404 - protein, 8 aa, Artificial Sequence
  Synthetic construct
GYTFTSYG

SEQ ID NO: 11405 - protein, 8 aa, Artificial Sequence
  Synthetic construct
GFTFSSYS

SEQ ID NO: 11406 - protein, 8 aa, Artificial Sequence
  Synthetic construct
GFTFRTYA

SEQ ID NO: 11407 - protein, 8 aa, Artificial Sequence
  Synthetic construct
GFTFSSYA

SEQ ID NO: 11408 - protein, 10 aa, Artificial Sequence
  Synthetic construct
GGSISSGSYY

SEQ ID NO: 11409 - protein, 10 aa, Artificial Sequence
  Synthetic construct
GGSMNNDDYY

SEQ ID NO: 11410 - protein, 8 aa, Artificial Sequence
  Synthetic construct
GFTFSSYA

SEQ ID NO: 11411 - protein, 8 aa, Artificial Sequence
  Synthetic construct
GYNFNNYW

SEQ ID NO: 11412 - protein, 8 aa, Artificial Sequence
  Synthetic construct
GFTFSAYA

SEQ ID NO: 11413 - protein, 10 aa, Artificial Sequence
  Synthetic construct
GGSISSGGYS

SEQ ID NO: 11414 - protein, 10 aa, Artificial Sequence
  Synthetic construct
GGSISSTTDY

SEQ ID NO: 11415 - protein, 10 aa, Artificial Sequence
  Synthetic construct
GGSISSSSYY

SEQ ID NO: 11416 - protein, 8 aa, Artificial Sequence
  Synthetic construct
GFTFSAYA

SEQ ID NO: 11417 - protein, 8 aa, Artificial Sequence
  Synthetic construct
DFILSTYG

SEQ ID NO: 11418 - protein, 8 aa, Artificial Sequence
  Synthetic construct
GGSISSYY

SEQ ID NO: 11419 - protein, 8 aa, Artificial Sequence
  Synthetic construct
RFTFSSYW

SEQ ID NO: 11420 - protein, 8 aa, Artificial Sequence
  Synthetic construct
GFTFGDYA

SEQ ID NO: 11421 - protein, 10 aa, Artificial Sequence
  Synthetic construct
GGSINNGNYY

SEQ ID NO: 11422 - protein, 10 aa, Artificial Sequence
  Synthetic construct
GDSISSGGYY

SEQ ID NO: 11423 - protein, 8 aa, Artificial Sequence
  Synthetic construct
GYTFTSYG

SEQ ID NO: 11424 - protein, 8 aa, Artificial Sequence
  Synthetic construct
GGSFSGYY

SEQ ID NO: 11425 - protein, 8 aa, Artificial Sequence
  Synthetic construct
GYTFTGYY

SEQ ID NO: 11426 - protein, 10 aa, Artificial Sequence
  Synthetic construct
GGSISSSSYY

SEQ ID NO: 11427 - protein, 8 aa, Artificial Sequence
  Synthetic construct
GFTFSSYS

SEQ ID NO: 11428 - protein, 8 aa, Artificial Sequence
  Synthetic construct
EFIDSFTY

SEQ ID NO: 11429 - protein, 8 aa, Artificial Sequence
  Synthetic construct
GYTFTSYA

SEQ ID NO: 11430 - protein, 8 aa, Artificial Sequence
  Synthetic construct
GYPFTRDG

SEQ ID NO: 11431 - protein, 8 aa, Artificial Sequence
  Synthetic construct
GYTFTDYY

SEQ ID NO: 11432 - protein, 8 aa, Artificial Sequence
  Synthetic construct
GYSFTSYW

SEQ ID NO: 11433 - protein, 8 aa, Artificial Sequence
  Synthetic construct
GFTFSTHA

SEQ ID NO: 11434 - protein, 8 aa, Artificial Sequence
  Synthetic construct
GFTVSSNY

SEQ ID NO: 11435 - protein, 8 aa, Artificial Sequence
  Synthetic construct
GGSISSYY

SEQ ID NO: 11436 - protein, 8 aa, Artificial Sequence
  Synthetic construct
GFTFNSYA

SEQ ID NO: 11437 - protein, 8 aa, Artificial Sequence
  Synthetic construct
GFTFSSYA

SEQ ID NO: 11438 - protein, 8 aa, Artificial Sequence
  Synthetic construct
GFTFSSYA

SEQ ID NO: 11439 - protein, 8 aa, Artificial Sequence
  Synthetic construct
GFTFADYA

SEQ ID NO: 11440 - protein, 8 aa, Artificial Sequence
  Synthetic construct
GYSFATYW

SEQ ID NO: 11441 - protein, 8 aa, Artificial Sequence
  Synthetic construct
GFTFSSYA

SEQ ID NO: 11442 - protein, 8 aa, Artificial Sequence
  Synthetic construct
GGSISGNF

SEQ ID NO: 11443 - protein, 8 aa, Artificial Sequence
  Synthetic construct
GFTFSSYA

SEQ ID NO: 11444 - protein, 8 aa, Artificial Sequence
  Synthetic construct
GYTFTSYY

SEQ ID NO: 11445 - protein, 8 aa, Artificial Sequence
  Synthetic construct
GFTFGDYA

SEQ ID NO: 11446 - protein, 10 aa, Artificial Sequence
  Synthetic construct
GFSLSTSGVG

SEQ ID NO: 11447 - protein, 8 aa, Artificial Sequence
  Synthetic construct
GYTFTNYA

SEQ ID NO: 11448 - protein, 10 aa, Artificial Sequence
  Synthetic construct
GGSITTGGYY

SEQ ID NO: 11449 - protein, 8 aa, Artificial Sequence
  Synthetic construct
GFTFSNAW

SEQ ID NO: 11450 - protein, 8 aa, Artificial Sequence
  Synthetic construct
GFGFTSYW

SEQ ID NO: 11451 - protein, 8 aa, Artificial Sequence
  Synthetic construct
GFTFSSYG

SEQ ID NO: 11452 - protein, 10 aa, Artificial Sequence
  Synthetic construct
GVSISSSSFF

SEQ ID NO: 11453 - protein, 8 aa, Artificial Sequence
  Synthetic construct
GVSITNYN

SEQ ID NO: 11454 - protein, 8 aa, Artificial Sequence
  Synthetic construct
GFTFTNYW

SEQ ID NO: 11455 - protein, 10 aa, Artificial Sequence
  Synthetic construct
GGSISSGSYY

SEQ ID NO: 11456 - protein, 8 aa, Artificial Sequence
  Synthetic construct
GFSFGTYA

SEQ ID NO: 11457 - protein, 8 aa, Artificial Sequence
  Synthetic construct
GFTFSGSA

SEQ ID NO: 11458 - protein, 8 aa, Artificial Sequence
  Synthetic construct
GYNFESFW

SEQ ID NO: 11459 - protein, 8 aa, Artificial Sequence
  Synthetic construct
GFTFSNYW

SEQ ID NO: 11460 - protein, 8 aa, Artificial Sequence
  Synthetic construct
GDSINSYY

SEQ ID NO: 11461 - protein, 8 aa, Artificial Sequence
  Synthetic construct
GYTFTSYG

SEQ ID NO: 11462 - protein, 10 aa, Artificial Sequence
  Synthetic construct
GGSITTGGYY

SEQ ID NO: 11463 - protein, 8 aa, Artificial Sequence
  Synthetic construct
GFTFSNAW

SEQ ID NO: 11464 - protein, 8 aa, Artificial Sequence
  Synthetic construct
GFTFSSYA

SEQ ID NO: 11465 - protein, 8 aa, Artificial Sequence
  Synthetic construct
GYSFTSYW

SEQ ID NO: 11466 - protein, 8 aa, Artificial Sequence
  Synthetic construct
GFTFSSYS

SEQ ID NO: 11467 - protein, 8 aa, Artificial Sequence
  Synthetic construct
GFTFSSCS

SEQ ID NO: 11468 - protein, 10 aa, Artificial Sequence
  Synthetic construct
GGSISSSSNY

SEQ ID NO: 11469 - protein, 8 aa, Artificial Sequence
  Synthetic construct
GFTFDDYT

SEQ ID NO: 11470 - protein, 8 aa, Artificial Sequence
  Synthetic construct
GFTFSSYA

SEQ ID NO: 11471 - protein, 8 aa, Artificial Sequence
  Synthetic construct
GFTSSNYG

SEQ ID NO: 11472 - protein, 8 aa, Artificial Sequence
  Synthetic construct
GFTFSSYA

SEQ ID NO: 11473 - protein, 8 aa, Artificial Sequence
  Synthetic construct
GYRFITYW

SEQ ID NO: 11474 - protein, 8 aa, Artificial Sequence
  Synthetic construct
GFTFKSYD

SEQ ID NO: 11475 - protein, 8 aa, Artificial Sequence
  Synthetic construct
GYTFTSYG

SEQ ID NO: 11476 - protein, 8 aa, Artificial Sequence
  Synthetic construct
GFTFSSYA

SEQ ID NO: 11477 - protein, 8 aa, Artificial Sequence
  Synthetic construct
GYSFTSYY

SEQ ID NO: 11478 - protein, 8 aa, Artificial Sequence
  Synthetic construct
GGTFSSYA

SEQ ID NO: 11479 - protein, 8 aa, Artificial Sequence
  Synthetic construct
GYTFTRFA

SEQ ID NO: 11480 - protein, 8 aa, Artificial Sequence
  Synthetic construct
GYTFTGYY

SEQ ID NO: 11481 - protein, 10 aa, Artificial Sequence
  Synthetic construct
GGSISSGSYY

SEQ ID NO: 11482 - protein, 8 aa, Artificial Sequence
  Synthetic construct
GFTVSSNY

SEQ ID NO: 11483 - protein, 10 aa, Artificial Sequence
  Synthetic construct
GFSLATSGVG

SEQ ID NO: 11484 - protein, 10 aa, Artificial Sequence
  Synthetic construct
GGSISSSSYY

SEQ ID NO: 11485 - protein, 8 aa, Artificial Sequence
  Synthetic construct
GFNFNNYG

SEQ ID NO: 11486 - protein, 8 aa, Artificial Sequence
  Synthetic construct
GYTFISYA

SEQ ID NO: 11487 - protein, 8 aa, Artificial Sequence
  Synthetic construct
GFTFSSYS

SEQ ID NO: 11488 - protein, 8 aa, Artificial Sequence
  Synthetic construct
GFTFDDYA

SEQ ID NO: 11489 - protein, 10 aa, Artificial Sequence
  Synthetic construct
GFSLSTTSVA

SEQ ID NO: 11490 - protein, 8 aa, Artificial Sequence
  Synthetic construct
GLPFNNAW

SEQ ID NO: 11491 - protein, 8 aa, Artificial Sequence
  Synthetic construct
GYLFTAHS

SEQ ID NO: 11492 - protein, 8 aa, Artificial Sequence
  Synthetic construct
GHTSMSYG

SEQ ID NO: 11493 - protein, 8 aa, Artificial Sequence
  Synthetic construct
GFTFSSYA

SEQ ID NO: 11494 - protein, 8 aa, Artificial Sequence
  Synthetic construct
GFTFSSYG

SEQ ID NO: 11495 - protein, 8 aa, Artificial Sequence
  Synthetic construct
GYTFTSYY

SEQ ID NO: 11496 - protein, 8 aa, Artificial Sequence
  Synthetic construct
GGSFSGYY

SEQ ID NO: 11497 - protein, 8 aa, Artificial Sequence
  Synthetic construct
GFTFSSYS

SEQ ID NO: 11498 - protein, 10 aa, Artificial Sequence
  Synthetic construct
GGSISSSSYY

SEQ ID NO: 11499 - protein, 8 aa, Artificial Sequence
  Synthetic construct
GFTFSDYG

SEQ ID NO: 11500 - protein, 10 aa, Artificial Sequence
  Synthetic construct
GFSLTSNGVG

SEQ ID NO: 11501 - protein, 8 aa, Artificial Sequence
  Synthetic construct
GFTFVNYG

SEQ ID NO: 11502 - protein, 8 aa, Artificial Sequence
  Synthetic construct
GYTFTSYG

SEQ ID NO: 11503 - protein, 8 aa, Artificial Sequence
  Synthetic construct
GFNFKRNA

SEQ ID NO: 11504 - protein, 10 aa, Artificial Sequence
  Synthetic construct
GFSLATSGVG

SEQ ID NO: 11505 - protein, 8 aa, Artificial Sequence
  Synthetic construct
GFTFSSYS

SEQ ID NO: 11506 - protein, 9 aa, Artificial Sequence
  Synthetic construct
GDSVSSNAW

SEQ ID NO: 11507 - protein, 8 aa, Artificial Sequence
  Synthetic construct
GFTFSNAW

SEQ ID NO: 11508 - protein, 8 aa, Artificial Sequence
  Synthetic construct
GFIFSDAY

SEQ ID NO: 11509 - protein, 10 aa, Artificial Sequence
  Synthetic construct
GGSISSGSYY

SEQ ID NO: 11510 - protein, 8 aa, Artificial Sequence
  Synthetic construct
GFNFNTYS

SEQ ID NO: 11511 - protein, 10 aa, Artificial Sequence
  Synthetic construct
GGSISSGGYS

SEQ ID NO: 11512 - protein, 8 aa, Artificial Sequence
  Synthetic construct
GGSFDNFL

SEQ ID NO: 11513 - protein, 8 aa, Artificial Sequence
  Synthetic construct
GYTFTSYG

SEQ ID NO: 11514 - protein, 10 aa, Artificial Sequence
  Synthetic construct
GFSLATSGVG

SEQ ID NO: 11515 - protein, 10 aa, Artificial Sequence
  Synthetic construct
GGSVSSGEFH

SEQ ID NO: 11516 - protein, 8 aa, Artificial Sequence
  Synthetic construct
GGSFSGYY

SEQ ID NO: 11517 - protein, 8 aa, Artificial Sequence
  Synthetic construct
GFTFSSYA

SEQ ID NO: 11518 - protein, 8 aa, Artificial Sequence
  Synthetic construct
GGSVNSYY

SEQ ID NO: 11519 - protein, 8 aa, Artificial Sequence
  Synthetic construct
ANTFNGYS

SEQ ID NO: 11520 - protein, 8 aa, Artificial Sequence
  Synthetic construct
GGTLSSYG

SEQ ID NO: 11521 - protein, 8 aa, Artificial Sequence
  Synthetic construct
GYPLIEHY

SEQ ID NO: 11522 - protein, 8 aa, Artificial Sequence
  Synthetic construct
GYAFISYY

SEQ ID NO: 11523 - protein, 8 aa, Artificial Sequence
  Synthetic construct
GFTFDSYA

SEQ ID NO: 11524 - protein, 8 aa, Artificial Sequence
  Synthetic construct
GFTVSSNY

SEQ ID NO: 11525 - protein, 8 aa, Artificial Sequence
  Synthetic construct
GFTFSSYS

SEQ ID NO: 11526 - protein, 9 aa, Artificial Sequence
  Synthetic construct
GVSISRGNW

SEQ ID NO: 11527 - protein, 8 aa, Artificial Sequence
  Synthetic construct
GFTFSSYS

SEQ ID NO: 11528 - protein, 8 aa, Artificial Sequence
  Synthetic construct
GYTFTSYA

SEQ ID NO: 11529 - protein, 8 aa, Artificial Sequence
  Synthetic construct
GVSFRGYY

SEQ ID NO: 11530 - protein, 10 aa, Artificial Sequence
  Synthetic construct
GDSVSSNNAA

SEQ ID NO: 11531 - protein, 8 aa, Artificial Sequence
  Synthetic construct
GGSISSYY

SEQ ID NO: 11532 - protein, 8 aa, Artificial Sequence
  Synthetic construct
GFTFSSYS

SEQ ID NO: 11533 - protein, 10 aa, Artificial Sequence
  Synthetic construct
GFSLATSGVG

SEQ ID NO: 11534 - protein, 8 aa, Artificial Sequence
  Synthetic construct
GFNFNNYA

SEQ ID NO: 11535 - protein, 8 aa, Artificial Sequence
  Synthetic construct
GFTFSSYA

SEQ ID NO: 11536 - protein, 8 aa, Artificial Sequence
  Synthetic construct
GFTFNSYW

SEQ ID NO: 11537 - protein, 8 aa, Artificial Sequence
  Synthetic construct
GFTFSTHA

SEQ ID NO: 11538 - protein, 8 aa, Artificial Sequence
  Synthetic construct
GYSFTSYW

SEQ ID NO: 11539 - protein, 8 aa, Artificial Sequence
  Synthetic construct
GYTFTGYY

SEQ ID NO: 11540 - protein, 10 aa, Artificial Sequence
  Synthetic construct
GGSISSSDYY

SEQ ID NO: 11541 - protein, 8 aa, Artificial Sequence
  Synthetic construct
GKTTTNYA

SEQ ID NO: 11542 - protein, 8 aa, Artificial Sequence
  Synthetic construct
RLTFSNHW

SEQ ID NO: 11543 - protein, 8 aa, Artificial Sequence
  Synthetic construct
GFTFSSYA

SEQ ID NO: 11544 - protein, 8 aa, Artificial Sequence
  Synthetic construct
GLTFSDFY

SEQ ID NO: 11545 - protein, 10 aa, Artificial Sequence
  Synthetic construct
GGSISSSSYY

SEQ ID NO: 11546 - protein, 8 aa, Artificial Sequence
  Synthetic construct
GASIRSSY

SEQ ID NO: 11547 - protein, 8 aa, Artificial Sequence
  Synthetic construct
GFTFSSYA

SEQ ID NO: 11548 - protein, 8 aa, Artificial Sequence
  Synthetic construct
GGFFSGYY

SEQ ID NO: 11549 - protein, 8 aa, Artificial Sequence
  Synthetic construct
GFTFSSYN

SEQ ID NO: 11550 - protein, 8 aa, Artificial Sequence
  Synthetic construct
GFTFSSYS

SEQ ID NO: 11551 - protein, 8 aa, Artificial Sequence
  Synthetic construct
GFTVSSNY

SEQ ID NO: 11552 - protein, 8 aa, Artificial Sequence
  Synthetic construct
GYSFATYW

SEQ ID NO: 11553 - protein, 8 aa, Artificial Sequence
  Synthetic construct
GYTFSSYD

SEQ ID NO: 11554 - protein, 8 aa, Artificial Sequence
  Synthetic construct
GFTVSSNY

SEQ ID NO: 11555 - protein, 8 aa, Artificial Sequence
  Synthetic construct
GYTFTSYG

SEQ ID NO: 11556 - protein, 8 aa, Artificial Sequence
  Synthetic construct
GFTFSSYG

SEQ ID NO: 11557 - protein, 8 aa, Artificial Sequence
  Synthetic construct
GFTFDDYA

SEQ ID NO: 11558 - protein, 8 aa, Artificial Sequence
  Synthetic construct
GFTFSSYS

SEQ ID NO: 11559 - protein, 8 aa, Artificial Sequence
  Synthetic construct
GFTFSSYW

SEQ ID NO: 11560 - protein, 9 aa, Artificial Sequence
  Synthetic construct
GGSISSSNW

SEQ ID NO: 11561 - protein, 8 aa, Artificial Sequence
  Synthetic construct
GFTFSSYG

SEQ ID NO: 11562 - protein, 8 aa, Artificial Sequence
  Synthetic construct
GFSLTSFP

SEQ ID NO: 11563 - protein, 8 aa, Artificial Sequence
  Synthetic construct
GGSFSGYY

SEQ ID NO: 11564 - protein, 8 aa, Artificial Sequence
  Synthetic construct
GFTFSSYS

SEQ ID NO: 11565 - protein, 10 aa, Artificial Sequence
  Synthetic construct
GGSVSSGSYY

SEQ ID NO: 11566 - protein, 8 aa, Artificial Sequence
  Synthetic construct
GFTFSSYW

SEQ ID NO: 11567 - protein, 8 aa, Artificial Sequence
  Synthetic construct
GFTFSAYT

SEQ ID NO: 11568 - protein, 10 aa, Artificial Sequence
  Synthetic construct
GGFIGSSGYY

SEQ ID NO: 11569 - protein, 8 aa, Artificial Sequence
  Synthetic construct
GFTFSSHW

SEQ ID NO: 11570 - protein, 8 aa, Artificial Sequence
  Synthetic construct
GFSLSTSG

SEQ ID NO: 11571 - protein, 8 aa, Artificial Sequence
  Synthetic construct
GYTFTDYY

SEQ ID NO: 11572 - protein, 10 aa, Artificial Sequence
  Synthetic construct
GGSISSSPYW

SEQ ID NO: 11573 - protein, 8 aa, Artificial Sequence
  Synthetic construct
GFTFSSYG

SEQ ID NO: 11574 - protein, 10 aa, Artificial Sequence
  Synthetic construct
GGSVSSGDYY

SEQ ID NO: 11575 - protein, 8 aa, Artificial Sequence
  Synthetic construct
GFTFNTST

SEQ ID NO: 11576 - protein, 8 aa, Artificial Sequence
  Synthetic construct
GNRFSDYY

SEQ ID NO: 11577 - protein, 8 aa, Artificial Sequence
  Synthetic construct
GFTFSSYA

SEQ ID NO: 11578 - protein, 8 aa, Artificial Sequence
  Synthetic construct
GFTFSSYG

SEQ ID NO: 11579 - protein, 8 aa, Artificial Sequence
  Synthetic construct
GFTFRNFW

SEQ ID NO: 11580 - protein, 8 aa, Artificial Sequence
  Synthetic construct
GFTFGDYA

SEQ ID NO: 11581 - protein, 8 aa, Artificial Sequence
  Synthetic construct
GGSIGRSY

SEQ ID NO: 11582 - protein, 8 aa, Artificial Sequence
  Synthetic construct
GFTFSDYA

SEQ ID NO: 11583 - protein, 10 aa, Artificial Sequence
  Synthetic construct
GGSISSGGYY

SEQ ID NO: 11584 - protein, 8 aa, Artificial Sequence
  Synthetic construct
GYTFTGYY

SEQ ID NO: 11585 - protein, 10 aa, Artificial Sequence
  Synthetic construct
GGSISSSSYY

SEQ ID NO: 11586 - protein, 8 aa, Artificial Sequence
  Synthetic construct
GFTFSGYA

SEQ ID NO: 11587 - protein, 8 aa, Artificial Sequence
  Synthetic construct
GGSISSYY

SEQ ID NO: 11588 - protein, 8 aa, Artificial Sequence
  Synthetic construct
GFTFSTSA

SEQ ID NO: 11589 - protein, 8 aa, Artificial Sequence
  Synthetic construct
GFTFSGSA

SEQ ID NO: 11590 - protein, 10 aa, Artificial Sequence
  Synthetic construct
GFSLSTSGVG

SEQ ID NO: 11591 - protein, 10 aa, Artificial Sequence
  Synthetic construct
GGSISSGSYY

SEQ ID NO: 11592 - protein, 8 aa, Artificial Sequence
  Synthetic construct
GGTFSTYA

SEQ ID NO: 11593 - protein, 10 aa, Artificial Sequence
  Synthetic construct
GGSISSSSYY

SEQ ID NO: 11594 - protein, 8 aa, Artificial Sequence
  Synthetic construct
GFTFSSYS

SEQ ID NO: 11595 - protein, 8 aa, Artificial Sequence
  Synthetic construct
GYTFTSYA

SEQ ID NO: 11596 - protein, 10 aa, Artificial Sequence
  Synthetic construct
GDSVSSGTHY

SEQ ID NO: 11597 - protein, 8 aa, Artificial Sequence
  Synthetic construct
GFTFSSYW

SEQ ID NO: 11598 - protein, 10 aa, Artificial Sequence
  Synthetic construct
GVSITSGSYY

SEQ ID NO: 11599 - protein, 8 aa, Artificial Sequence
  Synthetic construct
GFTFSSYW

SEQ ID NO: 11600 - protein, 8 aa, Artificial Sequence
  Synthetic construct
GFTVSSNY

SEQ ID NO: 11601 - protein, 8 aa, Artificial Sequence
  Synthetic construct
GYPFTRDG

SEQ ID NO: 11602 - protein, 8 aa, Artificial Sequence
  Synthetic construct
GFKFDDYG

SEQ ID NO: 11603 - protein, 8 aa, Artificial Sequence
  Synthetic construct
GFTFSSYW

SEQ ID NO: 11604 - protein, 8 aa, Artificial Sequence
  Synthetic construct
GFSFSTYA

SEQ ID NO: 11605 - protein, 8 aa, Artificial Sequence
  Synthetic construct
GFTFSSYA

SEQ ID NO: 11606 - protein, 8 aa, Artificial Sequence
  Synthetic construct
GFTFSDYT

SEQ ID NO: 11607 - protein, 8 aa, Artificial Sequence
  Synthetic construct
GDSLNNYA

SEQ ID NO: 11608 - protein, 8 aa, Artificial Sequence
  Synthetic construct
GFTFSSYS

SEQ ID NO: 11609 - protein, 8 aa, Artificial Sequence
  Synthetic construct
GGTFSKYA

SEQ ID NO: 11610 - protein, 8 aa, Artificial Sequence
  Synthetic construct
GFTFSSYW

SEQ ID NO: 11611 - protein, 8 aa, Artificial Sequence
  Synthetic construct
GGTFSSYA

SEQ ID NO: 11612 - protein, 10 aa, Artificial Sequence
  Synthetic construct
GGSISSGGYY

SEQ ID NO: 11613 - protein, 10 aa, Artificial Sequence
  Synthetic construct
GGSISSSSYY

SEQ ID NO: 11614 - protein, 10 aa, Artificial Sequence
  Synthetic construct
GFSLSTSGVG

SEQ ID NO: 11615 - protein, 8 aa, Artificial Sequence
  Synthetic construct
GYSFTSYW

SEQ ID NO: 11616 - protein, 8 aa, Artificial Sequence
  Synthetic construct
GFTFDSYS

SEQ ID NO: 11617 - protein, 8 aa, Artificial Sequence
  Synthetic construct
GYTFSSYS

SEQ ID NO: 11618 - protein, 8 aa, Artificial Sequence
  Synthetic construct
GYTFTSYG

SEQ ID NO: 11619 - protein, 8 aa, Artificial Sequence
  Synthetic construct
GYSFATYW

SEQ ID NO: 11620 - protein, 8 aa, Artificial Sequence
  Synthetic construct
GFTFSGSA

SEQ ID NO: 11621 - protein, 8 aa, Artificial Sequence
  Synthetic construct
GFTFSSYS

SEQ ID NO: 11622 - protein, 8 aa, Artificial Sequence
  Synthetic construct
GYTFTYYS

SEQ ID NO: 11623 - protein, 8 aa, Artificial Sequence
  Synthetic construct
GFAFGNYA

SEQ ID NO: 11624 - protein, 8 aa, Artificial Sequence
  Synthetic construct
GYSFATYW

SEQ ID NO: 11625 - protein, 8 aa, Artificial Sequence
  Synthetic construct
GGSFSGYY

SEQ ID NO: 11626 - protein, 8 aa, Artificial Sequence
  Synthetic construct
GFTFSSYA

SEQ ID NO: 11627 - protein, 8 aa, Artificial Sequence
  Synthetic construct
GFTFSNAW

SEQ ID NO: 11628 - protein, 8 aa, Artificial Sequence
  Synthetic construct
GFIFSDYA

SEQ ID NO: 11629 - protein, 8 aa, Artificial Sequence
  Synthetic construct
GFTFSSYS

SEQ ID NO: 11630 - protein, 8 aa, Artificial Sequence
  Synthetic construct
GGSISSYY

SEQ ID NO: 11631 - protein, 8 aa, Artificial Sequence
  Synthetic construct
GFTFSSYW

SEQ ID NO: 11632 - protein, 8 aa, Artificial Sequence
  Synthetic construct
GFTFNSNA

SEQ ID NO: 11633 - protein, 10 aa, Artificial Sequence
  Synthetic construct
GGSISSGGYY

SEQ ID NO: 11634 - protein, 8 aa, Artificial Sequence
  Synthetic construct
GFTFSAYS

SEQ ID NO: 11635 - protein, 8 aa, Artificial Sequence
  Synthetic construct
GFTFKSYD

SEQ ID NO: 11636 - protein, 8 aa, Artificial Sequence
  Synthetic construct
GFTFSSYS

SEQ ID NO: 11637 - protein, 10 aa, Artificial Sequence
  Synthetic construct
GGSIRGSDYY

SEQ ID NO: 11638 - protein, 10 aa, Artificial Sequence
  Synthetic construct
GGSISSGSYY

SEQ ID NO: 11639 - protein, 8 aa, Artificial Sequence
  Synthetic construct
GYIFTKYS

SEQ ID NO: 11640 - protein, 8 aa, Artificial Sequence
  Synthetic construct
GLNFKNYW

SEQ ID NO: 11641 - protein, 8 aa, Artificial Sequence
  Synthetic construct
GDSFSNYY

SEQ ID NO: 11642 - protein, 8 aa, Artificial Sequence
  Synthetic construct
GFTFSAYG

SEQ ID NO: 11643 - protein, 8 aa, Artificial Sequence
  Synthetic construct
GYTVTEYV

SEQ ID NO: 11644 - protein, 8 aa, Artificial Sequence
  Synthetic construct
GFTFSSYW

SEQ ID NO: 11645 - protein, 8 aa, Artificial Sequence
  Synthetic construct
GNIVSTNY

SEQ ID NO: 11646 - protein, 8 aa, Artificial Sequence
  Synthetic construct
GFTFKNYW

SEQ ID NO: 11647 - protein, 8 aa, Artificial Sequence
  Synthetic construct
GYPFTRDG

SEQ ID NO: 11648 - protein, 10 aa, Artificial Sequence
  Synthetic construct
GGSISSGSYY

SEQ ID NO: 11649 - protein, 8 aa, Artificial Sequence
  Synthetic construct
GFTFDDYA

SEQ ID NO: 11650 - protein, 8 aa, Artificial Sequence
  Synthetic construct
GGSFSGYY

SEQ ID NO: 11651 - protein, 10 aa, Artificial Sequence
  Synthetic construct
GGSVRTSAHF

SEQ ID NO: 11652 - protein, 10 aa, Artificial Sequence
  Synthetic construct
GGSISSSSYY

SEQ ID NO: 11653 - protein, 8 aa, Artificial Sequence
  Synthetic construct
GYTFTSYG

SEQ ID NO: 11654 - protein, 8 aa, Artificial Sequence
  Synthetic construct
GYSFAKYW

SEQ ID NO: 11655 - protein, 10 aa, Artificial Sequence
  Synthetic construct
GGSISSGPSH

SEQ ID NO: 11656 - protein, 10 aa, Artificial Sequence
  Synthetic construct
GASISSFSYY

SEQ ID NO: 11657 - protein, 8 aa, Artificial Sequence
  Synthetic construct
GFRFDIFW

SEQ ID NO: 11658 - protein, 8 aa, Artificial Sequence
  Synthetic construct
GFTFSSYG

SEQ ID NO: 11659 - protein, 8 aa, Artificial Sequence
  Synthetic construct
GGSISGYH

SEQ ID NO: 11660 - protein, 8 aa, Artificial Sequence
  Synthetic construct
GGTFSSYA

SEQ ID NO: 11661 - protein, 10 aa, Artificial Sequence
  Synthetic construct
GGSISSGGNF

SEQ ID NO: 11662 - protein, 8 aa, Artificial Sequence
  Synthetic construct
GYTFNTYG

SEQ ID NO: 11663 - protein, 8 aa, Artificial Sequence
  Synthetic construct
GFTFSNYA

SEQ ID NO: 11664 - protein, 10 aa, Artificial Sequence
  Synthetic construct
RGSISGGFYF

SEQ ID NO: 11665 - protein, 8 aa, Artificial Sequence
  Synthetic construct
GPTLGAYA

SEQ ID NO: 11666 - protein, 8 aa, Artificial Sequence
  Synthetic construct
GFTFSDHA

SEQ ID NO: 11667 - protein, 8 aa, Artificial Sequence
  Synthetic construct
GLTFSDFY

SEQ ID NO: 11668 - protein, 10 aa, Artificial Sequence
  Synthetic construct
GFSLSTSGVG

SEQ ID NO: 11669 - protein, 8 aa, Artificial Sequence
  Synthetic construct
GFTFTRYW

SEQ ID NO: 11670 - protein, 10 aa, Artificial Sequence
  Synthetic construct
GFSLSTSGVG

SEQ ID NO: 11671 - protein, 8 aa, Artificial Sequence
  Synthetic construct
GFTFSSYG

SEQ ID NO: 11672 - protein, 8 aa, Artificial Sequence
  Synthetic construct
GGSISSNY

SEQ ID NO: 11673 - protein, 8 aa, Artificial Sequence
  Synthetic construct
GFTFKSYD

SEQ ID NO: 11674 - protein, 8 aa, Artificial Sequence
  Synthetic construct
GGSLSGYY

SEQ ID NO: 11675 - protein, 9 aa, Artificial Sequence
  Synthetic construct
GDSIINNNW

SEQ ID NO: 11676 - protein, 8 aa, Artificial Sequence
  Synthetic construct
GGSFRSYA

SEQ ID NO: 11677 - protein, 8 aa, Artificial Sequence
  Synthetic construct
GFTFSSYA

SEQ ID NO: 11678 - protein, 8 aa, Artificial Sequence
  Synthetic construct
GYTFNEYW

SEQ ID NO: 11679 - protein, 8 aa, Artificial Sequence
  Synthetic construct
GFTFSSYN

SEQ ID NO: 11680 - protein, 8 aa, Artificial Sequence
  Synthetic construct
GYPFTRDG

SEQ ID NO: 11681 - protein, 8 aa, Artificial Sequence
  Synthetic construct
GGSISSYY

SEQ ID NO: 11682 - protein, 8 aa, Artificial Sequence
  Synthetic construct
GTTVSSNF

SEQ ID NO: 11683 - protein, 8 aa, Artificial Sequence
  Synthetic construct
GFNLGSYG

SEQ ID NO: 11684 - protein, 8 aa, Artificial Sequence
  Synthetic construct
GYSFPTYW

SEQ ID NO: 11685 - protein, 10 aa, Artificial Sequence
  Synthetic construct
DDSISKSAFY

SEQ ID NO: 11686 - protein, 8 aa, Artificial Sequence
  Synthetic construct
GFTLSSYD

SEQ ID NO: 11687 - protein, 8 aa, Artificial Sequence
  Synthetic construct
GFTFKSYD

SEQ ID NO: 11688 - protein, 8 aa, Artificial Sequence
  Synthetic construct
GYTFTSYG

SEQ ID NO: 11689 - protein, 10 aa, Artificial Sequence
  Synthetic construct
GGSISSGSYY

SEQ ID NO: 11690 - protein, 8 aa, Artificial Sequence
  Synthetic construct
GFTVSSNY

SEQ ID NO: 11691 - protein, 10 aa, Artificial Sequence
  Synthetic construct
GGSIDRSDYY

SEQ ID NO: 11692 - protein, 8 aa, Artificial Sequence
  Synthetic construct
GFTFSSYS

SEQ ID NO: 11693 - protein, 9 aa, Artificial Sequence
  Synthetic construct
GGSITSSNW

SEQ ID NO: 11694 - protein, 8 aa, Artificial Sequence
  Synthetic construct
GYTFTGYY

SEQ ID NO: 11695 - protein, 8 aa, Artificial Sequence
  Synthetic construct
GFTFSSYA

SEQ ID NO: 11696 - protein, 8 aa, Artificial Sequence
  Synthetic construct
GYPFTDYF

SEQ ID NO: 11697 - protein, 10 aa, Artificial Sequence
  Synthetic construct
GGSISSSSYY

SEQ ID NO: 11698 - protein, 8 aa, Artificial Sequence
  Synthetic construct
GYTFTSYA

SEQ ID NO: 11699 - protein, 8 aa, Artificial Sequence
  Synthetic construct
GFTFSRYW

SEQ ID NO: 11700 - protein, 8 aa, Artificial Sequence
  Synthetic construct
GFSFSSYV

SEQ ID NO: 11701 - protein, 8 aa, Artificial Sequence
  Synthetic construct
GFTFSSYA

SEQ ID NO: 11702 - protein, 8 aa, Artificial Sequence
  Synthetic construct
GFTFSSYA

SEQ ID NO: 11703 - protein, 8 aa, Artificial Sequence
  Synthetic construct
GFTFSSYA

SEQ ID NO: 11704 - protein, 8 aa, Artificial Sequence
  Synthetic construct
GYDFITYA

SEQ ID NO: 11705 - protein, 8 aa, Artificial Sequence
  Synthetic construct
GFRFSDYV

SEQ ID NO: 11706 - protein, 10 aa, Artificial Sequence
  Synthetic construct
GDSVSSNNAA

SEQ ID NO: 11707 - protein, 8 aa, Artificial Sequence
  Synthetic construct
GFTFSSYG

SEQ ID NO: 11708 - protein, 8 aa, Artificial Sequence
  Synthetic construct
GFTFSGSA

SEQ ID NO: 11709 - protein, 8 aa, Artificial Sequence
  Synthetic construct
GFTFSSYG

SEQ ID NO: 11710 - protein, 8 aa, Artificial Sequence
  Synthetic construct
GFTVRNNY

SEQ ID NO: 11711 - protein, 8 aa, Artificial Sequence
  Synthetic construct
GFTFSSYG

SEQ ID NO: 11712 - protein, 8 aa, Artificial Sequence
  Synthetic construct
GFTFSSYW

SEQ ID NO: 11713 - protein, 8 aa, Artificial Sequence
  Synthetic construct
GYKFFDYY

SEQ ID NO: 11714 - protein, 8 aa, Artificial Sequence
  Synthetic construct
GGSISSYY

SEQ ID NO: 11715 - protein, 9 aa, Artificial Sequence
  Synthetic construct
GASFSGSNW

SEQ ID NO: 11716 - protein, 8 aa, Artificial Sequence
  Synthetic construct
GYSFTSYW

SEQ ID NO: 11717 - protein, 10 aa, Artificial Sequence
  Synthetic construct
GFSLATSGVG

SEQ ID NO: 11718 - protein, 8 aa, Artificial Sequence
  Synthetic construct
GFTFSSYA

SEQ ID NO: 11719 - protein, 10 aa, Artificial Sequence
  Synthetic construct
GGSISSGSYY

SEQ ID NO: 11720 - protein, 8 aa, Artificial Sequence
  Synthetic construct
GFTFSDYY

SEQ ID NO: 11721 - protein, 8 aa, Artificial Sequence
  Synthetic construct
GYSFTNYW

SEQ ID NO: 11722 - protein, 8 aa, Artificial Sequence
  Synthetic construct
GFAFGNYA

SEQ ID NO: 11723 - protein, 8 aa, Artificial Sequence
  Synthetic construct
GGSFSGYY

SEQ ID NO: 11724 - protein, 8 aa, Artificial Sequence
  Synthetic construct
GYTFTSYG

SEQ ID NO: 11725 - protein, 8 aa, Artificial Sequence
  Synthetic construct
GFSFSIYT

SEQ ID NO: 11726 - protein, 10 aa, Artificial Sequence
  Synthetic construct
GGSISSGDYY

SEQ ID NO: 11727 - protein, 9 aa, Artificial Sequence
  Synthetic construct
GGSISSSNW

SEQ ID NO: 11728 - protein, 8 aa, Artificial Sequence
  Synthetic construct
GFTFSSYS

SEQ ID NO: 11729 - protein, 8 aa, Artificial Sequence
  Synthetic construct
GYIFRNHW

SEQ ID NO: 11730 - protein, 8 aa, Artificial Sequence
  Synthetic construct
GYTFTSYG

SEQ ID NO: 11731 - protein, 8 aa, Artificial Sequence
  Synthetic construct
GFTFSDYS

SEQ ID NO: 11732 - protein, 8 aa, Artificial Sequence
  Synthetic construct
GYSFATYW

SEQ ID NO: 11733 - protein, 8 aa, Artificial Sequence
  Synthetic construct
GYSFTTYW

SEQ ID NO: 11734 - protein, 8 aa, Artificial Sequence
  Synthetic construct
GEPFTKFY

SEQ ID NO: 11735 - protein, 8 aa, Artificial Sequence
  Synthetic construct
GYTFTSYG

SEQ ID NO: 11736 - protein, 8 aa, Artificial Sequence
  Synthetic construct
GFTFSAYS

SEQ ID NO: 11737 - protein, 8 aa, Artificial Sequence
  Synthetic construct
GFTFSSYG

SEQ ID NO: 11738 - protein, 8 aa, Artificial Sequence
  Synthetic construct
GFTFSSYA

SEQ ID NO: 11739 - protein, 8 aa, Artificial Sequence
  Synthetic construct
GYTFTSYG

SEQ ID NO: 11740 - protein, 8 aa, Artificial Sequence
  Synthetic construct
GFTFSSYS

SEQ ID NO: 11741 - protein, 8 aa, Artificial Sequence
  Synthetic construct
GFTFSSYG

SEQ ID NO: 11742 - protein, 8 aa, Artificial Sequence
  Synthetic construct
GGSFSGYY

SEQ ID NO: 11743 - protein, 8 aa, Artificial Sequence
  Synthetic construct
GGSFSGYY

SEQ ID NO: 11744 - protein, 8 aa, Artificial Sequence
  Synthetic construct
GFTFSTYG

SEQ ID NO: 11745 - protein, 8 aa, Artificial Sequence
  Synthetic construct
GFDFNSYS

SEQ ID NO: 11746 - protein, 9 aa, Artificial Sequence
  Synthetic construct
GGSISSSNW

SEQ ID NO: 11747 - protein, 8 aa, Artificial Sequence
  Synthetic construct
GGSFSPNY

SEQ ID NO: 11748 - protein, 8 aa, Artificial Sequence
  Synthetic construct
GFTFSSYG

SEQ ID NO: 11749 - protein, 8 aa, Artificial Sequence
  Synthetic construct
GFTFSTYP

SEQ ID NO: 11750 - protein, 8 aa, Artificial Sequence
  Synthetic construct
GFTFAAYV

SEQ ID NO: 11751 - protein, 8 aa, Artificial Sequence
  Synthetic construct
GFTFSDSW

SEQ ID NO: 11752 - protein, 8 aa, Artificial Sequence
  Synthetic construct
GFTFSDYY

SEQ ID NO: 11753 - protein, 8 aa, Artificial Sequence
  Synthetic construct
GFSFSYTW

SEQ ID NO: 11754 - protein, 8 aa, Artificial Sequence
  Synthetic construct
GFTFSSYS

SEQ ID NO: 11755 - protein, 8 aa, Artificial Sequence
  Synthetic construct
GYSFTSYW

SEQ ID NO: 11756 - protein, 8 aa, Artificial Sequence
  Synthetic construct
GFTVSSNY

SEQ ID NO: 11757 - protein, 10 aa, Artificial Sequence
  Synthetic construct
GGSISSGDYY

SEQ ID NO: 11758 - protein, 8 aa, Artificial Sequence
  Synthetic construct
GFTFSSYG

SEQ ID NO: 11759 - protein, 8 aa, Artificial Sequence
  Synthetic construct
GFTFSSYA

SEQ ID NO: 11760 - protein, 8 aa, Artificial Sequence
  Synthetic construct
GFTFSSYG

SEQ ID NO: 11761 - protein, 8 aa, Artificial Sequence
  Synthetic construct
GFSFTSYA

SEQ ID NO: 11762 - protein, 8 aa, Artificial Sequence
  Synthetic construct
GYSFTSYW

SEQ ID NO: 11763 - protein, 10 aa, Artificial Sequence
  Synthetic construct
GGSISSDNYY

SEQ ID NO: 11764 - protein, 8 aa, Artificial Sequence
  Synthetic construct
GYTFTSYG

SEQ ID NO: 11765 - protein, 8 aa, Artificial Sequence
  Synthetic construct
GFTFSNYA

SEQ ID NO: 11766 - protein, 10 aa, Artificial Sequence
  Synthetic construct
GGSISSSSYY

SEQ ID NO: 11767 - protein, 8 aa, Artificial Sequence
  Synthetic construct
GFTFRSSW

SEQ ID NO: 11768 - protein, 8 aa, Artificial Sequence
  Synthetic construct
GFTFSSYA

SEQ ID NO: 11769 - protein, 8 aa, Artificial Sequence
  Synthetic construct
GLKFSSYW

SEQ ID NO: 11770 - protein, 8 aa, Artificial Sequence
  Synthetic construct
GFTFRNSW

SEQ ID NO: 11771 - protein, 8 aa, Artificial Sequence
  Synthetic construct
GFTFGDYP

SEQ ID NO: 11772 - protein, 8 aa, Artificial Sequence
  Synthetic construct
GYSFTNYW

SEQ ID NO: 11773 - protein, 8 aa, Artificial Sequence
  Synthetic construct
GYSFATYW

SEQ ID NO: 11774 - protein, 10 aa, Artificial Sequence
  Synthetic construct
GGSISSGGYS

SEQ ID NO: 11775 - protein, 8 aa, Artificial Sequence
  Synthetic construct
GFTFSGSA

SEQ ID NO: 11776 - protein, 8 aa, Artificial Sequence
  Synthetic construct
GFTFSSYG

SEQ ID NO: 11777 - protein, 8 aa, Artificial Sequence
  Synthetic construct
GFTFSGSA

SEQ ID NO: 11778 - protein, 9 aa, Artificial Sequence
  Synthetic construct
GGSLSGNSW

SEQ ID NO: 11779 - protein, 8 aa, Artificial Sequence
  Synthetic construct
GYTFTSYR

SEQ ID NO: 11780 - protein, 8 aa, Artificial Sequence
  Synthetic construct
GFTFSSYW

SEQ ID NO: 11781 - protein, 8 aa, Artificial Sequence
  Synthetic construct
GFTFEDNA

SEQ ID NO: 11782 - protein, 8 aa, Artificial Sequence
  Synthetic construct
GGTFNSYI

SEQ ID NO: 11783 - protein, 10 aa, Artificial Sequence
  Synthetic construct
GGSISSGSYY

SEQ ID NO: 11784 - protein, 9 aa, Artificial Sequence
  Synthetic construct
GGSISSSNW

SEQ ID NO: 11785 - protein, 8 aa, Artificial Sequence
  Synthetic construct
GGPFSSYA

SEQ ID NO: 11786 - protein, 8 aa, Artificial Sequence
  Synthetic construct
GFTFSDYG

SEQ ID NO: 11787 - protein, 8 aa, Artificial Sequence
  Synthetic construct
GFTFSSYS

SEQ ID NO: 11788 - protein, 8 aa, Artificial Sequence
  Synthetic construct
GYTFISYY

SEQ ID NO: 11789 - protein, 8 aa, Artificial Sequence
  Synthetic construct
GVTFSNYN

SEQ ID NO: 11790 - protein, 8 aa, Artificial Sequence
  Synthetic construct
GASITSSY

SEQ ID NO: 11791 - protein, 10 aa, Artificial Sequence
  Synthetic construct
GGSISSGSYY

SEQ ID NO: 11792 - protein, 8 aa, Artificial Sequence
  Synthetic construct
GYSFSNYW

SEQ ID NO: 11793 - protein, 8 aa, Artificial Sequence
  Synthetic construct
GFTFSSYG

SEQ ID NO: 11794 - protein, 8 aa, Artificial Sequence
  Synthetic construct
GYTFISYY

SEQ ID NO: 11795 - protein, 8 aa, Artificial Sequence
  Synthetic construct
GYPFTRDG

SEQ ID NO: 11796 - protein, 8 aa, Artificial Sequence
  Synthetic construct
GFTFSTYR

SEQ ID NO: 11797 - protein, 8 aa, Artificial Sequence
  Synthetic construct
GFTFKTSP

SEQ ID NO: 11798 - protein, 8 aa, Artificial Sequence
  Synthetic construct
GFTFRNYG

SEQ ID NO: 11799 - protein, 8 aa, Artificial Sequence
  Synthetic construct
GYTFTSYY

SEQ ID NO: 11800 - protein, 8 aa, Artificial Sequence
  Synthetic construct
GYTFTSYY

SEQ ID NO: 11801 - protein, 8 aa, Artificial Sequence
  Synthetic construct
GFTFNTHA

SEQ ID NO: 11802 - protein, 8 aa, Artificial Sequence
  Synthetic construct
GYTFTSYG

SEQ ID NO: 11803 - protein, 8 aa, Artificial Sequence
  Synthetic construct
GFTFSSYW

SEQ ID NO: 11804 - protein, 8 aa, Artificial Sequence
  Synthetic construct
GYTFTHYA

SEQ ID NO: 11805 - protein, 8 aa, Artificial Sequence
  Synthetic construct
GYTFTNYF

SEQ ID NO: 11806 - protein, 8 aa, Artificial Sequence
  Synthetic construct
GFMFRTYG

SEQ ID NO: 11807 - protein, 8 aa, Artificial Sequence
  Synthetic construct
GFAFGNYA

SEQ ID NO: 11808 - protein, 8 aa, Artificial Sequence
  Synthetic construct
GGSFSGYY

SEQ ID NO: 11809 - protein, 8 aa, Artificial Sequence
  Synthetic construct
GASISSYY

SEQ ID NO: 11810 - protein, 8 aa, Artificial Sequence
  Synthetic construct
GFTFRSYW

SEQ ID NO: 11811 - protein, 8 aa, Artificial Sequence
  Synthetic construct
GFTFSSYS

SEQ ID NO: 11812 - protein, 8 aa, Artificial Sequence
  Synthetic construct
GFTFSSYW

SEQ ID NO: 11813 - protein, 10 aa, Artificial Sequence
  Synthetic construct
GGSISSGGYY

SEQ ID NO: 11814 - protein, 10 aa, Artificial Sequence
  Synthetic construct
GGSISSGSYY

SEQ ID NO: 11815 - protein, 8 aa, Artificial Sequence
  Synthetic construct
GFTFSSYS

SEQ ID NO: 11816 - protein, 8 aa, Artificial Sequence
  Synthetic construct
GFTFSNAW

SEQ ID NO: 11817 - protein, 8 aa, Artificial Sequence
  Synthetic construct
GYTFTSYY

SEQ ID NO: 11818 - protein, 8 aa, Artificial Sequence
  Synthetic construct
GYTFTSYY

SEQ ID NO: 11819 - protein, 8 aa, Artificial Sequence
  Synthetic construct
GYTFTSYG

SEQ ID NO: 11820 - protein, 10 aa, Artificial Sequence
  Synthetic construct
GGSITSGNYY

SEQ ID NO: 11821 - protein, 8 aa, Artificial Sequence
  Synthetic construct
GFTFSTYA

SEQ ID NO: 11822 - protein, 8 aa, Artificial Sequence
  Synthetic construct
GFTFSSYG

SEQ ID NO: 11823 - protein, 8 aa, Artificial Sequence
  Synthetic construct
GYSFTSYH

SEQ ID NO: 11824 - protein, 8 aa, Artificial Sequence
  Synthetic construct
GFTFSSYG

SEQ ID NO: 11825 - protein, 8 aa, Artificial Sequence
  Synthetic construct
GFSFSSFS

SEQ ID NO: 11826 - protein, 10 aa, Artificial Sequence
  Synthetic construct
GGSISSGGYS

SEQ ID NO: 11827 - protein, 8 aa, Artificial Sequence
  Synthetic construct
GYSFTSYW

SEQ ID NO: 11828 - protein, 8 aa, Artificial Sequence
  Synthetic construct
GYTFNTYG

SEQ ID NO: 11829 - protein, 8 aa, Artificial Sequence
  Synthetic construct
GYTFTGYY

SEQ ID NO: 11830 - protein, 8 aa, Artificial Sequence
  Synthetic construct
GYTLAGHG

SEQ ID NO: 11831 - protein, 8 aa, Artificial Sequence
  Synthetic construct
GHTFSDYY

SEQ ID NO: 11832 - protein, 10 aa, Artificial Sequence
  Synthetic construct
GFSLSTTGVG

SEQ ID NO: 11833 - protein, 8 aa, Artificial Sequence
  Synthetic construct
GFTFSNAW

SEQ ID NO: 11834 - protein, 8 aa, Artificial Sequence
  Synthetic construct
GYSFSKYW

SEQ ID NO: 11835 - protein, 8 aa, Artificial Sequence
  Synthetic construct
GFTFRNHG

SEQ ID NO: 11836 - protein, 8 aa, Artificial Sequence
  Synthetic construct
GFTFRNHG

SEQ ID NO: 11837 - protein, 8 aa, Artificial Sequence
  Synthetic construct
GFTFSSYG

SEQ ID NO: 11838 - protein, 8 aa, Artificial Sequence
  Synthetic construct
GFTFSSYA

SEQ ID NO: 11839 - protein, 8 aa, Artificial Sequence
  Synthetic construct
GFTFSSYA

SEQ ID NO: 11840 - protein, 8 aa, Artificial Sequence
  Synthetic construct
GLTFSSSG

SEQ ID NO: 11841 - protein, 8 aa, Artificial Sequence
  Synthetic construct
GFTFSSYS

SEQ ID NO: 11842 - protein, 8 aa, Artificial Sequence
  Synthetic construct
GYSFTTYW

SEQ ID NO: 11843 - protein, 10 aa, Artificial Sequence
  Synthetic construct
GTSLRTSSYY

SEQ ID NO: 11844 - protein, 8 aa, Artificial Sequence
  Synthetic construct
GGSFSPNY

SEQ ID NO: 11845 - protein, 8 aa, Artificial Sequence
  Synthetic construct
GFTFSSYW

SEQ ID NO: 11846 - protein, 8 aa, Artificial Sequence
  Synthetic construct
GFTFSRYW

SEQ ID NO: 11847 - protein, 8 aa, Artificial Sequence
  Synthetic construct
RFTFSNYP

SEQ ID NO: 11848 - protein, 8 aa, Artificial Sequence
  Synthetic construct
GYTFSNYY

SEQ ID NO: 11849 - protein, 8 aa, Artificial Sequence
  Synthetic construct
GYSFPTYW

SEQ ID NO: 11850 - protein, 8 aa, Artificial Sequence
  Synthetic construct
GFSLSNYW

SEQ ID NO: 11851 - protein, 10 aa, Artificial Sequence
  Synthetic construct
GGSITTGGYY

SEQ ID NO: 11852 - protein, 8 aa, Artificial Sequence
  Synthetic construct
GYTFSGYY

SEQ ID NO: 11853 - protein, 8 aa, Artificial Sequence
  Synthetic construct
GFIFTTYA

SEQ ID NO: 11854 - protein, 8 aa, Artificial Sequence
  Synthetic construct
GFSFSDFA

SEQ ID NO: 11855 - protein, 8 aa, Artificial Sequence
  Synthetic construct
GFTFSSYA

SEQ ID NO: 11856 - protein, 10 aa, Artificial Sequence
  Synthetic construct
GGSISSGGYS

SEQ ID NO: 11857 - protein, 10 aa, Artificial Sequence
  Synthetic construct
GGSIISDNLY

SEQ ID NO: 11858 - protein, 10 aa, Artificial Sequence
  Synthetic construct
GGSVSSGSYY

SEQ ID NO: 11859 - protein, 8 aa, Artificial Sequence
  Synthetic construct
GFRTSAYW

SEQ ID NO: 11860 - protein, 8 aa, Artificial Sequence
  Synthetic construct
GYSFATYW

SEQ ID NO: 11861 - protein, 8 aa, Artificial Sequence
  Synthetic construct
GFTFSSYW

SEQ ID NO: 11862 - protein, 8 aa, Artificial Sequence
  Synthetic construct
GGSITFNF

SEQ ID NO: 11863 - protein, 10 aa, Artificial Sequence
  Synthetic construct
GDSVSSGTHY

SEQ ID NO: 11864 - protein, 8 aa, Artificial Sequence
  Synthetic construct
GGSISSYY

SEQ ID NO: 11865 - protein, 8 aa, Artificial Sequence
  Synthetic construct
GFTFSTYW

SEQ ID NO: 11866 - protein, 8 aa, Artificial Sequence
  Synthetic construct
GFSFSSYG

SEQ ID NO: 11867 - protein, 10 aa, Artificial Sequence
  Synthetic construct
GGSISSSGYY

SEQ ID NO: 11868 - protein, 8 aa, Artificial Sequence
  Synthetic construct
GGSLSGYY

SEQ ID NO: 11869 - protein, 8 aa, Artificial Sequence
  Synthetic construct
GYTFTSYY

SEQ ID NO: 11870 - protein, 8 aa, Artificial Sequence
  Synthetic construct
GYTFTGYY

SEQ ID NO: 11871 - protein, 8 aa, Artificial Sequence
  Synthetic construct
GGSMRNYF

SEQ ID NO: 11872 - protein, 8 aa, Artificial Sequence
  Synthetic construct
GFTFSSYS

SEQ ID NO: 11873 - protein, 8 aa, Artificial Sequence
  Synthetic construct
GLVFDDAW

SEQ ID NO: 11874 - protein, 10 aa, Artificial Sequence
  Synthetic construct
GASITTRSYY

SEQ ID NO: 11875 - protein, 8 aa, Artificial Sequence
  Synthetic construct
GGSLSTYY

SEQ ID NO: 11876 - protein, 8 aa, Artificial Sequence
  Synthetic construct
GETFGGYY

SEQ ID NO: 11877 - protein, 8 aa, Artificial Sequence
  Synthetic construct
GYSFTSYW

SEQ ID NO: 11878 - protein, 8 aa, Artificial Sequence
  Synthetic construct
GFTFSGYS

SEQ ID NO: 11879 - protein, 8 aa, Artificial Sequence
  Synthetic construct
GFSFSTYA

SEQ ID NO: 11880 - protein, 8 aa, Artificial Sequence
  Synthetic construct
GFTVISTY

SEQ ID NO: 11881 - protein, 10 aa, Artificial Sequence
  Synthetic construct
GGSISSGNYY

SEQ ID NO: 11882 - protein, 8 aa, Artificial Sequence
  Synthetic construct
GFTFSSYG

SEQ ID NO: 11883 - protein, 8 aa, Artificial Sequence
  Synthetic construct
GYLFTAHS

SEQ ID NO: 11884 - protein, 8 aa, Artificial Sequence
  Synthetic construct
GFTFSSYA

SEQ ID NO: 11885 - protein, 8 aa, Artificial Sequence
  Synthetic construct
GGSFSGYY

SEQ ID NO: 11886 - protein, 8 aa, Artificial Sequence
  Synthetic construct
GFTVSNNY

SEQ ID NO: 11887 - protein, 8 aa, Artificial Sequence
  Synthetic construct
GFTFSSYA

SEQ ID NO: 11888 - protein, 8 aa, Artificial Sequence
  Synthetic construct
GFTFSSYG

SEQ ID NO: 11889 - protein, 10 aa, Artificial Sequence
  Synthetic construct
GFSLSNTRMG

SEQ ID NO: 11890 - protein, 10 aa, Artificial Sequence
  Synthetic construct
GFSLATSGVG

SEQ ID NO: 11891 - protein, 8 aa, Artificial Sequence
  Synthetic construct
GFNFDAYT

SEQ ID NO: 11892 - protein, 8 aa, Artificial Sequence
  Synthetic construct
GFTFSTSG

SEQ ID NO: 11893 - protein, 8 aa, Artificial Sequence
  Synthetic construct
GYSFATYW

SEQ ID NO: 11894 - protein, 8 aa, Artificial Sequence
  Synthetic construct
GFTFSSYA

SEQ ID NO: 11895 - protein, 8 aa, Artificial Sequence
  Synthetic construct
GFTFSDYY

SEQ ID NO: 11896 - protein, 8 aa, Artificial Sequence
  Synthetic construct
GFTFSSYA

SEQ ID NO: 11897 - protein, 8 aa, Artificial Sequence
  Synthetic construct
GGTFSTHA

SEQ ID NO: 11898 - protein, 8 aa, Artificial Sequence
  Synthetic construct
GFTFSSYG

SEQ ID NO: 11899 - protein, 8 aa, Artificial Sequence
  Synthetic construct
GFTFGDYA

SEQ ID NO: 11900 - protein, 8 aa, Artificial Sequence
  Synthetic construct
GFTFGAYW

SEQ ID NO: 11901 - protein, 8 aa, Artificial Sequence
  Synthetic construct
GFTFSSYS

SEQ ID NO: 11902 - protein, 8 aa, Artificial Sequence
  Synthetic construct
GFTFNSYS

SEQ ID NO: 11903 - protein, 8 aa, Artificial Sequence
  Synthetic construct
GFTFRSFA

SEQ ID NO: 11904 - protein, 8 aa, Artificial Sequence
  Synthetic construct
GFTFSDSY

SEQ ID NO: 11905 - protein, 10 aa, Artificial Sequence
  Synthetic construct
GGSISSSSYY

SEQ ID NO: 11906 - protein, 8 aa, Artificial Sequence
  Synthetic construct
GFSFPTFD

SEQ ID NO: 11907 - protein, 8 aa, Artificial Sequence
  Synthetic construct
GYSFTSYW

SEQ ID NO: 11908 - protein, 10 aa, Artificial Sequence
  Synthetic construct
GGSISSSNYY

SEQ ID NO: 11909 - protein, 8 aa, Artificial Sequence
  Synthetic construct
GFTFSTYP

SEQ ID NO: 11910 - protein, 8 aa, Artificial Sequence
  Synthetic construct
GGSFNSYS

SEQ ID NO: 11911 - protein, 8 aa, Artificial Sequence
  Synthetic construct
GYIFTTYY

SEQ ID NO: 11912 - protein, 8 aa, Artificial Sequence
  Synthetic construct
GFTFSNAW

SEQ ID NO: 11913 - protein, 8 aa, Artificial Sequence
  Synthetic construct
GFTFSSYS

SEQ ID NO: 11914 - protein, 8 aa, Artificial Sequence
  Synthetic construct
GGSISSYY

SEQ ID NO: 11915 - protein, 8 aa, Artificial Sequence
  Synthetic construct
GFTFSSYA

SEQ ID NO: 11916 - protein, 8 aa, Artificial Sequence
  Synthetic construct
GYTFTGYY

SEQ ID NO: 11917 - protein, 8 aa, Artificial Sequence
  Synthetic construct
GFTFSGSA

SEQ ID NO: 11918 - protein, 8 aa, Artificial Sequence
  Synthetic construct
GYSFATYW

SEQ ID NO: 11919 - protein, 8 aa, Artificial Sequence
  Synthetic construct
GFTLTGQG

SEQ ID NO: 11920 - protein, 8 aa, Artificial Sequence
  Synthetic construct
GYTFTDYY

SEQ ID NO: 11921 - protein, 8 aa, Artificial Sequence
  Synthetic construct
EFTFSSYA

SEQ ID NO: 11922 - protein, 8 aa, Artificial Sequence
  Synthetic construct
GFTFSAYG

SEQ ID NO: 11923 - protein, 10 aa, Artificial Sequence
  Synthetic construct
GGSVTSNDFY

SEQ ID NO: 11924 - protein, 10 aa, Artificial Sequence
  Synthetic construct
GGSISSSSYY

SEQ ID NO: 11925 - protein, 8 aa, Artificial Sequence
  Synthetic construct
GFTFSSYW

SEQ ID NO: 11926 - protein, 8 aa, Artificial Sequence
  Synthetic construct
GGTFSKYT

SEQ ID NO: 11927 - protein, 8 aa, Artificial Sequence
  Synthetic construct
GYPFTRDG

SEQ ID NO: 11928 - protein, 8 aa, Artificial Sequence
  Synthetic construct
GYTFTSYD

SEQ ID NO: 11929 - protein, 8 aa, Artificial Sequence
  Synthetic construct
GFKFDTYN

SEQ ID NO: 11930 - protein, 8 aa, Artificial Sequence
  Synthetic construct
GFSFVTSW

SEQ ID NO: 11931 - protein, 8 aa, Artificial Sequence
  Synthetic construct
GYTFTSYY

SEQ ID NO: 11932 - protein, 10 aa, Artificial Sequence
  Synthetic construct
GGSISSGGYY

SEQ ID NO: 11933 - protein, 8 aa, Artificial Sequence
  Synthetic construct
GFTFSSYS

SEQ ID NO: 11934 - protein, 8 aa, Artificial Sequence
  Synthetic construct
GFTLSSHA

SEQ ID NO: 11935 - protein, 10 aa, Artificial Sequence
  Synthetic construct
GGSIDSSGYY

SEQ ID NO: 11936 - protein, 8 aa, Artificial Sequence
  Synthetic construct
GFTFSSYA

SEQ ID NO: 11937 - protein, 8 aa, Artificial Sequence
  Synthetic construct
GFTFSSYG

SEQ ID NO: 11938 - protein, 8 aa, Artificial Sequence
  Synthetic construct
GYTFTDYY

SEQ ID NO: 11939 - protein, 8 aa, Artificial Sequence
  Synthetic construct
GYSFATYW

SEQ ID NO: 11940 - protein, 8 aa, Artificial Sequence
  Synthetic construct
GFSFSDYA

SEQ ID NO: 11941 - protein, 8 aa, Artificial Sequence
  Synthetic construct
GFVFSSYP

SEQ ID NO: 11942 - protein, 8 aa, Artificial Sequence
  Synthetic construct
GFSFGTYA

SEQ ID NO: 11943 - protein, 8 aa, Artificial Sequence
  Synthetic construct
GFTFSRYA

SEQ ID NO: 11944 - protein, 8 aa, Artificial Sequence
  Synthetic construct
GYTFTSYA

SEQ ID NO: 11945 - protein, 8 aa, Artificial Sequence
  Synthetic construct
GYTFTSYY

SEQ ID NO: 11946 - protein, 8 aa, Artificial Sequence
  Synthetic construct
GYTFTTYY

SEQ ID NO: 11947 - protein, 8 aa, Artificial Sequence
  Synthetic construct
GFTFSSHW

SEQ ID NO: 11948 - protein, 8 aa, Artificial Sequence
  Synthetic construct
GFTFGDYA

SEQ ID NO: 11949 - protein, 8 aa, Artificial Sequence
  Synthetic construct
GFTFGDYA

SEQ ID NO: 11950 - protein, 8 aa, Artificial Sequence
  Synthetic construct
GFTFSSYW

SEQ ID NO: 11951 - protein, 8 aa, Artificial Sequence
  Synthetic construct
GGTFRNYG

SEQ ID NO: 11952 - protein, 9 aa, Artificial Sequence
  Synthetic construct
GASISSSNW

SEQ ID NO: 11953 - protein, 8 aa, Artificial Sequence
  Synthetic construct
GFTFSSYA

SEQ ID NO: 11954 - protein, 8 aa, Artificial Sequence
  Synthetic construct
GFTFSSYG

SEQ ID NO: 11955 - protein, 8 aa, Artificial Sequence
  Synthetic construct
GFTFSSYS

SEQ ID NO: 11956 - protein, 8 aa, Artificial Sequence
  Synthetic construct
GFTFSSYS

SEQ ID NO: 11957 - protein, 8 aa, Artificial Sequence
  Synthetic construct
GFVFRSYG

SEQ ID NO: 11958 - protein, 8 aa, Artificial Sequence
  Synthetic construct
GFTFADYA

SEQ ID NO: 11959 - protein, 8 aa, Artificial Sequence
  Synthetic construct
GFTFSSYW

SEQ ID NO: 11960 - protein, 8 aa, Artificial Sequence
  Synthetic construct
AGTFGAFA

SEQ ID NO: 11961 - protein, 8 aa, Artificial Sequence
  Synthetic construct
GFTFSGSA

SEQ ID NO: 11962 - protein, 8 aa, Artificial Sequence
  Synthetic construct
GFTFRSYT

SEQ ID NO: 11963 - protein, 10 aa, Artificial Sequence
  Synthetic construct
GGSITTGGYY

SEQ ID NO: 11964 - protein, 10 aa, Artificial Sequence
  Synthetic construct
GGSITTGGYY

SEQ ID NO: 11965 - protein, 8 aa, Artificial Sequence
  Synthetic construct
GGSFSGNS

SEQ ID NO: 11966 - protein, 8 aa, Artificial Sequence
  Synthetic construct
GFTFRNHA

SEQ ID NO: 11967 - protein, 8 aa, Artificial Sequence
  Synthetic construct
GFSVKQNY

SEQ ID NO: 11968 - protein, 8 aa, Artificial Sequence
  Synthetic construct
GYNFYKFS

SEQ ID NO: 11969 - protein, 8 aa, Artificial Sequence
  Synthetic construct
GYSFATYW

SEQ ID NO: 11970 - protein, 8 aa, Artificial Sequence
  Synthetic construct
GFTFSNAW

SEQ ID NO: 11971 - protein, 10 aa, Artificial Sequence
  Synthetic construct
GGSINSGSHY

SEQ ID NO: 11972 - protein, 8 aa, Artificial Sequence
  Synthetic construct
GFTFSNNW

SEQ ID NO: 11973 - protein, 10 aa, Artificial Sequence
  Synthetic construct
GGSIISYTYF

SEQ ID NO: 11974 - protein, 8 aa, Artificial Sequence
  Synthetic construct
GFTFSSYG

SEQ ID NO: 11975 - protein, 8 aa, Artificial Sequence
  Synthetic construct
GFTFSSYS

SEQ ID NO: 11976 - protein, 8 aa, Artificial Sequence
  Synthetic construct
GYTFTSHY

SEQ ID NO: 11977 - protein, 8 aa, Artificial Sequence
  Synthetic construct
GFTFVDYG

SEQ ID NO: 11978 - protein, 8 aa, Artificial Sequence
  Synthetic construct
GYTFTSYA

SEQ ID NO: 11979 - protein, 8 aa, Artificial Sequence
  Synthetic construct
GYTFSDYA

SEQ ID NO: 11980 - protein, 8 aa, Artificial Sequence
  Synthetic construct
GYSFATYW

SEQ ID NO: 11981 - protein, 8 aa, Artificial Sequence
  Synthetic construct
GFTFSSYG

SEQ ID NO: 11982 - protein, 8 aa, Artificial Sequence
  Synthetic construct
GGSISSYY

SEQ ID NO: 11983 - protein, 10 aa, Artificial Sequence
  Synthetic construct
GGSISSSSYY

SEQ ID NO: 11984 - protein, 8 aa, Artificial Sequence
  Synthetic construct
GFTFSSYS

SEQ ID NO: 11985 - protein, 8 aa, Artificial Sequence
  Synthetic construct
GFMFSGSY

SEQ ID NO: 11986 - protein, 8 aa, Artificial Sequence
  Synthetic construct
GYTFTSYA

SEQ ID NO: 11987 - protein, 8 aa, Artificial Sequence
  Synthetic construct
GFTFSSYG

SEQ ID NO: 11988 - protein, 8 aa, Artificial Sequence
  Synthetic construct
GGTFGRQS

SEQ ID NO: 11989 - protein, 10 aa, Artificial Sequence
  Synthetic construct
GFSLSTSGVG

SEQ ID NO: 11990 - protein, 8 aa, Artificial Sequence
  Synthetic construct
GFTLSSYW

SEQ ID NO: 11991 - protein, 8 aa, Artificial Sequence
  Synthetic construct
GFTFSSYA

SEQ ID NO: 11992 - protein, 8 aa, Artificial Sequence
  Synthetic construct
GFTFSSYA

SEQ ID NO: 11993 - protein, 10 aa, Artificial Sequence
  Synthetic construct
GGSISSGSYY

SEQ ID NO: 11994 - protein, 8 aa, Artificial Sequence
  Synthetic construct
GFTFSSYA

SEQ ID NO: 11995 - protein, 10 aa, Artificial Sequence
  Synthetic construct
GGSISSGGYS

SEQ ID NO: 11996 - protein, 10 aa, Artificial Sequence
  Synthetic construct
GFSLATSGVG

SEQ ID NO: 11997 - protein, 8 aa, Artificial Sequence
  Synthetic construct
GFTFSSYA

SEQ ID NO: 11998 - protein, 10 aa, Artificial Sequence
  Synthetic construct
GGSISSSSYY

SEQ ID NO: 11999 - protein, 8 aa, Artificial Sequence
  Synthetic construct
GGSVKGYY

SEQ ID NO: 12000 - protein, 8 aa, Artificial Sequence
  Synthetic construct
GFTFSSYA

SEQ ID NO: 12001 - protein, 8 aa, Artificial Sequence
  Synthetic construct
GFIFDNHA

SEQ ID NO: 12002 - protein, 10 aa, Artificial Sequence
  Synthetic construct
GGSVSSGSYY

SEQ ID NO: 12003 - protein, 8 aa, Artificial Sequence
  Synthetic construct
GFSVSDNY

SEQ ID NO: 12004 - protein, 10 aa, Artificial Sequence
  Synthetic construct
GGSISSGSYY

SEQ ID NO: 12005 - protein, 8 aa, Artificial Sequence
  Synthetic construct
AASMTGYY

SEQ ID NO: 12006 - protein, 10 aa, Artificial Sequence
  Synthetic construct
GGSISSGDYS

SEQ ID NO: 12007 - protein, 8 aa, Artificial Sequence
  Synthetic construct
GFTFSSYR

SEQ ID NO: 12008 - protein, 8 aa, Artificial Sequence
  Synthetic construct
GYTFTSYG

SEQ ID NO: 12009 - protein, 8 aa, Artificial Sequence
  Synthetic construct
GGSFSGFY

SEQ ID NO: 12010 - protein, 8 aa, Artificial Sequence
  Synthetic construct
GGSISSYY

SEQ ID NO: 12011 - protein, 8 aa, Artificial Sequence
  Synthetic construct
GFSFPTFD

SEQ ID NO: 12012 - protein, 8 aa, Artificial Sequence
  Synthetic construct
GFTFSSYW

SEQ ID NO: 12013 - protein, 8 aa, Artificial Sequence
  Synthetic construct
GFTFSSYS

SEQ ID NO: 12014 - protein, 10 aa, Artificial Sequence
  Synthetic construct
GGSISSSSYY

SEQ ID NO: 12015 - protein, 8 aa, Artificial Sequence
  Synthetic construct
GYTFTSYA

SEQ ID NO: 12016 - protein, 8 aa, Artificial Sequence
  Synthetic construct
GFTFRDYS

SEQ ID NO: 12017 - protein, 10 aa, Artificial Sequence
  Synthetic construct
GGSTSSSSYY

SEQ ID NO: 12018 - protein, 8 aa, Artificial Sequence
  Synthetic construct
GYTFTGYY

SEQ ID NO: 12019 - protein, 8 aa, Artificial Sequence
  Synthetic construct
GFTFKSYD

SEQ ID NO: 12020 - protein, 8 aa, Artificial Sequence
  Synthetic construct
GYSFTAYY

SEQ ID NO: 12021 - protein, 8 aa, Artificial Sequence
  Synthetic construct
GFTLSSYV

SEQ ID NO: 12022 - protein, 8 aa, Artificial Sequence
  Synthetic construct
GYTFTSYY

SEQ ID NO: 12023 - protein, 9 aa, Artificial Sequence
  Synthetic construct
GASISRSDW

SEQ ID NO: 12024 - protein, 8 aa, Artificial Sequence
  Synthetic construct
GFTFSNYA

SEQ ID NO: 12025 - protein, 9 aa, Artificial Sequence
  Synthetic construct
GGNITNTNW

SEQ ID NO: 12026 - protein, 8 aa, Artificial Sequence
  Synthetic construct
GFSVSRND

SEQ ID NO: 12027 - protein, 8 aa, Artificial Sequence
  Synthetic construct
GFTFSSYA

SEQ ID NO: 12028 - protein, 8 aa, Artificial Sequence
  Synthetic construct
GFTFSSYW

SEQ ID NO: 12029 - protein, 8 aa, Artificial Sequence
  Synthetic construct
GYTFTTFG

SEQ ID NO: 12030 - protein, 8 aa, Artificial Sequence
  Synthetic construct
GYTFTSYG

SEQ ID NO: 12031 - protein, 10 aa, Artificial Sequence
  Synthetic construct
GFSLATSGVG

SEQ ID NO: 12032 - protein, 10 aa, Artificial Sequence
  Synthetic construct
GFSLATSGVG

SEQ ID NO: 12033 - protein, 8 aa, Artificial Sequence
  Synthetic construct
GFPFTTHA

SEQ ID NO: 12034 - protein, 8 aa, Artificial Sequence
  Synthetic construct
GFAFSNYD

SEQ ID NO: 12035 - protein, 8 aa, Artificial Sequence
  Synthetic construct
GYTFTAYY

SEQ ID NO: 12036 - protein, 8 aa, Artificial Sequence
  Synthetic construct
GYTFTDYY

SEQ ID NO: 12037 - protein, 8 aa, Artificial Sequence
  Synthetic construct
GYTFAAYY

SEQ ID NO: 12038 - protein, 8 aa, Artificial Sequence
  Synthetic construct
GGSISTYY

SEQ ID NO: 12039 - protein, 8 aa, Artificial Sequence
  Synthetic construct
GFIFSTYP

SEQ ID NO: 12040 - protein, 10 aa, Artificial Sequence
  Synthetic construct
GGSISSSSYY

SEQ ID NO: 12041 - protein, 8 aa, Artificial Sequence
  Synthetic construct
GYTFTSYY

SEQ ID NO: 12042 - protein, 8 aa, Artificial Sequence
  Synthetic construct
GFTFSSYS

SEQ ID NO: 12043 - protein, 8 aa, Artificial Sequence
  Synthetic construct
GFTFSSYA

SEQ ID NO: 12044 - protein, 8 aa, Artificial Sequence
  Synthetic construct
GGSFSGYY

SEQ ID NO: 12045 - protein, 8 aa, Artificial Sequence
  Synthetic construct
GGSFSNSY

SEQ ID NO: 12046 - protein, 10 aa, Artificial Sequence
  Synthetic construct
GGSISSGSYY

SEQ ID NO: 12047 - protein, 10 aa, Artificial Sequence
  Synthetic construct
GASISSSNYY

SEQ ID NO: 12048 - protein, 8 aa, Artificial Sequence
  Synthetic construct
GFTFIAYD

SEQ ID NO: 12049 - protein, 8 aa, Artificial Sequence
  Synthetic construct
GYTFTGYY

SEQ ID NO: 12050 - protein, 10 aa, Artificial Sequence
  Synthetic construct
GGSISSGSYY

SEQ ID NO: 12051 - protein, 10 aa, Artificial Sequence
  Synthetic construct
GGSISSSSYY

SEQ ID NO: 12052 - protein, 10 aa, Artificial Sequence
  Synthetic construct
GGSISSSIYY

SEQ ID NO: 12053 - protein, 10 aa, Artificial Sequence
  Synthetic construct
GDSVSSDSAA

SEQ ID NO: 12054 - protein, 9 aa, Artificial Sequence
  Synthetic construct
GGSISSSNW

SEQ ID NO: 12055 - protein, 8 aa, Artificial Sequence
  Synthetic construct
GDSIRSYY

SEQ ID NO: 12056 - protein, 8 aa, Artificial Sequence
  Synthetic construct
GFNLNDHG

SEQ ID NO: 12057 - protein, 8 aa, Artificial Sequence
  Synthetic construct
GYTFIDFY

SEQ ID NO: 12058 - protein, 8 aa, Artificial Sequence
  Synthetic construct
GFTFSSYA

SEQ ID NO: 12059 - protein, 8 aa, Artificial Sequence
  Synthetic construct
GFTFSNAW

SEQ ID NO: 12060 - protein, 8 aa, Artificial Sequence
  Synthetic construct
GGTFSSYT

SEQ ID NO: 12061 - protein, 8 aa, Artificial Sequence
  Synthetic construct
GFTFSSYG

SEQ ID NO: 12062 - protein, 8 aa, Artificial Sequence
  Synthetic construct
GFTVSSNY

SEQ ID NO: 12063 - protein, 8 aa, Artificial Sequence
  Synthetic construct
GFTVSNNY

SEQ ID NO: 12064 - protein, 9 aa, Artificial Sequence
  Synthetic construct
GGSFSGSNW

SEQ ID NO: 12065 - protein, 8 aa, Artificial Sequence
  Synthetic construct
GGSISSYY

SEQ ID NO: 12066 - protein, 8 aa, Artificial Sequence
  Synthetic construct
GFTFSSYA

SEQ ID NO: 12067 - protein, 10 aa, Artificial Sequence
  Synthetic construct
GGSISSNYYY

SEQ ID NO: 12068 - protein, 10 aa, Artificial Sequence
  Synthetic construct
GFSLTTSSMC

SEQ ID NO: 12069 - protein, 8 aa, Artificial Sequence
  Synthetic construct
DYTFTDYF

SEQ ID NO: 12070 - protein, 8 aa, Artificial Sequence
  Synthetic construct
GFTFSSYA

SEQ ID NO: 12071 - protein, 9 aa, Artificial Sequence
  Synthetic construct
GGSISSSNW

SEQ ID NO: 12072 - protein, 8 aa, Artificial Sequence
  Synthetic construct
GFNLRSYG

SEQ ID NO: 12073 - protein, 8 aa, Artificial Sequence
  Synthetic construct
GFTFRFSA

SEQ ID NO: 12074 - protein, 10 aa, Artificial Sequence
  Synthetic construct
GGSISSGSYY

SEQ ID NO: 12075 - protein, 8 aa, Artificial Sequence
  Synthetic construct
GFTFSSYW

SEQ ID NO: 12076 - protein, 8 aa, Artificial Sequence
  Synthetic construct
GFTFSSYS

SEQ ID NO: 12077 - protein, 8 aa, Artificial Sequence
  Synthetic construct
GFTFRNYP

SEQ ID NO: 12078 - protein, 8 aa, Artificial Sequence
  Synthetic construct
GGTFSSYA

SEQ ID NO: 12079 - protein, 8 aa, Artificial Sequence
  Synthetic construct
GFTFSSYA

SEQ ID NO: 12080 - protein, 10 aa, Artificial Sequence
  Synthetic construct
GFSLTMNGEG

SEQ ID NO: 12081 - protein, 8 aa, Artificial Sequence
  Synthetic construct
GFTFSRYW

SEQ ID NO: 12082 - protein, 8 aa, Artificial Sequence
  Synthetic construct
GFKFSASA

SEQ ID NO: 12083 - protein, 10 aa, Artificial Sequence
  Synthetic construct
GFSLATSGVG

SEQ ID NO: 12084 - protein, 8 aa, Artificial Sequence
  Synthetic construct
GYTFTSYY

SEQ ID NO: 12085 - protein, 8 aa, Artificial Sequence
  Synthetic construct
GFTFSSYA

SEQ ID NO: 12086 - protein, 8 aa, Artificial Sequence
  Synthetic construct
GFTVSTNY

SEQ ID NO: 12087 - protein, 8 aa, Artificial Sequence
  Synthetic construct
GGSINSYY

SEQ ID NO: 12088 - protein, 8 aa, Artificial Sequence
  Synthetic construct
GFTFSSYW

SEQ ID NO: 12089 - protein, 8 aa, Artificial Sequence
  Synthetic construct
GFTFKSYD

SEQ ID NO: 12090 - protein, 10 aa, Artificial Sequence
  Synthetic construct
GWSISSGPYY

SEQ ID NO: 12091 - protein, 10 aa, Artificial Sequence
  Synthetic construct
GGSISSSSYY

SEQ ID NO: 12092 - protein, 8 aa, Artificial Sequence
  Synthetic construct
GFTFDDYY

SEQ ID NO: 12093 - protein, 8 aa, Artificial Sequence
  Synthetic construct
GFTFSDYY

SEQ ID NO: 12094 - protein, 8 aa, Artificial Sequence
  Synthetic construct
GFSLSRYT

SEQ ID NO: 12095 - protein, 8 aa, Artificial Sequence
  Synthetic construct
GGSISSYY

SEQ ID NO: 12096 - protein, 8 aa, Artificial Sequence
  Synthetic construct
GYTFTSYY

SEQ ID NO: 12097 - protein, 8 aa, Artificial Sequence
  Synthetic construct
GYTFTNYA

SEQ ID NO: 12098 - protein, 8 aa, Artificial Sequence
  Synthetic construct
GFTFSSYS

SEQ ID NO: 12099 - protein, 8 aa, Artificial Sequence
  Synthetic construct
GFTFSSYA

SEQ ID NO: 12100 - protein, 10 aa, Artificial Sequence
  Synthetic construct
GGSISSSSYY

SEQ ID NO: 12101 - protein, 8 aa, Artificial Sequence
  Synthetic construct
GYSFATYW

SEQ ID NO: 12102 - protein, 10 aa, Artificial Sequence
  Synthetic construct
GGSINNGDYY

SEQ ID NO: 12103 - protein, 10 aa, Artificial Sequence
  Synthetic construct
GGFPSGGSYY

SEQ ID NO: 12104 - protein, 8 aa, Artificial Sequence
  Synthetic construct
GFIFRSYG

SEQ ID NO: 12105 - protein, 8 aa, Artificial Sequence
  Synthetic construct
GGSISTFY

SEQ ID NO: 12106 - protein, 8 aa, Artificial Sequence
  Synthetic construct
GFTFSSYW

SEQ ID NO: 12107 - protein, 8 aa, Artificial Sequence
  Synthetic construct
GYTFTGYY

SEQ ID NO: 12108 - protein, 10 aa, Artificial Sequence
  Synthetic construct
GGSINRGTYY

SEQ ID NO: 12109 - protein, 8 aa, Artificial Sequence
  Synthetic construct
GFTFSSYG

SEQ ID NO: 12110 - protein, 10 aa, Artificial Sequence
  Synthetic construct
GDSINSGSHY

SEQ ID NO: 12111 - protein, 8 aa, Artificial Sequence
  Synthetic construct
GFTFSDYT

SEQ ID NO: 12112 - protein, 8 aa, Artificial Sequence
  Synthetic construct
GFTFSSYS

SEQ ID NO: 12113 - protein, 8 aa, Artificial Sequence
  Synthetic construct
GFTFSSYS

SEQ ID NO: 12114 - protein, 8 aa, Artificial Sequence
  Synthetic construct
GFRFVSSA

SEQ ID NO: 12115 - protein, 8 aa, Artificial Sequence
  Synthetic construct
GFTFSSYS

SEQ ID NO: 12116 - protein, 8 aa, Artificial Sequence
  Synthetic construct
GFTFNKYG

SEQ ID NO: 12117 - protein, 8 aa, Artificial Sequence
  Synthetic construct
GFTFSSYT

SEQ ID NO: 12118 - protein, 8 aa, Artificial Sequence
  Synthetic construct
GFTFSSYS

SEQ ID NO: 12119 - protein, 8 aa, Artificial Sequence
  Synthetic construct
GFNVNNNY

SEQ ID NO: 12120 - protein, 8 aa, Artificial Sequence
  Synthetic construct
GFSFTNAW

SEQ ID NO: 12121 - protein, 8 aa, Artificial Sequence
  Synthetic construct
GFTFSSYG

SEQ ID NO: 12122 - protein, 8 aa, Artificial Sequence
  Synthetic construct
GFTFKSYD

SEQ ID NO: 12123 - protein, 8 aa, Artificial Sequence
  Synthetic construct
GGSISEYH

SEQ ID NO: 12124 - protein, 8 aa, Artificial Sequence
  Synthetic construct
GYSFTSYW

SEQ ID NO: 12125 - protein, 8 aa, Artificial Sequence
  Synthetic construct
GYTFTGYY

SEQ ID NO: 12126 - protein, 8 aa, Artificial Sequence
  Synthetic construct
GGYISNYY

SEQ ID NO: 12127 - protein, 8 aa, Artificial Sequence
  Synthetic construct
GFTFSTYG

SEQ ID NO: 12128 - protein, 8 aa, Artificial Sequence
  Synthetic construct
GGSMSSYY

SEQ ID NO: 12129 - protein, 10 aa, Artificial Sequence
  Synthetic construct
GGSISSGGYS

SEQ ID NO: 12130 - protein, 8 aa, Artificial Sequence
  Synthetic construct
GFNFDDYA

SEQ ID NO: 12131 - protein, 8 aa, Artificial Sequence
  Synthetic construct
GGSFSGYY

SEQ ID NO: 12132 - protein, 8 aa, Artificial Sequence
  Synthetic construct
GYTFANYP

SEQ ID NO: 12133 - protein, 8 aa, Artificial Sequence
  Synthetic construct
GGTFSSYA

SEQ ID NO: 12134 - protein, 8 aa, Artificial Sequence
  Synthetic construct
GFTFNNFA

SEQ ID NO: 12135 - protein, 8 aa, Artificial Sequence
  Synthetic construct
GFPFSSYA

SEQ ID NO: 12136 - protein, 8 aa, Artificial Sequence
  Synthetic construct
GFTFSSYS

SEQ ID NO: 12137 - protein, 8 aa, Artificial Sequence
  Synthetic construct
GYIFSLYA

SEQ ID NO: 12138 - protein, 8 aa, Artificial Sequence
  Synthetic construct
GFMFTSYY

SEQ ID NO: 12139 - protein, 8 aa, Artificial Sequence
  Synthetic construct
GGAFNSYA

SEQ ID NO: 12140 - protein, 8 aa, Artificial Sequence
  Synthetic construct
GGSFSGDL

SEQ ID NO: 12141 - protein, 8 aa, Artificial Sequence
  Synthetic construct
GYTFDDYF

SEQ ID NO: 12142 - protein, 8 aa, Artificial Sequence
  Synthetic construct
GFIFSTSV

SEQ ID NO: 12143 - protein, 8 aa, Artificial Sequence
  Synthetic construct
GYTFTTSW

SEQ ID NO: 12144 - protein, 8 aa, Artificial Sequence
  Synthetic construct
GFTFSTYG

SEQ ID NO: 12145 - protein, 8 aa, Artificial Sequence
  Synthetic construct
GGSISNHY

SEQ ID NO: 12146 - protein, 8 aa, Artificial Sequence
  Synthetic construct
GFTFNSYD

SEQ ID NO: 12147 - protein, 8 aa, Artificial Sequence
  Synthetic construct
GFSFVTSW

SEQ ID NO: 12148 - protein, 8 aa, Artificial Sequence
  Synthetic construct
GYPFTRDG

SEQ ID NO: 12149 - protein, 8 aa, Artificial Sequence
  Synthetic construct
GFTFSSYA

SEQ ID NO: 12150 - protein, 8 aa, Artificial Sequence
  Synthetic construct
GFTFSSYG

SEQ ID NO: 12151 - protein, 8 aa, Artificial Sequence
  Synthetic construct
GYSFTSYW

SEQ ID NO: 12152 - protein, 10 aa, Artificial Sequence
  Synthetic construct
GGSISSSSYY

SEQ ID NO: 12153 - protein, 8 aa, Artificial Sequence
  Synthetic construct
GFTFSSYA

SEQ ID NO: 12154 - protein, 8 aa, Artificial Sequence
  Synthetic construct
GYTFTGYY

SEQ ID NO: 12155 - protein, 8 aa, Artificial Sequence
  Synthetic construct
GYSFTGYY

SEQ ID NO: 12156 - protein, 8 aa, Artificial Sequence
  Synthetic construct
GGSFTNHY

SEQ ID NO: 12157 - protein, 8 aa, Artificial Sequence
  Synthetic construct
GYIFTRYP

SEQ ID NO: 12158 - protein, 8 aa, Artificial Sequence
  Synthetic construct
GFTFNNYA

SEQ ID NO: 12159 - protein, 9 aa, Artificial Sequence
  Synthetic construct
GGSISSSNW

SEQ ID NO: 12160 - protein, 10 aa, Artificial Sequence
  Synthetic construct
GGSISSSSYY

SEQ ID NO: 12161 - protein, 8 aa, Artificial Sequence
  Synthetic construct
GFTFKTYP

SEQ ID NO: 12162 - protein, 8 aa, Artificial Sequence
  Synthetic construct
GFTFSVYP

SEQ ID NO: 12163 - protein, 8 aa, Artificial Sequence
  Synthetic construct
SGSLSTYY

SEQ ID NO: 12164 - protein, 10 aa, Artificial Sequence
  Synthetic construct
GFSLSTSGMC

SEQ ID NO: 12165 - protein, 8 aa, Artificial Sequence
  Synthetic construct
GFTFDDYA

SEQ ID NO: 12166 - protein, 8 aa, Artificial Sequence
  Synthetic construct
GYIFTGYY

SEQ ID NO: 12167 - protein, 8 aa, Artificial Sequence
  Synthetic construct
GDTFSQDG

SEQ ID NO: 12168 - protein, 8 aa, Artificial Sequence
  Synthetic construct
GFTFNTYR

SEQ ID NO: 12169 - protein, 8 aa, Artificial Sequence
  Synthetic construct
GYSFATYW

SEQ ID NO: 12170 - protein, 8 aa, Artificial Sequence
  Synthetic construct
GLTFIEYW

SEQ ID NO: 12171 - protein, 8 aa, Artificial Sequence
  Synthetic construct
GFTFSSYA

SEQ ID NO: 12172 - protein, 10 aa, Artificial Sequence
  Synthetic construct
GDSVSSNSAA

SEQ ID NO: 12173 - protein, 8 aa, Artificial Sequence
  Synthetic construct
GFTFSSYS

SEQ ID NO: 12174 - protein, 8 aa, Artificial Sequence
  Synthetic construct
GFTVSSNY

SEQ ID NO: 12175 - protein, 10 aa, Artificial Sequence
  Synthetic construct
GGSINSGSHY

SEQ ID NO: 12176 - protein, 8 aa, Artificial Sequence
  Synthetic construct
GYTFDKYY

SEQ ID NO: 12177 - protein, 8 aa, Artificial Sequence
  Synthetic construct
GYTFTDHY

SEQ ID NO: 12178 - protein, 8 aa, Artificial Sequence
  Synthetic construct
GFTVSNNY

SEQ ID NO: 12179 - protein, 8 aa, Artificial Sequence
  Synthetic construct
GFTFSDYY

SEQ ID NO: 12180 - protein, 8 aa, Artificial Sequence
  Synthetic construct
GHRFSTYF

SEQ ID NO: 12181 - protein, 8 aa, Artificial Sequence
  Synthetic construct
GLILSDYV

SEQ ID NO: 12182 - protein, 8 aa, Artificial Sequence
  Synthetic construct
GYSFITYD

SEQ ID NO: 12183 - protein, 8 aa, Artificial Sequence
  Synthetic construct
GFTFNNAW

SEQ ID NO: 12184 - protein, 10 aa, Artificial Sequence
  Synthetic construct
GFSLSTSGKG

SEQ ID NO: 12185 - protein, 8 aa, Artificial Sequence
  Synthetic construct
GYTFTSYD

SEQ ID NO: 12186 - protein, 8 aa, Artificial Sequence
  Synthetic construct
GFTFSFSP

SEQ ID NO: 12187 - protein, 8 aa, Artificial Sequence
  Synthetic construct
GFTVSSNY

SEQ ID NO: 12188 - protein, 8 aa, Artificial Sequence
  Synthetic construct
GFTFSSYW

SEQ ID NO: 12189 - protein, 8 aa, Artificial Sequence
  Synthetic construct
GFAFGNYA

SEQ ID NO: 12190 - protein, 8 aa, Artificial Sequence
  Synthetic construct
GGTFSSYA

SEQ ID NO: 12191 - protein, 10 aa, Artificial Sequence
  Synthetic construct
GGSVNSGSDY

SEQ ID NO: 12192 - protein, 8 aa, Artificial Sequence
  Synthetic construct
GFTFSSYG

SEQ ID NO: 12193 - protein, 8 aa, Artificial Sequence
  Synthetic construct
GFTFSSYG

SEQ ID NO: 12194 - protein, 10 aa, Artificial Sequence
  Synthetic construct
GGSISSGSYY

SEQ ID NO: 12195 - protein, 8 aa, Artificial Sequence
  Synthetic construct
GFSSSDAW

SEQ ID NO: 12196 - protein, 8 aa, Artificial Sequence
  Synthetic construct
GYTFTSYY

SEQ ID NO: 12197 - protein, 8 aa, Artificial Sequence
  Synthetic construct
GASFSSHA

SEQ ID NO: 12198 - protein, 8 aa, Artificial Sequence
  Synthetic construct
GGSISSYY

SEQ ID NO: 12199 - protein, 8 aa, Artificial Sequence
  Synthetic construct
GYSFATYW

SEQ ID NO: 12200 - protein, 8 aa, Artificial Sequence
  Synthetic construct
GFTFSSYA

SEQ ID NO: 12201 - protein, 10 aa, Artificial Sequence
  Synthetic construct
GGSISSGDYY

SEQ ID NO: 12202 - protein, 8 aa, Artificial Sequence
  Synthetic construct
GFSFSTYG

SEQ ID NO: 12203 - protein, 8 aa, Artificial Sequence
  Synthetic construct
GFTFSSYS

SEQ ID NO: 12204 - protein, 8 aa, Artificial Sequence
  Synthetic construct
GFTFRNHA

SEQ ID NO: 12205 - protein, 8 aa, Artificial Sequence
  Synthetic construct
GYTFTSYY

SEQ ID NO: 12206 - protein, 6 aa, Artificial Sequence
  Synthetic construct
GFTFNG

SEQ ID NO: 12207 - protein, 8 aa, Artificial Sequence
  Synthetic construct
GYTFTKSG

SEQ ID NO: 12208 - protein, 8 aa, Artificial Sequence
  Synthetic construct
GYTFTSYG

SEQ ID NO: 12209 - protein, 8 aa, Artificial Sequence
  Synthetic construct
GFTFDQYA

SEQ ID NO: 12210 - protein, 8 aa, Artificial Sequence
  Synthetic construct
GFTFSRYW

SEQ ID NO: 12211 - protein, 8 aa, Artificial Sequence
  Synthetic construct
GYSFTTYW

SEQ ID NO: 12212 - protein, 8 aa, Artificial Sequence
  Synthetic construct
GGSTSSYY

SEQ ID NO: 12213 - protein, 8 aa, Artificial Sequence
  Synthetic construct
GFTFSNFW

SEQ ID NO: 12214 - protein, 8 aa, Artificial Sequence
  Synthetic construct
GYTFTSYG

SEQ ID NO: 12215 - protein, 8 aa, Artificial Sequence
  Synthetic construct
GFTFSSYG

SEQ ID NO: 12216 - protein, 8 aa, Artificial Sequence
  Synthetic construct
GFTFSSYS

SEQ ID NO: 12217 - protein, 8 aa, Artificial Sequence
  Synthetic construct
GGTFSSYA

SEQ ID NO: 12218 - protein, 8 aa, Artificial Sequence
  Synthetic construct
GYTFTSYG

SEQ ID NO: 12219 - protein, 8 aa, Artificial Sequence
  Synthetic construct
GVTYAADA

SEQ ID NO: 12220 - protein, 8 aa, Artificial Sequence
  Synthetic construct
GFAFGNYA

SEQ ID NO: 12221 - protein, 10 aa, Artificial Sequence
  Synthetic construct
GFSLDTSGVG

SEQ ID NO: 12222 - protein, 8 aa, Artificial Sequence
  Synthetic construct
GFIFSSYA

SEQ ID NO: 12223 - protein, 8 aa, Artificial Sequence
  Synthetic construct
GGSISGPS

SEQ ID NO: 12224 - protein, 8 aa, Artificial Sequence
  Synthetic construct
GYSFATYW

SEQ ID NO: 12225 - protein, 8 aa, Artificial Sequence
  Synthetic construct
GFTFNSYS

SEQ ID NO: 12226 - protein, 9 aa, Artificial Sequence
  Synthetic construct
GGSISSSNW

SEQ ID NO: 12227 - protein, 8 aa, Artificial Sequence
  Synthetic construct
GFTFSSYS

SEQ ID NO: 12228 - protein, 8 aa, Artificial Sequence
  Synthetic construct
GFNFDDYA

SEQ ID NO: 12229 - protein, 8 aa, Artificial Sequence
  Synthetic construct
GFTFSAYV

SEQ ID NO: 12230 - protein, 8 aa, Artificial Sequence
  Synthetic construct
EFTFSNAW

SEQ ID NO: 12231 - protein, 8 aa, Artificial Sequence
  Synthetic construct
GFTFSSYA

SEQ ID NO: 12232 - protein, 8 aa, Artificial Sequence
  Synthetic construct
GFSFRDYA

SEQ ID NO: 12233 - protein, 8 aa, Artificial Sequence
  Synthetic construct
GFSVSIDY

SEQ ID NO: 12234 - protein, 8 aa, Artificial Sequence
  Synthetic construct
GYTFTSYD

SEQ ID NO: 12235 - protein, 8 aa, Artificial Sequence
  Synthetic construct
GFTFSSYS

SEQ ID NO: 12236 - protein, 8 aa, Artificial Sequence
  Synthetic construct
RFTFDDYA

SEQ ID NO: 12237 - protein, 10 aa, Artificial Sequence
  Synthetic construct
RGSISNGGYY

SEQ ID NO: 12238 - protein, 8 aa, Artificial Sequence
  Synthetic construct
GYSFSRYW

SEQ ID NO: 12239 - protein, 8 aa, Artificial Sequence
  Synthetic construct
GFTFSDYY

SEQ ID NO: 12240 - protein, 8 aa, Artificial Sequence
  Synthetic construct
GFTFTSYA

SEQ ID NO: 12241 - protein, 10 aa, Artificial Sequence
  Synthetic construct
GFSLATSGVG

SEQ ID NO: 12242 - protein, 8 aa, Artificial Sequence
  Synthetic construct
GFTFSSYG

SEQ ID NO: 12243 - protein, 10 aa, Artificial Sequence
  Synthetic construct
GGSISSGTYY

SEQ ID NO: 12244 - protein, 10 aa, Artificial Sequence
  Synthetic construct
GFSLSTSGVG

SEQ ID NO: 12245 - protein, 8 aa, Artificial Sequence
  Synthetic construct
GYTFAGHY

SEQ ID NO: 12246 - protein, 8 aa, Artificial Sequence
  Synthetic construct
GFTFSSYA

SEQ ID NO: 12247 - protein, 8 aa, Artificial Sequence
  Synthetic construct
GFTFSSYA

SEQ ID NO: 12248 - protein, 8 aa, Artificial Sequence
  Synthetic construct
GFTFSSYG

SEQ ID NO: 12249 - protein, 8 aa, Artificial Sequence
  Synthetic construct
GFTFRDYA

SEQ ID NO: 12250 - protein, 8 aa, Artificial Sequence
  Synthetic construct
GFSFPTFD

SEQ ID NO: 12251 - protein, 8 aa, Artificial Sequence
  Synthetic construct
GFTFSSYA

SEQ ID NO: 12252 - protein, 8 aa, Artificial Sequence
  Synthetic construct
GYTFTSYA

SEQ ID NO: 12253 - protein, 8 aa, Artificial Sequence
  Synthetic construct
GDSLRTLY

SEQ ID NO: 12254 - protein, 8 aa, Artificial Sequence
  Synthetic construct
GFTVSDNY

SEQ ID NO: 12255 - protein, 8 aa, Artificial Sequence
  Synthetic construct
GFNFGVYG

SEQ ID NO: 12256 - protein, 8 aa, Artificial Sequence
  Synthetic construct
GFLFNNYP

SEQ ID NO: 12257 - protein, 8 aa, Artificial Sequence
  Synthetic construct
GFTFSSYG

SEQ ID NO: 12258 - protein, 8 aa, Artificial Sequence
  Synthetic construct
GFTFSTYG

SEQ ID NO: 12259 - protein, 8 aa, Artificial Sequence
  Synthetic construct
GGSFSGYY

SEQ ID NO: 12260 - protein, 8 aa, Artificial Sequence
  Synthetic construct
EFTLSSYS

SEQ ID NO: 12261 - protein, 8 aa, Artificial Sequence
  Synthetic construct
GFTFRDYY

SEQ ID NO: 12262 - protein, 10 aa, Artificial Sequence
  Synthetic construct
GFSLSTNGVG

SEQ ID NO: 12263 - protein, 8 aa, Artificial Sequence
  Synthetic construct
GGTFSSYA

SEQ ID NO: 12264 - protein, 8 aa, Artificial Sequence
  Synthetic construct
GYPFTRDG

SEQ ID NO: 12265 - protein, 10 aa, Artificial Sequence
  Synthetic construct
GGSISSGGYY

SEQ ID NO: 12266 - protein, 8 aa, Artificial Sequence
  Synthetic construct
GYSFATYW

SEQ ID NO: 12267 - protein, 8 aa, Artificial Sequence
  Synthetic construct
GFSFSAYS

SEQ ID NO: 12268 - protein, 8 aa, Artificial Sequence
  Synthetic construct
GFTFSSYW

SEQ ID NO: 12269 - protein, 8 aa, Artificial Sequence
  Synthetic construct
GFTVSDYY

SEQ ID NO: 12270 - protein, 10 aa, Artificial Sequence
  Synthetic construct
GFSLATSGVG

SEQ ID NO: 12271 - protein, 10 aa, Artificial Sequence
  Synthetic construct
GFSLATSGVG

SEQ ID NO: 12272 - protein, 10 aa, Artificial Sequence
  Synthetic construct
GGSISSGDYY

SEQ ID NO: 12273 - protein, 8 aa, Artificial Sequence
  Synthetic construct
GYTFTSYY

SEQ ID NO: 12274 - protein, 8 aa, Artificial Sequence
  Synthetic construct
GYTFTNSA

SEQ ID NO: 12275 - protein, 8 aa, Artificial Sequence
  Synthetic construct
GASVNSHH

SEQ ID NO: 12276 - protein, 8 aa, Artificial Sequence
  Synthetic construct
GGSFSGHY

SEQ ID NO: 12277 - protein, 8 aa, Artificial Sequence
  Synthetic construct
GFTFSSYA

SEQ ID NO: 12278 - protein, 8 aa, Artificial Sequence
  Synthetic construct
GYSFTSYW

SEQ ID NO: 12279 - protein, 8 aa, Artificial Sequence
  Synthetic construct
GYTFTGYY

SEQ ID NO: 12280 - protein, 10 aa, Artificial Sequence
  Synthetic construct
GGSITTGGYY

SEQ ID NO: 12281 - protein, 8 aa, Artificial Sequence
  Synthetic construct
GFTFSSYA

SEQ ID NO: 12282 - protein, 10 aa, Artificial Sequence
  Synthetic construct
GGSISSSSYY

SEQ ID NO: 12283 - protein, 8 aa, Artificial Sequence
  Synthetic construct
GYTFTSYD

SEQ ID NO: 12284 - protein, 8 aa, Artificial Sequence
  Synthetic construct
GFSLNDYF

SEQ ID NO: 12285 - protein, 8 aa, Artificial Sequence
  Synthetic construct
GYSFSNYW

SEQ ID NO: 12286 - protein, 8 aa, Artificial Sequence
  Synthetic construct
GYTFTSYY

SEQ ID NO: 12287 - protein, 8 aa, Artificial Sequence
  Synthetic construct
GFTFSSYG

SEQ ID NO: 12288 - protein, 8 aa, Artificial Sequence
  Synthetic construct
GYTFTSYY

SEQ ID NO: 12289 - protein, 8 aa, Artificial Sequence
  Synthetic construct
GYNFTNYW

SEQ ID NO: 12290 - protein, 8 aa, Artificial Sequence
  Synthetic construct
GFSFSRYA

SEQ ID NO: 12291 - protein, 8 aa, Artificial Sequence
  Synthetic construct
GFTFSSYW

SEQ ID NO: 12292 - protein, 8 aa, Artificial Sequence
  Synthetic construct
GFTFSSYA

SEQ ID NO: 12293 - protein, 8 aa, Artificial Sequence
  Synthetic construct
GYSFTSYW

SEQ ID NO: 12294 - protein, 8 aa, Artificial Sequence
  Synthetic construct
GYTFTSYY

SEQ ID NO: 12295 - protein, 10 aa, Artificial Sequence
  Synthetic construct
GGSINSGSHY

SEQ ID NO: 12296 - protein, 10 aa, Artificial Sequence
  Synthetic construct
GGSISSSSYY

SEQ ID NO: 12297 - protein, 8 aa, Artificial Sequence
  Synthetic construct
GGSISNHY

SEQ ID NO: 12298 - protein, 8 aa, Artificial Sequence
  Synthetic construct
GFTFSRYT

SEQ ID NO: 12299 - protein, 8 aa, Artificial Sequence
  Synthetic construct
GGTFSSYT

SEQ ID NO: 12300 - protein, 8 aa, Artificial Sequence
  Synthetic construct
GFTFSAQG

SEQ ID NO: 12301 - protein, 8 aa, Artificial Sequence
  Synthetic construct
GYTFTSYG

SEQ ID NO: 12302 - protein, 8 aa, Artificial Sequence
  Synthetic construct
GYTFTNYY

SEQ ID NO: 12303 - protein, 8 aa, Artificial Sequence
  Synthetic construct
GYTFTGYY

SEQ ID NO: 12304 - protein, 8 aa, Artificial Sequence
  Synthetic construct
GFTLSRYG

SEQ ID NO: 12305 - protein, 8 aa, Artificial Sequence
  Synthetic construct
GFTFSSYS

SEQ ID NO: 12306 - protein, 8 aa, Artificial Sequence
  Synthetic construct
GFTFSSYA

SEQ ID NO: 12307 - protein, 10 aa, Artificial Sequence
  Synthetic construct
RGSITNTVYY

SEQ ID NO: 12308 - protein, 8 aa, Artificial Sequence
  Synthetic construct
GFTFSSYA

SEQ ID NO: 12309 - protein, 8 aa, Artificial Sequence
  Synthetic construct
GFTFTSYA

SEQ ID NO: 12310 - protein, 8 aa, Artificial Sequence
  Synthetic construct
GDTFGNFY

SEQ ID NO: 12311 - protein, 8 aa, Artificial Sequence
  Synthetic construct
GFTFDDYA

SEQ ID NO: 12312 - protein, 10 aa, Artificial Sequence
  Synthetic construct
GGSISSGSYY

SEQ ID NO: 12313 - protein, 10 aa, Artificial Sequence
  Synthetic construct
GGSISSSSYY

SEQ ID NO: 12314 - protein, 10 aa, Artificial Sequence
  Synthetic construct
GGSISSSSYY

SEQ ID NO: 12315 - protein, 8 aa, Artificial Sequence
  Synthetic construct
GYIFTDYY

SEQ ID NO: 12316 - protein, 8 aa, Artificial Sequence
  Synthetic construct
GYTFTGYY

SEQ ID NO: 12317 - protein, 8 aa, Artificial Sequence
  Synthetic construct
GYIFTNYA

SEQ ID NO: 12318 - protein, 10 aa, Artificial Sequence
  Synthetic construct
GFSLSTSGMG

SEQ ID NO: 12319 - protein, 8 aa, Artificial Sequence
  Synthetic construct
GFTFSSHA

SEQ ID NO: 12320 - protein, 8 aa, Artificial Sequence
  Synthetic construct
GYPFTRDG

SEQ ID NO: 12321 - protein, 8 aa, Artificial Sequence
  Synthetic construct
GYTFGDHY

SEQ ID NO: 12322 - protein, 10 aa, Artificial Sequence
  Synthetic construct
GGSISSGSYY

SEQ ID NO: 12323 - protein, 8 aa, Artificial Sequence
  Synthetic construct
GFTFSTHW

SEQ ID NO: 12324 - protein, 8 aa, Artificial Sequence
  Synthetic construct
GYIFSNYG

SEQ ID NO: 12325 - protein, 10 aa, Artificial Sequence
  Synthetic construct
GTSIGSGTYF

SEQ ID NO: 12326 - protein, 10 aa, Artificial Sequence
  Synthetic construct
GGSISSGSYY

SEQ ID NO: 12327 - protein, 8 aa, Artificial Sequence
  Synthetic construct
GFTFGDYA

SEQ ID NO: 12328 - protein, 8 aa, Artificial Sequence
  Synthetic construct
GYSFTSYW

SEQ ID NO: 12329 - protein, 8 aa, Artificial Sequence
  Synthetic construct
GFTFSSYA

SEQ ID NO: 12330 - protein, 8 aa, Artificial Sequence
  Synthetic construct
GYPFTRDG

SEQ ID NO: 12331 - protein, 8 aa, Artificial Sequence
  Synthetic construct
GFNFDEYT

SEQ ID NO: 12332 - protein, 8 aa, Artificial Sequence
  Synthetic construct
GFTFSSYA

SEQ ID NO: 12333 - protein, 8 aa, Artificial Sequence
  Synthetic construct
GFTLSEYA

SEQ ID NO: 12334 - protein, 10 aa, Artificial Sequence
  Synthetic construct
GFSLSTSGVG

SEQ ID NO: 12335 - protein, 10 aa, Artificial Sequence
  Synthetic construct
GGSVSSKTYY

SEQ ID NO: 12336 - protein, 8 aa, Artificial Sequence
  Synthetic construct
GFTFSSYA

SEQ ID NO: 12337 - protein, 8 aa, Artificial Sequence
  Synthetic construct
GFSFSSFS

SEQ ID NO: 12338 - protein, 8 aa, Artificial Sequence
  Synthetic construct
GFTFSTYS

SEQ ID NO: 12339 - protein, 8 aa, Artificial Sequence
  Synthetic construct
GYTFTGYY

SEQ ID NO: 12340 - protein, 8 aa, Artificial Sequence
  Synthetic construct
GFIFSDYG

SEQ ID NO: 12341 - protein, 8 aa, Artificial Sequence
  Synthetic construct
GGSFSGYY

SEQ ID NO: 12342 - protein, 8 aa, Artificial Sequence
  Synthetic construct
GYSFATYW

SEQ ID NO: 12343 - protein, 8 aa, Artificial Sequence
  Synthetic construct
GFTFSSHW

SEQ ID NO: 12344 - protein, 8 aa, Artificial Sequence
  Synthetic construct
GGSFSAYF

SEQ ID NO: 12345 - protein, 8 aa, Artificial Sequence
  Synthetic construct
GFTFSSYG

SEQ ID NO: 12346 - protein, 8 aa, Artificial Sequence
  Synthetic construct
GFTFSNAW

SEQ ID NO: 12347 - protein, 8 aa, Artificial Sequence
  Synthetic construct
GYSFSNYA

SEQ ID NO: 12348 - protein, 8 aa, Artificial Sequence
  Synthetic construct
GFTFTGSA

SEQ ID NO: 12349 - protein, 10 aa, Artificial Sequence
  Synthetic construct
GGSISSSSYY

SEQ ID NO: 12350 - protein, 8 aa, Artificial Sequence
  Synthetic construct
GYTLSDYG

SEQ ID NO: 12351 - protein, 8 aa, Artificial Sequence
  Synthetic construct
GFTFSSYW

SEQ ID NO: 12352 - protein, 8 aa, Artificial Sequence
  Synthetic construct
GYTFTGYY

SEQ ID NO: 12353 - protein, 8 aa, Artificial Sequence
  Synthetic construct
GFTFNDAW

SEQ ID NO: 12354 - protein, 8 aa, Artificial Sequence
  Synthetic construct
GLTVSTTY

SEQ ID NO: 12355 - protein, 8 aa, Artificial Sequence
  Synthetic construct
GFIFSSYD

SEQ ID NO: 12356 - protein, 10 aa, Artificial Sequence
  Synthetic construct
GGSISSSSYY

SEQ ID NO: 12357 - protein, 8 aa, Artificial Sequence
  Synthetic construct
GFTYDEYD

SEQ ID NO: 12358 - protein, 10 aa, Artificial Sequence
  Synthetic construct
DDSISKSAFY

SEQ ID NO: 12359 - protein, 10 aa, Artificial Sequence
  Synthetic construct
GGSIASNSYY

SEQ ID NO: 12360 - protein, 8 aa, Artificial Sequence
  Synthetic construct
GFTFSSYG

SEQ ID NO: 12361 - protein, 8 aa, Artificial Sequence
  Synthetic construct
GFTFSGYA

SEQ ID NO: 12362 - protein, 8 aa, Artificial Sequence
  Synthetic construct
AFDFSAYG

SEQ ID NO: 12363 - protein, 8 aa, Artificial Sequence
  Synthetic construct
GFSFRSYG

SEQ ID NO: 12364 - protein, 8 aa, Artificial Sequence
  Synthetic construct
GFTFNSYS

SEQ ID NO: 12365 - protein, 8 aa, Artificial Sequence
  Synthetic construct
GFTVSSNY

SEQ ID NO: 12366 - protein, 8 aa, Artificial Sequence
  Synthetic construct
GYDFKMYW

SEQ ID NO: 12367 - protein, 8 aa, Artificial Sequence
  Synthetic construct
GPTFRSFW

SEQ ID NO: 12368 - protein, 8 aa, Artificial Sequence
  Synthetic construct
GGSISSYY

SEQ ID NO: 12369 - protein, 8 aa, Artificial Sequence
  Synthetic construct
GFTFSDYY

SEQ ID NO: 12370 - protein, 10 aa, Artificial Sequence
  Synthetic construct
GGSLTSGGNS

SEQ ID NO: 12371 - protein, 8 aa, Artificial Sequence
  Synthetic construct
GFTVSSNY

SEQ ID NO: 12372 - protein, 8 aa, Artificial Sequence
  Synthetic construct
GFTFSSYA

SEQ ID NO: 12373 - protein, 8 aa, Artificial Sequence
  Synthetic construct
GFPFTTHA

SEQ ID NO: 12374 - protein, 8 aa, Artificial Sequence
  Synthetic construct
GFTFSSYW

SEQ ID NO: 12375 - protein, 10 aa, Artificial Sequence
  Synthetic construct
GGSISSSSYY

SEQ ID NO: 12376 - protein, 8 aa, Artificial Sequence
  Synthetic construct
GFTFSTHG

SEQ ID NO: 12377 - protein, 10 aa, Artificial Sequence
  Synthetic construct
GGSISSIGYY

SEQ ID NO: 12378 - protein, 10 aa, Artificial Sequence
  Synthetic construct
GGSITTGGYY

SEQ ID NO: 12379 - protein, 8 aa, Artificial Sequence
  Synthetic construct
GYSFSDYW

SEQ ID NO: 12380 - protein, 8 aa, Artificial Sequence
  Synthetic construct
GGSTRGYY

SEQ ID NO: 12381 - protein, 8 aa, Artificial Sequence
  Synthetic construct
GGSFSGYY

SEQ ID NO: 12382 - protein, 8 aa, Artificial Sequence
  Synthetic construct
GYSFATYW

SEQ ID NO: 12383 - protein, 8 aa, Artificial Sequence
  Synthetic construct
DGSFSGSY

SEQ ID NO: 12384 - protein, 8 aa, Artificial Sequence
  Synthetic construct
GFIFSDHY

SEQ ID NO: 12385 - protein, 8 aa, Artificial Sequence
  Synthetic construct
GGSFSGFY

SEQ ID NO: 12386 - protein, 8 aa, Artificial Sequence
  Synthetic construct
GLTFSNYP

SEQ ID NO: 12387 - protein, 10 aa, Artificial Sequence
  Synthetic construct
GGSISSGSYY

SEQ ID NO: 12388 - protein, 8 aa, Artificial Sequence
  Synthetic construct
GLSFSRYA

SEQ ID NO: 12389 - protein, 8 aa, Artificial Sequence
  Synthetic construct
GGSMSSYF

SEQ ID NO: 12390 - protein, 8 aa, Artificial Sequence
  Synthetic construct
GFTFSSYW

SEQ ID NO: 12391 - protein, 10 aa, Artificial Sequence
  Synthetic construct
GGSISSGGYY

SEQ ID NO: 12392 - protein, 8 aa, Artificial Sequence
  Synthetic construct
GFTFSSYA

SEQ ID NO: 12393 - protein, 10 aa, Artificial Sequence
  Synthetic construct
GGSISSSSYY

SEQ ID NO: 12394 - protein, 8 aa, Artificial Sequence
  Synthetic construct
GFTFRFSA

SEQ ID NO: 12395 - protein, 8 aa, Artificial Sequence
  Synthetic construct
GFTFSSYA

SEQ ID NO: 12396 - protein, 8 aa, Artificial Sequence
  Synthetic construct
GYSFTDYW

SEQ ID NO: 12397 - protein, 8 aa, Artificial Sequence
  Synthetic construct
GGSFSGYY

SEQ ID NO: 12398 - protein, 8 aa, Artificial Sequence
  Synthetic construct
GYTFTSYD

SEQ ID NO: 12399 - protein, 10 aa, Artificial Sequence
  Synthetic construct
GGSISSSSYY

SEQ ID NO: 12400 - protein, 8 aa, Artificial Sequence
  Synthetic construct
GGTFSSYT

SEQ ID NO: 12401 - protein, 8 aa, Artificial Sequence
  Synthetic construct
GFTFSSYW

SEQ ID NO: 12402 - protein, 8 aa, Artificial Sequence
  Synthetic construct
GGSISDYY

SEQ ID NO: 12403 - protein, 8 aa, Artificial Sequence
  Synthetic construct
GFTFSSYA

SEQ ID NO: 12404 - protein, 8 aa, Artificial Sequence
  Synthetic construct
GFTFSSYG

SEQ ID NO: 12405 - protein, 8 aa, Artificial Sequence
  Synthetic construct
GYPFTRDG

SEQ ID NO: 12406 - protein, 8 aa, Artificial Sequence
  Synthetic construct
GFDFTSQT

SEQ ID NO: 12407 - protein, 8 aa, Artificial Sequence
  Synthetic construct
GFTLNNVW

SEQ ID NO: 12408 - protein, 8 aa, Artificial Sequence
  Synthetic construct
GFTFSDYS

SEQ ID NO: 12409 - protein, 8 aa, Artificial Sequence
  Synthetic construct
GGSFSGYY

SEQ ID NO: 12410 - protein, 8 aa, Artificial Sequence
  Synthetic construct
GFSIGSYA

SEQ ID NO: 12411 - protein, 8 aa, Artificial Sequence
  Synthetic construct
GFTFSSYG

SEQ ID NO: 12412 - protein, 8 aa, Artificial Sequence
  Synthetic construct
GYTFTSYG

SEQ ID NO: 12413 - protein, 8 aa, Artificial Sequence
  Synthetic construct
GFSFNNYG

SEQ ID NO: 12414 - protein, 8 aa, Artificial Sequence
  Synthetic construct
GFTFSSYW

SEQ ID NO: 12415 - protein, 8 aa, Artificial Sequence
  Synthetic construct
GFTFSSYA

SEQ ID NO: 12416 - protein, 8 aa, Artificial Sequence
  Synthetic construct
GYTFTSYG

SEQ ID NO: 12417 - protein, 8 aa, Artificial Sequence
  Synthetic construct
GYPFTRDG

SEQ ID NO: 12418 - protein, 10 aa, Artificial Sequence
  Synthetic construct
GGSISSGSYY

SEQ ID NO: 12419 - protein, 10 aa, Artificial Sequence
  Synthetic construct
GFSLSNARMG

SEQ ID NO: 12420 - protein, 8 aa, Artificial Sequence
  Synthetic construct
GFTVSSNY

SEQ ID NO: 12421 - protein, 10 aa, Artificial Sequence
  Synthetic construct
GGSLTSGGNS

SEQ ID NO: 12422 - protein, 8 aa, Artificial Sequence
  Synthetic construct
GFTFSSYS

SEQ ID NO: 12423 - protein, 8 aa, Artificial Sequence
  Synthetic construct
GGSFSGYY

SEQ ID NO: 12424 - protein, 8 aa, Artificial Sequence
  Synthetic construct
GFTFSSYA

SEQ ID NO: 12425 - protein, 8 aa, Artificial Sequence
  Synthetic construct
GLSFSRYA

SEQ ID NO: 12426 - protein, 8 aa, Artificial Sequence
  Synthetic construct
GFTFSSYA

SEQ ID NO: 12427 - protein, 8 aa, Artificial Sequence
  Synthetic construct
GFIFNNAW

SEQ ID NO: 12428 - protein, 8 aa, Artificial Sequence
  Synthetic construct
GFTFSSYS

SEQ ID NO: 12429 - protein, 8 aa, Artificial Sequence
  Synthetic construct
GYTFTGYY

SEQ ID NO: 12430 - protein, 8 aa, Artificial Sequence
  Synthetic construct
GYTFTSYY

SEQ ID NO: 12431 - protein, 10 aa, Artificial Sequence
  Synthetic construct
GGPTNSGDYF

SEQ ID NO: 12432 - protein, 8 aa, Artificial Sequence
  Synthetic construct
GFAFGTSP

SEQ ID NO: 12433 - protein, 8 aa, Artificial Sequence
  Synthetic construct
GFTFRNHA

SEQ ID NO: 12434 - protein, 8 aa, Artificial Sequence
  Synthetic construct
GLNFKNYW

SEQ ID NO: 12435 - protein, 8 aa, Artificial Sequence
  Synthetic construct
GFTFSSYS

SEQ ID NO: 12436 - protein, 8 aa, Artificial Sequence
  Synthetic construct
GYSFANFW

SEQ ID NO: 12437 - protein, 8 aa, Artificial Sequence
  Synthetic construct
GYTFTDNY

SEQ ID NO: 12438 - protein, 10 aa, Artificial Sequence
  Synthetic construct
GGSISSGSYY

SEQ ID NO: 12439 - protein, 8 aa, Artificial Sequence
  Synthetic construct
GGSFSGYY

SEQ ID NO: 12440 - protein, 8 aa, Artificial Sequence
  Synthetic construct
GFTFSAYA

SEQ ID NO: 12441 - protein, 10 aa, Artificial Sequence
  Synthetic construct
GGSISSSSYY

SEQ ID NO: 12442 - protein, 8 aa, Artificial Sequence
  Synthetic construct
GYTFTDYY

SEQ ID NO: 12443 - protein, 8 aa, Artificial Sequence
  Synthetic construct
GFTFSTYT

SEQ ID NO: 12444 - protein, 8 aa, Artificial Sequence
  Synthetic construct
GFTFDDYT

SEQ ID NO: 12445 - protein, 8 aa, Artificial Sequence
  Synthetic construct
GFSVSSNY

SEQ ID NO: 12446 - protein, 8 aa, Artificial Sequence
  Synthetic construct
GFTFSDVC

SEQ ID NO: 12447 - protein, 8 aa, Artificial Sequence
  Synthetic construct
GFTFSNYD

SEQ ID NO: 12448 - protein, 8 aa, Artificial Sequence
  Synthetic construct
GFTFSSYS

SEQ ID NO: 12449 - protein, 8 aa, Artificial Sequence
  Synthetic construct
GGTFSSYA

SEQ ID NO: 12450 - protein, 8 aa, Artificial Sequence
  Synthetic construct
GYTFSSYG

SEQ ID NO: 12451 - protein, 8 aa, Artificial Sequence
  Synthetic construct
GLSFPSSI

SEQ ID NO: 12452 - protein, 8 aa, Artificial Sequence
  Synthetic construct
GGIFSTYA

SEQ ID NO: 12453 - protein, 9 aa, Artificial Sequence
  Synthetic construct
GDSVSSNAW

SEQ ID NO: 12454 - protein, 10 aa, Artificial Sequence
  Synthetic construct
GDSVSSNSAT

SEQ ID NO: 12455 - protein, 8 aa, Artificial Sequence
  Synthetic construct
GYTFTNYW

SEQ ID NO: 12456 - protein, 10 aa, Artificial Sequence
  Synthetic construct
GGSISSSSYY

SEQ ID NO: 12457 - protein, 8 aa, Artificial Sequence
  Synthetic construct
GFIFSNYV

SEQ ID NO: 12458 - protein, 8 aa, Artificial Sequence
  Synthetic construct
GFTFSSYG

SEQ ID NO: 12459 - protein, 8 aa, Artificial Sequence
  Synthetic construct
GFSFSDYK

SEQ ID NO: 12460 - protein, 8 aa, Artificial Sequence
  Synthetic construct
GGTFSSYA

SEQ ID NO: 12461 - protein, 8 aa, Artificial Sequence
  Synthetic construct
GFTFSSYG

SEQ ID NO: 12462 - protein, 8 aa, Artificial Sequence
  Synthetic construct
GFTFSNYA

SEQ ID NO: 12463 - protein, 10 aa, Artificial Sequence
  Synthetic construct
GGSINSGSHY

SEQ ID NO: 12464 - protein, 10 aa, Artificial Sequence
  Synthetic construct
GGSVSSGSYY

SEQ ID NO: 12465 - protein, 8 aa, Artificial Sequence
  Synthetic construct
GYTFTSYY

SEQ ID NO: 12466 - protein, 8 aa, Artificial Sequence
  Synthetic construct
GGTFSSYS

SEQ ID NO: 12467 - protein, 8 aa, Artificial Sequence
  Synthetic construct
GYTFTGYY

SEQ ID NO: 12468 - protein, 8 aa, Artificial Sequence
  Synthetic construct
GGSISSYY

SEQ ID NO: 12469 - protein, 8 aa, Artificial Sequence
  Synthetic construct
GGTFSSYI

SEQ ID NO: 12470 - protein, 8 aa, Artificial Sequence
  Synthetic construct
GFTFAAYA

SEQ ID NO: 12471 - protein, 8 aa, Artificial Sequence
  Synthetic construct
GFNFSTYA

SEQ ID NO: 12472 - protein, 8 aa, Artificial Sequence
  Synthetic construct
GFSFSDYA

SEQ ID NO: 12473 - protein, 8 aa, Artificial Sequence
  Synthetic construct
GFTFSSYG

SEQ ID NO: 12474 - protein, 8 aa, Artificial Sequence
  Synthetic construct
GFTFGDYA

SEQ ID NO: 12475 - protein, 8 aa, Artificial Sequence
  Synthetic construct
GFTFSTYT

SEQ ID NO: 12476 - protein, 8 aa, Artificial Sequence
  Synthetic construct
GFTFSSYW

SEQ ID NO: 12477 - protein, 8 aa, Artificial Sequence
  Synthetic construct
GFTFSNAW

SEQ ID NO: 12478 - protein, 8 aa, Artificial Sequence
  Synthetic construct
GFAFDDCY

SEQ ID NO: 12479 - protein, 8 aa, Artificial Sequence
  Synthetic construct
GYTFTSYG

SEQ ID NO: 12480 - protein, 8 aa, Artificial Sequence
  Synthetic construct
GFTFSSYS

SEQ ID NO: 12481 - protein, 8 aa, Artificial Sequence
  Synthetic construct
GFTFSNYG

SEQ ID NO: 12482 - protein, 8 aa, Artificial Sequence
  Synthetic construct
GFTFNDAW

SEQ ID NO: 12483 - protein, 10 aa, Artificial Sequence
  Synthetic construct
GGSISSGSYY

SEQ ID NO: 12484 - protein, 8 aa, Artificial Sequence
  Synthetic construct
GFTFSGSA

SEQ ID NO: 12485 - protein, 8 aa, Artificial Sequence
  Synthetic construct
GFTFSNAW

SEQ ID NO: 12486 - protein, 8 aa, Artificial Sequence
  Synthetic construct
GFTFSSYA

SEQ ID NO: 12487 - protein, 8 aa, Artificial Sequence
  Synthetic construct
GFTFSHYG

SEQ ID NO: 12488 - protein, 8 aa, Artificial Sequence
  Synthetic construct
GFTFSAYW

SEQ ID NO: 12489 - protein, 8 aa, Artificial Sequence
  Synthetic construct
GFTFDSYS

SEQ ID NO: 12490 - protein, 8 aa, Artificial Sequence
  Synthetic construct
GYTFTSYG

SEQ ID NO: 12491 - protein, 8 aa, Artificial Sequence
  Synthetic construct
GFTFSDFA

SEQ ID NO: 12492 - protein, 10 aa, Artificial Sequence
  Synthetic construct
GGSINSGSHY

SEQ ID NO: 12493 - protein, 8 aa, Artificial Sequence
  Synthetic construct
GFTFSDYY

SEQ ID NO: 12494 - protein, 8 aa, Artificial Sequence
  Synthetic construct
GFTFSSYW

SEQ ID NO: 12495 - protein, 8 aa, Artificial Sequence
  Synthetic construct
GFTFSSYG

SEQ ID NO: 12496 - protein, 8 aa, Artificial Sequence
  Synthetic construct
GFTFGDYA

SEQ ID NO: 12497 - protein, 8 aa, Artificial Sequence
  Synthetic construct
GFTFSSYS

SEQ ID NO: 12498 - protein, 8 aa, Artificial Sequence
  Synthetic construct
GDTFSSYA

SEQ ID NO: 12499 - protein, 10 aa, Artificial Sequence
  Synthetic construct
GGSISSGTHY

SEQ ID NO: 12500 - protein, 8 aa, Artificial Sequence
  Synthetic construct
GFTFSNAW

SEQ ID NO: 12501 - protein, 10 aa, Artificial Sequence
  Synthetic construct
GGSISSGSYY

SEQ ID NO: 12502 - protein, 8 aa, Artificial Sequence
  Synthetic construct
GGSFSGYY

SEQ ID NO: 12503 - protein, 8 aa, Artificial Sequence
  Synthetic construct
GFTFSSYG

SEQ ID NO: 12504 - protein, 8 aa, Artificial Sequence
  Synthetic construct
GYPFTRDG

SEQ ID NO: 12505 - protein, 8 aa, Artificial Sequence
  Synthetic construct
GFTFSSYA

SEQ ID NO: 12506 - protein, 8 aa, Artificial Sequence
  Synthetic construct
GDSIDKYY

SEQ ID NO: 12507 - protein, 8 aa, Artificial Sequence
  Synthetic construct
GFTFSSYS

SEQ ID NO: 12508 - protein, 8 aa, Artificial Sequence
  Synthetic construct
GFIFSRYA

SEQ ID NO: 12509 - protein, 8 aa, Artificial Sequence
  Synthetic construct
GFSFSTYA

SEQ ID NO: 12510 - protein, 10 aa, Artificial Sequence
  Synthetic construct
GVSISSRGYY

SEQ ID NO: 12511 - protein, 8 aa, Artificial Sequence
  Synthetic construct
GASPTIYT

SEQ ID NO: 12512 - protein, 10 aa, Artificial Sequence
  Synthetic construct
GGSISSSSYY

SEQ ID NO: 12513 - protein, 9 aa, Artificial Sequence
  Synthetic construct
GGSISSSNW

SEQ ID NO: 12514 - protein, 8 aa, Artificial Sequence
  Synthetic construct
GFTFNSHA

SEQ ID NO: 12515 - protein, 8 aa, Artificial Sequence
  Synthetic construct
GFTVSSNY

SEQ ID NO: 12516 - protein, 8 aa, Artificial Sequence
  Synthetic construct
GFTFSNAW

SEQ ID NO: 12517 - protein, 8 aa, Artificial Sequence
  Synthetic construct
GFTFSSYA

SEQ ID NO: 12518 - protein, 8 aa, Artificial Sequence
  Synthetic construct
GFTFSNYA

SEQ ID NO: 12519 - protein, 8 aa, Artificial Sequence
  Synthetic construct
GDTFSGFA

SEQ ID NO: 12520 - protein, 8 aa, Artificial Sequence
  Synthetic construct
GFTFDDYA

SEQ ID NO: 12521 - protein, 10 aa, Artificial Sequence
  Synthetic construct
GGSVSSGYYY

SEQ ID NO: 12522 - protein, 10 aa, Artificial Sequence
  Synthetic construct
GFSLSTSGEG

SEQ ID NO: 12523 - protein, 8 aa, Artificial Sequence
  Synthetic construct
GYTFTSYG

SEQ ID NO: 12524 - protein, 8 aa, Artificial Sequence
  Synthetic construct
GYNFAAHW

SEQ ID NO: 12525 - protein, 8 aa, Artificial Sequence
  Synthetic construct
GFTFSSYS

SEQ ID NO: 12526 - protein, 8 aa, Artificial Sequence
  Synthetic construct
GFTFSSYA

SEQ ID NO: 12527 - protein, 8 aa, Artificial Sequence
  Synthetic construct
GFSLSNYG

SEQ ID NO: 12528 - protein, 8 aa, Artificial Sequence
  Synthetic construct
GYTFTSYY

SEQ ID NO: 12529 - protein, 10 aa, Artificial Sequence
  Synthetic construct
GGSISSGSYY

SEQ ID NO: 12530 - protein, 8 aa, Artificial Sequence
  Synthetic construct
GFTFSDYY

SEQ ID NO: 12531 - protein, 8 aa, Artificial Sequence
  Synthetic construct
GYMFSDYN

SEQ ID NO: 12532 - protein, 8 aa, Artificial Sequence
  Synthetic construct
GFTFSSYS

SEQ ID NO: 12533 - protein, 10 aa, Artificial Sequence
  Synthetic construct
GGSISSGSYY

SEQ ID NO: 12534 - protein, 8 aa, Artificial Sequence
  Synthetic construct
GFTFSNAW

SEQ ID NO: 12535 - protein, 8 aa, Artificial Sequence
  Synthetic construct
GGSLSTYY

SEQ ID NO: 12536 - protein, 8 aa, Artificial Sequence
  Synthetic construct
GGSFSGYY

SEQ ID NO: 12537 - protein, 10 aa, Artificial Sequence
  Synthetic construct
GGSISSSSYY

SEQ ID NO: 12538 - protein, 8 aa, Artificial Sequence
  Synthetic construct
GFTFSSYA

SEQ ID NO: 12539 - protein, 8 aa, Artificial Sequence
  Synthetic construct
GFIVSSNY

SEQ ID NO: 12540 - protein, 8 aa, Artificial Sequence
  Synthetic construct
GFAVSGYY

SEQ ID NO: 12541 - protein, 8 aa, Artificial Sequence
  Synthetic construct
GYSFATYW

SEQ ID NO: 12542 - protein, 10 aa, Artificial Sequence
  Synthetic construct
GFSLFSGQMG

SEQ ID NO: 12543 - protein, 8 aa, Artificial Sequence
  Synthetic construct
GYTFTGNV

SEQ ID NO: 12544 - protein, 8 aa, Artificial Sequence
  Synthetic construct
GDGFTTYY

SEQ ID NO: 12545 - protein, 8 aa, Artificial Sequence
  Synthetic construct
GFTFSSYS

SEQ ID NO: 12546 - protein, 8 aa, Artificial Sequence
  Synthetic construct
GSAFNTYN

SEQ ID NO: 12547 - protein, 8 aa, Artificial Sequence
  Synthetic construct
GFTFSDHY

SEQ ID NO: 12548 - protein, 8 aa, Artificial Sequence
  Synthetic construct
GASIRSYY

SEQ ID NO: 12549 - protein, 10 aa, Artificial Sequence
  Synthetic construct
GFSLSTSGEG

SEQ ID NO: 12550 - protein, 8 aa, Artificial Sequence
  Synthetic construct
GYSFATYW

SEQ ID NO: 12551 - protein, 8 aa, Artificial Sequence
  Synthetic construct
GYTFTSYY

SEQ ID NO: 12552 - protein, 8 aa, Artificial Sequence
  Synthetic construct
GFTVSTNY

SEQ ID NO: 12553 - protein, 8 aa, Artificial Sequence
  Synthetic construct
GYTFTSYG

SEQ ID NO: 12554 - protein, 10 aa, Artificial Sequence
  Synthetic construct
GFSLSTGGVA

SEQ ID NO: 12555 - protein, 8 aa, Artificial Sequence
  Synthetic construct
GFIFRNYA

SEQ ID NO: 12556 - protein, 8 aa, Artificial Sequence
  Synthetic construct
GYSFTSYY

SEQ ID NO: 12557 - protein, 8 aa, Artificial Sequence
  Synthetic construct
GFTLSDYG

SEQ ID NO: 12558 - protein, 8 aa, Artificial Sequence
  Synthetic construct
GFTFSNAW

SEQ ID NO: 12559 - protein, 10 aa, Artificial Sequence
  Synthetic construct
GGSIRSPKYY

SEQ ID NO: 12560 - protein, 8 aa, Artificial Sequence
  Synthetic construct
GYTFTSYD

SEQ ID NO: 12561 - protein, 8 aa, Artificial Sequence
  Synthetic construct
GYTFTSYG

SEQ ID NO: 12562 - protein, 10 aa, Artificial Sequence
  Synthetic construct
GGSLSSGSYY

SEQ ID NO: 12563 - protein, 10 aa, Artificial Sequence
  Synthetic construct
GFSLSNARMG

SEQ ID NO: 12564 - protein, 8 aa, Artificial Sequence
  Synthetic construct
GYSFATYW

SEQ ID NO: 12565 - protein, 10 aa, Artificial Sequence
  Synthetic construct
GGSISSGSFY

SEQ ID NO: 12566 - protein, 8 aa, Artificial Sequence
  Synthetic construct
GFTFSYFA

SEQ ID NO: 12567 - protein, 8 aa, Artificial Sequence
  Synthetic construct
GFNFDIYS

SEQ ID NO: 12568 - protein, 8 aa, Artificial Sequence
  Synthetic construct
GFTFSNYA

SEQ ID NO: 12569 - protein, 8 aa, Artificial Sequence
  Synthetic construct
GFTFSSFA

SEQ ID NO: 12570 - protein, 8 aa, Artificial Sequence
  Synthetic construct
GGSISSYY

SEQ ID NO: 12571 - protein, 8 aa, Artificial Sequence
  Synthetic construct
GFTVSSNY

SEQ ID NO: 12572 - protein, 8 aa, Artificial Sequence
  Synthetic construct
GYTFTSYG

SEQ ID NO: 12573 - protein, 8 aa, Artificial Sequence
  Synthetic construct
GFSFHNFA

SEQ ID NO: 12574 - protein, 10 aa, Artificial Sequence
  Synthetic construct
GGSINSRSYY

SEQ ID NO: 12575 - protein, 8 aa, Artificial Sequence
  Synthetic construct
GYIFSLYA

SEQ ID NO: 12576 - protein, 8 aa, Artificial Sequence
  Synthetic construct
GFTFSNYN

SEQ ID NO: 12577 - protein, 8 aa, Artificial Sequence
  Synthetic construct
GGSISSYY

SEQ ID NO: 12578 - protein, 8 aa, Artificial Sequence
  Synthetic construct
GYTFTSYY

SEQ ID NO: 12579 - protein, 8 aa, Artificial Sequence
  Synthetic construct
GFTFDDST

SEQ ID NO: 12580 - protein, 8 aa, Artificial Sequence
  Synthetic construct
GASITDYF

SEQ ID NO: 12581 - protein, 8 aa, Artificial Sequence
  Synthetic construct
GFTFSNYW

SEQ ID NO: 12582 - protein, 10 aa, Artificial Sequence
  Synthetic construct
GGSMNNNDYY

SEQ ID NO: 12583 - protein, 8 aa, Artificial Sequence
  Synthetic construct
GFTFRNYP

SEQ ID NO: 12584 - protein, 10 aa, Artificial Sequence
  Synthetic construct
GDSVLSGNHY

SEQ ID NO: 12585 - protein, 8 aa, Artificial Sequence
  Synthetic construct
GFTFNIYT

SEQ ID NO: 12586 - protein, 8 aa, Artificial Sequence
  Synthetic construct
GFSFNNAW

SEQ ID NO: 12587 - protein, 8 aa, Artificial Sequence
  Synthetic construct
GFTFAAYA

SEQ ID NO: 12588 - protein, 10 aa, Artificial Sequence
  Synthetic construct
GDSISTRGHY

SEQ ID NO: 12589 - protein, 8 aa, Artificial Sequence
  Synthetic construct
GFTFSSYA

SEQ ID NO: 12590 - protein, 8 aa, Artificial Sequence
  Synthetic construct
GFTFSSYS

SEQ ID NO: 12591 - protein, 8 aa, Artificial Sequence
  Synthetic construct
EFTFITYA

SEQ ID NO: 12592 - protein, 8 aa, Artificial Sequence
  Synthetic construct
GFIVNDNY

SEQ ID NO: 12593 - protein, 8 aa, Artificial Sequence
  Synthetic construct
GGTFSSYA

SEQ ID NO: 12594 - protein, 10 aa, Artificial Sequence
  Synthetic construct
GGSISSGDYY

SEQ ID NO: 12595 - protein, 10 aa, Artificial Sequence
  Synthetic construct
GGSISSSSYY

SEQ ID NO: 12596 - protein, 8 aa, Artificial Sequence
  Synthetic construct
GYTFTGYY

SEQ ID NO: 12597 - protein, 8 aa, Artificial Sequence
  Synthetic construct
GYTFTDYY

SEQ ID NO: 12598 - protein, 8 aa, Artificial Sequence
  Synthetic construct
GFTFSSYA

SEQ ID NO: 12599 - protein, 8 aa, Artificial Sequence
  Synthetic construct
GYTFTDHY

SEQ ID NO: 12600 - protein, 8 aa, Artificial Sequence
  Synthetic construct
GFTFSNYR

SEQ ID NO: 12601 - protein, 8 aa, Artificial Sequence
  Synthetic construct
GFTVSSNY

SEQ ID NO: 12602 - protein, 10 aa, Artificial Sequence
  Synthetic construct
GASITNTNYY

SEQ ID NO: 12603 - protein, 9 aa, Artificial Sequence
  Synthetic construct
GGSISSSNW

SEQ ID NO: 12604 - protein, 8 aa, Artificial Sequence
  Synthetic construct
GFTFSSYS

SEQ ID NO: 12605 - protein, 10 aa, Artificial Sequence
  Synthetic construct
GFSLSTSGVG

SEQ ID NO: 12606 - protein, 8 aa, Artificial Sequence
  Synthetic construct
GYTFTSYG

SEQ ID NO: 12607 - protein, 8 aa, Artificial Sequence
  Synthetic construct
GFTFNTYA

SEQ ID NO: 12608 - protein, 8 aa, Artificial Sequence
  Synthetic construct
GFTFDSYT

SEQ ID NO: 12609 - protein, 8 aa, Artificial Sequence
  Synthetic construct
GFTFSSYA

SEQ ID NO: 12610 - protein, 8 aa, Artificial Sequence
  Synthetic construct
DDTFSTYG

SEQ ID NO: 12611 - protein, 10 aa, Artificial Sequence
  Synthetic construct
GGSISSGSYY

SEQ ID NO: 12612 - protein, 10 aa, Artificial Sequence
  Synthetic construct
GGSISSGSYY

SEQ ID NO: 12613 - protein, 8 aa, Artificial Sequence
  Synthetic construct
GFTFSSYG

SEQ ID NO: 12614 - protein, 8 aa, Artificial Sequence
  Synthetic construct
GFTFSDYY

SEQ ID NO: 12615 - protein, 8 aa, Artificial Sequence
  Synthetic construct
GFTFSNYA

SEQ ID NO: 12616 - protein, 8 aa, Artificial Sequence
  Synthetic construct
GFTFSSYS

SEQ ID NO: 12617 - protein, 8 aa, Artificial Sequence
  Synthetic construct
GFIFDHFG

SEQ ID NO: 12618 - protein, 8 aa, Artificial Sequence
  Synthetic construct
GFTFSSYA

SEQ ID NO: 12619 - protein, 8 aa, Artificial Sequence
  Synthetic construct
GFTFSSYA

SEQ ID NO: 12620 - protein, 9 aa, Artificial Sequence
  Synthetic construct
GASISRGNW

SEQ ID NO: 12621 - protein, 8 aa, Artificial Sequence
  Synthetic construct
GFSFTIYS

SEQ ID NO: 12622 - protein, 8 aa, Artificial Sequence
  Synthetic construct
GLTFPNYG

SEQ ID NO: 12623 - protein, 8 aa, Artificial Sequence
  Synthetic construct
GFTFSSYG

SEQ ID NO: 12624 - protein, 10 aa, Artificial Sequence
  Synthetic construct
GFSLNTDRVC

SEQ ID NO: 12625 - protein, 8 aa, Artificial Sequence
  Synthetic construct
GFTFSSYS

SEQ ID NO: 12626 - protein, 10 aa, Artificial Sequence
  Synthetic construct
GGSISSSSYY

SEQ ID NO: 12627 - protein, 8 aa, Artificial Sequence
  Synthetic construct
GFSFSTTW

SEQ ID NO: 12628 - protein, 10 aa, Artificial Sequence
  Synthetic construct
GGSISSSSYY

SEQ ID NO: 12629 - protein, 8 aa, Artificial Sequence
  Synthetic construct
GYTFTNYA

SEQ ID NO: 12630 - protein, 8 aa, Artificial Sequence
  Synthetic construct
GFTFSSYS

SEQ ID NO: 12631 - protein, 9 aa, Artificial Sequence
  Synthetic construct
GDSVSSNNW

SEQ ID NO: 12632 - protein, 10 aa, Artificial Sequence
  Synthetic construct
GGSISSSSYY

SEQ ID NO: 12633 - protein, 10 aa, Artificial Sequence
  Synthetic construct
GGPVSSDDTY

SEQ ID NO: 12634 - protein, 10 aa, Artificial Sequence
  Synthetic construct
GGSISSSSYY

SEQ ID NO: 12635 - protein, 8 aa, Artificial Sequence
  Synthetic construct
GFSFSYYA

SEQ ID NO: 12636 - protein, 8 aa, Artificial Sequence
  Synthetic construct
GFTFSAFG

SEQ ID NO: 12637 - protein, 8 aa, Artificial Sequence
  Synthetic construct
GFTFSSYS

SEQ ID NO: 12638 - protein, 8 aa, Artificial Sequence
  Synthetic construct
GITFNTYA

SEQ ID NO: 12639 - protein, 8 aa, Artificial Sequence
  Synthetic construct
GYTFTTYY

SEQ ID NO: 12640 - protein, 8 aa, Artificial Sequence
  Synthetic construct
GGSMANYY

SEQ ID NO: 12641 - protein, 8 aa, Artificial Sequence
  Synthetic construct
GYTFTGYY

SEQ ID NO: 12642 - protein, 8 aa, Artificial Sequence
  Synthetic construct
GFTFSSYW

SEQ ID NO: 12643 - protein, 8 aa, Artificial Sequence
  Synthetic construct
GYTFTNYY

SEQ ID NO: 12644 - protein, 8 aa, Artificial Sequence
  Synthetic construct
GFPLSSYW

SEQ ID NO: 12645 - protein, 8 aa, Artificial Sequence
  Synthetic construct
GYSFATYW

SEQ ID NO: 12646 - protein, 8 aa, Artificial Sequence
  Synthetic construct
GYTLTELS

SEQ ID NO: 12647 - protein, 8 aa, Artificial Sequence
  Synthetic construct
GFSFKTCT

SEQ ID NO: 12648 - protein, 8 aa, Artificial Sequence
  Synthetic construct
GFTFRTYA

SEQ ID NO: 12649 - protein, 8 aa, Artificial Sequence
  Synthetic construct
GFTFSRYA

SEQ ID NO: 12650 - protein, 8 aa, Artificial Sequence
  Synthetic construct
GFTFSNYW

SEQ ID NO: 12651 - protein, 8 aa, Artificial Sequence
  Synthetic construct
GFTFSSYW

SEQ ID NO: 12652 - protein, 10 aa, Artificial Sequence
  Synthetic construct
GDSISSGGYS

SEQ ID NO: 12653 - protein, 8 aa, Artificial Sequence
  Synthetic construct
GYSFTSYW

SEQ ID NO: 12654 - protein, 8 aa, Artificial Sequence
  Synthetic construct
GYTFTSYA

SEQ ID NO: 12655 - protein, 10 aa, Artificial Sequence
  Synthetic construct
GGSISSGGYY

SEQ ID NO: 12656 - protein, 8 aa, Artificial Sequence
  Synthetic construct
GYTFTSYD

SEQ ID NO: 12657 - protein, 8 aa, Artificial Sequence
  Synthetic construct
GFTFSSYA

SEQ ID NO: 12658 - protein, 8 aa, Artificial Sequence
  Synthetic construct
GYTFTSYA

SEQ ID NO: 12659 - protein, 10 aa, Artificial Sequence
  Synthetic construct
GGSVSSGSYY

SEQ ID NO: 12660 - protein, 8 aa, Artificial Sequence
  Synthetic construct
GYMFSNYG

SEQ ID NO: 12661 - protein, 10 aa, Artificial Sequence
  Synthetic construct
GFSLATSGVG

SEQ ID NO: 12662 - protein, 8 aa, Artificial Sequence
  Synthetic construct
GYPFTRDG

SEQ ID NO: 12663 - protein, 8 aa, Artificial Sequence
  Synthetic construct
GFTFGTYV

SEQ ID NO: 12664 - protein, 8 aa, Artificial Sequence
  Synthetic construct
GFSLSGYG

SEQ ID NO: 12665 - protein, 8 aa, Artificial Sequence
  Synthetic construct
EFTFSRHA

SEQ ID NO: 12666 - protein, 9 aa, Artificial Sequence
  Synthetic construct
GVSFSGSNW

SEQ ID NO: 12667 - protein, 8 aa, Artificial Sequence
  Synthetic construct
GFAVTNNY

SEQ ID NO: 12668 - protein, 8 aa, Artificial Sequence
  Synthetic construct
GFSFSIYA

SEQ ID NO: 12669 - protein, 8 aa, Artificial Sequence
  Synthetic construct
GYNFPNYW

SEQ ID NO: 12670 - protein, 8 aa, Artificial Sequence
  Synthetic construct
GFTFSTHG

SEQ ID NO: 12671 - protein, 8 aa, Artificial Sequence
  Synthetic construct
GYSFSTYW

SEQ ID NO: 12672 - protein, 8 aa, Artificial Sequence
  Synthetic construct
GFTFSSSP

SEQ ID NO: 12673 - protein, 8 aa, Artificial Sequence
  Synthetic construct
GFTFSSYS

SEQ ID NO: 12674 - protein, 8 aa, Artificial Sequence
  Synthetic construct
GFMFRSYG

SEQ ID NO: 12675 - protein, 10 aa, Artificial Sequence
  Synthetic construct
GGSISSSSYY

SEQ ID NO: 12676 - protein, 10 aa, Artificial Sequence
  Synthetic construct
GFSLATSGVG

SEQ ID NO: 12677 - protein, 8 aa, Artificial Sequence
  Synthetic construct
GGSISSYY

SEQ ID NO: 12678 - protein, 10 aa, Artificial Sequence
  Synthetic construct
GGSISSGSYY

SEQ ID NO: 12679 - protein, 8 aa, Artificial Sequence
  Synthetic construct
GFTFSTYW

SEQ ID NO: 12680 - protein, 10 aa, Artificial Sequence
  Synthetic construct
GGSISSSSYY

SEQ ID NO: 12681 - protein, 8 aa, Artificial Sequence
  Synthetic construct
GFSISAYS

SEQ ID NO: 12682 - protein, 8 aa, Artificial Sequence
  Synthetic construct
GSMFSKYW

SEQ ID NO: 12683 - protein, 8 aa, Artificial Sequence
  Synthetic construct
GLTFSDFY

SEQ ID NO: 12684 - protein, 8 aa, Artificial Sequence
  Synthetic construct
GFTFSSYG

SEQ ID NO: 12685 - protein, 8 aa, Artificial Sequence
  Synthetic construct
GYSFATYW

SEQ ID NO: 12686 - protein, 8 aa, Artificial Sequence
  Synthetic construct
GFTFSSYW

SEQ ID NO: 12687 - protein, 8 aa, Artificial Sequence
  Synthetic construct
GFTVSSNY

SEQ ID NO: 12688 - protein, 8 aa, Artificial Sequence
  Synthetic construct
GFTFSNAW

SEQ ID NO: 12689 - protein, 10 aa, Artificial Sequence
  Synthetic construct
GGSISSGDYC

SEQ ID NO: 12690 - protein, 8 aa, Artificial Sequence
  Synthetic construct
GYPFTRDG

SEQ ID NO: 12691 - protein, 8 aa, Artificial Sequence
  Synthetic construct
GYPFTRDG

SEQ ID NO: 12692 - protein, 8 aa, Artificial Sequence
  Synthetic construct
GFTFSDYS

SEQ ID NO: 12693 - protein, 8 aa, Artificial Sequence
  Synthetic construct
GFTFSNYD

SEQ ID NO: 12694 - protein, 8 aa, Artificial Sequence
  Synthetic construct
GGSFSGYS

SEQ ID NO: 12695 - protein, 8 aa, Artificial Sequence
  Synthetic construct
GFTFSSYS

SEQ ID NO: 12696 - protein, 8 aa, Artificial Sequence
  Synthetic construct
GGTFSSYA

SEQ ID NO: 12697 - protein, 8 aa, Artificial Sequence
  Synthetic construct
GFTFKSYS

SEQ ID NO: 12698 - protein, 8 aa, Artificial Sequence
  Synthetic construct
GFTFSGSA

SEQ ID NO: 12699 - protein, 10 aa, Artificial Sequence
  Synthetic construct
GDSISTSRDY

SEQ ID NO: 12700 - protein, 8 aa, Artificial Sequence
  Synthetic construct
GFTFSSYA

SEQ ID NO: 12701 - protein, 8 aa, Artificial Sequence
  Synthetic construct
GYTFMNYA

SEQ ID NO: 12702 - protein, 8 aa, Artificial Sequence
  Synthetic construct
GFSFGTYA

SEQ ID NO: 12703 - protein, 8 aa, Artificial Sequence
  Synthetic construct
GFTFGDYA

SEQ ID NO: 12704 - protein, 8 aa, Artificial Sequence
  Synthetic construct
GFTFRSYA

SEQ ID NO: 12705 - protein, 8 aa, Artificial Sequence
  Synthetic construct
GGSISGYY

SEQ ID NO: 12706 - protein, 8 aa, Artificial Sequence
  Synthetic construct
GFTFSSYW

SEQ ID NO: 12707 - protein, 8 aa, Artificial Sequence
  Synthetic construct
GGAVSFFY

SEQ ID NO: 12708 - protein, 8 aa, Artificial Sequence
  Synthetic construct
GFTVSSNY

SEQ ID NO: 12709 - protein, 8 aa, Artificial Sequence
  Synthetic construct
GYTFSTYG

SEQ ID NO: 12710 - protein, 8 aa, Artificial Sequence
  Synthetic construct
GFTFSSYG

SEQ ID NO: 12711 - protein, 8 aa, Artificial Sequence
  Synthetic construct
KFTFSIYN

SEQ ID NO: 12712 - protein, 8 aa, Artificial Sequence
  Synthetic construct
GFTFSTYA

SEQ ID NO: 12713 - protein, 8 aa, Artificial Sequence
  Synthetic construct
GFTFSIYS

SEQ ID NO: 12714 - protein, 10 aa, Artificial Sequence
  Synthetic construct
GDSIGYGGYY

SEQ ID NO: 12715 - protein, 8 aa, Artificial Sequence
  Synthetic construct
GFTFSQYG

SEQ ID NO: 12716 - protein, 8 aa, Artificial Sequence
  Synthetic construct
GYPFTRDG

SEQ ID NO: 12717 - protein, 8 aa, Artificial Sequence
  Synthetic construct
GASVNDFY

SEQ ID NO: 12718 - protein, 10 aa, Artificial Sequence
  Synthetic construct
GGSISSSSYY

SEQ ID NO: 12719 - protein, 8 aa, Artificial Sequence
  Synthetic construct
GYDFKMYW

SEQ ID NO: 12720 - protein, 10 aa, Artificial Sequence
  Synthetic construct
GGSISSGSYY

SEQ ID NO: 12721 - protein, 8 aa, Artificial Sequence
  Synthetic construct
GFTFSSYA

SEQ ID NO: 12722 - protein, 8 aa, Artificial Sequence
  Synthetic construct
GFTFSTYG

SEQ ID NO: 12723 - protein, 8 aa, Artificial Sequence
  Synthetic construct
GYSFATYW

SEQ ID NO: 12724 - protein, 8 aa, Artificial Sequence
  Synthetic construct
GFTFFSYA

SEQ ID NO: 12725 - protein, 8 aa, Artificial Sequence
  Synthetic construct
GYTFTTSS

SEQ ID NO: 12726 - protein, 10 aa, Artificial Sequence
  Synthetic construct
GGSISSSSYY

SEQ ID NO: 12727 - protein, 8 aa, Artificial Sequence
  Synthetic construct
GFTFNSYA

SEQ ID NO: 12728 - protein, 8 aa, Artificial Sequence
  Synthetic construct
GFTFSSYD

SEQ ID NO: 12729 - protein, 8 aa, Artificial Sequence
  Synthetic construct
GFTFNTYG

SEQ ID NO: 12730 - protein, 8 aa, Artificial Sequence
  Synthetic construct
GGTFSTYT

SEQ ID NO: 12731 - protein, 9 aa, Artificial Sequence
  Synthetic construct
GGSISSSNW

SEQ ID NO: 12732 - protein, 8 aa, Artificial Sequence
  Synthetic construct
GFTFSNYG

SEQ ID NO: 12733 - protein, 8 aa, Artificial Sequence
  Synthetic construct
GYTFTSYG

SEQ ID NO: 12734 - protein, 8 aa, Artificial Sequence
  Synthetic construct
GFTFSSYA

SEQ ID NO: 12735 - protein, 8 aa, Artificial Sequence
  Synthetic construct
GYTFTDHY

SEQ ID NO: 12736 - protein, 8 aa, Artificial Sequence
  Synthetic construct
GFTFSDYY

SEQ ID NO: 12737 - protein, 10 aa, Artificial Sequence
  Synthetic construct
GGSIGSGSYY

SEQ ID NO: 12738 - protein, 8 aa, Artificial Sequence
  Synthetic construct
GFTFSNYA

SEQ ID NO: 12739 - protein, 8 aa, Artificial Sequence
  Synthetic construct
GFTFSSYA

SEQ ID NO: 12740 - protein, 8 aa, Artificial Sequence
  Synthetic construct
GYSFATYW

SEQ ID NO: 12741 - protein, 8 aa, Artificial Sequence
  Synthetic construct
GFTFSSYA

SEQ ID NO: 12742 - protein, 8 aa, Artificial Sequence
  Synthetic construct
GFTFSSYA

SEQ ID NO: 12743 - protein, 8 aa, Artificial Sequence
  Synthetic construct
GSTFIDDY

SEQ ID NO: 12744 - protein, 8 aa, Artificial Sequence
  Synthetic construct
GLSFSSDN

SEQ ID NO: 12745 - protein, 9 aa, Artificial Sequence
  Synthetic construct
GGSISGNYW

SEQ ID NO: 12746 - protein, 8 aa, Artificial Sequence
  Synthetic construct
GYTFTSFG

SEQ ID NO: 12747 - protein, 10 aa, Artificial Sequence
  Synthetic construct
GGSISSSSYY

SEQ ID NO: 12748 - protein, 8 aa, Artificial Sequence
  Synthetic construct
GFTFSGSA

SEQ ID NO: 12749 - protein, 8 aa, Artificial Sequence
  Synthetic construct
GYTFTSYD

SEQ ID NO: 12750 - protein, 8 aa, Artificial Sequence
  Synthetic construct
GFTFSSYS

SEQ ID NO: 12751 - protein, 8 aa, Artificial Sequence
  Synthetic construct
GFTFKSYS

SEQ ID NO: 12752 - protein, 8 aa, Artificial Sequence
  Synthetic construct
GFTFSSYG

SEQ ID NO: 12753 - protein, 8 aa, Artificial Sequence
  Synthetic construct
GFSFSTYA

SEQ ID NO: 12754 - protein, 8 aa, Artificial Sequence
  Synthetic construct
GYIFTNYW

SEQ ID NO: 12755 - protein, 8 aa, Artificial Sequence
  Synthetic construct
GGSFSNNF

SEQ ID NO: 12756 - protein, 8 aa, Artificial Sequence
  Synthetic construct
GFTFSSYG

SEQ ID NO: 12757 - protein, 8 aa, Artificial Sequence
  Synthetic construct
GFTFSSYS

SEQ ID NO: 12758 - protein, 8 aa, Artificial Sequence
  Synthetic construct
GFTFNSYT

SEQ ID NO: 12759 - protein, 10 aa, Artificial Sequence
  Synthetic construct
GFSLSNARMG

SEQ ID NO: 12760 - protein, 8 aa, Artificial Sequence
  Synthetic construct
GLFFNSNS

SEQ ID NO: 12761 - protein, 10 aa, Artificial Sequence
  Synthetic construct
GTSIGSGTYF

SEQ ID NO: 12762 - protein, 8 aa, Artificial Sequence
  Synthetic construct
GYTFTGYY

SEQ ID NO: 12763 - protein, 8 aa, Artificial Sequence
  Synthetic construct
GFNFDSYT

SEQ ID NO: 12764 - protein, 10 aa, Artificial Sequence
  Synthetic construct
GGSISSGSYY

SEQ ID NO: 12765 - protein, 8 aa, Artificial Sequence
  Synthetic construct
GFTFSSYS

SEQ ID NO: 12766 - protein, 8 aa, Artificial Sequence
  Synthetic construct
GFTFTAYG

SEQ ID NO: 12767 - protein, 8 aa, Artificial Sequence
  Synthetic construct
GFTFSSYW

SEQ ID NO: 12768 - protein, 8 aa, Artificial Sequence
  Synthetic construct
GFTFGAFS

SEQ ID NO: 12769 - protein, 8 aa, Artificial Sequence
  Synthetic construct
GFTFSSYI

SEQ ID NO: 12770 - protein, 10 aa, Artificial Sequence
  Synthetic construct
GDSIGYGGYY

SEQ ID NO: 12771 - protein, 8 aa, Artificial Sequence
  Synthetic construct
GYPFTRDG

SEQ ID NO: 12772 - protein, 8 aa, Artificial Sequence
  Synthetic construct
GYTFTRYG

SEQ ID NO: 12773 - protein, 8 aa, Artificial Sequence
  Synthetic construct
GYSFTSYW

SEQ ID NO: 12774 - protein, 10 aa, Artificial Sequence
  Synthetic construct
GVSISSSNYY

SEQ ID NO: 12775 - protein, 8 aa, Artificial Sequence
  Synthetic construct
GFTFSSHW

SEQ ID NO: 12776 - protein, 10 aa, Artificial Sequence
  Synthetic construct
GGSVDSDGLY

SEQ ID NO: 12777 - protein, 8 aa, Artificial Sequence
  Synthetic construct
GFTFSSYS

SEQ ID NO: 12778 - protein, 8 aa, Artificial Sequence
  Synthetic construct
GFTFSSAG

SEQ ID NO: 12779 - protein, 8 aa, Artificial Sequence
  Synthetic construct
GFTFSSYW

SEQ ID NO: 12780 - protein, 8 aa, Artificial Sequence
  Synthetic construct
GFAFGNYA

SEQ ID NO: 12781 - protein, 8 aa, Artificial Sequence
  Synthetic construct
GFTFSTYS

SEQ ID NO: 12782 - protein, 8 aa, Artificial Sequence
  Synthetic construct
GGTFSSYA

SEQ ID NO: 12783 - protein, 8 aa, Artificial Sequence
  Synthetic construct
GFTFSRYA

SEQ ID NO: 12784 - protein, 8 aa, Artificial Sequence
  Synthetic construct
GVGISHNY

SEQ ID NO: 12785 - protein, 10 aa, Artificial Sequence
  Synthetic construct
GGSISSGDFY

SEQ ID NO: 12786 - protein, 8 aa, Artificial Sequence
  Synthetic construct
GFTFSSYS

SEQ ID NO: 12787 - protein, 8 aa, Artificial Sequence
  Synthetic construct
GFTFSSYG

SEQ ID NO: 12788 - protein, 8 aa, Artificial Sequence
  Synthetic construct
GFTFSSYA

SEQ ID NO: 12789 - protein, 8 aa, Artificial Sequence
  Synthetic construct
GGSISSYY

SEQ ID NO: 12790 - protein, 10 aa, Artificial Sequence
  Synthetic construct
GGSISSSSYY

SEQ ID NO: 12791 - protein, 8 aa, Artificial Sequence
  Synthetic construct
GYTFSNYW

SEQ ID NO: 12792 - protein, 8 aa, Artificial Sequence
  Synthetic construct
GYTFTSYG

SEQ ID NO: 12793 - protein, 8 aa, Artificial Sequence
  Synthetic construct
GYTFSGYY

SEQ ID NO: 12794 - protein, 8 aa, Artificial Sequence
  Synthetic construct
GGTFNTYS

SEQ ID NO: 12795 - protein, 5 aa, Artificial Sequence
  Synthetic construct
GFSYW

SEQ ID NO: 12796 - protein, 8 aa, Artificial Sequence
  Synthetic construct
GFTFSSYG

SEQ ID NO: 12797 - protein, 8 aa, Artificial Sequence
  Synthetic construct
GFTFNDAW

SEQ ID NO: 12798 - protein, 8 aa, Artificial Sequence
  Synthetic construct
GFTFSSYG

SEQ ID NO: 12799 - protein, 8 aa, Artificial Sequence
  Synthetic construct
GFTFSGSA

SEQ ID NO: 12800 - protein, 8 aa, Artificial Sequence
  Synthetic construct
GFTFSSYA

SEQ ID NO: 12801 - protein, 8 aa, Artificial Sequence
  Synthetic construct
GFTFSSYA

SEQ ID NO: 12802 - protein, 10 aa, Artificial Sequence
  Synthetic construct
GGSVSSGSYY

SEQ ID NO: 12803 - protein, 8 aa, Artificial Sequence
  Synthetic construct
GYIFTNYF

SEQ ID NO: 12804 - protein, 10 aa, Artificial Sequence
  Synthetic construct
GGSISSGGYY

SEQ ID NO: 12805 - protein, 8 aa, Artificial Sequence
  Synthetic construct
GFTFRNYW

SEQ ID NO: 12806 - protein, 8 aa, Artificial Sequence
  Synthetic construct
GFSFRGYA

SEQ ID NO: 12807 - protein, 8 aa, Artificial Sequence
  Synthetic construct
GYSFATYW

SEQ ID NO: 12808 - protein, 8 aa, Artificial Sequence
  Synthetic construct
GYTFIDYY

SEQ ID NO: 12809 - protein, 8 aa, Artificial Sequence
  Synthetic construct
GPTLGTYA

SEQ ID NO: 12810 - protein, 8 aa, Artificial Sequence
  Synthetic construct
GFTFSSYW

SEQ ID NO: 12811 - protein, 8 aa, Artificial Sequence
  Synthetic construct
GFTFSSYA

SEQ ID NO: 12812 - protein, 8 aa, Artificial Sequence
  Synthetic construct
GFTFSSYW

SEQ ID NO: 12813 - protein, 8 aa, Artificial Sequence
  Synthetic construct
GFTFSSYG

SEQ ID NO: 12814 - protein, 8 aa, Artificial Sequence
  Synthetic construct
GFTFGDYA

SEQ ID NO: 12815 - protein, 8 aa, Artificial Sequence
  Synthetic construct
GFTFSSYG

SEQ ID NO: 12816 - protein, 10 aa, Artificial Sequence
  Synthetic construct
GGSISISTHY

SEQ ID NO: 12817 - protein, 10 aa, Artificial Sequence
  Synthetic construct
GGSISSGGYY

SEQ ID NO: 12818 - protein, 8 aa, Artificial Sequence
  Synthetic construct
GYTFTSYG

SEQ ID NO: 12819 - protein, 8 aa, Artificial Sequence
  Synthetic construct
GFNFTNAW

SEQ ID NO: 12820 - protein, 9 aa, Artificial Sequence
  Synthetic construct
GSSITSTNW

SEQ ID NO: 12821 - protein, 8 aa, Artificial Sequence
  Synthetic construct
GFSFSSDA

SEQ ID NO: 12822 - protein, 8 aa, Artificial Sequence
  Synthetic construct
GFTFSSYA

SEQ ID NO: 12823 - protein, 8 aa, Artificial Sequence
  Synthetic construct
GFTFSSYA

SEQ ID NO: 12824 - protein, 10 aa, Artificial Sequence
  Synthetic construct
GFSLSNARMG

SEQ ID NO: 12825 - protein, 10 aa, Artificial Sequence
  Synthetic construct
GFSLSAGAVG

SEQ ID NO: 12826 - protein, 8 aa, Artificial Sequence
  Synthetic construct
GFTFSSYA

SEQ ID NO: 12827 - protein, 8 aa, Artificial Sequence
  Synthetic construct
GGSISSYF

SEQ ID NO: 12828 - protein, 8 aa, Artificial Sequence
  Synthetic construct
GDSFTGNW

SEQ ID NO: 12829 - protein, 8 aa, Artificial Sequence
  Synthetic construct
SYTFSNYG

SEQ ID NO: 12830 - protein, 10 aa, Artificial Sequence
  Synthetic construct
GGSISSSSYY

SEQ ID NO: 12831 - protein, 8 aa, Artificial Sequence
  Synthetic construct
GFTFSSYA

SEQ ID NO: 12832 - protein, 8 aa, Artificial Sequence
  Synthetic construct
GFTFINAW

SEQ ID NO: 12833 - protein, 8 aa, Artificial Sequence
  Synthetic construct
GFTFDDYA

SEQ ID NO: 12834 - protein, 8 aa, Artificial Sequence
  Synthetic construct
GYTFTGYY

SEQ ID NO: 12835 - protein, 8 aa, Artificial Sequence
  Synthetic construct
GFSFNNYG

SEQ ID NO: 12836 - protein, 8 aa, Artificial Sequence
  Synthetic construct
GYTFTGYY

SEQ ID NO: 12837 - protein, 8 aa, Artificial Sequence
  Synthetic construct
GGSTRGYY

SEQ ID NO: 12838 - protein, 8 aa, Artificial Sequence
  Synthetic construct
GFTFSSYG

SEQ ID NO: 12839 - protein, 8 aa, Artificial Sequence
  Synthetic construct
GGTFSDYA

SEQ ID NO: 12840 - protein, 8 aa, Artificial Sequence
  Synthetic construct
GFTFSSYS

SEQ ID NO: 12841 - protein, 8 aa, Artificial Sequence
  Synthetic construct
GYTFTSYY

SEQ ID NO: 12842 - protein, 8 aa, Artificial Sequence
  Synthetic construct
GGSIRSYY

SEQ ID NO: 12843 - protein, 8 aa, Artificial Sequence
  Synthetic construct
GFTFSSYS

SEQ ID NO: 12844 - protein, 8 aa, Artificial Sequence
  Synthetic construct
GFTFSSYG

SEQ ID NO: 12845 - protein, 8 aa, Artificial Sequence
  Synthetic construct
GYSFTSYW

SEQ ID NO: 12846 - protein, 8 aa, Artificial Sequence
  Synthetic construct
GYSFTTYG

SEQ ID NO: 12847 - protein, 10 aa, Artificial Sequence
  Synthetic construct
GGSINSNNYY

SEQ ID NO: 12848 - protein, 8 aa, Artificial Sequence
  Synthetic construct
GGSLSPHF

SEQ ID NO: 12849 - protein, 8 aa, Artificial Sequence
  Synthetic construct
GFSFSIYS

SEQ ID NO: 12850 - protein, 8 aa, Artificial Sequence
  Synthetic construct
GYTFTSYG

SEQ ID NO: 12851 - protein, 8 aa, Artificial Sequence
  Synthetic construct
GFTFSSYA

SEQ ID NO: 12852 - protein, 8 aa, Artificial Sequence
  Synthetic construct
GFTFSAYG

SEQ ID NO: 12853 - protein, 8 aa, Artificial Sequence
  Synthetic construct
GFTFSSYA

SEQ ID NO: 12854 - protein, 10 aa, Artificial Sequence
  Synthetic construct
GGSISSGSYY

SEQ ID NO: 12855 - protein, 10 aa, Artificial Sequence
  Synthetic construct
GTSIGSGTYF

SEQ ID NO: 12856 - protein, 8 aa, Artificial Sequence
  Synthetic construct
GFTFSSYA

SEQ ID NO: 12857 - protein, 10 aa, Artificial Sequence
  Synthetic construct
GDSIGYGGYY

SEQ ID NO: 12858 - protein, 8 aa, Artificial Sequence
  Synthetic construct
GFTFKYYY

SEQ ID NO: 12859 - protein, 8 aa, Artificial Sequence
  Synthetic construct
GFTVSSNY

SEQ ID NO: 12860 - protein, 8 aa, Artificial Sequence
  Synthetic construct
GFTFSSYW

SEQ ID NO: 12861 - protein, 10 aa, Artificial Sequence
  Synthetic construct
GGSISSSSYY

SEQ ID NO: 12862 - protein, 8 aa, Artificial Sequence
  Synthetic construct
GYSFTSYW

SEQ ID NO: 12863 - protein, 8 aa, Artificial Sequence
  Synthetic construct
GYSFTSYW

SEQ ID NO: 12864 - protein, 8 aa, Artificial Sequence
  Synthetic construct
GFTFSSYA

SEQ ID NO: 12865 - protein, 10 aa, Artificial Sequence
  Synthetic construct
GGSISSSSYY

SEQ ID NO: 12866 - protein, 10 aa, Artificial Sequence
  Synthetic construct
GDRVSSDSAA

SEQ ID NO: 12867 - protein, 10 aa, Artificial Sequence
  Synthetic construct
GGSINNHNYY

SEQ ID NO: 12868 - protein, 8 aa, Artificial Sequence
  Synthetic construct
GFTFSNAW

SEQ ID NO: 12869 - protein, 8 aa, Artificial Sequence
  Synthetic construct
GFTFSSYG

SEQ ID NO: 12870 - protein, 8 aa, Artificial Sequence
  Synthetic construct
GFTFRSYP

SEQ ID NO: 12871 - protein, 8 aa, Artificial Sequence
  Synthetic construct
GFTFSSYA

SEQ ID NO: 12872 - protein, 10 aa, Artificial Sequence
  Synthetic construct
GGSISSGGFY

SEQ ID NO: 12873 - protein, 8 aa, Artificial Sequence
  Synthetic construct
GFTFSSYA

SEQ ID NO: 12874 - protein, 8 aa, Artificial Sequence
  Synthetic construct
GYTFTGYY

SEQ ID NO: 12875 - protein, 8 aa, Artificial Sequence
  Synthetic construct
GFTFSDYY

SEQ ID NO: 12876 - protein, 8 aa, Artificial Sequence
  Synthetic construct
GFTFSSYD

SEQ ID NO: 12877 - protein, 8 aa, Artificial Sequence
  Synthetic construct
GGSFSGYY

SEQ ID NO: 12878 - protein, 10 aa, Artificial Sequence
  Synthetic construct
GGPINGTSYC

SEQ ID NO: 12879 - protein, 8 aa, Artificial Sequence
  Synthetic construct
GGSLSSYS

SEQ ID NO: 12880 - protein, 8 aa, Artificial Sequence
  Synthetic construct
GFTFSSYA

SEQ ID NO: 12881 - protein, 8 aa, Artificial Sequence
  Synthetic construct
GGTFSSYA

SEQ ID NO: 12882 - protein, 8 aa, Artificial Sequence
  Synthetic construct
GYRFTSSW

SEQ ID NO: 12883 - protein, 8 aa, Artificial Sequence
  Synthetic construct
AFDFSAYG

SEQ ID NO: 12884 - protein, 8 aa, Artificial Sequence
  Synthetic construct
GFSLSTSD

SEQ ID NO: 12885 - protein, 10 aa, Artificial Sequence
  Synthetic construct
GASISSTTDY

SEQ ID NO: 12886 - protein, 8 aa, Artificial Sequence
  Synthetic construct
GYTFTSYA

SEQ ID NO: 12887 - protein, 10 aa, Artificial Sequence
  Synthetic construct
GGSISSGSYY

SEQ ID NO: 12888 - protein, 8 aa, Artificial Sequence
  Synthetic construct
GFTFSSYG

SEQ ID NO: 12889 - protein, 8 aa, Artificial Sequence
  Synthetic construct
GYTFTSFD

SEQ ID NO: 12890 - protein, 8 aa, Artificial Sequence
  Synthetic construct
GFDFSYYY

SEQ ID NO: 12891 - protein, 8 aa, Artificial Sequence
  Synthetic construct
GFTFSNFY

SEQ ID NO: 12892 - protein, 8 aa, Artificial Sequence
  Synthetic construct
GYPFTRDG

SEQ ID NO: 12893 - protein, 8 aa, Artificial Sequence
  Synthetic construct
GYTFTSYY

SEQ ID NO: 12894 - protein, 8 aa, Artificial Sequence
  Synthetic construct
GGSISSYY

SEQ ID NO: 12895 - protein, 10 aa, Artificial Sequence
  Synthetic construct
GFSLATSGVG

SEQ ID NO: 12896 - protein, 8 aa, Artificial Sequence
  Synthetic construct
GFTFSSYS

SEQ ID NO: 12897 - protein, 10 aa, Artificial Sequence
  Synthetic construct
AGSIGSSYFS

SEQ ID NO: 12898 - protein, 10 aa, Artificial Sequence
  Synthetic construct
GDSVSSNSAT

SEQ ID NO: 12899 - protein, 8 aa, Artificial Sequence
  Synthetic construct
GRSFSGYY

SEQ ID NO: 12900 - protein, 8 aa, Artificial Sequence
  Synthetic construct
EYDFSAYW

SEQ ID NO: 12901 - protein, 8 aa, Artificial Sequence
  Synthetic construct
GFTFSSYG

SEQ ID NO: 12902 - protein, 8 aa, Artificial Sequence
  Synthetic construct
GYSFSKYW

SEQ ID NO: 12903 - protein, 8 aa, Artificial Sequence
  Synthetic construct
AYSFPTYW

SEQ ID NO: 12904 - protein, 8 aa, Artificial Sequence
  Synthetic construct
GYSFATYW

SEQ ID NO: 12905 - protein, 8 aa, Artificial Sequence
  Synthetic construct
GFTFSSYS

SEQ ID NO: 12906 - protein, 8 aa, Artificial Sequence
  Synthetic construct
GYSFTDYF

SEQ ID NO: 12907 - protein, 8 aa, Artificial Sequence
  Synthetic construct
GVSIIDYY

SEQ ID NO: 12908 - protein, 8 aa, Artificial Sequence
  Synthetic construct
GFSLTGHG

SEQ ID NO: 12909 - protein, 8 aa, Artificial Sequence
  Synthetic construct
GFTFSRYY

SEQ ID NO: 12910 - protein, 10 aa, Artificial Sequence
  Synthetic construct
GGSISSSGYY

SEQ ID NO: 12911 - protein, 10 aa, Artificial Sequence
  Synthetic construct
GGSISSGGYY

SEQ ID NO: 12912 - protein, 10 aa, Artificial Sequence
  Synthetic construct
GFSLATSGVG

SEQ ID NO: 12913 - protein, 8 aa, Artificial Sequence
  Synthetic construct
GFTFSSYA

SEQ ID NO: 12914 - protein, 8 aa, Artificial Sequence
  Synthetic construct
GFTFSSSP

SEQ ID NO: 12915 - protein, 8 aa, Artificial Sequence
  Synthetic construct
GGSFSGFY

SEQ ID NO: 12916 - protein, 8 aa, Artificial Sequence
  Synthetic construct
GFAFNRYT

SEQ ID NO: 12917 - protein, 8 aa, Artificial Sequence
  Synthetic construct
GYTFTNFH

SEQ ID NO: 12918 - protein, 8 aa, Artificial Sequence
  Synthetic construct
GSSINSHY

SEQ ID NO: 12919 - protein, 8 aa, Artificial Sequence
  Synthetic construct
GYRFTTYW

SEQ ID NO: 12920 - protein, 8 aa, Artificial Sequence
  Synthetic construct
GYTFTSYA

SEQ ID NO: 12921 - protein, 8 aa, Artificial Sequence
  Synthetic construct
GYTFTNYY

SEQ ID NO: 12922 - protein, 8 aa, Artificial Sequence
  Synthetic construct
GFTFRDYW

SEQ ID NO: 12923 - protein, 8 aa, Artificial Sequence
  Synthetic construct
GFTFSSYA

SEQ ID NO: 12924 - protein, 8 aa, Artificial Sequence
  Synthetic construct
GFTFNTYR

SEQ ID NO: 12925 - protein, 8 aa, Artificial Sequence
  Synthetic construct
GYSFTSHW

SEQ ID NO: 12926 - protein, 8 aa, Artificial Sequence
  Synthetic construct
GFTFSSYG

SEQ ID NO: 12927 - protein, 8 aa, Artificial Sequence
  Synthetic construct
GFSFSTYA

SEQ ID NO: 12928 - protein, 8 aa, Artificial Sequence
  Synthetic construct
GYTFTGYY

SEQ ID NO: 12929 - protein, 8 aa, Artificial Sequence
  Synthetic construct
GFSFGTYA

SEQ ID NO: 12930 - protein, 10 aa, Artificial Sequence
  Synthetic construct
GGSISSGSYY

SEQ ID NO: 12931 - protein, 8 aa, Artificial Sequence
  Synthetic construct
GFTFNSYS

SEQ ID NO: 12932 - protein, 8 aa, Artificial Sequence
  Synthetic construct
GFTFSSYA

SEQ ID NO: 12933 - protein, 10 aa, Artificial Sequence
  Synthetic construct
DGSMNSNRYL

SEQ ID NO: 12934 - protein, 8 aa, Artificial Sequence
  Synthetic construct
GFTFSSYS

SEQ ID NO: 12935 - protein, 10 aa, Artificial Sequence
  Synthetic construct
GDSIGNGVHY

SEQ ID NO: 12936 - protein, 8 aa, Artificial Sequence
  Synthetic construct
GYTFTSYA

SEQ ID NO: 12937 - protein, 10 aa, Artificial Sequence
  Synthetic construct
GGSVRSTSHY

SEQ ID NO: 12938 - protein, 8 aa, Artificial Sequence
  Synthetic construct
GFTFSSYA

SEQ ID NO: 12939 - protein, 8 aa, Artificial Sequence
  Synthetic construct
RFPFSKYA

SEQ ID NO: 12940 - protein, 8 aa, Artificial Sequence
  Synthetic construct
GYTFSRYG

SEQ ID NO: 12941 - protein, 8 aa, Artificial Sequence
  Synthetic construct
GYPFTRDG

SEQ ID NO: 12942 - protein, 8 aa, Artificial Sequence
  Synthetic construct
GFTFSSYS

SEQ ID NO: 12943 - protein, 8 aa, Artificial Sequence
  Synthetic construct
GYSFTSYW

SEQ ID NO: 12944 - protein, 8 aa, Artificial Sequence
  Synthetic construct
GYTFTDYY

SEQ ID NO: 12945 - protein, 8 aa, Artificial Sequence
  Synthetic construct
GFTFSSYA

SEQ ID NO: 12946 - protein, 8 aa, Artificial Sequence
  Synthetic construct
GYSFTSYW

SEQ ID NO: 12947 - protein, 8 aa, Artificial Sequence
  Synthetic construct
GFTFSSYA

SEQ ID NO: 12948 - protein, 8 aa, Artificial Sequence
  Synthetic construct
GYTFTGYY

SEQ ID NO: 12949 - protein, 8 aa, Artificial Sequence
  Synthetic construct
GFTFSSYA

SEQ ID NO: 12950 - protein, 8 aa, Artificial Sequence
  Synthetic construct
DFAFSSYV

SEQ ID NO: 12951 - protein, 8 aa, Artificial Sequence
  Synthetic construct
GFTVSDNH

SEQ ID NO: 12952 - protein, 8 aa, Artificial Sequence
  Synthetic construct
GFTFSSYA

SEQ ID NO: 12953 - protein, 8 aa, Artificial Sequence
  Synthetic construct
GYTFTDHY

SEQ ID NO: 12954 - protein, 8 aa, Artificial Sequence
  Synthetic construct
GYIFSDYA

SEQ ID NO: 12955 - protein, 8 aa, Artificial Sequence
  Synthetic construct
GFTFSGFW

SEQ ID NO: 12956 - protein, 8 aa, Artificial Sequence
  Synthetic construct
GGSFSGYY

SEQ ID NO: 12957 - protein, 8 aa, Artificial Sequence
  Synthetic construct
GGSTGDIY

SEQ ID NO: 12958 - protein, 8 aa, Artificial Sequence
  Synthetic construct
GFTFSHYA

SEQ ID NO: 12959 - protein, 10 aa, Artificial Sequence
  Synthetic construct
GGSLNSGSHY

SEQ ID NO: 12960 - protein, 8 aa, Artificial Sequence
  Synthetic construct
GFTFSSYS

SEQ ID NO: 12961 - protein, 9 aa, Artificial Sequence
  Synthetic construct
GGSITTSNW

SEQ ID NO: 12962 - protein, 10 aa, Artificial Sequence
  Synthetic construct
GGSISSGGYY

SEQ ID NO: 12963 - protein, 8 aa, Artificial Sequence
  Synthetic construct
GYSFATYW

SEQ ID NO: 12964 - protein, 8 aa, Artificial Sequence
  Synthetic construct
GYSFATYW

SEQ ID NO: 12965 - protein, 8 aa, Artificial Sequence
  Synthetic construct
GFTFSSYA

SEQ ID NO: 12966 - protein, 8 aa, Artificial Sequence
  Synthetic construct
GFTFDDYA

SEQ ID NO: 12967 - protein, 8 aa, Artificial Sequence
  Synthetic construct
GYNFGTYG

SEQ ID NO: 12968 - protein, 8 aa, Artificial Sequence
  Synthetic construct
GFIFTTYV

SEQ ID NO: 12969 - protein, 8 aa, Artificial Sequence
  Synthetic construct
GYTFTGYY

SEQ ID NO: 12970 - protein, 8 aa, Artificial Sequence
  Synthetic construct
GFTFSSYG

SEQ ID NO: 12971 - protein, 8 aa, Artificial Sequence
  Synthetic construct
GYSFTDYY

SEQ ID NO: 12972 - protein, 10 aa, Artificial Sequence
  Synthetic construct
GASITTTAYY

SEQ ID NO: 12973 - protein, 8 aa, Artificial Sequence
  Synthetic construct
GFSLASFA

SEQ ID NO: 12974 - protein, 8 aa, Artificial Sequence
  Synthetic construct
GGSISSYY

SEQ ID NO: 12975 - protein, 8 aa, Artificial Sequence
  Synthetic construct
GFTFSSYA

SEQ ID NO: 12976 - protein, 8 aa, Artificial Sequence
  Synthetic construct
GYTFTGYY

SEQ ID NO: 12977 - protein, 8 aa, Artificial Sequence
  Synthetic construct
GYTFTSYA

SEQ ID NO: 12978 - protein, 10 aa, Artificial Sequence
  Synthetic construct
DDSISKSAFY

SEQ ID NO: 12979 - protein, 10 aa, Artificial Sequence
  Synthetic construct
GDSITSATYY

SEQ ID NO: 12980 - protein, 8 aa, Artificial Sequence
  Synthetic construct
GYTFTGYY

SEQ ID NO: 12981 - protein, 8 aa, Artificial Sequence
  Synthetic construct
GFIFSDFA

SEQ ID NO: 12982 - protein, 8 aa, Artificial Sequence
  Synthetic construct
GFTFTYYN

SEQ ID NO: 12983 - protein, 10 aa, Artificial Sequence
  Synthetic construct
GGSISSGGYY

SEQ ID NO: 12984 - protein, 8 aa, Artificial Sequence
  Synthetic construct
GYRFSSYW

SEQ ID NO: 12985 - protein, 8 aa, Artificial Sequence
  Synthetic construct
GFTFSTYI

SEQ ID NO: 12986 - protein, 8 aa, Artificial Sequence
  Synthetic construct
GFIFSNYN

SEQ ID NO: 12987 - protein, 10 aa, Artificial Sequence
  Synthetic construct
GGSINSDSYY

SEQ ID NO: 12988 - protein, 8 aa, Artificial Sequence
  Synthetic construct
GFIFNNYG

SEQ ID NO: 12989 - protein, 10 aa, Artificial Sequence
  Synthetic construct
GGSISSSSYY

SEQ ID NO: 12990 - protein, 8 aa, Artificial Sequence
  Synthetic construct
GYPFTRDG

SEQ ID NO: 12991 - protein, 8 aa, Artificial Sequence
  Synthetic construct
GFTFSSYS

SEQ ID NO: 12992 - protein, 8 aa, Artificial Sequence
  Synthetic construct
GFTFSSYG

SEQ ID NO: 12993 - protein, 9 aa, Artificial Sequence
  Synthetic construct
GSSITSTNW

SEQ ID NO: 12994 - protein, 8 aa, Artificial Sequence
  Synthetic construct
GYSFATYW

SEQ ID NO: 12995 - protein, 8 aa, Artificial Sequence
  Synthetic construct
GGSFSGYY

SEQ ID NO: 12996 - protein, 8 aa, Artificial Sequence
  Synthetic construct
GGSISSYY

SEQ ID NO: 12997 - protein, 8 aa, Artificial Sequence
  Synthetic construct
GFTFSSHW

SEQ ID NO: 12998 - protein, 8 aa, Artificial Sequence
  Synthetic construct
GFTFDDYG

SEQ ID NO: 12999 - protein, 8 aa, Artificial Sequence
  Synthetic construct
GFTFSSYS

SEQ ID NO: 13000 - protein, 8 aa, Artificial Sequence
  Synthetic construct
GYSFTSYW

SEQ ID NO: 13001 - protein, 9 aa, Artificial Sequence
  Synthetic construct
GGSISSSNW

SEQ ID NO: 13002 - protein, 8 aa, Artificial Sequence
  Synthetic construct
GFTFSGYS

SEQ ID NO: 13003 - protein, 8 aa, Artificial Sequence
  Synthetic construct
GYSFTSYW

SEQ ID NO: 13004 - protein, 8 aa, Artificial Sequence
  Synthetic construct
SGSISTYY

SEQ ID NO: 13005 - protein, 8 aa, Artificial Sequence
  Synthetic construct
GFAFSGYS

SEQ ID NO: 13006 - protein, 10 aa, Artificial Sequence
  Synthetic construct
GGSINSGSHY

SEQ ID NO: 13007 - protein, 8 aa, Artificial Sequence
  Synthetic construct
GYIFTNYY

SEQ ID NO: 13008 - protein, 8 aa, Artificial Sequence
  Synthetic construct
GFSLRNYG

SEQ ID NO: 13009 - protein, 10 aa, Artificial Sequence
  Synthetic construct
GFSLATSGVG

SEQ ID NO: 13010 - protein, 8 aa, Artificial Sequence
  Synthetic construct
GFTVSSNY

SEQ ID NO: 13011 - protein, 8 aa, Artificial Sequence
  Synthetic construct
GFTFSRFP

SEQ ID NO: 13012 - protein, 8 aa, Artificial Sequence
  Synthetic construct
GVSFSTYN

SEQ ID NO: 13013 - protein, 10 aa, Artificial Sequence
  Synthetic construct
GGSISSGSYY

SEQ ID NO: 13014 - protein, 8 aa, Artificial Sequence
  Synthetic construct
GFTFRNYA

SEQ ID NO: 13015 - protein, 8 aa, Artificial Sequence
  Synthetic construct
GFAFGNYA

SEQ ID NO: 13016 - protein, 8 aa, Artificial Sequence
  Synthetic construct
GYSFATYW

SEQ ID NO: 13017 - protein, 8 aa, Artificial Sequence
  Synthetic construct
GFNLNNHY

SEQ ID NO: 13018 - protein, 8 aa, Artificial Sequence
  Synthetic construct
GYTFTSYD

SEQ ID NO: 13019 - protein, 10 aa, Artificial Sequence
  Synthetic construct
GGSISSGSYY

SEQ ID NO: 13020 - protein, 8 aa, Artificial Sequence
  Synthetic construct
GFTFSSYS

SEQ ID NO: 13021 - protein, 10 aa, Artificial Sequence
  Synthetic construct
GGSIGSGGYY

SEQ ID NO: 13022 - protein, 8 aa, Artificial Sequence
  Synthetic construct
GFTFSNYG

SEQ ID NO: 13023 - protein, 8 aa, Artificial Sequence
  Synthetic construct
GFTFRSYT

SEQ ID NO: 13024 - protein, 8 aa, Artificial Sequence
  Synthetic construct
GFTFRNYW

SEQ ID NO: 13025 - protein, 8 aa, Artificial Sequence
  Synthetic construct
GGSFSGHY

SEQ ID NO: 13026 - protein, 8 aa, Artificial Sequence
  Synthetic construct
GYSFATYW

SEQ ID NO: 13027 - protein, 8 aa, Artificial Sequence
  Synthetic construct
RFTLKNYA

SEQ ID NO: 13028 - protein, 10 aa, Artificial Sequence
  Synthetic construct
GDSVSSNSAA

SEQ ID NO: 13029 - protein, 10 aa, Artificial Sequence
  Synthetic construct
GFSLTDPTMG

SEQ ID NO: 13030 - protein, 10 aa, Artificial Sequence
  Synthetic construct
GDSISSGGHY

SEQ ID NO: 13031 - protein, 8 aa, Artificial Sequence
  Synthetic construct
GFTFSSYA

SEQ ID NO: 13032 - protein, 8 aa, Artificial Sequence
  Synthetic construct
GGSFSNYF

SEQ ID NO: 13033 - protein, 8 aa, Artificial Sequence
  Synthetic construct
GFIFSGSA

SEQ ID NO: 13034 - protein, 8 aa, Artificial Sequence
  Synthetic construct
GFMFDTYD

SEQ ID NO: 13035 - protein, 8 aa, Artificial Sequence
  Synthetic construct
GFTFSSYG

SEQ ID NO: 13036 - protein, 8 aa, Artificial Sequence
  Synthetic construct
GFTFSNYG

SEQ ID NO: 13037 - protein, 8 aa, Artificial Sequence
  Synthetic construct
GFTFSFYG

SEQ ID NO: 13038 - protein, 8 aa, Artificial Sequence
  Synthetic construct
GFTFNDAW

SEQ ID NO: 13039 - protein, 8 aa, Artificial Sequence
  Synthetic construct
GFGFSDYP

SEQ ID NO: 13040 - protein, 10 aa, Artificial Sequence
  Synthetic construct
GGSINSGSHY

SEQ ID NO: 13041 - protein, 8 aa, Artificial Sequence
  Synthetic construct
KFTFSIYT

SEQ ID NO: 13042 - protein, 8 aa, Artificial Sequence
  Synthetic construct
GYTLTELS

SEQ ID NO: 13043 - protein, 8 aa, Artificial Sequence
  Synthetic construct
GGSLRNYA

SEQ ID NO: 13044 - protein, 8 aa, Artificial Sequence
  Synthetic construct
GFTFKSYD

SEQ ID NO: 13045 - protein, 8 aa, Artificial Sequence
  Synthetic construct
GFTFRSYT

SEQ ID NO: 13046 - protein, 8 aa, Artificial Sequence
  Synthetic construct
GFTFSSYP

SEQ ID NO: 13047 - protein, 10 aa, Artificial Sequence
  Synthetic construct
GGSISSGSYY

SEQ ID NO: 13048 - protein, 8 aa, Artificial Sequence
  Synthetic construct
GFTFSSYA

SEQ ID NO: 13049 - protein, 10 aa, Artificial Sequence
  Synthetic construct
GGSISSSSYY

SEQ ID NO: 13050 - protein, 8 aa, Artificial Sequence
  Synthetic construct
GFAFSSFG

SEQ ID NO: 13051 - protein, 8 aa, Artificial Sequence
  Synthetic construct
GYTFTNFW

SEQ ID NO: 13052 - protein, 8 aa, Artificial Sequence
  Synthetic construct
GYTFTSFG

SEQ ID NO: 13053 - protein, 10 aa, Artificial Sequence
  Synthetic construct
GGSISSSSYY

SEQ ID NO: 13054 - protein, 8 aa, Artificial Sequence
  Synthetic construct
GYTFTSYG

SEQ ID NO: 13055 - protein, 8 aa, Artificial Sequence
  Synthetic construct
GFTFSSYA

SEQ ID NO: 13056 - protein, 8 aa, Artificial Sequence
  Synthetic construct
GGTFSSYA

SEQ ID NO: 13057 - protein, 8 aa, Artificial Sequence
  Synthetic construct
GFSLSTSG

SEQ ID NO: 13058 - protein, 8 aa, Artificial Sequence
  Synthetic construct
GYTFTSYA

SEQ ID NO: 13059 - protein, 8 aa, Artificial Sequence
  Synthetic construct
GFTFSTYS

SEQ ID NO: 13060 - protein, 8 aa, Artificial Sequence
  Synthetic construct
GYSFTSFW

SEQ ID NO: 13061 - protein, 8 aa, Artificial Sequence
  Synthetic construct
GYTFTSYY

SEQ ID NO: 13062 - protein, 8 aa, Artificial Sequence
  Synthetic construct
GFVFNDYA

SEQ ID NO: 13063 - protein, 8 aa, Artificial Sequence
  Synthetic construct
GGSIGSYY

SEQ ID NO: 13064 - protein, 8 aa, Artificial Sequence
  Synthetic construct
GYSFTSYW

SEQ ID NO: 13065 - protein, 8 aa, Artificial Sequence
  Synthetic construct
GGSVSSYY

SEQ ID NO: 13066 - protein, 8 aa, Artificial Sequence
  Synthetic construct
GNRFSDYY

SEQ ID NO: 13067 - protein, 8 aa, Artificial Sequence
  Synthetic construct
GFTFINAW

SEQ ID NO: 13068 - protein, 10 aa, Artificial Sequence
  Synthetic construct
GGSISSGSYY

SEQ ID NO: 13069 - protein, 8 aa, Artificial Sequence
  Synthetic construct
GFPFSSYG

SEQ ID NO: 13070 - protein, 8 aa, Artificial Sequence
  Synthetic construct
GFTFSDSA

SEQ ID NO: 13071 - protein, 8 aa, Artificial Sequence
  Synthetic construct
GGSITGYY

SEQ ID NO: 13072 - protein, 8 aa, Artificial Sequence
  Synthetic construct
GYTFTSYG

SEQ ID NO: 13073 - protein, 8 aa, Artificial Sequence
  Synthetic construct
GFTFSGYV

SEQ ID NO: 13074 - protein, 10 aa, Artificial Sequence
  Synthetic construct
GGSIGSGSYY

SEQ ID NO: 13075 - protein, 8 aa, Artificial Sequence
  Synthetic construct
GYPFTRDG

SEQ ID NO: 13076 - protein, 8 aa, Artificial Sequence
  Synthetic construct
GYTFTSYY

SEQ ID NO: 13077 - protein, 8 aa, Artificial Sequence
  Synthetic construct
GYTFTSYY

SEQ ID NO: 13078 - protein, 10 aa, Artificial Sequence
  Synthetic construct
SGSFNTTSHY

SEQ ID NO: 13079 - protein, 8 aa, Artificial Sequence
  Synthetic construct
GFTFSSYW

SEQ ID NO: 13080 - protein, 8 aa, Artificial Sequence
  Synthetic construct
GFTFSSYW

SEQ ID NO: 13081 - protein, 8 aa, Artificial Sequence
  Synthetic construct
GFSFNSYG

SEQ ID NO: 13082 - protein, 8 aa, Artificial Sequence
  Synthetic construct
GFNFYTTA

SEQ ID NO: 13083 - protein, 10 aa, Artificial Sequence
  Synthetic construct
GFSLATSGVG

SEQ ID NO: 13084 - protein, 9 aa, Artificial Sequence
  Synthetic construct
GGSISSSNW

SEQ ID NO: 13085 - protein, 10 aa, Artificial Sequence
  Synthetic construct
GGSISSGGYS

SEQ ID NO: 13086 - protein, 10 aa, Artificial Sequence
  Synthetic construct
GGSISRGGFS

SEQ ID NO: 13087 - protein, 10 aa, Artificial Sequence
  Synthetic construct
GGSITSANYF

SEQ ID NO: 13088 - protein, 8 aa, Artificial Sequence
  Synthetic construct
GFTFSSYG

SEQ ID NO: 13089 - protein, 8 aa, Artificial Sequence
  Synthetic construct
GFTFSSYA

SEQ ID NO: 13090 - protein, 8 aa, Artificial Sequence
  Synthetic construct
GYTFTDYY

SEQ ID NO: 13091 - protein, 8 aa, Artificial Sequence
  Synthetic construct
GESFSGHY

SEQ ID NO: 13092 - protein, 8 aa, Artificial Sequence
  Synthetic construct
GVTFTGYG

SEQ ID NO: 13093 - protein, 8 aa, Artificial Sequence
  Synthetic construct
GFTFSSYS

SEQ ID NO: 13094 - protein, 8 aa, Artificial Sequence
  Synthetic construct
DGSINSYY

SEQ ID NO: 13095 - protein, 8 aa, Artificial Sequence
  Synthetic construct
GLTFSSYA

SEQ ID NO: 13096 - protein, 10 aa, Artificial Sequence
  Synthetic construct
GGPINGTSYC

SEQ ID NO: 13097 - protein, 8 aa, Artificial Sequence
  Synthetic construct
GFTFSSYW

SEQ ID NO: 13098 - protein, 8 aa, Artificial Sequence
  Synthetic construct
GFTFDDYA

SEQ ID NO: 13099 - protein, 8 aa, Artificial Sequence
  Synthetic construct
GFTFSDAW

SEQ ID NO: 13100 - protein, 8 aa, Artificial Sequence
  Synthetic construct
GYTFTSYY

SEQ ID NO: 13101 - protein, 8 aa, Artificial Sequence
  Synthetic construct
GFTFSRYS

SEQ ID NO: 13102 - protein, 8 aa, Artificial Sequence
  Synthetic construct
GFTFSTHS

SEQ ID NO: 13103 - protein, 8 aa, Artificial Sequence
  Synthetic construct
GFTFSDSA

SEQ ID NO: 13104 - protein, 8 aa, Artificial Sequence
  Synthetic construct
GFTFSSYA

SEQ ID NO: 13105 - protein, 8 aa, Artificial Sequence
  Synthetic construct
GFIVNSNY

SEQ ID NO: 13106 - protein, 8 aa, Artificial Sequence
  Synthetic construct
GFTFSSYW

SEQ ID NO: 13107 - protein, 8 aa, Artificial Sequence
  Synthetic construct
EFTFSNFW

SEQ ID NO: 13108 - protein, 8 aa, Artificial Sequence
  Synthetic construct
GFTFSSYG

SEQ ID NO: 13109 - protein, 8 aa, Artificial Sequence
  Synthetic construct
GFTFTNYW

SEQ ID NO: 13110 - protein, 10 aa, Artificial Sequence
  Synthetic construct
GGSISSGSYY

SEQ ID NO: 13111 - protein, 8 aa, Artificial Sequence
  Synthetic construct
GFSLSPYA

SEQ ID NO: 13112 - protein, 8 aa, Artificial Sequence
  Synthetic construct
GFTFRSYA

SEQ ID NO: 13113 - protein, 8 aa, Artificial Sequence
  Synthetic construct
GFSFSTYS

SEQ ID NO: 13114 - protein, 8 aa, Artificial Sequence
  Synthetic construct
GYTFTSYG

SEQ ID NO: 13115 - protein, 8 aa, Artificial Sequence
  Synthetic construct
GFTFRNYP

SEQ ID NO: 13116 - protein, 8 aa, Artificial Sequence
  Synthetic construct
GFTVSSNY

SEQ ID NO: 13117 - protein, 8 aa, Artificial Sequence
  Synthetic construct
GYTFTSYY

SEQ ID NO: 13118 - protein, 8 aa, Artificial Sequence
  Synthetic construct
GDTFTTYY

SEQ ID NO: 13119 - protein, 8 aa, Artificial Sequence
  Synthetic construct
GFTFSDYY

SEQ ID NO: 13120 - protein, 8 aa, Artificial Sequence
  Synthetic construct
GYSFTTYW

SEQ ID NO: 13121 - protein, 8 aa, Artificial Sequence
  Synthetic construct
GFNVRDNH

SEQ ID NO: 13122 - protein, 8 aa, Artificial Sequence
  Synthetic construct
GYSFTSYY

SEQ ID NO: 13123 - protein, 8 aa, Artificial Sequence
  Synthetic construct
GFTFSSYS

SEQ ID NO: 13124 - protein, 8 aa, Artificial Sequence
  Synthetic construct
GYTFTSYG

SEQ ID NO: 13125 - protein, 8 aa, Artificial Sequence
  Synthetic construct
GVISGRYA

SEQ ID NO: 13126 - protein, 8 aa, Artificial Sequence
  Synthetic construct
GYPFTRDG

SEQ ID NO: 13127 - protein, 8 aa, Artificial Sequence
  Synthetic construct
GFHFVTYG

SEQ ID NO: 13128 - protein, 8 aa, Artificial Sequence
  Synthetic construct
GFTFSRYA

SEQ ID NO: 13129 - protein, 8 aa, Artificial Sequence
  Synthetic construct
GFTFSNYA

SEQ ID NO: 13130 - protein, 10 aa, Artificial Sequence
  Synthetic construct
GGSISSSSYY

SEQ ID NO: 13131 - protein, 8 aa, Artificial Sequence
  Synthetic construct
GGSFSGYY

SEQ ID NO: 13132 - protein, 8 aa, Artificial Sequence
  Synthetic construct
GYTFTSYY

SEQ ID NO: 13133 - protein, 8 aa, Artificial Sequence
  Synthetic construct
GFTFSSYA

SEQ ID NO: 13134 - protein, 8 aa, Artificial Sequence
  Synthetic construct
GFNLDDHS

SEQ ID NO: 13135 - protein, 10 aa, Artificial Sequence
  Synthetic construct
GGSISSGSYY

SEQ ID NO: 13136 - protein, 8 aa, Artificial Sequence
  Synthetic construct
GFAFGNYA

SEQ ID NO: 13137 - protein, 10 aa, Artificial Sequence
  Synthetic construct
GGSISSGGYA

SEQ ID NO: 13138 - protein, 8 aa, Artificial Sequence
  Synthetic construct
GASISQYH

SEQ ID NO: 13139 - protein, 8 aa, Artificial Sequence
  Synthetic construct
GFTFSSYA

SEQ ID NO: 13140 - protein, 10 aa, Artificial Sequence
  Synthetic construct
GDSMRNGYYY

SEQ ID NO: 13141 - protein, 8 aa, Artificial Sequence
  Synthetic construct
GFTFSSYW

SEQ ID NO: 13142 - protein, 8 aa, Artificial Sequence
  Synthetic construct
GFTFSSYW

SEQ ID NO: 13143 - protein, 10 aa, Artificial Sequence
  Synthetic construct
GFSLDTSGVG

SEQ ID NO: 13144 - protein, 10 aa, Artificial Sequence
  Synthetic construct
GDSVSSNSAA

SEQ ID NO: 13145 - protein, 8 aa, Artificial Sequence
  Synthetic construct
GGSFSGYY

SEQ ID NO: 13146 - protein, 8 aa, Artificial Sequence
  Synthetic construct
GFTFSDYY

SEQ ID NO: 13147 - protein, 8 aa, Artificial Sequence
  Synthetic construct
GFTFSRYW

SEQ ID NO: 13148 - protein, 10 aa, Artificial Sequence
  Synthetic construct
GDSIGYGGYY

SEQ ID NO: 13149 - protein, 10 aa, Artificial Sequence
  Synthetic construct
GGSISSGDYY

SEQ ID NO: 13150 - protein, 8 aa, Artificial Sequence
  Synthetic construct
GYTFSTYG

SEQ ID NO: 13151 - protein, 10 aa, Artificial Sequence
  Synthetic construct
GGSINTGGYY

SEQ ID NO: 13152 - protein, 8 aa, Artificial Sequence
  Synthetic construct
GFTFSSYW

SEQ ID NO: 13153 - protein, 9 aa, Artificial Sequence
  Synthetic construct
GASISSSNW

SEQ ID NO: 13154 - protein, 8 aa, Artificial Sequence
  Synthetic construct
GYTFTSYY

SEQ ID NO: 13155 - protein, 8 aa, Artificial Sequence
  Synthetic construct
GFTFSSYA

SEQ ID NO: 13156 - protein, 8 aa, Artificial Sequence
  Synthetic construct
GFSLSDYY

SEQ ID NO: 13157 - protein, 8 aa, Artificial Sequence
  Synthetic construct
GFTFRNYA

SEQ ID NO: 13158 - protein, 10 aa, Artificial Sequence
  Synthetic construct
GGSINSGSHY

SEQ ID NO: 13159 - protein, 9 aa, Artificial Sequence
  Synthetic construct
GDSISRDHW

SEQ ID NO: 13160 - protein, 8 aa, Artificial Sequence
  Synthetic construct
GDSIRSNY

SEQ ID NO: 13161 - protein, 10 aa, Artificial Sequence
  Synthetic construct
SGSISSGLYY

SEQ ID NO: 13162 - protein, 8 aa, Artificial Sequence
  Synthetic construct
SGSLSSNY

SEQ ID NO: 13163 - protein, 8 aa, Artificial Sequence
  Synthetic construct
GFTFSSYS

SEQ ID NO: 13164 - protein, 8 aa, Artificial Sequence
  Synthetic construct
GFTVSSNY

SEQ ID NO: 13165 - protein, 8 aa, Artificial Sequence
  Synthetic construct
GFTFSSYW

SEQ ID NO: 13166 - protein, 8 aa, Artificial Sequence
  Synthetic construct
GFAFGNYA

SEQ ID NO: 13167 - protein, 8 aa, Artificial Sequence
  Synthetic construct
GFTFSSYS

SEQ ID NO: 13168 - protein, 10 aa, Artificial Sequence
  Synthetic construct
GGSISSSSYY

SEQ ID NO: 13169 - protein, 8 aa, Artificial Sequence
  Synthetic construct
GFTFSTYA

SEQ ID NO: 13170 - protein, 8 aa, Artificial Sequence
  Synthetic construct
GYTFISYA

SEQ ID NO: 13171 - protein, 8 aa, Artificial Sequence
  Synthetic construct
GFIFNRAW

SEQ ID NO: 13172 - protein, 8 aa, Artificial Sequence
  Synthetic construct
GFTFSTYR

SEQ ID NO: 13173 - protein, 8 aa, Artificial Sequence
  Synthetic construct
GFTFSSYA

SEQ ID NO: 13174 - protein, 8 aa, Artificial Sequence
  Synthetic construct
GFSFSSFG

SEQ ID NO: 13175 - protein, 8 aa, Artificial Sequence
  Synthetic construct
GFTFSSYG

SEQ ID NO: 13176 - protein, 8 aa, Artificial Sequence
  Synthetic construct
GYSFTNYY

SEQ ID NO: 13177 - protein, 8 aa, Artificial Sequence
  Synthetic construct
GFTFSSYA

SEQ ID NO: 13178 - protein, 10 aa, Artificial Sequence
  Synthetic construct
GDSVSSNKTA

SEQ ID NO: 13179 - protein, 8 aa, Artificial Sequence
  Synthetic construct
GGSISSYY

SEQ ID NO: 13180 - protein, 8 aa, Artificial Sequence
  Synthetic construct
GYSFATYW

SEQ ID NO: 13181 - protein, 8 aa, Artificial Sequence
  Synthetic construct
GYTFTGYY

SEQ ID NO: 13182 - protein, 8 aa, Artificial Sequence
  Synthetic construct
GYTFTDYY

SEQ ID NO: 13183 - protein, 10 aa, Artificial Sequence
  Synthetic construct
GASLEKSDYY

SEQ ID NO: 13184 - protein, 8 aa, Artificial Sequence
  Synthetic construct
GYTFTNYG

SEQ ID NO: 13185 - protein, 10 aa, Artificial Sequence
  Synthetic construct
GGSIGSGGYY

SEQ ID NO: 13186 - protein, 8 aa, Artificial Sequence
  Synthetic construct
GFIFSNFA

SEQ ID NO: 13187 - protein, 8 aa, Artificial Sequence
  Synthetic construct
GPTLGTYA

SEQ ID NO: 13188 - protein, 8 aa, Artificial Sequence
  Synthetic construct
GFTFSGSA

SEQ ID NO: 13189 - protein, 10 aa, Artificial Sequence
  Synthetic construct
GGSGFGGTFY

SEQ ID NO: 13190 - protein, 8 aa, Artificial Sequence
  Synthetic construct
GFTFSSYA

SEQ ID NO: 13191 - protein, 8 aa, Artificial Sequence
  Synthetic construct
GYSFATYW

SEQ ID NO: 13192 - protein, 9 aa, Artificial Sequence
  Synthetic construct
GGSISSGYS

SEQ ID NO: 13193 - protein, 8 aa, Artificial Sequence
  Synthetic construct
GYYFDKNW

SEQ ID NO: 13194 - protein, 8 aa, Artificial Sequence
  Synthetic construct
GGSFSGYY

SEQ ID NO: 13195 - protein, 8 aa, Artificial Sequence
  Synthetic construct
GFTFSSYA

SEQ ID NO: 13196 - protein, 8 aa, Artificial Sequence
  Synthetic construct
GFTFSDHY

SEQ ID NO: 13197 - protein, 8 aa, Artificial Sequence
  Synthetic construct
GFTFSGSA

SEQ ID NO: 13198 - protein, 8 aa, Artificial Sequence
  Synthetic construct
GYTFTGYY

SEQ ID NO: 13199 - protein, 8 aa, Artificial Sequence
  Synthetic construct
GFMFSSYW

SEQ ID NO: 13200 - protein, 8 aa, Artificial Sequence
  Synthetic construct
GFTFSGSA

SEQ ID NO: 13201 - protein, 8 aa, Artificial Sequence
  Synthetic construct
GFTFSNYA

SEQ ID NO: 13202 - protein, 8 aa, Artificial Sequence
  Synthetic construct
GDSITNYY

SEQ ID NO: 13203 - protein, 8 aa, Artificial Sequence
  Synthetic construct
GFSFSDSA

SEQ ID NO: 13204 - protein, 8 aa, Artificial Sequence
  Synthetic construct
GFTFSSYA

SEQ ID NO: 13205 - protein, 8 aa, Artificial Sequence
  Synthetic construct
GVTVSNNY

SEQ ID NO: 13206 - protein, 8 aa, Artificial Sequence
  Synthetic construct
GFTFSSYA

SEQ ID NO: 13207 - protein, 8 aa, Artificial Sequence
  Synthetic construct
GYTFTSYA

SEQ ID NO: 13208 - protein, 8 aa, Artificial Sequence
  Synthetic construct
GFTFSSYA

SEQ ID NO: 13209 - protein, 8 aa, Artificial Sequence
  Synthetic construct
GGSMRAYY

SEQ ID NO: 13210 - protein, 8 aa, Artificial Sequence
  Synthetic construct
GFIFSDAY

SEQ ID NO: 13211 - protein, 8 aa, Artificial Sequence
  Synthetic construct
GFTFGDYT

SEQ ID NO: 13212 - protein, 8 aa, Artificial Sequence
  Synthetic construct
GFTFSSYS

SEQ ID NO: 13213 - protein, 8 aa, Artificial Sequence
  Synthetic construct
GFAVSGTF

SEQ ID NO: 13214 - protein, 8 aa, Artificial Sequence
  Synthetic construct
EFSFYTYP

SEQ ID NO: 13215 - protein, 8 aa, Artificial Sequence
  Synthetic construct
GYSFTSYW

SEQ ID NO: 13216 - protein, 8 aa, Artificial Sequence
  Synthetic construct
GGTFTSYA

SEQ ID NO: 13217 - protein, 10 aa, Artificial Sequence
  Synthetic construct
GGSISSGSYY

SEQ ID NO: 13218 - protein, 8 aa, Artificial Sequence
  Synthetic construct
GFTFSSNA

SEQ ID NO: 13219 - protein, 8 aa, Artificial Sequence
  Synthetic construct
GGSISDHY

SEQ ID NO: 13220 - protein, 8 aa, Artificial Sequence
  Synthetic construct
GFTFNDAW

SEQ ID NO: 13221 - protein, 8 aa, Artificial Sequence
  Synthetic construct
GFTFRSQA

SEQ ID NO: 13222 - protein, 8 aa, Artificial Sequence
  Synthetic construct
GFTFSSYS

SEQ ID NO: 13223 - protein, 8 aa, Artificial Sequence
  Synthetic construct
GFPFSSYS

SEQ ID NO: 13224 - protein, 8 aa, Artificial Sequence
  Synthetic construct
GGTFSSYA

SEQ ID NO: 13225 - protein, 10 aa, Artificial Sequence
  Synthetic construct
GASTSSGSYY

SEQ ID NO: 13226 - protein, 8 aa, Artificial Sequence
  Synthetic construct
GYSFTSYW

SEQ ID NO: 13227 - protein, 8 aa, Artificial Sequence
  Synthetic construct
GFTLDDYA

SEQ ID NO: 13228 - protein, 8 aa, Artificial Sequence
  Synthetic construct
GFPFSSFA

SEQ ID NO: 13229 - protein, 8 aa, Artificial Sequence
  Synthetic construct
GFTFRNHA

SEQ ID NO: 13230 - protein, 8 aa, Artificial Sequence
  Synthetic construct
GGTFSSHS

SEQ ID NO: 13231 - protein, 8 aa, Artificial Sequence
  Synthetic construct
GGTFSSYA

SEQ ID NO: 13232 - protein, 8 aa, Artificial Sequence
  Synthetic construct
NGSISSYY

SEQ ID NO: 13233 - protein, 10 aa, Artificial Sequence
  Synthetic construct
GGSISSGSYY

SEQ ID NO: 13234 - protein, 8 aa, Artificial Sequence
  Synthetic construct
GFNFDDYA

SEQ ID NO: 13235 - protein, 8 aa, Artificial Sequence
  Synthetic construct
GYTFPNYY

SEQ ID NO: 13236 - protein, 8 aa, Artificial Sequence
  Synthetic construct
GFIFSTYA

SEQ ID NO: 13237 - protein, 8 aa, Artificial Sequence
  Synthetic construct
GGSISSYY

SEQ ID NO: 13238 - protein, 8 aa, Artificial Sequence
  Synthetic construct
GGSLSTYY

SEQ ID NO: 13239 - protein, 8 aa, Artificial Sequence
  Synthetic construct
GFTFSDYG

SEQ ID NO: 13240 - protein, 10 aa, Artificial Sequence
  Synthetic construct
GGSISSSSYY

SEQ ID NO: 13241 - protein, 8 aa, Artificial Sequence
  Synthetic construct
GGSFSGYY

SEQ ID NO: 13242 - protein, 10 aa, Artificial Sequence
  Synthetic construct
GGSISSGSYY

SEQ ID NO: 13243 - protein, 10 aa, Artificial Sequence
  Synthetic construct
GGSISSRSNH

SEQ ID NO: 13244 - protein, 8 aa, Artificial Sequence
  Synthetic construct
GFSFGTYA

SEQ ID NO: 13245 - protein, 8 aa, Artificial Sequence
  Synthetic construct
GFTFSNYG

SEQ ID NO: 13246 - protein, 10 aa, Artificial Sequence
  Synthetic construct
GGSITTGGYY

SEQ ID NO: 13247 - protein, 8 aa, Artificial Sequence
  Synthetic construct
GFTLSSYD

SEQ ID NO: 13248 - protein, 8 aa, Artificial Sequence
  Synthetic construct
GFTFSSYS

SEQ ID NO: 13249 - protein, 8 aa, Artificial Sequence
  Synthetic construct
GGSMINHY

SEQ ID NO: 13250 - protein, 8 aa, Artificial Sequence
  Synthetic construct
GFTFSSYW

SEQ ID NO: 13251 - protein, 10 aa, Artificial Sequence
  Synthetic construct
GGSITTGGYY

SEQ ID NO: 13252 - protein, 8 aa, Artificial Sequence
  Synthetic construct
GFTFSSYA

SEQ ID NO: 13253 - protein, 10 aa, Artificial Sequence
  Synthetic construct
GGSVSSGSYY

SEQ ID NO: 13254 - protein, 8 aa, Artificial Sequence
  Synthetic construct
GFNFDEYT

SEQ ID NO: 13255 - protein, 8 aa, Artificial Sequence
  Synthetic construct
GGTFSSDI

SEQ ID NO: 13256 - protein, 10 aa, Artificial Sequence
  Synthetic construct
DDSINSRHYL

SEQ ID NO: 13257 - protein, 8 aa, Artificial Sequence
  Synthetic construct
GFTFSSYD

SEQ ID NO: 13258 - protein, 8 aa, Artificial Sequence
  Synthetic construct
GFTFSSYW

SEQ ID NO: 13259 - protein, 8 aa, Artificial Sequence
  Synthetic construct
GLTYIRYP

SEQ ID NO: 13260 - protein, 8 aa, Artificial Sequence
  Synthetic construct
GGSFSGYY

SEQ ID NO: 13261 - protein, 8 aa, Artificial Sequence
  Synthetic construct
GFTFSTYT

SEQ ID NO: 13262 - protein, 8 aa, Artificial Sequence
  Synthetic construct
GYSFATYW

SEQ ID NO: 13263 - protein, 8 aa, Artificial Sequence
  Synthetic construct
GFPFIGYY

SEQ ID NO: 13264 - protein, 8 aa, Artificial Sequence
  Synthetic construct
GFTFTSYA

SEQ ID NO: 13265 - protein, 8 aa, Artificial Sequence
  Synthetic construct
GFTFSSYG

SEQ ID NO: 13266 - protein, 8 aa, Artificial Sequence
  Synthetic construct
GFTFSSYG

SEQ ID NO: 13267 - protein, 8 aa, Artificial Sequence
  Synthetic construct
GYTFTGYY

SEQ ID NO: 13268 - protein, 8 aa, Artificial Sequence
  Synthetic construct
GYTFTDYY

SEQ ID NO: 13269 - protein, 8 aa, Artificial Sequence
  Synthetic construct
GYTLTGHG

SEQ ID NO: 13270 - protein, 8 aa, Artificial Sequence
  Synthetic construct
GFTFSSYA

SEQ ID NO: 13271 - protein, 8 aa, Artificial Sequence
  Synthetic construct
GFTFSSYS

SEQ ID NO: 13272 - protein, 10 aa, Artificial Sequence
  Synthetic construct
DDSINSRRYL

SEQ ID NO: 13273 - protein, 8 aa, Artificial Sequence
  Synthetic construct
GGSFSTHA

SEQ ID NO: 13274 - protein, 8 aa, Artificial Sequence
  Synthetic construct
GFTFSSYD

SEQ ID NO: 13275 - protein, 8 aa, Artificial Sequence
  Synthetic construct
GGSMSTYY

SEQ ID NO: 13276 - protein, 8 aa, Artificial Sequence
  Synthetic construct
GYPFTRDG

SEQ ID NO: 13277 - protein, 8 aa, Artificial Sequence
  Synthetic construct
GYTFTSYA

SEQ ID NO: 13278 - protein, 10 aa, Artificial Sequence
  Synthetic construct
GGSISSGSYY

SEQ ID NO: 13279 - protein, 8 aa, Artificial Sequence
  Synthetic construct
GFTFSETW

SEQ ID NO: 13280 - protein, 8 aa, Artificial Sequence
  Synthetic construct
GFTFSSYS

SEQ ID NO: 13281 - protein, 8 aa, Artificial Sequence
  Synthetic construct
GGSTRGYY

SEQ ID NO: 13282 - protein, 8 aa, Artificial Sequence
  Synthetic construct
GITFKSYS

SEQ ID NO: 13283 - protein, 8 aa, Artificial Sequence
  Synthetic construct
GFAFSNYA

SEQ ID NO: 13284 - protein, 8 aa, Artificial Sequence
  Synthetic construct
GFTFSEPG

SEQ ID NO: 13285 - protein, 8 aa, Artificial Sequence
  Synthetic construct
GFTFSGSA

SEQ ID NO: 13286 - protein, 10 aa, Artificial Sequence
  Synthetic construct
GFSLATSGVG

SEQ ID NO: 13287 - protein, 8 aa, Artificial Sequence
  Synthetic construct
GLTVSTTY

SEQ ID NO: 13288 - protein, 8 aa, Artificial Sequence
  Synthetic construct
GYTFTDYY

SEQ ID NO: 13289 - protein, 8 aa, Artificial Sequence
  Synthetic construct
GYTFTSYG

SEQ ID NO: 13290 - protein, 8 aa, Artificial Sequence
  Synthetic construct
GYNFATYW

SEQ ID NO: 13291 - protein, 10 aa, Artificial Sequence
  Synthetic construct
GGSVSSDNYY

SEQ ID NO: 13292 - protein, 8 aa, Artificial Sequence
  Synthetic construct
GVTFTGYG

SEQ ID NO: 13293 - protein, 8 aa, Artificial Sequence
  Synthetic construct
GFTFNTYR

SEQ ID NO: 13294 - protein, 8 aa, Artificial Sequence
  Synthetic construct
GFASSSYW

SEQ ID NO: 13295 - protein, 9 aa, Artificial Sequence
  Synthetic construct
GGSISSSNW

SEQ ID NO: 13296 - protein, 8 aa, Artificial Sequence
  Synthetic construct
GFTFNSYA

SEQ ID NO: 13297 - protein, 8 aa, Artificial Sequence
  Synthetic construct
GFTFSSYW

SEQ ID NO: 13298 - protein, 8 aa, Artificial Sequence
  Synthetic construct
GFIFNNYG

SEQ ID NO: 13299 - protein, 8 aa, Artificial Sequence
  Synthetic construct
GFTFSRYW

SEQ ID NO: 13300 - protein, 8 aa, Artificial Sequence
  Synthetic construct
GFSFRSYS

SEQ ID NO: 13301 - protein, 8 aa, Artificial Sequence
  Synthetic construct
GPTLGTYA

SEQ ID NO: 13302 - protein, 8 aa, Artificial Sequence
  Synthetic construct
GFTFSSYA

SEQ ID NO: 13303 - protein, 8 aa, Artificial Sequence
  Synthetic construct
GFTFSRYW

SEQ ID NO: 13304 - protein, 8 aa, Artificial Sequence
  Synthetic construct
GFTFSTYG

SEQ ID NO: 13305 - protein, 8 aa, Artificial Sequence
  Synthetic construct
GFTFSNAW

SEQ ID NO: 13306 - protein, 8 aa, Artificial Sequence
  Synthetic construct
GFTFSSYS

SEQ ID NO: 13307 - protein, 8 aa, Artificial Sequence
  Synthetic construct
SGSISYYY

SEQ ID NO: 13308 - protein, 8 aa, Artificial Sequence
  Synthetic construct
GFTFSSYA

SEQ ID NO: 13309 - protein, 8 aa, Artificial Sequence
  Synthetic construct
GFTFSRYA

SEQ ID NO: 13310 - protein, 10 aa, Artificial Sequence
  Synthetic construct
GVSISSGRDY

SEQ ID NO: 13311 - protein, 8 aa, Artificial Sequence
  Synthetic construct
GYTFTNYD

SEQ ID NO: 13312 - protein, 8 aa, Artificial Sequence
  Synthetic construct
IDPTDSYT

SEQ ID NO: 13313 - protein, 8 aa, Artificial Sequence
  Synthetic construct
INTNTGNP

SEQ ID NO: 13314 - protein, 8 aa, Artificial Sequence
  Synthetic construct
ISTYNGKA

SEQ ID NO: 13315 - protein, 8 aa, Artificial Sequence
  Synthetic construct
VGDGRGNT

SEQ ID NO: 13316 - protein, 8 aa, Artificial Sequence
  Synthetic construct
ISAYNGNT

SEQ ID NO: 13317 - protein, 8 aa, Artificial Sequence
  Synthetic construct
ISGSGQGA

SEQ ID NO: 13318 - protein, 7 aa, Artificial Sequence
  Synthetic construct
IYAGGNT

SEQ ID NO: 13319 - protein, 7 aa, Artificial Sequence
  Synthetic construct
IYYDGRT

SEQ ID NO: 13320 - protein, 7 aa, Artificial Sequence
  Synthetic construct
IYYIGST

SEQ ID NO: 13321 - protein, 8 aa, Artificial Sequence
  Synthetic construct
INPNSGGT

SEQ ID NO: 13322 - protein, 8 aa, Artificial Sequence
  Synthetic construct
INPNSGGT

SEQ ID NO: 13323 - protein, 8 aa, Artificial Sequence
  Synthetic construct
VTPNSGDT

SEQ ID NO: 13324 - protein, 8 aa, Artificial Sequence
  Synthetic construct
ITNIGGDS

SEQ ID NO: 13325 - protein, 8 aa, Artificial Sequence
  Synthetic construct
ISAYNGNT

SEQ ID NO: 13326 - protein, 7 aa, Artificial Sequence
  Synthetic construct
IGTAGDP

SEQ ID NO: 13327 - protein, 8 aa, Artificial Sequence
  Synthetic construct
INPENGRV

SEQ ID NO: 13328 - protein, 8 aa, Artificial Sequence
  Synthetic construct
ISSGASTI

SEQ ID NO: 13329 - protein, 8 aa, Artificial Sequence
  Synthetic construct
ISGSGGST

SEQ ID NO: 13330 - protein, 7 aa, Artificial Sequence
  Synthetic construct
IYYSGNT

SEQ ID NO: 13331 - protein, 8 aa, Artificial Sequence
  Synthetic construct
ISYDGNNK

SEQ ID NO: 13332 - protein, 7 aa, Artificial Sequence
  Synthetic construct
FYDSGST

SEQ ID NO: 13333 - protein, 7 aa, Artificial Sequence
  Synthetic construct
IYHSGST

SEQ ID NO: 13334 - protein, 8 aa, Artificial Sequence
  Synthetic construct
INTNTGNP

SEQ ID NO: 13335 - protein, 7 aa, Artificial Sequence
  Synthetic construct
IYDSGST

SEQ ID NO: 13336 - protein, 8 aa, Artificial Sequence
  Synthetic construct
ISTDGNNK

SEQ ID NO: 13337 - protein, 8 aa, Artificial Sequence
  Synthetic construct
ISAFNGNT

SEQ ID NO: 13338 - protein, 10 aa, Artificial Sequence
  Synthetic construct
IRSSNDGGPT

SEQ ID NO: 13339 - protein, 8 aa, Artificial Sequence
  Synthetic construct
ISGSGGST

SEQ ID NO: 13340 - protein, 8 aa, Artificial Sequence
  Synthetic construct
IWYDGSNK

SEQ ID NO: 13341 - protein, 8 aa, Artificial Sequence
  Synthetic construct
VTDTGGGT

SEQ ID NO: 13342 - protein, 8 aa, Artificial Sequence
  Synthetic construct
IWYDGSNK

SEQ ID NO: 13343 - protein, 8 aa, Artificial Sequence
  Synthetic construct
INSDGRST

SEQ ID NO: 13344 - protein, 8 aa, Artificial Sequence
  Synthetic construct
IGAYNNDT

SEQ ID NO: 13345 - protein, 8 aa, Artificial Sequence
  Synthetic construct
ISVSGGTT

SEQ ID NO: 13346 - protein, 8 aa, Artificial Sequence
  Synthetic construct
ISGSGGST

SEQ ID NO: 13347 - protein, 10 aa, Artificial Sequence
  Synthetic construct
IKSKTDGGTT

SEQ ID NO: 13348 - protein, 8 aa, Artificial Sequence
  Synthetic construct
INASGGTT

SEQ ID NO: 13349 - protein, 8 aa, Artificial Sequence
  Synthetic construct
SANGGDKQ

SEQ ID NO: 13350 - protein, 8 aa, Artificial Sequence
  Synthetic construct
IAGDGSTK

SEQ ID NO: 13351 - protein, 7 aa, Artificial Sequence
  Synthetic construct
IYYSGGT

SEQ ID NO: 13352 - protein, 7 aa, Artificial Sequence
  Synthetic construct
IYYSGST

SEQ ID NO: 13353 - protein, 8 aa, Artificial Sequence
  Synthetic construct
MNPNSGNT

SEQ ID NO: 13354 - protein, 8 aa, Artificial Sequence
  Synthetic construct
ISYDGRNK

SEQ ID NO: 13355 - protein, 8 aa, Artificial Sequence
  Synthetic construct
INPNSGGT

SEQ ID NO: 13356 - protein, 8 aa, Artificial Sequence
  Synthetic construct
IDPSDSYT

SEQ ID NO: 13357 - protein, 8 aa, Artificial Sequence
  Synthetic construct
ISYDGSNK

SEQ ID NO: 13358 - protein, 8 aa, Artificial Sequence
  Synthetic construct
VSGSSTYI

SEQ ID NO: 13359 - protein, 10 aa, Artificial Sequence
  Synthetic construct
IRSSNDGGPT

SEQ ID NO: 13360 - protein, 8 aa, Artificial Sequence
  Synthetic construct
ISYDGSNK

SEQ ID NO: 13361 - protein, 8 aa, Artificial Sequence
  Synthetic construct
ISRSSSYI

SEQ ID NO: 13362 - protein, 7 aa, Artificial Sequence
  Synthetic construct
IYWDDDK

SEQ ID NO: 13363 - protein, 8 aa, Artificial Sequence
  Synthetic construct
ISAYNGNT

SEQ ID NO: 13364 - protein, 8 aa, Artificial Sequence
  Synthetic construct
ISGGGGGT

SEQ ID NO: 13365 - protein, 8 aa, Artificial Sequence
  Synthetic construct
IWYDGSNK

SEQ ID NO: 13366 - protein, 8 aa, Artificial Sequence
  Synthetic construct
IKQDGSEK

SEQ ID NO: 13367 - protein, 8 aa, Artificial Sequence
  Synthetic construct
TSYDGGSK

SEQ ID NO: 13368 - protein, 7 aa, Artificial Sequence
  Synthetic construct
TYDDDTP

SEQ ID NO: 13369 - protein, 8 aa, Artificial Sequence
  Synthetic construct
IYPGDSDT

SEQ ID NO: 13370 - protein, 8 aa, Artificial Sequence
  Synthetic construct
ISYDGSNK

SEQ ID NO: 13371 - protein, 7 aa, Artificial Sequence
  Synthetic construct
IYSDGNT

SEQ ID NO: 13372 - protein, 7 aa, Artificial Sequence
  Synthetic construct
IYYSGST

SEQ ID NO: 13373 - protein, 8 aa, Artificial Sequence
  Synthetic construct
INAGNGNT

SEQ ID NO: 13374 - protein, 8 aa, Artificial Sequence
  Synthetic construct
IDPSDSYT

SEQ ID NO: 13375 - protein, 8 aa, Artificial Sequence
  Synthetic construct
ISWDGGST

SEQ ID NO: 13376 - protein, 8 aa, Artificial Sequence
  Synthetic construct
ISYDGSNK

SEQ ID NO: 13377 - protein, 8 aa, Artificial Sequence
  Synthetic construct
ISYDGSNK

SEQ ID NO: 13378 - protein, 8 aa, Artificial Sequence
  Synthetic construct
ISYDGSNK

SEQ ID NO: 13379 - protein, 7 aa, Artificial Sequence
  Synthetic construct
VYWDDDK

SEQ ID NO: 13380 - protein, 8 aa, Artificial Sequence
  Synthetic construct
ISYDGSNK

SEQ ID NO: 13381 - protein, 8 aa, Artificial Sequence
  Synthetic construct
IIPLFGTS

SEQ ID NO: 13382 - protein, 7 aa, Artificial Sequence
  Synthetic construct
VYATGTT

SEQ ID NO: 13383 - protein, 8 aa, Artificial Sequence
  Synthetic construct
ISARDGDP

SEQ ID NO: 13384 - protein, 8 aa, Artificial Sequence
  Synthetic construct
ISGSGGST

SEQ ID NO: 13385 - protein, 8 aa, Artificial Sequence
  Synthetic construct
ISAYNGNT

SEQ ID NO: 13386 - protein, 8 aa, Artificial Sequence
  Synthetic construct
IIPIVGVV

SEQ ID NO: 13387 - protein, 7 aa, Artificial Sequence
  Synthetic construct
IYWDDDK

SEQ ID NO: 13388 - protein, 8 aa, Artificial Sequence
  Synthetic construct
ISYDGSNK

SEQ ID NO: 13389 - protein, 7 aa, Artificial Sequence
  Synthetic construct
IGSGGST

SEQ ID NO: 13390 - protein, 8 aa, Artificial Sequence
  Synthetic construct
ISYDGSNK

SEQ ID NO: 13391 - protein, 8 aa, Artificial Sequence
  Synthetic construct
LSRDSVSE

SEQ ID NO: 13392 - protein, 7 aa, Artificial Sequence
  Synthetic construct
VDSNGAT

SEQ ID NO: 13393 - protein, 8 aa, Artificial Sequence
  Synthetic construct
ISSSSSYI

SEQ ID NO: 13394 - protein, 8 aa, Artificial Sequence
  Synthetic construct
IKKDGSEK

SEQ ID NO: 13395 - protein, 7 aa, Artificial Sequence
  Synthetic construct
INHSGST

SEQ ID NO: 13396 - protein, 7 aa, Artificial Sequence
  Synthetic construct
IFSNDEK

SEQ ID NO: 13397 - protein, 7 aa, Artificial Sequence
  Synthetic construct
IYTSGST

SEQ ID NO: 13398 - protein, 8 aa, Artificial Sequence
  Synthetic construct
IYPGDSDT

SEQ ID NO: 13399 - protein, 8 aa, Artificial Sequence
  Synthetic construct
IKQDGSEK

SEQ ID NO: 13400 - protein, 7 aa, Artificial Sequence
  Synthetic construct
IYSGATT

SEQ ID NO: 13401 - protein, 8 aa, Artificial Sequence
  Synthetic construct
IWYDGSNK

SEQ ID NO: 13402 - protein, 7 aa, Artificial Sequence
  Synthetic construct
IGSDDDE

SEQ ID NO: 13403 - protein, 8 aa, Artificial Sequence
  Synthetic construct
INPKNGGT

SEQ ID NO: 13404 - protein, 9 aa, Artificial Sequence
  Synthetic construct
TYYRSKWYN

SEQ ID NO: 13405 - protein, 7 aa, Artificial Sequence
  Synthetic construct
IYAGGNT

SEQ ID NO: 13406 - protein, 7 aa, Artificial Sequence
  Synthetic construct
IFYSGNT

SEQ ID NO: 13407 - protein, 8 aa, Artificial Sequence
  Synthetic construct
VSYDGYNE

SEQ ID NO: 13408 - protein, 8 aa, Artificial Sequence
  Synthetic construct
MNPNSGNT

SEQ ID NO: 13409 - protein, 8 aa, Artificial Sequence
  Synthetic construct
INPDGTGA

SEQ ID NO: 13410 - protein, 7 aa, Artificial Sequence
  Synthetic construct
IYDGGST

SEQ ID NO: 13411 - protein, 8 aa, Artificial Sequence
  Synthetic construct
ISYDGSNK

SEQ ID NO: 13412 - protein, 8 aa, Artificial Sequence
  Synthetic construct
IIPIFGTA

SEQ ID NO: 13413 - protein, 7 aa, Artificial Sequence
  Synthetic construct
IYNGGST

SEQ ID NO: 13414 - protein, 8 aa, Artificial Sequence
  Synthetic construct
ISSSGSTI

SEQ ID NO: 13415 - protein, 8 aa, Artificial Sequence
  Synthetic construct
ISGSSSYI

SEQ ID NO: 13416 - protein, 8 aa, Artificial Sequence
  Synthetic construct
INQDGSEN

SEQ ID NO: 13417 - protein, 8 aa, Artificial Sequence
  Synthetic construct
ISYDGKYK

SEQ ID NO: 13418 - protein, 8 aa, Artificial Sequence
  Synthetic construct
ISGSGTPT

SEQ ID NO: 13419 - protein, 10 aa, Artificial Sequence
  Synthetic construct
IRSKANSYAT

SEQ ID NO: 13420 - protein, 8 aa, Artificial Sequence
  Synthetic construct
TSYAGTDK

SEQ ID NO: 13421 - protein, 8 aa, Artificial Sequence
  Synthetic construct
ISFDGSNT

SEQ ID NO: 13422 - protein, 8 aa, Artificial Sequence
  Synthetic construct
ISGSGSPL

SEQ ID NO: 13423 - protein, 8 aa, Artificial Sequence
  Synthetic construct
IKQDGSEK

SEQ ID NO: 13424 - protein, 8 aa, Artificial Sequence
  Synthetic construct
ISYDGSNK

SEQ ID NO: 13425 - protein, 8 aa, Artificial Sequence
  Synthetic construct
ISGNGGST

SEQ ID NO: 13426 - protein, 8 aa, Artificial Sequence
  Synthetic construct
ISYDGNRK

SEQ ID NO: 13427 - protein, 7 aa, Artificial Sequence
  Synthetic construct
IYWDDDK

SEQ ID NO: 13428 - protein, 7 aa, Artificial Sequence
  Synthetic construct
IYHSAIT

SEQ ID NO: 13429 - protein, 10 aa, Artificial Sequence
  Synthetic construct
IKSESYGGTA

SEQ ID NO: 13430 - protein, 8 aa, Artificial Sequence
  Synthetic construct
IKQDGNEK

SEQ ID NO: 13431 - protein, 8 aa, Artificial Sequence
  Synthetic construct
IKEDGSET

SEQ ID NO: 13432 - protein, 8 aa, Artificial Sequence
  Synthetic construct
ISWNSGSI

SEQ ID NO: 13433 - protein, 8 aa, Artificial Sequence
  Synthetic construct
ISSSSRDI

SEQ ID NO: 13434 - protein, 8 aa, Artificial Sequence
  Synthetic construct
INPNTGAT

SEQ ID NO: 13435 - protein, 7 aa, Artificial Sequence
  Synthetic construct
INHSGIT

SEQ ID NO: 13436 - protein, 8 aa, Artificial Sequence
  Synthetic construct
ISGDGSTT

SEQ ID NO: 13437 - protein, 7 aa, Artificial Sequence
  Synthetic construct
IYHSGST

SEQ ID NO: 13438 - protein, 8 aa, Artificial Sequence
  Synthetic construct
ISYDGSNK

SEQ ID NO: 13439 - protein, 8 aa, Artificial Sequence
  Synthetic construct
IIASGDTT

SEQ ID NO: 13440 - protein, 8 aa, Artificial Sequence
  Synthetic construct
INPGGGSA

SEQ ID NO: 13441 - protein, 8 aa, Artificial Sequence
  Synthetic construct
ISPTSDDT

SEQ ID NO: 13442 - protein, 7 aa, Artificial Sequence
  Synthetic construct
INHSGST

SEQ ID NO: 13443 - protein, 7 aa, Artificial Sequence
  Synthetic construct
IYHTGST

SEQ ID NO: 13444 - protein, 7 aa, Artificial Sequence
  Synthetic construct
MYTTGRT

SEQ ID NO: 13445 - protein, 7 aa, Artificial Sequence
  Synthetic construct
IYRDGAT

SEQ ID NO: 13446 - protein, 7 aa, Artificial Sequence
  Synthetic construct
VSYAEST

SEQ ID NO: 13447 - protein, 8 aa, Artificial Sequence
  Synthetic construct
ISYDGSNK

SEQ ID NO: 13448 - protein, 7 aa, Artificial Sequence
  Synthetic construct
IYHTGST

SEQ ID NO: 13449 - protein, 8 aa, Artificial Sequence
  Synthetic construct
ISGSGGST

SEQ ID NO: 13450 - protein, 8 aa, Artificial Sequence
  Synthetic construct
IDPKNGGT

SEQ ID NO: 13451 - protein, 8 aa, Artificial Sequence
  Synthetic construct
FWHDGSTK

SEQ ID NO: 13452 - protein, 8 aa, Artificial Sequence
  Synthetic construct
INPNSGGT

SEQ ID NO: 13453 - protein, 7 aa, Artificial Sequence
  Synthetic construct
IFSNDEK

SEQ ID NO: 13454 - protein, 8 aa, Artificial Sequence
  Synthetic construct
INWNSGSI

SEQ ID NO: 13455 - protein, 8 aa, Artificial Sequence
  Synthetic construct
IIPSLGIT

SEQ ID NO: 13456 - protein, 8 aa, Artificial Sequence
  Synthetic construct
VYPADSDA

SEQ ID NO: 13457 - protein, 8 aa, Artificial Sequence
  Synthetic construct
VSISSSTI

SEQ ID NO: 13458 - protein, 8 aa, Artificial Sequence
  Synthetic construct
ISVNADST

SEQ ID NO: 13459 - protein, 8 aa, Artificial Sequence
  Synthetic construct
IWYDGSNK

SEQ ID NO: 13460 - protein, 7 aa, Artificial Sequence
  Synthetic construct
IYQNGQT

SEQ ID NO: 13461 - protein, 7 aa, Artificial Sequence
  Synthetic construct
IYYSGSA

SEQ ID NO: 13462 - protein, 8 aa, Artificial Sequence
  Synthetic construct
INPSGGST

SEQ ID NO: 13463 - protein, 8 aa, Artificial Sequence
  Synthetic construct
ISYDGHDK

SEQ ID NO: 13464 - protein, 8 aa, Artificial Sequence
  Synthetic construct
IRSSDTYI

SEQ ID NO: 13465 - protein, 8 aa, Artificial Sequence
  Synthetic construct
ISGSGGST

SEQ ID NO: 13466 - protein, 8 aa, Artificial Sequence
  Synthetic construct
ISIVGSNT

SEQ ID NO: 13467 - protein, 8 aa, Artificial Sequence
  Synthetic construct
VNPDDSYS

SEQ ID NO: 13468 - protein, 8 aa, Artificial Sequence
  Synthetic construct
INQDGTEK

SEQ ID NO: 13469 - protein, 7 aa, Artificial Sequence
  Synthetic construct
ISYSGNT

SEQ ID NO: 13470 - protein, 8 aa, Artificial Sequence
  Synthetic construct
INPSGGSS

SEQ ID NO: 13471 - protein, 7 aa, Artificial Sequence
  Synthetic construct
IYTSGST

SEQ ID NO: 13472 - protein, 8 aa, Artificial Sequence
  Synthetic construct
ISSTDDTT

SEQ ID NO: 13473 - protein, 8 aa, Artificial Sequence
  Synthetic construct
INTDGSRT

SEQ ID NO: 13474 - protein, 7 aa, Artificial Sequence
  Synthetic construct
IYHSGTT

SEQ ID NO: 13475 - protein, 7 aa, Artificial Sequence
  Synthetic construct
IFSNDEK

SEQ ID NO: 13476 - protein, 8 aa, Artificial Sequence
  Synthetic construct
INPSGGST

SEQ ID NO: 13477 - protein, 8 aa, Artificial Sequence
  Synthetic construct
ISSSSSYT

SEQ ID NO: 13478 - protein, 8 aa, Artificial Sequence
  Synthetic construct
ISGSGGST

SEQ ID NO: 13479 - protein, 8 aa, Artificial Sequence
  Synthetic construct
ISWNSGSI

SEQ ID NO: 13480 - protein, 7 aa, Artificial Sequence
  Synthetic construct
VYDGGST

SEQ ID NO: 13481 - protein, 8 aa, Artificial Sequence
  Synthetic construct
ISGSGGST

SEQ ID NO: 13482 - protein, 7 aa, Artificial Sequence
  Synthetic construct
INHSGST

SEQ ID NO: 13483 - protein, 7 aa, Artificial Sequence
  Synthetic construct
IYTSGST

SEQ ID NO: 13484 - protein, 8 aa, Artificial Sequence
  Synthetic construct
ISGSSGST

SEQ ID NO: 13485 - protein, 8 aa, Artificial Sequence
  Synthetic construct
IYPGDSDT

SEQ ID NO: 13486 - protein, 8 aa, Artificial Sequence
  Synthetic construct
IDPTDSYT

SEQ ID NO: 13487 - protein, 1 aa, Artificial Sequence
  Synthetic construct
K

SEQ ID NO: 13488 - protein, 8 aa, Artificial Sequence
  Synthetic construct
MSSSGNLI

SEQ ID NO: 13489 - protein, 6 aa, Artificial Sequence
  Synthetic construct
LTGSDA

SEQ ID NO: 13490 - protein, 8 aa, Artificial Sequence
  Synthetic construct
ISSSSSYI

SEQ ID NO: 13491 - protein, 8 aa, Artificial Sequence
  Synthetic construct
INPNSGAT

SEQ ID NO: 13492 - protein, 8 aa, Artificial Sequence
  Synthetic construct
ISTYNGKA

SEQ ID NO: 13493 - protein, 8 aa, Artificial Sequence
  Synthetic construct
VSVYNGDT

SEQ ID NO: 13494 - protein, 8 aa, Artificial Sequence
  Synthetic construct
INNDGTTT

SEQ ID NO: 13495 - protein, 8 aa, Artificial Sequence
  Synthetic construct
INVGNNNT

SEQ ID NO: 13496 - protein, 8 aa, Artificial Sequence
  Synthetic construct
MNPNSGNT

SEQ ID NO: 13497 - protein, 7 aa, Artificial Sequence
  Synthetic construct
IYSGGST

SEQ ID NO: 13498 - protein, 8 aa, Artificial Sequence
  Synthetic construct
IDPTDSYT

SEQ ID NO: 13499 - protein, 8 aa, Artificial Sequence
  Synthetic construct
INQDGSDH

SEQ ID NO: 13500 - protein, 7 aa, Artificial Sequence
  Synthetic construct
IDSDGET

SEQ ID NO: 13501 - protein, 7 aa, Artificial Sequence
  Synthetic construct
IYYSGST

SEQ ID NO: 13502 - protein, 7 aa, Artificial Sequence
  Synthetic construct
IYYSGST

SEQ ID NO: 13503 - protein, 8 aa, Artificial Sequence
  Synthetic construct
IWYDGSNK

SEQ ID NO: 13504 - protein, 8 aa, Artificial Sequence
  Synthetic construct
INPNSGGT

SEQ ID NO: 13505 - protein, 8 aa, Artificial Sequence
  Synthetic construct
INAGNGNT

SEQ ID NO: 13506 - protein, 7 aa, Artificial Sequence
  Synthetic construct
ISYSGTT

SEQ ID NO: 13507 - protein, 8 aa, Artificial Sequence
  Synthetic construct
TWHEEDYK

SEQ ID NO: 13508 - protein, 8 aa, Artificial Sequence
  Synthetic construct
ITSSDSTI

SEQ ID NO: 13509 - protein, 8 aa, Artificial Sequence
  Synthetic construct
INCNGGTT

SEQ ID NO: 13510 - protein, 10 aa, Artificial Sequence
  Synthetic construct
VGSKGNTYAT

SEQ ID NO: 13511 - protein, 8 aa, Artificial Sequence
  Synthetic construct
ISWNSGDI

SEQ ID NO: 13512 - protein, 7 aa, Artificial Sequence
  Synthetic construct
IYYSGST

SEQ ID NO: 13513 - protein, 7 aa, Artificial Sequence
  Synthetic construct
IYYSGSA

SEQ ID NO: 13514 - protein, 8 aa, Artificial Sequence
  Synthetic construct
ISSSSSYI

SEQ ID NO: 13515 - protein, 8 aa, Artificial Sequence
  Synthetic construct
INQDGSVT

SEQ ID NO: 13516 - protein, 8 aa, Artificial Sequence
  Synthetic construct
IIPILGIA

SEQ ID NO: 13517 - protein, 8 aa, Artificial Sequence
  Synthetic construct
IWYDGSNK

SEQ ID NO: 13518 - protein, 8 aa, Artificial Sequence
  Synthetic construct
INPNSGGT

SEQ ID NO: 13519 - protein, 8 aa, Artificial Sequence
  Synthetic construct
ISGSGTTV

SEQ ID NO: 13520 - protein, 7 aa, Artificial Sequence
  Synthetic construct
IFSTDEK

SEQ ID NO: 13521 - protein, 8 aa, Artificial Sequence
  Synthetic construct
LSHDGSNH

SEQ ID NO: 13522 - protein, 7 aa, Artificial Sequence
  Synthetic construct
IYYNGNV

SEQ ID NO: 13523 - protein, 8 aa, Artificial Sequence
  Synthetic construct
IWYDGSNK

SEQ ID NO: 13524 - protein, 8 aa, Artificial Sequence
  Synthetic construct
INAGNGNT

SEQ ID NO: 13525 - protein, 8 aa, Artificial Sequence
  Synthetic construct
VNPDDSYS

SEQ ID NO: 13526 - protein, 8 aa, Artificial Sequence
  Synthetic construct
IRGSGTIS

SEQ ID NO: 13527 - protein, 8 aa, Artificial Sequence
  Synthetic construct
ISAYNGNT

SEQ ID NO: 13528 - protein, 8 aa, Artificial Sequence
  Synthetic construct
ISGSGGST

SEQ ID NO: 13529 - protein, 7 aa, Artificial Sequence
  Synthetic construct
IYYSGST

SEQ ID NO: 13530 - protein, 8 aa, Artificial Sequence
  Synthetic construct
ITFEGTKE

SEQ ID NO: 13531 - protein, 8 aa, Artificial Sequence
  Synthetic construct
VNPDDSYS

SEQ ID NO: 13532 - protein, 7 aa, Artificial Sequence
  Synthetic construct
IYYRGST

SEQ ID NO: 13533 - protein, 8 aa, Artificial Sequence
  Synthetic construct
IIPIFGTA

SEQ ID NO: 13534 - protein, 10 aa, Artificial Sequence
  Synthetic construct
IRSKAYGGTT

SEQ ID NO: 13535 - protein, 8 aa, Artificial Sequence
  Synthetic construct
ISSNGGYT

SEQ ID NO: 13536 - protein, 8 aa, Artificial Sequence
  Synthetic construct
IYPGDSDT

SEQ ID NO: 13537 - protein, 7 aa, Artificial Sequence
  Synthetic construct
IGPAGDT

SEQ ID NO: 13538 - protein, 8 aa, Artificial Sequence
  Synthetic construct
ISSSGSTI

SEQ ID NO: 13539 - protein, 7 aa, Artificial Sequence
  Synthetic construct
IYSGGST

SEQ ID NO: 13540 - protein, 7 aa, Artificial Sequence
  Synthetic construct
INHSGST

SEQ ID NO: 13541 - protein, 8 aa, Artificial Sequence
  Synthetic construct
ITSGSNFF

SEQ ID NO: 13542 - protein, 8 aa, Artificial Sequence
  Synthetic construct
FIPLFETP

SEQ ID NO: 13543 - protein, 8 aa, Artificial Sequence
  Synthetic construct
ISGTASTT

SEQ ID NO: 13544 - protein, 8 aa, Artificial Sequence
  Synthetic construct
ISSGSTNI

SEQ ID NO: 13545 - protein, 7 aa, Artificial Sequence
  Synthetic construct
IYFDGST

SEQ ID NO: 13546 - protein, 7 aa, Artificial Sequence
  Synthetic construct
IYWDDDK

SEQ ID NO: 13547 - protein, 8 aa, Artificial Sequence
  Synthetic construct
INPGGGTS

SEQ ID NO: 13548 - protein, 8 aa, Artificial Sequence
  Synthetic construct
FDPEDGET

SEQ ID NO: 13549 - protein, 10 aa, Artificial Sequence
  Synthetic construct
IKSNMHGGTA

SEQ ID NO: 13550 - protein, 8 aa, Artificial Sequence
  Synthetic construct
INPNSGGT

SEQ ID NO: 13551 - protein, 8 aa, Artificial Sequence
  Synthetic construct
IWYDGSNK

SEQ ID NO: 13552 - protein, 8 aa, Artificial Sequence
  Synthetic construct
LSGSGRGT

SEQ ID NO: 13553 - protein, 10 aa, Artificial Sequence
  Synthetic construct
IRSITNNYAT

SEQ ID NO: 13554 - protein, 8 aa, Artificial Sequence
  Synthetic construct
ISNIGVTT

SEQ ID NO: 13555 - protein, 8 aa, Artificial Sequence
  Synthetic construct
ISAYNGNT

SEQ ID NO: 13556 - protein, 8 aa, Artificial Sequence
  Synthetic construct
IKPDGSEK

SEQ ID NO: 13557 - protein, 7 aa, Artificial Sequence
  Synthetic construct
IGPAGDT

SEQ ID NO: 13558 - protein, 8 aa, Artificial Sequence
  Synthetic construct
ISAYNGNT

SEQ ID NO: 13559 - protein, 8 aa, Artificial Sequence
  Synthetic construct
ISAYNGNT

SEQ ID NO: 13560 - protein, 8 aa, Artificial Sequence
  Synthetic construct
ISANNGNT

SEQ ID NO: 13561 - protein, 8 aa, Artificial Sequence
  Synthetic construct
ISYDGSNK

SEQ ID NO: 13562 - protein, 8 aa, Artificial Sequence
  Synthetic construct
INPSGGST

SEQ ID NO: 13563 - protein, 8 aa, Artificial Sequence
  Synthetic construct
ITSSGVDT

SEQ ID NO: 13564 - protein, 7 aa, Artificial Sequence
  Synthetic construct
IYNSGSI

SEQ ID NO: 13565 - protein, 8 aa, Artificial Sequence
  Synthetic construct
IDPTDSYT

SEQ ID NO: 13566 - protein, 7 aa, Artificial Sequence
  Synthetic construct
IYTGGRT

SEQ ID NO: 13567 - protein, 8 aa, Artificial Sequence
  Synthetic construct
INHNGSEK

SEQ ID NO: 13568 - protein, 9 aa, Artificial Sequence
  Synthetic construct
TYYRSKWYN

SEQ ID NO: 13569 - protein, 8 aa, Artificial Sequence
  Synthetic construct
ISNSGGLR

SEQ ID NO: 13570 - protein, 8 aa, Artificial Sequence
  Synthetic construct
IYPGDSDT

SEQ ID NO: 13571 - protein, 7 aa, Artificial Sequence
  Synthetic construct
IDDSGST

SEQ ID NO: 13572 - protein, 8 aa, Artificial Sequence
  Synthetic construct
INPNSGDT

SEQ ID NO: 13573 - protein, 8 aa, Artificial Sequence
  Synthetic construct
INAGNGNT

SEQ ID NO: 13574 - protein, 8 aa, Artificial Sequence
  Synthetic construct
IGQDGNSK

SEQ ID NO: 13575 - protein, 7 aa, Artificial Sequence
  Synthetic construct
LSYGGST

SEQ ID NO: 13576 - protein, 8 aa, Artificial Sequence
  Synthetic construct
ISSSGVNT

SEQ ID NO: 13577 - protein, 8 aa, Artificial Sequence
  Synthetic construct
ISGSGAIT

SEQ ID NO: 13578 - protein, 8 aa, Artificial Sequence
  Synthetic construct
LSGSGRGT

SEQ ID NO: 13579 - protein, 7 aa, Artificial Sequence
  Synthetic construct
IYSSGIT

SEQ ID NO: 13580 - protein, 8 aa, Artificial Sequence
  Synthetic construct
ISYDGSNK

SEQ ID NO: 13581 - protein, 7 aa, Artificial Sequence
  Synthetic construct
IGPAGDT

SEQ ID NO: 13582 - protein, 10 aa, Artificial Sequence
  Synthetic construct
MRHKASRYTT

SEQ ID NO: 13583 - protein, 8 aa, Artificial Sequence
  Synthetic construct
ISAYNGNT

SEQ ID NO: 13584 - protein, 10 aa, Artificial Sequence
  Synthetic construct
IRSSNDGGPT

SEQ ID NO: 13585 - protein, 7 aa, Artificial Sequence
  Synthetic construct
IYWDDDK

SEQ ID NO: 13586 - protein, 8 aa, Artificial Sequence
  Synthetic construct
IDPSDSYT

SEQ ID NO: 13587 - protein, 7 aa, Artificial Sequence
  Synthetic construct
IYSGGAT

SEQ ID NO: 13588 - protein, 7 aa, Artificial Sequence
  Synthetic construct
IYWDDDK

SEQ ID NO: 13589 - protein, 7 aa, Artificial Sequence
  Synthetic construct
IYWDDDK

SEQ ID NO: 13590 - protein, 8 aa, Artificial Sequence
  Synthetic construct
INPSGGST

SEQ ID NO: 13591 - protein, 7 aa, Artificial Sequence
  Synthetic construct
SFHNGIT

SEQ ID NO: 13592 - protein, 8 aa, Artificial Sequence
  Synthetic construct
IDPTDSYT

SEQ ID NO: 13593 - protein, 8 aa, Artificial Sequence
  Synthetic construct
IDPTDSYT

SEQ ID NO: 13594 - protein, 7 aa, Artificial Sequence
  Synthetic construct
IDWDDSK

SEQ ID NO: 13595 - protein, 8 aa, Artificial Sequence
  Synthetic construct
MNSNSGGT

SEQ ID NO: 13596 - protein, 8 aa, Artificial Sequence
  Synthetic construct
IIPVLEIA

SEQ ID NO: 13597 - protein, 8 aa, Artificial Sequence
  Synthetic construct
MYSNSGAT

SEQ ID NO: 13598 - protein, 8 aa, Artificial Sequence
  Synthetic construct
ISTYNGKA

SEQ ID NO: 13599 - protein, 7 aa, Artificial Sequence
  Synthetic construct
IFHSGNA

SEQ ID NO: 13600 - protein, 8 aa, Artificial Sequence
  Synthetic construct
ISTYNGKA

SEQ ID NO: 13601 - protein, 7 aa, Artificial Sequence
  Synthetic construct
INHSGST

SEQ ID NO: 13602 - protein, 8 aa, Artificial Sequence
  Synthetic construct
IKQDGSEK

SEQ ID NO: 13603 - protein, 7 aa, Artificial Sequence
  Synthetic construct
IYTSGST

SEQ ID NO: 13604 - protein, 7 aa, Artificial Sequence
  Synthetic construct
VFYDGTS

SEQ ID NO: 13605 - protein, 7 aa, Artificial Sequence
  Synthetic construct
IYHSGST

SEQ ID NO: 13606 - protein, 7 aa, Artificial Sequence
  Synthetic construct
IYTSGST

SEQ ID NO: 13607 - protein, 8 aa, Artificial Sequence
  Synthetic construct
VDPKDDRT

SEQ ID NO: 13608 - protein, 8 aa, Artificial Sequence
  Synthetic construct
ISSSSSYI

SEQ ID NO: 13609 - protein, 8 aa, Artificial Sequence
  Synthetic construct
ISSNGGRT

SEQ ID NO: 13610 - protein, 8 aa, Artificial Sequence
  Synthetic construct
ISAYNGNT

SEQ ID NO: 13611 - protein, 8 aa, Artificial Sequence
  Synthetic construct
IDPTDSYT

SEQ ID NO: 13612 - protein, 8 aa, Artificial Sequence
  Synthetic construct
ISGSGDNI

SEQ ID NO: 13613 - protein, 8 aa, Artificial Sequence
  Synthetic construct
ISAYNGNT

SEQ ID NO: 13614 - protein, 8 aa, Artificial Sequence
  Synthetic construct
ISSSSSYI

SEQ ID NO: 13615 - protein, 7 aa, Artificial Sequence
  Synthetic construct
IYHSGST

SEQ ID NO: 13616 - protein, 8 aa, Artificial Sequence
  Synthetic construct
ISYDGSNK

SEQ ID NO: 13617 - protein, 8 aa, Artificial Sequence
  Synthetic construct
ISGSGGST

SEQ ID NO: 13618 - protein, 8 aa, Artificial Sequence
  Synthetic construct
IWYDGSNK

SEQ ID NO: 13619 - protein, 8 aa, Artificial Sequence
  Synthetic construct
INPSGGST

SEQ ID NO: 13620 - protein, 8 aa, Artificial Sequence
  Synthetic construct
VNPDDSYS

SEQ ID NO: 13621 - protein, 8 aa, Artificial Sequence
  Synthetic construct
MNPSDGAA

SEQ ID NO: 13622 - protein, 8 aa, Artificial Sequence
  Synthetic construct
ISSSSSYI

SEQ ID NO: 13623 - protein, 8 aa, Artificial Sequence
  Synthetic construct
ISAYNGNT

SEQ ID NO: 13624 - protein, 7 aa, Artificial Sequence
  Synthetic construct
IDWDDDK

SEQ ID NO: 13625 - protein, 7 aa, Artificial Sequence
  Synthetic construct
IYYSGST

SEQ ID NO: 13626 - protein, 7 aa, Artificial Sequence
  Synthetic construct
IFYGGTT

SEQ ID NO: 13627 - protein, 8 aa, Artificial Sequence
  Synthetic construct
IDPTDSYT

SEQ ID NO: 13628 - protein, 8 aa, Artificial Sequence
  Synthetic construct
IKDDGSTT

SEQ ID NO: 13629 - protein, 8 aa, Artificial Sequence
  Synthetic construct
IYPGDSDT

SEQ ID NO: 13630 - protein, 7 aa, Artificial Sequence
  Synthetic construct
FYISGST

SEQ ID NO: 13631 - protein, 8 aa, Artificial Sequence
  Synthetic construct
VSYDGSNQ

SEQ ID NO: 13632 - protein, 8 aa, Artificial Sequence
  Synthetic construct
VDQTGSES

SEQ ID NO: 13633 - protein, 8 aa, Artificial Sequence
  Synthetic construct
IIPILGIA

SEQ ID NO: 13634 - protein, 8 aa, Artificial Sequence
  Synthetic construct
IKPDGTVK

SEQ ID NO: 13635 - protein, 8 aa, Artificial Sequence
  Synthetic construct
ISSSSSYI

SEQ ID NO: 13636 - protein, 8 aa, Artificial Sequence
  Synthetic construct
LSGSGRGT

SEQ ID NO: 13637 - protein, 7 aa, Artificial Sequence
  Synthetic construct
IYYSGST

SEQ ID NO: 13638 - protein, 7 aa, Artificial Sequence
  Synthetic construct
INHSGST

SEQ ID NO: 13639 - protein, 7 aa, Artificial Sequence
  Synthetic construct
IYYSGST

SEQ ID NO: 13640 - protein, 8 aa, Artificial Sequence
  Synthetic construct
IQRDGSEK

SEQ ID NO: 13641 - protein, 7 aa, Artificial Sequence
  Synthetic construct
MYPTGGT

SEQ ID NO: 13642 - protein, 7 aa, Artificial Sequence
  Synthetic construct
IYTSGST

SEQ ID NO: 13643 - protein, 8 aa, Artificial Sequence
  Synthetic construct
IDPSDSYT

SEQ ID NO: 13644 - protein, 8 aa, Artificial Sequence
  Synthetic construct
ISGSGGST

SEQ ID NO: 13645 - protein, 7 aa, Artificial Sequence
  Synthetic construct
IYFSGST

SEQ ID NO: 13646 - protein, 8 aa, Artificial Sequence
  Synthetic construct
ISYDGGTK

SEQ ID NO: 13647 - protein, 10 aa, Artificial Sequence
  Synthetic construct
IRSKAYGGTT

SEQ ID NO: 13648 - protein, 7 aa, Artificial Sequence
  Synthetic construct
IYTSGST

SEQ ID NO: 13649 - protein, 8 aa, Artificial Sequence
  Synthetic construct
VSGFNGNT

SEQ ID NO: 13650 - protein, 8 aa, Artificial Sequence
  Synthetic construct
ISDSGGST

SEQ ID NO: 13651 - protein, 10 aa, Artificial Sequence
  Synthetic construct
IRSSNDGGPT

SEQ ID NO: 13652 - protein, 8 aa, Artificial Sequence
  Synthetic construct
INPNSGGT

SEQ ID NO: 13653 - protein, 7 aa, Artificial Sequence
  Synthetic construct
IYSGGST

SEQ ID NO: 13654 - protein, 7 aa, Artificial Sequence
  Synthetic construct
IYYSGST

SEQ ID NO: 13655 - protein, 8 aa, Artificial Sequence
  Synthetic construct
ISSSSSYI

SEQ ID NO: 13656 - protein, 8 aa, Artificial Sequence
  Synthetic construct
ISGSSNMK

SEQ ID NO: 13657 - protein, 8 aa, Artificial Sequence
  Synthetic construct
VNPDDSYS

SEQ ID NO: 13658 - protein, 8 aa, Artificial Sequence
  Synthetic construct
ISTYNGKA

SEQ ID NO: 13659 - protein, 8 aa, Artificial Sequence
  Synthetic construct
ISAYNGNT

SEQ ID NO: 13660 - protein, 8 aa, Artificial Sequence
  Synthetic construct
IDPTDSYT

SEQ ID NO: 13661 - protein, 8 aa, Artificial Sequence
  Synthetic construct
IWYDGSNK

SEQ ID NO: 13662 - protein, 8 aa, Artificial Sequence
  Synthetic construct
ISFDGSNK

SEQ ID NO: 13663 - protein, 8 aa, Artificial Sequence
  Synthetic construct
ISDNAGSI

SEQ ID NO: 13664 - protein, 7 aa, Artificial Sequence
  Synthetic construct
IYYSGST

SEQ ID NO: 13665 - protein, 8 aa, Artificial Sequence
  Synthetic construct
ISTYNGKA

SEQ ID NO: 13666 - protein, 8 aa, Artificial Sequence
  Synthetic construct
IIPIVGIA

SEQ ID NO: 13667 - protein, 8 aa, Artificial Sequence
  Synthetic construct
IYPDDSDT

SEQ ID NO: 13668 - protein, 7 aa, Artificial Sequence
  Synthetic construct
IYYSGST

SEQ ID NO: 13669 - protein, 8 aa, Artificial Sequence
  Synthetic construct
IDPTDSYT

SEQ ID NO: 13670 - protein, 8 aa, Artificial Sequence
  Synthetic construct
IDPKNGGT

SEQ ID NO: 13671 - protein, 7 aa, Artificial Sequence
  Synthetic construct
IFYSGRT

SEQ ID NO: 13672 - protein, 7 aa, Artificial Sequence
  Synthetic construct
IYSGGST

SEQ ID NO: 13673 - protein, 8 aa, Artificial Sequence
  Synthetic construct
ISGSGGST

SEQ ID NO: 13674 - protein, 8 aa, Artificial Sequence
  Synthetic construct
TSYDGSNG

SEQ ID NO: 13675 - protein, 7 aa, Artificial Sequence
  Synthetic construct
IYWDGDK

SEQ ID NO: 13676 - protein, 8 aa, Artificial Sequence
  Synthetic construct
ITNTGRTI

SEQ ID NO: 13677 - protein, 8 aa, Artificial Sequence
  Synthetic construct
ISSSSSTI

SEQ ID NO: 13678 - protein, 8 aa, Artificial Sequence
  Synthetic construct
IWFDGSKE

SEQ ID NO: 13679 - protein, 8 aa, Artificial Sequence
  Synthetic construct
VDPEDGET

SEQ ID NO: 13680 - protein, 10 aa, Artificial Sequence
  Synthetic construct
IKSETDGGTT

SEQ ID NO: 13681 - protein, 8 aa, Artificial Sequence
  Synthetic construct
ISGSGGST

SEQ ID NO: 13682 - protein, 7 aa, Artificial Sequence
  Synthetic construct
SYHSGST

SEQ ID NO: 13683 - protein, 8 aa, Artificial Sequence
  Synthetic construct
INPNSGAT

SEQ ID NO: 13684 - protein, 7 aa, Artificial Sequence
  Synthetic construct
IYTSGST

SEQ ID NO: 13685 - protein, 8 aa, Artificial Sequence
  Synthetic construct
ISSSSDTI

SEQ ID NO: 13686 - protein, 8 aa, Artificial Sequence
  Synthetic construct
ISSSSSYI

SEQ ID NO: 13687 - protein, 8 aa, Artificial Sequence
  Synthetic construct
INPSGGST

SEQ ID NO: 13688 - protein, 7 aa, Artificial Sequence
  Synthetic construct
IYSGGST

SEQ ID NO: 13689 - protein, 8 aa, Artificial Sequence
  Synthetic construct
VWYSGETK

SEQ ID NO: 13690 - protein, 7 aa, Artificial Sequence
  Synthetic construct
IYYSGST

SEQ ID NO: 13691 - protein, 8 aa, Artificial Sequence
  Synthetic construct
ISDDGGNK

SEQ ID NO: 13692 - protein, 8 aa, Artificial Sequence
  Synthetic construct
ISGRSTYI

SEQ ID NO: 13693 - protein, 8 aa, Artificial Sequence
  Synthetic construct
ISGSGGTT

SEQ ID NO: 13694 - protein, 8 aa, Artificial Sequence
  Synthetic construct
ISYDGSNK

SEQ ID NO: 13695 - protein, 8 aa, Artificial Sequence
  Synthetic construct
IKDGGDVK

SEQ ID NO: 13696 - protein, 8 aa, Artificial Sequence
  Synthetic construct
IDPSDSYT

SEQ ID NO: 13697 - protein, 8 aa, Artificial Sequence
  Synthetic construct
VSNDGYIK

SEQ ID NO: 13698 - protein, 8 aa, Artificial Sequence
  Synthetic construct
ISNNGDNT

SEQ ID NO: 13699 - protein, 10 aa, Artificial Sequence
  Synthetic construct
IKTTTDGGTT

SEQ ID NO: 13700 - protein, 8 aa, Artificial Sequence
  Synthetic construct
ISGSGGST

SEQ ID NO: 13701 - protein, 7 aa, Artificial Sequence
  Synthetic construct
INHTGST

SEQ ID NO: 13702 - protein, 7 aa, Artificial Sequence
  Synthetic construct
IYWDDDK

SEQ ID NO: 13703 - protein, 8 aa, Artificial Sequence
  Synthetic construct
ISYDGSNK

SEQ ID NO: 13704 - protein, 8 aa, Artificial Sequence
  Synthetic construct
ISSTSSYI

SEQ ID NO: 13705 - protein, 8 aa, Artificial Sequence
  Synthetic construct
ISGSSNTK

SEQ ID NO: 13706 - protein, 8 aa, Artificial Sequence
  Synthetic construct
INTNTGNP

SEQ ID NO: 13707 - protein, 5 aa, Artificial Sequence
  Synthetic construct
ISGTT

SEQ ID NO: 13708 - protein, 8 aa, Artificial Sequence
  Synthetic construct
LSGSGRGT

SEQ ID NO: 13709 - protein, 8 aa, Artificial Sequence
  Synthetic construct
ISDDGYNK

SEQ ID NO: 13710 - protein, 7 aa, Artificial Sequence
  Synthetic construct
IYYSGST

SEQ ID NO: 13711 - protein, 8 aa, Artificial Sequence
  Synthetic construct
IGSSSRYI

SEQ ID NO: 13712 - protein, 8 aa, Artificial Sequence
  Synthetic construct
IHPGDSDT

SEQ ID NO: 13713 - protein, 8 aa, Artificial Sequence
  Synthetic construct
ISDDGTNE

SEQ ID NO: 13714 - protein, 8 aa, Artificial Sequence
  Synthetic construct
MKTNGDIA

SEQ ID NO: 13715 - protein, 8 aa, Artificial Sequence
  Synthetic construct
ISWDTGKI

SEQ ID NO: 13716 - protein, 8 aa, Artificial Sequence
  Synthetic construct
ISGSGGST

SEQ ID NO: 13717 - protein, 7 aa, Artificial Sequence
  Synthetic construct
IYHSGST

SEQ ID NO: 13718 - protein, 7 aa, Artificial Sequence
  Synthetic construct
IYYSGRT

SEQ ID NO: 13719 - protein, 7 aa, Artificial Sequence
  Synthetic construct
INHSGST

SEQ ID NO: 13720 - protein, 7 aa, Artificial Sequence
  Synthetic construct
IDWDDDK

SEQ ID NO: 13721 - protein, 7 aa, Artificial Sequence
  Synthetic construct
IGTAGDP

SEQ ID NO: 13722 - protein, 8 aa, Artificial Sequence
  Synthetic construct
IDPSDSYT

SEQ ID NO: 13723 - protein, 10 aa, Artificial Sequence
  Synthetic construct
IKSKTDGGTT

SEQ ID NO: 13724 - protein, 8 aa, Artificial Sequence
  Synthetic construct
IVPLHGAT

SEQ ID NO: 13725 - protein, 8 aa, Artificial Sequence
  Synthetic construct
INADNGNT

SEQ ID NO: 13726 - protein, 7 aa, Artificial Sequence
  Synthetic construct
IYWDDDK

SEQ ID NO: 13727 - protein, 8 aa, Artificial Sequence
  Synthetic construct
ISGSGGST

SEQ ID NO: 13728 - protein, 8 aa, Artificial Sequence
  Synthetic construct
IIPILGIA

SEQ ID NO: 13729 - protein, 8 aa, Artificial Sequence
  Synthetic construct
IIPVLGVT

SEQ ID NO: 13730 - protein, 8 aa, Artificial Sequence
  Synthetic construct
ITGNGDNT

SEQ ID NO: 13731 - protein, 8 aa, Artificial Sequence
  Synthetic construct
INDGNDNT

SEQ ID NO: 13732 - protein, 7 aa, Artificial Sequence
  Synthetic construct
INHSGST

SEQ ID NO: 13733 - protein, 7 aa, Artificial Sequence
  Synthetic construct
INDSGAT

SEQ ID NO: 13734 - protein, 7 aa, Artificial Sequence
  Synthetic construct
IYHSGSS

SEQ ID NO: 13735 - protein, 7 aa, Artificial Sequence
  Synthetic construct
IYWDDDK

SEQ ID NO: 13736 - protein, 7 aa, Artificial Sequence
  Synthetic construct
IYYSGST

SEQ ID NO: 13737 - protein, 8 aa, Artificial Sequence
  Synthetic construct
IKQDGSEK

SEQ ID NO: 13738 - protein, 8 aa, Artificial Sequence
  Synthetic construct
ISSNGGST

SEQ ID NO: 13739 - protein, 8 aa, Artificial Sequence
  Synthetic construct
INPSGGST

SEQ ID NO: 13740 - protein, 7 aa, Artificial Sequence
  Synthetic construct
VYFTGST

SEQ ID NO: 13741 - protein, 8 aa, Artificial Sequence
  Synthetic construct
ISDDGSNN

SEQ ID NO: 13742 - protein, 8 aa, Artificial Sequence
  Synthetic construct
ISYDGSNK

SEQ ID NO: 13743 - protein, 8 aa, Artificial Sequence
  Synthetic construct
ISYDGSNK

SEQ ID NO: 13744 - protein, 7 aa, Artificial Sequence
  Synthetic construct
FISSASP

SEQ ID NO: 13745 - protein, 8 aa, Artificial Sequence
  Synthetic construct
ISSNGITT

SEQ ID NO: 13746 - protein, 8 aa, Artificial Sequence
  Synthetic construct
INPSGGST

SEQ ID NO: 13747 - protein, 8 aa, Artificial Sequence
  Synthetic construct
ITHNGGDR

SEQ ID NO: 13748 - protein, 8 aa, Artificial Sequence
  Synthetic construct
IWYDGSNK

SEQ ID NO: 13749 - protein, 8 aa, Artificial Sequence
  Synthetic construct
IWYDGSNK

SEQ ID NO: 13750 - protein, 8 aa, Artificial Sequence
  Synthetic construct
ISYDGSNK

SEQ ID NO: 13751 - protein, 7 aa, Artificial Sequence
  Synthetic construct
ISHGGDT

SEQ ID NO: 13752 - protein, 7 aa, Artificial Sequence
  Synthetic construct
IYYSGST

SEQ ID NO: 13753 - protein, 7 aa, Artificial Sequence
  Synthetic construct
IYYSGST

SEQ ID NO: 13754 - protein, 8 aa, Artificial Sequence
  Synthetic construct
INPSGGST

SEQ ID NO: 13755 - protein, 8 aa, Artificial Sequence
  Synthetic construct
IWYDGTNK

SEQ ID NO: 13756 - protein, 7 aa, Artificial Sequence
  Synthetic construct
IYYSGST

SEQ ID NO: 13757 - protein, 8 aa, Artificial Sequence
  Synthetic construct
ININTGKP

SEQ ID NO: 13758 - protein, 7 aa, Artificial Sequence
  Synthetic construct
INHSGDT

SEQ ID NO: 13759 - protein, 8 aa, Artificial Sequence
  Synthetic construct
ISAYNGNT

SEQ ID NO: 13760 - protein, 8 aa, Artificial Sequence
  Synthetic construct
VDPEDDET

SEQ ID NO: 13761 - protein, 8 aa, Artificial Sequence
  Synthetic construct
VNSDGSST

SEQ ID NO: 13762 - protein, 7 aa, Artificial Sequence
  Synthetic construct
LYYSGNT

SEQ ID NO: 13763 - protein, 8 aa, Artificial Sequence
  Synthetic construct
IKRDGSEK

SEQ ID NO: 13764 - protein, 8 aa, Artificial Sequence
  Synthetic construct
IWYDGSKK

SEQ ID NO: 13765 - protein, 8 aa, Artificial Sequence
  Synthetic construct
IGGQGDST

SEQ ID NO: 13766 - protein, 8 aa, Artificial Sequence
  Synthetic construct
INSDGSST

SEQ ID NO: 13767 - protein, 8 aa, Artificial Sequence
  Synthetic construct
ISTSRSYT

SEQ ID NO: 13768 - protein, 7 aa, Artificial Sequence
  Synthetic construct
IYQSGNT

SEQ ID NO: 13769 - protein, 8 aa, Artificial Sequence
  Synthetic construct
IDPTDSYT

SEQ ID NO: 13770 - protein, 8 aa, Artificial Sequence
  Synthetic construct
ISSDGYNT

SEQ ID NO: 13771 - protein, 8 aa, Artificial Sequence
  Synthetic construct
ISGSGANT

SEQ ID NO: 13772 - protein, 8 aa, Artificial Sequence
  Synthetic construct
INTDGSRT

SEQ ID NO: 13773 - protein, 8 aa, Artificial Sequence
  Synthetic construct
ISYDGSNK

SEQ ID NO: 13774 - protein, 8 aa, Artificial Sequence
  Synthetic construct
ISTYNGKA

SEQ ID NO: 13775 - protein, 7 aa, Artificial Sequence
  Synthetic construct
IYFTGTT

SEQ ID NO: 13776 - protein, 8 aa, Artificial Sequence
  Synthetic construct
IWYDGSNT

SEQ ID NO: 13777 - protein, 10 aa, Artificial Sequence
  Synthetic construct
CRKRANRFTT

SEQ ID NO: 13778 - protein, 7 aa, Artificial Sequence
  Synthetic construct
IYWDDDK

SEQ ID NO: 13779 - protein, 7 aa, Artificial Sequence
  Synthetic construct
IFAHGST

SEQ ID NO: 13780 - protein, 7 aa, Artificial Sequence
  Synthetic construct
IYSGGST

SEQ ID NO: 13781 - protein, 7 aa, Artificial Sequence
  Synthetic construct
IYTSGST

SEQ ID NO: 13782 - protein, 7 aa, Artificial Sequence
  Synthetic construct
IYTSGST

SEQ ID NO: 13783 - protein, 8 aa, Artificial Sequence
  Synthetic construct
ISGSGITT

SEQ ID NO: 13784 - protein, 8 aa, Artificial Sequence
  Synthetic construct
ISSNGGST

SEQ ID NO: 13785 - protein, 8 aa, Artificial Sequence
  Synthetic construct
ISGSGVYT

SEQ ID NO: 13786 - protein, 10 aa, Artificial Sequence
  Synthetic construct
IKSKTDGGTT

SEQ ID NO: 13787 - protein, 8 aa, Artificial Sequence
  Synthetic construct
INQDGSQI

SEQ ID NO: 13788 - protein, 7 aa, Artificial Sequence
  Synthetic construct
IYSGGST

SEQ ID NO: 13789 - protein, 8 aa, Artificial Sequence
  Synthetic construct
ISFYNGEI

SEQ ID NO: 13790 - protein, 7 aa, Artificial Sequence
  Synthetic construct
IYSGGST

SEQ ID NO: 13791 - protein, 8 aa, Artificial Sequence
  Synthetic construct
ISYDGSNK

SEQ ID NO: 13792 - protein, 8 aa, Artificial Sequence
  Synthetic construct
LSGSGRGT

SEQ ID NO: 13793 - protein, 8 aa, Artificial Sequence
  Synthetic construct
IYPGDSDT

SEQ ID NO: 13794 - protein, 8 aa, Artificial Sequence
  Synthetic construct
IKHDGSEK

SEQ ID NO: 13795 - protein, 10 aa, Artificial Sequence
  Synthetic construct
IRSKAYGGTT

SEQ ID NO: 13796 - protein, 7 aa, Artificial Sequence
  Synthetic construct
IYHSGST

SEQ ID NO: 13797 - protein, 8 aa, Artificial Sequence
  Synthetic construct
ISSSSSYI

SEQ ID NO: 13798 - protein, 8 aa, Artificial Sequence
  Synthetic construct
IDPTDSYT

SEQ ID NO: 13799 - protein, 8 aa, Artificial Sequence
  Synthetic construct
IKQDGSEK

SEQ ID NO: 13800 - protein, 8 aa, Artificial Sequence
  Synthetic construct
INPTGGRT

SEQ ID NO: 13801 - protein, 7 aa, Artificial Sequence
  Synthetic construct
IDSGGST

SEQ ID NO: 13802 - protein, 7 aa, Artificial Sequence
  Synthetic construct
VDWNGDK

SEQ ID NO: 13803 - protein, 7 aa, Artificial Sequence
  Synthetic construct
INHSGST

SEQ ID NO: 13804 - protein, 7 aa, Artificial Sequence
  Synthetic construct
IYSGGST

SEQ ID NO: 13805 - protein, 7 aa, Artificial Sequence
  Synthetic construct
IYYSGST

SEQ ID NO: 13806 - protein, 8 aa, Artificial Sequence
  Synthetic construct
IKQDGSEK

SEQ ID NO: 13807 - protein, 7 aa, Artificial Sequence
  Synthetic construct
IYTSGST

SEQ ID NO: 13808 - protein, 8 aa, Artificial Sequence
  Synthetic construct
ISTYNGKA

SEQ ID NO: 13809 - protein, 8 aa, Artificial Sequence
  Synthetic construct
ISYDGSNK

SEQ ID NO: 13810 - protein, 8 aa, Artificial Sequence
  Synthetic construct
ISNSGSAT

SEQ ID NO: 13811 - protein, 10 aa, Artificial Sequence
  Synthetic construct
IKSKTDGGTT

SEQ ID NO: 13812 - protein, 8 aa, Artificial Sequence
  Synthetic construct
ISHSSIYI

SEQ ID NO: 13813 - protein, 8 aa, Artificial Sequence
  Synthetic construct
ISESGSLI

SEQ ID NO: 13814 - protein, 7 aa, Artificial Sequence
  Synthetic construct
VFHSGNT

SEQ ID NO: 13815 - protein, 8 aa, Artificial Sequence
  Synthetic construct
ISNGRNYV

SEQ ID NO: 13816 - protein, 7 aa, Artificial Sequence
  Synthetic construct
LYISENT

SEQ ID NO: 13817 - protein, 8 aa, Artificial Sequence
  Synthetic construct
ISYDGSNK

SEQ ID NO: 13818 - protein, 7 aa, Artificial Sequence
  Synthetic construct
IYPSGPT

SEQ ID NO: 13819 - protein, 8 aa, Artificial Sequence
  Synthetic construct
ISSSSATI

SEQ ID NO: 13820 - protein, 8 aa, Artificial Sequence
  Synthetic construct
INAGNGNT

SEQ ID NO: 13821 - protein, 8 aa, Artificial Sequence
  Synthetic construct
IIPIFGTA

SEQ ID NO: 13822 - protein, 8 aa, Artificial Sequence
  Synthetic construct
IWYDGSSV

SEQ ID NO: 13823 - protein, 8 aa, Artificial Sequence
  Synthetic construct
IKQDGSEK

SEQ ID NO: 13824 - protein, 8 aa, Artificial Sequence
  Synthetic construct
INQDGSEK

SEQ ID NO: 13825 - protein, 8 aa, Artificial Sequence
  Synthetic construct
ISGSGGVT

SEQ ID NO: 13826 - protein, 7 aa, Artificial Sequence
  Synthetic construct
MKQSGNT

SEQ ID NO: 13827 - protein, 8 aa, Artificial Sequence
  Synthetic construct
IWYDGSNK

SEQ ID NO: 13828 - protein, 8 aa, Artificial Sequence
  Synthetic construct
ISGRGSDT

SEQ ID NO: 13829 - protein, 8 aa, Artificial Sequence
  Synthetic construct
ISGSGGST

SEQ ID NO: 13830 - protein, 10 aa, Artificial Sequence
  Synthetic construct
IRSKANSYAT

SEQ ID NO: 13831 - protein, 7 aa, Artificial Sequence
  Synthetic construct
INTSGDT

SEQ ID NO: 13832 - protein, 7 aa, Artificial Sequence
  Synthetic construct
INHSGNT

SEQ ID NO: 13833 - protein, 8 aa, Artificial Sequence
  Synthetic construct
ISTYNGKA

SEQ ID NO: 13834 - protein, 7 aa, Artificial Sequence
  Synthetic construct
IYSGGST

SEQ ID NO: 13835 - protein, 8 aa, Artificial Sequence
  Synthetic construct
IIAFLGIP

SEQ ID NO: 13836 - protein, 8 aa, Artificial Sequence
  Synthetic construct
IKQDGSEK

SEQ ID NO: 13837 - protein, 8 aa, Artificial Sequence
  Synthetic construct
IYFDDSDT

SEQ ID NO: 13838 - protein, 8 aa, Artificial Sequence
  Synthetic construct
ISAYNGNT

SEQ ID NO: 13839 - protein, 8 aa, Artificial Sequence
  Synthetic construct
IDPTDSYT

SEQ ID NO: 13840 - protein, 7 aa, Artificial Sequence
  Synthetic construct
IYYSGST

SEQ ID NO: 13841 - protein, 8 aa, Artificial Sequence
  Synthetic construct
ISSSSSYI

SEQ ID NO: 13842 - protein, 8 aa, Artificial Sequence
  Synthetic construct
INPTDGTT

SEQ ID NO: 13843 - protein, 8 aa, Artificial Sequence
  Synthetic construct
IDPTDSYT

SEQ ID NO: 13844 - protein, 8 aa, Artificial Sequence
  Synthetic construct
INRDSTYI

SEQ ID NO: 13845 - protein, 7 aa, Artificial Sequence
  Synthetic construct
IYWDGDA

SEQ ID NO: 13846 - protein, 8 aa, Artificial Sequence
  Synthetic construct
ISSSSSTI

SEQ ID NO: 13847 - protein, 8 aa, Artificial Sequence
  Synthetic construct
ISDTGRDT

SEQ ID NO: 13848 - protein, 7 aa, Artificial Sequence
  Synthetic construct
IYSGGNT

SEQ ID NO: 13849 - protein, 7 aa, Artificial Sequence
  Synthetic construct
IHLSGNT

SEQ ID NO: 13850 - protein, 8 aa, Artificial Sequence
  Synthetic construct
ISSSSSYI

SEQ ID NO: 13851 - protein, 8 aa, Artificial Sequence
  Synthetic construct
INIDGSRT

SEQ ID NO: 13852 - protein, 8 aa, Artificial Sequence
  Synthetic construct
IDPTDSYT

SEQ ID NO: 13853 - protein, 8 aa, Artificial Sequence
  Synthetic construct
ISGSGGST

SEQ ID NO: 13854 - protein, 8 aa, Artificial Sequence
  Synthetic construct
IDPTDSYT

SEQ ID NO: 13855 - protein, 7 aa, Artificial Sequence
  Synthetic construct
IYSGGST

SEQ ID NO: 13856 - protein, 8 aa, Artificial Sequence
  Synthetic construct
ISGSGVYT

SEQ ID NO: 13857 - protein, 8 aa, Artificial Sequence
  Synthetic construct
INTNSGNP

SEQ ID NO: 13858 - protein, 8 aa, Artificial Sequence
  Synthetic construct
IGALHGNT

SEQ ID NO: 13859 - protein, 8 aa, Artificial Sequence
  Synthetic construct
ISYDGSNK

SEQ ID NO: 13860 - protein, 8 aa, Artificial Sequence
  Synthetic construct
IDPTDSYT

SEQ ID NO: 13861 - protein, 7 aa, Artificial Sequence
  Synthetic construct
IFYSGTT

SEQ ID NO: 13862 - protein, 10 aa, Artificial Sequence
  Synthetic construct
IRSKANSYAT

SEQ ID NO: 13863 - protein, 8 aa, Artificial Sequence
  Synthetic construct
LSGSGRGT

SEQ ID NO: 13864 - protein, 8 aa, Artificial Sequence
  Synthetic construct
IYPPDSDT

SEQ ID NO: 13865 - protein, 7 aa, Artificial Sequence
  Synthetic construct
IYYSGST

SEQ ID NO: 13866 - protein, 8 aa, Artificial Sequence
  Synthetic construct
INPDDSYS

SEQ ID NO: 13867 - protein, 8 aa, Artificial Sequence
  Synthetic construct
VIPYFPTA

SEQ ID NO: 13868 - protein, 7 aa, Artificial Sequence
  Synthetic construct
VYYSGST

SEQ ID NO: 13869 - protein, 8 aa, Artificial Sequence
  Synthetic construct
IIPILDIS

SEQ ID NO: 13870 - protein, 7 aa, Artificial Sequence
  Synthetic construct
IYHSGST

SEQ ID NO: 13871 - protein, 8 aa, Artificial Sequence
  Synthetic construct
ISTYNGKA

SEQ ID NO: 13872 - protein, 7 aa, Artificial Sequence
  Synthetic construct
IYTTGST

SEQ ID NO: 13873 - protein, 8 aa, Artificial Sequence
  Synthetic construct
INPNSGGT

SEQ ID NO: 13874 - protein, 8 aa, Artificial Sequence
  Synthetic construct
INPLGGRT

SEQ ID NO: 13875 - protein, 8 aa, Artificial Sequence
  Synthetic construct
IDPSDSYT

SEQ ID NO: 13876 - protein, 8 aa, Artificial Sequence
  Synthetic construct
IYPGDSDT

SEQ ID NO: 13877 - protein, 8 aa, Artificial Sequence
  Synthetic construct
IDPQDSYT

SEQ ID NO: 13878 - protein, 8 aa, Artificial Sequence
  Synthetic construct
ISFDGSKK

SEQ ID NO: 13879 - protein, 8 aa, Artificial Sequence
  Synthetic construct
ISWNSGSI

SEQ ID NO: 13880 - protein, 8 aa, Artificial Sequence
  Synthetic construct
ISGSGGST

SEQ ID NO: 13881 - protein, 8 aa, Artificial Sequence
  Synthetic construct
INTDTGHP

SEQ ID NO: 13882 - protein, 8 aa, Artificial Sequence
  Synthetic construct
LSGSGRGT

SEQ ID NO: 13883 - protein, 8 aa, Artificial Sequence
  Synthetic construct
IRGSGDKT

SEQ ID NO: 13884 - protein, 7 aa, Artificial Sequence
  Synthetic construct
IYNSAVT

SEQ ID NO: 13885 - protein, 7 aa, Artificial Sequence
  Synthetic construct
IYYSDPP

SEQ ID NO: 13886 - protein, 8 aa, Artificial Sequence
  Synthetic construct
ISTNNGNT

SEQ ID NO: 13887 - protein, 8 aa, Artificial Sequence
  Synthetic construct
VSVDGNNQ

SEQ ID NO: 13888 - protein, 8 aa, Artificial Sequence
  Synthetic construct
INPNSGGT

SEQ ID NO: 13889 - protein, 7 aa, Artificial Sequence
  Synthetic construct
IYSGGST

SEQ ID NO: 13890 - protein, 8 aa, Artificial Sequence
  Synthetic construct
IIPIFGTA

SEQ ID NO: 13891 - protein, 8 aa, Artificial Sequence
  Synthetic construct
ISGSGGST

SEQ ID NO: 13892 - protein, 8 aa, Artificial Sequence
  Synthetic construct
ISYDGSNK

SEQ ID NO: 13893 - protein, 8 aa, Artificial Sequence
  Synthetic construct
INPNSGGT

SEQ ID NO: 13894 - protein, 10 aa, Artificial Sequence
  Synthetic construct
TRNKANSFAT

SEQ ID NO: 13895 - protein, 8 aa, Artificial Sequence
  Synthetic construct
INPNSGGT

SEQ ID NO: 13896 - protein, 8 aa, Artificial Sequence
  Synthetic construct
INSDGSST

SEQ ID NO: 13897 - protein, 8 aa, Artificial Sequence
  Synthetic construct
IIPVLGVA

SEQ ID NO: 13898 - protein, 7 aa, Artificial Sequence
  Synthetic construct
IYYSGST

SEQ ID NO: 13899 - protein, 8 aa, Artificial Sequence
  Synthetic construct
ISAYNGNT

SEQ ID NO: 13900 - protein, 8 aa, Artificial Sequence
  Synthetic construct
INTRTGNP

SEQ ID NO: 13901 - protein, 7 aa, Artificial Sequence
  Synthetic construct
IYWDDDK

SEQ ID NO: 13902 - protein, 8 aa, Artificial Sequence
  Synthetic construct
KSYDGNNK

SEQ ID NO: 13903 - protein, 7 aa, Artificial Sequence
  Synthetic construct
IYTSGST

SEQ ID NO: 13904 - protein, 10 aa, Artificial Sequence
  Synthetic construct
IKSKTDGGTT

SEQ ID NO: 13905 - protein, 7 aa, Artificial Sequence
  Synthetic construct
ILSTGTT

SEQ ID NO: 13906 - protein, 7 aa, Artificial Sequence
  Synthetic construct
IYHSGTT

SEQ ID NO: 13907 - protein, 8 aa, Artificial Sequence
  Synthetic construct
INAGNGNT

SEQ ID NO: 13908 - protein, 8 aa, Artificial Sequence
  Synthetic construct
ISSNGGST

SEQ ID NO: 13909 - protein, 8 aa, Artificial Sequence
  Synthetic construct
INQDGSEE

SEQ ID NO: 13910 - protein, 8 aa, Artificial Sequence
  Synthetic construct
IWYDGTNT

SEQ ID NO: 13911 - protein, 9 aa, Artificial Sequence
  Synthetic construct
TYYRSKWSN

SEQ ID NO: 13912 - protein, 8 aa, Artificial Sequence
  Synthetic construct
ISSSSSYI

SEQ ID NO: 13913 - protein, 7 aa, Artificial Sequence
  Synthetic construct
IYDSGST

SEQ ID NO: 13914 - protein, 8 aa, Artificial Sequence
  Synthetic construct
IDPSDSYT

SEQ ID NO: 13915 - protein, 8 aa, Artificial Sequence
  Synthetic construct
VSGSGDSP

SEQ ID NO: 13916 - protein, 7 aa, Artificial Sequence
  Synthetic construct
IYYNGNA

SEQ ID NO: 13917 - protein, 7 aa, Artificial Sequence
  Synthetic construct
IYYSGST

SEQ ID NO: 13918 - protein, 8 aa, Artificial Sequence
  Synthetic construct
IAYDGSNE

SEQ ID NO: 13919 - protein, 7 aa, Artificial Sequence
  Synthetic construct
IYTSGST

SEQ ID NO: 13920 - protein, 8 aa, Artificial Sequence
  Synthetic construct
INPNSGGT

SEQ ID NO: 13921 - protein, 8 aa, Artificial Sequence
  Synthetic construct
ISANSAYI

SEQ ID NO: 13922 - protein, 7 aa, Artificial Sequence
  Synthetic construct
GYYSGST

SEQ ID NO: 13923 - protein, 8 aa, Artificial Sequence
  Synthetic construct
ISGGGRVI

SEQ ID NO: 13924 - protein, 8 aa, Artificial Sequence
  Synthetic construct
IKFDGSDT

SEQ ID NO: 13925 - protein, 8 aa, Artificial Sequence
  Synthetic construct
INQDGGDK

SEQ ID NO: 13926 - protein, 8 aa, Artificial Sequence
  Synthetic construct
ISASDGRT

SEQ ID NO: 13927 - protein, 8 aa, Artificial Sequence
  Synthetic construct
ISSSSSYI

SEQ ID NO: 13928 - protein, 8 aa, Artificial Sequence
  Synthetic construct
IDPTDSYT

SEQ ID NO: 13929 - protein, 8 aa, Artificial Sequence
  Synthetic construct
ISSTSSHI

SEQ ID NO: 13930 - protein, 8 aa, Artificial Sequence
  Synthetic construct
INPSGGST

SEQ ID NO: 13931 - protein, 8 aa, Artificial Sequence
  Synthetic construct
INQDGRQK

SEQ ID NO: 13932 - protein, 7 aa, Artificial Sequence
  Synthetic construct
IYSGGST

SEQ ID NO: 13933 - protein, 8 aa, Artificial Sequence
  Synthetic construct
ISGSGGST

SEQ ID NO: 13934 - protein, 7 aa, Artificial Sequence
  Synthetic construct
IYFSRNT

SEQ ID NO: 13935 - protein, 8 aa, Artificial Sequence
  Synthetic construct
ISYDGSNK

SEQ ID NO: 13936 - protein, 8 aa, Artificial Sequence
  Synthetic construct
IDPEYGET

SEQ ID NO: 13937 - protein, 10 aa, Artificial Sequence
  Synthetic construct
IRSKAYGGTT

SEQ ID NO: 13938 - protein, 8 aa, Artificial Sequence
  Synthetic construct
ISSSSSYI

SEQ ID NO: 13939 - protein, 8 aa, Artificial Sequence
  Synthetic construct
IDPENGET

SEQ ID NO: 13940 - protein, 8 aa, Artificial Sequence
  Synthetic construct
IWYDGSNK

SEQ ID NO: 13941 - protein, 8 aa, Artificial Sequence
  Synthetic construct
IYPGDSDT

SEQ ID NO: 13942 - protein, 7 aa, Artificial Sequence
  Synthetic construct
IYTSGST

SEQ ID NO: 13943 - protein, 8 aa, Artificial Sequence
  Synthetic construct
IWFDGSNK

SEQ ID NO: 13944 - protein, 8 aa, Artificial Sequence
  Synthetic construct
ISNDGSDK

SEQ ID NO: 13945 - protein, 7 aa, Artificial Sequence
  Synthetic construct
IYYSGST

SEQ ID NO: 13946 - protein, 8 aa, Artificial Sequence
  Synthetic construct
ISFSDGST

SEQ ID NO: 13947 - protein, 7 aa, Artificial Sequence
  Synthetic construct
IYHSGST

SEQ ID NO: 13948 - protein, 8 aa, Artificial Sequence
  Synthetic construct
IDPTDSYT

SEQ ID NO: 13949 - protein, 8 aa, Artificial Sequence
  Synthetic construct
VIPYFPTA

SEQ ID NO: 13950 - protein, 8 aa, Artificial Sequence
  Synthetic construct
IDPTDSYT

SEQ ID NO: 13951 - protein, 8 aa, Artificial Sequence
  Synthetic construct
ISSNGGST

SEQ ID NO: 13952 - protein, 10 aa, Artificial Sequence
  Synthetic construct
IRSKAFGGTT

SEQ ID NO: 13953 - protein, 8 aa, Artificial Sequence
  Synthetic construct
IDPTESYT

SEQ ID NO: 13954 - protein, 7 aa, Artificial Sequence
  Synthetic construct
IFYTGTT

SEQ ID NO: 13955 - protein, 7 aa, Artificial Sequence
  Synthetic construct
VYYSGSI

SEQ ID NO: 13956 - protein, 8 aa, Artificial Sequence
  Synthetic construct
ISSSSDYV

SEQ ID NO: 13957 - protein, 7 aa, Artificial Sequence
  Synthetic construct
FYDNGST

SEQ ID NO: 13958 - protein, 7 aa, Artificial Sequence
  Synthetic construct
INPSGAS

SEQ ID NO: 13959 - protein, 7 aa, Artificial Sequence
  Synthetic construct
IHHRGTT

SEQ ID NO: 13960 - protein, 8 aa, Artificial Sequence
  Synthetic construct
IIPILDLA

SEQ ID NO: 13961 - protein, 7 aa, Artificial Sequence
  Synthetic construct
INHSGST

SEQ ID NO: 13962 - protein, 8 aa, Artificial Sequence
  Synthetic construct
ISGSGGST

SEQ ID NO: 13963 - protein, 10 aa, Artificial Sequence
  Synthetic construct
IRSKTYGATT

SEQ ID NO: 13964 - protein, 8 aa, Artificial Sequence
  Synthetic construct
MFPSDSDT

SEQ ID NO: 13965 - protein, 8 aa, Artificial Sequence
  Synthetic construct
ISSGSTNI

SEQ ID NO: 13966 - protein, 7 aa, Artificial Sequence
  Synthetic construct
IYWDDDK

SEQ ID NO: 13967 - protein, 7 aa, Artificial Sequence
  Synthetic construct
IYHSGST

SEQ ID NO: 13968 - protein, 8 aa, Artificial Sequence
  Synthetic construct
INPNTGAT

SEQ ID NO: 13969 - protein, 8 aa, Artificial Sequence
  Synthetic construct
ISGSGTPT

SEQ ID NO: 13970 - protein, 8 aa, Artificial Sequence
  Synthetic construct
ISYDGSNK

SEQ ID NO: 13971 - protein, 8 aa, Artificial Sequence
  Synthetic construct
ISYDGSNK

SEQ ID NO: 13972 - protein, 8 aa, Artificial Sequence
  Synthetic construct
ISSNGGST

SEQ ID NO: 13973 - protein, 8 aa, Artificial Sequence
  Synthetic construct
ISSSSSYI

SEQ ID NO: 13974 - protein, 7 aa, Artificial Sequence
  Synthetic construct
VYYSGST

SEQ ID NO: 13975 - protein, 8 aa, Artificial Sequence
  Synthetic construct
ISAYDGNT

SEQ ID NO: 13976 - protein, 8 aa, Artificial Sequence
  Synthetic construct
IDPTDSYT

SEQ ID NO: 13977 - protein, 8 aa, Artificial Sequence
  Synthetic construct
INAGNGNT

SEQ ID NO: 13978 - protein, 8 aa, Artificial Sequence
  Synthetic construct
ISGSGGST

SEQ ID NO: 13979 - protein, 8 aa, Artificial Sequence
  Synthetic construct
INSDGSST

SEQ ID NO: 13980 - protein, 8 aa, Artificial Sequence
  Synthetic construct
ISWDGGST

SEQ ID NO: 13981 - protein, 8 aa, Artificial Sequence
  Synthetic construct
IDPTDSYT

SEQ ID NO: 13982 - protein, 8 aa, Artificial Sequence
  Synthetic construct
FIPSLNIP

SEQ ID NO: 13983 - protein, 8 aa, Artificial Sequence
  Synthetic construct
IDPTDSYT

SEQ ID NO: 13984 - protein, 8 aa, Artificial Sequence
  Synthetic construct
IEQDGSEK

SEQ ID NO: 13985 - protein, 7 aa, Artificial Sequence
  Synthetic construct
IYWDDDK

SEQ ID NO: 13986 - protein, 8 aa, Artificial Sequence
  Synthetic construct
IKRDGSEK

SEQ ID NO: 13987 - protein, 8 aa, Artificial Sequence
  Synthetic construct
ISGSGGST

SEQ ID NO: 13988 - protein, 8 aa, Artificial Sequence
  Synthetic construct
ISYDGSNK

SEQ ID NO: 13989 - protein, 7 aa, Artificial Sequence
  Synthetic construct
TYTSGST

SEQ ID NO: 13990 - protein, 8 aa, Artificial Sequence
  Synthetic construct
INSDGSST

SEQ ID NO: 13991 - protein, 8 aa, Artificial Sequence
  Synthetic construct
ISSSSSTI

SEQ ID NO: 13992 - protein, 8 aa, Artificial Sequence
  Synthetic construct
ISSSSSYI

SEQ ID NO: 13993 - protein, 8 aa, Artificial Sequence
  Synthetic construct
ISYDGTNK

SEQ ID NO: 13994 - protein, 8 aa, Artificial Sequence
  Synthetic construct
ISSTGDNT

SEQ ID NO: 13995 - protein, 8 aa, Artificial Sequence
  Synthetic construct
ISSSSNYT

SEQ ID NO: 13996 - protein, 8 aa, Artificial Sequence
  Synthetic construct
ISGSGGST

SEQ ID NO: 13997 - protein, 7 aa, Artificial Sequence
  Synthetic construct
INYSGAT

SEQ ID NO: 13998 - protein, 8 aa, Artificial Sequence
  Synthetic construct
INPNSGGT

SEQ ID NO: 13999 - protein, 8 aa, Artificial Sequence
  Synthetic construct
IKPDGSEK

SEQ ID NO: 14000 - protein, 7 aa, Artificial Sequence
  Synthetic construct
IFVSGNT

SEQ ID NO: 14001 - protein, 8 aa, Artificial Sequence
  Synthetic construct
LSGSGRGT

SEQ ID NO: 14002 - protein, 8 aa, Artificial Sequence
  Synthetic construct
VSPDGTIT

SEQ ID NO: 14003 - protein, 8 aa, Artificial Sequence
  Synthetic construct
ISSLSSYI

SEQ ID NO: 14004 - protein, 8 aa, Artificial Sequence
  Synthetic construct
ISGSGGST

SEQ ID NO: 14005 - protein, 8 aa, Artificial Sequence
  Synthetic construct
IDPTDSYT

SEQ ID NO: 14006 - protein, 8 aa, Artificial Sequence
  Synthetic construct
ISGSGGST

SEQ ID NO: 14007 - protein, 8 aa, Artificial Sequence
  Synthetic construct
ISYEGSIK

SEQ ID NO: 14008 - protein, 8 aa, Artificial Sequence
  Synthetic construct
ISSSSTYI

SEQ ID NO: 14009 - protein, 8 aa, Artificial Sequence
  Synthetic construct
ISVYNGNT

SEQ ID NO: 14010 - protein, 8 aa, Artificial Sequence
  Synthetic construct
ISASGATA

SEQ ID NO: 14011 - protein, 8 aa, Artificial Sequence
  Synthetic construct
IWYDGSNK

SEQ ID NO: 14012 - protein, 7 aa, Artificial Sequence
  Synthetic construct
IYYSGST

SEQ ID NO: 14013 - protein, 8 aa, Artificial Sequence
  Synthetic construct
ISKDGRHT

SEQ ID NO: 14014 - protein, 10 aa, Artificial Sequence
  Synthetic construct
IRSKAYGGTT

SEQ ID NO: 14015 - protein, 7 aa, Artificial Sequence
  Synthetic construct
IYTSGST

SEQ ID NO: 14016 - protein, 8 aa, Artificial Sequence
  Synthetic construct
ISSNGGST

SEQ ID NO: 14017 - protein, 8 aa, Artificial Sequence
  Synthetic construct
ISGSGGST

SEQ ID NO: 14018 - protein, 8 aa, Artificial Sequence
  Synthetic construct
ISARSGTT

SEQ ID NO: 14019 - protein, 7 aa, Artificial Sequence
  Synthetic construct
ISSSSSI

SEQ ID NO: 14020 - protein, 7 aa, Artificial Sequence
  Synthetic construct
IYTSGST

SEQ ID NO: 14021 - protein, 7 aa, Artificial Sequence
  Synthetic construct
IYSGGST

SEQ ID NO: 14022 - protein, 7 aa, Artificial Sequence
  Synthetic construct
IYYSGST

SEQ ID NO: 14023 - protein, 8 aa, Artificial Sequence
  Synthetic construct
IHGSGGIT

SEQ ID NO: 14024 - protein, 8 aa, Artificial Sequence
  Synthetic construct
IWYDGSKK

SEQ ID NO: 14025 - protein, 7 aa, Artificial Sequence
  Synthetic construct
IYHSGST

SEQ ID NO: 14026 - protein, 8 aa, Artificial Sequence
  Synthetic construct
ISAYNGNT

SEQ ID NO: 14027 - protein, 8 aa, Artificial Sequence
  Synthetic construct
ISSSSSTI

SEQ ID NO: 14028 - protein, 8 aa, Artificial Sequence
  Synthetic construct
ISDSGDRT

SEQ ID NO: 14029 - protein, 8 aa, Artificial Sequence
  Synthetic construct
ISYDGSNK

SEQ ID NO: 14030 - protein, 7 aa, Artificial Sequence
  Synthetic construct
IYTSGST

SEQ ID NO: 14031 - protein, 7 aa, Artificial Sequence
  Synthetic construct
INYSGTT

SEQ ID NO: 14032 - protein, 8 aa, Artificial Sequence
  Synthetic construct
ISYDGSNK

SEQ ID NO: 14033 - protein, 8 aa, Artificial Sequence
  Synthetic construct
IYPRDSDT

SEQ ID NO: 14034 - protein, 8 aa, Artificial Sequence
  Synthetic construct
IWEDGDKI

SEQ ID NO: 14035 - protein, 7 aa, Artificial Sequence
  Synthetic construct
IYHSGST

SEQ ID NO: 14036 - protein, 7 aa, Artificial Sequence
  Synthetic construct
IYSSGST

SEQ ID NO: 14037 - protein, 7 aa, Artificial Sequence
  Synthetic construct
IYYSGST

SEQ ID NO: 14038 - protein, 8 aa, Artificial Sequence
  Synthetic construct
ISAGGVDT

SEQ ID NO: 14039 - protein, 8 aa, Artificial Sequence
  Synthetic construct
IWHDGSRK

SEQ ID NO: 14040 - protein, 7 aa, Artificial Sequence
  Synthetic construct
IYTSGST

SEQ ID NO: 14041 - protein, 8 aa, Artificial Sequence
  Synthetic construct
INSDGSST

SEQ ID NO: 14042 - protein, 10 aa, Artificial Sequence
  Synthetic construct
IRSKAYGGTT

SEQ ID NO: 14043 - protein, 7 aa, Artificial Sequence
  Synthetic construct
ISYSGSL

SEQ ID NO: 14044 - protein, 7 aa, Artificial Sequence
  Synthetic construct
IYYTGAT

SEQ ID NO: 14045 - protein, 8 aa, Artificial Sequence
  Synthetic construct
ISAYNGNT

SEQ ID NO: 14046 - protein, 7 aa, Artificial Sequence
  Synthetic construct
INHSGST

SEQ ID NO: 14047 - protein, 8 aa, Artificial Sequence
  Synthetic construct
INPNSGGT

SEQ ID NO: 14048 - protein, 7 aa, Artificial Sequence
  Synthetic construct
IYYSGST

SEQ ID NO: 14049 - protein, 8 aa, Artificial Sequence
  Synthetic construct
ISSSSSYI

SEQ ID NO: 14050 - protein, 7 aa, Artificial Sequence
  Synthetic construct
THSGGRT

SEQ ID NO: 14051 - protein, 8 aa, Artificial Sequence
  Synthetic construct
INAGNGNT

SEQ ID NO: 14052 - protein, 8 aa, Artificial Sequence
  Synthetic construct
ISTYNGKA

SEQ ID NO: 14053 - protein, 8 aa, Artificial Sequence
  Synthetic construct
FNPKSGIT

SEQ ID NO: 14054 - protein, 8 aa, Artificial Sequence
  Synthetic construct
IDPSDSYT

SEQ ID NO: 14055 - protein, 8 aa, Artificial Sequence
  Synthetic construct
IWYDGSDE

SEQ ID NO: 14056 - protein, 7 aa, Artificial Sequence
  Synthetic construct
IYSGGST

SEQ ID NO: 14057 - protein, 7 aa, Artificial Sequence
  Synthetic construct
IYYSGST

SEQ ID NO: 14058 - protein, 8 aa, Artificial Sequence
  Synthetic construct
ISDDGSTK

SEQ ID NO: 14059 - protein, 8 aa, Artificial Sequence
  Synthetic construct
ISGSGGST

SEQ ID NO: 14060 - protein, 8 aa, Artificial Sequence
  Synthetic construct
ISSNGGST

SEQ ID NO: 14061 - protein, 10 aa, Artificial Sequence
  Synthetic construct
IRSKTFGGTT

SEQ ID NO: 14062 - protein, 8 aa, Artificial Sequence
  Synthetic construct
IDPTDSYT

SEQ ID NO: 14063 - protein, 8 aa, Artificial Sequence
  Synthetic construct
ISSNGGST

SEQ ID NO: 14064 - protein, 7 aa, Artificial Sequence
  Synthetic construct
VSHTGST

SEQ ID NO: 14065 - protein, 8 aa, Artificial Sequence
  Synthetic construct
ISYDGSNK

SEQ ID NO: 14066 - protein, 8 aa, Artificial Sequence
  Synthetic construct
INPSGGST

SEQ ID NO: 14067 - protein, 10 aa, Artificial Sequence
  Synthetic construct
IRSKAYGGTT

SEQ ID NO: 14068 - protein, 7 aa, Artificial Sequence
  Synthetic construct
IYWDDDK

SEQ ID NO: 14069 - protein, 8 aa, Artificial Sequence
  Synthetic construct
INTNTKNP

SEQ ID NO: 14070 - protein, 7 aa, Artificial Sequence
  Synthetic construct
IYHSGTT

SEQ ID NO: 14071 - protein, 10 aa, Artificial Sequence
  Synthetic construct
IKSKTDGGTT

SEQ ID NO: 14072 - protein, 8 aa, Artificial Sequence
  Synthetic construct
LYPADSDT

SEQ ID NO: 14073 - protein, 8 aa, Artificial Sequence
  Synthetic construct
IWYDGSNK

SEQ ID NO: 14074 - protein, 7 aa, Artificial Sequence
  Synthetic construct
IYQNGQT

SEQ ID NO: 14075 - protein, 7 aa, Artificial Sequence
  Synthetic construct
IYYGDTT

SEQ ID NO: 14076 - protein, 8 aa, Artificial Sequence
  Synthetic construct
INIDGSGT

SEQ ID NO: 14077 - protein, 7 aa, Artificial Sequence
  Synthetic construct
IYTSGST

SEQ ID NO: 14078 - protein, 8 aa, Artificial Sequence
  Synthetic construct
ISGRDENT

SEQ ID NO: 14079 - protein, 10 aa, Artificial Sequence
  Synthetic construct
IRSRTNNYAT

SEQ ID NO: 14080 - protein, 8 aa, Artificial Sequence
  Synthetic construct
IYAGDSDT

SEQ ID NO: 14081 - protein, 8 aa, Artificial Sequence
  Synthetic construct
IKPDGSEK

SEQ ID NO: 14082 - protein, 7 aa, Artificial Sequence
  Synthetic construct
IYHSGGA

SEQ ID NO: 14083 - protein, 8 aa, Artificial Sequence
  Synthetic construct
ISAYNGNT

SEQ ID NO: 14084 - protein, 7 aa, Artificial Sequence
  Synthetic construct
IYHSGTT

SEQ ID NO: 14085 - protein, 10 aa, Artificial Sequence
  Synthetic construct
IKSKTDGGTT

SEQ ID NO: 14086 - protein, 8 aa, Artificial Sequence
  Synthetic construct
ISYDGSNK

SEQ ID NO: 14087 - protein, 8 aa, Artificial Sequence
  Synthetic construct
IYPGDSDT

SEQ ID NO: 14088 - protein, 8 aa, Artificial Sequence
  Synthetic construct
ISSSSSTI

SEQ ID NO: 14089 - protein, 8 aa, Artificial Sequence
  Synthetic construct
IDTTSSYI

SEQ ID NO: 14090 - protein, 7 aa, Artificial Sequence
  Synthetic construct
IYYSGTT

SEQ ID NO: 14091 - protein, 8 aa, Artificial Sequence
  Synthetic construct
ISWDGSST

SEQ ID NO: 14092 - protein, 8 aa, Artificial Sequence
  Synthetic construct
ISGSGGST

SEQ ID NO: 14093 - protein, 8 aa, Artificial Sequence
  Synthetic construct
IWSDGRNK

SEQ ID NO: 14094 - protein, 8 aa, Artificial Sequence
  Synthetic construct
IIGGGGST

SEQ ID NO: 14095 - protein, 8 aa, Artificial Sequence
  Synthetic construct
IDPSDSST

SEQ ID NO: 14096 - protein, 7 aa, Artificial Sequence
  Synthetic construct
IGPAGDT

SEQ ID NO: 14097 - protein, 8 aa, Artificial Sequence
  Synthetic construct
ISAYNGNT

SEQ ID NO: 14098 - protein, 8 aa, Artificial Sequence
  Synthetic construct
ISSNGGST

SEQ ID NO: 14099 - protein, 8 aa, Artificial Sequence
  Synthetic construct
IYPGDSQT

SEQ ID NO: 14100 - protein, 8 aa, Artificial Sequence
  Synthetic construct
IIPILDVA

SEQ ID NO: 14101 - protein, 8 aa, Artificial Sequence
  Synthetic construct
INGGNGNT

SEQ ID NO: 14102 - protein, 8 aa, Artificial Sequence
  Synthetic construct
INPNSGGT

SEQ ID NO: 14103 - protein, 7 aa, Artificial Sequence
  Synthetic construct
IYTSGST

SEQ ID NO: 14104 - protein, 7 aa, Artificial Sequence
  Synthetic construct
IYSGGST

SEQ ID NO: 14105 - protein, 7 aa, Artificial Sequence
  Synthetic construct
IYWDDDK

SEQ ID NO: 14106 - protein, 7 aa, Artificial Sequence
  Synthetic construct
IYYSGST

SEQ ID NO: 14107 - protein, 8 aa, Artificial Sequence
  Synthetic construct
MSGSGGTT

SEQ ID NO: 14108 - protein, 8 aa, Artificial Sequence
  Synthetic construct
INTGHGKA

SEQ ID NO: 14109 - protein, 8 aa, Artificial Sequence
  Synthetic construct
ISSSSSYI

SEQ ID NO: 14110 - protein, 8 aa, Artificial Sequence
  Synthetic construct
ISWNSGSI

SEQ ID NO: 14111 - protein, 7 aa, Artificial Sequence
  Synthetic construct
VSWDDDK

SEQ ID NO: 14112 - protein, 10 aa, Artificial Sequence
  Synthetic construct
IKSKSDGETI

SEQ ID NO: 14113 - protein, 8 aa, Artificial Sequence
  Synthetic construct
INTDTGHP

SEQ ID NO: 14114 - protein, 8 aa, Artificial Sequence
  Synthetic construct
INTYNGDT

SEQ ID NO: 14115 - protein, 8 aa, Artificial Sequence
  Synthetic construct
ISGSGGST

SEQ ID NO: 14116 - protein, 8 aa, Artificial Sequence
  Synthetic construct
ISYDGSNK

SEQ ID NO: 14117 - protein, 8 aa, Artificial Sequence
  Synthetic construct
INPSGGST

SEQ ID NO: 14118 - protein, 7 aa, Artificial Sequence
  Synthetic construct
INHSGST

SEQ ID NO: 14119 - protein, 8 aa, Artificial Sequence
  Synthetic construct
ISSSSSYI

SEQ ID NO: 14120 - protein, 7 aa, Artificial Sequence
  Synthetic construct
IYYSGST

SEQ ID NO: 14121 - protein, 8 aa, Artificial Sequence
  Synthetic construct
IWYDGSNK

SEQ ID NO: 14122 - protein, 7 aa, Artificial Sequence
  Synthetic construct
IYWDDDK

SEQ ID NO: 14123 - protein, 8 aa, Artificial Sequence
  Synthetic construct
IWFKGNNQ

SEQ ID NO: 14124 - protein, 8 aa, Artificial Sequence
  Synthetic construct
ISAYNGNT

SEQ ID NO: 14125 - protein, 8 aa, Artificial Sequence
  Synthetic construct
ISGNGANT

SEQ ID NO: 14126 - protein, 7 aa, Artificial Sequence
  Synthetic construct
IYWDDDK

SEQ ID NO: 14127 - protein, 8 aa, Artificial Sequence
  Synthetic construct
ISSSSSTI

SEQ ID NO: 14128 - protein, 7 aa, Artificial Sequence
  Synthetic construct
VFHRGNT

SEQ ID NO: 14129 - protein, 10 aa, Artificial Sequence
  Synthetic construct
IKSKTDGGTT

SEQ ID NO: 14130 - protein, 10 aa, Artificial Sequence
  Synthetic construct
ISTNSAGGTV

SEQ ID NO: 14131 - protein, 7 aa, Artificial Sequence
  Synthetic construct
IYTSGST

SEQ ID NO: 14132 - protein, 8 aa, Artificial Sequence
  Synthetic construct
ISSSSGTI

SEQ ID NO: 14133 - protein, 7 aa, Artificial Sequence
  Synthetic construct
IYHSGST

SEQ ID NO: 14134 - protein, 8 aa, Artificial Sequence
  Synthetic construct
ILPILGVP

SEQ ID NO: 14135 - protein, 8 aa, Artificial Sequence
  Synthetic construct
ISAYNGNT

SEQ ID NO: 14136 - protein, 7 aa, Artificial Sequence
  Synthetic construct
IYWDDDK

SEQ ID NO: 14137 - protein, 7 aa, Artificial Sequence
  Synthetic construct
IYYNGRT

SEQ ID NO: 14138 - protein, 7 aa, Artificial Sequence
  Synthetic construct
INHSGST

SEQ ID NO: 14139 - protein, 8 aa, Artificial Sequence
  Synthetic construct
ISGSGGST

SEQ ID NO: 14140 - protein, 7 aa, Artificial Sequence
  Synthetic construct
IYYSGST

SEQ ID NO: 14141 - protein, 8 aa, Artificial Sequence
  Synthetic construct
ITGARGNR

SEQ ID NO: 14142 - protein, 8 aa, Artificial Sequence
  Synthetic construct
IIPVFGTA

SEQ ID NO: 14143 - protein, 8 aa, Artificial Sequence
  Synthetic construct
VRPHSGDT

SEQ ID NO: 14144 - protein, 8 aa, Artificial Sequence
  Synthetic construct
INPSGCTP

SEQ ID NO: 14145 - protein, 8 aa, Artificial Sequence
  Synthetic construct
ISYNGVTT

SEQ ID NO: 14146 - protein, 7 aa, Artificial Sequence
  Synthetic construct
IYGDGST

SEQ ID NO: 14147 - protein, 8 aa, Artificial Sequence
  Synthetic construct
ISSSSSTI

SEQ ID NO: 14148 - protein, 7 aa, Artificial Sequence
  Synthetic construct
IYHSGNT

SEQ ID NO: 14149 - protein, 8 aa, Artificial Sequence
  Synthetic construct
ISSSSSYI

SEQ ID NO: 14150 - protein, 8 aa, Artificial Sequence
  Synthetic construct
INAGNGNT

SEQ ID NO: 14151 - protein, 7 aa, Artificial Sequence
  Synthetic construct
VTYSGNT

SEQ ID NO: 14152 - protein, 9 aa, Artificial Sequence
  Synthetic construct
TYYRSKWYN

SEQ ID NO: 14153 - protein, 7 aa, Artificial Sequence
  Synthetic construct
IYYSGST

SEQ ID NO: 14154 - protein, 8 aa, Artificial Sequence
  Synthetic construct
ISSSSSYI

SEQ ID NO: 14155 - protein, 7 aa, Artificial Sequence
  Synthetic construct
IYWDDDK

SEQ ID NO: 14156 - protein, 8 aa, Artificial Sequence
  Synthetic construct
ISVSGGTT

SEQ ID NO: 14157 - protein, 8 aa, Artificial Sequence
  Synthetic construct
ISYDGSNK

SEQ ID NO: 14158 - protein, 8 aa, Artificial Sequence
  Synthetic construct
INQISTII

SEQ ID NO: 14159 - protein, 8 aa, Artificial Sequence
  Synthetic construct
IWYDGSDE

SEQ ID NO: 14160 - protein, 8 aa, Artificial Sequence
  Synthetic construct
IDPSDSYT

SEQ ID NO: 14161 - protein, 8 aa, Artificial Sequence
  Synthetic construct
INPNSGGT

SEQ ID NO: 14162 - protein, 7 aa, Artificial Sequence
  Synthetic construct
IYYSGST

SEQ ID NO: 14163 - protein, 8 aa, Artificial Sequence
  Synthetic construct
SSVYNGET

SEQ ID NO: 14164 - protein, 8 aa, Artificial Sequence
  Synthetic construct
IKKDGSEK

SEQ ID NO: 14165 - protein, 8 aa, Artificial Sequence
  Synthetic construct
ISGSGGST

SEQ ID NO: 14166 - protein, 8 aa, Artificial Sequence
  Synthetic construct
ISGSGNII

SEQ ID NO: 14167 - protein, 7 aa, Artificial Sequence
  Synthetic construct
IYYSGST

SEQ ID NO: 14168 - protein, 7 aa, Artificial Sequence
  Synthetic construct
IYHSGST

SEQ ID NO: 14169 - protein, 8 aa, Artificial Sequence
  Synthetic construct
ISYDGSNK

SEQ ID NO: 14170 - protein, 7 aa, Artificial Sequence
  Synthetic construct
MKVSGSP

SEQ ID NO: 14171 - protein, 8 aa, Artificial Sequence
  Synthetic construct
ITSSSSTI

SEQ ID NO: 14172 - protein, 8 aa, Artificial Sequence
  Synthetic construct
ISSSSSYI

SEQ ID NO: 14173 - protein, 7 aa, Artificial Sequence
  Synthetic construct
IYSGGST

SEQ ID NO: 14174 - protein, 8 aa, Artificial Sequence
  Synthetic construct
IDPTDSYT

SEQ ID NO: 14175 - protein, 8 aa, Artificial Sequence
  Synthetic construct
MTPNSGDT

SEQ ID NO: 14176 - protein, 7 aa, Artificial Sequence
  Synthetic construct
LYSGGST

SEQ ID NO: 14177 - protein, 8 aa, Artificial Sequence
  Synthetic construct
ISAYNGNT

SEQ ID NO: 14178 - protein, 8 aa, Artificial Sequence
  Synthetic construct
IWYDGSNK

SEQ ID NO: 14179 - protein, 8 aa, Artificial Sequence
  Synthetic construct
ISWNSGSI

SEQ ID NO: 14180 - protein, 8 aa, Artificial Sequence
  Synthetic construct
ISSSSSYI

SEQ ID NO: 14181 - protein, 8 aa, Artificial Sequence
  Synthetic construct
INSDGSST

SEQ ID NO: 14182 - protein, 7 aa, Artificial Sequence
  Synthetic construct
IYHSGST

SEQ ID NO: 14183 - protein, 8 aa, Artificial Sequence
  Synthetic construct
IWYDGSNK

SEQ ID NO: 14184 - protein, 8 aa, Artificial Sequence
  Synthetic construct
ISHDGRNQ

SEQ ID NO: 14185 - protein, 7 aa, Artificial Sequence
  Synthetic construct
INHSGST

SEQ ID NO: 14186 - protein, 8 aa, Artificial Sequence
  Synthetic construct
ISSSSSYI

SEQ ID NO: 14187 - protein, 7 aa, Artificial Sequence
  Synthetic construct
IYYSGST

SEQ ID NO: 14188 - protein, 8 aa, Artificial Sequence
  Synthetic construct
IKQDGSEK

SEQ ID NO: 14189 - protein, 8 aa, Artificial Sequence
  Synthetic construct
ISGNSAAT

SEQ ID NO: 14190 - protein, 7 aa, Artificial Sequence
  Synthetic construct
MYSTGST

SEQ ID NO: 14191 - protein, 8 aa, Artificial Sequence
  Synthetic construct
IKQDGSEK

SEQ ID NO: 14192 - protein, 8 aa, Artificial Sequence
  Synthetic construct
ISRSSSYI

SEQ ID NO: 14193 - protein, 8 aa, Artificial Sequence
  Synthetic construct
IDPEDGRT

SEQ ID NO: 14194 - protein, 7 aa, Artificial Sequence
  Synthetic construct
VLHSGTT

SEQ ID NO: 14195 - protein, 8 aa, Artificial Sequence
  Synthetic construct
ISYDGSNK

SEQ ID NO: 14196 - protein, 7 aa, Artificial Sequence
  Synthetic construct
IYYSGTT

SEQ ID NO: 14197 - protein, 8 aa, Artificial Sequence
  Synthetic construct
ISYDGDNK

SEQ ID NO: 14198 - protein, 8 aa, Artificial Sequence
  Synthetic construct
VGPDDGEA

SEQ ID NO: 14199 - protein, 8 aa, Artificial Sequence
  Synthetic construct
ISAGGGNV

SEQ ID NO: 14200 - protein, 8 aa, Artificial Sequence
  Synthetic construct
IWYDGSNK

SEQ ID NO: 14201 - protein, 8 aa, Artificial Sequence
  Synthetic construct
INPDGSEI

SEQ ID NO: 14202 - protein, 10 aa, Artificial Sequence
  Synthetic construct
IRSKAYGGTT

SEQ ID NO: 14203 - protein, 7 aa, Artificial Sequence
  Synthetic construct
VYYSGSA

SEQ ID NO: 14204 - protein, 8 aa, Artificial Sequence
  Synthetic construct
VSESGIIT

SEQ ID NO: 14205 - protein, 7 aa, Artificial Sequence
  Synthetic construct
IYYSGST

SEQ ID NO: 14206 - protein, 8 aa, Artificial Sequence
  Synthetic construct
INPNSGGT

SEQ ID NO: 14207 - protein, 7 aa, Artificial Sequence
  Synthetic construct
IYYSGST

SEQ ID NO: 14208 - protein, 8 aa, Artificial Sequence
  Synthetic construct
ITGNGGTT

SEQ ID NO: 14209 - protein, 7 aa, Artificial Sequence
  Synthetic construct
IYYSGST

SEQ ID NO: 14210 - protein, 8 aa, Artificial Sequence
  Synthetic construct
VSGSSANI

SEQ ID NO: 14211 - protein, 10 aa, Artificial Sequence
  Synthetic construct
IRSKANSYAT

SEQ ID NO: 14212 - protein, 7 aa, Artificial Sequence
  Synthetic construct
IYWDDDK

SEQ ID NO: 14213 - protein, 7 aa, Artificial Sequence
  Synthetic construct
IYTSGST

SEQ ID NO: 14214 - protein, 8 aa, Artificial Sequence
  Synthetic construct
IIPVLGLA

SEQ ID NO: 14215 - protein, 7 aa, Artificial Sequence
  Synthetic construct
IYYSGST

SEQ ID NO: 14216 - protein, 8 aa, Artificial Sequence
  Synthetic construct
ITTSSSTI

SEQ ID NO: 14217 - protein, 8 aa, Artificial Sequence
  Synthetic construct
INAGNGNT

SEQ ID NO: 14218 - protein, 7 aa, Artificial Sequence
  Synthetic construct
VYGSGTV

SEQ ID NO: 14219 - protein, 8 aa, Artificial Sequence
  Synthetic construct
IKQDGSEK

SEQ ID NO: 14220 - protein, 7 aa, Artificial Sequence
  Synthetic construct
IYYSGTT

SEQ ID NO: 14221 - protein, 8 aa, Artificial Sequence
  Synthetic construct
INTDGSST

SEQ ID NO: 14222 - protein, 7 aa, Artificial Sequence
  Synthetic construct
INSGGST

SEQ ID NO: 14223 - protein, 8 aa, Artificial Sequence
  Synthetic construct
ISTYNGKA

SEQ ID NO: 14224 - protein, 8 aa, Artificial Sequence
  Synthetic construct
TNWNGGGK

SEQ ID NO: 14225 - protein, 8 aa, Artificial Sequence
  Synthetic construct
INTDGSRT

SEQ ID NO: 14226 - protein, 8 aa, Artificial Sequence
  Synthetic construct
ISRSSSYI

SEQ ID NO: 14227 - protein, 8 aa, Artificial Sequence
  Synthetic construct
ISYDGSNK

SEQ ID NO: 14228 - protein, 10 aa, Artificial Sequence
  Synthetic construct
IRVRANRYAT

SEQ ID NO: 14229 - protein, 8 aa, Artificial Sequence
  Synthetic construct
IIPVLDRP

SEQ ID NO: 14230 - protein, 8 aa, Artificial Sequence
  Synthetic construct
ISSSSRYI

SEQ ID NO: 14231 - protein, 8 aa, Artificial Sequence
  Synthetic construct
IIPMFGTT

SEQ ID NO: 14232 - protein, 8 aa, Artificial Sequence
  Synthetic construct
INIDGSRT

SEQ ID NO: 14233 - protein, 8 aa, Artificial Sequence
  Synthetic construct
IIPIFGTA

SEQ ID NO: 14234 - protein, 7 aa, Artificial Sequence
  Synthetic construct
IYYSGST

SEQ ID NO: 14235 - protein, 7 aa, Artificial Sequence
  Synthetic construct
IYYSGST

SEQ ID NO: 14236 - protein, 7 aa, Artificial Sequence
  Synthetic construct
IYWDDDK

SEQ ID NO: 14237 - protein, 8 aa, Artificial Sequence
  Synthetic construct
IDPSDSYT

SEQ ID NO: 14238 - protein, 8 aa, Artificial Sequence
  Synthetic construct
ISSRSSTI

SEQ ID NO: 14239 - protein, 8 aa, Artificial Sequence
  Synthetic construct
ITTDTGNP

SEQ ID NO: 14240 - protein, 8 aa, Artificial Sequence
  Synthetic construct
ISAYNGNT

SEQ ID NO: 14241 - protein, 8 aa, Artificial Sequence
  Synthetic construct
IDPTDSYT

SEQ ID NO: 14242 - protein, 10 aa, Artificial Sequence
  Synthetic construct
IRSKANSYAT

SEQ ID NO: 14243 - protein, 8 aa, Artificial Sequence
  Synthetic construct
ISSSSSTI

SEQ ID NO: 14244 - protein, 8 aa, Artificial Sequence
  Synthetic construct
INGGNGNT

SEQ ID NO: 14245 - protein, 8 aa, Artificial Sequence
  Synthetic construct
LSGSGRGT

SEQ ID NO: 14246 - protein, 8 aa, Artificial Sequence
  Synthetic construct
IDPTDSYT

SEQ ID NO: 14247 - protein, 7 aa, Artificial Sequence
  Synthetic construct
INHSGST

SEQ ID NO: 14248 - protein, 8 aa, Artificial Sequence
  Synthetic construct
ISGSGVTT

SEQ ID NO: 14249 - protein, 10 aa, Artificial Sequence
  Synthetic construct
IKSKTDGGTT

SEQ ID NO: 14250 - protein, 8 aa, Artificial Sequence
  Synthetic construct
ISYDGNHK

SEQ ID NO: 14251 - protein, 8 aa, Artificial Sequence
  Synthetic construct
ISSSSTYI

SEQ ID NO: 14252 - protein, 7 aa, Artificial Sequence
  Synthetic construct
IYYSGST

SEQ ID NO: 14253 - protein, 8 aa, Artificial Sequence
  Synthetic construct
IKTDGSST

SEQ ID NO: 14254 - protein, 8 aa, Artificial Sequence
  Synthetic construct
ISGSAVST

SEQ ID NO: 14255 - protein, 7 aa, Artificial Sequence
  Synthetic construct
IYYSGST

SEQ ID NO: 14256 - protein, 8 aa, Artificial Sequence
  Synthetic construct
ITADSTYK

SEQ ID NO: 14257 - protein, 7 aa, Artificial Sequence
  Synthetic construct
IGPAGDT

SEQ ID NO: 14258 - protein, 8 aa, Artificial Sequence
  Synthetic construct
ISSSSSYI

SEQ ID NO: 14259 - protein, 7 aa, Artificial Sequence
  Synthetic construct
IYYSGST

SEQ ID NO: 14260 - protein, 7 aa, Artificial Sequence
  Synthetic construct
IYTSGST

SEQ ID NO: 14261 - protein, 8 aa, Artificial Sequence
  Synthetic construct
INTNTGNP

SEQ ID NO: 14262 - protein, 8 aa, Artificial Sequence
  Synthetic construct
ITADGRTT

SEQ ID NO: 14263 - protein, 7 aa, Artificial Sequence
  Synthetic construct
IYPSGAT

SEQ ID NO: 14264 - protein, 8 aa, Artificial Sequence
  Synthetic construct
ISSTGNYI

SEQ ID NO: 14265 - protein, 8 aa, Artificial Sequence
  Synthetic construct
INTNTAKP

SEQ ID NO: 14266 - protein, 8 aa, Artificial Sequence
  Synthetic construct
IKQDGSEK

SEQ ID NO: 14267 - protein, 8 aa, Artificial Sequence
  Synthetic construct
INPDGGST

SEQ ID NO: 14268 - protein, 8 aa, Artificial Sequence
  Synthetic construct
IREDGSEK

SEQ ID NO: 14269 - protein, 8 aa, Artificial Sequence
  Synthetic construct
ISTYNGKA

SEQ ID NO: 14270 - protein, 7 aa, Artificial Sequence
  Synthetic construct
IYTSGST

SEQ ID NO: 14271 - protein, 8 aa, Artificial Sequence
  Synthetic construct
ITWSSDVI

SEQ ID NO: 14272 - protein, 7 aa, Artificial Sequence
  Synthetic construct
INYSGST

SEQ ID NO: 14273 - protein, 7 aa, Artificial Sequence
  Synthetic construct
TYFTGAT

SEQ ID NO: 14274 - protein, 7 aa, Artificial Sequence
  Synthetic construct
IYYSGST

SEQ ID NO: 14275 - protein, 8 aa, Artificial Sequence
  Synthetic construct
ISAYNGNT

SEQ ID NO: 14276 - protein, 8 aa, Artificial Sequence
  Synthetic construct
IYPGDSDT

SEQ ID NO: 14277 - protein, 7 aa, Artificial Sequence
  Synthetic construct
IYSSGST

SEQ ID NO: 14278 - protein, 7 aa, Artificial Sequence
  Synthetic construct
LYYSGST

SEQ ID NO: 14279 - protein, 8 aa, Artificial Sequence
  Synthetic construct
IKEDGSEE

SEQ ID NO: 14280 - protein, 8 aa, Artificial Sequence
  Synthetic construct
ISYDGSNK

SEQ ID NO: 14281 - protein, 7 aa, Artificial Sequence
  Synthetic construct
IYFTGST

SEQ ID NO: 14282 - protein, 8 aa, Artificial Sequence
  Synthetic construct
IIPIFGTA

SEQ ID NO: 14283 - protein, 7 aa, Artificial Sequence
  Synthetic construct
ISSSGSS

SEQ ID NO: 14284 - protein, 8 aa, Artificial Sequence
  Synthetic construct
ISVSSDIT

SEQ ID NO: 14285 - protein, 8 aa, Artificial Sequence
  Synthetic construct
ISGSGGST

SEQ ID NO: 14286 - protein, 7 aa, Artificial Sequence
  Synthetic construct
VDSSGSL

SEQ ID NO: 14287 - protein, 8 aa, Artificial Sequence
  Synthetic construct
TSYAGTDK

SEQ ID NO: 14288 - protein, 8 aa, Artificial Sequence
  Synthetic construct
ISYDGNKK

SEQ ID NO: 14289 - protein, 8 aa, Artificial Sequence
  Synthetic construct
ISGSGNII

SEQ ID NO: 14290 - protein, 7 aa, Artificial Sequence
  Synthetic construct
IYWDDDK

SEQ ID NO: 14291 - protein, 8 aa, Artificial Sequence
  Synthetic construct
IYPGDSDT

SEQ ID NO: 14292 - protein, 7 aa, Artificial Sequence
  Synthetic construct
IYWDDDK

SEQ ID NO: 14293 - protein, 8 aa, Artificial Sequence
  Synthetic construct
ISYDGSNK

SEQ ID NO: 14294 - protein, 7 aa, Artificial Sequence
  Synthetic construct
IYYSGTT

SEQ ID NO: 14295 - protein, 7 aa, Artificial Sequence
  Synthetic construct
IGPAGDT

SEQ ID NO: 14296 - protein, 7 aa, Artificial Sequence
  Synthetic construct
TDHSGDT

SEQ ID NO: 14297 - protein, 7 aa, Artificial Sequence
  Synthetic construct
THHSGGS

SEQ ID NO: 14298 - protein, 8 aa, Artificial Sequence
  Synthetic construct
VLPMYGTA

SEQ ID NO: 14299 - protein, 8 aa, Artificial Sequence
  Synthetic construct
ISGSGGST

SEQ ID NO: 14300 - protein, 8 aa, Artificial Sequence
  Synthetic construct
IFPRDSDV

SEQ ID NO: 14301 - protein, 8 aa, Artificial Sequence
  Synthetic construct
ISSSSSTI

SEQ ID NO: 14302 - protein, 8 aa, Artificial Sequence
  Synthetic construct
ISTYNGKA

SEQ ID NO: 14303 - protein, 7 aa, Artificial Sequence
  Synthetic construct
IYTSGST

SEQ ID NO: 14304 - protein, 7 aa, Artificial Sequence
  Synthetic construct
IYSGDAT

SEQ ID NO: 14305 - protein, 8 aa, Artificial Sequence
  Synthetic construct
VWYSGETK

SEQ ID NO: 14306 - protein, 8 aa, Artificial Sequence
  Synthetic construct
IYFDDSDT

SEQ ID NO: 14307 - protein, 7 aa, Artificial Sequence
  Synthetic construct
FYYSGST

SEQ ID NO: 14308 - protein, 8 aa, Artificial Sequence
  Synthetic construct
ITVSSSST

SEQ ID NO: 14309 - protein, 7 aa, Artificial Sequence
  Synthetic construct
IGPAGDT

SEQ ID NO: 14310 - protein, 8 aa, Artificial Sequence
  Synthetic construct
ISAYNGNT

SEQ ID NO: 14311 - protein, 7 aa, Artificial Sequence
  Synthetic construct
IYTSGST

SEQ ID NO: 14312 - protein, 7 aa, Artificial Sequence
  Synthetic construct
IYSGGST

SEQ ID NO: 14313 - protein, 7 aa, Artificial Sequence
  Synthetic construct
IYYSGST

SEQ ID NO: 14314 - protein, 8 aa, Artificial Sequence
  Synthetic construct
ISSSSSTI

SEQ ID NO: 14315 - protein, 7 aa, Artificial Sequence
  Synthetic construct
ISLGGST

SEQ ID NO: 14316 - protein, 8 aa, Artificial Sequence
  Synthetic construct
INPNSGGT

SEQ ID NO: 14317 - protein, 8 aa, Artificial Sequence
  Synthetic construct
ISYDGSNK

SEQ ID NO: 14318 - protein, 8 aa, Artificial Sequence
  Synthetic construct
INPNSGAT

SEQ ID NO: 14319 - protein, 7 aa, Artificial Sequence
  Synthetic construct
IYYSGST

SEQ ID NO: 14320 - protein, 8 aa, Artificial Sequence
  Synthetic construct
INGANDNI

SEQ ID NO: 14321 - protein, 8 aa, Artificial Sequence
  Synthetic construct
INIDGSRT

SEQ ID NO: 14322 - protein, 8 aa, Artificial Sequence
  Synthetic construct
ISHDATIT

SEQ ID NO: 14323 - protein, 8 aa, Artificial Sequence
  Synthetic construct
ISYDGSNK

SEQ ID NO: 14324 - protein, 8 aa, Artificial Sequence
  Synthetic construct
ISYDGSNK

SEQ ID NO: 14325 - protein, 8 aa, Artificial Sequence
  Synthetic construct
ISYDGSNK

SEQ ID NO: 14326 - protein, 8 aa, Artificial Sequence
  Synthetic construct
INTHTGDS

SEQ ID NO: 14327 - protein, 8 aa, Artificial Sequence
  Synthetic construct
ISHDGAVI

SEQ ID NO: 14328 - protein, 9 aa, Artificial Sequence
  Synthetic construct
TYYRSKWYN

SEQ ID NO: 14329 - protein, 8 aa, Artificial Sequence
  Synthetic construct
IWYDGRNK

SEQ ID NO: 14330 - protein, 10 aa, Artificial Sequence
  Synthetic construct
IRSKANSYAT

SEQ ID NO: 14331 - protein, 8 aa, Artificial Sequence
  Synthetic construct
IWYDGSNK

SEQ ID NO: 14332 - protein, 7 aa, Artificial Sequence
  Synthetic construct
IYSGDNT

SEQ ID NO: 14333 - protein, 8 aa, Artificial Sequence
  Synthetic construct
ISYDGSNK

SEQ ID NO: 14334 - protein, 8 aa, Artificial Sequence
  Synthetic construct
IKQDGSEK

SEQ ID NO: 14335 - protein, 8 aa, Artificial Sequence
  Synthetic construct
HDPSDGEI

SEQ ID NO: 14336 - protein, 7 aa, Artificial Sequence
  Synthetic construct
IYYSGST

SEQ ID NO: 14337 - protein, 7 aa, Artificial Sequence
  Synthetic construct
IHHSGST

SEQ ID NO: 14338 - protein, 8 aa, Artificial Sequence
  Synthetic construct
IHPGDSDI

SEQ ID NO: 14339 - protein, 7 aa, Artificial Sequence
  Synthetic construct
IYWDDDK

SEQ ID NO: 14340 - protein, 8 aa, Artificial Sequence
  Synthetic construct
ISGSGGST

SEQ ID NO: 14341 - protein, 7 aa, Artificial Sequence
  Synthetic construct
IYTSGST

SEQ ID NO: 14342 - protein, 8 aa, Artificial Sequence
  Synthetic construct
ITSSGSTM

SEQ ID NO: 14343 - protein, 8 aa, Artificial Sequence
  Synthetic construct
IYPRDSDT

SEQ ID NO: 14344 - protein, 8 aa, Artificial Sequence
  Synthetic construct
LSGSGRGT

SEQ ID NO: 14345 - protein, 7 aa, Artificial Sequence
  Synthetic construct
INHSGST

SEQ ID NO: 14346 - protein, 8 aa, Artificial Sequence
  Synthetic construct
ISAYNGNT

SEQ ID NO: 14347 - protein, 8 aa, Artificial Sequence
  Synthetic construct
ISYDGGTK

SEQ ID NO: 14348 - protein, 7 aa, Artificial Sequence
  Synthetic construct
IYYSGST

SEQ ID NO: 14349 - protein, 7 aa, Artificial Sequence
  Synthetic construct
IYHSGST

SEQ ID NO: 14350 - protein, 8 aa, Artificial Sequence
  Synthetic construct
ISSSSSYI

SEQ ID NO: 14351 - protein, 8 aa, Artificial Sequence
  Synthetic construct
IDPGDSHT

SEQ ID NO: 14352 - protein, 8 aa, Artificial Sequence
  Synthetic construct
ISAYNGNT

SEQ ID NO: 14353 - protein, 8 aa, Artificial Sequence
  Synthetic construct
ISIVGSNK

SEQ ID NO: 14354 - protein, 8 aa, Artificial Sequence
  Synthetic construct
IDPTDSYT

SEQ ID NO: 14355 - protein, 8 aa, Artificial Sequence
  Synthetic construct
IYPGDSDT

SEQ ID NO: 14356 - protein, 7 aa, Artificial Sequence
  Synthetic construct
ISHDGNI

SEQ ID NO: 14357 - protein, 8 aa, Artificial Sequence
  Synthetic construct
ISAYNGNT

SEQ ID NO: 14358 - protein, 8 aa, Artificial Sequence
  Synthetic construct
ITADSTYK

SEQ ID NO: 14359 - protein, 8 aa, Artificial Sequence
  Synthetic construct
IWYDGSNK

SEQ ID NO: 14360 - protein, 8 aa, Artificial Sequence
  Synthetic construct
ISYDGSNK

SEQ ID NO: 14361 - protein, 8 aa, Artificial Sequence
  Synthetic construct
ISAYNGNT

SEQ ID NO: 14362 - protein, 8 aa, Artificial Sequence
  Synthetic construct
ISSSSSTI

SEQ ID NO: 14363 - protein, 8 aa, Artificial Sequence
  Synthetic construct
ISYDGSNK

SEQ ID NO: 14364 - protein, 7 aa, Artificial Sequence
  Synthetic construct
INHSGST

SEQ ID NO: 14365 - protein, 7 aa, Artificial Sequence
  Synthetic construct
INHSGST

SEQ ID NO: 14366 - protein, 8 aa, Artificial Sequence
  Synthetic construct
ISGRGGST

SEQ ID NO: 14367 - protein, 8 aa, Artificial Sequence
  Synthetic construct
INSRSSTI

SEQ ID NO: 14368 - protein, 7 aa, Artificial Sequence
  Synthetic construct
IYHSGST

SEQ ID NO: 14369 - protein, 7 aa, Artificial Sequence
  Synthetic construct
IFHSGNP

SEQ ID NO: 14370 - protein, 8 aa, Artificial Sequence
  Synthetic construct
IWYDGSNK

SEQ ID NO: 14371 - protein, 8 aa, Artificial Sequence
  Synthetic construct
VGSDGGST

SEQ ID NO: 14372 - protein, 8 aa, Artificial Sequence
  Synthetic construct
ISNSGGSI

SEQ ID NO: 14373 - protein, 10 aa, Artificial Sequence
  Synthetic construct
IKSIVHGGTT

SEQ ID NO: 14374 - protein, 8 aa, Artificial Sequence
  Synthetic construct
ISSRSTFT

SEQ ID NO: 14375 - protein, 10 aa, Artificial Sequence
  Synthetic construct
IKSKTDGGTA

SEQ ID NO: 14376 - protein, 8 aa, Artificial Sequence
  Synthetic construct
ISSSSSYI

SEQ ID NO: 14377 - protein, 8 aa, Artificial Sequence
  Synthetic construct
IDPSDSYT

SEQ ID NO: 14378 - protein, 7 aa, Artificial Sequence
  Synthetic construct
IYSGGST

SEQ ID NO: 14379 - protein, 7 aa, Artificial Sequence
  Synthetic construct
IYYSGST

SEQ ID NO: 14380 - protein, 8 aa, Artificial Sequence
  Synthetic construct
ISYVGSNK

SEQ ID NO: 14381 - protein, 8 aa, Artificial Sequence
  Synthetic construct
ISGSGGST

SEQ ID NO: 14382 - protein, 8 aa, Artificial Sequence
  Synthetic construct
IWYDGSNK

SEQ ID NO: 14383 - protein, 8 aa, Artificial Sequence
  Synthetic construct
ISSNGGVT

SEQ ID NO: 14384 - protein, 8 aa, Artificial Sequence
  Synthetic construct
IYPGDSDT

SEQ ID NO: 14385 - protein, 7 aa, Artificial Sequence
  Synthetic construct
IYSSGTT

SEQ ID NO: 14386 - protein, 8 aa, Artificial Sequence
  Synthetic construct
ISAYNGNT

SEQ ID NO: 14387 - protein, 8 aa, Artificial Sequence
  Synthetic construct
ISGSSGNT

SEQ ID NO: 14388 - protein, 7 aa, Artificial Sequence
  Synthetic construct
IYYSGST

SEQ ID NO: 14389 - protein, 8 aa, Artificial Sequence
  Synthetic construct
INGPGTSA

SEQ ID NO: 14390 - protein, 8 aa, Artificial Sequence
  Synthetic construct
ISGSGGST

SEQ ID NO: 14391 - protein, 8 aa, Artificial Sequence
  Synthetic construct
IKQDGGAK

SEQ ID NO: 14392 - protein, 8 aa, Artificial Sequence
  Synthetic construct
IRHDESEI

SEQ ID NO: 14393 - protein, 10 aa, Artificial Sequence
  Synthetic construct
IRSRRNGGTT

SEQ ID NO: 14394 - protein, 8 aa, Artificial Sequence
  Synthetic construct
IDPSDSYT

SEQ ID NO: 14395 - protein, 8 aa, Artificial Sequence
  Synthetic construct
IDPTDSYT

SEQ ID NO: 14396 - protein, 7 aa, Artificial Sequence
  Synthetic construct
IYHSGST

SEQ ID NO: 14397 - protein, 10 aa, Artificial Sequence
  Synthetic construct
IRSKANSYAT

SEQ ID NO: 14398 - protein, 8 aa, Artificial Sequence
  Synthetic construct
ISYDGSNK

SEQ ID NO: 14399 - protein, 10 aa, Artificial Sequence
  Synthetic construct
IRSKANSYAT

SEQ ID NO: 14400 - protein, 7 aa, Artificial Sequence
  Synthetic construct
ISHLGTT

SEQ ID NO: 14401 - protein, 8 aa, Artificial Sequence
  Synthetic construct
IDPSDSYT

SEQ ID NO: 14402 - protein, 8 aa, Artificial Sequence
  Synthetic construct
IKQDGSEK

SEQ ID NO: 14403 - protein, 8 aa, Artificial Sequence
  Synthetic construct
ISWNSGGT

SEQ ID NO: 14404 - protein, 8 aa, Artificial Sequence
  Synthetic construct
VVPVFGTT

SEQ ID NO: 14405 - protein, 7 aa, Artificial Sequence
  Synthetic construct
IYTSGST

SEQ ID NO: 14406 - protein, 7 aa, Artificial Sequence
  Synthetic construct
IYHSGST

SEQ ID NO: 14407 - protein, 8 aa, Artificial Sequence
  Synthetic construct
IIPILGIS

SEQ ID NO: 14408 - protein, 8 aa, Artificial Sequence
  Synthetic construct
IWYDGTNT

SEQ ID NO: 14409 - protein, 8 aa, Artificial Sequence
  Synthetic construct
ISSSSSYI

SEQ ID NO: 14410 - protein, 8 aa, Artificial Sequence
  Synthetic construct
IKASGGST

SEQ ID NO: 14411 - protein, 8 aa, Artificial Sequence
  Synthetic construct
ISSSSSYI

SEQ ID NO: 14412 - protein, 7 aa, Artificial Sequence
  Synthetic construct
IYYIGTT

SEQ ID NO: 14413 - protein, 7 aa, Artificial Sequence
  Synthetic construct
IYTSGST

SEQ ID NO: 14414 - protein, 8 aa, Artificial Sequence
  Synthetic construct
VNPDDSYS

SEQ ID NO: 14415 - protein, 8 aa, Artificial Sequence
  Synthetic construct
ISYDGSNK

SEQ ID NO: 14416 - protein, 8 aa, Artificial Sequence
  Synthetic construct
IKASGGST

SEQ ID NO: 14417 - protein, 8 aa, Artificial Sequence
  Synthetic construct
ISTYNGKA

SEQ ID NO: 14418 - protein, 8 aa, Artificial Sequence
  Synthetic construct
ISSSSSYI

SEQ ID NO: 14419 - protein, 8 aa, Artificial Sequence
  Synthetic construct
IGLTAHET

SEQ ID NO: 14420 - protein, 8 aa, Artificial Sequence
  Synthetic construct
IWDDGSMQ

SEQ ID NO: 14421 - protein, 8 aa, Artificial Sequence
  Synthetic construct
INPETGDT

SEQ ID NO: 14422 - protein, 8 aa, Artificial Sequence
  Synthetic construct
INPSGGST

SEQ ID NO: 14423 - protein, 8 aa, Artificial Sequence
  Synthetic construct
ISGGGSGT

SEQ ID NO: 14424 - protein, 8 aa, Artificial Sequence
  Synthetic construct
ISAYNGNT

SEQ ID NO: 14425 - protein, 8 aa, Artificial Sequence
  Synthetic construct
INSDGSST

SEQ ID NO: 14426 - protein, 8 aa, Artificial Sequence
  Synthetic construct
IDPNTGKP

SEQ ID NO: 14427 - protein, 8 aa, Artificial Sequence
  Synthetic construct
VDPKDDRT

SEQ ID NO: 14428 - protein, 8 aa, Artificial Sequence
  Synthetic construct
LSHDGSKT

SEQ ID NO: 14429 - protein, 8 aa, Artificial Sequence
  Synthetic construct
LSGSGRGT

SEQ ID NO: 14430 - protein, 7 aa, Artificial Sequence
  Synthetic construct
INHSGST

SEQ ID NO: 14431 - protein, 7 aa, Artificial Sequence
  Synthetic construct
IYYSGST

SEQ ID NO: 14432 - protein, 8 aa, Artificial Sequence
  Synthetic construct
IKQDGSEK

SEQ ID NO: 14433 - protein, 8 aa, Artificial Sequence
  Synthetic construct
ISSSSSYI

SEQ ID NO: 14434 - protein, 8 aa, Artificial Sequence
  Synthetic construct
IKQDGSEK

SEQ ID NO: 14435 - protein, 7 aa, Artificial Sequence
  Synthetic construct
IYYSGST

SEQ ID NO: 14436 - protein, 7 aa, Artificial Sequence
  Synthetic construct
IYTSGST

SEQ ID NO: 14437 - protein, 8 aa, Artificial Sequence
  Synthetic construct
ISSSSSTI

SEQ ID NO: 14438 - protein, 10 aa, Artificial Sequence
  Synthetic construct
IKSKTDGGTT

SEQ ID NO: 14439 - protein, 8 aa, Artificial Sequence
  Synthetic construct
IKPSDGST

SEQ ID NO: 14440 - protein, 8 aa, Artificial Sequence
  Synthetic construct
IDPSGGST

SEQ ID NO: 14441 - protein, 8 aa, Artificial Sequence
  Synthetic construct
ISAYNGNT

SEQ ID NO: 14442 - protein, 7 aa, Artificial Sequence
  Synthetic construct
IYHNGRT

SEQ ID NO: 14443 - protein, 8 aa, Artificial Sequence
  Synthetic construct
INSDSNII

SEQ ID NO: 14444 - protein, 8 aa, Artificial Sequence
  Synthetic construct
IWYDGSNK

SEQ ID NO: 14445 - protein, 8 aa, Artificial Sequence
  Synthetic construct
INPSGGSA

SEQ ID NO: 14446 - protein, 8 aa, Artificial Sequence
  Synthetic construct
IWYDGSNK

SEQ ID NO: 14447 - protein, 8 aa, Artificial Sequence
  Synthetic construct
ISSSGSYI

SEQ ID NO: 14448 - protein, 7 aa, Artificial Sequence
  Synthetic construct
IYHSGST

SEQ ID NO: 14449 - protein, 8 aa, Artificial Sequence
  Synthetic construct
IDPSDSYT

SEQ ID NO: 14450 - protein, 8 aa, Artificial Sequence
  Synthetic construct
ISGYNGET

SEQ ID NO: 14451 - protein, 8 aa, Artificial Sequence
  Synthetic construct
INPNSGGT

SEQ ID NO: 14452 - protein, 8 aa, Artificial Sequence
  Synthetic construct
ASSYSDNT

SEQ ID NO: 14453 - protein, 8 aa, Artificial Sequence
  Synthetic construct
VDPDDGET

SEQ ID NO: 14454 - protein, 7 aa, Artificial Sequence
  Synthetic construct
IYWDDGK

SEQ ID NO: 14455 - protein, 10 aa, Artificial Sequence
  Synthetic construct
IKTKADGGTT

SEQ ID NO: 14456 - protein, 8 aa, Artificial Sequence
  Synthetic construct
IYPDDSDA

SEQ ID NO: 14457 - protein, 8 aa, Artificial Sequence
  Synthetic construct
VGFDGSKE

SEQ ID NO: 14458 - protein, 8 aa, Artificial Sequence
  Synthetic construct
VGFDGSKE

SEQ ID NO: 14459 - protein, 8 aa, Artificial Sequence
  Synthetic construct
LWYDGSNK

SEQ ID NO: 14460 - protein, 8 aa, Artificial Sequence
  Synthetic construct
ISSNGGST

SEQ ID NO: 14461 - protein, 8 aa, Artificial Sequence
  Synthetic construct
ISGSGGST

SEQ ID NO: 14462 - protein, 8 aa, Artificial Sequence
  Synthetic construct
ISSSSSYI

SEQ ID NO: 14463 - protein, 8 aa, Artificial Sequence
  Synthetic construct
ISSSSSYI

SEQ ID NO: 14464 - protein, 8 aa, Artificial Sequence
  Synthetic construct
INFGDSDI

SEQ ID NO: 14465 - protein, 7 aa, Artificial Sequence
  Synthetic construct
IDSSGTT

SEQ ID NO: 14466 - protein, 7 aa, Artificial Sequence
  Synthetic construct
IFHSGNP

SEQ ID NO: 14467 - protein, 8 aa, Artificial Sequence
  Synthetic construct
INIDGSRT

SEQ ID NO: 14468 - protein, 8 aa, Artificial Sequence
  Synthetic construct
INSDGSST

SEQ ID NO: 14469 - protein, 8 aa, Artificial Sequence
  Synthetic construct
ISKDATQK

SEQ ID NO: 14470 - protein, 8 aa, Artificial Sequence
  Synthetic construct
INPSVGST

SEQ ID NO: 14471 - protein, 8 aa, Artificial Sequence
  Synthetic construct
IYFDDSDT

SEQ ID NO: 14472 - protein, 8 aa, Artificial Sequence
  Synthetic construct
MNSDGSAK

SEQ ID NO: 14473 - protein, 7 aa, Artificial Sequence
  Synthetic construct
IYHSGTT

SEQ ID NO: 14474 - protein, 8 aa, Artificial Sequence
  Synthetic construct
INPNSGDT

SEQ ID NO: 14475 - protein, 8 aa, Artificial Sequence
  Synthetic construct
ISSRTNYI

SEQ ID NO: 14476 - protein, 8 aa, Artificial Sequence
  Synthetic construct
ISGRGDRI

SEQ ID NO: 14477 - protein, 5 aa, Artificial Sequence
  Synthetic construct
HRGAT

SEQ ID NO: 14478 - protein, 8 aa, Artificial Sequence
  Synthetic construct
ISGSGGST

SEQ ID NO: 14479 - protein, 7 aa, Artificial Sequence
  Synthetic construct
IYHSGST

SEQ ID NO: 14480 - protein, 7 aa, Artificial Sequence
  Synthetic construct
IYSSGSA

SEQ ID NO: 14481 - protein, 7 aa, Artificial Sequence
  Synthetic construct
IFHTGST

SEQ ID NO: 14482 - protein, 8 aa, Artificial Sequence
  Synthetic construct
IRRDSTRK

SEQ ID NO: 14483 - protein, 8 aa, Artificial Sequence
  Synthetic construct
IDPTDSYT

SEQ ID NO: 14484 - protein, 8 aa, Artificial Sequence
  Synthetic construct
INSDGSST

SEQ ID NO: 14485 - protein, 7 aa, Artificial Sequence
  Synthetic construct
IYYNGNT

SEQ ID NO: 14486 - protein, 7 aa, Artificial Sequence
  Synthetic construct
LYGSGTV

SEQ ID NO: 14487 - protein, 7 aa, Artificial Sequence
  Synthetic construct
IYYSGST

SEQ ID NO: 14488 - protein, 8 aa, Artificial Sequence
  Synthetic construct
IKNDGSRA

SEQ ID NO: 14489 - protein, 8 aa, Artificial Sequence
  Synthetic construct
IWYDGSNK

SEQ ID NO: 14490 - protein, 7 aa, Artificial Sequence
  Synthetic construct
MYSSGST

SEQ ID NO: 14491 - protein, 7 aa, Artificial Sequence
  Synthetic construct
VYYSGST

SEQ ID NO: 14492 - protein, 8 aa, Artificial Sequence
  Synthetic construct
INPSGGST

SEQ ID NO: 14493 - protein, 8 aa, Artificial Sequence
  Synthetic construct
INPNSGGT

SEQ ID NO: 14494 - protein, 7 aa, Artificial Sequence
  Synthetic construct
IYYSGGI

SEQ ID NO: 14495 - protein, 8 aa, Artificial Sequence
  Synthetic construct
ISSSSSTI

SEQ ID NO: 14496 - protein, 10 aa, Artificial Sequence
  Synthetic construct
IKSNAYGGTA

SEQ ID NO: 14497 - protein, 7 aa, Artificial Sequence
  Synthetic construct
VSTAGTI

SEQ ID NO: 14498 - protein, 7 aa, Artificial Sequence
  Synthetic construct
IFHSGNA

SEQ ID NO: 14499 - protein, 7 aa, Artificial Sequence
  Synthetic construct
INQRGAT

SEQ ID NO: 14500 - protein, 8 aa, Artificial Sequence
  Synthetic construct
IDPSDSYT

SEQ ID NO: 14501 - protein, 8 aa, Artificial Sequence
  Synthetic construct
ISGDSRHI

SEQ ID NO: 14502 - protein, 8 aa, Artificial Sequence
  Synthetic construct
ISRSSSYI

SEQ ID NO: 14503 - protein, 7 aa, Artificial Sequence
  Synthetic construct
IFSGGFT

SEQ ID NO: 14504 - protein, 7 aa, Artificial Sequence
  Synthetic construct
IYRTGGP

SEQ ID NO: 14505 - protein, 8 aa, Artificial Sequence
  Synthetic construct
ISYDGSNK

SEQ ID NO: 14506 - protein, 8 aa, Artificial Sequence
  Synthetic construct
INTDTGHP

SEQ ID NO: 14507 - protein, 8 aa, Artificial Sequence
  Synthetic construct
ISGSGGST

SEQ ID NO: 14508 - protein, 7 aa, Artificial Sequence
  Synthetic construct
INHSGST

SEQ ID NO: 14509 - protein, 7 aa, Artificial Sequence
  Synthetic construct
IYSGGST

SEQ ID NO: 14510 - protein, 8 aa, Artificial Sequence
  Synthetic construct
ISGSGGST

SEQ ID NO: 14511 - protein, 8 aa, Artificial Sequence
  Synthetic construct
IWYDGSNK

SEQ ID NO: 14512 - protein, 7 aa, Artificial Sequence
  Synthetic construct
IFSNDEK

SEQ ID NO: 14513 - protein, 7 aa, Artificial Sequence
  Synthetic construct
IYWDDDK

SEQ ID NO: 14514 - protein, 8 aa, Artificial Sequence
  Synthetic construct
ITWNGGST

SEQ ID NO: 14515 - protein, 8 aa, Artificial Sequence
  Synthetic construct
IQYDGSDE

SEQ ID NO: 14516 - protein, 8 aa, Artificial Sequence
  Synthetic construct
IDPTDSYT

SEQ ID NO: 14517 - protein, 8 aa, Artificial Sequence
  Synthetic construct
ISGSGGST

SEQ ID NO: 14518 - protein, 8 aa, Artificial Sequence
  Synthetic construct
ISSSGSSI

SEQ ID NO: 14519 - protein, 8 aa, Artificial Sequence
  Synthetic construct
ISYDGSNK

SEQ ID NO: 14520 - protein, 8 aa, Artificial Sequence
  Synthetic construct
IIPMFGTA

SEQ ID NO: 14521 - protein, 8 aa, Artificial Sequence
  Synthetic construct
IWYDGSNK

SEQ ID NO: 14522 - protein, 10 aa, Artificial Sequence
  Synthetic construct
IRSKAYGGTT

SEQ ID NO: 14523 - protein, 8 aa, Artificial Sequence
  Synthetic construct
IKKDGSET

SEQ ID NO: 14524 - protein, 8 aa, Artificial Sequence
  Synthetic construct
ISSSSSYI

SEQ ID NO: 14525 - protein, 8 aa, Artificial Sequence
  Synthetic construct
ISRSGSDI

SEQ ID NO: 14526 - protein, 8 aa, Artificial Sequence
  Synthetic construct
IRESGDNI

SEQ ID NO: 14527 - protein, 8 aa, Artificial Sequence
  Synthetic construct
ISNSGSAT

SEQ ID NO: 14528 - protein, 7 aa, Artificial Sequence
  Synthetic construct
IYYSGST

SEQ ID NO: 14529 - protein, 7 aa, Artificial Sequence
  Synthetic construct
IGAGGDT

SEQ ID NO: 14530 - protein, 8 aa, Artificial Sequence
  Synthetic construct
IDPSDSYT

SEQ ID NO: 14531 - protein, 7 aa, Artificial Sequence
  Synthetic construct
IYYSGST

SEQ ID NO: 14532 - protein, 8 aa, Artificial Sequence
  Synthetic construct
ISSYGDNP

SEQ ID NO: 14533 - protein, 8 aa, Artificial Sequence
  Synthetic construct
IIPVSATT

SEQ ID NO: 14534 - protein, 8 aa, Artificial Sequence
  Synthetic construct
LNPNGGYT

SEQ ID NO: 14535 - protein, 10 aa, Artificial Sequence
  Synthetic construct
IKSKTDGGTT

SEQ ID NO: 14536 - protein, 8 aa, Artificial Sequence
  Synthetic construct
ISSSSSYI

SEQ ID NO: 14537 - protein, 7 aa, Artificial Sequence
  Synthetic construct
IYYSGST

SEQ ID NO: 14538 - protein, 8 aa, Artificial Sequence
  Synthetic construct
ISGSGGST

SEQ ID NO: 14539 - protein, 8 aa, Artificial Sequence
  Synthetic construct
INPNSGGT

SEQ ID NO: 14540 - protein, 10 aa, Artificial Sequence
  Synthetic construct
IRSKANSYAT

SEQ ID NO: 14541 - protein, 8 aa, Artificial Sequence
  Synthetic construct
IDPTDSYT

SEQ ID NO: 14542 - protein, 8 aa, Artificial Sequence
  Synthetic construct
VWYDGSNE

SEQ ID NO: 14543 - protein, 8 aa, Artificial Sequence
  Synthetic construct
INPNSGGT

SEQ ID NO: 14544 - protein, 8 aa, Artificial Sequence
  Synthetic construct
IGDSGSET

SEQ ID NO: 14545 - protein, 8 aa, Artificial Sequence
  Synthetic construct
IWNDGSNK

SEQ ID NO: 14546 - protein, 7 aa, Artificial Sequence
  Synthetic construct
LYNRVGT

SEQ ID NO: 14547 - protein, 7 aa, Artificial Sequence
  Synthetic construct
IYYSGST

SEQ ID NO: 14548 - protein, 8 aa, Artificial Sequence
  Synthetic construct
INSDGSST

SEQ ID NO: 14549 - protein, 8 aa, Artificial Sequence
  Synthetic construct
IIPILGIV

SEQ ID NO: 14550 - protein, 8 aa, Artificial Sequence
  Synthetic construct
ISTYNGKA

SEQ ID NO: 14551 - protein, 8 aa, Artificial Sequence
  Synthetic construct
MNPNSGNT

SEQ ID NO: 14552 - protein, 8 aa, Artificial Sequence
  Synthetic construct
ITTTGTTI

SEQ ID NO: 14553 - protein, 8 aa, Artificial Sequence
  Synthetic construct
INDDGTST

SEQ ID NO: 14554 - protein, 8 aa, Artificial Sequence
  Synthetic construct
INPSGGST

SEQ ID NO: 14555 - protein, 7 aa, Artificial Sequence
  Synthetic construct
IYYSGST

SEQ ID NO: 14556 - protein, 8 aa, Artificial Sequence
  Synthetic construct
ISSSSSTI

SEQ ID NO: 14557 - protein, 8 aa, Artificial Sequence
  Synthetic construct
ISSDGTNK

SEQ ID NO: 14558 - protein, 7 aa, Artificial Sequence
  Synthetic construct
IYYSGNT

SEQ ID NO: 14559 - protein, 8 aa, Artificial Sequence
  Synthetic construct
ISGSGGST

SEQ ID NO: 14560 - protein, 8 aa, Artificial Sequence
  Synthetic construct
IWYDGSNK

SEQ ID NO: 14561 - protein, 8 aa, Artificial Sequence
  Synthetic construct
INPNNIVT

SEQ ID NO: 14562 - protein, 8 aa, Artificial Sequence
  Synthetic construct
IDPTDSYT

SEQ ID NO: 14563 - protein, 8 aa, Artificial Sequence
  Synthetic construct
ISYDEVNK

SEQ ID NO: 14564 - protein, 8 aa, Artificial Sequence
  Synthetic construct
ITGKSDYR

SEQ ID NO: 14565 - protein, 8 aa, Artificial Sequence
  Synthetic construct
ISGRDENT

SEQ ID NO: 14566 - protein, 8 aa, Artificial Sequence
  Synthetic construct
VSNTGDST

SEQ ID NO: 14567 - protein, 8 aa, Artificial Sequence
  Synthetic construct
INAGNGNT

SEQ ID NO: 14568 - protein, 8 aa, Artificial Sequence
  Synthetic construct
INPSGGST

SEQ ID NO: 14569 - protein, 8 aa, Artificial Sequence
  Synthetic construct
INPSGGST

SEQ ID NO: 14570 - protein, 8 aa, Artificial Sequence
  Synthetic construct
IKQDGSEK

SEQ ID NO: 14571 - protein, 10 aa, Artificial Sequence
  Synthetic construct
IRSKAYGGTT

SEQ ID NO: 14572 - protein, 10 aa, Artificial Sequence
  Synthetic construct
IRSKAYGGTT

SEQ ID NO: 14573 - protein, 8 aa, Artificial Sequence
  Synthetic construct
INSDGSST

SEQ ID NO: 14574 - protein, 8 aa, Artificial Sequence
  Synthetic construct
FIPMLDMT

SEQ ID NO: 14575 - protein, 7 aa, Artificial Sequence
  Synthetic construct
IYHSGST

SEQ ID NO: 14576 - protein, 8 aa, Artificial Sequence
  Synthetic construct
ISYDGSNK

SEQ ID NO: 14577 - protein, 8 aa, Artificial Sequence
  Synthetic construct
IWYDGSNK

SEQ ID NO: 14578 - protein, 8 aa, Artificial Sequence
  Synthetic construct
ISSSSSYI

SEQ ID NO: 14579 - protein, 8 aa, Artificial Sequence
  Synthetic construct
ISSSSSYI

SEQ ID NO: 14580 - protein, 8 aa, Artificial Sequence
  Synthetic construct
ISFEGDTK

SEQ ID NO: 14581 - protein, 8 aa, Artificial Sequence
  Synthetic construct
INWNSGSI

SEQ ID NO: 14582 - protein, 8 aa, Artificial Sequence
  Synthetic construct
IKQDGSEK

SEQ ID NO: 14583 - protein, 8 aa, Artificial Sequence
  Synthetic construct
IIPIFDTT

SEQ ID NO: 14584 - protein, 10 aa, Artificial Sequence
  Synthetic construct
IRSKANSYAT

SEQ ID NO: 14585 - protein, 8 aa, Artificial Sequence
  Synthetic construct
VSISSTYI

SEQ ID NO: 14586 - protein, 7 aa, Artificial Sequence
  Synthetic construct
IYHSGTT

SEQ ID NO: 14587 - protein, 7 aa, Artificial Sequence
  Synthetic construct
IYHSGTT

SEQ ID NO: 14588 - protein, 7 aa, Artificial Sequence
  Synthetic construct
INHSGDT

SEQ ID NO: 14589 - protein, 8 aa, Artificial Sequence
  Synthetic construct
ISGSGTPT

SEQ ID NO: 14590 - protein, 7 aa, Artificial Sequence
  Synthetic construct
LHSGGGS

SEQ ID NO: 14591 - protein, 8 aa, Artificial Sequence
  Synthetic construct
INSVSDKA

SEQ ID NO: 14592 - protein, 8 aa, Artificial Sequence
  Synthetic construct
IDPTDSYT

SEQ ID NO: 14593 - protein, 10 aa, Artificial Sequence
  Synthetic construct
IKSKTDGGTT

SEQ ID NO: 14594 - protein, 7 aa, Artificial Sequence
  Synthetic construct
IYPSGPT

SEQ ID NO: 14595 - protein, 8 aa, Artificial Sequence
  Synthetic construct
INSDGNRT

SEQ ID NO: 14596 - protein, 7 aa, Artificial Sequence
  Synthetic construct
IYYSGST

SEQ ID NO: 14597 - protein, 8 aa, Artificial Sequence
  Synthetic construct
IWYDGSNK

SEQ ID NO: 14598 - protein, 8 aa, Artificial Sequence
  Synthetic construct
ISSSSSYI

SEQ ID NO: 14599 - protein, 8 aa, Artificial Sequence
  Synthetic construct
INPSDGAT

SEQ ID NO: 14600 - protein, 10 aa, Artificial Sequence
  Synthetic construct
IRSKVYGGTT

SEQ ID NO: 14601 - protein, 8 aa, Artificial Sequence
  Synthetic construct
INAGNGNT

SEQ ID NO: 14602 - protein, 8 aa, Artificial Sequence
  Synthetic construct
INTNTEIP

SEQ ID NO: 14603 - protein, 8 aa, Artificial Sequence
  Synthetic construct
IDPTDSYT

SEQ ID NO: 14604 - protein, 8 aa, Artificial Sequence
  Synthetic construct
IWYDGSNK

SEQ ID NO: 14605 - protein, 7 aa, Artificial Sequence
  Synthetic construct
IYYSGST

SEQ ID NO: 14606 - protein, 7 aa, Artificial Sequence
  Synthetic construct
IYYSGST

SEQ ID NO: 14607 - protein, 8 aa, Artificial Sequence
  Synthetic construct
ISSSSSYI

SEQ ID NO: 14608 - protein, 8 aa, Artificial Sequence
  Synthetic construct
ISNSGTYT

SEQ ID NO: 14609 - protein, 8 aa, Artificial Sequence
  Synthetic construct
INAGNGNT

SEQ ID NO: 14610 - protein, 8 aa, Artificial Sequence
  Synthetic construct
ISYDGSNK

SEQ ID NO: 14611 - protein, 8 aa, Artificial Sequence
  Synthetic construct
IIPFLDIT

SEQ ID NO: 14612 - protein, 7 aa, Artificial Sequence
  Synthetic construct
IYWDDDK

SEQ ID NO: 14613 - protein, 8 aa, Artificial Sequence
  Synthetic construct
IKQDGSEQ

SEQ ID NO: 14614 - protein, 8 aa, Artificial Sequence
  Synthetic construct
ISYDGSNK

SEQ ID NO: 14615 - protein, 8 aa, Artificial Sequence
  Synthetic construct
ISGSGGST

SEQ ID NO: 14616 - protein, 7 aa, Artificial Sequence
  Synthetic construct
IYTSGST

SEQ ID NO: 14617 - protein, 8 aa, Artificial Sequence
  Synthetic construct
ISGSGGST

SEQ ID NO: 14618 - protein, 7 aa, Artificial Sequence
  Synthetic construct
IYHSGST

SEQ ID NO: 14619 - protein, 7 aa, Artificial Sequence
  Synthetic construct
IYWDDDK

SEQ ID NO: 14620 - protein, 8 aa, Artificial Sequence
  Synthetic construct
ISNSGGNT

SEQ ID NO: 14621 - protein, 7 aa, Artificial Sequence
  Synthetic construct
IYYSGST

SEQ ID NO: 14622 - protein, 7 aa, Artificial Sequence
  Synthetic construct
SYHSGRP

SEQ ID NO: 14623 - protein, 8 aa, Artificial Sequence
  Synthetic construct
ISGSGGST

SEQ ID NO: 14624 - protein, 8 aa, Artificial Sequence
  Synthetic construct
ISWNSGAL

SEQ ID NO: 14625 - protein, 7 aa, Artificial Sequence
  Synthetic construct
IFYSGNT

SEQ ID NO: 14626 - protein, 7 aa, Artificial Sequence
  Synthetic construct
IYLAGST

SEQ ID NO: 14627 - protein, 7 aa, Artificial Sequence
  Synthetic construct
IYTSGST

SEQ ID NO: 14628 - protein, 7 aa, Artificial Sequence
  Synthetic construct
ISHNGAT

SEQ ID NO: 14629 - protein, 7 aa, Artificial Sequence
  Synthetic construct
IYYSGTT

SEQ ID NO: 14630 - protein, 8 aa, Artificial Sequence
  Synthetic construct
ISSSSSYI

SEQ ID NO: 14631 - protein, 8 aa, Artificial Sequence
  Synthetic construct
ISAYNGNT

SEQ ID NO: 14632 - protein, 7 aa, Artificial Sequence
  Synthetic construct
IIHSGIT

SEQ ID NO: 14633 - protein, 7 aa, Artificial Sequence
  Synthetic construct
IYYSGST

SEQ ID NO: 14634 - protein, 7 aa, Artificial Sequence
  Synthetic construct
IGAGGDT

SEQ ID NO: 14635 - protein, 8 aa, Artificial Sequence
  Synthetic construct
IKQDGSEK

SEQ ID NO: 14636 - protein, 8 aa, Artificial Sequence
  Synthetic construct
ISSSSSYI

SEQ ID NO: 14637 - protein, 7 aa, Artificial Sequence
  Synthetic construct
IYYSGST

SEQ ID NO: 14638 - protein, 8 aa, Artificial Sequence
  Synthetic construct
INAGNGNT

SEQ ID NO: 14639 - protein, 10 aa, Artificial Sequence
  Synthetic construct
IRNKPYGGAA

SEQ ID NO: 14640 - protein, 7 aa, Artificial Sequence
  Synthetic construct
ISYSGRT

SEQ ID NO: 14641 - protein, 8 aa, Artificial Sequence
  Synthetic construct
INPNSGGT

SEQ ID NO: 14642 - protein, 7 aa, Artificial Sequence
  Synthetic construct
IGPAGDT

SEQ ID NO: 14643 - protein, 8 aa, Artificial Sequence
  Synthetic construct
INPNSGGT

SEQ ID NO: 14644 - protein, 8 aa, Artificial Sequence
  Synthetic construct
ISSNGGTT

SEQ ID NO: 14645 - protein, 8 aa, Artificial Sequence
  Synthetic construct
INPGDGST

SEQ ID NO: 14646 - protein, 7 aa, Artificial Sequence
  Synthetic construct
MSHSGTI

SEQ ID NO: 14647 - protein, 8 aa, Artificial Sequence
  Synthetic construct
INASGGST

SEQ ID NO: 14648 - protein, 7 aa, Artificial Sequence
  Synthetic construct
IHHSGST

SEQ ID NO: 14649 - protein, 7 aa, Artificial Sequence
  Synthetic construct
MYSGSNT

SEQ ID NO: 14650 - protein, 8 aa, Artificial Sequence
  Synthetic construct
ISYDGSNK

SEQ ID NO: 14651 - protein, 8 aa, Artificial Sequence
  Synthetic construct
INSDGSST

SEQ ID NO: 14652 - protein, 8 aa, Artificial Sequence
  Synthetic construct
ISGSNGIT

SEQ ID NO: 14653 - protein, 8 aa, Artificial Sequence
  Synthetic construct
ISGYNGNT

SEQ ID NO: 14654 - protein, 7 aa, Artificial Sequence
  Synthetic construct
IYWDDDK

SEQ ID NO: 14655 - protein, 7 aa, Artificial Sequence
  Synthetic construct
IYWDDDK

SEQ ID NO: 14656 - protein, 8 aa, Artificial Sequence
  Synthetic construct
ISGRDENT

SEQ ID NO: 14657 - protein, 7 aa, Artificial Sequence
  Synthetic construct
IGSGGDT

SEQ ID NO: 14658 - protein, 7 aa, Artificial Sequence
  Synthetic construct
INPTGAT

SEQ ID NO: 14659 - protein, 8 aa, Artificial Sequence
  Synthetic construct
VDPEDGET

SEQ ID NO: 14660 - protein, 8 aa, Artificial Sequence
  Synthetic construct
MNPNSGDT

SEQ ID NO: 14661 - protein, 7 aa, Artificial Sequence
  Synthetic construct
IYYSGST

SEQ ID NO: 14662 - protein, 8 aa, Artificial Sequence
  Synthetic construct
ISSTGDNT

SEQ ID NO: 14663 - protein, 7 aa, Artificial Sequence
  Synthetic construct
IYYSGST

SEQ ID NO: 14664 - protein, 8 aa, Artificial Sequence
  Synthetic construct
INPSGGST

SEQ ID NO: 14665 - protein, 8 aa, Artificial Sequence
  Synthetic construct
ISSSSSYI

SEQ ID NO: 14666 - protein, 8 aa, Artificial Sequence
  Synthetic construct
ISYDGSNK

SEQ ID NO: 14667 - protein, 7 aa, Artificial Sequence
  Synthetic construct
INHSGST

SEQ ID NO: 14668 - protein, 7 aa, Artificial Sequence
  Synthetic construct
INHSGKT

SEQ ID NO: 14669 - protein, 7 aa, Artificial Sequence
  Synthetic construct
IYTSGST

SEQ ID NO: 14670 - protein, 7 aa, Artificial Sequence
  Synthetic construct
IYYSGST

SEQ ID NO: 14671 - protein, 8 aa, Artificial Sequence
  Synthetic construct
ISHDGNNM

SEQ ID NO: 14672 - protein, 8 aa, Artificial Sequence
  Synthetic construct
INPNSGGT

SEQ ID NO: 14673 - protein, 7 aa, Artificial Sequence
  Synthetic construct
IYTSGST

SEQ ID NO: 14674 - protein, 7 aa, Artificial Sequence
  Synthetic construct
IYYSGST

SEQ ID NO: 14675 - protein, 7 aa, Artificial Sequence
  Synthetic construct
IYYSGST

SEQ ID NO: 14676 - protein, 9 aa, Artificial Sequence
  Synthetic construct
TYFRSKWYN

SEQ ID NO: 14677 - protein, 7 aa, Artificial Sequence
  Synthetic construct
IYHSGST

SEQ ID NO: 14678 - protein, 7 aa, Artificial Sequence
  Synthetic construct
IYTSGTT

SEQ ID NO: 14679 - protein, 8 aa, Artificial Sequence
  Synthetic construct
IWHDGSFK

SEQ ID NO: 14680 - protein, 8 aa, Artificial Sequence
  Synthetic construct
INPRGGST

SEQ ID NO: 14681 - protein, 8 aa, Artificial Sequence
  Synthetic construct
ISGSGGST

SEQ ID NO: 14682 - protein, 10 aa, Artificial Sequence
  Synthetic construct
IKSKTDGGTT

SEQ ID NO: 14683 - protein, 8 aa, Artificial Sequence
  Synthetic construct
ISPILGMT

SEQ ID NO: 14684 - protein, 8 aa, Artificial Sequence
  Synthetic construct
ISYDGSNK

SEQ ID NO: 14685 - protein, 7 aa, Artificial Sequence
  Synthetic construct
IYSGGST

SEQ ID NO: 14686 - protein, 7 aa, Artificial Sequence
  Synthetic construct
IYSDGST

SEQ ID NO: 14687 - protein, 7 aa, Artificial Sequence
  Synthetic construct
IHHSGST

SEQ ID NO: 14688 - protein, 7 aa, Artificial Sequence
  Synthetic construct
IYYSGST

SEQ ID NO: 14689 - protein, 8 aa, Artificial Sequence
  Synthetic construct
ISGSGGST

SEQ ID NO: 14690 - protein, 7 aa, Artificial Sequence
  Synthetic construct
VYHGGST

SEQ ID NO: 14691 - protein, 7 aa, Artificial Sequence
  Synthetic construct
IDWDDDK

SEQ ID NO: 14692 - protein, 8 aa, Artificial Sequence
  Synthetic construct
INPGNGGT

SEQ ID NO: 14693 - protein, 8 aa, Artificial Sequence
  Synthetic construct
ISGSGGST

SEQ ID NO: 14694 - protein, 7 aa, Artificial Sequence
  Synthetic construct
IHHSGST

SEQ ID NO: 14695 - protein, 8 aa, Artificial Sequence
  Synthetic construct
VSNSGTYT

SEQ ID NO: 14696 - protein, 8 aa, Artificial Sequence
  Synthetic construct
ISDDGGNK

SEQ ID NO: 14697 - protein, 7 aa, Artificial Sequence
  Synthetic construct
IYTSGST

SEQ ID NO: 14698 - protein, 8 aa, Artificial Sequence
  Synthetic construct
IKQDGSEK

SEQ ID NO: 14699 - protein, 8 aa, Artificial Sequence
  Synthetic construct
ISSSSSYI

SEQ ID NO: 14700 - protein, 8 aa, Artificial Sequence
  Synthetic construct
ITDDGKNE

SEQ ID NO: 14701 - protein, 8 aa, Artificial Sequence
  Synthetic construct
IIPIFGTA

SEQ ID NO: 14702 - protein, 8 aa, Artificial Sequence
  Synthetic construct
ISYDGSNK

SEQ ID NO: 14703 - protein, 7 aa, Artificial Sequence
  Synthetic construct
NYWDDDK

SEQ ID NO: 14704 - protein, 8 aa, Artificial Sequence
  Synthetic construct
INIDGSRT

SEQ ID NO: 14705 - protein, 10 aa, Artificial Sequence
  Synthetic construct
IRSKTNDYAT

SEQ ID NO: 14706 - protein, 7 aa, Artificial Sequence
  Synthetic construct
IYWDDDK

SEQ ID NO: 14707 - protein, 8 aa, Artificial Sequence
  Synthetic construct
INPSGGST

SEQ ID NO: 14708 - protein, 8 aa, Artificial Sequence
  Synthetic construct
ISGSGGST

SEQ ID NO: 14709 - protein, 7 aa, Artificial Sequence
  Synthetic construct
VYSSGST

SEQ ID NO: 14710 - protein, 7 aa, Artificial Sequence
  Synthetic construct
IYYSGST

SEQ ID NO: 14711 - protein, 8 aa, Artificial Sequence
  Synthetic construct
IKQDGSEK

SEQ ID NO: 14712 - protein, 7 aa, Artificial Sequence
  Synthetic construct
IGPAGDT

SEQ ID NO: 14713 - protein, 7 aa, Artificial Sequence
  Synthetic construct
IYTHGRT

SEQ ID NO: 14714 - protein, 7 aa, Artificial Sequence
  Synthetic construct
IYYSGST

SEQ ID NO: 14715 - protein, 8 aa, Artificial Sequence
  Synthetic construct
VNWNGGST

SEQ ID NO: 14716 - protein, 8 aa, Artificial Sequence
  Synthetic construct
VSGSASYT

SEQ ID NO: 14717 - protein, 8 aa, Artificial Sequence
  Synthetic construct
LSTTTSNT

SEQ ID NO: 14718 - protein, 7 aa, Artificial Sequence
  Synthetic construct
IYYSGST

SEQ ID NO: 14719 - protein, 8 aa, Artificial Sequence
  Synthetic construct
IDPSGGST

SEQ ID NO: 14720 - protein, 8 aa, Artificial Sequence
  Synthetic construct
INTNTGNP

SEQ ID NO: 14721 - protein, 8 aa, Artificial Sequence
  Synthetic construct
ISSSSSYI

SEQ ID NO: 14722 - protein, 8 aa, Artificial Sequence
  Synthetic construct
ISYDGSNK

SEQ ID NO: 14723 - protein, 7 aa, Artificial Sequence
  Synthetic construct
IYYSGST

SEQ ID NO: 14724 - protein, 8 aa, Artificial Sequence
  Synthetic construct
IDPTDSYT

SEQ ID NO: 14725 - protein, 7 aa, Artificial Sequence
  Synthetic construct
IYYIGST

SEQ ID NO: 14726 - protein, 7 aa, Artificial Sequence
  Synthetic construct
TYTSGST

SEQ ID NO: 14727 - protein, 8 aa, Artificial Sequence
  Synthetic construct
IWYDGSNE

SEQ ID NO: 14728 - protein, 7 aa, Artificial Sequence
  Synthetic construct
SFHNGIT

SEQ ID NO: 14729 - protein, 8 aa, Artificial Sequence
  Synthetic construct
IKQDGSEK

SEQ ID NO: 14730 - protein, 8 aa, Artificial Sequence
  Synthetic construct
INPNSGGT

SEQ ID NO: 14731 - protein, 7 aa, Artificial Sequence
  Synthetic construct
IYHSGST

SEQ ID NO: 14732 - protein, 8 aa, Artificial Sequence
  Synthetic construct
ISYDGSNK

SEQ ID NO: 14733 - protein, 7 aa, Artificial Sequence
  Synthetic construct
FYFSGSI

SEQ ID NO: 14734 - protein, 8 aa, Artificial Sequence
  Synthetic construct
ISTRHNVI

SEQ ID NO: 14735 - protein, 8 aa, Artificial Sequence
  Synthetic construct
ISSSSSTI

SEQ ID NO: 14736 - protein, 8 aa, Artificial Sequence
  Synthetic construct
ISSSSSYI

SEQ ID NO: 14737 - protein, 8 aa, Artificial Sequence
  Synthetic construct
ISGDGDSS

SEQ ID NO: 14738 - protein, 8 aa, Artificial Sequence
  Synthetic construct
ISSSSSYI

SEQ ID NO: 14739 - protein, 8 aa, Artificial Sequence
  Synthetic construct
IWHDGDDK

SEQ ID NO: 14740 - protein, 8 aa, Artificial Sequence
  Synthetic construct
ISSSSSYI

SEQ ID NO: 14741 - protein, 8 aa, Artificial Sequence
  Synthetic construct
ISSSSSYI

SEQ ID NO: 14742 - protein, 7 aa, Artificial Sequence
  Synthetic construct
IYSGGNT

SEQ ID NO: 14743 - protein, 10 aa, Artificial Sequence
  Synthetic construct
IKRKLDGGTT

SEQ ID NO: 14744 - protein, 8 aa, Artificial Sequence
  Synthetic construct
ISYDGSNK

SEQ ID NO: 14745 - protein, 7 aa, Artificial Sequence
  Synthetic construct
IGPAGDT

SEQ ID NO: 14746 - protein, 7 aa, Artificial Sequence
  Synthetic construct
IYYTGST

SEQ ID NO: 14747 - protein, 8 aa, Artificial Sequence
  Synthetic construct
IYPGDSDT

SEQ ID NO: 14748 - protein, 8 aa, Artificial Sequence
  Synthetic construct
INPNSGGT

SEQ ID NO: 14749 - protein, 7 aa, Artificial Sequence
  Synthetic construct
IYHSGST

SEQ ID NO: 14750 - protein, 8 aa, Artificial Sequence
  Synthetic construct
ISHDGGYK

SEQ ID NO: 14751 - protein, 7 aa, Artificial Sequence
  Synthetic construct
IYHSGST

SEQ ID NO: 14752 - protein, 7 aa, Artificial Sequence
  Synthetic construct
IYHSGST

SEQ ID NO: 14753 - protein, 8 aa, Artificial Sequence
  Synthetic construct
ISRNSDRV

SEQ ID NO: 14754 - protein, 7 aa, Artificial Sequence
  Synthetic construct
INHSGST

SEQ ID NO: 14755 - protein, 8 aa, Artificial Sequence
  Synthetic construct
INPSGGST

SEQ ID NO: 14756 - protein, 8 aa, Artificial Sequence
  Synthetic construct
IIPILGIA

SEQ ID NO: 14757 - protein, 8 aa, Artificial Sequence
  Synthetic construct
ISDDGNNK

SEQ ID NO: 14758 - protein, 8 aa, Artificial Sequence
  Synthetic construct
ISIGSDTI

SEQ ID NO: 14759 - protein, 8 aa, Artificial Sequence
  Synthetic construct
ISSSSSYI

SEQ ID NO: 14760 - protein, 8 aa, Artificial Sequence
  Synthetic construct
INPNTGNP

SEQ ID NO: 14761 - protein, 8 aa, Artificial Sequence
  Synthetic construct
INPSGGSA

SEQ ID NO: 14762 - protein, 7 aa, Artificial Sequence
  Synthetic construct
FLTPLGS

SEQ ID NO: 14763 - protein, 7 aa, Artificial Sequence
  Synthetic construct
VKHSTTS

SEQ ID NO: 14764 - protein, 8 aa, Artificial Sequence
  Synthetic construct
INPNSGGT

SEQ ID NO: 14765 - protein, 8 aa, Artificial Sequence
  Synthetic construct
ISFDGIRE

SEQ ID NO: 14766 - protein, 8 aa, Artificial Sequence
  Synthetic construct
IYPGDSET

SEQ ID NO: 14767 - protein, 8 aa, Artificial Sequence
  Synthetic construct
LSYDETEK

SEQ ID NO: 14768 - protein, 7 aa, Artificial Sequence
  Synthetic construct
IYYSGTT

SEQ ID NO: 14769 - protein, 8 aa, Artificial Sequence
  Synthetic construct
VSGSSYDT

SEQ ID NO: 14770 - protein, 8 aa, Artificial Sequence
  Synthetic construct
INDDGTST

SEQ ID NO: 14771 - protein, 8 aa, Artificial Sequence
  Synthetic construct
ISTYNGKA

SEQ ID NO: 14772 - protein, 8 aa, Artificial Sequence
  Synthetic construct
ISYDGSNK

SEQ ID NO: 14773 - protein, 8 aa, Artificial Sequence
  Synthetic construct
IWYDGSNK

SEQ ID NO: 14774 - protein, 8 aa, Artificial Sequence
  Synthetic construct
IDPSDSYT

SEQ ID NO: 14775 - protein, 7 aa, Artificial Sequence
  Synthetic construct
IYYSGST

SEQ ID NO: 14776 - protein, 8 aa, Artificial Sequence
  Synthetic construct
ISGSGGST

SEQ ID NO: 14777 - protein, 8 aa, Artificial Sequence
  Synthetic construct
INPNSGGT

SEQ ID NO: 14778 - protein, 8 aa, Artificial Sequence
  Synthetic construct
INPNNGGT

SEQ ID NO: 14779 - protein, 7 aa, Artificial Sequence
  Synthetic construct
IKHNGIT

SEQ ID NO: 14780 - protein, 8 aa, Artificial Sequence
  Synthetic construct
INTGNGDT

SEQ ID NO: 14781 - protein, 8 aa, Artificial Sequence
  Synthetic construct
ISSSGGNI

SEQ ID NO: 14782 - protein, 7 aa, Artificial Sequence
  Synthetic construct
IYHSGST

SEQ ID NO: 14783 - protein, 7 aa, Artificial Sequence
  Synthetic construct
IYYSGST

SEQ ID NO: 14784 - protein, 8 aa, Artificial Sequence
  Synthetic construct
ISSNGDIT

SEQ ID NO: 14785 - protein, 8 aa, Artificial Sequence
  Synthetic construct
ISYDGSNQ

SEQ ID NO: 14786 - protein, 7 aa, Artificial Sequence
  Synthetic construct
SFHNGIT

SEQ ID NO: 14787 - protein, 7 aa, Artificial Sequence
  Synthetic construct
IDWDDDK

SEQ ID NO: 14788 - protein, 8 aa, Artificial Sequence
  Synthetic construct
ISWNSGSI

SEQ ID NO: 14789 - protein, 8 aa, Artificial Sequence
  Synthetic construct
IKPNGGAT

SEQ ID NO: 14790 - protein, 8 aa, Artificial Sequence
  Synthetic construct
ISPMEGIA

SEQ ID NO: 14791 - protein, 8 aa, Artificial Sequence
  Synthetic construct
ISSTSSYI

SEQ ID NO: 14792 - protein, 8 aa, Artificial Sequence
  Synthetic construct
IDPTDSYT

SEQ ID NO: 14793 - protein, 8 aa, Artificial Sequence
  Synthetic construct
IEKDGSEK

SEQ ID NO: 14794 - protein, 8 aa, Artificial Sequence
  Synthetic construct
ISYDGSNK

SEQ ID NO: 14795 - protein, 9 aa, Artificial Sequence
  Synthetic construct
TYYRSKWYN

SEQ ID NO: 14796 - protein, 8 aa, Artificial Sequence
  Synthetic construct
ISSSSSYI

SEQ ID NO: 14797 - protein, 7 aa, Artificial Sequence
  Synthetic construct
IYSGGST

SEQ ID NO: 14798 - protein, 7 aa, Artificial Sequence
  Synthetic construct
IYPSGPT

SEQ ID NO: 14799 - protein, 8 aa, Artificial Sequence
  Synthetic construct
INPETGDS

SEQ ID NO: 14800 - protein, 8 aa, Artificial Sequence
  Synthetic construct
INTNTGAT

SEQ ID NO: 14801 - protein, 7 aa, Artificial Sequence
  Synthetic construct
IYSGGST

SEQ ID NO: 14802 - protein, 8 aa, Artificial Sequence
  Synthetic construct
ISSSGSTI

SEQ ID NO: 14803 - protein, 8 aa, Artificial Sequence
  Synthetic construct
IDPSDSYT

SEQ ID NO: 14804 - protein, 8 aa, Artificial Sequence
  Synthetic construct
IDPEDGER

SEQ ID NO: 14805 - protein, 8 aa, Artificial Sequence
  Synthetic construct
ISTKSGDT

SEQ ID NO: 14806 - protein, 10 aa, Artificial Sequence
  Synthetic construct
LKGKAHGEQK

SEQ ID NO: 14807 - protein, 7 aa, Artificial Sequence
  Synthetic construct
IFWDDDK

SEQ ID NO: 14808 - protein, 8 aa, Artificial Sequence
  Synthetic construct
MNPNSGNT

SEQ ID NO: 14809 - protein, 8 aa, Artificial Sequence
  Synthetic construct
ISDDGSNK

SEQ ID NO: 14810 - protein, 7 aa, Artificial Sequence
  Synthetic construct
IYSGGST

SEQ ID NO: 14811 - protein, 8 aa, Artificial Sequence
  Synthetic construct
IKQDGSEK

SEQ ID NO: 14812 - protein, 8 aa, Artificial Sequence
  Synthetic construct
LSGSGRGT

SEQ ID NO: 14813 - protein, 8 aa, Artificial Sequence
  Synthetic construct
IIPIFGTA

SEQ ID NO: 14814 - protein, 7 aa, Artificial Sequence
  Synthetic construct
IYYSGTT

SEQ ID NO: 14815 - protein, 8 aa, Artificial Sequence
  Synthetic construct
IWYDVKNT

SEQ ID NO: 14816 - protein, 8 aa, Artificial Sequence
  Synthetic construct
IWYDGSNK

SEQ ID NO: 14817 - protein, 7 aa, Artificial Sequence
  Synthetic construct
IYTSGST

SEQ ID NO: 14818 - protein, 10 aa, Artificial Sequence
  Synthetic construct
IRSKKDGGTI

SEQ ID NO: 14819 - protein, 8 aa, Artificial Sequence
  Synthetic construct
INPTGGRT

SEQ ID NO: 14820 - protein, 8 aa, Artificial Sequence
  Synthetic construct
IIPLYGTA

SEQ ID NO: 14821 - protein, 7 aa, Artificial Sequence
  Synthetic construct
IYTSGST

SEQ ID NO: 14822 - protein, 8 aa, Artificial Sequence
  Synthetic construct
IDPTDSYT

SEQ ID NO: 14823 - protein, 8 aa, Artificial Sequence
  Synthetic construct
ISTIGDVT

SEQ ID NO: 14824 - protein, 7 aa, Artificial Sequence
  Synthetic construct
IYYSGST

SEQ ID NO: 14825 - protein, 8 aa, Artificial Sequence
  Synthetic construct
IWYDGSYK

SEQ ID NO: 14826 - protein, 8 aa, Artificial Sequence
  Synthetic construct
ISSSSSYI

SEQ ID NO: 14827 - protein, 8 aa, Artificial Sequence
  Synthetic construct
ISGSGTPT

SEQ ID NO: 14828 - protein, 8 aa, Artificial Sequence
  Synthetic construct
INPSGGST

SEQ ID NO: 14829 - protein, 8 aa, Artificial Sequence
  Synthetic construct
ISYDGSNR

SEQ ID NO: 14830 - protein, 8 aa, Artificial Sequence
  Synthetic construct
INSHNGNT

SEQ ID NO: 14831 - protein, 8 aa, Artificial Sequence
  Synthetic construct
ISAYNGNT

SEQ ID NO: 14832 - protein, 8 aa, Artificial Sequence
  Synthetic construct
ISWKSDSI

SEQ ID NO: 14833 - protein, 8 aa, Artificial Sequence
  Synthetic construct
IKQDGSEK

SEQ ID NO: 14834 - protein, 8 aa, Artificial Sequence
  Synthetic construct
IYLGDSDT

SEQ ID NO: 14835 - protein, 7 aa, Artificial Sequence
  Synthetic construct
INDSGAT

SEQ ID NO: 14836 - protein, 8 aa, Artificial Sequence
  Synthetic construct
IKDDGSEK

SEQ ID NO: 14837 - protein, 8 aa, Artificial Sequence
  Synthetic construct
ISAYNGNT

SEQ ID NO: 14838 - protein, 8 aa, Artificial Sequence
  Synthetic construct
IWYDGSNK

SEQ ID NO: 14839 - protein, 8 aa, Artificial Sequence
  Synthetic construct
ISSSSSYI

SEQ ID NO: 14840 - protein, 8 aa, Artificial Sequence
  Synthetic construct
IIPIFGTA

SEQ ID NO: 14841 - protein, 8 aa, Artificial Sequence
  Synthetic construct
ISAYNGNT

SEQ ID NO: 14842 - protein, 8 aa, Artificial Sequence
  Synthetic construct
ISFDGSKK

SEQ ID NO: 14843 - protein, 8 aa, Artificial Sequence
  Synthetic construct
LSGSGRGT

SEQ ID NO: 14844 - protein, 7 aa, Artificial Sequence
  Synthetic construct
IYWDDDK

SEQ ID NO: 14845 - protein, 8 aa, Artificial Sequence
  Synthetic construct
ISYDGRNK

SEQ ID NO: 14846 - protein, 7 aa, Artificial Sequence
  Synthetic construct
INYSGTT

SEQ ID NO: 14847 - protein, 8 aa, Artificial Sequence
  Synthetic construct
IDPTDSYT

SEQ ID NO: 14848 - protein, 8 aa, Artificial Sequence
  Synthetic construct
ISRSGSDI

SEQ ID NO: 14849 - protein, 7 aa, Artificial Sequence
  Synthetic construct
IYHSGST

SEQ ID NO: 14850 - protein, 8 aa, Artificial Sequence
  Synthetic construct
ISSSSSYI

SEQ ID NO: 14851 - protein, 8 aa, Artificial Sequence
  Synthetic construct
ITWNSGSI

SEQ ID NO: 14852 - protein, 8 aa, Artificial Sequence
  Synthetic construct
ISNSGGDI

SEQ ID NO: 14853 - protein, 10 aa, Artificial Sequence
  Synthetic construct
IKSKTDGGTT

SEQ ID NO: 14854 - protein, 8 aa, Artificial Sequence
  Synthetic construct
ISGSGGST

SEQ ID NO: 14855 - protein, 8 aa, Artificial Sequence
  Synthetic construct
IASNLYNT

SEQ ID NO: 14856 - protein, 7 aa, Artificial Sequence
  Synthetic construct
LYSGGGT

SEQ ID NO: 14857 - protein, 8 aa, Artificial Sequence
  Synthetic construct
MNPNSGNT

SEQ ID NO: 14858 - protein, 8 aa, Artificial Sequence
  Synthetic construct
ISSSSSYI

SEQ ID NO: 14859 - protein, 8 aa, Artificial Sequence
  Synthetic construct
ISWNSDNI

SEQ ID NO: 14860 - protein, 7 aa, Artificial Sequence
  Synthetic construct
FYYTGTT

SEQ ID NO: 14861 - protein, 8 aa, Artificial Sequence
  Synthetic construct
LNEDGSVT

SEQ ID NO: 14862 - protein, 8 aa, Artificial Sequence
  Synthetic construct
ISSSSSYT

SEQ ID NO: 14863 - protein, 8 aa, Artificial Sequence
  Synthetic construct
ISFSDGST

SEQ ID NO: 14864 - protein, 7 aa, Artificial Sequence
  Synthetic construct
IYWDDDK

SEQ ID NO: 14865 - protein, 8 aa, Artificial Sequence
  Synthetic construct
IWYDGSNK

SEQ ID NO: 14866 - protein, 7 aa, Artificial Sequence
  Synthetic construct
IYATWSA

SEQ ID NO: 14867 - protein, 7 aa, Artificial Sequence
  Synthetic construct
IYWDDDK

SEQ ID NO: 14868 - protein, 8 aa, Artificial Sequence
  Synthetic construct
INPTSGGT

SEQ ID NO: 14869 - protein, 8 aa, Artificial Sequence
  Synthetic construct
ISYEGNRK

SEQ ID NO: 14870 - protein, 8 aa, Artificial Sequence
  Synthetic construct
ISYDGSNK

SEQ ID NO: 14871 - protein, 8 aa, Artificial Sequence
  Synthetic construct
ISYDGSNK

SEQ ID NO: 14872 - protein, 8 aa, Artificial Sequence
  Synthetic construct
IIGGGERT

SEQ ID NO: 14873 - protein, 7 aa, Artificial Sequence
  Synthetic construct
IGAGGDT

SEQ ID NO: 14874 - protein, 8 aa, Artificial Sequence
  Synthetic construct
ISYDGSNK

SEQ ID NO: 14875 - protein, 8 aa, Artificial Sequence
  Synthetic construct
INAGNGNT

SEQ ID NO: 14876 - protein, 7 aa, Artificial Sequence
  Synthetic construct
VLHSGSA

SEQ ID NO: 14877 - protein, 7 aa, Artificial Sequence
  Synthetic construct
LYLAGST

SEQ ID NO: 14878 - protein, 8 aa, Artificial Sequence
  Synthetic construct
IWSDGSNK

SEQ ID NO: 14879 - protein, 7 aa, Artificial Sequence
  Synthetic construct
MAGDGQS

SEQ ID NO: 14880 - protein, 8 aa, Artificial Sequence
  Synthetic construct
IWYDGSNK

SEQ ID NO: 14881 - protein, 8 aa, Artificial Sequence
  Synthetic construct
ISHDGGYK

SEQ ID NO: 14882 - protein, 7 aa, Artificial Sequence
  Synthetic construct
INHSGST

SEQ ID NO: 14883 - protein, 8 aa, Artificial Sequence
  Synthetic construct
ISSSSIRI

SEQ ID NO: 14884 - protein, 8 aa, Artificial Sequence
  Synthetic construct
ISGDGLYT

SEQ ID NO: 14885 - protein, 7 aa, Artificial Sequence
  Synthetic construct
IYWDDDK

SEQ ID NO: 14886 - protein, 8 aa, Artificial Sequence
  Synthetic construct
IIDIVGLA

SEQ ID NO: 14887 - protein, 8 aa, Artificial Sequence
  Synthetic construct
ISTYNGKA

SEQ ID NO: 14888 - protein, 7 aa, Artificial Sequence
  Synthetic construct
IYYSGST

SEQ ID NO: 14889 - protein, 8 aa, Artificial Sequence
  Synthetic construct
IDPTDSYT

SEQ ID NO: 14890 - protein, 8 aa, Artificial Sequence
  Synthetic construct
ISNTGVTT

SEQ ID NO: 14891 - protein, 8 aa, Artificial Sequence
  Synthetic construct
INTDGSTT

SEQ ID NO: 14892 - protein, 10 aa, Artificial Sequence
  Synthetic construct
TTDKPGGSTT

SEQ ID NO: 14893 - protein, 7 aa, Artificial Sequence
  Synthetic construct
IYWDDDK

SEQ ID NO: 14894 - protein, 7 aa, Artificial Sequence
  Synthetic construct
IYWDDDK

SEQ ID NO: 14895 - protein, 7 aa, Artificial Sequence
  Synthetic construct
IYYSGST

SEQ ID NO: 14896 - protein, 8 aa, Artificial Sequence
  Synthetic construct
INPSGGST

SEQ ID NO: 14897 - protein, 8 aa, Artificial Sequence
  Synthetic construct
INTANDNT

SEQ ID NO: 14898 - protein, 7 aa, Artificial Sequence
  Synthetic construct
VWKSGIT

SEQ ID NO: 14899 - protein, 7 aa, Artificial Sequence
  Synthetic construct
INHSGTT

SEQ ID NO: 14900 - protein, 8 aa, Artificial Sequence
  Synthetic construct
ISYDGSNK

SEQ ID NO: 14901 - protein, 8 aa, Artificial Sequence
  Synthetic construct
IDPSDSYT

SEQ ID NO: 14902 - protein, 8 aa, Artificial Sequence
  Synthetic construct
INPNSGGT

SEQ ID NO: 14903 - protein, 7 aa, Artificial Sequence
  Synthetic construct
IYHSGTT

SEQ ID NO: 14904 - protein, 8 aa, Artificial Sequence
  Synthetic construct
ISGSGGST

SEQ ID NO: 14905 - protein, 7 aa, Artificial Sequence
  Synthetic construct
IYYSGST

SEQ ID NO: 14906 - protein, 8 aa, Artificial Sequence
  Synthetic construct
MNPNSGNT

SEQ ID NO: 14907 - protein, 8 aa, Artificial Sequence
  Synthetic construct
IGNGDRVI

SEQ ID NO: 14908 - protein, 8 aa, Artificial Sequence
  Synthetic construct
VNPDDSYS

SEQ ID NO: 14909 - protein, 8 aa, Artificial Sequence
  Synthetic construct
INPTGGRT

SEQ ID NO: 14910 - protein, 8 aa, Artificial Sequence
  Synthetic construct
ISYDGSNK

SEQ ID NO: 14911 - protein, 8 aa, Artificial Sequence
  Synthetic construct
INPSGGST

SEQ ID NO: 14912 - protein, 8 aa, Artificial Sequence
  Synthetic construct
IDPRDSYT

SEQ ID NO: 14913 - protein, 8 aa, Artificial Sequence
  Synthetic construct
ISYEGSNK

SEQ ID NO: 14914 - protein, 8 aa, Artificial Sequence
  Synthetic construct
INIDGSRT

SEQ ID NO: 14915 - protein, 8 aa, Artificial Sequence
  Synthetic construct
ISGSGGST

SEQ ID NO: 14916 - protein, 8 aa, Artificial Sequence
  Synthetic construct
IDPSDSYT

SEQ ID NO: 14917 - protein, 8 aa, Artificial Sequence
  Synthetic construct
IDPSGGST

SEQ ID NO: 14918 - protein, 7 aa, Artificial Sequence
  Synthetic construct
IYPSGPT

SEQ ID NO: 14919 - protein, 7 aa, Artificial Sequence
  Synthetic construct
IYYSGST

SEQ ID NO: 14920 - protein, 7 aa, Artificial Sequence
  Synthetic construct
IYYSGST

SEQ ID NO: 14921 - protein, 8 aa, Artificial Sequence
  Synthetic construct
ISSSSSYI

SEQ ID NO: 14922 - protein, 8 aa, Artificial Sequence
  Synthetic construct
IIPILGIA

SEQ ID NO: 14923 - protein, 8 aa, Artificial Sequence
  Synthetic construct
IWYDGTNK

SEQ ID NO: 14924 - protein, 8 aa, Artificial Sequence
  Synthetic construct
ISAYNGNT

SEQ ID NO: 14925 - protein, 8 aa, Artificial Sequence
  Synthetic construct
INPNGGAT

SEQ ID NO: 14926 - protein, 8 aa, Artificial Sequence
  Synthetic construct
INPNSGGT

SEQ ID NO: 14927 - protein, 8 aa, Artificial Sequence
  Synthetic construct
MSHDGSVT

SEQ ID NO: 14928 - protein, 8 aa, Artificial Sequence
  Synthetic construct
ISSSSSTI

SEQ ID NO: 14929 - protein, 8 aa, Artificial Sequence
  Synthetic construct
ISGSGGST

SEQ ID NO: 14930 - protein, 7 aa, Artificial Sequence
  Synthetic construct
IYHSGTT

SEQ ID NO: 14931 - protein, 8 aa, Artificial Sequence
  Synthetic construct
ISYDGSNK

SEQ ID NO: 14932 - protein, 8 aa, Artificial Sequence
  Synthetic construct
ISFSDGST

SEQ ID NO: 14933 - protein, 8 aa, Artificial Sequence
  Synthetic construct
INLNGDSP

SEQ ID NO: 14934 - protein, 8 aa, Artificial Sequence
  Synthetic construct
ISWNSGSI

SEQ ID NO: 14935 - protein, 7 aa, Artificial Sequence
  Synthetic construct
IYTSGST

SEQ ID NO: 14936 - protein, 7 aa, Artificial Sequence
  Synthetic construct
IYYSGST

SEQ ID NO: 14937 - protein, 7 aa, Artificial Sequence
  Synthetic construct
IFYSGRT

SEQ ID NO: 14938 - protein, 8 aa, Artificial Sequence
  Synthetic construct
VDPENGET

SEQ ID NO: 14939 - protein, 8 aa, Artificial Sequence
  Synthetic construct
INPNSGGT

SEQ ID NO: 14940 - protein, 8 aa, Artificial Sequence
  Synthetic construct
INTNTGNP

SEQ ID NO: 14941 - protein, 7 aa, Artificial Sequence
  Synthetic construct
ISWDDDE

SEQ ID NO: 14942 - protein, 8 aa, Artificial Sequence
  Synthetic construct
VSGSGTNT

SEQ ID NO: 14943 - protein, 8 aa, Artificial Sequence
  Synthetic construct
ISTYNGKA

SEQ ID NO: 14944 - protein, 8 aa, Artificial Sequence
  Synthetic construct
INPRNGAT

SEQ ID NO: 14945 - protein, 7 aa, Artificial Sequence
  Synthetic construct
IYTSGST

SEQ ID NO: 14946 - protein, 8 aa, Artificial Sequence
  Synthetic construct
IHTGGGNT

SEQ ID NO: 14947 - protein, 8 aa, Artificial Sequence
  Synthetic construct
ISGHTGDT

SEQ ID NO: 14948 - protein, 7 aa, Artificial Sequence
  Synthetic construct
IFAHGST

SEQ ID NO: 14949 - protein, 7 aa, Artificial Sequence
  Synthetic construct
IYTSGST

SEQ ID NO: 14950 - protein, 10 aa, Artificial Sequence
  Synthetic construct
IRSKAYGGTT

SEQ ID NO: 14951 - protein, 8 aa, Artificial Sequence
  Synthetic construct
IDLSDSYT

SEQ ID NO: 14952 - protein, 8 aa, Artificial Sequence
  Synthetic construct
ISATGGST

SEQ ID NO: 14953 - protein, 8 aa, Artificial Sequence
  Synthetic construct
ISTYNGKA

SEQ ID NO: 14954 - protein, 8 aa, Artificial Sequence
  Synthetic construct
ITWDGGTA

SEQ ID NO: 14955 - protein, 8 aa, Artificial Sequence
  Synthetic construct
ISGSGGGT

SEQ ID NO: 14956 - protein, 8 aa, Artificial Sequence
  Synthetic construct
MSGSGGTT

SEQ ID NO: 14957 - protein, 7 aa, Artificial Sequence
  Synthetic construct
IYWDDDK

SEQ ID NO: 14958 - protein, 7 aa, Artificial Sequence
  Synthetic construct
IYYSGST

SEQ ID NO: 14959 - protein, 8 aa, Artificial Sequence
  Synthetic construct
ISYEGSNK

SEQ ID NO: 14960 - protein, 7 aa, Artificial Sequence
  Synthetic construct
ISSGSNS

SEQ ID NO: 14961 - protein, 8 aa, Artificial Sequence
  Synthetic construct
ITSTSRFI

SEQ ID NO: 14962 - protein, 8 aa, Artificial Sequence
  Synthetic construct
INPNSGGT

SEQ ID NO: 14963 - protein, 8 aa, Artificial Sequence
  Synthetic construct
IWHDGSNK

SEQ ID NO: 14964 - protein, 7 aa, Artificial Sequence
  Synthetic construct
INHSGST

SEQ ID NO: 14965 - protein, 8 aa, Artificial Sequence
  Synthetic construct
IDPTDSYT

SEQ ID NO: 14966 - protein, 8 aa, Artificial Sequence
  Synthetic construct
IRPEGTIT

SEQ ID NO: 14967 - protein, 7 aa, Artificial Sequence
  Synthetic construct
INHSGST

SEQ ID NO: 14968 - protein, 8 aa, Artificial Sequence
  Synthetic construct
ISYDGSNK

SEQ ID NO: 14969 - protein, 10 aa, Artificial Sequence
  Synthetic construct
IKSKTDGGTT

SEQ ID NO: 14970 - protein, 8 aa, Artificial Sequence
  Synthetic construct
INGGNGNT

SEQ ID NO: 14971 - protein, 8 aa, Artificial Sequence
  Synthetic construct
VVVGSGHA

SEQ ID NO: 14972 - protein, 7 aa, Artificial Sequence
  Synthetic construct
IYYSGST

SEQ ID NO: 14973 - protein, 8 aa, Artificial Sequence
  Synthetic construct
ISGHNGNT

SEQ ID NO: 14974 - protein, 8 aa, Artificial Sequence
  Synthetic construct
INIDGSRT

SEQ ID NO: 14975 - protein, 8 aa, Artificial Sequence
  Synthetic construct
INPNSGGT

SEQ ID NO: 14976 - protein, 10 aa, Artificial Sequence
  Synthetic construct
IRSSNDGGPT

SEQ ID NO: 14977 - protein, 7 aa, Artificial Sequence
  Synthetic construct
IYGGGTT

SEQ ID NO: 14978 - protein, 8 aa, Artificial Sequence
  Synthetic construct
ISSSSNTK

SEQ ID NO: 14979 - protein, 7 aa, Artificial Sequence
  Synthetic construct
IYYSGST

SEQ ID NO: 14980 - protein, 8 aa, Artificial Sequence
  Synthetic construct
ISWSSDTI

SEQ ID NO: 14981 - protein, 7 aa, Artificial Sequence
  Synthetic construct
FYYSGST

SEQ ID NO: 14982 - protein, 7 aa, Artificial Sequence
  Synthetic construct
IYYGGST

SEQ ID NO: 14983 - protein, 8 aa, Artificial Sequence
  Synthetic construct
IWYDGSNK

SEQ ID NO: 14984 - protein, 8 aa, Artificial Sequence
  Synthetic construct
ISSTGDNT

SEQ ID NO: 14985 - protein, 8 aa, Artificial Sequence
  Synthetic construct
SANGGDKQ

SEQ ID NO: 14986 - protein, 8 aa, Artificial Sequence
  Synthetic construct
ISYDGNKK

SEQ ID NO: 14987 - protein, 8 aa, Artificial Sequence
  Synthetic construct
ISHSETMI

SEQ ID NO: 14988 - protein, 7 aa, Artificial Sequence
  Synthetic construct
IYSGGST

SEQ ID NO: 14989 - protein, 8 aa, Artificial Sequence
  Synthetic construct
IYPGDSDT

SEQ ID NO: 14990 - protein, 8 aa, Artificial Sequence
  Synthetic construct
INGDGSGA

SEQ ID NO: 14991 - protein, 7 aa, Artificial Sequence
  Synthetic construct
IYTSGST

SEQ ID NO: 14992 - protein, 8 aa, Artificial Sequence
  Synthetic construct
ISSSSSYT

SEQ ID NO: 14993 - protein, 7 aa, Artificial Sequence
  Synthetic construct
IYYSGST

SEQ ID NO: 14994 - protein, 7 aa, Artificial Sequence
  Synthetic construct
IYSGGST

SEQ ID NO: 14995 - protein, 8 aa, Artificial Sequence
  Synthetic construct
ISGSGGST

SEQ ID NO: 14996 - protein, 8 aa, Artificial Sequence
  Synthetic construct
ISGRDENT

SEQ ID NO: 14997 - protein, 8 aa, Artificial Sequence
  Synthetic construct
IKQDGSEK

SEQ ID NO: 14998 - protein, 7 aa, Artificial Sequence
  Synthetic construct
IYYSGST

SEQ ID NO: 14999 - protein, 8 aa, Artificial Sequence
  Synthetic construct
IWFDGSNK

SEQ ID NO: 15000 - protein, 7 aa, Artificial Sequence
  Synthetic construct
IYYNEKT

SEQ ID NO: 15001 - protein, 7 aa, Artificial Sequence
  Synthetic construct
IYHSGTT

SEQ ID NO: 15002 - protein, 8 aa, Artificial Sequence
  Synthetic construct
IYPGDFDT

SEQ ID NO: 15003 - protein, 7 aa, Artificial Sequence
  Synthetic construct
IYFTGST

SEQ ID NO: 15004 - protein, 7 aa, Artificial Sequence
  Synthetic construct
INHSGST

SEQ ID NO: 15005 - protein, 8 aa, Artificial Sequence
  Synthetic construct
IDPTDSYT

SEQ ID NO: 15006 - protein, 7 aa, Artificial Sequence
  Synthetic construct
INQSGIT

SEQ ID NO: 15007 - protein, 10 aa, Artificial Sequence
  Synthetic construct
TRDKRNNYST

SEQ ID NO: 15008 - protein, 7 aa, Artificial Sequence
  Synthetic construct
ITLSGRT

SEQ ID NO: 15009 - protein, 8 aa, Artificial Sequence
  Synthetic construct
ISSHGDNT

SEQ ID NO: 15010 - protein, 7 aa, Artificial Sequence
  Synthetic construct
IYTSGST

SEQ ID NO: 15011 - protein, 8 aa, Artificial Sequence
  Synthetic construct
ISSYGDNT

SEQ ID NO: 15012 - protein, 7 aa, Artificial Sequence
  Synthetic construct
IYYSGST

SEQ ID NO: 15013 - protein, 8 aa, Artificial Sequence
  Synthetic construct
IKQDGSEK

SEQ ID NO: 15014 - protein, 7 aa, Artificial Sequence
  Synthetic construct
IYYSGST

SEQ ID NO: 15015 - protein, 8 aa, Artificial Sequence
  Synthetic construct
ISGSGGST

SEQ ID NO: 15016 - protein, 7 aa, Artificial Sequence
  Synthetic construct
IYYSGST

SEQ ID NO: 15017 - protein, 8 aa, Artificial Sequence
  Synthetic construct
ISDDGGNK

SEQ ID NO: 15018 - protein, 8 aa, Artificial Sequence
  Synthetic construct
ISGSGGST

SEQ ID NO: 15019 - protein, 8 aa, Artificial Sequence
  Synthetic construct
IHPFDSDT

SEQ ID NO: 15020 - protein, 7 aa, Artificial Sequence
  Synthetic construct
INHSGST

SEQ ID NO: 15021 - protein, 8 aa, Artificial Sequence
  Synthetic construct
MNPNSGNT

SEQ ID NO: 15022 - protein, 7 aa, Artificial Sequence
  Synthetic construct
IYYSGST

SEQ ID NO: 15023 - protein, 8 aa, Artificial Sequence
  Synthetic construct
IIPILGIA

SEQ ID NO: 15024 - protein, 8 aa, Artificial Sequence
  Synthetic construct
IKQDGSEK

SEQ ID NO: 15025 - protein, 7 aa, Artificial Sequence
  Synthetic construct
IYYSGNT

SEQ ID NO: 15026 - protein, 8 aa, Artificial Sequence
  Synthetic construct
ISGSGGST

SEQ ID NO: 15027 - protein, 8 aa, Artificial Sequence
  Synthetic construct
IWYDGSNK

SEQ ID NO: 15028 - protein, 8 aa, Artificial Sequence
  Synthetic construct
ISTYNGKA

SEQ ID NO: 15029 - protein, 8 aa, Artificial Sequence
  Synthetic construct
ISGGGETT

SEQ ID NO: 15030 - protein, 10 aa, Artificial Sequence
  Synthetic construct
SKSGSDGVTT

SEQ ID NO: 15031 - protein, 8 aa, Artificial Sequence
  Synthetic construct
ISPSGVTI

SEQ ID NO: 15032 - protein, 7 aa, Artificial Sequence
  Synthetic construct
INHSGST

SEQ ID NO: 15033 - protein, 8 aa, Artificial Sequence
  Synthetic construct
VSYDATYR

SEQ ID NO: 15034 - protein, 8 aa, Artificial Sequence
  Synthetic construct
IWYDGSNK

SEQ ID NO: 15035 - protein, 8 aa, Artificial Sequence
  Synthetic construct
ISAYNGNT

SEQ ID NO: 15036 - protein, 8 aa, Artificial Sequence
  Synthetic construct
IRYHGGNI

SEQ ID NO: 15037 - protein, 8 aa, Artificial Sequence
  Synthetic construct
INSDGSST

SEQ ID NO: 15038 - protein, 8 aa, Artificial Sequence
  Synthetic construct
ITNSGGST

SEQ ID NO: 15039 - protein, 8 aa, Artificial Sequence
  Synthetic construct
ISAYNGNT

SEQ ID NO: 15040 - protein, 8 aa, Artificial Sequence
  Synthetic construct
ISTYNGKA

SEQ ID NO: 15041 - protein, 7 aa, Artificial Sequence
  Synthetic construct
IYTSGST

SEQ ID NO: 15042 - protein, 7 aa, Artificial Sequence
  Synthetic construct
IFSNDEK

SEQ ID NO: 15043 - protein, 7 aa, Artificial Sequence
  Synthetic construct
IYSGGST

SEQ ID NO: 15044 - protein, 7 aa, Artificial Sequence
  Synthetic construct
IYYSGST

SEQ ID NO: 15045 - protein, 8 aa, Artificial Sequence
  Synthetic construct
ISSSSSYI

SEQ ID NO: 15046 - protein, 7 aa, Artificial Sequence
  Synthetic construct
INHSGST

SEQ ID NO: 15047 - protein, 8 aa, Artificial Sequence
  Synthetic construct
ISGSGGST

SEQ ID NO: 15048 - protein, 8 aa, Artificial Sequence
  Synthetic construct
ISSYGDNT

SEQ ID NO: 15049 - protein, 8 aa, Artificial Sequence
  Synthetic construct
ISGSGGST

SEQ ID NO: 15050 - protein, 10 aa, Artificial Sequence
  Synthetic construct
IKSKTEGGTT

SEQ ID NO: 15051 - protein, 8 aa, Artificial Sequence
  Synthetic construct
ISSSSSTI

SEQ ID NO: 15052 - protein, 8 aa, Artificial Sequence
  Synthetic construct
IGPHSGVT

SEQ ID NO: 15053 - protein, 8 aa, Artificial Sequence
  Synthetic construct
INPSGGST

SEQ ID NO: 15054 - protein, 7 aa, Artificial Sequence
  Synthetic construct
IYYNGRT

SEQ ID NO: 15055 - protein, 8 aa, Artificial Sequence
  Synthetic construct
VSSDGSFK

SEQ ID NO: 15056 - protein, 8 aa, Artificial Sequence
  Synthetic construct
ISGSGTPT

SEQ ID NO: 15057 - protein, 8 aa, Artificial Sequence
  Synthetic construct
ITADGRTT

SEQ ID NO: 15058 - protein, 8 aa, Artificial Sequence
  Synthetic construct
ISSSSSYI

SEQ ID NO: 15059 - protein, 8 aa, Artificial Sequence
  Synthetic construct
IYPTESET

SEQ ID NO: 15060 - protein, 8 aa, Artificial Sequence
  Synthetic construct
IDPQNGET

SEQ ID NO: 15061 - protein, 7 aa, Artificial Sequence
  Synthetic construct
IYTSGST

SEQ ID NO: 15062 - protein, 7 aa, Artificial Sequence
  Synthetic construct
INHSGST

SEQ ID NO: 15063 - protein, 8 aa, Artificial Sequence
  Synthetic construct
ISNSGGST

SEQ ID NO: 15064 - protein, 7 aa, Artificial Sequence
  Synthetic construct
IYYSGST

SEQ ID NO: 15065 - protein, 8 aa, Artificial Sequence
  Synthetic construct
VDPEDGET

SEQ ID NO: 15066 - protein, 8 aa, Artificial Sequence
  Synthetic construct
ISGSGNYI

SEQ ID NO: 15067 - protein, 8 aa, Artificial Sequence
  Synthetic construct
ISWDGGST

SEQ ID NO: 15068 - protein, 7 aa, Artificial Sequence
  Synthetic construct
IYSGGST

SEQ ID NO: 15069 - protein, 10 aa, Artificial Sequence
  Synthetic construct
IKTNSDGGTA

SEQ ID NO: 15070 - protein, 8 aa, Artificial Sequence
  Synthetic construct
ISSDGGDK

SEQ ID NO: 15071 - protein, 8 aa, Artificial Sequence
  Synthetic construct
ISSSSSYI

SEQ ID NO: 15072 - protein, 8 aa, Artificial Sequence
  Synthetic construct
IIPILGIA

SEQ ID NO: 15073 - protein, 8 aa, Artificial Sequence
  Synthetic construct
MSTYNGNT

SEQ ID NO: 15074 - protein, 8 aa, Artificial Sequence
  Synthetic construct
IVVGSGYI

SEQ ID NO: 15075 - protein, 8 aa, Artificial Sequence
  Synthetic construct
VIPFFATS

SEQ ID NO: 15076 - protein, 7 aa, Artificial Sequence
  Synthetic construct
VFHRGNT

SEQ ID NO: 15077 - protein, 9 aa, Artificial Sequence
  Synthetic construct
TYYRSKWYK

SEQ ID NO: 15078 - protein, 8 aa, Artificial Sequence
  Synthetic construct
IDPSDSYT

SEQ ID NO: 15079 - protein, 7 aa, Artificial Sequence
  Synthetic construct
IYYSGST

SEQ ID NO: 15080 - protein, 7 aa, Artificial Sequence
  Synthetic construct
VGASGYA

SEQ ID NO: 15081 - protein, 8 aa, Artificial Sequence
  Synthetic construct
IWYDGSNK

SEQ ID NO: 15082 - protein, 8 aa, Artificial Sequence
  Synthetic construct
INDGGTYI

SEQ ID NO: 15083 - protein, 8 aa, Artificial Sequence
  Synthetic construct
IIPIFGTA

SEQ ID NO: 15084 - protein, 8 aa, Artificial Sequence
  Synthetic construct
IWYDGSNK

SEQ ID NO: 15085 - protein, 8 aa, Artificial Sequence
  Synthetic construct
ISNDGGST

SEQ ID NO: 15086 - protein, 7 aa, Artificial Sequence
  Synthetic construct
IYPSGPT

SEQ ID NO: 15087 - protein, 7 aa, Artificial Sequence
  Synthetic construct
IYYSGST

SEQ ID NO: 15088 - protein, 8 aa, Artificial Sequence
  Synthetic construct
INPSGGST

SEQ ID NO: 15089 - protein, 8 aa, Artificial Sequence
  Synthetic construct
IIPNVGVP

SEQ ID NO: 15090 - protein, 8 aa, Artificial Sequence
  Synthetic construct
INPNSGGT

SEQ ID NO: 15091 - protein, 7 aa, Artificial Sequence
  Synthetic construct
IYTSGST

SEQ ID NO: 15092 - protein, 8 aa, Artificial Sequence
  Synthetic construct
IIPILGIT

SEQ ID NO: 15093 - protein, 8 aa, Artificial Sequence
  Synthetic construct
ISNSGGDT

SEQ ID NO: 15094 - protein, 8 aa, Artificial Sequence
  Synthetic construct
ISGSAHST

SEQ ID NO: 15095 - protein, 8 aa, Artificial Sequence
  Synthetic construct
ISYDGSNK

SEQ ID NO: 15096 - protein, 8 aa, Artificial Sequence
  Synthetic construct
IWYDGSNK

SEQ ID NO: 15097 - protein, 10 aa, Artificial Sequence
  Synthetic construct
IRSKAYGGTT

SEQ ID NO: 15098 - protein, 8 aa, Artificial Sequence
  Synthetic construct
ISGSSSYI

SEQ ID NO: 15099 - protein, 8 aa, Artificial Sequence
  Synthetic construct
INSDGSST

SEQ ID NO: 15100 - protein, 10 aa, Artificial Sequence
  Synthetic construct
IKSKTDGGTT

SEQ ID NO: 15101 - protein, 8 aa, Artificial Sequence
  Synthetic construct
ISSSSSYI

SEQ ID NO: 15102 - protein, 8 aa, Artificial Sequence
  Synthetic construct
ISAYNGNT

SEQ ID NO: 15103 - protein, 8 aa, Artificial Sequence
  Synthetic construct
ISSSSSTI

SEQ ID NO: 15104 - protein, 8 aa, Artificial Sequence
  Synthetic construct
ISTTSSTI

SEQ ID NO: 15105 - protein, 10 aa, Artificial Sequence
  Synthetic construct
IRSSNDGGPT

SEQ ID NO: 15106 - protein, 7 aa, Artificial Sequence
  Synthetic construct
IYTSGST

SEQ ID NO: 15107 - protein, 10 aa, Artificial Sequence
  Synthetic construct
IRSKANSYAT

SEQ ID NO: 15108 - protein, 10 aa, Artificial Sequence
  Synthetic construct
IKKKADGGTI

SEQ ID NO: 15109 - protein, 8 aa, Artificial Sequence
  Synthetic construct
ISYDGSNK

SEQ ID NO: 15110 - protein, 8 aa, Artificial Sequence
  Synthetic construct
TSADGSSQ

SEQ ID NO: 15111 - protein, 8 aa, Artificial Sequence
  Synthetic construct
IHHEGSSS

SEQ ID NO: 15112 - protein, 8 aa, Artificial Sequence
  Synthetic construct
ISSRSSTI

SEQ ID NO: 15113 - protein, 8 aa, Artificial Sequence
  Synthetic construct
ISAYNGNT

SEQ ID NO: 15114 - protein, 8 aa, Artificial Sequence
  Synthetic construct
ISNNENNR

SEQ ID NO: 15115 - protein, 7 aa, Artificial Sequence
  Synthetic construct
IYPSGPT

SEQ ID NO: 15116 - protein, 8 aa, Artificial Sequence
  Synthetic construct
ISSSSSYT

SEQ ID NO: 15117 - protein, 8 aa, Artificial Sequence
  Synthetic construct
IKQDGSEK

SEQ ID NO: 15118 - protein, 8 aa, Artificial Sequence
  Synthetic construct
ISYDGSNK

SEQ ID NO: 15119 - protein, 10 aa, Artificial Sequence
  Synthetic construct
IRSKAYGGTT

SEQ ID NO: 15120 - protein, 8 aa, Artificial Sequence
  Synthetic construct
ISSSSSYI

SEQ ID NO: 15121 - protein, 8 aa, Artificial Sequence
  Synthetic construct
IIPLFGTP

SEQ ID NO: 15122 - protein, 7 aa, Artificial Sequence
  Synthetic construct
IYPTGTT

SEQ ID NO: 15123 - protein, 10 aa, Artificial Sequence
  Synthetic construct
IKRKTDGGTT

SEQ ID NO: 15124 - protein, 7 aa, Artificial Sequence
  Synthetic construct
IYTNGDT

SEQ ID NO: 15125 - protein, 7 aa, Artificial Sequence
  Synthetic construct
IIDSGSS

SEQ ID NO: 15126 - protein, 8 aa, Artificial Sequence
  Synthetic construct
ISYDGSNK

SEQ ID NO: 15127 - protein, 8 aa, Artificial Sequence
  Synthetic construct
ISTYNGKA

SEQ ID NO: 15128 - protein, 8 aa, Artificial Sequence
  Synthetic construct
ISATGGTT

SEQ ID NO: 15129 - protein, 7 aa, Artificial Sequence
  Synthetic construct
IHYSGAS

SEQ ID NO: 15130 - protein, 8 aa, Artificial Sequence
  Synthetic construct
ISSSSSTI

SEQ ID NO: 15131 - protein, 8 aa, Artificial Sequence
  Synthetic construct
ISDSGRTT

SEQ ID NO: 15132 - protein, 8 aa, Artificial Sequence
  Synthetic construct
ISRSSSYI

SEQ ID NO: 15133 - protein, 7 aa, Artificial Sequence
  Synthetic construct
IYYSGST

SEQ ID NO: 15134 - protein, 8 aa, Artificial Sequence
  Synthetic construct
IISRTGAT

SEQ ID NO: 15135 - protein, 7 aa, Artificial Sequence
  Synthetic construct
IYYSGST

SEQ ID NO: 15136 - protein, 7 aa, Artificial Sequence
  Synthetic construct
IHHSGST

SEQ ID NO: 15137 - protein, 8 aa, Artificial Sequence
  Synthetic construct
IGGGGTNT

SEQ ID NO: 15138 - protein, 7 aa, Artificial Sequence
  Synthetic construct
IYSGGST

SEQ ID NO: 15139 - protein, 10 aa, Artificial Sequence
  Synthetic construct
IKSKTDGGTT

SEQ ID NO: 15140 - protein, 8 aa, Artificial Sequence
  Synthetic construct
ISSNGGST

SEQ ID NO: 15141 - protein, 8 aa, Artificial Sequence
  Synthetic construct
ISDGGGST

SEQ ID NO: 15142 - protein, 8 aa, Artificial Sequence
  Synthetic construct
IISILGVA

SEQ ID NO: 15143 - protein, 8 aa, Artificial Sequence
  Synthetic construct
ISWNSGNI

SEQ ID NO: 15144 - protein, 7 aa, Artificial Sequence
  Synthetic construct
IYNRGGL

SEQ ID NO: 15145 - protein, 7 aa, Artificial Sequence
  Synthetic construct
IFWDDDK

SEQ ID NO: 15146 - protein, 8 aa, Artificial Sequence
  Synthetic construct
ISAYNGNT

SEQ ID NO: 15147 - protein, 8 aa, Artificial Sequence
  Synthetic construct
IYPGDSTT

SEQ ID NO: 15148 - protein, 8 aa, Artificial Sequence
  Synthetic construct
ISSSSSYI

SEQ ID NO: 15149 - protein, 8 aa, Artificial Sequence
  Synthetic construct
ISGSGGST

SEQ ID NO: 15150 - protein, 8 aa, Artificial Sequence
  Synthetic construct
IDFDGSFE

SEQ ID NO: 15151 - protein, 8 aa, Artificial Sequence
  Synthetic construct
INPSGGRT

SEQ ID NO: 15152 - protein, 7 aa, Artificial Sequence
  Synthetic construct
IYTSGST

SEQ ID NO: 15153 - protein, 8 aa, Artificial Sequence
  Synthetic construct
ISPSGSTI

SEQ ID NO: 15154 - protein, 8 aa, Artificial Sequence
  Synthetic construct
INTNSHST

SEQ ID NO: 15155 - protein, 8 aa, Artificial Sequence
  Synthetic construct
ISSSSSYI

SEQ ID NO: 15156 - protein, 7 aa, Artificial Sequence
  Synthetic construct
IYTSGST

SEQ ID NO: 15157 - protein, 10 aa, Artificial Sequence
  Synthetic construct
IKSKTDGGTT

SEQ ID NO: 15158 - protein, 7 aa, Artificial Sequence
  Synthetic construct
IFHSGNA

SEQ ID NO: 15159 - protein, 7 aa, Artificial Sequence
  Synthetic construct
IKHGGST

SEQ ID NO: 15160 - protein, 7 aa, Artificial Sequence
  Synthetic construct
IYYSGST

SEQ ID NO: 15161 - protein, 8 aa, Artificial Sequence
  Synthetic construct
ISYDGSNK

SEQ ID NO: 15162 - protein, 7 aa, Artificial Sequence
  Synthetic construct
IYNGGDT

SEQ ID NO: 15163 - protein, 7 aa, Artificial Sequence
  Synthetic construct
IFTSGRT

SEQ ID NO: 15164 - protein, 8 aa, Artificial Sequence
  Synthetic construct
IDPTDSYT

SEQ ID NO: 15165 - protein, 7 aa, Artificial Sequence
  Synthetic construct
LFPNGEQ

SEQ ID NO: 15166 - protein, 8 aa, Artificial Sequence
  Synthetic construct
INTNTGNP

SEQ ID NO: 15167 - protein, 8 aa, Artificial Sequence
  Synthetic construct
MNPSDGTT

SEQ ID NO: 15168 - protein, 8 aa, Artificial Sequence
  Synthetic construct
ISSSSSTI

SEQ ID NO: 15169 - protein, 8 aa, Artificial Sequence
  Synthetic construct
ISSTGSVV

SEQ ID NO: 15170 - protein, 10 aa, Artificial Sequence
  Synthetic construct
TRNKANSYTT

SEQ ID NO: 15171 - protein, 7 aa, Artificial Sequence
  Synthetic construct
MYNSGST

SEQ ID NO: 15172 - protein, 7 aa, Artificial Sequence
  Synthetic construct
IYWDDDK

SEQ ID NO: 15173 - protein, 8 aa, Artificial Sequence
  Synthetic construct
IDPTDSYT

SEQ ID NO: 15174 - protein, 8 aa, Artificial Sequence
  Synthetic construct
INPSGGST

SEQ ID NO: 15175 - protein, 7 aa, Artificial Sequence
  Synthetic construct
VYSSGST

SEQ ID NO: 15176 - protein, 8 aa, Artificial Sequence
  Synthetic construct
ISAYNGNT

SEQ ID NO: 15177 - protein, 7 aa, Artificial Sequence
  Synthetic construct
IYWDDDK

SEQ ID NO: 15178 - protein, 8 aa, Artificial Sequence
  Synthetic construct
VWYDGSDQ

SEQ ID NO: 15179 - protein, 8 aa, Artificial Sequence
  Synthetic construct
INPNGGST

SEQ ID NO: 15180 - protein, 8 aa, Artificial Sequence
  Synthetic construct
ISYDGDKK

SEQ ID NO: 15181 - protein, 10 aa, Artificial Sequence
  Synthetic construct
IKTKADGGTT

SEQ ID NO: 15182 - protein, 7 aa, Artificial Sequence
  Synthetic construct
IFSSGSA

SEQ ID NO: 15183 - protein, 8 aa, Artificial Sequence
  Synthetic construct
MNPNSGNT

SEQ ID NO: 15184 - protein, 8 aa, Artificial Sequence
  Synthetic construct
ISAYNGNT

SEQ ID NO: 15185 - protein, 7 aa, Artificial Sequence
  Synthetic construct
VYISGTT

SEQ ID NO: 15186 - protein, 7 aa, Artificial Sequence
  Synthetic construct
IFSNDEK

SEQ ID NO: 15187 - protein, 8 aa, Artificial Sequence
  Synthetic construct
IDPTDSYT

SEQ ID NO: 15188 - protein, 7 aa, Artificial Sequence
  Synthetic construct
VYNSGST

SEQ ID NO: 15189 - protein, 8 aa, Artificial Sequence
  Synthetic construct
ISNDGGTK

SEQ ID NO: 15190 - protein, 8 aa, Artificial Sequence
  Synthetic construct
ISSTGLYK

SEQ ID NO: 15191 - protein, 8 aa, Artificial Sequence
  Synthetic construct
ISGSGGST

SEQ ID NO: 15192 - protein, 8 aa, Artificial Sequence
  Synthetic construct
ISNSGDGT

SEQ ID NO: 15193 - protein, 7 aa, Artificial Sequence
  Synthetic construct
VSYSGSP

SEQ ID NO: 15194 - protein, 7 aa, Artificial Sequence
  Synthetic construct
IYSGGST

SEQ ID NO: 15195 - protein, 8 aa, Artificial Sequence
  Synthetic construct
ISAYNGNT

SEQ ID NO: 15196 - protein, 8 aa, Artificial Sequence
  Synthetic construct
ISGSGGTT

SEQ ID NO: 15197 - protein, 7 aa, Artificial Sequence
  Synthetic construct
VYTTGTI

SEQ ID NO: 15198 - protein, 8 aa, Artificial Sequence
  Synthetic construct
INPNTGNP

SEQ ID NO: 15199 - protein, 8 aa, Artificial Sequence
  Synthetic construct
ISSSSSII

SEQ ID NO: 15200 - protein, 7 aa, Artificial Sequence
  Synthetic construct
IYYSGST

SEQ ID NO: 15201 - protein, 8 aa, Artificial Sequence
  Synthetic construct
INPSGGST

SEQ ID NO: 15202 - protein, 8 aa, Artificial Sequence
  Synthetic construct
IHWDGRRI

SEQ ID NO: 15203 - protein, 7 aa, Artificial Sequence
  Synthetic construct
IHFGGST

SEQ ID NO: 15204 - protein, 8 aa, Artificial Sequence
  Synthetic construct
INSDGSTT

SEQ ID NO: 15205 - protein, 7 aa, Artificial Sequence
  Synthetic construct
INYSGTT

SEQ ID NO: 15206 - protein, 8 aa, Artificial Sequence
  Synthetic construct
ITDDGNNE

SEQ ID NO: 15207 - protein, 7 aa, Artificial Sequence
  Synthetic construct
ILYSGRP

SEQ ID NO: 15208 - protein, 8 aa, Artificial Sequence
  Synthetic construct
ISSSSRDI

SEQ ID NO: 15209 - protein, 10 aa, Artificial Sequence
  Synthetic construct
IKSKDDGGTG

SEQ ID NO: 15210 - protein, 8 aa, Artificial Sequence
  Synthetic construct
VTNSGGDT

SEQ ID NO: 15211 - protein, 7 aa, Artificial Sequence
  Synthetic construct
IHYNGRT

SEQ ID NO: 15212 - protein, 8 aa, Artificial Sequence
  Synthetic construct
ISSSGVTT

SEQ ID NO: 15213 - protein, 8 aa, Artificial Sequence
  Synthetic construct
ISSSSSYI

SEQ ID NO: 15214 - protein, 8 aa, Artificial Sequence
  Synthetic construct
ISNDGKYK

SEQ ID NO: 15215 - protein, 7 aa, Artificial Sequence
  Synthetic construct
IYGDGAA

SEQ ID NO: 15216 - protein, 8 aa, Artificial Sequence
  Synthetic construct
IIPILGIA

SEQ ID NO: 15217 - protein, 7 aa, Artificial Sequence
  Synthetic construct
IYYSGST

SEQ ID NO: 15218 - protein, 7 aa, Artificial Sequence
  Synthetic construct
IYYSGST

SEQ ID NO: 15219 - protein, 8 aa, Artificial Sequence
  Synthetic construct
INPNSGGT

SEQ ID NO: 15220 - protein, 8 aa, Artificial Sequence
  Synthetic construct
VDPEDGET

SEQ ID NO: 15221 - protein, 8 aa, Artificial Sequence
  Synthetic construct
ISGSGGST

SEQ ID NO: 15222 - protein, 8 aa, Artificial Sequence
  Synthetic construct
IDPENGHT

SEQ ID NO: 15223 - protein, 8 aa, Artificial Sequence
  Synthetic construct
ISGGSSYI

SEQ ID NO: 15224 - protein, 7 aa, Artificial Sequence
  Synthetic construct
IYSGGST

SEQ ID NO: 15225 - protein, 7 aa, Artificial Sequence
  Synthetic construct
IYYSGNT

SEQ ID NO: 15226 - protein, 7 aa, Artificial Sequence
  Synthetic construct
IYHSGST

SEQ ID NO: 15227 - protein, 8 aa, Artificial Sequence
  Synthetic construct
ISSSSSYI

SEQ ID NO: 15228 - protein, 7 aa, Artificial Sequence
  Synthetic construct
IYWDDDK

SEQ ID NO: 15229 - protein, 8 aa, Artificial Sequence
  Synthetic construct
ISAYNGNT

SEQ ID NO: 15230 - protein, 8 aa, Artificial Sequence
  Synthetic construct
INISGGST

SEQ ID NO: 15231 - protein, 8 aa, Artificial Sequence
  Synthetic construct
ISGSTTYI

SEQ ID NO: 15232 - protein, 8 aa, Artificial Sequence
  Synthetic construct
ISSNGANT

SEQ ID NO: 15233 - protein, 8 aa, Artificial Sequence
  Synthetic construct
ISAYNGDT

SEQ ID NO: 15234 - protein, 7 aa, Artificial Sequence
  Synthetic construct
IYTSGST

SEQ ID NO: 15235 - protein, 7 aa, Artificial Sequence
  Synthetic construct
IYTSGST

SEQ ID NO: 15236 - protein, 8 aa, Artificial Sequence
  Synthetic construct
ISYDGSNK

SEQ ID NO: 15237 - protein, 8 aa, Artificial Sequence
  Synthetic construct
ISSSGSTI

SEQ ID NO: 15238 - protein, 8 aa, Artificial Sequence
  Synthetic construct
IWYDATKK

SEQ ID NO: 15239 - protein, 8 aa, Artificial Sequence
  Synthetic construct
ISSSSSYI

SEQ ID NO: 15240 - protein, 8 aa, Artificial Sequence
  Synthetic construct
ISYDGADT

SEQ ID NO: 15241 - protein, 8 aa, Artificial Sequence
  Synthetic construct
ISGSGGST

SEQ ID NO: 15242 - protein, 8 aa, Artificial Sequence
  Synthetic construct
ISGSGGST

SEQ ID NO: 15243 - protein, 7 aa, Artificial Sequence
  Synthetic construct
IYHSGNT

SEQ ID NO: 15244 - protein, 8 aa, Artificial Sequence
  Synthetic construct
ISDDGNNN

SEQ ID NO: 15245 - protein, 8 aa, Artificial Sequence
  Synthetic construct
ISAYNGDT

SEQ ID NO: 15246 - protein, 8 aa, Artificial Sequence
  Synthetic construct
ISYDGSNK

SEQ ID NO: 15247 - protein, 7 aa, Artificial Sequence
  Synthetic construct
IDWDGEA

SEQ ID NO: 15248 - protein, 8 aa, Artificial Sequence
  Synthetic construct
ISSSSSYI

SEQ ID NO: 15249 - protein, 7 aa, Artificial Sequence
  Synthetic construct
IYYSGST

SEQ ID NO: 15250 - protein, 8 aa, Artificial Sequence
  Synthetic construct
IREDGGAK

SEQ ID NO: 15251 - protein, 7 aa, Artificial Sequence
  Synthetic construct
IYYSGST

SEQ ID NO: 15252 - protein, 8 aa, Artificial Sequence
  Synthetic construct
INVDNSNT

SEQ ID NO: 15253 - protein, 8 aa, Artificial Sequence
  Synthetic construct
ISSSSSYI

SEQ ID NO: 15254 - protein, 7 aa, Artificial Sequence
  Synthetic construct
ISPDGRT

SEQ ID NO: 15255 - protein, 7 aa, Artificial Sequence
  Synthetic construct
IYYSGST

SEQ ID NO: 15256 - protein, 7 aa, Artificial Sequence
  Synthetic construct
IYHSGTT

SEQ ID NO: 15257 - protein, 7 aa, Artificial Sequence
  Synthetic construct
IYYSGST

SEQ ID NO: 15258 - protein, 8 aa, Artificial Sequence
  Synthetic construct
LSYDGSNK

SEQ ID NO: 15259 - protein, 8 aa, Artificial Sequence
  Synthetic construct
ISYHGSIT

SEQ ID NO: 15260 - protein, 8 aa, Artificial Sequence
  Synthetic construct
ISSSSSYI

SEQ ID NO: 15261 - protein, 6 aa, Artificial Sequence
  Synthetic construct
FSFSGT

SEQ ID NO: 15262 - protein, 8 aa, Artificial Sequence
  Synthetic construct
IYPKDGST

SEQ ID NO: 15263 - protein, 7 aa, Artificial Sequence
  Synthetic construct
IYYDGKT

SEQ ID NO: 15264 - protein, 8 aa, Artificial Sequence
  Synthetic construct
INPNSGGT

SEQ ID NO: 15265 - protein, 8 aa, Artificial Sequence
  Synthetic construct
IKQDGSEK

SEQ ID NO: 15266 - protein, 8 aa, Artificial Sequence
  Synthetic construct
VNPSDSRA

SEQ ID NO: 15267 - protein, 8 aa, Artificial Sequence
  Synthetic construct
IKKDGSET

SEQ ID NO: 15268 - protein, 8 aa, Artificial Sequence
  Synthetic construct
IDPTDSYT

SEQ ID NO: 15269 - protein, 8 aa, Artificial Sequence
  Synthetic construct
FDPEDGET

SEQ ID NO: 15270 - protein, 8 aa, Artificial Sequence
  Synthetic construct
ISASNNYI

SEQ ID NO: 15271 - protein, 8 aa, Artificial Sequence
  Synthetic construct
ISGSGGTT

SEQ ID NO: 15272 - protein, 8 aa, Artificial Sequence
  Synthetic construct
ILHNESKK

SEQ ID NO: 15273 - protein, 8 aa, Artificial Sequence
  Synthetic construct
INNDGSTT

SEQ ID NO: 15274 - protein, 8 aa, Artificial Sequence
  Synthetic construct
IKQDGSEK

SEQ ID NO: 15275 - protein, 7 aa, Artificial Sequence
  Synthetic construct
IYHSGTT

SEQ ID NO: 15276 - protein, 8 aa, Artificial Sequence
  Synthetic construct
IRPADSNT

SEQ ID NO: 15277 - protein, 8 aa, Artificial Sequence
  Synthetic construct
INAGNGNT

SEQ ID NO: 15278 - protein, 7 aa, Artificial Sequence
  Synthetic construct
IYYSGST

SEQ ID NO: 15279 - protein, 8 aa, Artificial Sequence
  Synthetic construct
MNPNSGNT

SEQ ID NO: 15280 - protein, 8 aa, Artificial Sequence
  Synthetic construct
ISGSGGST

SEQ ID NO: 15281 - protein, 8 aa, Artificial Sequence
  Synthetic construct
INTNTGNP

SEQ ID NO: 15282 - protein, 7 aa, Artificial Sequence
  Synthetic construct
IYYSGST

SEQ ID NO: 15283 - protein, 8 aa, Artificial Sequence
  Synthetic construct
ISAYNGDT

SEQ ID NO: 15284 - protein, 7 aa, Artificial Sequence
  Synthetic construct
IYWDDDK

SEQ ID NO: 15285 - protein, 8 aa, Artificial Sequence
  Synthetic construct
ISTYNGKA

SEQ ID NO: 15286 - protein, 8 aa, Artificial Sequence
  Synthetic construct
ISHDGNDI

SEQ ID NO: 15287 - protein, 8 aa, Artificial Sequence
  Synthetic construct
IWYDGTNK

SEQ ID NO: 15288 - protein, 8 aa, Artificial Sequence
  Synthetic construct
INGNGGST

SEQ ID NO: 15289 - protein, 7 aa, Artificial Sequence
  Synthetic construct
IHHSGST

SEQ ID NO: 15290 - protein, 7 aa, Artificial Sequence
  Synthetic construct
IHDNGAT

SEQ ID NO: 15291 - protein, 8 aa, Artificial Sequence
  Synthetic construct
ISDDGNNN

SEQ ID NO: 15292 - protein, 8 aa, Artificial Sequence
  Synthetic construct
IDPTDSYS

SEQ ID NO: 15293 - protein, 8 aa, Artificial Sequence
  Synthetic construct
ISGSGGST

SEQ ID NO: 15294 - protein, 8 aa, Artificial Sequence
  Synthetic construct
IYPADSDT

SEQ ID NO: 15295 - protein, 8 aa, Artificial Sequence
  Synthetic construct
ISGSGGST

SEQ ID NO: 15296 - protein, 8 aa, Artificial Sequence
  Synthetic construct
ISSSSSYI

SEQ ID NO: 15297 - protein, 8 aa, Artificial Sequence
  Synthetic construct
ISHDGRNE

SEQ ID NO: 15298 - protein, 7 aa, Artificial Sequence
  Synthetic construct
IYYSGST

SEQ ID NO: 15299 - protein, 7 aa, Artificial Sequence
  Synthetic construct
IYWDDDK

SEQ ID NO: 15300 - protein, 7 aa, Artificial Sequence
  Synthetic construct
IYTSGST

SEQ ID NO: 15301 - protein, 7 aa, Artificial Sequence
  Synthetic construct
IYTSGST

SEQ ID NO: 15302 - protein, 8 aa, Artificial Sequence
  Synthetic construct
INQDGSEN

SEQ ID NO: 15303 - protein, 7 aa, Artificial Sequence
  Synthetic construct
IYYSGST

SEQ ID NO: 15304 - protein, 8 aa, Artificial Sequence
  Synthetic construct
ISSTSSTI

SEQ ID NO: 15305 - protein, 8 aa, Artificial Sequence
  Synthetic construct
IKPDGSEK

SEQ ID NO: 15306 - protein, 8 aa, Artificial Sequence
  Synthetic construct
ISGSGNII

SEQ ID NO: 15307 - protein, 8 aa, Artificial Sequence
  Synthetic construct
ISYDGSNK

SEQ ID NO: 15308 - protein, 8 aa, Artificial Sequence
  Synthetic construct
IDPTDSYT

SEQ ID NO: 15309 - protein, 8 aa, Artificial Sequence
  Synthetic construct
INSDGSST

SEQ ID NO: 15310 - protein, 7 aa, Artificial Sequence
  Synthetic construct
IYSGGST

SEQ ID NO: 15311 - protein, 10 aa, Artificial Sequence
  Synthetic construct
IKSKTDGGTT

SEQ ID NO: 15312 - protein, 7 aa, Artificial Sequence
  Synthetic construct
VYTTGST

SEQ ID NO: 15313 - protein, 8 aa, Artificial Sequence
  Synthetic construct
ISTYNGKA

SEQ ID NO: 15314 - protein, 8 aa, Artificial Sequence
  Synthetic construct
ISTYNGKA

SEQ ID NO: 15315 - protein, 8 aa, Artificial Sequence
  Synthetic construct
ISDDGSYI

SEQ ID NO: 15316 - protein, 7 aa, Artificial Sequence
  Synthetic construct
IGMGGDT

SEQ ID NO: 15317 - protein, 7 aa, Artificial Sequence
  Synthetic construct
INHSGTT

SEQ ID NO: 15318 - protein, 8 aa, Artificial Sequence
  Synthetic construct
ISSSSSYI

SEQ ID NO: 15319 - protein, 8 aa, Artificial Sequence
  Synthetic construct
IIPILGIA

SEQ ID NO: 15320 - protein, 8 aa, Artificial Sequence
  Synthetic construct
IDDSSTYT

SEQ ID NO: 15321 - protein, 10 aa, Artificial Sequence
  Synthetic construct
IRSKANSYAT

SEQ ID NO: 15322 - protein, 7 aa, Artificial Sequence
  Synthetic construct
IYYSGST

SEQ ID NO: 15323 - protein, 8 aa, Artificial Sequence
  Synthetic construct
ISYDGSNK

SEQ ID NO: 15324 - protein, 8 aa, Artificial Sequence
  Synthetic construct
INAGNGDT

SEQ ID NO: 15325 - protein, 8 aa, Artificial Sequence
  Synthetic construct
ISGRDENT

SEQ ID NO: 15326 - protein, 10 aa, Artificial Sequence
  Synthetic construct
IRSKAYGGTT

SEQ ID NO: 15327 - protein, 8 aa, Artificial Sequence
  Synthetic construct
IWYDGSYK

SEQ ID NO: 15328 - protein, 7 aa, Artificial Sequence
  Synthetic construct
IYYSGST

SEQ ID NO: 15329 - protein, 8 aa, Artificial Sequence
  Synthetic construct
IKHDGSET

SEQ ID NO: 15330 - protein, 7 aa, Artificial Sequence
  Synthetic construct
IYYSGTT

SEQ ID NO: 15331 - protein, 7 aa, Artificial Sequence
  Synthetic construct
IYSGGST

SEQ ID NO: 15332 - protein, 8 aa, Artificial Sequence
  Synthetic construct
ISAKNGDR

SEQ ID NO: 15333 - protein, 8 aa, Artificial Sequence
  Synthetic construct
ISYDGSNK

SEQ ID NO: 15334 - protein, 8 aa, Artificial Sequence
  Synthetic construct
ISRSGTYI

SEQ ID NO: 15335 - protein, 8 aa, Artificial Sequence
  Synthetic construct
LSGSGRST

SEQ ID NO: 15336 - protein, 8 aa, Artificial Sequence
  Synthetic construct
ISSSSSTI

SEQ ID NO: 15337 - protein, 7 aa, Artificial Sequence
  Synthetic construct
IYDSGST

SEQ ID NO: 15338 - protein, 8 aa, Artificial Sequence
  Synthetic construct
ISRSGSSR

SEQ ID NO: 15339 - protein, 8 aa, Artificial Sequence
  Synthetic construct
ISTYNGKA

SEQ ID NO: 15340 - protein, 4 aa, Artificial Sequence
  Synthetic construct
SGTF

SEQ ID NO: 15341 - protein, 7 aa, Artificial Sequence
  Synthetic construct
IYYSGTT

SEQ ID NO: 15342 - protein, 8 aa, Artificial Sequence
  Synthetic construct
IYPGDSDT

SEQ ID NO: 15343 - protein, 7 aa, Artificial Sequence
  Synthetic construct
IYTSGST

SEQ ID NO: 15344 - protein, 8 aa, Artificial Sequence
  Synthetic construct
ISYDGSNK

SEQ ID NO: 15345 - protein, 8 aa, Artificial Sequence
  Synthetic construct
ISHDGGYK

SEQ ID NO: 15346 - protein, 8 aa, Artificial Sequence
  Synthetic construct
IDPTDSYT

SEQ ID NO: 15347 - protein, 8 aa, Artificial Sequence
  Synthetic construct
ISRNDRSS

SEQ ID NO: 15348 - protein, 8 aa, Artificial Sequence
  Synthetic construct
INTNTGNP

SEQ ID NO: 15349 - protein, 7 aa, Artificial Sequence
  Synthetic construct
IYYSGST

SEQ ID NO: 15350 - protein, 8 aa, Artificial Sequence
  Synthetic construct
ISDDGSTK

SEQ ID NO: 15351 - protein, 7 aa, Artificial Sequence
  Synthetic construct
IGTAGDT

SEQ ID NO: 15352 - protein, 8 aa, Artificial Sequence
  Synthetic construct
ILYDGGDK

SEQ ID NO: 15353 - protein, 8 aa, Artificial Sequence
  Synthetic construct
VTPIFGTT

SEQ ID NO: 15354 - protein, 7 aa, Artificial Sequence
  Synthetic construct
IYHSGST

SEQ ID NO: 15355 - protein, 8 aa, Artificial Sequence
  Synthetic construct
ISVDGNNK

SEQ ID NO: 15356 - protein, 8 aa, Artificial Sequence
  Synthetic construct
ISAYNGNT

SEQ ID NO: 15357 - protein, 8 aa, Artificial Sequence
  Synthetic construct
ISSNGGST

SEQ ID NO: 15358 - protein, 8 aa, Artificial Sequence
  Synthetic construct
MNSNSGGT

SEQ ID NO: 15359 - protein, 8 aa, Artificial Sequence
  Synthetic construct
ISSSSSYT

SEQ ID NO: 15360 - protein, 7 aa, Artificial Sequence
  Synthetic construct
INPSGNT

SEQ ID NO: 15361 - protein, 8 aa, Artificial Sequence
  Synthetic construct
ISGSGGST

SEQ ID NO: 15362 - protein, 8 aa, Artificial Sequence
  Synthetic construct
ISGSGGST

SEQ ID NO: 15363 - protein, 8 aa, Artificial Sequence
  Synthetic construct
IDPTDSYT

SEQ ID NO: 15364 - protein, 8 aa, Artificial Sequence
  Synthetic construct
ISYDGSNK

SEQ ID NO: 15365 - protein, 8 aa, Artificial Sequence
  Synthetic construct
ISGSGGST

SEQ ID NO: 15366 - protein, 8 aa, Artificial Sequence
  Synthetic construct
VDPEDGET

SEQ ID NO: 15367 - protein, 8 aa, Artificial Sequence
  Synthetic construct
ISSTSNYI

SEQ ID NO: 15368 - protein, 7 aa, Artificial Sequence
  Synthetic construct
TYHSGGT

SEQ ID NO: 15369 - protein, 8 aa, Artificial Sequence
  Synthetic construct
ISGYNGKT

SEQ ID NO: 15370 - protein, 7 aa, Artificial Sequence
  Synthetic construct
IYYSGST

SEQ ID NO: 15371 - protein, 10 aa, Artificial Sequence
  Synthetic construct
IRSKANSYAT

SEQ ID NO: 15372 - protein, 8 aa, Artificial Sequence
  Synthetic construct
MNPNSGNT

SEQ ID NO: 15373 - protein, 8 aa, Artificial Sequence
  Synthetic construct
ISSSSSYI

SEQ ID NO: 15374 - protein, 8 aa, Artificial Sequence
  Synthetic construct
IDDSSTYT

SEQ ID NO: 15375 - protein, 8 aa, Artificial Sequence
  Synthetic construct
ISYDGSNK

SEQ ID NO: 15376 - protein, 8 aa, Artificial Sequence
  Synthetic construct
ISRSSSYI

SEQ ID NO: 15377 - protein, 8 aa, Artificial Sequence
  Synthetic construct
IYPGDFDT

SEQ ID NO: 15378 - protein, 7 aa, Artificial Sequence
  Synthetic construct
IHYSGGT

SEQ ID NO: 15379 - protein, 8 aa, Artificial Sequence
  Synthetic construct
ISYDGSNK

SEQ ID NO: 15380 - protein, 8 aa, Artificial Sequence
  Synthetic construct
ISSSSSYI

SEQ ID NO: 15381 - protein, 8 aa, Artificial Sequence
  Synthetic construct
ISTTSNTI

SEQ ID NO: 15382 - protein, 7 aa, Artificial Sequence
  Synthetic construct
IFSNDEK

SEQ ID NO: 15383 - protein, 8 aa, Artificial Sequence
  Synthetic construct
ISSSGSNI

SEQ ID NO: 15384 - protein, 7 aa, Artificial Sequence
  Synthetic construct
IFAHGST

SEQ ID NO: 15385 - protein, 8 aa, Artificial Sequence
  Synthetic construct
INPNSGGT

SEQ ID NO: 15386 - protein, 8 aa, Artificial Sequence
  Synthetic construct
ISGSGTYI

SEQ ID NO: 15387 - protein, 7 aa, Artificial Sequence
  Synthetic construct
IYTSGST

SEQ ID NO: 15388 - protein, 8 aa, Artificial Sequence
  Synthetic construct
ISSSSSYI

SEQ ID NO: 15389 - protein, 8 aa, Artificial Sequence
  Synthetic construct
ISTSGGRQ

SEQ ID NO: 15390 - protein, 8 aa, Artificial Sequence
  Synthetic construct
INSDGSST

SEQ ID NO: 15391 - protein, 8 aa, Artificial Sequence
  Synthetic construct
ISSSSSYI

SEQ ID NO: 15392 - protein, 8 aa, Artificial Sequence
  Synthetic construct
ISTSSIDI

SEQ ID NO: 15393 - protein, 7 aa, Artificial Sequence
  Synthetic construct
IYDSGST

SEQ ID NO: 15394 - protein, 8 aa, Artificial Sequence
  Synthetic construct
ISTYNGKA

SEQ ID NO: 15395 - protein, 8 aa, Artificial Sequence
  Synthetic construct
ISAHNGNT

SEQ ID NO: 15396 - protein, 8 aa, Artificial Sequence
  Synthetic construct
IYPGDSDT

SEQ ID NO: 15397 - protein, 7 aa, Artificial Sequence
  Synthetic construct
IYYSVRS

SEQ ID NO: 15398 - protein, 8 aa, Artificial Sequence
  Synthetic construct
IKQDGSEK

SEQ ID NO: 15399 - protein, 7 aa, Artificial Sequence
  Synthetic construct
LHNGAGT

SEQ ID NO: 15400 - protein, 8 aa, Artificial Sequence
  Synthetic construct
ISSSSSYI

SEQ ID NO: 15401 - protein, 8 aa, Artificial Sequence
  Synthetic construct
ISATGSNT

SEQ ID NO: 15402 - protein, 8 aa, Artificial Sequence
  Synthetic construct
INIDGSRT

SEQ ID NO: 15403 - protein, 8 aa, Artificial Sequence
  Synthetic construct
LSGSGRGT

SEQ ID NO: 15404 - protein, 8 aa, Artificial Sequence
  Synthetic construct
ISTISATI

SEQ ID NO: 15405 - protein, 8 aa, Artificial Sequence
  Synthetic construct
IIPIFGTA

SEQ ID NO: 15406 - protein, 8 aa, Artificial Sequence
  Synthetic construct
ITAIPYDR

SEQ ID NO: 15407 - protein, 7 aa, Artificial Sequence
  Synthetic construct
LYSDTKT

SEQ ID NO: 15408 - protein, 7 aa, Artificial Sequence
  Synthetic construct
IYTSGKT

SEQ ID NO: 15409 - protein, 8 aa, Artificial Sequence
  Synthetic construct
ISSSSSYI

SEQ ID NO: 15410 - protein, 8 aa, Artificial Sequence
  Synthetic construct
ISYDGSNK

SEQ ID NO: 15411 - protein, 8 aa, Artificial Sequence
  Synthetic construct
ISSNGGST

SEQ ID NO: 15412 - protein, 7 aa, Artificial Sequence
  Synthetic construct
IYYSGST

SEQ ID NO: 15413 - protein, 7 aa, Artificial Sequence
  Synthetic construct
IYYSGST

SEQ ID NO: 15414 - protein, 8 aa, Artificial Sequence
  Synthetic construct
IYPGDSDT

SEQ ID NO: 15415 - protein, 8 aa, Artificial Sequence
  Synthetic construct
ISAYNGNT

SEQ ID NO: 15416 - protein, 8 aa, Artificial Sequence
  Synthetic construct
INPKNGGT

SEQ ID NO: 15417 - protein, 8 aa, Artificial Sequence
  Synthetic construct
IIPILDIA

SEQ ID NO: 15418 - protein, 8 aa, Artificial Sequence
  Synthetic construct
IKQDGSEK

SEQ ID NO: 15419 - protein, 8 aa, Artificial Sequence
  Synthetic construct
ISYDGSNK

SEQ ID NO: 15420 - protein, 10 aa, Artificial Sequence
  Synthetic construct
IRSSNDGGPT

SEQ ID NO: 15421 - protein, 8 aa, Artificial Sequence
  Synthetic construct
ISYDGSNK

SEQ ID NO: 15422 - protein, 10 aa, Artificial Sequence
  Synthetic construct
IRSKANSYAT

SEQ ID NO: 15423 - protein, 8 aa, Artificial Sequence
  Synthetic construct
ISGSGGST

SEQ ID NO: 15424 - protein, 8 aa, Artificial Sequence
  Synthetic construct
ISGSGGST

SEQ ID NO: 15425 - protein, 7 aa, Artificial Sequence
  Synthetic construct
IYYSGST

SEQ ID NO: 15426 - protein, 8 aa, Artificial Sequence
  Synthetic construct
VNADSGVT

SEQ ID NO: 15427 - protein, 7 aa, Artificial Sequence
  Synthetic construct
IYYSGST

SEQ ID NO: 15428 - protein, 8 aa, Artificial Sequence
  Synthetic construct
MNTDGSEK

SEQ ID NO: 15429 - protein, 8 aa, Artificial Sequence
  Synthetic construct
ISYDGGVR

SEQ ID NO: 15430 - protein, 8 aa, Artificial Sequence
  Synthetic construct
IDPTDSYT

SEQ ID NO: 15431 - protein, 8 aa, Artificial Sequence
  Synthetic construct
IDPETAEV

SEQ ID NO: 15432 - protein, 8 aa, Artificial Sequence
  Synthetic construct
TSYAGTDK

SEQ ID NO: 15433 - protein, 8 aa, Artificial Sequence
  Synthetic construct
IKQDGSEK

SEQ ID NO: 15434 - protein, 8 aa, Artificial Sequence
  Synthetic construct
ISGSGGST

SEQ ID NO: 15435 - protein, 8 aa, Artificial Sequence
  Synthetic construct
IKQDGSEK

SEQ ID NO: 15436 - protein, 8 aa, Artificial Sequence
  Synthetic construct
ISYDGSNK

SEQ ID NO: 15437 - protein, 10 aa, Artificial Sequence
  Synthetic construct
IRSKAYGGTT

SEQ ID NO: 15438 - protein, 8 aa, Artificial Sequence
  Synthetic construct
ISYDGSNK

SEQ ID NO: 15439 - protein, 7 aa, Artificial Sequence
  Synthetic construct
FYSSGTT

SEQ ID NO: 15440 - protein, 7 aa, Artificial Sequence
  Synthetic construct
VYYLGTT

SEQ ID NO: 15441 - protein, 8 aa, Artificial Sequence
  Synthetic construct
ISAYNGNT

SEQ ID NO: 15442 - protein, 10 aa, Artificial Sequence
  Synthetic construct
IKSKADGGTA

SEQ ID NO: 15443 - protein, 7 aa, Artificial Sequence
  Synthetic construct
MYYSGTT

SEQ ID NO: 15444 - protein, 8 aa, Artificial Sequence
  Synthetic construct
ISYDGKYK

SEQ ID NO: 15445 - protein, 8 aa, Artificial Sequence
  Synthetic construct
ISYDGSNK

SEQ ID NO: 15446 - protein, 8 aa, Artificial Sequence
  Synthetic construct
ISGSGGST

SEQ ID NO: 15447 - protein, 7 aa, Artificial Sequence
  Synthetic construct
IFSNDEK

SEQ ID NO: 15448 - protein, 7 aa, Artificial Sequence
  Synthetic construct
IYGEGDN

SEQ ID NO: 15449 - protein, 8 aa, Artificial Sequence
  Synthetic construct
ISGSGGST

SEQ ID NO: 15450 - protein, 7 aa, Artificial Sequence
  Synthetic construct
VFYSGST

SEQ ID NO: 15451 - protein, 8 aa, Artificial Sequence
  Synthetic construct
IDPSDSYT

SEQ ID NO: 15452 - protein, 8 aa, Artificial Sequence
  Synthetic construct
ISGHTGDT

SEQ ID NO: 15453 - protein, 7 aa, Artificial Sequence
  Synthetic construct
IYYSGST

SEQ ID NO: 15454 - protein, 8 aa, Artificial Sequence
  Synthetic construct
ISGSGGST

SEQ ID NO: 15455 - protein, 10 aa, Artificial Sequence
  Synthetic construct
IKSKTDGGTT

SEQ ID NO: 15456 - protein, 8 aa, Artificial Sequence
  Synthetic construct
INWNSGGR

SEQ ID NO: 15457 - protein, 8 aa, Artificial Sequence
  Synthetic construct
INPNSGGT

SEQ ID NO: 15458 - protein, 8 aa, Artificial Sequence
  Synthetic construct
IWFDGSHQ

SEQ ID NO: 15459 - protein, 8 aa, Artificial Sequence
  Synthetic construct
INPNSGDT

SEQ ID NO: 15460 - protein, 7 aa, Artificial Sequence
  Synthetic construct
IYFTGST

SEQ ID NO: 15461 - protein, 8 aa, Artificial Sequence
  Synthetic construct
IWYDGSNK

SEQ ID NO: 15462 - protein, 8 aa, Artificial Sequence
  Synthetic construct
IIPILGIT

SEQ ID NO: 15463 - protein, 8 aa, Artificial Sequence
  Synthetic construct
ISSSSSYI

SEQ ID NO: 15464 - protein, 8 aa, Artificial Sequence
  Synthetic construct
INPSGGST

SEQ ID NO: 15465 - protein, 7 aa, Artificial Sequence
  Synthetic construct
IYYSGST

SEQ ID NO: 15466 - protein, 8 aa, Artificial Sequence
  Synthetic construct
ISSSSSTI

SEQ ID NO: 15467 - protein, 8 aa, Artificial Sequence
  Synthetic construct
ISYHGDNE

SEQ ID NO: 15468 - protein, 8 aa, Artificial Sequence
  Synthetic construct
IYPGDSDT

SEQ ID NO: 15469 - protein, 8 aa, Artificial Sequence
  Synthetic construct
ISGYNGNT

SEQ ID NO: 15470 - protein, 7 aa, Artificial Sequence
  Synthetic construct
IYYIGTA

SEQ ID NO: 15471 - protein, 7 aa, Artificial Sequence
  Synthetic construct
VYYNGSP

SEQ ID NO: 15472 - protein, 8 aa, Artificial Sequence
  Synthetic construct
ISDDGNNN

SEQ ID NO: 15473 - protein, 8 aa, Artificial Sequence
  Synthetic construct
ISAYNGNT

SEQ ID NO: 15474 - protein, 8 aa, Artificial Sequence
  Synthetic construct
INVNGYDT

SEQ ID NO: 15475 - protein, 8 aa, Artificial Sequence
  Synthetic construct
ISYDGSNK

SEQ ID NO: 15476 - protein, 8 aa, Artificial Sequence
  Synthetic construct
ISGSGGST

SEQ ID NO: 15477 - protein, 7 aa, Artificial Sequence
  Synthetic construct
IYTSGST

SEQ ID NO: 15478 - protein, 7 aa, Artificial Sequence
  Synthetic construct
IFAHGST

SEQ ID NO: 15479 - protein, 8 aa, Artificial Sequence
  Synthetic construct
ISGSGGST

SEQ ID NO: 15480 - protein, 7 aa, Artificial Sequence
  Synthetic construct
IYDSGST

SEQ ID NO: 15481 - protein, 8 aa, Artificial Sequence
  Synthetic construct
IKQDGSEK

SEQ ID NO: 15482 - protein, 7 aa, Artificial Sequence
  Synthetic construct
IYSGGST

SEQ ID NO: 15483 - protein, 8 aa, Artificial Sequence
  Synthetic construct
IKQDGSEK

SEQ ID NO: 15484 - protein, 7 aa, Artificial Sequence
  Synthetic construct
IYYSGST

SEQ ID NO: 15485 - protein, 8 aa, Artificial Sequence
  Synthetic construct
IDPSDSYT

SEQ ID NO: 15486 - protein, 8 aa, Artificial Sequence
  Synthetic construct
IYPGDSDT

SEQ ID NO: 15487 - protein, 8 aa, Artificial Sequence
  Synthetic construct
ISYDGSNK

SEQ ID NO: 15488 - protein, 7 aa, Artificial Sequence
  Synthetic construct
IYYSGST

SEQ ID NO: 15489 - protein, 9 aa, Artificial Sequence
  Synthetic construct
TYYSSKWFY

SEQ ID NO: 15490 - protein, 7 aa, Artificial Sequence
  Synthetic construct
ISNSGGT

SEQ ID NO: 15491 - protein, 10 aa, Artificial Sequence
  Synthetic construct
IKSKTDGGTT

SEQ ID NO: 15492 - protein, 8 aa, Artificial Sequence
  Synthetic construct
ISYDGSNK

SEQ ID NO: 15493 - protein, 8 aa, Artificial Sequence
  Synthetic construct
ISYDGSKT

SEQ ID NO: 15494 - protein, 8 aa, Artificial Sequence
  Synthetic construct
ISGSGGST

SEQ ID NO: 15495 - protein, 7 aa, Artificial Sequence
  Synthetic construct
IYNTGSV

SEQ ID NO: 15496 - protein, 8 aa, Artificial Sequence
  Synthetic construct
ISYDGSNK

SEQ ID NO: 15497 - protein, 8 aa, Artificial Sequence
  Synthetic construct
INPNSGGT

SEQ ID NO: 15498 - protein, 8 aa, Artificial Sequence
  Synthetic construct
ISSSSSYT

SEQ ID NO: 15499 - protein, 7 aa, Artificial Sequence
  Synthetic construct
IGTAGDP

SEQ ID NO: 15500 - protein, 7 aa, Artificial Sequence
  Synthetic construct
INHSGST

SEQ ID NO: 15501 - protein, 7 aa, Artificial Sequence
  Synthetic construct
IYYRGKT

SEQ ID NO: 15502 - protein, 7 aa, Artificial Sequence
  Synthetic construct
ISHSGST

SEQ ID NO: 15503 - protein, 8 aa, Artificial Sequence
  Synthetic construct
ISGSGGST

SEQ ID NO: 15504 - protein, 8 aa, Artificial Sequence
  Synthetic construct
IIPILGIA

SEQ ID NO: 15505 - protein, 8 aa, Artificial Sequence
  Synthetic construct
IDPSDSYT

SEQ ID NO: 15506 - protein, 8 aa, Artificial Sequence
  Synthetic construct
SANGGDKQ

SEQ ID NO: 15507 - protein, 8 aa, Artificial Sequence
  Synthetic construct
ISRSSSYI

SEQ ID NO: 15508 - protein, 7 aa, Artificial Sequence
  Synthetic construct
IYPSGAT

SEQ ID NO: 15509 - protein, 8 aa, Artificial Sequence
  Synthetic construct
INAGNGNT

SEQ ID NO: 15510 - protein, 7 aa, Artificial Sequence
  Synthetic construct
IYTSGST

SEQ ID NO: 15511 - protein, 8 aa, Artificial Sequence
  Synthetic construct
IWYDGSNK

SEQ ID NO: 15512 - protein, 8 aa, Artificial Sequence
  Synthetic construct
MNPNSGDT

SEQ ID NO: 15513 - protein, 8 aa, Artificial Sequence
  Synthetic construct
ISNSAATI

SEQ ID NO: 15514 - protein, 8 aa, Artificial Sequence
  Synthetic construct
ISSRGNAI

SEQ ID NO: 15515 - protein, 8 aa, Artificial Sequence
  Synthetic construct
ISTYNGKA

SEQ ID NO: 15516 - protein, 8 aa, Artificial Sequence
  Synthetic construct
INPSGGST

SEQ ID NO: 15517 - protein, 7 aa, Artificial Sequence
  Synthetic construct
IYYSGST

SEQ ID NO: 15518 - protein, 7 aa, Artificial Sequence
  Synthetic construct
IYWDDDK

SEQ ID NO: 15519 - protein, 8 aa, Artificial Sequence
  Synthetic construct
ISSSSSYI

SEQ ID NO: 15520 - protein, 7 aa, Artificial Sequence
  Synthetic construct
MSQRGGR

SEQ ID NO: 15521 - protein, 9 aa, Artificial Sequence
  Synthetic construct
AYYRSRWFN

SEQ ID NO: 15522 - protein, 7 aa, Artificial Sequence
  Synthetic construct
INHSGST

SEQ ID NO: 15523 - protein, 8 aa, Artificial Sequence
  Synthetic construct
IYPGDSDT

SEQ ID NO: 15524 - protein, 8 aa, Artificial Sequence
  Synthetic construct
IWYDGSNK

SEQ ID NO: 15525 - protein, 8 aa, Artificial Sequence
  Synthetic construct
IYPGDSDT

SEQ ID NO: 15526 - protein, 8 aa, Artificial Sequence
  Synthetic construct
IYFDDSDA

SEQ ID NO: 15527 - protein, 8 aa, Artificial Sequence
  Synthetic construct
IDPTDSYT

SEQ ID NO: 15528 - protein, 8 aa, Artificial Sequence
  Synthetic construct
ISSSSSYI

SEQ ID NO: 15529 - protein, 8 aa, Artificial Sequence
  Synthetic construct
INPNSGAT

SEQ ID NO: 15530 - protein, 7 aa, Artificial Sequence
  Synthetic construct
VYDGGST

SEQ ID NO: 15531 - protein, 8 aa, Artificial Sequence
  Synthetic construct
VYYDGSNE

SEQ ID NO: 15532 - protein, 7 aa, Artificial Sequence
  Synthetic construct
IYSDSTT

SEQ ID NO: 15533 - protein, 7 aa, Artificial Sequence
  Synthetic construct
IYYSGST

SEQ ID NO: 15534 - protein, 7 aa, Artificial Sequence
  Synthetic construct
IYYSGST

SEQ ID NO: 15535 - protein, 7 aa, Artificial Sequence
  Synthetic construct
IYWDDDK

SEQ ID NO: 15536 - protein, 8 aa, Artificial Sequence
  Synthetic construct
ISGSGGST

SEQ ID NO: 15537 - protein, 8 aa, Artificial Sequence
  Synthetic construct
ISGSGGST

SEQ ID NO: 15538 - protein, 7 aa, Artificial Sequence
  Synthetic construct
IIHSGIT

SEQ ID NO: 15539 - protein, 8 aa, Artificial Sequence
  Synthetic construct
ITGSSSYI

SEQ ID NO: 15540 - protein, 8 aa, Artificial Sequence
  Synthetic construct
INPTGDST

SEQ ID NO: 15541 - protein, 7 aa, Artificial Sequence
  Synthetic construct
IFYSGST

SEQ ID NO: 15542 - protein, 8 aa, Artificial Sequence
  Synthetic construct
IYPGDSDT

SEQ ID NO: 15543 - protein, 8 aa, Artificial Sequence
  Synthetic construct
INAGNGNT

SEQ ID NO: 15544 - protein, 8 aa, Artificial Sequence
  Synthetic construct
INPNNGAT

SEQ ID NO: 15545 - protein, 8 aa, Artificial Sequence
  Synthetic construct
IKPDGREE

SEQ ID NO: 15546 - protein, 8 aa, Artificial Sequence
  Synthetic construct
ISGSGGST

SEQ ID NO: 15547 - protein, 8 aa, Artificial Sequence
  Synthetic construct
ISSTSSYI

SEQ ID NO: 15548 - protein, 8 aa, Artificial Sequence
  Synthetic construct
IYPSDSDT

SEQ ID NO: 15549 - protein, 8 aa, Artificial Sequence
  Synthetic construct
ISYDGSNK

SEQ ID NO: 15550 - protein, 8 aa, Artificial Sequence
  Synthetic construct
ISFDSKNI

SEQ ID NO: 15551 - protein, 8 aa, Artificial Sequence
  Synthetic construct
INPNSGGT

SEQ ID NO: 15552 - protein, 8 aa, Artificial Sequence
  Synthetic construct
ISGRDENT

SEQ ID NO: 15553 - protein, 7 aa, Artificial Sequence
  Synthetic construct
IYTSGST

SEQ ID NO: 15554 - protein, 8 aa, Artificial Sequence
  Synthetic construct
IDDSSTYT

SEQ ID NO: 15555 - protein, 8 aa, Artificial Sequence
  Synthetic construct
ISGSGGST

SEQ ID NO: 15556 - protein, 7 aa, Artificial Sequence
  Synthetic construct
IYSSGTI

SEQ ID NO: 15557 - protein, 8 aa, Artificial Sequence
  Synthetic construct
ISSTSNTI

SEQ ID NO: 15558 - protein, 7 aa, Artificial Sequence
  Synthetic construct
IYTNGRP

SEQ ID NO: 15559 - protein, 8 aa, Artificial Sequence
  Synthetic construct
INAGNGNT

SEQ ID NO: 15560 - protein, 7 aa, Artificial Sequence
  Synthetic construct
IYDSGST

SEQ ID NO: 15561 - protein, 8 aa, Artificial Sequence
  Synthetic construct
ISGSGGST

SEQ ID NO: 15562 - protein, 8 aa, Artificial Sequence
  Synthetic construct
ISYDGTNQ

SEQ ID NO: 15563 - protein, 8 aa, Artificial Sequence
  Synthetic construct
TSTFIHDT

SEQ ID NO: 15564 - protein, 8 aa, Artificial Sequence
  Synthetic construct
ISTYNGKA

SEQ ID NO: 15565 - protein, 8 aa, Artificial Sequence
  Synthetic construct
ISSSSSYI

SEQ ID NO: 15566 - protein, 8 aa, Artificial Sequence
  Synthetic construct
IYPGDSDT

SEQ ID NO: 15567 - protein, 8 aa, Artificial Sequence
  Synthetic construct
VDPGDGET

SEQ ID NO: 15568 - protein, 8 aa, Artificial Sequence
  Synthetic construct
ISYDGSNK

SEQ ID NO: 15569 - protein, 8 aa, Artificial Sequence
  Synthetic construct
IDPSDSYT

SEQ ID NO: 15570 - protein, 8 aa, Artificial Sequence
  Synthetic construct
ISYDGSNK

SEQ ID NO: 15571 - protein, 8 aa, Artificial Sequence
  Synthetic construct
INPNSGGT

SEQ ID NO: 15572 - protein, 8 aa, Artificial Sequence
  Synthetic construct
VGGSGVTT

SEQ ID NO: 15573 - protein, 8 aa, Artificial Sequence
  Synthetic construct
IPTDDISP

SEQ ID NO: 15574 - protein, 7 aa, Artificial Sequence
  Synthetic construct
FSGDGRR

SEQ ID NO: 15575 - protein, 8 aa, Artificial Sequence
  Synthetic construct
ISGSGGST

SEQ ID NO: 15576 - protein, 8 aa, Artificial Sequence
  Synthetic construct
INTNTGAT

SEQ ID NO: 15577 - protein, 8 aa, Artificial Sequence
  Synthetic construct
INTNTENP

SEQ ID NO: 15578 - protein, 8 aa, Artificial Sequence
  Synthetic construct
TRGDGRET

SEQ ID NO: 15579 - protein, 7 aa, Artificial Sequence
  Synthetic construct
INHSGST

SEQ ID NO: 15580 - protein, 7 aa, Artificial Sequence
  Synthetic construct
LNHRGTT

SEQ ID NO: 15581 - protein, 8 aa, Artificial Sequence
  Synthetic construct
ISFDGDNE

SEQ ID NO: 15582 - protein, 7 aa, Artificial Sequence
  Synthetic construct
IYPSGPT

SEQ ID NO: 15583 - protein, 8 aa, Artificial Sequence
  Synthetic construct
ISSSSSYI

SEQ ID NO: 15584 - protein, 7 aa, Artificial Sequence
  Synthetic construct
IYHSGTT

SEQ ID NO: 15585 - protein, 7 aa, Artificial Sequence
  Synthetic construct
IYYSGST

SEQ ID NO: 15586 - protein, 8 aa, Artificial Sequence
  Synthetic construct
IDPTDSYT

SEQ ID NO: 15587 - protein, 8 aa, Artificial Sequence
  Synthetic construct
IDPTDSYT

SEQ ID NO: 15588 - protein, 8 aa, Artificial Sequence
  Synthetic construct
ISYDGSNK

SEQ ID NO: 15589 - protein, 8 aa, Artificial Sequence
  Synthetic construct
ISWNSGSI

SEQ ID NO: 15590 - protein, 8 aa, Artificial Sequence
  Synthetic construct
ISTYSGNP

SEQ ID NO: 15591 - protein, 8 aa, Artificial Sequence
  Synthetic construct
FSGSDGRT

SEQ ID NO: 15592 - protein, 8 aa, Artificial Sequence
  Synthetic construct
INPNSGGT

SEQ ID NO: 15593 - protein, 8 aa, Artificial Sequence
  Synthetic construct
ISYDGSNK

SEQ ID NO: 15594 - protein, 8 aa, Artificial Sequence
  Synthetic construct
VDPENEDA

SEQ ID NO: 15595 - protein, 7 aa, Artificial Sequence
  Synthetic construct
IYYRGNT

SEQ ID NO: 15596 - protein, 8 aa, Artificial Sequence
  Synthetic construct
VSWNSDNV

SEQ ID NO: 15597 - protein, 7 aa, Artificial Sequence
  Synthetic construct
IYTSGST

SEQ ID NO: 15598 - protein, 8 aa, Artificial Sequence
  Synthetic construct
ISGSGGST

SEQ ID NO: 15599 - protein, 8 aa, Artificial Sequence
  Synthetic construct
INPNSGGT

SEQ ID NO: 15600 - protein, 8 aa, Artificial Sequence
  Synthetic construct
INAGNGNT

SEQ ID NO: 15601 - protein, 7 aa, Artificial Sequence
  Synthetic construct
FYYSGST

SEQ ID NO: 15602 - protein, 7 aa, Artificial Sequence
  Synthetic construct
ISYSGTA

SEQ ID NO: 15603 - protein, 8 aa, Artificial Sequence
  Synthetic construct
INPNSGGT

SEQ ID NO: 15604 - protein, 8 aa, Artificial Sequence
  Synthetic construct
MTGSGAAS

SEQ ID NO: 15605 - protein, 8 aa, Artificial Sequence
  Synthetic construct
ISSSSSYI

SEQ ID NO: 15606 - protein, 7 aa, Artificial Sequence
  Synthetic construct
VYYLGTT

SEQ ID NO: 15607 - protein, 8 aa, Artificial Sequence
  Synthetic construct
IDPTDSYT

SEQ ID NO: 15608 - protein, 8 aa, Artificial Sequence
  Synthetic construct
ITANGFGT

SEQ ID NO: 15609 - protein, 8 aa, Artificial Sequence
  Synthetic construct
ITNTGRTI

SEQ ID NO: 15610 - protein, 7 aa, Artificial Sequence
  Synthetic construct
IYTSGGT

SEQ ID NO: 15611 - protein, 8 aa, Artificial Sequence
  Synthetic construct
IWYDGSKK

SEQ ID NO: 15612 - protein, 7 aa, Artificial Sequence
  Synthetic construct
IYYSGST

SEQ ID NO: 15613 - protein, 8 aa, Artificial Sequence
  Synthetic construct
ISTYNGKA

SEQ ID NO: 15614 - protein, 8 aa, Artificial Sequence
  Synthetic construct
ISSSSSYI

SEQ ID NO: 15615 - protein, 8 aa, Artificial Sequence
  Synthetic construct
IWYDGSNK

SEQ ID NO: 15616 - protein, 7 aa, Artificial Sequence
  Synthetic construct
IYYSGTT

SEQ ID NO: 15617 - protein, 8 aa, Artificial Sequence
  Synthetic construct
IDPTDSYT

SEQ ID NO: 15618 - protein, 7 aa, Artificial Sequence
  Synthetic construct
INHSGST

SEQ ID NO: 15619 - protein, 7 aa, Artificial Sequence
  Synthetic construct
IYTSGST

SEQ ID NO: 15620 - protein, 8 aa, Artificial Sequence
  Synthetic construct
IRPEGTIT

SEQ ID NO: 15621 - protein, 8 aa, Artificial Sequence
  Synthetic construct
INYNGGNT

SEQ ID NO: 15622 - protein, 8 aa, Artificial Sequence
  Synthetic construct
ISSSSSTI

SEQ ID NO: 15623 - protein, 8 aa, Artificial Sequence
  Synthetic construct
IYPGDSDT

SEQ ID NO: 15624 - protein, 7 aa, Artificial Sequence
  Synthetic construct
IYHSGST

SEQ ID NO: 15625 - protein, 8 aa, Artificial Sequence
  Synthetic construct
ISGGSDYI

SEQ ID NO: 15626 - protein, 8 aa, Artificial Sequence
  Synthetic construct
IYPGDSDT

SEQ ID NO: 15627 - protein, 7 aa, Artificial Sequence
  Synthetic construct
SFHNGIT

SEQ ID NO: 15628 - protein, 8 aa, Artificial Sequence
  Synthetic construct
ISSSGRST

SEQ ID NO: 15629 - protein, 7 aa, Artificial Sequence
  Synthetic construct
IYPSGPT

SEQ ID NO: 15630 - protein, 8 aa, Artificial Sequence
  Synthetic construct
INPSGGTT

SEQ ID NO: 15631 - protein, 8 aa, Artificial Sequence
  Synthetic construct
VGYDGSNE

SEQ ID NO: 15632 - protein, 7 aa, Artificial Sequence
  Synthetic construct
IYWDDDK

SEQ ID NO: 15633 - protein, 7 aa, Artificial Sequence
  Synthetic construct
IYSGGST

SEQ ID NO: 15634 - protein, 8 aa, Artificial Sequence
  Synthetic construct
ISYDGSRK

SEQ ID NO: 15635 - protein, 8 aa, Artificial Sequence
  Synthetic construct
ISSTSSYI

SEQ ID NO: 15636 - protein, 7 aa, Artificial Sequence
  Synthetic construct
IYTSGST

SEQ ID NO: 15637 - protein, 8 aa, Artificial Sequence
  Synthetic construct
ISSDGNSK

SEQ ID NO: 15638 - protein, 8 aa, Artificial Sequence
  Synthetic construct
ISGSGTPT

SEQ ID NO: 15639 - protein, 8 aa, Artificial Sequence
  Synthetic construct
IDPTDSYT

SEQ ID NO: 15640 - protein, 8 aa, Artificial Sequence
  Synthetic construct
SNPTGSLP

SEQ ID NO: 15641 - protein, 8 aa, Artificial Sequence
  Synthetic construct
MNPNSGNT

SEQ ID NO: 15642 - protein, 7 aa, Artificial Sequence
  Synthetic construct
IYTSGST

SEQ ID NO: 15643 - protein, 8 aa, Artificial Sequence
  Synthetic construct
ISSSSSYI

SEQ ID NO: 15644 - protein, 7 aa, Artificial Sequence
  Synthetic construct
IYDSGST

SEQ ID NO: 15645 - protein, 8 aa, Artificial Sequence
  Synthetic construct
IWHDGSTK

SEQ ID NO: 15646 - protein, 8 aa, Artificial Sequence
  Synthetic construct
VSISSTYI

SEQ ID NO: 15647 - protein, 8 aa, Artificial Sequence
  Synthetic construct
IQSGVSST

SEQ ID NO: 15648 - protein, 7 aa, Artificial Sequence
  Synthetic construct
INHGGST

SEQ ID NO: 15649 - protein, 8 aa, Artificial Sequence
  Synthetic construct
IDPTDSYT

SEQ ID NO: 15650 - protein, 8 aa, Artificial Sequence
  Synthetic construct
ISSDGGST

SEQ ID NO: 15651 - protein, 9 aa, Artificial Sequence
  Synthetic construct
TYYRSKWYN

SEQ ID NO: 15652 - protein, 7 aa, Artificial Sequence
  Synthetic construct
ILSLDIN

SEQ ID NO: 15653 - protein, 7 aa, Artificial Sequence
  Synthetic construct
IYYRGDT

SEQ ID NO: 15654 - protein, 8 aa, Artificial Sequence
  Synthetic construct
LTGSGGST

SEQ ID NO: 15655 - protein, 7 aa, Artificial Sequence
  Synthetic construct
INHSGSI

SEQ ID NO: 15656 - protein, 10 aa, Artificial Sequence
  Synthetic construct
IRSQANGYAT

SEQ ID NO: 15657 - protein, 8 aa, Artificial Sequence
  Synthetic construct
ISSHGGST

SEQ ID NO: 15658 - protein, 8 aa, Artificial Sequence
  Synthetic construct
ISYDGSNK

SEQ ID NO: 15659 - protein, 8 aa, Artificial Sequence
  Synthetic construct
IWHDGSNK

SEQ ID NO: 15660 - protein, 8 aa, Artificial Sequence
  Synthetic construct
LSSDGNTE

SEQ ID NO: 15661 - protein, 10 aa, Artificial Sequence
  Synthetic construct
IRSSNDGGPT

SEQ ID NO: 15662 - protein, 8 aa, Artificial Sequence
  Synthetic construct
ISHTGRDQ

SEQ ID NO: 15663 - protein, 7 aa, Artificial Sequence
  Synthetic construct
IYPSGPT

SEQ ID NO: 15664 - protein, 8 aa, Artificial Sequence
  Synthetic construct
ISDDGRTT

SEQ ID NO: 15665 - protein, 8 aa, Artificial Sequence
  Synthetic construct
FDPEDGET

SEQ ID NO: 15666 - protein, 8 aa, Artificial Sequence
  Synthetic construct
IIPILHTT

SEQ ID NO: 15667 - protein, 7 aa, Artificial Sequence
  Synthetic construct
IGPAGDT

SEQ ID NO: 15668 - protein, 8 aa, Artificial Sequence
  Synthetic construct
VSISSTYI

SEQ ID NO: 15669 - protein, 8 aa, Artificial Sequence
  Synthetic construct
ISSTDDST

SEQ ID NO: 15670 - protein, 7 aa, Artificial Sequence
  Synthetic construct
IYTSGST

SEQ ID NO: 15671 - protein, 8 aa, Artificial Sequence
  Synthetic construct
ISYDGSNK

SEQ ID NO: 15672 - protein, 7 aa, Artificial Sequence
  Synthetic construct
IYYSGST

SEQ ID NO: 15673 - protein, 8 aa, Artificial Sequence
  Synthetic construct
ISYDGSHE

SEQ ID NO: 15674 - protein, 8 aa, Artificial Sequence
  Synthetic construct
IYPGDSDT

SEQ ID NO: 15675 - protein, 8 aa, Artificial Sequence
  Synthetic construct
ISGYSGNT

SEQ ID NO: 15676 - protein, 7 aa, Artificial Sequence
  Synthetic construct
IYYSGST

SEQ ID NO: 15677 - protein, 8 aa, Artificial Sequence
  Synthetic construct
ISAYNGNT

SEQ ID NO: 15678 - protein, 8 aa, Artificial Sequence
  Synthetic construct
ISYDGSNK

SEQ ID NO: 15679 - protein, 8 aa, Artificial Sequence
  Synthetic construct
IIPILGIA

SEQ ID NO: 15680 - protein, 8 aa, Artificial Sequence
  Synthetic construct
ISRSSSYI

SEQ ID NO: 15681 - protein, 8 aa, Artificial Sequence
  Synthetic construct
INAGNGNT

SEQ ID NO: 15682 - protein, 8 aa, Artificial Sequence
  Synthetic construct
ISHSNHYI

SEQ ID NO: 15683 - protein, 8 aa, Artificial Sequence
  Synthetic construct
IYPGDSDI

SEQ ID NO: 15684 - protein, 8 aa, Artificial Sequence
  Synthetic construct
INPSGGST

SEQ ID NO: 15685 - protein, 8 aa, Artificial Sequence
  Synthetic construct
ISWNSRSI

SEQ ID NO: 15686 - protein, 7 aa, Artificial Sequence
  Synthetic construct
IYYSGST

SEQ ID NO: 15687 - protein, 8 aa, Artificial Sequence
  Synthetic construct
IDPSDSYT

SEQ ID NO: 15688 - protein, 7 aa, Artificial Sequence
  Synthetic construct
VSNRGST

SEQ ID NO: 15689 - protein, 8 aa, Artificial Sequence
  Synthetic construct
VGPDDGEA

SEQ ID NO: 15690 - protein, 10 aa, Artificial Sequence
  Synthetic construct
LKSNADGGTT

SEQ ID NO: 15691 - protein, 7 aa, Artificial Sequence
  Synthetic construct
IYTSGST

SEQ ID NO: 15692 - protein, 8 aa, Artificial Sequence
  Synthetic construct
ILSDGSNK

SEQ ID NO: 15693 - protein, 10 aa, Artificial Sequence
  Synthetic construct
IRSKANSYAT

SEQ ID NO: 15694 - protein, 7 aa, Artificial Sequence
  Synthetic construct
NSHSGTS

SEQ ID NO: 15695 - protein, 8 aa, Artificial Sequence
  Synthetic construct
ISAYNGNT

SEQ ID NO: 15696 - protein, 8 aa, Artificial Sequence
  Synthetic construct
IKQDGGEK

SEQ ID NO: 15697 - protein, 7 aa, Artificial Sequence
  Synthetic construct
IYYSGST

SEQ ID NO: 15698 - protein, 8 aa, Artificial Sequence
  Synthetic construct
ISTYNGKA

SEQ ID NO: 15699 - protein, 8 aa, Artificial Sequence
  Synthetic construct
INPSGGST

SEQ ID NO: 15700 - protein, 8 aa, Artificial Sequence
  Synthetic construct
INPTGGRT

SEQ ID NO: 15701 - protein, 7 aa, Artificial Sequence
  Synthetic construct
VYARGSP

SEQ ID NO: 15702 - protein, 8 aa, Artificial Sequence
  Synthetic construct
INSDGSST

SEQ ID NO: 15703 - protein, 8 aa, Artificial Sequence
  Synthetic construct
IKQDGSEK

SEQ ID NO: 15704 - protein, 8 aa, Artificial Sequence
  Synthetic construct
ISGGGDLK

SEQ ID NO: 15705 - protein, 8 aa, Artificial Sequence
  Synthetic construct
IYYDGTNE

SEQ ID NO: 15706 - protein, 7 aa, Artificial Sequence
  Synthetic construct
IYWDDDK

SEQ ID NO: 15707 - protein, 7 aa, Artificial Sequence
  Synthetic construct
IYHSGST

SEQ ID NO: 15708 - protein, 7 aa, Artificial Sequence
  Synthetic construct
IYHSGST

SEQ ID NO: 15709 - protein, 7 aa, Artificial Sequence
  Synthetic construct
IYHNGNT

SEQ ID NO: 15710 - protein, 7 aa, Artificial Sequence
  Synthetic construct
IHHSGRA

SEQ ID NO: 15711 - protein, 8 aa, Artificial Sequence
  Synthetic construct
IWYDGSNK

SEQ ID NO: 15712 - protein, 8 aa, Artificial Sequence
  Synthetic construct
ISYDGSNK

SEQ ID NO: 15713 - protein, 8 aa, Artificial Sequence
  Synthetic construct
VDPVDGET

SEQ ID NO: 15714 - protein, 7 aa, Artificial Sequence
  Synthetic construct
INHGGST

SEQ ID NO: 15715 - protein, 8 aa, Artificial Sequence
  Synthetic construct
IWYDGTNE

SEQ ID NO: 15716 - protein, 8 aa, Artificial Sequence
  Synthetic construct
ISSSSSTI

SEQ ID NO: 15717 - protein, 7 aa, Artificial Sequence
  Synthetic construct
IYYSGSA

SEQ ID NO: 15718 - protein, 8 aa, Artificial Sequence
  Synthetic construct
ISGSGDGS

SEQ ID NO: 15719 - protein, 7 aa, Artificial Sequence
  Synthetic construct
IYYRGKT

SEQ ID NO: 15720 - protein, 8 aa, Artificial Sequence
  Synthetic construct
INSDGSST

SEQ ID NO: 15721 - protein, 8 aa, Artificial Sequence
  Synthetic construct
IGWNSGTM

SEQ ID NO: 15722 - protein, 10 aa, Artificial Sequence
  Synthetic construct
IKSKSDGGTT

SEQ ID NO: 15723 - protein, 8 aa, Artificial Sequence
  Synthetic construct
INPSGGST

SEQ ID NO: 15724 - protein, 8 aa, Artificial Sequence
  Synthetic construct
ISSSSSFL

SEQ ID NO: 15725 - protein, 8 aa, Artificial Sequence
  Synthetic construct
ISHTSVYI

SEQ ID NO: 15726 - protein, 10 aa, Artificial Sequence
  Synthetic construct
IRSKANSYAT

SEQ ID NO: 15727 - protein, 8 aa, Artificial Sequence
  Synthetic construct
ISSNGGGT

SEQ ID NO: 15728 - protein, 7 aa, Artificial Sequence
  Synthetic construct
IDGGGKT

SEQ ID NO: 15729 - protein, 8 aa, Artificial Sequence
  Synthetic construct
INSDGRST

SEQ ID NO: 15730 - protein, 8 aa, Artificial Sequence
  Synthetic construct
ISSDGATI

SEQ ID NO: 15731 - protein, 8 aa, Artificial Sequence
  Synthetic construct
IWYDGSNK

SEQ ID NO: 15732 - protein, 8 aa, Artificial Sequence
  Synthetic construct
INSDESIT

SEQ ID NO: 15733 - protein, 7 aa, Artificial Sequence
  Synthetic construct
IYTSGST

SEQ ID NO: 15734 - protein, 7 aa, Artificial Sequence
  Synthetic construct
IGSGGST

SEQ ID NO: 15735 - protein, 8 aa, Artificial Sequence
  Synthetic construct
LSGSGNTT

SEQ ID NO: 15736 - protein, 8 aa, Artificial Sequence
  Synthetic construct
ISSDTSPI

SEQ ID NO: 15737 - protein, 8 aa, Artificial Sequence
  Synthetic construct
ISAYNGNT

SEQ ID NO: 15738 - protein, 8 aa, Artificial Sequence
  Synthetic construct
ITDDGNNE

SEQ ID NO: 15739 - protein, 7 aa, Artificial Sequence
  Synthetic construct
IYSGGRT

SEQ ID NO: 15740 - protein, 8 aa, Artificial Sequence
  Synthetic construct
INPSGGNT

SEQ ID NO: 15741 - protein, 8 aa, Artificial Sequence
  Synthetic construct
INPSGNRP

SEQ ID NO: 15742 - protein, 8 aa, Artificial Sequence
  Synthetic construct
ISSSGSTI

SEQ ID NO: 15743 - protein, 8 aa, Artificial Sequence
  Synthetic construct
IYPGDSDT

SEQ ID NO: 15744 - protein, 7 aa, Artificial Sequence
  Synthetic construct
MSHRGEI

SEQ ID NO: 15745 - protein, 8 aa, Artificial Sequence
  Synthetic construct
IYPGDSQT

SEQ ID NO: 15746 - protein, 8 aa, Artificial Sequence
  Synthetic construct
ISSSSSYI

SEQ ID NO: 15747 - protein, 8 aa, Artificial Sequence
  Synthetic construct
ISAYNGNT

SEQ ID NO: 15748 - protein, 8 aa, Artificial Sequence
  Synthetic construct
INWEGDDI

SEQ ID NO: 15749 - protein, 8 aa, Artificial Sequence
  Synthetic construct
ISTYNGKA

SEQ ID NO: 15750 - protein, 8 aa, Artificial Sequence
  Synthetic construct
ISGNRDTI

SEQ ID NO: 15751 - protein, 8 aa, Artificial Sequence
  Synthetic construct
VSNDGSST

SEQ ID NO: 15752 - protein, 8 aa, Artificial Sequence
  Synthetic construct
ITGSGDNT

SEQ ID NO: 15753 - protein, 7 aa, Artificial Sequence
  Synthetic construct
IYYSGST

SEQ ID NO: 15754 - protein, 7 aa, Artificial Sequence
  Synthetic construct
INHSGST

SEQ ID NO: 15755 - protein, 8 aa, Artificial Sequence
  Synthetic construct
INPSGGST

SEQ ID NO: 15756 - protein, 8 aa, Artificial Sequence
  Synthetic construct
ISYDGSNK

SEQ ID NO: 15757 - protein, 8 aa, Artificial Sequence
  Synthetic construct
INWNSGMI

SEQ ID NO: 15758 - protein, 7 aa, Artificial Sequence
  Synthetic construct
IYTSGST

SEQ ID NO: 15759 - protein, 8 aa, Artificial Sequence
  Synthetic construct
LSGSGRGT

SEQ ID NO: 15760 - protein, 7 aa, Artificial Sequence
  Synthetic construct
IYHSGST

SEQ ID NO: 15761 - protein, 7 aa, Artificial Sequence
  Synthetic construct
IYNSGST

SEQ ID NO: 15762 - protein, 8 aa, Artificial Sequence
  Synthetic construct
ISYDGSNK

SEQ ID NO: 15763 - protein, 7 aa, Artificial Sequence
  Synthetic construct
FYSTENT

SEQ ID NO: 15764 - protein, 8 aa, Artificial Sequence
  Synthetic construct
IKQDGSEK

SEQ ID NO: 15765 - protein, 8 aa, Artificial Sequence
  Synthetic construct
IKQDGSEK

SEQ ID NO: 15766 - protein, 7 aa, Artificial Sequence
  Synthetic construct
IYWDDDK

SEQ ID NO: 15767 - protein, 9 aa, Artificial Sequence
  Synthetic construct
TYYRSKWYN

SEQ ID NO: 15768 - protein, 7 aa, Artificial Sequence
  Synthetic construct
INHSGST

SEQ ID NO: 15769 - protein, 10 aa, Artificial Sequence
  Synthetic construct
IRNKANSYTA

SEQ ID NO: 15770 - protein, 8 aa, Artificial Sequence
  Synthetic construct
INIDGSRT

SEQ ID NO: 15771 - protein, 7 aa, Artificial Sequence
  Synthetic construct
IYDSGST

SEQ ID NO: 15772 - protein, 7 aa, Artificial Sequence
  Synthetic construct
IYYSGST

SEQ ID NO: 15773 - protein, 8 aa, Artificial Sequence
  Synthetic construct
ISDSGDRS

SEQ ID NO: 15774 - protein, 7 aa, Artificial Sequence
  Synthetic construct
IHHTGGT

SEQ ID NO: 15775 - protein, 8 aa, Artificial Sequence
  Synthetic construct
IKQDGSEK

SEQ ID NO: 15776 - protein, 7 aa, Artificial Sequence
  Synthetic construct
IYHSGST

SEQ ID NO: 15777 - protein, 8 aa, Artificial Sequence
  Synthetic construct
INPSGGST

SEQ ID NO: 15778 - protein, 8 aa, Artificial Sequence
  Synthetic construct
ISGSGGNT

SEQ ID NO: 15779 - protein, 8 aa, Artificial Sequence
  Synthetic construct
IKGDGSTK

SEQ ID NO: 15780 - protein, 8 aa, Artificial Sequence
  Synthetic construct
IGGSGGST

SEQ ID NO: 15781 - protein, 7 aa, Artificial Sequence
  Synthetic construct
IYPSGPT

SEQ ID NO: 15782 - protein, 7 aa, Artificial Sequence
  Synthetic construct
MSHTGII

SEQ ID NO: 15783 - protein, 7 aa, Artificial Sequence
  Synthetic construct
IHYSGST

SEQ ID NO: 15784 - protein, 7 aa, Artificial Sequence
  Synthetic construct
IYSSGIT

SEQ ID NO: 15785 - protein, 7 aa, Artificial Sequence
  Synthetic construct
IFHNGKT

SEQ ID NO: 15786 - protein, 8 aa, Artificial Sequence
  Synthetic construct
ISSSSSYI

SEQ ID NO: 15787 - protein, 7 aa, Artificial Sequence
  Synthetic construct
IYSGGST

SEQ ID NO: 15788 - protein, 8 aa, Artificial Sequence
  Synthetic construct
INTDGSRT

SEQ ID NO: 15789 - protein, 8 aa, Artificial Sequence
  Synthetic construct
LSGSGRGT

SEQ ID NO: 15790 - protein, 8 aa, Artificial Sequence
  Synthetic construct
ISSSSSTI

SEQ ID NO: 15791 - protein, 7 aa, Artificial Sequence
  Synthetic construct
IYYSGST

SEQ ID NO: 15792 - protein, 7 aa, Artificial Sequence
  Synthetic construct
VIGSGTT

SEQ ID NO: 15793 - protein, 8 aa, Artificial Sequence
  Synthetic construct
INAGKNNT

SEQ ID NO: 15794 - protein, 10 aa, Artificial Sequence
  Synthetic construct
IKSKTDDETT

SEQ ID NO: 15795 - protein, 8 aa, Artificial Sequence
  Synthetic construct
ISSSSSYI

SEQ ID NO: 15796 - protein, 8 aa, Artificial Sequence
  Synthetic construct
ISYDGSNK

SEQ ID NO: 15797 - protein, 8 aa, Artificial Sequence
  Synthetic construct
VSSSGDAE

SEQ ID NO: 15798 - protein, 8 aa, Artificial Sequence
  Synthetic construct
ISYDGSNK

SEQ ID NO: 15799 - protein, 8 aa, Artificial Sequence
  Synthetic construct
INPSYDST

SEQ ID NO: 15800 - protein, 8 aa, Artificial Sequence
  Synthetic construct
ISATGGST

SEQ ID NO: 15801 - protein, 9 aa, Artificial Sequence
  Synthetic construct
TYYRSKWYN

SEQ ID NO: 15802 - protein, 7 aa, Artificial Sequence
  Synthetic construct
MYSGGST

SEQ ID NO: 15803 - protein, 8 aa, Artificial Sequence
  Synthetic construct
IDPTDSYT

SEQ ID NO: 15804 - protein, 8 aa, Artificial Sequence
  Synthetic construct
INPNSGGT

SEQ ID NO: 15805 - protein, 8 aa, Artificial Sequence
  Synthetic construct
VDPEDGET

SEQ ID NO: 15806 - protein, 7 aa, Artificial Sequence
  Synthetic construct
FYFGGNS

SEQ ID NO: 15807 - protein, 8 aa, Artificial Sequence
  Synthetic construct
ISVYNGNT

SEQ ID NO: 15808 - protein, 7 aa, Artificial Sequence
  Synthetic construct
IYDSGST

SEQ ID NO: 15809 - protein, 8 aa, Artificial Sequence
  Synthetic construct
ISGSGGST

SEQ ID NO: 15810 - protein, 8 aa, Artificial Sequence
  Synthetic construct
TSYAGTDK

SEQ ID NO: 15811 - protein, 10 aa, Artificial Sequence
  Synthetic construct
IRSKANSYAT

SEQ ID NO: 15812 - protein, 7 aa, Artificial Sequence
  Synthetic construct
IAHSGST

SEQ ID NO: 15813 - protein, 8 aa, Artificial Sequence
  Synthetic construct
ISGSGGST

SEQ ID NO: 15814 - protein, 8 aa, Artificial Sequence
  Synthetic construct
IDPTDSYT

SEQ ID NO: 15815 - protein, 7 aa, Artificial Sequence
  Synthetic construct
IYHSGST

SEQ ID NO: 15816 - protein, 8 aa, Artificial Sequence
  Synthetic construct
IHPRDSDT

SEQ ID NO: 15817 - protein, 7 aa, Artificial Sequence
  Synthetic construct
INHSGST

SEQ ID NO: 15818 - protein, 8 aa, Artificial Sequence
  Synthetic construct
ISGSGGST

SEQ ID NO: 15819 - protein, 10 aa, Artificial Sequence
  Synthetic construct
IRNKANSFTT

SEQ ID NO: 15820 - protein, 10 aa, Artificial Sequence
  Synthetic construct
IRSKANSYAT

SEQ ID NO: 15821 - protein, 8 aa, Artificial Sequence
  Synthetic construct
INPNSGGT

SEQ ID NO: 15822 - protein, 8 aa, Artificial Sequence
  Synthetic construct
INSDGSST

SEQ ID NO: 15823 - protein, 10 aa, Artificial Sequence
  Synthetic construct
IRSKANSYAT

SEQ ID NO: 15824 - protein, 8 aa, Artificial Sequence
  Synthetic construct
ITGSGGST

SEQ ID NO: 15825 - protein, 7 aa, Artificial Sequence
  Synthetic construct
IYTSGPT

SEQ ID NO: 15826 - protein, 10 aa, Artificial Sequence
  Synthetic construct
IRSITNNYAT

SEQ ID NO: 15827 - protein, 8 aa, Artificial Sequence
  Synthetic construct
ISYDGSNK

SEQ ID NO: 15828 - protein, 7 aa, Artificial Sequence
  Synthetic construct
IYSVGTT

SEQ ID NO: 15829 - protein, 8 aa, Artificial Sequence
  Synthetic construct
ISYDGSNK

SEQ ID NO: 15830 - protein, 8 aa, Artificial Sequence
  Synthetic construct
INAGNGNT

SEQ ID NO: 15831 - protein, 8 aa, Artificial Sequence
  Synthetic construct
ISGSGGST

SEQ ID NO: 15832 - protein, 7 aa, Artificial Sequence
  Synthetic construct
AYYSGTT

SEQ ID NO: 15833 - protein, 10 aa, Artificial Sequence
  Synthetic construct
ISTNSAGGTV

SEQ ID NO: 15834 - protein, 10 aa, Artificial Sequence
  Synthetic construct
IRSKAYSGST

SEQ ID NO: 15835 - protein, 8 aa, Artificial Sequence
  Synthetic construct
ISSSSSTI

SEQ ID NO: 15836 - protein, 7 aa, Artificial Sequence
  Synthetic construct
IYNDGKT

SEQ ID NO: 15837 - protein, 8 aa, Artificial Sequence
  Synthetic construct
ISHDGTNK

SEQ ID NO: 15838 - protein, 8 aa, Artificial Sequence
  Synthetic construct
IFPGDSDT

SEQ ID NO: 15839 - protein, 8 aa, Artificial Sequence
  Synthetic construct
IIPVLNIP

SEQ ID NO: 15840 - protein, 7 aa, Artificial Sequence
  Synthetic construct
IYTSGST

SEQ ID NO: 15841 - protein, 8 aa, Artificial Sequence
  Synthetic construct
ISGSGTKI

SEQ ID NO: 15842 - protein, 7 aa, Artificial Sequence
  Synthetic construct
IYSSGST

SEQ ID NO: 15843 - protein, 10 aa, Artificial Sequence
  Synthetic construct
IRSSNDGGPT

SEQ ID NO: 15844 - protein, 8 aa, Artificial Sequence
  Synthetic construct
ISGNGGSM

SEQ ID NO: 15845 - protein, 8 aa, Artificial Sequence
  Synthetic construct
ISSSSSYI

SEQ ID NO: 15846 - protein, 8 aa, Artificial Sequence
  Synthetic construct
ISYTAGRS

SEQ ID NO: 15847 - protein, 8 aa, Artificial Sequence
  Synthetic construct
IIPILGIA

SEQ ID NO: 15848 - protein, 7 aa, Artificial Sequence
  Synthetic construct
IYSSGST

SEQ ID NO: 15849 - protein, 8 aa, Artificial Sequence
  Synthetic construct
IYPGDSDT

SEQ ID NO: 15850 - protein, 8 aa, Artificial Sequence
  Synthetic construct
ISWTSGSI

SEQ ID NO: 15851 - protein, 8 aa, Artificial Sequence
  Synthetic construct
INTNGGTT

SEQ ID NO: 15852 - protein, 8 aa, Artificial Sequence
  Synthetic construct
ISGSGTPT

SEQ ID NO: 15853 - protein, 8 aa, Artificial Sequence
  Synthetic construct
IIPILNLA

SEQ ID NO: 15854 - protein, 8 aa, Artificial Sequence
  Synthetic construct
IIPILGIA

SEQ ID NO: 15855 - protein, 7 aa, Artificial Sequence
  Synthetic construct
VHGSGTT

SEQ ID NO: 15856 - protein, 7 aa, Artificial Sequence
  Synthetic construct
IYTSGST

SEQ ID NO: 15857 - protein, 8 aa, Artificial Sequence
  Synthetic construct
ISWNSGSI

SEQ ID NO: 15858 - protein, 8 aa, Artificial Sequence
  Synthetic construct
VDPKTDAT

SEQ ID NO: 15859 - protein, 8 aa, Artificial Sequence
  Synthetic construct
ISYDGSNQ

SEQ ID NO: 15860 - protein, 7 aa, Artificial Sequence
  Synthetic construct
IYYSGST

SEQ ID NO: 15861 - protein, 7 aa, Artificial Sequence
  Synthetic construct
SFHNGIT

SEQ ID NO: 15862 - protein, 8 aa, Artificial Sequence
  Synthetic construct
ISSSSSYI

SEQ ID NO: 15863 - protein, 7 aa, Artificial Sequence
  Synthetic construct
IYYSGST

SEQ ID NO: 15864 - protein, 7 aa, Artificial Sequence
  Synthetic construct
INHSGST

SEQ ID NO: 15865 - protein, 7 aa, Artificial Sequence
  Synthetic construct
IYTSGST

SEQ ID NO: 15866 - protein, 7 aa, Artificial Sequence
  Synthetic construct
IDYSGNT

SEQ ID NO: 15867 - protein, 8 aa, Artificial Sequence
  Synthetic construct
ISGRDENT

SEQ ID NO: 15868 - protein, 8 aa, Artificial Sequence
  Synthetic construct
IWYDGSKR

SEQ ID NO: 15869 - protein, 7 aa, Artificial Sequence
  Synthetic construct
IYHSGTT

SEQ ID NO: 15870 - protein, 8 aa, Artificial Sequence
  Synthetic construct
ITVSSSST

SEQ ID NO: 15871 - protein, 8 aa, Artificial Sequence
  Synthetic construct
ISSSSSYI

SEQ ID NO: 15872 - protein, 7 aa, Artificial Sequence
  Synthetic construct
IHSGGAT

SEQ ID NO: 15873 - protein, 8 aa, Artificial Sequence
  Synthetic construct
IKQDGSEK

SEQ ID NO: 15874 - protein, 7 aa, Artificial Sequence
  Synthetic construct
IYHSGTT

SEQ ID NO: 15875 - protein, 8 aa, Artificial Sequence
  Synthetic construct
ISGSGGST

SEQ ID NO: 15876 - protein, 7 aa, Artificial Sequence
  Synthetic construct
IDSSGTT

SEQ ID NO: 15877 - protein, 8 aa, Artificial Sequence
  Synthetic construct
ITWDGGTA

SEQ ID NO: 15878 - protein, 8 aa, Artificial Sequence
  Synthetic construct
IIPYLGKT

SEQ ID NO: 15879 - protein, 7 aa, Artificial Sequence
  Synthetic construct
IYSSGQT

SEQ ID NO: 15880 - protein, 7 aa, Artificial Sequence
  Synthetic construct
IGTAGDT

SEQ ID NO: 15881 - protein, 8 aa, Artificial Sequence
  Synthetic construct
INSDGSST

SEQ ID NO: 15882 - protein, 8 aa, Artificial Sequence
  Synthetic construct
ISSYGDST

SEQ ID NO: 15883 - protein, 7 aa, Artificial Sequence
  Synthetic construct
INHSGST

SEQ ID NO: 15884 - protein, 8 aa, Artificial Sequence
  Synthetic construct
ISASSSYI

SEQ ID NO: 15885 - protein, 8 aa, Artificial Sequence
  Synthetic construct
IDPTDSYT

SEQ ID NO: 15886 - protein, 8 aa, Artificial Sequence
  Synthetic construct
INPKSGGT

SEQ ID NO: 15887 - protein, 8 aa, Artificial Sequence
  Synthetic construct
ISFSDGST

SEQ ID NO: 15888 - protein, 8 aa, Artificial Sequence
  Synthetic construct
ISYDGSNK

SEQ ID NO: 15889 - protein, 8 aa, Artificial Sequence
  Synthetic construct
IWYDGSNK

SEQ ID NO: 15890 - protein, 8 aa, Artificial Sequence
  Synthetic construct
INPNSGVT

SEQ ID NO: 15891 - protein, 8 aa, Artificial Sequence
  Synthetic construct
INPNTGAT

SEQ ID NO: 15892 - protein, 8 aa, Artificial Sequence
  Synthetic construct
ASSYNDNA

SEQ ID NO: 15893 - protein, 8 aa, Artificial Sequence
  Synthetic construct
ISGSGGST

SEQ ID NO: 15894 - protein, 8 aa, Artificial Sequence
  Synthetic construct
ISSSSSYI

SEQ ID NO: 15895 - protein, 7 aa, Artificial Sequence
  Synthetic construct
IYSSGNT

SEQ ID NO: 15896 - protein, 8 aa, Artificial Sequence
  Synthetic construct
IMPIFGES

SEQ ID NO: 15897 - protein, 8 aa, Artificial Sequence
  Synthetic construct
KSYDGNNK

SEQ ID NO: 15898 - protein, 7 aa, Artificial Sequence
  Synthetic construct
IYYSGST

SEQ ID NO: 15899 - protein, 8 aa, Artificial Sequence
  Synthetic construct
ISTYNGKA

SEQ ID NO: 15900 - protein, 8 aa, Artificial Sequence
  Synthetic construct
INAGNGNT

SEQ ID NO: 15901 - protein, 7 aa, Artificial Sequence
  Synthetic construct
IYTSGST

SEQ ID NO: 15902 - protein, 8 aa, Artificial Sequence
  Synthetic construct
INNDGWTD

SEQ ID NO: 15903 - protein, 8 aa, Artificial Sequence
  Synthetic construct
ISSSSSTI

SEQ ID NO: 15904 - protein, 7 aa, Artificial Sequence
  Synthetic construct
IYFTGST

SEQ ID NO: 15905 - protein, 8 aa, Artificial Sequence
  Synthetic construct
IGTNHNLI

SEQ ID NO: 15906 - protein, 8 aa, Artificial Sequence
  Synthetic construct
ISSNSDGT

SEQ ID NO: 15907 - protein, 8 aa, Artificial Sequence
  Synthetic construct
ISNDGSDK

SEQ ID NO: 15908 - protein, 10 aa, Artificial Sequence
  Synthetic construct
IRSKANSYAT

SEQ ID NO: 15909 - protein, 7 aa, Artificial Sequence
  Synthetic construct
IYWDDDK

SEQ ID NO: 15910 - protein, 7 aa, Artificial Sequence
  Synthetic construct
IYGGGTT

SEQ ID NO: 15911 - protein, 8 aa, Artificial Sequence
  Synthetic construct
IDPEDGDT

SEQ ID NO: 15912 - protein, 8 aa, Artificial Sequence
  Synthetic construct
ISAYNGNT

SEQ ID NO: 15913 - protein, 8 aa, Artificial Sequence
  Synthetic construct
IHPGDPDT

SEQ ID NO: 15914 - protein, 7 aa, Artificial Sequence
  Synthetic construct
IYSSGTT

SEQ ID NO: 15915 - protein, 8 aa, Artificial Sequence
  Synthetic construct
IWYDGTNE

SEQ ID NO: 15916 - protein, 8 aa, Artificial Sequence
  Synthetic construct
ISSTSSYI

SEQ ID NO: 15917 - protein, 8 aa, Artificial Sequence
  Synthetic construct
IKLDGSER

SEQ ID NO: 15918 - protein, 7 aa, Artificial Sequence
  Synthetic construct
ISHSGTT

SEQ ID NO: 15919 - protein, 8 aa, Artificial Sequence
  Synthetic construct
ISDDGSTK

SEQ ID NO: 15920 - protein, 8 aa, Artificial Sequence
  Synthetic construct
INSDGSTT

SEQ ID NO: 15921 - protein, 8 aa, Artificial Sequence
  Synthetic construct
IWYDGSKK

SEQ ID NO: 15922 - protein, 8 aa, Artificial Sequence
  Synthetic construct
INIDGSRT

SEQ ID NO: 15923 - protein, 8 aa, Artificial Sequence
  Synthetic construct
ISSSSTYM

SEQ ID NO: 15924 - protein, 8 aa, Artificial Sequence
  Synthetic construct
TSYAGTDK

SEQ ID NO: 15925 - protein, 8 aa, Artificial Sequence
  Synthetic construct
IRDSGGTT

SEQ ID NO: 15926 - protein, 8 aa, Artificial Sequence
  Synthetic construct
IDSDGTTT

SEQ ID NO: 15927 - protein, 8 aa, Artificial Sequence
  Synthetic construct
VSYDGSDK

SEQ ID NO: 15928 - protein, 10 aa, Artificial Sequence
  Synthetic construct
IKSKTDGGTT

SEQ ID NO: 15929 - protein, 8 aa, Artificial Sequence
  Synthetic construct
ISSSSSYI

SEQ ID NO: 15930 - protein, 7 aa, Artificial Sequence
  Synthetic construct
AYNSGTT

SEQ ID NO: 15931 - protein, 8 aa, Artificial Sequence
  Synthetic construct
ISGSGGST

SEQ ID NO: 15932 - protein, 10 aa, Artificial Sequence
  Synthetic construct
ITAIPYDRFY

SEQ ID NO: 15933 - protein, 7 aa, Artificial Sequence
  Synthetic construct
IYTTGSA

SEQ ID NO: 15934 - protein, 8 aa, Artificial Sequence
  Synthetic construct
MNPNSGNT

SEQ ID NO: 15935 - protein, 16 aa, Artificial Sequence
  Synthetic construct
ARHLRRDNADYYGLDV

SEQ ID NO: 15936 - protein, 14 aa, Artificial Sequence
  Synthetic construct
ARHRRYSGYVSFDY

SEQ ID NO: 15937 - protein, 17 aa, Artificial Sequence
  Synthetic construct
ARSPHDHESSGYYAFDI

SEQ ID NO: 15938 - protein, 13 aa, Artificial Sequence
  Synthetic construct
IVITTSGLGTVGF

SEQ ID NO: 15939 - protein, 18 aa, Artificial Sequence
  Synthetic construct
ARKMALRYSSGWYVWFDP

SEQ ID NO: 15940 - protein, 25 aa, Artificial Sequence
  Synthetic construct
AKDLAAWGAIPDIDTGDFASYSFDV

SEQ ID NO: 15941 - protein, 15 aa, Artificial Sequence
  Synthetic construct
ASSSNWGFYYHGLDV

SEQ ID NO: 15942 - protein, 20 aa, Artificial Sequence
  Synthetic construct
ARPGVYCGGTTCYYYLGMDV

SEQ ID NO: 15943 - protein, 11 aa, Artificial Sequence
  Synthetic construct
ARVTSSGSAGY

SEQ ID NO: 15944 - protein, 18 aa, Artificial Sequence
  Synthetic construct
ARSRAMVRGAPNAHWFDP

SEQ ID NO: 15945 - protein, 18 aa, Artificial Sequence
  Synthetic construct
ARGGGYCSGGSCYFWFDP

SEQ ID NO: 15946 - protein, 19 aa, Artificial Sequence
  Synthetic construct
ARVGSRWIAGTTSELFFHY

SEQ ID NO: 15947 - protein, 23 aa, Artificial Sequence
  Synthetic construct
ARDKQGQGYSNTWHGGYYYGFDV

SEQ ID NO: 15948 - protein, 10 aa, Artificial Sequence
  Synthetic construct
ARGAALRMDV

SEQ ID NO: 15949 - protein, 25 aa, Artificial Sequence
  Synthetic construct
ARGGRYCSSTSCYEPPENNYWYFDL

SEQ ID NO: 15950 - protein, 25 aa, Artificial Sequence
  Synthetic construct
ARDFMPPPSGAFFGVVPLPGYFFDF

SEQ ID NO: 15951 - protein, 18 aa, Artificial Sequence
  Synthetic construct
ASTYSGSYGPYYYYAMGV

SEQ ID NO: 15952 - protein, 14 aa, Artificial Sequence
  Synthetic construct
AKVRLLWGSRYFDY

SEQ ID NO: 15953 - protein, 13 aa, Artificial Sequence
  Synthetic construct
AREVGSPRPHFDL

SEQ ID NO: 15954 - protein, 7 aa, Artificial Sequence
  Synthetic construct
ASLSVGD

SEQ ID NO: 15955 - protein, 12 aa, Artificial Sequence
  Synthetic construct
ARAGFGEFEFDS

SEQ ID NO: 15956 - protein, 20 aa, Artificial Sequence
  Synthetic construct
ARDRVTMVRGVKHRAGGMDV

SEQ ID NO: 15957 - protein, 19 aa, Artificial Sequence
  Synthetic construct
ARDQRVGVRPKTSSWYFDL

SEQ ID NO: 15958 - protein, 20 aa, Artificial Sequence
  Synthetic construct
ARGGDQNNCSAGSCYPLFDY

SEQ ID NO: 15959 - protein, 12 aa, Artificial Sequence
  Synthetic construct
ARFAAEQGNFDY

SEQ ID NO: 15960 - protein, 14 aa, Artificial Sequence
  Synthetic construct
ARGPGVQRLVYFDY

SEQ ID NO: 15961 - protein, 14 aa, Artificial Sequence
  Synthetic construct
TTEDWNLYNYAMGV

SEQ ID NO: 15962 - protein, 18 aa, Artificial Sequence
  Synthetic construct
AKGATDTAMGGFFGYFDL

SEQ ID NO: 15963 - protein, 19 aa, Artificial Sequence
  Synthetic construct
ARLTTGGSADYYYYYGMDV

SEQ ID NO: 15964 - protein, 14 aa, Artificial Sequence
  Synthetic construct
AKEMQGIATPYFDS

SEQ ID NO: 15965 - protein, 12 aa, Artificial Sequence
  Synthetic construct
ARAVVGGDAFDI

SEQ ID NO: 15966 - protein, 17 aa, Artificial Sequence
  Synthetic construct
TRDPNTRPSPRLNWFDP

SEQ ID NO: 15967 - protein, 18 aa, Artificial Sequence
  Synthetic construct
ARVMTLIVVVARAAWIDP

SEQ ID NO: 15968 - protein, 17 aa, Artificial Sequence
  Synthetic construct
AKGLYYYDSSGYRIFDF

SEQ ID NO: 15969 - protein, 18 aa, Artificial Sequence
  Synthetic construct
AKYVRRGNYYGSGSYYDY

SEQ ID NO: 15970 - protein, 18 aa, Artificial Sequence
  Synthetic construct
TTEIHPSLRQDYRGYFQY

SEQ ID NO: 15971 - protein, 15 aa, Artificial Sequence
  Synthetic construct
ARGILTGYYVPYFDY

SEQ ID NO: 15972 - protein, 8 aa, Artificial Sequence
  Synthetic construct
ASRGSFDM

SEQ ID NO: 15973 - protein, 11 aa, Artificial Sequence
  Synthetic construct
ARDKRRGASDY

SEQ ID NO: 15974 - protein, 15 aa, Artificial Sequence
  Synthetic construct
ARIPISGGSYGYFDP

SEQ ID NO: 15975 - protein, 12 aa, Artificial Sequence
  Synthetic construct
ARLLNRGYYFDY

SEQ ID NO: 15976 - protein, 9 aa, Artificial Sequence
  Synthetic construct
ARGRWSAAY

SEQ ID NO: 15977 - protein, 13 aa, Artificial Sequence
  Synthetic construct
AKGPWFGETPLDY

SEQ ID NO: 15978 - protein, 14 aa, Artificial Sequence
  Synthetic construct
AREAAWVGEFQPEC

SEQ ID NO: 15979 - protein, 25 aa, Artificial Sequence
  Synthetic construct
ARHRRPYYDYVWGSYRYNDYYGMDV

SEQ ID NO: 15980 - protein, 14 aa, Artificial Sequence
  Synthetic construct
AKDKWHSSSWYFDY

SEQ ID NO: 15981 - protein, 10 aa, Artificial Sequence
  Synthetic construct
VTSGRDVGSF

SEQ ID NO: 15982 - protein, 14 aa, Artificial Sequence
  Synthetic construct
TTEDWNLYNYAMGV

SEQ ID NO: 15983 - protein, 18 aa, Artificial Sequence
  Synthetic construct
AKDPLRGDSGYGNYYFDY

SEQ ID NO: 15984 - protein, 19 aa, Artificial Sequence
  Synthetic construct
ARVGGGAEWYSSGWLSFDY

SEQ ID NO: 15985 - protein, 13 aa, Artificial Sequence
  Synthetic construct
AHRLGGGYAAFDY

SEQ ID NO: 15986 - protein, 20 aa, Artificial Sequence
  Synthetic construct
ARDRSIAARRAFYYYYGMDV

SEQ ID NO: 15987 - protein, 18 aa, Artificial Sequence
  Synthetic construct
AKAPKHRCSGGSCYSGDH

SEQ ID NO: 15988 - protein, 16 aa, Artificial Sequence
  Synthetic construct
ARDRETMVRGVGLSGI

SEQ ID NO: 15989 - protein, 13 aa, Artificial Sequence
  Synthetic construct
ATYSSSWYGSVGS

SEQ ID NO: 15990 - protein, 13 aa, Artificial Sequence
  Synthetic construct
AMFSGVDIMATDS

SEQ ID NO: 15991 - protein, 17 aa, Artificial Sequence
  Synthetic construct
ARGVPGSSWYAVWGFDY

SEQ ID NO: 15992 - protein, 13 aa, Artificial Sequence
  Synthetic construct
ARAPQGRDDAFDI

SEQ ID NO: 15993 - protein, 13 aa, Artificial Sequence
  Synthetic construct
ARGAVVAESSFDY

SEQ ID NO: 15994 - protein, 12 aa, Artificial Sequence
  Synthetic construct
ARDVDGLYFFEY

SEQ ID NO: 15995 - protein, 12 aa, Artificial Sequence
  Synthetic construct
ARGTGSYYDFDY

SEQ ID NO: 15996 - protein, 17 aa, Artificial Sequence
  Synthetic construct
ASSGYSYGSYYYYGMDV

SEQ ID NO: 15997 - protein, 20 aa, Artificial Sequence
  Synthetic construct
ARRGAVYYGSGNLYYYGMDV

SEQ ID NO: 15998 - protein, 20 aa, Artificial Sequence
  Synthetic construct
AKDTSFGRPFSSWYVGYFHH

SEQ ID NO: 15999 - protein, 13 aa, Artificial Sequence
  Synthetic construct
ARSSGVWFGELGY

SEQ ID NO: 16000 - protein, 14 aa, Artificial Sequence
  Synthetic construct
AKDPMRLTWNYFDH

SEQ ID NO: 16001 - protein, 15 aa, Artificial Sequence
  Synthetic construct
AAGLNYDILTGSLDY

SEQ ID NO: 16002 - protein, 13 aa, Artificial Sequence
  Synthetic construct
ARLWSGYPPYFQD

SEQ ID NO: 16003 - protein, 19 aa, Artificial Sequence
  Synthetic construct
AKEKGYHYDSRNRRTYFDY

SEQ ID NO: 16004 - protein, 21 aa, Artificial Sequence
  Synthetic construct
ARGDRCSSTDCFRWRSHLFDS

SEQ ID NO: 16005 - protein, 8 aa, Artificial Sequence
  Synthetic construct
VRGYGLDV

SEQ ID NO: 16006 - protein, 12 aa, Artificial Sequence
  Synthetic construct
AKGTAYYYGMDV

SEQ ID NO: 16007 - protein, 10 aa, Artificial Sequence
  Synthetic construct
AYDFWRGGDY

SEQ ID NO: 16008 - protein, 20 aa, Artificial Sequence
  Synthetic construct
ARGRRGYCSSTSCYTGWFDP

SEQ ID NO: 16009 - protein, 14 aa, Artificial Sequence
  Synthetic construct
ATDQSIAAAGNPDH

SEQ ID NO: 16010 - protein, 16 aa, Artificial Sequence
  Synthetic construct
THKQADQYDILTGYWS

SEQ ID NO: 16011 - protein, 21 aa, Artificial Sequence
  Synthetic construct
AKDLVGATKGLRNLQRSPPDY

SEQ ID NO: 16012 - protein, 9 aa, Artificial Sequence
  Synthetic construct
ASGRVSPDN

SEQ ID NO: 16013 - protein, 23 aa, Artificial Sequence
  Synthetic construct
ARDHLKRRDGYNYIRKWGGGFDP

SEQ ID NO: 16014 - protein, 12 aa, Artificial Sequence
  Synthetic construct
ARRASEEYFFDF

SEQ ID NO: 16015 - protein, 14 aa, Artificial Sequence
  Synthetic construct
ARHNAAISQRGSYD

SEQ ID NO: 16016 - protein, 26 aa, Artificial Sequence
  Synthetic construct
ARDADLGRGYSYGYWLEFDYYNGMDV

SEQ ID NO: 16017 - protein, 14 aa, Artificial Sequence
  Synthetic construct
ARVPYGDYIVYFDY

SEQ ID NO: 16018 - protein, 27 aa, Artificial Sequence
  Synthetic construct
ARGRGSRSIALRDYYGSGSYRLYYFDY

SEQ ID NO: 16019 - protein, 17 aa, Artificial Sequence
  Synthetic construct
ARMQPMRLHEYYYGMDV

SEQ ID NO: 16020 - protein, 21 aa, Artificial Sequence
  Synthetic construct
ARADRYCSSTSCYKWGLAFDI

SEQ ID NO: 16021 - protein, 22 aa, Artificial Sequence
  Synthetic construct
ARLGNPLDYYRMGSPHYYAMDV

SEQ ID NO: 16022 - protein, 20 aa, Artificial Sequence
  Synthetic construct
ARDVGYCSSTSCYVRAGMDV

SEQ ID NO: 16023 - protein, 17 aa, Artificial Sequence
  Synthetic construct
ARDWDTEIPDYYYGLDI

SEQ ID NO: 16024 - protein, 19 aa, Artificial Sequence
  Synthetic construct
ARDGGDIVVVTAIGDAFDI

SEQ ID NO: 16025 - protein, 12 aa, Artificial Sequence
  Synthetic construct
AVMATATDAFDI

SEQ ID NO: 16026 - protein, 21 aa, Artificial Sequence
  Synthetic construct
ARSRLLPAATPRAVPNYCFDY

SEQ ID NO: 16027 - protein, 16 aa, Artificial Sequence
  Synthetic construct
ARNYDSSGYFYEGLDY

SEQ ID NO: 16028 - protein, 15 aa, Artificial Sequence
  Synthetic construct
ASSSNWGFYYHGLDV

SEQ ID NO: 16029 - protein, 26 aa, Artificial Sequence
  Synthetic construct
ARDSHNYYNSGSALSLGYYSYYGMDV

SEQ ID NO: 16030 - protein, 12 aa, Artificial Sequence
  Synthetic construct
ARSRSTPYFFES

SEQ ID NO: 16031 - protein, 20 aa, Artificial Sequence
  Synthetic construct
ARDRVERTGNVGFGYYAMDV

SEQ ID NO: 16032 - protein, 19 aa, Artificial Sequence
  Synthetic construct
ARDHSADQDDGRRSWWLDP

SEQ ID NO: 16033 - protein, 12 aa, Artificial Sequence
  Synthetic construct
VLEGGVSNSFDH

SEQ ID NO: 16034 - protein, 22 aa, Artificial Sequence
  Synthetic construct
AKDGFIWKFRIAAAGRRDYFDY

SEQ ID NO: 16035 - protein, 22 aa, Artificial Sequence
  Synthetic construct
AREIVAVLPSNYYDSSAGAFDI

SEQ ID NO: 16036 - protein, 15 aa, Artificial Sequence
  Synthetic construct
ARGGVYGSRLGWFDP

SEQ ID NO: 16037 - protein, 12 aa, Artificial Sequence
  Synthetic construct
ARGEVWFGELCF

SEQ ID NO: 16038 - protein, 26 aa, Artificial Sequence
  Synthetic construct
ARDADSGRGYSYGYWGEFDYYNGMDV

SEQ ID NO: 16039 - protein, 11 aa, Artificial Sequence
  Synthetic construct
AASETSTGIDF

SEQ ID NO: 16040 - protein, 13 aa, Artificial Sequence
  Synthetic construct
ARAPGNGKWEITY

SEQ ID NO: 16041 - protein, 19 aa, Artificial Sequence
  Synthetic construct
AKGFWACTPYTCSTGPFDS

SEQ ID NO: 16042 - protein, 12 aa, Artificial Sequence
  Synthetic construct
TRRGTTADNGDY

SEQ ID NO: 16043 - protein, 13 aa, Artificial Sequence
  Synthetic construct
AIFPGVDTVVADY

SEQ ID NO: 16044 - protein, 21 aa, Artificial Sequence
  Synthetic construct
ARAIWARYSGSSHYYYYGMDV

SEQ ID NO: 16045 - protein, 13 aa, Artificial Sequence
  Synthetic construct
ARIRVNALYLSDY

SEQ ID NO: 16046 - protein, 27 aa, Artificial Sequence
  Synthetic construct
ARDKIWRRGTTGPHPQAQRYYYYGMDV

SEQ ID NO: 16047 - protein, 19 aa, Artificial Sequence
  Synthetic construct
AKDLSGVTTRYYYYYGMDV

SEQ ID NO: 16048 - protein, 14 aa, Artificial Sequence
  Synthetic construct
ARVRYYGSGSYHDY

SEQ ID NO: 16049 - protein, 13 aa, Artificial Sequence
  Synthetic construct
AKDYGGSGTYWSY

SEQ ID NO: 16050 - protein, 14 aa, Artificial Sequence
  Synthetic construct
AHSGRGSTPFTIDS

SEQ ID NO: 16051 - protein, 15 aa, Artificial Sequence
  Synthetic construct
ARIPSTYTSSSWFDP

SEQ ID NO: 16052 - protein, 8 aa, Artificial Sequence
  Synthetic construct
DGDYGDYG

SEQ ID NO: 16053 - protein, 14 aa, Artificial Sequence
  Synthetic construct
ARASWLPYPDYLDY

SEQ ID NO: 16054 - protein, 9 aa, Artificial Sequence
  Synthetic construct
AKLRTRFSY

SEQ ID NO: 16055 - protein, 17 aa, Artificial Sequence
  Synthetic construct
AKDNYYDIRAVEGYFDY

SEQ ID NO: 16056 - protein, 19 aa, Artificial Sequence
  Synthetic construct
ARGHYYDSSPYYSEGGFDY

SEQ ID NO: 16057 - protein, 17 aa, Artificial Sequence
  Synthetic construct
AREADVIEATTNDGFDI

SEQ ID NO: 16058 - protein, 23 aa, Artificial Sequence
  Synthetic construct
ARGATRERSRSGNYFRSKGYFDY

SEQ ID NO: 16059 - protein, 12 aa, Artificial Sequence
  Synthetic construct
VRASIIGTMPGY

SEQ ID NO: 16060 - protein, 21 aa, Artificial Sequence
  Synthetic construct
ARDSPSQYYYENSDNSDAFDT

SEQ ID NO: 16061 - protein, 15 aa, Artificial Sequence
  Synthetic construct
AKDISLYRRYGALDY

SEQ ID NO: 16062 - protein, 13 aa, Artificial Sequence
  Synthetic construct
AKEGAKNYGYIDY

SEQ ID NO: 16063 - protein, 12 aa, Artificial Sequence
  Synthetic construct
ARAVIDTPDIDY

SEQ ID NO: 16064 - protein, 18 aa, Artificial Sequence
  Synthetic construct
AREPDPTRVMVSAVYFDH

SEQ ID NO: 16065 - protein, 11 aa, Artificial Sequence
  Synthetic construct
ARVTAVAGRVY

SEQ ID NO: 16066 - protein, 12 aa, Artificial Sequence
  Synthetic construct
ARAESSWYSIDY

SEQ ID NO: 16067 - protein, 6 aa, Artificial Sequence
  Synthetic construct
VRGTGY

SEQ ID NO: 16068 - protein, 12 aa, Artificial Sequence
  Synthetic construct
ALGRKDYGDYYR

SEQ ID NO: 16069 - protein, 16 aa, Artificial Sequence
  Synthetic construct
ARHLRGSYYGPDYFDY

SEQ ID NO: 16070 - protein, 16 aa, Artificial Sequence
  Synthetic construct
AKLAQQWLVSKSPFDY

SEQ ID NO: 16071 - protein, 18 aa, Artificial Sequence
  Synthetic construct
ASSSCSTTSCLVGEYFDN

SEQ ID NO: 16072 - protein, 21 aa, Artificial Sequence
  Synthetic construct
AKAPTRGRYCSSTSCSYYFDY

SEQ ID NO: 16073 - protein, 13 aa, Artificial Sequence
  Synthetic construct
VRDPRDDIVGIDY

SEQ ID NO: 16074 - protein, 17 aa, Artificial Sequence
  Synthetic construct
ARDNPLPRTPLTNHFDF

SEQ ID NO: 16075 - protein, 15 aa, Artificial Sequence
  Synthetic construct
ARFSLYSYGYRKFDY

SEQ ID NO: 16076 - protein, 18 aa, Artificial Sequence
  Synthetic construct
ARILSARIAAAGKGAFDP

SEQ ID NO: 16077 - protein, 17 aa, Artificial Sequence
  Synthetic construct
VKDREWQLRRGQMAFDF

SEQ ID NO: 16078 - protein, 22 aa, Artificial Sequence
  Synthetic construct
ARVGTRHYDFLSGYYKRDAFDI

SEQ ID NO: 16079 - protein, 15 aa, Artificial Sequence
  Synthetic construct
ARQRGSSGNNDAFDF

SEQ ID NO: 16080 - protein, 15 aa, Artificial Sequence
  Synthetic construct
ARGRIYGSGNPLYDY

SEQ ID NO: 16081 - protein, 12 aa, Artificial Sequence
  Synthetic construct
ASDYADVGFLDY

SEQ ID NO: 16082 - protein, 16 aa, Artificial Sequence
  Synthetic construct
ARDKGSSSWYGRGFDY

SEQ ID NO: 16083 - protein, 10 aa, Artificial Sequence
  Synthetic construct
ARHPYGGYHG

SEQ ID NO: 16084 - protein, 18 aa, Artificial Sequence
  Synthetic construct
ANSLRSCSGGSCQYYFDY

SEQ ID NO: 16085 - protein, 18 aa, Artificial Sequence
  Synthetic construct
ARDYYDYVWGSYRYSYDY

SEQ ID NO: 16086 - protein, 15 aa, Artificial Sequence
  Synthetic construct
AKPPDRRNTVTPFEY

SEQ ID NO: 16087 - protein, 17 aa, Artificial Sequence
  Synthetic construct
AKEEGGWGNYRIGWFDP

SEQ ID NO: 16088 - protein, 11 aa, Artificial Sequence
  Synthetic construct
AKGARGYCSTN

SEQ ID NO: 16089 - protein, 14 aa, Artificial Sequence
  Synthetic construct
ARPILGHFYYGMDV

SEQ ID NO: 16090 - protein, 17 aa, Artificial Sequence
  Synthetic construct
VTMRGHYQLFYDDSFDV

SEQ ID NO: 16091 - protein, 17 aa, Artificial Sequence
  Synthetic construct
ARDDPGHYYDYYFAMDV

SEQ ID NO: 16092 - protein, 19 aa, Artificial Sequence
  Synthetic construct
ARHHGVPSSSHYYYYGMDV

SEQ ID NO: 16093 - protein, 17 aa, Artificial Sequence
  Synthetic construct
ARGGSLVVVPATKGLDI

SEQ ID NO: 16094 - protein, 14 aa, Artificial Sequence
  Synthetic construct
ARGPVTIFGVVTRD

SEQ ID NO: 16095 - protein, 16 aa, Artificial Sequence
  Synthetic construct
VRDLAWRSIAADGGDC

SEQ ID NO: 16096 - protein, 16 aa, Artificial Sequence
  Synthetic construct
TRGGYSDYDWVPGIDY

SEQ ID NO: 16097 - protein, 18 aa, Artificial Sequence
  Synthetic construct
ARQGRRDGYNWRLAHFDS

SEQ ID NO: 16098 - protein, 20 aa, Artificial Sequence
  Synthetic construct
ARIRGYSSSWYDSADDYDSY

SEQ ID NO: 16099 - protein, 12 aa, Artificial Sequence
  Synthetic construct
ARGGSNGHMEAI

SEQ ID NO: 16100 - protein, 13 aa, Artificial Sequence
  Synthetic construct
ARVWELVGANFDY

SEQ ID NO: 16101 - protein, 14 aa, Artificial Sequence
  Synthetic construct
AKDPPGGYGASGDY

SEQ ID NO: 16102 - protein, 15 aa, Artificial Sequence
  Synthetic construct
AKDRGNYYDIGAFDI

SEQ ID NO: 16103 - protein, 12 aa, Artificial Sequence
  Synthetic construct
VLEGGAANSFDH

SEQ ID NO: 16104 - protein, 11 aa, Artificial Sequence
  Synthetic construct
AKALRSGTPGW

SEQ ID NO: 16105 - protein, 14 aa, Artificial Sequence
  Synthetic construct
ARRKNRLAAAWFDP

SEQ ID NO: 16106 - protein, 20 aa, Artificial Sequence
  Synthetic construct
ARDTGAYCSSTSCYPRAFDI

SEQ ID NO: 16107 - protein, 16 aa, Artificial Sequence
  Synthetic construct
AKGVGSDIAVAGTFEY

SEQ ID NO: 16108 - protein, 16 aa, Artificial Sequence
  Synthetic construct
VRTEYCSSTTCYHFDC

SEQ ID NO: 16109 - protein, 16 aa, Artificial Sequence
  Synthetic construct
ARHLRRDNADYYGLDV

SEQ ID NO: 16110 - protein, 12 aa, Artificial Sequence
  Synthetic construct
VRSVEILYYFDY

SEQ ID NO: 16111 - protein, 13 aa, Artificial Sequence
  Synthetic construct
ARGYYYSSGSYKF

SEQ ID NO: 16112 - protein, 15 aa, Artificial Sequence
  Synthetic construct
AKDQVSGDGYLEFDY

SEQ ID NO: 16113 - protein, 7 aa, Artificial Sequence
  Synthetic construct
ARDFEAA

SEQ ID NO: 16114 - protein, 17 aa, Artificial Sequence
  Synthetic construct
TRAELPPDYGDDVYFNH

SEQ ID NO: 16115 - protein, 17 aa, Artificial Sequence
  Synthetic construct
ARSPHDHESSGYYAFDI

SEQ ID NO: 16116 - protein, 20 aa, Artificial Sequence
  Synthetic construct
ARFSVYGADTSPKYFYGVDV

SEQ ID NO: 16117 - protein, 17 aa, Artificial Sequence
  Synthetic construct
ARDPGYSGDDWRNQFWL

SEQ ID NO: 16118 - protein, 21 aa, Artificial Sequence
  Synthetic construct
ARDSRARSSPKFYSFFYGMDV

SEQ ID NO: 16119 - protein, 22 aa, Artificial Sequence
  Synthetic construct
ARGPRYYDFWSGYYPGYYGMDV

SEQ ID NO: 16120 - protein, 14 aa, Artificial Sequence
  Synthetic construct
ARVSSGRYRGWFDP

SEQ ID NO: 16121 - protein, 16 aa, Artificial Sequence
  Synthetic construct
ARHLRRDNADYYGLDV

SEQ ID NO: 16122 - protein, 12 aa, Artificial Sequence
  Synthetic construct
VREGGATNIFDL

SEQ ID NO: 16123 - protein, 11 aa, Artificial Sequence
  Synthetic construct
ARMTSQGYFDF

SEQ ID NO: 16124 - protein, 21 aa, Artificial Sequence
  Synthetic construct
ARHSLSSSEVRQHRGRGWFDP

SEQ ID NO: 16125 - protein, 25 aa, Artificial Sequence
  Synthetic construct
ARHAAGAHYYGSGSYYRARSNWFDP

SEQ ID NO: 16126 - protein, 17 aa, Artificial Sequence
  Synthetic construct
ARDFKSKMVRGGTNMDV

SEQ ID NO: 16127 - protein, 14 aa, Artificial Sequence
  Synthetic construct
ARVLRYFDWYYFQH

SEQ ID NO: 16128 - protein, 7 aa, Artificial Sequence
  Synthetic construct
ARGYGGY

SEQ ID NO: 16129 - protein, 16 aa, Artificial Sequence
  Synthetic construct
ASQPDYYDRPRGLFEI

SEQ ID NO: 16130 - protein, 12 aa, Artificial Sequence
  Synthetic construct
ARDRGIAVVLDV

SEQ ID NO: 16131 - protein, 17 aa, Artificial Sequence
  Synthetic construct
ARYCSSPSCETSDVFDV

SEQ ID NO: 16132 - protein, 16 aa, Artificial Sequence
  Synthetic construct
ARVVPPDNSNWYLADY

SEQ ID NO: 16133 - protein, 10 aa, Artificial Sequence
  Synthetic construct
IRRSDDSSPS

SEQ ID NO: 16134 - protein, 16 aa, Artificial Sequence
  Synthetic construct
AKSRFRSLLSDDAFDI

SEQ ID NO: 16135 - protein, 26 aa, Artificial Sequence
  Synthetic construct
RGASMVVAAKGMRAWKSEHYYYGMDV

SEQ ID NO: 16136 - protein, 16 aa, Artificial Sequence
  Synthetic construct
ARLVRTGDQGRGYFDY

SEQ ID NO: 16137 - protein, 19 aa, Artificial Sequence
  Synthetic construct
ARDFDDGSYYDILTGYPDY

SEQ ID NO: 16138 - protein, 11 aa, Artificial Sequence
  Synthetic construct
AREALTGHFDY

SEQ ID NO: 16139 - protein, 17 aa, Artificial Sequence
  Synthetic construct
ASSRRYCSSTSCYGMDV

SEQ ID NO: 16140 - protein, 16 aa, Artificial Sequence
  Synthetic construct
ARGGYSGYGKKYYFDY

SEQ ID NO: 16141 - protein, 15 aa, Artificial Sequence
  Synthetic construct
ARLRWELRYYYGMDV

SEQ ID NO: 16142 - protein, 15 aa, Artificial Sequence
  Synthetic construct
AKVSWRQLVIEFLDH

SEQ ID NO: 16143 - protein, 16 aa, Artificial Sequence
  Synthetic construct
ARIDSWYQWALVAFDP

SEQ ID NO: 16144 - protein, 18 aa, Artificial Sequence
  Synthetic construct
AKEGHGNTSGFYYSMMDY

SEQ ID NO: 16145 - protein, 9 aa, Artificial Sequence
  Synthetic construct
ARLDYSKQT

SEQ ID NO: 16146 - protein, 15 aa, Artificial Sequence
  Synthetic construct
ARGSYDFWREGAFDI

SEQ ID NO: 16147 - protein, 13 aa, Artificial Sequence
  Synthetic construct
ARSYSSGRGGMDV

SEQ ID NO: 16148 - protein, 17 aa, Artificial Sequence
  Synthetic construct
VTMRGHYQLFYDDSFDV

SEQ ID NO: 16149 - protein, 15 aa, Artificial Sequence
  Synthetic construct
VKDRYSTGDRGYFDS

SEQ ID NO: 16150 - protein, 13 aa, Artificial Sequence
  Synthetic construct
ARRKTTMGAAFDI

SEQ ID NO: 16151 - protein, 12 aa, Artificial Sequence
  Synthetic construct
AKGLNYLDAFDI

SEQ ID NO: 16152 - protein, 17 aa, Artificial Sequence
  Synthetic construct
ARRDPRRRGVYYYGMDV

SEQ ID NO: 16153 - protein, 14 aa, Artificial Sequence
  Synthetic construct
ARAGPTTVGDAFDF

SEQ ID NO: 16154 - protein, 17 aa, Artificial Sequence
  Synthetic construct
VTMRGHYQLFYDDSFDV

SEQ ID NO: 16155 - protein, 16 aa, Artificial Sequence
  Synthetic construct
ARQTIYTDYQSYYYDF

SEQ ID NO: 16156 - protein, 18 aa, Artificial Sequence
  Synthetic construct
ARTRHPYYYDSSGYCYDY

SEQ ID NO: 16157 - protein, 9 aa, Artificial Sequence
  Synthetic construct
TRVGTVYRG

SEQ ID NO: 16158 - protein, 13 aa, Artificial Sequence
  Synthetic construct
TRIGISGQWFFDL

SEQ ID NO: 16159 - protein, 16 aa, Artificial Sequence
  Synthetic construct
AKGGKWDSTLVTRLAY

SEQ ID NO: 16160 - protein, 13 aa, Artificial Sequence
  Synthetic construct
ARGGGGTHNWFDP

SEQ ID NO: 16161 - protein, 12 aa, Artificial Sequence
  Synthetic construct
VRGGRQWLQIDS

SEQ ID NO: 16162 - protein, 8 aa, Artificial Sequence
  Synthetic construct
ARDAVFDY

SEQ ID NO: 16163 - protein, 27 aa, Artificial Sequence
  Synthetic construct
ARGPKRYCSGGSCYSSSPRYYYYGMDV

SEQ ID NO: 16164 - protein, 20 aa, Artificial Sequence
  Synthetic construct
ARGGGIAARRRNYYYYGMDV

SEQ ID NO: 16165 - protein, 21 aa, Artificial Sequence
  Synthetic construct
ARDLFTHSRGYYYHPVGAFEI

SEQ ID NO: 16166 - protein, 17 aa, Artificial Sequence
  Synthetic construct
AREYRETNWNSHDAFDI

SEQ ID NO: 16167 - protein, 13 aa, Artificial Sequence
  Synthetic construct
AKVGDYISRYFDS

SEQ ID NO: 16168 - protein, 16 aa, Artificial Sequence
  Synthetic construct
ARGGYYDSSGFYYFDY

SEQ ID NO: 16169 - protein, 20 aa, Artificial Sequence
  Synthetic construct
ARPGIAAGGSYYYYYLGMDV

SEQ ID NO: 16170 - protein, 15 aa, Artificial Sequence
  Synthetic construct
AHAITIFGVVSGFYY

SEQ ID NO: 16171 - protein, 16 aa, Artificial Sequence
  Synthetic construct
AKERATVVVPVGIMDV

SEQ ID NO: 16172 - protein, 18 aa, Artificial Sequence
  Synthetic construct
ATISGLRLGELSPYYFDY

SEQ ID NO: 16173 - protein, 7 aa, Artificial Sequence
  Synthetic construct
AADFGDF

SEQ ID NO: 16174 - protein, 12 aa, Artificial Sequence
  Synthetic construct
ARRVWAMGAFDI

SEQ ID NO: 16175 - protein, 19 aa, Artificial Sequence
  Synthetic construct
ARGGRRGIVGPLYYYGMDV

SEQ ID NO: 16176 - protein, 20 aa, Artificial Sequence
  Synthetic construct
VKDFHAGGASYDFWSGLFDR

SEQ ID NO: 16177 - protein, 16 aa, Artificial Sequence
  Synthetic construct
TRRDRDCAGNCAIFDY

SEQ ID NO: 16178 - protein, 14 aa, Artificial Sequence
  Synthetic construct
AKSLQWFGEPELDY

SEQ ID NO: 16179 - protein, 21 aa, Artificial Sequence
  Synthetic construct
ARGRRIVGVKGGQYYYYGMDV

SEQ ID NO: 16180 - protein, 18 aa, Artificial Sequence
  Synthetic construct
ARIQAATEYYNWNDVDDF

SEQ ID NO: 16181 - protein, 12 aa, Artificial Sequence
  Synthetic construct
VRGGRQWLQIDS

SEQ ID NO: 16182 - protein, 23 aa, Artificial Sequence
  Synthetic construct
ARDHFRVTGTTISRHYYYYGMDV

SEQ ID NO: 16183 - protein, 13 aa, Artificial Sequence
  Synthetic construct
ARSGDRKGGRNDY

SEQ ID NO: 16184 - protein, 15 aa, Artificial Sequence
  Synthetic construct
ARDRGRPTWEPFVDY

SEQ ID NO: 16185 - protein, 27 aa, Artificial Sequence
  Synthetic construct
ARDRLRIGGYCSSTSCYRWGYYYGMDV

SEQ ID NO: 16186 - protein, 18 aa, Artificial Sequence
  Synthetic construct
ARDQLLGYSSSWYLRFDY

SEQ ID NO: 16187 - protein, 13 aa, Artificial Sequence
  Synthetic construct
ARQAWGTDGWLDP

SEQ ID NO: 16188 - protein, 13 aa, Artificial Sequence
  Synthetic construct
ARDRGAGAGWFDP

SEQ ID NO: 16189 - protein, 16 aa, Artificial Sequence
  Synthetic construct
ARHLRRDNADYYGLDV

SEQ ID NO: 16190 - protein, 15 aa, Artificial Sequence
  Synthetic construct
ARSVLPLSNYWYLDV

SEQ ID NO: 16191 - protein, 16 aa, Artificial Sequence
  Synthetic construct
ARLDEDLEWLPLALDY

SEQ ID NO: 16192 - protein, 11 aa, Artificial Sequence
  Synthetic construct
ARGRGWARFDP

SEQ ID NO: 16193 - protein, 13 aa, Artificial Sequence
  Synthetic construct
AKIPVAGQWYFDL

SEQ ID NO: 16194 - protein, 16 aa, Artificial Sequence
  Synthetic construct
ARTKGVYGSMSTSFVY

SEQ ID NO: 16195 - protein, 19 aa, Artificial Sequence
  Synthetic construct
ARARTTVTTFRFFYYGLDV

SEQ ID NO: 16196 - protein, 14 aa, Artificial Sequence
  Synthetic construct
ATPSDCGVDCYGLF

SEQ ID NO: 16197 - protein, 19 aa, Artificial Sequence
  Synthetic construct
ARATYYYDSSGYRGGRFDY

SEQ ID NO: 16198 - protein, 15 aa, Artificial Sequence
  Synthetic construct
ARVTIVSSFTNRFDP

SEQ ID NO: 16199 - protein, 19 aa, Artificial Sequence
  Synthetic construct
ARTLRVDFAHIVTTIRFDY

SEQ ID NO: 16200 - protein, 14 aa, Artificial Sequence
  Synthetic construct
AKGATSGWPIRIDN

SEQ ID NO: 16201 - protein, 13 aa, Artificial Sequence
  Synthetic construct
ARVGAIRTGDLDY

SEQ ID NO: 16202 - protein, 20 aa, Artificial Sequence
  Synthetic construct
VKDFHAGGASYDFWSGLFDR

SEQ ID NO: 16203 - protein, 17 aa, Artificial Sequence
  Synthetic construct
AREGPSNYYETNGVIDH

SEQ ID NO: 16204 - protein, 18 aa, Artificial Sequence
  Synthetic construct
AKSGRYFDWLSTHYGMDV

SEQ ID NO: 16205 - protein, 12 aa, Artificial Sequence
  Synthetic construct
VRGGRQWLQIDS

SEQ ID NO: 16206 - protein, 16 aa, Artificial Sequence
  Synthetic construct
ARSSISCHRDYCYFDF

SEQ ID NO: 16207 - protein, 22 aa, Artificial Sequence
  Synthetic construct
ARDRRRQQLVRSPPGYRFGMDV

SEQ ID NO: 16208 - protein, 14 aa, Artificial Sequence
  Synthetic construct
TTEDWNLYNYAMGV

SEQ ID NO: 16209 - protein, 17 aa, Artificial Sequence
  Synthetic construct
AHRRAEGGNWDGGCLDV

SEQ ID NO: 16210 - protein, 14 aa, Artificial Sequence
  Synthetic construct
ARHSRGYSYGYNNY

SEQ ID NO: 16211 - protein, 15 aa, Artificial Sequence
  Synthetic construct
ARGPTVPLPGPPLGY

SEQ ID NO: 16212 - protein, 17 aa, Artificial Sequence
  Synthetic construct
AHRRAEGGNWDGGCLDV

SEQ ID NO: 16213 - protein, 21 aa, Artificial Sequence
  Synthetic construct
AHSESWYSAMVRGVIRTHFDY

SEQ ID NO: 16214 - protein, 15 aa, Artificial Sequence
  Synthetic construct
ARDKGTVVRASGFDP

SEQ ID NO: 16215 - protein, 15 aa, Artificial Sequence
  Synthetic construct
ARGGDYDSSAYAFDY

SEQ ID NO: 16216 - protein, 16 aa, Artificial Sequence
  Synthetic construct
ARHLRRDNADYYGLDV

SEQ ID NO: 16217 - protein, 16 aa, Artificial Sequence
  Synthetic construct
ARHLRRDNADYYGLDV

SEQ ID NO: 16218 - protein, 14 aa, Artificial Sequence
  Synthetic construct
ARSDHFNRSPVLDY

SEQ ID NO: 16219 - protein, 22 aa, Artificial Sequence
  Synthetic construct
VRGGPINYVSDSHYNEHPPFAY

SEQ ID NO: 16220 - protein, 17 aa, Artificial Sequence
  Synthetic construct
ARDLWDGSSLSTNYFDY

SEQ ID NO: 16221 - protein, 22 aa, Artificial Sequence
  Synthetic construct
VRGGPIKYVSDSHYNERPPFAY

SEQ ID NO: 16222 - protein, 17 aa, Artificial Sequence
  Synthetic construct
ARSPHDHESSGYYAFDI

SEQ ID NO: 16223 - protein, 15 aa, Artificial Sequence
  Synthetic construct
ARGGDYDTSGYALDY

SEQ ID NO: 16224 - protein, 17 aa, Artificial Sequence
  Synthetic construct
ARSPHDHESSGYYAFDI

SEQ ID NO: 16225 - protein, 18 aa, Artificial Sequence
  Synthetic construct
ARRRITMVRGVSPNWFDP

SEQ ID NO: 16226 - protein, 17 aa, Artificial Sequence
  Synthetic construct
ARDVLFGWFGESDAFDI

SEQ ID NO: 16227 - protein, 14 aa, Artificial Sequence
  Synthetic construct
ARGRGLRFSPAFDI

SEQ ID NO: 16228 - protein, 17 aa, Artificial Sequence
  Synthetic construct
VRGLKVMSYPPTNWFDS

SEQ ID NO: 16229 - protein, 25 aa, Artificial Sequence
  Synthetic construct
ARHPKKGYCSSTSCYRNYYYYGMDV

SEQ ID NO: 16230 - protein, 11 aa, Artificial Sequence
  Synthetic construct
ARDLRGGSYSR

SEQ ID NO: 16231 - protein, 14 aa, Artificial Sequence
  Synthetic construct
ARGPRSLGELLTDY

SEQ ID NO: 16232 - protein, 14 aa, Artificial Sequence
  Synthetic construct
ARAYGYSSSWYVGY

SEQ ID NO: 16233 - protein, 15 aa, Artificial Sequence
  Synthetic construct
VKDAGGYGSGRVSDY

SEQ ID NO: 16234 - protein, 14 aa, Artificial Sequence
  Synthetic construct
ARGGGYHRYNWFDP

SEQ ID NO: 16235 - protein, 16 aa, Artificial Sequence
  Synthetic construct
ARHLRRDNADYYGLDV

SEQ ID NO: 16236 - protein, 8 aa, Artificial Sequence
  Synthetic construct
ASSRVFDY

SEQ ID NO: 16237 - protein, 28 aa, Artificial Sequence
  Synthetic construct
ARDRRSIAVAGTPPRRTTYTYYYYGMDV

SEQ ID NO: 16238 - protein, 17 aa, Artificial Sequence
  Synthetic construct
ARGVGDVVVPGKDGMDV

SEQ ID NO: 16239 - protein, 14 aa, Artificial Sequence
  Synthetic construct
ARGTAVAPGKAFDI

SEQ ID NO: 16240 - protein, 16 aa, Artificial Sequence
  Synthetic construct
ARVGAERWLQFNALRY

SEQ ID NO: 16241 - protein, 14 aa, Artificial Sequence
  Synthetic construct
AKDARRTYYFGSFH

SEQ ID NO: 16242 - protein, 14 aa, Artificial Sequence
  Synthetic construct
ARDLTVTHYYGMDV

SEQ ID NO: 16243 - protein, 18 aa, Artificial Sequence
  Synthetic construct
ARDSEGRYYDSSGGYFDY

SEQ ID NO: 16244 - protein, 17 aa, Artificial Sequence
  Synthetic construct
VTMRGHYQLFYDDSFDV

SEQ ID NO: 16245 - protein, 12 aa, Artificial Sequence
  Synthetic construct
AGSDWYPYYFDY

SEQ ID NO: 16246 - protein, 18 aa, Artificial Sequence
  Synthetic construct
AREGRAVRGVMGGYYFDY

SEQ ID NO: 16247 - protein, 17 aa, Artificial Sequence
  Synthetic construct
ARDLRLSPYRPSHNIDY

SEQ ID NO: 16248 - protein, 28 aa, Artificial Sequence
  Synthetic construct
ARMKSPPRYFRYYGSGSYYEYYYYGMDV

SEQ ID NO: 16249 - protein, 15 aa, Artificial Sequence
  Synthetic construct
ARRTADGRGHHYVDT

SEQ ID NO: 16250 - protein, 13 aa, Artificial Sequence
  Synthetic construct
ARQTGHYYYTMDV

SEQ ID NO: 16251 - protein, 16 aa, Artificial Sequence
  Synthetic construct
ARHLRRDNADYYGLDV

SEQ ID NO: 16252 - protein, 16 aa, Artificial Sequence
  Synthetic construct
VRGGGKMLGAIPKVDY

SEQ ID NO: 16253 - protein, 13 aa, Artificial Sequence
  Synthetic construct
ARAPQGRDDAFDI

SEQ ID NO: 16254 - protein, 14 aa, Artificial Sequence
  Synthetic construct
ARGPYGDPDDHFDH

SEQ ID NO: 16255 - protein, 12 aa, Artificial Sequence
  Synthetic construct
ARGGDGGNSLDY

SEQ ID NO: 16256 - protein, 7 aa, Artificial Sequence
  Synthetic construct
TTEGLDY

SEQ ID NO: 16257 - protein, 20 aa, Artificial Sequence
  Synthetic construct
AREESTRSSSWYYYYYGMDV

SEQ ID NO: 16258 - protein, 11 aa, Artificial Sequence
  Synthetic construct
ARERDSAWFDP

SEQ ID NO: 16259 - protein, 16 aa, Artificial Sequence
  Synthetic construct
ARIGVRDPYYYYGMDV

SEQ ID NO: 16260 - protein, 20 aa, Artificial Sequence
  Synthetic construct
VKDFHAGGASYDFWSGLFDR

SEQ ID NO: 16261 - protein, 23 aa, Artificial Sequence
  Synthetic construct
ARGHRENYYGSGSYYKRGYYFDY

SEQ ID NO: 16262 - protein, 18 aa, Artificial Sequence
  Synthetic construct
ARGKGSVVAPVPIKAFAP

SEQ ID NO: 16263 - protein, 20 aa, Artificial Sequence
  Synthetic construct
ARHVGEYSSSWYFYYYGMDV

SEQ ID NO: 16264 - protein, 13 aa, Artificial Sequence
  Synthetic construct
SRAIDSGTVAGDY

SEQ ID NO: 16265 - protein, 16 aa, Artificial Sequence
  Synthetic construct
ARSVVRGAIMSDYFDL

SEQ ID NO: 16266 - protein, 17 aa, Artificial Sequence
  Synthetic construct
ARDPNGSGSYYMSWFDP

SEQ ID NO: 16267 - protein, 15 aa, Artificial Sequence
  Synthetic construct
ARRRGGDYGGNLFDY

SEQ ID NO: 16268 - protein, 14 aa, Artificial Sequence
  Synthetic construct
ATDLQPYASGGSPP

SEQ ID NO: 16269 - protein, 21 aa, Artificial Sequence
  Synthetic construct
ARDLYEQLVAGEYYHYYGMDV

SEQ ID NO: 16270 - protein, 20 aa, Artificial Sequence
  Synthetic construct
ARDPTRRWFTRSTRQYYLDS

SEQ ID NO: 16271 - protein, 11 aa, Artificial Sequence
  Synthetic construct
TRRSRSGIDDY

SEQ ID NO: 16272 - protein, 18 aa, Artificial Sequence
  Synthetic construct
ARVSLPAAAPRGPGIAVY

SEQ ID NO: 16273 - protein, 14 aa, Artificial Sequence
  Synthetic construct
ARDYRVPGNYGMDV

SEQ ID NO: 16274 - protein, 16 aa, Artificial Sequence
  Synthetic construct
AKVLSWAVVPLNAFDS

SEQ ID NO: 16275 - protein, 14 aa, Artificial Sequence
  Synthetic construct
TTEDWNLYNYAMGV

SEQ ID NO: 16276 - protein, 15 aa, Artificial Sequence
  Synthetic construct
ARGRRGSFKTYYFDY

SEQ ID NO: 16277 - protein, 14 aa, Artificial Sequence
  Synthetic construct
ARGGRGRATAGMDV

SEQ ID NO: 16278 - protein, 20 aa, Artificial Sequence
  Synthetic construct
ARQYKGRSGGNAARGSLIDY

SEQ ID NO: 16279 - protein, 17 aa, Artificial Sequence
  Synthetic construct
ARAARRYYDKNKVAFDI

SEQ ID NO: 16280 - protein, 13 aa, Artificial Sequence
  Synthetic construct
ARDALGMLGDEDS

SEQ ID NO: 16281 - protein, 17 aa, Artificial Sequence
  Synthetic construct
VTMRGHYQLFYDDSFDV

SEQ ID NO: 16282 - protein, 17 aa, Artificial Sequence
  Synthetic construct
ARSPHDHESSGYYAFDI

SEQ ID NO: 16283 - protein, 17 aa, Artificial Sequence
  Synthetic construct
ARGVRDSSGYYYNDFQH

SEQ ID NO: 16284 - protein, 16 aa, Artificial Sequence
  Synthetic construct
ARHLRRDNADYYGLDV

SEQ ID NO: 16285 - protein, 22 aa, Artificial Sequence
  Synthetic construct
ARDFRPTSYCSSTSCYLLPQDY

SEQ ID NO: 16286 - protein, 11 aa, Artificial Sequence
  Synthetic construct
PLIAAAQPWDF

SEQ ID NO: 16287 - protein, 16 aa, Artificial Sequence
  Synthetic construct
AKGVGSTPPTSRYLDY

SEQ ID NO: 16288 - protein, 14 aa, Artificial Sequence
  Synthetic construct
ARTGYYDSSGYLDI

SEQ ID NO: 16289 - protein, 17 aa, Artificial Sequence
  Synthetic construct
ARSPHDHESSGYYAFDI

SEQ ID NO: 16290 - protein, 13 aa, Artificial Sequence
  Synthetic construct
ARVGGKSPWYFDL

SEQ ID NO: 16291 - protein, 24 aa, Artificial Sequence
  Synthetic construct
ARLGGTYYDTLTGDPYYFFYGMDV

SEQ ID NO: 16292 - protein, 15 aa, Artificial Sequence
  Synthetic construct
ARHVLLGVVPAAIDY

SEQ ID NO: 16293 - protein, 16 aa, Artificial Sequence
  Synthetic construct
ARHLRRDNADYYGLDV

SEQ ID NO: 16294 - protein, 13 aa, Artificial Sequence
  Synthetic construct
VRDPRDDIVGIDY

SEQ ID NO: 16295 - protein, 19 aa, Artificial Sequence
  Synthetic construct
ARDRGVGSWHNYHYYGMDV

SEQ ID NO: 16296 - protein, 18 aa, Artificial Sequence
  Synthetic construct
ARAICSTDSGIRSCAFDI

SEQ ID NO: 16297 - protein, 17 aa, Artificial Sequence
  Synthetic construct
AKDALYSGSYYEGVFDY

SEQ ID NO: 16298 - protein, 15 aa, Artificial Sequence
  Synthetic construct
ARDPKYSGDYGLRFY

SEQ ID NO: 16299 - protein, 12 aa, Artificial Sequence
  Synthetic construct
AHSNSLPPNFDY

SEQ ID NO: 16300 - protein, 14 aa, Artificial Sequence
  Synthetic construct
ARVGDGGYGPNFDH

SEQ ID NO: 16301 - protein, 21 aa, Artificial Sequence
  Synthetic construct
ARDRAQYSSGWGRVYYYGMDV

SEQ ID NO: 16302 - protein, 20 aa, Artificial Sequence
  Synthetic construct
ARGKNLVVIPAADYGSWFDP

SEQ ID NO: 16303 - protein, 15 aa, Artificial Sequence
  Synthetic construct
AADGRNWKSLEVLDV

SEQ ID NO: 16304 - protein, 13 aa, Artificial Sequence
  Synthetic construct
TTRYKWNVDHSDY

SEQ ID NO: 16305 - protein, 18 aa, Artificial Sequence
  Synthetic construct
AKDRRYCSSTSCYFPFDY

SEQ ID NO: 16306 - protein, 21 aa, Artificial Sequence
  Synthetic construct
ARDAPVIRVETGMVTNRIFDS

SEQ ID NO: 16307 - protein, 17 aa, Artificial Sequence
  Synthetic construct
ARAEVPPDYSDHVYFQH

SEQ ID NO: 16308 - protein, 13 aa, Artificial Sequence
  Synthetic construct
ARGGRYSSSWLSS

SEQ ID NO: 16309 - protein, 13 aa, Artificial Sequence
  Synthetic construct
TRDSGRGGSWFDY

SEQ ID NO: 16310 - protein, 16 aa, Artificial Sequence
  Synthetic construct
ARDLRSLTRGYSLYDY

SEQ ID NO: 16311 - protein, 23 aa, Artificial Sequence
  Synthetic construct
ARDARYCSSTSCYRPDYYYGMDV

SEQ ID NO: 16312 - protein, 14 aa, Artificial Sequence
  Synthetic construct
ASARFRAARPIFDY

SEQ ID NO: 16313 - protein, 11 aa, Artificial Sequence
  Synthetic construct
VRGEGLGHIDL

SEQ ID NO: 16314 - protein, 17 aa, Artificial Sequence
  Synthetic construct
ARGLRWFPFERYNWFDP

SEQ ID NO: 16315 - protein, 10 aa, Artificial Sequence
  Synthetic construct
ATPVVERRDY

SEQ ID NO: 16316 - protein, 11 aa, Artificial Sequence
  Synthetic construct
VSKNNFHWFDR

SEQ ID NO: 16317 - protein, 20 aa, Artificial Sequence
  Synthetic construct
AKDRAPPNIYDSSGRYYFDS

SEQ ID NO: 16318 - protein, 12 aa, Artificial Sequence
  Synthetic construct
ARDVARGDGMDV

SEQ ID NO: 16319 - protein, 11 aa, Artificial Sequence
  Synthetic construct
ALLLNKNGVDV

SEQ ID NO: 16320 - protein, 19 aa, Artificial Sequence
  Synthetic construct
ARLMGYYGSGSYYSNWFDP

SEQ ID NO: 16321 - protein, 21 aa, Artificial Sequence
  Synthetic construct
ARGVAKRGGEYCSSTSCRLDP

SEQ ID NO: 16322 - protein, 16 aa, Artificial Sequence
  Synthetic construct
VKDLGWRSIAADGGDY

SEQ ID NO: 16323 - protein, 12 aa, Artificial Sequence
  Synthetic construct
TTFAGWRSYFDY

SEQ ID NO: 16324 - protein, 15 aa, Artificial Sequence
  Synthetic construct
AKVAAKYSSSSHIDY

SEQ ID NO: 16325 - protein, 12 aa, Artificial Sequence
  Synthetic construct
ARAWERKQWLDS

SEQ ID NO: 16326 - protein, 17 aa, Artificial Sequence
  Synthetic construct
AHRRAEGGNWDGGCLDV

SEQ ID NO: 16327 - protein, 22 aa, Artificial Sequence
  Synthetic construct
ARRPYTASGSSSLVYYYYGMDV

SEQ ID NO: 16328 - protein, 19 aa, Artificial Sequence
  Synthetic construct
ARVGGGSEWYNSGWFSFDS

SEQ ID NO: 16329 - protein, 9 aa, Artificial Sequence
  Synthetic construct
TRDGGTYPY

SEQ ID NO: 16330 - protein, 14 aa, Artificial Sequence
  Synthetic construct
ARSGHDREMAAIDY

SEQ ID NO: 16331 - protein, 14 aa, Artificial Sequence
  Synthetic construct
AKDRSVRGVITPDY

SEQ ID NO: 16332 - protein, 20 aa, Artificial Sequence
  Synthetic construct
VKDFHAGGASYDFWSGLFDR

SEQ ID NO: 16333 - protein, 18 aa, Artificial Sequence
  Synthetic construct
ARDSRSNEYFYFYYGMDV

SEQ ID NO: 16334 - protein, 16 aa, Artificial Sequence
  Synthetic construct
ATDHHFDWLDYNWFDP

SEQ ID NO: 16335 - protein, 18 aa, Artificial Sequence
  Synthetic construct
ARGVKWFGDPAAVWSLDI

SEQ ID NO: 16336 - protein, 20 aa, Artificial Sequence
  Synthetic construct
ARLRAQGQYDFWSADFYFDY

SEQ ID NO: 16337 - protein, 14 aa, Artificial Sequence
  Synthetic construct
VKDIGTTTSPPLDS

SEQ ID NO: 16338 - protein, 14 aa, Artificial Sequence
  Synthetic construct
ARGYGSDWRDAFDL

SEQ ID NO: 16339 - protein, 17 aa, Artificial Sequence
  Synthetic construct
AKDLEAAAPIYHSALDL

SEQ ID NO: 16340 - protein, 19 aa, Artificial Sequence
  Synthetic construct
AKEGYQLLTGYSSGRLFDY

SEQ ID NO: 16341 - protein, 19 aa, Artificial Sequence
  Synthetic construct
AREPGSGSYLIYYYYGMDV

SEQ ID NO: 16342 - protein, 15 aa, Artificial Sequence
  Synthetic construct
ARGDYSSSWYRPFNY

SEQ ID NO: 16343 - protein, 13 aa, Artificial Sequence
  Synthetic construct
ARRYYYGSAAFGY

SEQ ID NO: 16344 - protein, 13 aa, Artificial Sequence
  Synthetic construct
AKDHNWNDWYFDL

SEQ ID NO: 16345 - protein, 14 aa, Artificial Sequence
  Synthetic construct
ARMAGVRYYYGMDV

SEQ ID NO: 16346 - protein, 18 aa, Artificial Sequence
  Synthetic construct
ARGGDSSGYDYYYYGMDV

SEQ ID NO: 16347 - protein, 12 aa, Artificial Sequence
  Synthetic construct
AGGITFGGVHTF

SEQ ID NO: 16348 - protein, 9 aa, Artificial Sequence
  Synthetic construct
FWGARGFDY

SEQ ID NO: 16349 - protein, 10 aa, Artificial Sequence
  Synthetic construct
ATAERLWFDP

SEQ ID NO: 16350 - protein, 14 aa, Artificial Sequence
  Synthetic construct
ARLQVGAMGNGLDA

SEQ ID NO: 16351 - protein, 17 aa, Artificial Sequence
  Synthetic construct
AHRRAEGGNWDGGCLDV

SEQ ID NO: 16352 - protein, 17 aa, Artificial Sequence
  Synthetic construct
AKLKRWFGPYAKYYFDY

SEQ ID NO: 16353 - protein, 12 aa, Artificial Sequence
  Synthetic construct
ARDLGKYYDSRN

SEQ ID NO: 16354 - protein, 17 aa, Artificial Sequence
  Synthetic construct
ARELCSGGVCYQDAFDA

SEQ ID NO: 16355 - protein, 11 aa, Artificial Sequence
  Synthetic construct
AKEGRGNGFDP

SEQ ID NO: 16356 - protein, 14 aa, Artificial Sequence
  Synthetic construct
ARGPRGGRTNWFDP

SEQ ID NO: 16357 - protein, 12 aa, Artificial Sequence
  Synthetic construct
ARGRYSYGPFDY

SEQ ID NO: 16358 - protein, 15 aa, Artificial Sequence
  Synthetic construct
ARDYGEWEQYGTFPI

SEQ ID NO: 16359 - protein, 17 aa, Artificial Sequence
  Synthetic construct
ARARYGGSDLIYDVFDL

SEQ ID NO: 16360 - protein, 17 aa, Artificial Sequence
  Synthetic construct
AHRRAEGGNWDGGCLDV

SEQ ID NO: 16361 - protein, 18 aa, Artificial Sequence
  Synthetic construct
ARNLITMVRGVIQHPFDY

SEQ ID NO: 16362 - protein, 14 aa, Artificial Sequence
  Synthetic construct
ARGGRWGQSYGLDY

SEQ ID NO: 16363 - protein, 14 aa, Artificial Sequence
  Synthetic construct
ARARSSKGYYDSSH

SEQ ID NO: 16364 - protein, 11 aa, Artificial Sequence
  Synthetic construct
ARAPNRVGMDV

SEQ ID NO: 16365 - protein, 13 aa, Artificial Sequence
  Synthetic construct
ARRVAGATIWFHP

SEQ ID NO: 16366 - protein, 16 aa, Artificial Sequence
  Synthetic construct
ARSPMIRGVPAALFDH

SEQ ID NO: 16367 - protein, 13 aa, Artificial Sequence
  Synthetic construct
AKDRKQQRPFIDY

SEQ ID NO: 16368 - protein, 16 aa, Artificial Sequence
  Synthetic construct
AKAHRRGGYYYYGMDV

SEQ ID NO: 16369 - protein, 12 aa, Artificial Sequence
  Synthetic construct
ARGGDGFDLFDY

SEQ ID NO: 16370 - protein, 14 aa, Artificial Sequence
  Synthetic construct
ARAHVLIWFGAADY

SEQ ID NO: 16371 - protein, 11 aa, Artificial Sequence
  Synthetic construct
VIVVVPAAIVY

SEQ ID NO: 16372 - protein, 19 aa, Artificial Sequence
  Synthetic construct
AVTTFYDFFTGGPGGGFDY

SEQ ID NO: 16373 - protein, 26 aa, Artificial Sequence
  Synthetic construct
ARDRLGYCSGGSCSRLPAYYYYGMDV

SEQ ID NO: 16374 - protein, 20 aa, Artificial Sequence
  Synthetic construct
AREGGKGGSGSRSSKYGMDV

SEQ ID NO: 16375 - protein, 19 aa, Artificial Sequence
  Synthetic construct
AKDWGYCSSTSCYRSGMDV

SEQ ID NO: 16376 - protein, 13 aa, Artificial Sequence
  Synthetic construct
VRGQRRTRWALDI

SEQ ID NO: 16377 - protein, 12 aa, Artificial Sequence
  Synthetic construct
ARGRRTGTYFDY

SEQ ID NO: 16378 - protein, 18 aa, Artificial Sequence
  Synthetic construct
ARHSHGRIAAAGRKWFDP

SEQ ID NO: 16379 - protein, 24 aa, Artificial Sequence
  Synthetic construct
ARDLVYRDYYGSGSYYLMTGYFDY

SEQ ID NO: 16380 - protein, 16 aa, Artificial Sequence
  Synthetic construct
ARDPFRGSSAYYLRDY

SEQ ID NO: 16381 - protein, 11 aa, Artificial Sequence
  Synthetic construct
ARLRSRGWFDP

SEQ ID NO: 16382 - protein, 23 aa, Artificial Sequence
  Synthetic construct
ARDFDLVVPSATYPPFYYHGMDV

SEQ ID NO: 16383 - protein, 17 aa, Artificial Sequence
  Synthetic construct
ARTYTPFYYGSGKHLDY

SEQ ID NO: 16384 - protein, 16 aa, Artificial Sequence
  Synthetic construct
ARDLEITYDSSGYIDY

SEQ ID NO: 16385 - protein, 11 aa, Artificial Sequence
  Synthetic construct
TTLPKNTDFDL

SEQ ID NO: 16386 - protein, 12 aa, Artificial Sequence
  Synthetic construct
VRYSIGWPHLGY

SEQ ID NO: 16387 - protein, 14 aa, Artificial Sequence
  Synthetic construct
ARVDYDFWKGNFDY

SEQ ID NO: 16388 - protein, 22 aa, Artificial Sequence
  Synthetic construct
ARDLTQTHYYEGRAYYYDAFDV

SEQ ID NO: 16389 - protein, 12 aa, Artificial Sequence
  Synthetic construct
ASATTVIGAFDI

SEQ ID NO: 16390 - protein, 10 aa, Artificial Sequence
  Synthetic construct
ARRTGGSPDY

SEQ ID NO: 16391 - protein, 13 aa, Artificial Sequence
  Synthetic construct
ASSSWRYYYGMDV

SEQ ID NO: 16392 - protein, 17 aa, Artificial Sequence
  Synthetic construct
ARGAGDSAYDAWGVLDF

SEQ ID NO: 16393 - protein, 20 aa, Artificial Sequence
  Synthetic construct
ASLAYCSTIGCPHYYYGMDV

SEQ ID NO: 16394 - protein, 16 aa, Artificial Sequence
  Synthetic construct
ARHLRRDNADYYGLDV

SEQ ID NO: 16395 - protein, 18 aa, Artificial Sequence
  Synthetic construct
ARDRDFGSGNPYTNSFDP

SEQ ID NO: 16396 - protein, 14 aa, Artificial Sequence
  Synthetic construct
AKAWGSNYGPPDVD

SEQ ID NO: 16397 - protein, 16 aa, Artificial Sequence
  Synthetic construct
TRGGYSDYDWVPGIDY

SEQ ID NO: 16398 - protein, 26 aa, Artificial Sequence
  Synthetic construct
AREGPRRWEVDCGGDCYSGHSRAFDI

SEQ ID NO: 16399 - protein, 17 aa, Artificial Sequence
  Synthetic construct
ARSPHDHESSGYYAFDI

SEQ ID NO: 16400 - protein, 20 aa, Artificial Sequence
  Synthetic construct
ARRQTFYYTDYSPPTDAFDI

SEQ ID NO: 16401 - protein, 16 aa, Artificial Sequence
  Synthetic construct
ARDPFRGSSAYYLRDY

SEQ ID NO: 16402 - protein, 9 aa, Artificial Sequence
  Synthetic construct
VRGFHSFDL

SEQ ID NO: 16403 - protein, 17 aa, Artificial Sequence
  Synthetic construct
AHRRAEGGNWDGGCLDV

SEQ ID NO: 16404 - protein, 13 aa, Artificial Sequence
  Synthetic construct
ARAFHLVNNWHDP

SEQ ID NO: 16405 - protein, 14 aa, Artificial Sequence
  Synthetic construct
ARVSGSYRRNAFDI

SEQ ID NO: 16406 - protein, 14 aa, Artificial Sequence
  Synthetic construct
ARGGAAAATRYFDY

SEQ ID NO: 16407 - protein, 6 aa, Artificial Sequence
  Synthetic construct
ARTTDV

SEQ ID NO: 16408 - protein, 15 aa, Artificial Sequence
  Synthetic construct
AKGNSYSGSYLSFDP

SEQ ID NO: 16409 - protein, 19 aa, Artificial Sequence
  Synthetic construct
VKDGVASGSYRIARNSFDY

SEQ ID NO: 16410 - protein, 15 aa, Artificial Sequence
  Synthetic construct
AKGVEQAVDLNWFDP

SEQ ID NO: 16411 - protein, 9 aa, Artificial Sequence
  Synthetic construct
TTQNGWFDP

SEQ ID NO: 16412 - protein, 13 aa, Artificial Sequence
  Synthetic construct
ARDWAGRFLGHLS

SEQ ID NO: 16413 - protein, 11 aa, Artificial Sequence
  Synthetic construct
ARGDGGLPFDY

SEQ ID NO: 16414 - protein, 12 aa, Artificial Sequence
  Synthetic construct
ASGYSTIRGFDH

SEQ ID NO: 16415 - protein, 14 aa, Artificial Sequence
  Synthetic construct
ARESSIAAPGGVAV

SEQ ID NO: 16416 - protein, 17 aa, Artificial Sequence
  Synthetic construct
AKEVKWSTPRGYNWFDP

SEQ ID NO: 16417 - protein, 20 aa, Artificial Sequence
  Synthetic construct
VKDFHAGGASYDFWSGLFDR

SEQ ID NO: 16418 - protein, 14 aa, Artificial Sequence
  Synthetic construct
ARRKMATIWDAFDL

SEQ ID NO: 16419 - protein, 9 aa, Artificial Sequence
  Synthetic construct
ARESRWLTY

SEQ ID NO: 16420 - protein, 11 aa, Artificial Sequence
  Synthetic construct
TRFGSYYWFDP

SEQ ID NO: 16421 - protein, 14 aa, Artificial Sequence
  Synthetic construct
AREGRAYSHYYFDY

SEQ ID NO: 16422 - protein, 14 aa, Artificial Sequence
  Synthetic construct
AREYSSSWYRRVDY

SEQ ID NO: 16423 - protein, 16 aa, Artificial Sequence
  Synthetic construct
ARHLRRDNADYYGLDV

SEQ ID NO: 16424 - protein, 12 aa, Artificial Sequence
  Synthetic construct
ARRKYSSIYFDY

SEQ ID NO: 16425 - protein, 12 aa, Artificial Sequence
  Synthetic construct
ARSLGDSSGLDY

SEQ ID NO: 16426 - protein, 16 aa, Artificial Sequence
  Synthetic construct
ARDKDRTIFINYGMDV

SEQ ID NO: 16427 - protein, 15 aa, Artificial Sequence
  Synthetic construct
ARSPNYYDTRAYFDS

SEQ ID NO: 16428 - protein, 22 aa, Artificial Sequence
  Synthetic construct
ARTGGGAARAARTRYYYYGMDV

SEQ ID NO: 16429 - protein, 18 aa, Artificial Sequence
  Synthetic construct
ARAICSTDSGIRSCAFDI

SEQ ID NO: 16430 - protein, 20 aa, Artificial Sequence
  Synthetic construct
ARPGVYCGGPTCYFYSGMDV

SEQ ID NO: 16431 - protein, 18 aa, Artificial Sequence
  Synthetic construct
ARDDKYYYGSGSQHAFDI

SEQ ID NO: 16432 - protein, 10 aa, Artificial Sequence
  Synthetic construct
ATVTAWGSDY

SEQ ID NO: 16433 - protein, 17 aa, Artificial Sequence
  Synthetic construct
ARSPHDHESSGYYAFDI

SEQ ID NO: 16434 - protein, 16 aa, Artificial Sequence
  Synthetic construct
ARVPRLHIAAAGGGGG

SEQ ID NO: 16435 - protein, 11 aa, Artificial Sequence
  Synthetic construct
ARWKSGTHFDY

SEQ ID NO: 16436 - protein, 16 aa, Artificial Sequence
  Synthetic construct
TTDSVPYSSGWYWYDY

SEQ ID NO: 16437 - protein, 16 aa, Artificial Sequence
  Synthetic construct
ARNPRSLEGYYDAFDP

SEQ ID NO: 16438 - protein, 15 aa, Artificial Sequence
  Synthetic construct
VRDKPDDGGTTTYDF

SEQ ID NO: 16439 - protein, 16 aa, Artificial Sequence
  Synthetic construct
ARGRYVYYESTADFDN

SEQ ID NO: 16440 - protein, 14 aa, Artificial Sequence
  Synthetic construct
ARDGGSGSSVFFDY

SEQ ID NO: 16441 - protein, 15 aa, Artificial Sequence
  Synthetic construct
ASSNYDNLSFRSFDI

SEQ ID NO: 16442 - protein, 19 aa, Artificial Sequence
  Synthetic construct
ARDPRIAAAGRVRNNWFDP

SEQ ID NO: 16443 - protein, 20 aa, Artificial Sequence
  Synthetic construct
AGEFVIPAGKSQYYYYGMDV

SEQ ID NO: 16444 - protein, 17 aa, Artificial Sequence
  Synthetic construct
ARDPVYYYDRNNGYFDH

SEQ ID NO: 16445 - protein, 13 aa, Artificial Sequence
  Synthetic construct
ARRTSNYGVFFDY

SEQ ID NO: 16446 - protein, 21 aa, Artificial Sequence
  Synthetic construct
ARDSGHYYGSGSHPARDAFDI

SEQ ID NO: 16447 - protein, 13 aa, Artificial Sequence
  Synthetic construct
ARISAGIVGPSEY

SEQ ID NO: 16448 - protein, 14 aa, Artificial Sequence
  Synthetic construct
ARDGERGSSSPLDY

SEQ ID NO: 16449 - protein, 8 aa, Artificial Sequence
  Synthetic construct
ARSWNCDF

SEQ ID NO: 16450 - protein, 17 aa, Artificial Sequence
  Synthetic construct
AKGGGFSGYNYDPTADF

SEQ ID NO: 16451 - protein, 13 aa, Artificial Sequence
  Synthetic construct
ARGYGSGNSRFDP

SEQ ID NO: 16452 - protein, 19 aa, Artificial Sequence
  Synthetic construct
ARDWGLGHRGGIAAAGEDY

SEQ ID NO: 16453 - protein, 14 aa, Artificial Sequence
  Synthetic construct
AKPVVEEVDLQFDY

SEQ ID NO: 16454 - protein, 24 aa, Artificial Sequence
  Synthetic construct
AKDAGYGSGKRTGKVYYYYYGMDV

SEQ ID NO: 16455 - protein, 14 aa, Artificial Sequence
  Synthetic construct
TRQRYSGSYSVFDY

SEQ ID NO: 16456 - protein, 11 aa, Artificial Sequence
  Synthetic construct
ATRGGPLPFNY

SEQ ID NO: 16457 - protein, 12 aa, Artificial Sequence
  Synthetic construct
ARGEPTSDAFDI

SEQ ID NO: 16458 - protein, 17 aa, Artificial Sequence
  Synthetic construct
ARSPHDHESSGYYAFDI

SEQ ID NO: 16459 - protein, 24 aa, Artificial Sequence
  Synthetic construct
ARDRTYYDSSGYYLRQYYYYGMDV

SEQ ID NO: 16460 - protein, 15 aa, Artificial Sequence
  Synthetic construct
ARDPTDVVVDPDFDY

SEQ ID NO: 16461 - protein, 17 aa, Artificial Sequence
  Synthetic construct
ARDFGVDVLLWFGAFDY

SEQ ID NO: 16462 - protein, 16 aa, Artificial Sequence
  Synthetic construct
VRLALGSYTYYRQVDY

SEQ ID NO: 16463 - protein, 19 aa, Artificial Sequence
  Synthetic construct
ARHRVDYYGSGSYSNWFDP

SEQ ID NO: 16464 - protein, 16 aa, Artificial Sequence
  Synthetic construct
ARHLRRDNADYYGLDV

SEQ ID NO: 16465 - protein, 16 aa, Artificial Sequence
  Synthetic construct
ARHRSGSYRGSAWFDP

SEQ ID NO: 16466 - protein, 13 aa, Artificial Sequence
  Synthetic construct
ARAVAGITRPLDY

SEQ ID NO: 16467 - protein, 16 aa, Artificial Sequence
  Synthetic construct
ARDSRASGTTPLYYDY

SEQ ID NO: 16468 - protein, 16 aa, Artificial Sequence
  Synthetic construct
ARHLRRDNADYYGLDV

SEQ ID NO: 16469 - protein, 11 aa, Artificial Sequence
  Synthetic construct
TEGIQFWDMDV

SEQ ID NO: 16470 - protein, 18 aa, Artificial Sequence
  Synthetic construct
LYREEQLRRGVHHYGVDV

SEQ ID NO: 16471 - protein, 13 aa, Artificial Sequence
  Synthetic construct
ARRAYSSGWYVDY

SEQ ID NO: 16472 - protein, 8 aa, Artificial Sequence
  Synthetic construct
ANTNFLDY

SEQ ID NO: 16473 - protein, 15 aa, Artificial Sequence
  Synthetic construct
ARSTVPAGIGGGLDY

SEQ ID NO: 16474 - protein, 21 aa, Artificial Sequence
  Synthetic construct
AREYFDWQLYATSPSYYGMDV

SEQ ID NO: 16475 - protein, 16 aa, Artificial Sequence
  Synthetic construct
ATLPNWGRHYYYGMDV

SEQ ID NO: 16476 - protein, 16 aa, Artificial Sequence
  Synthetic construct
TRGGYSDYDWVPGIDY

SEQ ID NO: 16477 - protein, 16 aa, Artificial Sequence
  Synthetic construct
ARHLRRDNADYYGLDV

SEQ ID NO: 16478 - protein, 9 aa, Artificial Sequence
  Synthetic construct
AKGGSCYYY

SEQ ID NO: 16479 - protein, 16 aa, Artificial Sequence
  Synthetic construct
ARHLRRDNADYYGLDV

SEQ ID NO: 16480 - protein, 20 aa, Artificial Sequence
  Synthetic construct
AREGLGAYYYGSGSYKNIDY

SEQ ID NO: 16481 - protein, 15 aa, Artificial Sequence
  Synthetic construct
AKGVEQAVDLNWFDP

SEQ ID NO: 16482 - protein, 18 aa, Artificial Sequence
  Synthetic construct
ARVGAFSFSQAVKFYFDY

SEQ ID NO: 16483 - protein, 10 aa, Artificial Sequence
  Synthetic construct
ARDRHAYYDQ

SEQ ID NO: 16484 - protein, 16 aa, Artificial Sequence
  Synthetic construct
ARDAYRYSSGWRGFDY

SEQ ID NO: 16485 - protein, 16 aa, Artificial Sequence
  Synthetic construct
ARHLRRDNADYYGLDV

SEQ ID NO: 16486 - protein, 14 aa, Artificial Sequence
  Synthetic construct
ARHERAGAHNPFDY

SEQ ID NO: 16487 - protein, 16 aa, Artificial Sequence
  Synthetic construct
TRLANIAAAGRPVVDY

SEQ ID NO: 16488 - protein, 20 aa, Artificial Sequence
  Synthetic construct
VKDFHAGGASYDFWSGLFDR

SEQ ID NO: 16489 - protein, 16 aa, Artificial Sequence
  Synthetic construct
VRTEYCSSTTCYHFDL

SEQ ID NO: 16490 - protein, 14 aa, Artificial Sequence
  Synthetic construct
ARYCSSINCYSFDY

SEQ ID NO: 16491 - protein, 17 aa, Artificial Sequence
  Synthetic construct
VTMRGHYQLFYDDSFDV

SEQ ID NO: 16492 - protein, 18 aa, Artificial Sequence
  Synthetic construct
ASEYFDGRSYHSFCGLDV

SEQ ID NO: 16493 - protein, 12 aa, Artificial Sequence
  Synthetic construct
ARHEQWASGFDV

SEQ ID NO: 16494 - protein, 19 aa, Artificial Sequence
  Synthetic construct
ARDEWDGHSLGHYHYTMDV

SEQ ID NO: 16495 - protein, 17 aa, Artificial Sequence
  Synthetic construct
ARGFGGSRYYYYYGMDV

SEQ ID NO: 16496 - protein, 17 aa, Artificial Sequence
  Synthetic construct
ARSPHDHESSGYYAFDI

SEQ ID NO: 16497 - protein, 13 aa, Artificial Sequence
  Synthetic construct
AGDCSGGSCWFDP

SEQ ID NO: 16498 - protein, 19 aa, Artificial Sequence
  Synthetic construct
ALGLYVWGSYHPQGGWFDP

SEQ ID NO: 16499 - protein, 12 aa, Artificial Sequence
  Synthetic construct
GRSLGDSSGLDY

SEQ ID NO: 16500 - protein, 20 aa, Artificial Sequence
  Synthetic construct
ARHEPPTYDSSGYYYDAFDI

SEQ ID NO: 16501 - protein, 16 aa, Artificial Sequence
  Synthetic construct
ARARGRGSGYYSDFDS

SEQ ID NO: 16502 - protein, 15 aa, Artificial Sequence
  Synthetic construct
AMGSVAWAGRKGADF

SEQ ID NO: 16503 - protein, 14 aa, Artificial Sequence
  Synthetic construct
AREAFGWEQKHLDH

SEQ ID NO: 16504 - protein, 15 aa, Artificial Sequence
  Synthetic construct
TKDRDLLGLGEAFDT

SEQ ID NO: 16505 - protein, 14 aa, Artificial Sequence
  Synthetic construct
AKDFYYDILTEPWY

SEQ ID NO: 16506 - protein, 20 aa, Artificial Sequence
  Synthetic construct
ARIFHDGHNYDYEPLAWFDN

SEQ ID NO: 16507 - protein, 20 aa, Artificial Sequence
  Synthetic construct
VKDFHAGGASYDFWSGLFDR

SEQ ID NO: 16508 - protein, 15 aa, Artificial Sequence
  Synthetic construct
AKDSSSWYAGGYFDS

SEQ ID NO: 16509 - protein, 18 aa, Artificial Sequence
  Synthetic construct
ARDHHHSSDFYFNGVFDI

SEQ ID NO: 16510 - protein, 12 aa, Artificial Sequence
  Synthetic construct
ARHEQWLIGFRH

SEQ ID NO: 16511 - protein, 10 aa, Artificial Sequence
  Synthetic construct
ATDGFSPSDH

SEQ ID NO: 16512 - protein, 12 aa, Artificial Sequence
  Synthetic construct
ARFGAEQGNFDY

SEQ ID NO: 16513 - protein, 15 aa, Artificial Sequence
  Synthetic construct
ARVYFDWPKTYYFDY

SEQ ID NO: 16514 - protein, 26 aa, Artificial Sequence
  Synthetic construct
ARDWGYYYGSGSYYKRVRDYYYGMDV

SEQ ID NO: 16515 - protein, 19 aa, Artificial Sequence
  Synthetic construct
ASLGEYSSGWKTKKNWFDP

SEQ ID NO: 16516 - protein, 8 aa, Artificial Sequence
  Synthetic construct
AKGAGFDY

SEQ ID NO: 16517 - protein, 15 aa, Artificial Sequence
  Synthetic construct
VRSRVVAPRPSYFDY

SEQ ID NO: 16518 - protein, 16 aa, Artificial Sequence
  Synthetic construct
ARVRYYGSGSYYIFDY

SEQ ID NO: 16519 - protein, 14 aa, Artificial Sequence
  Synthetic construct
ARDQSYGSGSGLDY

SEQ ID NO: 16520 - protein, 23 aa, Artificial Sequence
  Synthetic construct
ARGHYYGSGSYPHPAYYYYGMDV

SEQ ID NO: 16521 - protein, 13 aa, Artificial Sequence
  Synthetic construct
ARLNYYYYYGMDV

SEQ ID NO: 16522 - protein, 13 aa, Artificial Sequence
  Synthetic construct
ATITTMVDYAMDV

SEQ ID NO: 16523 - protein, 17 aa, Artificial Sequence
  Synthetic construct
ARYRGYSYGSPRYYFDY

SEQ ID NO: 16524 - protein, 15 aa, Artificial Sequence
  Synthetic construct
ARDLGSSSSLLWFDY

SEQ ID NO: 16525 - protein, 10 aa, Artificial Sequence
  Synthetic construct
ATASGWPLDF

SEQ ID NO: 16526 - protein, 17 aa, Artificial Sequence
  Synthetic construct
AHRRAEGGNWDGGCLDV

SEQ ID NO: 16527 - protein, 8 aa, Artificial Sequence
  Synthetic construct
ARGRSMDV

SEQ ID NO: 16528 - protein, 13 aa, Artificial Sequence
  Synthetic construct
AREYGSGSSIFDY

SEQ ID NO: 16529 - protein, 7 aa, Artificial Sequence
  Synthetic construct
FQYQVTP

SEQ ID NO: 16530 - protein, 17 aa, Artificial Sequence
  Synthetic construct
ARDSGYGYGLHEEAFDV

SEQ ID NO: 16531 - protein, 16 aa, Artificial Sequence
  Synthetic construct
AREGGGPYDRSHYYDI

SEQ ID NO: 16532 - protein, 13 aa, Artificial Sequence
  Synthetic construct
ARARGRYSAEFDY

SEQ ID NO: 16533 - protein, 15 aa, Artificial Sequence
  Synthetic construct
VKPASSWTPQIVRDY

SEQ ID NO: 16534 - protein, 12 aa, Artificial Sequence
  Synthetic construct
ARVCCRLGRSDF

SEQ ID NO: 16535 - protein, 13 aa, Artificial Sequence
  Synthetic construct
ARDRSRSTGSFDS

SEQ ID NO: 16536 - protein, 11 aa, Artificial Sequence
  Synthetic construct
ASGVRSSGFDI

SEQ ID NO: 16537 - protein, 25 aa, Artificial Sequence
  Synthetic construct
ARGAGYCSSTSCSQKQRYYYYGMDV

SEQ ID NO: 16538 - protein, 12 aa, Artificial Sequence
  Synthetic construct
ARAYSDSWGFDY

SEQ ID NO: 16539 - protein, 19 aa, Artificial Sequence
  Synthetic construct
ARHYNGGYCSGGSCYSFDY

SEQ ID NO: 16540 - protein, 14 aa, Artificial Sequence
  Synthetic construct
AKHVRGWFIYGLDV

SEQ ID NO: 16541 - protein, 16 aa, Artificial Sequence
  Synthetic construct
ARRRGTDISTGRFFDS

SEQ ID NO: 16542 - protein, 12 aa, Artificial Sequence
  Synthetic construct
ARFGVKENWFDP

SEQ ID NO: 16543 - protein, 16 aa, Artificial Sequence
  Synthetic construct
ARDPDPATYSPYGMDV

SEQ ID NO: 16544 - protein, 22 aa, Artificial Sequence
  Synthetic construct
AREGRGYFFLSGGYYYYYGMDV

SEQ ID NO: 16545 - protein, 19 aa, Artificial Sequence
  Synthetic construct
ARDGRLRNSGSYYGNWFDP

SEQ ID NO: 16546 - protein, 16 aa, Artificial Sequence
  Synthetic construct
ARCGGGACNRAGGMDV

SEQ ID NO: 16547 - protein, 17 aa, Artificial Sequence
  Synthetic construct
ARHFRYYDFWSGYALDF

SEQ ID NO: 16548 - protein, 18 aa, Artificial Sequence
  Synthetic construct
AGQKEGVSIFGTDYGMDV

SEQ ID NO: 16549 - protein, 18 aa, Artificial Sequence
  Synthetic construct
ARDLGGNYYLLPHDWFDT

SEQ ID NO: 16550 - protein, 12 aa, Artificial Sequence
  Synthetic construct
TREGGATNIFDL

SEQ ID NO: 16551 - protein, 18 aa, Artificial Sequence
  Synthetic construct
ARGPPAGYYGSIVGAFDI

SEQ ID NO: 16552 - protein, 15 aa, Artificial Sequence
  Synthetic construct
ARGGIVGATRGFFDY

SEQ ID NO: 16553 - protein, 16 aa, Artificial Sequence
  Synthetic construct
ARHLRRDNADYYGLDV

SEQ ID NO: 16554 - protein, 20 aa, Artificial Sequence
  Synthetic construct
AGEGTYVVRGVVHFYYAMNV

SEQ ID NO: 16555 - protein, 20 aa, Artificial Sequence
  Synthetic construct
ARDRITMVRGAPISYYGMDV

SEQ ID NO: 16556 - protein, 16 aa, Artificial Sequence
  Synthetic construct
ARDQIYSSKWYQHSDS

SEQ ID NO: 16557 - protein, 13 aa, Artificial Sequence
  Synthetic construct
ARVKGSGIRAFDI

SEQ ID NO: 16558 - protein, 8 aa, Artificial Sequence
  Synthetic construct
AKGSGIDY

SEQ ID NO: 16559 - protein, 12 aa, Artificial Sequence
  Synthetic construct
ARANSGADSVDY

SEQ ID NO: 16560 - protein, 15 aa, Artificial Sequence
  Synthetic construct
AKDRSRYYGSGIEDY

SEQ ID NO: 16561 - protein, 10 aa, Artificial Sequence
  Synthetic construct
STDRAAGFDH

SEQ ID NO: 16562 - protein, 18 aa, Artificial Sequence
  Synthetic construct
TRVLAYCGGDCYRGPFDY

SEQ ID NO: 16563 - protein, 7 aa, Artificial Sequence
  Synthetic construct
ASSSPDY

SEQ ID NO: 16564 - protein, 10 aa, Artificial Sequence
  Synthetic construct
ATNRQGNFDY

SEQ ID NO: 16565 - protein, 14 aa, Artificial Sequence
  Synthetic construct
AREHLSESRYLLDY

SEQ ID NO: 16566 - protein, 18 aa, Artificial Sequence
  Synthetic construct
ARQKRGYSYGYSADAFDI

SEQ ID NO: 16567 - protein, 17 aa, Artificial Sequence
  Synthetic construct
AREYYDILTGYYVGFDY

SEQ ID NO: 16568 - protein, 19 aa, Artificial Sequence
  Synthetic construct
ARDHVYGLGLGERNDALDI

SEQ ID NO: 16569 - protein, 12 aa, Artificial Sequence
  Synthetic construct
SRAPRFGYPLDY

SEQ ID NO: 16570 - protein, 20 aa, Artificial Sequence
  Synthetic construct
ARQSRYITMVRGAPYWYFDL

SEQ ID NO: 16571 - protein, 21 aa, Artificial Sequence
  Synthetic construct
AKESPLVIGADGSASLVNMNV

SEQ ID NO: 16572 - protein, 15 aa, Artificial Sequence
  Synthetic construct
ARQTWFGELLSWFDP

SEQ ID NO: 16573 - protein, 16 aa, Artificial Sequence
  Synthetic construct
ARHLRRDNADYYGLDV

SEQ ID NO: 16574 - protein, 18 aa, Artificial Sequence
  Synthetic construct
ASEYFDGRSFHSFCGLDV

SEQ ID NO: 16575 - protein, 16 aa, Artificial Sequence
  Synthetic construct
ARHLRRDNADYYGLDV

SEQ ID NO: 16576 - protein, 24 aa, Artificial Sequence
  Synthetic construct
ARAWSDCSSTSCFARSPYYYGMDV

SEQ ID NO: 16577 - protein, 9 aa, Artificial Sequence
  Synthetic construct
LGYYYGMDV

SEQ ID NO: 16578 - protein, 24 aa, Artificial Sequence
  Synthetic construct
ATAGDILTGYHYSIIDSSRYLTRF

SEQ ID NO: 16579 - protein, 39 aa, Artificial Sequence
  Synthetic construct
ARDYPAGWEEESRSSKDVGVRSGNYYSKPEESYYYGLDV

SEQ ID NO: 16580 - protein, 10 aa, Artificial Sequence
  Synthetic construct
VRDRRGFFDE

SEQ ID NO: 16581 - protein, 18 aa, Artificial Sequence
  Synthetic construct
ATTHTSYYYDSSAGYMDV

SEQ ID NO: 16582 - protein, 16 aa, Artificial Sequence
  Synthetic construct
ARTRSLFYDNSGGFDY

SEQ ID NO: 16583 - protein, 20 aa, Artificial Sequence
  Synthetic construct
ARSYHYGTGGYRYYYYGMDA

SEQ ID NO: 16584 - protein, 11 aa, Artificial Sequence
  Synthetic construct
ARARGSDYFGY

SEQ ID NO: 16585 - protein, 13 aa, Artificial Sequence
  Synthetic construct
ARDAHTWVGVLGF

SEQ ID NO: 16586 - protein, 25 aa, Artificial Sequence
  Synthetic construct
ARGRIFRYYDSSGYATFQSVRYFDY

SEQ ID NO: 16587 - protein, 13 aa, Artificial Sequence
  Synthetic construct
AKGLAVAGSSYDP

SEQ ID NO: 16588 - protein, 15 aa, Artificial Sequence
  Synthetic construct
TRDLYCTGDSCDDNY

SEQ ID NO: 16589 - protein, 22 aa, Artificial Sequence
  Synthetic construct
VRLSAAGGMAFCGGVCPNGFDV

SEQ ID NO: 16590 - protein, 16 aa, Artificial Sequence
  Synthetic construct
ARGGYYDSSGFYYFDY

SEQ ID NO: 16591 - protein, 17 aa, Artificial Sequence
  Synthetic construct
ARGVVPAAPPWSPQFDY

SEQ ID NO: 16592 - protein, 17 aa, Artificial Sequence
  Synthetic construct
ARGPRAIGFGDYGWFDP

SEQ ID NO: 16593 - protein, 16 aa, Artificial Sequence
  Synthetic construct
ARDQYASSWYSGLIDY

SEQ ID NO: 16594 - protein, 19 aa, Artificial Sequence
  Synthetic construct
AKGFWACTPYTCSTGPFDS

SEQ ID NO: 16595 - protein, 15 aa, Artificial Sequence
  Synthetic construct
AKERYRSGGSCPLHV

SEQ ID NO: 16596 - protein, 10 aa, Artificial Sequence
  Synthetic construct
ATPVVERRDY

SEQ ID NO: 16597 - protein, 19 aa, Artificial Sequence
  Synthetic construct
VKGRPKYGSGSYYLKNFDY

SEQ ID NO: 16598 - protein, 17 aa, Artificial Sequence
  Synthetic construct
ARDQLRRSSWYHFCFDY

SEQ ID NO: 16599 - protein, 15 aa, Artificial Sequence
  Synthetic construct
ARDSDSSGYWGWFDP

SEQ ID NO: 16600 - protein, 17 aa, Artificial Sequence
  Synthetic construct
ARDARSIEDRYYYAMDV

SEQ ID NO: 16601 - protein, 16 aa, Artificial Sequence
  Synthetic construct
ARHLRRDNADYYGLDV

SEQ ID NO: 16602 - protein, 14 aa, Artificial Sequence
  Synthetic construct
ARGIAARHRKPGDY

SEQ ID NO: 16603 - protein, 16 aa, Artificial Sequence
  Synthetic construct
AKGRRNSGSYFPFFDY

SEQ ID NO: 16604 - protein, 18 aa, Artificial Sequence
  Synthetic construct
ARGQYYYGSGSYATPFDY

SEQ ID NO: 16605 - protein, 15 aa, Artificial Sequence
  Synthetic construct
AKGRHWRLWFGELLL

SEQ ID NO: 16606 - protein, 16 aa, Artificial Sequence
  Synthetic construct
ARHLRRDNADYYGLDV

SEQ ID NO: 16607 - protein, 19 aa, Artificial Sequence
  Synthetic construct
ARDSRVLSGTDPRGYALDV

SEQ ID NO: 16608 - protein, 16 aa, Artificial Sequence
  Synthetic construct
ARHLRRDNADYYGLDV

SEQ ID NO: 16609 - protein, 16 aa, Artificial Sequence
  Synthetic construct
AREDGRSSGWSSVLDQ

SEQ ID NO: 16610 - protein, 17 aa, Artificial Sequence
  Synthetic construct
AHRRAEGGNWDGGCLDV

SEQ ID NO: 16611 - protein, 17 aa, Artificial Sequence
  Synthetic construct
ARDSGTDYGGNSGAFDI

SEQ ID NO: 16612 - protein, 14 aa, Artificial Sequence
  Synthetic construct
AKLASYSRYNWFDP

SEQ ID NO: 16613 - protein, 14 aa, Artificial Sequence
  Synthetic construct
AKTTYSSGWWVFDY

SEQ ID NO: 16614 - protein, 11 aa, Artificial Sequence
  Synthetic construct
ARDFWSGYSDY

SEQ ID NO: 16615 - protein, 19 aa, Artificial Sequence
  Synthetic construct
ARDFITMVRGVIIGRGFDP

SEQ ID NO: 16616 - protein, 20 aa, Artificial Sequence
  Synthetic construct
ARRRVREYQLLRAVGYGMDV

SEQ ID NO: 16617 - protein, 7 aa, Artificial Sequence
  Synthetic construct
ARGPCIT

SEQ ID NO: 16618 - protein, 15 aa, Artificial Sequence
  Synthetic construct
AKDRSHHYTSGEFDH

SEQ ID NO: 16619 - protein, 16 aa, Artificial Sequence
  Synthetic construct
VKDLGWRSIAADGGDY

SEQ ID NO: 16620 - protein, 21 aa, Artificial Sequence
  Synthetic construct
ARASAFCGGDCRPPRAEYIQH

SEQ ID NO: 16621 - protein, 21 aa, Artificial Sequence
  Synthetic construct
AKAPTTRPGSGSYYRGGWFDP

SEQ ID NO: 16622 - protein, 11 aa, Artificial Sequence
  Synthetic construct
ARGSVDWSFDH

SEQ ID NO: 16623 - protein, 12 aa, Artificial Sequence
  Synthetic construct
ASSTVAGTSFDY

SEQ ID NO: 16624 - protein, 18 aa, Artificial Sequence
  Synthetic construct
ARIQAATEYYNWNDVDDF

SEQ ID NO: 16625 - protein, 20 aa, Artificial Sequence
  Synthetic construct
ARDRPSDHNFWSDRPYGLDV

SEQ ID NO: 16626 - protein, 20 aa, Artificial Sequence
  Synthetic construct
VKDFHAGGASYDFWSGLFDR

SEQ ID NO: 16627 - protein, 16 aa, Artificial Sequence
  Synthetic construct
VRDDDTLYHTGPHFDF

SEQ ID NO: 16628 - protein, 15 aa, Artificial Sequence
  Synthetic construct
ARGSSFYGSGSEFDP

SEQ ID NO: 16629 - protein, 20 aa, Artificial Sequence
  Synthetic construct
AKRGYSSGWRHSYYYYGMDV

SEQ ID NO: 16630 - protein, 16 aa, Artificial Sequence
  Synthetic construct
ARHLRRDNADYYGLDV

SEQ ID NO: 16631 - protein, 30 aa, Artificial Sequence
  Synthetic construct
AKGTKGGQKRRYCSSTSCYTGTYYYYGMDV

SEQ ID NO: 16632 - protein, 17 aa, Artificial Sequence
  Synthetic construct
AKDLLVWFGEQLNAFHL

SEQ ID NO: 16633 - protein, 15 aa, Artificial Sequence
  Synthetic construct
VVCDITGCIRGYFDY

SEQ ID NO: 16634 - protein, 14 aa, Artificial Sequence
  Synthetic construct
ARERSRGSIVGIDI

SEQ ID NO: 16635 - protein, 18 aa, Artificial Sequence
  Synthetic construct
VRGFFSNVRGRIVKGIDH

SEQ ID NO: 16636 - protein, 12 aa, Artificial Sequence
  Synthetic construct
ASDLSYDIEGGY

SEQ ID NO: 16637 - protein, 14 aa, Artificial Sequence
  Synthetic construct
ARQTTTTRGGWFDP

SEQ ID NO: 16638 - protein, 19 aa, Artificial Sequence
  Synthetic construct
ARVFGTYYYGSGTYPNLDC

SEQ ID NO: 16639 - protein, 18 aa, Artificial Sequence
  Synthetic construct
TRALLEPQINYYYYGMDV

SEQ ID NO: 16640 - protein, 11 aa, Artificial Sequence
  Synthetic construct
ARSRGAGTPGY

SEQ ID NO: 16641 - protein, 18 aa, Artificial Sequence
  Synthetic construct
VKDHLVATSRRYYYGMDV

SEQ ID NO: 16642 - protein, 13 aa, Artificial Sequence
  Synthetic construct
AKKDYSGSYSFDY

SEQ ID NO: 16643 - protein, 11 aa, Artificial Sequence
  Synthetic construct
VRGSFGELPLY

SEQ ID NO: 16644 - protein, 24 aa, Artificial Sequence
  Synthetic construct
ARDAVVRSVAGVLGRTNNYYGMDV

SEQ ID NO: 16645 - protein, 18 aa, Artificial Sequence
  Synthetic construct
ARAWTRQGTTRGGYYFDY

SEQ ID NO: 16646 - protein, 8 aa, Artificial Sequence
  Synthetic construct
AREGFLGA

SEQ ID NO: 16647 - protein, 18 aa, Artificial Sequence
  Synthetic construct
AREREYYYGSGSTYYFDY

SEQ ID NO: 16648 - protein, 14 aa, Artificial Sequence
  Synthetic construct
ATYGGYRSSSPSHY

SEQ ID NO: 16649 - protein, 12 aa, Artificial Sequence
  Synthetic construct
AAGISETTHLDH

SEQ ID NO: 16650 - protein, 14 aa, Artificial Sequence
  Synthetic construct
ARDASYSESYASDC

SEQ ID NO: 16651 - protein, 14 aa, Artificial Sequence
  Synthetic construct
ARVGVVYGSGSYGY

SEQ ID NO: 16652 - protein, 20 aa, Artificial Sequence
  Synthetic construct
ARDLGPCSSTSCPTREYFQH

SEQ ID NO: 16653 - protein, 12 aa, Artificial Sequence
  Synthetic construct
ASDYGDVGFLDY

SEQ ID NO: 16654 - protein, 18 aa, Artificial Sequence
  Synthetic construct
AREFSSSWYRYYYYGMDV

SEQ ID NO: 16655 - protein, 15 aa, Artificial Sequence
  Synthetic construct
ARDVAARPQYNWFDP

SEQ ID NO: 16656 - protein, 14 aa, Artificial Sequence
  Synthetic construct
ARRGYHANSAALDI

SEQ ID NO: 16657 - protein, 18 aa, Artificial Sequence
  Synthetic construct
ARECFSSSWYVGYYGMDV

SEQ ID NO: 16658 - protein, 17 aa, Artificial Sequence
  Synthetic construct
TRRYVATFPIEDHGMDV

SEQ ID NO: 16659 - protein, 14 aa, Artificial Sequence
  Synthetic construct
ALPKSNHHHFGMDV

SEQ ID NO: 16660 - protein, 15 aa, Artificial Sequence
  Synthetic construct
ARGGPQWLRRYYFDY

SEQ ID NO: 16661 - protein, 14 aa, Artificial Sequence
  Synthetic construct
ARGAGYVLHYAMDV

SEQ ID NO: 16662 - protein, 19 aa, Artificial Sequence
  Synthetic construct
AIYRDGGSYYGGYYYGMDV

SEQ ID NO: 16663 - protein, 15 aa, Artificial Sequence
  Synthetic construct
AKVKDFGVLILNPDY

SEQ ID NO: 16664 - protein, 13 aa, Artificial Sequence
  Synthetic construct
VRDIGNTGFHLDY

SEQ ID NO: 16665 - protein, 25 aa, Artificial Sequence
  Synthetic construct
ARASGYCSSTSCYKGHYYYYYGMDV

SEQ ID NO: 16666 - protein, 16 aa, Artificial Sequence
  Synthetic construct
ARWAAVAGTGIEAFDI

SEQ ID NO: 16667 - protein, 9 aa, Artificial Sequence
  Synthetic construct
TRGARYSSF

SEQ ID NO: 16668 - protein, 9 aa, Artificial Sequence
  Synthetic construct
FSATRDLDF

SEQ ID NO: 16669 - protein, 13 aa, Artificial Sequence
  Synthetic construct
ARELGSYSVAFDY

SEQ ID NO: 16670 - protein, 22 aa, Artificial Sequence
  Synthetic construct
ARRVKGSSIRGSSSSGSGWFDP

SEQ ID NO: 16671 - protein, 24 aa, Artificial Sequence
  Synthetic construct
ARGNPRHAYYYGSGSYSHNNWFDP

SEQ ID NO: 16672 - protein, 23 aa, Artificial Sequence
  Synthetic construct
AKGTNCSGGSCTNYYYYYYGMDV

SEQ ID NO: 16673 - protein, 23 aa, Artificial Sequence
  Synthetic construct
ARLPYCSGGSCYWKKAKGGSFDY

SEQ ID NO: 16674 - protein, 18 aa, Artificial Sequence
  Synthetic construct
ARVSSSWPRGGARNGMDV

SEQ ID NO: 16675 - protein, 16 aa, Artificial Sequence
  Synthetic construct
ARDFGRYDSRSYAFDV

SEQ ID NO: 16676 - protein, 14 aa, Artificial Sequence
  Synthetic construct
ARDRGRVATAIFDY

SEQ ID NO: 16677 - protein, 17 aa, Artificial Sequence
  Synthetic construct
ARSPHDHESSGYYAFDI

SEQ ID NO: 16678 - protein, 13 aa, Artificial Sequence
  Synthetic construct
AREREANSDAFDR

SEQ ID NO: 16679 - protein, 20 aa, Artificial Sequence
  Synthetic construct
ARQRLGYSSGWTVYYYGMDV

SEQ ID NO: 16680 - protein, 15 aa, Artificial Sequence
  Synthetic construct
ARGGSRYSSGYYFDF

SEQ ID NO: 16681 - protein, 18 aa, Artificial Sequence
  Synthetic construct
ARPKSIAARPAYYYGMDV

SEQ ID NO: 16682 - protein, 16 aa, Artificial Sequence
  Synthetic construct
ARDWPHCGGDCHIMDV

SEQ ID NO: 16683 - protein, 20 aa, Artificial Sequence
  Synthetic construct
AKGSLSTLVRGVIMRDWLDP

SEQ ID NO: 16684 - protein, 13 aa, Artificial Sequence
  Synthetic construct
AKSPTGYYSWCDY

SEQ ID NO: 16685 - protein, 14 aa, Artificial Sequence
  Synthetic construct
VKGHSSSWYQYFQH

SEQ ID NO: 16686 - protein, 19 aa, Artificial Sequence
  Synthetic construct
SRVEVRGSTNYGRFEWIDP

SEQ ID NO: 16687 - protein, 16 aa, Artificial Sequence
  Synthetic construct
ARHLRRDNADYYGLDV

SEQ ID NO: 16688 - protein, 15 aa, Artificial Sequence
  Synthetic construct
ARIRVRFGVVTPPDY

SEQ ID NO: 16689 - protein, 13 aa, Artificial Sequence
  Synthetic construct
VRDKSGTYFSFEN

SEQ ID NO: 16690 - protein, 18 aa, Artificial Sequence
  Synthetic construct
ARDREYSGSYYYYYGMDV

SEQ ID NO: 16691 - protein, 25 aa, Artificial Sequence
  Synthetic construct
ARVGTLGGYYYGSGRSAYREYGMDV

SEQ ID NO: 16692 - protein, 8 aa, Artificial Sequence
  Synthetic construct
TTIKGFDP

SEQ ID NO: 16693 - protein, 12 aa, Artificial Sequence
  Synthetic construct
AHPSGSYFQFDY

SEQ ID NO: 16694 - protein, 11 aa, Artificial Sequence
  Synthetic construct
ARVSPNYGDYT

SEQ ID NO: 16695 - protein, 16 aa, Artificial Sequence
  Synthetic construct
AREGGGPYDRSHYYDI

SEQ ID NO: 16696 - protein, 21 aa, Artificial Sequence
  Synthetic construct
TTDPRITMVRGVIIFTGLGPH

SEQ ID NO: 16697 - protein, 16 aa, Artificial Sequence
  Synthetic construct
ARTPYCSTTSCNPLDL

SEQ ID NO: 16698 - protein, 20 aa, Artificial Sequence
  Synthetic construct
ARDHDSSGYYYRGYYYGMDV

SEQ ID NO: 16699 - protein, 10 aa, Artificial Sequence
  Synthetic construct
ARHPYGGYHG

SEQ ID NO: 16700 - protein, 18 aa, Artificial Sequence
  Synthetic construct
ALRRSLGMSPAQDNWFDP

SEQ ID NO: 16701 - protein, 12 aa, Artificial Sequence
  Synthetic construct
ARDRWQLGEFDY

SEQ ID NO: 16702 - protein, 16 aa, Artificial Sequence
  Synthetic construct
ARDSSGWYRRVFGFDP

SEQ ID NO: 16703 - protein, 14 aa, Artificial Sequence
  Synthetic construct
AKGLTGWFLAPFDY

SEQ ID NO: 16704 - protein, 5 aa, Artificial Sequence
  Synthetic construct
STTNY

SEQ ID NO: 16705 - protein, 16 aa, Artificial Sequence
  Synthetic construct
VRTPYCSLSTCYPFDK

SEQ ID NO: 16706 - protein, 19 aa, Artificial Sequence
  Synthetic construct
ARGQHCSSTSCSYDYGMDV

SEQ ID NO: 16707 - protein, 18 aa, Artificial Sequence
  Synthetic construct
ASLYASGSRSYYYYGVDV

SEQ ID NO: 16708 - protein, 11 aa, Artificial Sequence
  Synthetic construct
AREFRGGRFDP

SEQ ID NO: 16709 - protein, 16 aa, Artificial Sequence
  Synthetic construct
AREGGGPYDRSHYYDI

SEQ ID NO: 16710 - protein, 14 aa, Artificial Sequence
  Synthetic construct
TTGVRYSGYDFHDY

SEQ ID NO: 16711 - protein, 18 aa, Artificial Sequence
  Synthetic construct
ARGGKWELRFYYYYGMDV

SEQ ID NO: 16712 - protein, 13 aa, Artificial Sequence
  Synthetic construct
ARPRHFGHDAFDI

SEQ ID NO: 16713 - protein, 9 aa, Artificial Sequence
  Synthetic construct
ASGGSYFGH

SEQ ID NO: 16714 - protein, 12 aa, Artificial Sequence
  Synthetic construct
ARDGDGFNVFDF

SEQ ID NO: 16715 - protein, 17 aa, Artificial Sequence
  Synthetic construct
ARGYYGSGSYYPFEFEP

SEQ ID NO: 16716 - protein, 23 aa, Artificial Sequence
  Synthetic construct
ARGETGRYYDVWTGKAGYYGMDF

SEQ ID NO: 16717 - protein, 17 aa, Artificial Sequence
  Synthetic construct
AKDHAGGWELLDGYFDY

SEQ ID NO: 16718 - protein, 17 aa, Artificial Sequence
  Synthetic construct
ARDRGDIDIIATGTIDY

SEQ ID NO: 16719 - protein, 18 aa, Artificial Sequence
  Synthetic construct
AKGSLGHCSGVTCYQFDY

SEQ ID NO: 16720 - protein, 20 aa, Artificial Sequence
  Synthetic construct
AAGPTGYDLLTGQYFPYFNY

SEQ ID NO: 16721 - protein, 12 aa, Artificial Sequence
  Synthetic construct
VRGGRQWLQIDS

SEQ ID NO: 16722 - protein, 11 aa, Artificial Sequence
  Synthetic construct
ARRGLVGATDP

SEQ ID NO: 16723 - protein, 13 aa, Artificial Sequence
  Synthetic construct
VKTSWGSYRNFDY

SEQ ID NO: 16724 - protein, 10 aa, Artificial Sequence
  Synthetic construct
ARGGYSEFDP

SEQ ID NO: 16725 - protein, 16 aa, Artificial Sequence
  Synthetic construct
ARATLPGKVGGTTLHH

SEQ ID NO: 16726 - protein, 19 aa, Artificial Sequence
  Synthetic construct
ARVCSSTSCYTDFYYGMDV

SEQ ID NO: 16727 - protein, 14 aa, Artificial Sequence
  Synthetic construct
ARDIKESGSYYSDY

SEQ ID NO: 16728 - protein, 16 aa, Artificial Sequence
  Synthetic construct
ARESPKWYQLRNAFDI

SEQ ID NO: 16729 - protein, 14 aa, Artificial Sequence
  Synthetic construct
ARETGTRRLYGMDV

SEQ ID NO: 16730 - protein, 17 aa, Artificial Sequence
  Synthetic construct
AHRRAEGGNWDGGCLDV

SEQ ID NO: 16731 - protein, 17 aa, Artificial Sequence
  Synthetic construct
ATKRMVVAAIPARWFDP

SEQ ID NO: 16732 - protein, 18 aa, Artificial Sequence
  Synthetic construct
AKDLAAGGWELPETSFDS

SEQ ID NO: 16733 - protein, 14 aa, Artificial Sequence
  Synthetic construct
ARVTRTWSEPEFDY

SEQ ID NO: 16734 - protein, 20 aa, Artificial Sequence
  Synthetic construct
ARAGRRGYYDSSGYHNWFDP

SEQ ID NO: 16735 - protein, 21 aa, Artificial Sequence
  Synthetic construct
AKVPTYYDFWSGHYYYYGMDV

SEQ ID NO: 16736 - protein, 16 aa, Artificial Sequence
  Synthetic construct
ARVGIPEWLFGLSFDY

SEQ ID NO: 16737 - protein, 11 aa, Artificial Sequence
  Synthetic construct
TLEYSSSWLIT

SEQ ID NO: 16738 - protein, 20 aa, Artificial Sequence
  Synthetic construct
ARIFHDGHNYDYEPLAWFDN

SEQ ID NO: 16739 - protein, 16 aa, Artificial Sequence
  Synthetic construct
ATSFGSQTYYKSHFDS

SEQ ID NO: 16740 - protein, 19 aa, Artificial Sequence
  Synthetic construct
AKDRGYCSSTSCRYWYFDL

SEQ ID NO: 16741 - protein, 19 aa, Artificial Sequence
  Synthetic construct
AKDYRVGATYYYYYYGMDV

SEQ ID NO: 16742 - protein, 13 aa, Artificial Sequence
  Synthetic construct
ASVKGSWGYAFDI

SEQ ID NO: 16743 - protein, 18 aa, Artificial Sequence
  Synthetic construct
ARVQGKYYYGPYYYGMDV

SEQ ID NO: 16744 - protein, 14 aa, Artificial Sequence
  Synthetic construct
ARDLRGSQIGAFDP

SEQ ID NO: 16745 - protein, 17 aa, Artificial Sequence
  Synthetic construct
ARRRIVVVPAANDAFDI

SEQ ID NO: 16746 - protein, 14 aa, Artificial Sequence
  Synthetic construct
AVTTTVTTSAYFDY

SEQ ID NO: 16747 - protein, 16 aa, Artificial Sequence
  Synthetic construct
AHRLPGGDWNSGYFDF

SEQ ID NO: 16748 - protein, 19 aa, Artificial Sequence
  Synthetic construct
ARSGDPLLPGPAGYFGLDV

SEQ ID NO: 16749 - protein, 11 aa, Artificial Sequence
  Synthetic construct
ARDYDFCRFDP

SEQ ID NO: 16750 - protein, 18 aa, Artificial Sequence
  Synthetic construct
AKDGNTFRPLDNYYGMDV

SEQ ID NO: 16751 - protein, 17 aa, Artificial Sequence
  Synthetic construct
AHRRAEGGNWDGGCLDV

SEQ ID NO: 16752 - protein, 14 aa, Artificial Sequence
  Synthetic construct
AGAPPYNSGYYFDY

SEQ ID NO: 16753 - protein, 19 aa, Artificial Sequence
  Synthetic construct
ARRLRGVEAINAYYFGMDA

SEQ ID NO: 16754 - protein, 16 aa, Artificial Sequence
  Synthetic construct
TTDLRWRYGERYYFDY

SEQ ID NO: 16755 - protein, 19 aa, Artificial Sequence
  Synthetic construct
TTHFVGRLVNTSTSDYFDY

SEQ ID NO: 16756 - protein, 20 aa, Artificial Sequence
  Synthetic construct
ARAGRSSSSGRRYYYYGMDV

SEQ ID NO: 16757 - protein, 14 aa, Artificial Sequence
  Synthetic construct
AGAPPYNSGYYFDY

SEQ ID NO: 16758 - protein, 13 aa, Artificial Sequence
  Synthetic construct
ARGTGSSWYIFDY

SEQ ID NO: 16759 - protein, 14 aa, Artificial Sequence
  Synthetic construct
AGSYSSVHPSGFHI

SEQ ID NO: 16760 - protein, 23 aa, Artificial Sequence
  Synthetic construct
AVGSEGRCFGSGSYRRCYYGMDV

SEQ ID NO: 16761 - protein, 17 aa, Artificial Sequence
  Synthetic construct
AHRRAEGGNWDGGCLDV

SEQ ID NO: 16762 - protein, 20 aa, Artificial Sequence
  Synthetic construct
ARSYYYRSDYHGSDHYGMGV

SEQ ID NO: 16763 - protein, 29 aa, Artificial Sequence
  Synthetic construct
ARASMNIVVVPAARGTHSEPQYYYYGMDV

SEQ ID NO: 16764 - protein, 18 aa, Artificial Sequence
  Synthetic construct
AKGGLWYYDSSGYYSCDY

SEQ ID NO: 16765 - protein, 12 aa, Artificial Sequence
  Synthetic construct
ARARANYFLFDY

SEQ ID NO: 16766 - protein, 16 aa, Artificial Sequence
  Synthetic construct
AWGVDYYGSGGGPVDD

SEQ ID NO: 16767 - protein, 15 aa, Artificial Sequence
  Synthetic construct
ARDGQQLVHKSNFDM

SEQ ID NO: 16768 - protein, 18 aa, Artificial Sequence
  Synthetic construct
AREISVSRGVILPGAFDI

SEQ ID NO: 16769 - protein, 18 aa, Artificial Sequence
  Synthetic construct
ARSGWELLQAFGGGWFDP

SEQ ID NO: 16770 - protein, 14 aa, Artificial Sequence
  Synthetic construct
AKSRVLVWFGDYDN

SEQ ID NO: 16771 - protein, 14 aa, Artificial Sequence
  Synthetic construct
ARYEGGNPPGAMDV

SEQ ID NO: 16772 - protein, 16 aa, Artificial Sequence
  Synthetic construct
ARSWTRSGSYSREFDY

SEQ ID NO: 16773 - protein, 17 aa, Artificial Sequence
  Synthetic construct
ARDTALMTTVTTGALDV

SEQ ID NO: 16774 - protein, 8 aa, Artificial Sequence
  Synthetic construct
ASYHRRDY

SEQ ID NO: 16775 - protein, 21 aa, Artificial Sequence
  Synthetic construct
ARVSQRYYYDSSGTPRGSFDY

SEQ ID NO: 16776 - protein, 16 aa, Artificial Sequence
  Synthetic construct
ATILPDWDRPHYYFEY

SEQ ID NO: 16777 - protein, 12 aa, Artificial Sequence
  Synthetic construct
ARSWGRGWYFDL

SEQ ID NO: 16778 - protein, 16 aa, Artificial Sequence
  Synthetic construct
ARQSSSGWKRYDAFDI

SEQ ID NO: 16779 - protein, 18 aa, Artificial Sequence
  Synthetic construct
ARGPKQRGYSYGYYGMDV

SEQ ID NO: 16780 - protein, 17 aa, Artificial Sequence
  Synthetic construct
AHRRAEGGNWDGGCLDV

SEQ ID NO: 16781 - protein, 17 aa, Artificial Sequence
  Synthetic construct
AKGLYYYDSSGYRIFDF

SEQ ID NO: 16782 - protein, 25 aa, Artificial Sequence
  Synthetic construct
ARRGIAVAGSKSGRNFPGGGGAFDI

SEQ ID NO: 16783 - protein, 16 aa, Artificial Sequence
  Synthetic construct
ARDLIMVKTPGDDFDY

SEQ ID NO: 16784 - protein, 15 aa, Artificial Sequence
  Synthetic construct
ARGGSRYSSGYYFDY

SEQ ID NO: 16785 - protein, 23 aa, Artificial Sequence
  Synthetic construct
ARHRKGRGYYYGSGSYYNNNFDY

SEQ ID NO: 16786 - protein, 10 aa, Artificial Sequence
  Synthetic construct
ARVPSSGWPY

SEQ ID NO: 16787 - protein, 13 aa, Artificial Sequence
  Synthetic construct
ARDGGGTSKGFGY

SEQ ID NO: 16788 - protein, 20 aa, Artificial Sequence
  Synthetic construct
ARFTTYGADTSPKYFFGMDV

SEQ ID NO: 16789 - protein, 8 aa, Artificial Sequence
  Synthetic construct
ATYRNLGY

SEQ ID NO: 16790 - protein, 19 aa, Artificial Sequence
  Synthetic construct
AKDLRSRRYSGSYYGAFDI

SEQ ID NO: 16791 - protein, 13 aa, Artificial Sequence
  Synthetic construct
ARGYSYSSGSYKF

SEQ ID NO: 16792 - protein, 14 aa, Artificial Sequence
  Synthetic construct
ASRNAYSSGWFVEY

SEQ ID NO: 16793 - protein, 11 aa, Artificial Sequence
  Synthetic construct
ASLFSGSYPKS

SEQ ID NO: 16794 - protein, 19 aa, Artificial Sequence
  Synthetic construct
ARKSLLWFGELLWSLTFDL

SEQ ID NO: 16795 - protein, 13 aa, Artificial Sequence
  Synthetic construct
ARGYGSGSARFDP

SEQ ID NO: 16796 - protein, 9 aa, Artificial Sequence
  Synthetic construct
ARDPLWRGY

SEQ ID NO: 16797 - protein, 23 aa, Artificial Sequence
  Synthetic construct
AREPTYSPIAVAGKGRLGKTLDY

SEQ ID NO: 16798 - protein, 14 aa, Artificial Sequence
  Synthetic construct
ARVGSSGYLYYFDY

SEQ ID NO: 16799 - protein, 16 aa, Artificial Sequence
  Synthetic construct
ARHLRRDNADYYGLDV

SEQ ID NO: 16800 - protein, 13 aa, Artificial Sequence
  Synthetic construct
ARFHEDWPYGMDV

SEQ ID NO: 16801 - protein, 14 aa, Artificial Sequence
  Synthetic construct
ARGSDYYRTGGFDP

SEQ ID NO: 16802 - protein, 17 aa, Artificial Sequence
  Synthetic construct
ARDARQQQRETRTPPGY

SEQ ID NO: 16803 - protein, 23 aa, Artificial Sequence
  Synthetic construct
AREGQKRYYDFWSGYYRFHGMDV

SEQ ID NO: 16804 - protein, 21 aa, Artificial Sequence
  Synthetic construct
AKDMYPGYCSGGSCYLDVFQH

SEQ ID NO: 16805 - protein, 17 aa, Artificial Sequence
  Synthetic construct
ARGGGRNYYGSGSYYSS

SEQ ID NO: 16806 - protein, 11 aa, Artificial Sequence
  Synthetic construct
TSLSFLSPGDY

SEQ ID NO: 16807 - protein, 13 aa, Artificial Sequence
  Synthetic construct
ARASYYGSGSYYN

SEQ ID NO: 16808 - protein, 19 aa, Artificial Sequence
  Synthetic construct
ARQKHSMVRGVISHWYFDL

SEQ ID NO: 16809 - protein, 14 aa, Artificial Sequence
  Synthetic construct
AKGASTALVRGPDV

SEQ ID NO: 16810 - protein, 25 aa, Artificial Sequence
  Synthetic construct
ARGGRPGCSGGSCYPPRYYYYGMDV

SEQ ID NO: 16811 - protein, 14 aa, Artificial Sequence
  Synthetic construct
ASPGTYYYGSGRDY

SEQ ID NO: 16812 - protein, 22 aa, Artificial Sequence
  Synthetic construct
ARESRSTRYCSSTSCYRSGMDV

SEQ ID NO: 16813 - protein, 8 aa, Artificial Sequence
  Synthetic construct
ARSARKDY

SEQ ID NO: 16814 - protein, 18 aa, Artificial Sequence
  Synthetic construct
ARDKGGEKGVFRDYVLGF

SEQ ID NO: 16815 - protein, 20 aa, Artificial Sequence
  Synthetic construct
ARRGGTYCSGVGCYENWFDP

SEQ ID NO: 16816 - protein, 17 aa, Artificial Sequence
  Synthetic construct
ARDFGVDVLLWFGAFDY

SEQ ID NO: 16817 - protein, 19 aa, Artificial Sequence
  Synthetic construct
ARVGGGDEWYSSGWFSFDN

SEQ ID NO: 16818 - protein, 12 aa, Artificial Sequence
  Synthetic construct
SKNVAGSDALDF

SEQ ID NO: 16819 - protein, 17 aa, Artificial Sequence
  Synthetic construct
AYTLGYCTSDSCPGFDP

SEQ ID NO: 16820 - protein, 15 aa, Artificial Sequence
  Synthetic construct
AKGRKWELLQAQIDY

SEQ ID NO: 16821 - protein, 18 aa, Artificial Sequence
  Synthetic construct
ARAYDILTDYYPNIYFDY

SEQ ID NO: 16822 - protein, 20 aa, Artificial Sequence
  Synthetic construct
ARDFWQRYYYDSSGSDAFDI

SEQ ID NO: 16823 - protein, 15 aa, Artificial Sequence
  Synthetic construct
TTDFRGDGSNDAFHI

SEQ ID NO: 16824 - protein, 18 aa, Artificial Sequence
  Synthetic construct
AKDSNSFIVVPAPNGLDV

SEQ ID NO: 16825 - protein, 18 aa, Artificial Sequence
  Synthetic construct
ARGGIWFGELTAVDAFDI

SEQ ID NO: 16826 - protein, 11 aa, Artificial Sequence
  Synthetic construct
ARDPAYSAFDI

SEQ ID NO: 16827 - protein, 16 aa, Artificial Sequence
  Synthetic construct
TRENARRWLQYLQFDY

SEQ ID NO: 16828 - protein, 12 aa, Artificial Sequence
  Synthetic construct
ARSNMAYWFFDL

SEQ ID NO: 16829 - protein, 16 aa, Artificial Sequence
  Synthetic construct
AKDRERELKWGRKFDS

SEQ ID NO: 16830 - protein, 18 aa, Artificial Sequence
  Synthetic construct
ARERVRRSGSYWSGYFDY

SEQ ID NO: 16831 - protein, 16 aa, Artificial Sequence
  Synthetic construct
ARTRQGSGSYYNLLRY

SEQ ID NO: 16832 - protein, 27 aa, Artificial Sequence
  Synthetic construct
ARHPLYYDFWSGYYEMGLGDYYYGMDV

SEQ ID NO: 16833 - protein, 17 aa, Artificial Sequence
  Synthetic construct
AKRDYYDESGYFPLLDE

SEQ ID NO: 16834 - protein, 14 aa, Artificial Sequence
  Synthetic construct
ARGFKGSSFNWFDP

SEQ ID NO: 16835 - protein, 16 aa, Artificial Sequence
  Synthetic construct
ARDRSLGATHIHWFDP

SEQ ID NO: 16836 - protein, 8 aa, Artificial Sequence
  Synthetic construct
TRHYFPGD

SEQ ID NO: 16837 - protein, 12 aa, Artificial Sequence
  Synthetic construct
AQSSSFYYGIDF

SEQ ID NO: 16838 - protein, 27 aa, Artificial Sequence
  Synthetic construct
ARGYSYRRAAYCGGDCYSFGKTNWFDP

SEQ ID NO: 16839 - protein, 21 aa, Artificial Sequence
  Synthetic construct
SRAINIAPADTGSYSYYGLDV

SEQ ID NO: 16840 - protein, 25 aa, Artificial Sequence
  Synthetic construct
ARVSKGYYYGSGSYNRDYYYYGMDV

SEQ ID NO: 16841 - protein, 18 aa, Artificial Sequence
  Synthetic construct
ASDPYCSGGSCYTGPNYY

SEQ ID NO: 16842 - protein, 16 aa, Artificial Sequence
  Synthetic construct
ARARGNYYDSSGLGAY

SEQ ID NO: 16843 - protein, 14 aa, Artificial Sequence
  Synthetic construct
ARGPYGDPDDRFDY

SEQ ID NO: 16844 - protein, 12 aa, Artificial Sequence
  Synthetic construct
ARGSYYRHAFDI

SEQ ID NO: 16845 - protein, 14 aa, Artificial Sequence
  Synthetic construct
ARYAGTRSGWFFDF

SEQ ID NO: 16846 - protein, 15 aa, Artificial Sequence
  Synthetic construct
VRGGGDTPARPPEFY

SEQ ID NO: 16847 - protein, 12 aa, Artificial Sequence
  Synthetic construct
AYTIVRGGFRDY

SEQ ID NO: 16848 - protein, 17 aa, Artificial Sequence
  Synthetic construct
ARSPHDHESSGYYAFDI

SEQ ID NO: 16849 - protein, 14 aa, Artificial Sequence
  Synthetic construct
ATYYYDSGFHYFEF

SEQ ID NO: 16850 - protein, 16 aa, Artificial Sequence
  Synthetic construct
TRGGYSDYDWVPGIDY

SEQ ID NO: 16851 - protein, 19 aa, Artificial Sequence
  Synthetic construct
ARVGGGAEWYSSGWLSFDY

SEQ ID NO: 16852 - protein, 20 aa, Artificial Sequence
  Synthetic construct
ARGPSPGRGAQPSAQTPFDY

SEQ ID NO: 16853 - protein, 7 aa, Artificial Sequence
  Synthetic construct
TFRLAPQ

SEQ ID NO: 16854 - protein, 18 aa, Artificial Sequence
  Synthetic construct
ARGNMGFGTPQYHYGLDA

SEQ ID NO: 16855 - protein, 19 aa, Artificial Sequence
  Synthetic construct
ARDPLWYYGSETYSYYFDY

SEQ ID NO: 16856 - protein, 14 aa, Artificial Sequence
  Synthetic construct
ARGRGVDFVDALDI

SEQ ID NO: 16857 - protein, 16 aa, Artificial Sequence
  Synthetic construct
TRGGYSGYDWVPGIDY

SEQ ID NO: 16858 - protein, 23 aa, Artificial Sequence
  Synthetic construct
ARAAEDIVVVPAAKDYYYYGMDV

SEQ ID NO: 16859 - protein, 17 aa, Artificial Sequence
  Synthetic construct
ARDLGLQGGRVPGIFDY

SEQ ID NO: 16860 - protein, 18 aa, Artificial Sequence
  Synthetic construct
ASLQIESGYYTSPHGFDY

SEQ ID NO: 16861 - protein, 8 aa, Artificial Sequence
  Synthetic construct
AHSGIAAP

SEQ ID NO: 16862 - protein, 13 aa, Artificial Sequence
  Synthetic construct
ARQAHGSGSYLVY

SEQ ID NO: 16863 - protein, 15 aa, Artificial Sequence
  Synthetic construct
ARVGRFGSGGYPFDY

SEQ ID NO: 16864 - protein, 16 aa, Artificial Sequence
  Synthetic construct
ARGGDCFSTSCYHFDY

SEQ ID NO: 16865 - protein, 16 aa, Artificial Sequence
  Synthetic construct
ARRGGRYSNNDNWFDP

SEQ ID NO: 16866 - protein, 16 aa, Artificial Sequence
  Synthetic construct
ARHLRRDNADYYGLDV

SEQ ID NO: 16867 - protein, 12 aa, Artificial Sequence
  Synthetic construct
TRQTQWLRSLDY

SEQ ID NO: 16868 - protein, 20 aa, Artificial Sequence
  Synthetic construct
ARGRGTRGYSYGYPFSWFDP

SEQ ID NO: 16869 - protein, 20 aa, Artificial Sequence
  Synthetic construct
VRAGGAAAGKPGYYKYGLDV

SEQ ID NO: 16870 - protein, 20 aa, Artificial Sequence
  Synthetic construct
VKDFHAGGASYDFWSGLFDR

SEQ ID NO: 16871 - protein, 16 aa, Artificial Sequence
  Synthetic construct
ARHLRRDNADYYGLDV

SEQ ID NO: 16872 - protein, 23 aa, Artificial Sequence
  Synthetic construct
ARLPHPRSSGWSNRGYYYYGMDV

SEQ ID NO: 16873 - protein, 15 aa, Artificial Sequence
  Synthetic construct
AKDLHGTTADGPGDY

SEQ ID NO: 16874 - protein, 7 aa, Artificial Sequence
  Synthetic construct
TTAGIDY

SEQ ID NO: 16875 - protein, 15 aa, Artificial Sequence
  Synthetic construct
SNSRKSTAVTSNFDS

SEQ ID NO: 16876 - protein, 16 aa, Artificial Sequence
  Synthetic construct
ARAGDIVGATRGWFDP

SEQ ID NO: 16877 - protein, 11 aa, Artificial Sequence
  Synthetic construct
ARSPKWLRFDY

SEQ ID NO: 16878 - protein, 8 aa, Artificial Sequence
  Synthetic construct
ARTGDFDS

SEQ ID NO: 16879 - protein, 12 aa, Artificial Sequence
  Synthetic construct
AKDIAARTYFHS

SEQ ID NO: 16880 - protein, 15 aa, Artificial Sequence
  Synthetic construct
ARSIQGWGQRGAFDI

SEQ ID NO: 16881 - protein, 12 aa, Artificial Sequence
  Synthetic construct
ARDREDSHGFDY

SEQ ID NO: 16882 - protein, 12 aa, Artificial Sequence
  Synthetic construct
VRGGRQWLQIDS

SEQ ID NO: 16883 - protein, 12 aa, Artificial Sequence
  Synthetic construct
ARDKTRGYAFDI

SEQ ID NO: 16884 - protein, 16 aa, Artificial Sequence
  Synthetic construct
AKHPLCRSSICYSLDV

SEQ ID NO: 16885 - protein, 13 aa, Artificial Sequence
  Synthetic construct
AREGRFPRGWFDP

SEQ ID NO: 16886 - protein, 23 aa, Artificial Sequence
  Synthetic construct
ARESVSVYDFWSDSYKDYWYFDL

SEQ ID NO: 16887 - protein, 15 aa, Artificial Sequence
  Synthetic construct
VSPSSDKDYFEVFDF

SEQ ID NO: 16888 - protein, 10 aa, Artificial Sequence
  Synthetic construct
ARGGIWGFDS

SEQ ID NO: 16889 - protein, 17 aa, Artificial Sequence
  Synthetic construct
ARDPLHYDTLTTYYEGY

SEQ ID NO: 16890 - protein, 21 aa, Artificial Sequence
  Synthetic construct
ARGAPVFGPVIVPSFYKPFDV

SEQ ID NO: 16891 - protein, 16 aa, Artificial Sequence
  Synthetic construct
ARVLRYFDRLRAAFDI

SEQ ID NO: 16892 - protein, 14 aa, Artificial Sequence
  Synthetic construct
VRTFAESHYSGMDV

SEQ ID NO: 16893 - protein, 20 aa, Artificial Sequence
  Synthetic construct
ARVGGSLESKVTVYYFEMDV

SEQ ID NO: 16894 - protein, 17 aa, Artificial Sequence
  Synthetic construct
ARSPHDHESSGYYAFDI

SEQ ID NO: 16895 - protein, 20 aa, Artificial Sequence
  Synthetic construct
ARDHRGGYGPKRYYYYGMDV

SEQ ID NO: 16896 - protein, 20 aa, Artificial Sequence
  Synthetic construct
IKGSRVTIFGVLTDGDAFDI

SEQ ID NO: 16897 - protein, 14 aa, Artificial Sequence
  Synthetic construct
ARGSSYYKPWYFDV

SEQ ID NO: 16898 - protein, 8 aa, Artificial Sequence
  Synthetic construct
ARHPTLDY

SEQ ID NO: 16899 - protein, 17 aa, Artificial Sequence
  Synthetic construct
ARHRGRDGYNRRGGFDY

SEQ ID NO: 16900 - protein, 15 aa, Artificial Sequence
  Synthetic construct
ARDLRRYSSGWYYDY

SEQ ID NO: 16901 - protein, 14 aa, Artificial Sequence
  Synthetic construct
ARARAQLWPDAFDY

SEQ ID NO: 16902 - protein, 18 aa, Artificial Sequence
  Synthetic construct
ARVHYDFRSGTIRDAFDI

SEQ ID NO: 16903 - protein, 11 aa, Artificial Sequence
  Synthetic construct
ALLSASSEFDF

SEQ ID NO: 16904 - protein, 9 aa, Artificial Sequence
  Synthetic construct
GRDRGFGEG

SEQ ID NO: 16905 - protein, 16 aa, Artificial Sequence
  Synthetic construct
AKVPTWIQLWTTYFDY

SEQ ID NO: 16906 - protein, 15 aa, Artificial Sequence
  Synthetic construct
ARDGRAYNYGYGMDV

SEQ ID NO: 16907 - protein, 17 aa, Artificial Sequence
  Synthetic construct
AARSGYDYGWFVMPMDV

SEQ ID NO: 16908 - protein, 13 aa, Artificial Sequence
  Synthetic construct
AREGGPAKNYFDN

SEQ ID NO: 16909 - protein, 12 aa, Artificial Sequence
  Synthetic construct
ARNSGTYFPFDY

SEQ ID NO: 16910 - protein, 8 aa, Artificial Sequence
  Synthetic construct
AKGSGIDY

SEQ ID NO: 16911 - protein, 16 aa, Artificial Sequence
  Synthetic construct
ARERRPHTTTWTWFDS

SEQ ID NO: 16912 - protein, 13 aa, Artificial Sequence
  Synthetic construct
AIFPGVDTVVADY

SEQ ID NO: 16913 - protein, 20 aa, Artificial Sequence
  Synthetic construct
ARELGKYTYGRHYYYYAMDV

SEQ ID NO: 16914 - protein, 13 aa, Artificial Sequence
  Synthetic construct
ARGYSYSSGSYKF

SEQ ID NO: 16915 - protein, 11 aa, Artificial Sequence
  Synthetic construct
APRGYGSGFDP

SEQ ID NO: 16916 - protein, 13 aa, Artificial Sequence
  Synthetic construct
ARAPQGRDDAFDI

SEQ ID NO: 16917 - protein, 19 aa, Artificial Sequence
  Synthetic construct
VHSQNCESTTCYKLNWFDV

SEQ ID NO: 16918 - protein, 22 aa, Artificial Sequence
  Synthetic construct
AKDPTPLKYMVRGVPLGRWFDP

SEQ ID NO: 16919 - protein, 17 aa, Artificial Sequence
  Synthetic construct
ARGIAVTGKPLPEWLQH

SEQ ID NO: 16920 - protein, 12 aa, Artificial Sequence
  Synthetic construct
VRGGRQWLQIDS

SEQ ID NO: 16921 - protein, 17 aa, Artificial Sequence
  Synthetic construct
ARGFVPGGRYLDRQFDL

SEQ ID NO: 16922 - protein, 13 aa, Artificial Sequence
  Synthetic construct
TRRPKGGGGSDQY

SEQ ID NO: 16923 - protein, 17 aa, Artificial Sequence
  Synthetic construct
VLDTTMAHPHNWYGLDV

SEQ ID NO: 16924 - protein, 23 aa, Artificial Sequence
  Synthetic construct
AKDLVVAAVRSGSYVSYYYGMDV

SEQ ID NO: 16925 - protein, 18 aa, Artificial Sequence
  Synthetic construct
ARAGWGSGSLFNPYNFDY

SEQ ID NO: 16926 - protein, 16 aa, Artificial Sequence
  Synthetic construct
ARDRPSCGSRYCPFDY

SEQ ID NO: 16927 - protein, 17 aa, Artificial Sequence
  Synthetic construct
ARSPHDHESSGYYAFDI

SEQ ID NO: 16928 - protein, 19 aa, Artificial Sequence
  Synthetic construct
ARDRTHYYGSGKTENWFDP

SEQ ID NO: 16929 - protein, 6 aa, Artificial Sequence
  Synthetic construct
VRGRTY

SEQ ID NO: 16930 - protein, 11 aa, Artificial Sequence
  Synthetic construct
VRGEGLGHIDL

SEQ ID NO: 16931 - protein, 16 aa, Artificial Sequence
  Synthetic construct
VRLALGSYTYYRQVDY

SEQ ID NO: 16932 - protein, 13 aa, Artificial Sequence
  Synthetic construct
ARLPFPGAEGFDQ

SEQ ID NO: 16933 - protein, 25 aa, Artificial Sequence
  Synthetic construct
ARDSAVEYWPVYGPRSTSHHYAMDV

SEQ ID NO: 16934 - protein, 12 aa, Artificial Sequence
  Synthetic construct
VRGGRQWLQIDS

SEQ ID NO: 16935 - protein, 10 aa, Artificial Sequence
  Synthetic construct
ARDIDGGMDV

SEQ ID NO: 16936 - protein, 13 aa, Artificial Sequence
  Synthetic construct
ARILRFVGYGMDV

SEQ ID NO: 16937 - protein, 11 aa, Artificial Sequence
  Synthetic construct
ARDHYYYGMDV

SEQ ID NO: 16938 - protein, 15 aa, Artificial Sequence
  Synthetic construct
AIAPGSGSQFSCLHI

SEQ ID NO: 16939 - protein, 16 aa, Artificial Sequence
  Synthetic construct
ARDARSSNLYYYGMDV

SEQ ID NO: 16940 - protein, 15 aa, Artificial Sequence
  Synthetic construct
ASVGAVAEGEGYFDY

SEQ ID NO: 16941 - protein, 11 aa, Artificial Sequence
  Synthetic construct
ARVRRSGGGDY

SEQ ID NO: 16942 - protein, 21 aa, Artificial Sequence
  Synthetic construct
ARARYDTIRPLGSGRMNAFDI

SEQ ID NO: 16943 - protein, 17 aa, Artificial Sequence
  Synthetic construct
ARAEVPPDYSDHVYFQH

SEQ ID NO: 16944 - protein, 12 aa, Artificial Sequence
  Synthetic construct
ARHGMGATTIDY

SEQ ID NO: 16945 - protein, 17 aa, Artificial Sequence
  Synthetic construct
ARGNGQWLGRNYYGMDV

SEQ ID NO: 16946 - protein, 16 aa, Artificial Sequence
  Synthetic construct
TRGGYSDYDWVPGIDY

SEQ ID NO: 16947 - protein, 11 aa, Artificial Sequence
  Synthetic construct
ARDVSWLLFDY

SEQ ID NO: 16948 - protein, 15 aa, Artificial Sequence
  Synthetic construct
ARDPYYDISPGYFDY

SEQ ID NO: 16949 - protein, 20 aa, Artificial Sequence
  Synthetic construct
ARQSYDSSGYYFRVAGAFDI

SEQ ID NO: 16950 - protein, 18 aa, Artificial Sequence
  Synthetic construct
ARTPYYYDSSGYYNAFDI

SEQ ID NO: 16951 - protein, 22 aa, Artificial Sequence
  Synthetic construct
MRENQKRTSRLGVVTIARYFDL

SEQ ID NO: 16952 - protein, 11 aa, Artificial Sequence
  Synthetic construct
GRDMNLILFDY

SEQ ID NO: 16953 - protein, 12 aa, Artificial Sequence
  Synthetic construct
ARSWGRGWYFDL

SEQ ID NO: 16954 - protein, 11 aa, Artificial Sequence
  Synthetic construct
ARDMFGQAFDL

SEQ ID NO: 16955 - protein, 16 aa, Artificial Sequence
  Synthetic construct
TSHGSGVYYYYYGMDV

SEQ ID NO: 16956 - protein, 16 aa, Artificial Sequence
  Synthetic construct
ARGGRGLYGGNSREDY

SEQ ID NO: 16957 - protein, 21 aa, Artificial Sequence
  Synthetic construct
ARDDRYSGYDRRYYYYHGMDV

SEQ ID NO: 16958 - protein, 15 aa, Artificial Sequence
  Synthetic construct
AKRGAAVVYYYGMDV

SEQ ID NO: 16959 - protein, 18 aa, Artificial Sequence
  Synthetic construct
ARAGRSSSWSVSEGKFDP

SEQ ID NO: 16960 - protein, 17 aa, Artificial Sequence
  Synthetic construct
ATVAGIDCRDASCQLRY

SEQ ID NO: 16961 - protein, 14 aa, Artificial Sequence
  Synthetic construct
ARVGTTVVTYYFDY

SEQ ID NO: 16962 - protein, 10 aa, Artificial Sequence
  Synthetic construct
ARSLGWYSDY

SEQ ID NO: 16963 - protein, 20 aa, Artificial Sequence
  Synthetic construct
ARLRAQGQYDFWSADFYLDY

SEQ ID NO: 16964 - protein, 17 aa, Artificial Sequence
  Synthetic construct
AHRRAEGGNWDGGCLDV

SEQ ID NO: 16965 - protein, 15 aa, Artificial Sequence
  Synthetic construct
AKSGTLYFVVGGMDV

SEQ ID NO: 16966 - protein, 12 aa, Artificial Sequence
  Synthetic construct
ARAPYDFWEFDP

SEQ ID NO: 16967 - protein, 16 aa, Artificial Sequence
  Synthetic construct
ARSGTTSYYYFYGMDV

SEQ ID NO: 16968 - protein, 15 aa, Artificial Sequence
  Synthetic construct
ARPAAQAARMYYFDS

SEQ ID NO: 16969 - protein, 20 aa, Artificial Sequence
  Synthetic construct
VKDFHAGGASYDFWSGLFDR

SEQ ID NO: 16970 - protein, 27 aa, Artificial Sequence
  Synthetic construct
ARGRSSPGSGSPRRERVAGYYYYGMDV

SEQ ID NO: 16971 - protein, 23 aa, Artificial Sequence
  Synthetic construct
ARLGCSSTSCYWGLDYYYYGMDV

SEQ ID NO: 16972 - protein, 20 aa, Artificial Sequence
  Synthetic construct
ARDPTRRWFTRSTRQYYLDS

SEQ ID NO: 16973 - protein, 13 aa, Artificial Sequence
  Synthetic construct
ARDKGELLDGFDY

SEQ ID NO: 16974 - protein, 15 aa, Artificial Sequence
  Synthetic construct
ARSPPGIAVAGTGYY

SEQ ID NO: 16975 - protein, 19 aa, Artificial Sequence
  Synthetic construct
ARMKGYCSSTSCYTRAFDI

SEQ ID NO: 16976 - protein, 15 aa, Artificial Sequence
  Synthetic construct
ARFDPATDQGDAFDV

SEQ ID NO: 16977 - protein, 23 aa, Artificial Sequence
  Synthetic construct
ARDLRYSYGFQNPKSYYYYGMDV

SEQ ID NO: 16978 - protein, 14 aa, Artificial Sequence
  Synthetic construct
ARPIMGHFYYGMDV

SEQ ID NO: 16979 - protein, 16 aa, Artificial Sequence
  Synthetic construct
ARHLRRDNADYYGLDV

SEQ ID NO: 16980 - protein, 14 aa, Artificial Sequence
  Synthetic construct
ARARAQLWPTAFDF

SEQ ID NO: 16981 - protein, 18 aa, Artificial Sequence
  Synthetic construct
ARGAGTGRSNYFFYGLDV

SEQ ID NO: 16982 - protein, 7 aa, Artificial Sequence
  Synthetic construct
ARDRGGY

SEQ ID NO: 16983 - protein, 12 aa, Artificial Sequence
  Synthetic construct
ARDREDSHGFDY

SEQ ID NO: 16984 - protein, 14 aa, Artificial Sequence
  Synthetic construct
ARYGGRIAAREFDY

SEQ ID NO: 16985 - protein, 16 aa, Artificial Sequence
  Synthetic construct
ARASGPAYRQSGPYRH

SEQ ID NO: 16986 - protein, 14 aa, Artificial Sequence
  Synthetic construct
ARAWGLKSRTTFDY

SEQ ID NO: 16987 - protein, 19 aa, Artificial Sequence
  Synthetic construct
ARERWVRYCSSTSCSPNDY

SEQ ID NO: 16988 - protein, 18 aa, Artificial Sequence
  Synthetic construct
AKALYYYGSGSSRSLIDY

SEQ ID NO: 16989 - protein, 19 aa, Artificial Sequence
  Synthetic construct
ARDRGYSYGRPYYYYGMDV

SEQ ID NO: 16990 - protein, 16 aa, Artificial Sequence
  Synthetic construct
ARDLDAIADLSLGFDP

SEQ ID NO: 16991 - protein, 19 aa, Artificial Sequence
  Synthetic construct
ARINGGFSGQDYDKECFDP

SEQ ID NO: 16992 - protein, 17 aa, Artificial Sequence
  Synthetic construct
ARELDSETYYNYNSLDV

SEQ ID NO: 16993 - protein, 18 aa, Artificial Sequence
  Synthetic construct
ARSQRIGSWPNRYNWFDP

SEQ ID NO: 16994 - protein, 15 aa, Artificial Sequence
  Synthetic construct
ARGGDYDTSGYAFDH

SEQ ID NO: 16995 - protein, 17 aa, Artificial Sequence
  Synthetic construct
ARRTRRAAPRYYYGMDV

SEQ ID NO: 16996 - protein, 16 aa, Artificial Sequence
  Synthetic construct
VKDLGWRSIAADGGDY

SEQ ID NO: 16997 - protein, 17 aa, Artificial Sequence
  Synthetic construct
AKDHAVGVTDTGEYFQH

SEQ ID NO: 16998 - protein, 12 aa, Artificial Sequence
  Synthetic construct
TDSFHYASRSRG

SEQ ID NO: 16999 - protein, 13 aa, Artificial Sequence
  Synthetic construct
AREGLSAGQPFDT

SEQ ID NO: 17000 - protein, 10 aa, Artificial Sequence
  Synthetic construct
NGRQWGTFDY

SEQ ID NO: 17001 - protein, 18 aa, Artificial Sequence
  Synthetic construct
ARDLSLRARSGSYDLRDY

SEQ ID NO: 17002 - protein, 7 aa, Artificial Sequence
  Synthetic construct
ARESTNP

SEQ ID NO: 17003 - protein, 18 aa, Artificial Sequence
  Synthetic construct
ARDRAGAISPRVGYYFDY

SEQ ID NO: 17004 - protein, 16 aa, Artificial Sequence
  Synthetic construct
ARHGRKRGYSGYYFDY

SEQ ID NO: 17005 - protein, 18 aa, Artificial Sequence
  Synthetic construct
AKDCRWEPSIGYYYGMDV

SEQ ID NO: 17006 - protein, 23 aa, Artificial Sequence
  Synthetic construct
AKDLGRLYSSSWYVRYYYYGMDV

SEQ ID NO: 17007 - protein, 11 aa, Artificial Sequence
  Synthetic construct
ARARIRSPFDY

SEQ ID NO: 17008 - protein, 20 aa, Artificial Sequence
  Synthetic construct
VKDWRGGIVEVFAVNSAFDI

SEQ ID NO: 17009 - protein, 19 aa, Artificial Sequence
  Synthetic construct
ARHPFRYYYGSGPVYGMDV

SEQ ID NO: 17010 - protein, 13 aa, Artificial Sequence
  Synthetic construct
AKDHNWNDWYFDL

SEQ ID NO: 17011 - protein, 15 aa, Artificial Sequence
  Synthetic construct
ASSRVVATIPRRFDY

SEQ ID NO: 17012 - protein, 15 aa, Artificial Sequence
  Synthetic construct
AKPTWTFDWNLLYDY

SEQ ID NO: 17013 - protein, 17 aa, Artificial Sequence
  Synthetic construct
ARHVSSSRPRYYYGMDV

SEQ ID NO: 17014 - protein, 18 aa, Artificial Sequence
  Synthetic construct
VKQFHSGSGSYYNVAFDL

SEQ ID NO: 17015 - protein, 21 aa, Artificial Sequence
  Synthetic construct
AKGSARGYSSSWHGPKYYFDY

SEQ ID NO: 17016 - protein, 20 aa, Artificial Sequence
  Synthetic construct
ARDMYCTDNSCYHTSPFFVW

SEQ ID NO: 17017 - protein, 11 aa, Artificial Sequence
  Synthetic construct
ARDPGRIGFDY

SEQ ID NO: 17018 - protein, 13 aa, Artificial Sequence
  Synthetic construct
TRYDYGGGSYLAY

SEQ ID NO: 17019 - protein, 25 aa, Artificial Sequence
  Synthetic construct
ARRMYYYDSSGYYQRTHYYYNAMDV

SEQ ID NO: 17020 - protein, 16 aa, Artificial Sequence
  Synthetic construct
ARHLRRDNADYYGLDV

SEQ ID NO: 17021 - protein, 16 aa, Artificial Sequence
  Synthetic construct
ARGKAGTTVTTGAFDI

SEQ ID NO: 17022 - protein, 16 aa, Artificial Sequence
  Synthetic construct
TRQGVEKINPRWAFDI

SEQ ID NO: 17023 - protein, 20 aa, Artificial Sequence
  Synthetic construct
AKGAGYGSGSYYKSLFGMDV

SEQ ID NO: 17024 - protein, 15 aa, Artificial Sequence
  Synthetic construct
TRPKVGATSYYGMDV

SEQ ID NO: 17025 - protein, 18 aa, Artificial Sequence
  Synthetic construct
VKVRPYSGGSYWENYFDY

SEQ ID NO: 17026 - protein, 18 aa, Artificial Sequence
  Synthetic construct
ARLFEYYYDSSGYYFPDY

SEQ ID NO: 17027 - protein, 16 aa, Artificial Sequence
  Synthetic construct
ARDLRGTMVRGVIFYY

SEQ ID NO: 17028 - protein, 14 aa, Artificial Sequence
  Synthetic construct
VKDRTSSSSGGFDS

SEQ ID NO: 17029 - protein, 21 aa, Artificial Sequence
  Synthetic construct
ATTYLASRIIVVRGVRNWFDS

SEQ ID NO: 17030 - protein, 11 aa, Artificial Sequence
  Synthetic construct
ARDSVQLGIDY

SEQ ID NO: 17031 - protein, 15 aa, Artificial Sequence
  Synthetic construct
ARVGRLQKPSYGMDV

SEQ ID NO: 17032 - protein, 11 aa, Artificial Sequence
  Synthetic construct
ASGEELDPIDH

SEQ ID NO: 17033 - protein, 13 aa, Artificial Sequence
  Synthetic construct
ARDRSRSTGSFDS

SEQ ID NO: 17034 - protein, 20 aa, Artificial Sequence
  Synthetic construct
ARAGYSSSSPDYYYYYDMDV

SEQ ID NO: 17035 - protein, 16 aa, Artificial Sequence
  Synthetic construct
ARGENILTGHYWWLDS

SEQ ID NO: 17036 - protein, 19 aa, Artificial Sequence
  Synthetic construct
ARVGGGSEWYSSGWFSFDY

SEQ ID NO: 17037 - protein, 12 aa, Artificial Sequence
  Synthetic construct
ATWHGNRGAFEI

SEQ ID NO: 17038 - protein, 14 aa, Artificial Sequence
  Synthetic construct
ARGRVVGAQYYFDY

SEQ ID NO: 17039 - protein, 17 aa, Artificial Sequence
  Synthetic construct
VTMRGHYQLFYDDSFDV

SEQ ID NO: 17040 - protein, 16 aa, Artificial Sequence
  Synthetic construct
AKDRGYRYYFYYGMDV

SEQ ID NO: 17041 - protein, 16 aa, Artificial Sequence
  Synthetic construct
ARGENILTGHFWWFDP

SEQ ID NO: 17042 - protein, 17 aa, Artificial Sequence
  Synthetic construct
ARSPHDHESSGYYAFDI

SEQ ID NO: 17043 - protein, 26 aa, Artificial Sequence
  Synthetic construct
ARDADLGRGYSYGYWLEFDYYNGMDV

SEQ ID NO: 17044 - protein, 8 aa, Artificial Sequence
  Synthetic construct
VKENDFHL

SEQ ID NO: 17045 - protein, 13 aa, Artificial Sequence
  Synthetic construct
ASDTGSYSNYFDY

SEQ ID NO: 17046 - protein, 16 aa, Artificial Sequence
  Synthetic construct
ARLNFADSSNHDYFDS

SEQ ID NO: 17047 - protein, 21 aa, Artificial Sequence
  Synthetic construct
ARGRNYVWGSYRYRIPNWFDP

SEQ ID NO: 17048 - protein, 23 aa, Artificial Sequence
  Synthetic construct
AKGIFAYYFDETHYSKTFYFFDF

SEQ ID NO: 17049 - protein, 18 aa, Artificial Sequence
  Synthetic construct
ARDLIRRKYNWNDYYFDY

SEQ ID NO: 17050 - protein, 10 aa, Artificial Sequence
  Synthetic construct
ARARWYAIDY

SEQ ID NO: 17051 - protein, 14 aa, Artificial Sequence
  Synthetic construct
VRDTVLEGTSTLDI

SEQ ID NO: 17052 - protein, 14 aa, Artificial Sequence
  Synthetic construct
ARGPRYLGELLTDF

SEQ ID NO: 17053 - protein, 16 aa, Artificial Sequence
  Synthetic construct
VRDFLAVAGRGGYFHY

SEQ ID NO: 17054 - protein, 20 aa, Artificial Sequence
  Synthetic construct
VKDFHAGGASYDFWSGLFDR

SEQ ID NO: 17055 - protein, 20 aa, Artificial Sequence
  Synthetic construct
ARGRAMVRGVGYYYYYGMDV

SEQ ID NO: 17056 - protein, 17 aa, Artificial Sequence
  Synthetic construct
ARGSCTGGSCYSVPFDY

SEQ ID NO: 17057 - protein, 33 aa, Artificial Sequence
  Synthetic construct
ARVPTYYYGSGSSSARVKLPDYYTSSRYYLFDY

SEQ ID NO: 17058 - protein, 15 aa, Artificial Sequence
  Synthetic construct
ARDTGTIFGVVIISY

SEQ ID NO: 17059 - protein, 11 aa, Artificial Sequence
  Synthetic construct
ASGVSRVLHGN

SEQ ID NO: 17060 - protein, 15 aa, Artificial Sequence
  Synthetic construct
ARGGGGAVKEYYFDY

SEQ ID NO: 17061 - protein, 14 aa, Artificial Sequence
  Synthetic construct
ARAGRYSYGLGFDY

SEQ ID NO: 17062 - protein, 17 aa, Artificial Sequence
  Synthetic construct
ARTQGMVRGVFYGVIDY

SEQ ID NO: 17063 - protein, 15 aa, Artificial Sequence
  Synthetic construct
RGQSGSYYYYYGMDV

SEQ ID NO: 17064 - protein, 16 aa, Artificial Sequence
  Synthetic construct
ARGLREYDSSGYYFDY

SEQ ID NO: 17065 - protein, 16 aa, Artificial Sequence
  Synthetic construct
ARDPGMFIHTAYYFDF

SEQ ID NO: 17066 - protein, 18 aa, Artificial Sequence
  Synthetic construct
ARDRITMVRGVIITPFGY

SEQ ID NO: 17067 - protein, 13 aa, Artificial Sequence
  Synthetic construct
AYGAYSSTSYVVY

SEQ ID NO: 17068 - protein, 16 aa, Artificial Sequence
  Synthetic construct
ARGGYYDSSGFRAFDI

SEQ ID NO: 17069 - protein, 19 aa, Artificial Sequence
  Synthetic construct
ARDGDRGSGSYYYYYGMDV

SEQ ID NO: 17070 - protein, 13 aa, Artificial Sequence
  Synthetic construct
ARDYVYGSGPVGY

SEQ ID NO: 17071 - protein, 19 aa, Artificial Sequence
  Synthetic construct
ARKRATVRGAQTPNWYFDL

SEQ ID NO: 17072 - protein, 20 aa, Artificial Sequence
  Synthetic construct
ASIPTFYHDSSGHYGDSVDY

SEQ ID NO: 17073 - protein, 17 aa, Artificial Sequence
  Synthetic construct
ARTPSAGYGSGSYWFDY

SEQ ID NO: 17074 - protein, 14 aa, Artificial Sequence
  Synthetic construct
ARRGGYNPVYAFDI

SEQ ID NO: 17075 - protein, 12 aa, Artificial Sequence
  Synthetic construct
ARYCGGDCSLDY

SEQ ID NO: 17076 - protein, 20 aa, Artificial Sequence
  Synthetic construct
ARAGLIVPAAILYYYYGMDV

SEQ ID NO: 17077 - protein, 26 aa, Artificial Sequence
  Synthetic construct
ARDVAYSSSWDGLIPLVITTTIPFDV

SEQ ID NO: 17078 - protein, 14 aa, Artificial Sequence
  Synthetic construct
ARDKRDQLLYYFDH

SEQ ID NO: 17079 - protein, 17 aa, Artificial Sequence
  Synthetic construct
AHTYCTTTNCKFMAFDY

SEQ ID NO: 17080 - protein, 7 aa, Artificial Sequence
  Synthetic construct
NTERGNY

SEQ ID NO: 17081 - protein, 15 aa, Artificial Sequence
  Synthetic construct
ARRALHCSRFTCYWD

SEQ ID NO: 17082 - protein, 18 aa, Artificial Sequence
  Synthetic construct
AKEDYDSSAYYLPTGFDY

SEQ ID NO: 17083 - protein, 18 aa, Artificial Sequence
  Synthetic construct
AKEDYDSSAYYLPTGFDY

SEQ ID NO: 17084 - protein, 17 aa, Artificial Sequence
  Synthetic construct
ARDQKNGELPYYYGMDV

SEQ ID NO: 17085 - protein, 14 aa, Artificial Sequence
  Synthetic construct
ARGDSGYDYTGVDD

SEQ ID NO: 17086 - protein, 15 aa, Artificial Sequence
  Synthetic construct
AKDRNHYSNIGWFDP

SEQ ID NO: 17087 - protein, 19 aa, Artificial Sequence
  Synthetic construct
ARVGGGGEWYSSGWFSFDS

SEQ ID NO: 17088 - protein, 20 aa, Artificial Sequence
  Synthetic construct
ARDLSVTTPWSYRVSDGMDV

SEQ ID NO: 17089 - protein, 11 aa, Artificial Sequence
  Synthetic construct
VSGSYFFYFDF

SEQ ID NO: 17090 - protein, 16 aa, Artificial Sequence
  Synthetic construct
ARTADADYLGGNWFDP

SEQ ID NO: 17091 - protein, 15 aa, Artificial Sequence
  Synthetic construct
ARGGDYDTSGYAFDH

SEQ ID NO: 17092 - protein, 16 aa, Artificial Sequence
  Synthetic construct
TRGGYSGYDWVPGIDY

SEQ ID NO: 17093 - protein, 22 aa, Artificial Sequence
  Synthetic construct
ARALHCSSTSCDQMYYYYGMDV

SEQ ID NO: 17094 - protein, 19 aa, Artificial Sequence
  Synthetic construct
AREDYYILTGHHTLGALDI

SEQ ID NO: 17095 - protein, 15 aa, Artificial Sequence
  Synthetic construct
ARDAGPGRRQGYFDY

SEQ ID NO: 17096 - protein, 16 aa, Artificial Sequence
  Synthetic construct
VRLALGSYTYYRQVDY

SEQ ID NO: 17097 - protein, 11 aa, Artificial Sequence
  Synthetic construct
ARDVGFGRYDY

SEQ ID NO: 17098 - protein, 16 aa, Artificial Sequence
  Synthetic construct
AREGGGPYDRSHYYDI

SEQ ID NO: 17099 - protein, 14 aa, Artificial Sequence
  Synthetic construct
ARGWSSGYKEGPGH

SEQ ID NO: 17100 - protein, 11 aa, Artificial Sequence
  Synthetic construct
ARSGAQWHMDV

SEQ ID NO: 17101 - protein, 16 aa, Artificial Sequence
  Synthetic construct
AKGTGNSLIYNYGLDA

SEQ ID NO: 17102 - protein, 22 aa, Artificial Sequence
  Synthetic construct
VRAAANHHFLTDSYPRNWYFDL

SEQ ID NO: 17103 - protein, 24 aa, Artificial Sequence
  Synthetic construct
AKDRRGVYCSSTSCYTPKGYYFDY

SEQ ID NO: 17104 - protein, 12 aa, Artificial Sequence
  Synthetic construct
ARYMTTVKTFDY

SEQ ID NO: 17105 - protein, 23 aa, Artificial Sequence
  Synthetic construct
ARVGLEGTLVRGSIFGQHLGFDY

SEQ ID NO: 17106 - protein, 9 aa, Artificial Sequence
  Synthetic construct
ARDGYYMFI

SEQ ID NO: 17107 - protein, 14 aa, Artificial Sequence
  Synthetic construct
AREQTGYSLRAFDI

SEQ ID NO: 17108 - protein, 18 aa, Artificial Sequence
  Synthetic construct
VRDSDYVTNDSHNDVYDV

SEQ ID NO: 17109 - protein, 16 aa, Artificial Sequence
  Synthetic construct
ARHLRRDNADYYGLDV

SEQ ID NO: 17110 - protein, 15 aa, Artificial Sequence
  Synthetic construct
ARAGRSGWFFSHTDY

SEQ ID NO: 17111 - protein, 17 aa, Artificial Sequence
  Synthetic construct
ARHLGRGQSWTTGDFDY

SEQ ID NO: 17112 - protein, 14 aa, Artificial Sequence
  Synthetic construct
ARGPYGDPDDRFDY

SEQ ID NO: 17113 - protein, 14 aa, Artificial Sequence
  Synthetic construct
ARVSTSCCAYWFDP

SEQ ID NO: 17114 - protein, 16 aa, Artificial Sequence
  Synthetic construct
VRGGAEVVGAMSKVDY

SEQ ID NO: 17115 - protein, 13 aa, Artificial Sequence
  Synthetic construct
GRDSGSYRGRLDP

SEQ ID NO: 17116 - protein, 13 aa, Artificial Sequence
  Synthetic construct
ARVNMQQYYAMDV

SEQ ID NO: 17117 - protein, 15 aa, Artificial Sequence
  Synthetic construct
ARHLYNSGWMGAFDI

SEQ ID NO: 17118 - protein, 18 aa, Artificial Sequence
  Synthetic construct
ARARRYGSGSYTSNWFDP

SEQ ID NO: 17119 - protein, 12 aa, Artificial Sequence
  Synthetic construct
ARRGGYDLPFDY

SEQ ID NO: 17120 - protein, 12 aa, Artificial Sequence
  Synthetic construct
ARIHDSHYAFDT

SEQ ID NO: 17121 - protein, 22 aa, Artificial Sequence
  Synthetic construct
AREREYYDFWSGYYRDYYGMDV

SEQ ID NO: 17122 - protein, 7 aa, Artificial Sequence
  Synthetic construct
CADFGDW

SEQ ID NO: 17123 - protein, 14 aa, Artificial Sequence
  Synthetic construct
AGGPYGDPDDRFDF

SEQ ID NO: 17124 - protein, 15 aa, Artificial Sequence
  Synthetic construct
ARGGDYDTSGYALDY

SEQ ID NO: 17125 - protein, 20 aa, Artificial Sequence
  Synthetic construct
ARGRRWRSGYSGSGSVPFDV

SEQ ID NO: 17126 - protein, 22 aa, Artificial Sequence
  Synthetic construct
ARLEGPREWKIESGSYRVVRDI

SEQ ID NO: 17127 - protein, 14 aa, Artificial Sequence
  Synthetic construct
ATGLQEIQRFAVGY

SEQ ID NO: 17128 - protein, 19 aa, Artificial Sequence
  Synthetic construct
ARVGGGAEWYSSGWLSFDY

SEQ ID NO: 17129 - protein, 15 aa, Artificial Sequence
  Synthetic construct
AREETVGATPAGFDL

SEQ ID NO: 17130 - protein, 14 aa, Artificial Sequence
  Synthetic construct
TRGADYALHYAMDV

SEQ ID NO: 17131 - protein, 17 aa, Artificial Sequence
  Synthetic construct
AKDLRWLPNYYYYGMDV

SEQ ID NO: 17132 - protein, 20 aa, Artificial Sequence
  Synthetic construct
ARIFHDGHNYDYEPLAWFDN

SEQ ID NO: 17133 - protein, 23 aa, Artificial Sequence
  Synthetic construct
AKGRYCSSTSCYTGGYYYYGMDV

SEQ ID NO: 17134 - protein, 17 aa, Artificial Sequence
  Synthetic construct
ARGGRYCSGGSCYIVSL

SEQ ID NO: 17135 - protein, 15 aa, Artificial Sequence
  Synthetic construct
ARDPGYSYGKHYFDS

SEQ ID NO: 17136 - protein, 12 aa, Artificial Sequence
  Synthetic construct
AKGPSAAAGTYY

SEQ ID NO: 17137 - protein, 19 aa, Artificial Sequence
  Synthetic construct
ARAGFTVRGGNYYYYGMDV

SEQ ID NO: 17138 - protein, 14 aa, Artificial Sequence
  Synthetic construct
ARIGRGSNNNVLDY

SEQ ID NO: 17139 - protein, 17 aa, Artificial Sequence
  Synthetic construct
AHRRAEGGNWDGGCLDV

SEQ ID NO: 17140 - protein, 13 aa, Artificial Sequence
  Synthetic construct
AREQPGRYSPLDQ

SEQ ID NO: 17141 - protein, 19 aa, Artificial Sequence
  Synthetic construct
ARDRGDCSSGRCYSDYIDY

SEQ ID NO: 17142 - protein, 16 aa, Artificial Sequence
  Synthetic construct
ARHLRRDNADYYGLDV

SEQ ID NO: 17143 - protein, 15 aa, Artificial Sequence
  Synthetic construct
AMPKSSSWFAGGMDV

SEQ ID NO: 17144 - protein, 17 aa, Artificial Sequence
  Synthetic construct
ARDWCGGFSCHIHAFDI

SEQ ID NO: 17145 - protein, 18 aa, Artificial Sequence
  Synthetic construct
ARDRRAKRYGSGFDWFDP

SEQ ID NO: 17146 - protein, 17 aa, Artificial Sequence
  Synthetic construct
ATRHYYDSSTYYYEGVY

SEQ ID NO: 17147 - protein, 13 aa, Artificial Sequence
  Synthetic construct
ARDSYSSSSYMDV

SEQ ID NO: 17148 - protein, 8 aa, Artificial Sequence
  Synthetic construct
TTYGAQGY

SEQ ID NO: 17149 - protein, 16 aa, Artificial Sequence
  Synthetic construct
ARYHYGDVSDTTRFDL

SEQ ID NO: 17150 - protein, 20 aa, Artificial Sequence
  Synthetic construct
ARDRPSRYCSGGSCQRDTDY

SEQ ID NO: 17151 - protein, 22 aa, Artificial Sequence
  Synthetic construct
VRDQGFKAPGYCSGGSCYYFDY

SEQ ID NO: 17152 - protein, 16 aa, Artificial Sequence
  Synthetic construct
AKDFFLYSYGGIQTAH

SEQ ID NO: 17153 - protein, 11 aa, Artificial Sequence
  Synthetic construct
ARWKSGTHFDY

SEQ ID NO: 17154 - protein, 19 aa, Artificial Sequence
  Synthetic construct
AIIRGYCSSTSCYQYYFDY

SEQ ID NO: 17155 - protein, 13 aa, Artificial Sequence
  Synthetic construct
ARGDSADGGHYPF

SEQ ID NO: 17156 - protein, 12 aa, Artificial Sequence
  Synthetic construct
ARHAGRNLIYDY

SEQ ID NO: 17157 - protein, 16 aa, Artificial Sequence
  Synthetic construct
ARQGPYELKSHDAFDI

SEQ ID NO: 17158 - protein, 16 aa, Artificial Sequence
  Synthetic construct
VRDLGWRSIASDGGDS

SEQ ID NO: 17159 - protein, 20 aa, Artificial Sequence
  Synthetic construct
ARDGNYCTGDSCYWGNGFDI

SEQ ID NO: 17160 - protein, 11 aa, Artificial Sequence
  Synthetic construct
ARQRGSYFFDY

SEQ ID NO: 17161 - protein, 24 aa, Artificial Sequence
  Synthetic construct
TTLPIGIEPVRGSYRSRQNYYFDY

SEQ ID NO: 17162 - protein, 5 aa, Artificial Sequence
  Synthetic construct
ARDGR

SEQ ID NO: 17163 - protein, 10 aa, Artificial Sequence
  Synthetic construct
ARRRGYSYDY

SEQ ID NO: 17164 - protein, 15 aa, Artificial Sequence
  Synthetic construct
AKDRRFVVPAAYFQH

SEQ ID NO: 17165 - protein, 15 aa, Artificial Sequence
  Synthetic construct
ARARRVGYYYYGMDV

SEQ ID NO: 17166 - protein, 7 aa, Artificial Sequence
  Synthetic construct
TRYNGGY

SEQ ID NO: 17167 - protein, 16 aa, Artificial Sequence
  Synthetic construct
ARHLRRDNADYYGLDV

SEQ ID NO: 17168 - protein, 18 aa, Artificial Sequence
  Synthetic construct
GRNSVQSTTMIRHYVVDV

SEQ ID NO: 17169 - protein, 12 aa, Artificial Sequence
  Synthetic construct
CLYENVWGAYSS

SEQ ID NO: 17170 - protein, 16 aa, Artificial Sequence
  Synthetic construct
AKGLGNRWPLSRSFDS

SEQ ID NO: 17171 - protein, 11 aa, Artificial Sequence
  Synthetic construct
VRDINNGVFDF

SEQ ID NO: 17172 - protein, 15 aa, Artificial Sequence
  Synthetic construct
ARGDGSYFGDRFFDT

SEQ ID NO: 17173 - protein, 11 aa, Artificial Sequence
  Synthetic construct
ARRRDAARLDY

SEQ ID NO: 17174 - protein, 12 aa, Artificial Sequence
  Synthetic construct
ARANIVVVPLGH

SEQ ID NO: 17175 - protein, 16 aa, Artificial Sequence
  Synthetic construct
AVDTAMIPQPSRGIDV

SEQ ID NO: 17176 - protein, 17 aa, Artificial Sequence
  Synthetic construct
ARSPHDHESSGYYAFDI

SEQ ID NO: 17177 - protein, 18 aa, Artificial Sequence
  Synthetic construct
ARGGSISRRAWYYYGMDV

SEQ ID NO: 17178 - protein, 13 aa, Artificial Sequence
  Synthetic construct
ARNRQWELQYFDS

SEQ ID NO: 17179 - protein, 11 aa, Artificial Sequence
  Synthetic construct
ARMGRWYDFDV

SEQ ID NO: 17180 - protein, 13 aa, Artificial Sequence
  Synthetic construct
ARDLSTYGDYAGP

SEQ ID NO: 17181 - protein, 14 aa, Artificial Sequence
  Synthetic construct
ARGYYYGSGSYYRY

SEQ ID NO: 17182 - protein, 8 aa, Artificial Sequence
  Synthetic construct
AEGRHSSS

SEQ ID NO: 17183 - protein, 12 aa, Artificial Sequence
  Synthetic construct
VTPVGVAGATDS

SEQ ID NO: 17184 - protein, 12 aa, Artificial Sequence
  Synthetic construct
ARLETGYDLCDP

SEQ ID NO: 17185 - protein, 14 aa, Artificial Sequence
  Synthetic construct
AKGYKVQGSSSPDY

SEQ ID NO: 17186 - protein, 15 aa, Artificial Sequence
  Synthetic construct
ARVGEKYSAKNWFDP

SEQ ID NO: 17187 - protein, 16 aa, Artificial Sequence
  Synthetic construct
VRGGPVAGTRSVIFAY

SEQ ID NO: 17188 - protein, 16 aa, Artificial Sequence
  Synthetic construct
ARHLRRDNADYYGLDV

SEQ ID NO: 17189 - protein, 11 aa, Artificial Sequence
  Synthetic construct
ATLPAAIDDDF

SEQ ID NO: 17190 - protein, 12 aa, Artificial Sequence
  Synthetic construct
VREDYGDSRFDF

SEQ ID NO: 17191 - protein, 14 aa, Artificial Sequence
  Synthetic construct
AKGLTGWFLAPFDY

SEQ ID NO: 17192 - protein, 16 aa, Artificial Sequence
  Synthetic construct
VRDLGWRTIATDGGDF

SEQ ID NO: 17193 - protein, 16 aa, Artificial Sequence
  Synthetic construct
ARTWGSIAARKYAFDI

SEQ ID NO: 17194 - protein, 19 aa, Artificial Sequence
  Synthetic construct
ARDRATMRRGYYYYYGMDV

SEQ ID NO: 17195 - protein, 15 aa, Artificial Sequence
  Synthetic construct
ARDKGTVVRASGFDP

SEQ ID NO: 17196 - protein, 17 aa, Artificial Sequence
  Synthetic construct
ARDLYIVVPPAAGAFDY

SEQ ID NO: 17197 - protein, 9 aa, Artificial Sequence
  Synthetic construct
TRGSSCPAY

SEQ ID NO: 17198 - protein, 14 aa, Artificial Sequence
  Synthetic construct
TRASWRSSWYHFQH

SEQ ID NO: 17199 - protein, 11 aa, Artificial Sequence
  Synthetic construct
ARGRAPNLFDY

SEQ ID NO: 17200 - protein, 13 aa, Artificial Sequence
  Synthetic construct
ARDKHTWIGVVGY

SEQ ID NO: 17201 - protein, 20 aa, Artificial Sequence
  Synthetic construct
AALAYCSNSGCPYYFYGLDA

SEQ ID NO: 17202 - protein, 23 aa, Artificial Sequence
  Synthetic construct
ARDLKFSYYYGSGSYYNPSPLDY

SEQ ID NO: 17203 - protein, 20 aa, Artificial Sequence
  Synthetic construct
ARDYRRVTQFGRYYYYGMDV

SEQ ID NO: 17204 - protein, 19 aa, Artificial Sequence
  Synthetic construct
ARDPHGTESLWFGESNLDY

SEQ ID NO: 17205 - protein, 18 aa, Artificial Sequence
  Synthetic construct
ARERTWRWLQRNYWYFDL

SEQ ID NO: 17206 - protein, 12 aa, Artificial Sequence
  Synthetic construct
AKAPGELWFLDL

SEQ ID NO: 17207 - protein, 17 aa, Artificial Sequence
  Synthetic construct
VKDREWQLRRGQMAFDF

SEQ ID NO: 17208 - protein, 23 aa, Artificial Sequence
  Synthetic construct
ARDSPIPKVVPAANYYYYYGMDV

SEQ ID NO: 17209 - protein, 13 aa, Artificial Sequence
  Synthetic construct
ARAGLGRDHKFDS

SEQ ID NO: 17210 - protein, 13 aa, Artificial Sequence
  Synthetic construct
TRALDNSGYYYDY

SEQ ID NO: 17211 - protein, 22 aa, Artificial Sequence
  Synthetic construct
ARVDHYYGSGSPGDYFYNGMDV

SEQ ID NO: 17212 - protein, 16 aa, Artificial Sequence
  Synthetic construct
AREGGGPYDRSHYYDI

SEQ ID NO: 17213 - protein, 16 aa, Artificial Sequence
  Synthetic construct
AREGGGPYDRSHYYDI

SEQ ID NO: 17214 - protein, 17 aa, Artificial Sequence
  Synthetic construct
ARTYTPFYYGSGKHLDY

SEQ ID NO: 17215 - protein, 19 aa, Artificial Sequence
  Synthetic construct
AKGFWACTPYTCSTGPFDS

SEQ ID NO: 17216 - protein, 11 aa, Artificial Sequence
  Synthetic construct
ARETESGDFDL

SEQ ID NO: 17217 - protein, 17 aa, Artificial Sequence
  Synthetic construct
AREALSGVWTSVPFYDT

SEQ ID NO: 17218 - protein, 16 aa, Artificial Sequence
  Synthetic construct
ARHLRRDNADYYGLDV

SEQ ID NO: 17219 - protein, 17 aa, Artificial Sequence
  Synthetic construct
TTGRTMVRGAPRRAFDI

SEQ ID NO: 17220 - protein, 20 aa, Artificial Sequence
  Synthetic construct
AGEFVIPAGKSQYYYYGMDV

SEQ ID NO: 17221 - protein, 19 aa, Artificial Sequence
  Synthetic construct
ARDPRYSKGADFYYSGMDV

SEQ ID NO: 17222 - protein, 20 aa, Artificial Sequence
  Synthetic construct
ARQGREYDILTGYDPGASDI

SEQ ID NO: 17223 - protein, 18 aa, Artificial Sequence
  Synthetic construct
ARDLRTYYYGSGRHSLGY

SEQ ID NO: 17224 - protein, 15 aa, Artificial Sequence
  Synthetic construct
ARSGGPYYGSGSFDY

SEQ ID NO: 17225 - protein, 17 aa, Artificial Sequence
  Synthetic construct
ARDTGEDVLLWFGAVDY

SEQ ID NO: 17226 - protein, 18 aa, Artificial Sequence
  Synthetic construct
TRDSREVWPGPDPENFDY

SEQ ID NO: 17227 - protein, 22 aa, Artificial Sequence
  Synthetic construct
ARGRKEGYCSSTSCHLFRWFDP

SEQ ID NO: 17228 - protein, 15 aa, Artificial Sequence
  Synthetic construct
GRGCTSTSCFLDFEY

SEQ ID NO: 17229 - protein, 16 aa, Artificial Sequence
  Synthetic construct
ARHLRRDNADYYGLDV

SEQ ID NO: 17230 - protein, 9 aa, Artificial Sequence
  Synthetic construct
ARGKRYFDY

SEQ ID NO: 17231 - protein, 13 aa, Artificial Sequence
  Synthetic construct
ARNRGSALAPFDY

SEQ ID NO: 17232 - protein, 16 aa, Artificial Sequence
  Synthetic construct
ARRRERFHHYYYGMDV

SEQ ID NO: 17233 - protein, 15 aa, Artificial Sequence
  Synthetic construct
ARDLSYGYKTDVWAY

SEQ ID NO: 17234 - protein, 16 aa, Artificial Sequence
  Synthetic construct
ARVPQTGTTAIEAFDI

SEQ ID NO: 17235 - protein, 16 aa, Artificial Sequence
  Synthetic construct
ARTHGNWNYVHWYFDL

SEQ ID NO: 17236 - protein, 14 aa, Artificial Sequence
  Synthetic construct
AKGANWGLYSAFDI

SEQ ID NO: 17237 - protein, 15 aa, Artificial Sequence
  Synthetic construct
ATERNSGSSSSYMDV

SEQ ID NO: 17238 - protein, 19 aa, Artificial Sequence
  Synthetic construct
AHSGPTNFWSGSRTNWFDP

SEQ ID NO: 17239 - protein, 14 aa, Artificial Sequence
  Synthetic construct
ARSSKSAVAGIIDS

SEQ ID NO: 17240 - protein, 20 aa, Artificial Sequence
  Synthetic construct
AREKFTMVRGAHFIFRAFDI

SEQ ID NO: 17241 - protein, 12 aa, Artificial Sequence
  Synthetic construct
ASVPRWLHVFDY

SEQ ID NO: 17242 - protein, 17 aa, Artificial Sequence
  Synthetic construct
AREATSSTSSFSYGMDV

SEQ ID NO: 17243 - protein, 18 aa, Artificial Sequence
  Synthetic construct
AKDKYSSTRRGAVNGMDV

SEQ ID NO: 17244 - protein, 20 aa, Artificial Sequence
  Synthetic construct
ARVGTYYYGSGSYYTNWFDP

SEQ ID NO: 17245 - protein, 17 aa, Artificial Sequence
  Synthetic construct
AHRRAEGGNWDGGCLDV

SEQ ID NO: 17246 - protein, 14 aa, Artificial Sequence
  Synthetic construct
AKVGATMVRGVYDY

SEQ ID NO: 17247 - protein, 20 aa, Artificial Sequence
  Synthetic construct
AKWELGDILTGYYPAEAFDI

SEQ ID NO: 17248 - protein, 19 aa, Artificial Sequence
  Synthetic construct
ARWGAHSSSWTPLGYAMDV

SEQ ID NO: 17249 - protein, 14 aa, Artificial Sequence
  Synthetic construct
AKGFGFGELLPFDY

SEQ ID NO: 17250 - protein, 23 aa, Artificial Sequence
  Synthetic construct
AKDIRAFRAFNYETAEYHYGMDV

SEQ ID NO: 17251 - protein, 15 aa, Artificial Sequence
  Synthetic construct
ASLPTYGSGRWGIDS

SEQ ID NO: 17252 - protein, 12 aa, Artificial Sequence
  Synthetic construct
ASSLSRRKGIDY

SEQ ID NO: 17253 - protein, 8 aa, Artificial Sequence
  Synthetic construct
ARDPPLRY

SEQ ID NO: 17254 - protein, 20 aa, Artificial Sequence
  Synthetic construct
ARLSLDCRRSSSCRGAWFDP

SEQ ID NO: 17255 - protein, 19 aa, Artificial Sequence
  Synthetic construct
ASGLHYYGSGSYTGNYFDH

SEQ ID NO: 17256 - protein, 12 aa, Artificial Sequence
  Synthetic construct
ARVGDYGDYFDY

SEQ ID NO: 17257 - protein, 13 aa, Artificial Sequence
  Synthetic construct
ARSPRGRTGTWNY

SEQ ID NO: 17258 - protein, 21 aa, Artificial Sequence
  Synthetic construct
ARGTGRSIPFVRGVKQTPFDY

SEQ ID NO: 17259 - protein, 13 aa, Artificial Sequence
  Synthetic construct
ARDTAMARDAFDI

SEQ ID NO: 17260 - protein, 13 aa, Artificial Sequence
  Synthetic construct
ARGDSADGGHYPF

SEQ ID NO: 17261 - protein, 11 aa, Artificial Sequence
  Synthetic construct
ARARLRYFETT

SEQ ID NO: 17262 - protein, 19 aa, Artificial Sequence
  Synthetic construct
ASAPKGGYYPNYYYYGMDV

SEQ ID NO: 17263 - protein, 15 aa, Artificial Sequence
  Synthetic construct
ARHDVVGAEVDAFDI

SEQ ID NO: 17264 - protein, 13 aa, Artificial Sequence
  Synthetic construct
ARGRGYGPVYFDY

SEQ ID NO: 17265 - protein, 20 aa, Artificial Sequence
  Synthetic construct
TRCAVPDRAVALPLYYGLDL

SEQ ID NO: 17266 - protein, 17 aa, Artificial Sequence
  Synthetic construct
ARRRGYQVPLYTYFFDY

SEQ ID NO: 17267 - protein, 19 aa, Artificial Sequence
  Synthetic construct
ARVFRGIVVVPAAMPVGDY

SEQ ID NO: 17268 - protein, 12 aa, Artificial Sequence
  Synthetic construct
VRGGRQWLQIDS

SEQ ID NO: 17269 - protein, 12 aa, Artificial Sequence
  Synthetic construct
ARELLTERALDL

SEQ ID NO: 17270 - protein, 12 aa, Artificial Sequence
  Synthetic construct
VKSSGSGSYFDY

SEQ ID NO: 17271 - protein, 7 aa, Artificial Sequence
  Synthetic construct
LVNAGDH

SEQ ID NO: 17272 - protein, 12 aa, Artificial Sequence
  Synthetic construct
VRHADRSRGMDV

SEQ ID NO: 17273 - protein, 17 aa, Artificial Sequence
  Synthetic construct
AKEGIVAVPASMFYFDY

SEQ ID NO: 17274 - protein, 11 aa, Artificial Sequence
  Synthetic construct
ARYVGQNWFDP

SEQ ID NO: 17275 - protein, 16 aa, Artificial Sequence
  Synthetic construct
ARISGSDWGRRDYFDY

SEQ ID NO: 17276 - protein, 17 aa, Artificial Sequence
  Synthetic construct
ARARVLYGSGSYSRFDP

SEQ ID NO: 17277 - protein, 14 aa, Artificial Sequence
  Synthetic construct
ARDLCSSTSCYYDY

SEQ ID NO: 17278 - protein, 12 aa, Artificial Sequence
  Synthetic construct
ARDYYNYGKFDY

SEQ ID NO: 17279 - protein, 15 aa, Artificial Sequence
  Synthetic construct
ARDHFRDTTYYGLDD

SEQ ID NO: 17280 - protein, 17 aa, Artificial Sequence
  Synthetic construct
AHRRAEGGNWDGGCLDV

SEQ ID NO: 17281 - protein, 17 aa, Artificial Sequence
  Synthetic construct
AHRRAEGGNWDGGCLDV

SEQ ID NO: 17282 - protein, 14 aa, Artificial Sequence
  Synthetic construct
AKGLTGWFLAPLDY

SEQ ID NO: 17283 - protein, 12 aa, Artificial Sequence
  Synthetic construct
ARDDSNKKAFDI

SEQ ID NO: 17284 - protein, 11 aa, Artificial Sequence
  Synthetic construct
ATRGGPLPFNY

SEQ ID NO: 17285 - protein, 14 aa, Artificial Sequence
  Synthetic construct
ATVYRPAGATTGFG

SEQ ID NO: 17286 - protein, 24 aa, Artificial Sequence
  Synthetic construct
ARGVTVIRGMIVLSPRRHSPYFDH

SEQ ID NO: 17287 - protein, 12 aa, Artificial Sequence
  Synthetic construct
ARSIGAVSWFDP

SEQ ID NO: 17288 - protein, 16 aa, Artificial Sequence
  Synthetic construct
VKDLGWRSIAADGGDY

SEQ ID NO: 17289 - protein, 16 aa, Artificial Sequence
  Synthetic construct
ARLQAGYSGYSYYFDY

SEQ ID NO: 17290 - protein, 20 aa, Artificial Sequence
  Synthetic construct
AREHRGRDHYYGSGRGAFDI

SEQ ID NO: 17291 - protein, 11 aa, Artificial Sequence
  Synthetic construct
ARSRGYSGYDY

SEQ ID NO: 17292 - protein, 15 aa, Artificial Sequence
  Synthetic construct
ARAGVQWLVRYGMDV

SEQ ID NO: 17293 - protein, 24 aa, Artificial Sequence
  Synthetic construct
ARIRQIVVVPAETRRYYYYYGMDV

SEQ ID NO: 17294 - protein, 19 aa, Artificial Sequence
  Synthetic construct
ARGGASTDGRFRTPLAFDH

SEQ ID NO: 17295 - protein, 12 aa, Artificial Sequence
  Synthetic construct
ARGSRYQLLPRA

SEQ ID NO: 17296 - protein, 14 aa, Artificial Sequence
  Synthetic construct
ATSSPFYDVTLIGS

SEQ ID NO: 17297 - protein, 14 aa, Artificial Sequence
  Synthetic construct
ARDDPAWGAVTLDY

SEQ ID NO: 17298 - protein, 14 aa, Artificial Sequence
  Synthetic construct
ARAPPYYYDSSGLQ

SEQ ID NO: 17299 - protein, 16 aa, Artificial Sequence
  Synthetic construct
ARSPVKNYYDSSGYYL

SEQ ID NO: 17300 - protein, 11 aa, Artificial Sequence
  Synthetic construct
ARRTTVTHFDY

SEQ ID NO: 17301 - protein, 17 aa, Artificial Sequence
  Synthetic construct
ARQRGYCSGGSCYRIDP

SEQ ID NO: 17302 - protein, 21 aa, Artificial Sequence
  Synthetic construct
ARFSCGSTTSCFSGQRDTVDV

SEQ ID NO: 17303 - protein, 17 aa, Artificial Sequence
  Synthetic construct
ARAPHNWNDVGGVRIDP

SEQ ID NO: 17304 - protein, 12 aa, Artificial Sequence
  Synthetic construct
AREDSVIIIFDY

SEQ ID NO: 17305 - protein, 12 aa, Artificial Sequence
  Synthetic construct
ARDKKIAVVLDV

SEQ ID NO: 17306 - protein, 12 aa, Artificial Sequence
  Synthetic construct
ARAEFNYAQFDL

SEQ ID NO: 17307 - protein, 18 aa, Artificial Sequence
  Synthetic construct
AKDRSMVRGVIVNNWFDP

SEQ ID NO: 17308 - protein, 18 aa, Artificial Sequence
  Synthetic construct
TTVGDSSGWYLRDYGMDV

SEQ ID NO: 17309 - protein, 15 aa, Artificial Sequence
  Synthetic construct
ARDVGNPYYYYGMDV

SEQ ID NO: 17310 - protein, 16 aa, Artificial Sequence
  Synthetic construct
AKDLVRGVNPLYYFDY

SEQ ID NO: 17311 - protein, 21 aa, Artificial Sequence
  Synthetic construct
ARAGPDNCSSTSCSRRRYFDY

SEQ ID NO: 17312 - protein, 19 aa, Artificial Sequence
  Synthetic construct
ARDRQSCSGGGCYYTWFDP

SEQ ID NO: 17313 - protein, 10 aa, Artificial Sequence
  Synthetic construct
ARGISWYLQY

SEQ ID NO: 17314 - protein, 20 aa, Artificial Sequence
  Synthetic construct
ARARYSSGWYGKNYYYGMDV

SEQ ID NO: 17315 - protein, 19 aa, Artificial Sequence
  Synthetic construct
AKGSRVVVAATWYYYGMDV

SEQ ID NO: 17316 - protein, 21 aa, Artificial Sequence
  Synthetic construct
AISTKYYDFWSGYYGVGWLDP

SEQ ID NO: 17317 - protein, 12 aa, Artificial Sequence
  Synthetic construct
ARFDSSDRVFDY

SEQ ID NO: 17318 - protein, 14 aa, Artificial Sequence
  Synthetic construct
AREGRYRNIYYFDY

SEQ ID NO: 17319 - protein, 21 aa, Artificial Sequence
  Synthetic construct
AKDRGYCSGGSCRRGYYGMDV

SEQ ID NO: 17320 - protein, 21 aa, Artificial Sequence
  Synthetic construct
ARGLDCSRSNCYSLGDNWLDP

SEQ ID NO: 17321 - protein, 16 aa, Artificial Sequence
  Synthetic construct
ARDSSVTYFGEGGIDI

SEQ ID NO: 17322 - protein, 10 aa, Artificial Sequence
  Synthetic construct
ATPVVERRDY

SEQ ID NO: 17323 - protein, 25 aa, Artificial Sequence
  Synthetic construct
ARGRRGRKYSSSWYSNYYYYYGMDV

SEQ ID NO: 17324 - protein, 14 aa, Artificial Sequence
  Synthetic construct
ARGRNRALGPRFDP

SEQ ID NO: 17325 - protein, 5 aa, Artificial Sequence
  Synthetic construct
ARSTS

SEQ ID NO: 17326 - protein, 20 aa, Artificial Sequence
  Synthetic construct
ARDPSWGSGWTNSLGSSFDV

SEQ ID NO: 17327 - protein, 22 aa, Artificial Sequence
  Synthetic construct
ARSRYGSGSYFSYYYYYYGMDV

SEQ ID NO: 17328 - protein, 23 aa, Artificial Sequence
  Synthetic construct
AREPNPRKPYCSGGSCYSGWFDP

SEQ ID NO: 17329 - protein, 18 aa, Artificial Sequence
  Synthetic construct
AHVGWHGLLGVPNYYFDH

SEQ ID NO: 17330 - protein, 16 aa, Artificial Sequence
  Synthetic construct
TRGGYSDYDWVPGIDY

SEQ ID NO: 17331 - protein, 20 aa, Artificial Sequence
  Synthetic construct
TRALKDIILKVVALDNWLDP

SEQ ID NO: 17332 - protein, 17 aa, Artificial Sequence
  Synthetic construct
AHRRAEGGNWDGGCLDV

SEQ ID NO: 17333 - protein, 20 aa, Artificial Sequence
  Synthetic construct
ARGDYDYVWGSYRYPNYFDY

SEQ ID NO: 17334 - protein, 11 aa, Artificial Sequence
  Synthetic construct
AKASSGSYYRF

SEQ ID NO: 17335 - protein, 15 aa, Artificial Sequence
  Synthetic construct
ARALGGNSNSPALGY

SEQ ID NO: 17336 - protein, 14 aa, Artificial Sequence
  Synthetic construct
ARVPGGLVPAAFDS

SEQ ID NO: 17337 - protein, 19 aa, Artificial Sequence
  Synthetic construct
ARDRYYYGSGSYLKNWFDP

SEQ ID NO: 17338 - protein, 12 aa, Artificial Sequence
  Synthetic construct
VRGGRQWLQIDS

SEQ ID NO: 17339 - protein, 12 aa, Artificial Sequence
  Synthetic construct
AREVDSWSTFDY

SEQ ID NO: 17340 - protein, 19 aa, Artificial Sequence
  Synthetic construct
ARLGRITMVRGVILNWFDP

SEQ ID NO: 17341 - protein, 15 aa, Artificial Sequence
  Synthetic construct
ARVGMLGERQDAFDV

SEQ ID NO: 17342 - protein, 15 aa, Artificial Sequence
  Synthetic construct
AREVPHVSGSLFVDY

SEQ ID NO: 17343 - protein, 13 aa, Artificial Sequence
  Synthetic construct
ARGLVGSTEAFDV

SEQ ID NO: 17344 - protein, 15 aa, Artificial Sequence
  Synthetic construct
ARGGMGSGYYDPVDY

SEQ ID NO: 17345 - protein, 16 aa, Artificial Sequence
  Synthetic construct
ARDPGMFIHTAYYFDF

SEQ ID NO: 17346 - protein, 17 aa, Artificial Sequence
  Synthetic construct
ARVGDCFSTSCYSTFDS

SEQ ID NO: 17347 - protein, 21 aa, Artificial Sequence
  Synthetic construct
ARVLRRSSSSRGLYYYYGMDV

SEQ ID NO: 17348 - protein, 17 aa, Artificial Sequence
  Synthetic construct
ASHYDSSGRLRRGLLDY

SEQ ID NO: 17349 - protein, 16 aa, Artificial Sequence
  Synthetic construct
ASSVAGYDYYYYGMDV

SEQ ID NO: 17350 - protein, 16 aa, Artificial Sequence
  Synthetic construct
ARHLRRDNADYYGLDV

SEQ ID NO: 17351 - protein, 16 aa, Artificial Sequence
  Synthetic construct
GRDRSVWGNYRIGIDQ

SEQ ID NO: 17352 - protein, 13 aa, Artificial Sequence
  Synthetic construct
ARAAQDYYYGMDV

SEQ ID NO: 17353 - protein, 20 aa, Artificial Sequence
  Synthetic construct
ARVLFGSGTPKIYFSYGMDV

SEQ ID NO: 17354 - protein, 15 aa, Artificial Sequence
  Synthetic construct
ARGGDYDSSAYAFDY

SEQ ID NO: 17355 - protein, 8 aa, Artificial Sequence
  Synthetic construct
ARSAKTDY

SEQ ID NO: 17356 - protein, 11 aa, Artificial Sequence
  Synthetic construct
ARGSYYNKNDY

SEQ ID NO: 17357 - protein, 12 aa, Artificial Sequence
  Synthetic construct
ARQGDILYGLDV

SEQ ID NO: 17358 - protein, 15 aa, Artificial Sequence
  Synthetic construct
AKDRSSWTIPDAFDI

SEQ ID NO: 17359 - protein, 14 aa, Artificial Sequence
  Synthetic construct
ARGPYGDPDDHFDY

SEQ ID NO: 17360 - protein, 10 aa, Artificial Sequence
  Synthetic construct
ARDRDWAFDY

SEQ ID NO: 17361 - protein, 13 aa, Artificial Sequence
  Synthetic construct
ARDRKGRWLPIDY

SEQ ID NO: 17362 - protein, 19 aa, Artificial Sequence
  Synthetic construct
ARDGIVPAATLHYYYGMDV

SEQ ID NO: 17363 - protein, 16 aa, Artificial Sequence
  Synthetic construct
VKGDNSAWYETSSFDH

SEQ ID NO: 17364 - protein, 17 aa, Artificial Sequence
  Synthetic construct
ARGPPYYYDSSGYYLGY

SEQ ID NO: 17365 - protein, 12 aa, Artificial Sequence
  Synthetic construct
ARSVEIRYYFDY

SEQ ID NO: 17366 - protein, 17 aa, Artificial Sequence
  Synthetic construct
ARGRRGLDGYNFGQIDY

SEQ ID NO: 17367 - protein, 18 aa, Artificial Sequence
  Synthetic construct
ARDLINRGPRARSGAFDI

SEQ ID NO: 17368 - protein, 21 aa, Artificial Sequence
  Synthetic construct
ATRTPLGPYYGARRDLRALDY

SEQ ID NO: 17369 - protein, 10 aa, Artificial Sequence
  Synthetic construct
TTEEAGFLGH

SEQ ID NO: 17370 - protein, 13 aa, Artificial Sequence
  Synthetic construct
AKAAPYGSGPFDY

SEQ ID NO: 17371 - protein, 12 aa, Artificial Sequence
  Synthetic construct
VRGGRQWLQIDS

SEQ ID NO: 17372 - protein, 15 aa, Artificial Sequence
  Synthetic construct
ARDGRAYSYGYGMDV

SEQ ID NO: 17373 - protein, 13 aa, Artificial Sequence
  Synthetic construct
ARGLSSGWYWFDP

SEQ ID NO: 17374 - protein, 20 aa, Artificial Sequence
  Synthetic construct
AREPLLGFGELLVAGPWFDP

SEQ ID NO: 17375 - protein, 16 aa, Artificial Sequence
  Synthetic construct
ARELIIASYSSGWFDY

SEQ ID NO: 17376 - protein, 14 aa, Artificial Sequence
  Synthetic construct
AKEDAHVYDDYVYS

SEQ ID NO: 17377 - protein, 13 aa, Artificial Sequence
  Synthetic construct
ARARSYGGRAIDY

SEQ ID NO: 17378 - protein, 17 aa, Artificial Sequence
  Synthetic construct
ARVSRIGRYYGSGWFDP

SEQ ID NO: 17379 - protein, 16 aa, Artificial Sequence
  Synthetic construct
AREYGSEAYLDTFVDN

SEQ ID NO: 17380 - protein, 27 aa, Artificial Sequence
  Synthetic construct
ARGHRYCSSTSCYLSPRRYYYYYGMDV

SEQ ID NO: 17381 - protein, 11 aa, Artificial Sequence
  Synthetic construct
ARDAVLYSLDY

SEQ ID NO: 17382 - protein, 19 aa, Artificial Sequence
  Synthetic construct
ARVYCSSTSCYMLDDAFDI

SEQ ID NO: 17383 - protein, 18 aa, Artificial Sequence
  Synthetic construct
ASPVTDAGGGGFSAKTDY

SEQ ID NO: 17384 - protein, 12 aa, Artificial Sequence
  Synthetic construct
ARDLRTNWYFDL

SEQ ID NO: 17385 - protein, 10 aa, Artificial Sequence
  Synthetic construct
ARDKWWSFDY

SEQ ID NO: 17386 - protein, 13 aa, Artificial Sequence
  Synthetic construct
ARDATNSWSPFDY

SEQ ID NO: 17387 - protein, 15 aa, Artificial Sequence
  Synthetic construct
ARDWFTDSLSGYFYA

SEQ ID NO: 17388 - protein, 17 aa, Artificial Sequence
  Synthetic construct
AGEKHSGTYHNYHDLDV

SEQ ID NO: 17389 - protein, 11 aa, Artificial Sequence
  Synthetic construct
ASLTYTPRVQH

SEQ ID NO: 17390 - protein, 17 aa, Artificial Sequence
  Synthetic construct
ARRVTYSNIIKPEYFQH

SEQ ID NO: 17391 - protein, 15 aa, Artificial Sequence
  Synthetic construct
TREAGSSGRAGYFDD

SEQ ID NO: 17392 - protein, 14 aa, Artificial Sequence
  Synthetic construct
ARHLDSSGYHLLDY

SEQ ID NO: 17393 - protein, 14 aa, Artificial Sequence
  Synthetic construct
AKVGGSGYSYGYYY

SEQ ID NO: 17394 - protein, 17 aa, Artificial Sequence
  Synthetic construct
ARDREDVYNAYPGSLDL

SEQ ID NO: 17395 - protein, 10 aa, Artificial Sequence
  Synthetic construct
ARASMSGMDV

SEQ ID NO: 17396 - protein, 11 aa, Artificial Sequence
  Synthetic construct
ARMGRWYEFDV

SEQ ID NO: 17397 - protein, 17 aa, Artificial Sequence
  Synthetic construct
ARSPHDHESSGYYAFDI

SEQ ID NO: 17398 - protein, 15 aa, Artificial Sequence
  Synthetic construct
ARAPKRGYSYGCLDY

SEQ ID NO: 17399 - protein, 23 aa, Artificial Sequence
  Synthetic construct
ARDHREYYYGSGSSYYYYYGMDV

SEQ ID NO: 17400 - protein, 19 aa, Artificial Sequence
  Synthetic construct
ARLGYSSSWYDYYYYGMDV

SEQ ID NO: 17401 - protein, 12 aa, Artificial Sequence
  Synthetic construct
ARGAGSRRPFGY

SEQ ID NO: 17402 - protein, 16 aa, Artificial Sequence
  Synthetic construct
ARRGSGSYYNRHYFDY

SEQ ID NO: 17403 - protein, 17 aa, Artificial Sequence
  Synthetic construct
ARDRGGGSGRFRSSMSY

SEQ ID NO: 17404 - protein, 12 aa, Artificial Sequence
  Synthetic construct
ARDPGSSWYGDF

SEQ ID NO: 17405 - protein, 9 aa, Artificial Sequence
  Synthetic construct
ARGLGVGDF

SEQ ID NO: 17406 - protein, 14 aa, Artificial Sequence
  Synthetic construct
ARLQVGAMGNGLDA

SEQ ID NO: 17407 - protein, 18 aa, Artificial Sequence
  Synthetic construct
AKDANSFIALPAGNGMDA

SEQ ID NO: 17408 - protein, 25 aa, Artificial Sequence
  Synthetic construct
ARARGLRGGVIAAAGFGQDQRRIDY

SEQ ID NO: 17409 - protein, 18 aa, Artificial Sequence
  Synthetic construct
ACKYSSSWYEMTVYYFDY

SEQ ID NO: 17410 - protein, 16 aa, Artificial Sequence
  Synthetic construct
VKDLGWRSIAEDGGDC

SEQ ID NO: 17411 - protein, 14 aa, Artificial Sequence
  Synthetic construct
ARDRSATYYGPFDY

SEQ ID NO: 17412 - protein, 15 aa, Artificial Sequence
  Synthetic construct
ARGGDYDSSGYAFDY

SEQ ID NO: 17413 - protein, 11 aa, Artificial Sequence
  Synthetic construct
ARTGPSGAFDI

SEQ ID NO: 17414 - protein, 17 aa, Artificial Sequence
  Synthetic construct
AKDSSGGVEYSSSEFDY

SEQ ID NO: 17415 - protein, 17 aa, Artificial Sequence
  Synthetic construct
ARGGEYCNNINCYEIDF

SEQ ID NO: 17416 - protein, 14 aa, Artificial Sequence
  Synthetic construct
ARRKSGRFPYSFDQ

SEQ ID NO: 17417 - protein, 26 aa, Artificial Sequence
  Synthetic construct
ARDADLGRGYSYGYWLEFDYYNGMDV

SEQ ID NO: 17418 - protein, 16 aa, Artificial Sequence
  Synthetic construct
ARHLRRDNADYYGLDV

SEQ ID NO: 17419 - protein, 10 aa, Artificial Sequence
  Synthetic construct
ASGIGWLIDY

SEQ ID NO: 17420 - protein, 10 aa, Artificial Sequence
  Synthetic construct
AREGFGELFG

SEQ ID NO: 17421 - protein, 19 aa, Artificial Sequence
  Synthetic construct
ARTPRWLHRQRWYYYGMDV

SEQ ID NO: 17422 - protein, 13 aa, Artificial Sequence
  Synthetic construct
ARSGLRYSGSYMA

SEQ ID NO: 17423 - protein, 13 aa, Artificial Sequence
  Synthetic construct
ARGGGGRQRYIDY

SEQ ID NO: 17424 - protein, 20 aa, Artificial Sequence
  Synthetic construct
AGEFVIPAGKSQYYYYGMDV

SEQ ID NO: 17425 - protein, 16 aa, Artificial Sequence
  Synthetic construct
AKDFWGLGHFRFGMDV

SEQ ID NO: 17426 - protein, 17 aa, Artificial Sequence
  Synthetic construct
AREADIIVATTNAAFDI

SEQ ID NO: 17427 - protein, 15 aa, Artificial Sequence
  Synthetic construct
ARAFVVRPAAIYFDY

SEQ ID NO: 17428 - protein, 21 aa, Artificial Sequence
  Synthetic construct
AREGLGYCSGGSCYHRGPTGY

SEQ ID NO: 17429 - protein, 9 aa, Artificial Sequence
  Synthetic construct
VMKFTGEFP

SEQ ID NO: 17430 - protein, 11 aa, Artificial Sequence
  Synthetic construct
VVGQKVGPDEE

SEQ ID NO: 17431 - protein, 16 aa, Artificial Sequence
  Synthetic construct
ARTTPRGWEQWPVLEY

SEQ ID NO: 17432 - protein, 12 aa, Artificial Sequence
  Synthetic construct
TTDGILGAPFDF

SEQ ID NO: 17433 - protein, 10 aa, Artificial Sequence
  Synthetic construct
IHSLGNYDDF

SEQ ID NO: 17434 - protein, 16 aa, Artificial Sequence
  Synthetic construct
ARLEYQRYLHYYGMDV

SEQ ID NO: 17435 - protein, 10 aa, Artificial Sequence
  Synthetic construct
VTPVVERRDY

SEQ ID NO: 17436 - protein, 13 aa, Artificial Sequence
  Synthetic construct
ARDHYGSGSYYDY

SEQ ID NO: 17437 - protein, 25 aa, Artificial Sequence
  Synthetic construct
ARHLGYCSGGSCYRRGRYYYYGMDV

SEQ ID NO: 17438 - protein, 20 aa, Artificial Sequence
  Synthetic construct
VKDFHAGGASYDFWSGLFDR

SEQ ID NO: 17439 - protein, 15 aa, Artificial Sequence
  Synthetic construct
ARVYFRYTDADAFDI

SEQ ID NO: 17440 - protein, 17 aa, Artificial Sequence
  Synthetic construct
ARAVDSYGSGSYGLFDP

SEQ ID NO: 17441 - protein, 13 aa, Artificial Sequence
  Synthetic construct
ARDGGDYVFYFDS

SEQ ID NO: 17442 - protein, 20 aa, Artificial Sequence
  Synthetic construct
ARGAQYNWNDADYYYYGMDV

SEQ ID NO: 17443 - protein, 18 aa, Artificial Sequence
  Synthetic construct
ARGYCSSTSCYRTNWFDP

SEQ ID NO: 17444 - protein, 9 aa, Artificial Sequence
  Synthetic construct
GRGGHYFDP

SEQ ID NO: 17445 - protein, 12 aa, Artificial Sequence
  Synthetic construct
ARSLGDSSGLDY

SEQ ID NO: 17446 - protein, 16 aa, Artificial Sequence
  Synthetic construct
ARATSGYTYGVVGFAP

SEQ ID NO: 17447 - protein, 15 aa, Artificial Sequence
  Synthetic construct
ARGAVRGVFNNWFDP

SEQ ID NO: 17448 - protein, 16 aa, Artificial Sequence
  Synthetic construct
ARHLRRDNADYYGLDV

SEQ ID NO: 17449 - protein, 19 aa, Artificial Sequence
  Synthetic construct
AKKGIIINSEVITHDAFDA

SEQ ID NO: 17450 - protein, 22 aa, Artificial Sequence
  Synthetic construct
AREKVSLYYDSSGYLGDNWFDP

SEQ ID NO: 17451 - protein, 19 aa, Artificial Sequence
  Synthetic construct
ARDLQQLVRGYFDSYGVDV

SEQ ID NO: 17452 - protein, 13 aa, Artificial Sequence
  Synthetic construct
ARDYRGYGQQLGY

SEQ ID NO: 17453 - protein, 19 aa, Artificial Sequence
  Synthetic construct
AKGFWACTPYTCSTGPFDS

SEQ ID NO: 17454 - protein, 17 aa, Artificial Sequence
  Synthetic construct
ARAPKRDPNYYYYGMDV

SEQ ID NO: 17455 - protein, 13 aa, Artificial Sequence
  Synthetic construct
ATPIAAGGSRNDH

SEQ ID NO: 17456 - protein, 21 aa, Artificial Sequence
  Synthetic construct
ARVLTGDCTTVNCPPGYWFDP

SEQ ID NO: 17457 - protein, 12 aa, Artificial Sequence
  Synthetic construct
ARQRYSNREVRP

SEQ ID NO: 17458 - protein, 19 aa, Artificial Sequence
  Synthetic construct
VKDIVTAAIGGAAGGGMDV

SEQ ID NO: 17459 - protein, 8 aa, Artificial Sequence
  Synthetic construct
SGGPRLAY

SEQ ID NO: 17460 - protein, 24 aa, Artificial Sequence
  Synthetic construct
ARAGYSGYYDRQGGYYYYYYGMDV

SEQ ID NO: 17461 - protein, 15 aa, Artificial Sequence
  Synthetic construct
ARDYGEWEQYGTFPI

SEQ ID NO: 17462 - protein, 11 aa, Artificial Sequence
  Synthetic construct
VRIVNGDKSFH

SEQ ID NO: 17463 - protein, 18 aa, Artificial Sequence
  Synthetic construct
ARDVEMATIAGSGRWFDP

SEQ ID NO: 17464 - protein, 19 aa, Artificial Sequence
  Synthetic construct
ARERGRRDGYKYYYYGMDV

SEQ ID NO: 17465 - protein, 24 aa, Artificial Sequence
  Synthetic construct
AREAGYCSSTSCRWYVPRPQYTDY

SEQ ID NO: 17466 - protein, 14 aa, Artificial Sequence
  Synthetic construct
ARAGKQLVQYYFDY

SEQ ID NO: 17467 - protein, 15 aa, Artificial Sequence
  Synthetic construct
ARVRAAVAQRRYFDY

SEQ ID NO: 17468 - protein, 14 aa, Artificial Sequence
  Synthetic construct
AREAFGWEQKHLDH

SEQ ID NO: 17469 - protein, 20 aa, Artificial Sequence
  Synthetic construct
VKDFHAGGASYDFWSGLFDR

SEQ ID NO: 17470 - protein, 17 aa, Artificial Sequence
  Synthetic construct
AHRRAEGGNWDGGCLDV

SEQ ID NO: 17471 - protein, 16 aa, Artificial Sequence
  Synthetic construct
ARPTLPRYFDWSGHDY

SEQ ID NO: 17472 - protein, 22 aa, Artificial Sequence
  Synthetic construct
ARGRMIILGEVIVPSRNYAMDV

SEQ ID NO: 17473 - protein, 16 aa, Artificial Sequence
  Synthetic construct
ARHLRRDNADYYGLDV

SEQ ID NO: 17474 - protein, 22 aa, Artificial Sequence
  Synthetic construct
VRDQGFKAPGYCSGGSCYYFDY

SEQ ID NO: 17475 - protein, 24 aa, Artificial Sequence
  Synthetic construct
ARDRYYDFWSGIRTTGKRNYGMDV

SEQ ID NO: 17476 - protein, 12 aa, Artificial Sequence
  Synthetic construct
AREGGYSGPMGG

SEQ ID NO: 17477 - protein, 19 aa, Artificial Sequence
  Synthetic construct
AKDILAYCTSTTCYGGFDY

SEQ ID NO: 17478 - protein, 17 aa, Artificial Sequence
  Synthetic construct
AKDHRVSVAASPEYFQH

SEQ ID NO: 17479 - protein, 15 aa, Artificial Sequence
  Synthetic construct
THRSSTVGVPGAIDY

SEQ ID NO: 17480 - protein, 20 aa, Artificial Sequence
  Synthetic construct
AKGGNFWSRGALYYYYGMDV

SEQ ID NO: 17481 - protein, 20 aa, Artificial Sequence
  Synthetic construct
ATLGGPFWNGYMTQYHGVDV

SEQ ID NO: 17482 - protein, 13 aa, Artificial Sequence
  Synthetic construct
AREISGSWYSFDY

SEQ ID NO: 17483 - protein, 15 aa, Artificial Sequence
  Synthetic construct
ARVVRWGSSSSVGGY

SEQ ID NO: 17484 - protein, 13 aa, Artificial Sequence
  Synthetic construct
ARDERWLPYYFDY

SEQ ID NO: 17485 - protein, 14 aa, Artificial Sequence
  Synthetic construct
AKGGNLIISSYFEH

SEQ ID NO: 17486 - protein, 12 aa, Artificial Sequence
  Synthetic construct
ASIMYGGNIVES

SEQ ID NO: 17487 - protein, 10 aa, Artificial Sequence
  Synthetic construct
ARDLRGASDS

SEQ ID NO: 17488 - protein, 13 aa, Artificial Sequence
  Synthetic construct
ARETYGSGREFDI

SEQ ID NO: 17489 - protein, 21 aa, Artificial Sequence
  Synthetic construct
AKESPLVIGADGSASLVNMNV

SEQ ID NO: 17490 - protein, 17 aa, Artificial Sequence
  Synthetic construct
AHRRAEGGNWDGGCLDV

SEQ ID NO: 17491 - protein, 19 aa, Artificial Sequence
  Synthetic construct
ARDRRYPIAGQKKGYGMDV

SEQ ID NO: 17492 - protein, 14 aa, Artificial Sequence
  Synthetic construct
AGGITGTRHYGVDV

SEQ ID NO: 17493 - protein, 20 aa, Artificial Sequence
  Synthetic construct
AHRMAPPTPYNPRTNNWFDP

SEQ ID NO: 17494 - protein, 18 aa, Artificial Sequence
  Synthetic construct
AKGGPTGNLNIGSDAFDF

SEQ ID NO: 17495 - protein, 13 aa, Artificial Sequence
  Synthetic construct
ARAPGGGDWYINL

SEQ ID NO: 17496 - protein, 21 aa, Artificial Sequence
  Synthetic construct
ARDRRGYSYASPGYYYYGMDV

SEQ ID NO: 17497 - protein, 14 aa, Artificial Sequence
  Synthetic construct
AKDRGRYYYYGMDV

SEQ ID NO: 17498 - protein, 15 aa, Artificial Sequence
  Synthetic construct
AKDLRAADPYWYFDL

SEQ ID NO: 17499 - protein, 13 aa, Artificial Sequence
  Synthetic construct
ARGDSADGGHYPF

SEQ ID NO: 17500 - protein, 19 aa, Artificial Sequence
  Synthetic construct
ARGGTMVRGVKGGVLGMDV

SEQ ID NO: 17501 - protein, 19 aa, Artificial Sequence
  Synthetic construct
ARVRDCSSTSCYKRGAFDI

SEQ ID NO: 17502 - protein, 15 aa, Artificial Sequence
  Synthetic construct
ARGGDYDSSGYAFDY

SEQ ID NO: 17503 - protein, 12 aa, Artificial Sequence
  Synthetic construct
AASLSRRKGIDY

SEQ ID NO: 17504 - protein, 21 aa, Artificial Sequence
  Synthetic construct
APGGHCFSNDCRRGGLGGMDV

SEQ ID NO: 17505 - protein, 10 aa, Artificial Sequence
  Synthetic construct
ARGDIRGSGY

SEQ ID NO: 17506 - protein, 16 aa, Artificial Sequence
  Synthetic construct
ARDRMRAQYYYYGMDV

SEQ ID NO: 17507 - protein, 14 aa, Artificial Sequence
  Synthetic construct
AKEDAHVYDDYVYS

SEQ ID NO: 17508 - protein, 28 aa, Artificial Sequence
  Synthetic construct
ARPMKYYYGSGREHGPRSKNYYYYGMDV

SEQ ID NO: 17509 - protein, 16 aa, Artificial Sequence
  Synthetic construct
ARCGGGACNQAGAMDV

SEQ ID NO: 17510 - protein, 12 aa, Artificial Sequence
  Synthetic construct
ARKGYSHGYVDY

SEQ ID NO: 17511 - protein, 19 aa, Artificial Sequence
  Synthetic construct
ARRRGRLSTGSYYGRPFDY

SEQ ID NO: 17512 - protein, 19 aa, Artificial Sequence
  Synthetic construct
ARDGGYCSRTSCYRYGMDV

SEQ ID NO: 17513 - protein, 17 aa, Artificial Sequence
  Synthetic construct
ARSPHDHESSGYYAFDI

SEQ ID NO: 17514 - protein, 14 aa, Artificial Sequence
  Synthetic construct
ARSTRRAGFDAFDI

SEQ ID NO: 17515 - protein, 16 aa, Artificial Sequence
  Synthetic construct
ARHLRRDNADYYGLDV

SEQ ID NO: 17516 - protein, 9 aa, Artificial Sequence
  Synthetic construct
ATDGGTFRS

SEQ ID NO: 17517 - protein, 16 aa, Artificial Sequence
  Synthetic construct
TRGGYSADDWVPGIDY

SEQ ID NO: 17518 - protein, 16 aa, Artificial Sequence
  Synthetic construct
ARRYCIRSRCPNAFDM

SEQ ID NO: 17519 - protein, 17 aa, Artificial Sequence
  Synthetic construct
AHRRAEGGNWDGGCLDV

SEQ ID NO: 17520 - protein, 17 aa, Artificial Sequence
  Synthetic construct
AHRRAEGGNWDGGCLDV

SEQ ID NO: 17521 - protein, 19 aa, Artificial Sequence
  Synthetic construct
ARDRLLWFGSHYYYYGMDV

SEQ ID NO: 17522 - protein, 17 aa, Artificial Sequence
  Synthetic construct
ARDASPEYSSGWSPYDY

SEQ ID NO: 17523 - protein, 13 aa, Artificial Sequence
  Synthetic construct
ATRPGMAVAGFDF

SEQ ID NO: 17524 - protein, 12 aa, Artificial Sequence
  Synthetic construct
AIYAEGQGGRGS

SEQ ID NO: 17525 - protein, 23 aa, Artificial Sequence
  Synthetic construct
ARRWGYRSVYTWTVAVTPAHFDY

SEQ ID NO: 17526 - protein, 10 aa, Artificial Sequence
  Synthetic construct
ARGSGFLFDY

SEQ ID NO: 17527 - protein, 18 aa, Artificial Sequence
  Synthetic construct
ARHAAAGSTEIGASSLGY

SEQ ID NO: 17528 - protein, 12 aa, Artificial Sequence
  Synthetic construct
ARGLRRELVKDY

SEQ ID NO: 17529 - protein, 16 aa, Artificial Sequence
  Synthetic construct
AREGGGPYDRSHYYDI

SEQ ID NO: 17530 - protein, 16 aa, Artificial Sequence
  Synthetic construct
AKDLVFGGSYRGIFDY

SEQ ID NO: 17531 - protein, 18 aa, Artificial Sequence
  Synthetic construct
ARQAAIYCSSTSCHQFDY

SEQ ID NO: 17532 - protein, 16 aa, Artificial Sequence
  Synthetic construct
ASRILLPNYYYYGMDV

SEQ ID NO: 17533 - protein, 10 aa, Artificial Sequence
  Synthetic construct
TAISHSSIDY

SEQ ID NO: 17534 - protein, 17 aa, Artificial Sequence
  Synthetic construct
VTMRGHYQLFYDDSFDV

SEQ ID NO: 17535 - protein, 12 aa, Artificial Sequence
  Synthetic construct
ARSLGDSSGLDY

SEQ ID NO: 17536 - protein, 18 aa, Artificial Sequence
  Synthetic construct
AKRTALDNYGYYYYGMDV

SEQ ID NO: 17537 - protein, 18 aa, Artificial Sequence
  Synthetic construct
ARNSGYCSSTSCSYYFDY

SEQ ID NO: 17538 - protein, 13 aa, Artificial Sequence
  Synthetic construct
ARHYNILTGYFDY

SEQ ID NO: 17539 - protein, 20 aa, Artificial Sequence
  Synthetic construct
ARVIVRVPAAVRGDYYAMDV

SEQ ID NO: 17540 - protein, 16 aa, Artificial Sequence
  Synthetic construct
TRGGYSGYDWVPGIDY

SEQ ID NO: 17541 - protein, 19 aa, Artificial Sequence
  Synthetic construct
AKGGNCGGDCYLFYWYFDL

SEQ ID NO: 17542 - protein, 16 aa, Artificial Sequence
  Synthetic construct
ARHPTRGTMVRGMVYA

SEQ ID NO: 17543 - protein, 16 aa, Artificial Sequence
  Synthetic construct
ARDPGMFIHTAYYFDF

SEQ ID NO: 17544 - protein, 20 aa, Artificial Sequence
  Synthetic construct
AGEFVIPAGKSQYYYYGMDV

SEQ ID NO: 17545 - protein, 15 aa, Artificial Sequence
  Synthetic construct
ARLNGSSGWYGYFDY

SEQ ID NO: 17546 - protein, 17 aa, Artificial Sequence
  Synthetic construct
ARDREDVYNAYPGSLDL

SEQ ID NO: 17547 - protein, 17 aa, Artificial Sequence
  Synthetic construct
AREPGGATLSYYYGMDV

SEQ ID NO: 17548 - protein, 22 aa, Artificial Sequence
  Synthetic construct
ARTSAARPSGGSGQSLEDAFDI

SEQ ID NO: 17549 - protein, 20 aa, Artificial Sequence
  Synthetic construct
AREVRVVVPGDQGPGLTFDI

SEQ ID NO: 17550 - protein, 16 aa, Artificial Sequence
  Synthetic construct
VRDFLAAAGRGGFFNY

SEQ ID NO: 17551 - protein, 19 aa, Artificial Sequence
  Synthetic construct
ARLYSSSWFNRYYYYGMDV

SEQ ID NO: 17552 - protein, 20 aa, Artificial Sequence
  Synthetic construct
ARDSSDYYDNSGTPYNWFDP

SEQ ID NO: 17553 - protein, 12 aa, Artificial Sequence
  Synthetic construct
ARWVYGGGAFDI

SEQ ID NO: 17554 - protein, 15 aa, Artificial Sequence
  Synthetic construct
AKDPFRGLSFFHLDY

SEQ ID NO: 17555 - protein, 19 aa, Artificial Sequence
  Synthetic construct
ARDGGYSSGWTDYYYGMDV

SEQ ID NO: 17556 - protein, 13 aa, Artificial Sequence
  Synthetic construct
AKTQWRYYYGMDV

SEQ ID NO: 17557 - protein, 18 aa, Artificial Sequence
  Synthetic construct
ARQGRRDGYNWRLAHFDS

SEQ ID NO: 17558 - protein, 12 aa, Artificial Sequence
  Synthetic construct
ARARAKKYYFDY

SEQ ID NO: 17559 - protein, 21 aa, Artificial Sequence
  Synthetic construct
AKESPLVIGADGSASLVNMNV

SEQ ID NO: 17560 - protein, 13 aa, Artificial Sequence
  Synthetic construct
AREADMATTVFDS

SEQ ID NO: 17561 - protein, 24 aa, Artificial Sequence
  Synthetic construct
AKDIGCTIFGVVIRCETTGYGMDV

SEQ ID NO: 17562 - protein, 22 aa, Artificial Sequence
  Synthetic construct
ARDLGRYYYDSSGYYKRGWFDP

SEQ ID NO: 17563 - protein, 19 aa, Artificial Sequence
  Synthetic construct
ARRVVSETGTSFSPPAFDY

SEQ ID NO: 17564 - protein, 18 aa, Artificial Sequence
  Synthetic construct
ARQGLLFSISPENDAFDV

SEQ ID NO: 17565 - protein, 10 aa, Artificial Sequence
  Synthetic construct
STDRGASFDF

SEQ ID NO: 17566 - protein, 7 aa, Artificial Sequence
  Synthetic construct
ARDKGSH

SEQ ID NO: 17567 - protein, 13 aa, Artificial Sequence
  Synthetic construct
ARAGSRGSYGMDV

SEQ ID NO: 17568 - protein, 16 aa, Artificial Sequence
  Synthetic construct
ARMGIPEWLFGLSFDY

SEQ ID NO: 17569 - protein, 12 aa, Artificial Sequence
  Synthetic construct
AKGEYARGPFGI

SEQ ID NO: 17570 - protein, 17 aa, Artificial Sequence
  Synthetic construct
ARSPHDHESSGYYAFDI

SEQ ID NO: 17571 - protein, 13 aa, Artificial Sequence
  Synthetic construct
ARPLTAIYAGFDY

SEQ ID NO: 17572 - protein, 21 aa, Artificial Sequence
  Synthetic construct
ARGRPKRGYGGNLSYYYGMDV

SEQ ID NO: 17573 - protein, 13 aa, Artificial Sequence
  Synthetic construct
ARDKWELLQGFDS

SEQ ID NO: 17574 - protein, 16 aa, Artificial Sequence
  Synthetic construct
TRDLWERHAAAAQSAH

SEQ ID NO: 17575 - protein, 13 aa, Artificial Sequence
  Synthetic construct
ARAFHLVNNWHDP

SEQ ID NO: 17576 - protein, 19 aa, Artificial Sequence
  Synthetic construct
ARGYYDFWSGYYTGRRFDP

SEQ ID NO: 17577 - protein, 8 aa, Artificial Sequence
  Synthetic construct
SRGVIKSL

SEQ ID NO: 17578 - protein, 18 aa, Artificial Sequence
  Synthetic construct
ARQGYDILTGYPSYGMDV

SEQ ID NO: 17579 - protein, 11 aa, Artificial Sequence
  Synthetic construct
AKTSVLGPECY

SEQ ID NO: 17580 - protein, 17 aa, Artificial Sequence
  Synthetic construct
ARSPHDHESSGYYAFDI

SEQ ID NO: 17581 - protein, 23 aa, Artificial Sequence
  Synthetic construct
AQGETGAYYDVLTGKAGYYGLDV

SEQ ID NO: 17582 - protein, 15 aa, Artificial Sequence
  Synthetic construct
AKSSILTGYYEVFDY

SEQ ID NO: 17583 - protein, 17 aa, Artificial Sequence
  Synthetic construct
AKETSLLHYDTSAYSDY

SEQ ID NO: 17584 - protein, 20 aa, Artificial Sequence
  Synthetic construct
ANRITIFGVVIKTEENWFDP

SEQ ID NO: 17585 - protein, 12 aa, Artificial Sequence
  Synthetic construct
AAYHDILTGYPF

SEQ ID NO: 17586 - protein, 14 aa, Artificial Sequence
  Synthetic construct
ARSHVLVWFGALDY

SEQ ID NO: 17587 - protein, 17 aa, Artificial Sequence
  Synthetic construct
ATDFPGNSPVAGTGFEY

SEQ ID NO: 17588 - protein, 10 aa, Artificial Sequence
  Synthetic construct
ANEKFYYFES

SEQ ID NO: 17589 - protein, 12 aa, Artificial Sequence
  Synthetic construct
ARGYGSGSYYRY

SEQ ID NO: 17590 - protein, 13 aa, Artificial Sequence
  Synthetic construct
ARDDILTGYTIDY

SEQ ID NO: 17591 - protein, 19 aa, Artificial Sequence
  Synthetic construct
ASRITMVRGVRIRRNWFDP

SEQ ID NO: 17592 - protein, 16 aa, Artificial Sequence
  Synthetic construct
ARHLRRDNADYYGLDV

SEQ ID NO: 17593 - protein, 17 aa, Artificial Sequence
  Synthetic construct
ARDLDFHTSCHYATFHY

SEQ ID NO: 17594 - protein, 10 aa, Artificial Sequence
  Synthetic construct
ARAVRLRLDP

SEQ ID NO: 17595 - protein, 17 aa, Artificial Sequence
  Synthetic construct
AKGSGYSSGWYRGAFDI

SEQ ID NO: 17596 - protein, 19 aa, Artificial Sequence
  Synthetic construct
TTDYGVRYFDWLLPEEPLT

SEQ ID NO: 17597 - protein, 10 aa, Artificial Sequence
  Synthetic construct
ARGSIVIHGY

SEQ ID NO: 17598 - protein, 18 aa, Artificial Sequence
  Synthetic construct
AASSTIGASDYHFYAMDV

SEQ ID NO: 17599 - protein, 15 aa, Artificial Sequence
  Synthetic construct
ARHGSSSWYPPYFQH

SEQ ID NO: 17600 - protein, 15 aa, Artificial Sequence
  Synthetic construct
ARAPYSGYDFMYFDY

SEQ ID NO: 17601 - protein, 16 aa, Artificial Sequence
  Synthetic construct
TRGGYSGYDWVPGIDY

SEQ ID NO: 17602 - protein, 22 aa, Artificial Sequence
  Synthetic construct
ARRITMVRGGEPRWPRLNWFDP

SEQ ID NO: 17603 - protein, 14 aa, Artificial Sequence
  Synthetic construct
TTEDWNLYNYAMGV

SEQ ID NO: 17604 - protein, 14 aa, Artificial Sequence
  Synthetic construct
ARYDGGNPPGGMDV

SEQ ID NO: 17605 - protein, 18 aa, Artificial Sequence
  Synthetic construct
AREADCTNSVCFPSTLDY

SEQ ID NO: 17606 - protein, 10 aa, Artificial Sequence
  Synthetic construct
ARQRSRYFDY

SEQ ID NO: 17607 - protein, 16 aa, Artificial Sequence
  Synthetic construct
GKGYYYGSEHRNVIDY

SEQ ID NO: 17608 - protein, 13 aa, Artificial Sequence
  Synthetic construct
ARLPFPGAEGFDQ

SEQ ID NO: 17609 - protein, 17 aa, Artificial Sequence
  Synthetic construct
ATSPLATSSPVGYYFDY

SEQ ID NO: 17610 - protein, 17 aa, Artificial Sequence
  Synthetic construct
ARAGYSSGYKRVLFVDY

SEQ ID NO: 17611 - protein, 16 aa, Artificial Sequence
  Synthetic construct
VKDLGWRTISSAGGDY

SEQ ID NO: 17612 - protein, 8 aa, Artificial Sequence
  Synthetic construct
ASRGSFDM

SEQ ID NO: 17613 - protein, 18 aa, Artificial Sequence
  Synthetic construct
ATSPHMIKFGGVIGHLDC

SEQ ID NO: 17614 - protein, 23 aa, Artificial Sequence
  Synthetic construct
ARDPPPTFYDFLTGSYNYFGMDV

SEQ ID NO: 17615 - protein, 13 aa, Artificial Sequence
  Synthetic construct
ARRYSGHKGGFDP

SEQ ID NO: 17616 - protein, 15 aa, Artificial Sequence
  Synthetic construct
ARRGYSGFMGAWFDH

SEQ ID NO: 17617 - protein, 20 aa, Artificial Sequence
  Synthetic construct
AREEFDTLTGFRYHYYGMDV

SEQ ID NO: 17618 - protein, 15 aa, Artificial Sequence
  Synthetic construct
ARDRSGSYYKSPFDY

SEQ ID NO: 17619 - protein, 20 aa, Artificial Sequence
  Synthetic construct
ARLNYYGSGSYYNAKYYFDY

SEQ ID NO: 17620 - protein, 14 aa, Artificial Sequence
  Synthetic construct
ARDMVGPTTNGFDF

SEQ ID NO: 17621 - protein, 13 aa, Artificial Sequence
  Synthetic construct
ARALMVRGVHFDY

SEQ ID NO: 17622 - protein, 17 aa, Artificial Sequence
  Synthetic construct
AKLWYSSSSWYLSGMDV

SEQ ID NO: 17623 - protein, 14 aa, Artificial Sequence
  Synthetic construct
AKGLTGWFLAPLDY

SEQ ID NO: 17624 - protein, 11 aa, Artificial Sequence
  Synthetic construct
ARAGWKKRMDV

SEQ ID NO: 17625 - protein, 23 aa, Artificial Sequence
  Synthetic construct
ARLERDCGGDCYSRRNPNWYFDL

SEQ ID NO: 17626 - protein, 13 aa, Artificial Sequence
  Synthetic construct
ARDSHSSSGLLDF

SEQ ID NO: 17627 - protein, 20 aa, Artificial Sequence
  Synthetic construct
ARYSLLDYGDYGGYYYAMDV

SEQ ID NO: 17628 - protein, 16 aa, Artificial Sequence
  Synthetic construct
AREGGGPYDRSHYYDI

SEQ ID NO: 17629 - protein, 14 aa, Artificial Sequence
  Synthetic construct
ARAYSSNYYEYFQY

SEQ ID NO: 17630 - protein, 15 aa, Artificial Sequence
  Synthetic construct
ARDGRAYNYGYGMDV

SEQ ID NO: 17631 - protein, 17 aa, Artificial Sequence
  Synthetic construct
ARVSGYSYGPGFKWFDP

SEQ ID NO: 17632 - protein, 16 aa, Artificial Sequence
  Synthetic construct
ARHLRRDNADYYGLDV

SEQ ID NO: 17633 - protein, 14 aa, Artificial Sequence
  Synthetic construct
ARVKTQVHGDYLDY

SEQ ID NO: 17634 - protein, 24 aa, Artificial Sequence
  Synthetic construct
VRGPSQYCSGGTCSSLGYFYPMDV

SEQ ID NO: 17635 - protein, 15 aa, Artificial Sequence
  Synthetic construct
ARLWNYGSEHWYFDL

SEQ ID NO: 17636 - protein, 16 aa, Artificial Sequence
  Synthetic construct
VRDLGWRSIAADGGDS

SEQ ID NO: 17637 - protein, 7 aa, Artificial Sequence
  Synthetic construct
ARGYQDP

SEQ ID NO: 17638 - protein, 16 aa, Artificial Sequence
  Synthetic construct
VHDLGWRSIAADGGDY

SEQ ID NO: 17639 - protein, 13 aa, Artificial Sequence
  Synthetic construct
ARVRKIVLDTFDI

SEQ ID NO: 17640 - protein, 16 aa, Artificial Sequence
  Synthetic construct
ARTYYDFWSGYYPFDY

SEQ ID NO: 17641 - protein, 29 aa, Artificial Sequence
  Synthetic construct
ARGRDQYYYDSSGYYYSRTKQRPGYYFDY

SEQ ID NO: 17642 - protein, 23 aa, Artificial Sequence
  Synthetic construct
AKDFSPALPYCSGGSCKGYYFDY

SEQ ID NO: 17643 - protein, 11 aa, Artificial Sequence
  Synthetic construct
ARRGTRGYFEV

SEQ ID NO: 17644 - protein, 10 aa, Artificial Sequence
  Synthetic construct
ATPVVERRDY

SEQ ID NO: 17645 - protein, 17 aa, Artificial Sequence
  Synthetic construct
AKRSTKYSSGWKNWFDP

SEQ ID NO: 17646 - protein, 15 aa, Artificial Sequence
  Synthetic construct
VRPRTSSNYFFVFHI

SEQ ID NO: 17647 - protein, 13 aa, Artificial Sequence
  Synthetic construct
ARPMVRGRSGMDV

SEQ ID NO: 17648 - protein, 22 aa, Artificial Sequence
  Synthetic construct
ARGGSNSGSYPRRHYYYYGMDV

SEQ ID NO: 17649 - protein, 20 aa, Artificial Sequence
  Synthetic construct
ARQPYDFWSGYYLYYYGMDV

SEQ ID NO: 17650 - protein, 19 aa, Artificial Sequence
  Synthetic construct
ARGGYCSSTSCYRNNWFDP

SEQ ID NO: 17651 - protein, 14 aa, Artificial Sequence
  Synthetic construct
ARGGARYSSGWPIW

SEQ ID NO: 17652 - protein, 13 aa, Artificial Sequence
  Synthetic construct
ARGGVIPAGYFQL

SEQ ID NO: 17653 - protein, 11 aa, Artificial Sequence
  Synthetic construct
AQAGFRSQGDY

SEQ ID NO: 17654 - protein, 8 aa, Artificial Sequence
  Synthetic construct
ARGLRSDY

SEQ ID NO: 17655 - protein, 17 aa, Artificial Sequence
  Synthetic construct
ARSPHDHESSGYYAFDI

SEQ ID NO: 17656 - protein, 23 aa, Artificial Sequence
  Synthetic construct
TTSMEFYSSGNLYIPLGSYSLDV

SEQ ID NO: 17657 - protein, 11 aa, Artificial Sequence
  Synthetic construct
STDSAYYPFDN

SEQ ID NO: 17658 - protein, 13 aa, Artificial Sequence
  Synthetic construct
ARARFTYNYNFYY

SEQ ID NO: 17659 - protein, 19 aa, Artificial Sequence
  Synthetic construct
ARGRYTAMVGRYYYYGMDV

SEQ ID NO: 17660 - protein, 16 aa, Artificial Sequence
  Synthetic construct
ARDEALVHGRPGYFDY

SEQ ID NO: 17661 - protein, 18 aa, Artificial Sequence
  Synthetic construct
ARGDKSTRWYPVSAQFDP

SEQ ID NO: 17662 - protein, 23 aa, Artificial Sequence
  Synthetic construct
ARDSREISSGSYRYYYYYYGMDV

SEQ ID NO: 17663 - protein, 13 aa, Artificial Sequence
  Synthetic construct
ARWPGGSGWHFDY

SEQ ID NO: 17664 - protein, 20 aa, Artificial Sequence
  Synthetic construct
ARGRGYCSSTSCYAYNWFDP

SEQ ID NO: 17665 - protein, 13 aa, Artificial Sequence
  Synthetic construct
AKDLVRGEGLFDY

SEQ ID NO: 17666 - protein, 16 aa, Artificial Sequence
  Synthetic construct
ARDAYVVGLGSKRSDY

SEQ ID NO: 17667 - protein, 17 aa, Artificial Sequence
  Synthetic construct
ARSPHDHESSGYYAFDI

SEQ ID NO: 17668 - protein, 20 aa, Artificial Sequence
  Synthetic construct
ARGRGGYSYGTTRRGGQFDY

SEQ ID NO: 17669 - protein, 17 aa, Artificial Sequence
  Synthetic construct
ARIRNYYGSGIRSPFDY

SEQ ID NO: 17670 - protein, 18 aa, Artificial Sequence
  Synthetic construct
ARGYYDFWSGYDGNWFDP

SEQ ID NO: 17671 - protein, 14 aa, Artificial Sequence
  Synthetic construct
ARDMVGPTTNGFDF

SEQ ID NO: 17672 - protein, 18 aa, Artificial Sequence
  Synthetic construct
ARGRNTVREYYYYYGMDV

SEQ ID NO: 17673 - protein, 19 aa, Artificial Sequence
  Synthetic construct
ARGTRGYSYGRSYYYGMDV

SEQ ID NO: 17674 - protein, 14 aa, Artificial Sequence
  Synthetic construct
AKPRRGYWVCPPRY

SEQ ID NO: 17675 - protein, 16 aa, Artificial Sequence
  Synthetic construct
VHDLGWRSIAADGGDY

SEQ ID NO: 17676 - protein, 19 aa, Artificial Sequence
  Synthetic construct
AKGHLYYYDSSGTPDAFDI

SEQ ID NO: 17677 - protein, 16 aa, Artificial Sequence
  Synthetic construct
TTDSHPRGYCSSTSCF

SEQ ID NO: 17678 - protein, 6 aa, Artificial Sequence
  Synthetic construct
ARDCDY

SEQ ID NO: 17679 - protein, 15 aa, Artificial Sequence
  Synthetic construct
ARIGLYFDSSGPFDY

SEQ ID NO: 17680 - protein, 12 aa, Artificial Sequence
  Synthetic construct
ARGYDILTGYQY

SEQ ID NO: 17681 - protein, 16 aa, Artificial Sequence
  Synthetic construct
ARARYYGSGSLRFFDS

SEQ ID NO: 17682 - protein, 13 aa, Artificial Sequence
  Synthetic construct
ARQIISGTWLFDH

SEQ ID NO: 17683 - protein, 19 aa, Artificial Sequence
  Synthetic construct
AKGFWACTPYTCSTGPFDS

SEQ ID NO: 17684 - protein, 15 aa, Artificial Sequence
  Synthetic construct
VSPSSDKDYFEVFDF

SEQ ID NO: 17685 - protein, 18 aa, Artificial Sequence
  Synthetic construct
ARDWGSYSSRHYYYGMDV

SEQ ID NO: 17686 - protein, 16 aa, Artificial Sequence
  Synthetic construct
ARQPSSVVGASNYFDS

SEQ ID NO: 17687 - protein, 11 aa, Artificial Sequence
  Synthetic construct
STAPSRDDFDY

SEQ ID NO: 17688 - protein, 16 aa, Artificial Sequence
  Synthetic construct
ARGGYSSSWKHNWFDP

SEQ ID NO: 17689 - protein, 8 aa, Artificial Sequence
  Synthetic construct
ARGGYFDY

SEQ ID NO: 17690 - protein, 17 aa, Artificial Sequence
  Synthetic construct
AKDHRVSVADSSEYFQH

SEQ ID NO: 17691 - protein, 14 aa, Artificial Sequence
  Synthetic construct
ARLSSGYYKSYFDY

SEQ ID NO: 17692 - protein, 13 aa, Artificial Sequence
  Synthetic construct
ATGYRSGYQTPCD

SEQ ID NO: 17693 - protein, 19 aa, Artificial Sequence
  Synthetic construct
ARTTYYDILTTYYKGEFDY

SEQ ID NO: 17694 - protein, 17 aa, Artificial Sequence
  Synthetic construct
AKDGSRYCSGGSCYMAS

SEQ ID NO: 17695 - protein, 13 aa, Artificial Sequence
  Synthetic construct
ARGIGYPRVYSDF

SEQ ID NO: 17696 - protein, 21 aa, Artificial Sequence
  Synthetic construct
TTEGFMGFGELLARYYYAMDV

SEQ ID NO: 17697 - protein, 15 aa, Artificial Sequence
  Synthetic construct
AKDEGSLLTLPPGDL

SEQ ID NO: 17698 - protein, 22 aa, Artificial Sequence
  Synthetic construct
ARDGNSVTMVRGARYWEYYFDY

SEQ ID NO: 17699 - protein, 22 aa, Artificial Sequence
  Synthetic construct
AREVRAPNQLRTSIYYYYGMDV

SEQ ID NO: 17700 - protein, 19 aa, Artificial Sequence
  Synthetic construct
AREGRGLGGSTGYYYVLDY

SEQ ID NO: 17701 - protein, 12 aa, Artificial Sequence
  Synthetic construct
VASPLIAAQLDF

SEQ ID NO: 17702 - protein, 18 aa, Artificial Sequence
  Synthetic construct
ASDHIDGTSYHTFYDLDV

SEQ ID NO: 17703 - protein, 19 aa, Artificial Sequence
  Synthetic construct
ARRLRGVEAINAYYFGMDA

SEQ ID NO: 17704 - protein, 6 aa, Artificial Sequence
  Synthetic construct
TKGLDV

SEQ ID NO: 17705 - protein, 12 aa, Artificial Sequence
  Synthetic construct
ARFPGVLQKVDY

SEQ ID NO: 17706 - protein, 10 aa, Artificial Sequence
  Synthetic construct
ARGKYSSSFY

SEQ ID NO: 17707 - protein, 12 aa, Artificial Sequence
  Synthetic construct
GTLLGATTMIEF

SEQ ID NO: 17708 - protein, 18 aa, Artificial Sequence
  Synthetic construct
ARDYSSSSPHRYKKTFDY

SEQ ID NO: 17709 - protein, 17 aa, Artificial Sequence
  Synthetic construct
AGSYSAYDFSGDDAFDI

SEQ ID NO: 17710 - protein, 15 aa, Artificial Sequence
  Synthetic construct
ALRTTLIAVAGSFDY

SEQ ID NO: 17711 - protein, 14 aa, Artificial Sequence
  Synthetic construct
ASQGDGYHKGWFDP

SEQ ID NO: 17712 - protein, 16 aa, Artificial Sequence
  Synthetic construct
VKDLGWRTIAADGGDY

SEQ ID NO: 17713 - protein, 20 aa, Artificial Sequence
  Synthetic construct
AGEFVIPAGKSQYYYYGMDV

SEQ ID NO: 17714 - protein, 21 aa, Artificial Sequence
  Synthetic construct
ARDAHRRVATSSYYYYYGMDV

SEQ ID NO: 17715 - protein, 20 aa, Artificial Sequence
  Synthetic construct
ARTRFPYSSGWYVGNNWFDP

SEQ ID NO: 17716 - protein, 11 aa, Artificial Sequence
  Synthetic construct
ARSPAWGESST

SEQ ID NO: 17717 - protein, 11 aa, Artificial Sequence
  Synthetic construct
ARGTRVGATWR

SEQ ID NO: 17718 - protein, 14 aa, Artificial Sequence
  Synthetic construct
ARGPLYSSGWYSDY

SEQ ID NO: 17719 - protein, 14 aa, Artificial Sequence
  Synthetic construct
ARGAEDGPNDALHF

SEQ ID NO: 17720 - protein, 17 aa, Artificial Sequence
  Synthetic construct
AKDHRVSVASSPEYFQQ

SEQ ID NO: 17721 - protein, 18 aa, Artificial Sequence
  Synthetic construct
ANDRRVPTTDRDFFGMDV

SEQ ID NO: 17722 - protein, 12 aa, Artificial Sequence
  Synthetic construct
ANMYYDILSGPY

SEQ ID NO: 17723 - protein, 16 aa, Artificial Sequence
  Synthetic construct
ASHYYGSGSYPRPFDY

SEQ ID NO: 17724 - protein, 14 aa, Artificial Sequence
  Synthetic construct
TREGGYDSGDSFDI

SEQ ID NO: 17725 - protein, 20 aa, Artificial Sequence
  Synthetic construct
ARDQVFWFGDFTQDYYGMDV

SEQ ID NO: 17726 - protein, 20 aa, Artificial Sequence
  Synthetic construct
ACFGGLSRTGYSSGWYLPPT

SEQ ID NO: 17727 - protein, 12 aa, Artificial Sequence
  Synthetic construct
TTYYYDSSALGY

SEQ ID NO: 17728 - protein, 14 aa, Artificial Sequence
  Synthetic construct
AIDYYESRGFYFKN

SEQ ID NO: 17729 - protein, 13 aa, Artificial Sequence
  Synthetic construct
ARFMVRGVRQVDY

SEQ ID NO: 17730 - protein, 17 aa, Artificial Sequence
  Synthetic construct
ARVRRSGSYRSYWYFDL

SEQ ID NO: 17731 - protein, 14 aa, Artificial Sequence
  Synthetic construct
AEVKPAYQYYGMDV

SEQ ID NO: 17732 - protein, 14 aa, Artificial Sequence
  Synthetic construct
TTEDWNLYNYAMGV

SEQ ID NO: 17733 - protein, 18 aa, Artificial Sequence
  Synthetic construct
ARIGKGSGWLRKSGISDY

SEQ ID NO: 17734 - protein, 23 aa, Artificial Sequence
  Synthetic construct
TRLRKDSSPLRSSKYYYYYGMDV

SEQ ID NO: 17735 - protein, 16 aa, Artificial Sequence
  Synthetic construct
TTDYDYFHSSGYYFDN

SEQ ID NO: 17736 - protein, 18 aa, Artificial Sequence
  Synthetic construct
ARIRNNQSKYRNWYYFDY

SEQ ID NO: 17737 - protein, 23 aa, Artificial Sequence
  Synthetic construct
AKRVDEYCGGGSCPKGYYYGLDV

SEQ ID NO: 17738 - protein, 14 aa, Artificial Sequence
  Synthetic construct
ARGGSSNWPAAFQH

SEQ ID NO: 17739 - protein, 15 aa, Artificial Sequence
  Synthetic construct
ARVGRFGSGGYPFDY

SEQ ID NO: 17740 - protein, 17 aa, Artificial Sequence
  Synthetic construct
ARDRYCSSTSCYTWFDP

SEQ ID NO: 17741 - protein, 13 aa, Artificial Sequence
  Synthetic construct
VKAQGNWGPYFDS

SEQ ID NO: 17742 - protein, 20 aa, Artificial Sequence
  Synthetic construct
AGEFVIPAGKSQYYYYGMDV

SEQ ID NO: 17743 - protein, 20 aa, Artificial Sequence
  Synthetic construct
ARELRYYDILTGYYSDAFDI

SEQ ID NO: 17744 - protein, 19 aa, Artificial Sequence
  Synthetic construct
ARQKYCSSTSCYSRGGMDV

SEQ ID NO: 17745 - protein, 25 aa, Artificial Sequence
  Synthetic construct
AKDHRYCSSTSCTIGYYYYYYGMDV

SEQ ID NO: 17746 - protein, 13 aa, Artificial Sequence
  Synthetic construct
TRYKWLRGQTVDY

SEQ ID NO: 17747 - protein, 13 aa, Artificial Sequence
  Synthetic construct
ARAGWLQPHAFDI

SEQ ID NO: 17748 - protein, 14 aa, Artificial Sequence
  Synthetic construct
ARDSSRYFDWLPWY

SEQ ID NO: 17749 - protein, 12 aa, Artificial Sequence
  Synthetic construct
ARDSSGDQRIDY

SEQ ID NO: 17750 - protein, 12 aa, Artificial Sequence
  Synthetic construct
STPYMAAADTGP

SEQ ID NO: 17751 - protein, 18 aa, Artificial Sequence
  Synthetic construct
ARANDFWSGSRGAFWFDP

SEQ ID NO: 17752 - protein, 18 aa, Artificial Sequence
  Synthetic construct
ARAIQNIVATFRGKYFQD

SEQ ID NO: 17753 - protein, 19 aa, Artificial Sequence
  Synthetic construct
AKTPRIGSGGRYYYYGMDV

SEQ ID NO: 17754 - protein, 17 aa, Artificial Sequence
  Synthetic construct
ARSPHDHESSGYYAFDI

SEQ ID NO: 17755 - protein, 15 aa, Artificial Sequence
  Synthetic construct
TFGQQLVRKGYYFDY

SEQ ID NO: 17756 - protein, 15 aa, Artificial Sequence
  Synthetic construct
ATYLKLQINYYGLDV

SEQ ID NO: 17757 - protein, 24 aa, Artificial Sequence
  Synthetic construct
ARVQWWFLASQSIAARRTRNAFDI

SEQ ID NO: 17758 - protein, 18 aa, Artificial Sequence
  Synthetic construct
ARSFWGGYCSTTNCPLDF

SEQ ID NO: 17759 - protein, 19 aa, Artificial Sequence
  Synthetic construct
ARVGGGAEWYSSGWLSFDY

SEQ ID NO: 17760 - protein, 11 aa, Artificial Sequence
  Synthetic construct
ARHKWGWDIDS

SEQ ID NO: 17761 - protein, 12 aa, Artificial Sequence
  Synthetic construct
ARDPTLRGLGDY

SEQ ID NO: 17762 - protein, 15 aa, Artificial Sequence
  Synthetic construct
ARQALYFDWLLQFDY

SEQ ID NO: 17763 - protein, 10 aa, Artificial Sequence
  Synthetic construct
AITIGWCVNY

SEQ ID NO: 17764 - protein, 18 aa, Artificial Sequence
  Synthetic construct
AKGYQMLYTAHRFDAFDF

SEQ ID NO: 17765 - protein, 20 aa, Artificial Sequence
  Synthetic construct
AREELERRGPTQHYYYGMDV

SEQ ID NO: 17766 - protein, 12 aa, Artificial Sequence
  Synthetic construct
VSGWSLRGRSHY

SEQ ID NO: 17767 - protein, 15 aa, Artificial Sequence
  Synthetic construct
VKPASSWTPQIVRDY

SEQ ID NO: 17768 - protein, 16 aa, Artificial Sequence
  Synthetic construct
VKRGPKAVVGSGYFDL

SEQ ID NO: 17769 - protein, 15 aa, Artificial Sequence
  Synthetic construct
ARDRVETGGAYESDS

SEQ ID NO: 17770 - protein, 15 aa, Artificial Sequence
  Synthetic construct
AKDMSFGGSYPQPDY

SEQ ID NO: 17771 - protein, 13 aa, Artificial Sequence
  Synthetic construct
ARLRGMSLWHFDL

SEQ ID NO: 17772 - protein, 14 aa, Artificial Sequence
  Synthetic construct
VHSTFYGAYDPADY

SEQ ID NO: 17773 - protein, 18 aa, Artificial Sequence
  Synthetic construct
ARAVRGVIPSFYYYGMDV

SEQ ID NO: 17774 - protein, 19 aa, Artificial Sequence
  Synthetic construct
ARNYGSLSIPTGATTYLDY

SEQ ID NO: 17775 - protein, 15 aa, Artificial Sequence
  Synthetic construct
ARDVGRELHWHPGGI

SEQ ID NO: 17776 - protein, 9 aa, Artificial Sequence
  Synthetic construct
ATSGSYFGY

SEQ ID NO: 17777 - protein, 14 aa, Artificial Sequence
  Synthetic construct
GRNSDPGHNWYFDL

SEQ ID NO: 17778 - protein, 12 aa, Artificial Sequence
  Synthetic construct
ARSLGDSSGLDY

SEQ ID NO: 17779 - protein, 20 aa, Artificial Sequence
  Synthetic construct
ARALSIAASLGGYYYYGMDV

SEQ ID NO: 17780 - protein, 13 aa, Artificial Sequence
  Synthetic construct
ARGTWVDHFGVDY

SEQ ID NO: 17781 - protein, 19 aa, Artificial Sequence
  Synthetic construct
ARHRIYRETTKIVEGGMDV

SEQ ID NO: 17782 - protein, 10 aa, Artificial Sequence
  Synthetic construct
ARGNSGNYSD

SEQ ID NO: 17783 - protein, 14 aa, Artificial Sequence
  Synthetic construct
ARVTGEDMTYGMDV

SEQ ID NO: 17784 - protein, 9 aa, Artificial Sequence
  Synthetic construct
TTSSIGRGY

SEQ ID NO: 17785 - protein, 15 aa, Artificial Sequence
  Synthetic construct
ARGGDYDTSGYALDY

SEQ ID NO: 17786 - protein, 13 aa, Artificial Sequence
  Synthetic construct
ARGYGAYTANYNS

SEQ ID NO: 17787 - protein, 14 aa, Artificial Sequence
  Synthetic construct
ARRWGRAYYYGMDV

SEQ ID NO: 17788 - protein, 18 aa, Artificial Sequence
  Synthetic construct
ARETRSRKYYYDSSGYGH

SEQ ID NO: 17789 - protein, 19 aa, Artificial Sequence
  Synthetic construct
ARGAVTGYYPHYSYYGMDV

SEQ ID NO: 17790 - protein, 16 aa, Artificial Sequence
  Synthetic construct
AGFLPVYNNGWSYFDS

SEQ ID NO: 17791 - protein, 16 aa, Artificial Sequence
  Synthetic construct
ARHLRRDNADYYGLDV

SEQ ID NO: 17792 - protein, 18 aa, Artificial Sequence
  Synthetic construct
ARVQQLGLRHYHYYDVDV

SEQ ID NO: 17793 - protein, 10 aa, Artificial Sequence
  Synthetic construct
ARGSSSAMDV

SEQ ID NO: 17794 - protein, 12 aa, Artificial Sequence
  Synthetic construct
AGSDWYPYYFDY

SEQ ID NO: 17795 - protein, 20 aa, Artificial Sequence
  Synthetic construct
ARDSVVVARLTGVEAYGMDV

SEQ ID NO: 17796 - protein, 19 aa, Artificial Sequence
  Synthetic construct
ARGMSSLSESGQSYWYFDL

SEQ ID NO: 17797 - protein, 22 aa, Artificial Sequence
  Synthetic construct
ARGGYSYGGKFRVRYYYYGMDV

SEQ ID NO: 17798 - protein, 14 aa, Artificial Sequence
  Synthetic construct
ARVFDWFSLWYFDL

SEQ ID NO: 17799 - protein, 11 aa, Artificial Sequence
  Synthetic construct
AHRLRADAFDI

SEQ ID NO: 17800 - protein, 16 aa, Artificial Sequence
  Synthetic construct
ARHLRRDNADYYGLDV

SEQ ID NO: 17801 - protein, 16 aa, Artificial Sequence
  Synthetic construct
ARDQAPYGSEKTQFDY

SEQ ID NO: 17802 - protein, 15 aa, Artificial Sequence
  Synthetic construct
ARALGGNSNSPALGY

SEQ ID NO: 17803 - protein, 17 aa, Artificial Sequence
  Synthetic construct
ARASRYSGSYYYYGMDV

SEQ ID NO: 17804 - protein, 13 aa, Artificial Sequence
  Synthetic construct
AHRYYYSVDAFDI

SEQ ID NO: 17805 - protein, 20 aa, Artificial Sequence
  Synthetic construct
ARGGPEMNFDSSGYYSHFDY

SEQ ID NO: 17806 - protein, 14 aa, Artificial Sequence
  Synthetic construct
ARASIVGATRRFDS

SEQ ID NO: 17807 - protein, 20 aa, Artificial Sequence
  Synthetic construct
VSAGYYYGSGGYENHYGMDV

SEQ ID NO: 17808 - protein, 7 aa, Artificial Sequence
  Synthetic construct
NTERGNY

SEQ ID NO: 17809 - protein, 18 aa, Artificial Sequence
  Synthetic construct
ARDQGECSSNSCYRWFDP

SEQ ID NO: 17810 - protein, 20 aa, Artificial Sequence
  Synthetic construct
ARAQKPRYSSGWYKRGPLPY

SEQ ID NO: 17811 - protein, 11 aa, Artificial Sequence
  Synthetic construct
ARGGSYRHFDY

SEQ ID NO: 17812 - protein, 21 aa, Artificial Sequence
  Synthetic construct
VRDLYEQLVAGEYFHYYGMDV

SEQ ID NO: 17813 - protein, 21 aa, Artificial Sequence
  Synthetic construct
ARALWYSRSSKFLPVGVAFDI

SEQ ID NO: 17814 - protein, 16 aa, Artificial Sequence
  Synthetic construct
ARHLRRDNADYYGLDV

SEQ ID NO: 17815 - protein, 19 aa, Artificial Sequence
  Synthetic construct
VRAEVVVVLPAAAYDAFDI

SEQ ID NO: 17816 - protein, 16 aa, Artificial Sequence
  Synthetic construct
VRDLGWRTIAATGGDF

SEQ ID NO: 17817 - protein, 18 aa, Artificial Sequence
  Synthetic construct
ARDSRVPCSGGSCYGLDV

SEQ ID NO: 17818 - protein, 22 aa, Artificial Sequence
  Synthetic construct
AKAIGRGDYGSGTYPYYYGMDV

SEQ ID NO: 17819 - protein, 16 aa, Artificial Sequence
  Synthetic construct
VKDLGWRTIAADGGDS

SEQ ID NO: 17820 - protein, 22 aa, Artificial Sequence
  Synthetic construct
ARLTKEVRGKRWPYYYYYGLDA

SEQ ID NO: 17821 - protein, 19 aa, Artificial Sequence
  Synthetic construct
ARDTASDSVVVPATTGGDY

SEQ ID NO: 17822 - protein, 17 aa, Artificial Sequence
  Synthetic construct
ARVLFVGQQLFTRKIDY

SEQ ID NO: 17823 - protein, 14 aa, Artificial Sequence
  Synthetic construct
ARHEEDYDSSGPDY

SEQ ID NO: 17824 - protein, 14 aa, Artificial Sequence
  Synthetic construct
ARGPYGDPDDHFDF

SEQ ID NO: 17825 - protein, 13 aa, Artificial Sequence
  Synthetic construct
ARDATNSWSPFDY

SEQ ID NO: 17826 - protein, 16 aa, Artificial Sequence
  Synthetic construct
ARDQTYPNSFYYGMDV

SEQ ID NO: 17827 - protein, 18 aa, Artificial Sequence
  Synthetic construct
ARSIVGATTYYYYYGMDV

SEQ ID NO: 17828 - protein, 15 aa, Artificial Sequence
  Synthetic construct
ARGRSRLSDLDAFDI

SEQ ID NO: 17829 - protein, 20 aa, Artificial Sequence
  Synthetic construct
AKDASRPEYSSKWDHGYFHH

SEQ ID NO: 17830 - protein, 13 aa, Artificial Sequence
  Synthetic construct
ARHIGQNTGYFDP

SEQ ID NO: 17831 - protein, 13 aa, Artificial Sequence
  Synthetic construct
ARGQRSSGWYQGY

SEQ ID NO: 17832 - protein, 14 aa, Artificial Sequence
  Synthetic construct
ARRGYHANSAALDI

SEQ ID NO: 17833 - protein, 20 aa, Artificial Sequence
  Synthetic construct
ARDPSWGSGWTNSLGSSFDF

SEQ ID NO: 17834 - protein, 25 aa, Artificial Sequence
  Synthetic construct
ARQFFREGESIYDVLTLTAWGFFGS

SEQ ID NO: 17835 - protein, 19 aa, Artificial Sequence
  Synthetic construct
ARGHYYDSSPYYSEGGFDY

SEQ ID NO: 17836 - protein, 17 aa, Artificial Sequence
  Synthetic construct
TTEVMWFGDTPGAVFES

SEQ ID NO: 17837 - protein, 17 aa, Artificial Sequence
  Synthetic construct
AKDHPVAVVIEEIILHH

SEQ ID NO: 17838 - protein, 11 aa, Artificial Sequence
  Synthetic construct
ARSPDFRLFDH

SEQ ID NO: 17839 - protein, 17 aa, Artificial Sequence
  Synthetic construct
TKDDRATRYSSNWFLDY

SEQ ID NO: 17840 - protein, 25 aa, Artificial Sequence
  Synthetic construct
ARDLRYYGSGSYIRPKNYYYYGMDV

SEQ ID NO: 17841 - protein, 14 aa, Artificial Sequence
  Synthetic construct
ARGSGISGLWYFDL

SEQ ID NO: 17842 - protein, 12 aa, Artificial Sequence
  Synthetic construct
ALGRKDYGDYYH

SEQ ID NO: 17843 - protein, 18 aa, Artificial Sequence
  Synthetic construct
ATSMTTVTTVFYYYGMDV

SEQ ID NO: 17844 - protein, 17 aa, Artificial Sequence
  Synthetic construct
ARERAYDCSSTSCYLDY

SEQ ID NO: 17845 - protein, 11 aa, Artificial Sequence
  Synthetic construct
ARDAMYSGFDY

SEQ ID NO: 17846 - protein, 16 aa, Artificial Sequence
  Synthetic construct
ARLYYYGSGSYYNLDY

SEQ ID NO: 17847 - protein, 15 aa, Artificial Sequence
  Synthetic construct
ATDLGYFDRRGGFDY

SEQ ID NO: 17848 - protein, 12 aa, Artificial Sequence
  Synthetic construct
AKDQGSGPPRGY

SEQ ID NO: 17849 - protein, 15 aa, Artificial Sequence
  Synthetic construct
ATDLPVDNADLRLNF

SEQ ID NO: 17850 - protein, 26 aa, Artificial Sequence
  Synthetic construct
ARDADLGHGYSYGYWLEFDHYNGMDV

SEQ ID NO: 17851 - protein, 23 aa, Artificial Sequence
  Synthetic construct
AREKYYYDSSGYYKQYYYYGMDV

SEQ ID NO: 17852 - protein, 16 aa, Artificial Sequence
  Synthetic construct
ATLTPVTAAGTGLFPD

SEQ ID NO: 17853 - protein, 10 aa, Artificial Sequence
  Synthetic construct
ANVHNYYFDY

SEQ ID NO: 17854 - protein, 20 aa, Artificial Sequence
  Synthetic construct
ARFGPRVVPAARYYYYGMDV

SEQ ID NO: 17855 - protein, 12 aa, Artificial Sequence
  Synthetic construct
AHRFFSSGCFDY

SEQ ID NO: 17856 - protein, 16 aa, Artificial Sequence
  Synthetic construct
ARVYRYNVLRFLEWSY

SEQ ID NO: 17857 - protein, 14 aa, Artificial Sequence
  Synthetic construct
AKRGVALRAHGFDF

SEQ ID NO: 17858 - protein, 15 aa, Artificial Sequence
  Synthetic construct
ARGEPLYRSILMGDI

SEQ ID NO: 17859 - protein, 17 aa, Artificial Sequence
  Synthetic construct
ARDGLYSSVEYYYGMDV

SEQ ID NO: 17860 - protein, 15 aa, Artificial Sequence
  Synthetic construct
ARAGGGVVTSTPFDH

SEQ ID NO: 17861 - protein, 22 aa, Artificial Sequence
  Synthetic construct
ASSYCSSTSCKRRYYYYYGMDV

SEQ ID NO: 17862 - protein, 26 aa, Artificial Sequence
  Synthetic construct
ARGPRGRRETYSSSWYVAYYYYGMDV

SEQ ID NO: 17863 - protein, 13 aa, Artificial Sequence
  Synthetic construct
AKAFSGSYRPFDY

SEQ ID NO: 17864 - protein, 19 aa, Artificial Sequence
  Synthetic construct
AREDGSGSYYGPPYLNGDV

SEQ ID NO: 17865 - protein, 12 aa, Artificial Sequence
  Synthetic construct
ARALGGVLGPDY

SEQ ID NO: 17866 - protein, 14 aa, Artificial Sequence
  Synthetic construct
ASYPTRWEKYGMDV

SEQ ID NO: 17867 - protein, 15 aa, Artificial Sequence
  Synthetic construct
AKGRDVTTVTEYFQH

SEQ ID NO: 17868 - protein, 14 aa, Artificial Sequence
  Synthetic construct
AKGPSSGYCNYFDY

SEQ ID NO: 17869 - protein, 13 aa, Artificial Sequence
  Synthetic construct
AKGEGSGWYYFDY

SEQ ID NO: 17870 - protein, 17 aa, Artificial Sequence
  Synthetic construct
ARDTALMTTVTTGALDV

SEQ ID NO: 17871 - protein, 16 aa, Artificial Sequence
  Synthetic construct
ARSPMIRGVPAALFDY

SEQ ID NO: 17872 - protein, 14 aa, Artificial Sequence
  Synthetic construct
ALLWFGEFYRGENY

SEQ ID NO: 17873 - protein, 19 aa, Artificial Sequence
  Synthetic construct
AKERLKPTRTTVNVNWFDP

SEQ ID NO: 17874 - protein, 11 aa, Artificial Sequence
  Synthetic construct
ARMTSQGYIDF

SEQ ID NO: 17875 - protein, 16 aa, Artificial Sequence
  Synthetic construct
AREHYGDYDGRNWFDP

SEQ ID NO: 17876 - protein, 10 aa, Artificial Sequence
  Synthetic construct
ARKGRGYSYG

SEQ ID NO: 17877 - protein, 11 aa, Artificial Sequence
  Synthetic construct
ARDTNWGVFDY

SEQ ID NO: 17878 - protein, 19 aa, Artificial Sequence
  Synthetic construct
ATIRITMVRTHNQHYGMDV

SEQ ID NO: 17879 - protein, 20 aa, Artificial Sequence
  Synthetic construct
ARSPLFVVVASAQSTGWIDP

SEQ ID NO: 17880 - protein, 17 aa, Artificial Sequence
  Synthetic construct
AREGKGITMVRGAPFDP

SEQ ID NO: 17881 - protein, 13 aa, Artificial Sequence
  Synthetic construct
ARETWDDISGYDY

SEQ ID NO: 17882 - protein, 22 aa, Artificial Sequence
  Synthetic construct
ARHSGLFSYDFWSGYPQYYFDY

SEQ ID NO: 17883 - protein, 16 aa, Artificial Sequence
  Synthetic construct
ARFIYFGTGSKNGIDV

SEQ ID NO: 17884 - protein, 16 aa, Artificial Sequence
  Synthetic construct
ARLVRRGREQRGAFDI

SEQ ID NO: 17885 - protein, 18 aa, Artificial Sequence
  Synthetic construct
ARDGGGYCIGGSCYGFDY

SEQ ID NO: 17886 - protein, 19 aa, Artificial Sequence
  Synthetic construct
AKKDYHYSGITADYWYFDH

SEQ ID NO: 17887 - protein, 15 aa, Artificial Sequence
  Synthetic construct
ARDSFSGSYRNAFDI

SEQ ID NO: 17888 - protein, 15 aa, Artificial Sequence
  Synthetic construct
AKDDSATRGKYYFGY

SEQ ID NO: 17889 - protein, 12 aa, Artificial Sequence
  Synthetic construct
ARDLIRTGHTDY

SEQ ID NO: 17890 - protein, 12 aa, Artificial Sequence
  Synthetic construct
ARTRPGRELFDY

SEQ ID NO: 17891 - protein, 14 aa, Artificial Sequence
  Synthetic construct
ARARVVRGAIILGP

SEQ ID NO: 17892 - protein, 23 aa, Artificial Sequence
  Synthetic construct
ARDGGDYDSSEIGRGYYYYGMDV

SEQ ID NO: 17893 - protein, 17 aa, Artificial Sequence
  Synthetic construct
ARGESLYLGPYRGKCDS

SEQ ID NO: 17894 - protein, 12 aa, Artificial Sequence
  Synthetic construct
ARAISWDPHFDY

SEQ ID NO: 17895 - protein, 16 aa, Artificial Sequence
  Synthetic construct
ARHLRRDNADYYGLDV

SEQ ID NO: 17896 - protein, 19 aa, Artificial Sequence
  Synthetic construct
ATRWGVGRGHYYYYYGMDV

SEQ ID NO: 17897 - protein, 18 aa, Artificial Sequence
  Synthetic construct
ARDYQLVREALEDDAFDI

SEQ ID NO: 17898 - protein, 14 aa, Artificial Sequence
  Synthetic construct
AKPVVVPVDLQFDQ

SEQ ID NO: 17899 - protein, 26 aa, Artificial Sequence
  Synthetic construct
ARDLTDYYGSGTYVASDSYYYFGMDV

SEQ ID NO: 17900 - protein, 17 aa, Artificial Sequence
  Synthetic construct
ARDFCSTTSCYTSSPGN

SEQ ID NO: 17901 - protein, 20 aa, Artificial Sequence
  Synthetic construct
ARGGYCSSTSCYRRKGGVDY

SEQ ID NO: 17902 - protein, 20 aa, Artificial Sequence
  Synthetic construct
ARARHYGSGNYYRARYYFDY

SEQ ID NO: 17903 - protein, 13 aa, Artificial Sequence
  Synthetic construct
ARLYGDSWRHFDY

SEQ ID NO: 17904 - protein, 22 aa, Artificial Sequence
  Synthetic construct
ARDRYGVRYQLLKRNYYYGMDV

SEQ ID NO: 17905 - protein, 16 aa, Artificial Sequence
  Synthetic construct
ARDRSDDYAYYYGMDV

SEQ ID NO: 17906 - protein, 17 aa, Artificial Sequence
  Synthetic construct
AREIRFLEWLSNYGMDV

SEQ ID NO: 17907 - protein, 13 aa, Artificial Sequence
  Synthetic construct
ASQWIQLWHLEDY

SEQ ID NO: 17908 - protein, 17 aa, Artificial Sequence
  Synthetic construct
ARTHTSKYDFWSGYYDY

SEQ ID NO: 17909 - protein, 14 aa, Artificial Sequence
  Synthetic construct
ARDRRRIHYYGMDV

SEQ ID NO: 17910 - protein, 19 aa, Artificial Sequence
  Synthetic construct
ARLRDDYFGSGSPGHYFDC

SEQ ID NO: 17911 - protein, 17 aa, Artificial Sequence
  Synthetic construct
AHRRAEGGNWDGGCLDV

SEQ ID NO: 17912 - protein, 17 aa, Artificial Sequence
  Synthetic construct
ARSPHDHESSGYYAFDI

SEQ ID NO: 17913 - protein, 11 aa, Artificial Sequence
  Synthetic construct
GRDVNLVFFDY

SEQ ID NO: 17914 - protein, 16 aa, Artificial Sequence
  Synthetic construct
ARDPFRGSSAYYLRDY

SEQ ID NO: 17915 - protein, 11 aa, Artificial Sequence
  Synthetic construct
AKEKTGYTFDY

SEQ ID NO: 17916 - protein, 10 aa, Artificial Sequence
  Synthetic construct
TSSSGWHSNY

SEQ ID NO: 17917 - protein, 20 aa, Artificial Sequence
  Synthetic construct
ARDLAVHLFHSTGLGDAFDI

SEQ ID NO: 17918 - protein, 16 aa, Artificial Sequence
  Synthetic construct
ARSPMIRGVPAALFDY

SEQ ID NO: 17919 - protein, 15 aa, Artificial Sequence
  Synthetic construct
ATPGEPNKYYYGLDV

SEQ ID NO: 17920 - protein, 12 aa, Artificial Sequence
  Synthetic construct
AQRTVGDTTNGF

SEQ ID NO: 17921 - protein, 17 aa, Artificial Sequence
  Synthetic construct
VRPPWNYGSRQDDSSDM

SEQ ID NO: 17922 - protein, 8 aa, Artificial Sequence
  Synthetic construct
AKTIVGEQ

SEQ ID NO: 17923 - protein, 19 aa, Artificial Sequence
  Synthetic construct
ARDQPRRRPGYYYYYGMDV

SEQ ID NO: 17924 - protein, 16 aa, Artificial Sequence
  Synthetic construct
VRDFLAAAGRGGFFNY

SEQ ID NO: 17925 - protein, 18 aa, Artificial Sequence
  Synthetic construct
ARKGRRRGSTYYYYGMDV

SEQ ID NO: 17926 - protein, 17 aa, Artificial Sequence
  Synthetic construct
AHRRAEGGNWDGGCLDV

SEQ ID NO: 17927 - protein, 9 aa, Artificial Sequence
  Synthetic construct
ASEGGFFDY

SEQ ID NO: 17928 - protein, 21 aa, Artificial Sequence
  Synthetic construct
ARVKTLRGYGSGSYRLGWFDP

SEQ ID NO: 17929 - protein, 21 aa, Artificial Sequence
  Synthetic construct
ARDSRWELWRVGYYYYYGMDV

SEQ ID NO: 17930 - protein, 18 aa, Artificial Sequence
  Synthetic construct
ARRFSVSSSWYFQPNFDY

SEQ ID NO: 17931 - protein, 12 aa, Artificial Sequence
  Synthetic construct
VREAEYFFGLDA

SEQ ID NO: 17932 - protein, 11 aa, Artificial Sequence
  Synthetic construct
SGGSGSKRGDY

SEQ ID NO: 17933 - protein, 13 aa, Artificial Sequence
  Synthetic construct
ARGYSYSSGSYKF

SEQ ID NO: 17934 - protein, 17 aa, Artificial Sequence
  Synthetic construct
AKSVGSGSYYGADAFDI

SEQ ID NO: 17935 - protein, 16 aa, Artificial Sequence
  Synthetic construct
ARHLRRDNADYYGLDV

SEQ ID NO: 17936 - protein, 14 aa, Artificial Sequence
  Synthetic construct
ARVRHRFGESPLSY

SEQ ID NO: 17937 - protein, 22 aa, Artificial Sequence
  Synthetic construct
ARGGYCSSTSCYRAQKNGAFDI

SEQ ID NO: 17938 - protein, 17 aa, Artificial Sequence
  Synthetic construct
TTDRRPFWGSYLENFDY

SEQ ID NO: 17939 - protein, 19 aa, Artificial Sequence
  Synthetic construct
AREPVNTWPNYYYYYGFDV

SEQ ID NO: 17940 - protein, 17 aa, Artificial Sequence
  Synthetic construct
ARSPHDHESSGYYAFDI

SEQ ID NO: 17941 - protein, 17 aa, Artificial Sequence
  Synthetic construct
ARSPHDHESSGYYAFDI

SEQ ID NO: 17942 - protein, 14 aa, Artificial Sequence
  Synthetic construct
ARDCRVDCYSGFDF

SEQ ID NO: 17943 - protein, 14 aa, Artificial Sequence
  Synthetic construct
ARDSGDYSYYGMDV

SEQ ID NO: 17944 - protein, 13 aa, Artificial Sequence
  Synthetic construct
ARGPFPKNSRFDP

SEQ ID NO: 17945 - protein, 15 aa, Artificial Sequence
  Synthetic construct
ARDPPRLYDSSGYDY

SEQ ID NO: 17946 - protein, 24 aa, Artificial Sequence
  Synthetic construct
ARAPTYCSSTSCYRGPYSYYGMDV

SEQ ID NO: 17947 - protein, 15 aa, Artificial Sequence
  Synthetic construct
ARDGPRLGGLDAFDI

SEQ ID NO: 17948 - protein, 19 aa, Artificial Sequence
  Synthetic construct
TRQKYCSSTSCYYYYGMDV

SEQ ID NO: 17949 - protein, 16 aa, Artificial Sequence
  Synthetic construct
ARDKYFGSSGYNYFDY

SEQ ID NO: 17950 - protein, 19 aa, Artificial Sequence
  Synthetic construct
ARGNRIQLWSIYYYYGMDV

SEQ ID NO: 17951 - protein, 20 aa, Artificial Sequence
  Synthetic construct
ARGIYCSTINCFALVDWIDP

SEQ ID NO: 17952 - protein, 14 aa, Artificial Sequence
  Synthetic construct
AKGLTGWFLAPFDY

SEQ ID NO: 17953 - protein, 11 aa, Artificial Sequence
  Synthetic construct
TRVFAYDSPDY

SEQ ID NO: 17954 - protein, 17 aa, Artificial Sequence
  Synthetic construct
ARDGSDYDREDTGYFDY

SEQ ID NO: 17955 - protein, 15 aa, Artificial Sequence
  Synthetic construct
ARGGEYHYGSGRFDP

SEQ ID NO: 17956 - protein, 11 aa, Artificial Sequence
  Synthetic construct
ARGALWFGETK

SEQ ID NO: 17957 - protein, 20 aa, Artificial Sequence
  Synthetic construct
ARDRSTWFSGKYHLRGAFDM

SEQ ID NO: 17958 - protein, 13 aa, Artificial Sequence
  Synthetic construct
ARRMTTGLWAFDI

SEQ ID NO: 17959 - protein, 22 aa, Artificial Sequence
  Synthetic construct
ARDLIVVVPAGMVSGISYAMEV

SEQ ID NO: 17960 - protein, 21 aa, Artificial Sequence
  Synthetic construct
AKPVLNAYCSGGSCYLHWFDP

SEQ ID NO: 17961 - protein, 22 aa, Artificial Sequence
  Synthetic construct
ARGGGVVPAAIPLDHYYYGMDL

SEQ ID NO: 17962 - protein, 14 aa, Artificial Sequence
  Synthetic construct
AKDPFVGGNGRFDS

SEQ ID NO: 17963 - protein, 13 aa, Artificial Sequence
  Synthetic construct
ASLPMVVVTKNDY

SEQ ID NO: 17964 - protein, 12 aa, Artificial Sequence
  Synthetic construct
ARAYSDSWGFDY

SEQ ID NO: 17965 - protein, 16 aa, Artificial Sequence
  Synthetic construct
ARGTPYDDSGVVIAYF

SEQ ID NO: 17966 - protein, 17 aa, Artificial Sequence
  Synthetic construct
ARSPHDHESSGYYAFDI

SEQ ID NO: 17967 - protein, 20 aa, Artificial Sequence
  Synthetic construct
ARGSCDDGACHPAPASGFDP

SEQ ID NO: 17968 - protein, 19 aa, Artificial Sequence
  Synthetic construct
ARHYCSGTSCLISHWYFDL

SEQ ID NO: 17969 - protein, 15 aa, Artificial Sequence
  Synthetic construct
ARRGYSGFMGAWFDH

SEQ ID NO: 17970 - protein, 25 aa, Artificial Sequence
  Synthetic construct
ARARYRSLGYCSSTSCSKTYWYFDL

SEQ ID NO: 17971 - protein, 18 aa, Artificial Sequence
  Synthetic construct
AREPPRPYYYGSGSYYDY

SEQ ID NO: 17972 - protein, 14 aa, Artificial Sequence
  Synthetic construct
AKEDAHVYDDYVYS

SEQ ID NO: 17973 - protein, 16 aa, Artificial Sequence
  Synthetic construct
ARHLRRDNADYYGLDV

SEQ ID NO: 17974 - protein, 11 aa, Artificial Sequence
  Synthetic construct
AKDLGSSGGGY

SEQ ID NO: 17975 - protein, 14 aa, Artificial Sequence
  Synthetic construct
ARIHGGLPGTDFDY

SEQ ID NO: 17976 - protein, 23 aa, Artificial Sequence
  Synthetic construct
ARHGGGKGVRTPGGHRPAGVCDY

SEQ ID NO: 17977 - protein, 20 aa, Artificial Sequence
  Synthetic construct
AKGSLSTLVRGVIMRDWLDP

SEQ ID NO: 17978 - protein, 21 aa, Artificial Sequence
  Synthetic construct
ARGVGGYSSSWYPVSYYGMDV

SEQ ID NO: 17979 - protein, 18 aa, Artificial Sequence
  Synthetic construct
AKDWKDSSWIYYYYAMDV

SEQ ID NO: 17980 - protein, 13 aa, Artificial Sequence
  Synthetic construct
ARDLITVRGGFDF

SEQ ID NO: 17981 - protein, 19 aa, Artificial Sequence
  Synthetic construct
ARDRRTRAAKNYYYYGMDV

SEQ ID NO: 17982 - protein, 12 aa, Artificial Sequence
  Synthetic construct
ARFGAEQGNFDY

SEQ ID NO: 17983 - protein, 17 aa, Artificial Sequence
  Synthetic construct
ARDRRILTGYFTDAFDI

SEQ ID NO: 17984 - protein, 13 aa, Artificial Sequence
  Synthetic construct
VKDPPQTLIVARH

SEQ ID NO: 17985 - protein, 22 aa, Artificial Sequence
  Synthetic construct
VRGGPINYVSDTHYHEQPPFAY

SEQ ID NO: 17986 - protein, 15 aa, Artificial Sequence
  Synthetic construct
ARAKVGGGSYYALEY

SEQ ID NO: 17987 - protein, 11 aa, Artificial Sequence
  Synthetic construct
ARDGSILEMDP

SEQ ID NO: 17988 - protein, 14 aa, Artificial Sequence
  Synthetic construct
AKGKDTAVDDSIDV

SEQ ID NO: 17989 - protein, 19 aa, Artificial Sequence
  Synthetic construct
ANHGYCSSTSCYTRKGFDY

SEQ ID NO: 17990 - protein, 16 aa, Artificial Sequence
  Synthetic construct
ARHLRRDNADYYGLDV

SEQ ID NO: 17991 - protein, 15 aa, Artificial Sequence
  Synthetic construct
ARGGIMGATPPHFDY

SEQ ID NO: 17992 - protein, 17 aa, Artificial Sequence
  Synthetic construct
AKDLGKYSGSYPTWFDP

SEQ ID NO: 17993 - protein, 15 aa, Artificial Sequence
  Synthetic construct
AREYQGSGYEANFDY

SEQ ID NO: 17994 - protein, 19 aa, Artificial Sequence
  Synthetic construct
ARVGGGGEWYNSGWFSFDS

SEQ ID NO: 17995 - protein, 14 aa, Artificial Sequence
  Synthetic construct
ARRIATPTEDAFDI

SEQ ID NO: 17996 - protein, 22 aa, Artificial Sequence
  Synthetic construct
ARDPPRGYESLYYYDRDYYFDY

SEQ ID NO: 17997 - protein, 16 aa, Artificial Sequence
  Synthetic construct
ARHHRAGKVVPAAIDY

SEQ ID NO: 17998 - protein, 10 aa, Artificial Sequence
  Synthetic construct
TRSMVRGVDY

SEQ ID NO: 17999 - protein, 20 aa, Artificial Sequence
  Synthetic construct
ARGASIAAVGYYYYYYGMDV

SEQ ID NO: 18000 - protein, 14 aa, Artificial Sequence
  Synthetic construct
ARVRRAVAGGGFDP

SEQ ID NO: 18001 - protein, 15 aa, Artificial Sequence
  Synthetic construct
ARDGPRLGGLDAFDI

SEQ ID NO: 18002 - protein, 11 aa, Artificial Sequence
  Synthetic construct
AKGRGVRYFAQ

SEQ ID NO: 18003 - protein, 19 aa, Artificial Sequence
  Synthetic construct
ARVGGGAEWYSSGWLSFDY

SEQ ID NO: 18004 - protein, 16 aa, Artificial Sequence
  Synthetic construct
ARGSVTYYTFGGVFDY

SEQ ID NO: 18005 - protein, 20 aa, Artificial Sequence
  Synthetic construct
ARAAYHYDSSGYISEGYFDY

SEQ ID NO: 18006 - protein, 17 aa, Artificial Sequence
  Synthetic construct
AKERRYCSGGSCYYFDY

SEQ ID NO: 18007 - protein, 18 aa, Artificial Sequence
  Synthetic construct
ARRTFDYYGSGSYYWVDY

SEQ ID NO: 18008 - protein, 14 aa, Artificial Sequence
  Synthetic construct
ARGLRAYSGHGFDY

SEQ ID NO: 18009 - protein, 18 aa, Artificial Sequence
  Synthetic construct
ARTTYYYGSGSSGANFDY

SEQ ID NO: 18010 - protein, 13 aa, Artificial Sequence
  Synthetic construct
ATSTVSTSGYFDY

SEQ ID NO: 18011 - protein, 13 aa, Artificial Sequence
  Synthetic construct
ARAFHLVNNWHDP

SEQ ID NO: 18012 - protein, 10 aa, Artificial Sequence
  Synthetic construct
ARTSIAATHY

SEQ ID NO: 18013 - protein, 13 aa, Artificial Sequence
  Synthetic construct
AREGYSSGNSFDY

SEQ ID NO: 18014 - protein, 11 aa, Artificial Sequence
  Synthetic construct
ARGLTRSAHDY

SEQ ID NO: 18015 - protein, 9 aa, Artificial Sequence
  Synthetic construct
AREHSYGTY

SEQ ID NO: 18016 - protein, 18 aa, Artificial Sequence
  Synthetic construct
ARSAKRELGGSRGDPFDP

SEQ ID NO: 18017 - protein, 23 aa, Artificial Sequence
  Synthetic construct
ARGGYCSSTSCYTGRTHSRVGDY

SEQ ID NO: 18018 - protein, 13 aa, Artificial Sequence
  Synthetic construct
ATTPTCTGDCFDY

SEQ ID NO: 18019 - protein, 12 aa, Artificial Sequence
  Synthetic construct
ARRAVADDPFDI

SEQ ID NO: 18020 - protein, 12 aa, Artificial Sequence
  Synthetic construct
ARAYSDSWGFDY

SEQ ID NO: 18021 - protein, 17 aa, Artificial Sequence
  Synthetic construct
ARSPHDHESSGYYAFDI

SEQ ID NO: 18022 - protein, 19 aa, Artificial Sequence
  Synthetic construct
ARDLVAYSSGWYGGSWLAP

SEQ ID NO: 18023 - protein, 21 aa, Artificial Sequence
  Synthetic construct
ARQGTYYYGSGSYSTRGSFDY

SEQ ID NO: 18024 - protein, 13 aa, Artificial Sequence
  Synthetic construct
ARRISVAGTSFDY

SEQ ID NO: 18025 - protein, 17 aa, Artificial Sequence
  Synthetic construct
ARDFGVDVLLWFGAFDY

SEQ ID NO: 18026 - protein, 15 aa, Artificial Sequence
  Synthetic construct
ARGDGSYFGDRFMDT

SEQ ID NO: 18027 - protein, 19 aa, Artificial Sequence
  Synthetic construct
ARVVGSGSYRWDTTYFFDY

SEQ ID NO: 18028 - protein, 11 aa, Artificial Sequence
  Synthetic construct
AKGRLLREPDY

SEQ ID NO: 18029 - protein, 16 aa, Artificial Sequence
  Synthetic construct
TRGGYSGYDWVPGIDY

SEQ ID NO: 18030 - protein, 20 aa, Artificial Sequence
  Synthetic construct
VKDFHAGGASYDFWSGLFDR

SEQ ID NO: 18031 - protein, 19 aa, Artificial Sequence
  Synthetic construct
ARDYTSETLLGYFYYAMDV

SEQ ID NO: 18032 - protein, 19 aa, Artificial Sequence
  Synthetic construct
AKYYYDSSGYYYDVDAFDI

SEQ ID NO: 18033 - protein, 13 aa, Artificial Sequence
  Synthetic construct
VKMRTAVVGVTPL

SEQ ID NO: 18034 - protein, 16 aa, Artificial Sequence
  Synthetic construct
ARHPPNDYVSGRTFDY

SEQ ID NO: 18035 - protein, 14 aa, Artificial Sequence
  Synthetic construct
ARGVFDTNGFYYAY

SEQ ID NO: 18036 - protein, 19 aa, Artificial Sequence
  Synthetic construct
ARDRGYCSSTSCYRAWFDP

SEQ ID NO: 18037 - protein, 17 aa, Artificial Sequence
  Synthetic construct
AKERSSSGWYERGYFQH

SEQ ID NO: 18038 - protein, 16 aa, Artificial Sequence
  Synthetic construct
VKDRKWLRFSGGPFDY

SEQ ID NO: 18039 - protein, 13 aa, Artificial Sequence
  Synthetic construct
ARRKYSSSSFFDY

SEQ ID NO: 18040 - protein, 17 aa, Artificial Sequence
  Synthetic construct
ARHVYSSSWYGGRSIDY

SEQ ID NO: 18041 - protein, 14 aa, Artificial Sequence
  Synthetic construct
ARQRGNYEARAFDI

SEQ ID NO: 18042 - protein, 20 aa, Artificial Sequence
  Synthetic construct
ARDSAVGATRGDYYYYGMDV

SEQ ID NO: 18043 - protein, 21 aa, Artificial Sequence
  Synthetic construct
ARSRLIPAATPRAVPNHCFDY

SEQ ID NO: 18044 - protein, 18 aa, Artificial Sequence
  Synthetic construct
AREQRYCTSVTCYGAVDS

SEQ ID NO: 18045 - protein, 15 aa, Artificial Sequence
  Synthetic construct
VTERQGSEGHSIFDH

SEQ ID NO: 18046 - protein, 24 aa, Artificial Sequence
  Synthetic construct
AKDRDRAYRPAFWFGDSPSYGMDV

SEQ ID NO: 18047 - protein, 14 aa, Artificial Sequence
  Synthetic construct
TTEDWNLYNYAMGV

SEQ ID NO: 18048 - protein, 15 aa, Artificial Sequence
  Synthetic construct
AKAPGASYYYYGMDV

SEQ ID NO: 18049 - protein, 16 aa, Artificial Sequence
  Synthetic construct
TRPGYSDNYYYYGMDV

SEQ ID NO: 18050 - protein, 16 aa, Artificial Sequence
  Synthetic construct
AKDTKKSMVRGGRFDY

SEQ ID NO: 18051 - protein, 14 aa, Artificial Sequence
  Synthetic construct
AKRGFTMVRGAYDY

SEQ ID NO: 18052 - protein, 21 aa, Artificial Sequence
  Synthetic construct
ARVVRRGSGSYRPYYYYGMDV

SEQ ID NO: 18053 - protein, 14 aa, Artificial Sequence
  Synthetic construct
VRDKVDTPFWELDP

SEQ ID NO: 18054 - protein, 17 aa, Artificial Sequence
  Synthetic construct
ARDYYDSSGYEGWGMDV

SEQ ID NO: 18055 - protein, 11 aa, Artificial Sequence
  Synthetic construct
ARDLARGYFDY

SEQ ID NO: 18056 - protein, 14 aa, Artificial Sequence
  Synthetic construct
ARADGFLSAAEFDH

SEQ ID NO: 18057 - protein, 12 aa, Artificial Sequence
  Synthetic construct
ARARTTYNRLDF

SEQ ID NO: 18058 - protein, 16 aa, Artificial Sequence
  Synthetic construct
ARHLRRDNADYYGLDV

SEQ ID NO: 18059 - protein, 20 aa, Artificial Sequence
  Synthetic construct
TTLASWGNCSETRCFDEFDV

SEQ ID NO: 18060 - protein, 13 aa, Artificial Sequence
  Synthetic construct
AIFPGVDTVVADY

SEQ ID NO: 18061 - protein, 13 aa, Artificial Sequence
  Synthetic construct
ARARMTGTKIPAY

SEQ ID NO: 18062 - protein, 16 aa, Artificial Sequence
  Synthetic construct
AKEPAAAGPYYYGMDV

SEQ ID NO: 18063 - protein, 21 aa, Artificial Sequence
  Synthetic construct
ARVGLNRRGVIISYYYYGMDV

SEQ ID NO: 18064 - protein, 17 aa, Artificial Sequence
  Synthetic construct
AKGGGYSYGRIYWYFDL

SEQ ID NO: 18065 - protein, 14 aa, Artificial Sequence
  Synthetic construct
TRLKRYLYKLFAGF

SEQ ID NO: 18066 - protein, 18 aa, Artificial Sequence
  Synthetic construct
AKLHLAYYDILTGYQFDY

SEQ ID NO: 18067 - protein, 24 aa, Artificial Sequence
  Synthetic construct
ARRPQYLLLSMTTGRRHHDFVMDV

SEQ ID NO: 18068 - protein, 12 aa, Artificial Sequence
  Synthetic construct
ARERLTFGGIDY

SEQ ID NO: 18069 - protein, 14 aa, Artificial Sequence
  Synthetic construct
ARNSGSYYARSFDY

SEQ ID NO: 18070 - protein, 21 aa, Artificial Sequence
  Synthetic construct
ATDEGYGYCIGAGGCYSAMDS

SEQ ID NO: 18071 - protein, 18 aa, Artificial Sequence
  Synthetic construct
ARTMGFRGFSYYYYGLDV

SEQ ID NO: 18072 - protein, 13 aa, Artificial Sequence
  Synthetic construct
ARAPGNGKWEITY

SEQ ID NO: 18073 - protein, 16 aa, Artificial Sequence
  Synthetic construct
ARGAVRFSYYYYGMDV

SEQ ID NO: 18074 - protein, 13 aa, Artificial Sequence
  Synthetic construct
AKIIVVVPGCFDY

SEQ ID NO: 18075 - protein, 14 aa, Artificial Sequence
  Synthetic construct
ARIVWKSGSRLSDY

SEQ ID NO: 18076 - protein, 17 aa, Artificial Sequence
  Synthetic construct
AHTVYKFAPGTYYYFDH

SEQ ID NO: 18077 - protein, 11 aa, Artificial Sequence
  Synthetic construct
AKGGVFQLTGY

SEQ ID NO: 18078 - protein, 12 aa, Artificial Sequence
  Synthetic construct
ARARTTYNRLDF

SEQ ID NO: 18079 - protein, 12 aa, Artificial Sequence
  Synthetic construct
ARHRIVAGGFDY

SEQ ID NO: 18080 - protein, 16 aa, Artificial Sequence
  Synthetic construct
STDLWERHRAPAQSHH

SEQ ID NO: 18081 - protein, 18 aa, Artificial Sequence
  Synthetic construct
ARLRKVLRYFDWLPHFDY

SEQ ID NO: 18082 - protein, 12 aa, Artificial Sequence
  Synthetic construct
AKGLNYLDAFDI

SEQ ID NO: 18083 - protein, 20 aa, Artificial Sequence
  Synthetic construct
TTGYSGYDFLAKKERYYFDY

SEQ ID NO: 18084 - protein, 15 aa, Artificial Sequence
  Synthetic construct
AKDVQAAAPYWHLDV

SEQ ID NO: 18085 - protein, 27 aa, Artificial Sequence
  Synthetic construct
ASSVEYSSSWSKQGVKSDYYYYYGMDV

SEQ ID NO: 18086 - protein, 14 aa, Artificial Sequence
  Synthetic construct
ARDWALGAKFYFDY

SEQ ID NO: 18087 - protein, 8 aa, Artificial Sequence
  Synthetic construct
ARLGSADY

SEQ ID NO: 18088 - protein, 15 aa, Artificial Sequence
  Synthetic construct
ARDGRAYNYGYGMDV

SEQ ID NO: 18089 - protein, 19 aa, Artificial Sequence
  Synthetic construct
ARVRYNWNEGRYYYYGMDV

SEQ ID NO: 18090 - protein, 12 aa, Artificial Sequence
  Synthetic construct
AREVNYYSAFDD

SEQ ID NO: 18091 - protein, 8 aa, Artificial Sequence
  Synthetic construct
ASGGSLGY

SEQ ID NO: 18092 - protein, 15 aa, Artificial Sequence
  Synthetic construct
ARSLMVRGVIHGMDV

SEQ ID NO: 18093 - protein, 17 aa, Artificial Sequence
  Synthetic construct
ARGQYCTNGVCYFEIDY

SEQ ID NO: 18094 - protein, 19 aa, Artificial Sequence
  Synthetic construct
ARVRGYCSSTSCYPDAFDI

SEQ ID NO: 18095 - protein, 13 aa, Artificial Sequence
  Synthetic construct
AKDAVEYSSVFDY

SEQ ID NO: 18096 - protein, 20 aa, Artificial Sequence
  Synthetic construct
ARRNYYGSGSYYTPYNWFDP

SEQ ID NO: 18097 - protein, 17 aa, Artificial Sequence
  Synthetic construct
ARDAAYYYDRSRRWFDS

SEQ ID NO: 18098 - protein, 15 aa, Artificial Sequence
  Synthetic construct
ASLNMGYSDTYSFDY

SEQ ID NO: 18099 - protein, 13 aa, Artificial Sequence
  Synthetic construct
ARGPSRSTPIVAY

SEQ ID NO: 18100 - protein, 16 aa, Artificial Sequence
  Synthetic construct
ARSPMIRGVPAALFDY

SEQ ID NO: 18101 - protein, 25 aa, Artificial Sequence
  Synthetic construct
ARDHRYCSSTSCYKGEPYYYYGMDV

SEQ ID NO: 18102 - protein, 11 aa, Artificial Sequence
  Synthetic construct
VKEDTPLVFDS

SEQ ID NO: 18103 - protein, 9 aa, Artificial Sequence
  Synthetic construct
AKDYFTFDS

SEQ ID NO: 18104 - protein, 17 aa, Artificial Sequence
  Synthetic construct
AKDPTTVGRYYYYGMDV

SEQ ID NO: 18105 - protein, 16 aa, Artificial Sequence
  Synthetic construct
ARGRTRGVYYYYGMDV

SEQ ID NO: 18106 - protein, 13 aa, Artificial Sequence
  Synthetic construct
ARAFHLVNNWHDP

SEQ ID NO: 18107 - protein, 14 aa, Artificial Sequence
  Synthetic construct
AKVHRYNWNPPSGY

SEQ ID NO: 18108 - protein, 12 aa, Artificial Sequence
  Synthetic construct
ARAYSDSWGFDY

SEQ ID NO: 18109 - protein, 14 aa, Artificial Sequence
  Synthetic construct
AREELRDLLYYFDY

SEQ ID NO: 18110 - protein, 12 aa, Artificial Sequence
  Synthetic construct
ARARGIRGVMAY

SEQ ID NO: 18111 - protein, 11 aa, Artificial Sequence
  Synthetic construct
AVKWESRSLDY

SEQ ID NO: 18112 - protein, 17 aa, Artificial Sequence
  Synthetic construct
ARHRMVRGVRWIPPFDP

SEQ ID NO: 18113 - protein, 21 aa, Artificial Sequence
  Synthetic construct
ARAFGSSSWYTRGRPVYGMDV

SEQ ID NO: 18114 - protein, 15 aa, Artificial Sequence
  Synthetic construct
ARPQIRVGALTHFDY

SEQ ID NO: 18115 - protein, 15 aa, Artificial Sequence
  Synthetic construct
ARVRGRQQLPNWFDP

SEQ ID NO: 18116 - protein, 22 aa, Artificial Sequence
  Synthetic construct
ARHVANCSSTSCYARRVGWFDP

SEQ ID NO: 18117 - protein, 14 aa, Artificial Sequence
  Synthetic construct
ARDARGYEGYHLHY

SEQ ID NO: 18118 - protein, 15 aa, Artificial Sequence
  Synthetic construct
ANFFGSSWKRGWFDS

SEQ ID NO: 18119 - protein, 16 aa, Artificial Sequence
  Synthetic construct
TTGYRHWLVRGRYFDY

SEQ ID NO: 18120 - protein, 20 aa, Artificial Sequence
  Synthetic construct
AKSEATVTGGRQYYYYGMDV

SEQ ID NO: 18121 - protein, 9 aa, Artificial Sequence
  Synthetic construct
ATLVTSGGG

SEQ ID NO: 18122 - protein, 13 aa, Artificial Sequence
  Synthetic construct
AKGSPSGRWYFDY

SEQ ID NO: 18123 - protein, 13 aa, Artificial Sequence
  Synthetic construct
ARGRGTGSDYVDS

SEQ ID NO: 18124 - protein, 15 aa, Artificial Sequence
  Synthetic construct
ARGIVATTRPYYFDY

SEQ ID NO: 18125 - protein, 15 aa, Artificial Sequence
  Synthetic construct
ARVVPVYSSGRRSDY

SEQ ID NO: 18126 - protein, 21 aa, Artificial Sequence
  Synthetic construct
ARYRATAYYYGSGSSPYYFDY

SEQ ID NO: 18127 - protein, 13 aa, Artificial Sequence
  Synthetic construct
ARGSTGTTPDFDY

SEQ ID NO: 18128 - protein, 14 aa, Artificial Sequence
  Synthetic construct
ARGGVTTVTTGFDP

SEQ ID NO: 18129 - protein, 18 aa, Artificial Sequence
  Synthetic construct
ARQYNDILSGYELGWFDP

SEQ ID NO: 18130 - protein, 16 aa, Artificial Sequence
  Synthetic construct
ARVEYAYSYGNYYFDF

SEQ ID NO: 18131 - protein, 16 aa, Artificial Sequence
  Synthetic construct
AKSGVGLIVGATIVYY

SEQ ID NO: 18132 - protein, 27 aa, Artificial Sequence
  Synthetic construct
ARAGMEGYCSSTSCHNERYYYYYGMDV

SEQ ID NO: 18133 - protein, 15 aa, Artificial Sequence
  Synthetic construct
AMGTIAWAGRKGADF

SEQ ID NO: 18134 - protein, 8 aa, Artificial Sequence
  Synthetic construct
ASRGSFDM

SEQ ID NO: 18135 - protein, 19 aa, Artificial Sequence
  Synthetic construct
ARVGGGDEWYSSGWFSFDN

SEQ ID NO: 18136 - protein, 16 aa, Artificial Sequence
  Synthetic construct
ARDRPPTDFSGWTFDS

SEQ ID NO: 18137 - protein, 14 aa, Artificial Sequence
  Synthetic construct
ARVWWTGSDRGFDY

SEQ ID NO: 18138 - protein, 18 aa, Artificial Sequence
  Synthetic construct
ARGAGIAALPRRKGGMDV

SEQ ID NO: 18139 - protein, 12 aa, Artificial Sequence
  Synthetic construct
AGADYAENWFDP

SEQ ID NO: 18140 - protein, 16 aa, Artificial Sequence
  Synthetic construct
ARGKDTPAYYYYLMDV

SEQ ID NO: 18141 - protein, 15 aa, Artificial Sequence
  Synthetic construct
ARDKADDGATTTYDL

SEQ ID NO: 18142 - protein, 15 aa, Artificial Sequence
  Synthetic construct
ARDRDYNGERAYFDS

SEQ ID NO: 18143 - protein, 17 aa, Artificial Sequence
  Synthetic construct
ARSPHDHESSGYYAFDI

SEQ ID NO: 18144 - protein, 22 aa, Artificial Sequence
  Synthetic construct
ARGLYYDFWSGYYDYYYYGMDV

SEQ ID NO: 18145 - protein, 11 aa, Artificial Sequence
  Synthetic construct
ARDQSSGWYLD

SEQ ID NO: 18146 - protein, 17 aa, Artificial Sequence
  Synthetic construct
AHRRAEGGNWDGGCLDV

SEQ ID NO: 18147 - protein, 21 aa, Artificial Sequence
  Synthetic construct
ARSRYCSSTSCYSGQTEYFQH

SEQ ID NO: 18148 - protein, 25 aa, Artificial Sequence
  Synthetic construct
VRHKNLRETTFANERSGSWHSYFDY

SEQ ID NO: 18149 - protein, 19 aa, Artificial Sequence
  Synthetic construct
TRATTHYNSIWATEGGMDV

SEQ ID NO: 18150 - protein, 17 aa, Artificial Sequence
  Synthetic construct
ARARGNRNYYYYYGMDV

SEQ ID NO: 18151 - protein, 15 aa, Artificial Sequence
  Synthetic construct
ARRGYSAFMGAWFDY

SEQ ID NO: 18152 - protein, 17 aa, Artificial Sequence
  Synthetic construct
ARGGLRWVLSGSYWVDY

SEQ ID NO: 18153 - protein, 12 aa, Artificial Sequence
  Synthetic construct
ATDDSGTGYSDH

SEQ ID NO: 18154 - protein, 16 aa, Artificial Sequence
  Synthetic construct
VRLALGSYSYYRQVDY

SEQ ID NO: 18155 - protein, 16 aa, Artificial Sequence
  Synthetic construct
ARHLRRDNADYYGLDV

SEQ ID NO: 18156 - protein, 18 aa, Artificial Sequence
  Synthetic construct
AREGRTRRWLQLCGPFDY

SEQ ID NO: 18157 - protein, 17 aa, Artificial Sequence
  Synthetic construct
TRAELPPDYGDDVYFNH

SEQ ID NO: 18158 - protein, 15 aa, Artificial Sequence
  Synthetic construct
ARGDDYNYILYQFDY

SEQ ID NO: 18159 - protein, 18 aa, Artificial Sequence
  Synthetic construct
GRNSVQSSVMIRHYVVDV

SEQ ID NO: 18160 - protein, 14 aa, Artificial Sequence
  Synthetic construct
ARYEGGHPPGGMDV

SEQ ID NO: 18161 - protein, 12 aa, Artificial Sequence
  Synthetic construct
ARTDAIDFLFYY

SEQ ID NO: 18162 - protein, 14 aa, Artificial Sequence
  Synthetic construct
ARARDGYSPDHFDY

SEQ ID NO: 18163 - protein, 17 aa, Artificial Sequence
  Synthetic construct
AHRRAEGGNWDGGCLDV

SEQ ID NO: 18164 - protein, 18 aa, Artificial Sequence
  Synthetic construct
AKGPNMAYGDYYYYGMDV

SEQ ID NO: 18165 - protein, 8 aa, Artificial Sequence
  Synthetic construct
AKTIVGEQ

SEQ ID NO: 18166 - protein, 21 aa, Artificial Sequence
  Synthetic construct
ARGTGRSIPFVRGVKQTPFDY

SEQ ID NO: 18167 - protein, 16 aa, Artificial Sequence
  Synthetic construct
AKFSGWEGGHQYYFDD

SEQ ID NO: 18168 - protein, 16 aa, Artificial Sequence
  Synthetic construct
ARGMKGYAYALPLVDY

SEQ ID NO: 18169 - protein, 11 aa, Artificial Sequence
  Synthetic construct
ARVRTVTSLDV

SEQ ID NO: 18170 - protein, 14 aa, Artificial Sequence
  Synthetic construct
VRARGQLWPNAFDY

SEQ ID NO: 18171 - protein, 16 aa, Artificial Sequence
  Synthetic construct
ARGIAAQVRLGYYFDY

SEQ ID NO: 18172 - protein, 11 aa, Artificial Sequence
  Synthetic construct
LSIVGANHRQR

SEQ ID NO: 18173 - protein, 12 aa, Artificial Sequence
  Synthetic construct
GRVDYNEDGTAY

SEQ ID NO: 18174 - protein, 16 aa, Artificial Sequence
  Synthetic construct
AKESRRESYYYYGMDV

SEQ ID NO: 18175 - protein, 26 aa, Artificial Sequence
  Synthetic construct
ARDADLGRGYSYGYWLEFDYYNGMDV

SEQ ID NO: 18176 - protein, 15 aa, Artificial Sequence
  Synthetic construct
ARPAALAARMYYFDY

SEQ ID NO: 18177 - protein, 13 aa, Artificial Sequence
  Synthetic construct
AKSRYFDWLLHDY

SEQ ID NO: 18178 - protein, 9 aa, Artificial Sequence
  Synthetic construct
ARDQPPNDY

SEQ ID NO: 18179 - protein, 14 aa, Artificial Sequence
  Synthetic construct
ARGYCSGGSCYFDY

SEQ ID NO: 18180 - protein, 14 aa, Artificial Sequence
  Synthetic construct
AKGLTGWFLAPFDY

SEQ ID NO: 18181 - protein, 14 aa, Artificial Sequence
  Synthetic construct
ARTRPLYYYYGMDV

SEQ ID NO: 18182 - protein, 15 aa, Artificial Sequence
  Synthetic construct
ARDGPRLGGLDAFDI

SEQ ID NO: 18183 - protein, 17 aa, Artificial Sequence
  Synthetic construct
AKVASRYSSSWYRGVDY

SEQ ID NO: 18184 - protein, 13 aa, Artificial Sequence
  Synthetic construct
ARENADNYYGMDV

SEQ ID NO: 18185 - protein, 11 aa, Artificial Sequence
  Synthetic construct
VTSISARLQAA

SEQ ID NO: 18186 - protein, 16 aa, Artificial Sequence
  Synthetic construct
AKEIQYYDSRENWVDP

SEQ ID NO: 18187 - protein, 11 aa, Artificial Sequence
  Synthetic construct
ARARGGWYFDY

SEQ ID NO: 18188 - protein, 20 aa, Artificial Sequence
  Synthetic construct
ARGIVVVPTATIVNYYGLDV

SEQ ID NO: 18189 - protein, 13 aa, Artificial Sequence
  Synthetic construct
AKVRGYGCYAFDY

SEQ ID NO: 18190 - protein, 19 aa, Artificial Sequence
  Synthetic construct
AREDYFVLTGHTTLGALDI

SEQ ID NO: 18191 - protein, 19 aa, Artificial Sequence
  Synthetic construct
ARGPRIVEPSVYYYYGMDV

SEQ ID NO: 18192 - protein, 17 aa, Artificial Sequence
  Synthetic construct
ARSPHDHESSGYYAFDI

SEQ ID NO: 18193 - protein, 17 aa, Artificial Sequence
  Synthetic construct
ARFITMVRGDDNKGFDY

SEQ ID NO: 18194 - protein, 14 aa, Artificial Sequence
  Synthetic construct
ARRGYYDSSGYSVY

SEQ ID NO: 18195 - protein, 20 aa, Artificial Sequence
  Synthetic construct
ATGSEDIGVVPATKDYGMDV

SEQ ID NO: 18196 - protein, 16 aa, Artificial Sequence
  Synthetic construct
ARDPRRGSSWHWYFDL

SEQ ID NO: 18197 - protein, 18 aa, Artificial Sequence
  Synthetic construct
ARHWPSMEQQLVRGGFDP

SEQ ID NO: 18198 - protein, 11 aa, Artificial Sequence
  Synthetic construct
ARGIWAEPADY

SEQ ID NO: 18199 - protein, 14 aa, Artificial Sequence
  Synthetic construct
ARVYYGSRWGAFDI

SEQ ID NO: 18200 - protein, 25 aa, Artificial Sequence
  Synthetic construct
AKDRENYLGSGSYSNGLHYKYGLDV

SEQ ID NO: 18201 - protein, 11 aa, Artificial Sequence
  Synthetic construct
ARDVSWRIFDL

SEQ ID NO: 18202 - protein, 8 aa, Artificial Sequence
  Synthetic construct
MGYGGNSV

SEQ ID NO: 18203 - protein, 14 aa, Artificial Sequence
  Synthetic construct
AKYEYNWNPGYFDY

SEQ ID NO: 18204 - protein, 17 aa, Artificial Sequence
  Synthetic construct
AREADIIVATTNAAFDI

SEQ ID NO: 18205 - protein, 18 aa, Artificial Sequence
  Synthetic construct
ARSRGECSSARCQDAFDI

SEQ ID NO: 18206 - protein, 10 aa, Artificial Sequence
  Synthetic construct
ARLDFRSSDY

SEQ ID NO: 18207 - protein, 16 aa, Artificial Sequence
  Synthetic construct
ARKLNMVRGVTGRFDP

SEQ ID NO: 18208 - protein, 18 aa, Artificial Sequence
  Synthetic construct
AKWPVGYCSSINCREGDV

SEQ ID NO: 18209 - protein, 17 aa, Artificial Sequence
  Synthetic construct
ARGPPRTIVATAPWLEY

SEQ ID NO: 18210 - protein, 20 aa, Artificial Sequence
  Synthetic construct
AGEFVIPAGKSQYYYYGMDV

SEQ ID NO: 18211 - protein, 18 aa, Artificial Sequence
  Synthetic construct
ARDLVVPAAIYLSHGMDV

SEQ ID NO: 18212 - protein, 21 aa, Artificial Sequence
  Synthetic construct
ARDSPAQYYYDDSGDSDALDT

SEQ ID NO: 18213 - protein, 21 aa, Artificial Sequence
  Synthetic construct
ARVARPRGWSGQQLVERGFDY

SEQ ID NO: 18214 - protein, 16 aa, Artificial Sequence
  Synthetic construct
ARHLRRDNADYYGLDV

SEQ ID NO: 18215 - protein, 16 aa, Artificial Sequence
  Synthetic construct
ARHLRRDNADYYGLDV

SEQ ID NO: 18216 - protein, 16 aa, Artificial Sequence
  Synthetic construct
ARELGQQLVYYYGMDV

SEQ ID NO: 18217 - protein, 17 aa, Artificial Sequence
  Synthetic construct
AKGHPSGYSSSWYGFDY

SEQ ID NO: 18218 - protein, 17 aa, Artificial Sequence
  Synthetic construct
ARDKDRGVMTPREAFDI

SEQ ID NO: 18219 - protein, 19 aa, Artificial Sequence
  Synthetic construct
AKGRRAGGVTAAGNQPFDS

SEQ ID NO: 18220 - protein, 13 aa, Artificial Sequence
  Synthetic construct
ARASWKGGSKFDP

SEQ ID NO: 18221 - protein, 15 aa, Artificial Sequence
  Synthetic construct
AKSCHRSRYYYGMDV

SEQ ID NO: 18222 - protein, 10 aa, Artificial Sequence
  Synthetic construct
STDRGGSFNR

SEQ ID NO: 18223 - protein, 18 aa, Artificial Sequence
  Synthetic construct
ARQYFEILTGFTPGWFDP

SEQ ID NO: 18224 - protein, 17 aa, Artificial Sequence
  Synthetic construct
AKDFSSSGEVVSNWFDT

SEQ ID NO: 18225 - protein, 22 aa, Artificial Sequence
  Synthetic construct
ARDRGYSYGNPRHYYYYYGMDV

SEQ ID NO: 18226 - protein, 20 aa, Artificial Sequence
  Synthetic construct
AKEAGARMPKHYYYYYGMDV

SEQ ID NO: 18227 - protein, 21 aa, Artificial Sequence
  Synthetic construct
ARGMKRRAYYYDSSGSNGMDV

SEQ ID NO: 18228 - protein, 17 aa, Artificial Sequence
  Synthetic construct
ARDLIRFVAAAGTWFDP

SEQ ID NO: 18229 - protein, 13 aa, Artificial Sequence
  Synthetic construct
ARLPFPGAEGFDQ

SEQ ID NO: 18230 - protein, 12 aa, Artificial Sequence
  Synthetic construct
ARRIAAAEKFDF

SEQ ID NO: 18231 - protein, 20 aa, Artificial Sequence
  Synthetic construct
ARDSETSNLNYYGSGSYYNH

SEQ ID NO: 18232 - protein, 14 aa, Artificial Sequence
  Synthetic construct
ARGRNSSHYDVFDV

SEQ ID NO: 18233 - protein, 14 aa, Artificial Sequence
  Synthetic construct
ARDGLRFGDLFLDY

SEQ ID NO: 18234 - protein, 12 aa, Artificial Sequence
  Synthetic construct
ARERLTFGGIDY

SEQ ID NO: 18235 - protein, 25 aa, Artificial Sequence
  Synthetic construct
ARHEMLGDYSAYATSGGHKRYAMDV

SEQ ID NO: 18236 - protein, 12 aa, Artificial Sequence
  Synthetic construct
TERGPNWGFFRY

SEQ ID NO: 18237 - protein, 14 aa, Artificial Sequence
  Synthetic construct
ARVGDGGYGPNFDH

SEQ ID NO: 18238 - protein, 20 aa, Artificial Sequence
  Synthetic construct
ARSNFGSGSFLFYYYYGIDV

SEQ ID NO: 18239 - protein, 12 aa, Artificial Sequence
  Synthetic construct
ASATTVIGAFDI

SEQ ID NO: 18240 - protein, 17 aa, Artificial Sequence
  Synthetic construct
ARLIFDWLLGAMYYFDY

SEQ ID NO: 18241 - protein, 17 aa, Artificial Sequence
  Synthetic construct
ARSPHDHESSGYYAFDI

SEQ ID NO: 18242 - protein, 21 aa, Artificial Sequence
  Synthetic construct
ARDHRRITGTKEGYYYYGMDV

SEQ ID NO: 18243 - protein, 16 aa, Artificial Sequence
  Synthetic construct
ARDRHSYPSNIGFIDY

SEQ ID NO: 18244 - protein, 18 aa, Artificial Sequence
  Synthetic construct
ARTMGFRGFSYYYYGLDV

SEQ ID NO: 18245 - protein, 16 aa, Artificial Sequence
  Synthetic construct
ARHLRRDNADYYGLDV

SEQ ID NO: 18246 - protein, 19 aa, Artificial Sequence
  Synthetic construct
ARERGYSYGYHRSGWYFDL

SEQ ID NO: 18247 - protein, 13 aa, Artificial Sequence
  Synthetic construct
ARTMVRGRMGFDY

SEQ ID NO: 18248 - protein, 17 aa, Artificial Sequence
  Synthetic construct
ARDLDFHTSFHYATFHY

SEQ ID NO: 18249 - protein, 17 aa, Artificial Sequence
  Synthetic construct
VRLDCVDTRCFTTPPDY

SEQ ID NO: 18250 - protein, 20 aa, Artificial Sequence
  Synthetic construct
ASDRVIAAAGNYYYYYGMDV

SEQ ID NO: 18251 - protein, 15 aa, Artificial Sequence
  Synthetic construct
ARRRYSSSWYDAFDI

SEQ ID NO: 18252 - protein, 13 aa, Artificial Sequence
  Synthetic construct
ASMTTAWYYGMDV

SEQ ID NO: 18253 - protein, 16 aa, Artificial Sequence
  Synthetic construct
ARCGGGRCNQAGAMDV

SEQ ID NO: 18254 - protein, 22 aa, Artificial Sequence
  Synthetic construct
ARQGSRRGYSYGKRYYYYGMDV

SEQ ID NO: 18255 - protein, 15 aa, Artificial Sequence
  Synthetic construct
ARGGDYDSSGYAFDY

SEQ ID NO: 18256 - protein, 10 aa, Artificial Sequence
  Synthetic construct
ARYTDYRFDF

SEQ ID NO: 18257 - protein, 20 aa, Artificial Sequence
  Synthetic construct
AGEFVIPAGKSQYYYYGMDV

SEQ ID NO: 18258 - protein, 12 aa, Artificial Sequence
  Synthetic construct
ARCVVTTDPLDI

SEQ ID NO: 18259 - protein, 13 aa, Artificial Sequence
  Synthetic construct
ARGSGSISCVLDV

SEQ ID NO: 18260 - protein, 17 aa, Artificial Sequence
  Synthetic construct
AHRRAEGGNWDGGCLDV

SEQ ID NO: 18261 - protein, 14 aa, Artificial Sequence
  Synthetic construct
ARYEGGHPPGGMDV

SEQ ID NO: 18262 - protein, 12 aa, Artificial Sequence
  Synthetic construct
ARSYSSSWYFEF

SEQ ID NO: 18263 - protein, 19 aa, Artificial Sequence
  Synthetic construct
ARVGGGSEWYNSGWFSFDS

SEQ ID NO: 18264 - protein, 19 aa, Artificial Sequence
  Synthetic construct
ARGHVLRFLRPHPGSWFDP

SEQ ID NO: 18265 - protein, 16 aa, Artificial Sequence
  Synthetic construct
AAQRAWVFRVQMWAEY

SEQ ID NO: 18266 - protein, 19 aa, Artificial Sequence
  Synthetic construct
AKGFWACTPYTCSTGPFDS

SEQ ID NO: 18267 - protein, 16 aa, Artificial Sequence
  Synthetic construct
ARHLRRDNADYYGLDV

SEQ ID NO: 18268 - protein, 23 aa, Artificial Sequence
  Synthetic construct
ARDRKDLYCGNDCFYYYYYGMDV

SEQ ID NO: 18269 - protein, 15 aa, Artificial Sequence
  Synthetic construct
ARGLRGPRRFGEFLY

SEQ ID NO: 18270 - protein, 21 aa, Artificial Sequence
  Synthetic construct
ARERYVVVPAAGDYYYYGMDV

SEQ ID NO: 18271 - protein, 14 aa, Artificial Sequence
  Synthetic construct
ARDPGIAAGYGMDV

SEQ ID NO: 18272 - protein, 12 aa, Artificial Sequence
  Synthetic construct
ARAYSDSWGFDY

SEQ ID NO: 18273 - protein, 14 aa, Artificial Sequence
  Synthetic construct
VRDRGLRFLYGLDV

SEQ ID NO: 18274 - protein, 22 aa, Artificial Sequence
  Synthetic construct
ARVDHYYGSGSPGDYFYNGMDV

SEQ ID NO: 18275 - protein, 13 aa, Artificial Sequence
  Synthetic construct
ARDKWELLQGFDY

SEQ ID NO: 18276 - protein, 12 aa, Artificial Sequence
  Synthetic construct
ARFSLGVDAFDI

SEQ ID NO: 18277 - protein, 16 aa, Artificial Sequence
  Synthetic construct
ARHLRRDNADYYGLDV

SEQ ID NO: 18278 - protein, 16 aa, Artificial Sequence
  Synthetic construct
VRDMGWRSIAADGGDS

SEQ ID NO: 18279 - protein, 19 aa, Artificial Sequence
  Synthetic construct
ARGPKNYGSGRQLNNWFDP

SEQ ID NO: 18280 - protein, 13 aa, Artificial Sequence
  Synthetic construct
VRMEYDSGWYFDL

SEQ ID NO: 18281 - protein, 18 aa, Artificial Sequence
  Synthetic construct
ARASAGRDILTGYVPLDY

SEQ ID NO: 18282 - protein, 14 aa, Artificial Sequence
  Synthetic construct
AKALRISMTSKFDY

SEQ ID NO: 18283 - protein, 21 aa, Artificial Sequence
  Synthetic construct
ARGTYQNSAFWSGYFPHWFDP

SEQ ID NO: 18284 - protein, 14 aa, Artificial Sequence
  Synthetic construct
SRQKGLSGGTHFDH

SEQ ID NO: 18285 - protein, 15 aa, Artificial Sequence
  Synthetic construct
VHASGEKNRNDAFDI

SEQ ID NO: 18286 - protein, 20 aa, Artificial Sequence
  Synthetic construct
AKDQGRGVVTRLIYYYGMDV

SEQ ID NO: 18287 - protein, 22 aa, Artificial Sequence
  Synthetic construct
ARDLEYQLRVTHNQYFYYGMDV

SEQ ID NO: 18288 - protein, 10 aa, Artificial Sequence
  Synthetic construct
ATIYGDSFDY

SEQ ID NO: 18289 - protein, 14 aa, Artificial Sequence
  Synthetic construct
TTEDWNLYNYAMGV

SEQ ID NO: 18290 - protein, 17 aa, Artificial Sequence
  Synthetic construct
ATGEHSESSLQSPTLAY

SEQ ID NO: 18291 - protein, 20 aa, Artificial Sequence
  Synthetic construct
AGEFVIPAGKSQYYYYGMDV

SEQ ID NO: 18292 - protein, 9 aa, Artificial Sequence
  Synthetic construct
ARDDSGFDY

SEQ ID NO: 18293 - protein, 18 aa, Artificial Sequence
  Synthetic construct
EVMGVVVPAAKSIYGMDV

SEQ ID NO: 18294 - protein, 16 aa, Artificial Sequence
  Synthetic construct
ARDRDYSYATDWYFDL

SEQ ID NO: 18295 - protein, 12 aa, Artificial Sequence
  Synthetic construct
VRGGRQWLQIDS

SEQ ID NO: 18296 - protein, 22 aa, Artificial Sequence
  Synthetic construct
ARVDHYYGSGSPGDYFYNGMDV

SEQ ID NO: 18297 - protein, 16 aa, Artificial Sequence
  Synthetic construct
VRDLAWRSIAADGGDH

SEQ ID NO: 18298 - protein, 17 aa, Artificial Sequence
  Synthetic construct
ASLPITISPGYYYGMDV

SEQ ID NO: 18299 - protein, 15 aa, Artificial Sequence
  Synthetic construct
ARDRGGLYGTDAFDI

SEQ ID NO: 18300 - protein, 16 aa, Artificial Sequence
  Synthetic construct
ARNRRAIRSGSNWFDP

SEQ ID NO: 18301 - protein, 14 aa, Artificial Sequence
  Synthetic construct
AVPKWDLMHGYLQN

SEQ ID NO: 18302 - protein, 16 aa, Artificial Sequence
  Synthetic construct
ARGSVTYYTFGGVFDS

SEQ ID NO: 18303 - protein, 15 aa, Artificial Sequence
  Synthetic construct
VRDHYSVLNRYGMDV

SEQ ID NO: 18304 - protein, 17 aa, Artificial Sequence
  Synthetic construct
ARLLPKYSSSSINWFDP

SEQ ID NO: 18305 - protein, 16 aa, Artificial Sequence
  Synthetic construct
ARGGYRSGWYPRNFDY

SEQ ID NO: 18306 - protein, 14 aa, Artificial Sequence
  Synthetic construct
ARDDYGDYVGYFQH

SEQ ID NO: 18307 - protein, 21 aa, Artificial Sequence
  Synthetic construct
ASPHTAKLHKKYYYYYYGMDV

SEQ ID NO: 18308 - protein, 19 aa, Artificial Sequence
  Synthetic construct
ARVGGGDEWYSSGWFSFDN

SEQ ID NO: 18309 - protein, 12 aa, Artificial Sequence
  Synthetic construct
ARGIYSGSYYAH

SEQ ID NO: 18310 - protein, 11 aa, Artificial Sequence
  Synthetic construct
ARGGSNWLHDF

SEQ ID NO: 18311 - protein, 15 aa, Artificial Sequence
  Synthetic construct
ARFEGKMSLGYGFDI

SEQ ID NO: 18312 - protein, 22 aa, Artificial Sequence
  Synthetic construct
ARDPYYYDSSGYYYYYYYGMDV

SEQ ID NO: 18313 - protein, 14 aa, Artificial Sequence
  Synthetic construct
VKDDSAFPGSDLAA

SEQ ID NO: 18314 - protein, 20 aa, Artificial Sequence
  Synthetic construct
ARSITMVREVISRSYYVMDV

SEQ ID NO: 18315 - protein, 18 aa, Artificial Sequence
  Synthetic construct
ARHGEYGGSPYYYYGMDV

SEQ ID NO: 18316 - protein, 17 aa, Artificial Sequence
  Synthetic construct
ASAPPGEFWSGRRAFDI

SEQ ID NO: 18317 - protein, 15 aa, Artificial Sequence
  Synthetic construct
TTDFRGDGSNDAFHI

SEQ ID NO: 18318 - protein, 16 aa, Artificial Sequence
  Synthetic construct
TTDLVELLWFGERTVV

SEQ ID NO: 18319 - protein, 12 aa, Artificial Sequence
  Synthetic construct
ARVRAFSKLVDP

SEQ ID NO: 18320 - protein, 11 aa, Artificial Sequence
  Synthetic construct
VKDKPGAGFDY

SEQ ID NO: 18321 - protein, 12 aa, Artificial Sequence
  Synthetic construct
TRRGTTADNGDY

SEQ ID NO: 18322 - protein, 15 aa, Artificial Sequence
  Synthetic construct
ARAPWVAGAFGWFDP

SEQ ID NO: 18323 - protein, 12 aa, Artificial Sequence
  Synthetic construct
ARRDWLLHGVDY

SEQ ID NO: 18324 - protein, 9 aa, Artificial Sequence
  Synthetic construct
ARAARGVDY

SEQ ID NO: 18325 - protein, 11 aa, Artificial Sequence
  Synthetic construct
ARGSRVTSFAL

SEQ ID NO: 18326 - protein, 17 aa, Artificial Sequence
  Synthetic construct
ARSPHDHESSGYYAFDI

SEQ ID NO: 18327 - protein, 13 aa, Artificial Sequence
  Synthetic construct
ARVEREWLRLYDY

SEQ ID NO: 18328 - protein, 12 aa, Artificial Sequence
  Synthetic construct
ARSLGDSSGLDY

SEQ ID NO: 18329 - protein, 14 aa, Artificial Sequence
  Synthetic construct
ARGADYLLYYAMDV

SEQ ID NO: 18330 - protein, 20 aa, Artificial Sequence
  Synthetic construct
ARDQQVGGSSYYYYYYGMDV

SEQ ID NO: 18331 - protein, 25 aa, Artificial Sequence
  Synthetic construct
ARGLGYCSGGSCHRKRGYYYYGMDV

SEQ ID NO: 18332 - protein, 13 aa, Artificial Sequence
  Synthetic construct
AKLLAVGRWYFEY

SEQ ID NO: 18333 - protein, 18 aa, Artificial Sequence
  Synthetic construct
ATNPPRRSSMIRDYHFDY

SEQ ID NO: 18334 - protein, 17 aa, Artificial Sequence
  Synthetic construct
AHRRAEGGNWDGGCLDV

SEQ ID NO: 18335 - protein, 19 aa, Artificial Sequence
  Synthetic construct
ARDSREWLRSYYYYYGMDV

SEQ ID NO: 18336 - protein, 14 aa, Artificial Sequence
  Synthetic construct
ARATSGSSRGAFDI

SEQ ID NO: 18337 - protein, 20 aa, Artificial Sequence
  Synthetic construct
ARDRVIMIRGVIKSQYGLDV

SEQ ID NO: 18338 - protein, 15 aa, Artificial Sequence
  Synthetic construct
AREVNLEDDSDAFDI

SEQ ID NO: 18339 - protein, 15 aa, Artificial Sequence
  Synthetic construct
ARDLWLRVRGVIFDY

SEQ ID NO: 18340 - protein, 18 aa, Artificial Sequence
  Synthetic construct
ARDRRRWELLRGTAYFDY

SEQ ID NO: 18341 - protein, 15 aa, Artificial Sequence
  Synthetic construct
AIATSSYGRVYGMDV

SEQ ID NO: 18342 - protein, 17 aa, Artificial Sequence
  Synthetic construct
ARTPYFYGAGSYRHFDY

SEQ ID NO: 18343 - protein, 17 aa, Artificial Sequence
  Synthetic construct
ARNTKTSTIIWHFVMDV

SEQ ID NO: 18344 - protein, 22 aa, Artificial Sequence
  Synthetic construct
ARSDRADRIAARQRPYYYGMDV

SEQ ID NO: 18345 - protein, 16 aa, Artificial Sequence
  Synthetic construct
AREKRPYSGTYQGFDS

SEQ ID NO: 18346 - protein, 13 aa, Artificial Sequence
  Synthetic construct
TRSPGVAKAAALL

SEQ ID NO: 18347 - protein, 18 aa, Artificial Sequence
  Synthetic construct
ARQYNDILSGYELGWFDP

SEQ ID NO: 18348 - protein, 17 aa, Artificial Sequence
  Synthetic construct
ARAGYCSSTSCYRWFDP

SEQ ID NO: 18349 - protein, 17 aa, Artificial Sequence
  Synthetic construct
VKDREYNLRRGQMAFDY

SEQ ID NO: 18350 - protein, 17 aa, Artificial Sequence
  Synthetic construct
TTEAYGAYGGSAADFDY

SEQ ID NO: 18351 - protein, 19 aa, Artificial Sequence
  Synthetic construct
ARGRAYNWNARPSVSWFDP

SEQ ID NO: 18352 - protein, 21 aa, Artificial Sequence
  Synthetic construct
ARDEGIAAPGNSRDFYYGMDV

SEQ ID NO: 18353 - protein, 16 aa, Artificial Sequence
  Synthetic construct
AKCGGGACNQAGAMDV

SEQ ID NO: 18354 - protein, 12 aa, Artificial Sequence
  Synthetic construct
TRRGTTADNGDY

SEQ ID NO: 18355 - protein, 17 aa, Artificial Sequence
  Synthetic construct
VKDEQSFVGYCSGGSCQ

SEQ ID NO: 18356 - protein, 7 aa, Artificial Sequence
  Synthetic construct
ARGWLYN

SEQ ID NO: 18357 - protein, 18 aa, Artificial Sequence
  Synthetic construct
ARVGTIAMVRDIISRYTS

SEQ ID NO: 18358 - protein, 15 aa, Artificial Sequence
  Synthetic construct
VREDFGRRGEFYFDH

SEQ ID NO: 18359 - protein, 18 aa, Artificial Sequence
  Synthetic construct
ARDSRRHSYYDSSGYYNY

SEQ ID NO: 18360 - protein, 13 aa, Artificial Sequence
  Synthetic construct
ARAYESGSSTLLF

SEQ ID NO: 18361 - protein, 15 aa, Artificial Sequence
  Synthetic construct
ARGKRSSWMTWNMDV

SEQ ID NO: 18362 - protein, 22 aa, Artificial Sequence
  Synthetic construct
ARDRAAEAYCGADCSLGWCFDL

SEQ ID NO: 18363 - protein, 13 aa, Artificial Sequence
  Synthetic construct
AKDPQYQLLRFDF

SEQ ID NO: 18364 - protein, 16 aa, Artificial Sequence
  Synthetic construct
ARGGYYDGSGYYYLEY

SEQ ID NO: 18365 - protein, 18 aa, Artificial Sequence
  Synthetic construct
ARLRPGYSYGYFVADFDY

SEQ ID NO: 18366 - protein, 20 aa, Artificial Sequence
  Synthetic construct
ARDPSWGSGWTNSLGSSFDL

SEQ ID NO: 18367 - protein, 11 aa, Artificial Sequence
  Synthetic construct
ARSVSYYGMDV

SEQ ID NO: 18368 - protein, 21 aa, Artificial Sequence
  Synthetic construct
ARDAAYFYGSGDLLGYYGMDV

SEQ ID NO: 18369 - protein, 11 aa, Artificial Sequence
  Synthetic construct
ARAWDYDSPDH

SEQ ID NO: 18370 - protein, 17 aa, Artificial Sequence
  Synthetic construct
ARDSFLQLVYYYYGMDV

SEQ ID NO: 18371 - protein, 14 aa, Artificial Sequence
  Synthetic construct
ARARAQLWPNAFDY

SEQ ID NO: 18372 - protein, 8 aa, Artificial Sequence
  Synthetic construct
VGYGGNSV

SEQ ID NO: 18373 - protein, 10 aa, Artificial Sequence
  Synthetic construct
ARGGYSEFDP

SEQ ID NO: 18374 - protein, 8 aa, Artificial Sequence
  Synthetic construct
ARGGGILL

SEQ ID NO: 18375 - protein, 15 aa, Artificial Sequence
  Synthetic construct
ARIRGKPYYYYGMDV

SEQ ID NO: 18376 - protein, 15 aa, Artificial Sequence
  Synthetic construct
VRHMRRTLSNDAFEI

SEQ ID NO: 18377 - protein, 17 aa, Artificial Sequence
  Synthetic construct
ARSPHDHESSGYYAFDI

SEQ ID NO: 18378 - protein, 13 aa, Artificial Sequence
  Synthetic construct
VKGSTHTNNWFDS

SEQ ID NO: 18379 - protein, 16 aa, Artificial Sequence
  Synthetic construct
VRDLGWRSIAADGGDS

SEQ ID NO: 18380 - protein, 11 aa, Artificial Sequence
  Synthetic construct
AKEGRGNGFDP

SEQ ID NO: 18381 - protein, 13 aa, Artificial Sequence
  Synthetic construct
ARHSAGSSRYFDY

SEQ ID NO: 18382 - protein, 19 aa, Artificial Sequence
  Synthetic construct
ARGWKRRYSSSSYHGWFDP

SEQ ID NO: 18383 - protein, 13 aa, Artificial Sequence
  Synthetic construct
ARDSRYFDWFLGY

SEQ ID NO: 18384 - protein, 24 aa, Artificial Sequence
  Synthetic construct
ARTSAGYYGSGSYYKGGWRGGMDV

SEQ ID NO: 18385 - protein, 13 aa, Artificial Sequence
  Synthetic construct
TRGSSFWIGSLDV

SEQ ID NO: 18386 - protein, 15 aa, Artificial Sequence
  Synthetic construct
ARGTVYGGRAEYFQH

SEQ ID NO: 18387 - protein, 20 aa, Artificial Sequence
  Synthetic construct
VKDFHAGGASYDFWSGLFDR

SEQ ID NO: 18388 - protein, 12 aa, Artificial Sequence
  Synthetic construct
ATNYGGNTPFDY

SEQ ID NO: 18389 - protein, 19 aa, Artificial Sequence
  Synthetic construct
ARDKTTPRSGGFYYYGMDV

SEQ ID NO: 18390 - protein, 25 aa, Artificial Sequence
  Synthetic construct
ARARKRHGDYYGSGRGQNYYYGMDV

SEQ ID NO: 18391 - protein, 18 aa, Artificial Sequence
  Synthetic construct
ARARDFWRGSEGAFWFDT

SEQ ID NO: 18392 - protein, 19 aa, Artificial Sequence
  Synthetic construct
ARVRRAGYSYATGYYGMDV

SEQ ID NO: 18393 - protein, 16 aa, Artificial Sequence
  Synthetic construct
ARDRKYYDILTGAFDY

SEQ ID NO: 18394 - protein, 17 aa, Artificial Sequence
  Synthetic construct
AHRRAEGGNWDGGCLDV

SEQ ID NO: 18395 - protein, 21 aa, Artificial Sequence
  Synthetic construct
ARDHYDFWSGRRRHTHNWFDP

SEQ ID NO: 18396 - protein, 16 aa, Artificial Sequence
  Synthetic construct
ASLIAAVGYYYYGMDV

SEQ ID NO: 18397 - protein, 9 aa, Artificial Sequence
  Synthetic construct
ARGRNSFDY

SEQ ID NO: 18398 - protein, 16 aa, Artificial Sequence
  Synthetic construct
TRGGYSDYDWVPGIDY

SEQ ID NO: 18399 - protein, 12 aa, Artificial Sequence
  Synthetic construct
ARAYSDSWGFDY

SEQ ID NO: 18400 - protein, 12 aa, Artificial Sequence
  Synthetic construct
ARSRKWLRLPDY

SEQ ID NO: 18401 - protein, 16 aa, Artificial Sequence
  Synthetic construct
AKEAPYTAVTYYGFDV

SEQ ID NO: 18402 - protein, 14 aa, Artificial Sequence
  Synthetic construct
ARVRDSSSSQFFDY

SEQ ID NO: 18403 - protein, 16 aa, Artificial Sequence
  Synthetic construct
AREPVNYYDSSGYYDY

SEQ ID NO: 18404 - protein, 20 aa, Artificial Sequence
  Synthetic construct
AALAYCSNSGCPYYFYGLDV

SEQ ID NO: 18405 - protein, 28 aa, Artificial Sequence
  Synthetic construct
AREEGGYDFWSGYYKSGWTIYYYYGMDV

SEQ ID NO: 18406 - protein, 14 aa, Artificial Sequence
  Synthetic construct
AKSKSDSTRGLFGY

SEQ ID NO: 18407 - protein, 11 aa, Artificial Sequence
  Synthetic construct
GRDQSRGATDF

SEQ ID NO: 18408 - protein, 16 aa, Artificial Sequence
  Synthetic construct
AKDYLAGNGIFDPFDI

SEQ ID NO: 18409 - protein, 20 aa, Artificial Sequence
  Synthetic construct
AGEFVIPAGKSQYYYYGMDV

SEQ ID NO: 18410 - protein, 12 aa, Artificial Sequence
  Synthetic construct
ARHAEESRGMDV

SEQ ID NO: 18411 - protein, 13 aa, Artificial Sequence
  Synthetic construct
ARGGGDSNSFLYY

SEQ ID NO: 18412 - protein, 12 aa, Artificial Sequence
  Synthetic construct
AKGNSSSWPLDY

SEQ ID NO: 18413 - protein, 15 aa, Artificial Sequence
  Synthetic construct
ARGGDYDSSGYAFDL

SEQ ID NO: 18414 - protein, 13 aa, Artificial Sequence
  Synthetic construct
ARDLHLMVRGVRP

SEQ ID NO: 18415 - protein, 14 aa, Artificial Sequence
  Synthetic construct
ARQYGYNSKYYFDY

SEQ ID NO: 18416 - protein, 16 aa, Artificial Sequence
  Synthetic construct
TRGGYSDYDWVPGIDF

SEQ ID NO: 18417 - protein, 20 aa, Artificial Sequence
  Synthetic construct
VKDFHAGGASYDFWSGLFDR

SEQ ID NO: 18418 - protein, 16 aa, Artificial Sequence
  Synthetic construct
ARRYYDILTGYYYYDY

SEQ ID NO: 18419 - protein, 16 aa, Artificial Sequence
  Synthetic construct
ARHPAYCGGDCYNFDY

SEQ ID NO: 18420 - protein, 12 aa, Artificial Sequence
  Synthetic construct
AKDHSSGWYVDY

SEQ ID NO: 18421 - protein, 14 aa, Artificial Sequence
  Synthetic construct
AKIEYGDYINWLDR

SEQ ID NO: 18422 - protein, 14 aa, Artificial Sequence
  Synthetic construct
TTTRPPPAPPTFDL

SEQ ID NO: 18423 - protein, 26 aa, Artificial Sequence
  Synthetic construct
ARDADLGRGYSYGYWLEFDYYNGMDV

SEQ ID NO: 18424 - protein, 19 aa, Artificial Sequence
  Synthetic construct
ARVRRHSSSWRYYYYGMDV

SEQ ID NO: 18425 - protein, 12 aa, Artificial Sequence
  Synthetic construct
AKEIGIADLFDY

SEQ ID NO: 18426 - protein, 18 aa, Artificial Sequence
  Synthetic construct
AKAGGYYYGSGSYYRPDY

SEQ ID NO: 18427 - protein, 14 aa, Artificial Sequence
  Synthetic construct
ARDSQAFPPNWFDS

SEQ ID NO: 18428 - protein, 11 aa, Artificial Sequence
  Synthetic construct
AKTSVLGPECY

SEQ ID NO: 18429 - protein, 8 aa, Artificial Sequence
  Synthetic construct
ARGWGFHS

SEQ ID NO: 18430 - protein, 10 aa, Artificial Sequence
  Synthetic construct
ARGGSTALRL

SEQ ID NO: 18431 - protein, 16 aa, Artificial Sequence
  Synthetic construct
ARHLRRDNADYYGLDV

SEQ ID NO: 18432 - protein, 20 aa, Artificial Sequence
  Synthetic construct
ARARRHRGVITPYYYYGMDV

SEQ ID NO: 18433 - protein, 10 aa, Artificial Sequence
  Synthetic construct
STDRGGSFEY

SEQ ID NO: 18434 - protein, 18 aa, Artificial Sequence
  Synthetic construct
ARHRPSPPGRGRPGWFDP

SEQ ID NO: 18435 - protein, 25 aa, Artificial Sequence
  Synthetic construct
ARDPRFCSTSTCHPGNSHYYYGMDA

SEQ ID NO: 18436 - protein, 12 aa, Artificial Sequence
  Synthetic construct
ARAYSDSWGFDY

SEQ ID NO: 18437 - protein, 14 aa, Artificial Sequence
  Synthetic construct
AKDSGDSGGFHFDY

SEQ ID NO: 18438 - protein, 13 aa, Artificial Sequence
  Synthetic construct
AIFPGVDTVVADY

SEQ ID NO: 18439 - protein, 13 aa, Artificial Sequence
  Synthetic construct
TRALDSRGYYYDY

SEQ ID NO: 18440 - protein, 14 aa, Artificial Sequence
  Synthetic construct
ARVTKYSQSHQFDV

SEQ ID NO: 18441 - protein, 14 aa, Artificial Sequence
  Synthetic construct
AKTRVGYGDYYFDY

SEQ ID NO: 18442 - protein, 16 aa, Artificial Sequence
  Synthetic construct
ARHLRRDNADYYGLDV

SEQ ID NO: 18443 - protein, 16 aa, Artificial Sequence
  Synthetic construct
ARGAVIVGDTHDAFDI

SEQ ID NO: 18444 - protein, 19 aa, Artificial Sequence
  Synthetic construct
ARHISDGRPNRYYFFGLDL

SEQ ID NO: 18445 - protein, 14 aa, Artificial Sequence
  Synthetic construct
ARKRGRYYYYGMDV

SEQ ID NO: 18446 - protein, 21 aa, Artificial Sequence
  Synthetic construct
AKTPLKQYCSGGSCYPRHFQH

SEQ ID NO: 18447 - protein, 21 aa, Artificial Sequence
  Synthetic construct
GRVALCGATTGVCPPGRHFDY

SEQ ID NO: 18448 - protein, 19 aa, Artificial Sequence
  Synthetic construct
TRQSRTYCGGDCYFASFGY

SEQ ID NO: 18449 - protein, 18 aa, Artificial Sequence
  Synthetic construct
ARVKQQLVSTIWYYGMDV

SEQ ID NO: 18450 - protein, 10 aa, Artificial Sequence
  Synthetic construct
VRGLEGGTAY

SEQ ID NO: 18451 - protein, 16 aa, Artificial Sequence
  Synthetic construct
VGPPLDDAWDRNWFDP

SEQ ID NO: 18452 - protein, 15 aa, Artificial Sequence
  Synthetic construct
AKDTGGTIFGVSFDC

SEQ ID NO: 18453 - protein, 18 aa, Artificial Sequence
  Synthetic construct
ARDHSDSRDFYFNGVFDI

SEQ ID NO: 18454 - protein, 16 aa, Artificial Sequence
  Synthetic construct
TRRDRDCAGNCAIFDY

SEQ ID NO: 18455 - protein, 18 aa, Artificial Sequence
  Synthetic construct
ARGKQSSKWSGSGSYSDY

SEQ ID NO: 18456 - protein, 14 aa, Artificial Sequence
  Synthetic construct
AREAPGIAAAGGGG

SEQ ID NO: 18457 - protein, 16 aa, Artificial Sequence
  Synthetic construct
ARASTRGVHSPSPFGY

SEQ ID NO: 18458 - protein, 21 aa, Artificial Sequence
  Synthetic construct
ARAAACARSSTSCYRANWFDP

SEQ ID NO: 18459 - protein, 17 aa, Artificial Sequence
  Synthetic construct
AKWASSGYYYYYYGMDV

SEQ ID NO: 18460 - protein, 13 aa, Artificial Sequence
  Synthetic construct
AAMVRGGLHFFDY

SEQ ID NO: 18461 - protein, 19 aa, Artificial Sequence
  Synthetic construct
TTHFVGRLVNTSTSEYFDY

SEQ ID NO: 18462 - protein, 19 aa, Artificial Sequence
  Synthetic construct
SRIPAENYDILTGYGLFDC

SEQ ID NO: 18463 - protein, 22 aa, Artificial Sequence
  Synthetic construct
ARDLRFQKILGYCSSTSCTSGY

SEQ ID NO: 18464 - protein, 12 aa, Artificial Sequence
  Synthetic construct
ARGIVGLNQLDS

SEQ ID NO: 18465 - protein, 12 aa, Artificial Sequence
  Synthetic construct
ARRGNWGSAFDI

SEQ ID NO: 18466 - protein, 13 aa, Artificial Sequence
  Synthetic construct
ARAWELPGSWFDP

SEQ ID NO: 18467 - protein, 18 aa, Artificial Sequence
  Synthetic construct
ARDLWSGYNVAAEYGMDV

SEQ ID NO: 18468 - protein, 10 aa, Artificial Sequence
  Synthetic construct
ARGKGVLFSL

SEQ ID NO: 18469 - protein, 19 aa, Artificial Sequence
  Synthetic construct
AKVDYRSSGLAKYYHGMDV

SEQ ID NO: 18470 - protein, 17 aa, Artificial Sequence
  Synthetic construct
ARTKLPGAYYYYYDMDV

SEQ ID NO: 18471 - protein, 14 aa, Artificial Sequence
  Synthetic construct
TTEDWNLYNYAMGV

SEQ ID NO: 18472 - protein, 20 aa, Artificial Sequence
  Synthetic construct
AKDELWVDLLSGYQWYYFDW

SEQ ID NO: 18473 - protein, 15 aa, Artificial Sequence
  Synthetic construct
ARVGYSGSYAGAFDI

SEQ ID NO: 18474 - protein, 15 aa, Artificial Sequence
  Synthetic construct
TTMGGPAARWVGFDY

SEQ ID NO: 18475 - protein, 19 aa, Artificial Sequence
  Synthetic construct
ARDLRRGGSSWQRPYGMDV

SEQ ID NO: 18476 - protein, 12 aa, Artificial Sequence
  Synthetic construct
ARAGVVYGNFQN

SEQ ID NO: 18477 - protein, 15 aa, Artificial Sequence
  Synthetic construct
ARHRRYSSSWNWFDP

SEQ ID NO: 18478 - protein, 18 aa, Artificial Sequence
  Synthetic construct
AKDMGWGLRSSLPTGFDY

SEQ ID NO: 18479 - protein, 19 aa, Artificial Sequence
  Synthetic construct
AKDLLSHSGTYSAGSTFDY

SEQ ID NO: 18480 - protein, 19 aa, Artificial Sequence
  Synthetic construct
AKGFWACTPYTCSTGPFDS

SEQ ID NO: 18481 - protein, 16 aa, Artificial Sequence
  Synthetic construct
ARGAGVSTTDWSWFDP

SEQ ID NO: 18482 - protein, 22 aa, Artificial Sequence
  Synthetic construct
ARERRTRGYSYGQPKYYYGMDV

SEQ ID NO: 18483 - protein, 24 aa, Artificial Sequence
  Synthetic construct
ARGAWGITVFGVLTPGDLNNWFDP

SEQ ID NO: 18484 - protein, 19 aa, Artificial Sequence
  Synthetic construct
ARDWRFYGSGSYYPRWFDP

SEQ ID NO: 18485 - protein, 14 aa, Artificial Sequence
  Synthetic construct
VKAGGSGWDWHFDL

SEQ ID NO: 18486 - protein, 14 aa, Artificial Sequence
  Synthetic construct
ARGSRDSGALVIET

SEQ ID NO: 18487 - protein, 14 aa, Artificial Sequence
  Synthetic construct
AKALLWLRGNWFDP

SEQ ID NO: 18488 - protein, 17 aa, Artificial Sequence
  Synthetic construct
ARVAYDILTGYEYYFDY

SEQ ID NO: 18489 - protein, 15 aa, Artificial Sequence
  Synthetic construct
ARGGDYDSSAYAFDY

SEQ ID NO: 18490 - protein, 25 aa, Artificial Sequence
  Synthetic construct
ARDDGYYYDSSAYRGGVYEYNGMDV

SEQ ID NO: 18491 - protein, 19 aa, Artificial Sequence
  Synthetic construct
ARHNAYYDSSGYYLYYFDY

SEQ ID NO: 18492 - protein, 15 aa, Artificial Sequence
  Synthetic construct
ARGPGWGYRRRFMDV

SEQ ID NO: 18493 - protein, 21 aa, Artificial Sequence
  Synthetic construct
ARDGRYRGSSSRYYYYYGMDV

SEQ ID NO: 18494 - protein, 13 aa, Artificial Sequence
  Synthetic construct
AVRATAAAPSVDY

SEQ ID NO: 18495 - protein, 14 aa, Artificial Sequence
  Synthetic construct
AKGLTGWFLAPFDY

SEQ ID NO: 18496 - protein, 17 aa, Artificial Sequence
  Synthetic construct
AKETEVVDTSMIYGMDV

SEQ ID NO: 18497 - protein, 16 aa, Artificial Sequence
  Synthetic construct
AREGGGPYDRSHYYDI

SEQ ID NO: 18498 - protein, 25 aa, Artificial Sequence
  Synthetic construct
ARDSAVEYWPVYGPRSTSHHYAMDV

SEQ ID NO: 18499 - protein, 15 aa, Artificial Sequence
  Synthetic construct
ARESGHYDSSGYYDY

SEQ ID NO: 18500 - protein, 10 aa, Artificial Sequence
  Synthetic construct
AREPGAAPDF

SEQ ID NO: 18501 - protein, 16 aa, Artificial Sequence
  Synthetic construct
ARDTPYYYDSSGYYSD

SEQ ID NO: 18502 - protein, 16 aa, Artificial Sequence
  Synthetic construct
AREGGGPYDRSHYYDI

SEQ ID NO: 18503 - protein, 16 aa, Artificial Sequence
  Synthetic construct
AKDIVVVVAARGYFDY

SEQ ID NO: 18504 - protein, 13 aa, Artificial Sequence
  Synthetic construct
AGALIVATTRFDY

SEQ ID NO: 18505 - protein, 23 aa, Artificial Sequence
  Synthetic construct
AQGETGAYYDVLTGKAGYYGLDV

SEQ ID NO: 18506 - protein, 15 aa, Artificial Sequence
  Synthetic construct
TRSAPGGDTVFRFDP

SEQ ID NO: 18507 - protein, 13 aa, Artificial Sequence
  Synthetic construct
ARENSDYYYGMDV

SEQ ID NO: 18508 - protein, 21 aa, Artificial Sequence
  Synthetic construct
ARGLPRVGSYSRQRANWYFDL

SEQ ID NO: 18509 - protein, 18 aa, Artificial Sequence
  Synthetic construct
ARAYRNYYGSGSLNTYYY

SEQ ID NO: 18510 - protein, 16 aa, Artificial Sequence
  Synthetic construct
VRDLGWRSIAADGGDS

SEQ ID NO: 18511 - protein, 25 aa, Artificial Sequence
  Synthetic construct
ARPTYYYDSSGHKRGPRRNLRAFDI

SEQ ID NO: 18512 - protein, 14 aa, Artificial Sequence
  Synthetic construct
ARHVSGSSISPLGY

SEQ ID NO: 18513 - protein, 16 aa, Artificial Sequence
  Synthetic construct
ARHLRRDNADYYGLDV

SEQ ID NO: 18514 - protein, 14 aa, Artificial Sequence
  Synthetic construct
ARISRDSGSPWFDY

SEQ ID NO: 18515 - protein, 21 aa, Artificial Sequence
  Synthetic construct
AKESPLVIGADGSASLVNMNV

SEQ ID NO: 18516 - protein, 15 aa, Artificial Sequence
  Synthetic construct
AKVAYSSSWHYYFDY

SEQ ID NO: 18517 - protein, 26 aa, Artificial Sequence
  Synthetic construct
ARGDTAYCSSTSCSIPSDYYYYGMDV

SEQ ID NO: 18518 - protein, 12 aa, Artificial Sequence
  Synthetic construct
VPTNSWAYYFDY

SEQ ID NO: 18519 - protein, 17 aa, Artificial Sequence
  Synthetic construct
AREADIIVATTNDAFDI

SEQ ID NO: 18520 - protein, 26 aa, Artificial Sequence
  Synthetic construct
ARDVAYSSSWDGLIPLVITSTIPFDV

SEQ ID NO: 18521 - protein, 14 aa, Artificial Sequence
  Synthetic construct
ACDPPRRGWLPFDY

SEQ ID NO: 18522 - protein, 20 aa, Artificial Sequence
  Synthetic construct
ARVPEKYYYGSGSYYPLMDV

SEQ ID NO: 18523 - protein, 13 aa, Artificial Sequence
  Synthetic construct
ARENSDYYYGMDV

SEQ ID NO: 18524 - protein, 22 aa, Artificial Sequence
  Synthetic construct
VRDPEPYTATVRYNHYWHGMDV

SEQ ID NO: 18525 - protein, 8 aa, Artificial Sequence
  Synthetic construct
ARGRSMDV

SEQ ID NO: 18526 - protein, 15 aa, Artificial Sequence
  Synthetic construct
ARDGLARRWYNWFDP

SEQ ID NO: 18527 - protein, 17 aa, Artificial Sequence
  Synthetic construct
ARSPHDHESSGYYAFDI

SEQ ID NO: 18528 - protein, 12 aa, Artificial Sequence
  Synthetic construct
ARCVVVVGLTDY

SEQ ID NO: 18529 - protein, 13 aa, Artificial Sequence
  Synthetic construct
ARALRGSSGYLGY

SEQ ID NO: 18530 - protein, 18 aa, Artificial Sequence
  Synthetic construct
ARDGTLTFNSRSYDALDI

SEQ ID NO: 18531 - protein, 16 aa, Artificial Sequence
  Synthetic construct
ARDMSGSYYYYYGMDV

SEQ ID NO: 18532 - protein, 15 aa, Artificial Sequence
  Synthetic construct
ARDGRAYNYGYGMDV

SEQ ID NO: 18533 - protein, 12 aa, Artificial Sequence
  Synthetic construct
VVSVEWLLSPDY

SEQ ID NO: 18534 - protein, 13 aa, Artificial Sequence
  Synthetic construct
AKDTRRWGNWFDP

SEQ ID NO: 18535 - protein, 10 aa, Artificial Sequence
  Synthetic construct
ATQSRGSLDH

SEQ ID NO: 18536 - protein, 15 aa, Artificial Sequence
  Synthetic construct
TRRLDYGDSRNGMDV

SEQ ID NO: 18537 - protein, 17 aa, Artificial Sequence
  Synthetic construct
AHRRAEGGNWDGGCLDV

SEQ ID NO: 18538 - protein, 14 aa, Artificial Sequence
  Synthetic construct
ARYDGGNPPGGMDV

SEQ ID NO: 18539 - protein, 10 aa, Artificial Sequence
  Synthetic construct
STGRNSNFEF

SEQ ID NO: 18540 - protein, 21 aa, Artificial Sequence
  Synthetic construct
AAGGFYSSGWFNPYYYYGMDV

SEQ ID NO: 18541 - protein, 19 aa, Artificial Sequence
  Synthetic construct
ARPGYYDSTSYSIVDAFDV

SEQ ID NO: 18542 - protein, 13 aa, Artificial Sequence
  Synthetic construct
AKDHNWNDWFFDL

SEQ ID NO: 18543 - protein, 17 aa, Artificial Sequence
  Synthetic construct
ARNTKTSTIIWHFVMDV

SEQ ID NO: 18544 - protein, 26 aa, Artificial Sequence
  Synthetic construct
ARDADLGRGYSYGYWLEFDYYNGMDV

SEQ ID NO: 18545 - protein, 14 aa, Artificial Sequence
  Synthetic construct
AREGIPVGYRVLDI

SEQ ID NO: 18546 - protein, 21 aa, Artificial Sequence
  Synthetic construct
ARDSPAQYYYDNSGDSDALDI

SEQ ID NO: 18547 - protein, 20 aa, Artificial Sequence
  Synthetic construct
AKGSLSTLVRGVIMRDWLDP

SEQ ID NO: 18548 - protein, 13 aa, Artificial Sequence
  Synthetic construct
ARVGAVAGRAFDI

SEQ ID NO: 18549 - protein, 12 aa, Artificial Sequence
  Synthetic construct
ASATTVIGAFDI

SEQ ID NO: 18550 - protein, 16 aa, Artificial Sequence
  Synthetic construct
TRGGYSDYDWVPGIDY

SEQ ID NO: 18551 - protein, 14 aa, Artificial Sequence
  Synthetic construct
AKTYYYDSSALFDY

SEQ ID NO: 18552 - protein, 13 aa, Artificial Sequence
  Synthetic construct
AIFPGVDTVVADY

SEQ ID NO: 18553 - protein, 13 aa, Artificial Sequence
  Synthetic construct
AKAVDSTTLSVGY

SEQ ID NO: 18554 - protein, 16 aa, Artificial Sequence
  Synthetic construct
ARSSPPDYDGAGAIDS

SEQ ID NO: 18555 - protein, 16 aa, Artificial Sequence
  Synthetic construct
ARKGRYCNSVSCPLDF

SEQ ID NO: 18556 - protein, 18 aa, Artificial Sequence
  Synthetic construct
TTDPDYDFWSGYYYPLDY

SEQ ID NO: 18557 - protein, 13 aa, Artificial Sequence
  Synthetic construct
ARASRGIAAPGDY

SEQ ID NO: 18558 - protein, 15 aa, Artificial Sequence
  Synthetic construct
ARGGVYGSRLGWFDP

SEQ ID NO: 18559 - protein, 15 aa, Artificial Sequence
  Synthetic construct
AKAVTRGSSGWYRNY

SEQ ID NO: 18560 - protein, 13 aa, Artificial Sequence
  Synthetic construct
VKMRTAVVGVTPL

SEQ ID NO: 18561 - protein, 13 aa, Artificial Sequence
  Synthetic construct
ARGNDYSNYPLDY

SEQ ID NO: 18562 - protein, 17 aa, Artificial Sequence
  Synthetic construct
ARGLESKLGYGYGGSDY

SEQ ID NO: 18563 - protein, 6 aa, Artificial Sequence
  Synthetic construct
RSITSY

SEQ ID NO: 18564 - protein, 7 aa, Artificial Sequence
  Synthetic construct
QSVSSSY

SEQ ID NO: 18565 - protein, 9 aa, Artificial Sequence
  Synthetic construct
SSDVGTYNL

SEQ ID NO: 18566 - protein, 12 aa, Artificial Sequence
  Synthetic construct
QSLSEPGGRHIF

SEQ ID NO: 18567 - protein, 6 aa, Artificial Sequence
  Synthetic construct
KLGDKY

SEQ ID NO: 18568 - protein, 6 aa, Artificial Sequence
  Synthetic construct
ESVNSF

SEQ ID NO: 18569 - protein, 6 aa, Artificial Sequence
  Synthetic construct
VLAKQH

SEQ ID NO: 18570 - protein, 6 aa, Artificial Sequence
  Synthetic construct
QDISSA

SEQ ID NO: 18571 - protein, 8 aa, Artificial Sequence
  Synthetic construct
SSNIGNNF

SEQ ID NO: 18572 - protein, 6 aa, Artificial Sequence
  Synthetic construct
QGISSY

SEQ ID NO: 18573 - protein, 8 aa, Artificial Sequence
  Synthetic construct
SSNIGNNY

SEQ ID NO: 18574 - protein, 8 aa, Artificial Sequence
  Synthetic construct
TSNIRNNY

SEQ ID NO: 18575 - protein, 6 aa, Artificial Sequence
  Synthetic construct
NIVNKA

SEQ ID NO: 18576 - protein, 9 aa, Artificial Sequence
  Synthetic construct
SSDVGGYNY

SEQ ID NO: 18577 - protein, 8 aa, Artificial Sequence
  Synthetic construct
SSNIGNNY

SEQ ID NO: 18578 - protein, 6 aa, Artificial Sequence
  Synthetic construct
RAISNY

SEQ ID NO: 18579 - protein, 11 aa, Artificial Sequence
  Synthetic construct
QSLLDRNGHNY

SEQ ID NO: 18580 - protein, 6 aa, Artificial Sequence
  Synthetic construct
QSVSSN

SEQ ID NO: 18581 - protein, 6 aa, Artificial Sequence
  Synthetic construct
QSIGTY

SEQ ID NO: 18582 - protein, 8 aa, Artificial Sequence
  Synthetic construct
SGSIASIY

SEQ ID NO: 18583 - protein, 9 aa, Artificial Sequence
  Synthetic construct
TGAVTSGFY

SEQ ID NO: 18584 - protein, 12 aa, Artificial Sequence
  Synthetic construct
QSVLYSSNNKNY

SEQ ID NO: 18585 - protein, 9 aa, Artificial Sequence
  Synthetic construct
TSDVGGYNL

SEQ ID NO: 18586 - protein, 6 aa, Artificial Sequence
  Synthetic construct
QSVSSY

SEQ ID NO: 18587 - protein, 9 aa, Artificial Sequence
  Synthetic construct
SSNIGAGYD

SEQ ID NO: 18588 - protein, 6 aa, Artificial Sequence
  Synthetic construct
QNIGTY

SEQ ID NO: 18589 - protein, 6 aa, Artificial Sequence
  Synthetic construct
RGINNY

SEQ ID NO: 18590 - protein, 6 aa, Artificial Sequence
  Synthetic construct
KLGDKY

SEQ ID NO: 18591 - protein, 6 aa, Artificial Sequence
  Synthetic construct
QGISSY

SEQ ID NO: 18592 - protein, 7 aa, Artificial Sequence
  Synthetic construct
QSVGISR

SEQ ID NO: 18593 - protein, 12 aa, Artificial Sequence
  Synthetic construct
QSVLYSSNNKNY

SEQ ID NO: 18594 - protein, 6 aa, Artificial Sequence
  Synthetic construct
QTVSSY

SEQ ID NO: 18595 - protein, 6 aa, Artificial Sequence
  Synthetic construct
QNVNSN

SEQ ID NO: 18596 - protein, 7 aa, Artificial Sequence
  Synthetic construct
QSVSSTY

SEQ ID NO: 18597 - protein, 6 aa, Artificial Sequence
  Synthetic construct
QSVSSN

SEQ ID NO: 18598 - protein, 6 aa, Artificial Sequence
  Synthetic construct
QSISSW

SEQ ID NO: 18599 - protein, 6 aa, Artificial Sequence
  Synthetic construct
QSISSW

SEQ ID NO: 18600 - protein, 8 aa, Artificial Sequence
  Synthetic construct
SSNVGNQG

SEQ ID NO: 18601 - protein, 9 aa, Artificial Sequence
  Synthetic construct
SSNIGAVYG

SEQ ID NO: 18602 - protein, 7 aa, Artificial Sequence
  Synthetic construct
QSVYSNY

SEQ ID NO: 18603 - protein, 6 aa, Artificial Sequence
  Synthetic construct
QGISSY

SEQ ID NO: 18604 - protein, 6 aa, Artificial Sequence
  Synthetic construct
QSISSW

SEQ ID NO: 18605 - protein, 7 aa, Artificial Sequence
  Synthetic construct
QSVSSSY

SEQ ID NO: 18606 - protein, 11 aa, Artificial Sequence
  Synthetic construct
QSLLHSSGYNY

SEQ ID NO: 18607 - protein, 6 aa, Artificial Sequence
  Synthetic construct
QGISSY

SEQ ID NO: 18608 - protein, 6 aa, Artificial Sequence
  Synthetic construct
QGISSW

SEQ ID NO: 18609 - protein, 6 aa, Artificial Sequence
  Synthetic construct
QSISNW

SEQ ID NO: 18610 - protein, 6 aa, Artificial Sequence
  Synthetic construct
RGINNY

SEQ ID NO: 18611 - protein, 6 aa, Artificial Sequence
  Synthetic construct
QSVSSY

SEQ ID NO: 18612 - protein, 6 aa, Artificial Sequence
  Synthetic construct
QGISSY

SEQ ID NO: 18613 - protein, 6 aa, Artificial Sequence
  Synthetic construct
QSISSW

SEQ ID NO: 18614 - protein, 7 aa, Artificial Sequence
  Synthetic construct
QSVSSSY

SEQ ID NO: 18615 - protein, 6 aa, Artificial Sequence
  Synthetic construct
QGISNY

SEQ ID NO: 18616 - protein, 12 aa, Artificial Sequence
  Synthetic construct
QSVLYSSNNKNY

SEQ ID NO: 18617 - protein, 6 aa, Artificial Sequence
  Synthetic construct
QGISNY

SEQ ID NO: 18618 - protein, 6 aa, Artificial Sequence
  Synthetic construct
QDINNY

SEQ ID NO: 18619 - protein, 9 aa, Artificial Sequence
  Synthetic construct
SSGVGGHDL

SEQ ID NO: 18620 - protein, 9 aa, Artificial Sequence
  Synthetic construct
SSDVGTYNL

SEQ ID NO: 18621 - protein, 6 aa, Artificial Sequence
  Synthetic construct
QGISSY

SEQ ID NO: 18622 - protein, 6 aa, Artificial Sequence
  Synthetic construct
KLGDEY

SEQ ID NO: 18623 - protein, 8 aa, Artificial Sequence
  Synthetic construct
SSNIGNNF

SEQ ID NO: 18624 - protein, 6 aa, Artificial Sequence
  Synthetic construct
QGISSY

SEQ ID NO: 18625 - protein, 6 aa, Artificial Sequence
  Synthetic construct
QGISSY

SEQ ID NO: 18626 - protein, 7 aa, Artificial Sequence
  Synthetic construct
SGHSSYA

SEQ ID NO: 18627 - protein, 6 aa, Artificial Sequence
  Synthetic construct
QGISNY

SEQ ID NO: 18628 - protein, 9 aa, Artificial Sequence
  Synthetic construct
SSNIGAGYD

SEQ ID NO: 18629 - protein, 11 aa, Artificial Sequence
  Synthetic construct
QSLLHSNGYNY

SEQ ID NO: 18630 - protein, 9 aa, Artificial Sequence
  Synthetic construct
SSNIGAAYE

SEQ ID NO: 18631 - protein, 6 aa, Artificial Sequence
  Synthetic construct
QGISSY

SEQ ID NO: 18632 - protein, 7 aa, Artificial Sequence
  Synthetic construct
SGHNNHA

SEQ ID NO: 18633 - protein, 11 aa, Artificial Sequence
  Synthetic construct
QSLVHSDGYTY

SEQ ID NO: 18634 - protein, 8 aa, Artificial Sequence
  Synthetic construct
SSSIGGDH

SEQ ID NO: 18635 - protein, 6 aa, Artificial Sequence
  Synthetic construct
QGISSY

SEQ ID NO: 18636 - protein, 8 aa, Artificial Sequence
  Synthetic construct
SSNIGNNY

SEQ ID NO: 18637 - protein, 9 aa, Artificial Sequence
  Synthetic construct
SSDVGGYNY

SEQ ID NO: 18638 - protein, 8 aa, Artificial Sequence
  Synthetic construct
TSNIGNSY

SEQ ID NO: 18639 - protein, 6 aa, Artificial Sequence
  Synthetic construct
QGISSY

SEQ ID NO: 18640 - protein, 11 aa, Artificial Sequence
  Synthetic construct
QSLGHSDGNTY

SEQ ID NO: 18641 - protein, 6 aa, Artificial Sequence
  Synthetic construct
QSVSSY

SEQ ID NO: 18642 - protein, 6 aa, Artificial Sequence
  Synthetic construct
ETIRTT

SEQ ID NO: 18643 - protein, 9 aa, Artificial Sequence
  Synthetic construct
SGLVTANHH

SEQ ID NO: 18644 - protein, 9 aa, Artificial Sequence
  Synthetic construct
TSDIGSYDL

SEQ ID NO: 18645 - protein, 9 aa, Artificial Sequence
  Synthetic construct
SSNIGAGYD

SEQ ID NO: 18646 - protein, 7 aa, Artificial Sequence
  Synthetic construct
QSVSSSY

SEQ ID NO: 18647 - protein, 9 aa, Artificial Sequence
  Synthetic construct
SGINVGTYR

SEQ ID NO: 18648 - protein, 6 aa, Artificial Sequence
  Synthetic construct
QGISSY

SEQ ID NO: 18649 - protein, 7 aa, Artificial Sequence
  Synthetic construct
QSVSSSY

SEQ ID NO: 18650 - protein, 6 aa, Artificial Sequence
  Synthetic construct
QGISSY

SEQ ID NO: 18651 - protein, 6 aa, Artificial Sequence
  Synthetic construct
HTVNTN

SEQ ID NO: 18652 - protein, 9 aa, Artificial Sequence
  Synthetic construct
SSNIGAGYD

SEQ ID NO: 18653 - protein, 6 aa, Artificial Sequence
  Synthetic construct
TLPKQF

SEQ ID NO: 18654 - protein, 6 aa, Artificial Sequence
  Synthetic construct
QMISRH

SEQ ID NO: 18655 - protein, 6 aa, Artificial Sequence
  Synthetic construct
QSILSY

SEQ ID NO: 18656 - protein, 6 aa, Artificial Sequence
  Synthetic construct
VLAKQH

SEQ ID NO: 18657 - protein, 8 aa, Artificial Sequence
  Synthetic construct
SSNIGTKT

SEQ ID NO: 18658 - protein, 6 aa, Artificial Sequence
  Synthetic construct
QSVHTY

SEQ ID NO: 18659 - protein, 6 aa, Artificial Sequence
  Synthetic construct
QSITNY

SEQ ID NO: 18660 - protein, 6 aa, Artificial Sequence
  Synthetic construct
SFRTCY

SEQ ID NO: 18661 - protein, 9 aa, Artificial Sequence
  Synthetic construct
RFDIGDYNH

SEQ ID NO: 18662 - protein, 8 aa, Artificial Sequence
  Synthetic construct
SSNIGNNY

SEQ ID NO: 18663 - protein, 7 aa, Artificial Sequence
  Synthetic construct
QSVSSSY

SEQ ID NO: 18664 - protein, 9 aa, Artificial Sequence
  Synthetic construct
SSNIGAGYD

SEQ ID NO: 18665 - protein, 7 aa, Artificial Sequence
  Synthetic construct
SGHSSYA

SEQ ID NO: 18666 - protein, 7 aa, Artificial Sequence
  Synthetic construct
QSVRSSC

SEQ ID NO: 18667 - protein, 6 aa, Artificial Sequence
  Synthetic construct
ILAKKY

SEQ ID NO: 18668 - protein, 7 aa, Artificial Sequence
  Synthetic construct
SGHNIYG

SEQ ID NO: 18669 - protein, 9 aa, Artificial Sequence
  Synthetic construct
SSDVGGYNY

SEQ ID NO: 18670 - protein, 9 aa, Artificial Sequence
  Synthetic construct
SSDVGGYNY

SEQ ID NO: 18671 - protein, 6 aa, Artificial Sequence
  Synthetic construct
QDIRNY

SEQ ID NO: 18672 - protein, 9 aa, Artificial Sequence
  Synthetic construct
SSDVGSYNL

SEQ ID NO: 18673 - protein, 6 aa, Artificial Sequence
  Synthetic construct
RGISSS

SEQ ID NO: 18674 - protein, 6 aa, Artificial Sequence
  Synthetic construct
QSISSY

SEQ ID NO: 18675 - protein, 6 aa, Artificial Sequence
  Synthetic construct
QGISSY

SEQ ID NO: 18676 - protein, 9 aa, Artificial Sequence
  Synthetic construct
SSDVGGYNY

SEQ ID NO: 18677 - protein, 12 aa, Artificial Sequence
  Synthetic construct
QSLLYRPNNKNS

SEQ ID NO: 18678 - protein, 9 aa, Artificial Sequence
  Synthetic construct
SSDVGGYHY

SEQ ID NO: 18679 - protein, 6 aa, Artificial Sequence
  Synthetic construct
SLRSFY

SEQ ID NO: 18680 - protein, 11 aa, Artificial Sequence
  Synthetic construct
QSLIHSDGNTY

SEQ ID NO: 18681 - protein, 11 aa, Artificial Sequence
  Synthetic construct
QSLLHSDGKTS

SEQ ID NO: 18682 - protein, 11 aa, Artificial Sequence
  Synthetic construct
QSLLHSDGKTY

SEQ ID NO: 18683 - protein, 6 aa, Artificial Sequence
  Synthetic construct
QSISSW

SEQ ID NO: 18684 - protein, 9 aa, Artificial Sequence
  Synthetic construct
SSNIGAAYD

SEQ ID NO: 18685 - protein, 6 aa, Artificial Sequence
  Synthetic construct
QSISTW

SEQ ID NO: 18686 - protein, 6 aa, Artificial Sequence
  Synthetic construct
QRINNW

SEQ ID NO: 18687 - protein, 12 aa, Artificial Sequence
  Synthetic construct
QSILHTSNNKNY

SEQ ID NO: 18688 - protein, 6 aa, Artificial Sequence
  Synthetic construct
QGISSA

SEQ ID NO: 18689 - protein, 6 aa, Artificial Sequence
  Synthetic construct
QSISSW

SEQ ID NO: 18690 - protein, 6 aa, Artificial Sequence
  Synthetic construct
QSVSSY

SEQ ID NO: 18691 - protein, 11 aa, Artificial Sequence
  Synthetic construct
QSLVHSDGNTY

SEQ ID NO: 18692 - protein, 6 aa, Artificial Sequence
  Synthetic construct
QNVIKY

SEQ ID NO: 18693 - protein, 9 aa, Artificial Sequence
  Synthetic construct
SGINVGTYR

SEQ ID NO: 18694 - protein, 6 aa, Artificial Sequence
  Synthetic construct
QNINRY

SEQ ID NO: 18695 - protein, 11 aa, Artificial Sequence
  Synthetic construct
QSLLHVDGKIY

SEQ ID NO: 18696 - protein, 7 aa, Artificial Sequence
  Synthetic construct
QSVRSRF

SEQ ID NO: 18697 - protein, 7 aa, Artificial Sequence
  Synthetic construct
QSVASNY

SEQ ID NO: 18698 - protein, 6 aa, Artificial Sequence
  Synthetic construct
QSISSW

SEQ ID NO: 18699 - protein, 12 aa, Artificial Sequence
  Synthetic construct
QNVLYGSNNKNY

SEQ ID NO: 18700 - protein, 6 aa, Artificial Sequence
  Synthetic construct
QGISSY

SEQ ID NO: 18701 - protein, 7 aa, Artificial Sequence
  Synthetic construct
QSLSSSH

SEQ ID NO: 18702 - protein, 6 aa, Artificial Sequence
  Synthetic construct
QKISIS

SEQ ID NO: 18703 - protein, 9 aa, Artificial Sequence
  Synthetic construct
TGAVTSGHY

SEQ ID NO: 18704 - protein, 6 aa, Artificial Sequence
  Synthetic construct
QSISSW

SEQ ID NO: 18705 - protein, 6 aa, Artificial Sequence
  Synthetic construct
QSIGNY

SEQ ID NO: 18706 - protein, 6 aa, Artificial Sequence
  Synthetic construct
QSISTW

SEQ ID NO: 18707 - protein, 8 aa, Artificial Sequence
  Synthetic construct
SSNIGDNY

SEQ ID NO: 18708 - protein, 6 aa, Artificial Sequence
  Synthetic construct
QSISSW

SEQ ID NO: 18709 - protein, 6 aa, Artificial Sequence
  Synthetic construct
QDITTF

SEQ ID NO: 18710 - protein, 8 aa, Artificial Sequence
  Synthetic construct
SSNIGNNY

SEQ ID NO: 18711 - protein, 11 aa, Artificial Sequence
  Synthetic construct
ESLLDTDGNTY

SEQ ID NO: 18712 - protein, 6 aa, Artificial Sequence
  Synthetic construct
ALPKKY

SEQ ID NO: 18713 - protein, 8 aa, Artificial Sequence
  Synthetic construct
SSNIGNNY

SEQ ID NO: 18714 - protein, 6 aa, Artificial Sequence
  Synthetic construct
NIGSKS

SEQ ID NO: 18715 - protein, 6 aa, Artificial Sequence
  Synthetic construct
QSVSSY

SEQ ID NO: 18716 - protein, 6 aa, Artificial Sequence
  Synthetic construct
QGISNY

SEQ ID NO: 18717 - protein, 9 aa, Artificial Sequence
  Synthetic construct
SSDVGGYIY

SEQ ID NO: 18718 - protein, 8 aa, Artificial Sequence
  Synthetic construct
TSNIWNNY

SEQ ID NO: 18719 - protein, 11 aa, Artificial Sequence
  Synthetic construct
HSLVHSDGNTY

SEQ ID NO: 18720 - protein, 11 aa, Artificial Sequence
  Synthetic construct
QSLLHSNGFNY

SEQ ID NO: 18721 - protein, 11 aa, Artificial Sequence
  Synthetic construct
QSLLHSNGYNY

SEQ ID NO: 18722 - protein, 6 aa, Artificial Sequence
  Synthetic construct
QDISNY

SEQ ID NO: 18723 - protein, 9 aa, Artificial Sequence
  Synthetic construct
SGDIGLYKH

SEQ ID NO: 18724 - protein, 8 aa, Artificial Sequence
  Synthetic construct
SSNIGTNF

SEQ ID NO: 18725 - protein, 11 aa, Artificial Sequence
  Synthetic construct
QSLLHRNGYNY

SEQ ID NO: 18726 - protein, 6 aa, Artificial Sequence
  Synthetic construct
QGISNY

SEQ ID NO: 18727 - protein, 6 aa, Artificial Sequence
  Synthetic construct
QGISNY

SEQ ID NO: 18728 - protein, 6 aa, Artificial Sequence
  Synthetic construct
QSISSY

SEQ ID NO: 18729 - protein, 6 aa, Artificial Sequence
  Synthetic construct
QGISSY

SEQ ID NO: 18730 - protein, 6 aa, Artificial Sequence
  Synthetic construct
KLGDKY

SEQ ID NO: 18731 - protein, 9 aa, Artificial Sequence
  Synthetic construct
SSDVGGYNH

SEQ ID NO: 18732 - protein, 6 aa, Artificial Sequence
  Synthetic construct
QSVSSN

SEQ ID NO: 18733 - protein, 6 aa, Artificial Sequence
  Synthetic construct
QGISSY

SEQ ID NO: 18734 - protein, 8 aa, Artificial Sequence
  Synthetic construct
SSNIGNNY

SEQ ID NO: 18735 - protein, 6 aa, Artificial Sequence
  Synthetic construct
QSVSSN

SEQ ID NO: 18736 - protein, 6 aa, Artificial Sequence
  Synthetic construct
QSISRW

SEQ ID NO: 18737 - protein, 6 aa, Artificial Sequence
  Synthetic construct
RSITSY

SEQ ID NO: 18738 - protein, 9 aa, Artificial Sequence
  Synthetic construct
TSDIGSYDL

SEQ ID NO: 18739 - protein, 7 aa, Artificial Sequence
  Synthetic construct
QSVSDNS

SEQ ID NO: 18740 - protein, 11 aa, Artificial Sequence
  Synthetic construct
QSLLNSDGYTY

SEQ ID NO: 18741 - protein, 6 aa, Artificial Sequence
  Synthetic construct
QSIGSS

SEQ ID NO: 18742 - protein, 6 aa, Artificial Sequence
  Synthetic construct
QDIRDD

SEQ ID NO: 18743 - protein, 9 aa, Artificial Sequence
  Synthetic construct
SSDVGTYNL

SEQ ID NO: 18744 - protein, 6 aa, Artificial Sequence
  Synthetic construct
QSIGRW

SEQ ID NO: 18745 - protein, 8 aa, Artificial Sequence
  Synthetic construct
SGSIASNY

SEQ ID NO: 18746 - protein, 6 aa, Artificial Sequence
  Synthetic construct
QRINNW

SEQ ID NO: 18747 - protein, 6 aa, Artificial Sequence
  Synthetic construct
QGISSY

SEQ ID NO: 18748 - protein, 8 aa, Artificial Sequence
  Synthetic construct
SSNIGNNY

SEQ ID NO: 18749 - protein, 6 aa, Artificial Sequence
  Synthetic construct
RSITSY

SEQ ID NO: 18750 - protein, 9 aa, Artificial Sequence
  Synthetic construct
SSDIGGYDF

SEQ ID NO: 18751 - protein, 7 aa, Artificial Sequence
  Synthetic construct
QSVTSSF

SEQ ID NO: 18752 - protein, 6 aa, Artificial Sequence
  Synthetic construct
QGISSY

SEQ ID NO: 18753 - protein, 9 aa, Artificial Sequence
  Synthetic construct
SSDVGSYNL

SEQ ID NO: 18754 - protein, 6 aa, Artificial Sequence
  Synthetic construct
ALPKKY

SEQ ID NO: 18755 - protein, 9 aa, Artificial Sequence
  Synthetic construct
SSDVGSYNL

SEQ ID NO: 18756 - protein, 7 aa, Artificial Sequence
  Synthetic construct
QSVSSSY

SEQ ID NO: 18757 - protein, 9 aa, Artificial Sequence
  Synthetic construct
GNDVGAFDF

SEQ ID NO: 18758 - protein, 12 aa, Artificial Sequence
  Synthetic construct
QSLLDSKSGYIY

SEQ ID NO: 18759 - protein, 8 aa, Artificial Sequence
  Synthetic construct
SGNIASNY

SEQ ID NO: 18760 - protein, 8 aa, Artificial Sequence
  Synthetic construct
SSNIGSNP

SEQ ID NO: 18761 - protein, 12 aa, Artificial Sequence
  Synthetic construct
QSVLYSSSNKNY

SEQ ID NO: 18762 - protein, 9 aa, Artificial Sequence
  Synthetic construct
SSEVGGYNY

SEQ ID NO: 18763 - protein, 6 aa, Artificial Sequence
  Synthetic construct
QSISSW

SEQ ID NO: 18764 - protein, 12 aa, Artificial Sequence
  Synthetic construct
QSVLYSSNNKDY

SEQ ID NO: 18765 - protein, 6 aa, Artificial Sequence
  Synthetic construct
QSVSSY

SEQ ID NO: 18766 - protein, 6 aa, Artificial Sequence
  Synthetic construct
NIDQNH

SEQ ID NO: 18767 - protein, 6 aa, Artificial Sequence
  Synthetic construct
QSISSW

SEQ ID NO: 18768 - protein, 6 aa, Artificial Sequence
  Synthetic construct
QGISSY

SEQ ID NO: 18769 - protein, 11 aa, Artificial Sequence
  Synthetic construct
QSLLHSNGYNY

SEQ ID NO: 18770 - protein, 6 aa, Artificial Sequence
  Synthetic construct
HDIGSD

SEQ ID NO: 18771 - protein, 9 aa, Artificial Sequence
  Synthetic construct
SSDFGTYHY

SEQ ID NO: 18772 - protein, 6 aa, Artificial Sequence
  Synthetic construct
ALPNQY

SEQ ID NO: 18773 - protein, 11 aa, Artificial Sequence
  Synthetic construct
QSLVHTNGYNY

SEQ ID NO: 18774 - protein, 12 aa, Artificial Sequence
  Synthetic construct
QSVLYSSNNKNY

SEQ ID NO: 18775 - protein, 12 aa, Artificial Sequence
  Synthetic construct
QSVLYSSNNKNY

SEQ ID NO: 18776 - protein, 8 aa, Artificial Sequence
  Synthetic construct
TSNIWNNY

SEQ ID NO: 18777 - protein, 8 aa, Artificial Sequence
  Synthetic construct
DYNIGNNF

SEQ ID NO: 18778 - protein, 9 aa, Artificial Sequence
  Synthetic construct
SSDVGSYNL

SEQ ID NO: 18779 - protein, 9 aa, Artificial Sequence
  Synthetic construct
SSDVGGYNY

SEQ ID NO: 18780 - protein, 6 aa, Artificial Sequence
  Synthetic construct
QSISSW

SEQ ID NO: 18781 - protein, 6 aa, Artificial Sequence
  Synthetic construct
ALPNQY

SEQ ID NO: 18782 - protein, 8 aa, Artificial Sequence
  Synthetic construct
TSNIWNNY

SEQ ID NO: 18783 - protein, 6 aa, Artificial Sequence
  Synthetic construct
SLGSYC

SEQ ID NO: 18784 - protein, 12 aa, Artificial Sequence
  Synthetic construct
QSVLYSSNNKNY

SEQ ID NO: 18785 - protein, 12 aa, Artificial Sequence
  Synthetic construct
QSVLYSSNNKNY

SEQ ID NO: 18786 - protein, 7 aa, Artificial Sequence
  Synthetic construct
QSVNNNY

SEQ ID NO: 18787 - protein, 7 aa, Artificial Sequence
  Synthetic construct
QTVSSSY

SEQ ID NO: 18788 - protein, 9 aa, Artificial Sequence
  Synthetic construct
SSDVGSYGL

SEQ ID NO: 18789 - protein, 6 aa, Artificial Sequence
  Synthetic construct
VLKNRY

SEQ ID NO: 18790 - protein, 8 aa, Artificial Sequence
  Synthetic construct
SSNIGSNT

SEQ ID NO: 18791 - protein, 12 aa, Artificial Sequence
  Synthetic construct
QSVLYSSNNKNY

SEQ ID NO: 18792 - protein, 6 aa, Artificial Sequence
  Synthetic construct
QGISNY

SEQ ID NO: 18793 - protein, 8 aa, Artificial Sequence
  Synthetic construct
TSNIGSNT

SEQ ID NO: 18794 - protein, 6 aa, Artificial Sequence
  Synthetic construct
QRIGTS

SEQ ID NO: 18795 - protein, 7 aa, Artificial Sequence
  Synthetic construct
QRIGSNH

SEQ ID NO: 18796 - protein, 6 aa, Artificial Sequence
  Synthetic construct
QSVSSY

SEQ ID NO: 18797 - protein, 6 aa, Artificial Sequence
  Synthetic construct
QGIGNS

SEQ ID NO: 18798 - protein, 8 aa, Artificial Sequence
  Synthetic construct
SSNIGSHT

SEQ ID NO: 18799 - protein, 9 aa, Artificial Sequence
  Synthetic construct
NDDVGSYNY

SEQ ID NO: 18800 - protein, 8 aa, Artificial Sequence
  Synthetic construct
SSNIGNNY

SEQ ID NO: 18801 - protein, 11 aa, Artificial Sequence
  Synthetic construct
QSVVHIDGNTY

SEQ ID NO: 18802 - protein, 6 aa, Artificial Sequence
  Synthetic construct
QSISSW

SEQ ID NO: 18803 - protein, 11 aa, Artificial Sequence
  Synthetic construct
QSLLHSNGYNY

SEQ ID NO: 18804 - protein, 7 aa, Artificial Sequence
  Synthetic construct
QTIRSNY

SEQ ID NO: 18805 - protein, 8 aa, Artificial Sequence
  Synthetic construct
SSNIGRDY

SEQ ID NO: 18806 - protein, 8 aa, Artificial Sequence
  Synthetic construct
SSSIGSNY

SEQ ID NO: 18807 - protein, 8 aa, Artificial Sequence
  Synthetic construct
SSNIGSNY

SEQ ID NO: 18808 - protein, 6 aa, Artificial Sequence
  Synthetic construct
QDISNF

SEQ ID NO: 18809 - protein, 6 aa, Artificial Sequence
  Synthetic construct
VLKNRY

SEQ ID NO: 18810 - protein, 6 aa, Artificial Sequence
  Synthetic construct
VLAKKY

SEQ ID NO: 18811 - protein, 12 aa, Artificial Sequence
  Synthetic construct
QSVLYSSNNKNY

SEQ ID NO: 18812 - protein, 6 aa, Artificial Sequence
  Synthetic construct
QSISSW

SEQ ID NO: 18813 - protein, 11 aa, Artificial Sequence
  Synthetic construct
QSLLHSNGYNY

SEQ ID NO: 18814 - protein, 11 aa, Artificial Sequence
  Synthetic construct
QSLLHSDGKTY

SEQ ID NO: 18815 - protein, 8 aa, Artificial Sequence
  Synthetic construct
SSDIGSST

SEQ ID NO: 18816 - protein, 6 aa, Artificial Sequence
  Synthetic construct
QTISAH

SEQ ID NO: 18817 - protein, 6 aa, Artificial Sequence
  Synthetic construct
RSITSY

SEQ ID NO: 18818 - protein, 6 aa, Artificial Sequence
  Synthetic construct
QSINNY

SEQ ID NO: 18819 - protein, 6 aa, Artificial Sequence
  Synthetic construct
QSINIY

SEQ ID NO: 18820 - protein, 8 aa, Artificial Sequence
  Synthetic construct
SSNIGSNT

SEQ ID NO: 18821 - protein, 7 aa, Artificial Sequence
  Synthetic construct
QTVKSNY

SEQ ID NO: 18822 - protein, 8 aa, Artificial Sequence
  Synthetic construct
SGSIASDY

SEQ ID NO: 18823 - protein, 7 aa, Artificial Sequence
  Synthetic construct
QSVTRSS

SEQ ID NO: 18824 - protein, 6 aa, Artificial Sequence
  Synthetic construct
ALAKIY

SEQ ID NO: 18825 - protein, 6 aa, Artificial Sequence
  Synthetic construct
SLRSYY

SEQ ID NO: 18826 - protein, 6 aa, Artificial Sequence
  Synthetic construct
QDISNF

SEQ ID NO: 18827 - protein, 8 aa, Artificial Sequence
  Synthetic construct
SSNIGNGY

SEQ ID NO: 18828 - protein, 7 aa, Artificial Sequence
  Synthetic construct
SAHSTYA

SEQ ID NO: 18829 - protein, 6 aa, Artificial Sequence
  Synthetic construct
SLRSNY

SEQ ID NO: 18830 - protein, 7 aa, Artificial Sequence
  Synthetic construct
QTIRSNY

SEQ ID NO: 18831 - protein, 6 aa, Artificial Sequence
  Synthetic construct
QSFTNW

SEQ ID NO: 18832 - protein, 8 aa, Artificial Sequence
  Synthetic construct
SSNIGNNY

SEQ ID NO: 18833 - protein, 6 aa, Artificial Sequence
  Synthetic construct
VLKNRY

SEQ ID NO: 18834 - protein, 6 aa, Artificial Sequence
  Synthetic construct
QSISNY

SEQ ID NO: 18835 - protein, 6 aa, Artificial Sequence
  Synthetic construct
QSISSW

SEQ ID NO: 18836 - protein, 6 aa, Artificial Sequence
  Synthetic construct
RGINNY

SEQ ID NO: 18837 - protein, 5 aa, Artificial Sequence
  Synthetic construct
QSVSR

SEQ ID NO: 18838 - protein, 6 aa, Artificial Sequence
  Synthetic construct
QSVSSN

SEQ ID NO: 18839 - protein, 7 aa, Artificial Sequence
  Synthetic construct
QSVSSSQ

SEQ ID NO: 18840 - protein, 5 aa, Artificial Sequence
  Synthetic construct
QSVSR

SEQ ID NO: 18841 - protein, 8 aa, Artificial Sequence
  Synthetic construct
SSNIGNNY

SEQ ID NO: 18842 - protein, 6 aa, Artificial Sequence
  Synthetic construct
QDISNY

SEQ ID NO: 18843 - protein, 6 aa, Artificial Sequence
  Synthetic construct
QGIGNY

SEQ ID NO: 18844 - protein, 6 aa, Artificial Sequence
  Synthetic construct
RSITSY

SEQ ID NO: 18845 - protein, 6 aa, Artificial Sequence
  Synthetic construct
RSITSY

SEQ ID NO: 18846 - protein, 7 aa, Artificial Sequence
  Synthetic construct
QSVSTTH

SEQ ID NO: 18847 - protein, 7 aa, Artificial Sequence
  Synthetic construct
QSVSSSS

SEQ ID NO: 18848 - protein, 7 aa, Artificial Sequence
  Synthetic construct
QSVSSSS

SEQ ID NO: 18849 - protein, 7 aa, Artificial Sequence
  Synthetic construct
QTVSSSA

SEQ ID NO: 18850 - protein, 9 aa, Artificial Sequence
  Synthetic construct
SSDVGTYNL

SEQ ID NO: 18851 - protein, 6 aa, Artificial Sequence
  Synthetic construct
QGIGTY

SEQ ID NO: 18852 - protein, 9 aa, Artificial Sequence
  Synthetic construct
SSDVGTYNL

SEQ ID NO: 18853 - protein, 6 aa, Artificial Sequence
  Synthetic construct
QSVSSY

SEQ ID NO: 18854 - protein, 6 aa, Artificial Sequence
  Synthetic construct
QSISSY

SEQ ID NO: 18855 - protein, 11 aa, Artificial Sequence
  Synthetic construct
QSLLHSNGYNY

SEQ ID NO: 18856 - protein, 12 aa, Artificial Sequence
  Synthetic construct
QTVLYSSNNRNY

SEQ ID NO: 18857 - protein, 6 aa, Artificial Sequence
  Synthetic construct
SLRSYY

SEQ ID NO: 18858 - protein, 6 aa, Artificial Sequence
  Synthetic construct
QSVSSN

SEQ ID NO: 18859 - protein, 12 aa, Artificial Sequence
  Synthetic construct
QTLFSDSNNKNY

SEQ ID NO: 18860 - protein, 9 aa, Artificial Sequence
  Synthetic construct
SSDVGGYNY

SEQ ID NO: 18861 - protein, 6 aa, Artificial Sequence
  Synthetic construct
QNINKY

SEQ ID NO: 18862 - protein, 7 aa, Artificial Sequence
  Synthetic construct
QSVSSSY

SEQ ID NO: 18863 - protein, 6 aa, Artificial Sequence
  Synthetic construct
RSITSY

SEQ ID NO: 18864 - protein, 6 aa, Artificial Sequence
  Synthetic construct
QDISHY

SEQ ID NO: 18865 - protein, 9 aa, Artificial Sequence
  Synthetic construct
SSDVGGYNY

SEQ ID NO: 18866 - protein, 6 aa, Artificial Sequence
  Synthetic construct
QGISSW

SEQ ID NO: 18867 - protein, 6 aa, Artificial Sequence
  Synthetic construct
KLGDKY

SEQ ID NO: 18868 - protein, 6 aa, Artificial Sequence
  Synthetic construct
QSVSSN

SEQ ID NO: 18869 - protein, 8 aa, Artificial Sequence
  Synthetic construct
SSNIGNNY

SEQ ID NO: 18870 - protein, 9 aa, Artificial Sequence
  Synthetic construct
SSDVGGYNY

SEQ ID NO: 18871 - protein, 12 aa, Artificial Sequence
  Synthetic construct
QSVLYSSNNKNY

SEQ ID NO: 18872 - protein, 8 aa, Artificial Sequence
  Synthetic construct
TSNIWNNY

SEQ ID NO: 18873 - protein, 9 aa, Artificial Sequence
  Synthetic construct
NSDLGSYNL

SEQ ID NO: 18874 - protein, 6 aa, Artificial Sequence
  Synthetic construct
SLRSYY

SEQ ID NO: 18875 - protein, 11 aa, Artificial Sequence
  Synthetic construct
QSLVHSDGNTY

SEQ ID NO: 18876 - protein, 6 aa, Artificial Sequence
  Synthetic construct
QGISSY

SEQ ID NO: 18877 - protein, 7 aa, Artificial Sequence
  Synthetic construct
QNFGSYY

SEQ ID NO: 18878 - protein, 7 aa, Artificial Sequence
  Synthetic construct
QTVSNTY

SEQ ID NO: 18879 - protein, 6 aa, Artificial Sequence
  Synthetic construct
RSITSY

SEQ ID NO: 18880 - protein, 12 aa, Artificial Sequence
  Synthetic construct
QSVLNTSNNKNY

SEQ ID NO: 18881 - protein, 9 aa, Artificial Sequence
  Synthetic construct
SSDVGTYNL

SEQ ID NO: 18882 - protein, 6 aa, Artificial Sequence
  Synthetic construct
KLSDEY

SEQ ID NO: 18883 - protein, 11 aa, Artificial Sequence
  Synthetic construct
QSLVHSDGNTY

SEQ ID NO: 18884 - protein, 11 aa, Artificial Sequence
  Synthetic construct
RSLEHSDGSIR

SEQ ID NO: 18885 - protein, 7 aa, Artificial Sequence
  Synthetic construct
QSVSSSY

SEQ ID NO: 18886 - protein, 7 aa, Artificial Sequence
  Synthetic construct
SGHTNYA

SEQ ID NO: 18887 - protein, 6 aa, Artificial Sequence
  Synthetic construct
QGISSY

SEQ ID NO: 18888 - protein, 7 aa, Artificial Sequence
  Synthetic construct
QTIRSNY

SEQ ID NO: 18889 - protein, 12 aa, Artificial Sequence
  Synthetic construct
QSVLYSSNNKNY

SEQ ID NO: 18890 - protein, 12 aa, Artificial Sequence
  Synthetic construct
QSVLNSSTNKNY

SEQ ID NO: 18891 - protein, 6 aa, Artificial Sequence
  Synthetic construct
QSVSSN

SEQ ID NO: 18892 - protein, 6 aa, Artificial Sequence
  Synthetic construct
KLGDKY

SEQ ID NO: 18893 - protein, 6 aa, Artificial Sequence
  Synthetic construct
QSVLKY

SEQ ID NO: 18894 - protein, 6 aa, Artificial Sequence
  Synthetic construct
KLGDKY

SEQ ID NO: 18895 - protein, 6 aa, Artificial Sequence
  Synthetic construct
QSISSW

SEQ ID NO: 18896 - protein, 12 aa, Artificial Sequence
  Synthetic construct
QSLLNSDDGNTY

SEQ ID NO: 18897 - protein, 8 aa, Artificial Sequence
  Synthetic construct
SSNIGSNY

SEQ ID NO: 18898 - protein, 6 aa, Artificial Sequence
  Synthetic construct
NIGSKS

SEQ ID NO: 18899 - protein, 6 aa, Artificial Sequence
  Synthetic construct
QGISSY

SEQ ID NO: 18900 - protein, 6 aa, Artificial Sequence
  Synthetic construct
QSISSW

SEQ ID NO: 18901 - protein, 8 aa, Artificial Sequence
  Synthetic construct
SSNIGGNY

SEQ ID NO: 18902 - protein, 9 aa, Artificial Sequence
  Synthetic construct
SSDIGVYNY

SEQ ID NO: 18903 - protein, 6 aa, Artificial Sequence
  Synthetic construct
RGINNY

SEQ ID NO: 18904 - protein, 6 aa, Artificial Sequence
  Synthetic construct
QSISSW

SEQ ID NO: 18905 - protein, 6 aa, Artificial Sequence
  Synthetic construct
QSVNDY

SEQ ID NO: 18906 - protein, 6 aa, Artificial Sequence
  Synthetic construct
QSISSY

SEQ ID NO: 18907 - protein, 6 aa, Artificial Sequence
  Synthetic construct
QSISSW

SEQ ID NO: 18908 - protein, 6 aa, Artificial Sequence
  Synthetic construct
QTIGSS

SEQ ID NO: 18909 - protein, 8 aa, Artificial Sequence
  Synthetic construct
TSNIWNNY

SEQ ID NO: 18910 - protein, 9 aa, Artificial Sequence
  Synthetic construct
SSDVGTYNL

SEQ ID NO: 18911 - protein, 9 aa, Artificial Sequence
  Synthetic construct
SGINVGTYR

SEQ ID NO: 18912 - protein, 6 aa, Artificial Sequence
  Synthetic construct
RSITSY

SEQ ID NO: 18913 - protein, 12 aa, Artificial Sequence
  Synthetic construct
QSVLYSSNNKNY

SEQ ID NO: 18914 - protein, 11 aa, Artificial Sequence
  Synthetic construct
QSLLNGNGYNY

SEQ ID NO: 18915 - protein, 6 aa, Artificial Sequence
  Synthetic construct
QGISNW

SEQ ID NO: 18916 - protein, 7 aa, Artificial Sequence
  Synthetic construct
QSVSSNY

SEQ ID NO: 18917 - protein, 9 aa, Artificial Sequence
  Synthetic construct
SSDVGTYNL

SEQ ID NO: 18918 - protein, 9 aa, Artificial Sequence
  Synthetic construct
SSDVGGYNY

SEQ ID NO: 18919 - protein, 6 aa, Artificial Sequence
  Synthetic construct
QSINTF

SEQ ID NO: 18920 - protein, 7 aa, Artificial Sequence
  Synthetic construct
QSVSSSY

SEQ ID NO: 18921 - protein, 6 aa, Artificial Sequence
  Synthetic construct
RSITSY

SEQ ID NO: 18922 - protein, 7 aa, Artificial Sequence
  Synthetic construct
QSLSSSH

SEQ ID NO: 18923 - protein, 8 aa, Artificial Sequence
  Synthetic construct
SSNIGSKT

SEQ ID NO: 18924 - protein, 6 aa, Artificial Sequence
  Synthetic construct
SLRSYY

SEQ ID NO: 18925 - protein, 8 aa, Artificial Sequence
  Synthetic construct
SSNIGNNL

SEQ ID NO: 18926 - protein, 6 aa, Artificial Sequence
  Synthetic construct
QSISRW

SEQ ID NO: 18927 - protein, 6 aa, Artificial Sequence
  Synthetic construct
QGISNY

SEQ ID NO: 18928 - protein, 9 aa, Artificial Sequence
  Synthetic construct
TSDIGSYDL

SEQ ID NO: 18929 - protein, 8 aa, Artificial Sequence
  Synthetic construct
SSNIGSNY

SEQ ID NO: 18930 - protein, 6 aa, Artificial Sequence
  Synthetic construct
QSVSSY

SEQ ID NO: 18931 - protein, 11 aa, Artificial Sequence
  Synthetic construct
QSLLRGDGKTH

SEQ ID NO: 18932 - protein, 7 aa, Artificial Sequence
  Synthetic construct
QSVSSSY

SEQ ID NO: 18933 - protein, 6 aa, Artificial Sequence
  Synthetic construct
QGISSY

SEQ ID NO: 18934 - protein, 6 aa, Artificial Sequence
  Synthetic construct
QYIKND

SEQ ID NO: 18935 - protein, 6 aa, Artificial Sequence
  Synthetic construct
QDIRND

SEQ ID NO: 18936 - protein, 7 aa, Artificial Sequence
  Synthetic construct
QSVSSSY

SEQ ID NO: 18937 - protein, 12 aa, Artificial Sequence
  Synthetic construct
QSILYSSNNKNY

SEQ ID NO: 18938 - protein, 7 aa, Artificial Sequence
  Synthetic construct
QSVSSSY

SEQ ID NO: 18939 - protein, 6 aa, Artificial Sequence
  Synthetic construct
QDISNY

SEQ ID NO: 18940 - protein, 6 aa, Artificial Sequence
  Synthetic construct
QSVSSY

SEQ ID NO: 18941 - protein, 9 aa, Artificial Sequence
  Synthetic construct
TGSVTSGNY

SEQ ID NO: 18942 - protein, 6 aa, Artificial Sequence
  Synthetic construct
QSVSSY

SEQ ID NO: 18943 - protein, 6 aa, Artificial Sequence
  Synthetic construct
QSINDR

SEQ ID NO: 18944 - protein, 6 aa, Artificial Sequence
  Synthetic construct
QAISNY

SEQ ID NO: 18945 - protein, 6 aa, Artificial Sequence
  Synthetic construct
QSIGNN

SEQ ID NO: 18946 - protein, 7 aa, Artificial Sequence
  Synthetic construct
QSVSSSY

SEQ ID NO: 18947 - protein, 8 aa, Artificial Sequence
  Synthetic construct
YSNIGSND

SEQ ID NO: 18948 - protein, 9 aa, Artificial Sequence
  Synthetic construct
SSDVGGYNY

SEQ ID NO: 18949 - protein, 9 aa, Artificial Sequence
  Synthetic construct
NSNIGAGYD

SEQ ID NO: 18950 - protein, 9 aa, Artificial Sequence
  Synthetic construct
SSDIRYYKH

SEQ ID NO: 18951 - protein, 6 aa, Artificial Sequence
  Synthetic construct
QDISNW

SEQ ID NO: 18952 - protein, 6 aa, Artificial Sequence
  Synthetic construct
QGISSY

SEQ ID NO: 18953 - protein, 8 aa, Artificial Sequence
  Synthetic construct
RSNIGSNI

SEQ ID NO: 18954 - protein, 5 aa, Artificial Sequence
  Synthetic construct
QSVSR

SEQ ID NO: 18955 - protein, 9 aa, Artificial Sequence
  Synthetic construct
TGAVTSGHY

SEQ ID NO: 18956 - protein, 6 aa, Artificial Sequence
  Synthetic construct
QAISSF

SEQ ID NO: 18957 - protein, 6 aa, Artificial Sequence
  Synthetic construct
QSISSN

SEQ ID NO: 18958 - protein, 6 aa, Artificial Sequence
  Synthetic construct
VLAKEY

SEQ ID NO: 18959 - protein, 6 aa, Artificial Sequence
  Synthetic construct
QDISNW

SEQ ID NO: 18960 - protein, 7 aa, Artificial Sequence
  Synthetic construct
QTIRSNY

SEQ ID NO: 18961 - protein, 11 aa, Artificial Sequence
  Synthetic construct
QSLLHSNGYNY

SEQ ID NO: 18962 - protein, 5 aa, Artificial Sequence
  Synthetic construct
SLRLF

SEQ ID NO: 18963 - protein, 8 aa, Artificial Sequence
  Synthetic construct
SSNIGGNY

SEQ ID NO: 18964 - protein, 6 aa, Artificial Sequence
  Synthetic construct
QSVSTN

SEQ ID NO: 18965 - protein, 6 aa, Artificial Sequence
  Synthetic construct
NIESES

SEQ ID NO: 18966 - protein, 12 aa, Artificial Sequence
  Synthetic construct
QSVLYTPNNKNY

SEQ ID NO: 18967 - protein, 8 aa, Artificial Sequence
  Synthetic construct
DSNIGSNS

SEQ ID NO: 18968 - protein, 8 aa, Artificial Sequence
  Synthetic construct
SSNIGNNY

SEQ ID NO: 18969 - protein, 11 aa, Artificial Sequence
  Synthetic construct
QSLLHSNGYNY

SEQ ID NO: 18970 - protein, 7 aa, Artificial Sequence
  Synthetic construct
QTVSSSY

SEQ ID NO: 18971 - protein, 6 aa, Artificial Sequence
  Synthetic construct
QSISSW

SEQ ID NO: 18972 - protein, 6 aa, Artificial Sequence
  Synthetic construct
QSVGRN

SEQ ID NO: 18973 - protein, 11 aa, Artificial Sequence
  Synthetic construct
QSLVHSDGNTY

SEQ ID NO: 18974 - protein, 11 aa, Artificial Sequence
  Synthetic construct
QSLLHSDGKTY

SEQ ID NO: 18975 - protein, 7 aa, Artificial Sequence
  Synthetic construct
QSVVSNQ

SEQ ID NO: 18976 - protein, 8 aa, Artificial Sequence
  Synthetic construct
SSNIGSKY

SEQ ID NO: 18977 - protein, 6 aa, Artificial Sequence
  Synthetic construct
QNIRKY

SEQ ID NO: 18978 - protein, 9 aa, Artificial Sequence
  Synthetic construct
TSDIGSYDL

SEQ ID NO: 18979 - protein, 5 aa, Artificial Sequence
  Synthetic construct
QSVSR

SEQ ID NO: 18980 - protein, 6 aa, Artificial Sequence
  Synthetic construct
QSVSSY

SEQ ID NO: 18981 - protein, 11 aa, Artificial Sequence
  Synthetic construct
QSLLHSNGYNY

SEQ ID NO: 18982 - protein, 8 aa, Artificial Sequence
  Synthetic construct
RSNIGNNF

SEQ ID NO: 18983 - protein, 6 aa, Artificial Sequence
  Synthetic construct
QSINTY

SEQ ID NO: 18984 - protein, 9 aa, Artificial Sequence
  Synthetic construct
SSDVGGYTY

SEQ ID NO: 18985 - protein, 6 aa, Artificial Sequence
  Synthetic construct
QGISSY

SEQ ID NO: 18986 - protein, 6 aa, Artificial Sequence
  Synthetic construct
QSISRW

SEQ ID NO: 18987 - protein, 6 aa, Artificial Sequence
  Synthetic construct
RNIDNW

SEQ ID NO: 18988 - protein, 5 aa, Artificial Sequence
  Synthetic construct
QSVSR

SEQ ID NO: 18989 - protein, 6 aa, Artificial Sequence
  Synthetic construct
NIGSKS

SEQ ID NO: 18990 - protein, 6 aa, Artificial Sequence
  Synthetic construct
QGISSY

SEQ ID NO: 18991 - protein, 9 aa, Artificial Sequence
  Synthetic construct
TGAVTSGHY

SEQ ID NO: 18992 - protein, 6 aa, Artificial Sequence
  Synthetic construct
QGISSY

SEQ ID NO: 18993 - protein, 6 aa, Artificial Sequence
  Synthetic construct
QTIINY

SEQ ID NO: 18994 - protein, 6 aa, Artificial Sequence
  Synthetic construct
QSVSDY

SEQ ID NO: 18995 - protein, 6 aa, Artificial Sequence
  Synthetic construct
QSISSW

SEQ ID NO: 18996 - protein, 9 aa, Artificial Sequence
  Synthetic construct
SSDVGGYNY

SEQ ID NO: 18997 - protein, 6 aa, Artificial Sequence
  Synthetic construct
QSFNYW

SEQ ID NO: 18998 - protein, 7 aa, Artificial Sequence
  Synthetic construct
QSVSSSH

SEQ ID NO: 18999 - protein, 6 aa, Artificial Sequence
  Synthetic construct
QSISSY

SEQ ID NO: 19000 - protein, 8 aa, Artificial Sequence
  Synthetic construct
FSDIGSGY

SEQ ID NO: 19001 - protein, 6 aa, Artificial Sequence
  Synthetic construct
QGISSY

SEQ ID NO: 19002 - protein, 6 aa, Artificial Sequence
  Synthetic construct
QSVSSN

SEQ ID NO: 19003 - protein, 6 aa, Artificial Sequence
  Synthetic construct
QGISSY

SEQ ID NO: 19004 - protein, 6 aa, Artificial Sequence
  Synthetic construct
QDISNY

SEQ ID NO: 19005 - protein, 6 aa, Artificial Sequence
  Synthetic construct
SLRSYY

SEQ ID NO: 19006 - protein, 6 aa, Artificial Sequence
  Synthetic construct
QSISSY

SEQ ID NO: 19007 - protein, 6 aa, Artificial Sequence
  Synthetic construct
SLRSYY

SEQ ID NO: 19008 - protein, 6 aa, Artificial Sequence
  Synthetic construct
QTVSTY

SEQ ID NO: 19009 - protein, 6 aa, Artificial Sequence
  Synthetic construct
QSVSSY

SEQ ID NO: 19010 - protein, 6 aa, Artificial Sequence
  Synthetic construct
SLRTYY

SEQ ID NO: 19011 - protein, 6 aa, Artificial Sequence
  Synthetic construct
QSISNW

SEQ ID NO: 19012 - protein, 7 aa, Artificial Sequence
  Synthetic construct
SGHSSYA

SEQ ID NO: 19013 - protein, 9 aa, Artificial Sequence
  Synthetic construct
SSDVGGYNY

SEQ ID NO: 19014 - protein, 7 aa, Artificial Sequence
  Synthetic construct
SGYSNYK

SEQ ID NO: 19015 - protein, 6 aa, Artificial Sequence
  Synthetic construct
QSVSTY

SEQ ID NO: 19016 - protein, 6 aa, Artificial Sequence
  Synthetic construct
QGIRND

SEQ ID NO: 19017 - protein, 6 aa, Artificial Sequence
  Synthetic construct
QTIRSY

SEQ ID NO: 19018 - protein, 11 aa, Artificial Sequence
  Synthetic construct
QSLVHSDGNIY

SEQ ID NO: 19019 - protein, 6 aa, Artificial Sequence
  Synthetic construct
QSISSY

SEQ ID NO: 19020 - protein, 6 aa, Artificial Sequence
  Synthetic construct
QSINRN

SEQ ID NO: 19021 - protein, 7 aa, Artificial Sequence
  Synthetic construct
QSLSSSY

SEQ ID NO: 19022 - protein, 6 aa, Artificial Sequence
  Synthetic construct
RSITSY

SEQ ID NO: 19023 - protein, 9 aa, Artificial Sequence
  Synthetic construct
SSDVGSFNL

SEQ ID NO: 19024 - protein, 8 aa, Artificial Sequence
  Synthetic construct
NSNIGFTY

SEQ ID NO: 19025 - protein, 8 aa, Artificial Sequence
  Synthetic construct
SSNIGTNF

SEQ ID NO: 19026 - protein, 6 aa, Artificial Sequence
  Synthetic construct
QSISSW

SEQ ID NO: 19027 - protein, 9 aa, Artificial Sequence
  Synthetic construct
SSDVGTYNL

SEQ ID NO: 19028 - protein, 6 aa, Artificial Sequence
  Synthetic construct
QNINIY

SEQ ID NO: 19029 - protein, 6 aa, Artificial Sequence
  Synthetic construct
QSITNY

SEQ ID NO: 19030 - protein, 6 aa, Artificial Sequence
  Synthetic construct
QRIRNF

SEQ ID NO: 19031 - protein, 5 aa, Artificial Sequence
  Synthetic construct
QSVSR

SEQ ID NO: 19032 - protein, 6 aa, Artificial Sequence
  Synthetic construct
QGISSA

SEQ ID NO: 19033 - protein, 6 aa, Artificial Sequence
  Synthetic construct
QSISSW

SEQ ID NO: 19034 - protein, 6 aa, Artificial Sequence
  Synthetic construct
QSVSSN

SEQ ID NO: 19035 - protein, 12 aa, Artificial Sequence
  Synthetic construct
QSVLYSSNNKNY

SEQ ID NO: 19036 - protein, 9 aa, Artificial Sequence
  Synthetic construct
SSDVGNYDL

SEQ ID NO: 19037 - protein, 6 aa, Artificial Sequence
  Synthetic construct
QSISSW

SEQ ID NO: 19038 - protein, 6 aa, Artificial Sequence
  Synthetic construct
ALSKKY

SEQ ID NO: 19039 - protein, 12 aa, Artificial Sequence
  Synthetic construct
QSVLYSSNNKNY

SEQ ID NO: 19040 - protein, 6 aa, Artificial Sequence
  Synthetic construct
QSVSKD

SEQ ID NO: 19041 - protein, 11 aa, Artificial Sequence
  Synthetic construct
QSLLHSDGKTY

SEQ ID NO: 19042 - protein, 8 aa, Artificial Sequence
  Synthetic construct
SSNIGDIY

SEQ ID NO: 19043 - protein, 6 aa, Artificial Sequence
  Synthetic construct
VLAKKY

SEQ ID NO: 19044 - protein, 6 aa, Artificial Sequence
  Synthetic construct
QSISSW

SEQ ID NO: 19045 - protein, 7 aa, Artificial Sequence
  Synthetic construct
QTIRSNY

SEQ ID NO: 19046 - protein, 6 aa, Artificial Sequence
  Synthetic construct
QSIGRW

SEQ ID NO: 19047 - protein, 11 aa, Artificial Sequence
  Synthetic construct
QSLVHSDGNTY

SEQ ID NO: 19048 - protein, 12 aa, Artificial Sequence
  Synthetic construct
QSVLYSSNNKNY

SEQ ID NO: 19049 - protein, 8 aa, Artificial Sequence
  Synthetic construct
SSNIGNNY

SEQ ID NO: 19050 - protein, 8 aa, Artificial Sequence
  Synthetic construct
SSNIGNNY

SEQ ID NO: 19051 - protein, 6 aa, Artificial Sequence
  Synthetic construct
RSITSY

SEQ ID NO: 19052 - protein, 6 aa, Artificial Sequence
  Synthetic construct
QGISSY

SEQ ID NO: 19053 - protein, 6 aa, Artificial Sequence
  Synthetic construct
NIGSKR

SEQ ID NO: 19054 - protein, 6 aa, Artificial Sequence
  Synthetic construct
QSVSSF

SEQ ID NO: 19055 - protein, 6 aa, Artificial Sequence
  Synthetic construct
RLGAKH

SEQ ID NO: 19056 - protein, 6 aa, Artificial Sequence
  Synthetic construct
QGISSY

SEQ ID NO: 19057 - protein, 6 aa, Artificial Sequence
  Synthetic construct
SLRSYY

SEQ ID NO: 19058 - protein, 6 aa, Artificial Sequence
  Synthetic construct
QGIGSA

SEQ ID NO: 19059 - protein, 6 aa, Artificial Sequence
  Synthetic construct
QSVSSN

SEQ ID NO: 19060 - protein, 9 aa, Artificial Sequence
  Synthetic construct
SSDVGGYNY

SEQ ID NO: 19061 - protein, 9 aa, Artificial Sequence
  Synthetic construct
SSDVGTYNL

SEQ ID NO: 19062 - protein, 6 aa, Artificial Sequence
  Synthetic construct
QSISSW

SEQ ID NO: 19063 - protein, 6 aa, Artificial Sequence
  Synthetic construct
NIGSKG

SEQ ID NO: 19064 - protein, 6 aa, Artificial Sequence
  Synthetic construct
QGISNY

SEQ ID NO: 19065 - protein, 6 aa, Artificial Sequence
  Synthetic construct
QSISSW

SEQ ID NO: 19066 - protein, 6 aa, Artificial Sequence
  Synthetic construct
QSITNY

SEQ ID NO: 19067 - protein, 6 aa, Artificial Sequence
  Synthetic construct
QTISNS

SEQ ID NO: 19068 - protein, 6 aa, Artificial Sequence
  Synthetic construct
DLGNKY

SEQ ID NO: 19069 - protein, 9 aa, Artificial Sequence
  Synthetic construct
SSDVGAYNY

SEQ ID NO: 19070 - protein, 6 aa, Artificial Sequence
  Synthetic construct
QSVSSN

SEQ ID NO: 19071 - protein, 6 aa, Artificial Sequence
  Synthetic construct
QNINNY

SEQ ID NO: 19072 - protein, 9 aa, Artificial Sequence
  Synthetic construct
SANIGAGYD

SEQ ID NO: 19073 - protein, 6 aa, Artificial Sequence
  Synthetic construct
QSVSSN

SEQ ID NO: 19074 - protein, 6 aa, Artificial Sequence
  Synthetic construct
QGISNY

SEQ ID NO: 19075 - protein, 7 aa, Artificial Sequence
  Synthetic construct
QLVTNNL

SEQ ID NO: 19076 - protein, 6 aa, Artificial Sequence
  Synthetic construct
QGISSY

SEQ ID NO: 19077 - protein, 11 aa, Artificial Sequence
  Synthetic construct
QRLVHSDGNTY

SEQ ID NO: 19078 - protein, 6 aa, Artificial Sequence
  Synthetic construct
KLDDKY

SEQ ID NO: 19079 - protein, 8 aa, Artificial Sequence
  Synthetic construct
SSNIGSNY

SEQ ID NO: 19080 - protein, 6 aa, Artificial Sequence
  Synthetic construct
QGISSY

SEQ ID NO: 19081 - protein, 6 aa, Artificial Sequence
  Synthetic construct
LLARKY

SEQ ID NO: 19082 - protein, 8 aa, Artificial Sequence
  Synthetic construct
SSNIGSNY

SEQ ID NO: 19083 - protein, 6 aa, Artificial Sequence
  Synthetic construct
QSISSW

SEQ ID NO: 19084 - protein, 7 aa, Artificial Sequence
  Synthetic construct
QSVSSSR

SEQ ID NO: 19085 - protein, 6 aa, Artificial Sequence
  Synthetic construct
VLPKQY

SEQ ID NO: 19086 - protein, 9 aa, Artificial Sequence
  Synthetic construct
SSDVGTYNL

SEQ ID NO: 19087 - protein, 6 aa, Artificial Sequence
  Synthetic construct
QSISSW

SEQ ID NO: 19088 - protein, 6 aa, Artificial Sequence
  Synthetic construct
QDISNF

SEQ ID NO: 19089 - protein, 6 aa, Artificial Sequence
  Synthetic construct
QSVNTW

SEQ ID NO: 19090 - protein, 9 aa, Artificial Sequence
  Synthetic construct
TGAVTRGHY

SEQ ID NO: 19091 - protein, 6 aa, Artificial Sequence
  Synthetic construct
QSVSSY

SEQ ID NO: 19092 - protein, 6 aa, Artificial Sequence
  Synthetic construct
RSITSY

SEQ ID NO: 19093 - protein, 9 aa, Artificial Sequence
  Synthetic construct
SSDVGSYNL

SEQ ID NO: 19094 - protein, 6 aa, Artificial Sequence
  Synthetic construct
QSISSW

SEQ ID NO: 19095 - protein, 6 aa, Artificial Sequence
  Synthetic construct
QSISSW

SEQ ID NO: 19096 - protein, 6 aa, Artificial Sequence
  Synthetic construct
RSITSY

SEQ ID NO: 19097 - protein, 11 aa, Artificial Sequence
  Synthetic construct
QNLVHSSGNTY

SEQ ID NO: 19098 - protein, 11 aa, Artificial Sequence
  Synthetic construct
QSLLQRNGKNY

SEQ ID NO: 19099 - protein, 9 aa, Artificial Sequence
  Synthetic construct
SSDVGGYNY

SEQ ID NO: 19100 - protein, 11 aa, Artificial Sequence
  Synthetic construct
QGLVHSDGNIY

SEQ ID NO: 19101 - protein, 7 aa, Artificial Sequence
  Synthetic construct
QSLSSRN

SEQ ID NO: 19102 - protein, 9 aa, Artificial Sequence
  Synthetic construct
GSHLGNYKY

SEQ ID NO: 19103 - protein, 6 aa, Artificial Sequence
  Synthetic construct
QSISSY

SEQ ID NO: 19104 - protein, 8 aa, Artificial Sequence
  Synthetic construct
SSNIGTNF

SEQ ID NO: 19105 - protein, 6 aa, Artificial Sequence
  Synthetic construct
RSITSY

SEQ ID NO: 19106 - protein, 7 aa, Artificial Sequence
  Synthetic construct
QSVSSSY

SEQ ID NO: 19107 - protein, 6 aa, Artificial Sequence
  Synthetic construct
RSITSY

SEQ ID NO: 19108 - protein, 7 aa, Artificial Sequence
  Synthetic construct
SGHSSYA

SEQ ID NO: 19109 - protein, 6 aa, Artificial Sequence
  Synthetic construct
ALPKKY

SEQ ID NO: 19110 - protein, 6 aa, Artificial Sequence
  Synthetic construct
QSVNSN

SEQ ID NO: 19111 - protein, 12 aa, Artificial Sequence
  Synthetic construct
QSVLYSPANKNY

SEQ ID NO: 19112 - protein, 9 aa, Artificial Sequence
  Synthetic construct
SSDVGGYNY

SEQ ID NO: 19113 - protein, 6 aa, Artificial Sequence
  Synthetic construct
RSITSY

SEQ ID NO: 19114 - protein, 6 aa, Artificial Sequence
  Synthetic construct
NIGTTS

SEQ ID NO: 19115 - protein, 11 aa, Artificial Sequence
  Synthetic construct
QSLVHSDGNTY

SEQ ID NO: 19116 - protein, 7 aa, Artificial Sequence
  Synthetic construct
QTIRSNY

SEQ ID NO: 19117 - protein, 6 aa, Artificial Sequence
  Synthetic construct
QSISRW

SEQ ID NO: 19118 - protein, 9 aa, Artificial Sequence
  Synthetic construct
SGSVSTSYY

SEQ ID NO: 19119 - protein, 8 aa, Artificial Sequence
  Synthetic construct
TSNIWNNY

SEQ ID NO: 19120 - protein, 11 aa, Artificial Sequence
  Synthetic construct
QGLVHTNGNTY

SEQ ID NO: 19121 - protein, 6 aa, Artificial Sequence
  Synthetic construct
QSVTRY

SEQ ID NO: 19122 - protein, 8 aa, Artificial Sequence
  Synthetic construct
NSNIGRNT

SEQ ID NO: 19123 - protein, 6 aa, Artificial Sequence
  Synthetic construct
QGISSY

SEQ ID NO: 19124 - protein, 9 aa, Artificial Sequence
  Synthetic construct
SSDVGTYNL

SEQ ID NO: 19125 - protein, 6 aa, Artificial Sequence
  Synthetic construct
QTINKF

SEQ ID NO: 19126 - protein, 6 aa, Artificial Sequence
  Synthetic construct
QGISSY

SEQ ID NO: 19127 - protein, 6 aa, Artificial Sequence
  Synthetic construct
DVGSKR

SEQ ID NO: 19128 - protein, 6 aa, Artificial Sequence
  Synthetic construct
QGISSW

SEQ ID NO: 19129 - protein, 6 aa, Artificial Sequence
  Synthetic construct
QSINNF

SEQ ID NO: 19130 - protein, 8 aa, Artificial Sequence
  Synthetic construct
SGSIASNY

SEQ ID NO: 19131 - protein, 6 aa, Artificial Sequence
  Synthetic construct
NIGSKS

SEQ ID NO: 19132 - protein, 9 aa, Artificial Sequence
  Synthetic construct
SRDVGGYNY

SEQ ID NO: 19133 - protein, 8 aa, Artificial Sequence
  Synthetic construct
SGSIASNY

SEQ ID NO: 19134 - protein, 9 aa, Artificial Sequence
  Synthetic construct
SDIDVLAFR

SEQ ID NO: 19135 - protein, 7 aa, Artificial Sequence
  Synthetic construct
QTIRSNY

SEQ ID NO: 19136 - protein, 6 aa, Artificial Sequence
  Synthetic construct
NIGSKT

SEQ ID NO: 19137 - protein, 6 aa, Artificial Sequence
  Synthetic construct
QDITNY

SEQ ID NO: 19138 - protein, 11 aa, Artificial Sequence
  Synthetic construct
QSLLHSNGYTY

SEQ ID NO: 19139 - protein, 9 aa, Artificial Sequence
  Synthetic construct
NSNIGAGYD

SEQ ID NO: 19140 - protein, 9 aa, Artificial Sequence
  Synthetic construct
NSNIGAGYD

SEQ ID NO: 19141 - protein, 6 aa, Artificial Sequence
  Synthetic construct
QSISSY

SEQ ID NO: 19142 - protein, 6 aa, Artificial Sequence
  Synthetic construct
QGISSY

SEQ ID NO: 19143 - protein, 6 aa, Artificial Sequence
  Synthetic construct
QDISNY

SEQ ID NO: 19144 - protein, 11 aa, Artificial Sequence
  Synthetic construct
QSLVHSDGNTY

SEQ ID NO: 19145 - protein, 6 aa, Artificial Sequence
  Synthetic construct
QGISSY

SEQ ID NO: 19146 - protein, 6 aa, Artificial Sequence
  Synthetic construct
QSVSSN

SEQ ID NO: 19147 - protein, 6 aa, Artificial Sequence
  Synthetic construct
QSINTY

SEQ ID NO: 19148 - protein, 7 aa, Artificial Sequence
  Synthetic construct
QSVSSSY

SEQ ID NO: 19149 - protein, 7 aa, Artificial Sequence
  Synthetic construct
QSVSSSY

SEQ ID NO: 19150 - protein, 9 aa, Artificial Sequence
  Synthetic construct
SSDVGGYYY

SEQ ID NO: 19151 - protein, 7 aa, Artificial Sequence
  Synthetic construct
QSVSSSY

SEQ ID NO: 19152 - protein, 11 aa, Artificial Sequence
  Synthetic construct
QSLLHSNGYNY

SEQ ID NO: 19153 - protein, 9 aa, Artificial Sequence
  Synthetic construct
SSDVGGYNY

SEQ ID NO: 19154 - protein, 5 aa, Artificial Sequence
  Synthetic construct
QSVSR

SEQ ID NO: 19155 - protein, 8 aa, Artificial Sequence
  Synthetic construct
SSNIGSYY

SEQ ID NO: 19156 - protein, 6 aa, Artificial Sequence
  Synthetic construct
QSISSY

SEQ ID NO: 19157 - protein, 12 aa, Artificial Sequence
  Synthetic construct
QSVLYSSNNKNN

SEQ ID NO: 19158 - protein, 6 aa, Artificial Sequence
  Synthetic construct
QSVTNN

SEQ ID NO: 19159 - protein, 12 aa, Artificial Sequence
  Synthetic construct
QSVLYSSNNKNH

SEQ ID NO: 19160 - protein, 6 aa, Artificial Sequence
  Synthetic construct
QSISSW

SEQ ID NO: 19161 - protein, 6 aa, Artificial Sequence
  Synthetic construct
QSVSSY

SEQ ID NO: 19162 - protein, 6 aa, Artificial Sequence
  Synthetic construct
QTVSIN

SEQ ID NO: 19163 - protein, 6 aa, Artificial Sequence
  Synthetic construct
QSISGY

SEQ ID NO: 19164 - protein, 11 aa, Artificial Sequence
  Synthetic construct
RSLLHSDGNTY

SEQ ID NO: 19165 - protein, 6 aa, Artificial Sequence
  Synthetic construct
QSISSY

SEQ ID NO: 19166 - protein, 6 aa, Artificial Sequence
  Synthetic construct
QGIRSW

SEQ ID NO: 19167 - protein, 6 aa, Artificial Sequence
  Synthetic construct
QSISSY

SEQ ID NO: 19168 - protein, 9 aa, Artificial Sequence
  Synthetic construct
NNDVGGHPY

SEQ ID NO: 19169 - protein, 6 aa, Artificial Sequence
  Synthetic construct
QSISGW

SEQ ID NO: 19170 - protein, 6 aa, Artificial Sequence
  Synthetic construct
QSVSSN

SEQ ID NO: 19171 - protein, 9 aa, Artificial Sequence
  Synthetic construct
SGDVGGYNY

SEQ ID NO: 19172 - protein, 11 aa, Artificial Sequence
  Synthetic construct
QSLLHSDGKTY

SEQ ID NO: 19173 - protein, 6 aa, Artificial Sequence
  Synthetic construct
QSVSSY

SEQ ID NO: 19174 - protein, 6 aa, Artificial Sequence
  Synthetic construct
QSISNW

SEQ ID NO: 19175 - protein, 6 aa, Artificial Sequence
  Synthetic construct
QSISNW

SEQ ID NO: 19176 - protein, 7 aa, Artificial Sequence
  Synthetic construct
QSISRSY

SEQ ID NO: 19177 - protein, 6 aa, Artificial Sequence
  Synthetic construct
QSVSNY

SEQ ID NO: 19178 - protein, 4 aa, Artificial Sequence
  Synthetic construct
TSDL

SEQ ID NO: 19179 - protein, 7 aa, Artificial Sequence
  Synthetic construct
SGHSNYA

SEQ ID NO: 19180 - protein, 6 aa, Artificial Sequence
  Synthetic construct
QGISSY

SEQ ID NO: 19181 - protein, 6 aa, Artificial Sequence
  Synthetic construct
RSITSY

SEQ ID NO: 19182 - protein, 8 aa, Artificial Sequence
  Synthetic construct
SSNIGRNT

SEQ ID NO: 19183 - protein, 8 aa, Artificial Sequence
  Synthetic construct
SSNIGSNY

SEQ ID NO: 19184 - protein, 6 aa, Artificial Sequence
  Synthetic construct
QGISNY

SEQ ID NO: 19185 - protein, 12 aa, Artificial Sequence
  Synthetic construct
QSVLYSSNNKNY

SEQ ID NO: 19186 - protein, 11 aa, Artificial Sequence
  Synthetic construct
QSLVHSDGNTY

SEQ ID NO: 19187 - protein, 8 aa, Artificial Sequence
  Synthetic construct
GSNIERHF

SEQ ID NO: 19188 - protein, 6 aa, Artificial Sequence
  Synthetic construct
QSISSY

SEQ ID NO: 19189 - protein, 6 aa, Artificial Sequence
  Synthetic construct
QTVSSY

SEQ ID NO: 19190 - protein, 9 aa, Artificial Sequence
  Synthetic construct
SSNIGAGYD

SEQ ID NO: 19191 - protein, 9 aa, Artificial Sequence
  Synthetic construct
SSDVGSYNL

SEQ ID NO: 19192 - protein, 6 aa, Artificial Sequence
  Synthetic construct
QSVSSY

SEQ ID NO: 19193 - protein, 6 aa, Artificial Sequence
  Synthetic construct
QGISNY

SEQ ID NO: 19194 - protein, 6 aa, Artificial Sequence
  Synthetic construct
QSVSSN

SEQ ID NO: 19195 - protein, 6 aa, Artificial Sequence
  Synthetic construct
QSVSSY

SEQ ID NO: 19196 - protein, 6 aa, Artificial Sequence
  Synthetic construct
QNISRW

SEQ ID NO: 19197 - protein, 6 aa, Artificial Sequence
  Synthetic construct
QGISHY

SEQ ID NO: 19198 - protein, 6 aa, Artificial Sequence
  Synthetic construct
QSISSY

SEQ ID NO: 19199 - protein, 6 aa, Artificial Sequence
  Synthetic construct
NLRSYY

SEQ ID NO: 19200 - protein, 6 aa, Artificial Sequence
  Synthetic construct
ALPKQY

SEQ ID NO: 19201 - protein, 7 aa, Artificial Sequence
  Synthetic construct
QSVSSSY

SEQ ID NO: 19202 - protein, 11 aa, Artificial Sequence
  Synthetic construct
QGLVHTNGNTY

SEQ ID NO: 19203 - protein, 6 aa, Artificial Sequence
  Synthetic construct
RSITSY

SEQ ID NO: 19204 - protein, 6 aa, Artificial Sequence
  Synthetic construct
QSISSY

SEQ ID NO: 19205 - protein, 8 aa, Artificial Sequence
  Synthetic construct
TSNIGSNT

SEQ ID NO: 19206 - protein, 6 aa, Artificial Sequence
  Synthetic construct
QGISNY

SEQ ID NO: 19207 - protein, 6 aa, Artificial Sequence
  Synthetic construct
QSIRRS

SEQ ID NO: 19208 - protein, 6 aa, Artificial Sequence
  Synthetic construct
QNIITY

SEQ ID NO: 19209 - protein, 6 aa, Artificial Sequence
  Synthetic construct
SIGSKS

SEQ ID NO: 19210 - protein, 6 aa, Artificial Sequence
  Synthetic construct
QNINTY

SEQ ID NO: 19211 - protein, 10 aa, Artificial Sequence
  Synthetic construct
QSLHTNGYNS

SEQ ID NO: 19212 - protein, 6 aa, Artificial Sequence
  Synthetic construct
QGIINY

SEQ ID NO: 19213 - protein, 8 aa, Artificial Sequence
  Synthetic construct
SGSIATYY

SEQ ID NO: 19214 - protein, 6 aa, Artificial Sequence
  Synthetic construct
QSISSY

SEQ ID NO: 19215 - protein, 6 aa, Artificial Sequence
  Synthetic construct
QSVSSN

SEQ ID NO: 19216 - protein, 8 aa, Artificial Sequence
  Synthetic construct
SSNIGNDL

SEQ ID NO: 19217 - protein, 8 aa, Artificial Sequence
  Synthetic construct
IADIGSHT

SEQ ID NO: 19218 - protein, 6 aa, Artificial Sequence
  Synthetic construct
QSVSSY

SEQ ID NO: 19219 - protein, 9 aa, Artificial Sequence
  Synthetic construct
SSDVGGYNY

SEQ ID NO: 19220 - protein, 9 aa, Artificial Sequence
  Synthetic construct
SFNIGAGYV

SEQ ID NO: 19221 - protein, 9 aa, Artificial Sequence
  Synthetic construct
SSNIGTTYP

SEQ ID NO: 19222 - protein, 9 aa, Artificial Sequence
  Synthetic construct
SSDVGGYNY

SEQ ID NO: 19223 - protein, 9 aa, Artificial Sequence
  Synthetic construct
TGAVTSGYY

SEQ ID NO: 19224 - protein, 6 aa, Artificial Sequence
  Synthetic construct
QSISTY

SEQ ID NO: 19225 - protein, 11 aa, Artificial Sequence
  Synthetic construct
QSLVHSDGNTY

SEQ ID NO: 19226 - protein, 6 aa, Artificial Sequence
  Synthetic construct
QSVSSY

SEQ ID NO: 19227 - protein, 7 aa, Artificial Sequence
  Synthetic construct
QSVSNNY

SEQ ID NO: 19228 - protein, 6 aa, Artificial Sequence
  Synthetic construct
QSISTY

SEQ ID NO: 19229 - protein, 6 aa, Artificial Sequence
  Synthetic construct
RSITSY

SEQ ID NO: 19230 - protein, 6 aa, Artificial Sequence
  Synthetic construct
QSISSY

SEQ ID NO: 19231 - protein, 6 aa, Artificial Sequence
  Synthetic construct
QSISSW

SEQ ID NO: 19232 - protein, 6 aa, Artificial Sequence
  Synthetic construct
QSVSSN

SEQ ID NO: 19233 - protein, 6 aa, Artificial Sequence
  Synthetic construct
QGISNY

SEQ ID NO: 19234 - protein, 6 aa, Artificial Sequence
  Synthetic construct
RSITSY

SEQ ID NO: 19235 - protein, 6 aa, Artificial Sequence
  Synthetic construct
ALPSQF

SEQ ID NO: 19236 - protein, 6 aa, Artificial Sequence
  Synthetic construct
IVGEES

SEQ ID NO: 19237 - protein, 6 aa, Artificial Sequence
  Synthetic construct
NIGSKS

SEQ ID NO: 19238 - protein, 5 aa, Artificial Sequence
  Synthetic construct
QSVSR

SEQ ID NO: 19239 - protein, 9 aa, Artificial Sequence
  Synthetic construct
SGINVGTYR

SEQ ID NO: 19240 - protein, 6 aa, Artificial Sequence
  Synthetic construct
QGISSW

SEQ ID NO: 19241 - protein, 9 aa, Artificial Sequence
  Synthetic construct
SGSVSTSYY

SEQ ID NO: 19242 - protein, 7 aa, Artificial Sequence
  Synthetic construct
QSVSINY

SEQ ID NO: 19243 - protein, 7 aa, Artificial Sequence
  Synthetic construct
QSVSSSY

SEQ ID NO: 19244 - protein, 6 aa, Artificial Sequence
  Synthetic construct
QSISSW

SEQ ID NO: 19245 - protein, 6 aa, Artificial Sequence
  Synthetic construct
QDISNY

SEQ ID NO: 19246 - protein, 6 aa, Artificial Sequence
  Synthetic construct
QSVRSN

SEQ ID NO: 19247 - protein, 9 aa, Artificial Sequence
  Synthetic construct
SSNVGNYKH

SEQ ID NO: 19248 - protein, 8 aa, Artificial Sequence
  Synthetic construct
NTNIGRNP

SEQ ID NO: 19249 - protein, 6 aa, Artificial Sequence
  Synthetic construct
QSISSW

SEQ ID NO: 19250 - protein, 9 aa, Artificial Sequence
  Synthetic construct
SGSVSTTHY

SEQ ID NO: 19251 - protein, 9 aa, Artificial Sequence
  Synthetic construct
SSDVGGYNY

SEQ ID NO: 19252 - protein, 6 aa, Artificial Sequence
  Synthetic construct
QSISNF

SEQ ID NO: 19253 - protein, 11 aa, Artificial Sequence
  Synthetic construct
QSLLQSDGYDY

SEQ ID NO: 19254 - protein, 7 aa, Artificial Sequence
  Synthetic construct
QTIRSNY

SEQ ID NO: 19255 - protein, 11 aa, Artificial Sequence
  Synthetic construct
QSLLHSNGYNY

SEQ ID NO: 19256 - protein, 6 aa, Artificial Sequence
  Synthetic construct
QSIGSY

SEQ ID NO: 19257 - protein, 6 aa, Artificial Sequence
  Synthetic construct
QSISSY

SEQ ID NO: 19258 - protein, 7 aa, Artificial Sequence
  Synthetic construct
QSVSSSY

SEQ ID NO: 19259 - protein, 11 aa, Artificial Sequence
  Synthetic construct
QSLLHSNGYNY

SEQ ID NO: 19260 - protein, 9 aa, Artificial Sequence
  Synthetic construct
SSDIGSYDR

SEQ ID NO: 19261 - protein, 6 aa, Artificial Sequence
  Synthetic construct
QGISTY

SEQ ID NO: 19262 - protein, 9 aa, Artificial Sequence
  Synthetic construct
SSDVGTYNY

SEQ ID NO: 19263 - protein, 8 aa, Artificial Sequence
  Synthetic construct
YSNVGINY

SEQ ID NO: 19264 - protein, 7 aa, Artificial Sequence
  Synthetic construct
QSVSSSY

SEQ ID NO: 19265 - protein, 6 aa, Artificial Sequence
  Synthetic construct
SLRSYY

SEQ ID NO: 19266 - protein, 9 aa, Artificial Sequence
  Synthetic construct
SSDIIGYNY

SEQ ID NO: 19267 - protein, 11 aa, Artificial Sequence
  Synthetic construct
QSLLHSNGYNY

SEQ ID NO: 19268 - protein, 6 aa, Artificial Sequence
  Synthetic construct
QSISSW

SEQ ID NO: 19269 - protein, 6 aa, Artificial Sequence
  Synthetic construct
SLRSYY

SEQ ID NO: 19270 - protein, 6 aa, Artificial Sequence
  Synthetic construct
QSISSY

SEQ ID NO: 19271 - protein, 7 aa, Artificial Sequence
  Synthetic construct
EPVSSSY

SEQ ID NO: 19272 - protein, 6 aa, Artificial Sequence
  Synthetic construct
QSIINF

SEQ ID NO: 19273 - protein, 6 aa, Artificial Sequence
  Synthetic construct
QGISSY

SEQ ID NO: 19274 - protein, 6 aa, Artificial Sequence
  Synthetic construct
QGISNY

SEQ ID NO: 19275 - protein, 6 aa, Artificial Sequence
  Synthetic construct
QGISSY

SEQ ID NO: 19276 - protein, 7 aa, Artificial Sequence
  Synthetic construct
SGHSSYI

SEQ ID NO: 19277 - protein, 6 aa, Artificial Sequence
  Synthetic construct
QSVRTW

SEQ ID NO: 19278 - protein, 7 aa, Artificial Sequence
  Synthetic construct
EIGANYG

SEQ ID NO: 19279 - protein, 6 aa, Artificial Sequence
  Synthetic construct
QSISSW

SEQ ID NO: 19280 - protein, 6 aa, Artificial Sequence
  Synthetic construct
QSVSSN

SEQ ID NO: 19281 - protein, 6 aa, Artificial Sequence
  Synthetic construct
QDISDF

SEQ ID NO: 19282 - protein, 6 aa, Artificial Sequence
  Synthetic construct
QSVSSY

SEQ ID NO: 19283 - protein, 7 aa, Artificial Sequence
  Synthetic construct
QSVSSSY

SEQ ID NO: 19284 - protein, 6 aa, Artificial Sequence
  Synthetic construct
QNIRDN

SEQ ID NO: 19285 - protein, 6 aa, Artificial Sequence
  Synthetic construct
QGISSY

SEQ ID NO: 19286 - protein, 8 aa, Artificial Sequence
  Synthetic construct
SSNIGSNT

SEQ ID NO: 19287 - protein, 6 aa, Artificial Sequence
  Synthetic construct
QNISHY

SEQ ID NO: 19288 - protein, 6 aa, Artificial Sequence
  Synthetic construct
QSISSW

SEQ ID NO: 19289 - protein, 6 aa, Artificial Sequence
  Synthetic construct
QGISNY

SEQ ID NO: 19290 - protein, 6 aa, Artificial Sequence
  Synthetic construct
QGISSY

SEQ ID NO: 19291 - protein, 9 aa, Artificial Sequence
  Synthetic construct
SSDVGNYNL

SEQ ID NO: 19292 - protein, 11 aa, Artificial Sequence
  Synthetic construct
QRLLHSDGKTY

SEQ ID NO: 19293 - protein, 6 aa, Artificial Sequence
  Synthetic construct
QSISSW

SEQ ID NO: 19294 - protein, 8 aa, Artificial Sequence
  Synthetic construct
SSNIGSNT

SEQ ID NO: 19295 - protein, 12 aa, Artificial Sequence
  Synthetic construct
QSVLYSSNNKNY

SEQ ID NO: 19296 - protein, 6 aa, Artificial Sequence
  Synthetic construct
ESVYRY

SEQ ID NO: 19297 - protein, 6 aa, Artificial Sequence
  Synthetic construct
SLRTYH

SEQ ID NO: 19298 - protein, 6 aa, Artificial Sequence
  Synthetic construct
QSVSSN

SEQ ID NO: 19299 - protein, 6 aa, Artificial Sequence
  Synthetic construct
SLRSYY

SEQ ID NO: 19300 - protein, 6 aa, Artificial Sequence
  Synthetic construct
QSISSY

SEQ ID NO: 19301 - protein, 6 aa, Artificial Sequence
  Synthetic construct
QSISSY

SEQ ID NO: 19302 - protein, 6 aa, Artificial Sequence
  Synthetic construct
QSISSW

SEQ ID NO: 19303 - protein, 6 aa, Artificial Sequence
  Synthetic construct
KLGYKY

SEQ ID NO: 19304 - protein, 9 aa, Artificial Sequence
  Synthetic construct
SSDVGSYNL

SEQ ID NO: 19305 - protein, 9 aa, Artificial Sequence
  Synthetic construct
SSDVGTYNL

SEQ ID NO: 19306 - protein, 6 aa, Artificial Sequence
  Synthetic construct
QSISND

SEQ ID NO: 19307 - protein, 6 aa, Artificial Sequence
  Synthetic construct
QSISSW

SEQ ID NO: 19308 - protein, 6 aa, Artificial Sequence
  Synthetic construct
NIGGKS

SEQ ID NO: 19309 - protein, 6 aa, Artificial Sequence
  Synthetic construct
QGISSY

SEQ ID NO: 19310 - protein, 7 aa, Artificial Sequence
  Synthetic construct
QSVSSSY

SEQ ID NO: 19311 - protein, 6 aa, Artificial Sequence
  Synthetic construct
KLGDKY

SEQ ID NO: 19312 - protein, 6 aa, Artificial Sequence
  Synthetic construct
QSVSSN

SEQ ID NO: 19313 - protein, 6 aa, Artificial Sequence
  Synthetic construct
QSISSW

SEQ ID NO: 19314 - protein, 12 aa, Artificial Sequence
  Synthetic construct
QSVLYSSNNKNY

SEQ ID NO: 19315 - protein, 7 aa, Artificial Sequence
  Synthetic construct
QSVSSSY

SEQ ID NO: 19316 - protein, 9 aa, Artificial Sequence
  Synthetic construct
SSDVGGYNY

SEQ ID NO: 19317 - protein, 6 aa, Artificial Sequence
  Synthetic construct
ERINTY

SEQ ID NO: 19318 - protein, 6 aa, Artificial Sequence
  Synthetic construct
QSISSY

SEQ ID NO: 19319 - protein, 11 aa, Artificial Sequence
  Synthetic construct
QSLLHSDGKTY

SEQ ID NO: 19320 - protein, 6 aa, Artificial Sequence
  Synthetic construct
QSISSY

SEQ ID NO: 19321 - protein, 8 aa, Artificial Sequence
  Synthetic construct
SSNIGNNY

SEQ ID NO: 19322 - protein, 6 aa, Artificial Sequence
  Synthetic construct
ALPKQY

SEQ ID NO: 19323 - protein, 12 aa, Artificial Sequence
  Synthetic construct
QSVLYSSNNKNH

SEQ ID NO: 19324 - protein, 12 aa, Artificial Sequence
  Synthetic construct
QSVLYSSNNKNY

SEQ ID NO: 19325 - protein, 12 aa, Artificial Sequence
  Synthetic construct
QTILYSSNSKNY

SEQ ID NO: 19326 - protein, 6 aa, Artificial Sequence
  Synthetic construct
QGISSY

SEQ ID NO: 19327 - protein, 11 aa, Artificial Sequence
  Synthetic construct
ESLLDTDGNTY

SEQ ID NO: 19328 - protein, 6 aa, Artificial Sequence
  Synthetic construct
QSLGFE

SEQ ID NO: 19329 - protein, 6 aa, Artificial Sequence
  Synthetic construct
QSISNY

SEQ ID NO: 19330 - protein, 6 aa, Artificial Sequence
  Synthetic construct
QSVSSN

SEQ ID NO: 19331 - protein, 6 aa, Artificial Sequence
  Synthetic construct
QNVTKY

SEQ ID NO: 19332 - protein, 6 aa, Artificial Sequence
  Synthetic construct
QDISTY

SEQ ID NO: 19333 - protein, 6 aa, Artificial Sequence
  Synthetic construct
QSLSRW

SEQ ID NO: 19334 - protein, 6 aa, Artificial Sequence
  Synthetic construct
QGISYY

SEQ ID NO: 19335 - protein, 11 aa, Artificial Sequence
  Synthetic construct
QSLLHSDGKTY

SEQ ID NO: 19336 - protein, 12 aa, Artificial Sequence
  Synthetic construct
QSVLYSSNNKNY

SEQ ID NO: 19337 - protein, 12 aa, Artificial Sequence
  Synthetic construct
QSVLYSSNNKNH

SEQ ID NO: 19338 - protein, 6 aa, Artificial Sequence
  Synthetic construct
QDISNY

SEQ ID NO: 19339 - protein, 6 aa, Artificial Sequence
  Synthetic construct
QSIGSS

SEQ ID NO: 19340 - protein, 6 aa, Artificial Sequence
  Synthetic construct
QSVSSN

SEQ ID NO: 19341 - protein, 7 aa, Artificial Sequence
  Synthetic construct
QSVSSSY

SEQ ID NO: 19342 - protein, 6 aa, Artificial Sequence
  Synthetic construct
QGISNY

SEQ ID NO: 19343 - protein, 8 aa, Artificial Sequence
  Synthetic construct
DSNIGTNN

SEQ ID NO: 19344 - protein, 11 aa, Artificial Sequence
  Synthetic construct
QSLVHTDGNTY

SEQ ID NO: 19345 - protein, 9 aa, Artificial Sequence
  Synthetic construct
SSNIGAGYD

SEQ ID NO: 19346 - protein, 6 aa, Artificial Sequence
  Synthetic construct
QSISTY

SEQ ID NO: 19347 - protein, 7 aa, Artificial Sequence
  Synthetic construct
QSVSSSY

SEQ ID NO: 19348 - protein, 8 aa, Artificial Sequence
  Synthetic construct
SGSIASKF

SEQ ID NO: 19349 - protein, 6 aa, Artificial Sequence
  Synthetic construct
VLKNRY

SEQ ID NO: 19350 - protein, 6 aa, Artificial Sequence
  Synthetic construct
QSISSW

SEQ ID NO: 19351 - protein, 12 aa, Artificial Sequence
  Synthetic construct
QSVLYSSNNKNY

SEQ ID NO: 19352 - protein, 9 aa, Artificial Sequence
  Synthetic construct
TSDIGSYDL

SEQ ID NO: 19353 - protein, 6 aa, Artificial Sequence
  Synthetic construct
HDISNN

SEQ ID NO: 19354 - protein, 7 aa, Artificial Sequence
  Synthetic construct
QSFSSSY

SEQ ID NO: 19355 - protein, 6 aa, Artificial Sequence
  Synthetic construct
QGISNY

SEQ ID NO: 19356 - protein, 8 aa, Artificial Sequence
  Synthetic construct
SSNIGNNY

SEQ ID NO: 19357 - protein, 6 aa, Artificial Sequence
  Synthetic construct
QSISSY

SEQ ID NO: 19358 - protein, 5 aa, Artificial Sequence
  Synthetic construct
QSVSR

SEQ ID NO: 19359 - protein, 6 aa, Artificial Sequence
  Synthetic construct
QGISSY

SEQ ID NO: 19360 - protein, 6 aa, Artificial Sequence
  Synthetic construct
QNVNRY

SEQ ID NO: 19361 - protein, 6 aa, Artificial Sequence
  Synthetic construct
QSISTW

SEQ ID NO: 19362 - protein, 6 aa, Artificial Sequence
  Synthetic construct
QGISSY

SEQ ID NO: 19363 - protein, 6 aa, Artificial Sequence
  Synthetic construct
NIGSKS

SEQ ID NO: 19364 - protein, 8 aa, Artificial Sequence
  Synthetic construct
RSNIGSHI

SEQ ID NO: 19365 - protein, 6 aa, Artificial Sequence
  Synthetic construct
QSINFY

SEQ ID NO: 19366 - protein, 9 aa, Artificial Sequence
  Synthetic construct
SDIDVLAFR

SEQ ID NO: 19367 - protein, 8 aa, Artificial Sequence
  Synthetic construct
DSNIGNNY

SEQ ID NO: 19368 - protein, 12 aa, Artificial Sequence
  Synthetic construct
QSVLYSSNNKNY

SEQ ID NO: 19369 - protein, 8 aa, Artificial Sequence
  Synthetic construct
SSNIGNNY

SEQ ID NO: 19370 - protein, 7 aa, Artificial Sequence
  Synthetic construct
QSVSSSY

SEQ ID NO: 19371 - protein, 6 aa, Artificial Sequence
  Synthetic construct
QGISSY

SEQ ID NO: 19372 - protein, 6 aa, Artificial Sequence
  Synthetic construct
QGISSY

SEQ ID NO: 19373 - protein, 6 aa, Artificial Sequence
  Synthetic construct
QSVSSN

SEQ ID NO: 19374 - protein, 6 aa, Artificial Sequence
  Synthetic construct
QGISSW

SEQ ID NO: 19375 - protein, 6 aa, Artificial Sequence
  Synthetic construct
QSVGAS

SEQ ID NO: 19376 - protein, 9 aa, Artificial Sequence
  Synthetic construct
TADFESFNF

SEQ ID NO: 19377 - protein, 9 aa, Artificial Sequence
  Synthetic construct
SSDVGGYNY

SEQ ID NO: 19378 - protein, 6 aa, Artificial Sequence
  Synthetic construct
QSVGTY

SEQ ID NO: 19379 - protein, 5 aa, Artificial Sequence
  Synthetic construct
QSVSR

SEQ ID NO: 19380 - protein, 8 aa, Artificial Sequence
  Synthetic construct
SSNIGNNY

SEQ ID NO: 19381 - protein, 9 aa, Artificial Sequence
  Synthetic construct
TSDIGSYDL

SEQ ID NO: 19382 - protein, 12 aa, Artificial Sequence
  Synthetic construct
QSVLYSSNNKNY

SEQ ID NO: 19383 - protein, 6 aa, Artificial Sequence
  Synthetic construct
ALPNQY

SEQ ID NO: 19384 - protein, 11 aa, Artificial Sequence
  Synthetic construct
QSLLHSNGYNY

SEQ ID NO: 19385 - protein, 8 aa, Artificial Sequence
  Synthetic construct
SFNIGNNY

SEQ ID NO: 19386 - protein, 6 aa, Artificial Sequence
  Synthetic construct
SLRSYY

SEQ ID NO: 19387 - protein, 8 aa, Artificial Sequence
  Synthetic construct
TSNIGNNK

SEQ ID NO: 19388 - protein, 6 aa, Artificial Sequence
  Synthetic construct
VLAKKY

SEQ ID NO: 19389 - protein, 5 aa, Artificial Sequence
  Synthetic construct
QSVSR

SEQ ID NO: 19390 - protein, 12 aa, Artificial Sequence
  Synthetic construct
QSVAYNSNNKNY

SEQ ID NO: 19391 - protein, 6 aa, Artificial Sequence
  Synthetic construct
ALPKQY

SEQ ID NO: 19392 - protein, 6 aa, Artificial Sequence
  Synthetic construct
QSISSW

SEQ ID NO: 19393 - protein, 8 aa, Artificial Sequence
  Synthetic construct
TSNIGNNY

SEQ ID NO: 19394 - protein, 8 aa, Artificial Sequence
  Synthetic construct
SGNIASNY

SEQ ID NO: 19395 - protein, 9 aa, Artificial Sequence
  Synthetic construct
SSDVGGYNY

SEQ ID NO: 19396 - protein, 6 aa, Artificial Sequence
  Synthetic construct
SLTNYY

SEQ ID NO: 19397 - protein, 9 aa, Artificial Sequence
  Synthetic construct
SSDVGGYNY

SEQ ID NO: 19398 - protein, 6 aa, Artificial Sequence
  Synthetic construct
QDISHY

SEQ ID NO: 19399 - protein, 6 aa, Artificial Sequence
  Synthetic construct
NIVGKS

SEQ ID NO: 19400 - protein, 6 aa, Artificial Sequence
  Synthetic construct
QGISSY

SEQ ID NO: 19401 - protein, 6 aa, Artificial Sequence
  Synthetic construct
QSISNY

SEQ ID NO: 19402 - protein, 6 aa, Artificial Sequence
  Synthetic construct
QSVSSY

SEQ ID NO: 19403 - protein, 12 aa, Artificial Sequence
  Synthetic construct
QSVLYSSNNKNY

SEQ ID NO: 19404 - protein, 9 aa, Artificial Sequence
  Synthetic construct
SSDVGSYNY

SEQ ID NO: 19405 - protein, 7 aa, Artificial Sequence
  Synthetic construct
QSVSSSY

SEQ ID NO: 19406 - protein, 6 aa, Artificial Sequence
  Synthetic construct
QGISSY

SEQ ID NO: 19407 - protein, 6 aa, Artificial Sequence
  Synthetic construct
QSVSSN

SEQ ID NO: 19408 - protein, 5 aa, Artificial Sequence
  Synthetic construct
QSVSR

SEQ ID NO: 19409 - protein, 7 aa, Artificial Sequence
  Synthetic construct
QSVSSTY

SEQ ID NO: 19410 - protein, 6 aa, Artificial Sequence
  Synthetic construct
QGISSY

SEQ ID NO: 19411 - protein, 11 aa, Artificial Sequence
  Synthetic construct
QSLLHFSGNYF

SEQ ID NO: 19412 - protein, 6 aa, Artificial Sequence
  Synthetic construct
NIGGKS

SEQ ID NO: 19413 - protein, 7 aa, Artificial Sequence
  Synthetic construct
QSVSSSY

SEQ ID NO: 19414 - protein, 8 aa, Artificial Sequence
  Synthetic construct
SSNIGSNY

SEQ ID NO: 19415 - protein, 9 aa, Artificial Sequence
  Synthetic construct
SANIGAGYD

SEQ ID NO: 19416 - protein, 6 aa, Artificial Sequence
  Synthetic construct
QNINKW

SEQ ID NO: 19417 - protein, 11 aa, Artificial Sequence
  Synthetic construct
QSLVHSDGNTY

SEQ ID NO: 19418 - protein, 12 aa, Artificial Sequence
  Synthetic construct
QSVLYSSNNKNY

SEQ ID NO: 19419 - protein, 7 aa, Artificial Sequence
  Synthetic construct
QSVSDHY

SEQ ID NO: 19420 - protein, 6 aa, Artificial Sequence
  Synthetic construct
QGISSY

SEQ ID NO: 19421 - protein, 8 aa, Artificial Sequence
  Synthetic construct
SGSIASNY

SEQ ID NO: 19422 - protein, 9 aa, Artificial Sequence
  Synthetic construct
SSDVGGYNY

SEQ ID NO: 19423 - protein, 8 aa, Artificial Sequence
  Synthetic construct
TSNIGSNY

SEQ ID NO: 19424 - protein, 6 aa, Artificial Sequence
  Synthetic construct
QGISNY

SEQ ID NO: 19425 - protein, 6 aa, Artificial Sequence
  Synthetic construct
QSISSY

SEQ ID NO: 19426 - protein, 9 aa, Artificial Sequence
  Synthetic construct
SGSVSTSYY

SEQ ID NO: 19427 - protein, 6 aa, Artificial Sequence
  Synthetic construct
RSITSY

SEQ ID NO: 19428 - protein, 12 aa, Artificial Sequence
  Synthetic construct
QSVLYSSNNKNY

SEQ ID NO: 19429 - protein, 11 aa, Artificial Sequence
  Synthetic construct
QSLLQSNGYNY

SEQ ID NO: 19430 - protein, 7 aa, Artificial Sequence
  Synthetic construct
QSVSSSY

SEQ ID NO: 19431 - protein, 6 aa, Artificial Sequence
  Synthetic construct
QSVSSN

SEQ ID NO: 19432 - protein, 7 aa, Artificial Sequence
  Synthetic construct
QSVSSSY

SEQ ID NO: 19433 - protein, 8 aa, Artificial Sequence
  Synthetic construct
SSNIGNNY

SEQ ID NO: 19434 - protein, 11 aa, Artificial Sequence
  Synthetic construct
QSLVHSGGDTY

SEQ ID NO: 19435 - protein, 9 aa, Artificial Sequence
  Synthetic construct
SSDVGGYNY

SEQ ID NO: 19436 - protein, 6 aa, Artificial Sequence
  Synthetic construct
QSISSY

SEQ ID NO: 19437 - protein, 9 aa, Artificial Sequence
  Synthetic construct
SRDIGTYNY

SEQ ID NO: 19438 - protein, 6 aa, Artificial Sequence
  Synthetic construct
QGISSY

SEQ ID NO: 19439 - protein, 6 aa, Artificial Sequence
  Synthetic construct
QSISSW

SEQ ID NO: 19440 - protein, 6 aa, Artificial Sequence
  Synthetic construct
QSISSW

SEQ ID NO: 19441 - protein, 6 aa, Artificial Sequence
  Synthetic construct
QSVSSY

SEQ ID NO: 19442 - protein, 6 aa, Artificial Sequence
  Synthetic construct
QSISSW

SEQ ID NO: 19443 - protein, 6 aa, Artificial Sequence
  Synthetic construct
QSVGTY

SEQ ID NO: 19444 - protein, 6 aa, Artificial Sequence
  Synthetic construct
QSVNTW

SEQ ID NO: 19445 - protein, 6 aa, Artificial Sequence
  Synthetic construct
QGISNF

SEQ ID NO: 19446 - protein, 6 aa, Artificial Sequence
  Synthetic construct
TLRTFY

SEQ ID NO: 19447 - protein, 11 aa, Artificial Sequence
  Synthetic construct
QSLLHSNGYNY

SEQ ID NO: 19448 - protein, 8 aa, Artificial Sequence
  Synthetic construct
SSNIGSNY

SEQ ID NO: 19449 - protein, 7 aa, Artificial Sequence
  Synthetic construct
QSVRSTH

SEQ ID NO: 19450 - protein, 6 aa, Artificial Sequence
  Synthetic construct
QSISSY

SEQ ID NO: 19451 - protein, 8 aa, Artificial Sequence
  Synthetic construct
GSNIGHSY

SEQ ID NO: 19452 - protein, 6 aa, Artificial Sequence
  Synthetic construct
QSVGTN

SEQ ID NO: 19453 - protein, 6 aa, Artificial Sequence
  Synthetic construct
QGITNY

SEQ ID NO: 19454 - protein, 11 aa, Artificial Sequence
  Synthetic construct
QSLVHSTGDTY

SEQ ID NO: 19455 - protein, 6 aa, Artificial Sequence
  Synthetic construct
QGISNY

SEQ ID NO: 19456 - protein, 6 aa, Artificial Sequence
  Synthetic construct
HGFSHY

SEQ ID NO: 19457 - protein, 8 aa, Artificial Sequence
  Synthetic construct
SGSIASNF

SEQ ID NO: 19458 - protein, 7 aa, Artificial Sequence
  Synthetic construct
QSVSSSY

SEQ ID NO: 19459 - protein, 12 aa, Artificial Sequence
  Synthetic construct
QSVLYSSNNKNY

SEQ ID NO: 19460 - protein, 6 aa, Artificial Sequence
  Synthetic construct
QGISSY

SEQ ID NO: 19461 - protein, 6 aa, Artificial Sequence
  Synthetic construct
ETINKW

SEQ ID NO: 19462 - protein, 6 aa, Artificial Sequence
  Synthetic construct
SLRSYY

SEQ ID NO: 19463 - protein, 6 aa, Artificial Sequence
  Synthetic construct
QSIGSD

SEQ ID NO: 19464 - protein, 6 aa, Artificial Sequence
  Synthetic construct
QSISSW

SEQ ID NO: 19465 - protein, 6 aa, Artificial Sequence
  Synthetic construct
SIASKS

SEQ ID NO: 19466 - protein, 6 aa, Artificial Sequence
  Synthetic construct
QGISSY

SEQ ID NO: 19467 - protein, 6 aa, Artificial Sequence
  Synthetic construct
HSIIRY

SEQ ID NO: 19468 - protein, 9 aa, Artificial Sequence
  Synthetic construct
SSDVGGYNY

SEQ ID NO: 19469 - protein, 6 aa, Artificial Sequence
  Synthetic construct
QGISNY

SEQ ID NO: 19470 - protein, 6 aa, Artificial Sequence
  Synthetic construct
QSISSW

SEQ ID NO: 19471 - protein, 6 aa, Artificial Sequence
  Synthetic construct
KLGDEY

SEQ ID NO: 19472 - protein, 7 aa, Artificial Sequence
  Synthetic construct
QSVSSSY

SEQ ID NO: 19473 - protein, 6 aa, Artificial Sequence
  Synthetic construct
RLGHRS

SEQ ID NO: 19474 - protein, 6 aa, Artificial Sequence
  Synthetic construct
QSVSSK

SEQ ID NO: 19475 - protein, 6 aa, Artificial Sequence
  Synthetic construct
QSISSY

SEQ ID NO: 19476 - protein, 9 aa, Artificial Sequence
  Synthetic construct
SSDVGTYNL

SEQ ID NO: 19477 - protein, 9 aa, Artificial Sequence
  Synthetic construct
NSNIGANFD

SEQ ID NO: 19478 - protein, 8 aa, Artificial Sequence
  Synthetic construct
SSNIGTNF

SEQ ID NO: 19479 - protein, 6 aa, Artificial Sequence
  Synthetic construct
QGISSY

SEQ ID NO: 19480 - protein, 6 aa, Artificial Sequence
  Synthetic construct
QGISSY

SEQ ID NO: 19481 - protein, 9 aa, Artificial Sequence
  Synthetic construct
SNIVGSYNY

SEQ ID NO: 19482 - protein, 8 aa, Artificial Sequence
  Synthetic construct
GSNIGRGT

SEQ ID NO: 19483 - protein, 9 aa, Artificial Sequence
  Synthetic construct
SSNIGIGFD

SEQ ID NO: 19484 - protein, 9 aa, Artificial Sequence
  Synthetic construct
SGDVGGYNF

SEQ ID NO: 19485 - protein, 8 aa, Artificial Sequence
  Synthetic construct
SSNIGTNF

SEQ ID NO: 19486 - protein, 7 aa, Artificial Sequence
  Synthetic construct
QSVSSSY

SEQ ID NO: 19487 - protein, 12 aa, Artificial Sequence
  Synthetic construct
QSVLYSSNNKNY

SEQ ID NO: 19488 - protein, 6 aa, Artificial Sequence
  Synthetic construct
KLGDKY

SEQ ID NO: 19489 - protein, 6 aa, Artificial Sequence
  Synthetic construct
QSVSSY

SEQ ID NO: 19490 - protein, 6 aa, Artificial Sequence
  Synthetic construct
KLGDKY

SEQ ID NO: 19491 - protein, 6 aa, Artificial Sequence
  Synthetic construct
QNVNTN

SEQ ID NO: 19492 - protein, 8 aa, Artificial Sequence
  Synthetic construct
SSNIGNSH

SEQ ID NO: 19493 - protein, 8 aa, Artificial Sequence
  Synthetic construct
SSNIGSNY

SEQ ID NO: 19494 - protein, 6 aa, Artificial Sequence
  Synthetic construct
RSITSY

SEQ ID NO: 19495 - protein, 6 aa, Artificial Sequence
  Synthetic construct
QSISSW

SEQ ID NO: 19496 - protein, 6 aa, Artificial Sequence
  Synthetic construct
QSISSW

SEQ ID NO: 19497 - protein, 11 aa, Artificial Sequence
  Synthetic construct
QSLLHSNGYNY

SEQ ID NO: 19498 - protein, 7 aa, Artificial Sequence
  Synthetic construct
QTIRSNY

SEQ ID NO: 19499 - protein, 6 aa, Artificial Sequence
  Synthetic construct
RSITSY

SEQ ID NO: 19500 - protein, 6 aa, Artificial Sequence
  Synthetic construct
QSISSW

SEQ ID NO: 19501 - protein, 6 aa, Artificial Sequence
  Synthetic construct
QSISSW

SEQ ID NO: 19502 - protein, 8 aa, Artificial Sequence
  Synthetic construct
SGSIASNY

SEQ ID NO: 19503 - protein, 6 aa, Artificial Sequence
  Synthetic construct
NIGSKS

SEQ ID NO: 19504 - protein, 6 aa, Artificial Sequence
  Synthetic construct
QSISNY

SEQ ID NO: 19505 - protein, 6 aa, Artificial Sequence
  Synthetic construct
QSVSSY

SEQ ID NO: 19506 - protein, 11 aa, Artificial Sequence
  Synthetic construct
QSLLHSDGNTY

SEQ ID NO: 19507 - protein, 9 aa, Artificial Sequence
  Synthetic construct
VSKNGAYYN

SEQ ID NO: 19508 - protein, 6 aa, Artificial Sequence
  Synthetic construct
QSISSW

SEQ ID NO: 19509 - protein, 6 aa, Artificial Sequence
  Synthetic construct
QGISNY

SEQ ID NO: 19510 - protein, 6 aa, Artificial Sequence
  Synthetic construct
VLKNRY

SEQ ID NO: 19511 - protein, 6 aa, Artificial Sequence
  Synthetic construct
QGISSY

SEQ ID NO: 19512 - protein, 6 aa, Artificial Sequence
  Synthetic construct
QGISSW

SEQ ID NO: 19513 - protein, 11 aa, Artificial Sequence
  Synthetic construct
QSLVHSDGNTY

SEQ ID NO: 19514 - protein, 7 aa, Artificial Sequence
  Synthetic construct
QSVPNGY

SEQ ID NO: 19515 - protein, 7 aa, Artificial Sequence
  Synthetic construct
SDYKSYE

SEQ ID NO: 19516 - protein, 12 aa, Artificial Sequence
  Synthetic construct
QSILYSSNKKNY

SEQ ID NO: 19517 - protein, 8 aa, Artificial Sequence
  Synthetic construct
SGNIANNY

SEQ ID NO: 19518 - protein, 12 aa, Artificial Sequence
  Synthetic construct
QTILYSSANKNN

SEQ ID NO: 19519 - protein, 6 aa, Artificial Sequence
  Synthetic construct
QGISSY

SEQ ID NO: 19520 - protein, 11 aa, Artificial Sequence
  Synthetic construct
QSLLHSRGYNY

SEQ ID NO: 19521 - protein, 6 aa, Artificial Sequence
  Synthetic construct
NIATKS

SEQ ID NO: 19522 - protein, 9 aa, Artificial Sequence
  Synthetic construct
SSDVGTYNL

SEQ ID NO: 19523 - protein, 6 aa, Artificial Sequence
  Synthetic construct
QSISSY

SEQ ID NO: 19524 - protein, 11 aa, Artificial Sequence
  Synthetic construct
QSLLHSDGKIY

SEQ ID NO: 19525 - protein, 6 aa, Artificial Sequence
  Synthetic construct
QSISTN

SEQ ID NO: 19526 - protein, 9 aa, Artificial Sequence
  Synthetic construct
SSDVGGYNR

SEQ ID NO: 19527 - protein, 6 aa, Artificial Sequence
  Synthetic construct
QGISSY

SEQ ID NO: 19528 - protein, 11 aa, Artificial Sequence
  Synthetic construct
QSLVHSDGNTY

SEQ ID NO: 19529 - protein, 8 aa, Artificial Sequence
  Synthetic construct
SSKIGTST

SEQ ID NO: 19530 - protein, 9 aa, Artificial Sequence
  Synthetic construct
SSDIGAYNY

SEQ ID NO: 19531 - protein, 6 aa, Artificial Sequence
  Synthetic construct
QGISNY

SEQ ID NO: 19532 - protein, 11 aa, Artificial Sequence
  Synthetic construct
QSLAHSDGNTY

SEQ ID NO: 19533 - protein, 6 aa, Artificial Sequence
  Synthetic construct
QSVSSY

SEQ ID NO: 19534 - protein, 6 aa, Artificial Sequence
  Synthetic construct
QSISTY

SEQ ID NO: 19535 - protein, 7 aa, Artificial Sequence
  Synthetic construct
QSVSSSY

SEQ ID NO: 19536 - protein, 6 aa, Artificial Sequence
  Synthetic construct
QTINNC

SEQ ID NO: 19537 - protein, 6 aa, Artificial Sequence
  Synthetic construct
NIGSRS

SEQ ID NO: 19538 - protein, 11 aa, Artificial Sequence
  Synthetic construct
QSLVHSDGNTY

SEQ ID NO: 19539 - protein, 6 aa, Artificial Sequence
  Synthetic construct
QYISNY

SEQ ID NO: 19540 - protein, 6 aa, Artificial Sequence
  Synthetic construct
QDIRNY

SEQ ID NO: 19541 - protein, 9 aa, Artificial Sequence
  Synthetic construct
SSDVGTYNL

SEQ ID NO: 19542 - protein, 7 aa, Artificial Sequence
  Synthetic construct
QSVSDHY

SEQ ID NO: 19543 - protein, 9 aa, Artificial Sequence
  Synthetic construct
SSNIGAGYD

SEQ ID NO: 19544 - protein, 9 aa, Artificial Sequence
  Synthetic construct
SSDVGTYNL

SEQ ID NO: 19545 - protein, 12 aa, Artificial Sequence
  Synthetic construct
QSVLYSSNNKNY

SEQ ID NO: 19546 - protein, 6 aa, Artificial Sequence
  Synthetic construct
QGISSW

SEQ ID NO: 19547 - protein, 11 aa, Artificial Sequence
  Synthetic construct
QSLLHSNGYNY

SEQ ID NO: 19548 - protein, 6 aa, Artificial Sequence
  Synthetic construct
VLKNRY

SEQ ID NO: 19549 - protein, 6 aa, Artificial Sequence
  Synthetic construct
EYISNY

SEQ ID NO: 19550 - protein, 9 aa, Artificial Sequence
  Synthetic construct
TGAVTSGSY

SEQ ID NO: 19551 - protein, 11 aa, Artificial Sequence
  Synthetic construct
HSVVHTNGITY

SEQ ID NO: 19552 - protein, 6 aa, Artificial Sequence
  Synthetic construct
QGISSW

SEQ ID NO: 19553 - protein, 12 aa, Artificial Sequence
  Synthetic construct
QSILYSINNKKY

SEQ ID NO: 19554 - protein, 6 aa, Artificial Sequence
  Synthetic construct
QSISRW

SEQ ID NO: 19555 - protein, 9 aa, Artificial Sequence
  Synthetic construct
SSDVGTYNL

SEQ ID NO: 19556 - protein, 6 aa, Artificial Sequence
  Synthetic construct
QSVSSN

SEQ ID NO: 19557 - protein, 6 aa, Artificial Sequence
  Synthetic construct
QSVASN

SEQ ID NO: 19558 - protein, 9 aa, Artificial Sequence
  Synthetic construct
TGSVTSGNY

SEQ ID NO: 19559 - protein, 9 aa, Artificial Sequence
  Synthetic construct
TGAVTRGHY

SEQ ID NO: 19560 - protein, 6 aa, Artificial Sequence
  Synthetic construct
QNIGTS

SEQ ID NO: 19561 - protein, 7 aa, Artificial Sequence
  Synthetic construct
QSVSSTY

SEQ ID NO: 19562 - protein, 6 aa, Artificial Sequence
  Synthetic construct
VLKNRY

SEQ ID NO: 19563 - protein, 6 aa, Artificial Sequence
  Synthetic construct
QSVSSN

SEQ ID NO: 19564 - protein, 9 aa, Artificial Sequence
  Synthetic construct
SSDVGGYNY

SEQ ID NO: 19565 - protein, 7 aa, Artificial Sequence
  Synthetic construct
SGHSSYA

SEQ ID NO: 19566 - protein, 6 aa, Artificial Sequence
  Synthetic construct
QSISTW

SEQ ID NO: 19567 - protein, 9 aa, Artificial Sequence
  Synthetic construct
SSDVGGYNY

SEQ ID NO: 19568 - protein, 11 aa, Artificial Sequence
  Synthetic construct
QSLVHSDGNTY

SEQ ID NO: 19569 - protein, 6 aa, Artificial Sequence
  Synthetic construct
QGISSY

SEQ ID NO: 19570 - protein, 6 aa, Artificial Sequence
  Synthetic construct
QGISSY

SEQ ID NO: 19571 - protein, 6 aa, Artificial Sequence
  Synthetic construct
QDIRND

SEQ ID NO: 19572 - protein, 7 aa, Artificial Sequence
  Synthetic construct
SGHSSYA

SEQ ID NO: 19573 - protein, 6 aa, Artificial Sequence
  Synthetic construct
ALPNQY

SEQ ID NO: 19574 - protein, 8 aa, Artificial Sequence
  Synthetic construct
SSNIGTNF

SEQ ID NO: 19575 - protein, 8 aa, Artificial Sequence
  Synthetic construct
SSNIGNHY

SEQ ID NO: 19576 - protein, 8 aa, Artificial Sequence
  Synthetic construct
SSNIGSNY

SEQ ID NO: 19577 - protein, 12 aa, Artificial Sequence
  Synthetic construct
QSVLYSSNNKNY

SEQ ID NO: 19578 - protein, 6 aa, Artificial Sequence
  Synthetic construct
QGISNY

SEQ ID NO: 19579 - protein, 8 aa, Artificial Sequence
  Synthetic construct
SSDIGTNT

SEQ ID NO: 19580 - protein, 9 aa, Artificial Sequence
  Synthetic construct
SDIKIDPYT

SEQ ID NO: 19581 - protein, 7 aa, Artificial Sequence
  Synthetic construct
QSVSSSY

SEQ ID NO: 19582 - protein, 6 aa, Artificial Sequence
  Synthetic construct
PLPKQY

SEQ ID NO: 19583 - protein, 7 aa, Artificial Sequence
  Synthetic construct
QSVSSSY

SEQ ID NO: 19584 - protein, 8 aa, Artificial Sequence
  Synthetic construct
SSNIGNNY

SEQ ID NO: 19585 - protein, 7 aa, Artificial Sequence
  Synthetic construct
QSVGSSY

SEQ ID NO: 19586 - protein, 11 aa, Artificial Sequence
  Synthetic construct
QSLLHSNGYNY

SEQ ID NO: 19587 - protein, 6 aa, Artificial Sequence
  Synthetic construct
QGISSY

SEQ ID NO: 19588 - protein, 12 aa, Artificial Sequence
  Synthetic construct
QTVLFPSNNKNY

SEQ ID NO: 19589 - protein, 6 aa, Artificial Sequence
  Synthetic construct
QSISSY

SEQ ID NO: 19590 - protein, 9 aa, Artificial Sequence
  Synthetic construct
SSNIGAGYD

SEQ ID NO: 19591 - protein, 6 aa, Artificial Sequence
  Synthetic construct
QSVSSN

SEQ ID NO: 19592 - protein, 5 aa, Artificial Sequence
  Synthetic construct
QSVSR

SEQ ID NO: 19593 - protein, 6 aa, Artificial Sequence
  Synthetic construct
QSISSW

SEQ ID NO: 19594 - protein, 9 aa, Artificial Sequence
  Synthetic construct
SSDVGGYNY

SEQ ID NO: 19595 - protein, 6 aa, Artificial Sequence
  Synthetic construct
QSISNY

SEQ ID NO: 19596 - protein, 9 aa, Artificial Sequence
  Synthetic construct
SNDVGGYNF

SEQ ID NO: 19597 - protein, 7 aa, Artificial Sequence
  Synthetic construct
QTIRSNY

SEQ ID NO: 19598 - protein, 6 aa, Artificial Sequence
  Synthetic construct
QSISSW

SEQ ID NO: 19599 - protein, 6 aa, Artificial Sequence
  Synthetic construct
SLRSYY

SEQ ID NO: 19600 - protein, 6 aa, Artificial Sequence
  Synthetic construct
NIGSKS

SEQ ID NO: 19601 - protein, 8 aa, Artificial Sequence
  Synthetic construct
SNNVGNQG

SEQ ID NO: 19602 - protein, 7 aa, Artificial Sequence
  Synthetic construct
SGHSSYA

SEQ ID NO: 19603 - protein, 8 aa, Artificial Sequence
  Synthetic construct
SSNIGNNY

SEQ ID NO: 19604 - protein, 6 aa, Artificial Sequence
  Synthetic construct
ALTKQF

SEQ ID NO: 19605 - protein, 6 aa, Artificial Sequence
  Synthetic construct
ALPKQY

SEQ ID NO: 19606 - protein, 9 aa, Artificial Sequence
  Synthetic construct
SSDVGGYIY

SEQ ID NO: 19607 - protein, 6 aa, Artificial Sequence
  Synthetic construct
RSITSY

SEQ ID NO: 19608 - protein, 8 aa, Artificial Sequence
  Synthetic construct
SSNIRSNS

SEQ ID NO: 19609 - protein, 8 aa, Artificial Sequence
  Synthetic construct
NSNIGGNF

SEQ ID NO: 19610 - protein, 9 aa, Artificial Sequence
  Synthetic construct
TGAVTSGHY

SEQ ID NO: 19611 - protein, 6 aa, Artificial Sequence
  Synthetic construct
QGISNY

SEQ ID NO: 19612 - protein, 6 aa, Artificial Sequence
  Synthetic construct
QGISNY

SEQ ID NO: 19613 - protein, 6 aa, Artificial Sequence
  Synthetic construct
QSISSW

SEQ ID NO: 19614 - protein, 6 aa, Artificial Sequence
  Synthetic construct
QSVSSN

SEQ ID NO: 19615 - protein, 12 aa, Artificial Sequence
  Synthetic construct
QSVLYSSNNKNY

SEQ ID NO: 19616 - protein, 8 aa, Artificial Sequence
  Synthetic construct
SSNIGSNY

SEQ ID NO: 19617 - protein, 6 aa, Artificial Sequence
  Synthetic construct
SLRSYY

SEQ ID NO: 19618 - protein, 6 aa, Artificial Sequence
  Synthetic construct
KLGDKY

SEQ ID NO: 19619 - protein, 6 aa, Artificial Sequence
  Synthetic construct
QSINNF

SEQ ID NO: 19620 - protein, 6 aa, Artificial Sequence
  Synthetic construct
QGISTF

SEQ ID NO: 19621 - protein, 9 aa, Artificial Sequence
  Synthetic construct
SSDVGSYNL

SEQ ID NO: 19622 - protein, 6 aa, Artificial Sequence
  Synthetic construct
QGIGTY

SEQ ID NO: 19623 - protein, 8 aa, Artificial Sequence
  Synthetic construct
SSNIGNNY

SEQ ID NO: 19624 - protein, 9 aa, Artificial Sequence
  Synthetic construct
TSAVGGYNF

SEQ ID NO: 19625 - protein, 6 aa, Artificial Sequence
  Synthetic construct
QDISNH

SEQ ID NO: 19626 - protein, 6 aa, Artificial Sequence
  Synthetic construct
QNIGTF

SEQ ID NO: 19627 - protein, 6 aa, Artificial Sequence
  Synthetic construct
QAISNF

SEQ ID NO: 19628 - protein, 6 aa, Artificial Sequence
  Synthetic construct
QGISSF

SEQ ID NO: 19629 - protein, 6 aa, Artificial Sequence
  Synthetic construct
QSISSW

SEQ ID NO: 19630 - protein, 7 aa, Artificial Sequence
  Synthetic construct
QSVSSSY

SEQ ID NO: 19631 - protein, 6 aa, Artificial Sequence
  Synthetic construct
QGISSY

SEQ ID NO: 19632 - protein, 9 aa, Artificial Sequence
  Synthetic construct
SGSVSTSYY

SEQ ID NO: 19633 - protein, 11 aa, Artificial Sequence
  Synthetic construct
QSLLHSDGKTY

SEQ ID NO: 19634 - protein, 9 aa, Artificial Sequence
  Synthetic construct
SSDVGGYNY

SEQ ID NO: 19635 - protein, 6 aa, Artificial Sequence
  Synthetic construct
QGISNY

SEQ ID NO: 19636 - protein, 8 aa, Artificial Sequence
  Synthetic construct
TSNIGIND

SEQ ID NO: 19637 - protein, 8 aa, Artificial Sequence
  Synthetic construct
SSNIGSNY

SEQ ID NO: 19638 - protein, 6 aa, Artificial Sequence
  Synthetic construct
QSVGRN

SEQ ID NO: 19639 - protein, 6 aa, Artificial Sequence
  Synthetic construct
QSVSSY

SEQ ID NO: 19640 - protein, 12 aa, Artificial Sequence
  Synthetic construct
QSVLYSSNNKNY

SEQ ID NO: 19641 - protein, 9 aa, Artificial Sequence
  Synthetic construct
SSDVGSYNL

SEQ ID NO: 19642 - protein, 6 aa, Artificial Sequence
  Synthetic construct
RLGDRY

SEQ ID NO: 19643 - protein, 6 aa, Artificial Sequence
  Synthetic construct
QSVSSY

SEQ ID NO: 19644 - protein, 8 aa, Artificial Sequence
  Synthetic construct
TSNIGSNT

SEQ ID NO: 19645 - protein, 11 aa, Artificial Sequence
  Synthetic construct
QSLVHSDGNTY

SEQ ID NO: 19646 - protein, 11 aa, Artificial Sequence
  Synthetic construct
QSLVHRDGNTY

SEQ ID NO: 19647 - protein, 9 aa, Artificial Sequence
  Synthetic construct
SSNIGAGYD

SEQ ID NO: 19648 - protein, 6 aa, Artificial Sequence
  Synthetic construct
RSITSY

SEQ ID NO: 19649 - protein, 6 aa, Artificial Sequence
  Synthetic construct
QSISSY

SEQ ID NO: 19650 - protein, 12 aa, Artificial Sequence
  Synthetic construct
QSVLYSSNNKNY

SEQ ID NO: 19651 - protein, 8 aa, Artificial Sequence
  Synthetic construct
SSNIGSNY

SEQ ID NO: 19652 - protein, 6 aa, Artificial Sequence
  Synthetic construct
QGISSY

SEQ ID NO: 19653 - protein, 9 aa, Artificial Sequence
  Synthetic construct
NSNIGAPYD

SEQ ID NO: 19654 - protein, 9 aa, Artificial Sequence
  Synthetic construct
SSDDGGYML

SEQ ID NO: 19655 - protein, 9 aa, Artificial Sequence
  Synthetic construct
SSDVGGYNY

SEQ ID NO: 19656 - protein, 12 aa, Artificial Sequence
  Synthetic construct
QSVLYSSNNKNY

SEQ ID NO: 19657 - protein, 12 aa, Artificial Sequence
  Synthetic construct
QSVLSSSNNHNY

SEQ ID NO: 19658 - protein, 7 aa, Artificial Sequence
  Synthetic construct
SGHSSYA

SEQ ID NO: 19659 - protein, 6 aa, Artificial Sequence
  Synthetic construct
QGISSY

SEQ ID NO: 19660 - protein, 8 aa, Artificial Sequence
  Synthetic construct
SSNIGNNY

SEQ ID NO: 19661 - protein, 6 aa, Artificial Sequence
  Synthetic construct
QSISGY

SEQ ID NO: 19662 - protein, 11 aa, Artificial Sequence
  Synthetic construct
QSLLHSDGKTY

SEQ ID NO: 19663 - protein, 7 aa, Artificial Sequence
  Synthetic construct
QSVSIIY

SEQ ID NO: 19664 - protein, 6 aa, Artificial Sequence
  Synthetic construct
QGISSY

SEQ ID NO: 19665 - protein, 7 aa, Artificial Sequence
  Synthetic construct
HAFSTHY

SEQ ID NO: 19666 - protein, 6 aa, Artificial Sequence
  Synthetic construct
QSVSSN

SEQ ID NO: 19667 - protein, 8 aa, Artificial Sequence
  Synthetic construct
TSNIWNNY

SEQ ID NO: 19668 - protein, 11 aa, Artificial Sequence
  Synthetic construct
QSLLHSDGKTY

SEQ ID NO: 19669 - protein, 7 aa, Artificial Sequence
  Synthetic construct
QSVSIIY

SEQ ID NO: 19670 - protein, 9 aa, Artificial Sequence
  Synthetic construct
SSDVGTYNL

SEQ ID NO: 19671 - protein, 7 aa, Artificial Sequence
  Synthetic construct
QSVSSSY

SEQ ID NO: 19672 - protein, 11 aa, Artificial Sequence
  Synthetic construct
HGLEHSDGTTY

SEQ ID NO: 19673 - protein, 11 aa, Artificial Sequence
  Synthetic construct
QSLLHSDGNTY

SEQ ID NO: 19674 - protein, 6 aa, Artificial Sequence
  Synthetic construct
QSIGSY

SEQ ID NO: 19675 - protein, 6 aa, Artificial Sequence
  Synthetic construct
QSISSW

SEQ ID NO: 19676 - protein, 6 aa, Artificial Sequence
  Synthetic construct
QSISTW

SEQ ID NO: 19677 - protein, 11 aa, Artificial Sequence
  Synthetic construct
QSLVHSDGNTY

SEQ ID NO: 19678 - protein, 6 aa, Artificial Sequence
  Synthetic construct
QGISNY

SEQ ID NO: 19679 - protein, 9 aa, Artificial Sequence
  Synthetic construct
SGVNVGTYR

SEQ ID NO: 19680 - protein, 10 aa, Artificial Sequence
  Synthetic construct
QSLFSKNQNY

SEQ ID NO: 19681 - protein, 8 aa, Artificial Sequence
  Synthetic construct
NSNIGNNA

SEQ ID NO: 19682 - protein, 7 aa, Artificial Sequence
  Synthetic construct
QTIRSNY

SEQ ID NO: 19683 - protein, 6 aa, Artificial Sequence
  Synthetic construct
QSVSSN

SEQ ID NO: 19684 - protein, 6 aa, Artificial Sequence
  Synthetic construct
QSISSW

SEQ ID NO: 19685 - protein, 6 aa, Artificial Sequence
  Synthetic construct
QSISSW

SEQ ID NO: 19686 - protein, 6 aa, Artificial Sequence
  Synthetic construct
QGISSY

SEQ ID NO: 19687 - protein, 6 aa, Artificial Sequence
  Synthetic construct
QGISSW

SEQ ID NO: 19688 - protein, 9 aa, Artificial Sequence
  Synthetic construct
SSDVGGYNY

SEQ ID NO: 19689 - protein, 12 aa, Artificial Sequence
  Synthetic construct
QSVLYSSNNKNY

SEQ ID NO: 19690 - protein, 7 aa, Artificial Sequence
  Synthetic construct
SGHSSYA

SEQ ID NO: 19691 - protein, 6 aa, Artificial Sequence
  Synthetic construct
QSISSY

SEQ ID NO: 19692 - protein, 12 aa, Artificial Sequence
  Synthetic construct
RSVLYSANNKNY

SEQ ID NO: 19693 - protein, 7 aa, Artificial Sequence
  Synthetic construct
QSVNANY

SEQ ID NO: 19694 - protein, 6 aa, Artificial Sequence
  Synthetic construct
QSISSW

SEQ ID NO: 19695 - protein, 11 aa, Artificial Sequence
  Synthetic construct
QSLIHSNGYNY

SEQ ID NO: 19696 - protein, 6 aa, Artificial Sequence
  Synthetic construct
QSVRNF

SEQ ID NO: 19697 - protein, 6 aa, Artificial Sequence
  Synthetic construct
QGISSY

SEQ ID NO: 19698 - protein, 6 aa, Artificial Sequence
  Synthetic construct
QSISTW

SEQ ID NO: 19699 - protein, 6 aa, Artificial Sequence
  Synthetic construct
QSVSSN

SEQ ID NO: 19700 - protein, 7 aa, Artificial Sequence
  Synthetic construct
QSINSKY

SEQ ID NO: 19701 - protein, 6 aa, Artificial Sequence
  Synthetic construct
QGISSY

SEQ ID NO: 19702 - protein, 6 aa, Artificial Sequence
  Synthetic construct
QSISSW

SEQ ID NO: 19703 - protein, 6 aa, Artificial Sequence
  Synthetic construct
QSISIN

SEQ ID NO: 19704 - protein, 6 aa, Artificial Sequence
  Synthetic construct
ALPKQY

SEQ ID NO: 19705 - protein, 11 aa, Artificial Sequence
  Synthetic construct
QSLVHSDGNIY

SEQ ID NO: 19706 - protein, 9 aa, Artificial Sequence
  Synthetic construct
ISDIGSYNL

SEQ ID NO: 19707 - protein, 12 aa, Artificial Sequence
  Synthetic construct
QSVLWSSNNRNY

SEQ ID NO: 19708 - protein, 9 aa, Artificial Sequence
  Synthetic construct
SSDVGAYNY

SEQ ID NO: 19709 - protein, 8 aa, Artificial Sequence
  Synthetic construct
SSNIGKNF

SEQ ID NO: 19710 - protein, 6 aa, Artificial Sequence
  Synthetic construct
QGISSY

SEQ ID NO: 19711 - protein, 11 aa, Artificial Sequence
  Synthetic construct
QSLLHGDGKTY

SEQ ID NO: 19712 - protein, 6 aa, Artificial Sequence
  Synthetic construct
QGISTY

SEQ ID NO: 19713 - protein, 6 aa, Artificial Sequence
  Synthetic construct
QGISNF

SEQ ID NO: 19714 - protein, 6 aa, Artificial Sequence
  Synthetic construct
QSVSSY

SEQ ID NO: 19715 - protein, 6 aa, Artificial Sequence
  Synthetic construct
QGVSSF

SEQ ID NO: 19716 - protein, 9 aa, Artificial Sequence
  Synthetic construct
SSDVGGYNY

SEQ ID NO: 19717 - protein, 6 aa, Artificial Sequence
  Synthetic construct
QSISNN

SEQ ID NO: 19718 - protein, 7 aa, Artificial Sequence
  Synthetic construct
QSLSNSY

SEQ ID NO: 19719 - protein, 6 aa, Artificial Sequence
  Synthetic construct
QGIGTY

SEQ ID NO: 19720 - protein, 8 aa, Artificial Sequence
  Synthetic construct
SSNIGTNF

SEQ ID NO: 19721 - protein, 6 aa, Artificial Sequence
  Synthetic construct
ALPKQY

SEQ ID NO: 19722 - protein, 8 aa, Artificial Sequence
  Synthetic construct
NSDVGYNY

SEQ ID NO: 19723 - protein, 7 aa, Artificial Sequence
  Synthetic construct
QSVSSNY

SEQ ID NO: 19724 - protein, 9 aa, Artificial Sequence
  Synthetic construct
TGTVTRGHY

SEQ ID NO: 19725 - protein, 11 aa, Artificial Sequence
  Synthetic construct
QSLQLSARKTC

SEQ ID NO: 19726 - protein, 12 aa, Artificial Sequence
  Synthetic construct
QSVLYSSNNKNH

SEQ ID NO: 19727 - protein, 8 aa, Artificial Sequence
  Synthetic construct
SSNIGSNY

SEQ ID NO: 19728 - protein, 6 aa, Artificial Sequence
  Synthetic construct
NIRIRS

SEQ ID NO: 19729 - protein, 6 aa, Artificial Sequence
  Synthetic construct
QAINNY

SEQ ID NO: 19730 - protein, 7 aa, Artificial Sequence
  Synthetic construct
QSVSSSH

SEQ ID NO: 19731 - protein, 6 aa, Artificial Sequence
  Synthetic construct
QSVSSY

SEQ ID NO: 19732 - protein, 11 aa, Artificial Sequence
  Synthetic construct
QSLVHSDGNTY

SEQ ID NO: 19733 - protein, 6 aa, Artificial Sequence
  Synthetic construct
ALPKRY

SEQ ID NO: 19734 - protein, 6 aa, Artificial Sequence
  Synthetic construct
QSVSSN

SEQ ID NO: 19735 - protein, 6 aa, Artificial Sequence
  Synthetic construct
QDISNY

SEQ ID NO: 19736 - protein, 6 aa, Artificial Sequence
  Synthetic construct
QSIRQD

SEQ ID NO: 19737 - protein, 7 aa, Artificial Sequence
  Synthetic construct
QSVSSSY

SEQ ID NO: 19738 - protein, 6 aa, Artificial Sequence
  Synthetic construct
QSISSW

SEQ ID NO: 19739 - protein, 9 aa, Artificial Sequence
  Synthetic construct
STDVGGHSF

SEQ ID NO: 19740 - protein, 6 aa, Artificial Sequence
  Synthetic construct
KLGDEY

SEQ ID NO: 19741 - protein, 6 aa, Artificial Sequence
  Synthetic construct
QSISSY

SEQ ID NO: 19742 - protein, 12 aa, Artificial Sequence
  Synthetic construct
QSVLNSYNNKND

SEQ ID NO: 19743 - protein, 8 aa, Artificial Sequence
  Synthetic construct
SSNIGDNY

SEQ ID NO: 19744 - protein, 6 aa, Artificial Sequence
  Synthetic construct
QAFNTY

SEQ ID NO: 19745 - protein, 6 aa, Artificial Sequence
  Synthetic construct
QGISSW

SEQ ID NO: 19746 - protein, 9 aa, Artificial Sequence
  Synthetic construct
SSDVGGYNY

SEQ ID NO: 19747 - protein, 6 aa, Artificial Sequence
  Synthetic construct
QGISSY

SEQ ID NO: 19748 - protein, 7 aa, Artificial Sequence
  Synthetic construct
QSVSSSY

SEQ ID NO: 19749 - protein, 7 aa, Artificial Sequence
  Synthetic construct
QSVSSSY

SEQ ID NO: 19750 - protein, 11 aa, Artificial Sequence
  Synthetic construct
QSLGHIDGNTY

SEQ ID NO: 19751 - protein, 6 aa, Artificial Sequence
  Synthetic construct
KVGDEY

SEQ ID NO: 19752 - protein, 6 aa, Artificial Sequence
  Synthetic construct
QGIGTY

SEQ ID NO: 19753 - protein, 7 aa, Artificial Sequence
  Synthetic construct
QSLSNSF

SEQ ID NO: 19754 - protein, 6 aa, Artificial Sequence
  Synthetic construct
QSVSSY

SEQ ID NO: 19755 - protein, 6 aa, Artificial Sequence
  Synthetic construct
QGISSY

SEQ ID NO: 19756 - protein, 6 aa, Artificial Sequence
  Synthetic construct
QGISSY

SEQ ID NO: 19757 - protein, 6 aa, Artificial Sequence
  Synthetic construct
KLDNKY

SEQ ID NO: 19758 - protein, 6 aa, Artificial Sequence
  Synthetic construct
QGVSSY

SEQ ID NO: 19759 - protein, 9 aa, Artificial Sequence
  Synthetic construct
SSDVGSYNL

SEQ ID NO: 19760 - protein, 9 aa, Artificial Sequence
  Synthetic construct
SDIDVLAFR

SEQ ID NO: 19761 - protein, 9 aa, Artificial Sequence
  Synthetic construct
SSDVGGYNY

SEQ ID NO: 19762 - protein, 6 aa, Artificial Sequence
  Synthetic construct
QGISSY

SEQ ID NO: 19763 - protein, 9 aa, Artificial Sequence
  Synthetic construct
SSDIGSYNH

SEQ ID NO: 19764 - protein, 6 aa, Artificial Sequence
  Synthetic construct
QSISSW

SEQ ID NO: 19765 - protein, 6 aa, Artificial Sequence
  Synthetic construct
QSISSY

SEQ ID NO: 19766 - protein, 7 aa, Artificial Sequence
  Synthetic construct
SGHSSYA

SEQ ID NO: 19767 - protein, 5 aa, Artificial Sequence
  Synthetic construct
QSVSR

SEQ ID NO: 19768 - protein, 8 aa, Artificial Sequence
  Synthetic construct
YSDIGDYY

SEQ ID NO: 19769 - protein, 9 aa, Artificial Sequence
  Synthetic construct
SSDVGGYNY

SEQ ID NO: 19770 - protein, 6 aa, Artificial Sequence
  Synthetic construct
RSITSY

SEQ ID NO: 19771 - protein, 6 aa, Artificial Sequence
  Synthetic construct
QSISSW

SEQ ID NO: 19772 - protein, 6 aa, Artificial Sequence
  Synthetic construct
QSISNY

SEQ ID NO: 19773 - protein, 6 aa, Artificial Sequence
  Synthetic construct
QSVSSN

SEQ ID NO: 19774 - protein, 6 aa, Artificial Sequence
  Synthetic construct
QSISKW

SEQ ID NO: 19775 - protein, 6 aa, Artificial Sequence
  Synthetic construct
QSVSSN

SEQ ID NO: 19776 - protein, 11 aa, Artificial Sequence
  Synthetic construct
QSLVHSDGNTY

SEQ ID NO: 19777 - protein, 6 aa, Artificial Sequence
  Synthetic construct
QSIFTY

SEQ ID NO: 19778 - protein, 12 aa, Artificial Sequence
  Synthetic construct
QSVLYSSNNKNY

SEQ ID NO: 19779 - protein, 6 aa, Artificial Sequence
  Synthetic construct
QSISSN

SEQ ID NO: 19780 - protein, 8 aa, Artificial Sequence
  Synthetic construct
TSNIGSNT

SEQ ID NO: 19781 - protein, 6 aa, Artificial Sequence
  Synthetic construct
NIETKG

SEQ ID NO: 19782 - protein, 9 aa, Artificial Sequence
  Synthetic construct
SSDVGSYNL

SEQ ID NO: 19783 - protein, 7 aa, Artificial Sequence
  Synthetic construct
SGHRNYA

SEQ ID NO: 19784 - protein, 6 aa, Artificial Sequence
  Synthetic construct
QSISSY

SEQ ID NO: 19785 - protein, 6 aa, Artificial Sequence
  Synthetic construct
QSLSRS

SEQ ID NO: 19786 - protein, 9 aa, Artificial Sequence
  Synthetic construct
SSDIGRYKS

SEQ ID NO: 19787 - protein, 7 aa, Artificial Sequence
  Synthetic construct
ENVATSY

SEQ ID NO: 19788 - protein, 6 aa, Artificial Sequence
  Synthetic construct
QGISNY

SEQ ID NO: 19789 - protein, 8 aa, Artificial Sequence
  Synthetic construct
SSNIGSNY

SEQ ID NO: 19790 - protein, 11 aa, Artificial Sequence
  Synthetic construct
QSLVHSDGNTY

SEQ ID NO: 19791 - protein, 9 aa, Artificial Sequence
  Synthetic construct
TGAVTSGYY

SEQ ID NO: 19792 - protein, 7 aa, Artificial Sequence
  Synthetic construct
QSVSSSY

SEQ ID NO: 19793 - protein, 6 aa, Artificial Sequence
  Synthetic construct
QSISSY

SEQ ID NO: 19794 - protein, 9 aa, Artificial Sequence
  Synthetic construct
SSDVGGYNY

SEQ ID NO: 19795 - protein, 6 aa, Artificial Sequence
  Synthetic construct
RSITSY

SEQ ID NO: 19796 - protein, 6 aa, Artificial Sequence
  Synthetic construct
QDINSW

SEQ ID NO: 19797 - protein, 7 aa, Artificial Sequence
  Synthetic construct
QSVSSSY

SEQ ID NO: 19798 - protein, 6 aa, Artificial Sequence
  Synthetic construct
QDISSY

SEQ ID NO: 19799 - protein, 6 aa, Artificial Sequence
  Synthetic construct
QSVSRK

SEQ ID NO: 19800 - protein, 9 aa, Artificial Sequence
  Synthetic construct
FYNIGAGYD

SEQ ID NO: 19801 - protein, 9 aa, Artificial Sequence
  Synthetic construct
SSDVGGYNY

SEQ ID NO: 19802 - protein, 11 aa, Artificial Sequence
  Synthetic construct
QSLLHSNGYNY

SEQ ID NO: 19803 - protein, 6 aa, Artificial Sequence
  Synthetic construct
QSVTTS

SEQ ID NO: 19804 - protein, 9 aa, Artificial Sequence
  Synthetic construct
SSDVGTYNL

SEQ ID NO: 19805 - protein, 6 aa, Artificial Sequence
  Synthetic construct
QGISNY

SEQ ID NO: 19806 - protein, 6 aa, Artificial Sequence
  Synthetic construct
QDISRW

SEQ ID NO: 19807 - protein, 8 aa, Artificial Sequence
  Synthetic construct
TSNIGYNS

SEQ ID NO: 19808 - protein, 12 aa, Artificial Sequence
  Synthetic construct
QSVLYSSNNKNY

SEQ ID NO: 19809 - protein, 6 aa, Artificial Sequence
  Synthetic construct
QSVSSN

SEQ ID NO: 19810 - protein, 9 aa, Artificial Sequence
  Synthetic construct
SGINVGTYR

SEQ ID NO: 19811 - protein, 6 aa, Artificial Sequence
  Synthetic construct
QSVSVY

SEQ ID NO: 19812 - protein, 6 aa, Artificial Sequence
  Synthetic construct
NIGSKS

SEQ ID NO: 19813 - protein, 8 aa, Artificial Sequence
  Synthetic construct
SSNIGSNY

SEQ ID NO: 19814 - protein, 6 aa, Artificial Sequence
  Synthetic construct
QGISSY

SEQ ID NO: 19815 - protein, 6 aa, Artificial Sequence
  Synthetic construct
QSVGGY

SEQ ID NO: 19816 - protein, 6 aa, Artificial Sequence
  Synthetic construct
RSITSY

SEQ ID NO: 19817 - protein, 9 aa, Artificial Sequence
  Synthetic construct
TGAVTSEHH

SEQ ID NO: 19818 - protein, 6 aa, Artificial Sequence
  Synthetic construct
QSISTY

SEQ ID NO: 19819 - protein, 6 aa, Artificial Sequence
  Synthetic construct
QNVTKY

SEQ ID NO: 19820 - protein, 9 aa, Artificial Sequence
  Synthetic construct
NNDIGDYSF

SEQ ID NO: 19821 - protein, 6 aa, Artificial Sequence
  Synthetic construct
QSVSSN

SEQ ID NO: 19822 - protein, 9 aa, Artificial Sequence
  Synthetic construct
SSDVGSYNL

SEQ ID NO: 19823 - protein, 6 aa, Artificial Sequence
  Synthetic construct
QDISNY

SEQ ID NO: 19824 - protein, 6 aa, Artificial Sequence
  Synthetic construct
QSVGSY

SEQ ID NO: 19825 - protein, 12 aa, Artificial Sequence
  Synthetic construct
QSVLYSSNNKNY

SEQ ID NO: 19826 - protein, 6 aa, Artificial Sequence
  Synthetic construct
QSVSSN

SEQ ID NO: 19827 - protein, 12 aa, Artificial Sequence
  Synthetic construct
QSVLYSSNNKNY

SEQ ID NO: 19828 - protein, 8 aa, Artificial Sequence
  Synthetic construct
SGSIASNY

SEQ ID NO: 19829 - protein, 7 aa, Artificial Sequence
  Synthetic construct
QSLSSSY

SEQ ID NO: 19830 - protein, 6 aa, Artificial Sequence
  Synthetic construct
QGISSY

SEQ ID NO: 19831 - protein, 6 aa, Artificial Sequence
  Synthetic construct
SLRSYY

SEQ ID NO: 19832 - protein, 8 aa, Artificial Sequence
  Synthetic construct
SSNIGSNT

SEQ ID NO: 19833 - protein, 6 aa, Artificial Sequence
  Synthetic construct
QGISSY

SEQ ID NO: 19834 - protein, 6 aa, Artificial Sequence
  Synthetic construct
QSIANN

SEQ ID NO: 19835 - protein, 6 aa, Artificial Sequence
  Synthetic construct
QSIGNY

SEQ ID NO: 19836 - protein, 6 aa, Artificial Sequence
  Synthetic construct
QGISSW

SEQ ID NO: 19837 - protein, 11 aa, Artificial Sequence
  Synthetic construct
QSVVHSDGNTY

SEQ ID NO: 19838 - protein, 11 aa, Artificial Sequence
  Synthetic construct
QSLLHSNGYNY

SEQ ID NO: 19839 - protein, 6 aa, Artificial Sequence
  Synthetic construct
QGISIW

SEQ ID NO: 19840 - protein, 12 aa, Artificial Sequence
  Synthetic construct
QSVLYSSNNKNH

SEQ ID NO: 19841 - protein, 12 aa, Artificial Sequence
  Synthetic construct
QSVLYSSNNKNH

SEQ ID NO: 19842 - protein, 6 aa, Artificial Sequence
  Synthetic construct
QSISNW

SEQ ID NO: 19843 - protein, 9 aa, Artificial Sequence
  Synthetic construct
SSDVGGYNY

SEQ ID NO: 19844 - protein, 7 aa, Artificial Sequence
  Synthetic construct
QSVSSNY

SEQ ID NO: 19845 - protein, 6 aa, Artificial Sequence
  Synthetic construct
QRISSY

SEQ ID NO: 19846 - protein, 6 aa, Artificial Sequence
  Synthetic construct
RSITSY

SEQ ID NO: 19847 - protein, 6 aa, Artificial Sequence
  Synthetic construct
QSVSSN

SEQ ID NO: 19848 - protein, 6 aa, Artificial Sequence
  Synthetic construct
QNINNY

SEQ ID NO: 19849 - protein, 6 aa, Artificial Sequence
  Synthetic construct
ELRNRY

SEQ ID NO: 19850 - protein, 8 aa, Artificial Sequence
  Synthetic construct
TSNIGSNY

SEQ ID NO: 19851 - protein, 9 aa, Artificial Sequence
  Synthetic construct
SSDVGGYNY

SEQ ID NO: 19852 - protein, 9 aa, Artificial Sequence
  Synthetic construct
SSDVGSYNL

SEQ ID NO: 19853 - protein, 6 aa, Artificial Sequence
  Synthetic construct
QSVNNY

SEQ ID NO: 19854 - protein, 11 aa, Artificial Sequence
  Synthetic construct
QSLVHSDGNTY

SEQ ID NO: 19855 - protein, 9 aa, Artificial Sequence
  Synthetic construct
SSDVGGYNY

SEQ ID NO: 19856 - protein, 6 aa, Artificial Sequence
  Synthetic construct
LLAKRY

SEQ ID NO: 19857 - protein, 6 aa, Artificial Sequence
  Synthetic construct
RSITSY

SEQ ID NO: 19858 - protein, 6 aa, Artificial Sequence
  Synthetic construct
QSVSSY

SEQ ID NO: 19859 - protein, 6 aa, Artificial Sequence
  Synthetic construct
QSVSSN

SEQ ID NO: 19860 - protein, 11 aa, Artificial Sequence
  Synthetic construct
QSLLHSNGYNY

SEQ ID NO: 19861 - protein, 6 aa, Artificial Sequence
  Synthetic construct
QSISSY

SEQ ID NO: 19862 - protein, 6 aa, Artificial Sequence
  Synthetic construct
NIGNKN

SEQ ID NO: 19863 - protein, 6 aa, Artificial Sequence
  Synthetic construct
QGISSY

SEQ ID NO: 19864 - protein, 6 aa, Artificial Sequence
  Synthetic construct
QSISSW

SEQ ID NO: 19865 - protein, 6 aa, Artificial Sequence
  Synthetic construct
RDVDKN

SEQ ID NO: 19866 - protein, 9 aa, Artificial Sequence
  Synthetic construct
SSDVGGYNY

SEQ ID NO: 19867 - protein, 6 aa, Artificial Sequence
  Synthetic construct
QSVRTT

SEQ ID NO: 19868 - protein, 8 aa, Artificial Sequence
  Synthetic construct
SSNIGNNY

SEQ ID NO: 19869 - protein, 6 aa, Artificial Sequence
  Synthetic construct
QSISSW

SEQ ID NO: 19870 - protein, 6 aa, Artificial Sequence
  Synthetic construct
QSISSY

SEQ ID NO: 19871 - protein, 6 aa, Artificial Sequence
  Synthetic construct
QGISSW

SEQ ID NO: 19872 - protein, 9 aa, Artificial Sequence
  Synthetic construct
SSDVGSYNL

SEQ ID NO: 19873 - protein, 5 aa, Artificial Sequence
  Synthetic construct
QSVSR

SEQ ID NO: 19874 - protein, 6 aa, Artificial Sequence
  Synthetic construct
QSIGSS

SEQ ID NO: 19875 - protein, 6 aa, Artificial Sequence
  Synthetic construct
QSVSSY

SEQ ID NO: 19876 - protein, 9 aa, Artificial Sequence
  Synthetic construct
TGAVTSGHH

SEQ ID NO: 19877 - protein, 6 aa, Artificial Sequence
  Synthetic construct
QSISSW

SEQ ID NO: 19878 - protein, 6 aa, Artificial Sequence
  Synthetic construct
KLGDKY

SEQ ID NO: 19879 - protein, 6 aa, Artificial Sequence
  Synthetic construct
QDISIW

SEQ ID NO: 19880 - protein, 6 aa, Artificial Sequence
  Synthetic construct
QGINNY

SEQ ID NO: 19881 - protein, 6 aa, Artificial Sequence
  Synthetic construct
QSVSSN

SEQ ID NO: 19882 - protein, 9 aa, Artificial Sequence
  Synthetic construct
SSDVGNYYL

SEQ ID NO: 19883 - protein, 6 aa, Artificial Sequence
  Synthetic construct
QSVSSN

SEQ ID NO: 19884 - protein, 7 aa, Artificial Sequence
  Synthetic construct
SGHSSYA

SEQ ID NO: 19885 - protein, 7 aa, Artificial Sequence
  Synthetic construct
QSVSSSY

SEQ ID NO: 19886 - protein, 6 aa, Artificial Sequence
  Synthetic construct
QSVSSY

SEQ ID NO: 19887 - protein, 8 aa, Artificial Sequence
  Synthetic construct
SSNIGSNY

SEQ ID NO: 19888 - protein, 7 aa, Artificial Sequence
  Synthetic construct
SGHRNYA

SEQ ID NO: 19889 - protein, 6 aa, Artificial Sequence
  Synthetic construct
QSVSSY

SEQ ID NO: 19890 - protein, 6 aa, Artificial Sequence
  Synthetic construct
QSISSY

SEQ ID NO: 19891 - protein, 9 aa, Artificial Sequence
  Synthetic construct
SSDVGGYNY

SEQ ID NO: 19892 - protein, 7 aa, Artificial Sequence
  Synthetic construct
QSVSSSY

SEQ ID NO: 19893 - protein, 6 aa, Artificial Sequence
  Synthetic construct
QSIGSY

SEQ ID NO: 19894 - protein, 8 aa, Artificial Sequence
  Synthetic construct
TSNIGTNT

SEQ ID NO: 19895 - protein, 12 aa, Artificial Sequence
  Synthetic construct
QSVLYSSNNKNY

SEQ ID NO: 19896 - protein, 6 aa, Artificial Sequence
  Synthetic construct
VLKNRY

SEQ ID NO: 19897 - protein, 6 aa, Artificial Sequence
  Synthetic construct
SLRTYF

SEQ ID NO: 19898 - protein, 9 aa, Artificial Sequence
  Synthetic construct
SSNIGAGYD

SEQ ID NO: 19899 - protein, 9 aa, Artificial Sequence
  Synthetic construct
SSDIGGYNF

SEQ ID NO: 19900 - protein, 10 aa, Artificial Sequence
  Synthetic construct
QSLHSNEHNY

SEQ ID NO: 19901 - protein, 7 aa, Artificial Sequence
  Synthetic construct
QSVSSSY

SEQ ID NO: 19902 - protein, 12 aa, Artificial Sequence
  Synthetic construct
QSLLYYSNSKNY

SEQ ID NO: 19903 - protein, 6 aa, Artificial Sequence
  Synthetic construct
NIGDRS

SEQ ID NO: 19904 - protein, 6 aa, Artificial Sequence
  Synthetic construct
QSISSW

SEQ ID NO: 19905 - protein, 9 aa, Artificial Sequence
  Synthetic construct
SSDVGGYNY

SEQ ID NO: 19906 - protein, 6 aa, Artificial Sequence
  Synthetic construct
QSISSH

SEQ ID NO: 19907 - protein, 8 aa, Artificial Sequence
  Synthetic construct
SSNIGNNL

SEQ ID NO: 19908 - protein, 5 aa, Artificial Sequence
  Synthetic construct
QSVSR

SEQ ID NO: 19909 - protein, 5 aa, Artificial Sequence
  Synthetic construct
QSVSR

SEQ ID NO: 19910 - protein, 6 aa, Artificial Sequence
  Synthetic construct
QNVNNY

SEQ ID NO: 19911 - protein, 6 aa, Artificial Sequence
  Synthetic construct
KLGDKY

SEQ ID NO: 19912 - protein, 7 aa, Artificial Sequence
  Synthetic construct
QSVSSSR

SEQ ID NO: 19913 - protein, 6 aa, Artificial Sequence
  Synthetic construct
QSISSW

SEQ ID NO: 19914 - protein, 6 aa, Artificial Sequence
  Synthetic construct
QDIRNW

SEQ ID NO: 19915 - protein, 12 aa, Artificial Sequence
  Synthetic construct
QSVLYSSNNKNY

SEQ ID NO: 19916 - protein, 9 aa, Artificial Sequence
  Synthetic construct
SSDVGNYKH

SEQ ID NO: 19917 - protein, 6 aa, Artificial Sequence
  Synthetic construct
QGISSY

SEQ ID NO: 19918 - protein, 6 aa, Artificial Sequence
  Synthetic construct
QGISSY

SEQ ID NO: 19919 - protein, 6 aa, Artificial Sequence
  Synthetic construct
QSVSSN

SEQ ID NO: 19920 - protein, 6 aa, Artificial Sequence
  Synthetic construct
QGISNY

SEQ ID NO: 19921 - protein, 6 aa, Artificial Sequence
  Synthetic construct
QSVSSY

SEQ ID NO: 19922 - protein, 6 aa, Artificial Sequence
  Synthetic construct
QRINSW

SEQ ID NO: 19923 - protein, 11 aa, Artificial Sequence
  Synthetic construct
QSLLHSNGYNY

SEQ ID NO: 19924 - protein, 9 aa, Artificial Sequence
  Synthetic construct
SSDVGGYNY

SEQ ID NO: 19925 - protein, 6 aa, Artificial Sequence
  Synthetic construct
QGISNY

SEQ ID NO: 19926 - protein, 7 aa, Artificial Sequence
  Synthetic construct
SGHSSYA

SEQ ID NO: 19927 - protein, 8 aa, Artificial Sequence
  Synthetic construct
SSNIGSNY

SEQ ID NO: 19928 - protein, 8 aa, Artificial Sequence
  Synthetic construct
SSNIGSNY

SEQ ID NO: 19929 - protein, 8 aa, Artificial Sequence
  Synthetic construct
SSNIGSNT

SEQ ID NO: 19930 - protein, 11 aa, Artificial Sequence
  Synthetic construct
RSLEHSDGTTY

SEQ ID NO: 19931 - protein, 7 aa, Artificial Sequence
  Synthetic construct
QSVSSSY

SEQ ID NO: 19932 - protein, 6 aa, Artificial Sequence
  Synthetic construct
QDISNF

SEQ ID NO: 19933 - protein, 12 aa, Artificial Sequence
  Synthetic construct
QSLFDDSDGYTY

SEQ ID NO: 19934 - protein, 8 aa, Artificial Sequence
  Synthetic construct
SGSIDSNY

SEQ ID NO: 19935 - protein, 9 aa, Artificial Sequence
  Synthetic construct
SSDVGGYNY

SEQ ID NO: 19936 - protein, 6 aa, Artificial Sequence
  Synthetic construct
SLRSYY

SEQ ID NO: 19937 - protein, 7 aa, Artificial Sequence
  Synthetic construct
QSVSSSY

SEQ ID NO: 19938 - protein, 6 aa, Artificial Sequence
  Synthetic construct
SLRSYY

SEQ ID NO: 19939 - protein, 6 aa, Artificial Sequence
  Synthetic construct
QSVSSY

SEQ ID NO: 19940 - protein, 6 aa, Artificial Sequence
  Synthetic construct
QSVSSN

SEQ ID NO: 19941 - protein, 9 aa, Artificial Sequence
  Synthetic construct
SSNIGTGYD

SEQ ID NO: 19942 - protein, 6 aa, Artificial Sequence
  Synthetic construct
QSISSW

SEQ ID NO: 19943 - protein, 6 aa, Artificial Sequence
  Synthetic construct
KLGDKY

SEQ ID NO: 19944 - protein, 7 aa, Artificial Sequence
  Synthetic construct
SGHTSYA

SEQ ID NO: 19945 - protein, 6 aa, Artificial Sequence
  Synthetic construct
QSLTSD

SEQ ID NO: 19946 - protein, 6 aa, Artificial Sequence
  Synthetic construct
KLGDKY

SEQ ID NO: 19947 - protein, 6 aa, Artificial Sequence
  Synthetic construct
QSISSW

SEQ ID NO: 19948 - protein, 6 aa, Artificial Sequence
  Synthetic construct
QGVRSY

SEQ ID NO: 19949 - protein, 8 aa, Artificial Sequence
  Synthetic construct
SSNIGRNF

SEQ ID NO: 19950 - protein, 6 aa, Artificial Sequence
  Synthetic construct
QSVSSY

SEQ ID NO: 19951 - protein, 11 aa, Artificial Sequence
  Synthetic construct
QSLLHSNGYNY

SEQ ID NO: 19952 - protein, 8 aa, Artificial Sequence
  Synthetic construct
SSNIGNNY

SEQ ID NO: 19953 - protein, 7 aa, Artificial Sequence
  Synthetic construct
QSVSSSY

SEQ ID NO: 19954 - protein, 6 aa, Artificial Sequence
  Synthetic construct
QSISRY

SEQ ID NO: 19955 - protein, 11 aa, Artificial Sequence
  Synthetic construct
QSLLHSDGKTY

SEQ ID NO: 19956 - protein, 7 aa, Artificial Sequence
  Synthetic construct
SGHSSYA

SEQ ID NO: 19957 - protein, 7 aa, Artificial Sequence
  Synthetic construct
QRVSRSY

SEQ ID NO: 19958 - protein, 8 aa, Artificial Sequence
  Synthetic construct
SSNIGTNF

SEQ ID NO: 19959 - protein, 6 aa, Artificial Sequence
  Synthetic construct
KLGDKY

SEQ ID NO: 19960 - protein, 5 aa, Artificial Sequence
  Synthetic construct
QSVSR

SEQ ID NO: 19961 - protein, 6 aa, Artificial Sequence
  Synthetic construct
QSVSSY

SEQ ID NO: 19962 - protein, 12 aa, Artificial Sequence
  Synthetic construct
QSVLYSSNNKNY

SEQ ID NO: 19963 - protein, 7 aa, Artificial Sequence
  Synthetic construct
QSVGSTS

SEQ ID NO: 19964 - protein, 6 aa, Artificial Sequence
  Synthetic construct
KLGDKY

SEQ ID NO: 19965 - protein, 6 aa, Artificial Sequence
  Synthetic construct
QGISSY

SEQ ID NO: 19966 - protein, 6 aa, Artificial Sequence
  Synthetic construct
VLKNRY

SEQ ID NO: 19967 - protein, 9 aa, Artificial Sequence
  Synthetic construct
TVYLGDYNY

SEQ ID NO: 19968 - protein, 6 aa, Artificial Sequence
  Synthetic construct
QSVSSY

SEQ ID NO: 19969 - protein, 9 aa, Artificial Sequence
  Synthetic construct
SGDVGGYDF

SEQ ID NO: 19970 - protein, 8 aa, Artificial Sequence
  Synthetic construct
RSNIGSNA

SEQ ID NO: 19971 - protein, 6 aa, Artificial Sequence
  Synthetic construct
QGINKY

SEQ ID NO: 19972 - protein, 8 aa, Artificial Sequence
  Synthetic construct
SSNIGSNY

SEQ ID NO: 19973 - protein, 7 aa, Artificial Sequence
  Synthetic construct
QSVNANY

SEQ ID NO: 19974 - protein, 8 aa, Artificial Sequence
  Synthetic construct
TSNIGNNY

SEQ ID NO: 19975 - protein, 11 aa, Artificial Sequence
  Synthetic construct
QSLLHSNGYNY

SEQ ID NO: 19976 - protein, 6 aa, Artificial Sequence
  Synthetic construct
QSVSSY

SEQ ID NO: 19977 - protein, 6 aa, Artificial Sequence
  Synthetic construct
QGISSY

SEQ ID NO: 19978 - protein, 6 aa, Artificial Sequence
  Synthetic construct
RSITSY

SEQ ID NO: 19979 - protein, 7 aa, Artificial Sequence
  Synthetic construct
QSIDNDY

SEQ ID NO: 19980 - protein, 6 aa, Artificial Sequence
  Synthetic construct
QGFSTY

SEQ ID NO: 19981 - protein, 9 aa, Artificial Sequence
  Synthetic construct
TSNIGAGYD

SEQ ID NO: 19982 - protein, 6 aa, Artificial Sequence
  Synthetic construct
QGIGSY

SEQ ID NO: 19983 - protein, 11 aa, Artificial Sequence
  Synthetic construct
QSLVHSDGNTY

SEQ ID NO: 19984 - protein, 11 aa, Artificial Sequence
  Synthetic construct
QSLVHSDGNTY

SEQ ID NO: 19985 - protein, 6 aa, Artificial Sequence
  Synthetic construct
QSVSHW

SEQ ID NO: 19986 - protein, 6 aa, Artificial Sequence
  Synthetic construct
QSVSSN

SEQ ID NO: 19987 - protein, 6 aa, Artificial Sequence
  Synthetic construct
ELGDEY

SEQ ID NO: 19988 - protein, 9 aa, Artificial Sequence
  Synthetic construct
SSDVGSYNL

SEQ ID NO: 19989 - protein, 12 aa, Artificial Sequence
  Synthetic construct
QSVLYSSNNKNY

SEQ ID NO: 19990 - protein, 7 aa, Artificial Sequence
  Synthetic construct
SGHSSYA

SEQ ID NO: 19991 - protein, 6 aa, Artificial Sequence
  Synthetic construct
QSVTKY

SEQ ID NO: 19992 - protein, 9 aa, Artificial Sequence
  Synthetic construct
SSNIGATYD

SEQ ID NO: 19993 - protein, 9 aa, Artificial Sequence
  Synthetic construct
TSDVGSYDL

SEQ ID NO: 19994 - protein, 6 aa, Artificial Sequence
  Synthetic construct
QSISSW

SEQ ID NO: 19995 - protein, 6 aa, Artificial Sequence
  Synthetic construct
SLRSYY

SEQ ID NO: 19996 - protein, 8 aa, Artificial Sequence
  Synthetic construct
SSNIGSNT

SEQ ID NO: 19997 - protein, 9 aa, Artificial Sequence
  Synthetic construct
SSNIGAPYG

SEQ ID NO: 19998 - protein, 6 aa, Artificial Sequence
  Synthetic construct
QGISSY

SEQ ID NO: 19999 - protein, 6 aa, Artificial Sequence
  Synthetic construct
VLKNRY

SEQ ID NO: 20000 - protein, 6 aa, Artificial Sequence
  Synthetic construct
QSISSY

SEQ ID NO: 20001 - protein, 9 aa, Artificial Sequence
  Synthetic construct
SSDVGGYNY

SEQ ID NO: 20002 - protein, 8 aa, Artificial Sequence
  Synthetic construct
SSNIGSNY

SEQ ID NO: 20003 - protein, 12 aa, Artificial Sequence
  Synthetic construct
QSVLLSSNNKNY

SEQ ID NO: 20004 - protein, 8 aa, Artificial Sequence
  Synthetic construct
SSNIGSNS

SEQ ID NO: 20005 - protein, 9 aa, Artificial Sequence
  Synthetic construct
ISDVGIYDY

SEQ ID NO: 20006 - protein, 7 aa, Artificial Sequence
  Synthetic construct
QSVSSSY

SEQ ID NO: 20007 - protein, 9 aa, Artificial Sequence
  Synthetic construct
RSNIGAGYD

SEQ ID NO: 20008 - protein, 9 aa, Artificial Sequence
  Synthetic construct
SSDVGGYNY

SEQ ID NO: 20009 - protein, 9 aa, Artificial Sequence
  Synthetic construct
SSNIGAGYD

SEQ ID NO: 20010 - protein, 9 aa, Artificial Sequence
  Synthetic construct
SSDVGSYNL

SEQ ID NO: 20011 - protein, 6 aa, Artificial Sequence
  Synthetic construct
QSVGGY

SEQ ID NO: 20012 - protein, 7 aa, Artificial Sequence
  Synthetic construct
QSVSGTY

SEQ ID NO: 20013 - protein, 8 aa, Artificial Sequence
  Synthetic construct
SSNIGNNY

SEQ ID NO: 20014 - protein, 7 aa, Artificial Sequence
  Synthetic construct
QSINGSY

SEQ ID NO: 20015 - protein, 9 aa, Artificial Sequence
  Synthetic construct
STDIGGYDY

SEQ ID NO: 20016 - protein, 11 aa, Artificial Sequence
  Synthetic construct
QSLVHSDGNTY

SEQ ID NO: 20017 - protein, 9 aa, Artificial Sequence
  Synthetic construct
SSDVGGYNY

SEQ ID NO: 20018 - protein, 6 aa, Artificial Sequence
  Synthetic construct
QSVRSY

SEQ ID NO: 20019 - protein, 6 aa, Artificial Sequence
  Synthetic construct
QSISRW

SEQ ID NO: 20020 - protein, 6 aa, Artificial Sequence
  Synthetic construct
NSDFYY

SEQ ID NO: 20021 - protein, 6 aa, Artificial Sequence
  Synthetic construct
KLGNKY

SEQ ID NO: 20022 - protein, 6 aa, Artificial Sequence
  Synthetic construct
QSITSW

SEQ ID NO: 20023 - protein, 8 aa, Artificial Sequence
  Synthetic construct
NSNIGRSS

SEQ ID NO: 20024 - protein, 8 aa, Artificial Sequence
  Synthetic construct
SSNIGYNS

SEQ ID NO: 20025 - protein, 9 aa, Artificial Sequence
  Synthetic construct
SSDVGTYNL

SEQ ID NO: 20026 - protein, 6 aa, Artificial Sequence
  Synthetic construct
QSISSY

SEQ ID NO: 20027 - protein, 8 aa, Artificial Sequence
  Synthetic construct
SSNIGSNY

SEQ ID NO: 20028 - protein, 9 aa, Artificial Sequence
  Synthetic construct
SSDVGGYNY

SEQ ID NO: 20029 - protein, 6 aa, Artificial Sequence
  Synthetic construct
QGISSY

SEQ ID NO: 20030 - protein, 9 aa, Artificial Sequence
  Synthetic construct
SSDVGGYNY

SEQ ID NO: 20031 - protein, 9 aa, Artificial Sequence
  Synthetic construct
SSDVGSYNL

SEQ ID NO: 20032 - protein, 8 aa, Artificial Sequence
  Synthetic construct
SSNIGNNY

SEQ ID NO: 20033 - protein, 6 aa, Artificial Sequence
  Synthetic construct
QDISNY

SEQ ID NO: 20034 - protein, 12 aa, Artificial Sequence
  Synthetic construct
QSVLYSSNNKNY

SEQ ID NO: 20035 - protein, 6 aa, Artificial Sequence
  Synthetic construct
QSVSSY

SEQ ID NO: 20036 - protein, 8 aa, Artificial Sequence
  Synthetic construct
SSNIGSNT

SEQ ID NO: 20037 - protein, 6 aa, Artificial Sequence
  Synthetic construct
QSVSSN

SEQ ID NO: 20038 - protein, 9 aa, Artificial Sequence
  Synthetic construct
SSDFGSYNF

SEQ ID NO: 20039 - protein, 6 aa, Artificial Sequence
  Synthetic construct
SLRSYS

SEQ ID NO: 20040 - protein, 6 aa, Artificial Sequence
  Synthetic construct
QVIGNY

SEQ ID NO: 20041 - protein, 6 aa, Artificial Sequence
  Synthetic construct
QSISSW

SEQ ID NO: 20042 - protein, 6 aa, Artificial Sequence
  Synthetic construct
SLRSYY

SEQ ID NO: 20043 - protein, 7 aa, Artificial Sequence
  Synthetic construct
SGHSSYI

SEQ ID NO: 20044 - protein, 9 aa, Artificial Sequence
  Synthetic construct
SSDIGGYDY

SEQ ID NO: 20045 - protein, 7 aa, Artificial Sequence
  Synthetic construct
QSVSSSY

SEQ ID NO: 20046 - protein, 6 aa, Artificial Sequence
  Synthetic construct
RSITSY

SEQ ID NO: 20047 - protein, 7 aa, Artificial Sequence
  Synthetic construct
QSVTRNY

SEQ ID NO: 20048 - protein, 7 aa, Artificial Sequence
  Synthetic construct
SGHSSYA

SEQ ID NO: 20049 - protein, 6 aa, Artificial Sequence
  Synthetic construct
QSISSY

SEQ ID NO: 20050 - protein, 6 aa, Artificial Sequence
  Synthetic construct
QSVSSN

SEQ ID NO: 20051 - protein, 6 aa, Artificial Sequence
  Synthetic construct
QGISNY

SEQ ID NO: 20052 - protein, 6 aa, Artificial Sequence
  Synthetic construct
QNINNY

SEQ ID NO: 20053 - protein, 8 aa, Artificial Sequence
  Synthetic construct
NSNIGSNP

SEQ ID NO: 20054 - protein, 6 aa, Artificial Sequence
  Synthetic construct
QSISGW

SEQ ID NO: 20055 - protein, 6 aa, Artificial Sequence
  Synthetic construct
QSVSSN

SEQ ID NO: 20056 - protein, 6 aa, Artificial Sequence
  Synthetic construct
QSISSW

SEQ ID NO: 20057 - protein, 6 aa, Artificial Sequence
  Synthetic construct
QDIDNS

SEQ ID NO: 20058 - protein, 6 aa, Artificial Sequence
  Synthetic construct
QSVGQH

SEQ ID NO: 20059 - protein, 6 aa, Artificial Sequence
  Synthetic construct
QSISNT

SEQ ID NO: 20060 - protein, 11 aa, Artificial Sequence
  Synthetic construct
QSLVHSDGNTY

SEQ ID NO: 20061 - protein, 8 aa, Artificial Sequence
  Synthetic construct
SSNIGSNT

SEQ ID NO: 20062 - protein, 9 aa, Artificial Sequence
  Synthetic construct
SSDVGSYNL

SEQ ID NO: 20063 - protein, 6 aa, Artificial Sequence
  Synthetic construct
QSVSRY

SEQ ID NO: 20064 - protein, 8 aa, Artificial Sequence
  Synthetic construct
SSNIGSNY

SEQ ID NO: 20065 - protein, 7 aa, Artificial Sequence
  Synthetic construct
QSVSSSY

SEQ ID NO: 20066 - protein, 7 aa, Artificial Sequence
  Synthetic construct
QTIRSNY

SEQ ID NO: 20067 - protein, 6 aa, Artificial Sequence
  Synthetic construct
QSIGSS

SEQ ID NO: 20068 - protein, 8 aa, Artificial Sequence
  Synthetic construct
RSNIGGNY

SEQ ID NO: 20069 - protein, 9 aa, Artificial Sequence
  Synthetic construct
SGSVSTTYY

SEQ ID NO: 20070 - protein, 9 aa, Artificial Sequence
  Synthetic construct
TGAVTSGYY

SEQ ID NO: 20071 - protein, 6 aa, Artificial Sequence
  Synthetic construct
QSVSSN

SEQ ID NO: 20072 - protein, 9 aa, Artificial Sequence
  Synthetic construct
SGDIGDYNF

SEQ ID NO: 20073 - protein, 6 aa, Artificial Sequence
  Synthetic construct
NIGSKR

SEQ ID NO: 20074 - protein, 11 aa, Artificial Sequence
  Synthetic construct
VTLLHTDGKTH

SEQ ID NO: 20075 - protein, 6 aa, Artificial Sequence
  Synthetic construct
QSISSW

SEQ ID NO: 20076 - protein, 6 aa, Artificial Sequence
  Synthetic construct
RSITSY

SEQ ID NO: 20077 - protein, 6 aa, Artificial Sequence
  Synthetic construct
ALPNRY

SEQ ID NO: 20078 - protein, 6 aa, Artificial Sequence
  Synthetic construct
SLRSYY

SEQ ID NO: 20079 - protein, 8 aa, Artificial Sequence
  Synthetic construct
SSNVGTYI

SEQ ID NO: 20080 - protein, 8 aa, Artificial Sequence
  Synthetic construct
SSNIGNNY

SEQ ID NO: 20081 - protein, 9 aa, Artificial Sequence
  Synthetic construct
SSDVGGYNY

SEQ ID NO: 20082 - protein, 6 aa, Artificial Sequence
  Synthetic construct
SLRSYY

SEQ ID NO: 20083 - protein, 6 aa, Artificial Sequence
  Synthetic construct
QSVSSY

SEQ ID NO: 20084 - protein, 6 aa, Artificial Sequence
  Synthetic construct
QNIANY

SEQ ID NO: 20085 - protein, 11 aa, Artificial Sequence
  Synthetic construct
QSLVHSDGNTY

SEQ ID NO: 20086 - protein, 6 aa, Artificial Sequence
  Synthetic construct
GLGGKY

SEQ ID NO: 20087 - protein, 9 aa, Artificial Sequence
  Synthetic construct
TGAVTSGHY

SEQ ID NO: 20088 - protein, 6 aa, Artificial Sequence
  Synthetic construct
QSVSSW

SEQ ID NO: 20089 - protein, 6 aa, Artificial Sequence
  Synthetic construct
QSISRW

SEQ ID NO: 20090 - protein, 12 aa, Artificial Sequence
  Synthetic construct
QSVLFNPNNKNY

SEQ ID NO: 20091 - protein, 6 aa, Artificial Sequence
  Synthetic construct
QSISSY

SEQ ID NO: 20092 - protein, 6 aa, Artificial Sequence
  Synthetic construct
QGISSY

SEQ ID NO: 20093 - protein, 7 aa, Artificial Sequence
  Synthetic construct
SGHSSYI

SEQ ID NO: 20094 - protein, 9 aa, Artificial Sequence
  Synthetic construct
SSDVGSYNL

SEQ ID NO: 20095 - protein, 6 aa, Artificial Sequence
  Synthetic construct
QSVSSY

SEQ ID NO: 20096 - protein, 6 aa, Artificial Sequence
  Synthetic construct
QAINNW

SEQ ID NO: 20097 - protein, 7 aa, Artificial Sequence
  Synthetic construct
QTIRSNY

SEQ ID NO: 20098 - protein, 5 aa, Artificial Sequence
  Synthetic construct
QSVSR

SEQ ID NO: 20099 - protein, 9 aa, Artificial Sequence
  Synthetic construct
SSDVGGYNY

SEQ ID NO: 20100 - protein, 7 aa, Artificial Sequence
  Synthetic construct
QSITNNY

SEQ ID NO: 20101 - protein, 6 aa, Artificial Sequence
  Synthetic construct
RSITSY

SEQ ID NO: 20102 - protein, 6 aa, Artificial Sequence
  Synthetic construct
QSIRTN

SEQ ID NO: 20103 - protein, 6 aa, Artificial Sequence
  Synthetic construct
QSISSW

SEQ ID NO: 20104 - protein, 7 aa, Artificial Sequence
  Synthetic construct
SGHSSYA

SEQ ID NO: 20105 - protein, 6 aa, Artificial Sequence
  Synthetic construct
QSIRSW

SEQ ID NO: 20106 - protein, 6 aa, Artificial Sequence
  Synthetic construct
QGISNY

SEQ ID NO: 20107 - protein, 6 aa, Artificial Sequence
  Synthetic construct
QGISNY

SEQ ID NO: 20108 - protein, 6 aa, Artificial Sequence
  Synthetic construct
QGISSY

SEQ ID NO: 20109 - protein, 7 aa, Artificial Sequence
  Synthetic construct
QSVSNNF

SEQ ID NO: 20110 - protein, 9 aa, Artificial Sequence
  Synthetic construct
SGSVSTSNY

SEQ ID NO: 20111 - protein, 7 aa, Artificial Sequence
  Synthetic construct
QSVSSSY

SEQ ID NO: 20112 - protein, 7 aa, Artificial Sequence
  Synthetic construct
SGHSSYA

SEQ ID NO: 20113 - protein, 8 aa, Artificial Sequence
  Synthetic construct
SGSIASYY

SEQ ID NO: 20114 - protein, 9 aa, Artificial Sequence
  Synthetic construct
SSNIGANYA

SEQ ID NO: 20115 - protein, 11 aa, Artificial Sequence
  Synthetic construct
RSLLHSDGKNY

SEQ ID NO: 20116 - protein, 7 aa, Artificial Sequence
  Synthetic construct
QSVSSSY

SEQ ID NO: 20117 - protein, 6 aa, Artificial Sequence
  Synthetic construct
NLRSYY

SEQ ID NO: 20118 - protein, 5 aa, Artificial Sequence
  Synthetic construct
QSVSR

SEQ ID NO: 20119 - protein, 6 aa, Artificial Sequence
  Synthetic construct
QGISSY

SEQ ID NO: 20120 - protein, 11 aa, Artificial Sequence
  Synthetic construct
QSLLHSNGYNY

SEQ ID NO: 20121 - protein, 6 aa, Artificial Sequence
  Synthetic construct
KLGDKY

SEQ ID NO: 20122 - protein, 8 aa, Artificial Sequence
  Synthetic construct
STNVANLG

SEQ ID NO: 20123 - protein, 7 aa, Artificial Sequence
  Synthetic construct
GGHSNYA

SEQ ID NO: 20124 - protein, 8 aa, Artificial Sequence
  Synthetic construct
SSNIGSNY

SEQ ID NO: 20125 - protein, 9 aa, Artificial Sequence
  Synthetic construct
SSDVGGYNY

SEQ ID NO: 20126 - protein, 6 aa, Artificial Sequence
  Synthetic construct
QSVTRY

SEQ ID NO: 20127 - protein, 7 aa, Artificial Sequence
  Synthetic construct
SGHRNYA

SEQ ID NO: 20128 - protein, 11 aa, Artificial Sequence
  Synthetic construct
QSLLHSDGKTY

SEQ ID NO: 20129 - protein, 9 aa, Artificial Sequence
  Synthetic construct
SSDVGSYNL

SEQ ID NO: 20130 - protein, 6 aa, Artificial Sequence
  Synthetic construct
QGVGSY

SEQ ID NO: 20131 - protein, 6 aa, Artificial Sequence
  Synthetic construct
ETIINY

SEQ ID NO: 20132 - protein, 6 aa, Artificial Sequence
  Synthetic construct
NIGGKN

SEQ ID NO: 20133 - protein, 6 aa, Artificial Sequence
  Synthetic construct
QSVGTN

SEQ ID NO: 20134 - protein, 12 aa, Artificial Sequence
  Synthetic construct
QSVLYSSNNKNY

SEQ ID NO: 20135 - protein, 11 aa, Artificial Sequence
  Synthetic construct
QSLVSSDGNTY

SEQ ID NO: 20136 - protein, 6 aa, Artificial Sequence
  Synthetic construct
QSVSSN

SEQ ID NO: 20137 - protein, 6 aa, Artificial Sequence
  Synthetic construct
QTVSNW

SEQ ID NO: 20138 - protein, 7 aa, Artificial Sequence
  Synthetic construct
QSVPSDQ

SEQ ID NO: 20139 - protein, 6 aa, Artificial Sequence
  Synthetic construct
QSISSW

SEQ ID NO: 20140 - protein, 8 aa, Artificial Sequence
  Synthetic construct
SSNIGNNY

SEQ ID NO: 20141 - protein, 9 aa, Artificial Sequence
  Synthetic construct
SSDVGTYNL

SEQ ID NO: 20142 - protein, 6 aa, Artificial Sequence
  Synthetic construct
QSISSY

SEQ ID NO: 20143 - protein, 6 aa, Artificial Sequence
  Synthetic construct
RSITSY

SEQ ID NO: 20144 - protein, 6 aa, Artificial Sequence
  Synthetic construct
QSVRDN

SEQ ID NO: 20145 - protein, 8 aa, Artificial Sequence
  Synthetic construct
SSNIGTNY

SEQ ID NO: 20146 - protein, 6 aa, Artificial Sequence
  Synthetic construct
QSISSS

SEQ ID NO: 20147 - protein, 5 aa, Artificial Sequence
  Synthetic construct
QSVSR

SEQ ID NO: 20148 - protein, 5 aa, Artificial Sequence
  Synthetic construct
QSVSR

SEQ ID NO: 20149 - protein, 6 aa, Artificial Sequence
  Synthetic construct
ALPKQY

SEQ ID NO: 20150 - protein, 12 aa, Artificial Sequence
  Synthetic construct
QSVLYSSNNKNY

SEQ ID NO: 20151 - protein, 6 aa, Artificial Sequence
  Synthetic construct
QSVSNN

SEQ ID NO: 20152 - protein, 6 aa, Artificial Sequence
  Synthetic construct
QSVGTW

SEQ ID NO: 20153 - protein, 12 aa, Artificial Sequence
  Synthetic construct
QSVLYSSNNQNY

SEQ ID NO: 20154 - protein, 6 aa, Artificial Sequence
  Synthetic construct
SLRSYY

SEQ ID NO: 20155 - protein, 9 aa, Artificial Sequence
  Synthetic construct
SSDVGNYDY

SEQ ID NO: 20156 - protein, 6 aa, Artificial Sequence
  Synthetic construct
QSVSSY

SEQ ID NO: 20157 - protein, 12 aa, Artificial Sequence
  Synthetic construct
QSVLYSSNNKNH

SEQ ID NO: 20158 - protein, 12 aa, Artificial Sequence
  Synthetic construct
QSVLYSSNNKNY

SEQ ID NO: 20159 - protein, 6 aa, Artificial Sequence
  Synthetic construct
SLRSYY

SEQ ID NO: 20160 - protein, 6 aa, Artificial Sequence
  Synthetic construct
QSISSY

SEQ ID NO: 20161 - protein, 11 aa, Artificial Sequence
  Synthetic construct
QSLAHNDGNTY

SEQ ID NO: 20162 - protein, 8 aa, Artificial Sequence
  Synthetic construct
TSNIWNNY

SEQ ID NO: 20163 - protein, 6 aa, Artificial Sequence
  Synthetic construct
NIGSKR

SEQ ID NO: 20164 - protein, 11 aa, Artificial Sequence
  Synthetic construct
QSLLHSNGYNY

SEQ ID NO: 20165 - protein, 7 aa, Artificial Sequence
  Synthetic construct
SGHSSYA

SEQ ID NO: 20166 - protein, 6 aa, Artificial Sequence
  Synthetic construct
KLGHIY

SEQ ID NO: 20167 - protein, 9 aa, Artificial Sequence
  Synthetic construct
SSDVGGYNY

SEQ ID NO: 20168 - protein, 8 aa, Artificial Sequence
  Synthetic construct
SSNIGTNF

SEQ ID NO: 20169 - protein, 6 aa, Artificial Sequence
  Synthetic construct
QSISSW

SEQ ID NO: 20170 - protein, 6 aa, Artificial Sequence
  Synthetic construct
QGISNY

SEQ ID NO: 20171 - protein, 7 aa, Artificial Sequence
  Synthetic construct
QSVNANY

SEQ ID NO: 20172 - protein, 6 aa, Artificial Sequence
  Synthetic construct
QNINNY

SEQ ID NO: 20173 - protein, 12 aa, Artificial Sequence
  Synthetic construct
QSVLYSSNNKNY

SEQ ID NO: 20174 - protein, 6 aa, Artificial Sequence
  Synthetic construct
QSITSW

SEQ ID NO: 20175 - protein, 6 aa, Artificial Sequence
  Synthetic construct
QGISSS

SEQ ID NO: 20176 - protein, 6 aa, Artificial Sequence
  Synthetic construct
QSISSY

SEQ ID NO: 20177 - protein, 6 aa, Artificial Sequence
  Synthetic construct
QSISIY

SEQ ID NO: 20178 - protein, 6 aa, Artificial Sequence
  Synthetic construct
NLRSYY

SEQ ID NO: 20179 - protein, 6 aa, Artificial Sequence
  Synthetic construct
QSISSW

SEQ ID NO: 20180 - protein, 12 aa, Artificial Sequence
  Synthetic construct
QNLLYSPNNKNY

SEQ ID NO: 20181 - protein, 9 aa, Artificial Sequence
  Synthetic construct
SSDVGGYNY

SEQ ID NO: 20182 - protein, 8 aa, Artificial Sequence
  Synthetic construct
SSNIGNNY

SEQ ID NO: 20183 - protein, 6 aa, Artificial Sequence
  Synthetic construct
SLRSYY

SEQ ID NO: 20184 - protein, 11 aa, Artificial Sequence
  Synthetic construct
QSLLHSNGYNY

SEQ ID NO: 20185 - protein, 11 aa, Artificial Sequence
  Synthetic construct
QSLLHRNGYNY

SEQ ID NO: 20186 - protein, 6 aa, Artificial Sequence
  Synthetic construct
QSVSSN

SEQ ID NO: 20187 - protein, 6 aa, Artificial Sequence
  Synthetic construct
NLRSYY

SEQ ID NO: 20188 - protein, 6 aa, Artificial Sequence
  Synthetic construct
QSIGTN

SEQ ID NO: 20189 - protein, 11 aa, Artificial Sequence
  Synthetic construct
QSLLHSDGKTY

SEQ ID NO: 20190 - protein, 6 aa, Artificial Sequence
  Synthetic construct
QSIGSS

SEQ ID NO: 20191 - protein, 6 aa, Artificial Sequence
  Synthetic construct
KLGDKY

SEQ ID NO: 20192 - protein, 6 aa, Artificial Sequence
  Synthetic construct
QSISRH

SEQ ID NO: 20193 - protein, 6 aa, Artificial Sequence
  Synthetic construct
QSISNY

SEQ ID NO: 20194 - protein, 6 aa, Artificial Sequence
  Synthetic construct
QSVSSY

SEQ ID NO: 20195 - protein, 6 aa, Artificial Sequence
  Synthetic construct
NLGDKY

SEQ ID NO: 20196 - protein, 8 aa, Artificial Sequence
  Synthetic construct
GSNIGRNT

SEQ ID NO: 20197 - protein, 6 aa, Artificial Sequence
  Synthetic construct
QSVSTY

SEQ ID NO: 20198 - protein, 9 aa, Artificial Sequence
  Synthetic construct
SSDVGTYNL

SEQ ID NO: 20199 - protein, 8 aa, Artificial Sequence
  Synthetic construct
PSNVGINF

SEQ ID NO: 20200 - protein, 6 aa, Artificial Sequence
  Synthetic construct
QSISSY

SEQ ID NO: 20201 - protein, 6 aa, Artificial Sequence
  Synthetic construct
QSISNY

SEQ ID NO: 20202 - protein, 9 aa, Artificial Sequence
  Synthetic construct
TTDVGANNY

SEQ ID NO: 20203 - protein, 6 aa, Artificial Sequence
  Synthetic construct
ELPKKY

SEQ ID NO: 20204 - protein, 6 aa, Artificial Sequence
  Synthetic construct
QGISSA

SEQ ID NO: 20205 - protein, 12 aa, Artificial Sequence
  Synthetic construct
QSVLYSSNNKNY

SEQ ID NO: 20206 - protein, 6 aa, Artificial Sequence
  Synthetic construct
QSISSY

SEQ ID NO: 20207 - protein, 6 aa, Artificial Sequence
  Synthetic construct
QSISSY

SEQ ID NO: 20208 - protein, 9 aa, Artificial Sequence
  Synthetic construct
SSDVGTYNL

SEQ ID NO: 20209 - protein, 11 aa, Artificial Sequence
  Synthetic construct
QSLVHTDGNTY

SEQ ID NO: 20210 - protein, 6 aa, Artificial Sequence
  Synthetic construct
QSISNY

SEQ ID NO: 20211 - protein, 8 aa, Artificial Sequence
  Synthetic construct
SSNIGGNF

SEQ ID NO: 20212 - protein, 6 aa, Artificial Sequence
  Synthetic construct
KLGDKY

SEQ ID NO: 20213 - protein, 9 aa, Artificial Sequence
  Synthetic construct
SSDIGRYKY

SEQ ID NO: 20214 - protein, 6 aa, Artificial Sequence
  Synthetic construct
QGISNY

SEQ ID NO: 20215 - protein, 9 aa, Artificial Sequence
  Synthetic construct
SSNIGAGYD

SEQ ID NO: 20216 - protein, 9 aa, Artificial Sequence
  Synthetic construct
SSNIGANYD

SEQ ID NO: 20217 - protein, 7 aa, Artificial Sequence
  Synthetic construct
QSVSSSY

SEQ ID NO: 20218 - protein, 6 aa, Artificial Sequence
  Synthetic construct
QGINNY

SEQ ID NO: 20219 - protein, 6 aa, Artificial Sequence
  Synthetic construct
QGISSW

SEQ ID NO: 20220 - protein, 6 aa, Artificial Sequence
  Synthetic construct
RSITSY

SEQ ID NO: 20221 - protein, 9 aa, Artificial Sequence
  Synthetic construct
TSDIGSYDL

SEQ ID NO: 20222 - protein, 8 aa, Artificial Sequence
  Synthetic construct
DSNIGRNS

SEQ ID NO: 20223 - protein, 6 aa, Artificial Sequence
  Synthetic construct
QSISSW

SEQ ID NO: 20224 - protein, 8 aa, Artificial Sequence
  Synthetic construct
SGSIASNY

SEQ ID NO: 20225 - protein, 9 aa, Artificial Sequence
  Synthetic construct
SSDVGAYNY

SEQ ID NO: 20226 - protein, 6 aa, Artificial Sequence
  Synthetic construct
QSISNN

SEQ ID NO: 20227 - protein, 6 aa, Artificial Sequence
  Synthetic construct
QSISSW

SEQ ID NO: 20228 - protein, 6 aa, Artificial Sequence
  Synthetic construct
QSLTGW

SEQ ID NO: 20229 - protein, 8 aa, Artificial Sequence
  Synthetic construct
SSNIGTNF

SEQ ID NO: 20230 - protein, 11 aa, Artificial Sequence
  Synthetic construct
QSLLHSNGYNY

SEQ ID NO: 20231 - protein, 6 aa, Artificial Sequence
  Synthetic construct
RGINNY

SEQ ID NO: 20232 - protein, 6 aa, Artificial Sequence
  Synthetic construct
NIGGKS

SEQ ID NO: 20233 - protein, 6 aa, Artificial Sequence
  Synthetic construct
QDINYY

SEQ ID NO: 20234 - protein, 6 aa, Artificial Sequence
  Synthetic construct
QSISSY

SEQ ID NO: 20235 - protein, 7 aa, Artificial Sequence
  Synthetic construct
QSVSNFY

SEQ ID NO: 20236 - protein, 6 aa, Artificial Sequence
  Synthetic construct
QNIGTS

SEQ ID NO: 20237 - protein, 6 aa, Artificial Sequence
  Synthetic construct
QSISSW

SEQ ID NO: 20238 - protein, 6 aa, Artificial Sequence
  Synthetic construct
QSISSW

SEQ ID NO: 20239 - protein, 9 aa, Artificial Sequence
  Synthetic construct
SSDIGGNNF

SEQ ID NO: 20240 - protein, 8 aa, Artificial Sequence
  Synthetic construct
SSNVGNQG

SEQ ID NO: 20241 - protein, 6 aa, Artificial Sequence
  Synthetic construct
ELPKKY

SEQ ID NO: 20242 - protein, 11 aa, Artificial Sequence
  Synthetic construct
QSLVHRNGNTF

SEQ ID NO: 20243 - protein, 6 aa, Artificial Sequence
  Synthetic construct
QGISSY

SEQ ID NO: 20244 - protein, 12 aa, Artificial Sequence
  Synthetic construct
QNVLLESNNKNF

SEQ ID NO: 20245 - protein, 7 aa, Artificial Sequence
  Synthetic construct
QSLISRY

SEQ ID NO: 20246 - protein, 6 aa, Artificial Sequence
  Synthetic construct
QGISSY

SEQ ID NO: 20247 - protein, 8 aa, Artificial Sequence
  Synthetic construct
SSNIGSNT

SEQ ID NO: 20248 - protein, 11 aa, Artificial Sequence
  Synthetic construct
RSLVHSDGTTY

SEQ ID NO: 20249 - protein, 6 aa, Artificial Sequence
  Synthetic construct
QSVSSN

SEQ ID NO: 20250 - protein, 6 aa, Artificial Sequence
  Synthetic construct
QGISSY

SEQ ID NO: 20251 - protein, 6 aa, Artificial Sequence
  Synthetic construct
QNVNNY

SEQ ID NO: 20252 - protein, 6 aa, Artificial Sequence
  Synthetic construct
QSVSSN

SEQ ID NO: 20253 - protein, 6 aa, Artificial Sequence
  Synthetic construct
QGISSY

SEQ ID NO: 20254 - protein, 9 aa, Artificial Sequence
  Synthetic construct
SSDVGSYKY

SEQ ID NO: 20255 - protein, 9 aa, Artificial Sequence
  Synthetic construct
TSDVGNYNR

SEQ ID NO: 20256 - protein, 12 aa, Artificial Sequence
  Synthetic construct
QSVLYSSNNKNH

SEQ ID NO: 20257 - protein, 6 aa, Artificial Sequence
  Synthetic construct
QSDSSY

SEQ ID NO: 20258 - protein, 6 aa, Artificial Sequence
  Synthetic construct
QGISTY

SEQ ID NO: 20259 - protein, 6 aa, Artificial Sequence
  Synthetic construct
QTISNS

SEQ ID NO: 20260 - protein, 6 aa, Artificial Sequence
  Synthetic construct
RSITSY

SEQ ID NO: 20261 - protein, 6 aa, Artificial Sequence
  Synthetic construct
QNIDSF

SEQ ID NO: 20262 - protein, 6 aa, Artificial Sequence
  Synthetic construct
QSITDW

SEQ ID NO: 20263 - protein, 9 aa, Artificial Sequence
  Synthetic construct
SSDVGNYNL

SEQ ID NO: 20264 - protein, 9 aa, Artificial Sequence
  Synthetic construct
SSDVGPYKH

SEQ ID NO: 20265 - protein, 9 aa, Artificial Sequence
  Synthetic construct
SGINVGTYR

SEQ ID NO: 20266 - protein, 9 aa, Artificial Sequence
  Synthetic construct
SSDFGLYKH

SEQ ID NO: 20267 - protein, 7 aa, Artificial Sequence
  Synthetic construct
QSVSSSY

SEQ ID NO: 20268 - protein, 6 aa, Artificial Sequence
  Synthetic construct
QSISSY

SEQ ID NO: 20269 - protein, 6 aa, Artificial Sequence
  Synthetic construct
QSISSW

SEQ ID NO: 20270 - protein, 6 aa, Artificial Sequence
  Synthetic construct
QGISSY

SEQ ID NO: 20271 - protein, 6 aa, Artificial Sequence
  Synthetic construct
QGISSY

SEQ ID NO: 20272 - protein, 6 aa, Artificial Sequence
  Synthetic construct
QSVSSY

SEQ ID NO: 20273 - protein, 6 aa, Artificial Sequence
  Synthetic construct
QSVSSN

SEQ ID NO: 20274 - protein, 6 aa, Artificial Sequence
  Synthetic construct
QSVSSY

SEQ ID NO: 20275 - protein, 7 aa, Artificial Sequence
  Synthetic construct
QSVSSSY

SEQ ID NO: 20276 - protein, 11 aa, Artificial Sequence
  Synthetic construct
QSLLHSNGYNY

SEQ ID NO: 20277 - protein, 11 aa, Artificial Sequence
  Synthetic construct
QSLVHSDGNTY

SEQ ID NO: 20278 - protein, 12 aa, Artificial Sequence
  Synthetic construct
QSVLYSSNNKNY

SEQ ID NO: 20279 - protein, 7 aa, Artificial Sequence
  Synthetic construct
SGHSSYA

SEQ ID NO: 20280 - protein, 8 aa, Artificial Sequence
  Synthetic construct
RFNIGSNY

SEQ ID NO: 20281 - protein, 6 aa, Artificial Sequence
  Synthetic construct
QGISNY

SEQ ID NO: 20282 - protein, 9 aa, Artificial Sequence
  Synthetic construct
SSDVGGYNY

SEQ ID NO: 20283 - protein, 9 aa, Artificial Sequence
  Synthetic construct
SSDVGTYNL

SEQ ID NO: 20284 - protein, 11 aa, Artificial Sequence
  Synthetic construct
QTLEHSDGYTY

SEQ ID NO: 20285 - protein, 6 aa, Artificial Sequence
  Synthetic construct
QSVSSY

SEQ ID NO: 20286 - protein, 6 aa, Artificial Sequence
  Synthetic construct
QDIRNW

SEQ ID NO: 20287 - protein, 8 aa, Artificial Sequence
  Synthetic construct
SSNIGSNY

SEQ ID NO: 20288 - protein, 6 aa, Artificial Sequence
  Synthetic construct
QSVSTY

SEQ ID NO: 20289 - protein, 6 aa, Artificial Sequence
  Synthetic construct
QGISNY

SEQ ID NO: 20290 - protein, 7 aa, Artificial Sequence
  Synthetic construct
SGHSSYA

SEQ ID NO: 20291 - protein, 9 aa, Artificial Sequence
  Synthetic construct
NSDIGAYNY

SEQ ID NO: 20292 - protein, 9 aa, Artificial Sequence
  Synthetic construct
SSDVGGYNY

SEQ ID NO: 20293 - protein, 7 aa, Artificial Sequence
  Synthetic construct
SGRSSYA

SEQ ID NO: 20294 - protein, 9 aa, Artificial Sequence
  Synthetic construct
TGAVTSGYY

SEQ ID NO: 20295 - protein, 9 aa, Artificial Sequence
  Synthetic construct
SSDVGTYNL

SEQ ID NO: 20296 - protein, 6 aa, Artificial Sequence
  Synthetic construct
QSISSY

SEQ ID NO: 20297 - protein, 7 aa, Artificial Sequence
  Synthetic construct
QSVSSSY

SEQ ID NO: 20298 - protein, 6 aa, Artificial Sequence
  Synthetic construct
QSVSSN

SEQ ID NO: 20299 - protein, 11 aa, Artificial Sequence
  Synthetic construct
QSLLHSNGYNY

SEQ ID NO: 20300 - protein, 6 aa, Artificial Sequence
  Synthetic construct
QSISSW

SEQ ID NO: 20301 - protein, 6 aa, Artificial Sequence
  Synthetic construct
QSISSY

SEQ ID NO: 20302 - protein, 6 aa, Artificial Sequence
  Synthetic construct
QSISSW

SEQ ID NO: 20303 - protein, 9 aa, Artificial Sequence
  Synthetic construct
SSDFGLYKH

SEQ ID NO: 20304 - protein, 6 aa, Artificial Sequence
  Synthetic construct
QSISSY

SEQ ID NO: 20305 - protein, 11 aa, Artificial Sequence
  Synthetic construct
QSLVHSDGNTY

SEQ ID NO: 20306 - protein, 9 aa, Artificial Sequence
  Synthetic construct
SSDVGGYNY

SEQ ID NO: 20307 - protein, 6 aa, Artificial Sequence
  Synthetic construct
QSVGNY

SEQ ID NO: 20308 - protein, 12 aa, Artificial Sequence
  Synthetic construct
QSVLYSSNNKNY

SEQ ID NO: 20309 - protein, 8 aa, Artificial Sequence
  Synthetic construct
NSNVGNNY

SEQ ID NO: 20310 - protein, 7 aa, Artificial Sequence
  Synthetic construct
SGYRNHA

SEQ ID NO: 20311 - protein, 9 aa, Artificial Sequence
  Synthetic construct
SSDVGGYNY

SEQ ID NO: 20312 - protein, 7 aa, Artificial Sequence
  Synthetic construct
SDYKSYE

SEQ ID NO: 20313 - protein, 6 aa, Artificial Sequence
  Synthetic construct
QSISSW

SEQ ID NO: 20314 - protein, 9 aa, Artificial Sequence
  Synthetic construct
SRDVGSYNS

SEQ ID NO: 20315 - protein, 8 aa, Artificial Sequence
  Synthetic construct
SSNIGNNY

SEQ ID NO: 20316 - protein, 12 aa, Artificial Sequence
  Synthetic construct
QSVLYSSNNKNY

SEQ ID NO: 20317 - protein, 12 aa, Artificial Sequence
  Synthetic construct
QSVLYSSNNKNY

SEQ ID NO: 20318 - protein, 6 aa, Artificial Sequence
  Synthetic construct
QDISDS

SEQ ID NO: 20319 - protein, 6 aa, Artificial Sequence
  Synthetic construct
QGISSY

SEQ ID NO: 20320 - protein, 6 aa, Artificial Sequence
  Synthetic construct
QSISNW

SEQ ID NO: 20321 - protein, 6 aa, Artificial Sequence
  Synthetic construct
KLGDQY

SEQ ID NO: 20322 - protein, 6 aa, Artificial Sequence
  Synthetic construct
QSISSY

SEQ ID NO: 20323 - protein, 6 aa, Artificial Sequence
  Synthetic construct
QSISNY

SEQ ID NO: 20324 - protein, 6 aa, Artificial Sequence
  Synthetic construct
QNINTY

SEQ ID NO: 20325 - protein, 8 aa, Artificial Sequence
  Synthetic construct
SSNIGSNY

SEQ ID NO: 20326 - protein, 6 aa, Artificial Sequence
  Synthetic construct
QSISSY

SEQ ID NO: 20327 - protein, 6 aa, Artificial Sequence
  Synthetic construct
QSISSY

SEQ ID NO: 20328 - protein, 6 aa, Artificial Sequence
  Synthetic construct
HSVSSN

SEQ ID NO: 20329 - protein, 6 aa, Artificial Sequence
  Synthetic construct
ESVGVK

SEQ ID NO: 20330 - protein, 11 aa, Artificial Sequence
  Synthetic construct
QSLVHTDGNTY

SEQ ID NO: 20331 - protein, 8 aa, Artificial Sequence
  Synthetic construct
SSNVEHKY

SEQ ID NO: 20332 - protein, 7 aa, Artificial Sequence
  Synthetic construct
ESISSRS

SEQ ID NO: 20333 - protein, 6 aa, Artificial Sequence
  Synthetic construct
QSIRHW

SEQ ID NO: 20334 - protein, 6 aa, Artificial Sequence
  Synthetic construct
QSVSSN

SEQ ID NO: 20335 - protein, 6 aa, Artificial Sequence
  Synthetic construct
QSVNNA

SEQ ID NO: 20336 - protein, 6 aa, Artificial Sequence
  Synthetic construct
QGISSY

SEQ ID NO: 20337 - protein, 8 aa, Artificial Sequence
  Synthetic construct
SSNIGSNA

SEQ ID NO: 20338 - protein, 9 aa, Artificial Sequence
  Synthetic construct
SGSVSTSYY

SEQ ID NO: 20339 - protein, 6 aa, Artificial Sequence
  Synthetic construct
QGISSY

SEQ ID NO: 20340 - protein, 9 aa, Artificial Sequence
  Synthetic construct
SSDVGGYNY

SEQ ID NO: 20341 - protein, 6 aa, Artificial Sequence
  Synthetic construct
QNINNY

SEQ ID NO: 20342 - protein, 7 aa, Artificial Sequence
  Synthetic construct
QSVSSSY

SEQ ID NO: 20343 - protein, 6 aa, Artificial Sequence
  Synthetic construct
QSVSSN

SEQ ID NO: 20344 - protein, 7 aa, Artificial Sequence
  Synthetic construct
QSVSGSF

SEQ ID NO: 20345 - protein, 6 aa, Artificial Sequence
  Synthetic construct
QSISSW

SEQ ID NO: 20346 - protein, 6 aa, Artificial Sequence
  Synthetic construct
QGISSA

SEQ ID NO: 20347 - protein, 6 aa, Artificial Sequence
  Synthetic construct
SLRTYY

SEQ ID NO: 20348 - protein, 6 aa, Artificial Sequence
  Synthetic construct
QDISNS

SEQ ID NO: 20349 - protein, 11 aa, Artificial Sequence
  Synthetic construct
QSLLHRNGYNY

SEQ ID NO: 20350 - protein, 7 aa, Artificial Sequence
  Synthetic construct
QIICSSC

SEQ ID NO: 20351 - protein, 9 aa, Artificial Sequence
  Synthetic construct
SSDVGGYNY

SEQ ID NO: 20352 - protein, 11 aa, Artificial Sequence
  Synthetic construct
QSLVHSDGNTY

SEQ ID NO: 20353 - protein, 6 aa, Artificial Sequence
  Synthetic construct
SLRSYY

SEQ ID NO: 20354 - protein, 6 aa, Artificial Sequence
  Synthetic construct
QSISSW

SEQ ID NO: 20355 - protein, 9 aa, Artificial Sequence
  Synthetic construct
SSNIGAGYD

SEQ ID NO: 20356 - protein, 6 aa, Artificial Sequence
  Synthetic construct
NIESKN

SEQ ID NO: 20357 - protein, 8 aa, Artificial Sequence
  Synthetic construct
SSNIGSNY

SEQ ID NO: 20358 - protein, 6 aa, Artificial Sequence
  Synthetic construct
QSISSW

SEQ ID NO: 20359 - protein, 11 aa, Artificial Sequence
  Synthetic construct
QSLLHSNGYNY

SEQ ID NO: 20360 - protein, 6 aa, Artificial Sequence
  Synthetic construct
RGINNY

SEQ ID NO: 20361 - protein, 11 aa, Artificial Sequence
  Synthetic construct
QSLLHSNGYNY

SEQ ID NO: 20362 - protein, 9 aa, Artificial Sequence
  Synthetic construct
SSDVGGYNY

SEQ ID NO: 20363 - protein, 11 aa, Artificial Sequence
  Synthetic construct
QSLLHRDGKTY

SEQ ID NO: 20364 - protein, 12 aa, Artificial Sequence
  Synthetic construct
QSVLYSSNNKNY

SEQ ID NO: 20365 - protein, 8 aa, Artificial Sequence
  Synthetic construct
SSNIGSNT

SEQ ID NO: 20366 - protein, 7 aa, Artificial Sequence
  Synthetic construct
PSVSGYY

SEQ ID NO: 20367 - protein, 6 aa, Artificial Sequence
  Synthetic construct
QNVNTN

SEQ ID NO: 20368 - protein, 7 aa, Artificial Sequence
  Synthetic construct
SGHSSYA

SEQ ID NO: 20369 - protein, 7 aa, Artificial Sequence
  Synthetic construct
QNVSDNY

SEQ ID NO: 20370 - protein, 6 aa, Artificial Sequence
  Synthetic construct
QNINNY

SEQ ID NO: 20371 - protein, 7 aa, Artificial Sequence
  Synthetic construct
QSVSSSY

SEQ ID NO: 20372 - protein, 6 aa, Artificial Sequence
  Synthetic construct
QGISSY

SEQ ID NO: 20373 - protein, 11 aa, Artificial Sequence
  Synthetic construct
QSLLHSNGYNY

SEQ ID NO: 20374 - protein, 6 aa, Artificial Sequence
  Synthetic construct
QSISSW

SEQ ID NO: 20375 - protein, 6 aa, Artificial Sequence
  Synthetic construct
QGISSY

SEQ ID NO: 20376 - protein, 7 aa, Artificial Sequence
  Synthetic construct
QTVRNSY

SEQ ID NO: 20377 - protein, 6 aa, Artificial Sequence
  Synthetic construct
KLGDTY

SEQ ID NO: 20378 - protein, 8 aa, Artificial Sequence
  Synthetic construct
SSNIGSNY

SEQ ID NO: 20379 - protein, 6 aa, Artificial Sequence
  Synthetic construct
KLGDRY

SEQ ID NO: 20380 - protein, 8 aa, Artificial Sequence
  Synthetic construct
TSNIGSNY

SEQ ID NO: 20381 - protein, 6 aa, Artificial Sequence
  Synthetic construct
QGISSY

SEQ ID NO: 20382 - protein, 9 aa, Artificial Sequence
  Synthetic construct
SSDVGTYNL

SEQ ID NO: 20383 - protein, 6 aa, Artificial Sequence
  Synthetic construct
QTIGTF

SEQ ID NO: 20384 - protein, 6 aa, Artificial Sequence
  Synthetic construct
QDISSW

SEQ ID NO: 20385 - protein, 8 aa, Artificial Sequence
  Synthetic construct
SSNIGNNY

SEQ ID NO: 20386 - protein, 6 aa, Artificial Sequence
  Synthetic construct
QSVSSY

SEQ ID NO: 20387 - protein, 6 aa, Artificial Sequence
  Synthetic construct
QGISSY

SEQ ID NO: 20388 - protein, 11 aa, Artificial Sequence
  Synthetic construct
QSLVHSDGNTY

SEQ ID NO: 20389 - protein, 6 aa, Artificial Sequence
  Synthetic construct
PGISNS

SEQ ID NO: 20390 - protein, 7 aa, Artificial Sequence
  Synthetic construct
QSVSSSY

SEQ ID NO: 20391 - protein, 9 aa, Artificial Sequence
  Synthetic construct
SSNIGAGYD

SEQ ID NO: 20392 - protein, 6 aa, Artificial Sequence
  Synthetic construct
NFERKT

SEQ ID NO: 20393 - protein, 6 aa, Artificial Sequence
  Synthetic construct
QSVSSN

SEQ ID NO: 20394 - protein, 6 aa, Artificial Sequence
  Synthetic construct
QSISYW

SEQ ID NO: 20395 - protein, 6 aa, Artificial Sequence
  Synthetic construct
QSVSSY

SEQ ID NO: 20396 - protein, 11 aa, Artificial Sequence
  Synthetic construct
QSLLHSDGKTY

SEQ ID NO: 20397 - protein, 6 aa, Artificial Sequence
  Synthetic construct
QTINSY

SEQ ID NO: 20398 - protein, 9 aa, Artificial Sequence
  Synthetic construct
SSDVGAYNY

SEQ ID NO: 20399 - protein, 9 aa, Artificial Sequence
  Synthetic construct
SGSVSTSYS

SEQ ID NO: 20400 - protein, 6 aa, Artificial Sequence
  Synthetic construct
QSISNL

SEQ ID NO: 20401 - protein, 6 aa, Artificial Sequence
  Synthetic construct
QGISSY

SEQ ID NO: 20402 - protein, 9 aa, Artificial Sequence
  Synthetic construct
ASDIGSFNR

SEQ ID NO: 20403 - protein, 6 aa, Artificial Sequence
  Synthetic construct
QSISSW

SEQ ID NO: 20404 - protein, 6 aa, Artificial Sequence
  Synthetic construct
QSISSY

SEQ ID NO: 20405 - protein, 6 aa, Artificial Sequence
  Synthetic construct
NLRNYY

SEQ ID NO: 20406 - protein, 6 aa, Artificial Sequence
  Synthetic construct
NIGSKS

SEQ ID NO: 20407 - protein, 7 aa, Artificial Sequence
  Synthetic construct
QSVSSSY

SEQ ID NO: 20408 - protein, 8 aa, Artificial Sequence
  Synthetic construct
ISNIGSNR

SEQ ID NO: 20409 - protein, 8 aa, Artificial Sequence
  Synthetic construct
SSNIGNNY

SEQ ID NO: 20410 - protein, 11 aa, Artificial Sequence
  Synthetic construct
QSLLHSDGRTY

SEQ ID NO: 20411 - protein, 6 aa, Artificial Sequence
  Synthetic construct
QSISSY

SEQ ID NO: 20412 - protein, 6 aa, Artificial Sequence
  Synthetic construct
ALPKKY

SEQ ID NO: 20413 - protein, 6 aa, Artificial Sequence
  Synthetic construct
QGIGTY

SEQ ID NO: 20414 - protein, 8 aa, Artificial Sequence
  Synthetic construct
SSNIGNNY

SEQ ID NO: 20415 - protein, 11 aa, Artificial Sequence
  Synthetic construct
QSLLHSNGYNY

SEQ ID NO: 20416 - protein, 6 aa, Artificial Sequence
  Synthetic construct
QSISSW

SEQ ID NO: 20417 - protein, 6 aa, Artificial Sequence
  Synthetic construct
QGISNS

SEQ ID NO: 20418 - protein, 8 aa, Artificial Sequence
  Synthetic construct
RPNIGNNK

SEQ ID NO: 20419 - protein, 6 aa, Artificial Sequence
  Synthetic construct
RSITSY

SEQ ID NO: 20420 - protein, 11 aa, Artificial Sequence
  Synthetic construct
QSLEHSDGYTY

SEQ ID NO: 20421 - protein, 6 aa, Artificial Sequence
  Synthetic construct
QSISNY

SEQ ID NO: 20422 - protein, 9 aa, Artificial Sequence
  Synthetic construct
NSDLGSYNL

SEQ ID NO: 20423 - protein, 6 aa, Artificial Sequence
  Synthetic construct
QSVSSN

SEQ ID NO: 20424 - protein, 9 aa, Artificial Sequence
  Synthetic construct
YSDIGSFNY

SEQ ID NO: 20425 - protein, 11 aa, Artificial Sequence
  Synthetic construct
QSLLHSNGYNY

SEQ ID NO: 20426 - protein, 6 aa, Artificial Sequence
  Synthetic construct
QTIQSN

SEQ ID NO: 20427 - protein, 9 aa, Artificial Sequence
  Synthetic construct
SGDIGYSNF

SEQ ID NO: 20428 - protein, 6 aa, Artificial Sequence
  Synthetic construct
RSITSY

SEQ ID NO: 20429 - protein, 11 aa, Artificial Sequence
  Synthetic construct
QSLLHSNGYNY

SEQ ID NO: 20430 - protein, 7 aa, Artificial Sequence
  Synthetic construct
QSVGSTS

SEQ ID NO: 20431 - protein, 6 aa, Artificial Sequence
  Synthetic construct
KLGDKY

SEQ ID NO: 20432 - protein, 8 aa, Artificial Sequence
  Synthetic construct
NTNIGDNP

SEQ ID NO: 20433 - protein, 6 aa, Artificial Sequence
  Synthetic construct
QGISDY

SEQ ID NO: 20434 - protein, 11 aa, Artificial Sequence
  Synthetic construct
QSLLHSNGYNY

SEQ ID NO: 20435 - protein, 6 aa, Artificial Sequence
  Synthetic construct
ILTKEY

SEQ ID NO: 20436 - protein, 9 aa, Artificial Sequence
  Synthetic construct
SSDVGAYNY

SEQ ID NO: 20437 - protein, 9 aa, Artificial Sequence
  Synthetic construct
RSNIGASYD

SEQ ID NO: 20438 - protein, 6 aa, Artificial Sequence
  Synthetic construct
QSISSY

SEQ ID NO: 20439 - protein, 8 aa, Artificial Sequence
  Synthetic construct
SSNIGNNY

SEQ ID NO: 20440 - protein, 8 aa, Artificial Sequence
  Synthetic construct
SSNIGSNY

SEQ ID NO: 20441 - protein, 8 aa, Artificial Sequence
  Synthetic construct
SSNIGSNY

SEQ ID NO: 20442 - protein, 6 aa, Artificial Sequence
  Synthetic construct
RSITSY

SEQ ID NO: 20443 - protein, 6 aa, Artificial Sequence
  Synthetic construct
QSVSTY

SEQ ID NO: 20444 - protein, 9 aa, Artificial Sequence
  Synthetic construct
SRDVGGYNY

SEQ ID NO: 20445 - protein, 6 aa, Artificial Sequence
  Synthetic construct
HIISEF

SEQ ID NO: 20446 - protein, 11 aa, Artificial Sequence
  Synthetic construct
QSLLHSNGYNY

SEQ ID NO: 20447 - protein, 9 aa, Artificial Sequence
  Synthetic construct
SSHIGSHSF

SEQ ID NO: 20448 - protein, 6 aa, Artificial Sequence
  Synthetic construct
QDITKS

SEQ ID NO: 20449 - protein, 6 aa, Artificial Sequence
  Synthetic construct
QSVSSY

SEQ ID NO: 20450 - protein, 6 aa, Artificial Sequence
  Synthetic construct
QSISSW

SEQ ID NO: 20451 - protein, 9 aa, Artificial Sequence
  Synthetic construct
SGDVGGYDY

SEQ ID NO: 20452 - protein, 6 aa, Artificial Sequence
  Synthetic construct
KVGDEY

SEQ ID NO: 20453 - protein, 7 aa, Artificial Sequence
  Synthetic construct
QSINGSY

SEQ ID NO: 20454 - protein, 6 aa, Artificial Sequence
  Synthetic construct
NIGSKN

SEQ ID NO: 20455 - protein, 7 aa, Artificial Sequence
  Synthetic construct
QSVSSSY

SEQ ID NO: 20456 - protein, 12 aa, Artificial Sequence
  Synthetic construct
QSVLYSSNNKNY

SEQ ID NO: 20457 - protein, 7 aa, Artificial Sequence
  Synthetic construct
SGHSSYA

SEQ ID NO: 20458 - protein, 9 aa, Artificial Sequence
  Synthetic construct
SSNIGTGYD

SEQ ID NO: 20459 - protein, 12 aa, Artificial Sequence
  Synthetic construct
QSVLYSSNNKNY

SEQ ID NO: 20460 - protein, 6 aa, Artificial Sequence
  Synthetic construct
QDIRND

SEQ ID NO: 20461 - protein, 6 aa, Artificial Sequence
  Synthetic construct
QSISRY

SEQ ID NO: 20462 - protein, 7 aa, Artificial Sequence
  Synthetic construct
LMVSTTY

SEQ ID NO: 20463 - protein, 9 aa, Artificial Sequence
  Synthetic construct
SSNIGAAYD

SEQ ID NO: 20464 - protein, 7 aa, Artificial Sequence
  Synthetic construct
QSVPGSY

SEQ ID NO: 20465 - protein, 8 aa, Artificial Sequence
  Synthetic construct
SSNIGNNH

SEQ ID NO: 20466 - protein, 8 aa, Artificial Sequence
  Synthetic construct
RSNIGTYA

SEQ ID NO: 20467 - protein, 6 aa, Artificial Sequence
  Synthetic construct
QGISNY

SEQ ID NO: 20468 - protein, 6 aa, Artificial Sequence
  Synthetic construct
SLRSYY

SEQ ID NO: 20469 - protein, 7 aa, Artificial Sequence
  Synthetic construct
QSVSSDY

SEQ ID NO: 20470 - protein, 7 aa, Artificial Sequence
  Synthetic construct
QSVHSRY

SEQ ID NO: 20471 - protein, 11 aa, Artificial Sequence
  Synthetic construct
QSLLHSNGYNY

SEQ ID NO: 20472 - protein, 6 aa, Artificial Sequence
  Synthetic construct
QSISSW

SEQ ID NO: 20473 - protein, 12 aa, Artificial Sequence
  Synthetic construct
QSVLYSSNNKNY

SEQ ID NO: 20474 - protein, 9 aa, Artificial Sequence
  Synthetic construct
SSDVGSYNL

SEQ ID NO: 20475 - protein, 6 aa, Artificial Sequence
  Synthetic construct
QSVSSN

SEQ ID NO: 20476 - protein, 6 aa, Artificial Sequence
  Synthetic construct
QSISSW

SEQ ID NO: 20477 - protein, 6 aa, Artificial Sequence
  Synthetic construct
SLSKIY

SEQ ID NO: 20478 - protein, 7 aa, Artificial Sequence
  Synthetic construct
QSVSSKY

SEQ ID NO: 20479 - protein, 6 aa, Artificial Sequence
  Synthetic construct
QSVSSN

SEQ ID NO: 20480 - protein, 6 aa, Artificial Sequence
  Synthetic construct
QSISHW

SEQ ID NO: 20481 - protein, 6 aa, Artificial Sequence
  Synthetic construct
QSISSW

SEQ ID NO: 20482 - protein, 6 aa, Artificial Sequence
  Synthetic construct
QSISSY

SEQ ID NO: 20483 - protein, 12 aa, Artificial Sequence
  Synthetic construct
QSVLYSSNNKNY

SEQ ID NO: 20484 - protein, 6 aa, Artificial Sequence
  Synthetic construct
QGISNY

SEQ ID NO: 20485 - protein, 6 aa, Artificial Sequence
  Synthetic construct
QSVSND

SEQ ID NO: 20486 - protein, 9 aa, Artificial Sequence
  Synthetic construct
STDIGGYNY

SEQ ID NO: 20487 - protein, 6 aa, Artificial Sequence
  Synthetic construct
QSINNW

SEQ ID NO: 20488 - protein, 7 aa, Artificial Sequence
  Synthetic construct
QSVTSNY

SEQ ID NO: 20489 - protein, 8 aa, Artificial Sequence
  Synthetic construct
SSNIGNNY

SEQ ID NO: 20490 - protein, 6 aa, Artificial Sequence
  Synthetic construct
QSISSY

SEQ ID NO: 20491 - protein, 6 aa, Artificial Sequence
  Synthetic construct
QGISNY

SEQ ID NO: 20492 - protein, 9 aa, Artificial Sequence
  Synthetic construct
SSNIGAGYD

SEQ ID NO: 20493 - protein, 11 aa, Artificial Sequence
  Synthetic construct
QSLTGGDEKAD

SEQ ID NO: 20494 - protein, 11 aa, Artificial Sequence
  Synthetic construct
QSLLHSDGKTY

SEQ ID NO: 20495 - protein, 7 aa, Artificial Sequence
  Synthetic construct
RSVSAIY

SEQ ID NO: 20496 - protein, 6 aa, Artificial Sequence
  Synthetic construct
QGISSY

SEQ ID NO: 20497 - protein, 6 aa, Artificial Sequence
  Synthetic construct
QGISSW

SEQ ID NO: 20498 - protein, 6 aa, Artificial Sequence
  Synthetic construct
QSISNY

SEQ ID NO: 20499 - protein, 6 aa, Artificial Sequence
  Synthetic construct
QTVSSY

SEQ ID NO: 20500 - protein, 6 aa, Artificial Sequence
  Synthetic construct
QSISSY

SEQ ID NO: 20501 - protein, 6 aa, Artificial Sequence
  Synthetic construct
QGISSY

SEQ ID NO: 20502 - protein, 7 aa, Artificial Sequence
  Synthetic construct
QSVSSSS

SEQ ID NO: 20503 - protein, 8 aa, Artificial Sequence
  Synthetic construct
SSNIGSNT

SEQ ID NO: 20504 - protein, 7 aa, Artificial Sequence
  Synthetic construct
SGHSSYA

SEQ ID NO: 20505 - protein, 12 aa, Artificial Sequence
  Synthetic construct
QSAFYSPTNRDH

SEQ ID NO: 20506 - protein, 6 aa, Artificial Sequence
  Synthetic construct
QGISSY

SEQ ID NO: 20507 - protein, 6 aa, Artificial Sequence
  Synthetic construct
SLRSFY

SEQ ID NO: 20508 - protein, 6 aa, Artificial Sequence
  Synthetic construct
QSVSSN

SEQ ID NO: 20509 - protein, 7 aa, Artificial Sequence
  Synthetic construct
QSVRGGY

SEQ ID NO: 20510 - protein, 9 aa, Artificial Sequence
  Synthetic construct
SSDVGGYNY

SEQ ID NO: 20511 - protein, 6 aa, Artificial Sequence
  Synthetic construct
QNIFTY

SEQ ID NO: 20512 - protein, 6 aa, Artificial Sequence
  Synthetic construct
QSISSW

SEQ ID NO: 20513 - protein, 6 aa, Artificial Sequence
  Synthetic construct
QGINNY

SEQ ID NO: 20514 - protein, 9 aa, Artificial Sequence
  Synthetic construct
PGSVSTADY

SEQ ID NO: 20515 - protein, 12 aa, Artificial Sequence
  Synthetic construct
QSVLYSSNNKNY

SEQ ID NO: 20516 - protein, 6 aa, Artificial Sequence
  Synthetic construct
QSINNY

SEQ ID NO: 20517 - protein, 8 aa, Artificial Sequence
  Synthetic construct
SSNIRNNI

SEQ ID NO: 20518 - protein, 8 aa, Artificial Sequence
  Synthetic construct
TSNIGDNT

SEQ ID NO: 20519 - protein, 6 aa, Artificial Sequence
  Synthetic construct
QGISNY

SEQ ID NO: 20520 - protein, 11 aa, Artificial Sequence
  Synthetic construct
QSLLHSDGKTY

SEQ ID NO: 20521 - protein, 9 aa, Artificial Sequence
  Synthetic construct
ASDIGAFNY

SEQ ID NO: 20522 - protein, 8 aa, Artificial Sequence
  Synthetic construct
YSNIGHNY

SEQ ID NO: 20523 - protein, 6 aa, Artificial Sequence
  Synthetic construct
RSITSY

SEQ ID NO: 20524 - protein, 11 aa, Artificial Sequence
  Synthetic construct
QSLLHSNGYNY

SEQ ID NO: 20525 - protein, 6 aa, Artificial Sequence
  Synthetic construct
QTINKY

SEQ ID NO: 20526 - protein, 6 aa, Artificial Sequence
  Synthetic construct
VLSRKY

SEQ ID NO: 20527 - protein, 6 aa, Artificial Sequence
  Synthetic construct
ALAKQY

SEQ ID NO: 20528 - protein, 7 aa, Artificial Sequence
  Synthetic construct
SGHNSYT

SEQ ID NO: 20529 - protein, 6 aa, Artificial Sequence
  Synthetic construct
QSISSY

SEQ ID NO: 20530 - protein, 9 aa, Artificial Sequence
  Synthetic construct
SSNIGAGYD

SEQ ID NO: 20531 - protein, 6 aa, Artificial Sequence
  Synthetic construct
NIENNN

SEQ ID NO: 20532 - protein, 9 aa, Artificial Sequence
  Synthetic construct
SSDVGGYNY

SEQ ID NO: 20533 - protein, 6 aa, Artificial Sequence
  Synthetic construct
ALPKQY

SEQ ID NO: 20534 - protein, 6 aa, Artificial Sequence
  Synthetic construct
QSISSY

SEQ ID NO: 20535 - protein, 6 aa, Artificial Sequence
  Synthetic construct
QGISSY

SEQ ID NO: 20536 - protein, 8 aa, Artificial Sequence
  Synthetic construct
SSNIGNNY

SEQ ID NO: 20537 - protein, 6 aa, Artificial Sequence
  Synthetic construct
QSISSY

SEQ ID NO: 20538 - protein, 6 aa, Artificial Sequence
  Synthetic construct
ALPKHF

SEQ ID NO: 20539 - protein, 5 aa, Artificial Sequence
  Synthetic construct
QSVSR

SEQ ID NO: 20540 - protein, 9 aa, Artificial Sequence
  Synthetic construct
SSDVGTYNL

SEQ ID NO: 20541 - protein, 9 aa, Artificial Sequence
  Synthetic construct
SGVSVGSYS

SEQ ID NO: 20542 - protein, 6 aa, Artificial Sequence
  Synthetic construct
QTVSTY

SEQ ID NO: 20543 - protein, 6 aa, Artificial Sequence
  Synthetic construct
QSISKY

SEQ ID NO: 20544 - protein, 6 aa, Artificial Sequence
  Synthetic construct
ALPNQY

SEQ ID NO: 20545 - protein, 6 aa, Artificial Sequence
  Synthetic construct
QSVSSN

SEQ ID NO: 20546 - protein, 6 aa, Artificial Sequence
  Synthetic construct
QTVSSY

SEQ ID NO: 20547 - protein, 9 aa, Artificial Sequence
  Synthetic construct
SSDVGGYNY

SEQ ID NO: 20548 - protein, 11 aa, Artificial Sequence
  Synthetic construct
QSLLHSNGYNY

SEQ ID NO: 20549 - protein, 8 aa, Artificial Sequence
  Synthetic construct
SSNIGSNY

SEQ ID NO: 20550 - protein, 6 aa, Artificial Sequence
  Synthetic construct
QGISNY

SEQ ID NO: 20551 - protein, 11 aa, Artificial Sequence
  Synthetic construct
QSLLHSNGYNY

SEQ ID NO: 20552 - protein, 8 aa, Artificial Sequence
  Synthetic construct
NSNIGNNA

SEQ ID NO: 20553 - protein, 11 aa, Artificial Sequence
  Synthetic construct
QSLLHSNGYNY

SEQ ID NO: 20554 - protein, 5 aa, Artificial Sequence
  Synthetic construct
QSVSR

SEQ ID NO: 20555 - protein, 6 aa, Artificial Sequence
  Synthetic construct
QGISSY

SEQ ID NO: 20556 - protein, 6 aa, Artificial Sequence
  Synthetic construct
QSVSSN

SEQ ID NO: 20557 - protein, 6 aa, Artificial Sequence
  Synthetic construct
QSISTY

SEQ ID NO: 20558 - protein, 9 aa, Artificial Sequence
  Synthetic construct
SSDVGGYNY

SEQ ID NO: 20559 - protein, 7 aa, Artificial Sequence
  Synthetic construct
RSIIGGN

SEQ ID NO: 20560 - protein, 6 aa, Artificial Sequence
  Synthetic construct
QSISSW

SEQ ID NO: 20561 - protein, 7 aa, Artificial Sequence
  Synthetic construct
QSVSDHY

SEQ ID NO: 20562 - protein, 6 aa, Artificial Sequence
  Synthetic construct
QGISSY

SEQ ID NO: 20563 - protein, 6 aa, Artificial Sequence
  Synthetic construct
QSISDW

SEQ ID NO: 20564 - protein, 12 aa, Artificial Sequence
  Synthetic construct
QSVLYSSNNKNY

SEQ ID NO: 20565 - protein, 7 aa, Artificial Sequence
  Synthetic construct
QSVSSSY

SEQ ID NO: 20566 - protein, 6 aa, Artificial Sequence
  Synthetic construct
QGISSY

SEQ ID NO: 20567 - protein, 6 aa, Artificial Sequence
  Synthetic construct
SLRNYY

SEQ ID NO: 20568 - protein, 9 aa, Artificial Sequence
  Synthetic construct
SSDVGTYNL

SEQ ID NO: 20569 - protein, 9 aa, Artificial Sequence
  Synthetic construct
SSDVGTYNL

SEQ ID NO: 20570 - protein, 6 aa, Artificial Sequence
  Synthetic construct
QGISSY

SEQ ID NO: 20571 - protein, 6 aa, Artificial Sequence
  Synthetic construct
QSVSRY

SEQ ID NO: 20572 - protein, 8 aa, Artificial Sequence
  Synthetic construct
SSNSGSNY

SEQ ID NO: 20573 - protein, 6 aa, Artificial Sequence
  Synthetic construct
QSVSSY

SEQ ID NO: 20574 - protein, 6 aa, Artificial Sequence
  Synthetic construct
ALPKQY

SEQ ID NO: 20575 - protein, 6 aa, Artificial Sequence
  Synthetic construct
QGISSY

SEQ ID NO: 20576 - protein, 7 aa, Artificial Sequence
  Synthetic construct
QSVSSSY

SEQ ID NO: 20577 - protein, 6 aa, Artificial Sequence
  Synthetic construct
QSVSTY

SEQ ID NO: 20578 - protein, 6 aa, Artificial Sequence
  Synthetic construct
QGISSY

SEQ ID NO: 20579 - protein, 6 aa, Artificial Sequence
  Synthetic construct
SLRNYF

SEQ ID NO: 20580 - protein, 6 aa, Artificial Sequence
  Synthetic construct
QNVTKY

SEQ ID NO: 20581 - protein, 6 aa, Artificial Sequence
  Synthetic construct
QGISNY

SEQ ID NO: 20582 - protein, 6 aa, Artificial Sequence
  Synthetic construct
QSISSW

SEQ ID NO: 20583 - protein, 9 aa, Artificial Sequence
  Synthetic construct
SSNIGAGYD

SEQ ID NO: 20584 - protein, 9 aa, Artificial Sequence
  Synthetic construct
SSDIGSYNY

SEQ ID NO: 20585 - protein, 6 aa, Artificial Sequence
  Synthetic construct
SLRTSY

SEQ ID NO: 20586 - protein, 6 aa, Artificial Sequence
  Synthetic construct
QSVSSY

SEQ ID NO: 20587 - protein, 6 aa, Artificial Sequence
  Synthetic construct
HSVSDY

SEQ ID NO: 20588 - protein, 12 aa, Artificial Sequence
  Synthetic construct
QSVLYSSNNKNY

SEQ ID NO: 20589 - protein, 6 aa, Artificial Sequence
  Synthetic construct
QSLDNN

SEQ ID NO: 20590 - protein, 8 aa, Artificial Sequence
  Synthetic construct
NSNIGGNT

SEQ ID NO: 20591 - protein, 11 aa, Artificial Sequence
  Synthetic construct
QSLVHSDGNTY

SEQ ID NO: 20592 - protein, 6 aa, Artificial Sequence
  Synthetic construct
QGIRSW

SEQ ID NO: 20593 - protein, 6 aa, Artificial Sequence
  Synthetic construct
QSVSTN

SEQ ID NO: 20594 - protein, 9 aa, Artificial Sequence
  Synthetic construct
SSDVGTYNL

SEQ ID NO: 20595 - protein, 6 aa, Artificial Sequence
  Synthetic construct
SLANHY

SEQ ID NO: 20596 - protein, 6 aa, Artificial Sequence
  Synthetic construct
QDISNY

SEQ ID NO: 20597 - protein, 12 aa, Artificial Sequence
  Synthetic construct
QNVLLESNNKNF

SEQ ID NO: 20598 - protein, 6 aa, Artificial Sequence
  Synthetic construct
QGISSY

SEQ ID NO: 20599 - protein, 6 aa, Artificial Sequence
  Synthetic construct
QSISSW

SEQ ID NO: 20600 - protein, 11 aa, Artificial Sequence
  Synthetic construct
QSLVSSDGNTY

SEQ ID NO: 20601 - protein, 7 aa, Artificial Sequence
  Synthetic construct
QSVSSSY

SEQ ID NO: 20602 - protein, 6 aa, Artificial Sequence
  Synthetic construct
QSISRW

SEQ ID NO: 20603 - protein, 9 aa, Artificial Sequence
  Synthetic construct
IGDVSYGNY

SEQ ID NO: 20604 - protein, 6 aa, Artificial Sequence
  Synthetic construct
QSVSSN

SEQ ID NO: 20605 - protein, 6 aa, Artificial Sequence
  Synthetic construct
KLGDKY

SEQ ID NO: 20606 - protein, 6 aa, Artificial Sequence
  Synthetic construct
QGISSY

SEQ ID NO: 20607 - protein, 8 aa, Artificial Sequence
  Synthetic construct
NSNIGSNT

SEQ ID NO: 20608 - protein, 6 aa, Artificial Sequence
  Synthetic construct
QSVYNF

SEQ ID NO: 20609 - protein, 7 aa, Artificial Sequence
  Synthetic construct
QSVSSSY

SEQ ID NO: 20610 - protein, 9 aa, Artificial Sequence
  Synthetic construct
NSNIGAGYD

SEQ ID NO: 20611 - protein, 6 aa, Artificial Sequence
  Synthetic construct
QSISSW

SEQ ID NO: 20612 - protein, 11 aa, Artificial Sequence
  Synthetic construct
QSLLHSNGYNY

SEQ ID NO: 20613 - protein, 7 aa, Artificial Sequence
  Synthetic construct
QSVSSSS

SEQ ID NO: 20614 - protein, 12 aa, Artificial Sequence
  Synthetic construct
QSVLYSSNNKNY

SEQ ID NO: 20615 - protein, 9 aa, Artificial Sequence
  Synthetic construct
NSNIGAGYD

SEQ ID NO: 20616 - protein, 11 aa, Artificial Sequence
  Synthetic construct
QSLLHDIGHNY

SEQ ID NO: 20617 - protein, 8 aa, Artificial Sequence
  Synthetic construct
SSNIGSNY

SEQ ID NO: 20618 - protein, 6 aa, Artificial Sequence
  Synthetic construct
HSVSHY

SEQ ID NO: 20619 - protein, 6 aa, Artificial Sequence
  Synthetic construct
QSVSSY

SEQ ID NO: 20620 - protein, 6 aa, Artificial Sequence
  Synthetic construct
QGISSY

SEQ ID NO: 20621 - protein, 6 aa, Artificial Sequence
  Synthetic construct
QGISNF

SEQ ID NO: 20622 - protein, 6 aa, Artificial Sequence
  Synthetic construct
QGINTY

SEQ ID NO: 20623 - protein, 6 aa, Artificial Sequence
  Synthetic construct
QNINNF

SEQ ID NO: 20624 - protein, 7 aa, Artificial Sequence
  Synthetic construct
QSVSSSY

SEQ ID NO: 20625 - protein, 6 aa, Artificial Sequence
  Synthetic construct
QGISSY

SEQ ID NO: 20626 - protein, 6 aa, Artificial Sequence
  Synthetic construct
QSVSSY

SEQ ID NO: 20627 - protein, 6 aa, Artificial Sequence
  Synthetic construct
QGISSY

SEQ ID NO: 20628 - protein, 6 aa, Artificial Sequence
  Synthetic construct
QGISSY

SEQ ID NO: 20629 - protein, 6 aa, Artificial Sequence
  Synthetic construct
QGISSY

SEQ ID NO: 20630 - protein, 6 aa, Artificial Sequence
  Synthetic construct
QSVSSY

SEQ ID NO: 20631 - protein, 6 aa, Artificial Sequence
  Synthetic construct
QGISSY

SEQ ID NO: 20632 - protein, 7 aa, Artificial Sequence
  Synthetic construct
QSVSSSY

SEQ ID NO: 20633 - protein, 6 aa, Artificial Sequence
  Synthetic construct
QGIANY

SEQ ID NO: 20634 - protein, 6 aa, Artificial Sequence
  Synthetic construct
QGISSY

SEQ ID NO: 20635 - protein, 6 aa, Artificial Sequence
  Synthetic construct
QSVSSN

SEQ ID NO: 20636 - protein, 6 aa, Artificial Sequence
  Synthetic construct
QGINIW

SEQ ID NO: 20637 - protein, 6 aa, Artificial Sequence
  Synthetic construct
QSISSY

SEQ ID NO: 20638 - protein, 6 aa, Artificial Sequence
  Synthetic construct
NIGTKS

SEQ ID NO: 20639 - protein, 9 aa, Artificial Sequence
  Synthetic construct
SSNIGALYD

SEQ ID NO: 20640 - protein, 6 aa, Artificial Sequence
  Synthetic construct
ALPKKY

SEQ ID NO: 20641 - protein, 6 aa, Artificial Sequence
  Synthetic construct
QDISSW

SEQ ID NO: 20642 - protein, 6 aa, Artificial Sequence
  Synthetic construct
QGISSY

SEQ ID NO: 20643 - protein, 6 aa, Artificial Sequence
  Synthetic construct
QGISSY

SEQ ID NO: 20644 - protein, 6 aa, Artificial Sequence
  Synthetic construct
QNINTW

SEQ ID NO: 20645 - protein, 9 aa, Artificial Sequence
  Synthetic construct
SGSVSTSYY

SEQ ID NO: 20646 - protein, 7 aa, Artificial Sequence
  Synthetic construct
QSVNSRY

SEQ ID NO: 20647 - protein, 6 aa, Artificial Sequence
  Synthetic construct
KLGEKY

SEQ ID NO: 20648 - protein, 6 aa, Artificial Sequence
  Synthetic construct
QGIRSW

SEQ ID NO: 20649 - protein, 9 aa, Artificial Sequence
  Synthetic construct
SSDVGTYNL

SEQ ID NO: 20650 - protein, 7 aa, Artificial Sequence
  Synthetic construct
QSFGSRY

SEQ ID NO: 20651 - protein, 6 aa, Artificial Sequence
  Synthetic construct
QGISSY

SEQ ID NO: 20652 - protein, 8 aa, Artificial Sequence
  Synthetic construct
SSNIGKNF

SEQ ID NO: 20653 - protein, 6 aa, Artificial Sequence
  Synthetic construct
QSVNTW

SEQ ID NO: 20654 - protein, 9 aa, Artificial Sequence
  Synthetic construct
YYNIGAGYP

SEQ ID NO: 20655 - protein, 8 aa, Artificial Sequence
  Synthetic construct
SGSIASNY

SEQ ID NO: 20656 - protein, 11 aa, Artificial Sequence
  Synthetic construct
QSLVHSDGNTY

SEQ ID NO: 20657 - protein, 8 aa, Artificial Sequence
  Synthetic construct
SSNIGTNF

SEQ ID NO: 20658 - protein, 7 aa, Artificial Sequence
  Synthetic construct
QTIRSNY

SEQ ID NO: 20659 - protein, 9 aa, Artificial Sequence
  Synthetic construct
SSNIGAGYD

SEQ ID NO: 20660 - protein, 6 aa, Artificial Sequence
  Synthetic construct
QSVSSY

SEQ ID NO: 20661 - protein, 6 aa, Artificial Sequence
  Synthetic construct
QGIRDD

SEQ ID NO: 20662 - protein, 6 aa, Artificial Sequence
  Synthetic construct
ILSNKY

SEQ ID NO: 20663 - protein, 6 aa, Artificial Sequence
  Synthetic construct
QSVSRY

SEQ ID NO: 20664 - protein, 6 aa, Artificial Sequence
  Synthetic construct
QSVSSN

SEQ ID NO: 20665 - protein, 6 aa, Artificial Sequence
  Synthetic construct
QSVSSN

SEQ ID NO: 20666 - protein, 6 aa, Artificial Sequence
  Synthetic construct
QSVSSN

SEQ ID NO: 20667 - protein, 12 aa, Artificial Sequence
  Synthetic construct
QSVLYSSNNKNY

SEQ ID NO: 20668 - protein, 6 aa, Artificial Sequence
  Synthetic construct
QSISSY

SEQ ID NO: 20669 - protein, 7 aa, Artificial Sequence
  Synthetic construct
QSLSSSY

SEQ ID NO: 20670 - protein, 9 aa, Artificial Sequence
  Synthetic construct
TSDIGSYDL

SEQ ID NO: 20671 - protein, 6 aa, Artificial Sequence
  Synthetic construct
QMISRH

SEQ ID NO: 20672 - protein, 7 aa, Artificial Sequence
  Synthetic construct
SGHNTYA

SEQ ID NO: 20673 - protein, 6 aa, Artificial Sequence
  Synthetic construct
QSIGSW

SEQ ID NO: 20674 - protein, 11 aa, Artificial Sequence
  Synthetic construct
QSLLHSNGYNY

SEQ ID NO: 20675 - protein, 6 aa, Artificial Sequence
  Synthetic construct
RGINNY

SEQ ID NO: 20676 - protein, 9 aa, Artificial Sequence
  Synthetic construct
SGINVGTYR

SEQ ID NO: 20677 - protein, 6 aa, Artificial Sequence
  Synthetic construct
KLGDKY

SEQ ID NO: 20678 - protein, 6 aa, Artificial Sequence
  Synthetic construct
QDISNY

SEQ ID NO: 20679 - protein, 6 aa, Artificial Sequence
  Synthetic construct
QGISSY

SEQ ID NO: 20680 - protein, 11 aa, Artificial Sequence
  Synthetic construct
QSLLHSNGYNY

SEQ ID NO: 20681 - protein, 9 aa, Artificial Sequence
  Synthetic construct
TGPVTTTHY

SEQ ID NO: 20682 - protein, 6 aa, Artificial Sequence
  Synthetic construct
QSVSSN

SEQ ID NO: 20683 - protein, 11 aa, Artificial Sequence
  Synthetic construct
QSLLHSDGRTY

SEQ ID NO: 20684 - protein, 6 aa, Artificial Sequence
  Synthetic construct
DIADRS

SEQ ID NO: 20685 - protein, 9 aa, Artificial Sequence
  Synthetic construct
SSDVGFYDL

SEQ ID NO: 20686 - protein, 6 aa, Artificial Sequence
  Synthetic construct
RSITSY

SEQ ID NO: 20687 - protein, 6 aa, Artificial Sequence
  Synthetic construct
ELTNEF

SEQ ID NO: 20688 - protein, 6 aa, Artificial Sequence
  Synthetic construct
QDIRNY

SEQ ID NO: 20689 - protein, 6 aa, Artificial Sequence
  Synthetic construct
QSISTW

SEQ ID NO: 20690 - protein, 6 aa, Artificial Sequence
  Synthetic construct
QSVSSY

SEQ ID NO: 20691 - protein, 6 aa, Artificial Sequence
  Synthetic construct
QGISSY

SEQ ID NO: 20692 - protein, 6 aa, Artificial Sequence
  Synthetic construct
QSISSW

SEQ ID NO: 20693 - protein, 11 aa, Artificial Sequence
  Synthetic construct
QSLVHSDGNTY

SEQ ID NO: 20694 - protein, 11 aa, Artificial Sequence
  Synthetic construct
QSLLHSDGKTY

SEQ ID NO: 20695 - protein, 12 aa, Artificial Sequence
  Synthetic construct
QSVLFGSNNENY

SEQ ID NO: 20696 - protein, 9 aa, Artificial Sequence
  Synthetic construct
SSDVDDYKF

SEQ ID NO: 20697 - protein, 6 aa, Artificial Sequence
  Synthetic construct
QSISSY

SEQ ID NO: 20698 - protein, 11 aa, Artificial Sequence
  Synthetic construct
QSLLHSNGHDY

SEQ ID NO: 20699 - protein, 9 aa, Artificial Sequence
  Synthetic construct
SSDIGTSNY

SEQ ID NO: 20700 - protein, 7 aa, Artificial Sequence
  Synthetic construct
SGHNIYG

SEQ ID NO: 20701 - protein, 6 aa, Artificial Sequence
  Synthetic construct
ALPKQY

SEQ ID NO: 20702 - protein, 6 aa, Artificial Sequence
  Synthetic construct
QSISSY

SEQ ID NO: 20703 - protein, 6 aa, Artificial Sequence
  Synthetic construct
QGISSY

SEQ ID NO: 20704 - protein, 7 aa, Artificial Sequence
  Synthetic construct
PPVRSDF

SEQ ID NO: 20705 - protein, 7 aa, Artificial Sequence
  Synthetic construct
QSVSSSY

SEQ ID NO: 20706 - protein, 9 aa, Artificial Sequence
  Synthetic construct
SSDVGFYDL

SEQ ID NO: 20707 - protein, 9 aa, Artificial Sequence
  Synthetic construct
RSDVGSYDY

SEQ ID NO: 20708 - protein, 9 aa, Artificial Sequence
  Synthetic construct
GGDVGANNY

SEQ ID NO: 20709 - protein, 11 aa, Artificial Sequence
  Synthetic construct
QSLLHSNGYNY

SEQ ID NO: 20710 - protein, 9 aa, Artificial Sequence
  Synthetic construct
SSDVGGYNY

SEQ ID NO: 20711 - protein, 6 aa, Artificial Sequence
  Synthetic construct
QSVSSY

SEQ ID NO: 20712 - protein, 9 aa, Artificial Sequence
  Synthetic construct
SADVGGFTL

SEQ ID NO: 20713 - protein, 11 aa, Artificial Sequence
  Synthetic construct
QSLLHSNGYNY

SEQ ID NO: 20714 - protein, 7 aa, Artificial Sequence
  Synthetic construct
QTVNSNY

SEQ ID NO: 20715 - protein, 6 aa, Artificial Sequence
  Synthetic construct
ALPKKY

SEQ ID NO: 20716 - protein, 6 aa, Artificial Sequence
  Synthetic construct
QGISTY

SEQ ID NO: 20717 - protein, 11 aa, Artificial Sequence
  Synthetic construct
QSLLHSNGYNY

SEQ ID NO: 20718 - protein, 6 aa, Artificial Sequence
  Synthetic construct
QNVSSN

SEQ ID NO: 20719 - protein, 11 aa, Artificial Sequence
  Synthetic construct
QSLVHSDGNTY

SEQ ID NO: 20720 - protein, 6 aa, Artificial Sequence
  Synthetic construct
QSISSW

SEQ ID NO: 20721 - protein, 8 aa, Artificial Sequence
  Synthetic construct
SSNIGNNY

SEQ ID NO: 20722 - protein, 6 aa, Artificial Sequence
  Synthetic construct
QSISSW

SEQ ID NO: 20723 - protein, 11 aa, Artificial Sequence
  Synthetic construct
QSLLHGDGKTY

SEQ ID NO: 20724 - protein, 9 aa, Artificial Sequence
  Synthetic construct
SSNIGAGYD

SEQ ID NO: 20725 - protein, 6 aa, Artificial Sequence
  Synthetic construct
NIGNKN

SEQ ID NO: 20726 - protein, 6 aa, Artificial Sequence
  Synthetic construct
SLRSYS

SEQ ID NO: 20727 - protein, 6 aa, Artificial Sequence
  Synthetic construct
SLRSFF

SEQ ID NO: 20728 - protein, 6 aa, Artificial Sequence
  Synthetic construct
QTVSSY

SEQ ID NO: 20729 - protein, 11 aa, Artificial Sequence
  Synthetic construct
QSLLHSNGYNY

SEQ ID NO: 20730 - protein, 6 aa, Artificial Sequence
  Synthetic construct
QFINSW

SEQ ID NO: 20731 - protein, 8 aa, Artificial Sequence
  Synthetic construct
SGSIASNY

SEQ ID NO: 20732 - protein, 6 aa, Artificial Sequence
  Synthetic construct
QGISSY

SEQ ID NO: 20733 - protein, 6 aa, Artificial Sequence
  Synthetic construct
QSISSW

SEQ ID NO: 20734 - protein, 9 aa, Artificial Sequence
  Synthetic construct
SSNIGALYD

SEQ ID NO: 20735 - protein, 8 aa, Artificial Sequence
  Synthetic construct
SSNIGNNY

SEQ ID NO: 20736 - protein, 6 aa, Artificial Sequence
  Synthetic construct
QGIRSW

SEQ ID NO: 20737 - protein, 6 aa, Artificial Sequence
  Synthetic construct
KLGNKY

SEQ ID NO: 20738 - protein, 12 aa, Artificial Sequence
  Synthetic construct
QSVLYSSNNKNY

SEQ ID NO: 20739 - protein, 6 aa, Artificial Sequence
  Synthetic construct
QSISSY

SEQ ID NO: 20740 - protein, 6 aa, Artificial Sequence
  Synthetic construct
QSVSSN

SEQ ID NO: 20741 - protein, 8 aa, Artificial Sequence
  Synthetic construct
SNNVGNQG

SEQ ID NO: 20742 - protein, 9 aa, Artificial Sequence
  Synthetic construct
SSDVGGYNY

SEQ ID NO: 20743 - protein, 6 aa, Artificial Sequence
  Synthetic construct
QGISSW

SEQ ID NO: 20744 - protein, 6 aa, Artificial Sequence
  Synthetic construct
QSVSSN

SEQ ID NO: 20745 - protein, 6 aa, Artificial Sequence
  Synthetic construct
QNIGDF

SEQ ID NO: 20746 - protein, 6 aa, Artificial Sequence
  Synthetic construct
QSIASY

SEQ ID NO: 20747 - protein, 12 aa, Artificial Sequence
  Synthetic construct
QSVLYSSNNKNY

SEQ ID NO: 20748 - protein, 9 aa, Artificial Sequence
  Synthetic construct
SGINVGTYR

SEQ ID NO: 20749 - protein, 6 aa, Artificial Sequence
  Synthetic construct
QGISNS

SEQ ID NO: 20750 - protein, 12 aa, Artificial Sequence
  Synthetic construct
QSVLYSSNNKNY

SEQ ID NO: 20751 - protein, 6 aa, Artificial Sequence
  Synthetic construct
QSIGNS

SEQ ID NO: 20752 - protein, 7 aa, Artificial Sequence
  Synthetic construct
QSVSSSY

SEQ ID NO: 20753 - protein, 6 aa, Artificial Sequence
  Synthetic construct
QSISSW

SEQ ID NO: 20754 - protein, 6 aa, Artificial Sequence
  Synthetic construct
QSVSSY

SEQ ID NO: 20755 - protein, 9 aa, Artificial Sequence
  Synthetic construct
SSDVGGYNY

SEQ ID NO: 20756 - protein, 6 aa, Artificial Sequence
  Synthetic construct
KLGDKY

SEQ ID NO: 20757 - protein, 7 aa, Artificial Sequence
  Synthetic construct
RSVSSSY

SEQ ID NO: 20758 - protein, 6 aa, Artificial Sequence
  Synthetic construct
SLRVYH

SEQ ID NO: 20759 - protein, 7 aa, Artificial Sequence
  Synthetic construct
SGHSSYA

SEQ ID NO: 20760 - protein, 11 aa, Artificial Sequence
  Synthetic construct
QSLLHSNGYNY

SEQ ID NO: 20761 - protein, 8 aa, Artificial Sequence
  Synthetic construct
SGSIASNY

SEQ ID NO: 20762 - protein, 8 aa, Artificial Sequence
  Synthetic construct
SSNVGNQG

SEQ ID NO: 20763 - protein, 6 aa, Artificial Sequence
  Synthetic construct
QGISNF

SEQ ID NO: 20764 - protein, 6 aa, Artificial Sequence
  Synthetic construct
QRISNY

SEQ ID NO: 20765 - protein, 12 aa, Artificial Sequence
  Synthetic construct
QSVLYRSNNKNY

SEQ ID NO: 20766 - protein, 7 aa, Artificial Sequence
  Synthetic construct
QSVSSSY

SEQ ID NO: 20767 - protein, 6 aa, Artificial Sequence
  Synthetic construct
QGISNY

SEQ ID NO: 20768 - protein, 6 aa, Artificial Sequence
  Synthetic construct
SLRSYY

SEQ ID NO: 20769 - protein, 6 aa, Artificial Sequence
  Synthetic construct
QSIGTS

SEQ ID NO: 20770 - protein, 7 aa, Artificial Sequence
  Synthetic construct
QSVRRNF

SEQ ID NO: 20771 - protein, 9 aa, Artificial Sequence
  Synthetic construct
SSDVGTYNL

SEQ ID NO: 20772 - protein, 7 aa, Artificial Sequence
  Synthetic construct
QSVSSSY

SEQ ID NO: 20773 - protein, 12 aa, Artificial Sequence
  Synthetic construct
QSVLYSSNNKNY

SEQ ID NO: 20774 - protein, 5 aa, Artificial Sequence
  Synthetic construct
QSVSR

SEQ ID NO: 20775 - protein, 7 aa, Artificial Sequence
  Synthetic construct
QSVSSSY

SEQ ID NO: 20776 - protein, 8 aa, Artificial Sequence
  Synthetic construct
TSTIGANF

SEQ ID NO: 20777 - protein, 7 aa, Artificial Sequence
  Synthetic construct
ESVSSSY

SEQ ID NO: 20778 - protein, 6 aa, Artificial Sequence
  Synthetic construct
SLRNYY

SEQ ID NO: 20779 - protein, 12 aa, Artificial Sequence
  Synthetic construct
QSVFFESQNNNF

SEQ ID NO: 20780 - protein, 6 aa, Artificial Sequence
  Synthetic construct
QGISNY

SEQ ID NO: 20781 - protein, 6 aa, Artificial Sequence
  Synthetic construct
GLRSYF

SEQ ID NO: 20782 - protein, 9 aa, Artificial Sequence
  Synthetic construct
TGAVTRGHY

SEQ ID NO: 20783 - protein, 6 aa, Artificial Sequence
  Synthetic construct
RSITSY

SEQ ID NO: 20784 - protein, 6 aa, Artificial Sequence
  Synthetic construct
QSISSW

SEQ ID NO: 20785 - protein, 6 aa, Artificial Sequence
  Synthetic construct
QDIRDD

SEQ ID NO: 20786 - protein, 8 aa, Artificial Sequence
  Synthetic construct
SSNIGNNH

SEQ ID NO: 20787 - protein, 6 aa, Artificial Sequence
  Synthetic construct
QDISTW

SEQ ID NO: 20788 - protein, 6 aa, Artificial Sequence
  Synthetic construct
NIRGKS

SEQ ID NO: 20789 - protein, 9 aa, Artificial Sequence
  Synthetic construct
GSDFGAYHY

SEQ ID NO: 20790 - protein, 8 aa, Artificial Sequence
  Synthetic construct
SGSIASNY

SEQ ID NO: 20791 - protein, 5 aa, Artificial Sequence
  Synthetic construct
QSVSR

SEQ ID NO: 20792 - protein, 11 aa, Artificial Sequence
  Synthetic construct
QSLLHSNGYNY

SEQ ID NO: 20793 - protein, 6 aa, Artificial Sequence
  Synthetic construct
QGISNY

SEQ ID NO: 20794 - protein, 6 aa, Artificial Sequence
  Synthetic construct
QSVSSY

SEQ ID NO: 20795 - protein, 7 aa, Artificial Sequence
  Synthetic construct
QSLSSSY

SEQ ID NO: 20796 - protein, 8 aa, Artificial Sequence
  Synthetic construct
SSNVGSNT

SEQ ID NO: 20797 - protein, 8 aa, Artificial Sequence
  Synthetic construct
TSNIGKSF

SEQ ID NO: 20798 - protein, 8 aa, Artificial Sequence
  Synthetic construct
SSKIGSST

SEQ ID NO: 20799 - protein, 12 aa, Artificial Sequence
  Synthetic construct
QSVLYSSNNKNY

SEQ ID NO: 20800 - protein, 7 aa, Artificial Sequence
  Synthetic construct
SGHSNYA

SEQ ID NO: 20801 - protein, 9 aa, Artificial Sequence
  Synthetic construct
SSNIGATSH

SEQ ID NO: 20802 - protein, 6 aa, Artificial Sequence
  Synthetic construct
QGISSY

SEQ ID NO: 20803 - protein, 7 aa, Artificial Sequence
  Synthetic construct
QSVSSSY

SEQ ID NO: 20804 - protein, 9 aa, Artificial Sequence
  Synthetic construct
SSDVGGYNY

SEQ ID NO: 20805 - protein, 6 aa, Artificial Sequence
  Synthetic construct
QSVSSN

SEQ ID NO: 20806 - protein, 6 aa, Artificial Sequence
  Synthetic construct
QDITNY

SEQ ID NO: 20807 - protein, 6 aa, Artificial Sequence
  Synthetic construct
SLRSYY

SEQ ID NO: 20808 - protein, 6 aa, Artificial Sequence
  Synthetic construct
QNVTKY

SEQ ID NO: 20809 - protein, 11 aa, Artificial Sequence
  Synthetic construct
QSLLHSNGYNY

SEQ ID NO: 20810 - protein, 6 aa, Artificial Sequence
  Synthetic construct
QGISSY

SEQ ID NO: 20811 - protein, 11 aa, Artificial Sequence
  Synthetic construct
QSLLHSDGKTY

SEQ ID NO: 20812 - protein, 6 aa, Artificial Sequence
  Synthetic construct
QAFSIY

SEQ ID NO: 20813 - protein, 11 aa, Artificial Sequence
  Synthetic construct
QSLVHSDGNTY

SEQ ID NO: 20814 - protein, 8 aa, Artificial Sequence
  Synthetic construct
RSNIGVNA

SEQ ID NO: 20815 - protein, 9 aa, Artificial Sequence
  Synthetic construct
SSDVGGYNY

SEQ ID NO: 20816 - protein, 6 aa, Artificial Sequence
  Synthetic construct
QDIDEE

SEQ ID NO: 20817 - protein, 7 aa, Artificial Sequence
  Synthetic construct
QSVSSSY

SEQ ID NO: 20818 - protein, 8 aa, Artificial Sequence
  Synthetic construct
SSDVNYKY

SEQ ID NO: 20819 - protein, 6 aa, Artificial Sequence
  Synthetic construct
QSVNSN

SEQ ID NO: 20820 - protein, 9 aa, Artificial Sequence
  Synthetic construct
SSDVGTYNL

SEQ ID NO: 20821 - protein, 6 aa, Artificial Sequence
  Synthetic construct
QSISSW

SEQ ID NO: 20822 - protein, 6 aa, Artificial Sequence
  Synthetic construct
QSISSW

SEQ ID NO: 20823 - protein, 8 aa, Artificial Sequence
  Synthetic construct
SSNIGNNY

SEQ ID NO: 20824 - protein, 6 aa, Artificial Sequence
  Synthetic construct
QGISSY

SEQ ID NO: 20825 - protein, 6 aa, Artificial Sequence
  Synthetic construct
QSVSSN

SEQ ID NO: 20826 - protein, 11 aa, Artificial Sequence
  Synthetic construct
QSLVHSDGNTY

SEQ ID NO: 20827 - protein, 9 aa, Artificial Sequence
  Synthetic construct
SSDVGGYNY

SEQ ID NO: 20828 - protein, 7 aa, Artificial Sequence
  Synthetic construct
QSVNSNY

SEQ ID NO: 20829 - protein, 9 aa, Artificial Sequence
  Synthetic construct
TGAVTRGYH

SEQ ID NO: 20830 - protein, 9 aa, Artificial Sequence
  Synthetic construct
TGPVTSGHY

SEQ ID NO: 20831 - protein, 6 aa, Artificial Sequence
  Synthetic construct
QGISSY

SEQ ID NO: 20832 - protein, 6 aa, Artificial Sequence
  Synthetic construct
QSISGW

SEQ ID NO: 20833 - protein, 6 aa, Artificial Sequence
  Synthetic construct
QNIRDF

SEQ ID NO: 20834 - protein, 11 aa, Artificial Sequence
  Synthetic construct
QSLAHSDGNTY

SEQ ID NO: 20835 - protein, 6 aa, Artificial Sequence
  Synthetic construct
QSIGSS

SEQ ID NO: 20836 - protein, 11 aa, Artificial Sequence
  Synthetic construct
QSLAHDDGSTY

SEQ ID NO: 20837 - protein, 8 aa, Artificial Sequence
  Synthetic construct
TSNLGTNY

SEQ ID NO: 20838 - protein, 6 aa, Artificial Sequence
  Synthetic construct
QNINNY

SEQ ID NO: 20839 - protein, 9 aa, Artificial Sequence
  Synthetic construct
SSNIGAGYD

SEQ ID NO: 20840 - protein, 6 aa, Artificial Sequence
  Synthetic construct
QGISSA

SEQ ID NO: 20841 - protein, 6 aa, Artificial Sequence
  Synthetic construct
QSVSSN

SEQ ID NO: 20842 - protein, 6 aa, Artificial Sequence
  Synthetic construct
RSITSY

SEQ ID NO: 20843 - protein, 6 aa, Artificial Sequence
  Synthetic construct
QSISDW

SEQ ID NO: 20844 - protein, 7 aa, Artificial Sequence
  Synthetic construct
QSVSSSY

SEQ ID NO: 20845 - protein, 9 aa, Artificial Sequence
  Synthetic construct
SGSVSTSYY

SEQ ID NO: 20846 - protein, 6 aa, Artificial Sequence
  Synthetic construct
HSVNTY

SEQ ID NO: 20847 - protein, 6 aa, Artificial Sequence
  Synthetic construct
QNISGY

SEQ ID NO: 20848 - protein, 11 aa, Artificial Sequence
  Synthetic construct
QSLLHSNGYNY

SEQ ID NO: 20849 - protein, 6 aa, Artificial Sequence
  Synthetic construct
QSISSW

SEQ ID NO: 20850 - protein, 6 aa, Artificial Sequence
  Synthetic construct
QDVSSY

SEQ ID NO: 20851 - protein, 7 aa, Artificial Sequence
  Synthetic construct
QSVSSSY

SEQ ID NO: 20852 - protein, 12 aa, Artificial Sequence
  Synthetic construct
QSVFYGSSNKNY

SEQ ID NO: 20853 - protein, 7 aa, Artificial Sequence
  Synthetic construct
QSVSSSY

SEQ ID NO: 20854 - protein, 11 aa, Artificial Sequence
  Synthetic construct
QSLLHSNGYNY

SEQ ID NO: 20855 - protein, 6 aa, Artificial Sequence
  Synthetic construct
QGISSY

SEQ ID NO: 20856 - protein, 9 aa, Artificial Sequence
  Synthetic construct
SSDVGSYNL

SEQ ID NO: 20857 - protein, 6 aa, Artificial Sequence
  Synthetic construct
QNIGTS

SEQ ID NO: 20858 - protein, 6 aa, Artificial Sequence
  Synthetic construct
KLGDKY

SEQ ID NO: 20859 - protein, 6 aa, Artificial Sequence
  Synthetic construct
QSISSW

SEQ ID NO: 20860 - protein, 7 aa, Artificial Sequence
  Synthetic construct
IGHSTYA

SEQ ID NO: 20861 - protein, 7 aa, Artificial Sequence
  Synthetic construct
SGHSSYI

SEQ ID NO: 20862 - protein, 9 aa, Artificial Sequence
  Synthetic construct
SSDVDDYKF

SEQ ID NO: 20863 - protein, 6 aa, Artificial Sequence
  Synthetic construct
QSINSW

SEQ ID NO: 20864 - protein, 6 aa, Artificial Sequence
  Synthetic construct
QDISSQ

SEQ ID NO: 20865 - protein, 6 aa, Artificial Sequence
  Synthetic construct
IVGEES

SEQ ID NO: 20866 - protein, 12 aa, Artificial Sequence
  Synthetic construct
QSVVYSSNNKNY

SEQ ID NO: 20867 - protein, 6 aa, Artificial Sequence
  Synthetic construct
QTIRSY

SEQ ID NO: 20868 - protein, 6 aa, Artificial Sequence
  Synthetic construct
QSVSSN

SEQ ID NO: 20869 - protein, 9 aa, Artificial Sequence
  Synthetic construct
SSDVGTYNL

SEQ ID NO: 20870 - protein, 6 aa, Artificial Sequence
  Synthetic construct
QSISSW

SEQ ID NO: 20871 - protein, 6 aa, Artificial Sequence
  Synthetic construct
QDISNY

SEQ ID NO: 20872 - protein, 9 aa, Artificial Sequence
  Synthetic construct
SSDVGGSKY

SEQ ID NO: 20873 - protein, 6 aa, Artificial Sequence
  Synthetic construct
RSITSY

SEQ ID NO: 20874 - protein, 6 aa, Artificial Sequence
  Synthetic construct
QSVSSN

SEQ ID NO: 20875 - protein, 6 aa, Artificial Sequence
  Synthetic construct
QSISSY

SEQ ID NO: 20876 - protein, 9 aa, Artificial Sequence
  Synthetic construct
TSDIGSYDL

SEQ ID NO: 20877 - protein, 8 aa, Artificial Sequence
  Synthetic construct
SSNIGRHW

SEQ ID NO: 20878 - protein, 6 aa, Artificial Sequence
  Synthetic construct
QSVSSY

SEQ ID NO: 20879 - protein, 6 aa, Artificial Sequence
  Synthetic construct
QSVSSN

SEQ ID NO: 20880 - protein, 7 aa, Artificial Sequence
  Synthetic construct
QSVSSSY

SEQ ID NO: 20881 - protein, 6 aa, Artificial Sequence
  Synthetic construct
QSLSNW

SEQ ID NO: 20882 - protein, 6 aa, Artificial Sequence
  Synthetic construct
QSISSW

SEQ ID NO: 20883 - protein, 6 aa, Artificial Sequence
  Synthetic construct
QGIGSY

SEQ ID NO: 20884 - protein, 6 aa, Artificial Sequence
  Synthetic construct
QSISTY

SEQ ID NO: 20885 - protein, 6 aa, Artificial Sequence
  Synthetic construct
QNINNY

SEQ ID NO: 20886 - protein, 6 aa, Artificial Sequence
  Synthetic construct
NIGGKS

SEQ ID NO: 20887 - protein, 9 aa, Artificial Sequence
  Synthetic construct
SSDVGTYKY

SEQ ID NO: 20888 - protein, 5 aa, Artificial Sequence
  Synthetic construct
QSVSR

SEQ ID NO: 20889 - protein, 6 aa, Artificial Sequence
  Synthetic construct
NIVGKS

SEQ ID NO: 20890 - protein, 6 aa, Artificial Sequence
  Synthetic construct
HLGDKD

SEQ ID NO: 20891 - protein, 6 aa, Artificial Sequence
  Synthetic construct
QAISNF

SEQ ID NO: 20892 - protein, 6 aa, Artificial Sequence
  Synthetic construct
QSISSW

SEQ ID NO: 20893 - protein, 8 aa, Artificial Sequence
  Synthetic construct
SGSISSNY

SEQ ID NO: 20894 - protein, 7 aa, Artificial Sequence
  Synthetic construct
QTIRSNY

SEQ ID NO: 20895 - protein, 6 aa, Artificial Sequence
  Synthetic construct
RSITSY

SEQ ID NO: 20896 - protein, 8 aa, Artificial Sequence
  Synthetic construct
TRNIANNY

SEQ ID NO: 20897 - protein, 12 aa, Artificial Sequence
  Synthetic construct
QSVLYSSNNKNY

SEQ ID NO: 20898 - protein, 8 aa, Artificial Sequence
  Synthetic construct
SSNIGSNY

SEQ ID NO: 20899 - protein, 9 aa, Artificial Sequence
  Synthetic construct
SSDVGGYNY

SEQ ID NO: 20900 - protein, 6 aa, Artificial Sequence
  Synthetic construct
QGIRSW

SEQ ID NO: 20901 - protein, 11 aa, Artificial Sequence
  Synthetic construct
QSLVHSDGNTY

SEQ ID NO: 20902 - protein, 6 aa, Artificial Sequence
  Synthetic construct
QGISIW

SEQ ID NO: 20903 - protein, 6 aa, Artificial Sequence
  Synthetic construct
QSISNY

SEQ ID NO: 20904 - protein, 6 aa, Artificial Sequence
  Synthetic construct
QDIRND

SEQ ID NO: 20905 - protein, 6 aa, Artificial Sequence
  Synthetic construct
QSISDW

SEQ ID NO: 20906 - protein, 9 aa, Artificial Sequence
  Synthetic construct
SSDIGTYSF

SEQ ID NO: 20907 - protein, 6 aa, Artificial Sequence
  Synthetic construct
QSVSSN

SEQ ID NO: 20908 - protein, 6 aa, Artificial Sequence
  Synthetic construct
ELGQKY

SEQ ID NO: 20909 - protein, 6 aa, Artificial Sequence
  Synthetic construct
QSVSRL

SEQ ID NO: 20910 - protein, 6 aa, Artificial Sequence
  Synthetic construct
SLRSYY

SEQ ID NO: 20911 - protein, 7 aa, Artificial Sequence
  Synthetic construct
QSVSSGY

SEQ ID NO: 20912 - protein, 6 aa, Artificial Sequence
  Synthetic construct
QAISNY

SEQ ID NO: 20913 - protein, 6 aa, Artificial Sequence
  Synthetic construct
RLTDKY

SEQ ID NO: 20914 - protein, 6 aa, Artificial Sequence
  Synthetic construct
QGISSY

SEQ ID NO: 20915 - protein, 6 aa, Artificial Sequence
  Synthetic construct
QSVSSS

SEQ ID NO: 20916 - protein, 11 aa, Artificial Sequence
  Synthetic construct
QSLVHSDGNTY

SEQ ID NO: 20917 - protein, 6 aa, Artificial Sequence
  Synthetic construct
RGINNY

SEQ ID NO: 20918 - protein, 11 aa, Artificial Sequence
  Synthetic construct
QSLLHTDGQTY

SEQ ID NO: 20919 - protein, 6 aa, Artificial Sequence
  Synthetic construct
QNINNY

SEQ ID NO: 20920 - protein, 6 aa, Artificial Sequence
  Synthetic construct
QDISNY

SEQ ID NO: 20921 - protein, 6 aa, Artificial Sequence
  Synthetic construct
QDISNS

SEQ ID NO: 20922 - protein, 7 aa, Artificial Sequence
  Synthetic construct
QSVSSFY

SEQ ID NO: 20923 - protein, 6 aa, Artificial Sequence
  Synthetic construct
VLKNRY

SEQ ID NO: 20924 - protein, 6 aa, Artificial Sequence
  Synthetic construct
QGISIW

SEQ ID NO: 20925 - protein, 9 aa, Artificial Sequence
  Synthetic construct
SGDIGLYKH

SEQ ID NO: 20926 - protein, 6 aa, Artificial Sequence
  Synthetic construct
QSVSSY

SEQ ID NO: 20927 - protein, 6 aa, Artificial Sequence
  Synthetic construct
QSISSW

SEQ ID NO: 20928 - protein, 6 aa, Artificial Sequence
  Synthetic construct
QSISSY

SEQ ID NO: 20929 - protein, 6 aa, Artificial Sequence
  Synthetic construct
QRIGTW

SEQ ID NO: 20930 - protein, 7 aa, Artificial Sequence
  Synthetic construct
QSVSSGY

SEQ ID NO: 20931 - protein, 8 aa, Artificial Sequence
  Synthetic construct
SSNIGSNY

SEQ ID NO: 20932 - protein, 6 aa, Artificial Sequence
  Synthetic construct
QSIGSS

SEQ ID NO: 20933 - protein, 8 aa, Artificial Sequence
  Synthetic construct
SSNIGSNT

SEQ ID NO: 20934 - protein, 6 aa, Artificial Sequence
  Synthetic construct
QDISNY

SEQ ID NO: 20935 - protein, 8 aa, Artificial Sequence
  Synthetic construct
SSNIGNNY

SEQ ID NO: 20936 - protein, 6 aa, Artificial Sequence
  Synthetic construct
QGISNF

SEQ ID NO: 20937 - protein, 6 aa, Artificial Sequence
  Synthetic construct
QSVSSY

SEQ ID NO: 20938 - protein, 6 aa, Artificial Sequence
  Synthetic construct
NLRSKA

SEQ ID NO: 20939 - protein, 6 aa, Artificial Sequence
  Synthetic construct
ALTTQY

SEQ ID NO: 20940 - protein, 7 aa, Artificial Sequence
  Synthetic construct
QSVSSSY

SEQ ID NO: 20941 - protein, 6 aa, Artificial Sequence
  Synthetic construct
QDISNY

SEQ ID NO: 20942 - protein, 7 aa, Artificial Sequence
  Synthetic construct
QSISISY

SEQ ID NO: 20943 - protein, 6 aa, Artificial Sequence
  Synthetic construct
QSISSW

SEQ ID NO: 20944 - protein, 6 aa, Artificial Sequence
  Synthetic construct
QGISNY

SEQ ID NO: 20945 - protein, 8 aa, Artificial Sequence
  Synthetic construct
GSNIGHSY

SEQ ID NO: 20946 - protein, 8 aa, Artificial Sequence
  Synthetic construct
SGSIASNY

SEQ ID NO: 20947 - protein, 6 aa, Artificial Sequence
  Synthetic construct
QGISSW

SEQ ID NO: 20948 - protein, 12 aa, Artificial Sequence
  Synthetic construct
RSLLYGSSNKDY

SEQ ID NO: 20949 - protein, 9 aa, Artificial Sequence
  Synthetic construct
SSDVGGYNY

SEQ ID NO: 20950 - protein, 7 aa, Artificial Sequence
  Synthetic construct
RNLSKNY

SEQ ID NO: 20951 - protein, 6 aa, Artificial Sequence
  Synthetic construct
QSISSY

SEQ ID NO: 20952 - protein, 11 aa, Artificial Sequence
  Synthetic construct
QSLVHSDGNTY

SEQ ID NO: 20953 - protein, 9 aa, Artificial Sequence
  Synthetic construct
SSDVGNFNI

SEQ ID NO: 20954 - protein, 9 aa, Artificial Sequence
  Synthetic construct
SSDVGTYNL

SEQ ID NO: 20955 - protein, 12 aa, Artificial Sequence
  Synthetic construct
QSVLYSSNNKNY

SEQ ID NO: 20956 - protein, 6 aa, Artificial Sequence
  Synthetic construct
NIGTKT

SEQ ID NO: 20957 - protein, 6 aa, Artificial Sequence
  Synthetic construct
QGISSY

SEQ ID NO: 20958 - protein, 7 aa, Artificial Sequence
  Synthetic construct
QSVSSSY

SEQ ID NO: 20959 - protein, 11 aa, Artificial Sequence
  Synthetic construct
QSLLHSNGYNY

SEQ ID NO: 20960 - protein, 7 aa, Artificial Sequence
  Synthetic construct
QNVTSNY

SEQ ID NO: 20961 - protein, 6 aa, Artificial Sequence
  Synthetic construct
QGISNW

SEQ ID NO: 20962 - protein, 5 aa, Artificial Sequence
  Synthetic construct
QSVSR

SEQ ID NO: 20963 - protein, 7 aa, Artificial Sequence
  Synthetic construct
QSVSSSY

SEQ ID NO: 20964 - protein, 6 aa, Artificial Sequence
  Synthetic construct
QSISSY

SEQ ID NO: 20965 - protein, 6 aa, Artificial Sequence
  Synthetic construct
QDISDW

SEQ ID NO: 20966 - protein, 6 aa, Artificial Sequence
  Synthetic construct
QSVNSN

SEQ ID NO: 20967 - protein, 12 aa, Artificial Sequence
  Synthetic construct
QSVLYSSNNKNY

SEQ ID NO: 20968 - protein, 6 aa, Artificial Sequence
  Synthetic construct
QGISSY

SEQ ID NO: 20969 - protein, 8 aa, Artificial Sequence
  Synthetic construct
SSNVGTNY

SEQ ID NO: 20970 - protein, 12 aa, Artificial Sequence
  Synthetic construct
QSIFLTSNNKNY

SEQ ID NO: 20971 - protein, 6 aa, Artificial Sequence
  Synthetic construct
QGISNW

SEQ ID NO: 20972 - protein, 6 aa, Artificial Sequence
  Synthetic construct
QGISNY

SEQ ID NO: 20973 - protein, 6 aa, Artificial Sequence
  Synthetic construct
QSISSW

SEQ ID NO: 20974 - protein, 8 aa, Artificial Sequence
  Synthetic construct
GGSIALNY

SEQ ID NO: 20975 - protein, 7 aa, Artificial Sequence
  Synthetic construct
RSVSSSY

SEQ ID NO: 20976 - protein, 12 aa, Artificial Sequence
  Synthetic construct
QSVLYSSNNKNY

SEQ ID NO: 20977 - protein, 6 aa, Artificial Sequence
  Synthetic construct
QSIGTY

SEQ ID NO: 20978 - protein, 7 aa, Artificial Sequence
  Synthetic construct
SGHSSYA

SEQ ID NO: 20979 - protein, 7 aa, Artificial Sequence
  Synthetic construct
QSVSSSY

SEQ ID NO: 20980 - protein, 11 aa, Artificial Sequence
  Synthetic construct
QSLLHSNGYNY

SEQ ID NO: 20981 - protein, 6 aa, Artificial Sequence
  Synthetic construct
QSISSW

SEQ ID NO: 20982 - protein, 9 aa, Artificial Sequence
  Synthetic construct
SSDVGGYNY

SEQ ID NO: 20983 - protein, 8 aa, Artificial Sequence
  Synthetic construct
SGSIVSSY

SEQ ID NO: 20984 - protein, 11 aa, Artificial Sequence
  Synthetic construct
QSLVHSDGNTY

SEQ ID NO: 20985 - protein, 11 aa, Artificial Sequence
  Synthetic construct
QSLLHSNGYNY

SEQ ID NO: 20986 - protein, 6 aa, Artificial Sequence
  Synthetic construct
SLNKHH

SEQ ID NO: 20987 - protein, 6 aa, Artificial Sequence
  Synthetic construct
QGISSY

SEQ ID NO: 20988 - protein, 12 aa, Artificial Sequence
  Synthetic construct
QSIFYSSNNKNY

SEQ ID NO: 20989 - protein, 7 aa, Artificial Sequence
  Synthetic construct
QSVSSSY

SEQ ID NO: 20990 - protein, 12 aa, Artificial Sequence
  Synthetic construct
RTLLFSSNNENY

SEQ ID NO: 20991 - protein, 8 aa, Artificial Sequence
  Synthetic construct
SGSIASDY

SEQ ID NO: 20992 - protein, 6 aa, Artificial Sequence
  Synthetic construct
QSVSHY

SEQ ID NO: 20993 - protein, 8 aa, Artificial Sequence
  Synthetic construct
SSNIGSNY

SEQ ID NO: 20994 - protein, 6 aa, Artificial Sequence
  Synthetic construct
QSISRY

SEQ ID NO: 20995 - protein, 6 aa, Artificial Sequence
  Synthetic construct
QSISSW

SEQ ID NO: 20996 - protein, 6 aa, Artificial Sequence
  Synthetic construct
QDIDDD

SEQ ID NO: 20997 - protein, 6 aa, Artificial Sequence
  Synthetic construct
QAISNY

SEQ ID NO: 20998 - protein, 6 aa, Artificial Sequence
  Synthetic construct
QGISNY

SEQ ID NO: 20999 - protein, 8 aa, Artificial Sequence
  Synthetic construct
NSNIKSST

SEQ ID NO: 21000 - protein, 9 aa, Artificial Sequence
  Synthetic construct
TGSVTSRHY

SEQ ID NO: 21001 - protein, 7 aa, Artificial Sequence
  Synthetic construct
QSVSSNY

SEQ ID NO: 21002 - protein, 7 aa, Artificial Sequence
  Synthetic construct
QSVSSSY

SEQ ID NO: 21003 - protein, 11 aa, Artificial Sequence
  Synthetic construct
QSLLHSNGYNY

SEQ ID NO: 21004 - protein, 6 aa, Artificial Sequence
  Synthetic construct
NIGSKN

SEQ ID NO: 21005 - protein, 9 aa, Artificial Sequence
  Synthetic construct
SSDVGTYNL

SEQ ID NO: 21006 - protein, 6 aa, Artificial Sequence
  Synthetic construct
QNIDIY

SEQ ID NO: 21007 - protein, 9 aa, Artificial Sequence
  Synthetic construct
TSGVGGFSF

SEQ ID NO: 21008 - protein, 6 aa, Artificial Sequence
  Synthetic construct
QSINTY

SEQ ID NO: 21009 - protein, 6 aa, Artificial Sequence
  Synthetic construct
QGISSY

SEQ ID NO: 21010 - protein, 7 aa, Artificial Sequence
  Synthetic construct
QSVSSSY

SEQ ID NO: 21011 - protein, 9 aa, Artificial Sequence
  Synthetic construct
SSDVGSYNL

SEQ ID NO: 21012 - protein, 6 aa, Artificial Sequence
  Synthetic construct
QGISNY

SEQ ID NO: 21013 - protein, 6 aa, Artificial Sequence
  Synthetic construct
EDIGAW

SEQ ID NO: 21014 - protein, 6 aa, Artificial Sequence
  Synthetic construct
SLRSYY

SEQ ID NO: 21015 - protein, 7 aa, Artificial Sequence
  Synthetic construct
QTIRSNY

SEQ ID NO: 21016 - protein, 8 aa, Artificial Sequence
  Synthetic construct
RSNIGNSY

SEQ ID NO: 21017 - protein, 6 aa, Artificial Sequence
  Synthetic construct
RDIDDD

SEQ ID NO: 21018 - protein, 9 aa, Artificial Sequence
  Synthetic construct
SSDVGSYNL

SEQ ID NO: 21019 - protein, 6 aa, Artificial Sequence
  Synthetic construct
TLGRNF

SEQ ID NO: 21020 - protein, 6 aa, Artificial Sequence
  Synthetic construct
QSISSY

SEQ ID NO: 21021 - protein, 9 aa, Artificial Sequence
  Synthetic construct
SSDVGGYNY

SEQ ID NO: 21022 - protein, 5 aa, Artificial Sequence
  Synthetic construct
QSVSR

SEQ ID NO: 21023 - protein, 6 aa, Artificial Sequence
  Synthetic construct
QSVSSY

SEQ ID NO: 21024 - protein, 6 aa, Artificial Sequence
  Synthetic construct
QSISSY

SEQ ID NO: 21025 - protein, 6 aa, Artificial Sequence
  Synthetic construct
QDIRKS

SEQ ID NO: 21026 - protein, 8 aa, Artificial Sequence
  Synthetic construct
SSNIGTNF

SEQ ID NO: 21027 - protein, 6 aa, Artificial Sequence
  Synthetic construct
QGIRSW

SEQ ID NO: 21028 - protein, 6 aa, Artificial Sequence
  Synthetic construct
QGISSY

SEQ ID NO: 21029 - protein, 6 aa, Artificial Sequence
  Synthetic construct
RSLSTY

SEQ ID NO: 21030 - protein, 6 aa, Artificial Sequence
  Synthetic construct
KLGDKY

SEQ ID NO: 21031 - protein, 7 aa, Artificial Sequence
  Synthetic construct
QSVSSSY

SEQ ID NO: 21032 - protein, 7 aa, Artificial Sequence
  Synthetic construct
QSLSSSY

SEQ ID NO: 21033 - protein, 9 aa, Artificial Sequence
  Synthetic construct
SSNIGAGYD

SEQ ID NO: 21034 - protein, 12 aa, Artificial Sequence
  Synthetic construct
QSVLYSSNNKNY

SEQ ID NO: 21035 - protein, 9 aa, Artificial Sequence
  Synthetic construct
SSNIGAVYG

SEQ ID NO: 21036 - protein, 7 aa, Artificial Sequence
  Synthetic construct
QSVTSGY

SEQ ID NO: 21037 - protein, 6 aa, Artificial Sequence
  Synthetic construct
QNINNY

SEQ ID NO: 21038 - protein, 11 aa, Artificial Sequence
  Synthetic construct
QSLLRSNEHSY

SEQ ID NO: 21039 - protein, 6 aa, Artificial Sequence
  Synthetic construct
KLGDKY

SEQ ID NO: 21040 - protein, 6 aa, Artificial Sequence
  Synthetic construct
QAISNY

SEQ ID NO: 21041 - protein, 6 aa, Artificial Sequence
  Synthetic construct
QGIGSY

SEQ ID NO: 21042 - protein, 6 aa, Artificial Sequence
  Synthetic construct
QGISSY

SEQ ID NO: 21043 - protein, 6 aa, Artificial Sequence
  Synthetic construct
NIGSKS

SEQ ID NO: 21044 - protein, 8 aa, Artificial Sequence
  Synthetic construct
SSNIGTNF

SEQ ID NO: 21045 - protein, 7 aa, Artificial Sequence
  Synthetic construct
QTIRSNY

SEQ ID NO: 21046 - protein, 7 aa, Artificial Sequence
  Synthetic construct
QSVSSSY

SEQ ID NO: 21047 - protein, 6 aa, Artificial Sequence
  Synthetic construct
QSVSSY

SEQ ID NO: 21048 - protein, 6 aa, Artificial Sequence
  Synthetic construct
QSVTTY

SEQ ID NO: 21049 - protein, 6 aa, Artificial Sequence
  Synthetic construct
KLGDKS

SEQ ID NO: 21050 - protein, 12 aa, Artificial Sequence
  Synthetic construct
QSVFYSSTNKNY

SEQ ID NO: 21051 - protein, 7 aa, Artificial Sequence
  Synthetic construct
QSVSSSY

SEQ ID NO: 21052 - protein, 9 aa, Artificial Sequence
  Synthetic construct
SSDVGGYNY

SEQ ID NO: 21053 - protein, 6 aa, Artificial Sequence
  Synthetic construct
SGHTYA

SEQ ID NO: 21054 - protein, 9 aa, Artificial Sequence
  Synthetic construct
SSDVGGYNY

SEQ ID NO: 21055 - protein, 6 aa, Artificial Sequence
  Synthetic construct
QGIRID

SEQ ID NO: 21056 - protein, 6 aa, Artificial Sequence
  Synthetic construct
QSISSY

SEQ ID NO: 21057 - protein, 6 aa, Artificial Sequence
  Synthetic construct
QSISSQ

SEQ ID NO: 21058 - protein, 7 aa, Artificial Sequence
  Synthetic construct
QSVSSSY

SEQ ID NO: 21059 - protein, 6 aa, Artificial Sequence
  Synthetic construct
RSITSY

SEQ ID NO: 21060 - protein, 6 aa, Artificial Sequence
  Synthetic construct
QSISSY

SEQ ID NO: 21061 - protein, 6 aa, Artificial Sequence
  Synthetic construct
QSVSSY

SEQ ID NO: 21062 - protein, 6 aa, Artificial Sequence
  Synthetic construct
QDIRNW

SEQ ID NO: 21063 - protein, 7 aa, Artificial Sequence
  Synthetic construct
QGISISY

SEQ ID NO: 21064 - protein, 6 aa, Artificial Sequence
  Synthetic construct
QGIRSW

SEQ ID NO: 21065 - protein, 8 aa, Artificial Sequence
  Synthetic construct
SGNIASNY

SEQ ID NO: 21066 - protein, 6 aa, Artificial Sequence
  Synthetic construct
QDIRNY

SEQ ID NO: 21067 - protein, 11 aa, Artificial Sequence
  Synthetic construct
QSLLHSNGYNY

SEQ ID NO: 21068 - protein, 6 aa, Artificial Sequence
  Synthetic construct
ALPNQY

SEQ ID NO: 21069 - protein, 6 aa, Artificial Sequence
  Synthetic construct
QGISSY

SEQ ID NO: 21070 - protein, 6 aa, Artificial Sequence
  Synthetic construct
RSITSY

SEQ ID NO: 21071 - protein, 6 aa, Artificial Sequence
  Synthetic construct
QSISTY

SEQ ID NO: 21072 - protein, 11 aa, Artificial Sequence
  Synthetic construct
QSLVHSDGNTY

SEQ ID NO: 21073 - protein, 6 aa, Artificial Sequence
  Synthetic construct
QSISSY

SEQ ID NO: 21074 - protein, 6 aa, Artificial Sequence
  Synthetic construct
QSISSW

SEQ ID NO: 21075 - protein, 11 aa, Artificial Sequence
  Synthetic construct
QSLFHSTGRTY

SEQ ID NO: 21076 - protein, 8 aa, Artificial Sequence
  Synthetic construct
SSNIGSNT

SEQ ID NO: 21077 - protein, 6 aa, Artificial Sequence
  Synthetic construct
QSISSY

SEQ ID NO: 21078 - protein, 7 aa, Artificial Sequence
  Synthetic construct
SGHNSYA

SEQ ID NO: 21079 - protein, 9 aa, Artificial Sequence
  Synthetic construct
SSDVGGYNF

SEQ ID NO: 21080 - protein, 9 aa, Artificial Sequence
  Synthetic construct
SSNVGAYNY

SEQ ID NO: 21081 - protein, 6 aa, Artificial Sequence
  Synthetic construct
QDINNY

SEQ ID NO: 21082 - protein, 8 aa, Artificial Sequence
  Synthetic construct
SSNIGRDY

SEQ ID NO: 21083 - protein, 7 aa, Artificial Sequence
  Synthetic construct
SGHSSYA

SEQ ID NO: 21084 - protein, 6 aa, Artificial Sequence
  Synthetic construct
QSVGTN

SEQ ID NO: 21085 - protein, 6 aa, Artificial Sequence
  Synthetic construct
QGISNY

SEQ ID NO: 21086 - protein, 6 aa, Artificial Sequence
  Synthetic construct
QSVSSN

SEQ ID NO: 21087 - protein, 6 aa, Artificial Sequence
  Synthetic construct
QSISSY

SEQ ID NO: 21088 - protein, 8 aa, Artificial Sequence
  Synthetic construct
SSNIGKNT

SEQ ID NO: 21089 - protein, 6 aa, Artificial Sequence
  Synthetic construct
ALPNQY

SEQ ID NO: 21090 - protein, 7 aa, Artificial Sequence
  Synthetic construct
QSVRSNY

SEQ ID NO: 21091 - protein, 7 aa, Artificial Sequence
  Synthetic construct
SGHSSYA

SEQ ID NO: 21092 - protein, 6 aa, Artificial Sequence
  Synthetic construct
QNIHTF

SEQ ID NO: 21093 - protein, 6 aa, Artificial Sequence
  Synthetic construct
QSISYW

SEQ ID NO: 21094 - protein, 9 aa, Artificial Sequence
  Synthetic construct
SSDVGGYNY

SEQ ID NO: 21095 - protein, 12 aa, Artificial Sequence
  Synthetic construct
QSVLNSSNNKTS

SEQ ID NO: 21096 - protein, 7 aa, Artificial Sequence
  Synthetic construct
QSVSSSY

SEQ ID NO: 21097 - protein, 6 aa, Artificial Sequence
  Synthetic construct
QGISRW

SEQ ID NO: 21098 - protein, 8 aa, Artificial Sequence
  Synthetic construct
SSDVGYNY

SEQ ID NO: 21099 - protein, 6 aa, Artificial Sequence
  Synthetic construct
RGINNY

SEQ ID NO: 21100 - protein, 9 aa, Artificial Sequence
  Synthetic construct
TSNIGAGYD

SEQ ID NO: 21101 - protein, 7 aa, Artificial Sequence
  Synthetic construct
SGHSSYA

SEQ ID NO: 21102 - protein, 6 aa, Artificial Sequence
  Synthetic construct
HSLGRF

SEQ ID NO: 21103 - protein, 9 aa, Artificial Sequence
  Synthetic construct
SSDVGSYNL

SEQ ID NO: 21104 - protein, 9 aa, Artificial Sequence
  Synthetic construct
SSDVGGYNY

SEQ ID NO: 21105 - protein, 12 aa, Artificial Sequence
  Synthetic construct
QSVLYSSNNKNY

SEQ ID NO: 21106 - protein, 6 aa, Artificial Sequence
  Synthetic construct
QSVRNY

SEQ ID NO: 21107 - protein, 6 aa, Artificial Sequence
  Synthetic construct
QSIGVY

SEQ ID NO: 21108 - protein, 9 aa, Artificial Sequence
  Synthetic construct
SSDVGGYNY

SEQ ID NO: 21109 - protein, 9 aa, Artificial Sequence
  Synthetic construct
SSDVGTYNR

SEQ ID NO: 21110 - protein, 12 aa, Artificial Sequence
  Synthetic construct
QSVLYSSNNKNY

SEQ ID NO: 21111 - protein, 9 aa, Artificial Sequence
  Synthetic construct
SNDVGNYNY

SEQ ID NO: 21112 - protein, 6 aa, Artificial Sequence
  Synthetic construct
QSVSSN

SEQ ID NO: 21113 - protein, 7 aa, Artificial Sequence
  Synthetic construct
QSVSSNY

SEQ ID NO: 21114 - protein, 12 aa, Artificial Sequence
  Synthetic construct
QSLFHDSMKRDA

SEQ ID NO: 21115 - protein, 11 aa, Artificial Sequence
  Synthetic construct
QSLLHSEGKTF

SEQ ID NO: 21116 - protein, 7 aa, Artificial Sequence
  Synthetic construct
QSVSSSY

SEQ ID NO: 21117 - protein, 6 aa, Artificial Sequence
  Synthetic construct
QGIGNY

SEQ ID NO: 21118 - protein, 6 aa, Artificial Sequence
  Synthetic construct
QSINND

SEQ ID NO: 21119 - protein, 6 aa, Artificial Sequence
  Synthetic construct
QGISSY

SEQ ID NO: 21120 - protein, 6 aa, Artificial Sequence
  Synthetic construct
QSVSSY

SEQ ID NO: 21121 - protein, 6 aa, Artificial Sequence
  Synthetic construct
QGISSY

SEQ ID NO: 21122 - protein, 9 aa, Artificial Sequence
  Synthetic construct
SGDVGGYNY

SEQ ID NO: 21123 - protein, 6 aa, Artificial Sequence
  Synthetic construct
QNVTKY

SEQ ID NO: 21124 - protein, 8 aa, Artificial Sequence
  Synthetic construct
SSNIGSNV

SEQ ID NO: 21125 - protein, 12 aa, Artificial Sequence
  Synthetic construct
QSVLYSSNNKNH

SEQ ID NO: 21126 - protein, 7 aa, Artificial Sequence
  Synthetic construct
QSVSSTY

SEQ ID NO: 21127 - protein, 6 aa, Artificial Sequence
  Synthetic construct
QSVSSN

SEQ ID NO: 21128 - protein, 11 aa, Artificial Sequence
  Synthetic construct
QSLLHSNGHTY

SEQ ID NO: 21129 - protein, 7 aa, Artificial Sequence
  Synthetic construct
SGHSSYA

SEQ ID NO: 21130 - protein, 12 aa, Artificial Sequence
  Synthetic construct
QSVLYSSNNKNH

SEQ ID NO: 21131 - protein, 7 aa, Artificial Sequence
  Synthetic construct
QSVSSSY

SEQ ID NO: 21132 - protein, 7 aa, Artificial Sequence
  Synthetic construct
QSVSSSY

SEQ ID NO: 21133 - protein, 11 aa, Artificial Sequence
  Synthetic construct
QSLVHTDGNTY

SEQ ID NO: 21134 - protein, 6 aa, Artificial Sequence
  Synthetic construct
QSIANY

SEQ ID NO: 21135 - protein, 6 aa, Artificial Sequence
  Synthetic construct
QGFSTY

SEQ ID NO: 21136 - protein, 6 aa, Artificial Sequence
  Synthetic construct
QSVSSN

SEQ ID NO: 21137 - protein, 6 aa, Artificial Sequence
  Synthetic construct
QSISSY

SEQ ID NO: 21138 - protein, 9 aa, Artificial Sequence
  Synthetic construct
SSDFGSYKS

SEQ ID NO: 21139 - protein, 6 aa, Artificial Sequence
  Synthetic construct
QSVSSN

SEQ ID NO: 21140 - protein, 7 aa, Artificial Sequence
  Synthetic construct
QSLSSSY

SEQ ID NO: 21141 - protein, 6 aa, Artificial Sequence
  Synthetic construct
RSITSY

SEQ ID NO: 21142 - protein, 9 aa, Artificial Sequence
  Synthetic construct
SSNIGAGYD

SEQ ID NO: 21143 - protein, 6 aa, Artificial Sequence
  Synthetic construct
NLRSYY

SEQ ID NO: 21144 - protein, 6 aa, Artificial Sequence
  Synthetic construct
QSVSSN

SEQ ID NO: 21145 - protein, 6 aa, Artificial Sequence
  Synthetic construct
QGISSY

SEQ ID NO: 21146 - protein, 7 aa, Artificial Sequence
  Synthetic construct
QSVSSNF

SEQ ID NO: 21147 - protein, 6 aa, Artificial Sequence
  Synthetic construct
QSINSW

SEQ ID NO: 21148 - protein, 11 aa, Artificial Sequence
  Synthetic construct
QSLVHSDGNSY

SEQ ID NO: 21149 - protein, 7 aa, Artificial Sequence
  Synthetic construct
QSVSSSY

SEQ ID NO: 21150 - protein, 6 aa, Artificial Sequence
  Synthetic construct
QGISSY

SEQ ID NO: 21151 - protein, 6 aa, Artificial Sequence
  Synthetic construct
QGFSTY

SEQ ID NO: 21152 - protein, 11 aa, Artificial Sequence
  Synthetic construct
QGVVHTDGNTY

SEQ ID NO: 21153 - protein, 8 aa, Artificial Sequence
  Synthetic construct
SSNIGSYY

SEQ ID NO: 21154 - protein, 7 aa, Artificial Sequence
  Synthetic construct
QSVSSSF

SEQ ID NO: 21155 - protein, 9 aa, Artificial Sequence
  Synthetic construct
SSDVGTYNL

SEQ ID NO: 21156 - protein, 6 aa, Artificial Sequence
  Synthetic construct
QGISNY

SEQ ID NO: 21157 - protein, 6 aa, Artificial Sequence
  Synthetic construct
QSISSW

SEQ ID NO: 21158 - protein, 6 aa, Artificial Sequence
  Synthetic construct
QDIGDE

SEQ ID NO: 21159 - protein, 7 aa, Artificial Sequence
  Synthetic construct
QSVSSSY

SEQ ID NO: 21160 - protein, 6 aa, Artificial Sequence
  Synthetic construct
QGISTY

SEQ ID NO: 21161 - protein, 9 aa, Artificial Sequence
  Synthetic construct
SGDVGSYTL

SEQ ID NO: 21162 - protein, 6 aa, Artificial Sequence
  Synthetic construct
QTITTF

SEQ ID NO: 21163 - protein, 11 aa, Artificial Sequence
  Synthetic construct
EGLIHSDGSIY

SEQ ID NO: 21164 - protein, 6 aa, Artificial Sequence
  Synthetic construct
QGISSY

SEQ ID NO: 21165 - protein, 5 aa, Artificial Sequence
  Synthetic construct
QSVSR

SEQ ID NO: 21166 - protein, 6 aa, Artificial Sequence
  Synthetic construct
NIGGKS

SEQ ID NO: 21167 - protein, 6 aa, Artificial Sequence
  Synthetic construct
QSVSKY

SEQ ID NO: 21168 - protein, 7 aa, Artificial Sequence
  Synthetic construct
QSVSSSY

SEQ ID NO: 21169 - protein, 6 aa, Artificial Sequence
  Synthetic construct
QRISGW

SEQ ID NO: 21170 - protein, 6 aa, Artificial Sequence
  Synthetic construct
QSVGRN

SEQ ID NO: 21171 - protein, 6 aa, Artificial Sequence
  Synthetic construct
QGISNW

SEQ ID NO: 21172 - protein, 7 aa, Artificial Sequence
  Synthetic construct
QSVSSSY

SEQ ID NO: 21173 - protein, 6 aa, Artificial Sequence
  Synthetic construct
QSIRTN

SEQ ID NO: 21174 - protein, 6 aa, Artificial Sequence
  Synthetic construct
QAISSA

SEQ ID NO: 21175 - protein, 6 aa, Artificial Sequence
  Synthetic construct
KLGDKY

SEQ ID NO: 21176 - protein, 6 aa, Artificial Sequence
  Synthetic construct
QSISTY

SEQ ID NO: 21177 - protein, 6 aa, Artificial Sequence
  Synthetic construct
QTIRSY

SEQ ID NO: 21178 - protein, 8 aa, Artificial Sequence
  Synthetic construct
SSNIGTNF

SEQ ID NO: 21179 - protein, 6 aa, Artificial Sequence
  Synthetic construct
QSVGNN

SEQ ID NO: 21180 - protein, 6 aa, Artificial Sequence
  Synthetic construct
QDIRNY

SEQ ID NO: 21181 - protein, 8 aa, Artificial Sequence
  Synthetic construct
SSNIGTNY

SEQ ID NO: 21182 - protein, 7 aa, Artificial Sequence
  Synthetic construct
QGVSGKY

SEQ ID NO: 21183 - protein, 12 aa, Artificial Sequence
  Synthetic construct
QSVLYTSNNKNY

SEQ ID NO: 21184 - protein, 6 aa, Artificial Sequence
  Synthetic construct
QSVSSY

SEQ ID NO: 21185 - protein, 6 aa, Artificial Sequence
  Synthetic construct
QGISSW

SEQ ID NO: 21186 - protein, 9 aa, Artificial Sequence
  Synthetic construct
SSNIGAGYD

SEQ ID NO: 21187 - protein, 6 aa, Artificial Sequence
  Synthetic construct
QSISSW

SEQ ID NO: 21188 - protein, 6 aa, Artificial Sequence
  Synthetic construct
QGIRDD

SEQ ID NO: 21189 - protein, 8 aa, Artificial Sequence
  Synthetic construct
YSNIGTNY

SEQ ID NO: 21190 - protein, 6 aa, Artificial Sequence
  Synthetic construct
QSISSY

SEQ ID NO: 21191 - protein, 3 aa, Artificial Sequence
  Synthetic construct
AAS

SEQ ID NO: 21192 - protein, 3 aa, Artificial Sequence
  Synthetic construct
GAS

SEQ ID NO: 21193 - protein, 3 aa, Artificial Sequence
  Synthetic construct
EVN

SEQ ID NO: 21194 - protein, 3 aa, Artificial Sequence
  Synthetic construct
TLS

SEQ ID NO: 21195 - protein, 3 aa, Artificial Sequence
  Synthetic construct
QDS

SEQ ID NO: 21196 - protein, 3 aa, Artificial Sequence
  Synthetic construct
AAS

SEQ ID NO: 21197 - protein, 3 aa, Artificial Sequence
  Synthetic construct
KDT

SEQ ID NO: 21198 - protein, 3 aa, Artificial Sequence
  Synthetic construct
DAS

SEQ ID NO: 21199 - protein, 3 aa, Artificial Sequence
  Synthetic construct
DNN

SEQ ID NO: 21200 - protein, 3 aa, Artificial Sequence
  Synthetic construct
AAS

SEQ ID NO: 21201 - protein, 3 aa, Artificial Sequence
  Synthetic construct
DNN

SEQ ID NO: 21202 - protein, 3 aa, Artificial Sequence
  Synthetic construct
DNY

SEQ ID NO: 21203 - protein, 3 aa, Artificial Sequence
  Synthetic construct
YDR

SEQ ID NO: 21204 - protein, 3 aa, Artificial Sequence
  Synthetic construct
DVS

SEQ ID NO: 21205 - protein, 3 aa, Artificial Sequence
  Synthetic construct
DNN

SEQ ID NO: 21206 - protein, 3 aa, Artificial Sequence
  Synthetic construct
GGS

SEQ ID NO: 21207 - protein, 3 aa, Artificial Sequence
  Synthetic construct
LGS

SEQ ID NO: 21208 - protein, 3 aa, Artificial Sequence
  Synthetic construct
GAS

SEQ ID NO: 21209 - protein, 3 aa, Artificial Sequence
  Synthetic construct
GAS

SEQ ID NO: 21210 - protein, 3 aa, Artificial Sequence
  Synthetic construct
EDN

SEQ ID NO: 21211 - protein, 3 aa, Artificial Sequence
  Synthetic construct
ATS

SEQ ID NO: 21212 - protein, 3 aa, Artificial Sequence
  Synthetic construct
WAS

SEQ ID NO: 21213 - protein, 3 aa, Artificial Sequence
  Synthetic construct
EGS

SEQ ID NO: 21214 - protein, 3 aa, Artificial Sequence
  Synthetic construct
DAS

SEQ ID NO: 21215 - protein, 3 aa, Artificial Sequence
  Synthetic construct
GNK

SEQ ID NO: 21216 - protein, 3 aa, Artificial Sequence
  Synthetic construct
AAS

SEQ ID NO: 21217 - protein, 3 aa, Artificial Sequence
  Synthetic construct
AAS

SEQ ID NO: 21218 - protein, 3 aa, Artificial Sequence
  Synthetic construct
QDS

SEQ ID NO: 21219 - protein, 3 aa, Artificial Sequence
  Synthetic construct
AAS

SEQ ID NO: 21220 - protein, 3 aa, Artificial Sequence
  Synthetic construct
DVS

SEQ ID NO: 21221 - protein, 3 aa, Artificial Sequence
  Synthetic construct
WAS

SEQ ID NO: 21222 - protein, 3 aa, Artificial Sequence
  Synthetic construct
TTS

SEQ ID NO: 21223 - protein, 3 aa, Artificial Sequence
  Synthetic construct
GAS

SEQ ID NO: 21224 - protein, 3 aa, Artificial Sequence
  Synthetic construct
GTS

SEQ ID NO: 21225 - protein, 3 aa, Artificial Sequence
  Synthetic construct
GAS

SEQ ID NO: 21226 - protein, 3 aa, Artificial Sequence
  Synthetic construct
KAS

SEQ ID NO: 21227 - protein, 3 aa, Artificial Sequence
  Synthetic construct
KAS

SEQ ID NO: 21228 - protein, 3 aa, Artificial Sequence
  Synthetic construct
RNN

SEQ ID NO: 21229 - protein, 3 aa, Artificial Sequence
  Synthetic construct
DNV

SEQ ID NO: 21230 - protein, 3 aa, Artificial Sequence
  Synthetic construct
GAS

SEQ ID NO: 21231 - protein, 3 aa, Artificial Sequence
  Synthetic construct
AAS

SEQ ID NO: 21232 - protein, 3 aa, Artificial Sequence
  Synthetic construct
KAS

SEQ ID NO: 21233 - protein, 3 aa, Artificial Sequence
  Synthetic construct
GAF

SEQ ID NO: 21234 - protein, 3 aa, Artificial Sequence
  Synthetic construct
LGS

SEQ ID NO: 21235 - protein, 3 aa, Artificial Sequence
  Synthetic construct
AAS

SEQ ID NO: 21236 - protein, 3 aa, Artificial Sequence
  Synthetic construct
AAS

SEQ ID NO: 21237 - protein, 3 aa, Artificial Sequence
  Synthetic construct
QAS

SEQ ID NO: 21238 - protein, 3 aa, Artificial Sequence
  Synthetic construct
AAS

SEQ ID NO: 21239 - protein, 3 aa, Artificial Sequence
  Synthetic construct
DAS

SEQ ID NO: 21240 - protein, 3 aa, Artificial Sequence
  Synthetic construct
AAS

SEQ ID NO: 21241 - protein, 3 aa, Artificial Sequence
  Synthetic construct
KAS

SEQ ID NO: 21242 - protein, 3 aa, Artificial Sequence
  Synthetic construct
GAS

SEQ ID NO: 21243 - protein, 3 aa, Artificial Sequence
  Synthetic construct
ATS

SEQ ID NO: 21244 - protein, 3 aa, Artificial Sequence
  Synthetic construct
WAS

SEQ ID NO: 21245 - protein, 3 aa, Artificial Sequence
  Synthetic construct
AAS

SEQ ID NO: 21246 - protein, 3 aa, Artificial Sequence
  Synthetic construct
DAS

SEQ ID NO: 21247 - protein, 3 aa, Artificial Sequence
  Synthetic construct
EVN

SEQ ID NO: 21248 - protein, 3 aa, Artificial Sequence
  Synthetic construct
EVS

SEQ ID NO: 21249 - protein, 3 aa, Artificial Sequence
  Synthetic construct
AAS

SEQ ID NO: 21250 - protein, 3 aa, Artificial Sequence
  Synthetic construct
QNN

SEQ ID NO: 21251 - protein, 3 aa, Artificial Sequence
  Synthetic construct
DNN

SEQ ID NO: 21252 - protein, 3 aa, Artificial Sequence
  Synthetic construct
AAS

SEQ ID NO: 21253 - protein, 3 aa, Artificial Sequence
  Synthetic construct
AAS

SEQ ID NO: 21254 - protein, 7 aa, Artificial Sequence
  Synthetic construct
LYSDGSH

SEQ ID NO: 21255 - protein, 3 aa, Artificial Sequence
  Synthetic construct
AAS

SEQ ID NO: 21256 - protein, 3 aa, Artificial Sequence
  Synthetic construct
GNS

SEQ ID NO: 21257 - protein, 3 aa, Artificial Sequence
  Synthetic construct
LGS

SEQ ID NO: 21258 - protein, 3 aa, Artificial Sequence
  Synthetic construct
NTN

SEQ ID NO: 21259 - protein, 3 aa, Artificial Sequence
  Synthetic construct
AAS

SEQ ID NO: 21260 - protein, 7 aa, Artificial Sequence
  Synthetic construct
VNTDGSH

SEQ ID NO: 21261 - protein, 3 aa, Artificial Sequence
  Synthetic construct
KVF

SEQ ID NO: 21262 - protein, 3 aa, Artificial Sequence
  Synthetic construct
NND

SEQ ID NO: 21263 - protein, 3 aa, Artificial Sequence
  Synthetic construct
AAS

SEQ ID NO: 21264 - protein, 3 aa, Artificial Sequence
  Synthetic construct
DNN

SEQ ID NO: 21265 - protein, 3 aa, Artificial Sequence
  Synthetic construct
GVN

SEQ ID NO: 21266 - protein, 3 aa, Artificial Sequence
  Synthetic construct
DNN

SEQ ID NO: 21267 - protein, 3 aa, Artificial Sequence
  Synthetic construct
AAS

SEQ ID NO: 21268 - protein, 3 aa, Artificial Sequence
  Synthetic construct
KVS

SEQ ID NO: 21269 - protein, 3 aa, Artificial Sequence
  Synthetic construct
DAS

SEQ ID NO: 21270 - protein, 3 aa, Artificial Sequence
  Synthetic construct
GVS

SEQ ID NO: 21271 - protein, 3 aa, Artificial Sequence
  Synthetic construct
NTN

SEQ ID NO: 21272 - protein, 3 aa, Artificial Sequence
  Synthetic construct
EGT

SEQ ID NO: 21273 - protein, 3 aa, Artificial Sequence
  Synthetic construct
RND

SEQ ID NO: 21274 - protein, 3 aa, Artificial Sequence
  Synthetic construct
GAS

SEQ ID NO: 21275 - protein, 7 aa, Artificial Sequence
  Synthetic construct
YKSDSDK

SEQ ID NO: 21276 - protein, 3 aa, Artificial Sequence
  Synthetic construct
AAS

SEQ ID NO: 21277 - protein, 3 aa, Artificial Sequence
  Synthetic construct
GAS

SEQ ID NO: 21278 - protein, 3 aa, Artificial Sequence
  Synthetic construct
AAS

SEQ ID NO: 21279 - protein, 3 aa, Artificial Sequence
  Synthetic construct
DAS

SEQ ID NO: 21280 - protein, 3 aa, Artificial Sequence
  Synthetic construct
GNS

SEQ ID NO: 21281 - protein, 3 aa, Artificial Sequence
  Synthetic construct
KDR

SEQ ID NO: 21282 - protein, 3 aa, Artificial Sequence
  Synthetic construct
AAS

SEQ ID NO: 21283 - protein, 3 aa, Artificial Sequence
  Synthetic construct
AAS

SEQ ID NO: 21284 - protein, 3 aa, Artificial Sequence
  Synthetic construct
KDT

SEQ ID NO: 21285 - protein, 3 aa, Artificial Sequence
  Synthetic construct
NNN

SEQ ID NO: 21286 - protein, 3 aa, Artificial Sequence
  Synthetic construct
DAS

SEQ ID NO: 21287 - protein, 3 aa, Artificial Sequence
  Synthetic construct
AAS

SEQ ID NO: 21288 - protein, 3 aa, Artificial Sequence
  Synthetic construct
GKN

SEQ ID NO: 21289 - protein, 3 aa, Artificial Sequence
  Synthetic construct
DVN

SEQ ID NO: 21290 - protein, 3 aa, Artificial Sequence
  Synthetic construct
DNN

SEQ ID NO: 21291 - protein, 3 aa, Artificial Sequence
  Synthetic construct
GAS

SEQ ID NO: 21292 - protein, 3 aa, Artificial Sequence
  Synthetic construct
ANN

SEQ ID NO: 21293 - protein, 7 aa, Artificial Sequence
  Synthetic construct
LNSDGSH

SEQ ID NO: 21294 - protein, 3 aa, Artificial Sequence
  Synthetic construct
GAS

SEQ ID NO: 21295 - protein, 3 aa, Artificial Sequence
  Synthetic construct
KDS

SEQ ID NO: 21296 - protein, 7 aa, Artificial Sequence
  Synthetic construct
VNTDGSH

SEQ ID NO: 21297 - protein, 3 aa, Artificial Sequence
  Synthetic construct
DVS

SEQ ID NO: 21298 - protein, 3 aa, Artificial Sequence
  Synthetic construct
DVS

SEQ ID NO: 21299 - protein, 3 aa, Artificial Sequence
  Synthetic construct
DAS

SEQ ID NO: 21300 - protein, 3 aa, Artificial Sequence
  Synthetic construct
EVS

SEQ ID NO: 21301 - protein, 3 aa, Artificial Sequence
  Synthetic construct
AAS

SEQ ID NO: 21302 - protein, 3 aa, Artificial Sequence
  Synthetic construct
AAS

SEQ ID NO: 21303 - protein, 3 aa, Artificial Sequence
  Synthetic construct
AAS

SEQ ID NO: 21304 - protein, 3 aa, Artificial Sequence
  Synthetic construct
DVS

SEQ ID NO: 21305 - protein, 3 aa, Artificial Sequence
  Synthetic construct
WAS

SEQ ID NO: 21306 - protein, 3 aa, Artificial Sequence
  Synthetic construct
DVS

SEQ ID NO: 21307 - protein, 3 aa, Artificial Sequence
  Synthetic construct
NRK

SEQ ID NO: 21308 - protein, 3 aa, Artificial Sequence
  Synthetic construct
KVF

SEQ ID NO: 21309 - protein, 3 aa, Artificial Sequence
  Synthetic construct
EVS

SEQ ID NO: 21310 - protein, 3 aa, Artificial Sequence
  Synthetic construct
EVS

SEQ ID NO: 21311 - protein, 3 aa, Artificial Sequence
  Synthetic construct
KAS

SEQ ID NO: 21312 - protein, 3 aa, Artificial Sequence
  Synthetic construct
GNK

SEQ ID NO: 21313 - protein, 3 aa, Artificial Sequence
  Synthetic construct
KAS

SEQ ID NO: 21314 - protein, 3 aa, Artificial Sequence
  Synthetic construct
EAS

SEQ ID NO: 21315 - protein, 3 aa, Artificial Sequence
  Synthetic construct
WAS

SEQ ID NO: 21316 - protein, 3 aa, Artificial Sequence
  Synthetic construct
DSS

SEQ ID NO: 21317 - protein, 3 aa, Artificial Sequence
  Synthetic construct
KAS

SEQ ID NO: 21318 - protein, 3 aa, Artificial Sequence
  Synthetic construct
GAS

SEQ ID NO: 21319 - protein, 3 aa, Artificial Sequence
  Synthetic construct
KVS

SEQ ID NO: 21320 - protein, 3 aa, Artificial Sequence
  Synthetic construct
SAS

SEQ ID NO: 21321 - protein, 7 aa, Artificial Sequence
  Synthetic construct
YKSDSDK

SEQ ID NO: 21322 - protein, 3 aa, Artificial Sequence
  Synthetic construct
AAS

SEQ ID NO: 21323 - protein, 3 aa, Artificial Sequence
  Synthetic construct
EVS

SEQ ID NO: 21324 - protein, 3 aa, Artificial Sequence
  Synthetic construct
GAS

SEQ ID NO: 21325 - protein, 3 aa, Artificial Sequence
  Synthetic construct
GAS

SEQ ID NO: 21326 - protein, 3 aa, Artificial Sequence
  Synthetic construct
KAS

SEQ ID NO: 21327 - protein, 3 aa, Artificial Sequence
  Synthetic construct
WAS

SEQ ID NO: 21328 - protein, 3 aa, Artificial Sequence
  Synthetic construct
AAS

SEQ ID NO: 21329 - protein, 3 aa, Artificial Sequence
  Synthetic construct
GAS

SEQ ID NO: 21330 - protein, 3 aa, Artificial Sequence
  Synthetic construct
KAS

SEQ ID NO: 21331 - protein, 3 aa, Artificial Sequence
  Synthetic construct
DTS

SEQ ID NO: 21332 - protein, 3 aa, Artificial Sequence
  Synthetic construct
KAS

SEQ ID NO: 21333 - protein, 3 aa, Artificial Sequence
  Synthetic construct
ATS

SEQ ID NO: 21334 - protein, 3 aa, Artificial Sequence
  Synthetic construct
EAS

SEQ ID NO: 21335 - protein, 3 aa, Artificial Sequence
  Synthetic construct
DDN

SEQ ID NO: 21336 - protein, 3 aa, Artificial Sequence
  Synthetic construct
KAS

SEQ ID NO: 21337 - protein, 3 aa, Artificial Sequence
  Synthetic construct
ATS

SEQ ID NO: 21338 - protein, 3 aa, Artificial Sequence
  Synthetic construct
DNN

SEQ ID NO: 21339 - protein, 3 aa, Artificial Sequence
  Synthetic construct
TLS

SEQ ID NO: 21340 - protein, 3 aa, Artificial Sequence
  Synthetic construct
EDS

SEQ ID NO: 21341 - protein, 3 aa, Artificial Sequence
  Synthetic construct
DNN

SEQ ID NO: 21342 - protein, 3 aa, Artificial Sequence
  Synthetic construct
HDS

SEQ ID NO: 21343 - protein, 3 aa, Artificial Sequence
  Synthetic construct
DAS

SEQ ID NO: 21344 - protein, 3 aa, Artificial Sequence
  Synthetic construct
AAS

SEQ ID NO: 21345 - protein, 3 aa, Artificial Sequence
  Synthetic construct
DVT

SEQ ID NO: 21346 - protein, 3 aa, Artificial Sequence
  Synthetic construct
RNN

SEQ ID NO: 21347 - protein, 3 aa, Artificial Sequence
  Synthetic construct
KVS

SEQ ID NO: 21348 - protein, 3 aa, Artificial Sequence
  Synthetic construct
WGS

SEQ ID NO: 21349 - protein, 3 aa, Artificial Sequence
  Synthetic construct
VRS

SEQ ID NO: 21350 - protein, 3 aa, Artificial Sequence
  Synthetic construct
DAS

SEQ ID NO: 21351 - protein, 3 aa, Artificial Sequence
  Synthetic construct
DVS

SEQ ID NO: 21352 - protein, 3 aa, Artificial Sequence
  Synthetic construct
RNT

SEQ ID NO: 21353 - protein, 3 aa, Artificial Sequence
  Synthetic construct
LGS

SEQ ID NO: 21354 - protein, 3 aa, Artificial Sequence
  Synthetic construct
AAS

SEQ ID NO: 21355 - protein, 3 aa, Artificial Sequence
  Synthetic construct
AAS

SEQ ID NO: 21356 - protein, 3 aa, Artificial Sequence
  Synthetic construct
AAS

SEQ ID NO: 21357 - protein, 3 aa, Artificial Sequence
  Synthetic construct
AAS

SEQ ID NO: 21358 - protein, 3 aa, Artificial Sequence
  Synthetic construct
QDS

SEQ ID NO: 21359 - protein, 3 aa, Artificial Sequence
  Synthetic construct
DVT

SEQ ID NO: 21360 - protein, 3 aa, Artificial Sequence
  Synthetic construct
GAS

SEQ ID NO: 21361 - protein, 3 aa, Artificial Sequence
  Synthetic construct
AAS

SEQ ID NO: 21362 - protein, 3 aa, Artificial Sequence
  Synthetic construct
DNN

SEQ ID NO: 21363 - protein, 3 aa, Artificial Sequence
  Synthetic construct
AAS

SEQ ID NO: 21364 - protein, 3 aa, Artificial Sequence
  Synthetic construct
KAS

SEQ ID NO: 21365 - protein, 3 aa, Artificial Sequence
  Synthetic construct
AAS

SEQ ID NO: 21366 - protein, 3 aa, Artificial Sequence
  Synthetic construct
EGT

SEQ ID NO: 21367 - protein, 3 aa, Artificial Sequence
  Synthetic construct
GAS

SEQ ID NO: 21368 - protein, 3 aa, Artificial Sequence
  Synthetic construct
LGS

SEQ ID NO: 21369 - protein, 3 aa, Artificial Sequence
  Synthetic construct
YAS

SEQ ID NO: 21370 - protein, 3 aa, Artificial Sequence
  Synthetic construct
VAS

SEQ ID NO: 21371 - protein, 3 aa, Artificial Sequence
  Synthetic construct
EVN

SEQ ID NO: 21372 - protein, 3 aa, Artificial Sequence
  Synthetic construct
KSS

SEQ ID NO: 21373 - protein, 3 aa, Artificial Sequence
  Synthetic construct
EDD

SEQ ID NO: 21374 - protein, 3 aa, Artificial Sequence
  Synthetic construct
TAS

SEQ ID NO: 21375 - protein, 3 aa, Artificial Sequence
  Synthetic construct
AAS

SEQ ID NO: 21376 - protein, 3 aa, Artificial Sequence
  Synthetic construct
DNN

SEQ ID NO: 21377 - protein, 3 aa, Artificial Sequence
  Synthetic construct
AAS

SEQ ID NO: 21378 - protein, 3 aa, Artificial Sequence
  Synthetic construct
GVN

SEQ ID NO: 21379 - protein, 3 aa, Artificial Sequence
  Synthetic construct
GTS

SEQ ID NO: 21380 - protein, 3 aa, Artificial Sequence
  Synthetic construct
AAS

SEQ ID NO: 21381 - protein, 3 aa, Artificial Sequence
  Synthetic construct
EVS

SEQ ID NO: 21382 - protein, 3 aa, Artificial Sequence
  Synthetic construct
EDS

SEQ ID NO: 21383 - protein, 3 aa, Artificial Sequence
  Synthetic construct
EGS

SEQ ID NO: 21384 - protein, 3 aa, Artificial Sequence
  Synthetic construct
GAS

SEQ ID NO: 21385 - protein, 3 aa, Artificial Sequence
  Synthetic construct
DVT

SEQ ID NO: 21386 - protein, 3 aa, Artificial Sequence
  Synthetic construct
TIS

SEQ ID NO: 21387 - protein, 3 aa, Artificial Sequence
  Synthetic construct
DDN

SEQ ID NO: 21388 - protein, 3 aa, Artificial Sequence
  Synthetic construct
GDD

SEQ ID NO: 21389 - protein, 3 aa, Artificial Sequence
  Synthetic construct
WAS

SEQ ID NO: 21390 - protein, 3 aa, Artificial Sequence
  Synthetic construct
DVN

SEQ ID NO: 21391 - protein, 3 aa, Artificial Sequence
  Synthetic construct
KAS

SEQ ID NO: 21392 - protein, 3 aa, Artificial Sequence
  Synthetic construct
WAS

SEQ ID NO: 21393 - protein, 3 aa, Artificial Sequence
  Synthetic construct
DAS

SEQ ID NO: 21394 - protein, 3 aa, Artificial Sequence
  Synthetic construct
YDG

SEQ ID NO: 21395 - protein, 3 aa, Artificial Sequence
  Synthetic construct
KAS

SEQ ID NO: 21396 - protein, 3 aa, Artificial Sequence
  Synthetic construct
AAS

SEQ ID NO: 21397 - protein, 3 aa, Artificial Sequence
  Synthetic construct
LGS

SEQ ID NO: 21398 - protein, 3 aa, Artificial Sequence
  Synthetic construct
AAS

SEQ ID NO: 21399 - protein, 3 aa, Artificial Sequence
  Synthetic construct
DVS

SEQ ID NO: 21400 - protein, 3 aa, Artificial Sequence
  Synthetic construct
KDT

SEQ ID NO: 21401 - protein, 3 aa, Artificial Sequence
  Synthetic construct
LAS

SEQ ID NO: 21402 - protein, 3 aa, Artificial Sequence
  Synthetic construct
WAS

SEQ ID NO: 21403 - protein, 3 aa, Artificial Sequence
  Synthetic construct
WAS

SEQ ID NO: 21404 - protein, 3 aa, Artificial Sequence
  Synthetic construct
RNN

SEQ ID NO: 21405 - protein, 3 aa, Artificial Sequence
  Synthetic construct
DNN

SEQ ID NO: 21406 - protein, 3 aa, Artificial Sequence
  Synthetic construct
EGS

SEQ ID NO: 21407 - protein, 3 aa, Artificial Sequence
  Synthetic construct
DVS

SEQ ID NO: 21408 - protein, 3 aa, Artificial Sequence
  Synthetic construct
KAS

SEQ ID NO: 21409 - protein, 3 aa, Artificial Sequence
  Synthetic construct
KDT

SEQ ID NO: 21410 - protein, 3 aa, Artificial Sequence
  Synthetic construct
RNN

SEQ ID NO: 21411 - protein, 3 aa, Artificial Sequence
  Synthetic construct
GDN

SEQ ID NO: 21412 - protein, 3 aa, Artificial Sequence
  Synthetic construct
WAS

SEQ ID NO: 21413 - protein, 3 aa, Artificial Sequence
  Synthetic construct
WAS

SEQ ID NO: 21414 - protein, 3 aa, Artificial Sequence
  Synthetic construct
GAS

SEQ ID NO: 21415 - protein, 3 aa, Artificial Sequence
  Synthetic construct
ATS

SEQ ID NO: 21416 - protein, 3 aa, Artificial Sequence
  Synthetic construct
EVS

SEQ ID NO: 21417 - protein, 3 aa, Artificial Sequence
  Synthetic construct
GDT

SEQ ID NO: 21418 - protein, 3 aa, Artificial Sequence
  Synthetic construct
SNN

SEQ ID NO: 21419 - protein, 3 aa, Artificial Sequence
  Synthetic construct
WAS

SEQ ID NO: 21420 - protein, 3 aa, Artificial Sequence
  Synthetic construct
AAS

SEQ ID NO: 21421 - protein, 3 aa, Artificial Sequence
  Synthetic construct
SNN

SEQ ID NO: 21422 - protein, 3 aa, Artificial Sequence
  Synthetic construct
AES

SEQ ID NO: 21423 - protein, 3 aa, Artificial Sequence
  Synthetic construct
GAS

SEQ ID NO: 21424 - protein, 3 aa, Artificial Sequence
  Synthetic construct
DAS

SEQ ID NO: 21425 - protein, 3 aa, Artificial Sequence
  Synthetic construct
DAS

SEQ ID NO: 21426 - protein, 3 aa, Artificial Sequence
  Synthetic construct
TNN

SEQ ID NO: 21427 - protein, 3 aa, Artificial Sequence
  Synthetic construct
DVS

SEQ ID NO: 21428 - protein, 3 aa, Artificial Sequence
  Synthetic construct
DNN

SEQ ID NO: 21429 - protein, 3 aa, Artificial Sequence
  Synthetic construct
KVS

SEQ ID NO: 21430 - protein, 3 aa, Artificial Sequence
  Synthetic construct
KAS

SEQ ID NO: 21431 - protein, 3 aa, Artificial Sequence
  Synthetic construct
LGS

SEQ ID NO: 21432 - protein, 3 aa, Artificial Sequence
  Synthetic construct
DAS

SEQ ID NO: 21433 - protein, 3 aa, Artificial Sequence
  Synthetic construct
SNN

SEQ ID NO: 21434 - protein, 3 aa, Artificial Sequence
  Synthetic construct
RNN

SEQ ID NO: 21435 - protein, 3 aa, Artificial Sequence
  Synthetic construct
RNN

SEQ ID NO: 21436 - protein, 3 aa, Artificial Sequence
  Synthetic construct
GAT

SEQ ID NO: 21437 - protein, 3 aa, Artificial Sequence
  Synthetic construct
GDT

SEQ ID NO: 21438 - protein, 3 aa, Artificial Sequence
  Synthetic construct
KDS

SEQ ID NO: 21439 - protein, 3 aa, Artificial Sequence
  Synthetic construct
WAS

SEQ ID NO: 21440 - protein, 3 aa, Artificial Sequence
  Synthetic construct
KAS

SEQ ID NO: 21441 - protein, 3 aa, Artificial Sequence
  Synthetic construct
LGS

SEQ ID NO: 21442 - protein, 3 aa, Artificial Sequence
  Synthetic construct
EVS

SEQ ID NO: 21443 - protein, 3 aa, Artificial Sequence
  Synthetic construct
SNH

SEQ ID NO: 21444 - protein, 3 aa, Artificial Sequence
  Synthetic construct
GAS

SEQ ID NO: 21445 - protein, 3 aa, Artificial Sequence
  Synthetic construct
AAS

SEQ ID NO: 21446 - protein, 3 aa, Artificial Sequence
  Synthetic construct
AAS

SEQ ID NO: 21447 - protein, 3 aa, Artificial Sequence
  Synthetic construct
AAS

SEQ ID NO: 21448 - protein, 3 aa, Artificial Sequence
  Synthetic construct
SNN

SEQ ID NO: 21449 - protein, 3 aa, Artificial Sequence
  Synthetic construct
GAS

SEQ ID NO: 21450 - protein, 3 aa, Artificial Sequence
  Synthetic construct
EDN

SEQ ID NO: 21451 - protein, 3 aa, Artificial Sequence
  Synthetic construct
GAS

SEQ ID NO: 21452 - protein, 3 aa, Artificial Sequence
  Synthetic construct
KDT

SEQ ID NO: 21453 - protein, 3 aa, Artificial Sequence
  Synthetic construct
GKN

SEQ ID NO: 21454 - protein, 3 aa, Artificial Sequence
  Synthetic construct
SVS

SEQ ID NO: 21455 - protein, 3 aa, Artificial Sequence
  Synthetic construct
DNN

SEQ ID NO: 21456 - protein, 7 aa, Artificial Sequence
  Synthetic construct
LNSDGSH

SEQ ID NO: 21457 - protein, 3 aa, Artificial Sequence
  Synthetic construct
DEN

SEQ ID NO: 21458 - protein, 3 aa, Artificial Sequence
  Synthetic construct
DAS

SEQ ID NO: 21459 - protein, 3 aa, Artificial Sequence
  Synthetic construct
KTS

SEQ ID NO: 21460 - protein, 3 aa, Artificial Sequence
  Synthetic construct
DNN

SEQ ID NO: 21461 - protein, 3 aa, Artificial Sequence
  Synthetic construct
GDT

SEQ ID NO: 21462 - protein, 3 aa, Artificial Sequence
  Synthetic construct
AAS

SEQ ID NO: 21463 - protein, 3 aa, Artificial Sequence
  Synthetic construct
KAS

SEQ ID NO: 21464 - protein, 3 aa, Artificial Sequence
  Synthetic construct
AAS

SEQ ID NO: 21465 - protein, 3 aa, Artificial Sequence
  Synthetic construct
DAT

SEQ ID NO: 21466 - protein, 3 aa, Artificial Sequence
  Synthetic construct
GAS

SEQ ID NO: 21467 - protein, 3 aa, Artificial Sequence
  Synthetic construct
GAS

SEQ ID NO: 21468 - protein, 3 aa, Artificial Sequence
  Synthetic construct
DAT

SEQ ID NO: 21469 - protein, 3 aa, Artificial Sequence
  Synthetic construct
DNN

SEQ ID NO: 21470 - protein, 3 aa, Artificial Sequence
  Synthetic construct
DAS

SEQ ID NO: 21471 - protein, 3 aa, Artificial Sequence
  Synthetic construct
LAA

SEQ ID NO: 21472 - protein, 3 aa, Artificial Sequence
  Synthetic construct
AAS

SEQ ID NO: 21473 - protein, 3 aa, Artificial Sequence
  Synthetic construct
AAS

SEQ ID NO: 21474 - protein, 3 aa, Artificial Sequence
  Synthetic construct
GAS

SEQ ID NO: 21475 - protein, 3 aa, Artificial Sequence
  Synthetic construct
GAS

SEQ ID NO: 21476 - protein, 3 aa, Artificial Sequence
  Synthetic construct
GAS

SEQ ID NO: 21477 - protein, 3 aa, Artificial Sequence
  Synthetic construct
GAS

SEQ ID NO: 21478 - protein, 3 aa, Artificial Sequence
  Synthetic construct
EVN

SEQ ID NO: 21479 - protein, 3 aa, Artificial Sequence
  Synthetic construct
SAS

SEQ ID NO: 21480 - protein, 3 aa, Artificial Sequence
  Synthetic construct
EVN

SEQ ID NO: 21481 - protein, 3 aa, Artificial Sequence
  Synthetic construct
DAS

SEQ ID NO: 21482 - protein, 3 aa, Artificial Sequence
  Synthetic construct
AAS

SEQ ID NO: 21483 - protein, 3 aa, Artificial Sequence
  Synthetic construct
LGS

SEQ ID NO: 21484 - protein, 3 aa, Artificial Sequence
  Synthetic construct
WAS

SEQ ID NO: 21485 - protein, 3 aa, Artificial Sequence
  Synthetic construct
GKN

SEQ ID NO: 21486 - protein, 3 aa, Artificial Sequence
  Synthetic construct
GAS

SEQ ID NO: 21487 - protein, 3 aa, Artificial Sequence
  Synthetic construct
WAS

SEQ ID NO: 21488 - protein, 3 aa, Artificial Sequence
  Synthetic construct
DVS

SEQ ID NO: 21489 - protein, 3 aa, Artificial Sequence
  Synthetic construct
AAS

SEQ ID NO: 21490 - protein, 3 aa, Artificial Sequence
  Synthetic construct
GAS

SEQ ID NO: 21491 - protein, 3 aa, Artificial Sequence
  Synthetic construct
AAS

SEQ ID NO: 21492 - protein, 3 aa, Artificial Sequence
  Synthetic construct
DAS

SEQ ID NO: 21493 - protein, 3 aa, Artificial Sequence
  Synthetic construct
DVS

SEQ ID NO: 21494 - protein, 3 aa, Artificial Sequence
  Synthetic construct
AAS

SEQ ID NO: 21495 - protein, 3 aa, Artificial Sequence
  Synthetic construct
QDS

SEQ ID NO: 21496 - protein, 3 aa, Artificial Sequence
  Synthetic construct
GAS

SEQ ID NO: 21497 - protein, 3 aa, Artificial Sequence
  Synthetic construct
DNN

SEQ ID NO: 21498 - protein, 3 aa, Artificial Sequence
  Synthetic construct
DVS

SEQ ID NO: 21499 - protein, 3 aa, Artificial Sequence
  Synthetic construct
WAS

SEQ ID NO: 21500 - protein, 3 aa, Artificial Sequence
  Synthetic construct
RNN

SEQ ID NO: 21501 - protein, 3 aa, Artificial Sequence
  Synthetic construct
EAI

SEQ ID NO: 21502 - protein, 3 aa, Artificial Sequence
  Synthetic construct
GKN

SEQ ID NO: 21503 - protein, 3 aa, Artificial Sequence
  Synthetic construct
KVS

SEQ ID NO: 21504 - protein, 3 aa, Artificial Sequence
  Synthetic construct
AAS

SEQ ID NO: 21505 - protein, 3 aa, Artificial Sequence
  Synthetic construct
GAS

SEQ ID NO: 21506 - protein, 3 aa, Artificial Sequence
  Synthetic construct
AAS

SEQ ID NO: 21507 - protein, 3 aa, Artificial Sequence
  Synthetic construct
AAS

SEQ ID NO: 21508 - protein, 3 aa, Artificial Sequence
  Synthetic construct
WAS

SEQ ID NO: 21509 - protein, 3 aa, Artificial Sequence
  Synthetic construct
EVS

SEQ ID NO: 21510 - protein, 3 aa, Artificial Sequence
  Synthetic construct
QDS

SEQ ID NO: 21511 - protein, 3 aa, Artificial Sequence
  Synthetic construct
KVS

SEQ ID NO: 21512 - protein, 3 aa, Artificial Sequence
  Synthetic construct
NVF

SEQ ID NO: 21513 - protein, 3 aa, Artificial Sequence
  Synthetic construct
GAS

SEQ ID NO: 21514 - protein, 7 aa, Artificial Sequence
  Synthetic construct
VNSDGNF

SEQ ID NO: 21515 - protein, 3 aa, Artificial Sequence
  Synthetic construct
AAS

SEQ ID NO: 21516 - protein, 3 aa, Artificial Sequence
  Synthetic construct
DAS

SEQ ID NO: 21517 - protein, 3 aa, Artificial Sequence
  Synthetic construct
WAS

SEQ ID NO: 21518 - protein, 3 aa, Artificial Sequence
  Synthetic construct
WAF

SEQ ID NO: 21519 - protein, 3 aa, Artificial Sequence
  Synthetic construct
GAS

SEQ ID NO: 21520 - protein, 3 aa, Artificial Sequence
  Synthetic construct
QDN

SEQ ID NO: 21521 - protein, 3 aa, Artificial Sequence
  Synthetic construct
DVS

SEQ ID NO: 21522 - protein, 3 aa, Artificial Sequence
  Synthetic construct
QDS

SEQ ID NO: 21523 - protein, 3 aa, Artificial Sequence
  Synthetic construct
KAS

SEQ ID NO: 21524 - protein, 3 aa, Artificial Sequence
  Synthetic construct
TLS

SEQ ID NO: 21525 - protein, 3 aa, Artificial Sequence
  Synthetic construct
RNN

SEQ ID NO: 21526 - protein, 3 aa, Artificial Sequence
  Synthetic construct
YNS

SEQ ID NO: 21527 - protein, 3 aa, Artificial Sequence
  Synthetic construct
AAS

SEQ ID NO: 21528 - protein, 3 aa, Artificial Sequence
  Synthetic construct
KAS

SEQ ID NO: 21529 - protein, 3 aa, Artificial Sequence
  Synthetic construct
NDS

SEQ ID NO: 21530 - protein, 3 aa, Artificial Sequence
  Synthetic construct
DVS

SEQ ID NO: 21531 - protein, 3 aa, Artificial Sequence
  Synthetic construct
AAS

SEQ ID NO: 21532 - protein, 3 aa, Artificial Sequence
  Synthetic construct
KAS

SEQ ID NO: 21533 - protein, 3 aa, Artificial Sequence
  Synthetic construct
DAS

SEQ ID NO: 21534 - protein, 3 aa, Artificial Sequence
  Synthetic construct
AAS

SEQ ID NO: 21535 - protein, 3 aa, Artificial Sequence
  Synthetic construct
KAS

SEQ ID NO: 21536 - protein, 3 aa, Artificial Sequence
  Synthetic construct
FAS

SEQ ID NO: 21537 - protein, 3 aa, Artificial Sequence
  Synthetic construct
RNN

SEQ ID NO: 21538 - protein, 3 aa, Artificial Sequence
  Synthetic construct
EVN

SEQ ID NO: 21539 - protein, 7 aa, Artificial Sequence
  Synthetic construct
YKSDSDK

SEQ ID NO: 21540 - protein, 3 aa, Artificial Sequence
  Synthetic construct
AAS

SEQ ID NO: 21541 - protein, 3 aa, Artificial Sequence
  Synthetic construct
WAS

SEQ ID NO: 21542 - protein, 3 aa, Artificial Sequence
  Synthetic construct
LGS

SEQ ID NO: 21543 - protein, 3 aa, Artificial Sequence
  Synthetic construct
AAS

SEQ ID NO: 21544 - protein, 3 aa, Artificial Sequence
  Synthetic construct
GAS

SEQ ID NO: 21545 - protein, 3 aa, Artificial Sequence
  Synthetic construct
EVN

SEQ ID NO: 21546 - protein, 3 aa, Artificial Sequence
  Synthetic construct
DVS

SEQ ID NO: 21547 - protein, 3 aa, Artificial Sequence
  Synthetic construct
GAS

SEQ ID NO: 21548 - protein, 3 aa, Artificial Sequence
  Synthetic construct
GAS

SEQ ID NO: 21549 - protein, 3 aa, Artificial Sequence
  Synthetic construct
AAS

SEQ ID NO: 21550 - protein, 3 aa, Artificial Sequence
  Synthetic construct
GAS

SEQ ID NO: 21551 - protein, 3 aa, Artificial Sequence
  Synthetic construct
SNN

SEQ ID NO: 21552 - protein, 3 aa, Artificial Sequence
  Synthetic construct
GKN

SEQ ID NO: 21553 - protein, 3 aa, Artificial Sequence
  Synthetic construct
KNI

SEQ ID NO: 21554 - protein, 3 aa, Artificial Sequence
  Synthetic construct
KTS

SEQ ID NO: 21555 - protein, 3 aa, Artificial Sequence
  Synthetic construct
AAS

SEQ ID NO: 21556 - protein, 3 aa, Artificial Sequence
  Synthetic construct
EGT

SEQ ID NO: 21557 - protein, 3 aa, Artificial Sequence
  Synthetic construct
RNN

SEQ ID NO: 21558 - protein, 3 aa, Artificial Sequence
  Synthetic construct
DAS

SEQ ID NO: 21559 - protein, 3 aa, Artificial Sequence
  Synthetic construct
EVS

SEQ ID NO: 21560 - protein, 3 aa, Artificial Sequence
  Synthetic construct
DVS

SEQ ID NO: 21561 - protein, 3 aa, Artificial Sequence
  Synthetic construct
AAS

SEQ ID NO: 21562 - protein, 3 aa, Artificial Sequence
  Synthetic construct
AAS

SEQ ID NO: 21563 - protein, 3 aa, Artificial Sequence
  Synthetic construct
IAS

SEQ ID NO: 21564 - protein, 3 aa, Artificial Sequence
  Synthetic construct
GAS

SEQ ID NO: 21565 - protein, 3 aa, Artificial Sequence
  Synthetic construct
WAS

SEQ ID NO: 21566 - protein, 3 aa, Artificial Sequence
  Synthetic construct
GAS

SEQ ID NO: 21567 - protein, 3 aa, Artificial Sequence
  Synthetic construct
DAS

SEQ ID NO: 21568 - protein, 3 aa, Artificial Sequence
  Synthetic construct
DAS

SEQ ID NO: 21569 - protein, 3 aa, Artificial Sequence
  Synthetic construct
STT

SEQ ID NO: 21570 - protein, 3 aa, Artificial Sequence
  Synthetic construct
DAS

SEQ ID NO: 21571 - protein, 3 aa, Artificial Sequence
  Synthetic construct
KAS

SEQ ID NO: 21572 - protein, 3 aa, Artificial Sequence
  Synthetic construct
DAS

SEQ ID NO: 21573 - protein, 3 aa, Artificial Sequence
  Synthetic construct
GAS

SEQ ID NO: 21574 - protein, 3 aa, Artificial Sequence
  Synthetic construct
GAS

SEQ ID NO: 21575 - protein, 3 aa, Artificial Sequence
  Synthetic construct
NND

SEQ ID NO: 21576 - protein, 3 aa, Artificial Sequence
  Synthetic construct
DVS

SEQ ID NO: 21577 - protein, 3 aa, Artificial Sequence
  Synthetic construct
NND

SEQ ID NO: 21578 - protein, 3 aa, Artificial Sequence
  Synthetic construct
DDS

SEQ ID NO: 21579 - protein, 3 aa, Artificial Sequence
  Synthetic construct
AAS

SEQ ID NO: 21580 - protein, 3 aa, Artificial Sequence
  Synthetic construct
AAS

SEQ ID NO: 21581 - protein, 3 aa, Artificial Sequence
  Synthetic construct
GND

SEQ ID NO: 21582 - protein, 3 aa, Artificial Sequence
  Synthetic construct
DAT

SEQ ID NO: 21583 - protein, 3 aa, Artificial Sequence
  Synthetic construct
DTS

SEQ ID NO: 21584 - protein, 3 aa, Artificial Sequence
  Synthetic construct
AVS

SEQ ID NO: 21585 - protein, 3 aa, Artificial Sequence
  Synthetic construct
GAT

SEQ ID NO: 21586 - protein, 3 aa, Artificial Sequence
  Synthetic construct
KDS

SEQ ID NO: 21587 - protein, 3 aa, Artificial Sequence
  Synthetic construct
AAS

SEQ ID NO: 21588 - protein, 3 aa, Artificial Sequence
  Synthetic construct
DAS

SEQ ID NO: 21589 - protein, 3 aa, Artificial Sequence
  Synthetic construct
LGS

SEQ ID NO: 21590 - protein, 3 aa, Artificial Sequence
  Synthetic construct
GKN

SEQ ID NO: 21591 - protein, 3 aa, Artificial Sequence
  Synthetic construct
DNN

SEQ ID NO: 21592 - protein, 3 aa, Artificial Sequence
  Synthetic construct
GAS

SEQ ID NO: 21593 - protein, 3 aa, Artificial Sequence
  Synthetic construct
FDS

SEQ ID NO: 21594 - protein, 3 aa, Artificial Sequence
  Synthetic construct
WAS

SEQ ID NO: 21595 - protein, 3 aa, Artificial Sequence
  Synthetic construct
DSN

SEQ ID NO: 21596 - protein, 3 aa, Artificial Sequence
  Synthetic construct
DNN

SEQ ID NO: 21597 - protein, 3 aa, Artificial Sequence
  Synthetic construct
LGS

SEQ ID NO: 21598 - protein, 3 aa, Artificial Sequence
  Synthetic construct
DAS

SEQ ID NO: 21599 - protein, 3 aa, Artificial Sequence
  Synthetic construct
KAS

SEQ ID NO: 21600 - protein, 3 aa, Artificial Sequence
  Synthetic construct
GAS

SEQ ID NO: 21601 - protein, 3 aa, Artificial Sequence
  Synthetic construct
KIS

SEQ ID NO: 21602 - protein, 3 aa, Artificial Sequence
  Synthetic construct
EVS

SEQ ID NO: 21603 - protein, 3 aa, Artificial Sequence
  Synthetic construct
DAS

SEQ ID NO: 21604 - protein, 3 aa, Artificial Sequence
  Synthetic construct
RNN

SEQ ID NO: 21605 - protein, 3 aa, Artificial Sequence
  Synthetic construct
EAS

SEQ ID NO: 21606 - protein, 3 aa, Artificial Sequence
  Synthetic construct
EGT

SEQ ID NO: 21607 - protein, 3 aa, Artificial Sequence
  Synthetic construct
DAT

SEQ ID NO: 21608 - protein, 3 aa, Artificial Sequence
  Synthetic construct
DAS

SEQ ID NO: 21609 - protein, 3 aa, Artificial Sequence
  Synthetic construct
LGS

SEQ ID NO: 21610 - protein, 3 aa, Artificial Sequence
  Synthetic construct
DNN

SEQ ID NO: 21611 - protein, 3 aa, Artificial Sequence
  Synthetic construct
AAF

SEQ ID NO: 21612 - protein, 3 aa, Artificial Sequence
  Synthetic construct
DVS

SEQ ID NO: 21613 - protein, 3 aa, Artificial Sequence
  Synthetic construct
AAS

SEQ ID NO: 21614 - protein, 3 aa, Artificial Sequence
  Synthetic construct
KAS

SEQ ID NO: 21615 - protein, 3 aa, Artificial Sequence
  Synthetic construct
TAS

SEQ ID NO: 21616 - protein, 3 aa, Artificial Sequence
  Synthetic construct
DAT

SEQ ID NO: 21617 - protein, 3 aa, Artificial Sequence
  Synthetic construct
YDS

SEQ ID NO: 21618 - protein, 3 aa, Artificial Sequence
  Synthetic construct
AAS

SEQ ID NO: 21619 - protein, 3 aa, Artificial Sequence
  Synthetic construct
DTS

SEQ ID NO: 21620 - protein, 3 aa, Artificial Sequence
  Synthetic construct
AAS

SEQ ID NO: 21621 - protein, 3 aa, Artificial Sequence
  Synthetic construct
AAS

SEQ ID NO: 21622 - protein, 3 aa, Artificial Sequence
  Synthetic construct
DAS

SEQ ID NO: 21623 - protein, 3 aa, Artificial Sequence
  Synthetic construct
KAS

SEQ ID NO: 21624 - protein, 3 aa, Artificial Sequence
  Synthetic construct
DVS

SEQ ID NO: 21625 - protein, 3 aa, Artificial Sequence
  Synthetic construct
RAS

SEQ ID NO: 21626 - protein, 3 aa, Artificial Sequence
  Synthetic construct
GAS

SEQ ID NO: 21627 - protein, 3 aa, Artificial Sequence
  Synthetic construct
AAS

SEQ ID NO: 21628 - protein, 3 aa, Artificial Sequence
  Synthetic construct
RND

SEQ ID NO: 21629 - protein, 3 aa, Artificial Sequence
  Synthetic construct
AAS

SEQ ID NO: 21630 - protein, 3 aa, Artificial Sequence
  Synthetic construct
GAS

SEQ ID NO: 21631 - protein, 3 aa, Artificial Sequence
  Synthetic construct
AAS

SEQ ID NO: 21632 - protein, 3 aa, Artificial Sequence
  Synthetic construct
DAS

SEQ ID NO: 21633 - protein, 3 aa, Artificial Sequence
  Synthetic construct
GKN

SEQ ID NO: 21634 - protein, 3 aa, Artificial Sequence
  Synthetic construct
AAS

SEQ ID NO: 21635 - protein, 3 aa, Artificial Sequence
  Synthetic construct
GKN

SEQ ID NO: 21636 - protein, 3 aa, Artificial Sequence
  Synthetic construct
GAS

SEQ ID NO: 21637 - protein, 3 aa, Artificial Sequence
  Synthetic construct
DAS

SEQ ID NO: 21638 - protein, 3 aa, Artificial Sequence
  Synthetic construct
GKN

SEQ ID NO: 21639 - protein, 3 aa, Artificial Sequence
  Synthetic construct
SAS

SEQ ID NO: 21640 - protein, 7 aa, Artificial Sequence
  Synthetic construct
LNSDGSH

SEQ ID NO: 21641 - protein, 3 aa, Artificial Sequence
  Synthetic construct
DVS

SEQ ID NO: 21642 - protein, 8 aa, Artificial Sequence
  Synthetic construct
VGTGGIVG

SEQ ID NO: 21643 - protein, 3 aa, Artificial Sequence
  Synthetic construct
DAS

SEQ ID NO: 21644 - protein, 3 aa, Artificial Sequence
  Synthetic construct
AAS

SEQ ID NO: 21645 - protein, 3 aa, Artificial Sequence
  Synthetic construct
DAS

SEQ ID NO: 21646 - protein, 3 aa, Artificial Sequence
  Synthetic construct
QIS

SEQ ID NO: 21647 - protein, 3 aa, Artificial Sequence
  Synthetic construct
AAS

SEQ ID NO: 21648 - protein, 3 aa, Artificial Sequence
  Synthetic construct
AAS

SEQ ID NO: 21649 - protein, 3 aa, Artificial Sequence
  Synthetic construct
GAF

SEQ ID NO: 21650 - protein, 3 aa, Artificial Sequence
  Synthetic construct
AAS

SEQ ID NO: 21651 - protein, 3 aa, Artificial Sequence
  Synthetic construct
EVY

SEQ ID NO: 21652 - protein, 3 aa, Artificial Sequence
  Synthetic construct
RNN

SEQ ID NO: 21653 - protein, 3 aa, Artificial Sequence
  Synthetic construct
RNT

SEQ ID NO: 21654 - protein, 3 aa, Artificial Sequence
  Synthetic construct
KAS

SEQ ID NO: 21655 - protein, 3 aa, Artificial Sequence
  Synthetic construct
EVN

SEQ ID NO: 21656 - protein, 3 aa, Artificial Sequence
  Synthetic construct
AAS

SEQ ID NO: 21657 - protein, 3 aa, Artificial Sequence
  Synthetic construct
AAS

SEQ ID NO: 21658 - protein, 3 aa, Artificial Sequence
  Synthetic construct
DVS

SEQ ID NO: 21659 - protein, 3 aa, Artificial Sequence
  Synthetic construct
DAT

SEQ ID NO: 21660 - protein, 3 aa, Artificial Sequence
  Synthetic construct
DAS

SEQ ID NO: 21661 - protein, 3 aa, Artificial Sequence
  Synthetic construct
KAS

SEQ ID NO: 21662 - protein, 3 aa, Artificial Sequence
  Synthetic construct
GAS

SEQ ID NO: 21663 - protein, 3 aa, Artificial Sequence
  Synthetic construct
WAS

SEQ ID NO: 21664 - protein, 3 aa, Artificial Sequence
  Synthetic construct
EVS

SEQ ID NO: 21665 - protein, 3 aa, Artificial Sequence
  Synthetic construct
KAS

SEQ ID NO: 21666 - protein, 3 aa, Artificial Sequence
  Synthetic construct
KDS

SEQ ID NO: 21667 - protein, 3 aa, Artificial Sequence
  Synthetic construct
WAS

SEQ ID NO: 21668 - protein, 3 aa, Artificial Sequence
  Synthetic construct
GVY

SEQ ID NO: 21669 - protein, 3 aa, Artificial Sequence
  Synthetic construct
EVS

SEQ ID NO: 21670 - protein, 3 aa, Artificial Sequence
  Synthetic construct
DSN

SEQ ID NO: 21671 - protein, 3 aa, Artificial Sequence
  Synthetic construct
KDS

SEQ ID NO: 21672 - protein, 3 aa, Artificial Sequence
  Synthetic construct
KAS

SEQ ID NO: 21673 - protein, 3 aa, Artificial Sequence
  Synthetic construct
DAS

SEQ ID NO: 21674 - protein, 3 aa, Artificial Sequence
  Synthetic construct
RTS

SEQ ID NO: 21675 - protein, 3 aa, Artificial Sequence
  Synthetic construct
KVS

SEQ ID NO: 21676 - protein, 3 aa, Artificial Sequence
  Synthetic construct
WAS

SEQ ID NO: 21677 - protein, 3 aa, Artificial Sequence
  Synthetic construct
DNN

SEQ ID NO: 21678 - protein, 3 aa, Artificial Sequence
  Synthetic construct
DNN

SEQ ID NO: 21679 - protein, 3 aa, Artificial Sequence
  Synthetic construct
AAS

SEQ ID NO: 21680 - protein, 3 aa, Artificial Sequence
  Synthetic construct
AAS

SEQ ID NO: 21681 - protein, 3 aa, Artificial Sequence
  Synthetic construct
DDS

SEQ ID NO: 21682 - protein, 3 aa, Artificial Sequence
  Synthetic construct
DAS

SEQ ID NO: 21683 - protein, 3 aa, Artificial Sequence
  Synthetic construct
EDS

SEQ ID NO: 21684 - protein, 3 aa, Artificial Sequence
  Synthetic construct
AAS

SEQ ID NO: 21685 - protein, 3 aa, Artificial Sequence
  Synthetic construct
HKN

SEQ ID NO: 21686 - protein, 3 aa, Artificial Sequence
  Synthetic construct
DAS

SEQ ID NO: 21687 - protein, 3 aa, Artificial Sequence
  Synthetic construct
GAS

SEQ ID NO: 21688 - protein, 3 aa, Artificial Sequence
  Synthetic construct
EVS

SEQ ID NO: 21689 - protein, 3 aa, Artificial Sequence
  Synthetic construct
EVN

SEQ ID NO: 21690 - protein, 3 aa, Artificial Sequence
  Synthetic construct
KAS

SEQ ID NO: 21691 - protein, 3 aa, Artificial Sequence
  Synthetic construct
YNS

SEQ ID NO: 21692 - protein, 3 aa, Artificial Sequence
  Synthetic construct
AAS

SEQ ID NO: 21693 - protein, 3 aa, Artificial Sequence
  Synthetic construct
KAS

SEQ ID NO: 21694 - protein, 3 aa, Artificial Sequence
  Synthetic construct
TAS

SEQ ID NO: 21695 - protein, 3 aa, Artificial Sequence
  Synthetic construct
AAS

SEQ ID NO: 21696 - protein, 3 aa, Artificial Sequence
  Synthetic construct
QDT

SEQ ID NO: 21697 - protein, 3 aa, Artificial Sequence
  Synthetic construct
DVI

SEQ ID NO: 21698 - protein, 3 aa, Artificial Sequence
  Synthetic construct
GAS

SEQ ID NO: 21699 - protein, 3 aa, Artificial Sequence
  Synthetic construct
STS

SEQ ID NO: 21700 - protein, 3 aa, Artificial Sequence
  Synthetic construct
SNT

SEQ ID NO: 21701 - protein, 3 aa, Artificial Sequence
  Synthetic construct
GAS

SEQ ID NO: 21702 - protein, 3 aa, Artificial Sequence
  Synthetic construct
AAS

SEQ ID NO: 21703 - protein, 3 aa, Artificial Sequence
  Synthetic construct
DAS

SEQ ID NO: 21704 - protein, 3 aa, Artificial Sequence
  Synthetic construct
AAS

SEQ ID NO: 21705 - protein, 3 aa, Artificial Sequence
  Synthetic construct
KVS

SEQ ID NO: 21706 - protein, 3 aa, Artificial Sequence
  Synthetic construct
EDD

SEQ ID NO: 21707 - protein, 3 aa, Artificial Sequence
  Synthetic construct
TDN

SEQ ID NO: 21708 - protein, 3 aa, Artificial Sequence
  Synthetic construct
AAS

SEQ ID NO: 21709 - protein, 3 aa, Artificial Sequence
  Synthetic construct
RDT

SEQ ID NO: 21710 - protein, 3 aa, Artificial Sequence
  Synthetic construct
RNN

SEQ ID NO: 21711 - protein, 3 aa, Artificial Sequence
  Synthetic construct
KAS

SEQ ID NO: 21712 - protein, 3 aa, Artificial Sequence
  Synthetic construct
DAS

SEQ ID NO: 21713 - protein, 3 aa, Artificial Sequence
  Synthetic construct
NDN

SEQ ID NO: 21714 - protein, 3 aa, Artificial Sequence
  Synthetic construct
EVN

SEQ ID NO: 21715 - protein, 3 aa, Artificial Sequence
  Synthetic construct
KAS

SEQ ID NO: 21716 - protein, 3 aa, Artificial Sequence
  Synthetic construct
AAS

SEQ ID NO: 21717 - protein, 3 aa, Artificial Sequence
  Synthetic construct
DAS

SEQ ID NO: 21718 - protein, 3 aa, Artificial Sequence
  Synthetic construct
DTS

SEQ ID NO: 21719 - protein, 3 aa, Artificial Sequence
  Synthetic construct
DAS

SEQ ID NO: 21720 - protein, 3 aa, Artificial Sequence
  Synthetic construct
AAS

SEQ ID NO: 21721 - protein, 3 aa, Artificial Sequence
  Synthetic construct
EGS

SEQ ID NO: 21722 - protein, 3 aa, Artificial Sequence
  Synthetic construct
KAS

SEQ ID NO: 21723 - protein, 3 aa, Artificial Sequence
  Synthetic construct
KAS

SEQ ID NO: 21724 - protein, 3 aa, Artificial Sequence
  Synthetic construct
AAS

SEQ ID NO: 21725 - protein, 3 aa, Artificial Sequence
  Synthetic construct
QVS

SEQ ID NO: 21726 - protein, 3 aa, Artificial Sequence
  Synthetic construct
LGV

SEQ ID NO: 21727 - protein, 3 aa, Artificial Sequence
  Synthetic construct
DVS

SEQ ID NO: 21728 - protein, 3 aa, Artificial Sequence
  Synthetic construct
KVS

SEQ ID NO: 21729 - protein, 3 aa, Artificial Sequence
  Synthetic construct
GAS

SEQ ID NO: 21730 - protein, 3 aa, Artificial Sequence
  Synthetic construct
NFT

SEQ ID NO: 21731 - protein, 3 aa, Artificial Sequence
  Synthetic construct
AAS

SEQ ID NO: 21732 - protein, 3 aa, Artificial Sequence
  Synthetic construct
RNT

SEQ ID NO: 21733 - protein, 3 aa, Artificial Sequence
  Synthetic construct
AAS

SEQ ID NO: 21734 - protein, 3 aa, Artificial Sequence
  Synthetic construct
GAS

SEQ ID NO: 21735 - protein, 3 aa, Artificial Sequence
  Synthetic construct
AAS

SEQ ID NO: 21736 - protein, 7 aa, Artificial Sequence
  Synthetic construct
LNSDGSH

SEQ ID NO: 21737 - protein, 3 aa, Artificial Sequence
  Synthetic construct
KDS

SEQ ID NO: 21738 - protein, 3 aa, Artificial Sequence
  Synthetic construct
GAS

SEQ ID NO: 21739 - protein, 3 aa, Artificial Sequence
  Synthetic construct
WAS

SEQ ID NO: 21740 - protein, 3 aa, Artificial Sequence
  Synthetic construct
DVS

SEQ ID NO: 21741 - protein, 3 aa, Artificial Sequence
  Synthetic construct
AAS

SEQ ID NO: 21742 - protein, 3 aa, Artificial Sequence
  Synthetic construct
YDS

SEQ ID NO: 21743 - protein, 3 aa, Artificial Sequence
  Synthetic construct
KVS

SEQ ID NO: 21744 - protein, 3 aa, Artificial Sequence
  Synthetic construct
DAS

SEQ ID NO: 21745 - protein, 3 aa, Artificial Sequence
  Synthetic construct
KAS

SEQ ID NO: 21746 - protein, 3 aa, Artificial Sequence
  Synthetic construct
NTN

SEQ ID NO: 21747 - protein, 3 aa, Artificial Sequence
  Synthetic construct
RNN

SEQ ID NO: 21748 - protein, 3 aa, Artificial Sequence
  Synthetic construct
QVS

SEQ ID NO: 21749 - protein, 3 aa, Artificial Sequence
  Synthetic construct
TTS

SEQ ID NO: 21750 - protein, 3 aa, Artificial Sequence
  Synthetic construct
NNI

SEQ ID NO: 21751 - protein, 3 aa, Artificial Sequence
  Synthetic construct
AAS

SEQ ID NO: 21752 - protein, 3 aa, Artificial Sequence
  Synthetic construct
EVN

SEQ ID NO: 21753 - protein, 3 aa, Artificial Sequence
  Synthetic construct
AAS

SEQ ID NO: 21754 - protein, 3 aa, Artificial Sequence
  Synthetic construct
AAS

SEQ ID NO: 21755 - protein, 3 aa, Artificial Sequence
  Synthetic construct
DDS

SEQ ID NO: 21756 - protein, 3 aa, Artificial Sequence
  Synthetic construct
AAS

SEQ ID NO: 21757 - protein, 3 aa, Artificial Sequence
  Synthetic construct
TAS

SEQ ID NO: 21758 - protein, 3 aa, Artificial Sequence
  Synthetic construct
EDK

SEQ ID NO: 21759 - protein, 3 aa, Artificial Sequence
  Synthetic construct
YDT

SEQ ID NO: 21760 - protein, 3 aa, Artificial Sequence
  Synthetic construct
DVT

SEQ ID NO: 21761 - protein, 3 aa, Artificial Sequence
  Synthetic construct
EDN

SEQ ID NO: 21762 - protein, 7 aa, Artificial Sequence
  Synthetic construct
YHSDSDN

SEQ ID NO: 21763 - protein, 3 aa, Artificial Sequence
  Synthetic construct
DAS

SEQ ID NO: 21764 - protein, 3 aa, Artificial Sequence
  Synthetic construct
FDT

SEQ ID NO: 21765 - protein, 3 aa, Artificial Sequence
  Synthetic construct
AAS

SEQ ID NO: 21766 - protein, 3 aa, Artificial Sequence
  Synthetic construct
LGS

SEQ ID NO: 21767 - protein, 3 aa, Artificial Sequence
  Synthetic construct
GKT

SEQ ID NO: 21768 - protein, 3 aa, Artificial Sequence
  Synthetic construct
GNR

SEQ ID NO: 21769 - protein, 3 aa, Artificial Sequence
  Synthetic construct
AAS

SEQ ID NO: 21770 - protein, 3 aa, Artificial Sequence
  Synthetic construct
AAS

SEQ ID NO: 21771 - protein, 3 aa, Artificial Sequence
  Synthetic construct
DAS

SEQ ID NO: 21772 - protein, 3 aa, Artificial Sequence
  Synthetic construct
KVS

SEQ ID NO: 21773 - protein, 3 aa, Artificial Sequence
  Synthetic construct
AAS

SEQ ID NO: 21774 - protein, 3 aa, Artificial Sequence
  Synthetic construct
GAS

SEQ ID NO: 21775 - protein, 3 aa, Artificial Sequence
  Synthetic construct
AAS

SEQ ID NO: 21776 - protein, 3 aa, Artificial Sequence
  Synthetic construct
GAS

SEQ ID NO: 21777 - protein, 3 aa, Artificial Sequence
  Synthetic construct
GAS

SEQ ID NO: 21778 - protein, 3 aa, Artificial Sequence
  Synthetic construct
DVS

SEQ ID NO: 21779 - protein, 3 aa, Artificial Sequence
  Synthetic construct
GAS

SEQ ID NO: 21780 - protein, 3 aa, Artificial Sequence
  Synthetic construct
LGS

SEQ ID NO: 21781 - protein, 3 aa, Artificial Sequence
  Synthetic construct
DVS

SEQ ID NO: 21782 - protein, 3 aa, Artificial Sequence
  Synthetic construct
DAT

SEQ ID NO: 21783 - protein, 3 aa, Artificial Sequence
  Synthetic construct
RND

SEQ ID NO: 21784 - protein, 3 aa, Artificial Sequence
  Synthetic construct
AAS

SEQ ID NO: 21785 - protein, 3 aa, Artificial Sequence
  Synthetic construct
WAS

SEQ ID NO: 21786 - protein, 3 aa, Artificial Sequence
  Synthetic construct
AVS

SEQ ID NO: 21787 - protein, 3 aa, Artificial Sequence
  Synthetic construct
WAS

SEQ ID NO: 21788 - protein, 3 aa, Artificial Sequence
  Synthetic construct
KAS

SEQ ID NO: 21789 - protein, 3 aa, Artificial Sequence
  Synthetic construct
DAS

SEQ ID NO: 21790 - protein, 3 aa, Artificial Sequence
  Synthetic construct
GAS

SEQ ID NO: 21791 - protein, 3 aa, Artificial Sequence
  Synthetic construct
VAS

SEQ ID NO: 21792 - protein, 3 aa, Artificial Sequence
  Synthetic construct
KVS

SEQ ID NO: 21793 - protein, 3 aa, Artificial Sequence
  Synthetic construct
AAS

SEQ ID NO: 21794 - protein, 3 aa, Artificial Sequence
  Synthetic construct
AAS

SEQ ID NO: 21795 - protein, 3 aa, Artificial Sequence
  Synthetic construct
AAS

SEQ ID NO: 21796 - protein, 3 aa, Artificial Sequence
  Synthetic construct
DVT

SEQ ID NO: 21797 - protein, 3 aa, Artificial Sequence
  Synthetic construct
KAS

SEQ ID NO: 21798 - protein, 3 aa, Artificial Sequence
  Synthetic construct
GAS

SEQ ID NO: 21799 - protein, 3 aa, Artificial Sequence
  Synthetic construct
DVS

SEQ ID NO: 21800 - protein, 3 aa, Artificial Sequence
  Synthetic construct
EVS

SEQ ID NO: 21801 - protein, 3 aa, Artificial Sequence
  Synthetic construct
DAS

SEQ ID NO: 21802 - protein, 3 aa, Artificial Sequence
  Synthetic construct
KAS

SEQ ID NO: 21803 - protein, 3 aa, Artificial Sequence
  Synthetic construct
KAS

SEQ ID NO: 21804 - protein, 3 aa, Artificial Sequence
  Synthetic construct
GTS

SEQ ID NO: 21805 - protein, 3 aa, Artificial Sequence
  Synthetic construct
DAS

SEQ ID NO: 21806 - protein, 3 aa, Artificial Sequence
  Synthetic construct
AVH

SEQ ID NO: 21807 - protein, 7 aa, Artificial Sequence
  Synthetic construct
VNSDGSH

SEQ ID NO: 21808 - protein, 3 aa, Artificial Sequence
  Synthetic construct
AAS

SEQ ID NO: 21809 - protein, 3 aa, Artificial Sequence
  Synthetic construct
AAS

SEQ ID NO: 21810 - protein, 3 aa, Artificial Sequence
  Synthetic construct
TEN

SEQ ID NO: 21811 - protein, 3 aa, Artificial Sequence
  Synthetic construct
RNN

SEQ ID NO: 21812 - protein, 3 aa, Artificial Sequence
  Synthetic construct
AAY

SEQ ID NO: 21813 - protein, 3 aa, Artificial Sequence
  Synthetic construct
WAS

SEQ ID NO: 21814 - protein, 3 aa, Artificial Sequence
  Synthetic construct
KVS

SEQ ID NO: 21815 - protein, 3 aa, Artificial Sequence
  Synthetic construct
RDD

SEQ ID NO: 21816 - protein, 3 aa, Artificial Sequence
  Synthetic construct
AAS

SEQ ID NO: 21817 - protein, 3 aa, Artificial Sequence
  Synthetic construct
AAS

SEQ ID NO: 21818 - protein, 3 aa, Artificial Sequence
  Synthetic construct
GNS

SEQ ID NO: 21819 - protein, 3 aa, Artificial Sequence
  Synthetic construct
EVS

SEQ ID NO: 21820 - protein, 3 aa, Artificial Sequence
  Synthetic construct
LAS

SEQ ID NO: 21821 - protein, 3 aa, Artificial Sequence
  Synthetic construct
AAS

SEQ ID NO: 21822 - protein, 3 aa, Artificial Sequence
  Synthetic construct
GAS

SEQ ID NO: 21823 - protein, 3 aa, Artificial Sequence
  Synthetic construct
DAS

SEQ ID NO: 21824 - protein, 3 aa, Artificial Sequence
  Synthetic construct
KAS

SEQ ID NO: 21825 - protein, 3 aa, Artificial Sequence
  Synthetic construct
AAS

SEQ ID NO: 21826 - protein, 3 aa, Artificial Sequence
  Synthetic construct
AAS

SEQ ID NO: 21827 - protein, 3 aa, Artificial Sequence
  Synthetic construct
GKN

SEQ ID NO: 21828 - protein, 3 aa, Artificial Sequence
  Synthetic construct
KDS

SEQ ID NO: 21829 - protein, 3 aa, Artificial Sequence
  Synthetic construct
GAS

SEQ ID NO: 21830 - protein, 3 aa, Artificial Sequence
  Synthetic construct
QVS

SEQ ID NO: 21831 - protein, 3 aa, Artificial Sequence
  Synthetic construct
AAS

SEQ ID NO: 21832 - protein, 3 aa, Artificial Sequence
  Synthetic construct
AAS

SEQ ID NO: 21833 - protein, 3 aa, Artificial Sequence
  Synthetic construct
SHN

SEQ ID NO: 21834 - protein, 3 aa, Artificial Sequence
  Synthetic construct
AVS

SEQ ID NO: 21835 - protein, 3 aa, Artificial Sequence
  Synthetic construct
AAS

SEQ ID NO: 21836 - protein, 3 aa, Artificial Sequence
  Synthetic construct
SAS

SEQ ID NO: 21837 - protein, 3 aa, Artificial Sequence
  Synthetic construct
YDS

SEQ ID NO: 21838 - protein, 3 aa, Artificial Sequence
  Synthetic construct
DTS

SEQ ID NO: 21839 - protein, 3 aa, Artificial Sequence
  Synthetic construct
LTS

SEQ ID NO: 21840 - protein, 3 aa, Artificial Sequence
  Synthetic construct
DAS

SEQ ID NO: 21841 - protein, 3 aa, Artificial Sequence
  Synthetic construct
EDS

SEQ ID NO: 21842 - protein, 3 aa, Artificial Sequence
  Synthetic construct
AAS

SEQ ID NO: 21843 - protein, 3 aa, Artificial Sequence
  Synthetic construct
GAS

SEQ ID NO: 21844 - protein, 3 aa, Artificial Sequence
  Synthetic construct
SNN

SEQ ID NO: 21845 - protein, 3 aa, Artificial Sequence
  Synthetic construct
RSD

SEQ ID NO: 21846 - protein, 3 aa, Artificial Sequence
  Synthetic construct
DAS

SEQ ID NO: 21847 - protein, 3 aa, Artificial Sequence
  Synthetic construct
DVS

SEQ ID NO: 21848 - protein, 3 aa, Artificial Sequence
  Synthetic construct
GNN

SEQ ID NO: 21849 - protein, 3 aa, Artificial Sequence
  Synthetic construct
RNN

SEQ ID NO: 21850 - protein, 3 aa, Artificial Sequence
  Synthetic construct
DVS

SEQ ID NO: 21851 - protein, 3 aa, Artificial Sequence
  Synthetic construct
STS

SEQ ID NO: 21852 - protein, 3 aa, Artificial Sequence
  Synthetic construct
DAS

SEQ ID NO: 21853 - protein, 3 aa, Artificial Sequence
  Synthetic construct
KIS

SEQ ID NO: 21854 - protein, 3 aa, Artificial Sequence
  Synthetic construct
DAS

SEQ ID NO: 21855 - protein, 3 aa, Artificial Sequence
  Synthetic construct
GAS

SEQ ID NO: 21856 - protein, 3 aa, Artificial Sequence
  Synthetic construct
AAS

SEQ ID NO: 21857 - protein, 3 aa, Artificial Sequence
  Synthetic construct
AAS

SEQ ID NO: 21858 - protein, 3 aa, Artificial Sequence
  Synthetic construct
AAS

SEQ ID NO: 21859 - protein, 3 aa, Artificial Sequence
  Synthetic construct
KAS

SEQ ID NO: 21860 - protein, 3 aa, Artificial Sequence
  Synthetic construct
GAS

SEQ ID NO: 21861 - protein, 3 aa, Artificial Sequence
  Synthetic construct
AAS

SEQ ID NO: 21862 - protein, 3 aa, Artificial Sequence
  Synthetic construct
AAS

SEQ ID NO: 21863 - protein, 3 aa, Artificial Sequence
  Synthetic construct
LDT

SEQ ID NO: 21864 - protein, 3 aa, Artificial Sequence
  Synthetic construct
YDT

SEQ ID NO: 21865 - protein, 3 aa, Artificial Sequence
  Synthetic construct
YDS

SEQ ID NO: 21866 - protein, 3 aa, Artificial Sequence
  Synthetic construct
DAT

SEQ ID NO: 21867 - protein, 7 aa, Artificial Sequence
  Synthetic construct
YKSDSDN

SEQ ID NO: 21868 - protein, 3 aa, Artificial Sequence
  Synthetic construct
AAS

SEQ ID NO: 21869 - protein, 3 aa, Artificial Sequence
  Synthetic construct
STN

SEQ ID NO: 21870 - protein, 3 aa, Artificial Sequence
  Synthetic construct
GTS

SEQ ID NO: 21871 - protein, 3 aa, Artificial Sequence
  Synthetic construct
GAS

SEQ ID NO: 21872 - protein, 3 aa, Artificial Sequence
  Synthetic construct
KAS

SEQ ID NO: 21873 - protein, 3 aa, Artificial Sequence
  Synthetic construct
DAS

SEQ ID NO: 21874 - protein, 3 aa, Artificial Sequence
  Synthetic construct
GAS

SEQ ID NO: 21875 - protein, 3 aa, Artificial Sequence
  Synthetic construct
DVS

SEQ ID NO: 21876 - protein, 3 aa, Artificial Sequence
  Synthetic construct
STD

SEQ ID NO: 21877 - protein, 3 aa, Artificial Sequence
  Synthetic construct
KAS

SEQ ID NO: 21878 - protein, 3 aa, Artificial Sequence
  Synthetic construct
STN

SEQ ID NO: 21879 - protein, 3 aa, Artificial Sequence
  Synthetic construct
DVS

SEQ ID NO: 21880 - protein, 3 aa, Artificial Sequence
  Synthetic construct
GAT

SEQ ID NO: 21881 - protein, 3 aa, Artificial Sequence
  Synthetic construct
LAS

SEQ ID NO: 21882 - protein, 3 aa, Artificial Sequence
  Synthetic construct
DAS

SEQ ID NO: 21883 - protein, 3 aa, Artificial Sequence
  Synthetic construct
LGS

SEQ ID NO: 21884 - protein, 3 aa, Artificial Sequence
  Synthetic construct
GAS

SEQ ID NO: 21885 - protein, 3 aa, Artificial Sequence
  Synthetic construct
AAS

SEQ ID NO: 21886 - protein, 3 aa, Artificial Sequence
  Synthetic construct
GAS

SEQ ID NO: 21887 - protein, 3 aa, Artificial Sequence
  Synthetic construct
LGS

SEQ ID NO: 21888 - protein, 3 aa, Artificial Sequence
  Synthetic construct
QAN

SEQ ID NO: 21889 - protein, 3 aa, Artificial Sequence
  Synthetic construct
AAS

SEQ ID NO: 21890 - protein, 3 aa, Artificial Sequence
  Synthetic construct
DVT

SEQ ID NO: 21891 - protein, 3 aa, Artificial Sequence
  Synthetic construct
DDD

SEQ ID NO: 21892 - protein, 3 aa, Artificial Sequence
  Synthetic construct
GAS

SEQ ID NO: 21893 - protein, 3 aa, Artificial Sequence
  Synthetic construct
GKN

SEQ ID NO: 21894 - protein, 3 aa, Artificial Sequence
  Synthetic construct
DVT

SEQ ID NO: 21895 - protein, 3 aa, Artificial Sequence
  Synthetic construct
LGS

SEQ ID NO: 21896 - protein, 3 aa, Artificial Sequence
  Synthetic construct
KAS

SEQ ID NO: 21897 - protein, 3 aa, Artificial Sequence
  Synthetic construct
GKN

SEQ ID NO: 21898 - protein, 3 aa, Artificial Sequence
  Synthetic construct
AAS

SEQ ID NO: 21899 - protein, 3 aa, Artificial Sequence
  Synthetic construct
GAS

SEQ ID NO: 21900 - protein, 3 aa, Artificial Sequence
  Synthetic construct
AAS

SEQ ID NO: 21901 - protein, 3 aa, Artificial Sequence
  Synthetic construct
AAS

SEQ ID NO: 21902 - protein, 3 aa, Artificial Sequence
  Synthetic construct
AAS

SEQ ID NO: 21903 - protein, 3 aa, Artificial Sequence
  Synthetic construct
AAS

SEQ ID NO: 21904 - protein, 7 aa, Artificial Sequence
  Synthetic construct
LEGSGSY

SEQ ID NO: 21905 - protein, 3 aa, Artificial Sequence
  Synthetic construct
GAS

SEQ ID NO: 21906 - protein, 3 aa, Artificial Sequence
  Synthetic construct
DNV

SEQ ID NO: 21907 - protein, 3 aa, Artificial Sequence
  Synthetic construct
KAS

SEQ ID NO: 21908 - protein, 3 aa, Artificial Sequence
  Synthetic construct
GAS

SEQ ID NO: 21909 - protein, 3 aa, Artificial Sequence
  Synthetic construct
SAS

SEQ ID NO: 21910 - protein, 3 aa, Artificial Sequence
  Synthetic construct
DAS

SEQ ID NO: 21911 - protein, 3 aa, Artificial Sequence
  Synthetic construct
GAS

SEQ ID NO: 21912 - protein, 3 aa, Artificial Sequence
  Synthetic construct
AAS

SEQ ID NO: 21913 - protein, 3 aa, Artificial Sequence
  Synthetic construct
AAS

SEQ ID NO: 21914 - protein, 3 aa, Artificial Sequence
  Synthetic construct
SNN

SEQ ID NO: 21915 - protein, 3 aa, Artificial Sequence
  Synthetic construct
AAS

SEQ ID NO: 21916 - protein, 3 aa, Artificial Sequence
  Synthetic construct
KAS

SEQ ID NO: 21917 - protein, 3 aa, Artificial Sequence
  Synthetic construct
AAS

SEQ ID NO: 21918 - protein, 3 aa, Artificial Sequence
  Synthetic construct
AAS

SEQ ID NO: 21919 - protein, 3 aa, Artificial Sequence
  Synthetic construct
EVN

SEQ ID NO: 21920 - protein, 3 aa, Artificial Sequence
  Synthetic construct
ETS

SEQ ID NO: 21921 - protein, 3 aa, Artificial Sequence
  Synthetic construct
KAS

SEQ ID NO: 21922 - protein, 3 aa, Artificial Sequence
  Synthetic construct
SNN

SEQ ID NO: 21923 - protein, 3 aa, Artificial Sequence
  Synthetic construct
WAS

SEQ ID NO: 21924 - protein, 3 aa, Artificial Sequence
  Synthetic construct
DSF

SEQ ID NO: 21925 - protein, 3 aa, Artificial Sequence
  Synthetic construct
GKN

SEQ ID NO: 21926 - protein, 3 aa, Artificial Sequence
  Synthetic construct
GAS

SEQ ID NO: 21927 - protein, 3 aa, Artificial Sequence
  Synthetic construct
GKN

SEQ ID NO: 21928 - protein, 3 aa, Artificial Sequence
  Synthetic construct
AAS

SEQ ID NO: 21929 - protein, 3 aa, Artificial Sequence
  Synthetic construct
AAS

SEQ ID NO: 21930 - protein, 3 aa, Artificial Sequence
  Synthetic construct
KAS

SEQ ID NO: 21931 - protein, 3 aa, Artificial Sequence
  Synthetic construct
QDN

SEQ ID NO: 21932 - protein, 3 aa, Artificial Sequence
  Synthetic construct
EVS

SEQ ID NO: 21933 - protein, 3 aa, Artificial Sequence
  Synthetic construct
EVN

SEQ ID NO: 21934 - protein, 3 aa, Artificial Sequence
  Synthetic construct
AAS

SEQ ID NO: 21935 - protein, 3 aa, Artificial Sequence
  Synthetic construct
KAS

SEQ ID NO: 21936 - protein, 3 aa, Artificial Sequence
  Synthetic construct
YDR

SEQ ID NO: 21937 - protein, 3 aa, Artificial Sequence
  Synthetic construct
AAS

SEQ ID NO: 21938 - protein, 3 aa, Artificial Sequence
  Synthetic construct
GAS

SEQ ID NO: 21939 - protein, 3 aa, Artificial Sequence
  Synthetic construct
QNT

SEQ ID NO: 21940 - protein, 3 aa, Artificial Sequence
  Synthetic construct
GAS

SEQ ID NO: 21941 - protein, 3 aa, Artificial Sequence
  Synthetic construct
KAS

SEQ ID NO: 21942 - protein, 3 aa, Artificial Sequence
  Synthetic construct
WAS

SEQ ID NO: 21943 - protein, 3 aa, Artificial Sequence
  Synthetic construct
GAS

SEQ ID NO: 21944 - protein, 3 aa, Artificial Sequence
  Synthetic construct
DVS

SEQ ID NO: 21945 - protein, 3 aa, Artificial Sequence
  Synthetic construct
AAS

SEQ ID NO: 21946 - protein, 3 aa, Artificial Sequence
  Synthetic construct
AAS

SEQ ID NO: 21947 - protein, 3 aa, Artificial Sequence
  Synthetic construct
EVS

SEQ ID NO: 21948 - protein, 3 aa, Artificial Sequence
  Synthetic construct
AAS

SEQ ID NO: 21949 - protein, 3 aa, Artificial Sequence
  Synthetic construct
DNN

SEQ ID NO: 21950 - protein, 3 aa, Artificial Sequence
  Synthetic construct
KDS

SEQ ID NO: 21951 - protein, 3 aa, Artificial Sequence
  Synthetic construct
WAS

SEQ ID NO: 21952 - protein, 3 aa, Artificial Sequence
  Synthetic construct
WAS

SEQ ID NO: 21953 - protein, 3 aa, Artificial Sequence
  Synthetic construct
WSS

SEQ ID NO: 21954 - protein, 3 aa, Artificial Sequence
  Synthetic construct
AAS

SEQ ID NO: 21955 - protein, 3 aa, Artificial Sequence
  Synthetic construct
TLS

SEQ ID NO: 21956 - protein, 3 aa, Artificial Sequence
  Synthetic construct
DAS

SEQ ID NO: 21957 - protein, 3 aa, Artificial Sequence
  Synthetic construct
SAS

SEQ ID NO: 21958 - protein, 3 aa, Artificial Sequence
  Synthetic construct
GAS

SEQ ID NO: 21959 - protein, 3 aa, Artificial Sequence
  Synthetic construct
DTS

SEQ ID NO: 21960 - protein, 3 aa, Artificial Sequence
  Synthetic construct
AAS

SEQ ID NO: 21961 - protein, 3 aa, Artificial Sequence
  Synthetic construct
KAS

SEQ ID NO: 21962 - protein, 3 aa, Artificial Sequence
  Synthetic construct
AAS

SEQ ID NO: 21963 - protein, 3 aa, Artificial Sequence
  Synthetic construct
ELS

SEQ ID NO: 21964 - protein, 3 aa, Artificial Sequence
  Synthetic construct
WAS

SEQ ID NO: 21965 - protein, 3 aa, Artificial Sequence
  Synthetic construct
WAS

SEQ ID NO: 21966 - protein, 3 aa, Artificial Sequence
  Synthetic construct
DAS

SEQ ID NO: 21967 - protein, 3 aa, Artificial Sequence
  Synthetic construct
YAS

SEQ ID NO: 21968 - protein, 3 aa, Artificial Sequence
  Synthetic construct
GAS

SEQ ID NO: 21969 - protein, 3 aa, Artificial Sequence
  Synthetic construct
GAS

SEQ ID NO: 21970 - protein, 3 aa, Artificial Sequence
  Synthetic construct
GSS

SEQ ID NO: 21971 - protein, 3 aa, Artificial Sequence
  Synthetic construct
SNH

SEQ ID NO: 21972 - protein, 3 aa, Artificial Sequence
  Synthetic construct
RVS

SEQ ID NO: 21973 - protein, 3 aa, Artificial Sequence
  Synthetic construct
GNS

SEQ ID NO: 21974 - protein, 3 aa, Artificial Sequence
  Synthetic construct
TAS

SEQ ID NO: 21975 - protein, 3 aa, Artificial Sequence
  Synthetic construct
GAS

SEQ ID NO: 21976 - protein, 3 aa, Artificial Sequence
  Synthetic construct
EDN

SEQ ID NO: 21977 - protein, 3 aa, Artificial Sequence
  Synthetic construct
GDT

SEQ ID NO: 21978 - protein, 3 aa, Artificial Sequence
  Synthetic construct
KAS

SEQ ID NO: 21979 - protein, 3 aa, Artificial Sequence
  Synthetic construct
WAS

SEQ ID NO: 21980 - protein, 3 aa, Artificial Sequence
  Synthetic construct
EGT

SEQ ID NO: 21981 - protein, 3 aa, Artificial Sequence
  Synthetic construct
DAV

SEQ ID NO: 21982 - protein, 3 aa, Artificial Sequence
  Synthetic construct
GAS

SEQ ID NO: 21983 - protein, 3 aa, Artificial Sequence
  Synthetic construct
AAS

SEQ ID NO: 21984 - protein, 3 aa, Artificial Sequence
  Synthetic construct
DNN

SEQ ID NO: 21985 - protein, 3 aa, Artificial Sequence
  Synthetic construct
AAS

SEQ ID NO: 21986 - protein, 3 aa, Artificial Sequence
  Synthetic construct
DAT

SEQ ID NO: 21987 - protein, 3 aa, Artificial Sequence
  Synthetic construct
AAS

SEQ ID NO: 21988 - protein, 3 aa, Artificial Sequence
  Synthetic construct
GAS

SEQ ID NO: 21989 - protein, 3 aa, Artificial Sequence
  Synthetic construct
RAS

SEQ ID NO: 21990 - protein, 3 aa, Artificial Sequence
  Synthetic construct
AAS

SEQ ID NO: 21991 - protein, 3 aa, Artificial Sequence
  Synthetic construct
YDS

SEQ ID NO: 21992 - protein, 3 aa, Artificial Sequence
  Synthetic construct
YND

SEQ ID NO: 21993 - protein, 3 aa, Artificial Sequence
  Synthetic construct
AAS

SEQ ID NO: 21994 - protein, 7 aa, Artificial Sequence
  Synthetic construct
YHSDSDN

SEQ ID NO: 21995 - protein, 3 aa, Artificial Sequence
  Synthetic construct
RNN

SEQ ID NO: 21996 - protein, 3 aa, Artificial Sequence
  Synthetic construct
WAS

SEQ ID NO: 21997 - protein, 3 aa, Artificial Sequence
  Synthetic construct
DNN

SEQ ID NO: 21998 - protein, 3 aa, Artificial Sequence
  Synthetic construct
GAS

SEQ ID NO: 21999 - protein, 3 aa, Artificial Sequence
  Synthetic construct
AAS

SEQ ID NO: 22000 - protein, 3 aa, Artificial Sequence
  Synthetic construct
AAS

SEQ ID NO: 22001 - protein, 3 aa, Artificial Sequence
  Synthetic construct
GAS

SEQ ID NO: 22002 - protein, 3 aa, Artificial Sequence
  Synthetic construct
AAS

SEQ ID NO: 22003 - protein, 3 aa, Artificial Sequence
  Synthetic construct
DAT

SEQ ID NO: 22004 - protein, 3 aa, Artificial Sequence
  Synthetic construct
NVH

SEQ ID NO: 22005 - protein, 3 aa, Artificial Sequence
  Synthetic construct
DVS

SEQ ID NO: 22006 - protein, 3 aa, Artificial Sequence
  Synthetic construct
EAS

SEQ ID NO: 22007 - protein, 3 aa, Artificial Sequence
  Synthetic construct
DAT

SEQ ID NO: 22008 - protein, 3 aa, Artificial Sequence
  Synthetic construct
DNN

SEQ ID NO: 22009 - protein, 3 aa, Artificial Sequence
  Synthetic construct
EGT

SEQ ID NO: 22010 - protein, 3 aa, Artificial Sequence
  Synthetic construct
WAS

SEQ ID NO: 22011 - protein, 3 aa, Artificial Sequence
  Synthetic construct
QDV

SEQ ID NO: 22012 - protein, 3 aa, Artificial Sequence
  Synthetic construct
LGS

SEQ ID NO: 22013 - protein, 3 aa, Artificial Sequence
  Synthetic construct
DDS

SEQ ID NO: 22014 - protein, 3 aa, Artificial Sequence
  Synthetic construct
GKN

SEQ ID NO: 22015 - protein, 3 aa, Artificial Sequence
  Synthetic construct
DNN

SEQ ID NO: 22016 - protein, 3 aa, Artificial Sequence
  Synthetic construct
KDS

SEQ ID NO: 22017 - protein, 3 aa, Artificial Sequence
  Synthetic construct
DAT

SEQ ID NO: 22018 - protein, 3 aa, Artificial Sequence
  Synthetic construct
WAS

SEQ ID NO: 22019 - protein, 3 aa, Artificial Sequence
  Synthetic construct
KDS

SEQ ID NO: 22020 - protein, 3 aa, Artificial Sequence
  Synthetic construct
KAS

SEQ ID NO: 22021 - protein, 3 aa, Artificial Sequence
  Synthetic construct
DDN

SEQ ID NO: 22022 - protein, 3 aa, Artificial Sequence
  Synthetic construct
EDN

SEQ ID NO: 22023 - protein, 3 aa, Artificial Sequence
  Synthetic construct
EVS

SEQ ID NO: 22024 - protein, 3 aa, Artificial Sequence
  Synthetic construct
GKD

SEQ ID NO: 22025 - protein, 3 aa, Artificial Sequence
  Synthetic construct
AVT

SEQ ID NO: 22026 - protein, 3 aa, Artificial Sequence
  Synthetic construct
AAS

SEQ ID NO: 22027 - protein, 3 aa, Artificial Sequence
  Synthetic construct
YDS

SEQ ID NO: 22028 - protein, 3 aa, Artificial Sequence
  Synthetic construct
AAS

SEQ ID NO: 22029 - protein, 3 aa, Artificial Sequence
  Synthetic construct
DAS

SEQ ID NO: 22030 - protein, 3 aa, Artificial Sequence
  Synthetic construct
DAS

SEQ ID NO: 22031 - protein, 3 aa, Artificial Sequence
  Synthetic construct
WAS

SEQ ID NO: 22032 - protein, 3 aa, Artificial Sequence
  Synthetic construct
DVS

SEQ ID NO: 22033 - protein, 3 aa, Artificial Sequence
  Synthetic construct
GAS

SEQ ID NO: 22034 - protein, 3 aa, Artificial Sequence
  Synthetic construct
AAS

SEQ ID NO: 22035 - protein, 3 aa, Artificial Sequence
  Synthetic construct
GAS

SEQ ID NO: 22036 - protein, 3 aa, Artificial Sequence
  Synthetic construct
DAT

SEQ ID NO: 22037 - protein, 3 aa, Artificial Sequence
  Synthetic construct
GTS

SEQ ID NO: 22038 - protein, 3 aa, Artificial Sequence
  Synthetic construct
AAS

SEQ ID NO: 22039 - protein, 3 aa, Artificial Sequence
  Synthetic construct
SAS

SEQ ID NO: 22040 - protein, 3 aa, Artificial Sequence
  Synthetic construct
YDR

SEQ ID NO: 22041 - protein, 3 aa, Artificial Sequence
  Synthetic construct
GAS

SEQ ID NO: 22042 - protein, 3 aa, Artificial Sequence
  Synthetic construct
RNN

SEQ ID NO: 22043 - protein, 3 aa, Artificial Sequence
  Synthetic construct
GNR

SEQ ID NO: 22044 - protein, 3 aa, Artificial Sequence
  Synthetic construct
KAS

SEQ ID NO: 22045 - protein, 3 aa, Artificial Sequence
  Synthetic construct
KVS

SEQ ID NO: 22046 - protein, 3 aa, Artificial Sequence
  Synthetic construct
WAS

SEQ ID NO: 22047 - protein, 3 aa, Artificial Sequence
  Synthetic construct
GAT

SEQ ID NO: 22048 - protein, 3 aa, Artificial Sequence
  Synthetic construct
AAS

SEQ ID NO: 22049 - protein, 3 aa, Artificial Sequence
  Synthetic construct
EDK

SEQ ID NO: 22050 - protein, 3 aa, Artificial Sequence
  Synthetic construct
DVS

SEQ ID NO: 22051 - protein, 3 aa, Artificial Sequence
  Synthetic construct
TDN

SEQ ID NO: 22052 - protein, 3 aa, Artificial Sequence
  Synthetic construct
AAS

SEQ ID NO: 22053 - protein, 3 aa, Artificial Sequence
  Synthetic construct
AAS

SEQ ID NO: 22054 - protein, 3 aa, Artificial Sequence
  Synthetic construct
STN

SEQ ID NO: 22055 - protein, 3 aa, Artificial Sequence
  Synthetic construct
AAS

SEQ ID NO: 22056 - protein, 3 aa, Artificial Sequence
  Synthetic construct
WAS

SEQ ID NO: 22057 - protein, 3 aa, Artificial Sequence
  Synthetic construct
LGS

SEQ ID NO: 22058 - protein, 3 aa, Artificial Sequence
  Synthetic construct
GAS

SEQ ID NO: 22059 - protein, 3 aa, Artificial Sequence
  Synthetic construct
GAS

SEQ ID NO: 22060 - protein, 3 aa, Artificial Sequence
  Synthetic construct
GAS

SEQ ID NO: 22061 - protein, 3 aa, Artificial Sequence
  Synthetic construct
DNN

SEQ ID NO: 22062 - protein, 3 aa, Artificial Sequence
  Synthetic construct
KVS

SEQ ID NO: 22063 - protein, 3 aa, Artificial Sequence
  Synthetic construct
DVS

SEQ ID NO: 22064 - protein, 3 aa, Artificial Sequence
  Synthetic construct
AAS

SEQ ID NO: 22065 - protein, 3 aa, Artificial Sequence
  Synthetic construct
DVS

SEQ ID NO: 22066 - protein, 3 aa, Artificial Sequence
  Synthetic construct
AAS

SEQ ID NO: 22067 - protein, 3 aa, Artificial Sequence
  Synthetic construct
KAS

SEQ ID NO: 22068 - protein, 3 aa, Artificial Sequence
  Synthetic construct
KAS

SEQ ID NO: 22069 - protein, 3 aa, Artificial Sequence
  Synthetic construct
DAS

SEQ ID NO: 22070 - protein, 3 aa, Artificial Sequence
  Synthetic construct
KAS

SEQ ID NO: 22071 - protein, 3 aa, Artificial Sequence
  Synthetic construct
DAS

SEQ ID NO: 22072 - protein, 3 aa, Artificial Sequence
  Synthetic construct
DAS

SEQ ID NO: 22073 - protein, 3 aa, Artificial Sequence
  Synthetic construct
AAS

SEQ ID NO: 22074 - protein, 3 aa, Artificial Sequence
  Synthetic construct
DKN

SEQ ID NO: 22075 - protein, 3 aa, Artificial Sequence
  Synthetic construct
LAS

SEQ ID NO: 22076 - protein, 3 aa, Artificial Sequence
  Synthetic construct
RNN

SEQ ID NO: 22077 - protein, 3 aa, Artificial Sequence
  Synthetic construct
GAS

SEQ ID NO: 22078 - protein, 3 aa, Artificial Sequence
  Synthetic construct
AAS

SEQ ID NO: 22079 - protein, 3 aa, Artificial Sequence
  Synthetic construct
DNN

SEQ ID NO: 22080 - protein, 3 aa, Artificial Sequence
  Synthetic construct
DAS

SEQ ID NO: 22081 - protein, 3 aa, Artificial Sequence
  Synthetic construct
AAS

SEQ ID NO: 22082 - protein, 3 aa, Artificial Sequence
  Synthetic construct
EVS

SEQ ID NO: 22083 - protein, 3 aa, Artificial Sequence
  Synthetic construct
AAS

SEQ ID NO: 22084 - protein, 3 aa, Artificial Sequence
  Synthetic construct
GAS

SEQ ID NO: 22085 - protein, 3 aa, Artificial Sequence
  Synthetic construct
DDN

SEQ ID NO: 22086 - protein, 3 aa, Artificial Sequence
  Synthetic construct
GAS

SEQ ID NO: 22087 - protein, 3 aa, Artificial Sequence
  Synthetic construct
WAS

SEQ ID NO: 22088 - protein, 3 aa, Artificial Sequence
  Synthetic construct
AAS

SEQ ID NO: 22089 - protein, 3 aa, Artificial Sequence
  Synthetic construct
GTS

SEQ ID NO: 22090 - protein, 3 aa, Artificial Sequence
  Synthetic construct
GKN

SEQ ID NO: 22091 - protein, 3 aa, Artificial Sequence
  Synthetic construct
GAS

SEQ ID NO: 22092 - protein, 3 aa, Artificial Sequence
  Synthetic construct
KAS

SEQ ID NO: 22093 - protein, 3 aa, Artificial Sequence
  Synthetic construct
SDR

SEQ ID NO: 22094 - protein, 3 aa, Artificial Sequence
  Synthetic construct
AAS

SEQ ID NO: 22095 - protein, 3 aa, Artificial Sequence
  Synthetic construct
AAS

SEQ ID NO: 22096 - protein, 3 aa, Artificial Sequence
  Synthetic construct
DVS

SEQ ID NO: 22097 - protein, 3 aa, Artificial Sequence
  Synthetic construct
AAS

SEQ ID NO: 22098 - protein, 3 aa, Artificial Sequence
  Synthetic construct
KAS

SEQ ID NO: 22099 - protein, 3 aa, Artificial Sequence
  Synthetic construct
QDS

SEQ ID NO: 22100 - protein, 3 aa, Artificial Sequence
  Synthetic construct
GAS

SEQ ID NO: 22101 - protein, 3 aa, Artificial Sequence
  Synthetic construct
EDT

SEQ ID NO: 22102 - protein, 3 aa, Artificial Sequence
  Synthetic construct
GAS

SEQ ID NO: 22103 - protein, 3 aa, Artificial Sequence
  Synthetic construct
AAS

SEQ ID NO: 22104 - protein, 3 aa, Artificial Sequence
  Synthetic construct
EVN

SEQ ID NO: 22105 - protein, 3 aa, Artificial Sequence
  Synthetic construct
GDT

SEQ ID NO: 22106 - protein, 3 aa, Artificial Sequence
  Synthetic construct
RNT

SEQ ID NO: 22107 - protein, 3 aa, Artificial Sequence
  Synthetic construct
AAS

SEQ ID NO: 22108 - protein, 3 aa, Artificial Sequence
  Synthetic construct
AAS

SEQ ID NO: 22109 - protein, 3 aa, Artificial Sequence
  Synthetic construct
EAT

SEQ ID NO: 22110 - protein, 3 aa, Artificial Sequence
  Synthetic construct
GNN

SEQ ID NO: 22111 - protein, 3 aa, Artificial Sequence
  Synthetic construct
GNT

SEQ ID NO: 22112 - protein, 3 aa, Artificial Sequence
  Synthetic construct
DVS

SEQ ID NO: 22113 - protein, 3 aa, Artificial Sequence
  Synthetic construct
RNT

SEQ ID NO: 22114 - protein, 3 aa, Artificial Sequence
  Synthetic construct
GAS

SEQ ID NO: 22115 - protein, 3 aa, Artificial Sequence
  Synthetic construct
WAS

SEQ ID NO: 22116 - protein, 3 aa, Artificial Sequence
  Synthetic construct
QDS

SEQ ID NO: 22117 - protein, 3 aa, Artificial Sequence
  Synthetic construct
DAS

SEQ ID NO: 22118 - protein, 3 aa, Artificial Sequence
  Synthetic construct
QDS

SEQ ID NO: 22119 - protein, 3 aa, Artificial Sequence
  Synthetic construct
SAS

SEQ ID NO: 22120 - protein, 3 aa, Artificial Sequence
  Synthetic construct
DTN

SEQ ID NO: 22121 - protein, 3 aa, Artificial Sequence
  Synthetic construct
RNN

SEQ ID NO: 22122 - protein, 3 aa, Artificial Sequence
  Synthetic construct
AAS

SEQ ID NO: 22123 - protein, 3 aa, Artificial Sequence
  Synthetic construct
KAS

SEQ ID NO: 22124 - protein, 3 aa, Artificial Sequence
  Synthetic construct
KAS

SEQ ID NO: 22125 - protein, 3 aa, Artificial Sequence
  Synthetic construct
LSS

SEQ ID NO: 22126 - protein, 3 aa, Artificial Sequence
  Synthetic construct
DAS

SEQ ID NO: 22127 - protein, 3 aa, Artificial Sequence
  Synthetic construct
AAS

SEQ ID NO: 22128 - protein, 3 aa, Artificial Sequence
  Synthetic construct
KAS

SEQ ID NO: 22129 - protein, 3 aa, Artificial Sequence
  Synthetic construct
KAS

SEQ ID NO: 22130 - protein, 3 aa, Artificial Sequence
  Synthetic construct
EDN

SEQ ID NO: 22131 - protein, 3 aa, Artificial Sequence
  Synthetic construct
YDN

SEQ ID NO: 22132 - protein, 3 aa, Artificial Sequence
  Synthetic construct
AAS

SEQ ID NO: 22133 - protein, 3 aa, Artificial Sequence
  Synthetic construct
DAS

SEQ ID NO: 22134 - protein, 3 aa, Artificial Sequence
  Synthetic construct
KVS

SEQ ID NO: 22135 - protein, 3 aa, Artificial Sequence
  Synthetic construct
NYN

SEQ ID NO: 22136 - protein, 3 aa, Artificial Sequence
  Synthetic construct
KAS

SEQ ID NO: 22137 - protein, 3 aa, Artificial Sequence
  Synthetic construct
AAS

SEQ ID NO: 22138 - protein, 3 aa, Artificial Sequence
  Synthetic construct
GDT

SEQ ID NO: 22139 - protein, 3 aa, Artificial Sequence
  Synthetic construct
AAS

SEQ ID NO: 22140 - protein, 3 aa, Artificial Sequence
  Synthetic construct
AAS

SEQ ID NO: 22141 - protein, 3 aa, Artificial Sequence
  Synthetic construct
KIS

SEQ ID NO: 22142 - protein, 3 aa, Artificial Sequence
  Synthetic construct
GTS

SEQ ID NO: 22143 - protein, 8 aa, Artificial Sequence
  Synthetic construct
VGPNGIVG

SEQ ID NO: 22144 - protein, 3 aa, Artificial Sequence
  Synthetic construct
WAS

SEQ ID NO: 22145 - protein, 3 aa, Artificial Sequence
  Synthetic construct
EDN

SEQ ID NO: 22146 - protein, 3 aa, Artificial Sequence
  Synthetic construct
WAS

SEQ ID NO: 22147 - protein, 3 aa, Artificial Sequence
  Synthetic construct
AAS

SEQ ID NO: 22148 - protein, 3 aa, Artificial Sequence
  Synthetic construct
LGS

SEQ ID NO: 22149 - protein, 3 aa, Artificial Sequence
  Synthetic construct
HDA

SEQ ID NO: 22150 - protein, 3 aa, Artificial Sequence
  Synthetic construct
EVN

SEQ ID NO: 22151 - protein, 3 aa, Artificial Sequence
  Synthetic construct
AAS

SEQ ID NO: 22152 - protein, 3 aa, Artificial Sequence
  Synthetic construct
ELS

SEQ ID NO: 22153 - protein, 3 aa, Artificial Sequence
  Synthetic construct
GAY

SEQ ID NO: 22154 - protein, 3 aa, Artificial Sequence
  Synthetic construct
EVS

SEQ ID NO: 22155 - protein, 3 aa, Artificial Sequence
  Synthetic construct
AAS

SEQ ID NO: 22156 - protein, 3 aa, Artificial Sequence
  Synthetic construct
KVS

SEQ ID NO: 22157 - protein, 3 aa, Artificial Sequence
  Synthetic construct
NSN

SEQ ID NO: 22158 - protein, 3 aa, Artificial Sequence
  Synthetic construct
DVY

SEQ ID NO: 22159 - protein, 3 aa, Artificial Sequence
  Synthetic construct
SAS

SEQ ID NO: 22160 - protein, 3 aa, Artificial Sequence
  Synthetic construct
KVS

SEQ ID NO: 22161 - protein, 3 aa, Artificial Sequence
  Synthetic construct
DAS

SEQ ID NO: 22162 - protein, 3 aa, Artificial Sequence
  Synthetic construct
AAS

SEQ ID NO: 22163 - protein, 3 aa, Artificial Sequence
  Synthetic construct
GAS

SEQ ID NO: 22164 - protein, 3 aa, Artificial Sequence
  Synthetic construct
KTS

SEQ ID NO: 22165 - protein, 3 aa, Artificial Sequence
  Synthetic construct
YNS

SEQ ID NO: 22166 - protein, 3 aa, Artificial Sequence
  Synthetic construct
KVS

SEQ ID NO: 22167 - protein, 3 aa, Artificial Sequence
  Synthetic construct
GAS

SEQ ID NO: 22168 - protein, 3 aa, Artificial Sequence
  Synthetic construct
DAS

SEQ ID NO: 22169 - protein, 3 aa, Artificial Sequence
  Synthetic construct
EVT

SEQ ID NO: 22170 - protein, 3 aa, Artificial Sequence
  Synthetic construct
GAT

SEQ ID NO: 22171 - protein, 3 aa, Artificial Sequence
  Synthetic construct
GNS

SEQ ID NO: 22172 - protein, 3 aa, Artificial Sequence
  Synthetic construct
EVS

SEQ ID NO: 22173 - protein, 3 aa, Artificial Sequence
  Synthetic construct
WAS

SEQ ID NO: 22174 - protein, 3 aa, Artificial Sequence
  Synthetic construct
AAS

SEQ ID NO: 22175 - protein, 3 aa, Artificial Sequence
  Synthetic construct
LGS

SEQ ID NO: 22176 - protein, 3 aa, Artificial Sequence
  Synthetic construct
GDT

SEQ ID NO: 22177 - protein, 3 aa, Artificial Sequence
  Synthetic construct
AAS

SEQ ID NO: 22178 - protein, 3 aa, Artificial Sequence
  Synthetic construct
GTD

SEQ ID NO: 22179 - protein, 3 aa, Artificial Sequence
  Synthetic construct
QVS

SEQ ID NO: 22180 - protein, 3 aa, Artificial Sequence
  Synthetic construct
AAS

SEQ ID NO: 22181 - protein, 3 aa, Artificial Sequence
  Synthetic construct
WAS

SEQ ID NO: 22182 - protein, 3 aa, Artificial Sequence
  Synthetic construct
QAS

SEQ ID NO: 22183 - protein, 3 aa, Artificial Sequence
  Synthetic construct
EVN

SEQ ID NO: 22184 - protein, 3 aa, Artificial Sequence
  Synthetic construct
GAS

SEQ ID NO: 22185 - protein, 3 aa, Artificial Sequence
  Synthetic construct
GAS

SEQ ID NO: 22186 - protein, 3 aa, Artificial Sequence
  Synthetic construct
STT

SEQ ID NO: 22187 - protein, 3 aa, Artificial Sequence
  Synthetic construct
DTS

SEQ ID NO: 22188 - protein, 3 aa, Artificial Sequence
  Synthetic construct
GAS

SEQ ID NO: 22189 - protein, 3 aa, Artificial Sequence
  Synthetic construct
GAS

SEQ ID NO: 22190 - protein, 3 aa, Artificial Sequence
  Synthetic construct
GDT

SEQ ID NO: 22191 - protein, 3 aa, Artificial Sequence
  Synthetic construct
GAS

SEQ ID NO: 22192 - protein, 3 aa, Artificial Sequence
  Synthetic construct
DVS

SEQ ID NO: 22193 - protein, 7 aa, Artificial Sequence
  Synthetic construct
LNSDGSH

SEQ ID NO: 22194 - protein, 3 aa, Artificial Sequence
  Synthetic construct
RAS

SEQ ID NO: 22195 - protein, 3 aa, Artificial Sequence
  Synthetic construct
DVS

SEQ ID NO: 22196 - protein, 3 aa, Artificial Sequence
  Synthetic construct
KIS

SEQ ID NO: 22197 - protein, 3 aa, Artificial Sequence
  Synthetic construct
AAS

SEQ ID NO: 22198 - protein, 3 aa, Artificial Sequence
  Synthetic construct
AAS

SEQ ID NO: 22199 - protein, 3 aa, Artificial Sequence
  Synthetic construct
IAS

SEQ ID NO: 22200 - protein, 7 aa, Artificial Sequence
  Synthetic construct
LNSDGSH

SEQ ID NO: 22201 - protein, 3 aa, Artificial Sequence
  Synthetic construct
KDS

SEQ ID NO: 22202 - protein, 3 aa, Artificial Sequence
  Synthetic construct
RNT

SEQ ID NO: 22203 - protein, 3 aa, Artificial Sequence
  Synthetic construct
ENN

SEQ ID NO: 22204 - protein, 3 aa, Artificial Sequence
  Synthetic construct
RNN

SEQ ID NO: 22205 - protein, 3 aa, Artificial Sequence
  Synthetic construct
WAS

SEQ ID NO: 22206 - protein, 3 aa, Artificial Sequence
  Synthetic construct
AAS

SEQ ID NO: 22207 - protein, 3 aa, Artificial Sequence
  Synthetic construct
RND

SEQ ID NO: 22208 - protein, 7 aa, Artificial Sequence
  Synthetic construct
YKSDLDK

SEQ ID NO: 22209 - protein, 3 aa, Artificial Sequence
  Synthetic construct
GAS

SEQ ID NO: 22210 - protein, 3 aa, Artificial Sequence
  Synthetic construct
KDS

SEQ ID NO: 22211 - protein, 3 aa, Artificial Sequence
  Synthetic construct
GAS

SEQ ID NO: 22212 - protein, 3 aa, Artificial Sequence
  Synthetic construct
DNN

SEQ ID NO: 22213 - protein, 3 aa, Artificial Sequence
  Synthetic construct
GAS

SEQ ID NO: 22214 - protein, 3 aa, Artificial Sequence
  Synthetic construct
LGS

SEQ ID NO: 22215 - protein, 3 aa, Artificial Sequence
  Synthetic construct
AAS

SEQ ID NO: 22216 - protein, 3 aa, Artificial Sequence
  Synthetic construct
WAS

SEQ ID NO: 22217 - protein, 3 aa, Artificial Sequence
  Synthetic construct
AAS

SEQ ID NO: 22218 - protein, 3 aa, Artificial Sequence
  Synthetic construct
GNN

SEQ ID NO: 22219 - protein, 3 aa, Artificial Sequence
  Synthetic construct
GAS

SEQ ID NO: 22220 - protein, 3 aa, Artificial Sequence
  Synthetic construct
DAT

SEQ ID NO: 22221 - protein, 3 aa, Artificial Sequence
  Synthetic construct
KAS

SEQ ID NO: 22222 - protein, 3 aa, Artificial Sequence
  Synthetic construct
DVS

SEQ ID NO: 22223 - protein, 3 aa, Artificial Sequence
  Synthetic construct
TAS

SEQ ID NO: 22224 - protein, 3 aa, Artificial Sequence
  Synthetic construct
DVY

SEQ ID NO: 22225 - protein, 3 aa, Artificial Sequence
  Synthetic construct
DAS

SEQ ID NO: 22226 - protein, 3 aa, Artificial Sequence
  Synthetic construct
KAS

SEQ ID NO: 22227 - protein, 3 aa, Artificial Sequence
  Synthetic construct
GKN

SEQ ID NO: 22228 - protein, 3 aa, Artificial Sequence
  Synthetic construct
YNS

SEQ ID NO: 22229 - protein, 3 aa, Artificial Sequence
  Synthetic construct
RNN

SEQ ID NO: 22230 - protein, 7 aa, Artificial Sequence
  Synthetic construct
LNSDGSH

SEQ ID NO: 22231 - protein, 3 aa, Artificial Sequence
  Synthetic construct
DNN

SEQ ID NO: 22232 - protein, 3 aa, Artificial Sequence
  Synthetic construct
KDR

SEQ ID NO: 22233 - protein, 3 aa, Artificial Sequence
  Synthetic construct
KDS

SEQ ID NO: 22234 - protein, 3 aa, Artificial Sequence
  Synthetic construct
DVT

SEQ ID NO: 22235 - protein, 3 aa, Artificial Sequence
  Synthetic construct
AAS

SEQ ID NO: 22236 - protein, 3 aa, Artificial Sequence
  Synthetic construct
SNN

SEQ ID NO: 22237 - protein, 3 aa, Artificial Sequence
  Synthetic construct
KNS

SEQ ID NO: 22238 - protein, 3 aa, Artificial Sequence
  Synthetic construct
DTS

SEQ ID NO: 22239 - protein, 3 aa, Artificial Sequence
  Synthetic construct
AAS

SEQ ID NO: 22240 - protein, 3 aa, Artificial Sequence
  Synthetic construct
AAS

SEQ ID NO: 22241 - protein, 3 aa, Artificial Sequence
  Synthetic construct
KAS

SEQ ID NO: 22242 - protein, 3 aa, Artificial Sequence
  Synthetic construct
GAS

SEQ ID NO: 22243 - protein, 3 aa, Artificial Sequence
  Synthetic construct
WAS

SEQ ID NO: 22244 - protein, 3 aa, Artificial Sequence
  Synthetic construct
RNN

SEQ ID NO: 22245 - protein, 3 aa, Artificial Sequence
  Synthetic construct
GKN

SEQ ID NO: 22246 - protein, 3 aa, Artificial Sequence
  Synthetic construct
QDS

SEQ ID NO: 22247 - protein, 3 aa, Artificial Sequence
  Synthetic construct
AAS

SEQ ID NO: 22248 - protein, 3 aa, Artificial Sequence
  Synthetic construct
AAS

SEQ ID NO: 22249 - protein, 3 aa, Artificial Sequence
  Synthetic construct
EGS

SEQ ID NO: 22250 - protein, 3 aa, Artificial Sequence
  Synthetic construct
AAS

SEQ ID NO: 22251 - protein, 3 aa, Artificial Sequence
  Synthetic construct
DNN

SEQ ID NO: 22252 - protein, 3 aa, Artificial Sequence
  Synthetic construct
DVS

SEQ ID NO: 22253 - protein, 3 aa, Artificial Sequence
  Synthetic construct
DAF

SEQ ID NO: 22254 - protein, 3 aa, Artificial Sequence
  Synthetic construct
DVS

SEQ ID NO: 22255 - protein, 3 aa, Artificial Sequence
  Synthetic construct
AAS

SEQ ID NO: 22256 - protein, 3 aa, Artificial Sequence
  Synthetic construct
AAS

SEQ ID NO: 22257 - protein, 3 aa, Artificial Sequence
  Synthetic construct
KAS

SEQ ID NO: 22258 - protein, 3 aa, Artificial Sequence
  Synthetic construct
GAS

SEQ ID NO: 22259 - protein, 3 aa, Artificial Sequence
  Synthetic construct
AAS

SEQ ID NO: 22260 - protein, 3 aa, Artificial Sequence
  Synthetic construct
STN

SEQ ID NO: 22261 - protein, 3 aa, Artificial Sequence
  Synthetic construct
EVS

SEQ ID NO: 22262 - protein, 3 aa, Artificial Sequence
  Synthetic construct
DVS

SEQ ID NO: 22263 - protein, 3 aa, Artificial Sequence
  Synthetic construct
AAS

SEQ ID NO: 22264 - protein, 3 aa, Artificial Sequence
  Synthetic construct
DNY

SEQ ID NO: 22265 - protein, 3 aa, Artificial Sequence
  Synthetic construct
RNN

SEQ ID NO: 22266 - protein, 3 aa, Artificial Sequence
  Synthetic construct
GAS

SEQ ID NO: 22267 - protein, 3 aa, Artificial Sequence
  Synthetic construct
DAS

SEQ ID NO: 22268 - protein, 3 aa, Artificial Sequence
  Synthetic construct
WAS

SEQ ID NO: 22269 - protein, 3 aa, Artificial Sequence
  Synthetic construct
EGS

SEQ ID NO: 22270 - protein, 3 aa, Artificial Sequence
  Synthetic construct
EET

SEQ ID NO: 22271 - protein, 3 aa, Artificial Sequence
  Synthetic construct
DAS

SEQ ID NO: 22272 - protein, 3 aa, Artificial Sequence
  Synthetic construct
GNN

SEQ ID NO: 22273 - protein, 3 aa, Artificial Sequence
  Synthetic construct
KIS

SEQ ID NO: 22274 - protein, 3 aa, Artificial Sequence
  Synthetic construct
QVS

SEQ ID NO: 22275 - protein, 3 aa, Artificial Sequence
  Synthetic construct
GSS

SEQ ID NO: 22276 - protein, 3 aa, Artificial Sequence
  Synthetic construct
AAS

SEQ ID NO: 22277 - protein, 3 aa, Artificial Sequence
  Synthetic construct
AAS

SEQ ID NO: 22278 - protein, 3 aa, Artificial Sequence
  Synthetic construct
WAS

SEQ ID NO: 22279 - protein, 3 aa, Artificial Sequence
  Synthetic construct
RNN

SEQ ID NO: 22280 - protein, 3 aa, Artificial Sequence
  Synthetic construct
AAS

SEQ ID NO: 22281 - protein, 3 aa, Artificial Sequence
  Synthetic construct
GNG

SEQ ID NO: 22282 - protein, 3 aa, Artificial Sequence
  Synthetic construct
DVS

SEQ ID NO: 22283 - protein, 3 aa, Artificial Sequence
  Synthetic construct
DVS

SEQ ID NO: 22284 - protein, 3 aa, Artificial Sequence
  Synthetic construct
WAS

SEQ ID NO: 22285 - protein, 3 aa, Artificial Sequence
  Synthetic construct
WAS

SEQ ID NO: 22286 - protein, 7 aa, Artificial Sequence
  Synthetic construct
LNSDGSH

SEQ ID NO: 22287 - protein, 3 aa, Artificial Sequence
  Synthetic construct
AAS

SEQ ID NO: 22288 - protein, 3 aa, Artificial Sequence
  Synthetic construct
DNY

SEQ ID NO: 22289 - protein, 3 aa, Artificial Sequence
  Synthetic construct
VAS

SEQ ID NO: 22290 - protein, 3 aa, Artificial Sequence
  Synthetic construct
EVS

SEQ ID NO: 22291 - protein, 3 aa, Artificial Sequence
  Synthetic construct
GAS

SEQ ID NO: 22292 - protein, 3 aa, Artificial Sequence
  Synthetic construct
ATS

SEQ ID NO: 22293 - protein, 3 aa, Artificial Sequence
  Synthetic construct
ETS

SEQ ID NO: 22294 - protein, 3 aa, Artificial Sequence
  Synthetic construct
GAS

SEQ ID NO: 22295 - protein, 3 aa, Artificial Sequence
  Synthetic construct
RNN

SEQ ID NO: 22296 - protein, 3 aa, Artificial Sequence
  Synthetic construct
EVS

SEQ ID NO: 22297 - protein, 3 aa, Artificial Sequence
  Synthetic construct
GAS

SEQ ID NO: 22298 - protein, 3 aa, Artificial Sequence
  Synthetic construct
EVN

SEQ ID NO: 22299 - protein, 3 aa, Artificial Sequence
  Synthetic construct
GAS

SEQ ID NO: 22300 - protein, 3 aa, Artificial Sequence
  Synthetic construct
SVS

SEQ ID NO: 22301 - protein, 3 aa, Artificial Sequence
  Synthetic construct
KVS

SEQ ID NO: 22302 - protein, 3 aa, Artificial Sequence
  Synthetic construct
AAS

SEQ ID NO: 22303 - protein, 3 aa, Artificial Sequence
  Synthetic construct
KAS

SEQ ID NO: 22304 - protein, 3 aa, Artificial Sequence
  Synthetic construct
KAS

SEQ ID NO: 22305 - protein, 3 aa, Artificial Sequence
  Synthetic construct
KVS

SEQ ID NO: 22306 - protein, 3 aa, Artificial Sequence
  Synthetic construct
AAS

SEQ ID NO: 22307 - protein, 7 aa, Artificial Sequence
  Synthetic construct
YKSDSDK

SEQ ID NO: 22308 - protein, 3 aa, Artificial Sequence
  Synthetic construct
WAS

SEQ ID NO: 22309 - protein, 3 aa, Artificial Sequence
  Synthetic construct
YEE

SEQ ID NO: 22310 - protein, 3 aa, Artificial Sequence
  Synthetic construct
DAS

SEQ ID NO: 22311 - protein, 3 aa, Artificial Sequence
  Synthetic construct
GAS

SEQ ID NO: 22312 - protein, 3 aa, Artificial Sequence
  Synthetic construct
KAS

SEQ ID NO: 22313 - protein, 3 aa, Artificial Sequence
  Synthetic construct
KAS

SEQ ID NO: 22314 - protein, 3 aa, Artificial Sequence
  Synthetic construct
AAS

SEQ ID NO: 22315 - protein, 3 aa, Artificial Sequence
  Synthetic construct
AAS

SEQ ID NO: 22316 - protein, 3 aa, Artificial Sequence
  Synthetic construct
DVS

SEQ ID NO: 22317 - protein, 3 aa, Artificial Sequence
  Synthetic construct
WAS

SEQ ID NO: 22318 - protein, 7 aa, Artificial Sequence
  Synthetic construct
LNSDGSH

SEQ ID NO: 22319 - protein, 3 aa, Artificial Sequence
  Synthetic construct
AAS

SEQ ID NO: 22320 - protein, 3 aa, Artificial Sequence
  Synthetic construct
WAT

SEQ ID NO: 22321 - protein, 3 aa, Artificial Sequence
  Synthetic construct
DAS

SEQ ID NO: 22322 - protein, 3 aa, Artificial Sequence
  Synthetic construct
KAS

SEQ ID NO: 22323 - protein, 3 aa, Artificial Sequence
  Synthetic construct
FGS

SEQ ID NO: 22324 - protein, 3 aa, Artificial Sequence
  Synthetic construct
DAS

SEQ ID NO: 22325 - protein, 3 aa, Artificial Sequence
  Synthetic construct
AAS

SEQ ID NO: 22326 - protein, 3 aa, Artificial Sequence
  Synthetic construct
KAS

SEQ ID NO: 22327 - protein, 3 aa, Artificial Sequence
  Synthetic construct
GAS

SEQ ID NO: 22328 - protein, 3 aa, Artificial Sequence
  Synthetic construct
SAS

SEQ ID NO: 22329 - protein, 3 aa, Artificial Sequence
  Synthetic construct
AAS

SEQ ID NO: 22330 - protein, 3 aa, Artificial Sequence
  Synthetic construct
KAS

SEQ ID NO: 22331 - protein, 3 aa, Artificial Sequence
  Synthetic construct
GAS

SEQ ID NO: 22332 - protein, 3 aa, Artificial Sequence
  Synthetic construct
KDS

SEQ ID NO: 22333 - protein, 3 aa, Artificial Sequence
  Synthetic construct
KVS

SEQ ID NO: 22334 - protein, 3 aa, Artificial Sequence
  Synthetic construct
EVS

SEQ ID NO: 22335 - protein, 3 aa, Artificial Sequence
  Synthetic construct
WAS

SEQ ID NO: 22336 - protein, 3 aa, Artificial Sequence
  Synthetic construct
DVS

SEQ ID NO: 22337 - protein, 3 aa, Artificial Sequence
  Synthetic construct
DNS

SEQ ID NO: 22338 - protein, 3 aa, Artificial Sequence
  Synthetic construct
AAS

SEQ ID NO: 22339 - protein, 3 aa, Artificial Sequence
  Synthetic construct
KTS

SEQ ID NO: 22340 - protein, 3 aa, Artificial Sequence
  Synthetic construct
AAS

SEQ ID NO: 22341 - protein, 3 aa, Artificial Sequence
  Synthetic construct
AAS

SEQ ID NO: 22342 - protein, 3 aa, Artificial Sequence
  Synthetic construct
DAS

SEQ ID NO: 22343 - protein, 3 aa, Artificial Sequence
  Synthetic construct
AAS

SEQ ID NO: 22344 - protein, 3 aa, Artificial Sequence
  Synthetic construct
DVS

SEQ ID NO: 22345 - protein, 3 aa, Artificial Sequence
  Synthetic construct
GAS

SEQ ID NO: 22346 - protein, 3 aa, Artificial Sequence
  Synthetic construct
HAS

SEQ ID NO: 22347 - protein, 3 aa, Artificial Sequence
  Synthetic construct
TAS

SEQ ID NO: 22348 - protein, 3 aa, Artificial Sequence
  Synthetic construct
RNT

SEQ ID NO: 22349 - protein, 3 aa, Artificial Sequence
  Synthetic construct
KDS

SEQ ID NO: 22350 - protein, 3 aa, Artificial Sequence
  Synthetic construct
HVS

SEQ ID NO: 22351 - protein, 3 aa, Artificial Sequence
  Synthetic construct
GAS

SEQ ID NO: 22352 - protein, 3 aa, Artificial Sequence
  Synthetic construct
DTS

SEQ ID NO: 22353 - protein, 3 aa, Artificial Sequence
  Synthetic construct
DVS

SEQ ID NO: 22354 - protein, 3 aa, Artificial Sequence
  Synthetic construct
WAS

SEQ ID NO: 22355 - protein, 3 aa, Artificial Sequence
  Synthetic construct
RNN

SEQ ID NO: 22356 - protein, 3 aa, Artificial Sequence
  Synthetic construct
YDS

SEQ ID NO: 22357 - protein, 3 aa, Artificial Sequence
  Synthetic construct
AAS

SEQ ID NO: 22358 - protein, 3 aa, Artificial Sequence
  Synthetic construct
GAS

SEQ ID NO: 22359 - protein, 3 aa, Artificial Sequence
  Synthetic construct
DAS

SEQ ID NO: 22360 - protein, 3 aa, Artificial Sequence
  Synthetic construct
KVS

SEQ ID NO: 22361 - protein, 3 aa, Artificial Sequence
  Synthetic construct
KDT

SEQ ID NO: 22362 - protein, 3 aa, Artificial Sequence
  Synthetic construct
AAS

SEQ ID NO: 22363 - protein, 3 aa, Artificial Sequence
  Synthetic construct
DAS

SEQ ID NO: 22364 - protein, 3 aa, Artificial Sequence
  Synthetic construct
GAS

SEQ ID NO: 22365 - protein, 3 aa, Artificial Sequence
  Synthetic construct
GAS

SEQ ID NO: 22366 - protein, 3 aa, Artificial Sequence
  Synthetic construct
KAS

SEQ ID NO: 22367 - protein, 3 aa, Artificial Sequence
  Synthetic construct
DVD

SEQ ID NO: 22368 - protein, 3 aa, Artificial Sequence
  Synthetic construct
QDN

SEQ ID NO: 22369 - protein, 3 aa, Artificial Sequence
  Synthetic construct
AAS

SEQ ID NO: 22370 - protein, 3 aa, Artificial Sequence
  Synthetic construct
WAS

SEQ ID NO: 22371 - protein, 3 aa, Artificial Sequence
  Synthetic construct
DNN

SEQ ID NO: 22372 - protein, 3 aa, Artificial Sequence
  Synthetic construct
AAS

SEQ ID NO: 22373 - protein, 3 aa, Artificial Sequence
  Synthetic construct
AAS

SEQ ID NO: 22374 - protein, 3 aa, Artificial Sequence
  Synthetic construct
DVS

SEQ ID NO: 22375 - protein, 3 aa, Artificial Sequence
  Synthetic construct
AAS

SEQ ID NO: 22376 - protein, 3 aa, Artificial Sequence
  Synthetic construct
GAS

SEQ ID NO: 22377 - protein, 3 aa, Artificial Sequence
  Synthetic construct
GAS

SEQ ID NO: 22378 - protein, 3 aa, Artificial Sequence
  Synthetic construct
RVS

SEQ ID NO: 22379 - protein, 3 aa, Artificial Sequence
  Synthetic construct
QET

SEQ ID NO: 22380 - protein, 3 aa, Artificial Sequence
  Synthetic construct
SAS

SEQ ID NO: 22381 - protein, 3 aa, Artificial Sequence
  Synthetic construct
DAS

SEQ ID NO: 22382 - protein, 3 aa, Artificial Sequence
  Synthetic construct
DAS

SEQ ID NO: 22383 - protein, 3 aa, Artificial Sequence
  Synthetic construct
AAS

SEQ ID NO: 22384 - protein, 3 aa, Artificial Sequence
  Synthetic construct
AAS

SEQ ID NO: 22385 - protein, 3 aa, Artificial Sequence
  Synthetic construct
QGS

SEQ ID NO: 22386 - protein, 3 aa, Artificial Sequence
  Synthetic construct
AAS

SEQ ID NO: 22387 - protein, 3 aa, Artificial Sequence
  Synthetic construct
EVS

SEQ ID NO: 22388 - protein, 7 aa, Artificial Sequence
  Synthetic construct
YHSDSDN

SEQ ID NO: 22389 - protein, 3 aa, Artificial Sequence
  Synthetic construct
DVS

SEQ ID NO: 22390 - protein, 3 aa, Artificial Sequence
  Synthetic construct
AAS

SEQ ID NO: 22391 - protein, 3 aa, Artificial Sequence
  Synthetic construct
EVN

SEQ ID NO: 22392 - protein, 3 aa, Artificial Sequence
  Synthetic construct
KAS

SEQ ID NO: 22393 - protein, 3 aa, Artificial Sequence
  Synthetic construct
AAS

SEQ ID NO: 22394 - protein, 7 aa, Artificial Sequence
  Synthetic construct
LNSDGSR

SEQ ID NO: 22395 - protein, 3 aa, Artificial Sequence
  Synthetic construct
DAT

SEQ ID NO: 22396 - protein, 3 aa, Artificial Sequence
  Synthetic construct
DDD

SEQ ID NO: 22397 - protein, 3 aa, Artificial Sequence
  Synthetic construct
DVS

SEQ ID NO: 22398 - protein, 3 aa, Artificial Sequence
  Synthetic construct
AAS

SEQ ID NO: 22399 - protein, 3 aa, Artificial Sequence
  Synthetic construct
KAS

SEQ ID NO: 22400 - protein, 3 aa, Artificial Sequence
  Synthetic construct
AAA

SEQ ID NO: 22401 - protein, 3 aa, Artificial Sequence
  Synthetic construct
GAS

SEQ ID NO: 22402 - protein, 3 aa, Artificial Sequence
  Synthetic construct
KAS

SEQ ID NO: 22403 - protein, 3 aa, Artificial Sequence
  Synthetic construct
GAS

SEQ ID NO: 22404 - protein, 3 aa, Artificial Sequence
  Synthetic construct
KVS

SEQ ID NO: 22405 - protein, 3 aa, Artificial Sequence
  Synthetic construct
ATS

SEQ ID NO: 22406 - protein, 3 aa, Artificial Sequence
  Synthetic construct
WAS

SEQ ID NO: 22407 - protein, 3 aa, Artificial Sequence
  Synthetic construct
GAS

SEQ ID NO: 22408 - protein, 3 aa, Artificial Sequence
  Synthetic construct
SNN

SEQ ID NO: 22409 - protein, 3 aa, Artificial Sequence
  Synthetic construct
YSS

SEQ ID NO: 22410 - protein, 3 aa, Artificial Sequence
  Synthetic construct
EVS

SEQ ID NO: 22411 - protein, 7 aa, Artificial Sequence
  Synthetic construct
LNSDGSH

SEQ ID NO: 22412 - protein, 3 aa, Artificial Sequence
  Synthetic construct
AAS

SEQ ID NO: 22413 - protein, 3 aa, Artificial Sequence
  Synthetic construct
GAS

SEQ ID NO: 22414 - protein, 3 aa, Artificial Sequence
  Synthetic construct
DVT

SEQ ID NO: 22415 - protein, 3 aa, Artificial Sequence
  Synthetic construct
GSS

SEQ ID NO: 22416 - protein, 3 aa, Artificial Sequence
  Synthetic construct
AAS

SEQ ID NO: 22417 - protein, 3 aa, Artificial Sequence
  Synthetic construct
RNN

SEQ ID NO: 22418 - protein, 3 aa, Artificial Sequence
  Synthetic construct
KVS

SEQ ID NO: 22419 - protein, 3 aa, Artificial Sequence
  Synthetic construct
STS

SEQ ID NO: 22420 - protein, 3 aa, Artificial Sequence
  Synthetic construct
GAS

SEQ ID NO: 22421 - protein, 3 aa, Artificial Sequence
  Synthetic construct
AAS

SEQ ID NO: 22422 - protein, 3 aa, Artificial Sequence
  Synthetic construct
DVS

SEQ ID NO: 22423 - protein, 3 aa, Artificial Sequence
  Synthetic construct
AAS

SEQ ID NO: 22424 - protein, 3 aa, Artificial Sequence
  Synthetic construct
SAS

SEQ ID NO: 22425 - protein, 3 aa, Artificial Sequence
  Synthetic construct
GAS

SEQ ID NO: 22426 - protein, 3 aa, Artificial Sequence
  Synthetic construct
AAS

SEQ ID NO: 22427 - protein, 3 aa, Artificial Sequence
  Synthetic construct
GAS

SEQ ID NO: 22428 - protein, 3 aa, Artificial Sequence
  Synthetic construct
RNR

SEQ ID NO: 22429 - protein, 3 aa, Artificial Sequence
  Synthetic construct
EVS

SEQ ID NO: 22430 - protein, 3 aa, Artificial Sequence
  Synthetic construct
LGS

SEQ ID NO: 22431 - protein, 3 aa, Artificial Sequence
  Synthetic construct
GAS

SEQ ID NO: 22432 - protein, 3 aa, Artificial Sequence
  Synthetic construct
EVN

SEQ ID NO: 22433 - protein, 3 aa, Artificial Sequence
  Synthetic construct
AAS

SEQ ID NO: 22434 - protein, 3 aa, Artificial Sequence
  Synthetic construct
AAS

SEQ ID NO: 22435 - protein, 3 aa, Artificial Sequence
  Synthetic construct
DNN

SEQ ID NO: 22436 - protein, 3 aa, Artificial Sequence
  Synthetic construct
WAS

SEQ ID NO: 22437 - protein, 3 aa, Artificial Sequence
  Synthetic construct
GAS

SEQ ID NO: 22438 - protein, 7 aa, Artificial Sequence
  Synthetic construct
YKSDSDK

SEQ ID NO: 22439 - protein, 3 aa, Artificial Sequence
  Synthetic construct
DAS

SEQ ID NO: 22440 - protein, 3 aa, Artificial Sequence
  Synthetic construct
YDT

SEQ ID NO: 22441 - protein, 3 aa, Artificial Sequence
  Synthetic construct
RNN

SEQ ID NO: 22442 - protein, 3 aa, Artificial Sequence
  Synthetic construct
AAS

SEQ ID NO: 22443 - protein, 3 aa, Artificial Sequence
  Synthetic construct
GAS

SEQ ID NO: 22444 - protein, 3 aa, Artificial Sequence
  Synthetic construct
AAS

SEQ ID NO: 22445 - protein, 3 aa, Artificial Sequence
  Synthetic construct
DTS

SEQ ID NO: 22446 - protein, 3 aa, Artificial Sequence
  Synthetic construct
IAT

SEQ ID NO: 22447 - protein, 3 aa, Artificial Sequence
  Synthetic construct
DTS

SEQ ID NO: 22448 - protein, 3 aa, Artificial Sequence
  Synthetic construct
DVS

SEQ ID NO: 22449 - protein, 3 aa, Artificial Sequence
  Synthetic construct
GAS

SEQ ID NO: 22450 - protein, 3 aa, Artificial Sequence
  Synthetic construct
EGS

SEQ ID NO: 22451 - protein, 3 aa, Artificial Sequence
  Synthetic construct
DAS

SEQ ID NO: 22452 - protein, 3 aa, Artificial Sequence
  Synthetic construct
DAS

SEQ ID NO: 22453 - protein, 3 aa, Artificial Sequence
  Synthetic construct
WAS

SEQ ID NO: 22454 - protein, 3 aa, Artificial Sequence
  Synthetic construct
GAS

SEQ ID NO: 22455 - protein, 3 aa, Artificial Sequence
  Synthetic construct
WAS

SEQ ID NO: 22456 - protein, 3 aa, Artificial Sequence
  Synthetic construct
EDH

SEQ ID NO: 22457 - protein, 3 aa, Artificial Sequence
  Synthetic construct
DAS

SEQ ID NO: 22458 - protein, 3 aa, Artificial Sequence
  Synthetic construct
AAS

SEQ ID NO: 22459 - protein, 3 aa, Artificial Sequence
  Synthetic construct
GKN

SEQ ID NO: 22460 - protein, 3 aa, Artificial Sequence
  Synthetic construct
SNN

SEQ ID NO: 22461 - protein, 3 aa, Artificial Sequence
  Synthetic construct
AAS

SEQ ID NO: 22462 - protein, 3 aa, Artificial Sequence
  Synthetic construct
DIS

SEQ ID NO: 22463 - protein, 3 aa, Artificial Sequence
  Synthetic construct
ATS

SEQ ID NO: 22464 - protein, 3 aa, Artificial Sequence
  Synthetic construct
AAS

SEQ ID NO: 22465 - protein, 3 aa, Artificial Sequence
  Synthetic construct
QIS

SEQ ID NO: 22466 - protein, 3 aa, Artificial Sequence
  Synthetic construct
LGS

SEQ ID NO: 22467 - protein, 3 aa, Artificial Sequence
  Synthetic construct
AAS

SEQ ID NO: 22468 - protein, 3 aa, Artificial Sequence
  Synthetic construct
WAS

SEQ ID NO: 22469 - protein, 3 aa, Artificial Sequence
  Synthetic construct
WAS

SEQ ID NO: 22470 - protein, 3 aa, Artificial Sequence
  Synthetic construct
SAS

SEQ ID NO: 22471 - protein, 3 aa, Artificial Sequence
  Synthetic construct
DVS

SEQ ID NO: 22472 - protein, 3 aa, Artificial Sequence
  Synthetic construct
GAS

SEQ ID NO: 22473 - protein, 3 aa, Artificial Sequence
  Synthetic construct
AAS

SEQ ID NO: 22474 - protein, 3 aa, Artificial Sequence
  Synthetic construct
AAS

SEQ ID NO: 22475 - protein, 3 aa, Artificial Sequence
  Synthetic construct
GAS

SEQ ID NO: 22476 - protein, 3 aa, Artificial Sequence
  Synthetic construct
STS

SEQ ID NO: 22477 - protein, 3 aa, Artificial Sequence
  Synthetic construct
QDS

SEQ ID NO: 22478 - protein, 3 aa, Artificial Sequence
  Synthetic construct
RNN

SEQ ID NO: 22479 - protein, 3 aa, Artificial Sequence
  Synthetic construct
EVS

SEQ ID NO: 22480 - protein, 3 aa, Artificial Sequence
  Synthetic construct
EVS

SEQ ID NO: 22481 - protein, 3 aa, Artificial Sequence
  Synthetic construct
DAS

SEQ ID NO: 22482 - protein, 3 aa, Artificial Sequence
  Synthetic construct
KVS

SEQ ID NO: 22483 - protein, 3 aa, Artificial Sequence
  Synthetic construct
DVS

SEQ ID NO: 22484 - protein, 3 aa, Artificial Sequence
  Synthetic construct
KDN

SEQ ID NO: 22485 - protein, 3 aa, Artificial Sequence
  Synthetic construct
AAS

SEQ ID NO: 22486 - protein, 3 aa, Artificial Sequence
  Synthetic construct
DAS

SEQ ID NO: 22487 - protein, 3 aa, Artificial Sequence
  Synthetic construct
GAS

SEQ ID NO: 22488 - protein, 3 aa, Artificial Sequence
  Synthetic construct
LGS

SEQ ID NO: 22489 - protein, 3 aa, Artificial Sequence
  Synthetic construct
AAS

SEQ ID NO: 22490 - protein, 3 aa, Artificial Sequence
  Synthetic construct
YNR

SEQ ID NO: 22491 - protein, 3 aa, Artificial Sequence
  Synthetic construct
AAS

SEQ ID NO: 22492 - protein, 3 aa, Artificial Sequence
  Synthetic construct
KAS

SEQ ID NO: 22493 - protein, 3 aa, Artificial Sequence
  Synthetic construct
AAS

SEQ ID NO: 22494 - protein, 3 aa, Artificial Sequence
  Synthetic construct
DVS

SEQ ID NO: 22495 - protein, 3 aa, Artificial Sequence
  Synthetic construct
GAS

SEQ ID NO: 22496 - protein, 3 aa, Artificial Sequence
  Synthetic construct
DNN

SEQ ID NO: 22497 - protein, 3 aa, Artificial Sequence
  Synthetic construct
KAS

SEQ ID NO: 22498 - protein, 3 aa, Artificial Sequence
  Synthetic construct
AAS

SEQ ID NO: 22499 - protein, 3 aa, Artificial Sequence
  Synthetic construct
AAS

SEQ ID NO: 22500 - protein, 3 aa, Artificial Sequence
  Synthetic construct
EGS

SEQ ID NO: 22501 - protein, 3 aa, Artificial Sequence
  Synthetic construct
DAT

SEQ ID NO: 22502 - protein, 3 aa, Artificial Sequence
  Synthetic construct
YAS

SEQ ID NO: 22503 - protein, 3 aa, Artificial Sequence
  Synthetic construct
DAS

SEQ ID NO: 22504 - protein, 3 aa, Artificial Sequence
  Synthetic construct
STN

SEQ ID NO: 22505 - protein, 3 aa, Artificial Sequence
  Synthetic construct
KAS

SEQ ID NO: 22506 - protein, 3 aa, Artificial Sequence
  Synthetic construct
QDS

SEQ ID NO: 22507 - protein, 3 aa, Artificial Sequence
  Synthetic construct
AAS

SEQ ID NO: 22508 - protein, 3 aa, Artificial Sequence
  Synthetic construct
TAS

SEQ ID NO: 22509 - protein, 3 aa, Artificial Sequence
  Synthetic construct
GAS

SEQ ID NO: 22510 - protein, 3 aa, Artificial Sequence
  Synthetic construct
EDG

SEQ ID NO: 22511 - protein, 3 aa, Artificial Sequence
  Synthetic construct
GAS

SEQ ID NO: 22512 - protein, 7 aa, Artificial Sequence
  Synthetic construct
LNSDGSH

SEQ ID NO: 22513 - protein, 3 aa, Artificial Sequence
  Synthetic construct
GAS

SEQ ID NO: 22514 - protein, 3 aa, Artificial Sequence
  Synthetic construct
DAT

SEQ ID NO: 22515 - protein, 3 aa, Artificial Sequence
  Synthetic construct
RNN

SEQ ID NO: 22516 - protein, 7 aa, Artificial Sequence
  Synthetic construct
LNSDGSH

SEQ ID NO: 22517 - protein, 3 aa, Artificial Sequence
  Synthetic construct
DAS

SEQ ID NO: 22518 - protein, 3 aa, Artificial Sequence
  Synthetic construct
AAS

SEQ ID NO: 22519 - protein, 3 aa, Artificial Sequence
  Synthetic construct
DVS

SEQ ID NO: 22520 - protein, 3 aa, Artificial Sequence
  Synthetic construct
GAS

SEQ ID NO: 22521 - protein, 3 aa, Artificial Sequence
  Synthetic construct
AAS

SEQ ID NO: 22522 - protein, 3 aa, Artificial Sequence
  Synthetic construct
TNN

SEQ ID NO: 22523 - protein, 3 aa, Artificial Sequence
  Synthetic construct
WAS

SEQ ID NO: 22524 - protein, 3 aa, Artificial Sequence
  Synthetic construct
GDT

SEQ ID NO: 22525 - protein, 3 aa, Artificial Sequence
  Synthetic construct
AKN

SEQ ID NO: 22526 - protein, 3 aa, Artificial Sequence
  Synthetic construct
GNT

SEQ ID NO: 22527 - protein, 3 aa, Artificial Sequence
  Synthetic construct
EVN

SEQ ID NO: 22528 - protein, 3 aa, Artificial Sequence
  Synthetic construct
WAS

SEQ ID NO: 22529 - protein, 3 aa, Artificial Sequence
  Synthetic construct
GAS

SEQ ID NO: 22530 - protein, 3 aa, Artificial Sequence
  Synthetic construct
WAS

SEQ ID NO: 22531 - protein, 3 aa, Artificial Sequence
  Synthetic construct
YDK

SEQ ID NO: 22532 - protein, 3 aa, Artificial Sequence
  Synthetic construct
KAS

SEQ ID NO: 22533 - protein, 3 aa, Artificial Sequence
  Synthetic construct
DVS

SEQ ID NO: 22534 - protein, 3 aa, Artificial Sequence
  Synthetic construct
AAS

SEQ ID NO: 22535 - protein, 3 aa, Artificial Sequence
  Synthetic construct
RNN

SEQ ID NO: 22536 - protein, 3 aa, Artificial Sequence
  Synthetic construct
DAT

SEQ ID NO: 22537 - protein, 3 aa, Artificial Sequence
  Synthetic construct
DAT

SEQ ID NO: 22538 - protein, 3 aa, Artificial Sequence
  Synthetic construct
DTS

SEQ ID NO: 22539 - protein, 3 aa, Artificial Sequence
  Synthetic construct
QDN

SEQ ID NO: 22540 - protein, 3 aa, Artificial Sequence
  Synthetic construct
DAS

SEQ ID NO: 22541 - protein, 3 aa, Artificial Sequence
  Synthetic construct
KAS

SEQ ID NO: 22542 - protein, 3 aa, Artificial Sequence
  Synthetic construct
GAS

SEQ ID NO: 22543 - protein, 3 aa, Artificial Sequence
  Synthetic construct
WAS

SEQ ID NO: 22544 - protein, 3 aa, Artificial Sequence
  Synthetic construct
DVT

SEQ ID NO: 22545 - protein, 3 aa, Artificial Sequence
  Synthetic construct
AAS

SEQ ID NO: 22546 - protein, 3 aa, Artificial Sequence
  Synthetic construct
AAS

SEQ ID NO: 22547 - protein, 3 aa, Artificial Sequence
  Synthetic construct
GAS

SEQ ID NO: 22548 - protein, 3 aa, Artificial Sequence
  Synthetic construct
AAS

SEQ ID NO: 22549 - protein, 3 aa, Artificial Sequence
  Synthetic construct
DAS

SEQ ID NO: 22550 - protein, 3 aa, Artificial Sequence
  Synthetic construct
EAS

SEQ ID NO: 22551 - protein, 3 aa, Artificial Sequence
  Synthetic construct
LGS

SEQ ID NO: 22552 - protein, 3 aa, Artificial Sequence
  Synthetic construct
EVN

SEQ ID NO: 22553 - protein, 3 aa, Artificial Sequence
  Synthetic construct
AAS

SEQ ID NO: 22554 - protein, 7 aa, Artificial Sequence
  Synthetic construct
LNSDGSH

SEQ ID NO: 22555 - protein, 3 aa, Artificial Sequence
  Synthetic construct
RNN

SEQ ID NO: 22556 - protein, 3 aa, Artificial Sequence
  Synthetic construct
RNN

SEQ ID NO: 22557 - protein, 3 aa, Artificial Sequence
  Synthetic construct
SNN

SEQ ID NO: 22558 - protein, 3 aa, Artificial Sequence
  Synthetic construct
KVS

SEQ ID NO: 22559 - protein, 3 aa, Artificial Sequence
  Synthetic construct
GAS

SEQ ID NO: 22560 - protein, 3 aa, Artificial Sequence
  Synthetic construct
DAS

SEQ ID NO: 22561 - protein, 3 aa, Artificial Sequence
  Synthetic construct
SLT

SEQ ID NO: 22562 - protein, 3 aa, Artificial Sequence
  Synthetic construct
EDN

SEQ ID NO: 22563 - protein, 3 aa, Artificial Sequence
  Synthetic construct
DVS

SEQ ID NO: 22564 - protein, 3 aa, Artificial Sequence
  Synthetic construct
GKN

SEQ ID NO: 22565 - protein, 3 aa, Artificial Sequence
  Synthetic construct
GAS

SEQ ID NO: 22566 - protein, 3 aa, Artificial Sequence
  Synthetic construct
GKN

SEQ ID NO: 22567 - protein, 3 aa, Artificial Sequence
  Synthetic construct
DAS

SEQ ID NO: 22568 - protein, 3 aa, Artificial Sequence
  Synthetic construct
GAS

SEQ ID NO: 22569 - protein, 3 aa, Artificial Sequence
  Synthetic construct
ANN

SEQ ID NO: 22570 - protein, 3 aa, Artificial Sequence
  Synthetic construct
KAS

SEQ ID NO: 22571 - protein, 3 aa, Artificial Sequence
  Synthetic construct
QDS

SEQ ID NO: 22572 - protein, 7 aa, Artificial Sequence
  Synthetic construct
VNSDGSH

SEQ ID NO: 22573 - protein, 3 aa, Artificial Sequence
  Synthetic construct
DAS

SEQ ID NO: 22574 - protein, 3 aa, Artificial Sequence
  Synthetic construct
QDT

SEQ ID NO: 22575 - protein, 3 aa, Artificial Sequence
  Synthetic construct
KAS

SEQ ID NO: 22576 - protein, 3 aa, Artificial Sequence
  Synthetic construct
AAS

SEQ ID NO: 22577 - protein, 3 aa, Artificial Sequence
  Synthetic construct
DNS

SEQ ID NO: 22578 - protein, 3 aa, Artificial Sequence
  Synthetic construct
DAS

SEQ ID NO: 22579 - protein, 3 aa, Artificial Sequence
  Synthetic construct
LGS

SEQ ID NO: 22580 - protein, 3 aa, Artificial Sequence
  Synthetic construct
DNN

SEQ ID NO: 22581 - protein, 3 aa, Artificial Sequence
  Synthetic construct
GAS

SEQ ID NO: 22582 - protein, 3 aa, Artificial Sequence
  Synthetic construct
AAS

SEQ ID NO: 22583 - protein, 3 aa, Artificial Sequence
  Synthetic construct
EVS

SEQ ID NO: 22584 - protein, 7 aa, Artificial Sequence
  Synthetic construct
LNSDGSH

SEQ ID NO: 22585 - protein, 3 aa, Artificial Sequence
  Synthetic construct
GAS

SEQ ID NO: 22586 - protein, 3 aa, Artificial Sequence
  Synthetic construct
RNT

SEQ ID NO: 22587 - protein, 3 aa, Artificial Sequence
  Synthetic construct
SDT

SEQ ID NO: 22588 - protein, 3 aa, Artificial Sequence
  Synthetic construct
DAT

SEQ ID NO: 22589 - protein, 3 aa, Artificial Sequence
  Synthetic construct
DAS

SEQ ID NO: 22590 - protein, 3 aa, Artificial Sequence
  Synthetic construct
WAS

SEQ ID NO: 22591 - protein, 3 aa, Artificial Sequence
  Synthetic construct
GAS

SEQ ID NO: 22592 - protein, 3 aa, Artificial Sequence
  Synthetic construct
QDN

SEQ ID NO: 22593 - protein, 3 aa, Artificial Sequence
  Synthetic construct
AAS

SEQ ID NO: 22594 - protein, 3 aa, Artificial Sequence
  Synthetic construct
GDT

SEQ ID NO: 22595 - protein, 3 aa, Artificial Sequence
  Synthetic construct
EVT

SEQ ID NO: 22596 - protein, 3 aa, Artificial Sequence
  Synthetic construct
DAS

SEQ ID NO: 22597 - protein, 3 aa, Artificial Sequence
  Synthetic construct
DVS

SEQ ID NO: 22598 - protein, 3 aa, Artificial Sequence
  Synthetic construct
NNN

SEQ ID NO: 22599 - protein, 3 aa, Artificial Sequence
  Synthetic construct
TAS

SEQ ID NO: 22600 - protein, 3 aa, Artificial Sequence
  Synthetic construct
RNN

SEQ ID NO: 22601 - protein, 3 aa, Artificial Sequence
  Synthetic construct
DAS

SEQ ID NO: 22602 - protein, 3 aa, Artificial Sequence
  Synthetic construct
DNS

SEQ ID NO: 22603 - protein, 3 aa, Artificial Sequence
  Synthetic construct
LGS

SEQ ID NO: 22604 - protein, 3 aa, Artificial Sequence
  Synthetic construct
DAS

SEQ ID NO: 22605 - protein, 3 aa, Artificial Sequence
  Synthetic construct
AAS

SEQ ID NO: 22606 - protein, 3 aa, Artificial Sequence
  Synthetic construct
AAS

SEQ ID NO: 22607 - protein, 3 aa, Artificial Sequence
  Synthetic construct
GAS

SEQ ID NO: 22608 - protein, 3 aa, Artificial Sequence
  Synthetic construct
GAS

SEQ ID NO: 22609 - protein, 3 aa, Artificial Sequence
  Synthetic construct
GDS

SEQ ID NO: 22610 - protein, 3 aa, Artificial Sequence
  Synthetic construct
LAA

SEQ ID NO: 22611 - protein, 3 aa, Artificial Sequence
  Synthetic construct
KVS

SEQ ID NO: 22612 - protein, 3 aa, Artificial Sequence
  Synthetic construct
KIS

SEQ ID NO: 22613 - protein, 3 aa, Artificial Sequence
  Synthetic construct
KAS

SEQ ID NO: 22614 - protein, 3 aa, Artificial Sequence
  Synthetic construct
GAS

SEQ ID NO: 22615 - protein, 3 aa, Artificial Sequence
  Synthetic construct
QDT

SEQ ID NO: 22616 - protein, 3 aa, Artificial Sequence
  Synthetic construct
EVT

SEQ ID NO: 22617 - protein, 3 aa, Artificial Sequence
  Synthetic construct
WAS

SEQ ID NO: 22618 - protein, 7 aa, Artificial Sequence
  Synthetic construct
LNSDGSH

SEQ ID NO: 22619 - protein, 3 aa, Artificial Sequence
  Synthetic construct
GAS

SEQ ID NO: 22620 - protein, 3 aa, Artificial Sequence
  Synthetic construct
GNS

SEQ ID NO: 22621 - protein, 3 aa, Artificial Sequence
  Synthetic construct
DVN

SEQ ID NO: 22622 - protein, 3 aa, Artificial Sequence
  Synthetic construct
EAS

SEQ ID NO: 22623 - protein, 3 aa, Artificial Sequence
  Synthetic construct
GKN

SEQ ID NO: 22624 - protein, 3 aa, Artificial Sequence
  Synthetic construct
SDS

SEQ ID NO: 22625 - protein, 3 aa, Artificial Sequence
  Synthetic construct
DTN

SEQ ID NO: 22626 - protein, 3 aa, Artificial Sequence
  Synthetic construct
AAS

SEQ ID NO: 22627 - protein, 3 aa, Artificial Sequence
  Synthetic construct
GDT

SEQ ID NO: 22628 - protein, 3 aa, Artificial Sequence
  Synthetic construct
AAS

SEQ ID NO: 22629 - protein, 3 aa, Artificial Sequence
  Synthetic construct
DVS

SEQ ID NO: 22630 - protein, 3 aa, Artificial Sequence
  Synthetic construct
RNN

SEQ ID NO: 22631 - protein, 3 aa, Artificial Sequence
  Synthetic construct
WAS

SEQ ID NO: 22632 - protein, 3 aa, Artificial Sequence
  Synthetic construct
SNN

SEQ ID NO: 22633 - protein, 3 aa, Artificial Sequence
  Synthetic construct
DVF

SEQ ID NO: 22634 - protein, 3 aa, Artificial Sequence
  Synthetic construct
GAS

SEQ ID NO: 22635 - protein, 3 aa, Artificial Sequence
  Synthetic construct
GNN

SEQ ID NO: 22636 - protein, 3 aa, Artificial Sequence
  Synthetic construct
DVS

SEQ ID NO: 22637 - protein, 3 aa, Artificial Sequence
  Synthetic construct
GNT

SEQ ID NO: 22638 - protein, 3 aa, Artificial Sequence
  Synthetic construct
EGS

SEQ ID NO: 22639 - protein, 3 aa, Artificial Sequence
  Synthetic construct
DAS

SEQ ID NO: 22640 - protein, 3 aa, Artificial Sequence
  Synthetic construct
GAS

SEQ ID NO: 22641 - protein, 3 aa, Artificial Sequence
  Synthetic construct
DNN

SEQ ID NO: 22642 - protein, 3 aa, Artificial Sequence
  Synthetic construct
GTS

SEQ ID NO: 22643 - protein, 3 aa, Artificial Sequence
  Synthetic construct
DVT

SEQ ID NO: 22644 - protein, 3 aa, Artificial Sequence
  Synthetic construct
RVS

SEQ ID NO: 22645 - protein, 3 aa, Artificial Sequence
  Synthetic construct
DVS

SEQ ID NO: 22646 - protein, 3 aa, Artificial Sequence
  Synthetic construct
DAS

SEQ ID NO: 22647 - protein, 3 aa, Artificial Sequence
  Synthetic construct
RSS

SEQ ID NO: 22648 - protein, 3 aa, Artificial Sequence
  Synthetic construct
DFR

SEQ ID NO: 22649 - protein, 3 aa, Artificial Sequence
  Synthetic construct
QDT

SEQ ID NO: 22650 - protein, 3 aa, Artificial Sequence
  Synthetic construct
KAS

SEQ ID NO: 22651 - protein, 2 aa, Artificial Sequence
  Synthetic construct
NS

SEQ ID NO: 22652 - protein, 3 aa, Artificial Sequence
  Synthetic construct
DNN

SEQ ID NO: 22653 - protein, 3 aa, Artificial Sequence
  Synthetic construct
EVN

SEQ ID NO: 22654 - protein, 3 aa, Artificial Sequence
  Synthetic construct
AAS

SEQ ID NO: 22655 - protein, 3 aa, Artificial Sequence
  Synthetic construct
RNN

SEQ ID NO: 22656 - protein, 3 aa, Artificial Sequence
  Synthetic construct
DVS

SEQ ID NO: 22657 - protein, 3 aa, Artificial Sequence
  Synthetic construct
AAS

SEQ ID NO: 22658 - protein, 3 aa, Artificial Sequence
  Synthetic construct
DVS

SEQ ID NO: 22659 - protein, 3 aa, Artificial Sequence
  Synthetic construct
EVS

SEQ ID NO: 22660 - protein, 3 aa, Artificial Sequence
  Synthetic construct
DNN

SEQ ID NO: 22661 - protein, 3 aa, Artificial Sequence
  Synthetic construct
DAS

SEQ ID NO: 22662 - protein, 3 aa, Artificial Sequence
  Synthetic construct
WAS

SEQ ID NO: 22663 - protein, 3 aa, Artificial Sequence
  Synthetic construct
DGS

SEQ ID NO: 22664 - protein, 3 aa, Artificial Sequence
  Synthetic construct
SNN

SEQ ID NO: 22665 - protein, 3 aa, Artificial Sequence
  Synthetic construct
GAS

SEQ ID NO: 22666 - protein, 3 aa, Artificial Sequence
  Synthetic construct
DVS

SEQ ID NO: 22667 - protein, 3 aa, Artificial Sequence
  Synthetic construct
ANN

SEQ ID NO: 22668 - protein, 3 aa, Artificial Sequence
  Synthetic construct
LAA

SEQ ID NO: 22669 - protein, 3 aa, Artificial Sequence
  Synthetic construct
KAS

SEQ ID NO: 22670 - protein, 3 aa, Artificial Sequence
  Synthetic construct
GKN

SEQ ID NO: 22671 - protein, 7 aa, Artificial Sequence
  Synthetic construct
LLPSGRY

SEQ ID NO: 22672 - protein, 3 aa, Artificial Sequence
  Synthetic construct
HVN

SEQ ID NO: 22673 - protein, 3 aa, Artificial Sequence
  Synthetic construct
GAS

SEQ ID NO: 22674 - protein, 3 aa, Artificial Sequence
  Synthetic construct
AAS

SEQ ID NO: 22675 - protein, 3 aa, Artificial Sequence
  Synthetic construct
DAF

SEQ ID NO: 22676 - protein, 7 aa, Artificial Sequence
  Synthetic construct
LNSDGSH

SEQ ID NO: 22677 - protein, 3 aa, Artificial Sequence
  Synthetic construct
AAS

SEQ ID NO: 22678 - protein, 3 aa, Artificial Sequence
  Synthetic construct
GAS

SEQ ID NO: 22679 - protein, 3 aa, Artificial Sequence
  Synthetic construct
AAS

SEQ ID NO: 22680 - protein, 3 aa, Artificial Sequence
  Synthetic construct
STS

SEQ ID NO: 22681 - protein, 3 aa, Artificial Sequence
  Synthetic construct
SDK

SEQ ID NO: 22682 - protein, 3 aa, Artificial Sequence
  Synthetic construct
KAS

SEQ ID NO: 22683 - protein, 3 aa, Artificial Sequence
  Synthetic construct
GAS

SEQ ID NO: 22684 - protein, 3 aa, Artificial Sequence
  Synthetic construct
KAS

SEQ ID NO: 22685 - protein, 3 aa, Artificial Sequence
  Synthetic construct
DAS

SEQ ID NO: 22686 - protein, 3 aa, Artificial Sequence
  Synthetic construct
DAS

SEQ ID NO: 22687 - protein, 3 aa, Artificial Sequence
  Synthetic construct
GAS

SEQ ID NO: 22688 - protein, 3 aa, Artificial Sequence
  Synthetic construct
KVS

SEQ ID NO: 22689 - protein, 3 aa, Artificial Sequence
  Synthetic construct
GFN

SEQ ID NO: 22690 - protein, 3 aa, Artificial Sequence
  Synthetic construct
EGS

SEQ ID NO: 22691 - protein, 3 aa, Artificial Sequence
  Synthetic construct
DAS

SEQ ID NO: 22692 - protein, 3 aa, Artificial Sequence
  Synthetic construct
RNN

SEQ ID NO: 22693 - protein, 3 aa, Artificial Sequence
  Synthetic construct
GAS

SEQ ID NO: 22694 - protein, 3 aa, Artificial Sequence
  Synthetic construct
DAS

SEQ ID NO: 22695 - protein, 3 aa, Artificial Sequence
  Synthetic construct
YAS

SEQ ID NO: 22696 - protein, 3 aa, Artificial Sequence
  Synthetic construct
TNN

SEQ ID NO: 22697 - protein, 3 aa, Artificial Sequence
  Synthetic construct
STN

SEQ ID NO: 22698 - protein, 3 aa, Artificial Sequence
  Synthetic construct
STS

SEQ ID NO: 22699 - protein, 3 aa, Artificial Sequence
  Synthetic construct
GAS

SEQ ID NO: 22700 - protein, 3 aa, Artificial Sequence
  Synthetic construct
DVT

SEQ ID NO: 22701 - protein, 3 aa, Artificial Sequence
  Synthetic construct
DDS

SEQ ID NO: 22702 - protein, 3 aa, Artificial Sequence
  Synthetic construct
EVS

SEQ ID NO: 22703 - protein, 3 aa, Artificial Sequence
  Synthetic construct
KAS

SEQ ID NO: 22704 - protein, 3 aa, Artificial Sequence
  Synthetic construct
AAS

SEQ ID NO: 22705 - protein, 3 aa, Artificial Sequence
  Synthetic construct
KDT

SEQ ID NO: 22706 - protein, 3 aa, Artificial Sequence
  Synthetic construct
GKN

SEQ ID NO: 22707 - protein, 3 aa, Artificial Sequence
  Synthetic construct
RNN

SEQ ID NO: 22708 - protein, 3 aa, Artificial Sequence
  Synthetic construct
DNN

SEQ ID NO: 22709 - protein, 3 aa, Artificial Sequence
  Synthetic construct
DVS

SEQ ID NO: 22710 - protein, 3 aa, Artificial Sequence
  Synthetic construct
GKN

SEQ ID NO: 22711 - protein, 3 aa, Artificial Sequence
  Synthetic construct
DAS

SEQ ID NO: 22712 - protein, 3 aa, Artificial Sequence
  Synthetic construct
AAS

SEQ ID NO: 22713 - protein, 3 aa, Artificial Sequence
  Synthetic construct
KVS

SEQ ID NO: 22714 - protein, 3 aa, Artificial Sequence
  Synthetic construct
RDS

SEQ ID NO: 22715 - protein, 3 aa, Artificial Sequence
  Synthetic construct
DAT

SEQ ID NO: 22716 - protein, 3 aa, Artificial Sequence
  Synthetic construct
KAS

SEQ ID NO: 22717 - protein, 3 aa, Artificial Sequence
  Synthetic construct
KAS

SEQ ID NO: 22718 - protein, 3 aa, Artificial Sequence
  Synthetic construct
WAS

SEQ ID NO: 22719 - protein, 3 aa, Artificial Sequence
  Synthetic construct
AAS

SEQ ID NO: 22720 - protein, 3 aa, Artificial Sequence
  Synthetic construct
AAS

SEQ ID NO: 22721 - protein, 7 aa, Artificial Sequence
  Synthetic construct
LEGSGSY

SEQ ID NO: 22722 - protein, 3 aa, Artificial Sequence
  Synthetic construct
EGS

SEQ ID NO: 22723 - protein, 3 aa, Artificial Sequence
  Synthetic construct
DAS

SEQ ID NO: 22724 - protein, 3 aa, Artificial Sequence
  Synthetic construct
GAS

SEQ ID NO: 22725 - protein, 3 aa, Artificial Sequence
  Synthetic construct
DAS

SEQ ID NO: 22726 - protein, 3 aa, Artificial Sequence
  Synthetic construct
DAT

SEQ ID NO: 22727 - protein, 3 aa, Artificial Sequence
  Synthetic construct
EVS

SEQ ID NO: 22728 - protein, 3 aa, Artificial Sequence
  Synthetic construct
GAS

SEQ ID NO: 22729 - protein, 3 aa, Artificial Sequence
  Synthetic construct
AAS

SEQ ID NO: 22730 - protein, 3 aa, Artificial Sequence
  Synthetic construct
GAS

SEQ ID NO: 22731 - protein, 3 aa, Artificial Sequence
  Synthetic construct
KAS

SEQ ID NO: 22732 - protein, 7 aa, Artificial Sequence
  Synthetic construct
LNSDGSH

SEQ ID NO: 22733 - protein, 3 aa, Artificial Sequence
  Synthetic construct
QAS

SEQ ID NO: 22734 - protein, 3 aa, Artificial Sequence
  Synthetic construct
DAS

SEQ ID NO: 22735 - protein, 3 aa, Artificial Sequence
  Synthetic construct
AAS

SEQ ID NO: 22736 - protein, 3 aa, Artificial Sequence
  Synthetic construct
AAS

SEQ ID NO: 22737 - protein, 3 aa, Artificial Sequence
  Synthetic construct
GAS

SEQ ID NO: 22738 - protein, 3 aa, Artificial Sequence
  Synthetic construct
STT

SEQ ID NO: 22739 - protein, 3 aa, Artificial Sequence
  Synthetic construct
GAS

SEQ ID NO: 22740 - protein, 7 aa, Artificial Sequence
  Synthetic construct
LNSDGSH

SEQ ID NO: 22741 - protein, 3 aa, Artificial Sequence
  Synthetic construct
EHT

SEQ ID NO: 22742 - protein, 3 aa, Artificial Sequence
  Synthetic construct
GDT

SEQ ID NO: 22743 - protein, 3 aa, Artificial Sequence
  Synthetic construct
DVF

SEQ ID NO: 22744 - protein, 3 aa, Artificial Sequence
  Synthetic construct
GAS

SEQ ID NO: 22745 - protein, 3 aa, Artificial Sequence
  Synthetic construct
GKN

SEQ ID NO: 22746 - protein, 3 aa, Artificial Sequence
  Synthetic construct
DAT

SEQ ID NO: 22747 - protein, 3 aa, Artificial Sequence
  Synthetic construct
AAS

SEQ ID NO: 22748 - protein, 3 aa, Artificial Sequence
  Synthetic construct
LGS

SEQ ID NO: 22749 - protein, 3 aa, Artificial Sequence
  Synthetic construct
QDS

SEQ ID NO: 22750 - protein, 3 aa, Artificial Sequence
  Synthetic construct
RND

SEQ ID NO: 22751 - protein, 7 aa, Artificial Sequence
  Synthetic construct
VNSDGSH

SEQ ID NO: 22752 - protein, 3 aa, Artificial Sequence
  Synthetic construct
RNN

SEQ ID NO: 22753 - protein, 3 aa, Artificial Sequence
  Synthetic construct
DVS

SEQ ID NO: 22754 - protein, 3 aa, Artificial Sequence
  Synthetic construct
GIS

SEQ ID NO: 22755 - protein, 7 aa, Artificial Sequence
  Synthetic construct
LNSDGSH

SEQ ID NO: 22756 - protein, 3 aa, Artificial Sequence
  Synthetic construct
EVS

SEQ ID NO: 22757 - protein, 3 aa, Artificial Sequence
  Synthetic construct
EVS

SEQ ID NO: 22758 - protein, 3 aa, Artificial Sequence
  Synthetic construct
VAT

SEQ ID NO: 22759 - protein, 3 aa, Artificial Sequence
  Synthetic construct
TAS

SEQ ID NO: 22760 - protein, 3 aa, Artificial Sequence
  Synthetic construct
DDS

SEQ ID NO: 22761 - protein, 3 aa, Artificial Sequence
  Synthetic construct
GAS

SEQ ID NO: 22762 - protein, 3 aa, Artificial Sequence
  Synthetic construct
WAS

SEQ ID NO: 22763 - protein, 3 aa, Artificial Sequence
  Synthetic construct
MIS

SEQ ID NO: 22764 - protein, 3 aa, Artificial Sequence
  Synthetic construct
GAS

SEQ ID NO: 22765 - protein, 3 aa, Artificial Sequence
  Synthetic construct
GAS

SEQ ID NO: 22766 - protein, 3 aa, Artificial Sequence
  Synthetic construct
GAF

SEQ ID NO: 22767 - protein, 3 aa, Artificial Sequence
  Synthetic construct
KAS

SEQ ID NO: 22768 - protein, 3 aa, Artificial Sequence
  Synthetic construct
DNN

SEQ ID NO: 22769 - protein, 3 aa, Artificial Sequence
  Synthetic construct
EVN

SEQ ID NO: 22770 - protein, 3 aa, Artificial Sequence
  Synthetic construct
AAS

SEQ ID NO: 22771 - protein, 3 aa, Artificial Sequence
  Synthetic construct
AAS

SEQ ID NO: 22772 - protein, 3 aa, Artificial Sequence
  Synthetic construct
GAT

SEQ ID NO: 22773 - protein, 3 aa, Artificial Sequence
  Synthetic construct
RNS

SEQ ID NO: 22774 - protein, 3 aa, Artificial Sequence
  Synthetic construct
AAS

SEQ ID NO: 22775 - protein, 3 aa, Artificial Sequence
  Synthetic construct
DAT

SEQ ID NO: 22776 - protein, 3 aa, Artificial Sequence
  Synthetic construct
DAT

SEQ ID NO: 22777 - protein, 3 aa, Artificial Sequence
  Synthetic construct
KDS

SEQ ID NO: 22778 - protein, 3 aa, Artificial Sequence
  Synthetic construct
WAS

SEQ ID NO: 22779 - protein, 3 aa, Artificial Sequence
  Synthetic construct
AAS

SEQ ID NO: 22780 - protein, 3 aa, Artificial Sequence
  Synthetic construct
KAS

SEQ ID NO: 22781 - protein, 3 aa, Artificial Sequence
  Synthetic construct
WAS

SEQ ID NO: 22782 - protein, 3 aa, Artificial Sequence
  Synthetic construct
GKN

SEQ ID NO: 22783 - protein, 3 aa, Artificial Sequence
  Synthetic construct
DVA

SEQ ID NO: 22784 - protein, 3 aa, Artificial Sequence
  Synthetic construct
DAS

SEQ ID NO: 22785 - protein, 3 aa, Artificial Sequence
  Synthetic construct
WAS

SEQ ID NO: 22786 - protein, 3 aa, Artificial Sequence
  Synthetic construct
WAS

SEQ ID NO: 22787 - protein, 3 aa, Artificial Sequence
  Synthetic construct
GKN

SEQ ID NO: 22788 - protein, 3 aa, Artificial Sequence
  Synthetic construct
AAS

SEQ ID NO: 22789 - protein, 3 aa, Artificial Sequence
  Synthetic construct
RVS

SEQ ID NO: 22790 - protein, 3 aa, Artificial Sequence
  Synthetic construct
RNN

SEQ ID NO: 22791 - protein, 3 aa, Artificial Sequence
  Synthetic construct
DDS

SEQ ID NO: 22792 - protein, 3 aa, Artificial Sequence
  Synthetic construct
LGS

SEQ ID NO: 22793 - protein, 7 aa, Artificial Sequence
  Synthetic construct
LNSDGSH

SEQ ID NO: 22794 - protein, 3 aa, Artificial Sequence
  Synthetic construct
QDN

SEQ ID NO: 22795 - protein, 3 aa, Artificial Sequence
  Synthetic construct
EVS

SEQ ID NO: 22796 - protein, 3 aa, Artificial Sequence
  Synthetic construct
RNT

SEQ ID NO: 22797 - protein, 3 aa, Artificial Sequence
  Synthetic construct
KAS

SEQ ID NO: 22798 - protein, 3 aa, Artificial Sequence
  Synthetic construct
AAS

SEQ ID NO: 22799 - protein, 3 aa, Artificial Sequence
  Synthetic construct
DAS

SEQ ID NO: 22800 - protein, 3 aa, Artificial Sequence
  Synthetic construct
STS

SEQ ID NO: 22801 - protein, 3 aa, Artificial Sequence
  Synthetic construct
WAS

SEQ ID NO: 22802 - protein, 3 aa, Artificial Sequence
  Synthetic construct
KAS

SEQ ID NO: 22803 - protein, 3 aa, Artificial Sequence
  Synthetic construct
GAS

SEQ ID NO: 22804 - protein, 3 aa, Artificial Sequence
  Synthetic construct
AAS

SEQ ID NO: 22805 - protein, 3 aa, Artificial Sequence
  Synthetic construct
AAS

SEQ ID NO: 22806 - protein, 3 aa, Artificial Sequence
  Synthetic construct
GKN

SEQ ID NO: 22807 - protein, 3 aa, Artificial Sequence
  Synthetic construct
KAS

SEQ ID NO: 22808 - protein, 3 aa, Artificial Sequence
  Synthetic construct
WAS

SEQ ID NO: 22809 - protein, 3 aa, Artificial Sequence
  Synthetic construct
DVS

SEQ ID NO: 22810 - protein, 3 aa, Artificial Sequence
  Synthetic construct
DNV

SEQ ID NO: 22811 - protein, 3 aa, Artificial Sequence
  Synthetic construct
GKN

SEQ ID NO: 22812 - protein, 3 aa, Artificial Sequence
  Synthetic construct
LGS

SEQ ID NO: 22813 - protein, 3 aa, Artificial Sequence
  Synthetic construct
LGS

SEQ ID NO: 22814 - protein, 3 aa, Artificial Sequence
  Synthetic construct
GAS

SEQ ID NO: 22815 - protein, 3 aa, Artificial Sequence
  Synthetic construct
GKN

SEQ ID NO: 22816 - protein, 3 aa, Artificial Sequence
  Synthetic construct
AAS

SEQ ID NO: 22817 - protein, 3 aa, Artificial Sequence
  Synthetic construct
EVS

SEQ ID NO: 22818 - protein, 3 aa, Artificial Sequence
  Synthetic construct
YAS

SEQ ID NO: 22819 - protein, 3 aa, Artificial Sequence
  Synthetic construct
QDS

SEQ ID NO: 22820 - protein, 3 aa, Artificial Sequence
  Synthetic construct
DAS

SEQ ID NO: 22821 - protein, 3 aa, Artificial Sequence
  Synthetic construct
GAF

SEQ ID NO: 22822 - protein, 3 aa, Artificial Sequence
  Synthetic construct
DAS

SEQ ID NO: 22823 - protein, 3 aa, Artificial Sequence
  Synthetic construct
QDN

SEQ ID NO: 22824 - protein, 3 aa, Artificial Sequence
  Synthetic construct
YNN

SEQ ID NO: 22825 - protein, 3 aa, Artificial Sequence
  Synthetic construct
DAS

SEQ ID NO: 22826 - protein, 3 aa, Artificial Sequence
  Synthetic construct
EVN

SEQ ID NO: 22827 - protein, 3 aa, Artificial Sequence
  Synthetic construct
STI

SEQ ID NO: 22828 - protein, 3 aa, Artificial Sequence
  Synthetic construct
AAS

SEQ ID NO: 22829 - protein, 3 aa, Artificial Sequence
  Synthetic construct
SAS

SEQ ID NO: 22830 - protein, 3 aa, Artificial Sequence
  Synthetic construct
DVR

SEQ ID NO: 22831 - protein, 3 aa, Artificial Sequence
  Synthetic construct
EDT

SEQ ID NO: 22832 - protein, 3 aa, Artificial Sequence
  Synthetic construct
DAS

SEQ ID NO: 22833 - protein, 3 aa, Artificial Sequence
  Synthetic construct
WAS

SEQ ID NO: 22834 - protein, 3 aa, Artificial Sequence
  Synthetic construct
AAS

SEQ ID NO: 22835 - protein, 3 aa, Artificial Sequence
  Synthetic construct
AAS

SEQ ID NO: 22836 - protein, 3 aa, Artificial Sequence
  Synthetic construct
EVN

SEQ ID NO: 22837 - protein, 3 aa, Artificial Sequence
  Synthetic construct
KVS

SEQ ID NO: 22838 - protein, 3 aa, Artificial Sequence
  Synthetic construct
AAS

SEQ ID NO: 22839 - protein, 3 aa, Artificial Sequence
  Synthetic construct
MNN

SEQ ID NO: 22840 - protein, 3 aa, Artificial Sequence
  Synthetic construct
QDI

SEQ ID NO: 22841 - protein, 3 aa, Artificial Sequence
  Synthetic construct
DVS

SEQ ID NO: 22842 - protein, 3 aa, Artificial Sequence
  Synthetic construct
AAS

SEQ ID NO: 22843 - protein, 3 aa, Artificial Sequence
  Synthetic construct
GNS

SEQ ID NO: 22844 - protein, 3 aa, Artificial Sequence
  Synthetic construct
DTS

SEQ ID NO: 22845 - protein, 3 aa, Artificial Sequence
  Synthetic construct
GAS

SEQ ID NO: 22846 - protein, 3 aa, Artificial Sequence
  Synthetic construct
AAS

SEQ ID NO: 22847 - protein, 3 aa, Artificial Sequence
  Synthetic construct
AAS

SEQ ID NO: 22848 - protein, 3 aa, Artificial Sequence
  Synthetic construct
AAS

SEQ ID NO: 22849 - protein, 3 aa, Artificial Sequence
  Synthetic construct
EGT

SEQ ID NO: 22850 - protein, 3 aa, Artificial Sequence
  Synthetic construct
SNN

SEQ ID NO: 22851 - protein, 3 aa, Artificial Sequence
  Synthetic construct
KAS

SEQ ID NO: 22852 - protein, 3 aa, Artificial Sequence
  Synthetic construct
EDN

SEQ ID NO: 22853 - protein, 3 aa, Artificial Sequence
  Synthetic construct
DVN

SEQ ID NO: 22854 - protein, 3 aa, Artificial Sequence
  Synthetic construct
GAS

SEQ ID NO: 22855 - protein, 3 aa, Artificial Sequence
  Synthetic construct
KAS

SEQ ID NO: 22856 - protein, 3 aa, Artificial Sequence
  Synthetic construct
EAS

SEQ ID NO: 22857 - protein, 3 aa, Artificial Sequence
  Synthetic construct
RNN

SEQ ID NO: 22858 - protein, 3 aa, Artificial Sequence
  Synthetic construct
LGS

SEQ ID NO: 22859 - protein, 3 aa, Artificial Sequence
  Synthetic construct
AAS

SEQ ID NO: 22860 - protein, 3 aa, Artificial Sequence
  Synthetic construct
YDR

SEQ ID NO: 22861 - protein, 3 aa, Artificial Sequence
  Synthetic construct
DAS

SEQ ID NO: 22862 - protein, 3 aa, Artificial Sequence
  Synthetic construct
AAS

SEQ ID NO: 22863 - protein, 3 aa, Artificial Sequence
  Synthetic construct
GAS

SEQ ID NO: 22864 - protein, 3 aa, Artificial Sequence
  Synthetic construct
GAS

SEQ ID NO: 22865 - protein, 3 aa, Artificial Sequence
  Synthetic construct
KAS

SEQ ID NO: 22866 - protein, 3 aa, Artificial Sequence
  Synthetic construct
KAS

SEQ ID NO: 22867 - protein, 3 aa, Artificial Sequence
  Synthetic construct
DVS

SEQ ID NO: 22868 - protein, 3 aa, Artificial Sequence
  Synthetic construct
RNN

SEQ ID NO: 22869 - protein, 3 aa, Artificial Sequence
  Synthetic construct
EDT

SEQ ID NO: 22870 - protein, 3 aa, Artificial Sequence
  Synthetic construct
WVS

SEQ ID NO: 22871 - protein, 3 aa, Artificial Sequence
  Synthetic construct
AAS

SEQ ID NO: 22872 - protein, 3 aa, Artificial Sequence
  Synthetic construct
WAS

SEQ ID NO: 22873 - protein, 3 aa, Artificial Sequence
  Synthetic construct
GAS

SEQ ID NO: 22874 - protein, 3 aa, Artificial Sequence
  Synthetic construct
AAS

SEQ ID NO: 22875 - protein, 3 aa, Artificial Sequence
  Synthetic construct
SNN

SEQ ID NO: 22876 - protein, 3 aa, Artificial Sequence
  Synthetic construct
KVS

SEQ ID NO: 22877 - protein, 3 aa, Artificial Sequence
  Synthetic construct
GAS

SEQ ID NO: 22878 - protein, 3 aa, Artificial Sequence
  Synthetic construct
AAS

SEQ ID NO: 22879 - protein, 3 aa, Artificial Sequence
  Synthetic construct
DTS

SEQ ID NO: 22880 - protein, 3 aa, Artificial Sequence
  Synthetic construct
GAS

SEQ ID NO: 22881 - protein, 3 aa, Artificial Sequence
  Synthetic construct
AAS

SEQ ID NO: 22882 - protein, 3 aa, Artificial Sequence
  Synthetic construct
DVS

SEQ ID NO: 22883 - protein, 3 aa, Artificial Sequence
  Synthetic construct
EVI

SEQ ID NO: 22884 - protein, 3 aa, Artificial Sequence
  Synthetic construct
WAS

SEQ ID NO: 22885 - protein, 3 aa, Artificial Sequence
  Synthetic construct
DVS

SEQ ID NO: 22886 - protein, 3 aa, Artificial Sequence
  Synthetic construct
AAS

SEQ ID NO: 22887 - protein, 3 aa, Artificial Sequence
  Synthetic construct
TAS

SEQ ID NO: 22888 - protein, 3 aa, Artificial Sequence
  Synthetic construct
AAS

SEQ ID NO: 22889 - protein, 3 aa, Artificial Sequence
  Synthetic construct
AAS

SEQ ID NO: 22890 - protein, 3 aa, Artificial Sequence
  Synthetic construct
KAS

SEQ ID NO: 22891 - protein, 3 aa, Artificial Sequence
  Synthetic construct
EVN

SEQ ID NO: 22892 - protein, 3 aa, Artificial Sequence
  Synthetic construct
DVS

SEQ ID NO: 22893 - protein, 7 aa, Artificial Sequence
  Synthetic construct
YKSDSDK

SEQ ID NO: 22894 - protein, 3 aa, Artificial Sequence
  Synthetic construct
DVT

SEQ ID NO: 22895 - protein, 3 aa, Artificial Sequence
  Synthetic construct
GAS

SEQ ID NO: 22896 - protein, 3 aa, Artificial Sequence
  Synthetic construct
AAS

SEQ ID NO: 22897 - protein, 3 aa, Artificial Sequence
  Synthetic construct
KAS

SEQ ID NO: 22898 - protein, 3 aa, Artificial Sequence
  Synthetic construct
AAS

SEQ ID NO: 22899 - protein, 3 aa, Artificial Sequence
  Synthetic construct
AAS

SEQ ID NO: 22900 - protein, 3 aa, Artificial Sequence
  Synthetic construct
DAS

SEQ ID NO: 22901 - protein, 3 aa, Artificial Sequence
  Synthetic construct
GAS

SEQ ID NO: 22902 - protein, 3 aa, Artificial Sequence
  Synthetic construct
DAS

SEQ ID NO: 22903 - protein, 3 aa, Artificial Sequence
  Synthetic construct
GAS

SEQ ID NO: 22904 - protein, 3 aa, Artificial Sequence
  Synthetic construct
LGS

SEQ ID NO: 22905 - protein, 3 aa, Artificial Sequence
  Synthetic construct
KIS

SEQ ID NO: 22906 - protein, 3 aa, Artificial Sequence
  Synthetic construct
WAS

SEQ ID NO: 22907 - protein, 7 aa, Artificial Sequence
  Synthetic construct
LNSDGSH

SEQ ID NO: 22908 - protein, 3 aa, Artificial Sequence
  Synthetic construct
KND

SEQ ID NO: 22909 - protein, 3 aa, Artificial Sequence
  Synthetic construct
AAS

SEQ ID NO: 22910 - protein, 3 aa, Artificial Sequence
  Synthetic construct
DVS

SEQ ID NO: 22911 - protein, 3 aa, Artificial Sequence
  Synthetic construct
EVN

SEQ ID NO: 22912 - protein, 3 aa, Artificial Sequence
  Synthetic construct
KVS

SEQ ID NO: 22913 - protein, 3 aa, Artificial Sequence
  Synthetic construct
GAS

SEQ ID NO: 22914 - protein, 3 aa, Artificial Sequence
  Synthetic construct
AAS

SEQ ID NO: 22915 - protein, 3 aa, Artificial Sequence
  Synthetic construct
RNN

SEQ ID NO: 22916 - protein, 3 aa, Artificial Sequence
  Synthetic construct
DAS

SEQ ID NO: 22917 - protein, 3 aa, Artificial Sequence
  Synthetic construct
AAS

SEQ ID NO: 22918 - protein, 7 aa, Artificial Sequence
  Synthetic construct
LNSDGSH

SEQ ID NO: 22919 - protein, 3 aa, Artificial Sequence
  Synthetic construct
DVT

SEQ ID NO: 22920 - protein, 3 aa, Artificial Sequence
  Synthetic construct
DVS

SEQ ID NO: 22921 - protein, 7 aa, Artificial Sequence
  Synthetic construct
INSDGSH

SEQ ID NO: 22922 - protein, 3 aa, Artificial Sequence
  Synthetic construct
STS

SEQ ID NO: 22923 - protein, 3 aa, Artificial Sequence
  Synthetic construct
EVN

SEQ ID NO: 22924 - protein, 3 aa, Artificial Sequence
  Synthetic construct
AAS

SEQ ID NO: 22925 - protein, 3 aa, Artificial Sequence
  Synthetic construct
GAS

SEQ ID NO: 22926 - protein, 3 aa, Artificial Sequence
  Synthetic construct
GAS

SEQ ID NO: 22927 - protein, 3 aa, Artificial Sequence
  Synthetic construct
LAS

SEQ ID NO: 22928 - protein, 3 aa, Artificial Sequence
  Synthetic construct
KAS

SEQ ID NO: 22929 - protein, 3 aa, Artificial Sequence
  Synthetic construct
AAS

SEQ ID NO: 22930 - protein, 3 aa, Artificial Sequence
  Synthetic construct
KAS

SEQ ID NO: 22931 - protein, 3 aa, Artificial Sequence
  Synthetic construct
DVT

SEQ ID NO: 22932 - protein, 3 aa, Artificial Sequence
  Synthetic construct
AAS

SEQ ID NO: 22933 - protein, 3 aa, Artificial Sequence
  Synthetic construct
KIS

SEQ ID NO: 22934 - protein, 3 aa, Artificial Sequence
  Synthetic construct
DVS

SEQ ID NO: 22935 - protein, 3 aa, Artificial Sequence
  Synthetic construct
DAS

SEQ ID NO: 22936 - protein, 3 aa, Artificial Sequence
  Synthetic construct
WAS

SEQ ID NO: 22937 - protein, 3 aa, Artificial Sequence
  Synthetic construct
ENN

SEQ ID NO: 22938 - protein, 7 aa, Artificial Sequence
  Synthetic construct
LNSDGSH

SEQ ID NO: 22939 - protein, 3 aa, Artificial Sequence
  Synthetic construct
DVS

SEQ ID NO: 22940 - protein, 8 aa, Artificial Sequence
  Synthetic construct
VGPNGIVG

SEQ ID NO: 22941 - protein, 3 aa, Artificial Sequence
  Synthetic construct
KAS

SEQ ID NO: 22942 - protein, 3 aa, Artificial Sequence
  Synthetic construct
DVY

SEQ ID NO: 22943 - protein, 3 aa, Artificial Sequence
  Synthetic construct
DDN

SEQ ID NO: 22944 - protein, 3 aa, Artificial Sequence
  Synthetic construct
WAS

SEQ ID NO: 22945 - protein, 3 aa, Artificial Sequence
  Synthetic construct
WAS

SEQ ID NO: 22946 - protein, 3 aa, Artificial Sequence
  Synthetic construct
DAS

SEQ ID NO: 22947 - protein, 3 aa, Artificial Sequence
  Synthetic construct
AAS

SEQ ID NO: 22948 - protein, 3 aa, Artificial Sequence
  Synthetic construct
KAS

SEQ ID NO: 22949 - protein, 3 aa, Artificial Sequence
  Synthetic construct
QDN

SEQ ID NO: 22950 - protein, 3 aa, Artificial Sequence
  Synthetic construct
AAS

SEQ ID NO: 22951 - protein, 3 aa, Artificial Sequence
  Synthetic construct
AAS

SEQ ID NO: 22952 - protein, 3 aa, Artificial Sequence
  Synthetic construct
AAS

SEQ ID NO: 22953 - protein, 3 aa, Artificial Sequence
  Synthetic construct
RND

SEQ ID NO: 22954 - protein, 3 aa, Artificial Sequence
  Synthetic construct
AAS

SEQ ID NO: 22955 - protein, 3 aa, Artificial Sequence
  Synthetic construct
AAS

SEQ ID NO: 22956 - protein, 3 aa, Artificial Sequence
  Synthetic construct
GAS

SEQ ID NO: 22957 - protein, 3 aa, Artificial Sequence
  Synthetic construct
DAS

SEQ ID NO: 22958 - protein, 3 aa, Artificial Sequence
  Synthetic construct
KVS

SEQ ID NO: 22959 - protein, 3 aa, Artificial Sequence
  Synthetic construct
RDN

SEQ ID NO: 22960 - protein, 3 aa, Artificial Sequence
  Synthetic construct
DAS

SEQ ID NO: 22961 - protein, 3 aa, Artificial Sequence
  Synthetic construct
KAT

SEQ ID NO: 22962 - protein, 3 aa, Artificial Sequence
  Synthetic construct
GAS

SEQ ID NO: 22963 - protein, 3 aa, Artificial Sequence
  Synthetic construct
YVA

SEQ ID NO: 22964 - protein, 3 aa, Artificial Sequence
  Synthetic construct
AAS

SEQ ID NO: 22965 - protein, 3 aa, Artificial Sequence
  Synthetic construct
TNR

SEQ ID NO: 22966 - protein, 3 aa, Artificial Sequence
  Synthetic construct
STN

SEQ ID NO: 22967 - protein, 3 aa, Artificial Sequence
  Synthetic construct
AAS

SEQ ID NO: 22968 - protein, 3 aa, Artificial Sequence
  Synthetic construct
EVT

SEQ ID NO: 22969 - protein, 3 aa, Artificial Sequence
  Synthetic construct
STS

SEQ ID NO: 22970 - protein, 3 aa, Artificial Sequence
  Synthetic construct
GAS

SEQ ID NO: 22971 - protein, 3 aa, Artificial Sequence
  Synthetic construct
GAS

SEQ ID NO: 22972 - protein, 3 aa, Artificial Sequence
  Synthetic construct
AAS

SEQ ID NO: 22973 - protein, 3 aa, Artificial Sequence
  Synthetic construct
KAS

SEQ ID NO: 22974 - protein, 3 aa, Artificial Sequence
  Synthetic construct
DAS

SEQ ID NO: 22975 - protein, 3 aa, Artificial Sequence
  Synthetic construct
GKN

SEQ ID NO: 22976 - protein, 3 aa, Artificial Sequence
  Synthetic construct
DGS

SEQ ID NO: 22977 - protein, 3 aa, Artificial Sequence
  Synthetic construct
LSS

SEQ ID NO: 22978 - protein, 3 aa, Artificial Sequence
  Synthetic construct
GAS

SEQ ID NO: 22979 - protein, 3 aa, Artificial Sequence
  Synthetic construct
DVS

SEQ ID NO: 22980 - protein, 3 aa, Artificial Sequence
  Synthetic construct
KVS

SEQ ID NO: 22981 - protein, 3 aa, Artificial Sequence
  Synthetic construct
GKN

SEQ ID NO: 22982 - protein, 3 aa, Artificial Sequence
  Synthetic construct
KAS

SEQ ID NO: 22983 - protein, 3 aa, Artificial Sequence
  Synthetic construct
GNT

SEQ ID NO: 22984 - protein, 3 aa, Artificial Sequence
  Synthetic construct
YDT

SEQ ID NO: 22985 - protein, 3 aa, Artificial Sequence
  Synthetic construct
RNN

SEQ ID NO: 22986 - protein, 3 aa, Artificial Sequence
  Synthetic construct
KAS

SEQ ID NO: 22987 - protein, 3 aa, Artificial Sequence
  Synthetic construct
LGS

SEQ ID NO: 22988 - protein, 3 aa, Artificial Sequence
  Synthetic construct
AAS

SEQ ID NO: 22989 - protein, 3 aa, Artificial Sequence
  Synthetic construct
LGS

SEQ ID NO: 22990 - protein, 3 aa, Artificial Sequence
  Synthetic construct
DVS

SEQ ID NO: 22991 - protein, 3 aa, Artificial Sequence
  Synthetic construct
EVS

SEQ ID NO: 22992 - protein, 3 aa, Artificial Sequence
  Synthetic construct
WAS

SEQ ID NO: 22993 - protein, 3 aa, Artificial Sequence
  Synthetic construct
SNN

SEQ ID NO: 22994 - protein, 3 aa, Artificial Sequence
  Synthetic construct
GTS

SEQ ID NO: 22995 - protein, 3 aa, Artificial Sequence
  Synthetic construct
SAS

SEQ ID NO: 22996 - protein, 7 aa, Artificial Sequence
  Synthetic construct
LNSDGSH

SEQ ID NO: 22997 - protein, 3 aa, Artificial Sequence
  Synthetic construct
AAS

SEQ ID NO: 22998 - protein, 3 aa, Artificial Sequence
  Synthetic construct
STS

SEQ ID NO: 22999 - protein, 3 aa, Artificial Sequence
  Synthetic construct
GAS

SEQ ID NO: 23000 - protein, 3 aa, Artificial Sequence
  Synthetic construct
AAS

SEQ ID NO: 23001 - protein, 3 aa, Artificial Sequence
  Synthetic construct
LGS

SEQ ID NO: 23002 - protein, 3 aa, Artificial Sequence
  Synthetic construct
KAS

SEQ ID NO: 23003 - protein, 3 aa, Artificial Sequence
  Synthetic construct
AAS

SEQ ID NO: 23004 - protein, 3 aa, Artificial Sequence
  Synthetic construct
ATS

SEQ ID NO: 23005 - protein, 3 aa, Artificial Sequence
  Synthetic construct
QDF

SEQ ID NO: 23006 - protein, 3 aa, Artificial Sequence
  Synthetic construct
RNN

SEQ ID NO: 23007 - protein, 3 aa, Artificial Sequence
  Synthetic construct
EDI

SEQ ID NO: 23008 - protein, 3 aa, Artificial Sequence
  Synthetic construct
KNK

SEQ ID NO: 23009 - protein, 3 aa, Artificial Sequence
  Synthetic construct
AAS

SEQ ID NO: 23010 - protein, 3 aa, Artificial Sequence
  Synthetic construct
EVN

SEQ ID NO: 23011 - protein, 3 aa, Artificial Sequence
  Synthetic construct
AVS

SEQ ID NO: 23012 - protein, 3 aa, Artificial Sequence
  Synthetic construct
SAS

SEQ ID NO: 23013 - protein, 3 aa, Artificial Sequence
  Synthetic construct
DNN

SEQ ID NO: 23014 - protein, 3 aa, Artificial Sequence
  Synthetic construct
DSS

SEQ ID NO: 23015 - protein, 3 aa, Artificial Sequence
  Synthetic construct
AAS

SEQ ID NO: 23016 - protein, 3 aa, Artificial Sequence
  Synthetic construct
KVS

SEQ ID NO: 23017 - protein, 3 aa, Artificial Sequence
  Synthetic construct
SAS

SEQ ID NO: 23018 - protein, 3 aa, Artificial Sequence
  Synthetic construct
GAS

SEQ ID NO: 23019 - protein, 3 aa, Artificial Sequence
  Synthetic construct
TNT

SEQ ID NO: 23020 - protein, 3 aa, Artificial Sequence
  Synthetic construct
YDN

SEQ ID NO: 23021 - protein, 3 aa, Artificial Sequence
  Synthetic construct
GAS

SEQ ID NO: 23022 - protein, 3 aa, Artificial Sequence
  Synthetic construct
KAS

SEQ ID NO: 23023 - protein, 3 aa, Artificial Sequence
  Synthetic construct
DAS

SEQ ID NO: 23024 - protein, 3 aa, Artificial Sequence
  Synthetic construct
EVS

SEQ ID NO: 23025 - protein, 3 aa, Artificial Sequence
  Synthetic construct
GAT

SEQ ID NO: 23026 - protein, 3 aa, Artificial Sequence
  Synthetic construct
DVS

SEQ ID NO: 23027 - protein, 3 aa, Artificial Sequence
  Synthetic construct
NKN

SEQ ID NO: 23028 - protein, 3 aa, Artificial Sequence
  Synthetic construct
FAS

SEQ ID NO: 23029 - protein, 3 aa, Artificial Sequence
  Synthetic construct
AAS

SEQ ID NO: 23030 - protein, 3 aa, Artificial Sequence
  Synthetic construct
EVF

SEQ ID NO: 23031 - protein, 3 aa, Artificial Sequence
  Synthetic construct
KAS

SEQ ID NO: 23032 - protein, 3 aa, Artificial Sequence
  Synthetic construct
AAS

SEQ ID NO: 23033 - protein, 3 aa, Artificial Sequence
  Synthetic construct
DKN

SEQ ID NO: 23034 - protein, 3 aa, Artificial Sequence
  Synthetic construct
DDS

SEQ ID NO: 23035 - protein, 3 aa, Artificial Sequence
  Synthetic construct
GAS

SEQ ID NO: 23036 - protein, 3 aa, Artificial Sequence
  Synthetic construct
NNN

SEQ ID NO: 23037 - protein, 3 aa, Artificial Sequence
  Synthetic construct
DNV

SEQ ID NO: 23038 - protein, 3 aa, Artificial Sequence
  Synthetic construct
AVS

SEQ ID NO: 23039 - protein, 3 aa, Artificial Sequence
  Synthetic construct
AAS

SEQ ID NO: 23040 - protein, 3 aa, Artificial Sequence
  Synthetic construct
EDS

SEQ ID NO: 23041 - protein, 3 aa, Artificial Sequence
  Synthetic construct
SAS

SEQ ID NO: 23042 - protein, 3 aa, Artificial Sequence
  Synthetic construct
SNS

SEQ ID NO: 23043 - protein, 3 aa, Artificial Sequence
  Synthetic construct
LGS

SEQ ID NO: 23044 - protein, 3 aa, Artificial Sequence
  Synthetic construct
KAS

SEQ ID NO: 23045 - protein, 3 aa, Artificial Sequence
  Synthetic construct
AAS

SEQ ID NO: 23046 - protein, 3 aa, Artificial Sequence
  Synthetic construct
GNN

SEQ ID NO: 23047 - protein, 3 aa, Artificial Sequence
  Synthetic construct
AAS

SEQ ID NO: 23048 - protein, 3 aa, Artificial Sequence
  Synthetic construct
RVS

SEQ ID NO: 23049 - protein, 3 aa, Artificial Sequence
  Synthetic construct
AAS

SEQ ID NO: 23050 - protein, 3 aa, Artificial Sequence
  Synthetic construct
EAI

SEQ ID NO: 23051 - protein, 3 aa, Artificial Sequence
  Synthetic construct
GAS

SEQ ID NO: 23052 - protein, 3 aa, Artificial Sequence
  Synthetic construct
DVH

SEQ ID NO: 23053 - protein, 3 aa, Artificial Sequence
  Synthetic construct
LGS

SEQ ID NO: 23054 - protein, 3 aa, Artificial Sequence
  Synthetic construct
GAS

SEQ ID NO: 23055 - protein, 3 aa, Artificial Sequence
  Synthetic construct
DVN

SEQ ID NO: 23056 - protein, 3 aa, Artificial Sequence
  Synthetic construct
AAS

SEQ ID NO: 23057 - protein, 3 aa, Artificial Sequence
  Synthetic construct
LGS

SEQ ID NO: 23058 - protein, 3 aa, Artificial Sequence
  Synthetic construct
GAS

SEQ ID NO: 23059 - protein, 3 aa, Artificial Sequence
  Synthetic construct
QDS

SEQ ID NO: 23060 - protein, 3 aa, Artificial Sequence
  Synthetic construct
DNN

SEQ ID NO: 23061 - protein, 3 aa, Artificial Sequence
  Synthetic construct
AAS

SEQ ID NO: 23062 - protein, 3 aa, Artificial Sequence
  Synthetic construct
LVS

SEQ ID NO: 23063 - protein, 3 aa, Artificial Sequence
  Synthetic construct
KDT

SEQ ID NO: 23064 - protein, 3 aa, Artificial Sequence
  Synthetic construct
DVS

SEQ ID NO: 23065 - protein, 3 aa, Artificial Sequence
  Synthetic construct
GNT

SEQ ID NO: 23066 - protein, 3 aa, Artificial Sequence
  Synthetic construct
AAS

SEQ ID NO: 23067 - protein, 3 aa, Artificial Sequence
  Synthetic construct
DNN

SEQ ID NO: 23068 - protein, 3 aa, Artificial Sequence
  Synthetic construct
RNN

SEQ ID NO: 23069 - protein, 3 aa, Artificial Sequence
  Synthetic construct
RNN

SEQ ID NO: 23070 - protein, 3 aa, Artificial Sequence
  Synthetic construct
AAS

SEQ ID NO: 23071 - protein, 3 aa, Artificial Sequence
  Synthetic construct
DAS

SEQ ID NO: 23072 - protein, 3 aa, Artificial Sequence
  Synthetic construct
EVS

SEQ ID NO: 23073 - protein, 3 aa, Artificial Sequence
  Synthetic construct
AAS

SEQ ID NO: 23074 - protein, 3 aa, Artificial Sequence
  Synthetic construct
LGS

SEQ ID NO: 23075 - protein, 3 aa, Artificial Sequence
  Synthetic construct
DVS

SEQ ID NO: 23076 - protein, 3 aa, Artificial Sequence
  Synthetic construct
EAS

SEQ ID NO: 23077 - protein, 3 aa, Artificial Sequence
  Synthetic construct
DAS

SEQ ID NO: 23078 - protein, 3 aa, Artificial Sequence
  Synthetic construct
KAS

SEQ ID NO: 23079 - protein, 3 aa, Artificial Sequence
  Synthetic construct
DVI

SEQ ID NO: 23080 - protein, 3 aa, Artificial Sequence
  Synthetic construct
QET

SEQ ID NO: 23081 - protein, 3 aa, Artificial Sequence
  Synthetic construct
GTS

SEQ ID NO: 23082 - protein, 3 aa, Artificial Sequence
  Synthetic construct
YDS

SEQ ID NO: 23083 - protein, 3 aa, Artificial Sequence
  Synthetic construct
GAS

SEQ ID NO: 23084 - protein, 3 aa, Artificial Sequence
  Synthetic construct
WAS

SEQ ID NO: 23085 - protein, 7 aa, Artificial Sequence
  Synthetic construct
LNSDGSH

SEQ ID NO: 23086 - protein, 3 aa, Artificial Sequence
  Synthetic construct
RNN

SEQ ID NO: 23087 - protein, 3 aa, Artificial Sequence
  Synthetic construct
WAS

SEQ ID NO: 23088 - protein, 3 aa, Artificial Sequence
  Synthetic construct
AAS

SEQ ID NO: 23089 - protein, 3 aa, Artificial Sequence
  Synthetic construct
AAS

SEQ ID NO: 23090 - protein, 3 aa, Artificial Sequence
  Synthetic construct
STS

SEQ ID NO: 23091 - protein, 3 aa, Artificial Sequence
  Synthetic construct
GNK

SEQ ID NO: 23092 - protein, 3 aa, Artificial Sequence
  Synthetic construct
GAS

SEQ ID NO: 23093 - protein, 3 aa, Artificial Sequence
  Synthetic construct
DNN

SEQ ID NO: 23094 - protein, 3 aa, Artificial Sequence
  Synthetic construct
DDN

SEQ ID NO: 23095 - protein, 3 aa, Artificial Sequence
  Synthetic construct
AAS

SEQ ID NO: 23096 - protein, 3 aa, Artificial Sequence
  Synthetic construct
GKN

SEQ ID NO: 23097 - protein, 3 aa, Artificial Sequence
  Synthetic construct
GAS

SEQ ID NO: 23098 - protein, 3 aa, Artificial Sequence
  Synthetic construct
GAS

SEQ ID NO: 23099 - protein, 3 aa, Artificial Sequence
  Synthetic construct
LGS

SEQ ID NO: 23100 - protein, 3 aa, Artificial Sequence
  Synthetic construct
KAS

SEQ ID NO: 23101 - protein, 3 aa, Artificial Sequence
  Synthetic construct
WAS

SEQ ID NO: 23102 - protein, 3 aa, Artificial Sequence
  Synthetic construct
EVS

SEQ ID NO: 23103 - protein, 3 aa, Artificial Sequence
  Synthetic construct
GAS

SEQ ID NO: 23104 - protein, 3 aa, Artificial Sequence
  Synthetic construct
KAS

SEQ ID NO: 23105 - protein, 3 aa, Artificial Sequence
  Synthetic construct
EDN

SEQ ID NO: 23106 - protein, 3 aa, Artificial Sequence
  Synthetic construct
GAS

SEQ ID NO: 23107 - protein, 3 aa, Artificial Sequence
  Synthetic construct
GAS

SEQ ID NO: 23108 - protein, 3 aa, Artificial Sequence
  Synthetic construct
KAS

SEQ ID NO: 23109 - protein, 3 aa, Artificial Sequence
  Synthetic construct
KAS

SEQ ID NO: 23110 - protein, 3 aa, Artificial Sequence
  Synthetic construct
AAS

SEQ ID NO: 23111 - protein, 3 aa, Artificial Sequence
  Synthetic construct
WAS

SEQ ID NO: 23112 - protein, 3 aa, Artificial Sequence
  Synthetic construct
AAS

SEQ ID NO: 23113 - protein, 3 aa, Artificial Sequence
  Synthetic construct
GAS

SEQ ID NO: 23114 - protein, 3 aa, Artificial Sequence
  Synthetic construct
DVT

SEQ ID NO: 23115 - protein, 3 aa, Artificial Sequence
  Synthetic construct
KAS

SEQ ID NO: 23116 - protein, 3 aa, Artificial Sequence
  Synthetic construct
GVS

SEQ ID NO: 23117 - protein, 3 aa, Artificial Sequence
  Synthetic construct
DNN

SEQ ID NO: 23118 - protein, 3 aa, Artificial Sequence
  Synthetic construct
AAS

SEQ ID NO: 23119 - protein, 3 aa, Artificial Sequence
  Synthetic construct
AAS

SEQ ID NO: 23120 - protein, 3 aa, Artificial Sequence
  Synthetic construct
GNS

SEQ ID NO: 23121 - protein, 3 aa, Artificial Sequence
  Synthetic construct
EVS

SEQ ID NO: 23122 - protein, 3 aa, Artificial Sequence
  Synthetic construct
EVS

SEQ ID NO: 23123 - protein, 3 aa, Artificial Sequence
  Synthetic construct
GAS

SEQ ID NO: 23124 - protein, 3 aa, Artificial Sequence
  Synthetic construct
AAS

SEQ ID NO: 23125 - protein, 3 aa, Artificial Sequence
  Synthetic construct
AAS

SEQ ID NO: 23126 - protein, 3 aa, Artificial Sequence
  Synthetic construct
DAS

SEQ ID NO: 23127 - protein, 3 aa, Artificial Sequence
  Synthetic construct
DAS

SEQ ID NO: 23128 - protein, 3 aa, Artificial Sequence
  Synthetic construct
AAS

SEQ ID NO: 23129 - protein, 3 aa, Artificial Sequence
  Synthetic construct
AAS

SEQ ID NO: 23130 - protein, 3 aa, Artificial Sequence
  Synthetic construct
GTS

SEQ ID NO: 23131 - protein, 3 aa, Artificial Sequence
  Synthetic construct
SNN

SEQ ID NO: 23132 - protein, 7 aa, Artificial Sequence
  Synthetic construct
LNSDGSH

SEQ ID NO: 23133 - protein, 3 aa, Artificial Sequence
  Synthetic construct
WAS

SEQ ID NO: 23134 - protein, 3 aa, Artificial Sequence
  Synthetic construct
AAS

SEQ ID NO: 23135 - protein, 3 aa, Artificial Sequence
  Synthetic construct
SNK

SEQ ID NO: 23136 - protein, 3 aa, Artificial Sequence
  Synthetic construct
GAS

SEQ ID NO: 23137 - protein, 3 aa, Artificial Sequence
  Synthetic construct
RAS

SEQ ID NO: 23138 - protein, 3 aa, Artificial Sequence
  Synthetic construct
DVS

SEQ ID NO: 23139 - protein, 3 aa, Artificial Sequence
  Synthetic construct
GAN

SEQ ID NO: 23140 - protein, 3 aa, Artificial Sequence
  Synthetic construct
EAS

SEQ ID NO: 23141 - protein, 3 aa, Artificial Sequence
  Synthetic construct
TAS

SEQ ID NO: 23142 - protein, 3 aa, Artificial Sequence
  Synthetic construct
NTN

SEQ ID NO: 23143 - protein, 3 aa, Artificial Sequence
  Synthetic construct
WAS

SEQ ID NO: 23144 - protein, 3 aa, Artificial Sequence
  Synthetic construct
VAS

SEQ ID NO: 23145 - protein, 3 aa, Artificial Sequence
  Synthetic construct
SNN

SEQ ID NO: 23146 - protein, 3 aa, Artificial Sequence
  Synthetic construct
KND

SEQ ID NO: 23147 - protein, 3 aa, Artificial Sequence
  Synthetic construct
AAS

SEQ ID NO: 23148 - protein, 3 aa, Artificial Sequence
  Synthetic construct
EVS

SEQ ID NO: 23149 - protein, 3 aa, Artificial Sequence
  Synthetic construct
SVT

SEQ ID NO: 23150 - protein, 3 aa, Artificial Sequence
  Synthetic construct
DDN

SEQ ID NO: 23151 - protein, 3 aa, Artificial Sequence
  Synthetic construct
AAS

SEQ ID NO: 23152 - protein, 3 aa, Artificial Sequence
  Synthetic construct
LGS

SEQ ID NO: 23153 - protein, 3 aa, Artificial Sequence
  Synthetic construct
AAT

SEQ ID NO: 23154 - protein, 3 aa, Artificial Sequence
  Synthetic construct
KDT

SEQ ID NO: 23155 - protein, 3 aa, Artificial Sequence
  Synthetic construct
KDS

SEQ ID NO: 23156 - protein, 7 aa, Artificial Sequence
  Synthetic construct
VNSDGSH

SEQ ID NO: 23157 - protein, 3 aa, Artificial Sequence
  Synthetic construct
AAS

SEQ ID NO: 23158 - protein, 3 aa, Artificial Sequence
  Synthetic construct
DNS

SEQ ID NO: 23159 - protein, 3 aa, Artificial Sequence
  Synthetic construct
YHT

SEQ ID NO: 23160 - protein, 3 aa, Artificial Sequence
  Synthetic construct
DVS

SEQ ID NO: 23161 - protein, 3 aa, Artificial Sequence
  Synthetic construct
KDS

SEQ ID NO: 23162 - protein, 3 aa, Artificial Sequence
  Synthetic construct
AAS

SEQ ID NO: 23163 - protein, 3 aa, Artificial Sequence
  Synthetic construct
AAS

SEQ ID NO: 23164 - protein, 3 aa, Artificial Sequence
  Synthetic construct
DNN

SEQ ID NO: 23165 - protein, 3 aa, Artificial Sequence
  Synthetic construct
AAS

SEQ ID NO: 23166 - protein, 3 aa, Artificial Sequence
  Synthetic construct
KDT

SEQ ID NO: 23167 - protein, 3 aa, Artificial Sequence
  Synthetic construct
DAT

SEQ ID NO: 23168 - protein, 3 aa, Artificial Sequence
  Synthetic construct
EVN

SEQ ID NO: 23169 - protein, 7 aa, Artificial Sequence
  Synthetic construct
YTSDSDY

SEQ ID NO: 23170 - protein, 3 aa, Artificial Sequence
  Synthetic construct
GAS

SEQ ID NO: 23171 - protein, 3 aa, Artificial Sequence
  Synthetic construct
AAS

SEQ ID NO: 23172 - protein, 3 aa, Artificial Sequence
  Synthetic construct
KDT

SEQ ID NO: 23173 - protein, 3 aa, Artificial Sequence
  Synthetic construct
TAS

SEQ ID NO: 23174 - protein, 3 aa, Artificial Sequence
  Synthetic construct
DAS

SEQ ID NO: 23175 - protein, 3 aa, Artificial Sequence
  Synthetic construct
EVS

SEQ ID NO: 23176 - protein, 3 aa, Artificial Sequence
  Synthetic construct
LGS

SEQ ID NO: 23177 - protein, 3 aa, Artificial Sequence
  Synthetic construct
RNN

SEQ ID NO: 23178 - protein, 3 aa, Artificial Sequence
  Synthetic construct
EVS

SEQ ID NO: 23179 - protein, 3 aa, Artificial Sequence
  Synthetic construct
LGS

SEQ ID NO: 23180 - protein, 3 aa, Artificial Sequence
  Synthetic construct
YED

SEQ ID NO: 23181 - protein, 3 aa, Artificial Sequence
  Synthetic construct
LGS

SEQ ID NO: 23182 - protein, 3 aa, Artificial Sequence
  Synthetic construct
DAT

SEQ ID NO: 23183 - protein, 3 aa, Artificial Sequence
  Synthetic construct
AAS

SEQ ID NO: 23184 - protein, 3 aa, Artificial Sequence
  Synthetic construct
GAS

SEQ ID NO: 23185 - protein, 3 aa, Artificial Sequence
  Synthetic construct
AAS

SEQ ID NO: 23186 - protein, 3 aa, Artificial Sequence
  Synthetic construct
DVS

SEQ ID NO: 23187 - protein, 3 aa, Artificial Sequence
  Synthetic construct
SND

SEQ ID NO: 23188 - protein, 3 aa, Artificial Sequence
  Synthetic construct
AAS

SEQ ID NO: 23189 - protein, 3 aa, Artificial Sequence
  Synthetic construct
GAT

SEQ ID NO: 23190 - protein, 3 aa, Artificial Sequence
  Synthetic construct
AAS

SEQ ID NO: 23191 - protein, 3 aa, Artificial Sequence
  Synthetic construct
KAS

SEQ ID NO: 23192 - protein, 3 aa, Artificial Sequence
  Synthetic construct
WAS

SEQ ID NO: 23193 - protein, 3 aa, Artificial Sequence
  Synthetic construct
GAS

SEQ ID NO: 23194 - protein, 3 aa, Artificial Sequence
  Synthetic construct
AAS

SEQ ID NO: 23195 - protein, 3 aa, Artificial Sequence
  Synthetic construct
GKN

SEQ ID NO: 23196 - protein, 3 aa, Artificial Sequence
  Synthetic construct
EVN

SEQ ID NO: 23197 - protein, 3 aa, Artificial Sequence
  Synthetic construct
EVN

SEQ ID NO: 23198 - protein, 3 aa, Artificial Sequence
  Synthetic construct
AAS

SEQ ID NO: 23199 - protein, 3 aa, Artificial Sequence
  Synthetic construct
GAS

SEQ ID NO: 23200 - protein, 3 aa, Artificial Sequence
  Synthetic construct
TDS

SEQ ID NO: 23201 - protein, 3 aa, Artificial Sequence
  Synthetic construct
DAS

SEQ ID NO: 23202 - protein, 3 aa, Artificial Sequence
  Synthetic construct
KDS

SEQ ID NO: 23203 - protein, 3 aa, Artificial Sequence
  Synthetic construct
GAS

SEQ ID NO: 23204 - protein, 3 aa, Artificial Sequence
  Synthetic construct
GAS

SEQ ID NO: 23205 - protein, 3 aa, Artificial Sequence
  Synthetic construct
DAS

SEQ ID NO: 23206 - protein, 3 aa, Artificial Sequence
  Synthetic construct
AAS

SEQ ID NO: 23207 - protein, 3 aa, Artificial Sequence
  Synthetic construct
GKN

SEQ ID NO: 23208 - protein, 3 aa, Artificial Sequence
  Synthetic construct
DTS

SEQ ID NO: 23209 - protein, 3 aa, Artificial Sequence
  Synthetic construct
AAS

SEQ ID NO: 23210 - protein, 3 aa, Artificial Sequence
  Synthetic construct
RAS

SEQ ID NO: 23211 - protein, 3 aa, Artificial Sequence
  Synthetic construct
TNN

SEQ ID NO: 23212 - protein, 3 aa, Artificial Sequence
  Synthetic construct
HVS

SEQ ID NO: 23213 - protein, 3 aa, Artificial Sequence
  Synthetic construct
GQN

SEQ ID NO: 23214 - protein, 3 aa, Artificial Sequence
  Synthetic construct
DAS

SEQ ID NO: 23215 - protein, 3 aa, Artificial Sequence
  Synthetic construct
GAS

SEQ ID NO: 23216 - protein, 3 aa, Artificial Sequence
  Synthetic construct
WAS

SEQ ID NO: 23217 - protein, 3 aa, Artificial Sequence
  Synthetic construct
DAS

SEQ ID NO: 23218 - protein, 3 aa, Artificial Sequence
  Synthetic construct
RNN

SEQ ID NO: 23219 - protein, 3 aa, Artificial Sequence
  Synthetic construct
KVS

SEQ ID NO: 23220 - protein, 3 aa, Artificial Sequence
  Synthetic construct
AAS

SEQ ID NO: 23221 - protein, 3 aa, Artificial Sequence
  Synthetic construct
GTS

SEQ ID NO: 23222 - protein, 3 aa, Artificial Sequence
  Synthetic construct
EVN

SEQ ID NO: 23223 - protein, 3 aa, Artificial Sequence
  Synthetic construct
KNI

SEQ ID NO: 23224 - protein, 3 aa, Artificial Sequence
  Synthetic construct
DAS

SEQ ID NO: 23225 - protein, 3 aa, Artificial Sequence
  Synthetic construct
WAS

SEQ ID NO: 23226 - protein, 3 aa, Artificial Sequence
  Synthetic construct
AAS

SEQ ID NO: 23227 - protein, 3 aa, Artificial Sequence
  Synthetic construct
KAS

SEQ ID NO: 23228 - protein, 3 aa, Artificial Sequence
  Synthetic construct
MIS

SEQ ID NO: 23229 - protein, 3 aa, Artificial Sequence
  Synthetic construct
GAS

SEQ ID NO: 23230 - protein, 3 aa, Artificial Sequence
  Synthetic construct
KAS

SEQ ID NO: 23231 - protein, 3 aa, Artificial Sequence
  Synthetic construct
DTT

SEQ ID NO: 23232 - protein, 3 aa, Artificial Sequence
  Synthetic construct
GAS

SEQ ID NO: 23233 - protein, 3 aa, Artificial Sequence
  Synthetic construct
QNT

SEQ ID NO: 23234 - protein, 3 aa, Artificial Sequence
  Synthetic construct
AAS

SEQ ID NO: 23235 - protein, 3 aa, Artificial Sequence
  Synthetic construct
INN

SEQ ID NO: 23236 - protein, 3 aa, Artificial Sequence
  Synthetic construct
GVS

SEQ ID NO: 23237 - protein, 3 aa, Artificial Sequence
  Synthetic construct
GAS

SEQ ID NO: 23238 - protein, 3 aa, Artificial Sequence
  Synthetic construct
GNS

SEQ ID NO: 23239 - protein, 3 aa, Artificial Sequence
  Synthetic construct
KAS

SEQ ID NO: 23240 - protein, 3 aa, Artificial Sequence
  Synthetic construct
LGS

SEQ ID NO: 23241 - protein, 3 aa, Artificial Sequence
  Synthetic construct
GAS

SEQ ID NO: 23242 - protein, 3 aa, Artificial Sequence
  Synthetic construct
WAS

SEQ ID NO: 23243 - protein, 3 aa, Artificial Sequence
  Synthetic construct
GNN

SEQ ID NO: 23244 - protein, 3 aa, Artificial Sequence
  Synthetic construct
MGS

SEQ ID NO: 23245 - protein, 3 aa, Artificial Sequence
  Synthetic construct
RNN

SEQ ID NO: 23246 - protein, 3 aa, Artificial Sequence
  Synthetic construct
DTF

SEQ ID NO: 23247 - protein, 3 aa, Artificial Sequence
  Synthetic construct
DAS

SEQ ID NO: 23248 - protein, 3 aa, Artificial Sequence
  Synthetic construct
AAS

SEQ ID NO: 23249 - protein, 3 aa, Artificial Sequence
  Synthetic construct
AAS

SEQ ID NO: 23250 - protein, 3 aa, Artificial Sequence
  Synthetic construct
AVS

SEQ ID NO: 23251 - protein, 3 aa, Artificial Sequence
  Synthetic construct
SIS

SEQ ID NO: 23252 - protein, 3 aa, Artificial Sequence
  Synthetic construct
GTS

SEQ ID NO: 23253 - protein, 3 aa, Artificial Sequence
  Synthetic construct
AAS

SEQ ID NO: 23254 - protein, 3 aa, Artificial Sequence
  Synthetic construct
DAS

SEQ ID NO: 23255 - protein, 3 aa, Artificial Sequence
  Synthetic construct
AAS

SEQ ID NO: 23256 - protein, 3 aa, Artificial Sequence
  Synthetic construct
AAS

SEQ ID NO: 23257 - protein, 3 aa, Artificial Sequence
  Synthetic construct
GAS

SEQ ID NO: 23258 - protein, 3 aa, Artificial Sequence
  Synthetic construct
DAS

SEQ ID NO: 23259 - protein, 3 aa, Artificial Sequence
  Synthetic construct
AAS

SEQ ID NO: 23260 - protein, 3 aa, Artificial Sequence
  Synthetic construct
GAS

SEQ ID NO: 23261 - protein, 3 aa, Artificial Sequence
  Synthetic construct
AAS

SEQ ID NO: 23262 - protein, 3 aa, Artificial Sequence
  Synthetic construct
AAS

SEQ ID NO: 23263 - protein, 3 aa, Artificial Sequence
  Synthetic construct
GAS

SEQ ID NO: 23264 - protein, 3 aa, Artificial Sequence
  Synthetic construct
DAS

SEQ ID NO: 23265 - protein, 3 aa, Artificial Sequence
  Synthetic construct
AAS

SEQ ID NO: 23266 - protein, 3 aa, Artificial Sequence
  Synthetic construct
YDR

SEQ ID NO: 23267 - protein, 3 aa, Artificial Sequence
  Synthetic construct
GDT

SEQ ID NO: 23268 - protein, 3 aa, Artificial Sequence
  Synthetic construct
KDS

SEQ ID NO: 23269 - protein, 3 aa, Artificial Sequence
  Synthetic construct
KAS

SEQ ID NO: 23270 - protein, 3 aa, Artificial Sequence
  Synthetic construct
AAS

SEQ ID NO: 23271 - protein, 3 aa, Artificial Sequence
  Synthetic construct
AAS

SEQ ID NO: 23272 - protein, 3 aa, Artificial Sequence
  Synthetic construct
MTS

SEQ ID NO: 23273 - protein, 3 aa, Artificial Sequence
  Synthetic construct
STN

SEQ ID NO: 23274 - protein, 3 aa, Artificial Sequence
  Synthetic construct
GAS

SEQ ID NO: 23275 - protein, 3 aa, Artificial Sequence
  Synthetic construct
QDL

SEQ ID NO: 23276 - protein, 3 aa, Artificial Sequence
  Synthetic construct
AAS

SEQ ID NO: 23277 - protein, 3 aa, Artificial Sequence
  Synthetic construct
EVN

SEQ ID NO: 23278 - protein, 3 aa, Artificial Sequence
  Synthetic construct
GAS

SEQ ID NO: 23279 - protein, 3 aa, Artificial Sequence
  Synthetic construct
AAS

SEQ ID NO: 23280 - protein, 3 aa, Artificial Sequence
  Synthetic construct
RNN

SEQ ID NO: 23281 - protein, 3 aa, Artificial Sequence
  Synthetic construct
DAS

SEQ ID NO: 23282 - protein, 3 aa, Artificial Sequence
  Synthetic construct
RDR

SEQ ID NO: 23283 - protein, 3 aa, Artificial Sequence
  Synthetic construct
EDN

SEQ ID NO: 23284 - protein, 3 aa, Artificial Sequence
  Synthetic construct
KVS

SEQ ID NO: 23285 - protein, 3 aa, Artificial Sequence
  Synthetic construct
RNA

SEQ ID NO: 23286 - protein, 3 aa, Artificial Sequence
  Synthetic construct
DAS

SEQ ID NO: 23287 - protein, 3 aa, Artificial Sequence
  Synthetic construct
GSN

SEQ ID NO: 23288 - protein, 3 aa, Artificial Sequence
  Synthetic construct
DAS

SEQ ID NO: 23289 - protein, 3 aa, Artificial Sequence
  Synthetic construct
GAT

SEQ ID NO: 23290 - protein, 3 aa, Artificial Sequence
  Synthetic construct
KDT

SEQ ID NO: 23291 - protein, 3 aa, Artificial Sequence
  Synthetic construct
GAS

SEQ ID NO: 23292 - protein, 3 aa, Artificial Sequence
  Synthetic construct
GAS

SEQ ID NO: 23293 - protein, 3 aa, Artificial Sequence
  Synthetic construct
GAS

SEQ ID NO: 23294 - protein, 3 aa, Artificial Sequence
  Synthetic construct
GAS

SEQ ID NO: 23295 - protein, 3 aa, Artificial Sequence
  Synthetic construct
WAS

SEQ ID NO: 23296 - protein, 3 aa, Artificial Sequence
  Synthetic construct
AAS

SEQ ID NO: 23297 - protein, 3 aa, Artificial Sequence
  Synthetic construct
GAS

SEQ ID NO: 23298 - protein, 3 aa, Artificial Sequence
  Synthetic construct
EGT

SEQ ID NO: 23299 - protein, 3 aa, Artificial Sequence
  Synthetic construct
AAS

SEQ ID NO: 23300 - protein, 7 aa, Artificial Sequence
  Synthetic construct
VNSDGSH

SEQ ID NO: 23301 - protein, 3 aa, Artificial Sequence
  Synthetic construct
KAS

SEQ ID NO: 23302 - protein, 3 aa, Artificial Sequence
  Synthetic construct
LGS

SEQ ID NO: 23303 - protein, 3 aa, Artificial Sequence
  Synthetic construct
AAS

SEQ ID NO: 23304 - protein, 7 aa, Artificial Sequence
  Synthetic construct
YKSDSDK

SEQ ID NO: 23305 - protein, 3 aa, Artificial Sequence
  Synthetic construct
QDS

SEQ ID NO: 23306 - protein, 3 aa, Artificial Sequence
  Synthetic construct
DAS

SEQ ID NO: 23307 - protein, 3 aa, Artificial Sequence
  Synthetic construct
AAS

SEQ ID NO: 23308 - protein, 3 aa, Artificial Sequence
  Synthetic construct
LGS

SEQ ID NO: 23309 - protein, 3 aa, Artificial Sequence
  Synthetic construct
DTN

SEQ ID NO: 23310 - protein, 3 aa, Artificial Sequence
  Synthetic construct
GAS

SEQ ID NO: 23311 - protein, 3 aa, Artificial Sequence
  Synthetic construct
EVS

SEQ ID NO: 23312 - protein, 3 aa, Artificial Sequence
  Synthetic construct
RDK

SEQ ID NO: 23313 - protein, 3 aa, Artificial Sequence
  Synthetic construct
EAS

SEQ ID NO: 23314 - protein, 3 aa, Artificial Sequence
  Synthetic construct
AAS

SEQ ID NO: 23315 - protein, 3 aa, Artificial Sequence
  Synthetic construct
KDT

SEQ ID NO: 23316 - protein, 3 aa, Artificial Sequence
  Synthetic construct
DAS

SEQ ID NO: 23317 - protein, 3 aa, Artificial Sequence
  Synthetic construct
KAS

SEQ ID NO: 23318 - protein, 3 aa, Artificial Sequence
  Synthetic construct
DAS

SEQ ID NO: 23319 - protein, 3 aa, Artificial Sequence
  Synthetic construct
AAS

SEQ ID NO: 23320 - protein, 3 aa, Artificial Sequence
  Synthetic construct
KAS

SEQ ID NO: 23321 - protein, 3 aa, Artificial Sequence
  Synthetic construct
KIS

SEQ ID NO: 23322 - protein, 3 aa, Artificial Sequence
  Synthetic construct
EVS

SEQ ID NO: 23323 - protein, 3 aa, Artificial Sequence
  Synthetic construct
WAS

SEQ ID NO: 23324 - protein, 3 aa, Artificial Sequence
  Synthetic construct
DVS

SEQ ID NO: 23325 - protein, 3 aa, Artificial Sequence
  Synthetic construct
AAS

SEQ ID NO: 23326 - protein, 3 aa, Artificial Sequence
  Synthetic construct
LGS

SEQ ID NO: 23327 - protein, 3 aa, Artificial Sequence
  Synthetic construct
DVT

SEQ ID NO: 23328 - protein, 7 aa, Artificial Sequence
  Synthetic construct
VNTDGSH

SEQ ID NO: 23329 - protein, 3 aa, Artificial Sequence
  Synthetic construct
KDS

SEQ ID NO: 23330 - protein, 3 aa, Artificial Sequence
  Synthetic construct
AAS

SEQ ID NO: 23331 - protein, 3 aa, Artificial Sequence
  Synthetic construct
AAS

SEQ ID NO: 23332 - protein, 3 aa, Artificial Sequence
  Synthetic construct
GAS

SEQ ID NO: 23333 - protein, 3 aa, Artificial Sequence
  Synthetic construct
GAS

SEQ ID NO: 23334 - protein, 3 aa, Artificial Sequence
  Synthetic construct
EAS

SEQ ID NO: 23335 - protein, 3 aa, Artificial Sequence
  Synthetic construct
DVS

SEQ ID NO: 23336 - protein, 3 aa, Artificial Sequence
  Synthetic construct
DVS

SEQ ID NO: 23337 - protein, 3 aa, Artificial Sequence
  Synthetic construct
LGS

SEQ ID NO: 23338 - protein, 3 aa, Artificial Sequence
  Synthetic construct
DVS

SEQ ID NO: 23339 - protein, 3 aa, Artificial Sequence
  Synthetic construct
DAS

SEQ ID NO: 23340 - protein, 3 aa, Artificial Sequence
  Synthetic construct
EDR

SEQ ID NO: 23341 - protein, 3 aa, Artificial Sequence
  Synthetic construct
LGS

SEQ ID NO: 23342 - protein, 3 aa, Artificial Sequence
  Synthetic construct
GAS

SEQ ID NO: 23343 - protein, 3 aa, Artificial Sequence
  Synthetic construct
EDS

SEQ ID NO: 23344 - protein, 3 aa, Artificial Sequence
  Synthetic construct
AAS

SEQ ID NO: 23345 - protein, 3 aa, Artificial Sequence
  Synthetic construct
LGS

SEQ ID NO: 23346 - protein, 3 aa, Artificial Sequence
  Synthetic construct
DAS

SEQ ID NO: 23347 - protein, 3 aa, Artificial Sequence
  Synthetic construct
KIS

SEQ ID NO: 23348 - protein, 3 aa, Artificial Sequence
  Synthetic construct
KAS

SEQ ID NO: 23349 - protein, 3 aa, Artificial Sequence
  Synthetic construct
DNN

SEQ ID NO: 23350 - protein, 3 aa, Artificial Sequence
  Synthetic construct
KAS

SEQ ID NO: 23351 - protein, 3 aa, Artificial Sequence
  Synthetic construct
ELS

SEQ ID NO: 23352 - protein, 3 aa, Artificial Sequence
  Synthetic construct
GNS

SEQ ID NO: 23353 - protein, 3 aa, Artificial Sequence
  Synthetic construct
RDT

SEQ ID NO: 23354 - protein, 3 aa, Artificial Sequence
  Synthetic construct
GKN

SEQ ID NO: 23355 - protein, 3 aa, Artificial Sequence
  Synthetic construct
GKN

SEQ ID NO: 23356 - protein, 3 aa, Artificial Sequence
  Synthetic construct
DAS

SEQ ID NO: 23357 - protein, 3 aa, Artificial Sequence
  Synthetic construct
LGS

SEQ ID NO: 23358 - protein, 3 aa, Artificial Sequence
  Synthetic construct
AAS

SEQ ID NO: 23359 - protein, 3 aa, Artificial Sequence
  Synthetic construct
EDN

SEQ ID NO: 23360 - protein, 3 aa, Artificial Sequence
  Synthetic construct
AAS

SEQ ID NO: 23361 - protein, 3 aa, Artificial Sequence
  Synthetic construct
KAS

SEQ ID NO: 23362 - protein, 3 aa, Artificial Sequence
  Synthetic construct
GDT

SEQ ID NO: 23363 - protein, 3 aa, Artificial Sequence
  Synthetic construct
DNN

SEQ ID NO: 23364 - protein, 3 aa, Artificial Sequence
  Synthetic construct
AAS

SEQ ID NO: 23365 - protein, 3 aa, Artificial Sequence
  Synthetic construct
HNT

SEQ ID NO: 23366 - protein, 3 aa, Artificial Sequence
  Synthetic construct
WAS

SEQ ID NO: 23367 - protein, 3 aa, Artificial Sequence
  Synthetic construct
AAS

SEQ ID NO: 23368 - protein, 3 aa, Artificial Sequence
  Synthetic construct
GAS

SEQ ID NO: 23369 - protein, 3 aa, Artificial Sequence
  Synthetic construct
RNN

SEQ ID NO: 23370 - protein, 3 aa, Artificial Sequence
  Synthetic construct
DVS

SEQ ID NO: 23371 - protein, 3 aa, Artificial Sequence
  Synthetic construct
AAS

SEQ ID NO: 23372 - protein, 3 aa, Artificial Sequence
  Synthetic construct
GAS

SEQ ID NO: 23373 - protein, 3 aa, Artificial Sequence
  Synthetic construct
AAS

SEQ ID NO: 23374 - protein, 3 aa, Artificial Sequence
  Synthetic construct
DAS

SEQ ID NO: 23375 - protein, 3 aa, Artificial Sequence
  Synthetic construct
WAS

SEQ ID NO: 23376 - protein, 7 aa, Artificial Sequence
  Synthetic construct
YKSDSDK

SEQ ID NO: 23377 - protein, 3 aa, Artificial Sequence
  Synthetic construct
SAS

SEQ ID NO: 23378 - protein, 3 aa, Artificial Sequence
  Synthetic construct
WAS

SEQ ID NO: 23379 - protein, 3 aa, Artificial Sequence
  Synthetic construct
SVS

SEQ ID NO: 23380 - protein, 3 aa, Artificial Sequence
  Synthetic construct
GAS

SEQ ID NO: 23381 - protein, 3 aa, Artificial Sequence
  Synthetic construct
KAS

SEQ ID NO: 23382 - protein, 3 aa, Artificial Sequence
  Synthetic construct
DAS

SEQ ID NO: 23383 - protein, 3 aa, Artificial Sequence
  Synthetic construct
DVS

SEQ ID NO: 23384 - protein, 3 aa, Artificial Sequence
  Synthetic construct
QDS

SEQ ID NO: 23385 - protein, 3 aa, Artificial Sequence
  Synthetic construct
GAS

SEQ ID NO: 23386 - protein, 3 aa, Artificial Sequence
  Synthetic construct
GNK

SEQ ID NO: 23387 - protein, 7 aa, Artificial Sequence
  Synthetic construct
LNSDGSH

SEQ ID NO: 23388 - protein, 3 aa, Artificial Sequence
  Synthetic construct
LGS

SEQ ID NO: 23389 - protein, 3 aa, Artificial Sequence
  Synthetic construct
EDK

SEQ ID NO: 23390 - protein, 3 aa, Artificial Sequence
  Synthetic construct
RNN

SEQ ID NO: 23391 - protein, 3 aa, Artificial Sequence
  Synthetic construct
AAS

SEQ ID NO: 23392 - protein, 3 aa, Artificial Sequence
  Synthetic construct
GAS

SEQ ID NO: 23393 - protein, 3 aa, Artificial Sequence
  Synthetic construct
WAS

SEQ ID NO: 23394 - protein, 3 aa, Artificial Sequence
  Synthetic construct
GAS

SEQ ID NO: 23395 - protein, 3 aa, Artificial Sequence
  Synthetic construct
AAS

SEQ ID NO: 23396 - protein, 3 aa, Artificial Sequence
  Synthetic construct
GEN

SEQ ID NO: 23397 - protein, 3 aa, Artificial Sequence
  Synthetic construct
LAS

SEQ ID NO: 23398 - protein, 3 aa, Artificial Sequence
  Synthetic construct
NAS

SEQ ID NO: 23399 - protein, 3 aa, Artificial Sequence
  Synthetic construct
EVN

SEQ ID NO: 23400 - protein, 3 aa, Artificial Sequence
  Synthetic construct
GAS

SEQ ID NO: 23401 - protein, 3 aa, Artificial Sequence
  Synthetic construct
WAS

SEQ ID NO: 23402 - protein, 3 aa, Artificial Sequence
  Synthetic construct
DAT

SEQ ID NO: 23403 - protein, 3 aa, Artificial Sequence
  Synthetic construct
GAS

SEQ ID NO: 23404 - protein, 3 aa, Artificial Sequence
  Synthetic construct
DNN

SEQ ID NO: 23405 - protein, 3 aa, Artificial Sequence
  Synthetic construct
GAS

SEQ ID NO: 23406 - protein, 3 aa, Artificial Sequence
  Synthetic construct
HKN

SEQ ID NO: 23407 - protein, 3 aa, Artificial Sequence
  Synthetic construct
WAS

SEQ ID NO: 23408 - protein, 3 aa, Artificial Sequence
  Synthetic construct
AAS

SEQ ID NO: 23409 - protein, 3 aa, Artificial Sequence
  Synthetic construct
GKN

SEQ ID NO: 23410 - protein, 3 aa, Artificial Sequence
  Synthetic construct
DTS

SEQ ID NO: 23411 - protein, 3 aa, Artificial Sequence
  Synthetic construct
AAS

SEQ ID NO: 23412 - protein, 3 aa, Artificial Sequence
  Synthetic construct
KAS

SEQ ID NO: 23413 - protein, 3 aa, Artificial Sequence
  Synthetic construct
VAS

SEQ ID NO: 23414 - protein, 3 aa, Artificial Sequence
  Synthetic construct
DSN

SEQ ID NO: 23415 - protein, 3 aa, Artificial Sequence
  Synthetic construct
FAS

SEQ ID NO: 23416 - protein, 3 aa, Artificial Sequence
  Synthetic construct
YDS

SEQ ID NO: 23417 - protein, 3 aa, Artificial Sequence
  Synthetic construct
DFT

SEQ ID NO: 23418 - protein, 3 aa, Artificial Sequence
  Synthetic construct
EDN

SEQ ID NO: 23419 - protein, 3 aa, Artificial Sequence
  Synthetic construct
DAT

SEQ ID NO: 23420 - protein, 3 aa, Artificial Sequence
  Synthetic construct
LGS

SEQ ID NO: 23421 - protein, 3 aa, Artificial Sequence
  Synthetic construct
EAS

SEQ ID NO: 23422 - protein, 3 aa, Artificial Sequence
  Synthetic construct
DAT

SEQ ID NO: 23423 - protein, 3 aa, Artificial Sequence
  Synthetic construct
GAS

SEQ ID NO: 23424 - protein, 3 aa, Artificial Sequence
  Synthetic construct
SDN

SEQ ID NO: 23425 - protein, 3 aa, Artificial Sequence
  Synthetic construct
DND

SEQ ID NO: 23426 - protein, 3 aa, Artificial Sequence
  Synthetic construct
NND

SEQ ID NO: 23427 - protein, 3 aa, Artificial Sequence
  Synthetic construct
WAS

SEQ ID NO: 23428 - protein, 7 aa, Artificial Sequence
  Synthetic construct
VNSDGSH

SEQ ID NO: 23429 - protein, 3 aa, Artificial Sequence
  Synthetic construct
DNS

SEQ ID NO: 23430 - protein, 3 aa, Artificial Sequence
  Synthetic construct
AAS

SEQ ID NO: 23431 - protein, 3 aa, Artificial Sequence
  Synthetic construct
GAS

SEQ ID NO: 23432 - protein, 3 aa, Artificial Sequence
  Synthetic construct
DVN

SEQ ID NO: 23433 - protein, 3 aa, Artificial Sequence
  Synthetic construct
GAS

SEQ ID NO: 23434 - protein, 3 aa, Artificial Sequence
  Synthetic construct
GAS

SEQ ID NO: 23435 - protein, 3 aa, Artificial Sequence
  Synthetic construct
GKN

SEQ ID NO: 23436 - protein, 3 aa, Artificial Sequence
  Synthetic construct
DTS

SEQ ID NO: 23437 - protein, 3 aa, Artificial Sequence
  Synthetic construct
LGS

SEQ ID NO: 23438 - protein, 3 aa, Artificial Sequence
  Synthetic construct
GAS

SEQ ID NO: 23439 - protein, 3 aa, Artificial Sequence
  Synthetic construct
EVS

SEQ ID NO: 23440 - protein, 3 aa, Artificial Sequence
  Synthetic construct
AAS

SEQ ID NO: 23441 - protein, 3 aa, Artificial Sequence
  Synthetic construct
KVS

SEQ ID NO: 23442 - protein, 3 aa, Artificial Sequence
  Synthetic construct
SNS

SEQ ID NO: 23443 - protein, 3 aa, Artificial Sequence
  Synthetic construct
EVT

SEQ ID NO: 23444 - protein, 3 aa, Artificial Sequence
  Synthetic construct
EAT

SEQ ID NO: 23445 - protein, 3 aa, Artificial Sequence
  Synthetic construct
DAS

SEQ ID NO: 23446 - protein, 3 aa, Artificial Sequence
  Synthetic construct
EVI

SEQ ID NO: 23447 - protein, 3 aa, Artificial Sequence
  Synthetic construct
GTS

SEQ ID NO: 23448 - protein, 3 aa, Artificial Sequence
  Synthetic construct
EVN

SEQ ID NO: 23449 - protein, 3 aa, Artificial Sequence
  Synthetic construct
KAS

SEQ ID NO: 23450 - protein, 3 aa, Artificial Sequence
  Synthetic construct
KAS

SEQ ID NO: 23451 - protein, 3 aa, Artificial Sequence
  Synthetic construct
DNN

SEQ ID NO: 23452 - protein, 3 aa, Artificial Sequence
  Synthetic construct
AAS

SEQ ID NO: 23453 - protein, 3 aa, Artificial Sequence
  Synthetic construct
GAS

SEQ ID NO: 23454 - protein, 3 aa, Artificial Sequence
  Synthetic construct
KVS

SEQ ID NO: 23455 - protein, 3 aa, Artificial Sequence
  Synthetic construct
DVS

SEQ ID NO: 23456 - protein, 3 aa, Artificial Sequence
  Synthetic construct
ATS

SEQ ID NO: 23457 - protein, 3 aa, Artificial Sequence
  Synthetic construct
DTD

SEQ ID NO: 23458 - protein, 3 aa, Artificial Sequence
  Synthetic construct
DTT

SEQ ID NO: 23459 - protein, 3 aa, Artificial Sequence
  Synthetic construct
AAS

SEQ ID NO: 23460 - protein, 3 aa, Artificial Sequence
  Synthetic construct
KAS

SEQ ID NO: 23461 - protein, 3 aa, Artificial Sequence
  Synthetic construct
DIS

SEQ ID NO: 23462 - protein, 3 aa, Artificial Sequence
  Synthetic construct
KVS

SEQ ID NO: 23463 - protein, 3 aa, Artificial Sequence
  Synthetic construct
YAS

SEQ ID NO: 23464 - protein, 3 aa, Artificial Sequence
  Synthetic construct
KVS

SEQ ID NO: 23465 - protein, 3 aa, Artificial Sequence
  Synthetic construct
RDN

SEQ ID NO: 23466 - protein, 3 aa, Artificial Sequence
  Synthetic construct
STS

SEQ ID NO: 23467 - protein, 3 aa, Artificial Sequence
  Synthetic construct
GNS

SEQ ID NO: 23468 - protein, 3 aa, Artificial Sequence
  Synthetic construct
DSS

SEQ ID NO: 23469 - protein, 3 aa, Artificial Sequence
  Synthetic construct
GAS

SEQ ID NO: 23470 - protein, 3 aa, Artificial Sequence
  Synthetic construct
AAS

SEQ ID NO: 23471 - protein, 3 aa, Artificial Sequence
  Synthetic construct
KAS

SEQ ID NO: 23472 - protein, 3 aa, Artificial Sequence
  Synthetic construct
GAS

SEQ ID NO: 23473 - protein, 3 aa, Artificial Sequence
  Synthetic construct
STN

SEQ ID NO: 23474 - protein, 3 aa, Artificial Sequence
  Synthetic construct
DAS

SEQ ID NO: 23475 - protein, 3 aa, Artificial Sequence
  Synthetic construct
AAS

SEQ ID NO: 23476 - protein, 3 aa, Artificial Sequence
  Synthetic construct
LGS

SEQ ID NO: 23477 - protein, 3 aa, Artificial Sequence
  Synthetic construct
KAS

SEQ ID NO: 23478 - protein, 3 aa, Artificial Sequence
  Synthetic construct
GAS

SEQ ID NO: 23479 - protein, 3 aa, Artificial Sequence
  Synthetic construct
GAS

SEQ ID NO: 23480 - protein, 3 aa, Artificial Sequence
  Synthetic construct
WAS

SEQ ID NO: 23481 - protein, 3 aa, Artificial Sequence
  Synthetic construct
GAS

SEQ ID NO: 23482 - protein, 3 aa, Artificial Sequence
  Synthetic construct
LGS

SEQ ID NO: 23483 - protein, 3 aa, Artificial Sequence
  Synthetic construct
AAS

SEQ ID NO: 23484 - protein, 3 aa, Artificial Sequence
  Synthetic construct
EGS

SEQ ID NO: 23485 - protein, 3 aa, Artificial Sequence
  Synthetic construct
GAS

SEQ ID NO: 23486 - protein, 3 aa, Artificial Sequence
  Synthetic construct
QDT

SEQ ID NO: 23487 - protein, 3 aa, Artificial Sequence
  Synthetic construct
KAS

SEQ ID NO: 23488 - protein, 7 aa, Artificial Sequence
  Synthetic construct
LSNFGAH

SEQ ID NO: 23489 - protein, 7 aa, Artificial Sequence
  Synthetic construct
LEDSGSY

SEQ ID NO: 23490 - protein, 3 aa, Artificial Sequence
  Synthetic construct
DVS

SEQ ID NO: 23491 - protein, 3 aa, Artificial Sequence
  Synthetic construct
KAS

SEQ ID NO: 23492 - protein, 3 aa, Artificial Sequence
  Synthetic construct
DVS

SEQ ID NO: 23493 - protein, 3 aa, Artificial Sequence
  Synthetic construct
YDS

SEQ ID NO: 23494 - protein, 3 aa, Artificial Sequence
  Synthetic construct
WAS

SEQ ID NO: 23495 - protein, 3 aa, Artificial Sequence
  Synthetic construct
DAS

SEQ ID NO: 23496 - protein, 3 aa, Artificial Sequence
  Synthetic construct
GAS

SEQ ID NO: 23497 - protein, 3 aa, Artificial Sequence
  Synthetic construct
EVN

SEQ ID NO: 23498 - protein, 3 aa, Artificial Sequence
  Synthetic construct
KAS

SEQ ID NO: 23499 - protein, 3 aa, Artificial Sequence
  Synthetic construct
DAS

SEQ ID NO: 23500 - protein, 3 aa, Artificial Sequence
  Synthetic construct
DVT

SEQ ID NO: 23501 - protein, 3 aa, Artificial Sequence
  Synthetic construct
AAS

SEQ ID NO: 23502 - protein, 3 aa, Artificial Sequence
  Synthetic construct
GAS

SEQ ID NO: 23503 - protein, 3 aa, Artificial Sequence
  Synthetic construct
AAS

SEQ ID NO: 23504 - protein, 3 aa, Artificial Sequence
  Synthetic construct
EGT

SEQ ID NO: 23505 - protein, 3 aa, Artificial Sequence
  Synthetic construct
RNY

SEQ ID NO: 23506 - protein, 3 aa, Artificial Sequence
  Synthetic construct
DAS

SEQ ID NO: 23507 - protein, 3 aa, Artificial Sequence
  Synthetic construct
GAS

SEQ ID NO: 23508 - protein, 3 aa, Artificial Sequence
  Synthetic construct
GAS

SEQ ID NO: 23509 - protein, 3 aa, Artificial Sequence
  Synthetic construct
KAS

SEQ ID NO: 23510 - protein, 3 aa, Artificial Sequence
  Synthetic construct
KAS

SEQ ID NO: 23511 - protein, 3 aa, Artificial Sequence
  Synthetic construct
LAA

SEQ ID NO: 23512 - protein, 3 aa, Artificial Sequence
  Synthetic construct
AAS

SEQ ID NO: 23513 - protein, 3 aa, Artificial Sequence
  Synthetic construct
STS

SEQ ID NO: 23514 - protein, 3 aa, Artificial Sequence
  Synthetic construct
YEN

SEQ ID NO: 23515 - protein, 3 aa, Artificial Sequence
  Synthetic construct
DVT

SEQ ID NO: 23516 - protein, 3 aa, Artificial Sequence
  Synthetic construct
DAT

SEQ ID NO: 23517 - protein, 3 aa, Artificial Sequence
  Synthetic construct
YDR

SEQ ID NO: 23518 - protein, 3 aa, Artificial Sequence
  Synthetic construct
QST

SEQ ID NO: 23519 - protein, 3 aa, Artificial Sequence
  Synthetic construct
AVS

SEQ ID NO: 23520 - protein, 3 aa, Artificial Sequence
  Synthetic construct
KAS

SEQ ID NO: 23521 - protein, 3 aa, Artificial Sequence
  Synthetic construct
EDN

SEQ ID NO: 23522 - protein, 3 aa, Artificial Sequence
  Synthetic construct
DAS

SEQ ID NO: 23523 - protein, 3 aa, Artificial Sequence
  Synthetic construct
AAS

SEQ ID NO: 23524 - protein, 3 aa, Artificial Sequence
  Synthetic construct
DTH

SEQ ID NO: 23525 - protein, 3 aa, Artificial Sequence
  Synthetic construct
WAS

SEQ ID NO: 23526 - protein, 3 aa, Artificial Sequence
  Synthetic construct
RNN

SEQ ID NO: 23527 - protein, 3 aa, Artificial Sequence
  Synthetic construct
DVS

SEQ ID NO: 23528 - protein, 3 aa, Artificial Sequence
  Synthetic construct
AAS

SEQ ID NO: 23529 - protein, 3 aa, Artificial Sequence
  Synthetic construct
KIS

SEQ ID NO: 23530 - protein, 3 aa, Artificial Sequence
  Synthetic construct
AAS

SEQ ID NO: 23531 - protein, 3 aa, Artificial Sequence
  Synthetic construct
SAS

SEQ ID NO: 23532 - protein, 3 aa, Artificial Sequence
  Synthetic construct
AAS

SEQ ID NO: 23533 - protein, 3 aa, Artificial Sequence
  Synthetic construct
KAS

SEQ ID NO: 23534 - protein, 3 aa, Artificial Sequence
  Synthetic construct
DVS

SEQ ID NO: 23535 - protein, 3 aa, Artificial Sequence
  Synthetic construct
GAS

SEQ ID NO: 23536 - protein, 3 aa, Artificial Sequence
  Synthetic construct
HDS

SEQ ID NO: 23537 - protein, 3 aa, Artificial Sequence
  Synthetic construct
KAS

SEQ ID NO: 23538 - protein, 3 aa, Artificial Sequence
  Synthetic construct
GKH

SEQ ID NO: 23539 - protein, 3 aa, Artificial Sequence
  Synthetic construct
GAS

SEQ ID NO: 23540 - protein, 3 aa, Artificial Sequence
  Synthetic construct
AAS

SEQ ID NO: 23541 - protein, 3 aa, Artificial Sequence
  Synthetic construct
QDA

SEQ ID NO: 23542 - protein, 3 aa, Artificial Sequence
  Synthetic construct
AAS

SEQ ID NO: 23543 - protein, 3 aa, Artificial Sequence
  Synthetic construct
DTS

SEQ ID NO: 23544 - protein, 3 aa, Artificial Sequence
  Synthetic construct
KVS

SEQ ID NO: 23545 - protein, 3 aa, Artificial Sequence
  Synthetic construct
AAS

SEQ ID NO: 23546 - protein, 3 aa, Artificial Sequence
  Synthetic construct
EVS

SEQ ID NO: 23547 - protein, 3 aa, Artificial Sequence
  Synthetic construct
STS

SEQ ID NO: 23548 - protein, 3 aa, Artificial Sequence
  Synthetic construct
DAS

SEQ ID NO: 23549 - protein, 3 aa, Artificial Sequence
  Synthetic construct
DAS

SEQ ID NO: 23550 - protein, 3 aa, Artificial Sequence
  Synthetic construct
GAS

SEQ ID NO: 23551 - protein, 3 aa, Artificial Sequence
  Synthetic construct
GDT

SEQ ID NO: 23552 - protein, 3 aa, Artificial Sequence
  Synthetic construct
AAS

SEQ ID NO: 23553 - protein, 3 aa, Artificial Sequence
  Synthetic construct
DVS

SEQ ID NO: 23554 - protein, 3 aa, Artificial Sequence
  Synthetic construct
DAS

SEQ ID NO: 23555 - protein, 3 aa, Artificial Sequence
  Synthetic construct
KAS

SEQ ID NO: 23556 - protein, 3 aa, Artificial Sequence
  Synthetic construct
AAS

SEQ ID NO: 23557 - protein, 3 aa, Artificial Sequence
  Synthetic construct
EAS

SEQ ID NO: 23558 - protein, 3 aa, Artificial Sequence
  Synthetic construct
GVS

SEQ ID NO: 23559 - protein, 3 aa, Artificial Sequence
  Synthetic construct
RNS

SEQ ID NO: 23560 - protein, 3 aa, Artificial Sequence
  Synthetic construct
YAS

SEQ ID NO: 23561 - protein, 3 aa, Artificial Sequence
  Synthetic construct
NDS

SEQ ID NO: 23562 - protein, 3 aa, Artificial Sequence
  Synthetic construct
DAS

SEQ ID NO: 23563 - protein, 3 aa, Artificial Sequence
  Synthetic construct
DNN

SEQ ID NO: 23564 - protein, 3 aa, Artificial Sequence
  Synthetic construct
GAS

SEQ ID NO: 23565 - protein, 3 aa, Artificial Sequence
  Synthetic construct
DAS

SEQ ID NO: 23566 - protein, 3 aa, Artificial Sequence
  Synthetic construct
FDG

SEQ ID NO: 23567 - protein, 3 aa, Artificial Sequence
  Synthetic construct
KDA

SEQ ID NO: 23568 - protein, 3 aa, Artificial Sequence
  Synthetic construct
GAS

SEQ ID NO: 23569 - protein, 3 aa, Artificial Sequence
  Synthetic construct
TTS

SEQ ID NO: 23570 - protein, 3 aa, Artificial Sequence
  Synthetic construct
GAS

SEQ ID NO: 23571 - protein, 3 aa, Artificial Sequence
  Synthetic construct
KAS

SEQ ID NO: 23572 - protein, 3 aa, Artificial Sequence
  Synthetic construct
TAS

SEQ ID NO: 23573 - protein, 3 aa, Artificial Sequence
  Synthetic construct
DNN

SEQ ID NO: 23574 - protein, 3 aa, Artificial Sequence
  Synthetic construct
EDN

SEQ ID NO: 23575 - protein, 3 aa, Artificial Sequence
  Synthetic construct
AAS

SEQ ID NO: 23576 - protein, 3 aa, Artificial Sequence
  Synthetic construct
WAS

SEQ ID NO: 23577 - protein, 3 aa, Artificial Sequence
  Synthetic construct
DVS

SEQ ID NO: 23578 - protein, 3 aa, Artificial Sequence
  Synthetic construct
GAF

SEQ ID NO: 23579 - protein, 3 aa, Artificial Sequence
  Synthetic construct
AAS

SEQ ID NO: 23580 - protein, 3 aa, Artificial Sequence
  Synthetic construct
KVS

SEQ ID NO: 23581 - protein, 3 aa, Artificial Sequence
  Synthetic construct
EVT

SEQ ID NO: 23582 - protein, 3 aa, Artificial Sequence
  Synthetic construct
EVN

SEQ ID NO: 23583 - protein, 3 aa, Artificial Sequence
  Synthetic construct
WAS

SEQ ID NO: 23584 - protein, 3 aa, Artificial Sequence
  Synthetic construct
DDS

SEQ ID NO: 23585 - protein, 3 aa, Artificial Sequence
  Synthetic construct
AAS

SEQ ID NO: 23586 - protein, 3 aa, Artificial Sequence
  Synthetic construct
GAS

SEQ ID NO: 23587 - protein, 3 aa, Artificial Sequence
  Synthetic construct
LGS

SEQ ID NO: 23588 - protein, 3 aa, Artificial Sequence
  Synthetic construct
GAS

SEQ ID NO: 23589 - protein, 3 aa, Artificial Sequence
  Synthetic construct
AAS

SEQ ID NO: 23590 - protein, 3 aa, Artificial Sequence
  Synthetic construct
DAT

SEQ ID NO: 23591 - protein, 3 aa, Artificial Sequence
  Synthetic construct
GAS

SEQ ID NO: 23592 - protein, 3 aa, Artificial Sequence
  Synthetic construct
AAS

SEQ ID NO: 23593 - protein, 3 aa, Artificial Sequence
  Synthetic construct
KAS

SEQ ID NO: 23594 - protein, 3 aa, Artificial Sequence
  Synthetic construct
GAS

SEQ ID NO: 23595 - protein, 3 aa, Artificial Sequence
  Synthetic construct
WAS

SEQ ID NO: 23596 - protein, 3 aa, Artificial Sequence
  Synthetic construct
AAS

SEQ ID NO: 23597 - protein, 3 aa, Artificial Sequence
  Synthetic construct
RNN

SEQ ID NO: 23598 - protein, 3 aa, Artificial Sequence
  Synthetic construct
WAS

SEQ ID NO: 23599 - protein, 3 aa, Artificial Sequence
  Synthetic construct
GAS

SEQ ID NO: 23600 - protein, 3 aa, Artificial Sequence
  Synthetic construct
AAS

SEQ ID NO: 23601 - protein, 3 aa, Artificial Sequence
  Synthetic construct
QAS

SEQ ID NO: 23602 - protein, 3 aa, Artificial Sequence
  Synthetic construct
DHN

SEQ ID NO: 23603 - protein, 3 aa, Artificial Sequence
  Synthetic construct
GAS

SEQ ID NO: 23604 - protein, 3 aa, Artificial Sequence
  Synthetic construct
WAS

SEQ ID NO: 23605 - protein, 3 aa, Artificial Sequence
  Synthetic construct
TAS

SEQ ID NO: 23606 - protein, 7 aa, Artificial Sequence
  Synthetic construct
VNSDGSH

SEQ ID NO: 23607 - protein, 3 aa, Artificial Sequence
  Synthetic construct
GAS

SEQ ID NO: 23608 - protein, 3 aa, Artificial Sequence
  Synthetic construct
LGS

SEQ ID NO: 23609 - protein, 3 aa, Artificial Sequence
  Synthetic construct
KAS

SEQ ID NO: 23610 - protein, 3 aa, Artificial Sequence
  Synthetic construct
DVS

SEQ ID NO: 23611 - protein, 3 aa, Artificial Sequence
  Synthetic construct
EDN

SEQ ID NO: 23612 - protein, 3 aa, Artificial Sequence
  Synthetic construct
KVS

SEQ ID NO: 23613 - protein, 3 aa, Artificial Sequence
  Synthetic construct
LGS

SEQ ID NO: 23614 - protein, 3 aa, Artificial Sequence
  Synthetic construct
GDN

SEQ ID NO: 23615 - protein, 3 aa, Artificial Sequence
  Synthetic construct
AAS

SEQ ID NO: 23616 - protein, 3 aa, Artificial Sequence
  Synthetic construct
WAS

SEQ ID NO: 23617 - protein, 3 aa, Artificial Sequence
  Synthetic construct
GAS

SEQ ID NO: 23618 - protein, 3 aa, Artificial Sequence
  Synthetic construct
WAS

SEQ ID NO: 23619 - protein, 3 aa, Artificial Sequence
  Synthetic construct
EDN

SEQ ID NO: 23620 - protein, 3 aa, Artificial Sequence
  Synthetic construct
DAS

SEQ ID NO: 23621 - protein, 3 aa, Artificial Sequence
  Synthetic construct
RNN

SEQ ID NO: 23622 - protein, 3 aa, Artificial Sequence
  Synthetic construct
AAS

SEQ ID NO: 23623 - protein, 3 aa, Artificial Sequence
  Synthetic construct
KAS

SEQ ID NO: 23624 - protein, 3 aa, Artificial Sequence
  Synthetic construct
EAT

SEQ ID NO: 23625 - protein, 3 aa, Artificial Sequence
  Synthetic construct
SAS

SEQ ID NO: 23626 - protein, 3 aa, Artificial Sequence
  Synthetic construct
AAS

SEQ ID NO: 23627 - protein, 3 aa, Artificial Sequence
  Synthetic construct
NTY

SEQ ID NO: 23628 - protein, 3 aa, Artificial Sequence
  Synthetic construct
DVK

SEQ ID NO: 23629 - protein, 3 aa, Artificial Sequence
  Synthetic construct
GAS

SEQ ID NO: 23630 - protein, 3 aa, Artificial Sequence
  Synthetic construct
GAS

SEQ ID NO: 23631 - protein, 3 aa, Artificial Sequence
  Synthetic construct
LGS

SEQ ID NO: 23632 - protein, 3 aa, Artificial Sequence
  Synthetic construct
RDD

SEQ ID NO: 23633 - protein, 3 aa, Artificial Sequence
  Synthetic construct
EVN

SEQ ID NO: 23634 - protein, 3 aa, Artificial Sequence
  Synthetic construct
DAS

SEQ ID NO: 23635 - protein, 3 aa, Artificial Sequence
  Synthetic construct
DGS

SEQ ID NO: 23636 - protein, 3 aa, Artificial Sequence
  Synthetic construct
AAF

SEQ ID NO: 23637 - protein, 3 aa, Artificial Sequence
  Synthetic construct
AAS

SEQ ID NO: 23638 - protein, 3 aa, Artificial Sequence
  Synthetic construct
GAS

SEQ ID NO: 23639 - protein, 3 aa, Artificial Sequence
  Synthetic construct
EGS

SEQ ID NO: 23640 - protein, 3 aa, Artificial Sequence
  Synthetic construct
AAS

SEQ ID NO: 23641 - protein, 3 aa, Artificial Sequence
  Synthetic construct
RAD

SEQ ID NO: 23642 - protein, 3 aa, Artificial Sequence
  Synthetic construct
GKN

SEQ ID NO: 23643 - protein, 3 aa, Artificial Sequence
  Synthetic construct
DAS

SEQ ID NO: 23644 - protein, 3 aa, Artificial Sequence
  Synthetic construct
DNN

SEQ ID NO: 23645 - protein, 3 aa, Artificial Sequence
  Synthetic construct
EGT

SEQ ID NO: 23646 - protein, 3 aa, Artificial Sequence
  Synthetic construct
EVS

SEQ ID NO: 23647 - protein, 3 aa, Artificial Sequence
  Synthetic construct
QDT

SEQ ID NO: 23648 - protein, 3 aa, Artificial Sequence
  Synthetic construct
AAS

SEQ ID NO: 23649 - protein, 3 aa, Artificial Sequence
  Synthetic construct
DVS

SEQ ID NO: 23650 - protein, 3 aa, Artificial Sequence
  Synthetic construct
DAT

SEQ ID NO: 23651 - protein, 3 aa, Artificial Sequence
  Synthetic construct
DAS

SEQ ID NO: 23652 - protein, 3 aa, Artificial Sequence
  Synthetic construct
AAS

SEQ ID NO: 23653 - protein, 3 aa, Artificial Sequence
  Synthetic construct
SAS

SEQ ID NO: 23654 - protein, 3 aa, Artificial Sequence
  Synthetic construct
RNT

SEQ ID NO: 23655 - protein, 3 aa, Artificial Sequence
  Synthetic construct
AAS

SEQ ID NO: 23656 - protein, 3 aa, Artificial Sequence
  Synthetic construct
AAS

SEQ ID NO: 23657 - protein, 3 aa, Artificial Sequence
  Synthetic construct
AAS

SEQ ID NO: 23658 - protein, 3 aa, Artificial Sequence
  Synthetic construct
QDS

SEQ ID NO: 23659 - protein, 3 aa, Artificial Sequence
  Synthetic construct
GAS

SEQ ID NO: 23660 - protein, 3 aa, Artificial Sequence
  Synthetic construct
DAS

SEQ ID NO: 23661 - protein, 3 aa, Artificial Sequence
  Synthetic construct
GNS

SEQ ID NO: 23662 - protein, 3 aa, Artificial Sequence
  Synthetic construct
WAS

SEQ ID NO: 23663 - protein, 3 aa, Artificial Sequence
  Synthetic construct
DNI

SEQ ID NO: 23664 - protein, 3 aa, Artificial Sequence
  Synthetic construct
GAS

SEQ ID NO: 23665 - protein, 3 aa, Artificial Sequence
  Synthetic construct
STS

SEQ ID NO: 23666 - protein, 3 aa, Artificial Sequence
  Synthetic construct
WGS

SEQ ID NO: 23667 - protein, 3 aa, Artificial Sequence
  Synthetic construct
QDS

SEQ ID NO: 23668 - protein, 3 aa, Artificial Sequence
  Synthetic construct
GAS

SEQ ID NO: 23669 - protein, 3 aa, Artificial Sequence
  Synthetic construct
LAS

SEQ ID NO: 23670 - protein, 3 aa, Artificial Sequence
  Synthetic construct
AAS

SEQ ID NO: 23671 - protein, 3 aa, Artificial Sequence
  Synthetic construct
YDS

SEQ ID NO: 23672 - protein, 3 aa, Artificial Sequence
  Synthetic construct
RNT

SEQ ID NO: 23673 - protein, 3 aa, Artificial Sequence
  Synthetic construct
DAS

SEQ ID NO: 23674 - protein, 3 aa, Artificial Sequence
  Synthetic construct
GAS

SEQ ID NO: 23675 - protein, 3 aa, Artificial Sequence
  Synthetic construct
DAS

SEQ ID NO: 23676 - protein, 3 aa, Artificial Sequence
  Synthetic construct
DAS

SEQ ID NO: 23677 - protein, 3 aa, Artificial Sequence
  Synthetic construct
QDT

SEQ ID NO: 23678 - protein, 3 aa, Artificial Sequence
  Synthetic construct
WTS

SEQ ID NO: 23679 - protein, 3 aa, Artificial Sequence
  Synthetic construct
GAS

SEQ ID NO: 23680 - protein, 3 aa, Artificial Sequence
  Synthetic construct
DVS

SEQ ID NO: 23681 - protein, 7 aa, Artificial Sequence
  Synthetic construct
INSDGSH

SEQ ID NO: 23682 - protein, 3 aa, Artificial Sequence
  Synthetic construct
DVS

SEQ ID NO: 23683 - protein, 3 aa, Artificial Sequence
  Synthetic construct
AAS

SEQ ID NO: 23684 - protein, 3 aa, Artificial Sequence
  Synthetic construct
AAS

SEQ ID NO: 23685 - protein, 3 aa, Artificial Sequence
  Synthetic construct
GAS

SEQ ID NO: 23686 - protein, 3 aa, Artificial Sequence
  Synthetic construct
GAS

SEQ ID NO: 23687 - protein, 3 aa, Artificial Sequence
  Synthetic construct
AAS

SEQ ID NO: 23688 - protein, 3 aa, Artificial Sequence
  Synthetic construct
AAS

SEQ ID NO: 23689 - protein, 3 aa, Artificial Sequence
  Synthetic construct
QAS

SEQ ID NO: 23690 - protein, 3 aa, Artificial Sequence
  Synthetic construct
AAS

SEQ ID NO: 23691 - protein, 3 aa, Artificial Sequence
  Synthetic construct
AAS

SEQ ID NO: 23692 - protein, 3 aa, Artificial Sequence
  Synthetic construct
AAS

SEQ ID NO: 23693 - protein, 3 aa, Artificial Sequence
  Synthetic construct
EDN

SEQ ID NO: 23694 - protein, 3 aa, Artificial Sequence
  Synthetic construct
DAS

SEQ ID NO: 23695 - protein, 3 aa, Artificial Sequence
  Synthetic construct
LGS

SEQ ID NO: 23696 - protein, 3 aa, Artificial Sequence
  Synthetic construct
RDN

SEQ ID NO: 23697 - protein, 3 aa, Artificial Sequence
  Synthetic construct
AAS

SEQ ID NO: 23698 - protein, 3 aa, Artificial Sequence
  Synthetic construct
AAS

SEQ ID NO: 23699 - protein, 3 aa, Artificial Sequence
  Synthetic construct
TAS

SEQ ID NO: 23700 - protein, 3 aa, Artificial Sequence
  Synthetic construct
QVS

SEQ ID NO: 23701 - protein, 3 aa, Artificial Sequence
  Synthetic construct
AAS

SEQ ID NO: 23702 - protein, 3 aa, Artificial Sequence
  Synthetic construct
KAS

SEQ ID NO: 23703 - protein, 3 aa, Artificial Sequence
  Synthetic construct
YVS

SEQ ID NO: 23704 - protein, 3 aa, Artificial Sequence
  Synthetic construct
SNN

SEQ ID NO: 23705 - protein, 3 aa, Artificial Sequence
  Synthetic construct
AAS

SEQ ID NO: 23706 - protein, 7 aa, Artificial Sequence
  Synthetic construct
LNSDGSH

SEQ ID NO: 23707 - protein, 3 aa, Artificial Sequence
  Synthetic construct
DVT

SEQ ID NO: 23708 - protein, 3 aa, Artificial Sequence
  Synthetic construct
DVS

SEQ ID NO: 23709 - protein, 3 aa, Artificial Sequence
  Synthetic construct
DAS

SEQ ID NO: 23710 - protein, 3 aa, Artificial Sequence
  Synthetic construct
SNN

SEQ ID NO: 23711 - protein, 7 aa, Artificial Sequence
  Synthetic construct
LNSDGSH

SEQ ID NO: 23712 - protein, 3 aa, Artificial Sequence
  Synthetic construct
GAS

SEQ ID NO: 23713 - protein, 3 aa, Artificial Sequence
  Synthetic construct
AAS

SEQ ID NO: 23714 - protein, 3 aa, Artificial Sequence
  Synthetic construct
GAS

SEQ ID NO: 23715 - protein, 3 aa, Artificial Sequence
  Synthetic construct
AAS

SEQ ID NO: 23716 - protein, 3 aa, Artificial Sequence
  Synthetic construct
GNT

SEQ ID NO: 23717 - protein, 3 aa, Artificial Sequence
  Synthetic construct
QDV

SEQ ID NO: 23718 - protein, 3 aa, Artificial Sequence
  Synthetic construct
GAS

SEQ ID NO: 23719 - protein, 7 aa, Artificial Sequence
  Synthetic construct
LNSDGSH

SEQ ID NO: 23720 - protein, 3 aa, Artificial Sequence
  Synthetic construct
AAS

SEQ ID NO: 23721 - protein, 3 aa, Artificial Sequence
  Synthetic construct
KAS

SEQ ID NO: 23722 - protein, 3 aa, Artificial Sequence
  Synthetic construct
DVS

SEQ ID NO: 23723 - protein, 3 aa, Artificial Sequence
  Synthetic construct
WAS

SEQ ID NO: 23724 - protein, 3 aa, Artificial Sequence
  Synthetic construct
GAS

SEQ ID NO: 23725 - protein, 3 aa, Artificial Sequence
  Synthetic construct
DAS

SEQ ID NO: 23726 - protein, 3 aa, Artificial Sequence
  Synthetic construct
DVS

SEQ ID NO: 23727 - protein, 3 aa, Artificial Sequence
  Synthetic construct
AAS

SEQ ID NO: 23728 - protein, 3 aa, Artificial Sequence
  Synthetic construct
GNN

SEQ ID NO: 23729 - protein, 7 aa, Artificial Sequence
  Synthetic construct
LNSDGSH

SEQ ID NO: 23730 - protein, 3 aa, Artificial Sequence
  Synthetic construct
DAS

SEQ ID NO: 23731 - protein, 3 aa, Artificial Sequence
  Synthetic construct
EGS

SEQ ID NO: 23732 - protein, 3 aa, Artificial Sequence
  Synthetic construct
DVT

SEQ ID NO: 23733 - protein, 3 aa, Artificial Sequence
  Synthetic construct
WAS

SEQ ID NO: 23734 - protein, 3 aa, Artificial Sequence
  Synthetic construct
DAS

SEQ ID NO: 23735 - protein, 3 aa, Artificial Sequence
  Synthetic construct
ATS

SEQ ID NO: 23736 - protein, 3 aa, Artificial Sequence
  Synthetic construct
DVS

SEQ ID NO: 23737 - protein, 3 aa, Artificial Sequence
  Synthetic construct
EVN

SEQ ID NO: 23738 - protein, 3 aa, Artificial Sequence
  Synthetic construct
WAS

SEQ ID NO: 23739 - protein, 3 aa, Artificial Sequence
  Synthetic construct
EVT

SEQ ID NO: 23740 - protein, 3 aa, Artificial Sequence
  Synthetic construct
GAS

SEQ ID NO: 23741 - protein, 3 aa, Artificial Sequence
  Synthetic construct
GAS

SEQ ID NO: 23742 - protein, 3 aa, Artificial Sequence
  Synthetic construct
WAS

SEQ ID NO: 23743 - protein, 3 aa, Artificial Sequence
  Synthetic construct
EVS

SEQ ID NO: 23744 - protein, 3 aa, Artificial Sequence
  Synthetic construct
GAS

SEQ ID NO: 23745 - protein, 3 aa, Artificial Sequence
  Synthetic construct
LAA

SEQ ID NO: 23746 - protein, 3 aa, Artificial Sequence
  Synthetic construct
GAS

SEQ ID NO: 23747 - protein, 3 aa, Artificial Sequence
  Synthetic construct
AAS

SEQ ID NO: 23748 - protein, 3 aa, Artificial Sequence
  Synthetic construct
DAS

SEQ ID NO: 23749 - protein, 3 aa, Artificial Sequence
  Synthetic construct
AAS

SEQ ID NO: 23750 - protein, 3 aa, Artificial Sequence
  Synthetic construct
DVS

SEQ ID NO: 23751 - protein, 3 aa, Artificial Sequence
  Synthetic construct
DTS

SEQ ID NO: 23752 - protein, 3 aa, Artificial Sequence
  Synthetic construct
SNY

SEQ ID NO: 23753 - protein, 3 aa, Artificial Sequence
  Synthetic construct
WAS

SEQ ID NO: 23754 - protein, 3 aa, Artificial Sequence
  Synthetic construct
GAS

SEQ ID NO: 23755 - protein, 3 aa, Artificial Sequence
  Synthetic construct
GAS

SEQ ID NO: 23756 - protein, 3 aa, Artificial Sequence
  Synthetic construct
EVF

SEQ ID NO: 23757 - protein, 7 aa, Artificial Sequence
  Synthetic construct
LNSDGSH

SEQ ID NO: 23758 - protein, 3 aa, Artificial Sequence
  Synthetic construct
WAS

SEQ ID NO: 23759 - protein, 3 aa, Artificial Sequence
  Synthetic construct
GAS

SEQ ID NO: 23760 - protein, 3 aa, Artificial Sequence
  Synthetic construct
AAS

SEQ ID NO: 23761 - protein, 3 aa, Artificial Sequence
  Synthetic construct
KVS

SEQ ID NO: 23762 - protein, 3 aa, Artificial Sequence
  Synthetic construct
AAS

SEQ ID NO: 23763 - protein, 3 aa, Artificial Sequence
  Synthetic construct
AAS

SEQ ID NO: 23764 - protein, 3 aa, Artificial Sequence
  Synthetic construct
GAS

SEQ ID NO: 23765 - protein, 3 aa, Artificial Sequence
  Synthetic construct
AAS

SEQ ID NO: 23766 - protein, 3 aa, Artificial Sequence
  Synthetic construct
DGS

SEQ ID NO: 23767 - protein, 3 aa, Artificial Sequence
  Synthetic construct
GAS

SEQ ID NO: 23768 - protein, 3 aa, Artificial Sequence
  Synthetic construct
GAS

SEQ ID NO: 23769 - protein, 3 aa, Artificial Sequence
  Synthetic construct
AAS

SEQ ID NO: 23770 - protein, 3 aa, Artificial Sequence
  Synthetic construct
GNN

SEQ ID NO: 23771 - protein, 3 aa, Artificial Sequence
  Synthetic construct
GKN

SEQ ID NO: 23772 - protein, 3 aa, Artificial Sequence
  Synthetic construct
GAS

SEQ ID NO: 23773 - protein, 3 aa, Artificial Sequence
  Synthetic construct
AAS

SEQ ID NO: 23774 - protein, 3 aa, Artificial Sequence
  Synthetic construct
GAS

SEQ ID NO: 23775 - protein, 3 aa, Artificial Sequence
  Synthetic construct
KAS

SEQ ID NO: 23776 - protein, 3 aa, Artificial Sequence
  Synthetic construct
KVS

SEQ ID NO: 23777 - protein, 3 aa, Artificial Sequence
  Synthetic construct
GAS

SEQ ID NO: 23778 - protein, 3 aa, Artificial Sequence
  Synthetic construct
AAS

SEQ ID NO: 23779 - protein, 3 aa, Artificial Sequence
  Synthetic construct
AAS

SEQ ID NO: 23780 - protein, 3 aa, Artificial Sequence
  Synthetic construct
KVS

SEQ ID NO: 23781 - protein, 3 aa, Artificial Sequence
  Synthetic construct
RND

SEQ ID NO: 23782 - protein, 3 aa, Artificial Sequence
  Synthetic construct
GAS

SEQ ID NO: 23783 - protein, 3 aa, Artificial Sequence
  Synthetic construct
EVN

SEQ ID NO: 23784 - protein, 3 aa, Artificial Sequence
  Synthetic construct
AAS

SEQ ID NO: 23785 - protein, 3 aa, Artificial Sequence
  Synthetic construct
KAS

SEQ ID NO: 23786 - protein, 3 aa, Artificial Sequence
  Synthetic construct
AAS

SEQ ID NO: 23787 - protein, 3 aa, Artificial Sequence
  Synthetic construct
GAS

SEQ ID NO: 23788 - protein, 3 aa, Artificial Sequence
  Synthetic construct
AAS

SEQ ID NO: 23789 - protein, 3 aa, Artificial Sequence
  Synthetic construct
EVT

SEQ ID NO: 23790 - protein, 3 aa, Artificial Sequence
  Synthetic construct
DAG

SEQ ID NO: 23791 - protein, 3 aa, Artificial Sequence
  Synthetic construct
DVS

SEQ ID NO: 23792 - protein, 3 aa, Artificial Sequence
  Synthetic construct
AAS

SEQ ID NO: 23793 - protein, 3 aa, Artificial Sequence
  Synthetic construct
DAT

SEQ ID NO: 23794 - protein, 3 aa, Artificial Sequence
  Synthetic construct
YDR

SEQ ID NO: 23795 - protein, 3 aa, Artificial Sequence
  Synthetic construct
DSS

SEQ ID NO: 23796 - protein, 3 aa, Artificial Sequence
  Synthetic construct
GAS

SEQ ID NO: 23797 - protein, 3 aa, Artificial Sequence
  Synthetic construct
KAS

SEQ ID NO: 23798 - protein, 3 aa, Artificial Sequence
  Synthetic construct
GAS

SEQ ID NO: 23799 - protein, 3 aa, Artificial Sequence
  Synthetic construct
GAS

SEQ ID NO: 23800 - protein, 3 aa, Artificial Sequence
  Synthetic construct
GAS

SEQ ID NO: 23801 - protein, 3 aa, Artificial Sequence
  Synthetic construct
GTS

SEQ ID NO: 23802 - protein, 3 aa, Artificial Sequence
  Synthetic construct
DSS

SEQ ID NO: 23803 - protein, 3 aa, Artificial Sequence
  Synthetic construct
QNT

SEQ ID NO: 23804 - protein, 3 aa, Artificial Sequence
  Synthetic construct
AAS

SEQ ID NO: 23805 - protein, 3 aa, Artificial Sequence
  Synthetic construct
DAS

SEQ ID NO: 23806 - protein, 3 aa, Artificial Sequence
  Synthetic construct
RNT

SEQ ID NO: 23807 - protein, 3 aa, Artificial Sequence
  Synthetic construct
GAS

SEQ ID NO: 23808 - protein, 3 aa, Artificial Sequence
  Synthetic construct
DAS

SEQ ID NO: 23809 - protein, 3 aa, Artificial Sequence
  Synthetic construct
RNN

SEQ ID NO: 23810 - protein, 3 aa, Artificial Sequence
  Synthetic construct
GTF

SEQ ID NO: 23811 - protein, 3 aa, Artificial Sequence
  Synthetic construct
WAS

SEQ ID NO: 23812 - protein, 3 aa, Artificial Sequence
  Synthetic construct
DAS

SEQ ID NO: 23813 - protein, 3 aa, Artificial Sequence
  Synthetic construct
AAS

SEQ ID NO: 23814 - protein, 3 aa, Artificial Sequence
  Synthetic construct
ANT

SEQ ID NO: 23815 - protein, 3 aa, Artificial Sequence
  Synthetic construct
KAS

SEQ ID NO: 23816 - protein, 3 aa, Artificial Sequence
  Synthetic construct
GAT

SEQ ID NO: 23817 - protein, 3 aa, Artificial Sequence
  Synthetic construct
DNN

SEQ ID NO: 23818 - protein, 3 aa, Artificial Sequence
  Synthetic construct
AAS

SEQ ID NO: 23819 - protein, 9 aa, Artificial Sequence
  Synthetic construct
QRSFSTPWT

SEQ ID NO: 23820 - protein, 6 aa, Artificial Sequence
  Synthetic construct
QQYGRT

SEQ ID NO: 23821 - protein, 10 aa, Artificial Sequence
  Synthetic construct
CSYARGSIFV

SEQ ID NO: 23822 - protein, 9 aa, Artificial Sequence
  Synthetic construct
MQRLEFPLI

SEQ ID NO: 23823 - protein, 9 aa, Artificial Sequence
  Synthetic construct
QAWDSSTAV

SEQ ID NO: 23824 - protein, 9 aa, Artificial Sequence
  Synthetic construct
QQAYIAPLT

SEQ ID NO: 23825 - protein, 11 aa, Artificial Sequence
  Synthetic construct
HSAGSSATDVL

SEQ ID NO: 23826 - protein, 10 aa, Artificial Sequence
  Synthetic construct
QQFSNYPALT

SEQ ID NO: 23827 - protein, 12 aa, Artificial Sequence
  Synthetic construct
GTWDSSLSVYVV

SEQ ID NO: 23828 - protein, 9 aa, Artificial Sequence
  Synthetic construct
QQYYSYPFT

SEQ ID NO: 23829 - protein, 11 aa, Artificial Sequence
  Synthetic construct
GTWDSSLSAWV

SEQ ID NO: 23830 - protein, 11 aa, Artificial Sequence
  Synthetic construct
GTWDYSLSAVV

SEQ ID NO: 23831 - protein, 11 aa, Artificial Sequence
  Synthetic construct
QVWEINTHQVF

SEQ ID NO: 23832 - protein, 10 aa, Artificial Sequence
  Synthetic construct
CSYAGSYTWV

SEQ ID NO: 23833 - protein, 11 aa, Artificial Sequence
  Synthetic construct
GTWDSSLSALV

SEQ ID NO: 23834 - protein, 9 aa, Artificial Sequence
  Synthetic construct
QKYASASPS

SEQ ID NO: 23835 - protein, 11 aa, Artificial Sequence
  Synthetic construct
MQALQTPRAWT

SEQ ID NO: 23836 - protein, 9 aa, Artificial Sequence
  Synthetic construct
QQYNNWPTL

SEQ ID NO: 23837 - protein, 8 aa, Artificial Sequence
  Synthetic construct
QQRANWPT

SEQ ID NO: 23838 - protein, 9 aa, Artificial Sequence
  Synthetic construct
QSYDSNKVV

SEQ ID NO: 23839 - protein, 11 aa, Artificial Sequence
  Synthetic construct
LLYFGLPQPWV

SEQ ID NO: 23840 - protein, 9 aa, Artificial Sequence
  Synthetic construct
QQYYSTPYT

SEQ ID NO: 23841 - protein, 11 aa, Artificial Sequence
  Synthetic construct
CSYSGSRTSVI

SEQ ID NO: 23842 - protein, 9 aa, Artificial Sequence
  Synthetic construct
QQRSNWPLT

SEQ ID NO: 23843 - protein, 11 aa, Artificial Sequence
  Synthetic construct
QAFDSSLSEYV

SEQ ID NO: 23844 - protein, 9 aa, Artificial Sequence
  Synthetic construct
QQSYSTPPT

SEQ ID NO: 23845 - protein, 9 aa, Artificial Sequence
  Synthetic construct
QQSYNTPRT

SEQ ID NO: 23846 - protein, 8 aa, Artificial Sequence
  Synthetic construct
QAWDSSVV

SEQ ID NO: 23847 - protein, 9 aa, Artificial Sequence
  Synthetic construct
QQYYSYPLT

SEQ ID NO: 23848 - protein, 10 aa, Artificial Sequence
  Synthetic construct
QQFGFSSPTT

SEQ ID NO: 23849 - protein, 9 aa, Artificial Sequence
  Synthetic construct
QQYYSTPPT

SEQ ID NO: 23850 - protein, 9 aa, Artificial Sequence
  Synthetic construct
QQSYTTPYT

SEQ ID NO: 23851 - protein, 9 aa, Artificial Sequence
  Synthetic construct
QQYDNWPRT

SEQ ID NO: 23852 - protein, 10 aa, Artificial Sequence
  Synthetic construct
QQYGSSPPWT

SEQ ID NO: 23853 - protein, 10 aa, Artificial Sequence [sequence omitted]

SEQ ID NO: 23854 - protein, 8 aa, Artificial Sequence
  Synthetic construct
QQYNSYRT

SEQ ID NO: 23855 - protein, 9 aa, Artificial Sequence
  Synthetic construct
QHYNTFPLT

SEQ ID NO: 23856 - protein, 11 aa, Artificial Sequence
  Synthetic construct
SAWDNNLEAYV

SEQ ID NO: 23857 - protein, 11 aa, Artificial Sequence
  Synthetic construct
QSHDSSLNIYV

SEQ ID NO: 23858 - protein, 10 aa, Artificial Sequence
  Synthetic construct
QQYGSSLSYT

SEQ ID NO: 23859 - protein, 10 aa, Artificial Sequence
  Synthetic construct
QQYYSYPLLT

SEQ ID NO: 23860 - protein, 10 aa, Artificial Sequence
  Synthetic construct
QQYNSYSPWT

SEQ ID NO: 23861 - protein, 10 aa, Artificial Sequence
  Synthetic construct
QQYGSSPPYT

SEQ ID NO: 23862 - protein, 9 aa, Artificial Sequence
  Synthetic construct
MQALQTPWT

SEQ ID NO: 23863 - protein, 8 aa, Artificial Sequence
  Synthetic construct
QQLNSYPL

SEQ ID NO: 23864 - protein, 9 aa, Artificial Sequence
  Synthetic construct
QQANSFPLT

SEQ ID NO: 23865 - protein, 9 aa, Artificial Sequence
  Synthetic construct
QQYISYVLT

SEQ ID NO: 23866 - protein, 9 aa, Artificial Sequence
  Synthetic construct
QQSYNTPRT

SEQ ID NO: 23867 - protein, 10 aa, Artificial Sequence
  Synthetic construct
QLRVNWPRVT

SEQ ID NO: 23868 - protein, 9 aa, Artificial Sequence
  Synthetic construct
QQLNSYPPT

SEQ ID NO: 23869 - protein, 10 aa, Artificial Sequence
  Synthetic construct
QQYNSYSGGT

SEQ ID NO: 23870 - protein, 9 aa, Artificial Sequence
  Synthetic construct
QQYGSSRGT

SEQ ID NO: 23871 - protein, 9 aa, Artificial Sequence
  Synthetic construct
QQYNTYPFT

SEQ ID NO: 23872 - protein, 8 aa, Artificial Sequence
  Synthetic construct
QQYYSTPR

SEQ ID NO: 23873 - protein, 9 aa, Artificial Sequence
  Synthetic construct
LQHNSYPWT

SEQ ID NO: 23874 - protein, 8 aa, Artificial Sequence
  Synthetic construct
QQYDSLWT

SEQ ID NO: 23875 - protein, 10 aa, Artificial Sequence
  Synthetic construct
SSYGGNHNLD

SEQ ID NO: 23876 - protein, 11 aa, Artificial Sequence
  Synthetic construct
CSYAGSRTLWV

SEQ ID NO: 23877 - protein, 9 aa, Artificial Sequence
  Synthetic construct
QQYYSFPPT

SEQ ID NO: 23878 - protein, 11 aa, Artificial Sequence
  Synthetic construct
QAWDSSTAVYV

SEQ ID NO: 23879 - protein, 10 aa, Artificial Sequence
  Synthetic construct
ASWDSNLRVV

SEQ ID NO: 23880 - protein, 9 aa, Artificial Sequence
  Synthetic construct
QQYYSYPYT

SEQ ID NO: 23881 - protein, 9 aa, Artificial Sequence
  Synthetic construct
QQYYSYPWT

SEQ ID NO: 23882 - protein, 9 aa, Artificial Sequence
  Synthetic construct
QTWGNGVGV

SEQ ID NO: 23883 - protein, 9 aa, Artificial Sequence
  Synthetic construct
QQYNSYPLT

SEQ ID NO: 23884 - protein, 11 aa, Artificial Sequence
  Synthetic construct
QSYDSSLSGYV

SEQ ID NO: 23885 - protein, 9 aa, Artificial Sequence
  Synthetic construct
MQALQTPFT

SEQ ID NO: 23886 - protein, 11 aa, Artificial Sequence
  Synthetic construct
QSYDSGLRDYV

SEQ ID NO: 23887 - protein, 9 aa, Artificial Sequence
  Synthetic construct
QQYYSYPRT

SEQ ID NO: 23888 - protein, 9 aa, Artificial Sequence
  Synthetic construct
QTWDTGIGV

SEQ ID NO: 23889 - protein, 10 aa, Artificial Sequence
  Synthetic construct
MQGTHWPLYT

SEQ ID NO: 23890 - protein, 11 aa, Artificial Sequence
  Synthetic construct
AAWDASLRTWV

SEQ ID NO: 23891 - protein, 9 aa, Artificial Sequence
  Synthetic construct
QQYYSYPRT

SEQ ID NO: 23892 - protein, 11 aa, Artificial Sequence
  Synthetic construct
GTWDSSLSAWV

SEQ ID NO: 23893 - protein, 10 aa, Artificial Sequence
  Synthetic construct
CSYAGSYPWL

SEQ ID NO: 23894 - protein, 10 aa, Artificial Sequence
  Synthetic construct
ATWDSSLHWV

SEQ ID NO: 23895 - protein, 9 aa, Artificial Sequence
  Synthetic construct
QQYYSYPRT

SEQ ID NO: 23896 - protein, 9 aa, Artificial Sequence
  Synthetic construct
MQGTHWPYT

SEQ ID NO: 23897 - protein, 8 aa, Artificial Sequence
  Synthetic construct
QQRSNWIT

SEQ ID NO: 23898 - protein, 8 aa, Artificial Sequence
  Synthetic construct
QQYNQWYT

SEQ ID NO: 23899 - protein, 10 aa, Artificial Sequence
  Synthetic construct
VLYMGNGLYV

SEQ ID NO: 23900 - protein, 10 aa, Artificial Sequence
  Synthetic construct
CSYAGSRSVV

SEQ ID NO: 23901 - protein, 12 aa, Artificial Sequence
  Synthetic construct
QSYDSRLSGHWV

SEQ ID NO: 23902 - protein, 9 aa, Artificial Sequence
  Synthetic construct
QQYGSSVLT

SEQ ID NO: 23903 - protein, 9 aa, Artificial Sequence
  Synthetic construct
MIWHSSAWV

SEQ ID NO: 23904 - protein, 9 aa, Artificial Sequence
  Synthetic construct
QQYYSFPPA

SEQ ID NO: 23905 - protein, 9 aa, Artificial Sequence
  Synthetic construct
QQYGSSPLT

SEQ ID NO: 23906 - protein, 9 aa, Artificial Sequence
  Synthetic construct
QQYYSYPLT

SEQ ID NO: 23907 - protein, 11 aa, Artificial Sequence
  Synthetic construct
QQYREWPPMYT

SEQ ID NO: 23908 - protein, 12 aa, Artificial Sequence
  Synthetic construct
QSYDSSLSGSWV

SEQ ID NO: 23909 - protein, 10 aa, Artificial Sequence
  Synthetic construct
QSEDKSGIVV

SEQ ID NO: 23910 - protein, 9 aa, Artificial Sequence
  Synthetic construct
QQSYSTPYI

SEQ ID NO: 23911 - protein, 9 aa, Artificial Sequence
  Synthetic construct
QQSYSTPYT

SEQ ID NO: 23912 - protein, 11 aa, Artificial Sequence
  Synthetic construct
HSAGSSATDVL

SEQ ID NO: 23913 - protein, 11 aa, Artificial Sequence
  Synthetic construct
AAWDDSLNGPV

SEQ ID NO: 23914 - protein, 10 aa, Artificial Sequence
  Synthetic construct
QQRFNWPPLT

SEQ ID NO: 23915 - protein, 10 aa, Artificial Sequence
  Synthetic construct
QQTYSSPSYT

SEQ ID NO: 23916 - protein, 11 aa, Artificial Sequence
  Synthetic construct
FCRDNSGRQWV

SEQ ID NO: 23917 - protein, 10 aa, Artificial Sequence
  Synthetic construct
CSYTRSSTRV

SEQ ID NO: 23918 - protein, 11 aa, Artificial Sequence
  Synthetic construct
GTWDSSLSVVV

SEQ ID NO: 23919 - protein, 10 aa, Artificial Sequence
  Synthetic construct
QQYGSSPLYT

SEQ ID NO: 23920 - protein, 11 aa, Artificial Sequence
  Synthetic construct
QSYDVSLGGGV

SEQ ID NO: 23921 - protein, 9 aa, Artificial Sequence
  Synthetic construct
QTWGTGLYV

SEQ ID NO: 23922 - protein, 10 aa, Artificial Sequence
  Synthetic construct
QQYGSSPPLT

SEQ ID NO: 23923 - protein, 10 aa, Artificial Sequence
  Synthetic construct
YSATDNNRGV

SEQ ID NO: 23924 - protein, 9 aa, Artificial Sequence
  Synthetic construct
QTWTTGIAV

SEQ ID NO: 23925 - protein, 10 aa, Artificial Sequence
  Synthetic construct
SSYSRVTTCV

SEQ ID NO: 23926 - protein, 10 aa, Artificial Sequence
  Synthetic construct
SSYTSISTVV

SEQ ID NO: 23927 - protein, 8 aa, Artificial Sequence
  Synthetic construct
QQYDNLWT

SEQ ID NO: 23928 - protein, 10 aa, Artificial Sequence
  Synthetic construct
CSYASSSTGV

SEQ ID NO: 23929 - protein, 9 aa, Artificial Sequence
  Synthetic construct
QQANSFRWT

SEQ ID NO: 23930 - protein, 9 aa, Artificial Sequence
  Synthetic construct
QQSYSTPRT

SEQ ID NO: 23931 - protein, 9 aa, Artificial Sequence
  Synthetic construct
QQYYSYPLT

SEQ ID NO: 23932 - protein, 10 aa, Artificial Sequence
  Synthetic construct
CSYAGSYTVV

SEQ ID NO: 23933 - protein, 10 aa, Artificial Sequence
  Synthetic construct
QQYYDSLTWT

SEQ ID NO: 23934 - protein, 11 aa, Artificial Sequence
  Synthetic construct
SSYTSSSPLDV

SEQ ID NO: 23935 - protein, 10 aa, Artificial Sequence
  Synthetic construct
NSRDSSGSLV

SEQ ID NO: 23936 - protein, 9 aa, Artificial Sequence
  Synthetic construct
LQFTHWPRT

SEQ ID NO: 23937 - protein, 9 aa, Artificial Sequence
  Synthetic construct
MQGIQLLFT

SEQ ID NO: 23938 - protein, 10 aa, Artificial Sequence
  Synthetic construct
MQGIHLPSFT

SEQ ID NO: 23939 - protein, 8 aa, Artificial Sequence
  Synthetic construct
QQYNSYYT

SEQ ID NO: 23940 - protein, 11 aa, Artificial Sequence
  Synthetic construct
QSYDSSLSGYV

SEQ ID NO: 23941 - protein, 9 aa, Artificial Sequence
  Synthetic construct
QQYNSYPFT

SEQ ID NO: 23942 - protein, 10 aa, Artificial Sequence
  Synthetic construct
QQYNSYSPYT

SEQ ID NO: 23943 - protein, 8 aa, Artificial Sequence
  Synthetic construct
HQYYDTPS

SEQ ID NO: 23944 - protein, 9 aa, Artificial Sequence
  Synthetic construct
QQFYNYVVT

SEQ ID NO: 23945 - protein, 8 aa, Artificial Sequence
  Synthetic construct
QQYNSYSA

SEQ ID NO: 23946 - protein, 10 aa, Artificial Sequence
  Synthetic construct
LQRSRWPLFT

SEQ ID NO: 23947 - protein, 9 aa, Artificial Sequence
  Synthetic construct
MQGTHWPGT

SEQ ID NO: 23948 - protein, 9 aa, Artificial Sequence
  Synthetic construct
QQSYGIPRT

SEQ ID NO: 23949 - protein, 9 aa, Artificial Sequence
  Synthetic construct
MIWHSSAWV

SEQ ID NO: 23950 - protein, 9 aa, Artificial Sequence
  Synthetic construct
QQSYGPPFT

SEQ ID NO: 23951 - protein, 8 aa, Artificial Sequence
  Synthetic construct
MQGLNLLS

SEQ ID NO: 23952 - protein, 11 aa, Artificial Sequence
  Synthetic construct
QQYAPSPPWYI

SEQ ID NO: 23953 - protein, 9 aa, Artificial Sequence
  Synthetic construct
QQYGSSPYT

SEQ ID NO: 23954 - protein, 9 aa, Artificial Sequence
  Synthetic construct
QQYNSYPWT

SEQ ID NO: 23955 - protein, 9 aa, Artificial Sequence
  Synthetic construct
QQYYSTPRT

SEQ ID NO: 23956 - protein, 10 aa, Artificial Sequence
  Synthetic construct
QQYYSYPSIT

SEQ ID NO: 23957 - protein, 9 aa, Artificial Sequence
  Synthetic construct
LQYGTLPWT

SEQ ID NO: 23958 - protein, 9 aa, Artificial Sequence
  Synthetic construct
QQYHTYPLT

SEQ ID NO: 23959 - protein, 10 aa, Artificial Sequence
  Synthetic construct
LLSYSGAERV

SEQ ID NO: 23960 - protein, 9 aa, Artificial Sequence
  Synthetic construct
QQYNSYLYT

SEQ ID NO: 23961 - protein, 10 aa, Artificial Sequence
  Synthetic construct
QQYYITPPYT

SEQ ID NO: 23962 - protein, 8 aa, Artificial Sequence
  Synthetic construct
QQYNTFWT

SEQ ID NO: 23963 - protein, 11 aa, Artificial Sequence
  Synthetic construct
AAWDSSLRAGV

SEQ ID NO: 23964 - protein, 8 aa, Artificial Sequence
  Synthetic construct
QQYNNYWT

SEQ ID NO: 23965 - protein, 9 aa, Artificial Sequence
  Synthetic construct
QQYSSYPLT

SEQ ID NO: 23966 - protein, 11 aa, Artificial Sequence
  Synthetic construct
GTWDSSLSAGV

SEQ ID NO: 23967 - protein, 9 aa, Artificial Sequence
  Synthetic construct
MQRLEFPLT

SEQ ID NO: 23968 - protein, 11 aa, Artificial Sequence
  Synthetic construct
YSTDSSGNHYV

SEQ ID NO: 23969 - protein, 12 aa, Artificial Sequence
  Synthetic construct
GTWDSSLSASWV

SEQ ID NO: 23970 - protein, 11 aa, Artificial Sequence
  Synthetic construct
QVWDSSSNHAI

SEQ ID NO: 23971 - protein, 9 aa, Artificial Sequence
  Synthetic construct
QQRSNWPLT

SEQ ID NO: 23972 - protein, 9 aa, Artificial Sequence
  Synthetic construct
QQYNSYPLT

SEQ ID NO: 23973 - protein, 10 aa, Artificial Sequence
  Synthetic construct
SSYTSRSTVV

SEQ ID NO: 23974 - protein, 11 aa, Artificial Sequence
  Synthetic construct
AAWDDRLNGVV

SEQ ID NO: 23975 - protein, 10 aa, Artificial Sequence
  Synthetic construct
MQGTHWPPYT

SEQ ID NO: 23976 - protein, 9 aa, Artificial Sequence
  Synthetic construct
MQALQTPFT

SEQ ID NO: 23977 - protein, 9 aa, Artificial Sequence
  Synthetic construct
MQALETPYT

SEQ ID NO: 23978 - protein, 9 aa, Artificial Sequence
  Synthetic construct
QQYDNLPLT

SEQ ID NO: 23979 - protein, 12 aa, Artificial Sequence
  Synthetic construct
CSYTSSSTLEVV

SEQ ID NO: 23980 - protein, 11 aa, Artificial Sequence
  Synthetic construct
AAWDDSLSGVI

SEQ ID NO: 23981 - protein, 9 aa, Artificial Sequence
  Synthetic construct
MQGLQTPWT

SEQ ID NO: 23982 - protein, 9 aa, Artificial Sequence
  Synthetic construct
QKYNSALWT

SEQ ID NO: 23983 - protein, 9 aa, Artificial Sequence
  Synthetic construct
QNYNSAPYT

SEQ ID NO: 23984 - protein, 10 aa, Artificial Sequence
  Synthetic construct
QQSYSTPVFT

SEQ ID NO: 23985 - protein, 9 aa, Artificial Sequence
  Synthetic construct
QQYYSYPWT

SEQ ID NO: 23986 - protein, 10 aa, Artificial Sequence
  Synthetic construct
QAWDSSTAWV

SEQ ID NO: 23987 - protein, 10 aa, Artificial Sequence
  Synthetic construct
CSYTTSSTRV

SEQ ID NO: 23988 - protein, 9 aa, Artificial Sequence
  Synthetic construct
QQYNNWPQT

SEQ ID NO: 23989 - protein, 11 aa, Artificial Sequence
  Synthetic construct
QQYYSYPPMYT

SEQ ID NO: 23990 - protein, 12 aa, Artificial Sequence
  Synthetic construct
GTWDSSLSAGQV

SEQ ID NO: 23991 - protein, 10 aa, Artificial Sequence
  Synthetic construct
QQYNIWPPLT

SEQ ID NO: 23992 - protein, 8 aa, Artificial Sequence
  Synthetic construct
QQYNSSPT

SEQ ID NO: 23993 - protein, 9 aa, Artificial Sequence
  Synthetic construct
QRSFSTPWT

SEQ ID NO: 23994 - protein, 10 aa, Artificial Sequence
  Synthetic construct
CSYAGSRSVV

SEQ ID NO: 23995 - protein, 9 aa, Artificial Sequence
  Synthetic construct
QQYDSSPIT

SEQ ID NO: 23996 - protein, 9 aa, Artificial Sequence
  Synthetic construct
MQGLQTPPT

SEQ ID NO: 23997 - protein, 9 aa, Artificial Sequence
  Synthetic construct
HQSSSLPRT

SEQ ID NO: 23998 - protein, 9 aa, Artificial Sequence
  Synthetic construct
LQDHTYPLT

SEQ ID NO: 23999 - protein, 10 aa, Artificial Sequence
  Synthetic construct
CSYARGSIFV

SEQ ID NO: 24000 - protein, 8 aa, Artificial Sequence
  Synthetic construct
QHYDGYWT

SEQ ID NO: 24001 - protein, 9 aa, Artificial Sequence
  Synthetic construct
QSYERNIWV

SEQ ID NO: 24002 - protein, 9 aa, Artificial Sequence
  Synthetic construct
QQVNSFPLT

SEQ ID NO: 24003 - protein, 9 aa, Artificial Sequence
  Synthetic construct
QQLNSYPLT

SEQ ID NO: 24004 - protein, 10 aa, Artificial Sequence
  Synthetic construct
GTWDSSLDWV

SEQ ID NO: 24005 - protein, 9 aa, Artificial Sequence
  Synthetic construct
QRSFSTPWT

SEQ ID NO: 24006 - protein, 10 aa, Artificial Sequence
  Synthetic construct
CVYSNKNVYV

SEQ ID NO: 24007 - protein, 8 aa, Artificial Sequence
  Synthetic construct
QQYDSSFT

SEQ ID NO: 24008 - protein, 9 aa, Artificial Sequence
  Synthetic construct
QQYYSYPLT

SEQ ID NO: 24009 - protein, 10 aa, Artificial Sequence
  Synthetic construct
CSYAGSSTWV

SEQ ID NO: 24010 - protein, 11 aa, Artificial Sequence
  Synthetic construct
YSTDSSGNHKV

SEQ ID NO: 24011 - protein, 11 aa, Artificial Sequence
  Synthetic construct
CSYAGSSTFVV

SEQ ID NO: 24012 - protein, 9 aa, Artificial Sequence
  Synthetic construct
QQYGSSPWT

SEQ ID NO: 24013 - protein, 11 aa, Artificial Sequence
  Synthetic construct
SSYRNSNTLVV

SEQ ID NO: 24014 - protein, 9 aa, Artificial Sequence
  Synthetic construct
MHRLEFPLT

SEQ ID NO: 24015 - protein, 9 aa, Artificial Sequence
  Synthetic construct
QSYDSSSWV

SEQ ID NO: 24016 - protein, 12 aa, Artificial Sequence
  Synthetic construct
AAWDDSLNGHVV

SEQ ID NO: 24017 - protein, 9 aa, Artificial Sequence
  Synthetic construct
QQYFSTPWT

SEQ ID NO: 24018 - protein, 11 aa, Artificial Sequence
  Synthetic construct
CSYAGRNTYWV

SEQ ID NO: 24019 - protein, 8 aa, Artificial Sequence
  Synthetic construct
QQYNSYWT

SEQ ID NO: 24020 - protein, 8 aa, Artificial Sequence
  Synthetic construct
QQYSTTLS

SEQ ID NO: 24021 - protein, 9 aa, Artificial Sequence
  Synthetic construct
QQRSNWPLT

SEQ ID NO: 24022 - protein, 12 aa, Artificial Sequence
  Synthetic construct
LIYDNTLDHPYV

SEQ ID NO: 24023 - protein, 9 aa, Artificial Sequence
  Synthetic construct
QQYNSYWWT

SEQ ID NO: 24024 - protein, 10 aa, Artificial Sequence
  Synthetic construct
QQYYSYPRLT

SEQ ID NO: 24025 - protein, 9 aa, Artificial Sequence
  Synthetic construct
MQALQTPRT

SEQ ID NO: 24026 - protein, 9 aa, Artificial Sequence
  Synthetic construct
LQDYNLPWT

SEQ ID NO: 24027 - protein, 9 aa, Artificial Sequence
  Synthetic construct
SSHTSTSVL

SEQ ID NO: 24028 - protein, 10 aa, Artificial Sequence
  Synthetic construct
QSADSSATVV

SEQ ID NO: 24029 - protein, 9 aa, Artificial Sequence
  Synthetic construct
MQALQTPLT

SEQ ID NO: 24030 - protein, 9 aa, Artificial Sequence
  Synthetic construct
QQYYSTPLT

SEQ ID NO: 24031 - protein, 9 aa, Artificial Sequence
  Synthetic construct
QQYYSTPYT

SEQ ID NO: 24032 - protein, 11 aa, Artificial Sequence
  Synthetic construct
AAWDDRLNGVV

SEQ ID NO: 24033 - protein, 11 aa, Artificial Sequence
  Synthetic construct
ATWDGGLNSYV

SEQ ID NO: 24034 - protein, 10 aa, Artificial Sequence
  Synthetic construct
CSYAGSSTLV

SEQ ID NO: 24035 - protein, 10 aa, Artificial Sequence
  Synthetic construct
SSYTSSTTQV

SEQ ID NO: 24036 - protein, 9 aa, Artificial Sequence
  Synthetic construct
QQYNSYSYT

SEQ ID NO: 24037 - protein, 10 aa, Artificial Sequence
  Synthetic construct
LSADSNANYV

SEQ ID NO: 24038 - protein, 11 aa, Artificial Sequence
  Synthetic construct
AAWDDRLNGVV

SEQ ID NO: 24039 - protein, 13 aa, Artificial Sequence
  Synthetic construct
SSRDSNTYLRGMV

SEQ ID NO: 24040 - protein, 9 aa, Artificial Sequence
  Synthetic construct
QQYYSTPLT

SEQ ID NO: 24041 - protein, 9 aa, Artificial Sequence
  Synthetic construct
QQYYSTPYT

SEQ ID NO: 24042 - protein, 8 aa, Artificial Sequence
  Synthetic construct
QQYGTSHK

SEQ ID NO: 24043 - protein, 10 aa, Artificial Sequence
  Synthetic construct
QQFGRSSPLT

SEQ ID NO: 24044 - protein, 10 aa, Artificial Sequence
  Synthetic construct
CSYAGSSTWV

SEQ ID NO: 24045 - protein, 9 aa, Artificial Sequence
  Synthetic construct
YCAAGNEGI

SEQ ID NO: 24046 - protein, 11 aa, Artificial Sequence
  Synthetic construct
AAWDDSLNAVV

SEQ ID NO: 24047 - protein, 9 aa, Artificial Sequence
  Synthetic construct
QQYYSTPYT

SEQ ID NO: 24048 - protein, 9 aa, Artificial Sequence
  Synthetic construct
QKYNSAPRT

SEQ ID NO: 24049 - protein, 11 aa, Artificial Sequence
  Synthetic construct
ATWDDSLNVVV

SEQ ID NO: 24050 - protein, 9 aa, Artificial Sequence
  Synthetic construct
QQSYNIPRT

SEQ ID NO: 24051 - protein, 9 aa, Artificial Sequence
  Synthetic construct
QQYDASPLS

SEQ ID NO: 24052 - protein, 9 aa, Artificial Sequence
  Synthetic construct
QQRTNWSYT

SEQ ID NO: 24053 - protein, 11 aa, Artificial Sequence
  Synthetic construct
QQFANYPQELS

SEQ ID NO: 24054 - protein, 11 aa, Artificial Sequence
  Synthetic construct
AVWDDSLSGPV

SEQ ID NO: 24055 - protein, 11 aa, Artificial Sequence
  Synthetic construct
TSYSIGSTLVV

SEQ ID NO: 24056 - protein, 11 aa, Artificial Sequence
  Synthetic construct
GTWDSSLSAAV

SEQ ID NO: 24057 - protein, 9 aa, Artificial Sequence
  Synthetic construct
MQGTHWPRT

SEQ ID NO: 24058 - protein, 9 aa, Artificial Sequence
  Synthetic construct
QQYNSYPYT

SEQ ID NO: 24059 - protein, 9 aa, Artificial Sequence
  Synthetic construct
MQALQTPWT

SEQ ID NO: 24060 - protein, 10 aa, Artificial Sequence
  Synthetic construct
QQYGSSPPYT

SEQ ID NO: 24061 - protein, 11 aa, Artificial Sequence
  Synthetic construct
ATWDGSLSAWV

SEQ ID NO: 24062 - protein, 12 aa, Artificial Sequence
  Synthetic construct
AAWDDSLSGRVV

SEQ ID NO: 24063 - protein, 12 aa, Artificial Sequence
  Synthetic construct
AAWDDSLSGRYV

SEQ ID NO: 24064 - protein, 9 aa, Artificial Sequence
  Synthetic construct
QQYYDYPLT

SEQ ID NO: 24065 - protein, 9 aa, Artificial Sequence
  Synthetic construct
YCAAGNEGI

SEQ ID NO: 24066 - protein, 10 aa, Artificial Sequence
  Synthetic construct
YSAADNNQGV

SEQ ID NO: 24067 - protein, 9 aa, Artificial Sequence
  Synthetic construct
QQYYSTPQT

SEQ ID NO: 24068 - protein, 9 aa, Artificial Sequence
  Synthetic construct
QHYNSYPWT

SEQ ID NO: 24069 - protein, 9 aa, Artificial Sequence
  Synthetic construct
MQALQTPYT

SEQ ID NO: 24070 - protein, 9 aa, Artificial Sequence
  Synthetic construct
MQGIHLPRT

SEQ ID NO: 24071 - protein, 11 aa, Artificial Sequence
  Synthetic construct
AAWDDGLNGYV

SEQ ID NO: 24072 - protein, 9 aa, Artificial Sequence
  Synthetic construct
QQSHSAPYT

SEQ ID NO: 24073 - protein, 9 aa, Artificial Sequence
  Synthetic construct
QRSFSTPWT

SEQ ID NO: 24074 - protein, 9 aa, Artificial Sequence
  Synthetic construct
QQSYSSPRT

SEQ ID NO: 24075 - protein, 9 aa, Artificial Sequence
  Synthetic construct
QQSYSTPPT

SEQ ID NO: 24076 - protein, 10 aa, Artificial Sequence
  Synthetic construct
SAWDDSLKAV

SEQ ID NO: 24077 - protein, 8 aa, Artificial Sequence
  Synthetic construct
QQYGSSPT

SEQ ID NO: 24078 - protein, 10 aa, Artificial Sequence
  Synthetic construct
QSYDSSLTWV

SEQ ID NO: 24079 - protein, 9 aa, Artificial Sequence
  Synthetic construct
QQYGSSPRI

SEQ ID NO: 24080 - protein, 11 aa, Artificial Sequence
  Synthetic construct
QSADSSGSYEV

SEQ ID NO: 24081 - protein, 12 aa, Artificial Sequence
  Synthetic construct
NSRDSSGNHLGV

SEQ ID NO: 24082 - protein, 5 aa, Artificial Sequence
  Synthetic construct
QHRVT

SEQ ID NO: 24083 - protein, 11 aa, Artificial Sequence
  Synthetic construct
GTWDISLSDGV

SEQ ID NO: 24084 - protein, 9 aa, Artificial Sequence
  Synthetic construct
QTWGIGVVV

SEQ ID NO: 24085 - protein, 11 aa, Artificial Sequence
  Synthetic construct
NSRDRSGNHWV

SEQ ID NO: 24086 - protein, 10 aa, Artificial Sequence
  Synthetic construct
QQYGSSPPYT

SEQ ID NO: 24087 - protein, 8 aa, Artificial Sequence
  Synthetic construct
QQYNSPYT

SEQ ID NO: 24088 - protein, 11 aa, Artificial Sequence
  Synthetic construct
GTWDSSLSGGV

SEQ ID NO: 24089 - protein, 9 aa, Artificial Sequence
  Synthetic construct
YCAAGNEGI

SEQ ID NO: 24090 - protein, 9 aa, Artificial Sequence
  Synthetic construct
QQTYSTPYT

SEQ ID NO: 24091 - protein, 9 aa, Artificial Sequence
  Synthetic construct
QQYNSYSQT

SEQ ID NO: 24092 - protein, 9 aa, Artificial Sequence
  Synthetic construct
QQSYNTPRT

SEQ ID NO: 24093 - protein, 8 aa, Artificial Sequence
  Synthetic construct
QQYDGSPT

SEQ ID NO: 24094 - protein, 9 aa, Artificial Sequence
  Synthetic construct
QQYNNWPYT

SEQ ID NO: 24095 - protein, 9 aa, Artificial Sequence
  Synthetic construct
QQYGSLPIT

SEQ ID NO: 24096 - protein, 8 aa, Artificial Sequence
  Synthetic construct
QQYDGSPT

SEQ ID NO: 24097 - protein, 11 aa, Artificial Sequence
  Synthetic construct
GTWDSSLSAQV

SEQ ID NO: 24098 - protein, 12 aa, Artificial Sequence
  Synthetic construct
QLYDNLPPGMYT

SEQ ID NO: 24099 - protein, 9 aa, Artificial Sequence
  Synthetic construct
QQLNIYPRT

SEQ ID NO: 24100 - protein, 9 aa, Artificial Sequence
  Synthetic construct
QRSFSTPWT

SEQ ID NO: 24101 - protein, 9 aa, Artificial Sequence
  Synthetic construct
QRSFSTPWT

SEQ ID NO: 24102 - protein, 10 aa, Artificial Sequence
  Synthetic construct
HQCSTSPPYT

SEQ ID NO: 24103 - protein, 9 aa, Artificial Sequence
  Synthetic construct
QQYGSSPFT

SEQ ID NO: 24104 - protein, 10 aa, Artificial Sequence
  Synthetic construct
QHYGTSPMYT

SEQ ID NO: 24105 - protein, 9 aa, Artificial Sequence
  Synthetic construct
QQYGSSPFT

SEQ ID NO: 24106 - protein, 10 aa, Artificial Sequence
  Synthetic construct
CSYARGSIFV

SEQ ID NO: 24107 - protein, 9 aa, Artificial Sequence
  Synthetic construct
QQLNIYPRT

SEQ ID NO: 24108 - protein, 10 aa, Artificial Sequence
  Synthetic construct
CSYARGSIFV

SEQ ID NO: 24109 - protein, 9 aa, Artificial Sequence
  Synthetic construct
QQRSNWLIT

SEQ ID NO: 24110 - protein, 9 aa, Artificial Sequence
  Synthetic construct
QQSYSTPWT

SEQ ID NO: 24111 - protein, 9 aa, Artificial Sequence
  Synthetic construct
MQALQTPWT

SEQ ID NO: 24112 - protein, 9 aa, Artificial Sequence
  Synthetic construct
QQYYSSPPT

SEQ ID NO: 24113 - protein, 11 aa, Artificial Sequence
  Synthetic construct
NSRDSSGNPLV

SEQ ID NO: 24114 - protein, 9 aa, Artificial Sequence
  Synthetic construct
QQYNNWPYT

SEQ ID NO: 24115 - protein, 10 aa, Artificial Sequence
  Synthetic construct
QQYGSTSGYT

SEQ ID NO: 24116 - protein, 10 aa, Artificial Sequence
  Synthetic construct
SSYTSSSTQV

SEQ ID NO: 24117 - protein, 9 aa, Artificial Sequence
  Synthetic construct
QQSYSTPIT

SEQ ID NO: 24118 - protein, 9 aa, Artificial Sequence
  Synthetic construct
QQYGSSPFT

SEQ ID NO: 24119 - protein, 9 aa, Artificial Sequence
  Synthetic construct
QRSFSTPWT

SEQ ID NO: 24120 - protein, 9 aa, Artificial Sequence
  Synthetic construct
QQYDAPPLT

SEQ ID NO: 24121 - protein, 12 aa, Artificial Sequence
  Synthetic construct
SSYTSSSTFDYV

SEQ ID NO: 24122 - protein, 9 aa, Artificial Sequence
  Synthetic construct
QQANSFPLT

SEQ ID NO: 24123 - protein, 10 aa, Artificial Sequence
  Synthetic construct
QAWDSSTAVV

SEQ ID NO: 24124 - protein, 9 aa, Artificial Sequence
  Synthetic construct
QQYNNWPRT

SEQ ID NO: 24125 - protein, 11 aa, Artificial Sequence
  Synthetic construct
GTWDSSLSAGV

SEQ ID NO: 24126 - protein, 10 aa, Artificial Sequence
  Synthetic construct
SSYTSSSTLV

SEQ ID NO: 24127 - protein, 10 aa, Artificial Sequence
  Synthetic construct
QQYYSTPPWT

SEQ ID NO: 24128 - protein, 11 aa, Artificial Sequence
  Synthetic construct
AAWDDRLNGVV

SEQ ID NO: 24129 - protein, 10 aa, Artificial Sequence
  Synthetic construct
CSYAGASTVK

SEQ ID NO: 24130 - protein, 11 aa, Artificial Sequence
  Synthetic construct
NSRDSSGNHRV

SEQ ID NO: 24131 - protein, 9 aa, Artificial Sequence
  Synthetic construct
MQGTHWPPT

SEQ ID NO: 24132 - protein, 9 aa, Artificial Sequence
  Synthetic construct
QQYYSYPLT

SEQ ID NO: 24133 - protein, 9 aa, Artificial Sequence
  Synthetic construct
HQYGRSPLT

SEQ ID NO: 24134 - protein, 11 aa, Artificial Sequence
  Synthetic construct
QYCGGSPRMFT

SEQ ID NO: 24135 - protein, 9 aa, Artificial Sequence
  Synthetic construct
QRSFSTPWT

SEQ ID NO: 24136 - protein, 9 aa, Artificial Sequence
  Synthetic construct
LQYYNAPYT

SEQ ID NO: 24137 - protein, 11 aa, Artificial Sequence
  Synthetic construct
CSYAGSRTLWV

SEQ ID NO: 24138 - protein, 9 aa, Artificial Sequence
  Synthetic construct
QAWGTTSAV

SEQ ID NO: 24139 - protein, 9 aa, Artificial Sequence
  Synthetic construct
MQGAHWPVT

SEQ ID NO: 24140 - protein, 9 aa, Artificial Sequence
  Synthetic construct
FQGTFWPLT

SEQ ID NO: 24141 - protein, 9 aa, Artificial Sequence
  Synthetic construct
QQYGSSPQT

SEQ ID NO: 24142 - protein, 9 aa, Artificial Sequence
  Synthetic construct
QTWDTGIKV

SEQ ID NO: 24143 - protein, 9 aa, Artificial Sequence
  Synthetic construct
QQYYSYSIT

SEQ ID NO: 24144 - protein, 10 aa, Artificial Sequence
  Synthetic construct
QQYGSSPPYT

SEQ ID NO: 24145 - protein, 9 aa, Artificial Sequence
  Synthetic construct
QQYYSTPQT

SEQ ID NO: 24146 - protein, 9 aa, Artificial Sequence
  Synthetic construct
QQYYNTPYT

SEQ ID NO: 24147 - protein, 10 aa, Artificial Sequence
  Synthetic construct
QQYNNWPPIT

SEQ ID NO: 24148 - protein, 8 aa, Artificial Sequence
  Synthetic construct
QAWDINTF

SEQ ID NO: 24149 - protein, 9 aa, Artificial Sequence
  Synthetic construct
QQRTNWPPT

SEQ ID NO: 24150 - protein, 10 aa, Artificial Sequence
  Synthetic construct
QAWDSSTPYV

SEQ ID NO: 24151 - protein, 9 aa, Artificial Sequence
  Synthetic construct
QQYNSYSWT

SEQ ID NO: 24152 - protein, 9 aa, Artificial Sequence
  Synthetic construct
MQRIEFPIT

SEQ ID NO: 24153 - protein, 11 aa, Artificial Sequence
  Synthetic construct
AAWDDGLSGVV

SEQ ID NO: 24154 - protein, 11 aa, Artificial Sequence
  Synthetic construct
QVWDSRSEHYV

SEQ ID NO: 24155 - protein, 8 aa, Artificial Sequence
  Synthetic construct
QQYYSYPS

SEQ ID NO: 24156 - protein, 10 aa, Artificial Sequence
  Synthetic construct
QQYNSYSRYT

SEQ ID NO: 24157 - protein, 11 aa, Artificial Sequence
  Synthetic construct
SSWDDSRSGPV

SEQ ID NO: 24158 - protein, 11 aa, Artificial Sequence
  Synthetic construct
SLYIGRTSLVV

SEQ ID NO: 24159 - protein, 9 aa, Artificial Sequence
  Synthetic construct
QQSYNTPRT

SEQ ID NO: 24160 - protein, 8 aa, Artificial Sequence
  Synthetic construct
QQYNSWQT

SEQ ID NO: 24161 - protein, 9 aa, Artificial Sequence
  Synthetic construct
EHRRDWLGT

SEQ ID NO: 24162 - protein, 10 aa, Artificial Sequence
  Synthetic construct
QQSYSTPPYT

SEQ ID NO: 24163 - protein, 8 aa, Artificial Sequence
  Synthetic construct
QQYNSYWT

SEQ ID NO: 24164 - protein, 9 aa, Artificial Sequence
  Synthetic construct
HQTSTLPRT

SEQ ID NO: 24165 - protein, 11 aa, Artificial Sequence
  Synthetic construct
AAWDDRLNGVV

SEQ ID NO: 24166 - protein, 10 aa, Artificial Sequence
  Synthetic construct
CSYARGSIFV

SEQ ID NO: 24167 - protein, 9 aa, Artificial Sequence
  Synthetic construct
MIWHSSAVV

SEQ ID NO: 24168 - protein, 9 aa, Artificial Sequence
  Synthetic construct
QRSFSTPWT

SEQ ID NO: 24169 - protein, 9 aa, Artificial Sequence
  Synthetic construct
QQYYSTPKT

SEQ ID NO: 24170 - protein, 9 aa, Artificial Sequence
  Synthetic construct
MQALQTLFT

SEQ ID NO: 24171 - protein, 9 aa, Artificial Sequence
  Synthetic construct
QQANSFPLT

SEQ ID NO: 24172 - protein, 9 aa, Artificial Sequence
  Synthetic construct
QQYGSSPWT

SEQ ID NO: 24173 - protein, 10 aa, Artificial Sequence
  Synthetic construct
CSYARGSIFV

SEQ ID NO: 24174 - protein, 11 aa, Artificial Sequence
  Synthetic construct
SSYTSSSTYVV

SEQ ID NO: 24175 - protein, 9 aa, Artificial Sequence
  Synthetic construct
QQSYSAPYT

SEQ ID NO: 24176 - protein, 9 aa, Artificial Sequence
  Synthetic construct
QQYGSSPPT

SEQ ID NO: 24177 - protein, 9 aa, Artificial Sequence
  Synthetic construct
QRSFSTPWT

SEQ ID NO: 24178 - protein, 9 aa, Artificial Sequence
  Synthetic construct
LQYGTLPWT

SEQ ID NO: 24179 - protein, 11 aa, Artificial Sequence
  Synthetic construct
AVWDDSLNGRV

SEQ ID NO: 24180 - protein, 12 aa, Artificial Sequence
  Synthetic construct
NSRDSSGNHLRV

SEQ ID NO: 24181 - protein, 11 aa, Artificial Sequence
  Synthetic construct
SAWDDSLNGPV

SEQ ID NO: 24182 - protein, 10 aa, Artificial Sequence
  Synthetic construct
QQYDTYSTWT

SEQ ID NO: 24183 - protein, 9 aa, Artificial Sequence
  Synthetic construct
QQYNSYPLT

SEQ ID NO: 24184 - protein, 10 aa, Artificial Sequence
  Synthetic construct
CSYAGSRSVV

SEQ ID NO: 24185 - protein, 11 aa, Artificial Sequence
  Synthetic construct
AAWDDSLSGRV

SEQ ID NO: 24186 - protein, 9 aa, Artificial Sequence
  Synthetic construct
QQRSNWPLT

SEQ ID NO: 24187 - protein, 9 aa, Artificial Sequence
  Synthetic construct
MQSRQLPWT

SEQ ID NO: 24188 - protein, 10 aa, Artificial Sequence
  Synthetic construct
QQYGTSPLFT

SEQ ID NO: 24189 - protein, 9 aa, Artificial Sequence
  Synthetic construct
QQYYSYPRT

SEQ ID NO: 24190 - protein, 9 aa, Artificial Sequence
  Synthetic construct
LQEYGYPRT

SEQ ID NO: 24191 - protein, 9 aa, Artificial Sequence
  Synthetic construct
LQDHTYPLT

SEQ ID NO: 24192 - protein, 8 aa, Artificial Sequence
  Synthetic construct
QQYGSSPG

SEQ ID NO: 24193 - protein, 8 aa, Artificial Sequence
  Synthetic construct
QQYYSTPS

SEQ ID NO: 24194 - protein, 8 aa, Artificial Sequence
  Synthetic construct
QQYGSSRT

SEQ ID NO: 24195 - protein, 9 aa, Artificial Sequence
  Synthetic construct
QQYDNLPLT

SEQ ID NO: 24196 - protein, 10 aa, Artificial Sequence
  Synthetic construct
QQRSNWPPIT

SEQ ID NO: 24197 - protein, 10 aa, Artificial Sequence
  Synthetic construct
LNVDGGTQYV

SEQ ID NO: 24198 - protein, 9 aa, Artificial Sequence
  Synthetic construct
QQRSNWPIT

SEQ ID NO: 24199 - protein, 9 aa, Artificial Sequence
  Synthetic construct
QQYNSYSRT

SEQ ID NO: 24200 - protein, 10 aa, Artificial Sequence
  Synthetic construct
QQFNNYPLIT

SEQ ID NO: 24201 - protein, 10 aa, Artificial Sequence
  Synthetic construct
QQYNNWPTIT

SEQ ID NO: 24202 - protein, 9 aa, Artificial Sequence
  Synthetic construct
QQYGSSTWT

SEQ ID NO: 24203 - protein, 12 aa, Artificial Sequence
  Synthetic construct
AGWDDSLSGTVV

SEQ ID NO: 24204 - protein, 10 aa, Artificial Sequence
  Synthetic construct
SSYTSSSTCV

SEQ ID NO: 24205 - protein, 11 aa, Artificial Sequence
  Synthetic construct
QSYDSILSGSL

SEQ ID NO: 24206 - protein, 12 aa, Artificial Sequence
  Synthetic construct
SSYTGTMTLAVT

SEQ ID NO: 24207 - protein, 9 aa, Artificial Sequence
  Synthetic construct
QQANSFPIT

SEQ ID NO: 24208 - protein, 9 aa, Artificial Sequence
  Synthetic construct
QQYYSYPLT

SEQ ID NO: 24209 - protein, 11 aa, Artificial Sequence
  Synthetic construct
ATWDDSLNGRV

SEQ ID NO: 24210 - protein, 8 aa, Artificial Sequence
  Synthetic construct
QQYDGSPT

SEQ ID NO: 24211 - protein, 10 aa, Artificial Sequence
  Synthetic construct
LLSYSGARWV

SEQ ID NO: 24212 - protein, 9 aa, Artificial Sequence
  Synthetic construct
QQLNGYPPT

SEQ ID NO: 24213 - protein, 9 aa, Artificial Sequence
  Synthetic construct
QQYNNWPRT

SEQ ID NO: 24214 - protein, 9 aa, Artificial Sequence
  Synthetic construct
YSAADNRGV

SEQ ID NO: 24215 - protein, 9 aa, Artificial Sequence
  Synthetic construct
QQYNSYPPT

SEQ ID NO: 24216 - protein, 10 aa, Artificial Sequence
  Synthetic construct
QQYGSSPPYT

SEQ ID NO: 24217 - protein, 8 aa, Artificial Sequence
  Synthetic construct
MQALQTPT

SEQ ID NO: 24218 - protein, 12 aa, Artificial Sequence
  Synthetic construct
NSRDTSDNHLRL

SEQ ID NO: 24219 - protein, 11 aa, Artificial Sequence
  Synthetic construct
GTWDTSLSAGV

SEQ ID NO: 24220 - protein, 11 aa, Artificial Sequence
  Synthetic construct
LQYNNWPPRFT

SEQ ID NO: 24221 - protein, 11 aa, Artificial Sequence
  Synthetic construct
QVLDSTSGHRV

SEQ ID NO: 24222 - protein, 10 aa, Artificial Sequence
  Synthetic construct
QQYYSTVSIT

SEQ ID NO: 24223 - protein, 11 aa, Artificial Sequence
  Synthetic construct
SSWDDSLSIVI

SEQ ID NO: 24224 - protein, 12 aa, Artificial Sequence
  Synthetic construct
GTWDSSLSVFYV

SEQ ID NO: 24225 - protein, 9 aa, Artificial Sequence
  Synthetic construct
MQALQTPRT

SEQ ID NO: 24226 - protein, 9 aa, Artificial Sequence
  Synthetic construct
QEYGGSPGT

SEQ ID NO: 24227 - protein, 9 aa, Artificial Sequence
  Synthetic construct
QQYNSYPFT

SEQ ID NO: 24228 - protein, 9 aa, Artificial Sequence
  Synthetic construct
QQYNNWPPA

SEQ ID NO: 24229 - protein, 9 aa, Artificial Sequence
  Synthetic construct
TQATQFPLT

SEQ ID NO: 24230 - protein, 10 aa, Artificial Sequence
  Synthetic construct
MQSIQLPRLT

SEQ ID NO: 24231 - protein, 9 aa, Artificial Sequence
  Synthetic construct
QQYQTSRFT

SEQ ID NO: 24232 - protein, 11 aa, Artificial Sequence
  Synthetic construct
AAWDDSLSGRV

SEQ ID NO: 24233 - protein, 9 aa, Artificial Sequence
  Synthetic construct
LQNEYSPLT

SEQ ID NO: 24234 - protein, 10 aa, Artificial Sequence
  Synthetic construct
CSYAGSRSVV

SEQ ID NO: 24235 - protein, 8 aa, Artificial Sequence
  Synthetic construct
QQYDGSPT

SEQ ID NO: 24236 - protein, 9 aa, Artificial Sequence
  Synthetic construct
QQRSNWRVT

SEQ ID NO: 24237 - protein, 10 aa, Artificial Sequence
  Synthetic construct
MQALQTPELT

SEQ ID NO: 24238 - protein, 11 aa, Artificial Sequence
  Synthetic construct
GTWDSRLSAGV

SEQ ID NO: 24239 - protein, 9 aa, Artificial Sequence
  Synthetic construct
QQSYSSPRS

SEQ ID NO: 24240 - protein, 10 aa, Artificial Sequence
  Synthetic construct
SSYRSSSTWV

SEQ ID NO: 24241 - protein, 9 aa, Artificial Sequence
  Synthetic construct
QQYYSYPRT

SEQ ID NO: 24242 - protein, 9 aa, Artificial Sequence
  Synthetic construct
QHYNNYPWT

SEQ ID NO: 24243 - protein, 9 aa, Artificial Sequence
  Synthetic construct
QQAHSFPKT

SEQ ID NO: 24244 - protein, 8 aa, Artificial Sequence
  Synthetic construct
QQYDGSPT

SEQ ID NO: 24245 - protein, 11 aa, Artificial Sequence
  Synthetic construct
QVWDSSSDHPV

SEQ ID NO: 24246 - protein, 9 aa, Artificial Sequence
  Synthetic construct
QQYYSYPRT

SEQ ID NO: 24247 - protein, 9 aa, Artificial Sequence
  Synthetic construct
LLSYSGAVV

SEQ ID NO: 24248 - protein, 9 aa, Artificial Sequence
  Synthetic construct
QQYYSYPRT

SEQ ID NO: 24249 - protein, 9 aa, Artificial Sequence
  Synthetic construct
QQSYSNPFT

SEQ ID NO: 24250 - protein, 10 aa, Artificial Sequence
  Synthetic construct
QQRSNWPPVT

SEQ ID NO: 24251 - protein, 8 aa, Artificial Sequence
  Synthetic construct
QQYNSYWT

SEQ ID NO: 24252 - protein, 12 aa, Artificial Sequence
  Synthetic construct
CSYAGSYTSYVV

SEQ ID NO: 24253 - protein, 9 aa, Artificial Sequence
  Synthetic construct
QQYNSHPWT

SEQ ID NO: 24254 - protein, 9 aa, Artificial Sequence
  Synthetic construct
QQYGTSPRT

SEQ ID NO: 24255 - protein, 9 aa, Artificial Sequence
  Synthetic construct
QQSYSTPWT

SEQ ID NO: 24256 - protein, 12 aa, Artificial Sequence
  Synthetic construct
AAWDDSLSGRLV

SEQ ID NO: 24257 - protein, 9 aa, Artificial Sequence
  Synthetic construct
QQYYSYPQT

SEQ ID NO: 24258 - protein, 9 aa, Artificial Sequence
  Synthetic construct
QQYNNWPRT

SEQ ID NO: 24259 - protein, 9 aa, Artificial Sequence
  Synthetic construct
QQYYSYPRT

SEQ ID NO: 24260 - protein, 9 aa, Artificial Sequence
  Synthetic construct
QQYDDLPLT

SEQ ID NO: 24261 - protein, 12 aa, Artificial Sequence
  Synthetic construct
NSRDSSGNHLVV

SEQ ID NO: 24262 - protein, 9 aa, Artificial Sequence
  Synthetic construct
QQSYSTPWT

SEQ ID NO: 24263 - protein, 13 aa, Artificial Sequence
  Synthetic construct
NSRDSSGNHLLYV

SEQ ID NO: 24264 - protein, 9 aa, Artificial Sequence
  Synthetic construct
QQSDSIPVT

SEQ ID NO: 24265 - protein, 9 aa, Artificial Sequence
  Synthetic construct
QQRSNWPLT

SEQ ID NO: 24266 - protein, 13 aa, Artificial Sequence
  Synthetic construct
NSRDSSGDQTFYV

SEQ ID NO: 24267 - protein, 9 aa, Artificial Sequence
  Synthetic construct
QQYNSYPRT

SEQ ID NO: 24268 - protein, 9 aa, Artificial Sequence
  Synthetic construct
QTWGTGLTV

SEQ ID NO: 24269 - protein, 10 aa, Artificial Sequence
  Synthetic construct
ISYRSSSTRV

SEQ ID NO: 24270 - protein, 13 aa, Artificial Sequence
  Synthetic construct
GADHGSGSNFVWV

SEQ ID NO: 24271 - protein, 10 aa, Artificial Sequence
  Synthetic construct
QQRYNWPSFT

SEQ ID NO: 24272 - protein, 9 aa, Artificial Sequence
  Synthetic construct
LQDYNYPRT

SEQ ID NO: 24273 - protein, 8 aa, Artificial Sequence
  Synthetic construct
QQYDNLFT

SEQ ID NO: 24274 - protein, 9 aa, Artificial Sequence
  Synthetic construct
AQGTHFPHT

SEQ ID NO: 24275 - protein, 9 aa, Artificial Sequence
  Synthetic construct
QQSYSTPPT

SEQ ID NO: 24276 - protein, 9 aa, Artificial Sequence
  Synthetic construct
QQSYSTPPT

SEQ ID NO: 24277 - protein, 9 aa, Artificial Sequence
  Synthetic construct
QQLGSSPYT

SEQ ID NO: 24278 - protein, 9 aa, Artificial Sequence
  Synthetic construct
QRSFSTPWT

SEQ ID NO: 24279 - protein, 10 aa, Artificial Sequence
  Synthetic construct
CSFTSDHTWV

SEQ ID NO: 24280 - protein, 10 aa, Artificial Sequence
  Synthetic construct
AAWGDNMSVL

SEQ ID NO: 24281 - protein, 11 aa, Artificial Sequence
  Synthetic construct
AAWDDSLSGVI

SEQ ID NO: 24282 - protein, 8 aa, Artificial Sequence
  Synthetic construct
QQYNSWWT

SEQ ID NO: 24283 - protein, 10 aa, Artificial Sequence
  Synthetic construct
CSYARGSIFV

SEQ ID NO: 24284 - protein, 9 aa, Artificial Sequence
  Synthetic construct
QQSFDSPRT

SEQ ID NO: 24285 - protein, 9 aa, Artificial Sequence
  Synthetic construct
QQSFTIPVT

SEQ ID NO: 24286 - protein, 9 aa, Artificial Sequence
  Synthetic construct
QQYDNYPYT

SEQ ID NO: 24287 - protein, 8 aa, Artificial Sequence
  Synthetic construct
QQYDGSPT

SEQ ID NO: 24288 - protein, 9 aa, Artificial Sequence
  Synthetic construct
QQFNNYVVT

SEQ ID NO: 24289 - protein, 10 aa, Artificial Sequence
  Synthetic construct
QQYNSYSSYT

SEQ ID NO: 24290 - protein, 9 aa, Artificial Sequence
  Synthetic construct
QQYNNWLRT

SEQ ID NO: 24291 - protein, 9 aa, Artificial Sequence
  Synthetic construct
QQYYSTLLT

SEQ ID NO: 24292 - protein, 11 aa, Artificial Sequence
  Synthetic construct
CSFATDSSFYV

SEQ ID NO: 24293 - protein, 9 aa, Artificial Sequence
  Synthetic construct
QQYNSYPYT

SEQ ID NO: 24294 - protein, 11 aa, Artificial Sequence
  Synthetic construct
QSADSDGTYVV

SEQ ID NO: 24295 - protein, 9 aa, Artificial Sequence
  Synthetic construct
QQYYSTLRT

SEQ ID NO: 24296 - protein, 10 aa, Artificial Sequence
  Synthetic construct
QQYNNWPPYT

SEQ ID NO: 24297 - protein, 8 aa, Artificial Sequence
  Synthetic construct
MQGIHLPT

SEQ ID NO: 24298 - protein, 11 aa, Artificial Sequence
  Synthetic construct
GAWDKSLSAHV

SEQ ID NO: 24299 - protein, 10 aa, Artificial Sequence
  Synthetic construct
YSAADNNQRV

SEQ ID NO: 24300 - protein, 8 aa, Artificial Sequence
  Synthetic construct
QQYNSYWT

SEQ ID NO: 24301 - protein, 10 aa, Artificial Sequence
  Synthetic construct
QQYGSSPPYT

SEQ ID NO: 24302 - protein, 9 aa, Artificial Sequence
  Synthetic construct
QQYDNYSLT

SEQ ID NO: 24303 - protein, 9 aa, Artificial Sequence
  Synthetic construct
MQGTHWPYT

SEQ ID NO: 24304 - protein, 9 aa, Artificial Sequence
  Synthetic construct
HQYYRTPYT

SEQ ID NO: 24305 - protein, 11 aa, Artificial Sequence
  Synthetic construct
GTWDSSLSAAV

SEQ ID NO: 24306 - protein, 12 aa, Artificial Sequence
  Synthetic construct
GTWDSSLSAGVV

SEQ ID NO: 24307 - protein, 9 aa, Artificial Sequence
  Synthetic construct
QRSFSTPWT

SEQ ID NO: 24308 - protein, 9 aa, Artificial Sequence
  Synthetic construct
QQLNSYPLT

SEQ ID NO: 24309 - protein, 11 aa, Artificial Sequence
  Synthetic construct
QVWDSSSDHVV

SEQ ID NO: 24310 - protein, 9 aa, Artificial Sequence
  Synthetic construct
QQRDSWPDT

SEQ ID NO: 24311 - protein, 10 aa, Artificial Sequence
  Synthetic construct
QAWDGGTEVV

SEQ ID NO: 24312 - protein, 9 aa, Artificial Sequence
  Synthetic construct
QQYYSYPYT

SEQ ID NO: 24313 - protein, 12 aa, Artificial Sequence
  Synthetic construct
NSRDNSGNHLRV

SEQ ID NO: 24314 - protein, 10 aa, Artificial Sequence
  Synthetic construct
QQFNNYPEIT

SEQ ID NO: 24315 - protein, 10 aa, Artificial Sequence
  Synthetic construct
QQYNNWPPYT

SEQ ID NO: 24316 - protein, 11 aa, Artificial Sequence
  Synthetic construct
SSYAGSNNFEV

SEQ ID NO: 24317 - protein, 10 aa, Artificial Sequence
  Synthetic construct
CSYARGSIFV

SEQ ID NO: 24318 - protein, 9 aa, Artificial Sequence
  Synthetic construct
QQYNSYPYT

SEQ ID NO: 24319 - protein, 11 aa, Artificial Sequence
  Synthetic construct
QVWDSTSGHPI

SEQ ID NO: 24320 - protein, 9 aa, Artificial Sequence
  Synthetic construct
LQHNSYPYT

SEQ ID NO: 24321 - protein, 9 aa, Artificial Sequence
  Synthetic construct
QQYNSYLYT

SEQ ID NO: 24322 - protein, 9 aa, Artificial Sequence
  Synthetic construct
QQSHSPPFT

SEQ ID NO: 24323 - protein, 9 aa, Artificial Sequence
  Synthetic construct
QQSFRTPWT

SEQ ID NO: 24324 - protein, 9 aa, Artificial Sequence
  Synthetic construct
QTWDSRTVV

SEQ ID NO: 24325 - protein, 10 aa, Artificial Sequence
  Synthetic construct
SSYTSTSTFV

SEQ ID NO: 24326 - protein, 8 aa, Artificial Sequence
  Synthetic construct
QQYNNWRT

SEQ ID NO: 24327 - protein, 9 aa, Artificial Sequence
  Synthetic construct
QQTYNIPRT

SEQ ID NO: 24328 - protein, 11 aa, Artificial Sequence
  Synthetic construct
QSYDSSLSDVV

SEQ ID NO: 24329 - protein, 10 aa, Artificial Sequence
  Synthetic construct
QQYNNWPPYT

SEQ ID NO: 24330 - protein, 9 aa, Artificial Sequence
  Synthetic construct
LQHNSYPRT

SEQ ID NO: 24331 - protein, 9 aa, Artificial Sequence
  Synthetic construct
QQYGLSPYT

SEQ ID NO: 24332 - protein, 10 aa, Artificial Sequence
  Synthetic construct
QQYYSYPPYT

SEQ ID NO: 24333 - protein, 8 aa, Artificial Sequence
  Synthetic construct
MEGTQRPT

SEQ ID NO: 24334 - protein, 9 aa, Artificial Sequence
  Synthetic construct
QAWDSSSVT

SEQ ID NO: 24335 - protein, 11 aa, Artificial Sequence
  Synthetic construct
AAWDDRLSGVL

SEQ ID NO: 24336 - protein, 9 aa, Artificial Sequence
  Synthetic construct
QQYYSYPRT

SEQ ID NO: 24337 - protein, 9 aa, Artificial Sequence
  Synthetic construct
YSAADNQGV

SEQ ID NO: 24338 - protein, 11 aa, Artificial Sequence
  Synthetic construct
AAWDDSLSGYV

SEQ ID NO: 24339 - protein, 9 aa, Artificial Sequence
  Synthetic construct
QQYNSYSAT

SEQ ID NO: 24340 - protein, 9 aa, Artificial Sequence
  Synthetic construct
QQYGSSPFT

SEQ ID NO: 24341 - protein, 11 aa, Artificial Sequence
  Synthetic construct
QSSDSSGTHMV

SEQ ID NO: 24342 - protein, 10 aa, Artificial Sequence
  Synthetic construct
CSYARGSIFV

SEQ ID NO: 24343 - protein, 9 aa, Artificial Sequence
  Synthetic construct
QQYNSYPGT

SEQ ID NO: 24344 - protein, 9 aa, Artificial Sequence
  Synthetic construct
QKYNSAPFT

SEQ ID NO: 24345 - protein, 10 aa, Artificial Sequence
  Synthetic construct
QQRTNWPPLT

SEQ ID NO: 24346 - protein, 10 aa, Artificial Sequence
  Synthetic construct
LLSYTDARPA

SEQ ID NO: 24347 - protein, 11 aa, Artificial Sequence
  Synthetic construct
QQRSNWPPVFT

SEQ ID NO: 24348 - protein, 9 aa, Artificial Sequence
  Synthetic construct
QRSFSTPWT

SEQ ID NO: 24349 - protein, 11 aa, Artificial Sequence
  Synthetic construct
CSYAGSSTSVV

SEQ ID NO: 24350 - protein, 9 aa, Artificial Sequence
  Synthetic construct
QQYNSYSRT

SEQ ID NO: 24351 - protein, 8 aa, Artificial Sequence
  Synthetic construct
QQYNSQWT

SEQ ID NO: 24352 - protein, 9 aa, Artificial Sequence
  Synthetic construct
QRSFSTPWT

SEQ ID NO: 24353 - protein, 8 aa, Artificial Sequence
  Synthetic construct
QQGTHRPA

SEQ ID NO: 24354 - protein, 9 aa, Artificial Sequence
  Synthetic construct
MQGLQPPGT

SEQ ID NO: 24355 - protein, 10 aa, Artificial Sequence
  Synthetic construct
SSYTSSSTLV

SEQ ID NO: 24356 - protein, 9 aa, Artificial Sequence
  Synthetic construct
MQATHWPRA

SEQ ID NO: 24357 - protein, 9 aa, Artificial Sequence
  Synthetic construct
QQYSSSPGT

SEQ ID NO: 24358 - protein, 11 aa, Artificial Sequence
  Synthetic construct
SAYTSSNTLVV

SEQ ID NO: 24359 - protein, 8 aa, Artificial Sequence
  Synthetic construct
QQSYSTYT

SEQ ID NO: 24360 - protein, 11 aa, Artificial Sequence
  Synthetic construct
AAWDDSLSGVI

SEQ ID NO: 24361 - protein, 9 aa, Artificial Sequence
  Synthetic construct
QRSFSTPWT

SEQ ID NO: 24362 - protein, 9 aa, Artificial Sequence
  Synthetic construct
QQYGSSPLT

SEQ ID NO: 24363 - protein, 9 aa, Artificial Sequence
  Synthetic construct
QRSFSTPWT

SEQ ID NO: 24364 - protein, 9 aa, Artificial Sequence
  Synthetic construct
QTWGTGIRV

SEQ ID NO: 24365 - protein, 11 aa, Artificial Sequence
  Synthetic construct
QSADSDGTYVV

SEQ ID NO: 24366 - protein, 10 aa, Artificial Sequence
  Synthetic construct
QQYNYWPPLT

SEQ ID NO: 24367 - protein, 9 aa, Artificial Sequence
  Synthetic construct
QQYYFNPRT

SEQ ID NO: 24368 - protein, 10 aa, Artificial Sequence
  Synthetic construct
SSYTSSSTVV

SEQ ID NO: 24369 - protein, 9 aa, Artificial Sequence
  Synthetic construct
QRSFSTPWT

SEQ ID NO: 24370 - protein, 13 aa, Artificial Sequence
  Synthetic construct
QVWDSRSALPNVI

SEQ ID NO: 24371 - protein, 9 aa, Artificial Sequence
  Synthetic construct
MQGTHWLLT

SEQ ID NO: 24372 - protein, 10 aa, Artificial Sequence
  Synthetic construct
QQYGSSPPYT

SEQ ID NO: 24373 - protein, 8 aa, Artificial Sequence
  Synthetic construct
QQYKTSVT

SEQ ID NO: 24374 - protein, 10 aa, Artificial Sequence
  Synthetic construct
VLNMGSGLYV

SEQ ID NO: 24375 - protein, 11 aa, Artificial Sequence
  Synthetic construct
AAWDDRLKGVV

SEQ ID NO: 24376 - protein, 9 aa, Artificial Sequence
  Synthetic construct
MQGTEWPRT

SEQ ID NO: 24377 - protein, 9 aa, Artificial Sequence
  Synthetic construct
QHSYSNPRT

SEQ ID NO: 24378 - protein, 11 aa, Artificial Sequence
  Synthetic construct
STYDDNLNGPL

SEQ ID NO: 24379 - protein, 9 aa, Artificial Sequence
  Synthetic construct
QQYYSFPRT

SEQ ID NO: 24380 - protein, 10 aa, Artificial Sequence
  Synthetic construct
CSYARGSIFV

SEQ ID NO: 24381 - protein, 9 aa, Artificial Sequence
  Synthetic construct
QQSFSPPWT

SEQ ID NO: 24382 - protein, 9 aa, Artificial Sequence
  Synthetic construct
QQYYSYPYT

SEQ ID NO: 24383 - protein, 11 aa, Artificial Sequence
  Synthetic construct
HVRDSSSEHVV

SEQ ID NO: 24384 - protein, 9 aa, Artificial Sequence
  Synthetic construct
QQANSFPLT

SEQ ID NO: 24385 - protein, 9 aa, Artificial Sequence
  Synthetic construct
QQSYTVTWT

SEQ ID NO: 24386 - protein, 9 aa, Artificial Sequence
  Synthetic construct
QSSDINSWV

SEQ ID NO: 24387 - protein, 11 aa, Artificial Sequence
  Synthetic construct
QVWDSIRNYVV

SEQ ID NO: 24388 - protein, 10 aa, Artificial Sequence
  Synthetic construct
SSYTSDSTVV

SEQ ID NO: 24389 - protein, 9 aa, Artificial Sequence
  Synthetic construct
QSYDSSNRV

SEQ ID NO: 24390 - protein, 9 aa, Artificial Sequence
  Synthetic construct
MIWYNSASV

SEQ ID NO: 24391 - protein, 10 aa, Artificial Sequence
  Synthetic construct
QQYGSSPPYT

SEQ ID NO: 24392 - protein, 13 aa, Artificial Sequence
  Synthetic construct
QVWDRSSDHYNYA

SEQ ID NO: 24393 - protein, 9 aa, Artificial Sequence
  Synthetic construct
QQYDNLPPT

SEQ ID NO: 24394 - protein, 9 aa, Artificial Sequence
  Synthetic construct
MQGLQTQIT

SEQ ID NO: 24395 - protein, 11 aa, Artificial Sequence
  Synthetic construct
QSYDSRLSGWV

SEQ ID NO: 24396 - protein, 11 aa, Artificial Sequence
  Synthetic construct
QAFDSRLSSYV

SEQ ID NO: 24397 - protein, 9 aa, Artificial Sequence
  Synthetic construct
QQSYSTPPT

SEQ ID NO: 24398 - protein, 9 aa, Artificial Sequence
  Synthetic construct
QQYYSYPRT

SEQ ID NO: 24399 - protein, 11 aa, Artificial Sequence
  Synthetic construct
QQYDNLPPRLT

SEQ ID NO: 24400 - protein, 10 aa, Artificial Sequence
  Synthetic construct
MQGTHWPPLT

SEQ ID NO: 24401 - protein, 9 aa, Artificial Sequence
  Synthetic construct
QQLNSYPTT

SEQ ID NO: 24402 - protein, 10 aa, Artificial Sequence [sequence omitted]

SEQ ID NO: 24403 - protein, 9 aa, Artificial Sequence
  Synthetic construct
QQSYSPPPT

SEQ ID NO: 24404 - protein, 10 aa, Artificial Sequence
  Synthetic construct
QQYGSSPGLT

SEQ ID NO: 24405 - protein, 9 aa, Artificial Sequence
  Synthetic construct
QQYGSSRLT

SEQ ID NO: 24406 - protein, 9 aa, Artificial Sequence
  Synthetic construct
SSYTRTNVV

SEQ ID NO: 24407 - protein, 8 aa, Artificial Sequence
  Synthetic construct
QQYGRKLT

SEQ ID NO: 24408 - protein, 9 aa, Artificial Sequence
  Synthetic construct
MQALQTPRT

SEQ ID NO: 24409 - protein, 10 aa, Artificial Sequence
  Synthetic construct
CSYAGRFTSL

SEQ ID NO: 24410 - protein, 8 aa, Artificial Sequence
  Synthetic construct
QQYDGSPT

SEQ ID NO: 24411 - protein, 12 aa, Artificial Sequence
  Synthetic construct
AAWDDSLSGPYV

SEQ ID NO: 24412 - protein, 9 aa, Artificial Sequence
  Synthetic construct
QQSYSTPYT

SEQ ID NO: 24413 - protein, 9 aa, Artificial Sequence
  Synthetic construct
QQYYSTPFT

SEQ ID NO: 24414 - protein, 9 aa, Artificial Sequence
  Synthetic construct
QQYSNWPRT

SEQ ID NO: 24415 - protein, 9 aa, Artificial Sequence
  Synthetic construct
QQYYNTPRT

SEQ ID NO: 24416 - protein, 9 aa, Artificial Sequence
  Synthetic construct
QQYNSYPLT

SEQ ID NO: 24417 - protein, 11 aa, Artificial Sequence
  Synthetic construct
QQRSNWPPRYT

SEQ ID NO: 24418 - protein, 9 aa, Artificial Sequence
  Synthetic construct
QQYNNWPYT

SEQ ID NO: 24419 - protein, 11 aa, Artificial Sequence
  Synthetic construct
QQSFFTPRELT

SEQ ID NO: 24420 - protein, 11 aa, Artificial Sequence
  Synthetic construct
MQATHWPPGYT

SEQ ID NO: 24421 - protein, 9 aa, Artificial Sequence
  Synthetic construct
QQSYSTRWT

SEQ ID NO: 24422 - protein, 9 aa, Artificial Sequence
  Synthetic construct
QQANSLPYT

SEQ ID NO: 24423 - protein, 9 aa, Artificial Sequence
  Synthetic construct
QQSYSTPYT

SEQ ID NO: 24424 - protein, 12 aa, Artificial Sequence
  Synthetic construct
SAYTSTIENIWI

SEQ ID NO: 24425 - protein, 10 aa, Artificial Sequence
  Synthetic construct
QQYNSYSPYT

SEQ ID NO: 24426 - protein, 9 aa, Artificial Sequence
  Synthetic construct
QQYNNWPLT

SEQ ID NO: 24427 - protein, 10 aa, Artificial Sequence
  Synthetic construct
CSYRSGGTYV

SEQ ID NO: 24428 - protein, 9 aa, Artificial Sequence
  Synthetic construct
MQGIHLPRT

SEQ ID NO: 24429 - protein, 9 aa, Artificial Sequence
  Synthetic construct
QQRSNWPIT

SEQ ID NO: 24430 - protein, 9 aa, Artificial Sequence
  Synthetic construct
QHYNNYPFT

SEQ ID NO: 24431 - protein, 9 aa, Artificial Sequence
  Synthetic construct
QQYNSFSRT

SEQ ID NO: 24432 - protein, 9 aa, Artificial Sequence
  Synthetic construct
QQSASSPWT

SEQ ID NO: 24433 - protein, 11 aa, Artificial Sequence
  Synthetic construct
QQRTNWPPSIT

SEQ ID NO: 24434 - protein, 9 aa, Artificial Sequence
  Synthetic construct
CSYISATYV

SEQ ID NO: 24435 - protein, 9 aa, Artificial Sequence
  Synthetic construct
QTWGTGTVV

SEQ ID NO: 24436 - protein, 9 aa, Artificial Sequence
  Synthetic construct
QQYYSYPWT

SEQ ID NO: 24437 - protein, 9 aa, Artificial Sequence
  Synthetic construct
QRSFSTPWT

SEQ ID NO: 24438 - protein, 11 aa, Artificial Sequence
  Synthetic construct
AVWDDGLNGVV

SEQ ID NO: 24439 - protein, 11 aa, Artificial Sequence
  Synthetic construct
AAWDDSLSGPV

SEQ ID NO: 24440 - protein, 9 aa, Artificial Sequence
  Synthetic construct
QQYNSYPYT

SEQ ID NO: 24441 - protein, 9 aa, Artificial Sequence
  Synthetic construct
QQYYSTPSS

SEQ ID NO: 24442 - protein, 9 aa, Artificial Sequence
  Synthetic construct
MQGTHWPRA

SEQ ID NO: 24443 - protein, 10 aa, Artificial Sequence
  Synthetic construct
ATWDDSVGGV

SEQ ID NO: 24444 - protein, 9 aa, Artificial Sequence
  Synthetic construct
QQSYSTPWT

SEQ ID NO: 24445 - protein, 9 aa, Artificial Sequence
  Synthetic construct
QQRSDWPRT

SEQ ID NO: 24446 - protein, 11 aa, Artificial Sequence
  Synthetic construct
QSYDSSLSGSV

SEQ ID NO: 24447 - protein, 9 aa, Artificial Sequence
  Synthetic construct
CSYAGSSYV

SEQ ID NO: 24448 - protein, 9 aa, Artificial Sequence
  Synthetic construct
QQRSNWPLT

SEQ ID NO: 24449 - protein, 9 aa, Artificial Sequence
  Synthetic construct
LQHNSYPLT

SEQ ID NO: 24450 - protein, 9 aa, Artificial Sequence
  Synthetic construct
QQYNNWPNT

SEQ ID NO: 24451 - protein, 8 aa, Artificial Sequence
  Synthetic construct
QQRSNWFT

SEQ ID NO: 24452 - protein, 9 aa, Artificial Sequence
  Synthetic construct
QQYNTNPLT

SEQ ID NO: 24453 - protein, 9 aa, Artificial Sequence
  Synthetic construct
LQHNTYPWT

SEQ ID NO: 24454 - protein, 10 aa, Artificial Sequence
  Synthetic construct
QQSYSTRALT

SEQ ID NO: 24455 - protein, 11 aa, Artificial Sequence
  Synthetic construct
TSRDSGGNHWV

SEQ ID NO: 24456 - protein, 10 aa, Artificial Sequence
  Synthetic construct
QSADSSGTYV

SEQ ID NO: 24457 - protein, 9 aa, Artificial Sequence
  Synthetic construct
QQYGTSPRT

SEQ ID NO: 24458 - protein, 9 aa, Artificial Sequence
  Synthetic construct
MQGTEWPRT

SEQ ID NO: 24459 - protein, 9 aa, Artificial Sequence
  Synthetic construct
QRSFSTPWT

SEQ ID NO: 24460 - protein, 9 aa, Artificial Sequence
  Synthetic construct
QQSYSTPRT

SEQ ID NO: 24461 - protein, 11 aa, Artificial Sequence
  Synthetic construct
AAWDDSLNGWV

SEQ ID NO: 24462 - protein, 9 aa, Artificial Sequence
  Synthetic construct
QKYNSAPVT

SEQ ID NO: 24463 - protein, 9 aa, Artificial Sequence
  Synthetic construct
QQSYTAPRS

SEQ ID NO: 24464 - protein, 9 aa, Artificial Sequence
  Synthetic construct
QQSYSDTRT

SEQ ID NO: 24465 - protein, 11 aa, Artificial Sequence
  Synthetic construct
QVWDSSRYHVV

SEQ ID NO: 24466 - protein, 9 aa, Artificial Sequence
  Synthetic construct
QQNYNTVPT

SEQ ID NO: 24467 - protein, 9 aa, Artificial Sequence
  Synthetic construct
MQGLQTPPT

SEQ ID NO: 24468 - protein, 9 aa, Artificial Sequence
  Synthetic construct
LQHNSYPLT

SEQ ID NO: 24469 - protein, 9 aa, Artificial Sequence
  Synthetic construct
QSYDNNFVV

SEQ ID NO: 24470 - protein, 9 aa, Artificial Sequence
  Synthetic construct
QQSYSTPRT

SEQ ID NO: 24471 - protein, 9 aa, Artificial Sequence
  Synthetic construct
QQYNNWLIT

SEQ ID NO: 24472 - protein, 11 aa, Artificial Sequence
  Synthetic construct
AAWDDTLNGRI

SEQ ID NO: 24473 - protein, 11 aa, Artificial Sequence
  Synthetic construct
ATWHDKLNGPL

SEQ ID NO: 24474 - protein, 9 aa, Artificial Sequence
  Synthetic construct
QQRTNWSYT

SEQ ID NO: 24475 - protein, 11 aa, Artificial Sequence
  Synthetic construct
SSYTSSSTFYV

SEQ ID NO: 24476 - protein, 11 aa, Artificial Sequence
  Synthetic construct
QSFDSSLSAYV

SEQ ID NO: 24477 - protein, 12 aa, Artificial Sequence
  Synthetic construct
QSFDRRLGGEMV

SEQ ID NO: 24478 - protein, 10 aa, Artificial Sequence
  Synthetic construct
SSYSRVTTCV

SEQ ID NO: 24479 - protein, 9 aa, Artificial Sequence
  Synthetic construct
LLYYGGAQV

SEQ ID NO: 24480 - protein, 9 aa, Artificial Sequence
  Synthetic construct
QKRSNWPFT

SEQ ID NO: 24481 - protein, 9 aa, Artificial Sequence
  Synthetic construct
TQATQFPWT

SEQ ID NO: 24482 - protein, 5 aa, Artificial Sequence
  Synthetic construct
QQRKT

SEQ ID NO: 24483 - protein, 9 aa, Artificial Sequence
  Synthetic construct
QQYCCSPRT

SEQ ID NO: 24484 - protein, 9 aa, Artificial Sequence
  Synthetic construct
QQSYSTQYT

SEQ ID NO: 24485 - protein, 9 aa, Artificial Sequence
  Synthetic construct
QRSFSTPWT

SEQ ID NO: 24486 - protein, 9 aa, Artificial Sequence
  Synthetic construct
QQSYSTQWT

SEQ ID NO: 24487 - protein, 10 aa, Artificial Sequence
  Synthetic construct
QQYNSYSPWT

SEQ ID NO: 24488 - protein, 11 aa, Artificial Sequence
  Synthetic construct
QQYNNWPPKYT

SEQ ID NO: 24489 - protein, 9 aa, Artificial Sequence
  Synthetic construct
QKYNSAPLT

SEQ ID NO: 24490 - protein, 9 aa, Artificial Sequence
  Synthetic construct
QRSFSTPWT

SEQ ID NO: 24491 - protein, 10 aa, Artificial Sequence
  Synthetic construct
QSADSYGTLL

SEQ ID NO: 24492 - protein, 11 aa, Artificial Sequence
  Synthetic construct
QVWDGLREHFV

SEQ ID NO: 24493 - protein, 11 aa, Artificial Sequence
  Synthetic construct
QVWDSSSDHAV

SEQ ID NO: 24494 - protein, 8 aa, Artificial Sequence
  Synthetic construct
QQYDGSPT

SEQ ID NO: 24495 - protein, 9 aa, Artificial Sequence
  Synthetic construct
MVWHSGAWV

SEQ ID NO: 24496 - protein, 9 aa, Artificial Sequence
  Synthetic construct
QQANSFPLT

SEQ ID NO: 24497 - protein, 10 aa, Artificial Sequence
  Synthetic construct
VLYMGSGIWV

SEQ ID NO: 24498 - protein, 10 aa, Artificial Sequence
  Synthetic construct
QQYGSSPVYT

SEQ ID NO: 24499 - protein, 9 aa, Artificial Sequence
  Synthetic construct
QQYGSSLFT

SEQ ID NO: 24500 - protein, 9 aa, Artificial Sequence
  Synthetic construct
QQYNSYSGT

SEQ ID NO: 24501 - protein, 9 aa, Artificial Sequence
  Synthetic construct
QQYDNLPFT

SEQ ID NO: 24502 - protein, 11 aa, Artificial Sequence
  Synthetic construct
QQYNNWPPMYT

SEQ ID NO: 24503 - protein, 12 aa, Artificial Sequence
  Synthetic construct
SSYTSSSTLEVV

SEQ ID NO: 24504 - protein, 11 aa, Artificial Sequence
  Synthetic construct
ATWDDSLNGWV

SEQ ID NO: 24505 - protein, 9 aa, Artificial Sequence
  Synthetic construct
QQYNSYSWT

SEQ ID NO: 24506 - protein, 10 aa, Artificial Sequence
  Synthetic construct
VLYLGSGIVV

SEQ ID NO: 24507 - protein, 10 aa, Artificial Sequence
  Synthetic construct
SSYTSSSTFV

SEQ ID NO: 24508 - protein, 9 aa, Artificial Sequence
  Synthetic construct
QQYYDYPLT

SEQ ID NO: 24509 - protein, 11 aa, Artificial Sequence
  Synthetic construct
MQALQNPPRYT

SEQ ID NO: 24510 - protein, 10 aa, Artificial Sequence
  Synthetic construct
QQYGSSPPYT

SEQ ID NO: 24511 - protein, 9 aa, Artificial Sequence
  Synthetic construct
MEALQPPYT

SEQ ID NO: 24512 - protein, 10 aa, Artificial Sequence
  Synthetic construct
QQSYNAPPFT

SEQ ID NO: 24513 - protein, 9 aa, Artificial Sequence
  Synthetic construct
QQSYSTLHT

SEQ ID NO: 24514 - protein, 9 aa, Artificial Sequence
  Synthetic construct
QQYGTSPRT

SEQ ID NO: 24515 - protein, 10 aa, Artificial Sequence
  Synthetic construct
MQALQTPPFT

SEQ ID NO: 24516 - protein, 10 aa, Artificial Sequence
  Synthetic construct
SSFTVSNTYV

SEQ ID NO: 24517 - protein, 9 aa, Artificial Sequence
  Synthetic construct
QQLNAYPLT

SEQ ID NO: 24518 - protein, 10 aa, Artificial Sequence
  Synthetic construct
CSYAGSYTVL

SEQ ID NO: 24519 - protein, 11 aa, Artificial Sequence
  Synthetic construct
ATWDSTLSNGV

SEQ ID NO: 24520 - protein, 9 aa, Artificial Sequence
  Synthetic construct
QQYGSSPRT

SEQ ID NO: 24521 - protein, 10 aa, Artificial Sequence
  Synthetic construct
NSRDSSGNVV

SEQ ID NO: 24522 - protein, 10 aa, Artificial Sequence
  Synthetic construct
NSYTSSSTLV

SEQ ID NO: 24523 - protein, 10 aa, Artificial Sequence
  Synthetic construct
MQALQTPPWT

SEQ ID NO: 24524 - protein, 9 aa, Artificial Sequence
  Synthetic construct
QQYNSYWWT

SEQ ID NO: 24525 - protein, 11 aa, Artificial Sequence
  Synthetic construct
NSRDSSGNHLV

SEQ ID NO: 24526 - protein, 9 aa, Artificial Sequence
  Synthetic construct
QQSYSTPDT

SEQ ID NO: 24527 - protein, 9 aa, Artificial Sequence
  Synthetic construct
QQYGVSLST

SEQ ID NO: 24528 - protein, 10 aa, Artificial Sequence
  Synthetic construct
QQTYSAPLYT

SEQ ID NO: 24529 - protein, 10 aa, Artificial Sequence
  Synthetic construct
QQYYSYPPIT

SEQ ID NO: 24530 - protein, 9 aa, Artificial Sequence
  Synthetic construct
LQHNSYPRT

SEQ ID NO: 24531 - protein, 9 aa, Artificial Sequence
  Synthetic construct
QQYYSYPRT

SEQ ID NO: 24532 - protein, 10 aa, Artificial Sequence
  Synthetic construct
ETWDSNIHGV

SEQ ID NO: 24533 - protein, 9 aa, Artificial Sequence
  Synthetic construct
QQADSFPFT

SEQ ID NO: 24534 - protein, 11 aa, Artificial Sequence
  Synthetic construct
QSYDNGLTGPR

SEQ ID NO: 24535 - protein, 9 aa, Artificial Sequence
  Synthetic construct
QQYNSYPFT

SEQ ID NO: 24536 - protein, 9 aa, Artificial Sequence
  Synthetic construct
QQYNNWPRT

SEQ ID NO: 24537 - protein, 9 aa, Artificial Sequence
  Synthetic construct
QQYDSYPLT

SEQ ID NO: 24538 - protein, 10 aa, Artificial Sequence
  Synthetic construct
QQRSNWPPYT

SEQ ID NO: 24539 - protein, 11 aa, Artificial Sequence
  Synthetic construct
QQYGSSPPRYT

SEQ ID NO: 24540 - protein, 8 aa, Artificial Sequence
  Synthetic construct
LQDFRYLT

SEQ ID NO: 24541 - protein, 9 aa, Artificial Sequence
  Synthetic construct
QQYYSYPRT

SEQ ID NO: 24542 - protein, 11 aa, Artificial Sequence
  Synthetic construct
AAWDDSLTGPL

SEQ ID NO: 24543 - protein, 9 aa, Artificial Sequence
  Synthetic construct
QQGSSPPWT

SEQ ID NO: 24544 - protein, 9 aa, Artificial Sequence
  Synthetic construct
QQYNSYPWT

SEQ ID NO: 24545 - protein, 9 aa, Artificial Sequence
  Synthetic construct
QQLNTYPRT

SEQ ID NO: 24546 - protein, 9 aa, Artificial Sequence
  Synthetic construct
QQYYSYPRT

SEQ ID NO: 24547 - protein, 11 aa, Artificial Sequence
  Synthetic construct
CSYGPTGTSIL

SEQ ID NO: 24548 - protein, 9 aa, Artificial Sequence
  Synthetic construct
MQGTYLPIT

SEQ ID NO: 24549 - protein, 9 aa, Artificial Sequence
  Synthetic construct
QQYNSYPWT

SEQ ID NO: 24550 - protein, 11 aa, Artificial Sequence
  Synthetic construct
ATWDDSLNGPV

SEQ ID NO: 24551 - protein, 9 aa, Artificial Sequence
  Synthetic construct
QQYYSTPPT

SEQ ID NO: 24552 - protein, 10 aa, Artificial Sequence
  Synthetic construct
HDRSNWPRGT

SEQ ID NO: 24553 - protein, 11 aa, Artificial Sequence
  Synthetic construct
NSRDSSGGHVV

SEQ ID NO: 24554 - protein, 9 aa, Artificial Sequence
  Synthetic construct
QQYNNWRGT

SEQ ID NO: 24555 - protein, 6 aa, Artificial Sequence
  Synthetic construct
NSRDRI

SEQ ID NO: 24556 - protein, 9 aa, Artificial Sequence
  Synthetic construct
QQSYSTLWT

SEQ ID NO: 24557 - protein, 9 aa, Artificial Sequence
  Synthetic construct
QQSYSTPLT

SEQ ID NO: 24558 - protein, 9 aa, Artificial Sequence
  Synthetic construct
QQYNSYSRT

SEQ ID NO: 24559 - protein, 10 aa, Artificial Sequence
  Synthetic construct
QAWDSSSPLV

SEQ ID NO: 24560 - protein, 10 aa, Artificial Sequence
  Synthetic construct
CSYAGSSTLV

SEQ ID NO: 24561 - protein, 10 aa, Artificial Sequence
  Synthetic construct
CSYARGSIFV

SEQ ID NO: 24562 - protein, 9 aa, Artificial Sequence
  Synthetic construct
QQSYAMPLT

SEQ ID NO: 24563 - protein, 9 aa, Artificial Sequence
  Synthetic construct
QQYNSYPYT

SEQ ID NO: 24564 - protein, 11 aa, Artificial Sequence
  Synthetic construct
QVWDRSSDHVV

SEQ ID NO: 24565 - protein, 9 aa, Artificial Sequence
  Synthetic construct
QQYYSYPLT

SEQ ID NO: 24566 - protein, 9 aa, Artificial Sequence
  Synthetic construct
QQYGSSPGT

SEQ ID NO: 24567 - protein, 9 aa, Artificial Sequence
  Synthetic construct
QAWDSNTVV

SEQ ID NO: 24568 - protein, 9 aa, Artificial Sequence
  Synthetic construct
QQYNNWPRT

SEQ ID NO: 24569 - protein, 9 aa, Artificial Sequence
  Synthetic construct
QQYNSYSRT

SEQ ID NO: 24570 - protein, 9 aa, Artificial Sequence
  Synthetic construct
QQYYTTPLT

SEQ ID NO: 24571 - protein, 9 aa, Artificial Sequence
  Synthetic construct
QQYGTSPRT

SEQ ID NO: 24572 - protein, 11 aa, Artificial Sequence
  Synthetic construct
SSYTSSSTPYV

SEQ ID NO: 24573 - protein, 9 aa, Artificial Sequence
  Synthetic construct
QQSYGTPVT

SEQ ID NO: 24574 - protein, 9 aa, Artificial Sequence
  Synthetic construct
QQSYSTPYT

SEQ ID NO: 24575 - protein, 9 aa, Artificial Sequence
  Synthetic construct
MQSIQLPLT

SEQ ID NO: 24576 - protein, 9 aa, Artificial Sequence
  Synthetic construct
QQSYSTPYT

SEQ ID NO: 24577 - protein, 11 aa, Artificial Sequence
  Synthetic construct
GTWDSSLSAYV

SEQ ID NO: 24578 - protein, 11 aa, Artificial Sequence
  Synthetic construct
QSADSSGTYWV

SEQ ID NO: 24579 - protein, 9 aa, Artificial Sequence
  Synthetic construct
QQYYNTPRT

SEQ ID NO: 24580 - protein, 9 aa, Artificial Sequence
  Synthetic construct
QQYYSTPYT

SEQ ID NO: 24581 - protein, 9 aa, Artificial Sequence
  Synthetic construct
QQYYSNPYT

SEQ ID NO: 24582 - protein, 9 aa, Artificial Sequence
  Synthetic construct
QQYYSYPRT

SEQ ID NO: 24583 - protein, 9 aa, Artificial Sequence
  Synthetic construct
MQRLEFPLT

SEQ ID NO: 24584 - protein, 9 aa, Artificial Sequence
  Synthetic construct
QHRTLWPLT

SEQ ID NO: 24585 - protein, 9 aa, Artificial Sequence
  Synthetic construct
QQGYRTPWT

SEQ ID NO: 24586 - protein, 10 aa, Artificial Sequence
  Synthetic construct
QQYNNWPLWT

SEQ ID NO: 24587 - protein, 9 aa, Artificial Sequence
  Synthetic construct
QQRSRWPGT

SEQ ID NO: 24588 - protein, 9 aa, Artificial Sequence
  Synthetic construct
LQSSSYTFT

SEQ ID NO: 24589 - protein, 8 aa, Artificial Sequence
  Synthetic construct
QQYNTFPT

SEQ ID NO: 24590 - protein, 9 aa, Artificial Sequence
  Synthetic construct
QQLHSYPIT

SEQ ID NO: 24591 - protein, 9 aa, Artificial Sequence
  Synthetic construct
MQGIDLPWT

SEQ ID NO: 24592 - protein, 9 aa, Artificial Sequence
  Synthetic construct
QQYYSTPRT

SEQ ID NO: 24593 - protein, 9 aa, Artificial Sequence
  Synthetic construct
QQYYNTPRT

SEQ ID NO: 24594 - protein, 9 aa, Artificial Sequence
  Synthetic construct
QQYDNLPYT

SEQ ID NO: 24595 - protein, 9 aa, Artificial Sequence
  Synthetic construct
HQSSSLPIT

SEQ ID NO: 24596 - protein, 10 aa, Artificial Sequence
  Synthetic construct
QHYNNWPPHT

SEQ ID NO: 24597 - protein, 9 aa, Artificial Sequence
  Synthetic construct
QQYGSSPRT

SEQ ID NO: 24598 - protein, 9 aa, Artificial Sequence
  Synthetic construct
QQYNSFPIT

SEQ ID NO: 24599 - protein, 11 aa, Artificial Sequence
  Synthetic construct
VAWDDSLDGWE

SEQ ID NO: 24600 - protein, 8 aa, Artificial Sequence
  Synthetic construct
MQGTHWPT

SEQ ID NO: 24601 - protein, 12 aa, Artificial Sequence
  Synthetic construct
QSYDSSLSGSRV

SEQ ID NO: 24602 - protein, 9 aa, Artificial Sequence
  Synthetic construct
QQSYSSPFT

SEQ ID NO: 24603 - protein, 8 aa, Artificial Sequence
  Synthetic construct
QQYETLIT

SEQ ID NO: 24604 - protein, 9 aa, Artificial Sequence
  Synthetic construct
QSYHGSDVV

SEQ ID NO: 24605 - protein, 9 aa, Artificial Sequence
  Synthetic construct
YCAAGNEGI

SEQ ID NO: 24606 - protein, 9 aa, Artificial Sequence
  Synthetic construct
QQYNSYPWT

SEQ ID NO: 24607 - protein, 9 aa, Artificial Sequence
  Synthetic construct
QQYYSTPLT

SEQ ID NO: 24608 - protein, 10 aa, Artificial Sequence
  Synthetic construct
CSYAGSRSVV

SEQ ID NO: 24609 - protein, 9 aa, Artificial Sequence
  Synthetic construct
QQCETLPFT

SEQ ID NO: 24610 - protein, 9 aa, Artificial Sequence
  Synthetic construct
QQYGSSPWT

SEQ ID NO: 24611 - protein, 9 aa, Artificial Sequence
  Synthetic construct
QKYNSAPRT

SEQ ID NO: 24612 - protein, 11 aa, Artificial Sequence
  Synthetic construct
GTWDSSLSAWV

SEQ ID NO: 24613 - protein, 9 aa, Artificial Sequence
  Synthetic construct
QQSYSTPRT

SEQ ID NO: 24614 - protein, 8 aa, Artificial Sequence
  Synthetic construct
QQYDGSPT

SEQ ID NO: 24615 - protein, 9 aa, Artificial Sequence
  Synthetic construct
QQYYSYLIT

SEQ ID NO: 24616 - protein, 17 aa, Artificial Sequence
  Synthetic construct
QQYNSFSPTFRNPYSRT

SEQ ID NO: 24617 - protein, 9 aa, Artificial Sequence
  Synthetic construct
QQYETYPLT

SEQ ID NO: 24618 - protein, 9 aa, Artificial Sequence
  Synthetic construct
QQYYSYPRT

SEQ ID NO: 24619 - protein, 11 aa, Artificial Sequence
  Synthetic construct
QVWDSSSDHPV

SEQ ID NO: 24620 - protein, 11 aa, Artificial Sequence
  Synthetic construct
AAWDDSLNEFV

SEQ ID NO: 24621 - protein, 9 aa, Artificial Sequence
  Synthetic construct
QQTHSIPIT

SEQ ID NO: 24622 - protein, 9 aa, Artificial Sequence
  Synthetic construct
MIWYNSASV

SEQ ID NO: 24623 - protein, 11 aa, Artificial Sequence
  Synthetic construct
AAWDDTLSAVL

SEQ ID NO: 24624 - protein, 9 aa, Artificial Sequence
  Synthetic construct
QQYYSTPRT

SEQ ID NO: 24625 - protein, 11 aa, Artificial Sequence
  Synthetic construct
GTWDSSLSAGV

SEQ ID NO: 24626 - protein, 9 aa, Artificial Sequence
  Synthetic construct
QQYGSSPRT

SEQ ID NO: 24627 - protein, 9 aa, Artificial Sequence
  Synthetic construct
QQYYSYPRT

SEQ ID NO: 24628 - protein, 9 aa, Artificial Sequence
  Synthetic construct
QQYYSYPRT

SEQ ID NO: 24629 - protein, 9 aa, Artificial Sequence
  Synthetic construct
QQYNNWRRT

SEQ ID NO: 24630 - protein, 9 aa, Artificial Sequence
  Synthetic construct
QQANSFPVT

SEQ ID NO: 24631 - protein, 8 aa, Artificial Sequence
  Synthetic construct
QCRSKWSI

SEQ ID NO: 24632 - protein, 10 aa, Artificial Sequence
  Synthetic construct
FSYTPTRIWV

SEQ ID NO: 24633 - protein, 11 aa, Artificial Sequence
  Synthetic construct
SSYTSSSTSYV

SEQ ID NO: 24634 - protein, 8 aa, Artificial Sequence
  Synthetic construct
QQRSSWRT

SEQ ID NO: 24635 - protein, 8 aa, Artificial Sequence
  Synthetic construct
QQYDGSPT

SEQ ID NO: 24636 - protein, 11 aa, Artificial Sequence
  Synthetic construct
ATWDSSLSVVV

SEQ ID NO: 24637 - protein, 10 aa, Artificial Sequence
  Synthetic construct
CSYAGSRSVV

SEQ ID NO: 24638 - protein, 9 aa, Artificial Sequence
  Synthetic construct
QQYYSTPRT

SEQ ID NO: 24639 - protein, 11 aa, Artificial Sequence
  Synthetic construct
QSTDPTETFVL

SEQ ID NO: 24640 - protein, 11 aa, Artificial Sequence
  Synthetic construct
MQALQTPPEYT

SEQ ID NO: 24641 - protein, 11 aa, Artificial Sequence
  Synthetic construct
ATWDSSLSAVV

SEQ ID NO: 24642 - protein, 11 aa, Artificial Sequence
  Synthetic construct
NSRDSSGNHVV

SEQ ID NO: 24643 - protein, 11 aa, Artificial Sequence
  Synthetic construct
GTWDNGLSGVV

SEQ ID NO: 24644 - protein, 10 aa, Artificial Sequence
  Synthetic construct
YSAADNNLGV

SEQ ID NO: 24645 - protein, 8 aa, Artificial Sequence
  Synthetic construct
QQYDGSPT

SEQ ID NO: 24646 - protein, 9 aa, Artificial Sequence
  Synthetic construct
QQYYSIPWT

SEQ ID NO: 24647 - protein, 11 aa, Artificial Sequence
  Synthetic construct
QSADSSGTYYV

SEQ ID NO: 24648 - protein, 10 aa, Artificial Sequence
  Synthetic construct
QQYNSYPAFT

SEQ ID NO: 24649 - protein, 11 aa, Artificial Sequence
  Synthetic construct
GTWDYNLSAVV

SEQ ID NO: 24650 - protein, 9 aa, Artificial Sequence
  Synthetic construct
QSYEISNVV

SEQ ID NO: 24651 - protein, 10 aa, Artificial Sequence
  Synthetic construct
SSYAGSNNHV

SEQ ID NO: 24652 - protein, 12 aa, Artificial Sequence
  Synthetic construct
NSRGSGGDHHVA

SEQ ID NO: 24653 - protein, 10 aa, Artificial Sequence
  Synthetic construct
CSKAGGFTWV

SEQ ID NO: 24654 - protein, 9 aa, Artificial Sequence
  Synthetic construct
HRYNSVLVT

SEQ ID NO: 24655 - protein, 11 aa, Artificial Sequence
  Synthetic construct
QVWDGSSDRVV

SEQ ID NO: 24656 - protein, 10 aa, Artificial Sequence
  Synthetic construct
QQYYSYPPWT

SEQ ID NO: 24657 - protein, 9 aa, Artificial Sequence
  Synthetic construct
QQSFSTPRT

SEQ ID NO: 24658 - protein, 10 aa, Artificial Sequence
  Synthetic construct
QQRSNWKVYT

SEQ ID NO: 24659 - protein, 10 aa, Artificial Sequence
  Synthetic construct
QQYYSTPPWT

SEQ ID NO: 24660 - protein, 11 aa, Artificial Sequence
  Synthetic construct
ASYTTSSSRVV

SEQ ID NO: 24661 - protein, 11 aa, Artificial Sequence
  Synthetic construct
QQYGSSPPGYT

SEQ ID NO: 24662 - protein, 9 aa, Artificial Sequence
  Synthetic construct
QQYYSFPRT

SEQ ID NO: 24663 - protein, 10 aa, Artificial Sequence
  Synthetic construct
QQYNNWPPFT

SEQ ID NO: 24664 - protein, 8 aa, Artificial Sequence
  Synthetic construct
QQYDGSPT

SEQ ID NO: 24665 - protein, 10 aa, Artificial Sequence
  Synthetic construct
QQYGSSPPWT

SEQ ID NO: 24666 - protein, 9 aa, Artificial Sequence
  Synthetic construct
QQYYSYPLT

SEQ ID NO: 24667 - protein, 9 aa, Artificial Sequence
  Synthetic construct
LQALQTPPT

SEQ ID NO: 24668 - protein, 11 aa, Artificial Sequence
  Synthetic construct
QVWDRSSDHVV

SEQ ID NO: 24669 - protein, 10 aa, Artificial Sequence
  Synthetic construct
QQYGSSQLYT

SEQ ID NO: 24670 - protein, 11 aa, Artificial Sequence
  Synthetic construct
AAWDDSLSGPV

SEQ ID NO: 24671 - protein, 11 aa, Artificial Sequence
  Synthetic construct
QSYDSSLSGYV

SEQ ID NO: 24672 - protein, 8 aa, Artificial Sequence
  Synthetic construct
QQYDFFWA

SEQ ID NO: 24673 - protein, 8 aa, Artificial Sequence
  Synthetic construct
MQGTHLWT

SEQ ID NO: 24674 - protein, 9 aa, Artificial Sequence
  Synthetic construct
QQYYSTPLT

SEQ ID NO: 24675 - protein, 9 aa, Artificial Sequence
  Synthetic construct
HQYGTSPIT

SEQ ID NO: 24676 - protein, 9 aa, Artificial Sequence
  Synthetic construct
QQYYSYPVT

SEQ ID NO: 24677 - protein, 10 aa, Artificial Sequence
  Synthetic construct
QSYDGNNFVV

SEQ ID NO: 24678 - protein, 10 aa, Artificial Sequence
  Synthetic construct
SSYTSSSTYV

SEQ ID NO: 24679 - protein, 11 aa, Artificial Sequence
  Synthetic construct
AAWDDSLSGVV

SEQ ID NO: 24680 - protein, 9 aa, Artificial Sequence
  Synthetic construct
QQYNNYPWT

SEQ ID NO: 24681 - protein, 8 aa, Artificial Sequence
  Synthetic construct
QQSYTRYT

SEQ ID NO: 24682 - protein, 10 aa, Artificial Sequence
  Synthetic construct
VLYMGSGSWV

SEQ ID NO: 24683 - protein, 9 aa, Artificial Sequence
  Synthetic construct
QRSFSTPWT

SEQ ID NO: 24684 - protein, 10 aa, Artificial Sequence
  Synthetic construct
QQYYNTLSYT

SEQ ID NO: 24685 - protein, 9 aa, Artificial Sequence
  Synthetic construct
MQALQTPLT

SEQ ID NO: 24686 - protein, 9 aa, Artificial Sequence
  Synthetic construct
QQYGSSPRT

SEQ ID NO: 24687 - protein, 10 aa, Artificial Sequence
  Synthetic construct
QQYNNWPPYT

SEQ ID NO: 24688 - protein, 9 aa, Artificial Sequence
  Synthetic construct
QQYGSSPGT

SEQ ID NO: 24689 - protein, 11 aa, Artificial Sequence
  Synthetic construct
GTWDSSLSAKV

SEQ ID NO: 24690 - protein, 9 aa, Artificial Sequence
  Synthetic construct
MQGTHWPRT

SEQ ID NO: 24691 - protein, 10 aa, Artificial Sequence
  Synthetic construct
SSYTSSSTLV

SEQ ID NO: 24692 - protein, 9 aa, Artificial Sequence
  Synthetic construct
QQSYSTPYT

SEQ ID NO: 24693 - protein, 10 aa, Artificial Sequence
  Synthetic construct
SSFTVTNKHV

SEQ ID NO: 24694 - protein, 9 aa, Artificial Sequence
  Synthetic construct
QQYYSYPRT

SEQ ID NO: 24695 - protein, 9 aa, Artificial Sequence
  Synthetic construct
QQYNSYPWT

SEQ ID NO: 24696 - protein, 9 aa, Artificial Sequence
  Synthetic construct
QQYNSYSRT

SEQ ID NO: 24697 - protein, 11 aa, Artificial Sequence
  Synthetic construct
QQRSNWPPRYT

SEQ ID NO: 24698 - protein, 10 aa, Artificial Sequence
  Synthetic construct
QQYDHYPELS

SEQ ID NO: 24699 - protein, 9 aa, Artificial Sequence
  Synthetic construct
QQRNNWPLT

SEQ ID NO: 24700 - protein, 10 aa, Artificial Sequence
  Synthetic construct
QQRTNWPPLT

SEQ ID NO: 24701 - protein, 9 aa, Artificial Sequence
  Synthetic construct
QQLSSYPPT

SEQ ID NO: 24702 - protein, 12 aa, Artificial Sequence
  Synthetic construct
KSRDNKGNHPDV

SEQ ID NO: 24703 - protein, 9 aa, Artificial Sequence
  Synthetic construct
MQALRIPYT

SEQ ID NO: 24704 - protein, 11 aa, Artificial Sequence
  Synthetic construct
AAWDDSLSGVV

SEQ ID NO: 24705 - protein, 9 aa, Artificial Sequence
  Synthetic construct
QQYRSSPYT

SEQ ID NO: 24706 - protein, 9 aa, Artificial Sequence
  Synthetic construct
QQSYSLPHT

SEQ ID NO: 24707 - protein, 11 aa, Artificial Sequence
  Synthetic construct
GTWDSSLSAVV

SEQ ID NO: 24708 - protein, 9 aa, Artificial Sequence
  Synthetic construct
QQRTKWPPS

SEQ ID NO: 24709 - protein, 9 aa, Artificial Sequence
  Synthetic construct
QKYNSAPFT

SEQ ID NO: 24710 - protein, 8 aa, Artificial Sequence
  Synthetic construct
LQATHWPT

SEQ ID NO: 24711 - protein, 9 aa, Artificial Sequence
  Synthetic construct
LQHNSYPRT

SEQ ID NO: 24712 - protein, 10 aa, Artificial Sequence
  Synthetic construct
QRYNSAPSVT

SEQ ID NO: 24713 - protein, 10 aa, Artificial Sequence
  Synthetic construct
QSYDNTNHAV

SEQ ID NO: 24714 - protein, 8 aa, Artificial Sequence
  Synthetic construct
QQYGSSRT

SEQ ID NO: 24715 - protein, 9 aa, Artificial Sequence
  Synthetic construct
QQYYSTPLT

SEQ ID NO: 24716 - protein, 9 aa, Artificial Sequence
  Synthetic construct
QQYYSYPLT

SEQ ID NO: 24717 - protein, 9 aa, Artificial Sequence
  Synthetic construct
QQYNTDSGR

SEQ ID NO: 24718 - protein, 11 aa, Artificial Sequence
  Synthetic construct
NSRDSSDNHLV

SEQ ID NO: 24719 - protein, 10 aa, Artificial Sequence
  Synthetic construct
QQYNNWPPLT

SEQ ID NO: 24720 - protein, 9 aa, Artificial Sequence
  Synthetic construct
QQYNSYSWT

SEQ ID NO: 24721 - protein, 12 aa, Artificial Sequence
  Synthetic construct
QVWDNGGEHHVV

SEQ ID NO: 24722 - protein, 9 aa, Artificial Sequence
  Synthetic construct
QQYYSYPPT

SEQ ID NO: 24723 - protein, 9 aa, Artificial Sequence
  Synthetic construct
QQSYSTPWT

SEQ ID NO: 24724 - protein, 12 aa, Artificial Sequence
  Synthetic construct
SSYTSSSTPLYV

SEQ ID NO: 24725 - protein, 9 aa, Artificial Sequence
  Synthetic construct
QQYHSYPWT

SEQ ID NO: 24726 - protein, 9 aa, Artificial Sequence
  Synthetic construct
QQYNSYSRT

SEQ ID NO: 24727 - protein, 9 aa, Artificial Sequence
  Synthetic construct
QSWGASGAV

SEQ ID NO: 24728 - protein, 9 aa, Artificial Sequence
  Synthetic construct
QQYGSSRIT

SEQ ID NO: 24729 - protein, 12 aa, Artificial Sequence
  Synthetic construct
QAWDSTSTWDVV

SEQ ID NO: 24730 - protein, 9 aa, Artificial Sequence
  Synthetic construct
QQYNNWPYT

SEQ ID NO: 24731 - protein, 8 aa, Artificial Sequence
  Synthetic construct
QQSYSTYT

SEQ ID NO: 24732 - protein, 10 aa, Artificial Sequence
  Synthetic construct
CSYARGSIFV

SEQ ID NO: 24733 - protein, 12 aa, Artificial Sequence
  Synthetic construct
QSYDNSLGGFVI

SEQ ID NO: 24734 - protein, 11 aa, Artificial Sequence
  Synthetic construct
AAWDDSLSGVI

SEQ ID NO: 24735 - protein, 9 aa, Artificial Sequence
  Synthetic construct
QQLNSYPPT

SEQ ID NO: 24736 - protein, 9 aa, Artificial Sequence
  Synthetic construct
QQYYSYPRT

SEQ ID NO: 24737 - protein, 11 aa, Artificial Sequence
  Synthetic construct
APYTISSRPDV

SEQ ID NO: 24738 - protein, 12 aa, Artificial Sequence
  Synthetic construct
ASWDDSHPGRYV

SEQ ID NO: 24739 - protein, 11 aa, Artificial Sequence
  Synthetic construct
QSYDNSLSGYV

SEQ ID NO: 24740 - protein, 9 aa, Artificial Sequence
  Synthetic construct
SSFKSTTLD

SEQ ID NO: 24741 - protein, 11 aa, Artificial Sequence
  Synthetic construct
AAWDDSLSGVV

SEQ ID NO: 24742 - protein, 10 aa, Artificial Sequence
  Synthetic construct
QQYGSSPPIT

SEQ ID NO: 24743 - protein, 9 aa, Artificial Sequence
  Synthetic construct
QQYYSTPWT

SEQ ID NO: 24744 - protein, 11 aa, Artificial Sequence
  Synthetic construct
QAWDSSTACWV

SEQ ID NO: 24745 - protein, 9 aa, Artificial Sequence
  Synthetic construct
QQRSNWPPS

SEQ ID NO: 24746 - protein, 9 aa, Artificial Sequence
  Synthetic construct
QAWDSSTVV

SEQ ID NO: 24747 - protein, 11 aa, Artificial Sequence
  Synthetic construct
QQYDNWPPMYT

SEQ ID NO: 24748 - protein, 11 aa, Artificial Sequence
  Synthetic construct
ATWDSSLSAMV

SEQ ID NO: 24749 - protein, 11 aa, Artificial Sequence
  Synthetic construct
AAWDDSLSVVV

SEQ ID NO: 24750 - protein, 9 aa, Artificial Sequence
  Synthetic construct
QRSFSTPWT

SEQ ID NO: 24751 - protein, 10 aa, Artificial Sequence
  Synthetic construct
QQYNSYSPWT

SEQ ID NO: 24752 - protein, 11 aa, Artificial Sequence
  Synthetic construct
QQYNSYSRTIT

SEQ ID NO: 24753 - protein, 9 aa, Artificial Sequence
  Synthetic construct
MQTLDTPVT

SEQ ID NO: 24754 - protein, 10 aa, Artificial Sequence
  Synthetic construct
QQYGSSPPYT

SEQ ID NO: 24755 - protein, 9 aa, Artificial Sequence
  Synthetic construct
QRSFSTPWT

SEQ ID NO: 24756 - protein, 9 aa, Artificial Sequence
  Synthetic construct
QQYNSYSRV

SEQ ID NO: 24757 - protein, 8 aa, Artificial Sequence
  Synthetic construct
QQYISYWT

SEQ ID NO: 24758 - protein, 9 aa, Artificial Sequence
  Synthetic construct
QSYDSSNWV

SEQ ID NO: 24759 - protein, 11 aa, Artificial Sequence
  Synthetic construct
QVWDSISAHYV

SEQ ID NO: 24760 - protein, 9 aa, Artificial Sequence
  Synthetic construct
QQSYSPPLT

SEQ ID NO: 24761 - protein, 8 aa, Artificial Sequence
  Synthetic construct
QQRSNWRT

SEQ ID NO: 24762 - protein, 9 aa, Artificial Sequence
  Synthetic construct
MQGTHWPRT

SEQ ID NO: 24763 - protein, 11 aa, Artificial Sequence
  Synthetic construct
QSYDDSLSGYV

SEQ ID NO: 24764 - protein, 8 aa, Artificial Sequence
  Synthetic construct
QQYNSYYT

SEQ ID NO: 24765 - protein, 9 aa, Artificial Sequence
  Synthetic construct
QQLDSYSWM

SEQ ID NO: 24766 - protein, 9 aa, Artificial Sequence
  Synthetic construct
YCAAGNEGI

SEQ ID NO: 24767 - protein, 9 aa, Artificial Sequence
  Synthetic construct
QQYYSYPPT

SEQ ID NO: 24768 - protein, 9 aa, Artificial Sequence
  Synthetic construct
QQTKSFPIT

SEQ ID NO: 24769 - protein, 9 aa, Artificial Sequence
  Synthetic construct
TQATQFPYT

SEQ ID NO: 24770 - protein, 9 aa, Artificial Sequence
  Synthetic construct
QRYGSSPLT

SEQ ID NO: 24771 - protein, 13 aa, Artificial Sequence
  Synthetic construct
GADHGAGDMFVYV

SEQ ID NO: 24772 - protein, 9 aa, Artificial Sequence
  Synthetic construct
QQYFSIPLT

SEQ ID NO: 24773 - protein, 10 aa, Artificial Sequence
  Synthetic construct
QSYDSGNPMV

SEQ ID NO: 24774 - protein, 9 aa, Artificial Sequence
  Synthetic construct
QQYYSTPYT

SEQ ID NO: 24775 - protein, 9 aa, Artificial Sequence
  Synthetic construct
QQYYSYPRT

SEQ ID NO: 24776 - protein, 8 aa, Artificial Sequence
  Synthetic construct
MQALRSWT

SEQ ID NO: 24777 - protein, 11 aa, Artificial Sequence
  Synthetic construct
QVWDTRTDHVI

SEQ ID NO: 24778 - protein, 10 aa, Artificial Sequence
  Synthetic construct
CSYARGSIFV

SEQ ID NO: 24779 - protein, 9 aa, Artificial Sequence
  Synthetic construct
QQSYSTPLT

SEQ ID NO: 24780 - protein, 9 aa, Artificial Sequence
  Synthetic construct
MQSTHHPLT

SEQ ID NO: 24781 - protein, 8 aa, Artificial Sequence
  Synthetic construct
QQYNNWHT

SEQ ID NO: 24782 - protein, 10 aa, Artificial Sequence
  Synthetic construct
SSYTISFTVV

SEQ ID NO: 24783 - protein, 9 aa, Artificial Sequence
  Synthetic construct
QQYYSYPHT

SEQ ID NO: 24784 - protein, 9 aa, Artificial Sequence
  Synthetic construct
MQGTHWPPL

SEQ ID NO: 24785 - protein, 11 aa, Artificial Sequence
  Synthetic construct
SAWHDSLNGVV

SEQ ID NO: 24786 - protein, 10 aa, Artificial Sequence
  Synthetic construct
GSYTTTSTYV

SEQ ID NO: 24787 - protein, 10 aa, Artificial Sequence
  Synthetic construct
QQYKSYPSIT

SEQ ID NO: 24788 - protein, 10 aa, Artificial Sequence
  Synthetic construct
MQGTHWPPFT

SEQ ID NO: 24789 - protein, 10 aa, Artificial Sequence
  Synthetic construct
QQRSNWPPWT

SEQ ID NO: 24790 - protein, 9 aa, Artificial Sequence
  Synthetic construct
QQSYVTPRT

SEQ ID NO: 24791 - protein, 9 aa, Artificial Sequence
  Synthetic construct
QQYGSSPQT

SEQ ID NO: 24792 - protein, 8 aa, Artificial Sequence
  Synthetic construct
QQYNNYRT

SEQ ID NO: 24793 - protein, 10 aa, Artificial Sequence
  Synthetic construct
QVWDRASDGV

SEQ ID NO: 24794 - protein, 9 aa, Artificial Sequence
  Synthetic construct
MQGTHWPRA

SEQ ID NO: 24795 - protein, 9 aa, Artificial Sequence
  Synthetic construct
QQSYNLPRT

SEQ ID NO: 24796 - protein, 8 aa, Artificial Sequence
  Synthetic construct
QQYDNLWT

SEQ ID NO: 24797 - protein, 12 aa, Artificial Sequence
  Synthetic construct
CSYAGGTTFQWV

SEQ ID NO: 24798 - protein, 9 aa, Artificial Sequence
  Synthetic construct
HQYGSSPIT

SEQ ID NO: 24799 - protein, 12 aa, Artificial Sequence
  Synthetic construct
QSYDSSLSASYV

SEQ ID NO: 24800 - protein, 11 aa, Artificial Sequence
  Synthetic construct
CSYAGSRTLWV

SEQ ID NO: 24801 - protein, 9 aa, Artificial Sequence
  Synthetic construct
QQYYSIPLT

SEQ ID NO: 24802 - protein, 9 aa, Artificial Sequence
  Synthetic construct
QQANSFPFT

SEQ ID NO: 24803 - protein, 9 aa, Artificial Sequence
  Synthetic construct
MQALQTPLT

SEQ ID NO: 24804 - protein, 9 aa, Artificial Sequence
  Synthetic construct
YCAAGNEGI

SEQ ID NO: 24805 - protein, 9 aa, Artificial Sequence
  Synthetic construct
QQSYSFPIT

SEQ ID NO: 24806 - protein, 10 aa, Artificial Sequence
  Synthetic construct
LLDTGAAFWV

SEQ ID NO: 24807 - protein, 9 aa, Artificial Sequence
  Synthetic construct
MQGTDWPRT

SEQ ID NO: 24808 - protein, 10 aa, Artificial Sequence
  Synthetic construct
QQANSFPPLT

SEQ ID NO: 24809 - protein, 9 aa, Artificial Sequence
  Synthetic construct
LQYYTTPQT

SEQ ID NO: 24810 - protein, 7 aa, Artificial Sequence
  Synthetic construct
QQYNSWT

SEQ ID NO: 24811 - protein, 10 aa, Artificial Sequence
  Synthetic construct
CSYARGSIFV

SEQ ID NO: 24812 - protein, 9 aa, Artificial Sequence
  Synthetic construct
QQYNNWLRT

SEQ ID NO: 24813 - protein, 9 aa, Artificial Sequence
  Synthetic construct
QQYNRWLWT

SEQ ID NO: 24814 - protein, 10 aa, Artificial Sequence
  Synthetic construct
LNVDGGTQYV

SEQ ID NO: 24815 - protein, 10 aa, Artificial Sequence
  Synthetic construct
LLSYTDARPA

SEQ ID NO: 24816 - protein, 9 aa, Artificial Sequence
  Synthetic construct
QQSYSTFYT

SEQ ID NO: 24817 - protein, 10 aa, Artificial Sequence
  Synthetic construct
QQYGSSAKFT

SEQ ID NO: 24818 - protein, 9 aa, Artificial Sequence
  Synthetic construct
YCAAGNEGI

SEQ ID NO: 24819 - protein, 9 aa, Artificial Sequence
  Synthetic construct
QQYNNWPLT

SEQ ID NO: 24820 - protein, 10 aa, Artificial Sequence
  Synthetic construct
SSYTSSSTWV

SEQ ID NO: 24821 - protein, 9 aa, Artificial Sequence
  Synthetic construct
QTWGTGSRV

SEQ ID NO: 24822 - protein, 9 aa, Artificial Sequence
  Synthetic construct
HQYNSYSRM

SEQ ID NO: 24823 - protein, 11 aa, Artificial Sequence
  Synthetic construct
SSYTSSSTRYV

SEQ ID NO: 24824 - protein, 9 aa, Artificial Sequence
  Synthetic construct
AQATQFPYT

SEQ ID NO: 24825 - protein, 8 aa, Artificial Sequence
  Synthetic construct
QQLNSYPF

SEQ ID NO: 24826 - protein, 10 aa, Artificial Sequence
  Synthetic construct
QQYYSYPPLT

SEQ ID NO: 24827 - protein, 9 aa, Artificial Sequence
  Synthetic construct
LQDHTYPLT

SEQ ID NO: 24828 - protein, 10 aa, Artificial Sequence
  Synthetic construct
QTWGTGIRGV

SEQ ID NO: 24829 - protein, 11 aa, Artificial Sequence
  Synthetic construct
QSADNSGSYYV

SEQ ID NO: 24830 - protein, 11 aa, Artificial Sequence
  Synthetic construct
AAWDDSLSGVI

SEQ ID NO: 24831 - protein, 11 aa, Artificial Sequence
  Synthetic construct
GAWDDSLTGVA

SEQ ID NO: 24832 - protein, 10 aa, Artificial Sequence
  Synthetic construct
AAWDDSLSGV

SEQ ID NO: 24833 - protein, 9 aa, Artificial Sequence
  Synthetic construct
QQYYSTPIT

SEQ ID NO: 24834 - protein, 9 aa, Artificial Sequence
  Synthetic construct
QQYNSYPYT

SEQ ID NO: 24835 - protein, 11 aa, Artificial Sequence
  Synthetic construct
STWDDSLNNVL

SEQ ID NO: 24836 - protein, 9 aa, Artificial Sequence
  Synthetic construct
LIWHHDVVV

SEQ ID NO: 24837 - protein, 11 aa, Artificial Sequence
  Synthetic construct
QQYGSSPPGYT

SEQ ID NO: 24838 - protein, 11 aa, Artificial Sequence
  Synthetic construct
QSADSSGNYRV

SEQ ID NO: 24839 - protein, 10 aa, Artificial Sequence
  Synthetic construct
QQYGSSPRLT

SEQ ID NO: 24840 - protein, 11 aa, Artificial Sequence
  Synthetic construct
GTWDSSLSAGV

SEQ ID NO: 24841 - protein, 10 aa, Artificial Sequence
  Synthetic construct
QQYGSSPGYT

SEQ ID NO: 24842 - protein, 9 aa, Artificial Sequence
  Synthetic construct
MQALQTPLT

SEQ ID NO: 24843 - protein, 9 aa, Artificial Sequence
  Synthetic construct
QQYYSYPRT

SEQ ID NO: 24844 - protein, 9 aa, Artificial Sequence
  Synthetic construct
QQHHTSPRT

SEQ ID NO: 24845 - protein, 9 aa, Artificial Sequence
  Synthetic construct
QQSYSTPYT

SEQ ID NO: 24846 - protein, 12 aa, Artificial Sequence
  Synthetic construct
QSYDSSLSGFVV

SEQ ID NO: 24847 - protein, 11 aa, Artificial Sequence
  Synthetic construct
HQYNSWPSRFT

SEQ ID NO: 24848 - protein, 8 aa, Artificial Sequence
  Synthetic construct
QQYDGSPT

SEQ ID NO: 24849 - protein, 8 aa, Artificial Sequence
  Synthetic construct
QQYNSYWT

SEQ ID NO: 24850 - protein, 11 aa, Artificial Sequence
  Synthetic construct
SSYTSSSTLVV

SEQ ID NO: 24851 - protein, 9 aa, Artificial Sequence
  Synthetic construct
QQSYRTPPT

SEQ ID NO: 24852 - protein, 12 aa, Artificial Sequence
  Synthetic construct
SSKTSSNTFGAI

SEQ ID NO: 24853 - protein, 10 aa, Artificial Sequence
  Synthetic construct
QQYGSSPPYT

SEQ ID NO: 24854 - protein, 9 aa, Artificial Sequence
  Synthetic construct
QQYNSYSRT

SEQ ID NO: 24855 - protein, 11 aa, Artificial Sequence
  Synthetic construct
NSRDSSGNHLV

SEQ ID NO: 24856 - protein, 11 aa, Artificial Sequence
  Synthetic construct
QVWDSRSEHYV

SEQ ID NO: 24857 - protein, 11 aa, Artificial Sequence
  Synthetic construct
SAWDSSLSAVV

SEQ ID NO: 24858 - protein, 9 aa, Artificial Sequence
  Synthetic construct
QTWGTGIRV

SEQ ID NO: 24859 - protein, 12 aa, Artificial Sequence
  Synthetic construct
GTWDSSLSAGQV

SEQ ID NO: 24860 - protein, 11 aa, Artificial Sequence
  Synthetic construct
QSADSSSTYVL

SEQ ID NO: 24861 - protein, 12 aa, Artificial Sequence
  Synthetic construct
QSADSSGTYPRV

SEQ ID NO: 24862 - protein, 10 aa, Artificial Sequence
  Synthetic construct
SSYTSRSTLV

SEQ ID NO: 24863 - protein, 9 aa, Artificial Sequence
  Synthetic construct
QRSFSTPWT

SEQ ID NO: 24864 - protein, 11 aa, Artificial Sequence
  Synthetic construct
SAWDGSLNDVI

SEQ ID NO: 24865 - protein, 11 aa, Artificial Sequence
  Synthetic construct
GAWDDDLNANL

SEQ ID NO: 24866 - protein, 10 aa, Artificial Sequence
  Synthetic construct
LLSYSGAYVV

SEQ ID NO: 24867 - protein, 9 aa, Artificial Sequence
  Synthetic construct
QQLDSYSWM

SEQ ID NO: 24868 - protein, 9 aa, Artificial Sequence
  Synthetic construct
LQHNSYPRT

SEQ ID NO: 24869 - protein, 10 aa, Artificial Sequence
  Synthetic construct
QQYNSYSRRT

SEQ ID NO: 24870 - protein, 9 aa, Artificial Sequence
  Synthetic construct
QQYNNWPLT

(The sequence listing continues in the following parts.)
